United States Patent Application Publication US 2023/0298691 A1 - sequence listing, part 2

SEQ ID NO: 40833 - DNA, 20 bp, Homo sapiens
ctggctgacacctgacatcc

SEQ ID NO: 40834 - DNA, 17 bp, Homo sapiens
tcagcaaggccaggggg

SEQ ID NO: 40835 - DNA, 16 bp, Homo sapiens
agggtgagtggaggga

SEQ ID NO: 40836 - DNA, 21 bp, Homo sapiens
ctgaacttcacgcccgtgcca

SEQ ID NO: 40837 - DNA, 24 bp, Homo sapiens
gtggggccaggacgtgtcccagac

SEQ ID NO: 40838 - DNA, 24 bp, Homo sapiens
ccccagctgccgtcccgtttgagg

SEQ ID NO: 40839 - DNA, 22 bp, Homo sapiens
tctgggggctctgagcatctag

SEQ ID NO: 40840 - DNA, 17 bp, Homo sapiens
gatcttggctcaccgca

SEQ ID NO: 40841 - DNA, 19 bp, Homo sapiens
atgcctgttatcccagcac

SEQ ID NO: 40842 - DNA, 19 bp, Homo sapiens
cggagtagctgggattaca

SEQ ID NO: 40843 - DNA, 24 bp, Homo sapiens
aaattctcacaaaattcactatct

SEQ ID NO: 40844 - DNA, 16 bp, Homo sapiens
gacgggattttgccat

SEQ ID NO: 40845 - DNA, 18 bp, Homo sapiens
tggggtaggatccaataa

SEQ ID NO: 40846 - DNA, 23 bp, Homo sapiens
gatccacctaccttggcctccca

SEQ ID NO: 40847 - DNA, 16 bp, Homo sapiens
ctctggcggagcttct

SEQ ID NO: 40848 - DNA, 24 bp, Homo sapiens
aaggggccccccttggacgggact

SEQ ID NO: 40849 - DNA, 22 bp, Homo sapiens
cagcagaggtcccctgagaggg

SEQ ID NO: 40850 - DNA, 22 bp, Homo sapiens
cccctgcaagcagctgtggtgc

SEQ ID NO: 40851 - DNA, 18 bp, Homo sapiens
ctaagattcctgtcctct

SEQ ID NO: 40852 - DNA, 24 bp, Homo sapiens
ctgggaggtccctgaggtgggagg

SEQ ID NO: 40853 - DNA, 23 bp, Homo sapiens
ctcaccttgccaggtgcacacat

SEQ ID NO: 40854 - DNA, 24 bp, Homo sapiens
ggccagtcccactggggcatctca

SEQ ID NO: 40855 - DNA, 24 bp, Homo sapiens
ggggttgtcaggatggctgcacca

SEQ ID NO: 40856 - DNA, 22 bp, Homo sapiens
ggcaaggtcttcaccaccccag

SEQ ID NO: 40857 - DNA, 21 bp, Homo sapiens
tagggggtggggagtggtggg

SEQ ID NO: 40858 - DNA, 23 bp, Homo sapiens
catgaacgagcaatgccgctttg

SEQ ID NO: 40859 - DNA, 21 bp, Homo sapiens
ctctgccctccccacactggg

SEQ ID NO: 40860 - DNA, 22 bp, Homo sapiens
ctggatgaccccttcgcccacg

SEQ ID NO: 40861 - DNA, 22 bp, Homo sapiens
cacgcctccccccagacctggg

SEQ ID NO: 40862 - DNA, 16 bp, Homo sapiens
cgctgaaggctgctcg

SEQ ID NO: 40863 - DNA, 24 bp, Homo sapiens
atcatgtagcccaggccgaagtca

SEQ ID NO: 40864 - DNA, 17 bp, Homo sapiens
gctgccatggcagctcc

SEQ ID NO: 40865 - DNA, 24 bp, Homo sapiens
ccgggagctggggcagcgccggcc

SEQ ID NO: 40866 - DNA, 24 bp, Homo sapiens
caaggacaagagatgcagcaggga

SEQ ID NO: 40867 - DNA, 20 bp, Homo sapiens
gctgcagccagcaggagctg

SEQ ID NO: 40868 - DNA, 24 bp, Homo sapiens
ctcccccgcacacaagcttagagg

SEQ ID NO: 40869 - DNA, 24 bp, Homo sapiens
gtgcggctgggcagcatcatggcg

SEQ ID NO: 40870 - DNA, 24 bp, Homo sapiens
gggacttgcaccctcccagagctg

SEQ ID NO: 40871 - DNA, 24 bp, Homo sapiens
ctcggccctcgcaggctgggcatg

SEQ ID NO: 40872 - DNA, 23 bp, Homo sapiens
gtactcactgcaggtagcggctc

SEQ ID NO: 40873 - DNA, 22 bp, Homo sapiens
atcggggtggggtgggactggc

SEQ ID NO: 40874 - DNA, 23 bp, Homo sapiens
cggtggaaggcggcctgcaccag

SEQ ID NO: 40875 - DNA, 16 bp, Homo sapiens
agagtgggccaaggtc

SEQ ID NO: 40876 - DNA, 17 bp, Homo sapiens
ctgcccgtcgtgctcca

SEQ ID NO: 40877 - DNA, 23 bp, Homo sapiens
ggccagcactgcccagcgctggg

SEQ ID NO: 40878 - DNA, 23 bp, Homo sapiens
cagctgcaccctgaaccatgagg

SEQ ID NO: 40879 - DNA, 24 bp, Homo sapiens
cacagggcgtgtccctcttaaggc

SEQ ID NO: 40880 - DNA, 24 bp, Homo sapiens
gagccgcctcttgtctcctcccag

SEQ ID NO: 40881 - DNA, 23 bp, Homo sapiens
tagggtggcccctctgtgcccca

SEQ ID NO: 40882 - DNA, 21 bp, Homo sapiens
cgcctgggagttaggccaggc

SEQ ID NO: 40883 - DNA, 24 bp, Homo sapiens
gggccaccacaaacgctgaggaga

SEQ ID NO: 40884 - DNA, 23 bp, Homo sapiens
tgccagccgggggcagttgcctg

SEQ ID NO: 40885 - DNA, 24 bp, Homo sapiens
atggcacatgccggtgacaggagc

SEQ ID NO: 40886 - DNA, 24 bp, Homo sapiens
cagtgcactgccccacaccctcac

SEQ ID NO: 40887 - DNA, 23 bp, Homo sapiens
cacgggccacgatgaataccacg

SEQ ID NO: 40888 - DNA, 20 bp, Homo sapiens
ctgggctgggccaaggctcc

SEQ ID NO: 40889 - DNA, 16 bp, Homo sapiens
ctcagagcctggagaa

SEQ ID NO: 40890 - DNA, 22 bp, Homo sapiens
ttcacgcctctgtggccctgca

SEQ ID NO: 40891 - DNA, 22 bp, Homo sapiens
ctctctcttccatttctctcca

SEQ ID NO: 40892 - DNA, 20 bp, Homo sapiens
gtgtgaggaagatggcgtga

SEQ ID NO: 40893 - DNA, 24 bp, Homo sapiens
cagtggatggggtctgtcaacact

SEQ ID NO: 40894 - DNA, 21 bp, Homo sapiens
ctggaggtaggcccagcggca

SEQ ID NO: 40895 - DNA, 24 bp, Homo sapiens
cagtgggagcaggtcctgagagtg

SEQ ID NO: 40896 - DNA, 20 bp, Homo sapiens
gggatcttgtttcttatagg

SEQ ID NO: 40897 - DNA, 21 bp, Homo sapiens
gagtccttgggtgcccacatc

SEQ ID NO: 40898 - DNA, 17 bp, Homo sapiens
aacgcacacactctcca

SEQ ID NO: 40899 - DNA, 22 bp, Homo sapiens
agggcctgtggttcccgctgat

SEQ ID NO: 40900 - DNA, 17 bp, Homo sapiens
gtggaggcaggcccggc

SEQ ID NO: 40901 - DNA, 16 bp, Homo sapiens
gaagaaggagcaggtg

SEQ ID NO: 40902 - DNA, 19 bp, Homo sapiens
caccaggaccacgttgatg

SEQ ID NO: 40903 - DNA, 17 bp, Homo sapiens
aatgagggaggggtcac

SEQ ID NO: 40904 - DNA, 17 bp, Homo sapiens
gtacagaagtacctgct

SEQ ID NO: 40905 - DNA, 21 bp, Homo sapiens
cacctccggctaacaaggaaa

SEQ ID NO: 40906 - DNA, 23 bp, Homo sapiens
cgatgactacaacatcgaggtcc

SEQ ID NO: 40907 - DNA, 24 bp, Homo sapiens
tctctggcctgcccagcccctggt

SEQ ID NO: 40908 - DNA, 17 bp, Homo sapiens
tagaggagcacgccaac

SEQ ID NO: 40909 - DNA, 24 bp, Homo sapiens
cacaatgttcatgagtgtcagcag

SEQ ID NO: 40910 - DNA, 24 bp, Homo sapiens
aagacggtgtcctctccttgcagg

SEQ ID NO: 40911 - DNA, 24 bp, Homo sapiens
cacagagtcatccacgcccagcag

SEQ ID NO: 40912 - DNA, 16 bp, Homo sapiens
ctggcgcctggtaggt

SEQ ID NO: 40913 - DNA, 17 bp, Homo sapiens
gtgccctccgcctcgag

SEQ ID NO: 40914 - DNA, 22 bp, Homo sapiens
cctctgtaaaatggaataatac

SEQ ID NO: 40915 - DNA, 17 bp, Homo sapiens
gtccaggctgtccaggg

SEQ ID NO: 40916 - DNA, 24 bp, Homo sapiens
cgtcagccaggcagctggcccatt

SEQ ID NO: 40917 - DNA, 23 bp, Homo sapiens
tggtgtatcgccggccacccacg

SEQ ID NO: 40918 - DNA, 23 bp, Homo sapiens
caagctggtctgtggagagctgc

SEQ ID NO: 40919 - DNA, 23 bp, Homo sapiens
cttcatcgaacccttggagaagg

SEQ ID NO: 40920 - DNA, 20 bp, Homo sapiens
ggctctccacacagcctgcc

SEQ ID NO: 40921 - DNA, 20 bp, Homo sapiens
aatctgatcctgttgtcttt

SEQ ID NO: 40922 - DNA, 16 bp, Homo sapiens
cgagaggaggggacgt

SEQ ID NO: 40923 - DNA, 17 bp, Homo sapiens
tactccctgagggggtc

SEQ ID NO: 40924 - DNA, 23 bp, Homo sapiens
tgctcagcctcctgcgccgccag

SEQ ID NO: 40925 - DNA, 16 bp, Homo sapiens
agggttcaagctgagc

SEQ ID NO: 40926 - DNA, 19 bp, Homo sapiens
tccggatcagaccagcctg

SEQ ID NO: 40927 - DNA, 24 bp, Homo sapiens
cccttcagttggagcacgaggctc

SEQ ID NO: 40928 - DNA, 23 bp, Homo sapiens
gtctctacgtcggagacgtggcc

SEQ ID NO: 40929 - DNA, 24 bp, Homo sapiens
caggccttgccctcccaagggact

SEQ ID NO: 40930 - DNA, 20 bp, Homo sapiens
atggagtggcagggcgagaa

SEQ ID NO: 40931 - DNA, 24 bp, Homo sapiens
gcagcggagagaaaggagctagag

SEQ ID NO: 40932 - DNA, 16 bp, Homo sapiens
cgagacctgcacctgc

SEQ ID NO: 40933 - DNA, 22 bp, Homo sapiens
ccacagaggaggcttcggctag

SEQ ID NO: 40934 - DNA, 16 bp, Homo sapiens
ggaggcaacgaggagg

SEQ ID NO: 40935 - DNA, 24 bp, Homo sapiens
gcaggggctccacgcgggtggtgc

SEQ ID NO: 40936 - DNA, 21 bp, Homo sapiens
cagctacgtccagagcagggg

SEQ ID NO: 40937 - DNA, 24 bp, Homo sapiens
gaggcgggcgttgggccgcagccg

SEQ ID NO: 40938 - DNA, 18 bp, Homo sapiens
atcctggcggtgcccgtg

SEQ ID NO: 40939 - DNA, 16 bp, Homo sapiens
ctgccaggctcctcct

SEQ ID NO: 40940 - DNA, 24 bp, Homo sapiens
gtctccgccgatctaacgcccctt

SEQ ID NO: 40941 - DNA, 23 bp, Homo sapiens
ggccctgcgggctcgtacccctg

SEQ ID NO: 40942 - DNA, 20 bp, Homo sapiens
ggggtctgggggggcgtggc

SEQ ID NO: 40943 - DNA, 24 bp, Homo sapiens
caagcggccctgggcgtcagtgcg

SEQ ID NO: 40944 - DNA, 24 bp, Homo sapiens
gccggggaggtgcaggctggcttc

SEQ ID NO: 40945 - DNA, 20 bp, Homo sapiens
gcccgcgaacgccaggctcg

SEQ ID NO: 40946 - DNA, 20 bp, Homo sapiens
gggcgcgcggagtttgccca

SEQ ID NO: 40947 - DNA, 22 bp, Homo sapiens
ccgcgctgctgctgctgctgct

SEQ ID NO: 40948 - DNA, 21 bp, Homo sapiens
cggggcacgcgggacagggcc

SEQ ID NO: 40949 - DNA, 23 bp, Homo sapiens
ggggccccggctgcagtccggct

SEQ ID NO: 40950 - DNA, 23 bp, Homo sapiens
ctacctggggggtcggcggcggc

SEQ ID NO: 40951 - DNA, 16 bp, Homo sapiens
tgtgggctgggcggct

SEQ ID NO: 40952 - DNA, 24 bp, Homo sapiens
caggagcggcggcggcagcagcag

SEQ ID NO: 40953 - DNA, 21 bp, Homo sapiens
cgcctcgcctcctccgccccg

SEQ ID NO: 40954 - DNA, 24 bp, Homo sapiens
ggctcccgccggcggatccatggc

SEQ ID NO: 40955 - DNA, 24 bp, Homo sapiens
caatgagactggtgtcattccaga

SEQ ID NO: 40956 - DNA, 24 bp, Homo sapiens
cacagcaggcgggcgccagccagc

SEQ ID NO: 40957 - DNA, 24 bp, Homo sapiens
acctgaaggtggggtcaagggagg

SEQ ID NO: 40958 - DNA, 16 bp, Homo sapiens
caagaagcccggggca

SEQ ID NO: 40959 - DNA, 20 bp, Homo sapiens
cttgagctataagtggcacc

SEQ ID NO: 40960 - DNA, 20 bp, Homo sapiens
tagatgggcccgaatttctg

SEQ ID NO: 40961 - DNA, 20 bp, Homo sapiens
ctgctgctgctgcccctgct

SEQ ID NO: 40962 - DNA, 23 bp, Homo sapiens
ctcctatggtgagggccagagcg

SEQ ID NO: 40963 - DNA, 17 bp, Homo sapiens
ctccacctcccgcctct

SEQ ID NO: 40964 - DNA, 20 bp, Homo sapiens
agacagccaaagcagcgtca

SEQ ID NO: 40965 - DNA, 16 bp, Homo sapiens
tatctgcttggcctga

SEQ ID NO: 40966 - DNA, 17 bp, Homo sapiens
actttttgaccatggct

SEQ ID NO: 40967 - DNA, 21 bp, Homo sapiens
gcaaggtgagaggctgatctc

SEQ ID NO: 40968 - DNA, 22 bp, Homo sapiens
ttttaagaaagaaaaaatgccc

SEQ ID NO: 40969 - DNA, 16 bp, Homo sapiens
gtcctctctccgctga

SEQ ID NO: 40970 - DNA, 22 bp, Homo sapiens
gaatttaagaccagcctgggca

SEQ ID NO: 40971 - DNA, 18 bp, Homo sapiens
ccaagaggaccattgagg

SEQ ID NO: 40972 - DNA, 16 bp, Homo sapiens
gccccaaaggtggctc

SEQ ID NO: 40973 - DNA, 22 bp, Homo sapiens
tcccacctcagcctcaagtgtg

SEQ ID NO: 40974 - DNA, 22 bp, Homo sapiens
ggagtagtctcccaaggacagg

SEQ ID NO: 40975 - DNA, 17 bp, Homo sapiens
ggggggcatatctggtg

SEQ ID NO: 40976 - DNA, 21 bp, Homo sapiens
gatgcccagcagcagggctga

SEQ ID NO: 40977 - DNA, 22 bp, Homo sapiens
gtcaggccctcagctgccttca

SEQ ID NO: 40978 - DNA, 24 bp, Homo sapiens
gagcccagccttacctcacagaac

SEQ ID NO: 40979 - DNA, 24 bp, Homo sapiens
acaagctggtgtctaggaactacc

SEQ ID NO: 40980 - DNA, 21 bp, Homo sapiens
ctgtgcagcgggcagggcggg

SEQ ID NO: 40981 - DNA, 23 bp, Homo sapiens
aagcccacaagaagctcacccgc

SEQ ID NO: 40982 - DNA, 23 bp, Homo sapiens
cacaggggtgccgggctgggctc

SEQ ID NO: 40983 - DNA, 18 bp, Homo sapiens
cagctgacccaggagttc

SEQ ID NO: 40984 - DNA, 19 bp, Homo sapiens
gtgaggtaacagatgatgc

SEQ ID NO: 40985 - DNA, 16 bp, Homo sapiens
gcctctcacagtagcc

SEQ ID NO: 40986 - DNA, 16 bp, Homo sapiens
gggaggggctgggggt

SEQ ID NO: 40987 - DNA, 20 bp, Homo sapiens
cactgtttctccacagcgca

SEQ ID NO: 40988 - DNA, 24 bp, Homo sapiens
gcattaagttgtcgtcctgccaga

SEQ ID NO: 40989 - DNA, 18 bp, Homo sapiens
ctctcctcacctgcagca

SEQ ID NO: 40990 - DNA, 17 bp, Homo sapiens
ggaccagtggctccagg

SEQ ID NO: 40991 - DNA, 22 bp, Homo sapiens
aaggtgcctcacagcccctcag

SEQ ID NO: 40992 - DNA, 22 bp, Homo sapiens
cctacaacccaggggtgtctag

SEQ ID NO: 40993 - DNA, 24 bp, Homo sapiens
actgaaagtactccctccttttct

SEQ ID NO: 40994 - DNA, 17 bp, Homo sapiens
tgagaatgcagctgtgg

SEQ ID NO: 40995 - DNA, 21 bp, Homo sapiens
tgtatccaggaggtgttaaaa

SEQ ID NO: 40996 - DNA, 19 bp, Homo sapiens
ttctctatggcctgcttca

SEQ ID NO: 40997 - DNA, 23 bp, Homo sapiens
ctttctcagggtgaggacctgga

SEQ ID NO: 40998 - DNA, 18 bp, Homo sapiens
gaggccgtccacgtacag

SEQ ID NO: 40999 - DNA, 20 bp, Homo sapiens
gtggagggagaggctccttc

SEQ ID NO: 41000 - DNA, 18 bp, Homo sapiens
agaacccgcctcatagca

SEQ ID NO: 41001 - DNA, 23 bp, Homo sapiens
aatccaggtctccggaggctgaa

SEQ ID NO: 41002 - DNA, 18 bp, Homo sapiens
gcggctggcctggggaga

SEQ ID NO: 41003 - DNA, 21 bp, Homo sapiens
tgcagctgaggcagcacaagg

SEQ ID NO: 41004 - DNA, 23 bp, Homo sapiens
catcatgtccctccactggcctg

SEQ ID NO: 41005 - DNA, 23 bp, Homo sapiens
cagtgatgctaccggcctcagca

SEQ ID NO: 41006 - DNA, 16 bp, Homo sapiens
gtccagagccctcttc

SEQ ID NO: 41007 - DNA, 22 bp, Homo sapiens
ctgttgccactctgtactcctc

SEQ ID NO: 41008 - DNA, 20 bp, Homo sapiens
gtggtctcagtgccaccgat

SEQ ID NO: 41009 - DNA, 24 bp, Homo sapiens
caccctctgcaggagagcctcgtg

SEQ ID NO: 41010 - DNA, 19 bp, Homo sapiens
caggacgcacctcagggtg

SEQ ID NO: 41011 - DNA, 21 bp, Homo sapiens
tggcgcagccgagcatggaag

SEQ ID NO: 41012 - DNA, 23 bp, Homo sapiens
agagctgagtgagggtgcccacc

SEQ ID NO: 41013 - DNA, 24 bp, Homo sapiens
ggctgcagtggacctcctgatcgg

SEQ ID NO: 41014 - DNA, 16 bp, Homo sapiens
aacccagtgagcctga

SEQ ID NO: 41015 - DNA, 24 bp, Homo sapiens
gtggtttttttgcttcaccaccct

SEQ ID NO: 41016 - DNA, 23 bp, Homo sapiens
cccagcaacctggccagggcggt

SEQ ID NO: 41017 - DNA, 21 bp, Homo sapiens
gaggcaccagggcccagttcg

SEQ ID NO: 41018 - DNA, 19 bp, Homo sapiens
ctgtgcttgcctcaccggc

SEQ ID NO: 41019 - DNA, 16 bp, Homo sapiens
gtggcattgagcaagg

SEQ ID NO: 41020 - DNA, 24 bp, Homo sapiens
aggctgggcagctgtgggctgctg

SEQ ID NO: 41021 - DNA, 20 bp, Homo sapiens
ctgggccgtgtggtgcggtg

SEQ ID NO: 41022 - DNA, 21 bp, Homo sapiens
gactgcaggaggagctagacc

SEQ ID NO: 41023 - DNA, 16 bp, Homo sapiens
tccctgggctcgggct

SEQ ID NO: 41024 - DNA, 24 bp, Homo sapiens
cctacaaggaccgtgcacggctgc

SEQ ID NO: 41025 - DNA, 23 bp, Homo sapiens
tgactgtgccctcagggatgtcg

SEQ ID NO: 41026 - DNA, 21 bp, Homo sapiens
ggcccgttgtgcccttagcct

SEQ ID NO: 41027 - DNA, 23 bp, Homo sapiens
agaactcatgtggcctctcccag

SEQ ID NO: 41028 - DNA, 24 bp, Homo sapiens
cgagggttggggatgagtgaggaa

SEQ ID NO: 41029 - DNA, 24 bp, Homo sapiens
gaccagcctccaccacattttcac

SEQ ID NO: 41030 - DNA, 24 bp, Homo sapiens
tccagcccccttcagcatctccgg

SEQ ID NO: 41031 - DNA, 21 bp, Homo sapiens
aggaagcgatctgcgggcggg

SEQ ID NO: 41032 - DNA, 20 bp, Homo sapiens
caaggcgcccacctggatga

SEQ ID NO: 41033 - DNA, 21 bp, Homo sapiens
cccaggcacacgcgggcaccg

SEQ ID NO: 41034 - DNA, 24 bp, Homo sapiens
ggggggccgggggcctgccgtgaa

SEQ ID NO: 41035 - DNA, 24 bp, Homo sapiens
gcgtgaaggcctgcagcagtcggg

SEQ ID NO: 41036 - DNA, 24 bp, Homo sapiens
gaacgcctccccacccacctgtcc

SEQ ID NO: 41037 - DNA, 24 bp, Homo sapiens
aggatgacactgcagtggggcagg

SEQ ID NO: 41038 - DNA, 24 bp, Homo sapiens
ctccagagctctggccttcggctg

SEQ ID NO: 41039 - DNA, 16 bp, Homo sapiens
tgggcccccatccccc

SEQ ID NO: 41040 - DNA, 23 bp, Homo sapiens
ctggagctcttcgtggtgctgac

SEQ ID NO: 41041 - DNA, 24 bp, Homo sapiens
aataaaggagaaactgaggtaccc

SEQ ID NO: 41042 - DNA, 16 bp, Homo sapiens
ctccctgcagcccctg

SEQ ID NO: 41043 - DNA, 21 bp, Homo sapiens
tctctgccagcgatctcgcag

SEQ ID NO: 41044 - DNA, 23 bp, Homo sapiens
aagtgcggctgcagccccggggg

SEQ ID NO: 41045 - DNA, 24 bp, Homo sapiens
ctgaggggtcgccccgagagaaga

SEQ ID NO: 41046 - DNA, 16 bp, Homo sapiens
tcaatgccactttgca

SEQ ID NO: 41047 - DNA, 22 bp, Homo sapiens
cagtcagtgagcaggagctgct

SEQ ID NO: 41048 - DNA, 20 bp, Homo sapiens
cagcctgaggaggagccctt

SEQ ID NO: 41049 - DNA, 18 bp, Homo sapiens
tcagcactgatgctcacc

SEQ ID NO: 41050 - DNA, 22 bp, Homo sapiens
agccatgctgagcggggtccca

SEQ ID NO: 41051 - DNA, 24 bp, Homo sapiens
ctcccctgcctgggcatagaccac

SEQ ID NO: 41052 - DNA, 24 bp, Homo sapiens
gcgctggatgcgcttgtaccggag

SEQ ID NO: 41053 - DNA, 21 bp, Homo sapiens
agggaagatcattgacatcta

SEQ ID NO: 41054 - DNA, 16 bp, Homo sapiens
gcagcaagtcctccat

SEQ ID NO: 41055 - DNA, 22 bp, Homo sapiens
ctaaaaaaaatgtttaagggaa

SEQ ID NO: 41056 - DNA, 16 bp, Homo sapiens
acgcagggttcatgac

SEQ ID NO: 41057 - DNA, 16 bp, Homo sapiens
caggctggcctcaaac

SEQ ID NO: 41058 - DNA, 20 bp, Homo sapiens
aagtagctgggactcaggtg

SEQ ID NO: 41059 - DNA, 17 bp, Homo sapiens
cagattcaagctagagc

SEQ ID NO: 41060 - DNA, 22 bp, Homo sapiens
gcaagtggctcaccttcctcca

SEQ ID NO: 41061 - DNA, 24 bp, Homo sapiens
ggatgagctggtcagcactggctt

SEQ ID NO: 41062 - DNA, 18 bp, Homo sapiens
tcagagcagagagagtag

SEQ ID NO: 41063 - DNA, 24 bp, Homo sapiens
ttagaggaagactgcgaagggctt

SEQ ID NO: 41064 - DNA, 22 bp, Homo sapiens
gtttaccaggctcacagatggc

SEQ ID NO: 41065 - DNA, 16 bp, Homo sapiens
cgggcctcccagctac

SEQ ID NO: 41066 - DNA, 24 bp, Homo sapiens
cagagttggcatcacctcctccct

SEQ ID NO: 41067 - DNA, 19 bp, Homo sapiens
tacctgcctatctccctaa

SEQ ID NO: 41068 - DNA, 18 bp, Homo sapiens
catcccctaagcatccca

SEQ ID NO: 41069 - DNA, 18 bp, Homo sapiens
ctgctcatctccaccctc

SEQ ID NO: 41070 - DNA, 17 bp, Homo sapiens
gtgtgatggcacttaga

SEQ ID NO: 41071 - DNA, 24 bp, Homo sapiens
caccaacagaccagatctcctgga

SEQ ID NO: 41072 - DNA, 18 bp, Homo sapiens
cagcttgtcaaatcttta

SEQ ID NO: 41073 - DNA, 17 bp, Homo sapiens
ctccttgccgagctaga

SEQ ID NO: 41074 - DNA, 23 bp, Homo sapiens
aggggtgaaggaggcacaaaatg

SEQ ID NO: 41075 - DNA, 18 bp, Homo sapiens
taagggggacaccaagga

SEQ ID NO: 41076 - DNA, 21 bp, Homo sapiens
caggccgcagaagggcagggt

SEQ ID NO: 41077 - DNA, 20 bp, Homo sapiens
agctgagtggagggccctgt

SEQ ID NO: 41078 - DNA, 24 bp, Homo sapiens
cacatcctgagtgctgtgcagccc

SEQ ID NO: 41079 - DNA, 22 bp, Homo sapiens
tgaaattgggcagggtccactg

SEQ ID NO: 41080 - DNA, 17 bp, Homo sapiens
gaagtggagattctgga

SEQ ID NO: 41081 - DNA, 23 bp, Homo sapiens
attatattatctcagaactgaaa

SEQ ID NO: 41082 - DNA, 16 bp, Homo sapiens
tgcagctccatgcatt

SEQ ID NO: 41083 - DNA, 20 bp, Homo sapiens
ctttctcatatccttcccac

SEQ ID NO: 41084 - DNA, 16 bp, Homo sapiens
ccacaagccgagcttt

SEQ ID NO: 41085 - DNA, 20 bp, Homo sapiens
acctgtccatcactcctcca

SEQ ID NO: 41086 - DNA, 17 bp, Homo sapiens
agtgctgtattgtcagg

SEQ ID NO: 41087 - DNA, 22 bp, Homo sapiens
cagttcatcaaagaagataatg

SEQ ID NO: 41088 - DNA, 24 bp, Homo sapiens
gatcattcctaatcctcctttcta

SEQ ID NO: 41089 - DNA, 17 bp, Homo sapiens
tatgtgggccaaagtga

SEQ ID NO: 41090 - DNA, 20 bp, Homo sapiens
gcaggaacctgacttgtaga

SEQ ID NO: 41091 - DNA, 17 bp, Homo sapiens
gctctcaccttctcaca

SEQ ID NO: 41092 - DNA, 21 bp, Homo sapiens
tagggggtggcttgggggcca

SEQ ID NO: 41093 - DNA, 16 bp, Homo sapiens
ctggggagcaggaggg

SEQ ID NO: 41094 - DNA, 24 bp, Homo sapiens
ctgctcactcaccttcccgcacat

SEQ ID NO: 41095 - DNA, 16 bp, Homo sapiens
ccttaccttcctcagg

SEQ ID NO: 41096 - DNA, 20 bp, Homo sapiens
cttcacgctgagtgagagga

SEQ ID NO: 41097 - DNA, 21 bp, Homo sapiens
catgggccccctggcaccggc

SEQ ID NO: 41098 - DNA, 24 bp, Homo sapiens
cacacaattgacctcttgggcagc

SEQ ID NO: 41099 - DNA, 23 bp, Homo sapiens
attcagctccccctggagcaccc

SEQ ID NO: 41100 - DNA, 18 bp, Homo sapiens
cttccaggccccctggcc

SEQ ID NO: 41101 - DNA, 21 bp, Homo sapiens
cagtgtcctggcatgatgtgg

SEQ ID NO: 41102 - DNA, 19 bp, Homo sapiens
ccttggccagaagggtctt

SEQ ID NO: 41103 - DNA, 23 bp, Homo sapiens
gacaggagcccctccaagagcat

SEQ ID NO: 41104 - DNA, 23 bp, Homo sapiens
caggcccaggctcagtagctcag

SEQ ID NO: 41105 - DNA, 21 bp, Homo sapiens
acagctcactcccaggccgtt

SEQ ID NO: 41106 - DNA, 22 bp, Homo sapiens
cttcttcacctcctgcagccca

SEQ ID NO: 41107 - DNA, 22 bp, Homo sapiens
gtgctgccggctttcctctcct

SEQ ID NO: 41108 - DNA, 23 bp, Homo sapiens
agatggaaagtgcgtggttggga

SEQ ID NO: 41109 - DNA, 17 bp, Homo sapiens
gttcctctttgcagttt

SEQ ID NO: 41110 - DNA, 24 bp, Homo sapiens
tggtctccaccttgggggctccaa

SEQ ID NO: 41111 - DNA, 18 bp, Homo sapiens
tagatgggtgggtggtga

SEQ ID NO: 41112 - DNA, 23 bp, Homo sapiens
gtgcctgcccaaagtcctcagcc

SEQ ID NO: 41113 - DNA, 23 bp, Homo sapiens
ggatcaagaactcagggtaagag

SEQ ID NO: 41114 - DNA, 23 bp, Homo sapiens
ctcctcagtcaagccacctgcca

SEQ ID NO: 41115 - DNA, 17 bp, Homo sapiens
gtggtaggggatctcta

SEQ ID NO: 41116 - DNA, 23 bp, Homo sapiens
tcagcgtcccattcccttctccc

SEQ ID NO: 41117 - DNA, 16 bp, Homo sapiens
aaggttcctgcctact

SEQ ID NO: 41118 - DNA, 18 bp, Homo sapiens
ggtgcccacgtcctctta

SEQ ID NO: 41119 - DNA, 19 bp, Homo sapiens
aaaaaaaaacaacaaacct

SEQ ID NO: 41120 - DNA, 16 bp, Homo sapiens
gtcagaagggcataga

SEQ ID NO: 41121 - DNA, 24 bp, Homo sapiens
tgaacttggcacagctagcacggc

SEQ ID NO: 41122 - DNA, 24 bp, Homo sapiens
gtgctaggattacaggcgtgagcc

SEQ ID NO: 41123 - DNA, 18 bp, Homo sapiens
gcagcggctcagcatcct

SEQ ID NO: 41124 - DNA, 18 bp, Homo sapiens
ctgagttcttgtaacaaa

SEQ ID NO: 41125 - DNA, 22 bp, Homo sapiens
tgcctgctgatgtgcagacagc

SEQ ID NO: 41126 - DNA, 24 bp, Homo sapiens
cttgatactcactgcacaccgccg

SEQ ID NO: 41127 - DNA, 17 bp, Homo sapiens
gtctgcagctgccctcc

SEQ ID NO: 41128 - DNA, 23 bp, Homo sapiens
aaggtgggcagtgagggcccgca

SEQ ID NO: 41129 - DNA, 24 bp, Homo sapiens
gtgccgactttgggacaaggcagt

SEQ ID NO: 41130 - DNA, 21 bp, Homo sapiens
tcgagctcatgaggaaatgct

SEQ ID NO: 41131 - DNA, 24 bp, Homo sapiens
actggggtagatgctcatctccct

SEQ ID NO: 41132 - DNA, 21 bp, Homo sapiens
tggccacaaccatgaggggag

SEQ ID NO: 41133 - DNA, 20 bp, Homo sapiens
atgcccgtgtgatggctgtg

SEQ ID NO: 41134 - DNA, 24 bp, Homo sapiens
aggtgatccacctgcctcggcctc

SEQ ID NO: 41135 - DNA, 17 bp, Homo sapiens
cagtcctgttgctcaca

SEQ ID NO: 41136 - DNA, 24 bp, Homo sapiens
ggcccccccagctttgagaggccc

SEQ ID NO: 41137 - DNA, 18 bp, Homo sapiens
tggggctgtggagacaaa

SEQ ID NO: 41138 - DNA, 24 bp, Homo sapiens
gaggaggaggtgacgcagcacagc

SEQ ID NO: 41139 - DNA, 23 bp, Homo sapiens
ttgctcacagacccattgggatc

SEQ ID NO: 41140 - DNA, 20 bp, Homo sapiens
cccagaaggtccacagctgt

SEQ ID NO: 41141 - DNA, 16 bp, Homo sapiens
catcttccacctcctc

SEQ ID NO: 41142 - DNA, 21 bp, Homo sapiens
gagaagatggcctgcagtttt

SEQ ID NO: 41143 - DNA, 19 bp, Homo sapiens
aaagaggtaggacttggcc

SEQ ID NO: 41144 - DNA, 20 bp, Homo sapiens
catcatgggaatatgcctga

SEQ ID NO: 41145 - DNA, 24 bp, Homo sapiens
gtccttctacggggccccccaggc

SEQ ID NO: 41146 - DNA, 23 bp, Homo sapiens
gaggagggaggggagaggaagca

SEQ ID NO: 41147 - DNA, 22 bp, Homo sapiens
gacgaatgtctgttctctggtt

SEQ ID NO: 41148 - DNA, 18 bp, Homo sapiens
gttctactctccagagac

SEQ ID NO: 41149 - DNA, 20 bp, Homo sapiens
ctagatctaagggatcttgt

SEQ ID NO: 41150 - DNA, 20 bp, Homo sapiens
cagcaactactgtggtcttc

SEQ ID NO: 41151 - DNA, 23 bp, Homo sapiens
atggggacagccctgtcctgggg

SEQ ID NO: 41152 - DNA, 24 bp, Homo sapiens
agttcctgtcagcagggcacccct

SEQ ID NO: 41153 - DNA, 17 bp, Homo sapiens
cttacagaaaggagtgg

SEQ ID NO: 41154 - DNA, 17 bp, Homo sapiens
ttggtgtctgaactctg

SEQ ID NO: 41155 - DNA, 23 bp, Homo sapiens
tcctcccaatcccactctggcca

SEQ ID NO: 41156 - DNA, 19 bp, Homo sapiens
gctcccttcagaggaatcc

SEQ ID NO: 41157 - DNA, 19 bp, Homo sapiens
tgttctaagcaggcttttc

SEQ ID NO: 41158 - DNA, 21 bp, Homo sapiens
cgatttttagaaacgaaagct

SEQ ID NO: 41159 - DNA, 24 bp, Homo sapiens
gaggcgaggcttcaggacagcaca

SEQ ID NO: 41160 - DNA, 16 bp, Homo sapiens
tacatggtgaggcccc

SEQ ID NO: 41161 - DNA, 23 bp, Homo sapiens
gacaaactgctccagagagtgga

SEQ ID NO: 41162 - DNA, 22 bp, Homo sapiens
aaacagttggggaagctccaga

SEQ ID NO: 41163 - DNA, 17 bp, Homo sapiens
ccacctgtgaaaggtaa

SEQ ID NO: 41164 - DNA, 16 bp, Homo sapiens
ggggttcattgggcct

SEQ ID NO: 41165 - DNA, 20 bp, Homo sapiens
tggtctacacccatccttgg

SEQ ID NO: 41166 - DNA, 18 bp, Homo sapiens
gtcctctgtgattgagaa

SEQ ID NO: 41167 - DNA, 24 bp, Homo sapiens
gccaagtaggcactggctggtcca

SEQ ID NO: 41168 - DNA, 18 bp, Homo sapiens
gtccatctgcattccttt

SEQ ID NO: 41169 - DNA, 19 bp, Homo sapiens
gtaacagagcaagaacctg

SEQ ID NO: 41170 - DNA, 19 bp, Homo sapiens
gtgtgccaacaattgggca

SEQ ID NO: 41171 - DNA, 16 bp, Homo sapiens
ggcacaaattacacat

SEQ ID NO: 41172 - DNA, 16 bp, Homo sapiens
attgtgacctgaccag

SEQ ID NO: 41173 - DNA, 16 bp, Homo sapiens
acaaatcccagctgta

SEQ ID NO: 41174 - DNA, 18 bp, Homo sapiens
tcaagaagtagtctgcat

SEQ ID NO: 41175 - DNA, 23 bp, Homo sapiens
gacttccttccaggatctctact

SEQ ID NO: 41176 - DNA, 18 bp, Homo sapiens
ctaagactgacttgttcc

SEQ ID NO: 41177 - DNA, 17 bp, Homo sapiens
ttatgacggtgttcttt

SEQ ID NO: 41178 - DNA, 17 bp, Homo sapiens
ccgcaaatgtggcttct

SEQ ID NO: 41179 - DNA, 21 bp, Homo sapiens
ccatttgccagagagttacac

SEQ ID NO: 41180 - DNA, 23 bp, Homo sapiens
aggcatgggataggaggaatgta

SEQ ID NO: 41181 - DNA, 17 bp, Homo sapiens
ttggaaggctccatcgc

SEQ ID NO: 41182 - DNA, 18 bp, Homo sapiens
cctgggtatctgaaagtg

SEQ ID NO: 41183 - DNA, 16 bp, Homo sapiens
ctgcccccttaggaga

SEQ ID NO: 41184 - DNA, 20 bp, Homo sapiens
gtggggagaagacacaattt

SEQ ID NO: 41185 - DNA, 17 bp, Homo sapiens
gtggttatgggaaagac

SEQ ID NO: 41186 - DNA, 24 bp, Homo sapiens
aatgagcagcttcctttgtcttca

SEQ ID NO: 41187 - DNA, 21 bp, Homo sapiens
tggtacccattagagggagag

SEQ ID NO: 41188 - DNA, 23 bp, Homo sapiens
gtgctgggattacaggcgtgagt

SEQ ID NO: 41189 - DNA, 17 bp, Homo sapiens
cctgccactttggcttt

SEQ ID NO: 41190 - DNA, 24 bp, Homo sapiens
gatgatatggggcacgagtcctaa

SEQ ID NO: 41191 - DNA, 16 bp, Homo sapiens
actgggacccggctct

SEQ ID NO: 41192 - DNA, 24 bp, Homo sapiens
aagaaagaggaagcactcctgacc

SEQ ID NO: 41193 - DNA, 16 bp, Homo sapiens
acagccgcacttggct

SEQ ID NO: 41194 - DNA, 24 bp, Homo sapiens
ccatttccagggggtcacagccaa

SEQ ID NO: 41195 - DNA, 19 bp, Homo sapiens
cttggcctcttccagggcg

SEQ ID NO: 41196 - DNA, 23 bp, Homo sapiens
gaggggctctcccagcggtccag

SEQ ID NO: 41197 - DNA, 18 bp, Homo sapiens
actccagggagttctggg

SEQ ID NO: 41198 - DNA, 21 bp, Homo sapiens
tctaggacctgcaccctagcc

SEQ ID NO: 41199 - DNA, 20 bp, Homo sapiens
agcagtcggcccccaccccc

SEQ ID NO: 41200 - DNA, 23 bp, Homo sapiens
ctgggccacccacacccattcgc

SEQ ID NO: 41201 - DNA, 24 bp, Homo sapiens
cagggactcggctggctgtgactg

SEQ ID NO: 41202 - DNA, 24 bp, Homo sapiens
ggctcacccctagtgaatctccag

SEQ ID NO: 41203 - DNA, 16 bp, Homo sapiens
ccgcgggtgctggaga

SEQ ID NO: 41204 - DNA, 24 bp, Homo sapiens
agaaaccgcaaaggaggacaccac

SEQ ID NO: 41205 - DNA, 24 bp, Homo sapiens
ggcctgggctcggaccgcgagtcg

SEQ ID NO: 41206 - DNA, 23 bp, Homo sapiens
gacacagtctggcccgcccgcgg

SEQ ID NO: 41207 - DNA, 16 bp, Homo sapiens
gcggtgcggcggcccc

SEQ ID NO: 41208 - DNA, 23 bp, Homo sapiens
cagcccttgcaacgccggccgcg

SEQ ID NO: 41209 - DNA, 23 bp, Homo sapiens
agctactggttagccgcgcgctg

SEQ ID NO: 41210 - DNA, 21 bp, Homo sapiens
ctcaccagcagcggcccgact

SEQ ID NO: 41211 - DNA, 24 bp, Homo sapiens
ctggtggcagccctggaggggccg

SEQ ID NO: 41212 - DNA, 24 bp, Homo sapiens
gcagtgcccaacctagcgccgggg

SEQ ID NO: 41213 - DNA, 19 bp, Homo sapiens
ggcctggtgctggccctga

SEQ ID NO: 41214 - DNA, 24 bp, Homo sapiens
ccagtgccaggagccgcagcagcg

SEQ ID NO: 41215 - DNA, 19 bp, Homo sapiens
ccgagacacccccgttggc

SEQ ID NO: 41216 - DNA, 24 bp, Homo sapiens
gaccctgctcttcggtgcccgcgt

SEQ ID NO: 41217 - DNA, 23 bp, Homo sapiens
ctcctcgttggtgtcctgtcacc

SEQ ID NO: 41218 - DNA, 24 bp, Homo sapiens
gccgggctctcccctgcaggcctc

SEQ ID NO: 41219 - DNA, 16 bp, Homo sapiens
cgcgcacactagtcgt

SEQ ID NO: 41220 - DNA, 18 bp, Homo sapiens
gtggcagcagcactgcca

SEQ ID NO: 41221 - DNA, 16 bp, Homo sapiens
gttcgcggcacccgac

SEQ ID NO: 41222 - DNA, 24 bp, Homo sapiens
gcaagacagccagcgccatggtga

SEQ ID NO: 41223 - DNA, 22 bp, Homo sapiens
cttatagcatgacaccaggcct

SEQ ID NO: 41224 - DNA, 17 bp, Homo sapiens
gccgttcaggtgcttga

SEQ ID NO: 41225 - DNA, 23 bp, Homo sapiens
acaaatcaggtattgaaattaaa

SEQ ID NO: 41226 - DNA, 18 bp, Homo sapiens
tctgtttgaagttggtgt

SEQ ID NO: 41227 - DNA, 28 bp, Homo sapiens
taactaaaataatattttagacaaaagc

SEQ ID NO: 41228 - DNA, 17 bp, Homo sapiens
tccgtgaaaatggaaat

SEQ ID NO: 41229 - DNA, 18 bp, Homo sapiens
ttccaaacacttctcaat

SEQ ID NO: 41230 - DNA, 19 bp, Homo sapiens
cagttgagaaggttttggg

SEQ ID NO: 41231 - DNA, 22 bp, Homo sapiens
tcccaggaccaaatacattgga

SEQ ID NO: 41232 - DNA, 16 bp, Homo sapiens
attagtagcactccca

SEQ ID NO: 41233 - DNA, 22 bp, Homo sapiens
ataacttgaatgcaaaacaaca

SEQ ID NO: 41234 - DNA, 21 bp, Homo sapiens
ccagatattcttgtcatgtgt

SEQ ID NO: 41235 - DNA, 20 bp, Homo sapiens
accaggaaataatatgttcc

SEQ ID NO: 41236 - DNA, 18 bp, Homo sapiens
cctcgctgctggtcataa

SEQ ID NO: 41237 - DNA, 22 bp, Homo sapiens
aagctatcattactcaagattc

SEQ ID NO: 41238 - DNA, 16 bp, Homo sapiens
gaagtggcccagcagg

SEQ ID NO: 41239 - DNA, 16 bp, Homo sapiens
ggtatcacccctccac

SEQ ID NO: 41240 - DNA, 23 bp, Homo sapiens
ttttatagtcattatctagtaat

SEQ ID NO: 41241 - DNA, 18 bp, Homo sapiens
tgagttcaggaactaggg

SEQ ID NO: 41242 - DNA, 19 bp, Homo sapiens
aagtctttgcccattagta

SEQ ID NO: 41243 - DNA, 16 bp, Homo sapiens
gcatccacagcctgct

SEQ ID NO: 41244 - DNA, 22 bp, Homo sapiens
cttctggtgggccttatgggca

SEQ ID NO: 41245 - DNA, 19 bp, Homo sapiens
tgctgatcttggttttgat

SEQ ID NO: 41246 - DNA, 19 bp, Homo sapiens
cagttaccaggagatgtat

SEQ ID NO: 41247 - DNA, 18 bp, Homo sapiens
gtagcaaaaatgggacaa

SEQ ID NO: 41248 - DNA, 22 bp, Homo sapiens
tctaaatgtaagtgactagtaa

SEQ ID NO: 41249 - DNA, 19 bp, Homo sapiens
ttaaatgtttttcagggtt

SEQ ID NO: 41250 - DNA, 16 bp, Homo sapiens
agggcctatgtccaca

SEQ ID NO: 41251 - DNA, 19 bp, Homo sapiens
tgctgtgaataaattagtt

SEQ ID NO: 41252 - DNA, 19 bp, Homo sapiens
cctctgtcatggccatctt

SEQ ID NO: 41253 - DNA, 19 bp, Homo sapiens
acaacccaaaatacaagta

SEQ ID NO: 41254 - DNA, 21 bp, Homo sapiens
ttccatgaatttatgaaccct

SEQ ID NO: 41255 - DNA, 27 bp, Homo sapiens
atatactctattatatgttatatagtc

SEQ ID NO: 41256 - DNA, 16 bp, Homo sapiens
tcgccaggaatttgga

SEQ ID NO: 41257 - DNA, 24 bp, Homo sapiens
tataaaattcaaaaattttctcag

SEQ ID NO: 41258 - DNA, 19 bp, Homo sapiens
tgaaaaaggtatttggtga

SEQ ID NO: 41259 - DNA, 20 bp, Homo sapiens
ggggattgtgctaacagaaa

SEQ ID NO: 41260 - DNA, 18 bp, Homo sapiens
agttaatggaaccaccat

SEQ ID NO: 41261 - DNA, 22 bp, Homo sapiens
tgatagcagatgttatctcttt

SEQ ID NO: 41262 - DNA, 28 bp, Homo sapiens
tttacttatgtaataaaatgtttaatta

SEQ ID NO: 41263 - DNA, 17 bp, Homo sapiens
tcattcgctttatgttc

SEQ ID NO: 41264 - DNA, 21 bp, Homo sapiens
gaagagatgctttcataatgc

SEQ ID NO: 41265 - DNA, 15 bp, Homo sapiens
cctggctcttgcagt

SEQ ID NO: 41266 - DNA, 19 bp, Homo sapiens
gccattattttcttttggg

SEQ ID NO: 41267 - DNA, 16 bp, Homo sapiens
atcaagctttggctga

SEQ ID NO: 41268 - DNA, 18 bp, Homo sapiens
agctaaactggtcaactt

SEQ ID NO: 41269 - DNA, 21 bp, Homo sapiens
tcttcatgtaaattgtccctt

SEQ ID NO: 41270 - DNA, 19 bp, Homo sapiens
ccttgcccgagatgcatcc

SEQ ID NO: 41271 - DNA, 24 bp, Homo sapiens
gttaggattatggaaaaaaatgcc

SEQ ID NO: 41272 - DNA, 17 bp, Homo sapiens
cggttagtgcagcaaga

SEQ ID NO: 41273 - DNA, 21 bp, Homo sapiens
tgaataaaattcctaggttat

SEQ ID NO: 41274 - DNA, 19 bp, Homo sapiens
caatgccttatctttagtt

SEQ ID NO: 41275 - DNA, 22 bp, Homo sapiens
tctggcaattgataatacttca

SEQ ID NO: 41276 - DNA, 20 bp, Homo sapiens
atgctgttgtaaggattaat

SEQ ID NO: 41277 - DNA, 20 bp, Homo sapiens
ccaggttctgaagtaattgt

SEQ ID NO: 41278 - DNA, 24 bp, Homo sapiens
aacacagaaaatacttaaaaaaaa

SEQ ID NO: 41279 - DNA, 19 bp, Homo sapiens
cagagcattacaattaggt

SEQ ID NO: 41280 - DNA, 17 bp, Homo sapiens
ctgtttcgcactgaagt

SEQ ID NO: 41281 - DNA, 22 bp, Homo sapiens
tgcattaagaattaagaatact

SEQ ID NO: 41282 - DNA, 20 bp, Homo sapiens
actggtacttatttactcca

SEQ ID NO: 41283 - DNA, 16 bp, Homo sapiens
tgaagaatgtgctgcc

SEQ ID NO: 41284 - DNA, 20 bp, Homo sapiens
ttacccaagttccatttttc

SEQ ID NO: 41285 - DNA, 17 bp, Homo sapiens
ttgaagaaatgggtgga

SEQ ID NO: 41286 - DNA, 25 bp, Homo sapiens
aatgaatttctttttaactactgga

SEQ ID NO: 41287 - DNA, 26 bp, Homo sapiens
atagtttacacacatttttaatattc

SEQ ID NO: 41288 - DNA, 17 bp, Homo sapiens
ctagcttgtcttcgggc

SEQ ID NO: 41289 - DNA, 29 bp, Homo sapiens
ttaacatttagtttataattttattaata

SEQ ID NO: 41290 - DNA, 17 bp, Homo sapiens
gctacagctttggccat

SEQ ID NO: 41291 - DNA, 25 bp, Homo sapiens
acaaattctaattaatgactttgat

SEQ ID NO: 41292 - DNA, 25 bp, Homo sapiens
tataaaatcaaatctgaattttttt

SEQ ID NO: 41293 - DNA, 21 bp, Homo sapiens
atggaatgtctcacaaatgat

SEQ ID NO: 41294 - DNA, 24 bp, Homo sapiens
tgtaagtgatttgatttataaatt

SEQ ID NO: 41295 - DNA, 20 bp, Homo sapiens
tcatcattcaagaagaatct

SEQ ID NO: 41296 - DNA, 26 bp, Homo sapiens
aaatctttacaaatctgtaaattctg

SEQ ID NO: 41297 - DNA, 19 bp, Homo sapiens
ttttgatgaagctttgggt

SEQ ID NO: 41298 - DNA, 22 bp, Homo sapiens
taaagcagcatcataaacatca

SEQ ID NO: 41299 - DNA, 18 bp, Homo sapiens
gtactgcaatagaagcaa

SEQ ID NO: 41300 - DNA, 18 bp, Homo sapiens
agccactttgggaatccc

SEQ ID NO: 41301 - DNA, 21 bp, Homo sapiens
cacctgtttctttgagttttt

SEQ ID NO: 41302 - DNA, 20 bp, Homo sapiens
acttttcacagttggcaaac

SEQ ID NO: 41303 - DNA, 16 bp, Homo sapiens
tgcagcagttgctgtt

SEQ ID NO: 41304 - DNA, 17 bp, Homo sapiens
tccaaatactgctgcca

SEQ ID NO: 41305 - DNA, 24 bp, Homo sapiens
ctaaactaatttgtctgaatttat

SEQ ID NO: 41306 - DNA, 24 bp, Homo sapiens
tttatttattatattatgtataat

SEQ ID NO: 41307 - DNA, 18 bp, Homo sapiens
agcacactgtcagacatc

SEQ ID NO: 41308 - DNA, 25 bp, Homo sapiens
tatcatttcaaatattaacagatag

SEQ ID NO: 41309 - DNA, 21 bp, Homo sapiens
actctgggctcacttaataga

SEQ ID NO: 41310 - DNA, 21 bp, Homo sapiens
aaaaaatatatatatataact

SEQ ID NO: 41311 - DNA, 18 bp, Homo sapiens
tctggggaattggaatga

SEQ ID NO: 41312 - DNA, 19 bp, Homo sapiens
acctgctcagtaagtgacc

SEQ ID NO: 41313 - DNA, 23 bp, Homo sapiens
atattgttaactttaattaaatt

SEQ ID NO: 41314 - DNA, 16 bp, Homo sapiens
aggctgaaacattttc

SEQ ID NO: 41315 - DNA, 23 bp, Homo sapiens
aattaaaatatagaccttgattt

SEQ ID NO: 41316 - DNA, 23 bp, Homo sapiens
tcatctttgctatttccatatag

SEQ ID NO: 41317 - DNA, 21 bp, Homo sapiens
tatgttaggtttaaagttaca

SEQ ID NO: 41318 - DNA, 20 bp, Homo sapiens
agaaatattggctttttctc

SEQ ID NO: 41319 - DNA, 19 bp, Homo sapiens
ttggagtactctagaactg

SEQ ID NO: 41320 - DNA, 21 bp, Homo sapiens
tctagcctgacatttatattt

SEQ ID NO: 41321 - DNA, 16 bp, Homo sapiens
tatgcaggaagcaggg

SEQ ID NO: 41322 - DNA, 23 bp, Homo sapiens
ttaatgttgaaacaatatctagg

SEQ ID NO: 41323 - DNA, 21 bp, Homo sapiens
actgttacaattttttttttt

SEQ ID NO: 41324 - DNA, 17 bp, Homo sapiens
tcaggccagcctggagt

SEQ ID NO: 41325 - DNA, 21 bp, Homo sapiens
tgtttatgcttagaaagtgga

SEQ ID NO: 41326 - DNA, 17 bp, Homo sapiens
cagaatggcatcagccc

SEQ ID NO: 41327 - DNA, 23 bp, Homo sapiens
tattttgttaacattatgaacta

SEQ ID NO: 41328 - DNA, 16 bp, Homo sapiens
aattttggcatgtgct

SEQ ID NO: 41329 - DNA, 22 bp, Homo sapiens
acagaacataaaattagtacat

SEQ ID NO: 41330 - DNA, 19 bp, Homo sapiens
acatttttcctccagaacc

SEQ ID NO: 41331 - DNA, 24 bp, Homo sapiens
atattactcagactaaatttttaa

SEQ ID NO: 41332 - DNA, 16 bp, Homo sapiens
cttactggtaccatcc

SEQ ID NO: 41333 - DNA, 21 bp, Homo sapiens
aaggaactatagaaaaaccta

SEQ ID NO: 41334 - DNA, 16 bp, Homo sapiens
attccagttcttgcaa

SEQ ID NO: 41335 - DNA, 20 bp, Homo sapiens
tcagcaataattttcatgga

SEQ ID NO: 41336 - DNA, 23 bp, Homo sapiens
aattctttttgatggaattcctt

SEQ ID NO: 41337 - DNA, 19 bp, Homo sapiens
agtatatcattttggatgg

SEQ ID NO: 41338 - DNA, 21 bp, Homo sapiens
acaaccctcgagttcgtggtg

SEQ ID NO: 41339 - DNA, 21 bp, Homo sapiens
cagttactataaaatttgcaa

SEQ ID NO: 41340 - DNA, 16 bp, Homo sapiens
gcagggattatcagtt

SEQ ID NO: 41341 - DNA, 22 bp, Homo sapiens
attttttctaaaggaattccat

SEQ ID NO: 41342 - DNA, 16 bp, Homo sapiens
accttgattccagact

SEQ ID NO: 41343 - DNA, 16 bp, Homo sapiens
ctccagccattccaac

SEQ ID NO: 41344 - DNA, 21 bp, Homo sapiens
gttgttataaaagtgtactgt

SEQ ID NO: 41345 - DNA, 20 bp, Homo sapiens
atgtgtcgccagatcaaagg

SEQ ID NO: 41346 - DNA, 22 bp, Homo sapiens
cttaagaagtgaagtatcttta

SEQ ID NO: 41347 - DNA, 25 bp, Homo sapiens
agaagttaaaaaaatccactttttt

SEQ ID NO: 41348 - DNA, 16 bp, Homo sapiens
ccgccagtatgctggt

SEQ ID NO: 41349 - DNA, 20 bp, Homo sapiens
agtgaatatcatctttacag

SEQ ID NO: 41350 - DNA, 19 bp, Homo sapiens
aggagtgaagccattcaca

SEQ ID NO: 41351 - DNA, 23 bp, Homo sapiens
ataaatattatgtcttacattaa

SEQ ID NO: 41352 - DNA, 22 bp, Homo sapiens
ctataaaacccttgtattccaa

SEQ ID NO: 41353 - DNA, 22 bp, Homo sapiens
cttattgctttcttccacagta

SEQ ID NO: 41354 - DNA, 19 bp, Homo sapiens
aaaagcagctgaaaggcaa

SEQ ID NO: 41355 - DNA, 22 bp, Homo sapiens
ggtatacatggtaggatatggt

SEQ ID NO: 41356 - DNA, 16 bp, Homo sapiens
cagcaacgacttctac

SEQ ID NO: 41357 - DNA, 19 bp, Homo sapiens
ccatagtatctctcttgga

SEQ ID NO: 41358 - DNA, 18 bp, Homo sapiens
ttttttactttcacctca

SEQ ID NO: 41359 - DNA, 18 bp, Homo sapiens
attaggtcttctgggttt

SEQ ID NO: 41360 - DNA, 22 bp, Homo sapiens
ggtcagttcttatttctattgg

SEQ ID NO: 41361 - DNA, 16 bp, Homo sapiens
aaggggctgttgctgg

SEQ ID NO: 41362 - DNA, 16 bp, Homo sapiens
gctcctatttcccacc

SEQ ID NO: 41363 - DNA, 20 bp, Homo sapiens
tcttttacctgcctcaggta

SEQ ID NO: 41364 - DNA, 21 bp, Homo sapiens
gcagaaaaggggaagaaatga

SEQ ID NO: 41365 - DNA, 20 bp, Homo sapiens
tgttttccattttaaagttg

SEQ ID NO: 41366 - DNA, 16 bp, Homo sapiens
ggccactgaggcattc

SEQ ID NO: 41367 - DNA, 21 bp, Homo sapiens
tgtcccagcaggacagtcctc

SEQ ID NO: 41368 - DNA, 16 bp, Homo sapiens
tcggctgagtaagcaa

SEQ ID NO: 41369 - DNA, 21 bp, Homo sapiens
tgcctttcaggccaaatgccc

SEQ ID NO: 41370 - DNA, 17 bp, Homo sapiens
gccaaaatcagctgctg

SEQ ID NO: 41371 - DNA, 21 bp, Homo sapiens
gggtgtactgaatgaaggcag

SEQ ID NO: 41372 - DNA, 16 bp, Homo sapiens
gagactgggaactgga

SEQ ID NO: 41373 - DNA, 24 bp, Homo sapiens
aagccccaagctgccactttgctt

SEQ ID NO: 41374 - DNA, 21 bp, Homo sapiens
tactggcatcacatcccatgg

SEQ ID NO: 41375 - DNA, 24 bp, Homo sapiens
ctctcttgtctgaagtctgggcat

SEQ ID NO: 41376 - DNA, 18 bp, Homo sapiens
gaaagttagccgccacat

SEQ ID NO: 41377 - DNA, 20 bp, Homo sapiens
gcaactgctcttggccctcc

SEQ ID NO: 41378 - DNA, 24 bp, Homo sapiens
tgaaggtcatgctgggcaaggtga

SEQ ID NO: 41379 - DNA, 16 bp, Homo sapiens
acctggagcacagatg

SEQ ID NO: 41380 - DNA, 21 bp, Homo sapiens
taactggttgaaaactaaatc

SEQ ID NO: 41381 - DNA, 18 bp, Homo sapiens
cagcctcttcctctcgga

SEQ ID NO: 41382 - DNA, 21 bp, Homo sapiens
aattcaatctttgatttgaca

SEQ ID NO: 41383 - DNA, 20 bp, Homo sapiens
atcaactggtgggggcactg

SEQ ID NO: 41384 - DNA, 18 bp, Homo sapiens
tacatatttggagtgtct

SEQ ID NO: 41385 - DNA, 17 bp, Homo sapiens
gggcccaaaaaagaaga

SEQ ID NO: 41386 - DNA, 17 bp, Homo sapiens
aaagactaagaaggggc

SEQ ID NO: 41387 - DNA, 21 bp, Homo sapiens
tcctgaatcccagactaataa

SEQ ID NO: 41388 - DNA, 17 bp, Homo sapiens
tcagaccatccacagtg

SEQ ID NO: 41389 - DNA, 22 bp, Homo sapiens
caactgaacaaaaaaatccttt

SEQ ID NO: 41390 - DNA, 22 bp, Homo sapiens
cttaccttctcccaccacagtg

SEQ ID NO: 41391 - DNA, 16 bp, Homo sapiens
tgggacaagggtacat

SEQ ID NO: 41392 - DNA, 20 bp, Homo sapiens
atgtggatatgaatattttg

SEQ ID NO: 41393 - DNA, 21 bp, Homo sapiens
ttttatgccattatttcttga

SEQ ID NO: 41394 - DNA, 22 bp, Homo sapiens
taatgtattaattgaacaattt

SEQ ID NO: 41395 - DNA, 17 bp, Homo sapiens
gcctcatggctggctct

SEQ ID NO: 41396 - DNA, 24 bp, Homo sapiens
tcacaaaaatttgtctttggggaa

SEQ ID NO: 41397 - DNA, 16 bp, Homo sapiens
gcctgtgactaggaag

SEQ ID NO: 41398 - DNA, 23 bp, Homo sapiens
tcagaaattttcattccaaaata

SEQ ID NO: 41399 - DNA, 16 bp, Homo sapiens
cttcttttccccgcca

SEQ ID NO: 41400 - DNA, 18 bp, Homo sapiens
agccaacagcacaccaga

SEQ ID NO: 41401 - DNA, 22 bp, Homo sapiens
tgaatgtatttatttttaccat

SEQ ID NO: 41402 - DNA, 20 bp, Homo sapiens
gccaggatgatggtcgactt

SEQ ID NO: 41403 - DNA, 28 bp, Homo sapiens
tatgtatttattaaatttaatgaatata

SEQ ID NO: 41404 - DNA, 18 bp, Homo sapiens
gtaaaattgactcctgtg

SEQ ID NO: 41405 - DNA, 19 bp, Homo sapiens
tctcaagcttaatgataca

SEQ ID NO: 41406 - DNA, 16 bp, Homo sapiens
ggcagtcttgatctct

SEQ ID NO: 41407 - DNA, 24 bp, Homo sapiens
ttattcatgatagtagctattccc

SEQ ID NO: 41408 - DNA, 18 bp, Homo sapiens
tttttgtagggtgcaccc

SEQ ID NO: 41409 - DNA, 18 bp, Homo sapiens
aacacagaataaaagcac

SEQ ID NO: 41410 - DNA, 17 bp, Homo sapiens
cagaagacatgaagaca

SEQ ID NO: 41411 - DNA, 18 bp, Homo sapiens
aaagtgccagtttgaccc

SEQ ID NO: 41412 - DNA, 18 bp, Homo sapiens
tggattaggtaacctctt

SEQ ID NO: 41413 - DNA, 19 bp, Homo sapiens
cttgagtttctgcctgggt

SEQ ID NO: 41414 - DNA, 21 bp, Homo sapiens
atcttccttttcacagacact

SEQ ID NO: 41415 - DNA, 16 bp, Homo sapiens
tcagcttccctggaag

SEQ ID NO: 41416 - DNA, 23 bp, Homo sapiens
ttactgaagaaattcagtattac

SEQ ID NO: 41417 - DNA, 22 bp, Homo sapiens
ctattcccatttctagaatcga

SEQ ID NO: 41418 - DNA, 18 bp, Homo sapiens
tctgtgcagataaagtgg

SEQ ID NO: 41419 - DNA, 18 bp, Homo sapiens
tccatcttttctaacttc

SEQ ID NO: 41420 - DNA, 16 bp, Homo sapiens
ctgagtctgatgctcc

SEQ ID NO: 41421 - DNA, 20 bp, Homo sapiens
ttatcactttctttccttta

SEQ ID NO: 41422 - DNA, 17 bp, Homo sapiens
agggactctactcttcg

SEQ ID NO: 41423 - DNA, 19 bp, Homo sapiens
gtggaaggaaaatgtgaaa

SEQ ID NO: 41424 - DNA, 18 bp, Homo sapiens
agaagtgggaaatgagct

SEQ ID NO: 41425 - DNA, 24 bp, Homo sapiens
cagtgggcactctgtaaatgtgta

SEQ ID NO: 41426 - DNA, 22 bp, Homo sapiens
aaaactgggaacttgatatata

SEQ ID NO: 41427 - DNA, 21 bp, Homo sapiens
tgctacttagctctaaagaca

SEQ ID NO: 41428 - DNA, 19 bp, Homo sapiens
tcctaaggatgtattttgt

SEQ ID NO: 41429 - DNA, 20 bp, Homo sapiens
taccaattgtggctgcactg

SEQ ID NO: 41430 - DNA, 19 bp, Homo sapiens
tgcaaatattttcactggt

SEQ ID NO: 41431 - DNA, 16 bp, Homo sapiens
gtgcatagggccgaat

SEQ ID NO: 41432 - DNA, 18 bp, Homo sapiens
acctttgctataaagcca

SEQ ID NO: 41433 - DNA, 26 bp, Homo sapiens
tatagaatctaaaaactaagaattta

SEQ ID NO: 41434 - DNA, 19 bp, Homo sapiens
cttactagttactcagtca

SEQ ID NO: 41435 - DNA, 18 bp, Homo sapiens
aaaaagcagatgagttat

SEQ ID NO: 41436 - DNA, 17 bp, Homo sapiens
tcgagtcatcactgctc

SEQ ID NO: 41437 - DNA, 19 bp, Homo sapiens
tggacctaaaaaatcagcc

SEQ ID NO: 41438 - DNA, 16 bp, Homo sapiens
gagcactggaatgatt

SEQ ID NO: 41439 - DNA, 18 bp, Homo sapiens
tagccaatgactcccttt

SEQ ID NO: 41440 - DNA, 20 bp, Homo sapiens
caatgactgtggaaactatc

SEQ ID NO: 41441 - DNA, 19 bp, Homo sapiens
tctagtaccccagtctgtt

SEQ ID NO: 41442 - DNA, 16 bp, Homo sapiens
aagagttggtcaacgt

SEQ ID NO: 41443 - DNA, 20 bp, Homo sapiens
ttgttacttgataaggatga

SEQ ID NO: 41444 - DNA, 18 bp, Homo sapiens
gacagtagagcaaaaaga

SEQ ID NO: 41445 - DNA, 23 bp, Homo sapiens
ttcaatgacaatcacttttgaga

SEQ ID NO: 41446 - DNA, 20 bp, Homo sapiens
caaaaccaaatcaggtttat

SEQ ID NO: 41447 - DNA, 17 bp, Homo sapiens
ttccatcatgagaggcc

SEQ ID NO: 41448 - DNA, 18 bp, Homo sapiens
tcttagaaaaaggctggg

SEQ ID NO: 41449 - DNA, 22 bp, Homo sapiens
gtagggcaattgcgctttcttt

SEQ ID NO: 41450 - DNA, 17 bp, Homo sapiens
ttgaaatacgctcaggt

SEQ ID NO: 41451 - DNA, 19 bp, Homo sapiens
atggccaggcatctcgtga

SEQ ID NO: 41452 - DNA, 21 bp, Homo sapiens
ggtgccaactatttcaacatc

SEQ ID NO: 41453 - DNA, 21 bp, Homo sapiens
gtctttcgagtattactattt

SEQ ID NO: 41454 - DNA, 18 bp, Homo sapiens
agttttattccacccact

SEQ ID NO: 41455 - DNA, 24 bp, Homo sapiens
ggccaagtgaatggaaacacctga

SEQ ID NO: 41456 - DNA, 16 bp, Homo sapiens
gcttctcttggctgta

SEQ ID NO: 41457 - DNA, 20 bp, Homo sapiens
atacaagaggttatccatga

SEQ ID NO: 41458 - DNA, 17 bp, Homo sapiens
tctgcttcatggatcaa

SEQ ID NO: 41459 - DNA, 18 bp, Homo sapiens
tgactgaaccagagtggg

SEQ ID NO: 41460 - DNA, 16 bp, Homo sapiens
ctgggtcagtgtctac

SEQ ID NO: 41461 - DNA, 20 bp, Homo sapiens
agctcatggtagaatacagc

SEQ ID NO: 41462 - DNA, 18 bp, Homo sapiens
gtgactagtggttttgtt

SEQ ID NO: 41463 - DNA, 21 bp, Homo sapiens
aaaaagcgcaaaacttgagga

SEQ ID NO: 41464 - DNA, 19 bp, Homo sapiens
cctaattcttgatagcgct

SEQ ID NO: 41465 - DNA, 21 bp, Homo sapiens
gggtaagatagaatagaaagt

SEQ ID NO: 41466 - DNA, 21 bp, Homo sapiens
acagaaatgtacataccaatt

SEQ ID NO: 41467 - DNA, 17 bp, Homo sapiens
tgctaaagacatcaaca

SEQ ID NO: 41468 - DNA, 23 bp, Homo sapiens
tataattcatatatcacttgttt

SEQ ID NO: 41469 - DNA, 19 bp, Homo sapiens
tgcccaaatggcatcagcg

SEQ ID NO: 41470 - DNA, 28 bp, Homo sapiens
gtttaataaatattttatccagttatag

SEQ ID NO: 41471 - DNA, 21 bp, Homo sapiens
gaatccttgcatcagaaattg

SEQ ID NO: 41472 - DNA, 16 bp, Homo sapiens
tttgccgcaatcttcc

SEQ ID NO: 41473 - DNA, 16 bp, Homo sapiens
aaccactgagcaggct

SEQ ID NO: 41474 - DNA, 22 bp, Homo sapiens
acaattgaaacagtgtcttaac

SEQ ID NO: 41475 - DNA, 20 bp, Homo sapiens
gggtggagacatatttttgg

SEQ ID NO: 41476 - DNA, 16 bp, Homo sapiens
gcttcctgctgcctca

SEQ ID NO: 41477 - DNA, 18 bp, Homo sapiens
aaggtgtggggtattttc

SEQ ID NO: 41478 - DNA, 22 bp, Homo sapiens
ctcctctattctgaaatcttca

SEQ ID NO: 41479 - DNA, 23 bp, Homo sapiens
cataatgactcagcattcctgta

SEQ ID NO: 41480 - DNA, 16 bp, Homo sapiens
tcctaaaacagaggca

SEQ ID NO: 41481 - DNA, 24 bp, Homo sapiens
aactctagaatttaggtcttcacc

SEQ ID NO: 41482 - DNA, 21 bp, Homo sapiens
agtccaagaaaatatctcttc

SEQ ID NO: 41483 - DNA, 18 bp, Homo sapiens
cacaagcacccttgcctc

SEQ ID NO: 41484 - DNA, 20 bp, Homo sapiens
ttgactgtcttcacaggaaa

SEQ ID NO: 41485 - DNA, 18 bp, Homo sapiens
ggatgcagtccattctgc

SEQ ID NO: 41486 - DNA, 23 bp, Homo sapiens
ttagcactaccaatgtatatttt

SEQ ID NO: 41487 - DNA, 16 bp, Homo sapiens
gggctctcccatccag

SEQ ID NO: 41488 - DNA, 18 bp, Homo sapiens
tctatgtaacacattgtc

SEQ ID NO: 41489 - DNA, 21 bp, Homo sapiens
aggacagactacttttcctaa

SEQ ID NO: 41490 - DNA, 20 bp, Homo sapiens
aggcgtgaatataggagggg

SEQ ID NO: 41491 - DNA, 24 bp, Homo sapiens
gataaaagataaaaacaagttcta

SEQ ID NO: 41492 - DNA, 23 bp, Homo sapiens
cattctaagattcatttctattt

SEQ ID NO: 41493 - DNA, 16 bp, Homo sapiens
tgcagagaacagtgga

SEQ ID NO: 41494 - DNA, 19 bp, Homo sapiens
gccaagtacttcataaata

SEQ ID NO: 41495 - DNA, 18 bp, Homo sapiens
tttctagttttgtgaaga

SEQ ID NO: 41496 - DNA, 22 bp, Homo sapiens
ggttgtaatgaaggaaagtaga

SEQ ID NO: 41497 - DNA, 18 bp, Homo sapiens
tttgtggctggtggttta

SEQ ID NO: 41498 - DNA, 17 bp, Homo sapiens
gctgttattgggtgcat

SEQ ID NO: 41499 - DNA, 19 bp, Homo sapiens
agctttaactaacttaggg

SEQ ID NO: 41500 - DNA, 20 bp, Homo sapiens
ggtcatcgctatagcaactc

SEQ ID NO: 41501 - DNA, 22 bp, Homo sapiens
ggaatgatcattcaatttcagg

SEQ ID NO: 41502 - DNA, 24 bp, Homo sapiens
cagcaggttggacagcaagcacta

SEQ ID NO: 41503 - DNA, 16 bp, Homo sapiens
gtggcctgtattcacc

SEQ ID NO: 41504 - DNA, 20 bp, Homo sapiens
aaaattttatgcatggatgt

SEQ ID NO: 41505 - DNA, 17 bp, Homo sapiens
gccaacttgacatcaac

SEQ ID NO: 41506 - DNA, 19 bp, Homo sapiens
gaagtttcatgattcctga

SEQ ID NO: 41507 - DNA, 16 bp, Homo sapiens
tggccaccagctcttc

SEQ ID NO: 41508 - DNA, 19 bp, Homo sapiens
ctgaggccactgatttggt

SEQ ID NO: 41509 - DNA, 18 bp, Homo sapiens
tgtattttctgctccaca

SEQ ID NO: 41510 - DNA, 18 bp, Homo sapiens
cttggattggagggagct

SEQ ID NO: 41511 - DNA, 20 bp, Homo sapiens
gtggagatagagaacattac

SEQ ID NO: 41512 - DNA, 18 bp, Homo sapiens
tcctgaatgcagtcaaaa

SEQ ID NO: 41513 - DNA, 16 bp, Homo sapiens
gcttcttggctttcaa

SEQ ID NO: 41514 - DNA, 22 bp, Homo sapiens
aatctgcacttttttgacggaa

SEQ ID NO: 41515 - DNA, 17 bp, Homo sapiens
tcaagtcttcatggcct

SEQ ID NO: 41516 - DNA, 18 bp, Homo sapiens
agtattgtctaccagagt

SEQ ID NO: 41517 - DNA, 17 bp, Homo sapiens
catccgaggccacaagt

SEQ ID NO: 41518 - DNA, 23 bp, Homo sapiens
ggcaccatagtcaaagttcttga

SEQ ID NO: 41519 - DNA, 18 bp, Homo sapiens
aggtaaaggacatcaacc

SEQ ID NO: 41520 - DNA, 21 bp, Homo sapiens
ctttccttatagagatgaagg

SEQ ID NO: 41521 - DNA, 17 bp, Homo sapiens
gttctgatgacacagcc

SEQ ID NO: 41522 - DNA, 16 bp, Homo sapiens
agttcacaagaggagc

SEQ ID NO: 41523 - DNA, 22 bp, Homo sapiens
tttggcacagctggccatggca

SEQ ID NO: 41524 - DNA, 17 bp, Homo sapiens
acaacgttgccatggag

SEQ ID NO: 41525 - DNA, 16 bp, Homo sapiens
cgggggcattcatgca

SEQ ID NO: 41526 - DNA, 17 bp, Homo sapiens
aaatggtggaccacgct

SEQ ID NO: 41527 - DNA, 22 bp, Homo sapiens
gttgaattcagtaatgtgtcag

SEQ ID NO: 41528 - DNA, 19 bp, Homo sapiens
accctctaaatctatgcca

SEQ ID NO: 41529 - DNA, 18 bp, Homo sapiens
ggtgtccttcaacttctt

SEQ ID NO: 41530 - DNA, 20 bp, Homo sapiens
aaagtactccatgactggca

SEQ ID NO: 41531 - DNA, 24 bp, Homo sapiens
atgggccattcttcagccttttgt

SEQ ID NO: 41532 - DNA, 17 bp, Homo sapiens
atgatccaggatcctgc

SEQ ID NO: 41533 - DNA, 20 bp, Homo sapiens
gtgttgagaataaacttaca

SEQ ID NO: 41534 - DNA, 19 bp, Homo sapiens
agttctgaatttccacatt

SEQ ID NO: 41535 - DNA, 23 bp, Homo sapiens
gattaggactgaaaattcatagc

SEQ ID NO: 41536 - DNA, 17 bp, Homo sapiens
atcatgtagggggagac

SEQ ID NO: 41537 - DNA, 23 bp, Homo sapiens
taaatgaaaattctcacagttgg

SEQ ID NO: 41538 - DNA, 16 bp, Homo sapiens
cattcgtttggctgct

SEQ ID NO: 41539 - DNA, 19 bp, Homo sapiens
ctggtaatggccaattact

SEQ ID NO: 41540 - DNA, 20 bp, Homo sapiens
aaagtttttttttcccacaa

SEQ ID NO: 41541 - DNA, 17 bp, Homo sapiens
aaggaccccacaaacag

SEQ ID NO: 41542 - DNA, 22 bp, Homo sapiens
gatgttttcatttctcaggttt

SEQ ID NO: 41543 - DNA, 18 bp, Homo sapiens
caacagtccaacctcagc

SEQ ID NO: 41544 - DNA, 16 bp, Homo sapiens
gaatgccccaggaaaa

SEQ ID NO: 41545 - DNA, 24 bp, Homo sapiens
aaattaatgagggaatagagataa

SEQ ID NO: 41546 - DNA, 18 bp, Homo sapiens
agtcaagggccaccatgt

SEQ ID NO: 41547 - DNA, 16 bp, Homo sapiens
cctctgaatggcaatc

SEQ ID NO: 41548 - DNA, 20 bp, Homo sapiens
aaatagtccttagctcctct

SEQ ID NO: 41549 - DNA, 23 bp, Homo sapiens
gtcttcctagctcattcacttac

SEQ ID NO: 41550 - DNA, 19 bp, Homo sapiens
tgccattgttatgctgtta

SEQ ID NO: 41551 - DNA, 24 bp, Homo sapiens
gtttgagccgttcatagatcctca

SEQ ID NO: 41552 - DNA, 16 bp, Homo sapiens
tttcttgctctggagt

SEQ ID NO: 41553 - DNA, 22 bp, Homo sapiens
ctgcttcatgaggctcataaga

SEQ ID NO: 41554 - DNA, 20 bp, Homo sapiens
actgccatgtcttatttcta

SEQ ID NO: 41555 - DNA, 26 bp, Homo sapiens
tagagatattttttaaattccctata

SEQ ID NO: 41556 - DNA, 20 bp, Homo sapiens
tatcctaagaactcctggac

SEQ ID NO: 41557 - DNA, 20 bp, Homo sapiens
tgtttaacctaaaaatcagt

SEQ ID NO: 41558 - DNA, 22 bp, Homo sapiens
aggatttttctatccaactgtt

SEQ ID NO: 41559 - DNA, 22 bp, Homo sapiens
aacaacaaccaagaaaaagccc

SEQ ID NO: 41560 - DNA, 16 bp, Homo sapiens
acaacagcctctggaa

SEQ ID NO: 41561 - DNA, 21 bp, Homo sapiens
tcagctccaagatgtgtccag

SEQ ID NO: 41562 - DNA, 23 bp, Homo sapiens
agagcatttaaataatgcttttg

SEQ ID NO: 41563 - DNA, 19 bp, Homo sapiens
ctactcacaagagagctgg

SEQ ID NO: 41564 - DNA, 20 bp, Homo sapiens
agcctcagagggagtctttt

SEQ ID NO: 41565 - DNA, 25 bp, Homo sapiens
gaatttagcatatgttctatgaata

SEQ ID NO: 41566 - DNA, 20 bp, Homo sapiens
caggtactttagaaaatccc

SEQ ID NO: 41567 - DNA, 21 bp, Homo sapiens
acacacacatgcattttattt

SEQ ID NO: 41568 - DNA, 19 bp, Homo sapiens
gcaatttctccctctcttt

SEQ ID NO: 41569 - DNA, 16 bp, Homo sapiens
tccattcatacggtca

SEQ ID NO: 41570 - DNA, 19 bp, Homo sapiens
ctcctccatatagtctact

SEQ ID NO: 41571 - DNA, 19 bp, Homo sapiens
agcttttgttccttttcta

SEQ ID NO: 41572 - DNA, 23 bp, Homo sapiens
ctctgaccacatgtaaagcttgc

SEQ ID NO: 41573 - DNA, 16 bp, Homo sapiens
tgagtgtggcatgcat

SEQ ID NO: 41574 - DNA, 20 bp, Homo sapiens
tccctaaactctgttaagca

SEQ ID NO: 41575 - DNA, 18 bp, Homo sapiens
ttccattcttcaaagggc

SEQ ID NO: 41576 - DNA, 24 bp, Homo sapiens
tctcacagaatataattctcaaca

SEQ ID NO: 41577 - DNA, 20 bp, Homo sapiens
tgtgacatatctgagcaatt

SEQ ID NO: 41578 - DNA, 19 bp, Homo sapiens
tccccgcctgcaatgacca

SEQ ID NO: 41579 - DNA, 16 bp, Homo sapiens
cagctcccaaactgct

SEQ ID NO: 41580 - DNA, 19 bp, Homo sapiens
gtctaaggtccccatcaca

SEQ ID NO: 41581 - DNA, 18 bp, Homo sapiens
ctagcttttggcagacta

SEQ ID NO: 41582 - DNA, 19 bp, Homo sapiens
tctatgaaattgttctcct

SEQ ID NO: 41583 - DNA, 20 bp, Homo sapiens
aacaataccattccaggccc

SEQ ID NO: 41584 - DNA, 22 bp, Homo sapiens
ataagtgcctacttatttccaa

SEQ ID NO: 41585 - DNA, 17 bp, Homo sapiens
cagctttaaaatggtcc

SEQ ID NO: 41586 - DNA, 19 bp, Homo sapiens
atctggctgggttcagcct

SEQ ID NO: 41587 - DNA, 24 bp, Homo sapiens
tcacaatggattagattttcaaaa

SEQ ID NO: 41588 - DNA, 16 bp, Homo sapiens
acgtcatccccagggc

SEQ ID NO: 41589 - DNA, 17 bp, Homo sapiens
gggaggtgaaaatacca

SEQ ID NO: 41590 - DNA, 16 bp, Homo sapiens
ttgccatgtttcaggg

SEQ ID NO: 41591 - DNA, 22 bp, Homo sapiens
taattacttgctttttaactga

SEQ ID NO: 41592 - DNA, 23 bp, Homo sapiens
cagatacatattttagttacagg

SEQ ID NO: 41593 - DNA, 17 bp, Homo sapiens
ggccaagttcaagtcat

SEQ ID NO: 41594 - DNA, 18 bp, Homo sapiens
cctgcctgtttattaaca

SEQ ID NO: 41595 - DNA, 26 bp, Homo sapiens
atattaagatgatctttgtatcacat

SEQ ID NO: 41596 - DNA, 19 bp, Homo sapiens
atactagacacttctactt

SEQ ID NO: 41597 - DNA, 18 bp, Homo sapiens
ttaggcaactagaattta

SEQ ID NO: 41598 - DNA, 16 bp, Homo sapiens
ttccttcacccggaga

SEQ ID NO: 41599 - DNA, 20 bp, Homo sapiens
atgttggaaatcaattgtta

SEQ ID NO: 41600 - DNA, 18 bp, Homo sapiens
ctggttcttcaatagcca

SEQ ID NO: 41601 - DNA, 20 bp, Homo sapiens
cacacagctgtccctttcag

SEQ ID NO: 41602 - DNA, 21 bp, Homo sapiens
aagatgtgggagtcgagtggg

SEQ ID NO: 41603 - DNA, 23 bp, Homo sapiens
gggtgattggtgatttctgacta

SEQ ID NO: 41604 - DNA, 17 bp, Homo sapiens
tacctactgctggtgca

SEQ ID NO: 41605 - DNA, 23 bp, Homo sapiens
agataggtgagttgcctcagctg

SEQ ID NO: 41606 - DNA, 21 bp, Homo sapiens
cactattgtgtttttctttca

SEQ ID NO: 41607 - DNA, 22 bp, Homo sapiens
gtgatggaagaaatggaaaaga

SEQ ID NO: 41608 - DNA, 18 bp, Homo sapiens
ttttggcagggtggtgtg

SEQ ID NO: 41609 - DNA, 21 bp, Homo sapiens
gtaaggcggcaaatctgtgtg

SEQ ID NO: 41610 - DNA, 18 bp, Homo sapiens
aaagtacaatctgggtct

SEQ ID NO: 41611 - DNA, 21 bp, Homo sapiens
tagcttatattcatctggcca

SEQ ID NO: 41612 - DNA, 18 bp, Homo sapiens
gacctactcattgcaatc

SEQ ID NO: 41613 - DNA, 23 bp, Homo sapiens
atgccaagactttcaataacgag

SEQ ID NO: 41614 - DNA, 18 bp, Homo sapiens
gtacgtgatacattgtct

SEQ ID NO: 41615 - DNA, 19 bp, Homo sapiens
agaacaaatgagaatgcag

SEQ ID NO: 41616 - DNA, 20 bp, Homo sapiens
actcctgaagtttcttatga

SEQ ID NO: 41617 - DNA, 18 bp, Homo sapiens
tgatccaaaggttctcag

SEQ ID NO: 41618 - DNA, 19 bp, Homo sapiens
gcaaataatctctcaaccc

SEQ ID NO: 41619 - DNA, 19 bp, Homo sapiens
gccatccagccacgagggt

SEQ ID NO: 41620 - DNA, 18 bp, Homo sapiens
tatgtggagagaatggaa

SEQ ID NO: 41621 - DNA, 21 bp, Homo sapiens
tatttctgctgtcagtcatgg

SEQ ID NO: 41622 - DNA, 17 bp, Homo sapiens
cacacagtgactgctaa

SEQ ID NO: 41623 - DNA, 18 bp, Homo sapiens
ctaccatacactcatgat

SEQ ID NO: 41624 - DNA, 16 bp, Homo sapiens
ggaggaggtgttcttt

SEQ ID NO: 41625 - DNA, 22 bp, Homo sapiens
tctttagagctaaatacttcaa

SEQ ID NO: 41626 - DNA, 18 bp, Homo sapiens
ggaaaccctttcagcttc

SEQ ID NO: 41627 - DNA, 18 bp, Homo sapiens
aataacagatgcatgccc

SEQ ID NO: 41628 - DNA, 16 bp, Homo sapiens
tggaagacttggatgg

SEQ ID NO: 41629 - DNA, 19 bp, Homo sapiens
ccaatagacatacgatgaa

SEQ ID NO: 41630 - DNA, 20 bp, Homo sapiens
cagttgaagtttacaaactc

SEQ ID NO: 41631 - DNA, 19 bp, Homo sapiens
ccaaagcttgaattgacca

SEQ ID NO: 41632 - DNA, 23 bp, Homo sapiens
cattgtgtaataatctttctgtt

SEQ ID NO: 41633 - DNA, 19 bp, Homo sapiens
cttctgtttttcccagaca

SEQ ID NO: 41634 - DNA, 24 bp, Homo sapiens
gataaatatgcaatttaaatccta

SEQ ID NO: 41635 - DNA, 20 bp, Homo sapiens
tggaaatgccactaagtttg

SEQ ID NO: 41636 - DNA, 16 bp, Homo sapiens
aacacccacagaaaac

SEQ ID NO: 41637 - DNA, 18 bp, Homo sapiens
aggatgtcttttaggaga

SEQ ID NO: 41638 - DNA, 24 bp, Homo sapiens
ttgttaattttgatctcatcaact

SEQ ID NO: 41639 - DNA, 22 bp, Homo sapiens
aagagataatgattcacaaagt

SEQ ID NO: 41640 - DNA, 18 bp, Homo sapiens
gtcatctgggattaaaac

SEQ ID NO: 41641 - DNA, 22 bp, Homo sapiens
tatttatcatctgttctgtcta

SEQ ID NO: 41642 - DNA, 20 bp, Homo sapiens
tgtgtccagttttcttattt

SEQ ID NO: 41643 - DNA, 16 bp, Homo sapiens
tggccacacagttgat

SEQ ID NO: 41644 - DNA, 21 bp, Homo sapiens
tctcttagtcaatagctcgct

SEQ ID NO: 41645 - DNA, 20 bp, Homo sapiens
tcccatcttttaggagtttt

SEQ ID NO: 41646 - DNA, 21 bp, Homo sapiens
agagttctttctatattctgg

SEQ ID NO: 41647 - DNA, 17 bp, Homo sapiens
tcagttactgacagctt

SEQ ID NO: 41648 - DNA, 23 bp, Homo sapiens
tatgagattcactaaagaatgct

SEQ ID NO: 41649 - DNA, 20 bp, Homo sapiens
tcaaagtttattcatgcaga

SEQ ID NO: 41650 - DNA, 22 bp, Homo sapiens
ggcccagcacatgtaattttgt

SEQ ID NO: 41651 - DNA, 18 bp, Homo sapiens
tgctgtaacatgctgtat

SEQ ID NO: 41652 - DNA, 23 bp, Homo sapiens
taccttgtgggcaaaatgaccaa

SEQ ID NO: 41653 - DNA, 27 bp, Homo sapiens
cttctttctacttaatcaataatttta

SEQ ID NO: 41654 - DNA, 18 bp, Homo sapiens
cgtcaattccaaaatctc

SEQ ID NO: 41655 - DNA, 20 bp, Homo sapiens
ggatgcctatactgacattg

SEQ ID NO: 41656 - DNA, 23 bp, Homo sapiens
attgctacttctaaaaatctata

SEQ ID NO: 41657 - DNA, 21 bp, Homo sapiens
tatgatccattggtgctttaa

SEQ ID NO: 41658 - DNA, 24 bp, Homo sapiens
atgtcactggcaccactctgttcc

SEQ ID NO: 41659 - DNA, 21 bp, Homo sapiens
tcccatttaagtagatatgca

SEQ ID NO: 41660 - DNA, 19 bp, Homo sapiens
ttcactttttaggtatggt

SEQ ID NO: 41661 - DNA, 18 bp, Homo sapiens
aacaacaacaataacaac

SEQ ID NO: 41662 - DNA, 23 bp, Homo sapiens
tgtatttttcaacaagaaaaagt

SEQ ID NO: 41663 - DNA, 17 bp, Homo sapiens
actgtgaagctctggaa

SEQ ID NO: 41664 - DNA, 17 bp, Homo sapiens
gggtcacagattccatc

SEQ ID NO: 41665 - DNA, 24 bp, Homo sapiens
tgaaatttagggtatacaaagaga

SEQ ID NO: 41666 - DNA, 17 bp, Homo sapiens
ttccttcactcagaaca

SEQ ID NO: 41667 - DNA, 21 bp, Homo sapiens
agaaaatgcacaggaacatca

SEQ ID NO: 41668 - DNA, 17 bp, Homo sapiens
tggctatggctactttt

SEQ ID NO: 41669 - DNA, 19 bp, Homo sapiens
ttctacagtaaaatgtgaa

SEQ ID NO: 41670 - DNA, 17 bp, Homo sapiens
tcatacatggggtaact

SEQ ID NO: 41671 - DNA, 18 bp, Homo sapiens
cctggtacaagaatgtgc

SEQ ID NO: 41672 - DNA, 20 bp, Homo sapiens
tggcagaaagtgaatataaa

SEQ ID NO: 41673 - DNA, 18 bp, Homo sapiens
ggttggtcatgagatgga

SEQ ID NO: 41674 - DNA, 20 bp, Homo sapiens
cccaaaaggaaaaaaaaaga

SEQ ID NO: 41675 - DNA, 19 bp, Homo sapiens
tggcatctatatctgcagt

SEQ ID NO: 41676 - DNA, 20 bp, Homo sapiens
caatggcaattattcttcca

SEQ ID NO: 41677 - DNA, 23 bp, Homo sapiens
aacgtgatcatccaggtttctgg

SEQ ID NO: 41678 - DNA, 20 bp, Homo sapiens
gagaaagaactttatgccct

SEQ ID NO: 41679 - DNA, 18 bp, Homo sapiens
cccctggatttgttgaaa

SEQ ID NO: 41680 - DNA, 18 bp, Homo sapiens
ataacattggtgggactg

SEQ ID NO: 41681 - DNA, 23 bp, Homo sapiens
gaactctgatgtgtattagtaga

SEQ ID NO: 41682 - DNA, 17 bp, Homo sapiens
attggagagtccctcgg

SEQ ID NO: 41683 - DNA, 25 bp, Homo sapiens
atactaaatattttctaaatatata

SEQ ID NO: 41684 - DNA, 30 bp, Homo sapiens
gcatttcatatatatatatatatatatata

SEQ ID NO: 41685 - DNA, 18 bp, Homo sapiens
tgttctcagggacatgca

SEQ ID NO: 41686 - DNA, 17 bp, Homo sapiens
acattttgccatcaggc

SEQ ID NO: 41687 - DNA, 16 bp, Homo sapiens
tgcagcatctcttgtt

SEQ ID NO: 41688 - DNA, 23 bp, Homo sapiens
cactgtaatagatttaaaatcaa

SEQ ID NO: 41689 - DNA, 19 bp, Homo sapiens
tctttccctgatttacaga

SEQ ID NO: 41690 - DNA, 16 bp, Homo sapiens
atctcatctccgtgca

SEQ ID NO: 41691 - DNA, 24 bp, Homo sapiens
gtaagccaatcagtgatgactaca

SEQ ID NO: 41692 - DNA, 20 bp, Homo sapiens
aggtggacagtaatgtattc

SEQ ID NO: 41693 - DNA, 23 bp, Homo sapiens
tgatcataaagccaatattttta

SEQ ID NO: 41694 - DNA, 17 bp, Homo sapiens
gctgcacagtgaggaac

SEQ ID NO: 41695 - DNA, 20 bp, Homo sapiens
tgtgtcctacacaagaatgc

SEQ ID NO: 41696 - DNA, 17 bp, Homo sapiens
tctcaggagccatatct

SEQ ID NO: 41697 - DNA, 20 bp, Homo sapiens
agcgcatgacctaaaatatt

SEQ ID NO: 41698 - DNA, 18 bp, Homo sapiens
tgtgggagaatgtcttta

SEQ ID NO: 41699 - DNA, 17 bp, Homo sapiens
atgctgaggcctctact

SEQ ID NO: 41700 - DNA, 21 bp, Homo sapiens
gagttactcattctcttgatt

SEQ ID NO: 41701 - DNA, 22 bp, Homo sapiens
caagtgatttgtttaggcatac

SEQ ID NO: 41702 - DNA, 18 bp, Homo sapiens
tccataagcatctgagct

SEQ ID NO: 41703 - DNA, 21 bp, Homo sapiens
tccatctctaaatccctcaaa

SEQ ID NO: 41704 - DNA, 16 bp, Homo sapiens
ttcccagaagagccca

SEQ ID NO: 41705 - DNA, 17 bp, Homo sapiens
aaacatgggagaaagaa

SEQ ID NO: 41706 - DNA, 18 bp, Homo sapiens
ttccatgagtgagaagat

SEQ ID NO: 41707 - DNA, 19 bp, Homo sapiens
ctcccaccagagtgagtga

SEQ ID NO: 41708 - DNA, 16 bp, Homo sapiens
gctttaggttctctgg

SEQ ID NO: 41709 - DNA, 20 bp, Homo sapiens
ctgcactcccttcaactgga

SEQ ID NO: 41710 - DNA, 19 bp, Homo sapiens
ttcctcggtgctgacagta

SEQ ID NO: 41711 - DNA, 16 bp, Homo sapiens
atccctggatcctagc

SEQ ID NO: 41712 - DNA, 18 bp, Homo sapiens
acagaggagaatcaaaga

SEQ ID NO: 41713 - DNA, 24 bp, Homo sapiens
acaatcaagagcattctgaaaact

SEQ ID NO: 41714 - DNA, 20 bp, Homo sapiens
aggaaatctcactaatgaga

SEQ ID NO: 41715 - DNA, 19 bp, Homo sapiens
ttttaaaagaggtcaacca

SEQ ID NO: 41716 - DNA, 16 bp, Homo sapiens
gctggagagcaccata

SEQ ID NO: 41717 - DNA, 19 bp, Homo sapiens
ttgctcattagactttcca

SEQ ID NO: 41718 - DNA, 20 bp, Homo sapiens
cagttctatcatcctctttt

SEQ ID NO: 41719 - DNA, 18 bp, Homo sapiens
gaaacaagcagcttctcc

SEQ ID NO: 41720 - DNA, 20 bp, Homo sapiens
gaattatgttaatctagtgg

SEQ ID NO: 41721 - DNA, 16 bp, Homo sapiens
cagagccacagtggcc

SEQ ID NO: 41722 - DNA, 23 bp, Homo sapiens
gtgtctatagttcactatttggt

SEQ ID NO: 41723 - DNA, 18 bp, Homo sapiens
tgtgcaggatacagacct

SEQ ID NO: 41724 - DNA, 20 bp, Homo sapiens
tctaccattatttaagcaga

SEQ ID NO: 41725 - DNA, 17 bp, Homo sapiens
tcagtggaacaggtgtt

SEQ ID NO: 41726 - DNA, 24 bp, Homo sapiens
gtccagaccccaatacagttaaga

SEQ ID NO: 41727 - DNA, 16 bp, Homo sapiens
gtgctggctttagaag

SEQ ID NO: 41728 - DNA, 23 bp, Homo sapiens
tcagtacctcaaaggtgacttaa

SEQ ID NO: 41729 - DNA, 17 bp, Homo sapiens
ggttcactaccagaagt

SEQ ID NO: 41730 - DNA, 19 bp, Homo sapiens
ctcttccatcggtttggca

SEQ ID NO: 41731 - DNA, 23 bp, Homo sapiens
attaaattaatcacgttttgatt

SEQ ID NO: 41732 - DNA, 19 bp, Homo sapiens
agggttccagtccacagca

SEQ ID NO: 41733 - DNA, 20 bp, Homo sapiens
cttttccaggtcttatttta

SEQ ID NO: 41734 - DNA, 21 bp, Homo sapiens
gctctaagacaggtgacaatt

SEQ ID NO: 41735 - DNA, 22 bp, Homo sapiens
agttttacttgttatttaagga

SEQ ID NO: 41736 - DNA, 18 bp, Homo sapiens
ctcccttctttccctatg

SEQ ID NO: 41737 - DNA, 20 bp, Homo sapiens
ctcagcaactatagtcaagg

SEQ ID NO: 41738 - DNA, 16 bp, Homo sapiens
agacaagcccttccaa

SEQ ID NO: 41739 - DNA, 21 bp, Homo sapiens
gctctacttcatttcctctga

SEQ ID NO: 41740 - DNA, 23 bp, Homo sapiens
caggacccatcgagctcagggca

SEQ ID NO: 41741 - DNA, 18 bp, Homo sapiens
gccaggaacttgactcca

SEQ ID NO: 41742 - DNA, 18 bp, Homo sapiens
gggactgacaattttccc

SEQ ID NO: 41743 - DNA, 20 bp, Homo sapiens
atctgagctctgccttggaa

SEQ ID NO: 41744 - DNA, 21 bp, Homo sapiens
agtatttaaatgaaggggatt

SEQ ID NO: 41745 - DNA, 16 bp, Homo sapiens
caaggatggcgtgtgc

SEQ ID NO: 41746 - DNA, 19 bp, Homo sapiens
tactgtgcttctacaagag

SEQ ID NO: 41747 - DNA, 16 bp, Homo sapiens
gctggacactaacaca

SEQ ID NO: 41748 - DNA, 24 bp, Homo sapiens
gtctgaggataaattgtcaactaa

SEQ ID NO: 41749 - DNA, 16 bp, Homo sapiens
gaaaggctgccacaag

SEQ ID NO: 41750 - DNA, 23 bp, Homo sapiens
ccccctacaagtgatataatcat

SEQ ID NO: 41751 - DNA, 17 bp, Homo sapiens
ttccagggcaacttttc

SEQ ID NO: 41752 - DNA, 17 bp, Homo sapiens
taagttgaggatgcttg

SEQ ID NO: 41753 - DNA, 16 bp, Homo sapiens
accaacgaagcaacag

SEQ ID NO: 41754 - DNA, 16 bp, Homo sapiens
gacgttgtcgccatct

SEQ ID NO: 41755 - DNA, 21 bp, Homo sapiens
caatacttatactatcccgcc

SEQ ID NO: 41756 - DNA, 18 bp, Homo sapiens
ctccggcagaactgtaaa

SEQ ID NO: 41757 - DNA, 22 bp, Homo sapiens
aaccagagttaactatgaattc

SEQ ID NO: 41758 - DNA, 20 bp, Homo sapiens
caagattactgagatacgga

SEQ ID NO: 41759 - DNA, 26 bp, Homo sapiens
tgagcacatttaatattatatatcgc

SEQ ID NO: 41760 - DNA, 18 bp, Homo sapiens
cattaccatggaaactga

SEQ ID NO: 41761 - DNA, 23 bp, Homo sapiens
aaatttaatttgagctgtttgaa

SEQ ID NO: 41762 - DNA, 16 bp, Homo sapiens
tctcgtttcagcccta

SEQ ID NO: 41763 - DNA, 18 bp, Homo sapiens
tgttctggccccagcgtt

SEQ ID NO: 41764 - DNA, 22 bp, Homo sapiens
tgcaatgattaataagagtaaa

SEQ ID NO: 41765 - DNA, 21 bp, Homo sapiens
cgtctcacactccatctctgc

SEQ ID NO: 41766 - DNA, 22 bp, Homo sapiens
atttgcaaaatttgacaaatgg

SEQ ID NO: 41767 - DNA, 18 bp, Homo sapiens
gaacttcatctctttcca

SEQ ID NO: 41768 - DNA, 19 bp, Homo sapiens
aggctggctggaatccaca

SEQ ID NO: 41769 - DNA, 21 bp, Homo sapiens
tttgtgccagatcattgggca

SEQ ID NO: 41770 - DNA, 20 bp, Homo sapiens
tgccaggccacatccaccca

SEQ ID NO: 41771 - DNA, 20 bp, Homo sapiens
agagcaactgcttgaatcgt

SEQ ID NO: 41772 - DNA, 22 bp, Homo sapiens
caagcatttgtggggaagttca

SEQ ID NO: 41773 - DNA, 16 bp, Homo sapiens
gaggctgccagacaca

SEQ ID NO: 41774 - DNA, 24 bp, Homo sapiens
agaatgatggaaacattgactctg

SEQ ID NO: 41775 - DNA, 19 bp, Homo sapiens
taatggtgactgtttcctg

SEQ ID NO: 41776 - DNA, 19 bp, Homo sapiens
tcgcaaatgtagaggtaag

SEQ ID NO: 41777 - DNA, 23 bp, Homo sapiens
caggaacttcatttgtgaaaccg

SEQ ID NO: 41778 - DNA, 16 bp, Homo sapiens
actgcacataggtgtg

SEQ ID NO: 41779 - DNA, 23 bp, Homo sapiens
acaatacattttaaaaaaagtaa

SEQ ID NO: 41780 - DNA, 17 bp, Homo sapiens
ggaaggccaaggacact

SEQ ID NO: 41781 - DNA, 23 bp, Homo sapiens
acaggtggcctcagattctaact

SEQ ID NO: 41782 - DNA, 18 bp, Homo sapiens
tgctacagtgtctgcctt

SEQ ID NO: 41783 - DNA, 23 bp, Homo sapiens
gcacacatagagaaattagtagt

SEQ ID NO: 41784 - DNA, 17 bp, Homo sapiens
gcgggattttctccagg

SEQ ID NO: 41785 - DNA, 23 bp, Homo sapiens
tatcatttccatatatatgcttt

SEQ ID NO: 41786 - DNA, 17 bp, Homo sapiens
gaacttgtacctttgtc

SEQ ID NO: 41787 - DNA, 21 bp, Homo sapiens
ggggcagaaccaagcagctga

SEQ ID NO: 41788 - DNA, 19 bp, Homo sapiens
aggaagcaaatgtttgaat

SEQ ID NO: 41789 - DNA, 19 bp, Homo sapiens
acacacagcagctgagaca

SEQ ID NO: 41790 - DNA, 16 bp, Homo sapiens
cacctcaagccagttg

SEQ ID NO: 41791 - DNA, 21 bp, Homo sapiens
cttccacccaggcagccttta

SEQ ID NO: 41792 - DNA, 22 bp, Homo sapiens
cataacaaagacaagcctcagg

SEQ ID NO: 41793 - DNA, 17 bp, Homo sapiens
atctgccctggtgttca

SEQ ID NO: 41794 - DNA, 20 bp, Homo sapiens
cttccatcaggcagattgtg

SEQ ID NO: 41795 - DNA, 16 bp, Homo sapiens
cccttccggccgggga

SEQ ID NO: 41796 - DNA, 21 bp, Homo sapiens
tttacataaagaaagtgtgct

SEQ ID NO: 41797 - DNA, 19 bp, Homo sapiens
ttataggaatgtcaccctg

SEQ ID NO: 41798 - DNA, 22 bp, Homo sapiens
ctgctgtaataataactcttga

SEQ ID NO: 41799 - DNA, 22 bp, Homo sapiens
gcgatgacatcttaacctttgc

SEQ ID NO: 41800 - DNA, 18 bp, Homo sapiens
cctctgacgtggtactcc

SEQ ID NO: 41801 - DNA, 20 bp, Homo sapiens
taggagtcattggttataac

SEQ ID NO: 41802 - DNA, 18 bp, Homo sapiens
gtggttaccagagacacc

SEQ ID NO: 41803 - DNA, 17 bp, Homo sapiens
ccacagggaatggctct

SEQ ID NO: 41804 - DNA, 24 bp, Homo sapiens
ctcctgagatctgggccactgcaa

SEQ ID NO: 41805 - DNA, 16 bp, Homo sapiens
attgaccagcagacct

SEQ ID NO: 41806 - DNA, 21 bp, Homo sapiens
caattctggggtaaaggcctt

SEQ ID NO: 41807 - DNA, 17 bp, Homo sapiens
tggtggaagcctcttga

SEQ ID NO: 41808 - DNA, 16 bp, Homo sapiens
ccagggcaacagagcc

SEQ ID NO: 41809 - DNA, 22 bp, Homo sapiens
cagacacttctacattatgccc

SEQ ID NO: 41810 - DNA, 17 bp, Homo sapiens
cgatgttcaccgtcagg

SEQ ID NO: 41811 - DNA, 17 bp, Homo sapiens
ccactacctgtcagttt

SEQ ID NO: 41812 - DNA, 21 bp, Homo sapiens
ctcaggcctgtgccctctatg

SEQ ID NO: 41813 - DNA, 23 bp, Homo sapiens
gcaatgtaactttttttaatgca

SEQ ID NO: 41814 - DNA, 18 bp, Homo sapiens
ataatgaaacacttgggg

SEQ ID NO: 41815 - DNA, 16 bp, Homo sapiens
gttagccaccacagct

SEQ ID NO: 41816 - DNA, 21 bp, Homo sapiens
catacccatttcttgtataaa

SEQ ID NO: 41817 - DNA, 23 bp, Homo sapiens
ctgtcatggatgccttgtccaca

SEQ ID NO: 41818 - DNA, 16 bp, Homo sapiens
cacaacgtggcttgca

SEQ ID NO: 41819 - DNA, 16 bp, Homo sapiens
taaccagcgagtgtca

SEQ ID NO: 41820 - DNA, 20 bp, Homo sapiens
acaaataccatcggctcatc

SEQ ID NO: 41821 - DNA, 19 bp, Homo sapiens
gcctggagggtgacccctt

SEQ ID NO: 41822 - DNA, 16 bp, Homo sapiens
ccactggtgtttgtgg

SEQ ID NO: 41823 - DNA, 19 bp, Homo sapiens
tccttttacttgtgtgatt

SEQ ID NO: 41824 - DNA, 20 bp, Homo sapiens
aaagagtgcaattcccctga

SEQ ID NO: 41825 - DNA, 20 bp, Homo sapiens
acttactgtgagggggttgc

SEQ ID NO: 41826 - DNA, 24 bp, Homo sapiens
acgttcagggagaaggaagctcca

SEQ ID NO: 41827 - DNA, 22 bp, Homo sapiens
atttgcagtgatgcctcggata

SEQ ID NO: 41828 - DNA, 20 bp, Homo sapiens
ggtctcccaaactcaaaatc

SEQ ID NO: 41829 - DNA, 16 bp, Homo sapiens
gtacgtcagaagcaga

SEQ ID NO: 41830 - DNA, 21 bp, Homo sapiens
ctccttctagagttaagaagc

SEQ ID NO: 41831 - DNA, 18 bp, Homo sapiens
aacgtgagcctgtctgga

SEQ ID NO: 41832 - DNA, 21 bp, Homo sapiens
cgaaccctgcgatgggaagat

SEQ ID NO: 41833 - DNA, 16 bp, Homo sapiens
catccttctggggaac

SEQ ID NO: 41834 - DNA, 20 bp, Homo sapiens
acagacatattagcaaatcc

SEQ ID NO: 41835 - DNA, 18 bp, Homo sapiens
tgcaaggagaaatcacaa

SEQ ID NO: 41836 - DNA, 23 bp, Homo sapiens
cctccagactgtgaagagggatg

SEQ ID NO: 41837 - DNA, 24 bp, Homo sapiens
ccaagcttggtggggaaaggcttc

SEQ ID NO: 41838 - DNA, 21 bp, Homo sapiens
tctcaacatcacagttcaggt

SEQ ID NO: 41839 - DNA, 19 bp, Homo sapiens
ctgccgtggaggtctgggc

SEQ ID NO: 41840 - DNA, 23 bp, Homo sapiens
acatgcaggctcaggctgctatt

SEQ ID NO: 41841 - DNA, 16 bp, Homo sapiens
tctggtgtgaaaccct

SEQ ID NO: 41842 - DNA, 16 bp, Homo sapiens
tgccgcttcatacatg

SEQ ID NO: 41843 - DNA, 16 bp, Homo sapiens
ttggtttgggtacttg

SEQ ID NO: 41844 - DNA, 17 bp, Homo sapiens
cgaagaacctgttgcca

SEQ ID NO: 41845 - DNA, 20 bp, Homo sapiens
tcatactttaggagggacca

SEQ ID NO: 41846 - DNA, 16 bp, Homo sapiens
gggtatctggggggct

SEQ ID NO: 41847 - DNA, 18 bp, Homo sapiens
caggtgctatgaattctt

SEQ ID NO: 41848 - DNA, 19 bp, Homo sapiens
caatgtcacaggaccgatt

SEQ ID NO: 41849 - DNA, 23 bp, Homo sapiens
gagaaaaaataattgaggtttca

SEQ ID NO: 41850 - DNA, 20 bp, Homo sapiens
cctattcctgagatgctgag

SEQ ID NO: 41851 - DNA, 16 bp, Homo sapiens
ttttcagcatcgagcc

SEQ ID NO: 41852 - DNA, 21 bp, Homo sapiens
tctcctgtttcccctctctct

SEQ ID NO: 41853 - DNA, 23 bp, Homo sapiens
gtcagttatttcctaaacatctg

SEQ ID NO: 41854 - DNA, 20 bp, Homo sapiens
tccagcaaatagaattgctg

SEQ ID NO: 41855 - DNA, 19 bp, Homo sapiens
tttgctcttctcctcaaaa

SEQ ID NO: 41856 - DNA, 16 bp, Homo sapiens
cagggacccacagcaa

SEQ ID NO: 41857 - DNA, 21 bp, Homo sapiens
agaggttaaagacatgaacat

SEQ ID NO: 41858 - DNA, 20 bp, Homo sapiens
tttgttccaatgttatgatg

SEQ ID NO: 41859 - DNA, 16 bp, Homo sapiens
gcccccactgccagct

SEQ ID NO: 41860 - DNA, 24 bp, Homo sapiens
aaaaagaaaatacctaactcaaaa

SEQ ID NO: 41861 - DNA, 16 bp, Homo sapiens
cgtccaggatgccttg

SEQ ID NO: 41862 - DNA, 18 bp, Homo sapiens
ttaatgcaagtggtcacc

SEQ ID NO: 41863 - DNA, 16 bp, Homo sapiens
agaccctggtcattgg

SEQ ID NO: 41864 - DNA, 18 bp, Homo sapiens
ggaaattctgtggagacc

SEQ ID NO: 41865 - DNA, 23 bp, Homo sapiens
tgaatagatggttgagcccacaa

SEQ ID NO: 41866 - DNA, 16 bp, Homo sapiens
gtgtgaaccggagcca

SEQ ID NO: 41867 - DNA, 17 bp, Homo sapiens
attatgcataggggtga

SEQ ID NO: 41868 - DNA, 17 bp, Homo sapiens
ttcatcagcctcgccac

SEQ ID NO: 41869 - DNA, 18 bp, Homo sapiens
caggagattgattcgatg

SEQ ID NO: 41870 - DNA, 22 bp, Homo sapiens
ttaaatccagttattgtgactc

SEQ ID NO: 41871 - DNA, 25 bp, Homo sapiens
aaaaacttaaatccaaaatacaata

SEQ ID NO: 41872 - DNA, 18 bp, Homo sapiens
actgtgatcagaggggac

SEQ ID NO: 41873 - DNA, 24 bp, Homo sapiens
tataggaccaatgctctaagaaga

SEQ ID NO: 41874 - DNA, 22 bp, Homo sapiens
taaaactgaggtttaattttta

SEQ ID NO: 41875 - DNA, 21 bp, Homo sapiens
tgcttatgtttctgctcagag

SEQ ID NO: 41876 - DNA, 24 bp, Homo sapiens
ttaacttttaaaactaattctata

SEQ ID NO: 41877 - DNA, 20 bp, Homo sapiens
tctgggaagaactgcagaat

SEQ ID NO: 41878 - DNA, 19 bp, Homo sapiens
agagaagagagagacttgg

SEQ ID NO: 41879 - DNA, 20 bp, Homo sapiens
ccacttcatagcaaaacaga

SEQ ID NO: 41880 - DNA, 18 bp, Homo sapiens
cgtgtgccatcaatgtcg

SEQ ID NO: 41881 - DNA, 23 bp, Homo sapiens
acatcagttcatttagttctaag

SEQ ID NO: 41882 - DNA, 16 bp, Homo sapiens
ggccaccatccgaggc

SEQ ID NO: 41883 - DNA, 16 bp, Homo sapiens
cccagagagaaagaga

SEQ ID NO: 41884 - DNA, 16 bp, Homo sapiens
gcctgtatggttggtg

SEQ ID NO: 41885 - DNA, 19 bp, Homo sapiens
tgcttgaattgcttgtagc

SEQ ID NO: 41886 - DNA, 20 bp, Homo sapiens
tttgactaaggagtttcata

SEQ ID NO: 41887 - DNA, 23 bp, Homo sapiens
aatatcaggctaacaccttccaa

SEQ ID NO: 41888 - DNA, 30 bp, Homo sapiens
tctatatgatagtttatatatttaactcca

SEQ ID NO: 41889 - DNA, 21 bp, Homo sapiens
gtgagttcatttaagggctca

SEQ ID NO: 41890 - DNA, 18 bp, Homo sapiens
acctagactggatatggt

SEQ ID NO: 41891 - DNA, 22 bp, Homo sapiens
aaaagacagtgagtcacagtga

SEQ ID NO: 41892 - DNA, 17 bp, Homo sapiens
ggtgagaccctctggtc

SEQ ID NO: 41893 - DNA, 21 bp, Homo sapiens
aacactagcttcagagggtca

SEQ ID NO: 41894 - DNA, 17 bp, Homo sapiens
cagaccaatgtagtctg

SEQ ID NO: 41895 - DNA, 19 bp, Homo sapiens
cgcagctctggaaggctcc

SEQ ID NO: 41896 - DNA, 16 bp, Homo sapiens
cccagttcttgcaggt

SEQ ID NO: 41897 - DNA, 22 bp, Homo sapiens
ttctccagtggcactgatggca

SEQ ID NO: 41898 - DNA, 20 bp, Homo sapiens
ttctcctttaagatggtgac

SEQ ID NO: 41899 - DNA, 16 bp, Homo sapiens
agcaaatctgtctgac

SEQ ID NO: 41900 - DNA, 19 bp, Homo sapiens
agaggtctctcaaatgaag

SEQ ID NO: 41901 - DNA, 19 bp, Homo sapiens
actcgttttgttcactgta

SEQ ID NO: 41902 - DNA, 18 bp, Homo sapiens
gctccttgaattttggga

SEQ ID NO: 41903 - DNA, 21 bp, Homo sapiens
gtaaatcattaggttgatgtc

SEQ ID NO: 41904 - DNA, 19 bp, Homo sapiens
ttagatggaccaaaaaata

SEQ ID NO: 41905 - DNA, 19 bp, Homo sapiens
ctctttccagtacctccaa

SEQ ID NO: 41906 - DNA, 21 bp, Homo sapiens
aatttatcttctacccaccca

SEQ ID NO: 41907 - DNA, 17 bp, Homo sapiens
gcctcatttcaggtggt

SEQ ID NO: 41908 - DNA, 17 bp, Homo sapiens
agcccatctcagagcca

SEQ ID NO: 41909 - DNA, 21 bp, Homo sapiens
ggagcacttcacatatacttt

SEQ ID NO: 41910 - DNA, 23 bp, Homo sapiens
gaatggacacagggagttgaccc

SEQ ID NO: 41911 - DNA, 21 bp, Homo sapiens
tggaaaaatagaaaaaaggaa

SEQ ID NO: 41912 - DNA, 19 bp, Homo sapiens
acatcattcactcgcacaa

SEQ ID NO: 41913 - DNA, 16 bp, Homo sapiens
tacataccctgtggag

SEQ ID NO: 41914 - DNA, 19 bp, Homo sapiens
cccatatttggagacatgt

SEQ ID NO: 41915 - DNA, 18 bp, Homo sapiens
cattggcaaaatgaccct

SEQ ID NO: 41916 - DNA, 17 bp, Homo sapiens
actggagtgaatcctgc

SEQ ID NO: 41917 - DNA, 21 bp, Homo sapiens
tgagttagacttgaaactgga

SEQ ID NO: 41918 - DNA, 19 bp, Homo sapiens
ggttccatgacagaattta

SEQ ID NO: 41919 - DNA, 16 bp, Homo sapiens
tggttggcagtagcca

SEQ ID NO: 41920 - DNA, 21 bp, Homo sapiens
gctgtctgattatctgaaaca

SEQ ID NO: 41921 - DNA, 20 bp, Homo sapiens
tcatataccacacgcgtggc

SEQ ID NO: 41922 - DNA, 18 bp, Homo sapiens
tttactgttacgtttcta

SEQ ID NO: 41923 - DNA, 22 bp, Homo sapiens
tgttgaaaacttccagaaagaa

SEQ ID NO: 41924 - DNA, 16 bp, Homo sapiens
cgtgtggaccttgtcc

SEQ ID NO: 41925 - DNA, 19 bp, Homo sapiens
catgacagtttccatttgt

SEQ ID NO: 41926 - DNA, 16 bp, Homo sapiens
acatccaggtacctca

SEQ ID NO: 41927 - DNA, 19 bp, Homo sapiens
gcagcaaatccatgccact

SEQ ID NO: 41928 - DNA, 17 bp, Homo sapiens
tgtacaaatttctgctc

SEQ ID NO: 41929 - DNA, 18 bp, Homo sapiens
ccccaatctgagtggacc

SEQ ID NO: 41930 - DNA, 19 bp, Homo sapiens
aaggtggattaattagtgt

SEQ ID NO: 41931 - DNA, 19 bp, Homo sapiens
ccttcacagtgaagtcact

SEQ ID NO: 41932 - DNA, 21 bp, Homo sapiens
gggtctcctgaaaatttgata

SEQ ID NO: 41933 - DNA, 16 bp, Homo sapiens
agagctggtgaaggtg

SEQ ID NO: 41934 - DNA, 22 bp, Homo sapiens
ctttcactttaagaatgtcact

SEQ ID NO: 41935 - DNA, 16 bp, Homo sapiens
gcggacaagtccacct

SEQ ID NO: 41936 - DNA, 23 bp, Homo sapiens
taatattatcacctgtctgacaa

SEQ ID NO: 41937 - DNA, 18 bp, Homo sapiens
actgaaggaacagaagag

SEQ ID NO: 41938 - DNA, 21 bp, Homo sapiens
atgtgagtgagaattgttgca

SEQ ID NO: 41939 - DNA, 16 bp, Homo sapiens
tgcacaccccaaccca

SEQ ID NO: 41940 - DNA, 20 bp, Homo sapiens
gatgcgaaagtgtcctccta

SEQ ID NO: 41941 - DNA, 17 bp, Homo sapiens
cttagctctttctggaa

SEQ ID NO: 41942 - DNA, 18 bp, Homo sapiens
aggaccagtccagatccc

SEQ ID NO: 41943 - DNA, 24 bp, Homo sapiens
atacttccaggtgaatctggtgct

SEQ ID NO: 41944 - DNA, 16 bp, Homo sapiens
cggtctacagtgtcac

SEQ ID NO: 41945 - DNA, 21 bp, Homo sapiens
ttttcctgaaaaaagtcacac

SEQ ID NO: 41946 - DNA, 23 bp, Homo sapiens
caagctgattctggaacggctcg

SEQ ID NO: 41947 - DNA, 18 bp, Homo sapiens
agaagggacaggtgtaaa

SEQ ID NO: 41948 - DNA, 24 bp, Homo sapiens
acagcaagtctaccatcttaagtc

SEQ ID NO: 41949 - DNA, 19 bp, Homo sapiens
cacaccccgccagccagga

SEQ ID NO: 41950 - DNA, 19 bp, Homo sapiens
ggtgtgtactgagatctga

SEQ ID NO: 41951 - DNA, 20 bp, Homo sapiens
ctgattccaccagattgccc

SEQ ID NO: 41952 - DNA, 21 bp, Homo sapiens
atcctcctgcgtcctctccat

SEQ ID NO: 41953 - DNA, 21 bp, Homo sapiens
gagacatagtaccaaagacac

SEQ ID NO: 41954 - DNA, 19 bp, Homo sapiens
cctgttctatgtggatgaa

SEQ ID NO: 41955 - DNA, 20 bp, Homo sapiens
caaaaaggaggatcacctgt

SEQ ID NO: 41956 - DNA, 16 bp, Homo sapiens
aactccccagtgctgg

SEQ ID NO: 41957 - DNA, 21 bp, Homo sapiens
aaagtttgaggtaggcatgtg

SEQ ID NO: 41958 - DNA, 17 bp, Homo sapiens
tcgattgcactgacctc

SEQ ID NO: 41959 - DNA, 21 bp, Homo sapiens
tacgtttgtgtctgcaataat

SEQ ID NO: 41960 - DNA, 21 bp, Homo sapiens
ggactgcaagtgctccctgag

SEQ ID NO: 41961 - DNA, 21 bp, Homo sapiens
agaaggttgatctgatgaacc

SEQ ID NO: 41962 - DNA, 24 bp, Homo sapiens
ctctctcctggctgcatagctcac

SEQ ID NO: 41963 - DNA, 24 bp, Homo sapiens
gaagcaacgcacacaagtctccca

SEQ ID NO: 41964 - DNA, 19 bp, Homo sapiens
gtgggatgtttgtagcctt

SEQ ID NO: 41965 - DNA, 23 bp, Homo sapiens
ctctggagtcaaacttttttgtc

SEQ ID NO: 41966 - DNA, 18 bp, Homo sapiens
ttcaaaacatggtaaaga

SEQ ID NO: 41967 - DNA, 19 bp, Homo sapiens
ataagaccattagtgcctg

SEQ ID NO: 41968 - DNA, 20 bp, Homo sapiens
atacaaaggccacatgaaca

SEQ ID NO: 41969 - DNA, 19 bp, Homo sapiens
agctgactgaattcccacc

SEQ ID NO: 41970 - DNA, 18 bp, Homo sapiens
ctgcttcttgcactaata

SEQ ID NO: 41971 - DNA, 22 bp, Homo sapiens
gtgagactccagtcacaggtgg

SEQ ID NO: 41972 - DNA, 16 bp, Homo sapiens
cagagcctatggcagg

SEQ ID NO: 41973 - DNA, 23 bp, Homo sapiens
ggacacaatcatcttcaggatct

SEQ ID NO: 41974 - DNA, 18 bp, Homo sapiens
agttatttgtctctctgg

SEQ ID NO: 41975 - DNA, 18 bp, Homo sapiens
gtgtccattcatacctga

SEQ ID NO: 41976 - DNA, 21 bp, Homo sapiens
ccccggctgcccagaagggct

SEQ ID NO: 41977 - DNA, 24 bp, Homo sapiens
gaaacaccttgggcagatcacagc

SEQ ID NO: 41978 - DNA, 16 bp, Homo sapiens
ggagcccttctgtggc

SEQ ID NO: 41979 - DNA, 19 bp, Homo sapiens
gagcaataccaatacctac

SEQ ID NO: 41980 - DNA, 20 bp, Homo sapiens
tctattttatctgaactgca

SEQ ID NO: 41981 - DNA, 16 bp, Homo sapiens
gatctagccgatagcc

SEQ ID NO: 41982 - DNA, 19 bp, Homo sapiens
taaaatcctcatgcacaca

SEQ ID NO: 41983 - DNA, 17 bp, Homo sapiens
ctgacggaggctgaacc

SEQ ID NO: 41984 - DNA, 24 bp, Homo sapiens
ttacttactcaaggttgcatgggt

SEQ ID NO: 41985 - DNA, 16 bp, Homo sapiens
ttggaaacttctgggc

SEQ ID NO: 41986 - DNA, 20 bp, Homo sapiens
tcccaagcacagtgcagtgc

SEQ ID NO: 41987 - DNA, 16 bp, Homo sapiens
ctggaacccctttggt

SEQ ID NO: 41988 - DNA, 20 bp, Homo sapiens
tttttactctgttatcacct

SEQ ID NO: 41989 - DNA, 23 bp, Homo sapiens
tttttcctttgtaatagattcaa

SEQ ID NO: 41990 - DNA, 21 bp, Homo sapiens
agaccatgatgaaaaagacaa

SEQ ID NO: 41991 - DNA, 16 bp, Homo sapiens
gggagtgggagaactg

SEQ ID NO: 41992 - DNA, 21 bp, Homo sapiens
caaatccaagccggagaagga

SEQ ID NO: 41993 - DNA, 17 bp, Homo sapiens
cagccaatccctgcaaa

SEQ ID NO: 41994 - DNA, 19 bp, Homo sapiens
aactcctcaatggttgttt

SEQ ID NO: 41995 - DNA, 16 bp, Homo sapiens
tttaggtgctgaatgt

SEQ ID NO: 41996 - DNA, 19 bp, Homo sapiens
agcataaagaccaccccca

SEQ ID NO: 41997 - DNA, 19 bp, Homo sapiens
tcttagattgtctctctgg

SEQ ID NO: 41998 - DNA, 18 bp, Homo sapiens
caccagatgggctgtggc

SEQ ID NO: 41999 - DNA, 19 bp, Homo sapiens
aagcattgaaaagttaaaa

SEQ ID NO: 42000 - DNA, 20 bp, Homo sapiens
ggaagaagtttcctctgcct

SEQ ID NO: 42001 - DNA, 24 bp, Homo sapiens
atcttcacaatgctgttaaagaga

SEQ ID NO: 42002 - DNA, 16 bp, Homo sapiens
cacttacctacgggag

SEQ ID NO: 42003 - DNA, 16 bp, Homo sapiens
caggtcgccagactcc

SEQ ID NO: 42004 - DNA, 16 bp, Homo sapiens
gcagggggatgaggat

SEQ ID NO: 42005 - DNA, 17 bp, Homo sapiens
gctccatgggactggaa

SEQ ID NO: 42006 - DNA, 16 bp, Homo sapiens
tggagctgttgggtgg

SEQ ID NO: 42007 - DNA, 18 bp, Homo sapiens
gatctggtgcttctcccg

SEQ ID NO: 42008 - DNA, 16 bp, Homo sapiens
ctggtttgactcctgg

SEQ ID NO: 42009 - DNA, 21 bp, Homo sapiens
gtgttgtgaatctggacacca

SEQ ID NO: 42010 - DNA, 24 bp, Homo sapiens
tagtattgatcatgatatgcttat

SEQ ID NO: 42011 - DNA, 18 bp, Homo sapiens
caggtagtacatggctcc

SEQ ID NO: 42012 - DNA, 16 bp, Homo sapiens
agcagttcagacactt

SEQ ID NO: 42013 - DNA, 20 bp, Homo sapiens
cttcatccctattctgctcc

SEQ ID NO: 42014 - DNA, 16 bp, Homo sapiens
gctgaggtaactgggt

SEQ ID NO: 42015 - DNA, 19 bp, Homo sapiens
gttcacattcaaacaagtt

SEQ ID NO: 42016 - DNA, 16 bp, Homo sapiens
agccaagcttccttgc

SEQ ID NO: 42017 - DNA, 22 bp, Homo sapiens
taaactatctgtaaaacatgag

SEQ ID NO: 42018 - DNA, 18 bp, Homo sapiens
ggctcagtgggttctttg

SEQ ID NO: 42019 - DNA, 20 bp, Homo sapiens
gtatgggactggcaacagag

SEQ ID NO: 42020 - DNA, 18 bp, Homo sapiens
gttcagtgattcaggcct

SEQ ID NO: 42021 - DNA, 21 bp, Homo sapiens
gttcctctgaccaactgaaat

SEQ ID NO: 42022 - DNA, 21 bp, Homo sapiens
gcataagaatcaggttgttct

SEQ ID NO: 42023 - DNA, 16 bp, Homo sapiens
tgtctctggagccaca

SEQ ID NO: 42024 - DNA, 17 bp, Homo sapiens
cagttctccatttgggt

SEQ ID NO: 42025 - DNA, 23 bp, Homo sapiens
gttgaattggctagtgttataaa

SEQ ID NO: 42026 - DNA, 17 bp, Homo sapiens
gggactggaactgactg

SEQ ID NO: 42027 - DNA, 18 bp, Homo sapiens
cacctaggttagcaaagg

SEQ ID NO: 42028 - DNA, 19 bp, Homo sapiens
cgatctacatgtcttacag

SEQ ID NO: 42029 - DNA, 24 bp, Homo sapiens
tgaaaggttgtccttcctgtgacc

SEQ ID NO: 42030 - DNA, 25 bp, Homo sapiens
tctttcaccttgtaatttaaaataa

SEQ ID NO: 42031 - DNA, 17 bp, Homo sapiens
ctgtaccctggggtggc

SEQ ID NO: 42032 - DNA, 17 bp, Homo sapiens
actctatctggctctag

SEQ ID NO: 42033 - DNA, 17 bp, Homo sapiens
gccctcgattgcctgta

SEQ ID NO: 42034 - DNA, 24 bp, Homo sapiens
aagctaagagccttcctgaaagga

SEQ ID NO: 42035 - DNA, 19 bp, Homo sapiens
cactcgggctccaggaaaa

SEQ ID NO: 42036 - DNA, 22 bp, Homo sapiens
gagtaagccagtcaaatagatg

SEQ ID NO: 42037 - DNA, 18 bp, Homo sapiens
ttaattcgctttaggcat

SEQ ID NO: 42038 - DNA, 24 bp, Homo sapiens
gattaaagatattcagagtttatt

SEQ ID NO: 42039 - DNA, 22 bp, Homo sapiens
atatacccacacacatatacat

SEQ ID NO: 42040 - DNA, 19 bp, Homo sapiens
acacgtgtctaatatcaca

SEQ ID NO: 42041 - DNA, 19 bp, Homo sapiens
caggagacttttttgacaa

SEQ ID NO: 42042 - DNA, 22 bp, Homo sapiens
gatgagtcagaaggggcaaagc

SEQ ID NO: 42043 - DNA, 20 bp, Homo sapiens
tgcagaaatattatctgtgt

SEQ ID NO: 42044 - DNA, 19 bp, Homo sapiens
tcctagagcatctaaaact

SEQ ID NO: 42045 - DNA, 17 bp, Homo sapiens
aggtcatattctggtct

SEQ ID NO: 42046 - DNA, 17 bp, Homo sapiens
cctgggcagaattgtca

SEQ ID NO: 42047 - DNA, 18 bp, Homo sapiens
actgttgctggacttaga

SEQ ID NO: 42048 - DNA, 16 bp, Homo sapiens
cccagtttctggaaac

SEQ ID NO: 42049 - DNA, 22 bp, Homo sapiens
ctaaacaggatcttttcctata

SEQ ID NO: 42050 - DNA, 20 bp, Homo sapiens
ctatgattgtagggacagct

SEQ ID NO: 42051 - DNA, 19 bp, Homo sapiens
aaacagaactttgtctttt

SEQ ID NO: 42052 - DNA, 22 bp, Homo sapiens
gggaaggaggggccaacattga

SEQ ID NO: 42053 - DNA, 17 bp, Homo sapiens
ttcccaatcttcctttc

SEQ ID NO: 42054 - DNA, 20 bp, Homo sapiens
agtgtgtctggtataggaaa

SEQ ID NO: 42055 - DNA, 16 bp, Homo sapiens
agttatccaagggagc

SEQ ID NO: 42056 - DNA, 20 bp, Homo sapiens
tgttacaggctcccagaatg

SEQ ID NO: 42057 - DNA, 22 bp, Homo sapiens
tatatgtttaacattttccgtc

SEQ ID NO: 42058 - DNA, 16 bp, Homo sapiens
aatggcctggcccaga

SEQ ID NO: 42059 - DNA, 26 bp, Homo sapiens
agagagataggtaatataaaatgaag

SEQ ID NO: 42060 - DNA, 16 bp, Homo sapiens
attacaggtttgggtg

SEQ ID NO: 42061 - DNA, 23 bp, Homo sapiens
ctttcctttgttaaatactgaga

SEQ ID NO: 42062 - DNA, 22 bp, Homo sapiens
agtttctatatgagctgtttca

SEQ ID NO: 42063 - DNA, 18 bp, Homo sapiens
ggaccatggtcttgggac

SEQ ID NO: 42064 - DNA, 22 bp, Homo sapiens
attattattatcctcatgagaa

SEQ ID NO: 42065 - DNA, 16 bp, Homo sapiens
gtgagttgtctggtca

SEQ ID NO: 42066 - DNA, 22 bp, Homo sapiens
gaaagaaatggataagacttta

SEQ ID NO: 42067 - DNA, 19 bp, Homo sapiens
ttctctagcaaatttggtt

SEQ ID NO: 42068 - DNA, 17 bp, Homo sapiens
tccacatggcactgcag

SEQ ID NO: 42069 - DNA, 18 bp, Homo sapiens
attaccctaagcatttgc

SEQ ID NO: 42070 - DNA, 17 bp, Homo sapiens
tgggttactccttgctc

SEQ ID NO: 42071 - DNA, 21 bp, Homo sapiens
ttaaaaaaacagatatatggt

SEQ ID NO: 42072 - DNA, 24 bp, Homo sapiens
cttttgttttcatttttttttaaa

SEQ ID NO: 42073 - DNA, 18 bp, Homo sapiens
catgtggacgaacttaca

SEQ ID NO: 42074 - DNA, 17 bp, Homo sapiens
ttcctctgagttttgtg

SEQ ID NO: 42075 - DNA, 21 bp, Homo sapiens
cagcttcccatctgcctattt

SEQ ID NO: 42076 - DNA, 16 bp, Homo sapiens
catccgccttcagcca

SEQ ID NO: 42077 - DNA, 18 bp, Homo sapiens
aagtttgctgaagcccag

SEQ ID NO: 42078 - DNA, 21 bp, Homo sapiens
gattatcactggaagattgga

SEQ ID NO: 42079 - DNA, 17 bp, Homo sapiens
gtgccaactgcttacaa

SEQ ID NO: 42080 - DNA, 23 bp, Homo sapiens
agctaagtccattaaattaaaaa

SEQ ID NO: 42081 - DNA, 21 bp, Homo sapiens
gtatgtaactagttaaacaca

SEQ ID NO: 42082 - DNA, 24 bp, Homo sapiens
tttgccatattgagtatatacaac

SEQ ID NO: 42083 - DNA, 21 bp, Homo sapiens
gcatcaaaatcaaaagtttcc

SEQ ID NO: 42084 - DNA, 20 bp, Homo sapiens
acccttgaccttactgttgt

SEQ ID NO: 42085 - DNA, 19 bp, Homo sapiens
agcacgttaaaaatgaacc

SEQ ID NO: 42086 - DNA, 16 bp, Homo sapiens
tccaaggcgcagacac

SEQ ID NO: 42087 - DNA, 21 bp, Homo sapiens
gttaaattttcccactcataa

SEQ ID NO: 42088 - DNA, 19 bp, Homo sapiens
cctcctgtgtttgtgaata

SEQ ID NO: 42089 - DNA, 22 bp, Homo sapiens
agattcacaattattcctattt

SEQ ID NO: 42090 - DNA, 19 bp, Homo sapiens
agggtgacatgagtaaata

SEQ ID NO: 42091 - DNA, 18 bp, Homo sapiens
acttggtgaacgatgggt

SEQ ID NO: 42092 - DNA, 20 bp, Homo sapiens
aacgttcaaaattcatcttt

SEQ ID NO: 42093 - DNA, 18 bp, Homo sapiens
gctggtaagcagtccaaa

SEQ ID NO: 42094 - DNA, 22 bp, Homo sapiens
ccattttcttttaacccggtca

SEQ ID NO: 42095 - DNA, 17 bp, Homo sapiens
ctgtctgaagcacatga

SEQ ID NO: 42096 - DNA, 16 bp, Homo sapiens
agcacacccttagact

SEQ ID NO: 42097 - DNA, 18 bp, Homo sapiens
tgctagctttgggaattc

SEQ ID NO: 42098 - DNA, 20 bp, Homo sapiens
gtacagctatctcgtggtcc

SEQ ID NO: 42099 - DNA, 20 bp, Homo sapiens
tccttggttagctctgtttt

SEQ ID NO: 42100 - DNA, 17 bp, Homo sapiens
ccaggaagtacagaccc

SEQ ID NO: 42101 - DNA, 22 bp, Homo sapiens
agggaccttttagaaagcatat

SEQ ID NO: 42102 - DNA, 16 bp, Homo sapiens
ggagtgttccctgtga

SEQ ID NO: 42103 - DNA, 19 bp, Homo sapiens
cacagcaaaaattgctcta

SEQ ID NO: 42104 - DNA, 17 bp, Homo sapiens
tggctctcaattggaga

SEQ ID NO: 42105 - DNA, 18 bp, Homo sapiens
tcctgtctggtcttccta

SEQ ID NO: 42106 - DNA, 22 bp, Homo sapiens
tctatgcagcctgagatttctt

SEQ ID NO: 42107 - DNA, 22 bp, Homo sapiens
caaatccaagaaaacaggaaag

SEQ ID NO: 42108 - DNA, 24 bp, Homo sapiens
aatttaatgtcttacattaccccc

SEQ ID NO: 42109 - DNA, 17 bp, Homo sapiens
cacgttcaccaggtgta

SEQ ID NO: 42110 - DNA, 21 bp, Homo sapiens
aactcctttatacagcatcta

SEQ ID NO: 42111 - DNA, 18 bp, Homo sapiens
tagcaagccagtatctag

SEQ ID NO: 42112 - DNA, 16 bp, Homo sapiens
ggtagccttgcagggg

SEQ ID NO: 42113 - DNA, 17 bp, Homo sapiens
cacttttacacctgtcc

SEQ ID NO: 42114 - DNA, 19 bp, Homo sapiens
accaatgttttttttcact

SEQ ID NO: 42115 - DNA, 19 bp, Homo sapiens
gattgtgggtcaatacata

SEQ ID NO: 42116 - DNA, 19 bp, Homo sapiens
ggcaggttaaatattgctt

SEQ ID NO: 42117 - DNA, 21 bp, Homo sapiens
aatgactgtgatccacgttcc

SEQ ID NO: 42118 - DNA, 16 bp, Homo sapiens
actctggggatgtggt

SEQ ID NO: 42119 - DNA, 23 bp, Homo sapiens
agtatttttaactcaattttttg

SEQ ID NO: 42120 - DNA, 17 bp, Homo sapiens
gtggacagaatgactgc

SEQ ID NO: 42121 - DNA, 26 bp, Homo sapiens
acaaccaaaatattactttaagtttc

SEQ ID NO: 42122 - DNA, 19 bp, Homo sapiens
gctatgctgctccaatcaa

SEQ ID NO: 42123 - DNA, 17 bp, Homo sapiens
aattccttcaaaacaca

SEQ ID NO: 42124 - DNA, 24 bp, Homo sapiens
tatgtaaacaaaatgataattttt

SEQ ID NO: 42125 - DNA, 23 bp, Homo sapiens
ctcatcagagagatcagccaggc

SEQ ID NO: 42126 - DNA, 21 bp, Homo sapiens
cagtgacattttacaatctta

SEQ ID NO: 42127 - DNA, 26 bp, Homo sapiens
aaaacattgaactaattaaattagaa

SEQ ID NO: 42128 - DNA, 16 bp, Homo sapiens
aacagttgattccccg

SEQ ID NO: 42129 - DNA, 17 bp, Homo sapiens
accaattttgttggcaa

SEQ ID NO: 42130 - DNA, 24 bp, Homo sapiens
tttatgtatagtgtgtactaaaat

SEQ ID NO: 42131 - DNA, 16 bp, Homo sapiens
tctagggggctttgaa

SEQ ID NO: 42132 - DNA, 21 bp, Homo sapiens
tccatcataaacattgtatcc

SEQ ID NO: 42133 - DNA, 20 bp, Homo sapiens
gtctaattctttccgaggat

SEQ ID NO: 42134 - DNA, 20 bp, Homo sapiens
acaacatctttaattttgcc

SEQ ID NO: 42135 - DNA, 18 bp, Homo sapiens
tggcaccatgtagttgta

SEQ ID NO: 42136 - DNA, 20 bp, Homo sapiens
acctttctaccatattcaaa

SEQ ID NO: 42137 - DNA, 18 bp, Homo sapiens
gaaagaatctctgtgcct

SEQ ID NO: 42138 - DNA, 22 bp, Homo sapiens
agtttttatgtggatcaatatc

SEQ ID NO: 42139 - DNA, 20 bp, Homo sapiens
gaagaaaatgattttctggc

SEQ ID NO: 42140 - DNA, 21 bp, Homo sapiens
ggccttgataagagtctgatt

SEQ ID NO: 42141 - DNA, 17 bp, Homo sapiens
tcagtaccactaaaaca

SEQ ID NO: 42142 - DNA, 20 bp, Homo sapiens
gtgccattgttatagctcat

SEQ ID NO: 42143 - DNA, 20 bp, Homo sapiens
acattaaatacattgatcca

SEQ ID NO: 42144 - DNA, 19 bp, Homo sapiens
aggtctgattatggagacc

SEQ ID NO: 42145 - DNA, 19 bp, Homo sapiens
tgggaaggtattgtgaaaa

SEQ ID NO: 42146 - DNA, 21 bp, Homo sapiens
atccatacaattagaccttct

SEQ ID NO: 42147 - DNA, 22 bp, Homo sapiens
tttatgtatacctgaccaatca

SEQ ID NO: 42148 - DNA, 23 bp, Homo sapiens
tggaggtttctcattctataatt

SEQ ID NO: 42149 - DNA, 18 bp, Homo sapiens
tgggctggaaatacatgt

SEQ ID NO: 42150 - DNA, 21 bp, Homo sapiens
agttgaaaatgaagttttgtt

SEQ ID NO: 42151 - DNA, 17 bp, Homo sapiens
atggaggtgaatgtaca

SEQ ID NO: 42152 - DNA, 24 bp, Homo sapiens
acacaggcaactgtaagaaaatga

SEQ ID NO: 42153 - DNA, 19 bp, Homo sapiens
gcaaaaggtggctcaaatg

SEQ ID NO: 42154 - DNA, 19 bp, Homo sapiens
tcaaacaggacacagactg

SEQ ID NO: 42155 - DNA, 17 bp, Homo sapiens
gctgtatccgacaagtt

SEQ ID NO: 42156 - DNA, 18 bp, Homo sapiens
aagttgtgccatttactg

SEQ ID NO: 42157 - DNA, 20 bp, Homo sapiens
ttggaggagtatcttcttta

SEQ ID NO: 42158 - DNA, 20 bp, Homo sapiens
gctgtcccatcacagtcacc

SEQ ID NO: 42159 - DNA, 16 bp, Homo sapiens
aaaggcctccactaaa

SEQ ID NO: 42160 - DNA, 26 bp, Homo sapiens
tgtaattcttgattatttatgataac

SEQ ID NO: 42161 - DNA, 17 bp, Homo sapiens
taaaagcaggaagagtt

SEQ ID NO: 42162 - DNA, 16 bp, Homo sapiens
tgccatgggatttaca

SEQ ID NO: 42163 - DNA, 19 bp, Homo sapiens
tggcgacagaactatcatt

SEQ ID NO: 42164 - DNA, 22 bp, Homo sapiens
tatttgtgtccagagaactcat

SEQ ID NO: 42165 - DNA, 19 bp, Homo sapiens
tgcaggtgattttttatgc

SEQ ID NO: 42166 - DNA, 18 bp, Homo sapiens
caggtagccttctgcacc

SEQ ID NO: 42167 - DNA, 20 bp, Homo sapiens
acagcaaaagttttcaatgg

SEQ ID NO: 42168 - DNA, 20 bp, Homo sapiens
atagttactttttggagagt

SEQ ID NO: 42169 - DNA, 18 bp, Homo sapiens
gctcaagatctgttactt

SEQ ID NO: 42170 - DNA, 20 bp, Homo sapiens
acggaactatttactaaaga

SEQ ID NO: 42171 - DNA, 18 bp, Homo sapiens
agaatatctagggcttct

SEQ ID NO: 42172 - DNA, 18 bp, Homo sapiens
gctgcagatggtatccta

SEQ ID NO: 42173 - DNA, 22 bp, Homo sapiens
aaagcatcaaatgtttacatat

SEQ ID NO: 42174 - DNA, 18 bp, Homo sapiens
gcttcctttcatgttcga

SEQ ID NO: 42175 - DNA, 23 bp, Homo sapiens
tagactattaggaattcattctg

SEQ ID NO: 42176 - DNA, 19 bp, Homo sapiens
ccctcagctttatccataa

SEQ ID NO: 42177 - DNA, 20 bp, Homo sapiens
ttttaagtgttgtgcagcat

SEQ ID NO: 42178 - DNA, 22 bp, Homo sapiens
tgtatttatgagcaatgttttt

SEQ ID NO: 42179 - DNA, 17 bp, Homo sapiens
tgtgtcttttttcgaac

SEQ ID NO: 42180 - DNA, 16 bp, Homo sapiens
caagcaactcttgggc

SEQ ID NO: 42181 - DNA, 19 bp, Homo sapiens
gcttctgaaagatggatca

SEQ ID NO: 42182 - DNA, 21 bp, Homo sapiens
attttcaggtactaagagacc

SEQ ID NO: 42183 - DNA, 18 bp, Homo sapiens
tgtgatcttggaaaagcc

SEQ ID NO: 42184 - DNA, 20 bp, Homo sapiens
aagctccaatcctttttcca

SEQ ID NO: 42185 - DNA, 16 bp, Homo sapiens
agccacaaatagcagc

SEQ ID NO: 42186 - DNA, 18 bp, Homo sapiens
cagggtagtcgtatgttt

SEQ ID NO: 42187 - DNA, 20 bp, Homo sapiens
gaggtttcaaagatccaaag

SEQ ID NO: 42188 - DNA, 22 bp, Homo sapiens
actttccgttctgctggttttg

SEQ ID NO: 42189 - DNA, 17 bp, Homo sapiens
gccaagaagcatcagcc

SEQ ID NO: 42190 - DNA, 20 bp, Homo sapiens
ctgtgaagtataatgtcaaa

SEQ ID NO: 42191 - DNA, 18 bp, Homo sapiens
tacctcatggatacacct

SEQ ID NO: 42192 - DNA, 20 bp, Homo sapiens
atgtacttttttacttctca

SEQ ID NO: 42193 - DNA, 17 bp, Homo sapiens
gtgatcctgaacatgac

SEQ ID NO: 42194 - DNA, 17 bp, Homo sapiens
tttgtggacagcaaaat

SEQ ID NO: 42195 - DNA, 17 bp, Homo sapiens
cacagctgcaattgtac

SEQ ID NO: 42196 - DNA, 24 bp, Homo sapiens
tccagtggttcctagaggacagaa

SEQ ID NO: 42197 - DNA, 19 bp, Homo sapiens
tcagggcaatacatagtat

SEQ ID NO: 42198 - DNA, 16 bp, Homo sapiens
acagtggtgtggaggg

SEQ ID NO: 42199 - DNA, 24 bp, Homo sapiens
tttgaatcacaattcattttgatc

SEQ ID NO: 42200 - DNA, 16 bp, Homo sapiens
cctttccacccagtgg

SEQ ID NO: 42201 - DNA, 21 bp, Homo sapiens
ttttagttgccttcacctgtc

SEQ ID NO: 42202 - DNA, 16 bp, Homo sapiens
tgaaatgtggcaatgg

SEQ ID NO: 42203 - DNA, 23 bp, Homo sapiens
aatatgtgcatctgtttgtgttc

SEQ ID NO: 42204 - DNA, 16 bp, Homo sapiens
gggccacccaaatgct

SEQ ID NO: 42205 - DNA, 22 bp, Homo sapiens
ttagagtgcaaacaacctgcta

SEQ ID NO: 42206 - DNA, 18 bp, Homo sapiens
ggctgtattttcactctt

SEQ ID NO: 42207 - DNA, 19 bp, Homo sapiens
cactctctatgcatgtccc

SEQ ID NO: 42208 - DNA, 24 bp, Homo sapiens
accttcttcttgttttttctattt

SEQ ID NO: 42209 - DNA, 16 bp, Homo sapiens
aacactgcgtccagca

SEQ ID NO: 42210 - DNA, 28 bp, Homo sapiens
taaaatttacatgtattactttattttg

SEQ ID NO: 42211 - DNA, 17 bp, Homo sapiens
ccatccttctcagtgcg

SEQ ID NO: 42212 - DNA, 19 bp, Homo sapiens
tctcttaccaaatggagca

SEQ ID NO: 42213 - DNA, 20 bp, Homo sapiens
tgaaagcaatccatatagct

SEQ ID NO: 42214 - DNA, 19 bp, Homo sapiens
ggttggtctcaatgtcttc

SEQ ID NO: 42215 - DNA, 16 bp, Homo sapiens
ttccctcaacatttga

SEQ ID NO: 42216 - DNA, 22 bp, Homo sapiens
taggttttttttccctttcgaa

SEQ ID NO: 42217 - DNA, 21 bp, Homo sapiens
accatttttaaaatctgctcc

SEQ ID NO: 42218 - DNA, 19 bp, Homo sapiens
gggaaataacaaaagagta

SEQ ID NO: 42219 - DNA, 22 bp, Homo sapiens
cctacataaaactgactgaaga

SEQ ID NO: 42220 - DNA, 22 bp, Homo sapiens
tggtatcatgttatttcttcaa

SEQ ID NO: 42221 - DNA, 20 bp, Homo sapiens
atttttatgatcatctacct

SEQ ID NO: 42222 - DNA, 18 bp, Homo sapiens
ctgttcatctgggcaagt

SEQ ID NO: 42223 - DNA, 21 bp, Homo sapiens
aatagtctgtgaacttcgtgg

SEQ ID NO: 42224 - DNA, 16 bp, Homo sapiens
gtctggcatagcaagc

SEQ ID NO: 42225 - DNA, 20 bp, Homo sapiens
gacaatatactagtgctctc

SEQ ID NO: 42226 - DNA, 16 bp, Homo sapiens
gcgatgacttcctggc

SEQ ID NO: 42227 - DNA, 20 bp, Homo sapiens
cagccagccctcttggaaga

SEQ ID NO: 42228 - DNA, 20 bp, Homo sapiens
gaactcctgaatttcctctc

SEQ ID NO: 42229 - DNA, 17 bp, Homo sapiens
gaggggctcgctcctga

SEQ ID NO: 42230 - DNA, 24 bp, Homo sapiens
tgtattataacttaccatactgat

SEQ ID NO: 42231 - DNA, 18 bp, Homo sapiens
tgccattgagcaggccca

SEQ ID NO: 42232 - DNA, 18 bp, Homo sapiens
ctgggaataacaacagcc

SEQ ID NO: 42233 - DNA, 21 bp, Homo sapiens
gaactgctaagtactttggac

SEQ ID NO: 42234 - DNA, 17 bp, Homo sapiens
ctcagcactgcaaaata

SEQ ID NO: 42235 - DNA, 22 bp, Homo sapiens
tgcatctaggcaaaggtctttt

SEQ ID NO: 42236 - DNA, 16 bp, Homo sapiens
cagacatcagcttcca

SEQ ID NO: 42237 - DNA, 20 bp, Homo sapiens
aagtattcttaaaggagcga

SEQ ID NO: 42238 - DNA, 16 bp, Homo sapiens
caaggttcagtggcac

SEQ ID NO: 42239 - DNA, 25 bp, Homo sapiens
ctgtccagtaaaaaatatcaagtta

SEQ ID NO: 42240 - DNA, 21 bp, Homo sapiens
acaaatacatgtacaggttta

SEQ ID NO: 42241 - DNA, 22 bp, Homo sapiens
cttcaggtggaattcataatgg

SEQ ID NO: 42242 - DNA, 24 bp, Homo sapiens
ttaatgtaatagtaaacagactat

SEQ ID NO: 42243 - DNA, 22 bp, Homo sapiens
gaggtgtatccaaaggcatctg

SEQ ID NO: 42244 - DNA, 17 bp, Homo sapiens
ttcctgttgagtcactt

SEQ ID NO: 42245 - DNA, 17 bp, Homo sapiens
catatgggaggtctgga

SEQ ID NO: 42246 - DNA, 20 bp, Homo sapiens
cccagaagaagatttgatgt

SEQ ID NO: 42247 - DNA, 17 bp, Homo sapiens
catgtggaaatggtgcc

SEQ ID NO: 42248 - DNA, 22 bp, Homo sapiens
agtgatttctatcctcttcacc

SEQ ID NO: 42249 - DNA, 16 bp, Homo sapiens
tgagtgtccaaggctg

SEQ ID NO: 42250 - DNA, 16 bp, Homo sapiens
catcagtgcagagggg

SEQ ID NO: 42251 - DNA, 20 bp, Homo sapiens
tcagttgtttcctaatgaat

SEQ ID NO: 42252 - DNA, 16 bp, Homo sapiens
ttggaacacaggtggc

SEQ ID NO: 42253 - DNA, 26 bp, Homo sapiens
agatgcaattataattttatttgcat

SEQ ID NO: 42254 - DNA, 18 bp, Homo sapiens
gcttgcctgaatacagcc

SEQ ID NO: 42255 - DNA, 23 bp, Homo sapiens
attcaaaagttgaaacagaaaag

SEQ ID NO: 42256 - DNA, 20 bp, Homo sapiens
ttaccacatgtgtgcatcat

SEQ ID NO: 42257 - DNA, 16 bp, Homo sapiens
aactgccacgtccctt

SEQ ID NO: 42258 - DNA, 21 bp, Homo sapiens
tcgtctctcagaggacaatac

SEQ ID NO: 42259 - DNA, 19 bp, Homo sapiens
cttcaagtaaacaacaaag

SEQ ID NO: 42260 - DNA, 17 bp, Homo sapiens
taggttgggaatcagga

SEQ ID NO: 42261 - DNA, 23 bp, Homo sapiens
tgcaaatgttcaaattcataaga

SEQ ID NO: 42262 - DNA, 22 bp, Homo sapiens
ggcacagatgatgagcacacca

SEQ ID NO: 42263 - DNA, 18 bp, Homo sapiens
tgttgttactttttctac

SEQ ID NO: 42264 - DNA, 20 bp, Homo sapiens
tcatcgatgatgaagaattc

SEQ ID NO: 42265 - DNA, 19 bp, Homo sapiens
ccaattacagaaccaaaca

SEQ ID NO: 42266 - DNA, 16 bp, Homo sapiens
acaggacctgctttct

SEQ ID NO: 42267 - DNA, 17 bp, Homo sapiens
gacaaaactagccaaca

SEQ ID NO: 42268 - DNA, 21 bp, Homo sapiens
acattgattcaaaatatgcct

SEQ ID NO: 42269 - DNA, 19 bp, Homo sapiens
tttaatcatccctaaagca

SEQ ID NO: 42270 - DNA, 18 bp, Homo sapiens
acctccagtacagaagaa

SEQ ID NO: 42271 - DNA, 22 bp, Homo sapiens
tacaaggaatctgttcaattaa

SEQ ID NO: 42272 - DNA, 17 bp, Homo sapiens
aacgcctgttggcagcc

SEQ ID NO: 42273 - DNA, 20 bp, Homo sapiens
atctgaaatactgagggcac

SEQ ID NO: 42274 - DNA, 18 bp, Homo sapiens
tactcctttcttgccaaa

SEQ ID NO: 42275 - DNA, 20 bp, Homo sapiens
ggcatgggaaatctctgtgt

SEQ ID NO: 42276 - DNA, 20 bp, Homo sapiens
tgttgtgatccagaaagtac

SEQ ID NO: 42277 - DNA, 24 bp, Homo sapiens
atttcaatcatacaaacaactcca

SEQ ID NO: 42278 - DNA, 18 bp, Homo sapiens
tacttggggaggttgagg

SEQ ID NO: 42279 - DNA, 22 bp, Homo sapiens
ctaattacagcattaacacaaa

SEQ ID NO: 42280 - DNA, 16 bp, Homo sapiens
atcacaccactgcgct

SEQ ID NO: 42281 - DNA, 20 bp, Homo sapiens
gaaggccatcagttaaatat

SEQ ID NO: 42282 - DNA, 19 bp, Homo sapiens
aacaaacaaaatttcagca

SEQ ID NO: 42283 - DNA, 20 bp, Homo sapiens
tttcttaaaggtaatgggaa

SEQ ID NO: 42284 - DNA, 17 bp, Homo sapiens
ggggtgaatgcatttgt

SEQ ID NO: 42285 - DNA, 24 bp, Homo sapiens
ttgtgtttaattattgttaaccaa

SEQ ID NO: 42286 - DNA, 16 bp, Homo sapiens
agaatttccacaccca

SEQ ID NO: 42287 - DNA, 21 bp, Homo sapiens
taattatctaatagcactcct

SEQ ID NO: 42288 - DNA, 19 bp, Homo sapiens
tgctttccacaattattcc

SEQ ID NO: 42289 - DNA, 19 bp, Homo sapiens
agagaaactacaaagaact

SEQ ID NO: 42290 - DNA, 20 bp, Homo sapiens
cagaactgttaccatctact

SEQ ID NO: 42291 - DNA, 26 bp, Homo sapiens
gaaaaattctctcacaatatttaaat

SEQ ID NO: 42292 - DNA, 18 bp, Homo sapiens
ttcaatgggaattcctat

SEQ ID NO: 42293 - DNA, 21 bp, Homo sapiens
acatgacatacaagaagtcaa

SEQ ID NO: 42294 - DNA, 24 bp, Homo sapiens
taatgctatcagaacatattaata

SEQ ID NO: 42295 - DNA, 25 bp, Homo sapiens
taaactgtttgtttttatagtcaag

SEQ ID NO: 42296 - DNA, 20 bp, Homo sapiens
accttttcaaatgaatgcta

SEQ ID NO: 42297 - DNA, 18 bp, Homo sapiens
acttcaaaaagggcagtt

SEQ ID NO: 42298 - DNA, 25 bp, Homo sapiens
tacactttatatctaaagttcttaa

SEQ ID NO: 42299 - DNA, 24 bp, Homo sapiens
aactgaaagtattcgatcagaatt

SEQ ID NO: 42300 - DNA, 17 bp, Homo sapiens
cagtggcatagtgtcat

SEQ ID NO: 42301 - DNA, 24 bp, Homo sapiens
tgctagtacccatcactaagttta

SEQ ID NO: 42302 - DNA, 16 bp, Homo sapiens
gtgccagcaggatgta

SEQ ID NO: 42303 - DNA, 20 bp, Homo sapiens
aaaaagaaatacaaaagggt

SEQ ID NO: 42304 - DNA, 18 bp, Homo sapiens
gatgtgacacaaggggtt

SEQ ID NO: 42305 - DNA, 22 bp, Homo sapiens
tgaaatgtagtggacagtcaca

SEQ ID NO: 42306 - DNA, 21 bp, Homo sapiens
tgtttataaatcacagatccc

SEQ ID NO: 42307 - DNA, 16 bp, Homo sapiens
tgcctccattgtggca

SEQ ID NO: 42308 - DNA, 29 bp, Homo sapiens
attttctattatttctatttatgttccta

SEQ ID NO: 42309 - DNA, 17 bp, Homo sapiens
agtccacatggtatcaa

SEQ ID NO: 42310 - DNA, 18 bp, Homo sapiens
tcctcagttaaaccttga

SEQ ID NO: 42311 - DNA, 18 bp, Homo sapiens
ggagacagcataaatccc

SEQ ID NO: 42312 - DNA, 27 bp, Homo sapiens
tataacttaaaaattcaataaactgta

SEQ ID NO: 42313 - DNA, 17 bp, Homo sapiens
cattccatccaaggcag

SEQ ID NO: 42314 - DNA, 17 bp, Homo sapiens
cgaaatatagtgcagcc

SEQ ID NO: 42315 - DNA, 18 bp, Homo sapiens
gcctgtaccagtcaagaa

SEQ ID NO: 42316 - DNA, 25 bp, Homo sapiens
aataatatattcaagaaaatcattt

SEQ ID NO: 42317 - DNA, 24 bp, Homo sapiens
aattgttaatgtgatagtttttca

SEQ ID NO: 42318 - DNA, 19 bp, Homo sapiens
aatcaaatcagcctccaaa

SEQ ID NO: 42319 - DNA, 16 bp, Homo sapiens
atgcagccagtaaaat

SEQ ID NO: 42320 - DNA, 27 bp, Homo sapiens
ctattactttttggattgatatttatg

SEQ ID NO: 42321 - DNA, 18 bp, Homo sapiens
tctgtcttcattggtgga

SEQ ID NO: 42322 - DNA, 23 bp, Homo sapiens
cagatggccccactagccagaaa

SEQ ID NO: 42323 - DNA, 22 bp, Homo sapiens
cacaaatatgcgaatctatcaa

SEQ ID NO: 42324 - DNA, 26 bp, Homo sapiens
tgattttcaataattattttcaataa

SEQ ID NO: 42325 - DNA, 20 bp, Homo sapiens
ttaaatggttacaggcaaga

SEQ ID NO: 42326 - DNA, 16 bp, Homo sapiens
cccatgaaggtctgga

SEQ ID NO: 42327 - DNA, 22 bp, Homo sapiens
tttaattaatttgtcagataaa

SEQ ID NO: 42328 - DNA, 21 bp, Homo sapiens
ttttccgagtacatgattgat

SEQ ID NO: 42329 - DNA, 19 bp, Homo sapiens
tctgcttctggctttgttt

SEQ ID NO: 42330 - DNA, 20 bp, Homo sapiens
gcgttacatggatccaattc

SEQ ID NO: 42331 - DNA, 17 bp, Homo sapiens
agagtggacaacgggca

SEQ ID NO: 42332 - DNA, 19 bp, Homo sapiens
tgcacatgttaatactaat

SEQ ID NO: 42333 - DNA, 17 bp, Homo sapiens
ccccaacagtaccactt

SEQ ID NO: 42334 - DNA, 18 bp, Homo sapiens
gttagggatagcctttgc

SEQ ID NO: 42335 - DNA, 17 bp, Homo sapiens
ccagtgcaaatatatgg

SEQ ID NO: 42336 - DNA, 17 bp, Homo sapiens
cagtgtatacttttgcc

SEQ ID NO: 42337 - DNA, 18 bp, Homo sapiens
ttcaaacttcatgtctct

SEQ ID NO: 42338 - DNA, 17 bp, Homo sapiens
tttgcttcaccaggaca

SEQ ID NO: 42339 - DNA, 26 bp, Homo sapiens
ttagtagatggattttttattcaatt

SEQ ID NO: 42340 - DNA, 25 bp, Homo sapiens
ggtggtgagtataatatatagagtt

SEQ ID NO: 42341 - DNA, 16 bp, Homo sapiens
cagaccttcagctcct

SEQ ID NO: 42342 - DNA, 22 bp, Homo sapiens
aagcacataattagaacaactt

SEQ ID NO: 42343 - DNA, 25 bp, Homo sapiens
gattcttatctagaatttcagaatg

SEQ ID NO: 42344 - DNA, 19 bp, Homo sapiens
gtaccattttcaataaaca

SEQ ID NO: 42345 - DNA, 23 bp, Homo sapiens
tttcaacctaaattgtattttct

SEQ ID NO: 42346 - DNA, 19 bp, Homo sapiens
gacatacagcagaagtcca

SEQ ID NO: 42347 - DNA, 21 bp, Homo sapiens
tcattagagaaaacatatgct

SEQ ID NO: 42348 - DNA, 17 bp, Homo sapiens
ttaaagccacattctga

SEQ ID NO: 42349 - DNA, 21 bp, Homo sapiens
ccatgactattccaaaggaaa

SEQ ID NO: 42350 - DNA, 21 bp, Homo sapiens
aagaataaccatctgtgtcag

SEQ ID NO: 42351 - DNA, 18 bp, Homo sapiens
gtcttcactggaatccat

SEQ ID NO: 42352 - DNA, 20 bp, Homo sapiens
cctgattacaatgaggctgt

SEQ ID NO: 42353 - DNA, 20 bp, Homo sapiens
gtgcaatatcaggaatttcc

SEQ ID NO: 42354 - DNA, 23 bp, Homo sapiens
agaaaagaaactcatttctaaaa

SEQ ID NO: 42355 - DNA, 18 bp, Homo sapiens
tctcttaaaaaagaggtc

SEQ ID NO: 42356 - DNA, 19 bp, Homo sapiens
atcagccgttgaggtgcca

SEQ ID NO: 42357 - DNA, 18 bp, Homo sapiens
cgtcttcctccatgtctg

SEQ ID NO: 42358 - DNA, 19 bp, Homo sapiens
ggaagatgccggcttgcag

SEQ ID NO: 42359 - DNA, 17 bp, Homo sapiens
caccaccaatgttgcat

SEQ ID NO: 42360 - DNA, 21 bp, Homo sapiens
ttggaccattctgaagaagtc

SEQ ID NO: 42361 - DNA, 18 bp, Homo sapiens
cacatgcaaatgacttca

SEQ ID NO: 42362 - DNA, 16 bp, Homo sapiens
tctggcctaattacag

SEQ ID NO: 42363 - DNA, 25 bp, Homo sapiens
tttgagttaaacttacaaatttatc

SEQ ID NO: 42364 - DNA, 21 bp, Homo sapiens
tgctgaaactgtataaaatgc

SEQ ID NO: 42365 - DNA, 19 bp, Homo sapiens
tggaaaaaagtaaaggatc

SEQ ID NO: 42366 - DNA, 18 bp, Homo sapiens
tgtcaatggtggcagatt

SEQ ID NO: 42367 - DNA, 17 bp, Homo sapiens
tggcataactatgggac

SEQ ID NO: 42368 - DNA, 18 bp, Homo sapiens
aagtaacatccggataaa

SEQ ID NO: 42369 - DNA, 21 bp, Homo sapiens
tcaaaaatgactactgatgaa

SEQ ID NO: 42370 - DNA, 18 bp, Homo sapiens
agtttgaacagtgtatga

SEQ ID NO: 42371 - DNA, 18 bp, Homo sapiens
ccattgtcccttcacaaa

SEQ ID NO: 42372 - DNA, 16 bp, Homo sapiens
acctcagtgggtccca

SEQ ID NO: 42373 - DNA, 20 bp, Homo sapiens
gaagaatccattaccctatc

SEQ ID NO: 42374 - DNA, 19 bp, Homo sapiens
ttttctgatactgacagtt

SEQ ID NO: 42375 - DNA, 19 bp, Homo sapiens
tgccatctttatttccttc

SEQ ID NO: 42376 - DNA, 23 bp, Homo sapiens
attcatcaagtctgaagagatag

SEQ ID NO: 42377 - DNA, 18 bp, Homo sapiens
tctgggcattcattttct

SEQ ID NO: 42378 - DNA, 19 bp, Homo sapiens
aacatccaaattacttgat

SEQ ID NO: 42379 - DNA, 16 bp, Homo sapiens
tggatgaactcagcga

SEQ ID NO: 42380 - DNA, 21 bp, Homo sapiens
ttgttctttttgcactctttt

SEQ ID NO: 42381 - DNA, 18 bp, Homo sapiens
cctctcgtgaattctcag

SEQ ID NO: 42382 - DNA, 22 bp, Homo sapiens
atttcagtagcagaagaaaatg

SEQ ID NO: 42383 - DNA, 20 bp, Homo sapiens
ggctgctgattctttaagag

SEQ ID NO: 42384 - DNA, 19 bp, Homo sapiens
agtgcataccagctggcta

SEQ ID NO: 42385 - DNA, 20 bp, Homo sapiens
gaatatcaggctattactga

SEQ ID NO: 42386 - DNA, 22 bp, Homo sapiens
gactgtttgctatgcaaaactt

SEQ ID NO: 42387 - DNA, 19 bp, Homo sapiens
catcttaaactcatcagct

SEQ ID NO: 42388 - DNA, 18 bp, Homo sapiens
gttgcacatgtttggctt

SEQ ID NO: 42389 - DNA, 16 bp, Homo sapiens
cagcccctcgatgtct

SEQ ID NO: 42390 - DNA, 18 bp, Homo sapiens
tgagtctctggttgcttg

SEQ ID NO: 42391 - DNA, 19 bp, Homo sapiens
ctcaagaggatattgaaga

SEQ ID NO: 42392 - DNA, 24 bp, Homo sapiens
tttgtactgaaccggtgcagagct

SEQ ID NO: 42393 - DNA, 16 bp, Homo sapiens
cgtggattcctgctta

SEQ ID NO: 42394 - DNA, 23 bp, Homo sapiens
ttaccttagcaggaaaaatggga

SEQ ID NO: 42395 - DNA, 20 bp, Homo sapiens
cagtaattagaagcattcca

SEQ ID NO: 42396 - DNA, 24 bp, Homo sapiens
ttgaaattaaagaatcagctgaat

SEQ ID NO: 42397 - DNA, 24 bp, Homo sapiens
ctacacaatctttattatttgaga

SEQ ID NO: 42398 - DNA, 18 bp, Homo sapiens
gcacttatggaggcagct

SEQ ID NO: 42399 - DNA, 16 bp, Homo sapiens
taggagagcaaggacc

SEQ ID NO: 42400 - DNA, 22 bp, Homo sapiens
ctgtttagctcaatatcagccc

SEQ ID NO: 42401 - DNA, 19 bp, Homo sapiens
acatcggtatcacatatgc

SEQ ID NO: 42402 - DNA, 18 bp, Homo sapiens
aagcaacagtctgacagt

SEQ ID NO: 42403 - DNA, 17 bp, Homo sapiens
ttcctcttctcgattcc

SEQ ID NO: 42404 - DNA, 20 bp, Homo sapiens
ggaagacatgataaatgggg

SEQ ID NO: 42405 - DNA, 21 bp, Homo sapiens
aagaactgattgtcactagag

SEQ ID NO: 42406 - DNA, 23 bp, Homo sapiens
tagtgtggctgctgaagttcgaa

SEQ ID NO: 42407 - DNA, 16 bp, Homo sapiens
ccactggtttggcaac

SEQ ID NO: 42408 - DNA, 22 bp, Homo sapiens
tgctgggtcacgaataccaaaa

SEQ ID NO: 42409 - DNA, 20 bp, Homo sapiens
tggcttttttcctttttgta

SEQ ID NO: 42410 - DNA, 19 bp, Homo sapiens
ctgtgttttgctgaaagct

SEQ ID NO: 42411 - DNA, 19 bp, Homo sapiens
aatttgcctgagatttatc

SEQ ID NO: 42412 - DNA, 17 bp, Homo sapiens
gggtgtgctaattctta

SEQ ID NO: 42413 - DNA, 21 bp, Homo sapiens
aatatgatttacagaaccata

SEQ ID NO: 42414 - DNA, 18 bp, Homo sapiens
tgcctgtctgttttggac

SEQ ID NO: 42415 - DNA, 21 bp, Homo sapiens
aaaacaaaacttaaaacagga

SEQ ID NO: 42416 - DNA, 22 bp, Homo sapiens
ccatctataaaggctactagaa

SEQ ID NO: 42417 - DNA, 22 bp, Homo sapiens
aaaaatcatgtatctcagaaaa

SEQ ID NO: 42418 - DNA, 21 bp, Homo sapiens
atttccacacagacatataca

SEQ ID NO: 42419 - DNA, 19 bp, Homo sapiens
tttcaaactcaaacttctt

SEQ ID NO: 42420 - DNA, 19 bp, Homo sapiens
ctttgtggtgatgaaataa

SEQ ID NO: 42421 - DNA, 24 bp, Homo sapiens
caactgggtaagtgtccattatgg

SEQ ID NO: 42422 - DNA, 24 bp, Homo sapiens
aaagaaactgagcttaatttaatt

SEQ ID NO: 42423 - DNA, 16 bp, Homo sapiens
gtctcagaagggggaa

SEQ ID NO: 42424 - DNA, 20 bp, Homo sapiens
tctatggaaatgcaaatgga

SEQ ID NO: 42425 - DNA, 21 bp, Homo sapiens
gatgggagttaaacaggtaat

SEQ ID NO: 42426 - DNA, 20 bp, Homo sapiens
tgggtaaaatttactatgga

SEQ ID NO: 42427 - DNA, 22 bp, Homo sapiens
caacaagggaaagaggaatgcc

SEQ ID NO: 42428 - DNA, 17 bp, Homo sapiens
atggagaatgaacctgg

SEQ ID NO: 42429 - DNA, 21 bp, Homo sapiens
ctgaagattaactactccgac

SEQ ID NO: 42430 - DNA, 17 bp, Homo sapiens
tggacaccactgtgaga

SEQ ID NO: 42431 - DNA, 28 bp, Homo sapiens
gtatcaaagagaataaaaaattattaca

SEQ ID NO: 42432 - DNA, 27 bp, Homo sapiens
cataactgtttttattatcattaaaaa

SEQ ID NO: 42433 - DNA, 16 bp, Homo sapiens
acatgtcgagccaggt

SEQ ID NO: 42434 - DNA, 20 bp, Homo sapiens
ttgtacaaaacatctagcat

SEQ ID NO: 42435 - DNA, 21 bp, Homo sapiens
ttgggaatgcactcaagctca

SEQ ID NO: 42436 - DNA, 20 bp, Homo sapiens
gagatagaataagagctacc

SEQ ID NO: 42437 - DNA, 20 bp, Homo sapiens
atgtttttaaagaatgatca

SEQ ID NO: 42438 - DNA, 18 bp, Homo sapiens
tggtgcagactgtgaaga

SEQ ID NO: 42439 - DNA, 23 bp, Homo sapiens
tggattgtcaaaattgtattata

SEQ ID NO: 42440 - DNA, 20 bp, Homo sapiens
ggattttctggtcaattttg

SEQ ID NO: 42441 - DNA, 22 bp, Homo sapiens
ttatatatgcagtatgcttatt

SEQ ID NO: 42442 - DNA, 18 bp, Homo sapiens
tagtgctcatgtgtataa

SEQ ID NO: 42443 - DNA, 21 bp, Homo sapiens
caaacatatccattgatgtga

SEQ ID NO: 42444 - DNA, 17 bp, Homo sapiens
tgttggagctctgaaaa

SEQ ID NO: 42445 - DNA, 24 bp, Homo sapiens
gagcattcatttatattaatttca

SEQ ID NO: 42446 - DNA, 16 bp, Homo sapiens
actgttttggggccac

SEQ ID NO: 42447 - DNA, 23 bp, Homo sapiens
ttgtaattgttattttctaagtt

SEQ ID NO: 42448 - DNA, 21 bp, Homo sapiens
ttcagtcatctgtcttaatgg

SEQ ID NO: 42449 - DNA, 19 bp, Homo sapiens
acttagtatttacattgca

SEQ ID NO: 42450 - DNA, 17 bp, Homo sapiens
tggatacactggtgcat

SEQ ID NO: 42451 - DNA, 18 bp, Homo sapiens
atttacttacttgtgggt

SEQ ID NO: 42452 - DNA, 18 bp, Homo sapiens
cccttgtatgaatgaagg

SEQ ID NO: 42453 - DNA, 18 bp, Homo sapiens
ccatcaacacagatccct

SEQ ID NO: 42454 - DNA, 25 bp, Homo sapiens
gtcaaccttatactaataatcaaat

SEQ ID NO: 42455 - DNA, 20 bp, Homo sapiens
atgcttttttcacagtatgc

SEQ ID NO: 42456 - DNA, 20 bp, Homo sapiens
tttgcacatcagttttttag

SEQ ID NO: 42457 - DNA, 21 bp, Homo sapiens
aatccatgtgctgacttctga

SEQ ID NO: 42458 - DNA, 19 bp, Homo sapiens
ccgcttactgtcataaaca

SEQ ID NO: 42459 - DNA, 23 bp, Homo sapiens
tttggagcagccaaagaattaca

SEQ ID NO: 42460 - DNA, 22 bp, Homo sapiens
aatgaatatccatgttcatgtg

SEQ ID NO: 42461 - DNA, 24 bp, Homo sapiens
aactgtggaagaaatgactctgaa

SEQ ID NO: 42462 - DNA, 23 bp, Homo sapiens
taacatctacttatttgaaaatg

SEQ ID NO: 42463 - DNA, 27 bp, Homo sapiens
atttttgtcatataacttgaataaaat

SEQ ID NO: 42464 - DNA, 17 bp, Homo sapiens
tttcacctgaactagga

SEQ ID NO: 42465 - DNA, 22 bp, Homo sapiens
tgctagtcccatctgcatcaca

SEQ ID NO: 42466 - DNA, 19 bp, Homo sapiens
ccagtcaccttcaaggata

SEQ ID NO: 42467 - DNA, 19 bp, Homo sapiens
tgcattagctaaaactggc

SEQ ID NO: 42468 - DNA, 16 bp, Homo sapiens
tgtgaaacaaacgcca

SEQ ID NO: 42469 - DNA, 21 bp, Homo sapiens
tgaaagagcataattaaaatt

SEQ ID NO: 42470 - DNA, 17 bp, Homo sapiens
tgtatcgatggcatcaa

SEQ ID NO: 42471 - DNA, 24 bp, Homo sapiens
tgagttaaatatactttcataaag

SEQ ID NO: 42472 - DNA, 19 bp, Homo sapiens
aggcatcaactgtgaaata

SEQ ID NO: 42473 - DNA, 23 bp, Homo sapiens
tgtagacaaggatttgaaaggca

SEQ ID NO: 42474 - DNA, 23 bp, Homo sapiens
ttttaagagttttgtatttaaat

SEQ ID NO: 42475 - DNA, 20 bp, Homo sapiens
tcttgcagtcacaggtataa

SEQ ID NO: 42476 - DNA, 23 bp, Homo sapiens
aaataccaagttatcattataga

SEQ ID NO: 42477 - DNA, 17 bp, Homo sapiens
ctgataggcattcatct

SEQ ID NO: 42478 - DNA, 24 bp, Homo sapiens
aattttacttcttattaatttctt

SEQ ID NO: 42479 - DNA, 18 bp, Homo sapiens
tgtgtctacaggactgat

SEQ ID NO: 42480 - DNA, 18 bp, Homo sapiens
gtttgcatctggcagatt

SEQ ID NO: 42481 - DNA, 17 bp, Homo sapiens
ggcccttctgtgaactt

SEQ ID NO: 42482 - DNA, 19 bp, Homo sapiens
acagaaatatgttgctgca

SEQ ID NO: 42483 - DNA, 19 bp, Homo sapiens
ctcatttctccacttttct

SEQ ID NO: 42484 - DNA, 18 bp, Homo sapiens
aggcagttgtatccatca

SEQ ID NO: 42485 - DNA, 24 bp, Homo sapiens
gaatgtcttgaatttaaaatataa

SEQ ID NO: 42486 - DNA, 23 bp, Homo sapiens
tttacatttatttacatcaagtt

SEQ ID NO: 42487 - DNA, 22 bp, Homo sapiens
ttgctatattttttcaaagaaa

SEQ ID NO: 42488 - DNA, 22 bp, Homo sapiens
aaatttgagatttttgacataa

SEQ ID NO: 42489 - DNA, 21 bp, Homo sapiens
ccttgcaaaaataatggaaca

SEQ ID NO: 42490 - DNA, 20 bp, Homo sapiens
cacaaatgtatcagtggtga

SEQ ID NO: 42491 - DNA, 18 bp, Homo sapiens
cctgggttttctggatct

SEQ ID NO: 42492 - DNA, 22 bp, Homo sapiens
ctttcttgttgaattacacaca

SEQ ID NO: 42493 - DNA, 23 bp, Homo sapiens
attgattttatacatatatacta

SEQ ID NO: 42494 - DNA, 21 bp, Homo sapiens
tcacctgtttgtcagatccac

SEQ ID NO: 42495 - DNA, 20 bp, Homo sapiens
aattggtgaattaagcaaca

SEQ ID NO: 42496 - DNA, 19 bp, Homo sapiens
caatttcacacagagatcc

SEQ ID NO: 42497 - DNA, 21 bp, Homo sapiens
aaaaagtatctagatacatgt

SEQ ID NO: 42498 - DNA, 21 bp, Homo sapiens
caaaaaatttagtaactccat

SEQ ID NO: 42499 - DNA, 18 bp, Homo sapiens
cctgccaggattatggtg

SEQ ID NO: 42500 - DNA, 22 bp, Homo sapiens
agcatggcaagtttttaataat

SEQ ID NO: 42501 - DNA, 16 bp, Homo sapiens
tgcagaatttgaaggt

SEQ ID NO: 42502 - DNA, 21 bp, Homo sapiens
atacatctagacacataaaca

SEQ ID NO: 42503 - DNA, 18 bp, Homo sapiens
actaccactgattctgat

SEQ ID NO: 42504 - DNA, 19 bp, Homo sapiens
tgaccatatcttcacagtc

SEQ ID NO: 42505 - DNA, 21 bp, Homo sapiens
gcttgagagtaattattttct

SEQ ID NO: 42506 - DNA, 19 bp, Homo sapiens
tttcacagtttttaccttc

SEQ ID NO: 42507 - DNA, 24 bp, Homo sapiens
atttttataactggatttgaagtt

SEQ ID NO: 42508 - DNA, 17 bp, Homo sapiens
actcaacatgcttagct

SEQ ID NO: 42509 - DNA, 21 bp, Homo sapiens
atttttccaacccattttagg

SEQ ID NO: 42510 - DNA, 18 bp, Homo sapiens
tggacaattttgccacca

SEQ ID NO: 42511 - DNA, 20 bp, Homo sapiens
atttaaaaacaataaaatcc

SEQ ID NO: 42512 - DNA, 22 bp, Homo sapiens
ggaggtctttgtcatgaatcta

SEQ ID NO: 42513 - DNA, 23 bp, Homo sapiens
caatgctgatttgcgtctaccaa

SEQ ID NO: 42514 - DNA, 18 bp, Homo sapiens
ggacagaactgtagtgaa

SEQ ID NO: 42515 - DNA, 16 bp, Homo sapiens
ggttatagcgttggtg

SEQ ID NO: 42516 - DNA, 20 bp, Homo sapiens
aagagttcacacttctaaaa

SEQ ID NO: 42517 - DNA, 17 bp, Homo sapiens
tgtccagggatggtaga

SEQ ID NO: 42518 - DNA, 19 bp, Homo sapiens
agcaccacatactattagt

SEQ ID NO: 42519 - DNA, 19 bp, Homo sapiens
cgcattcatttatttcttc

SEQ ID NO: 42520 - DNA, 20 bp, Homo sapiens
caggaaattaggcaaacaat

SEQ ID NO: 42521 - DNA, 22 bp, Homo sapiens
caaatgattgcgacaccatctt

SEQ ID NO: 42522 - DNA, 20 bp, Homo sapiens
tgagtgtaaaatgaatcctt

SEQ ID NO: 42523 - DNA, 24 bp, Homo sapiens
ttaaatgtatctaaagtgaaaata

SEQ ID NO: 42524 - DNA, 16 bp, Homo sapiens
accagtgtgtgtgcct

SEQ ID NO: 42525 - DNA, 23 bp, Homo sapiens
agtaatttcatgaagaaagctaa

SEQ ID NO: 42526 - DNA, 24 bp, Homo sapiens
taatatctgtattataggcttaat

SEQ ID NO: 42527 - DNA, 19 bp, Homo sapiens
ggaattgttcttgcaagga

SEQ ID NO: 42528 - DNA, 25 bp, Homo sapiens
attggcattctataaaactaaaaaa

SEQ ID NO: 42529 - DNA, 20 bp, Homo sapiens
aatttccttcccaatcagat

SEQ ID NO: 42530 - DNA, 19 bp, Homo sapiens
tgtgagcacaattctacct

SEQ ID NO: 42531 - DNA, 27 bp, Homo sapiens
tgagaagtaagcatatgtaatatatat

SEQ ID NO: 42532 - DNA, 16 bp, Homo sapiens
ccaggctatgttggga

SEQ ID NO: 42533 - DNA, 21 bp, Homo sapiens
tgtacataggtgttaaattat

SEQ ID NO: 42534 - DNA, 22 bp, Homo sapiens
aggaatgttaagagttttctct

SEQ ID NO: 42535 - DNA, 16 bp, Homo sapiens
gcaggtctttgcaggt

SEQ ID NO: 42536 - DNA, 21 bp, Homo sapiens
aagtgaactacataaatgatt

SEQ ID NO: 42537 - DNA, 20 bp, Homo sapiens
tgttcacatcttatcccaac

SEQ ID NO: 42538 - DNA, 22 bp, Homo sapiens
tattgtagatgactatgtaatc

SEQ ID NO: 42539 - DNA, 19 bp, Homo sapiens
tggtaattacttctgccag

SEQ ID NO: 42540 - DNA, 20 bp, Homo sapiens
aaaatgaaggactaataatg

SEQ ID NO: 42541 - DNA, 19 bp, Homo sapiens
tgatatagatgagtgtgct

SEQ ID NO: 42542 - DNA, 21 bp, Homo sapiens
gagacagaagtgctttttaaa

SEQ ID NO: 42543 - DNA, 20 bp, Homo sapiens
gcctgtcttgttaacactta

SEQ ID NO: 42544 - DNA, 16 bp, Homo sapiens
atggaggcacacactg

SEQ ID NO: 42545 - DNA, 19 bp, Homo sapiens
agatgtcatcctaagtgga

SEQ ID NO: 42546 - DNA, 18 bp, Homo sapiens
tttgcagggatgtgaagc

SEQ ID NO: 42547 - DNA, 21 bp, Homo sapiens
caaggtgaaataaatgggttc

SEQ ID NO: 42548 - DNA, 18 bp, Homo sapiens
attattcaagtgaatgca

SEQ ID NO: 42549 - DNA, 20 bp, Homo sapiens
actagtacacatttaagggg

SEQ ID NO: 42550 - DNA, 20 bp, Homo sapiens
caatcaatagacacatttga

SEQ ID NO: 42551 - DNA, 16 bp, Homo sapiens
gaaaggaacatctgtg

SEQ ID NO: 42552 - DNA, 29 bp, Homo sapiens
aacaacattatttactagaaaatttaatt

SEQ ID NO: 42553 - DNA, 16 bp, Homo sapiens
atggcctctgcctggc

SEQ ID NO: 42554 - DNA, 21 bp, Homo sapiens
gacacacttgcggaagaaata

SEQ ID NO: 42555 - DNA, 19 bp, Homo sapiens
ttggcagattgtgtgttgt

SEQ ID NO: 42556 - DNA, 23 bp, Homo sapiens
ggacgcagatttgcagtcttcag

SEQ ID NO: 42557 - DNA, 22 bp, Homo sapiens
gtatatgactaattgggttttt

SEQ ID NO: 42558 - DNA, 19 bp, Homo sapiens
gttacaattgtgcgaaagg

SEQ ID NO: 42559 - DNA, 24 bp, Homo sapiens
ttatttctgtgtttttaaataaat

SEQ ID NO: 42560 - DNA, 20 bp, Homo sapiens
ccctaagcaatagtcaacat

SEQ ID NO: 42561 - DNA, 20 bp, Homo sapiens
ccaagaatggacactttatg

SEQ ID NO: 42562 - DNA, 23 bp, Homo sapiens
tttattctttatttgttgagtgt

SEQ ID NO: 42563 - DNA, 22 bp, Homo sapiens
caccaaattcagcaacatatag

SEQ ID NO: 42564 - DNA, 21 bp, Homo sapiens
atttttttctccatctacatt

SEQ ID NO: 42565 - DNA, 23 bp, Homo sapiens
tattaattcttcccaaattaatt

SEQ ID NO: 42566 - DNA, 23 bp, Homo sapiens
acattaattgattttaagccact

SEQ ID NO: 42567 - DNA, 25 bp, Homo sapiens
atactctgaataaatggaaatataa

SEQ ID NO: 42568 - DNA, 17 bp, Homo sapiens
tcatgctgtataaacct

SEQ ID NO: 42569 - DNA, 18 bp, Homo sapiens
agcactataaaccctctg

SEQ ID NO: 42570 - DNA, 22 bp, Homo sapiens
cataacatgtattatgtaacat

SEQ ID NO: 42571 - DNA, 17 bp, Homo sapiens
caacatgaagctgtttg

SEQ ID NO: 42572 - DNA, 25 bp, Homo sapiens
aaattccaatcattttaatcaacaa

SEQ ID NO: 42573 - DNA, 16 bp, Homo sapiens
tgggctggcaacatgt

SEQ ID NO: 42574 - DNA, 25 bp, Homo sapiens
atcaatttaattataactttttgat

SEQ ID NO: 42575 - DNA, 17 bp, Homo sapiens
tggatgcagttgtttga

SEQ ID NO: 42576 - DNA, 20 bp, Homo sapiens
tgggtctattaatttcatct

SEQ ID NO: 42577 - DNA, 18 bp, Homo sapiens
gtagtaagtgatgggaat

SEQ ID NO: 42578 - DNA, 24 bp, Homo sapiens
gatcatcagttgtattttccagat

SEQ ID NO: 42579 - DNA, 19 bp, Homo sapiens
aggtttcatcttagtagac

SEQ ID NO: 42580 - DNA, 18 bp, Homo sapiens
cctgactgtcttcttcac

SEQ ID NO: 42581 - DNA, 16 bp, Homo sapiens
gtgccagccaagcttt

SEQ ID NO: 42582 - DNA, 18 bp, Homo sapiens
ttcttcatgttggttccc

SEQ ID NO: 42583 - DNA, 21 bp, Homo sapiens
tgcaaactatatattttgaat

SEQ ID NO: 42584 - DNA, 16 bp, Homo sapiens
tttctttctggctgca

SEQ ID NO: 42585 - DNA, 22 bp, Homo sapiens
aaaatcagacaattacaagcta

SEQ ID NO: 42586 - DNA, 23 bp, Homo sapiens
tatctctttttttttaaaggatc

SEQ ID NO: 42587 - DNA, 16 bp, Homo sapiens
gtgccttcatgtggga

SEQ ID NO: 42588 - DNA, 16 bp, Homo sapiens
tttgaccacagtcctt

SEQ ID NO: 42589 - DNA, 18 bp, Homo sapiens
gttgcatcttcagtgcag

SEQ ID NO: 42590 - DNA, 17 bp, Homo sapiens
tgcatacaggaacttat

SEQ ID NO: 42591 - DNA, 20 bp, Homo sapiens
cacttttcgccttcagatcc

SEQ ID NO: 42592 - DNA, 24 bp, Homo sapiens
acacgtcagttaaaggaatacatt

SEQ ID NO: 42593 - DNA, 18 bp, Homo sapiens
tgccaagataaaggtcct

SEQ ID NO: 42594 - DNA, 25 bp, Homo sapiens
tttgagatataaaatactttgtgtg

SEQ ID NO: 42595 - DNA, 19 bp, Homo sapiens
ttgaagaatgtttacctaa

SEQ ID NO: 42596 - DNA, 21 bp, Homo sapiens
aaatgattcaagcagattgaa

SEQ ID NO: 42597 - DNA, 18 bp, Homo sapiens
ttccttgtttcctttttg

SEQ ID NO: 42598 - DNA, 18 bp, Homo sapiens
ttcaaattgagcaggacc

SEQ ID NO: 42599 - DNA, 20 bp, Homo sapiens
tagctgtttatgttatatgt

SEQ ID NO: 42600 - DNA, 17 bp, Homo sapiens
agcagaggtgttgatga

SEQ ID NO: 42601 - DNA, 20 bp, Homo sapiens
aaagagaagtataaaaagtg

SEQ ID NO: 42602 - DNA, 17 bp, Homo sapiens
ccctggaatgcatacat

SEQ ID NO: 42603 - DNA, 16 bp, Homo sapiens
acccctattgctaagc

SEQ ID NO: 42604 - DNA, 16 bp, Homo sapiens
gcatcaactgtctgaa

SEQ ID NO: 42605 - DNA, 19 bp, Homo sapiens
tgtttctctggctaagatt

SEQ ID NO: 42606 - DNA, 22 bp, Homo sapiens
ttacagctgtatatcaggattt

SEQ ID NO: 42607 - DNA, 20 bp, Homo sapiens
tgaagggctaacttatgttg

SEQ ID NO: 42608 - DNA, 19 bp, Homo sapiens
tgttaataggcttttctga

SEQ ID NO: 42609 - DNA, 18 bp, Homo sapiens
attgaaacaccattcttc

SEQ ID NO: 42610 - DNA, 26 bp, Homo sapiens
tgtattaaaaaatgattaataatacc

SEQ ID NO: 42611 - DNA, 21 bp, Homo sapiens
tgctttctcacagtttttttc

SEQ ID NO: 42612 - DNA, 17 bp, Homo sapiens
acccaaaacatgcaaaa

SEQ ID NO: 42613 - DNA, 20 bp, Homo sapiens
gagtcatttcctttgaggaa

SEQ ID NO: 42614 - DNA, 20 bp, Homo sapiens
aagttagggttaaaaccaga

SEQ ID NO: 42615 - DNA, 20 bp, Homo sapiens
tgcatctgttcaccaatatt

SEQ ID NO: 42616 - DNA, 20 bp, Homo sapiens
tccatgtactttgtattaaa

SEQ ID NO: 42617 - DNA, 25 bp, Homo sapiens
attacctttgaaatatccataatac

SEQ ID NO: 42618 - DNA, 20 bp, Homo sapiens
tcacatttcttacatgtagc

SEQ ID NO: 42619 - DNA, 19 bp, Homo sapiens
ttctactccaagttcatga

SEQ ID NO: 42620 - DNA, 24 bp, Homo sapiens
gaatgctcttacaaagcaaatctg

SEQ ID NO: 42621 - DNA, 18 bp, Homo sapiens
ggagatggtgttgtgaca

SEQ ID NO: 42622 - DNA, 25 bp, Homo sapiens
aataggaaaaattaaaataagtaga

SEQ ID NO: 42623 - DNA, 20 bp, Homo sapiens
ctgatgtcagtgagttttca

SEQ ID NO: 42624 - DNA, 21 bp, Homo sapiens
taccttaataaggattctaat

SEQ ID NO: 42625 - DNA, 17 bp, Homo sapiens
tagcagttctgcttata

SEQ ID NO: 42626 - DNA, 19 bp, Homo sapiens
aaccactcacttatatgtt

SEQ ID NO: 42627 - DNA, 17 bp, Homo sapiens
tgaggtgtcagcaaaac

SEQ ID NO: 42628 - DNA, 18 bp, Homo sapiens
accattctgacatggtac

SEQ ID NO: 42629 - DNA, 18 bp, Homo sapiens
tccttccttccttttctt

SEQ ID NO: 42630 - DNA, 17 bp, Homo sapiens
gatccttttgggcattc

SEQ ID NO: 42631 - DNA, 20 bp, Homo sapiens
ttcataaactctagagaaat

SEQ ID NO: 42632 - DNA, 21 bp, Homo sapiens
tccaaaaaagcagagaaacac

SEQ ID NO: 42633 - DNA, 22 bp, Homo sapiens
agaattgcaatgaatgaatttt

SEQ ID NO: 42634 - DNA, 22 bp, Homo sapiens
attaaccaaattgatttattaa

SEQ ID NO: 42635 - DNA, 19 bp, Homo sapiens
actgcagcaatattacttc

SEQ ID NO: 42636 - DNA, 22 bp, Homo sapiens
tgaaattgtatttttcaataat

SEQ ID NO: 42637 - DNA, 18 bp, Homo sapiens
ggaaagaattgctcagaa

SEQ ID NO: 42638 - DNA, 19 bp, Homo sapiens
agttacttgtgtatatggt

SEQ ID NO: 42639 - DNA, 20 bp, Homo sapiens
agggaaaactgatggttata

SEQ ID NO: 42640 - DNA, 24 bp, Homo sapiens
cattcacaaatgaaactatttgaa

SEQ ID NO: 42641 - DNA, 21 bp, Homo sapiens
tggtttcataactgaaattac

SEQ ID NO: 42642 - DNA, 18 bp, Homo sapiens
tggttgacactggccaat

SEQ ID NO: 42643 - DNA, 22 bp, Homo sapiens
gctctcctgacctcgtgatcca

SEQ ID NO: 42644 - DNA, 19 bp, Homo sapiens
gtgagccaccgcatttaaa

SEQ ID NO: 42645 - DNA, 17 bp, Homo sapiens
actgccaggaacttgat

SEQ ID NO: 42646 - DNA, 23 bp, Homo sapiens
gtgtttctctattttaataaaat

SEQ ID NO: 42647 - DNA, 16 bp, Homo sapiens
agtgaagcttggagca

SEQ ID NO: 42648 - DNA, 22 bp, Homo sapiens
gacagacacattcatatgcttg

SEQ ID NO: 42649 - DNA, 16 bp, Homo sapiens
cagcagttctgccagg

SEQ ID NO: 42650 - DNA, 20 bp, Homo sapiens
catggtttaaaagaacatgc

SEQ ID NO: 42651 - DNA, 16 bp, Homo sapiens
ggcaagtggtccatca

SEQ ID NO: 42652 - DNA, 18 bp, Homo sapiens
ctggcaatggcagctata

SEQ ID NO: 42653 - DNA, 16 bp, Homo sapiens
aggaatgcacactgtt

SEQ ID NO: 42654 - DNA, 18 bp, Homo sapiens
gcaaaattctgaactcag

SEQ ID NO: 42655 - DNA, 16 bp, Homo sapiens
tggctgtgtgcaaaat

SEQ ID NO: 42656 - DNA, 16 bp, Homo sapiens
tcccagtggacaaggt

SEQ ID NO: 42657 - DNA, 18 bp, Homo sapiens
tctgaaccatctcttcaa

SEQ ID NO: 42658 - DNA, 17 bp, Homo sapiens
acactcagccacttaga

SEQ ID NO: 42659 - DNA, 16 bp, Homo sapiens
agctgttccccagatt

SEQ ID NO: 42660 - DNA, 18 bp, Homo sapiens
tgatcttccgttgtggta

SEQ ID NO: 42661 - DNA, 19 bp, Homo sapiens
ggacttctacagagattgc

SEQ ID NO: 42662 - DNA, 25 bp, Homo sapiens
caaatttatttctggaaattgaaga

SEQ ID NO: 42663 - DNA, 17 bp, Homo sapiens
ggcatccacaaccctca

SEQ ID NO: 42664 - DNA, 21 bp, Homo sapiens
taattgaatttgcaaagggca

SEQ ID NO: 42665 - DNA, 16 bp, Homo sapiens
ggtttttcacagctct

SEQ ID NO: 42666 - DNA, 16 bp, Homo sapiens
acacccaaaaaccagc

SEQ ID NO: 42667 - DNA, 23 bp, Homo sapiens
gataaactgtaaaatacagctac

SEQ ID NO: 42668 - DNA, 16 bp, Homo sapiens
ccacatatgatgaggg

SEQ ID NO: 42669 - DNA, 20 bp, Homo sapiens
accacaactttacttggaaa

SEQ ID NO: 42670 - DNA, 20 bp, Homo sapiens
tgtttttccatttatgaaag

SEQ ID NO: 42671 - DNA, 17 bp, Homo sapiens
tcaaagctactttgggt

SEQ ID NO: 42672 - DNA, 24 bp, Homo sapiens
cctgagcctgagtagccagccggc

SEQ ID NO: 42673 - DNA, 16 bp, Homo sapiens
ttcatgggaccgcccc

SEQ ID NO: 42674 - DNA, 23 bp, Homo sapiens
aaaagccccgcgccagccccgcg

SEQ ID NO: 42675 - DNA, 20 bp, Homo sapiens
cgccctccccgcaggcggcg

SEQ ID NO: 42676 - DNA, 21 bp, Homo sapiens
aaagtaaaatgagccacctgc

SEQ ID NO: 42677 - DNA, 24 bp, Homo sapiens
gggatggcggttgtagcggcggct

SEQ ID NO: 42678 - DNA, 23 bp, Homo sapiens
ggaccgagtgggcagtcccaggg

SEQ ID NO: 42679 - DNA, 24 bp, Homo sapiens
cactggcgtcggcttcctggcgcg

SEQ ID NO: 42680 - DNA, 22 bp, Homo sapiens
cagcctgccggcccctgcccct

SEQ ID NO: 42681 - DNA, 16 bp, Homo sapiens
aggatgcggcccagag

SEQ ID NO: 42682 - DNA, 16 bp, Homo sapiens
ggcaaggaggttccag

SEQ ID NO: 42683 - DNA, 16 bp, Homo sapiens
ccgggagtacggtgag

SEQ ID NO: 42684 - DNA, 23 bp, Homo sapiens
tcttatagtattattgtaaataa

SEQ ID NO: 42685 - DNA, 17 bp, Homo sapiens
tttggccaatgagttat

SEQ ID NO: 42686 - DNA, 20 bp, Homo sapiens
ccttgattttagtcaagttg

SEQ ID NO: 42687 - DNA, 18 bp, Homo sapiens
ggaattaacacagctacc

SEQ ID NO: 42688 - DNA, 23 bp, Homo sapiens
aacacacgaaatgattttttttt

SEQ ID NO: 42689 - DNA, 19 bp, Homo sapiens
tgtcaggtagatacaatgt

SEQ ID NO: 42690 - DNA, 24 bp, Homo sapiens
cttttccagtctgtaacaagtgcc

SEQ ID NO: 42691 - DNA, 21 bp, Homo sapiens
ctggtaataagtggactaata

SEQ ID NO: 42692 - DNA, 23 bp, Homo sapiens
tcatctagtctaaaatgtcaata

SEQ ID NO: 42693 - DNA, 19 bp, Homo sapiens
gcatctaaagactccacca

SEQ ID NO: 42694 - DNA, 20 bp, Homo sapiens
tggtccatttatcttttgtg

SEQ ID NO: 42695 - DNA, 24 bp, Homo sapiens
aaagttctatcagaatactattca

SEQ ID NO: 42696 - DNA, 26 bp, Homo sapiens
gttagtattatttagagattattaaa

SEQ ID NO: 42697 - DNA, 23 bp, Homo sapiens
aatggggatatgacaaaaaattt

SEQ ID NO: 42698 - DNA, 17 bp, Homo sapiens
ttggtgaagatgttgcc

SEQ ID NO: 42699 - DNA, 16 bp, Homo sapiens
ccaaaggattctgcgg

SEQ ID NO: 42700 - DNA, 19 bp, Homo sapiens
tccaacaattccttgttca

SEQ ID NO: 42701 - DNA, 24 bp, Homo sapiens
ctacctgttctatacttctccatc

SEQ ID NO: 42702 - DNA, 18 bp, Homo sapiens
tctgcaaactgaatttcc

SEQ ID NO: 42703 - DNA, 16 bp, Homo sapiens
actctcatttgccaca

SEQ ID NO: 42704 - DNA, 22 bp, Homo sapiens
atttcaatgaatgaacaacctt

SEQ ID NO: 42705 - DNA, 24 bp, Homo sapiens
ttttaataccccattgtgtgaaca

SEQ ID NO: 42706 - DNA, 16 bp, Homo sapiens
tgtttagaatgcaggt

SEQ ID NO: 42707 - DNA, 16 bp, Homo sapiens
actgccattgcggaaa

SEQ ID NO: 42708 - DNA, 25 bp, Homo sapiens
tattagatctttaaatatatgctca

SEQ ID NO: 42709 - DNA, 19 bp, Homo sapiens
ggaaggaagagggggaggg

SEQ ID NO: 42710 - DNA, 18 bp, Homo sapiens
gaggcttccacagttaaa

SEQ ID NO: 42711 - DNA, 24 bp, Homo sapiens
gaagggaaggaaggaagggaggga

SEQ ID NO: 42712 - DNA, 18 bp, Homo sapiens
tgcttcaggactctgaga

SEQ ID NO: 42713 - DNA, 16 bp, Homo sapiens
catgccccgtctttct

SEQ ID NO: 42714 - DNA, 22 bp, Homo sapiens
gaaatcaaataaagtacataaa

SEQ ID NO: 42715 - DNA, 17 bp, Homo sapiens
gctatcgctctggggat

SEQ ID NO: 42716 - DNA, 20 bp, Homo sapiens
tttcctctagataagcatag

SEQ ID NO: 42717 - DNA, 19 bp, Homo sapiens
tgttggtcatggggctctc

SEQ ID NO: 42718 - DNA, 17 bp, Homo sapiens
aacctccccttcttaaa

SEQ ID NO: 42719 - DNA, 27 bp, Homo sapiens
ttatttttatataatatgtaaacttaa

SEQ ID NO: 42720 - DNA, 17 bp, Homo sapiens
tgcatgacaaaagaagt

SEQ ID NO: 42721 - DNA, 24 bp, Homo sapiens
tttttaattagtaacaattgatta

SEQ ID NO: 42722 - DNA, 17 bp, Homo sapiens
tgctgccctgtaaagta

SEQ ID NO: 42723 - DNA, 24 bp, Homo sapiens
tactgggatatatttttactaaaa

SEQ ID NO: 42724 - DNA, 24 bp, Homo sapiens
acttttagagctataaaaaacaaa

SEQ ID NO: 42725 - DNA, 16 bp, Homo sapiens
agccctttccaggcca

SEQ ID NO: 42726 - DNA, 21 bp, Homo sapiens
tcaagattctttctacaagga

SEQ ID NO: 42727 - DNA, 24 bp, Homo sapiens
attttttgaacctaaaatacttta

SEQ ID NO: 42728 - DNA, 19 bp, Homo sapiens
ggagccatatcataaatgc

SEQ ID NO: 42729 - DNA, 16 bp, Homo sapiens
acttcggcctgggaca

SEQ ID NO: 42730 - DNA, 18 bp, Homo sapiens
aaataaagctttgctaca

SEQ ID NO: 42731 - DNA, 16 bp, Homo sapiens
ttgggatcaatgctac

SEQ ID NO: 42732 - DNA, 20 bp, Homo sapiens
tcagaaaaaatgtccttttt

SEQ ID NO: 42733 - DNA, 24 bp, Homo sapiens
atttttcatgtatcaggatttaaa

SEQ ID NO: 42734 - DNA, 16 bp, Homo sapiens
aacatcccactgtccc

SEQ ID NO: 42735 - DNA, 19 bp, Homo sapiens
agaaattagcatcagtagc

SEQ ID NO: 42736 - DNA, 18 bp, Homo sapiens
tagttgcctggggcactc

SEQ ID NO: 42737 - DNA, 22 bp, Homo sapiens
ttgttattttcgcagaatatgg

SEQ ID NO: 42738 - DNA, 16 bp, Homo sapiens
tcttttgccatggaag

SEQ ID NO: 42739 - DNA, 19 bp, Homo sapiens
tgcagatcagttcctgaga

SEQ ID NO: 42740 - DNA, 16 bp, Homo sapiens
gtccacatcccaaggt

SEQ ID NO: 42741 - DNA, 17 bp, Homo sapiens
gaggctagaacctttgt

SEQ ID NO: 42742 - DNA, 16 bp, Homo sapiens
gccaaaggtttcaggg

SEQ ID NO: 42743 - DNA, 16 bp, Homo sapiens
tccgagaggtagcttc

SEQ ID NO: 42744 - DNA, 20 bp, Homo sapiens
tcaattgaaaatgctcacat

SEQ ID NO: 42745 - DNA, 19 bp, Homo sapiens
ctgaggactataatacctt

SEQ ID NO: 42746 - DNA, 19 bp, Homo sapiens
ttgagcatgaagctgttta

SEQ ID NO: 42747 - DNA, 21 bp, Homo sapiens
gatgactgacctgtcgaaagc

SEQ ID NO: 42748 - DNA, 16 bp, Homo sapiens
agggagcctcgtgact

SEQ ID NO: 42749 - DNA, 22 bp, Homo sapiens
ttacactatttattgaatgtat

SEQ ID NO: 42750 - DNA, 24 bp, Homo sapiens
attgaaatcagttccaaaaattac

SEQ ID NO: 42751 - DNA, 22 bp, Homo sapiens
taaaatagatattctttttaac

SEQ ID NO: 42752 - DNA, 24 bp, Homo sapiens
tcacatattgtgataagtaattta

SEQ ID NO: 42753 - DNA, 17 bp, Homo sapiens
agggcgactgctaatca

SEQ ID NO: 42754 - DNA, 22 bp, Homo sapiens
tttacttatcacagtatatgaa

SEQ ID NO: 42755 - DNA, 17 bp, Homo sapiens
agctctacagttcaggt

SEQ ID NO: 42756 - DNA, 22 bp, Homo sapiens
gctgttacctgcttttttcata

SEQ ID NO: 42757 - DNA, 20 bp, Homo sapiens
gaggaaatggtgtgtcataa

SEQ ID NO: 42758 - DNA, 23 bp, Homo sapiens
tgtatttttagtaagtgaaatat

SEQ ID NO: 42759 - DNA, 16 bp, Homo sapiens
tttcgaagggcatcat

SEQ ID NO: 42760 - DNA, 19 bp, Homo sapiens
tgaagttaagcatcctgac

SEQ ID NO: 42761 - DNA, 18 bp, Homo sapiens
ggcacatagtagctttct

SEQ ID NO: 42762 - DNA, 17 bp, Homo sapiens
atcaagagtatgtggtt

SEQ ID NO: 42763 - DNA, 21 bp, Homo sapiens
tttgttaccatcaaaacactg

SEQ ID NO: 42764 - DNA, 18 bp, Homo sapiens
atcccagacaaatggaag

SEQ ID NO: 42765 - DNA, 25 bp, Homo sapiens
ttttttttctaaagcacattatttt

SEQ ID NO: 42766 - DNA, 16 bp, Homo sapiens
gagcagcagaaggagg

SEQ ID NO: 42767 - DNA, 24 bp, Homo sapiens
agggggctgtctcctcctcttccc

SEQ ID NO: 42768 - DNA, 22 bp, Homo sapiens
ttgctgatgtgcctgtgactgc

SEQ ID NO: 42769 - DNA, 20 bp, Homo sapiens
gacagggcggcagcgactcc

SEQ ID NO: 42770 - DNA, 24 bp, Homo sapiens
gaggaatctcggtcccggcaaagg

SEQ ID NO: 42771 - DNA, 23 bp, Homo sapiens
atgccgggagccgccggggtcct

SEQ ID NO: 42772 - DNA, 24 bp, Homo sapiens
ctctgaaggcgaagcaagacggca

SEQ ID NO: 42773 - DNA, 23 bp, Homo sapiens
gtacaggcgcagcggccgcagca

SEQ ID NO: 42774 - DNA, 16 bp, Homo sapiens
catggcattgaacttg

SEQ ID NO: 42775 - DNA, 19 bp, Homo sapiens
agtatactgaattgtcagg

SEQ ID NO: 42776 - DNA, 17 bp, Homo sapiens
acatgttgcattggtcg

SEQ ID NO: 42777 - DNA, 22 bp, Homo sapiens
aaaaatattttatctcaattgc

SEQ ID NO: 42778 - DNA, 16 bp, Homo sapiens
aggctgcccagggaca

SEQ ID NO: 42779 - DNA, 19 bp, Homo sapiens
ctggtctacacaccttcat

SEQ ID NO: 42780 - DNA, 19 bp, Homo sapiens
acactaaaatacatacggt

SEQ ID NO: 42781 - DNA, 19 bp, Homo sapiens
ttgcttctaatgctcttat

SEQ ID NO: 42782 - DNA, 17 bp, Homo sapiens
aacttggcctcaacatc

SEQ ID NO: 42783 - DNA, 18 bp, Homo sapiens
ctgcaaattggtagaaca

SEQ ID NO: 42784 - DNA, 19 bp, Homo sapiens
agctcttaatggtaaaaag

SEQ ID NO: 42785 - DNA, 22 bp, Homo sapiens
tctgcaatcaaaacagcagcaa

SEQ ID NO: 42786 - DNA, 22 bp, Homo sapiens
gaagaaattctgttgagaatct

SEQ ID NO: 42787 - DNA, 16 bp, Homo sapiens
ctctgccaccaagtgt

SEQ ID NO: 42788 - DNA, 20 bp, Homo sapiens
cacatgatggttgttttaac

SEQ ID NO: 42789 - DNA, 17 bp, Homo sapiens
acctgctgtaaatccag

SEQ ID NO: 42790 - DNA, 19 bp, Homo sapiens
tcttttcttcttcctttca

SEQ ID NO: 42791 - DNA, 23 bp, Homo sapiens
caaatagcaaatgtaaaatgcaa

SEQ ID NO: 42792 - DNA, 20 bp, Homo sapiens
tgctattgatggaaagaaca

SEQ ID NO: 42793 - DNA, 19 bp, Homo sapiens
agaaaacaatggagagtga

SEQ ID NO: 42794 - DNA, 22 bp, Homo sapiens
aataccattatgtgacaattac

SEQ ID NO: 42795 - DNA, 23 bp, Homo sapiens
agcaaaaaattattagatatgaa

SEQ ID NO: 42796 - DNA, 17 bp, Homo sapiens
ggggggagttagctgcc

SEQ ID NO: 42797 - DNA, 24 bp, Homo sapiens
attatagaataaaatctgaaataa

SEQ ID NO: 42798 - DNA, 16 bp, Homo sapiens
atactgccagggcttg

SEQ ID NO: 42799 - DNA, 22 bp, Homo sapiens
aaaatgatgagaatatttggga

SEQ ID NO: 42800 - DNA, 19 bp, Homo sapiens
gcccagtgcggggataaat

SEQ ID NO: 42801 - DNA, 19 bp, Homo sapiens
atcgcgtatgtgattgtga

SEQ ID NO: 42802 - DNA, 23 bp, Homo sapiens
aaggggtgtatcttggagtaaaa

SEQ ID NO: 42803 - DNA, 19 bp, Homo sapiens
acgctctcttgatgatgtt

SEQ ID NO: 42804 - DNA, 19 bp, Homo sapiens
accgtatcaaatgtgctta

SEQ ID NO: 42805 - DNA, 17 bp, Homo sapiens
tgcctaacgctttacaa

SEQ ID NO: 42806 - DNA, 20 bp, Homo sapiens
ttttaaaatctccctgacat

SEQ ID NO: 42807 - DNA, 18 bp, Homo sapiens
tgaggtcatctgcacttc

SEQ ID NO: 42808 - DNA, 20 bp, Homo sapiens
ctaatcacctcaggtttttc

SEQ ID NO: 42809 - DNA, 23 bp, Homo sapiens
tatatcagttacttcactagatg

SEQ ID NO: 42810 - DNA, 16 bp, Homo sapiens
aaggatcatcggcact

SEQ ID NO: 42811 - DNA, 23 bp, Homo sapiens
cgtaactaattgggagaatggga

SEQ ID NO: 42812 - DNA, 16 bp, Homo sapiens
tgtgcggatcctctga

SEQ ID NO: 42813 - DNA, 26 bp, Homo sapiens
aatatttaaattttggaaaacataat

SEQ ID NO: 42814 - DNA, 18 bp, Homo sapiens
ggtgacaatggggtcaat

SEQ ID NO: 42815 - DNA, 16 bp, Homo sapiens
atgggagaccaagtgc

SEQ ID NO: 42816 - DNA, 23 bp, Homo sapiens
agataagtgggatatcatttgta

SEQ ID NO: 42817 - DNA, 17 bp, Homo sapiens
gctatattcgcctgaga

SEQ ID NO: 42818 - DNA, 21 bp, Homo sapiens
ttgataataaccactcctaca

SEQ ID NO: 42819 - DNA, 17 bp, Homo sapiens
gctcacaaagacccaag

SEQ ID NO: 42820 - DNA, 21 bp, Homo sapiens
ggaaagtctgtcaaatttcaa

SEQ ID NO: 42821 - DNA, 18 bp, Homo sapiens
ttgtcagttttgtgagtc

SEQ ID NO: 42822 - DNA, 18 bp, Homo sapiens
catagcagatgcacatcc

SEQ ID NO: 42823 - DNA, 20 bp, Homo sapiens
aactaaggataaaagcagaa

SEQ ID NO: 42824 - DNA, 18 bp, Homo sapiens
tgcctaagcatcctataa

SEQ ID NO: 42825 - DNA, 23 bp, Homo sapiens
gaccttgcagtcatcttaacagg

SEQ ID NO: 42826 - DNA, 19 bp, Homo sapiens
cgttctctgtcagcaaaga

SEQ ID NO: 42827 - DNA, 24 bp, Homo sapiens
ggtcaaggatatttcagttggagg

SEQ ID NO: 42828 - DNA, 17 bp, Homo sapiens
tatttcaccctggcatg

SEQ ID NO: 42829 - DNA, 17 bp, Homo sapiens
tccagcgacaaatgtat

SEQ ID NO: 42830 - DNA, 20 bp, Homo sapiens
tcaagcctggcaccactttc

SEQ ID NO: 42831 - DNA, 17 bp, Homo sapiens
ggacagcactgatcaca

SEQ ID NO: 42832 - DNA, 23 bp, Homo sapiens
tccagatgttttctcttttcttc

SEQ ID NO: 42833 - DNA, 20 bp, Homo sapiens
aacataccttcacattcagt

SEQ ID NO: 42834 - DNA, 16 bp, Homo sapiens
tttgtgcttcctccct

SEQ ID NO: 42835 - DNA, 19 bp, Homo sapiens
cattactggctttttttct

SEQ ID NO: 42836 - DNA, 22 bp, Homo sapiens
gcataacacatgtggcgatagc

SEQ ID NO: 42837 - DNA, 25 bp, Homo sapiens
tcttcgaagtgataatataaatgag

SEQ ID NO: 42838 - DNA, 20 bp, Homo sapiens
gagctggaacttttctaact

SEQ ID NO: 42839 - DNA, 25 bp, Homo sapiens
gtctcaaaaaaaaaatctattatgt

SEQ ID NO: 42840 - DNA, 19 bp, Homo sapiens
ttgggtacaattaatgcag

SEQ ID NO: 42841 - DNA, 25 bp, Homo sapiens
aatcaaattgatgtttattaattta

SEQ ID NO: 42842 - DNA, 17 bp, Homo sapiens
cctttgggtctgaagaa

SEQ ID NO: 42843 - DNA, 23 bp, Homo sapiens
gaagaatgctattatgatgaaaa

SEQ ID NO: 42844 - DNA, 23 bp, Homo sapiens
taaaacatttttgtatgaaaaag

SEQ ID NO: 42845 - DNA, 17 bp, Homo sapiens
attggagggggtgtctg

SEQ ID NO: 42846 - DNA, 22 bp, Homo sapiens
acttaccttttaatttgaagtt

SEQ ID NO: 42847 - DNA, 19 bp, Homo sapiens
gcgagacatgtactgatgg

SEQ ID NO: 42848 - DNA, 30 bp, Homo sapiens
gattttagaaattataaacatgtattaaag

SEQ ID NO: 42849 - DNA, 16 bp, Homo sapiens
aaccaattggatcgca

SEQ ID NO: 42850 - DNA, 22 bp, Homo sapiens
attattaaaactactttgtcta

SEQ ID NO: 42851 - DNA, 17 bp, Homo sapiens
ctgctgcagctctcacc

SEQ ID NO: 42852 - DNA, 22 bp, Homo sapiens
tattacacttcgttaaattcat

SEQ ID NO: 42853 - DNA, 25 bp, Homo sapiens
ctgcaaaatattcttctgaaaataa

SEQ ID NO: 42854 - DNA, 17 bp, Homo sapiens
gccatgtcattgcgatc

SEQ ID NO: 42855 - DNA, 18 bp, Homo sapiens
ggaacgctaatacactga

SEQ ID NO: 42856 - DNA, 16 bp, Homo sapiens
acatgctcgacgaggt

SEQ ID NO: 42857 - DNA, 17 bp, Homo sapiens
ccagttttgcaatgaca

SEQ ID NO: 42858 - DNA, 20 bp, Homo sapiens
aaaaatctatttttgtgtca

SEQ ID NO: 42859 - DNA, 16 bp, Homo sapiens
tgcagtccgggtagcc

SEQ ID NO: 42860 - DNA, 24 bp, Homo sapiens
ttaacaactaaattatgtacttgt

SEQ ID NO: 42861 - DNA, 16 bp, Homo sapiens
cagatacaggggccaa

SEQ ID NO: 42862 - DNA, 17 bp, Homo sapiens
tttggcacctggatcct

SEQ ID NO: 42863 - DNA, 20 bp, Homo sapiens
gccaagaaaaataaccttct

SEQ ID NO: 42864 - DNA, 16 bp, Homo sapiens
caggggctacactggc

SEQ ID NO: 42865 - DNA, 18 bp, Homo sapiens
atggatacttccagaagt

SEQ ID NO: 42866 - DNA, 23 bp, Homo sapiens
tagggagcaaaaatgaggatcct

SEQ ID NO: 42867 - DNA, 21 bp, Homo sapiens
ggatacagcttaacacatagc

SEQ ID NO: 42868 - DNA, 17 bp, Homo sapiens
ccggatttgcaacgact

SEQ ID NO: 42869 - DNA, 20 bp, Homo sapiens
gttgagagggtaaaatgaag

SEQ ID NO: 42870 - DNA, 17 bp, Homo sapiens
tgaaacccctgaacaga

SEQ ID NO: 42871 - DNA, 19 bp, Homo sapiens
agctcataatgttgaagga

SEQ ID NO: 42872 - DNA, 18 bp, Homo sapiens
acagaaccaaatggtgct

SEQ ID NO: 42873 - DNA, 24 bp, Homo sapiens
aggaaaatgttgaaggaggagact

SEQ ID NO: 42874 - DNA, 22 bp, Homo sapiens
agaaactgttcatacaaaagaa

SEQ ID NO: 42875 - DNA, 16 bp, Homo sapiens
tggaaaggctgcgatg

SEQ ID NO: 42876 - DNA, 21 bp, Homo sapiens
cagcatttgaagaaaattcca

SEQ ID NO: 42877 - DNA, 20 bp, Homo sapiens
ctactggacctatggcaaag

SEQ ID NO: 42878 - DNA, 18 bp, Homo sapiens
ccaggaaggtcagtcaga

SEQ ID NO: 42879 - DNA, 24 bp, Homo sapiens
aaatgtttgtggtttggttttttt

SEQ ID NO: 42880 - DNA, 17 bp, Homo sapiens
tgatctgctgaggtgag

SEQ ID NO: 42881 - DNA, 24 bp, Homo sapiens
atgaaagagaaaagcagctgatag

SEQ ID NO: 42882 - DNA, 16 bp, Homo sapiens
ggagccggcgcgctcc

SEQ ID NO: 42883 - DNA, 16 bp, Homo sapiens
caagatatgagtggct

SEQ ID NO: 42884 - DNA, 18 bp, Homo sapiens
agtcagttaaagcagaat

SEQ ID NO: 42885 - DNA, 17 bp, Homo sapiens
cagcaggacgacttgga

SEQ ID NO: 42886 - DNA, 21 bp, Homo sapiens
caattcagtgtgtatttgatt

SEQ ID NO: 42887 - DNA, 19 bp, Homo sapiens
gccctgccgcacagctact

SEQ ID NO: 42888 - DNA, 19 bp, Homo sapiens
ttgtgcaacatggaagaaa

SEQ ID NO: 42889 - DNA, 23 bp, Homo sapiens
aaggttactcctaaataaatgcc

SEQ ID NO: 42890 - DNA, 20 bp, Homo sapiens
cctcttcttcaaggtcatat

SEQ ID NO: 42891 - DNA, 19 bp, Homo sapiens
aatactgccctatagaaca

SEQ ID NO: 42892 - DNA, 17 bp, Homo sapiens
gtactctacctctaaga

SEQ ID NO: 42893 - DNA, 24 bp, Homo sapiens
taatagcccatctcctatcccgta

SEQ ID NO: 42894 - DNA, 21 bp, Homo sapiens
aggtaaaaaatacagtactgg

SEQ ID NO: 42895 - DNA, 20 bp, Homo sapiens
gaggacagttgacatttacc

SEQ ID NO: 42896 - DNA, 23 bp, Homo sapiens
aatctcctaaggtatattttttt

SEQ ID NO: 42897 - DNA, 19 bp, Homo sapiens
tgttctccagcttatgatt

SEQ ID NO: 42898 - DNA, 23 bp, Homo sapiens
ctctgtctccaaaaaaaaataaa

SEQ ID NO: 42899 - DNA, 16 bp, Homo sapiens
tgttcttcagatgggt

SEQ ID NO: 42900 - DNA, 22 bp, Homo sapiens
gtggaggatacaaatatagata

SEQ ID NO: 42901 - DNA, 17 bp, Homo sapiens
actggaaaatgtgtgcc

SEQ ID NO: 42902 - DNA, 24 bp, Homo sapiens
cttttttatttcttttttttcccc

SEQ ID NO: 42903 - DNA, 18 bp, Homo sapiens
tgtgatttgtaggaggac

SEQ ID NO: 42904 - DNA, 23 bp, Homo sapiens
cagcccaagatgaggtgtacctg

SEQ ID NO: 42905 - DNA, 16 bp, Homo sapiens
tgaacgttggagctgc

SEQ ID NO: 42906 - DNA, 24 bp, Homo sapiens
aaagaagaatcatttaccatacat

SEQ ID NO: 42907 - DNA, 19 bp, Homo sapiens
ctaggtgccttaaaaaatt

SEQ ID NO: 42908 - DNA, 20 bp, Homo sapiens
gaatttgaagagagtcctcc

SEQ ID NO: 42909 - DNA, 19 bp, Homo sapiens
aagagaaaaatctttcaga

SEQ ID NO: 42910 - DNA, 24 bp, Homo sapiens
tatgacaaaggaccagagcttttg

SEQ ID NO: 42911 - DNA, 16 bp, Homo sapiens
gctgcaatgcttccat

SEQ ID NO: 42912 - DNA, 24 bp, Homo sapiens
cataattggcttatatttatgtca

SEQ ID NO: 42913 - DNA, 17 bp, Homo sapiens
gcaagcttacttcacaa

SEQ ID NO: 42914 - DNA, 20 bp, Homo sapiens
cttattcaccatctcttttt

SEQ ID NO: 42915 - DNA, 21 bp, Homo sapiens
tagaataggttattgaaagca

SEQ ID NO: 42916 - DNA, 17 bp, Homo sapiens
cgctgtctcctatccta

SEQ ID NO: 42917 - DNA, 21 bp, Homo sapiens
caagttttgtttttaagtgat

SEQ ID NO: 42918 - DNA, 21 bp, Homo sapiens
ccaccagggtatactggctcc

SEQ ID NO: 42919 - DNA, 22 bp, Homo sapiens
ctctgttgcaatgtttcaataa

SEQ ID NO: 42920 - DNA, 16 bp, Homo sapiens
atggctcacagatgcc

SEQ ID NO: 42921 - DNA, 22 bp, Homo sapiens
tgttattttctgttatcagaaa

SEQ ID NO: 42922 - DNA, 16 bp, Homo sapiens
agcacttaccaggcat

SEQ ID NO: 42923 - DNA, 22 bp, Homo sapiens
atctccaagactgactaaagcc

SEQ ID NO: 42924 - DNA, 19 bp, Homo sapiens
ctgaattgtagcatctgtc

SEQ ID NO: 42925 - DNA, 20 bp, Homo sapiens
ttaacggcactatttttggt

SEQ ID NO: 42926 - DNA, 22 bp, Homo sapiens
tcagttcaatacaaagatcttt

SEQ ID NO: 42927 - DNA, 22 bp, Homo sapiens
gtcctgtgatgacgtcactgga

SEQ ID NO: 42928 - DNA, 24 bp, Homo sapiens
tattaaattaactttcaatgctat

SEQ ID NO: 42929 - DNA, 20 bp, Homo sapiens
aggaagacatttatcacaat

SEQ ID NO: 42930 - DNA, 23 bp, Homo sapiens
tggaaaaattattcttgctggca

SEQ ID NO: 42931 - DNA, 16 bp, Homo sapiens
ggcacagggttgacag

SEQ ID NO: 42932 - DNA, 18 bp, Homo sapiens
tgttgatccctgacacca

SEQ ID NO: 42933 - DNA, 18 bp, Homo sapiens
tgctgagcttattcatgg

SEQ ID NO: 42934 - DNA, 16 bp, Homo sapiens
tcacacaggtggccca

SEQ ID NO: 42935 - DNA, 27 bp, Homo sapiens
gtttattatttatttacatgggataaa

SEQ ID NO: 42936 - DNA, 17 bp, Homo sapiens
aggaacctctgaagact

SEQ ID NO: 42937 - DNA, 20 bp, Homo sapiens
tcttaggtttgaaaaaattc

SEQ ID NO: 42938 - DNA, 19 bp, Homo sapiens
caatgtcatttcatcctcc

SEQ ID NO: 42939 - DNA, 21 bp, Homo sapiens
cacagatcaatccaagactcc

SEQ ID NO: 42940 - DNA, 23 bp, Homo sapiens
gagaatgaccagcctgtactctt

SEQ ID NO: 42941 - DNA, 23 bp, Homo sapiens
tagtatactcttacctctcacag

SEQ ID NO: 42942 - DNA, 17 bp, Homo sapiens
tgactttgtgtatgtcc

SEQ ID NO: 42943 - DNA, 17 bp, Homo sapiens
tgattgtatctgcggtt

SEQ ID NO: 42944 - DNA, 20 bp, Homo sapiens
ctttagcccaacgtgccatt

SEQ ID NO: 42945 - DNA, 21 bp, Homo sapiens
aagtgcgttgagaaactttat

SEQ ID NO: 42946 - DNA, 17 bp, Homo sapiens
gtacacaggaccacgct

SEQ ID NO: 42947 - DNA, 19 bp, Homo sapiens
tacactgcagttgtagaaa

SEQ ID NO: 42948 - DNA, 17 bp, Homo sapiens
acatgatcctccaggta

SEQ ID NO: 42949 - DNA, 21 bp, Homo sapiens
aaggaaaatccatcatcctgg

SEQ ID NO: 42950 - DNA, 16 bp, Homo sapiens
aagctgtcacagctgc

SEQ ID NO: 42951 - DNA, 18 bp, Homo sapiens
aactgaggtccccccaaa

SEQ ID NO: 42952 - DNA, 16 bp, Homo sapiens
gcacagagctcacagt

SEQ ID NO: 42953 - DNA, 20 bp, Homo sapiens
ctattttggacaaccctctg

SEQ ID NO: 42954 - DNA, 21 bp, Homo sapiens
gcatcaatagttcaggactta

SEQ ID NO: 42955 - DNA, 18 bp, Homo sapiens
tctccatccctggcagct

SEQ ID NO: 42956 - DNA, 18 bp, Homo sapiens
ccacactcaagaactcat

SEQ ID NO: 42957 - DNA, 18 bp, Homo sapiens
caggtacaacaggccggt

SEQ ID NO: 42958 - DNA, 23 bp, Homo sapiens
atatgcagactctgtatattcta

SEQ ID NO: 42959 - DNA, 17 bp, Homo sapiens
tgcgaagaactgtcagc

SEQ ID NO: 42960 - DNA, 23 bp, Homo sapiens
tagggattaaatgatagaatgcc

SEQ ID NO: 42961 - DNA, 17 bp, Homo sapiens
gactgtggcaaacctca

SEQ ID NO: 42962 - DNA, 22 bp, Homo sapiens
tgttactgaacttaggcgtcca

SEQ ID NO: 42963 - DNA, 19 bp, Homo sapiens
ctccttaccttgcatttgt

SEQ ID NO: 42964 - DNA, 24 bp, Homo sapiens
agactattagaaagttttcctgat

SEQ ID NO: 42965 - DNA, 17 bp, Homo sapiens
tgaaaagccagtgaaaa

SEQ ID NO: 42966 - DNA, 18 bp, Homo sapiens
cggtggctctttctctga

SEQ ID NO: 42967 - DNA, 23 bp, Homo sapiens
agtcatttcaattgtagaattag

SEQ ID NO: 42968 - DNA, 16 bp, Homo sapiens
acgttcagggtcagag

SEQ ID NO: 42969 - DNA, 17 bp, Homo sapiens
acagccccttgctgatt

SEQ ID NO: 42970 - DNA, 19 bp, Homo sapiens
tgaggaatcctgataactc

SEQ ID NO: 42971 - DNA, 21 bp, Homo sapiens
aacattgtccactctcttcac

SEQ ID NO: 42972 - DNA, 22 bp, Homo sapiens
catcttgcttcacttcgagtta

SEQ ID NO: 42973 - DNA, 16 bp, Homo sapiens
tgaaatagccgtgggc

SEQ ID NO: 42974 - DNA, 22 bp, Homo sapiens
ggctgggacctttggcctacaa

SEQ ID NO: 42975 - DNA, 19 bp, Homo sapiens
cagagtgaatatgtaggac

SEQ ID NO: 42976 - DNA, 20 bp, Homo sapiens
gggtctaagtcattcgactg

SEQ ID NO: 42977 - DNA, 17 bp, Homo sapiens
caatctgtgcttccttt

SEQ ID NO: 42978 - DNA, 16 bp, Homo sapiens
atgtgaccgctgtgcc

SEQ ID NO: 42979 - DNA, 22 bp, Homo sapiens
gacatgtatttcattttttaag

SEQ ID NO: 42980 - DNA, 18 bp, Homo sapiens
agtctttgggtcacaatt

SEQ ID NO: 42981 - DNA, 24 bp, Homo sapiens
aaatatccttaagtgtagaactga

SEQ ID NO: 42982 - DNA, 18 bp, Homo sapiens
tgggtgcacatttagaac

SEQ ID NO: 42983 - DNA, 24 bp, Homo sapiens
aacactttgtgtcaaatttttact

SEQ ID NO: 42984 - DNA, 18 bp, Homo sapiens
tcagagcaaaaaagtggt

SEQ ID NO: 42985 - DNA, 17 bp, Homo sapiens
tgttctcatctgggtaa

SEQ ID NO: 42986 - DNA, 22 bp, Homo sapiens
atattgaattttgaaatgccca

SEQ ID NO: 42987 - DNA, 18 bp, Homo sapiens
ccaataccattggagaga

SEQ ID NO: 42988 - DNA, 22 bp, Homo sapiens
ttgattaatatctgtaatcaca

SEQ ID NO: 42989 - DNA, 24 bp, Homo sapiens
ttatgttcactgatgtttcccaag

SEQ ID NO: 42990 - DNA, 19 bp, Homo sapiens
ggcctgtatttacattgca

SEQ ID NO: 42991 - DNA, 18 bp, Homo sapiens
atgtgtttaatggaagca

SEQ ID NO: 42992 - DNA, 16 bp, Homo sapiens
gtgacctcgactgcac

SEQ ID NO: 42993 - DNA, 16 bp, Homo sapiens
tgttaatggttgctgt

SEQ ID NO: 42994 - DNA, 16 bp, Homo sapiens
ttgtggcatctgtccc

SEQ ID NO: 42995 - DNA, 18 bp, Homo sapiens
gggatccttggatttcca

SEQ ID NO: 42996 - DNA, 16 bp, Homo sapiens
tacaagtgcactgccc

SEQ ID NO: 42997 - DNA, 23 bp, Homo sapiens
attctctggtgcaaaatgtacag

SEQ ID NO: 42998 - DNA, 18 bp, Homo sapiens
gagcaatggaaacagaat

SEQ ID NO: 42999 - DNA, 20 bp, Homo sapiens
gtgactgcttcctccctggg

SEQ ID NO: 43000 - DNA, 18 bp, Homo sapiens
tccatctgtttgtttagc

SEQ ID NO: 43001 - DNA, 22 bp, Homo sapiens
aaatgctcctgtagtgatcaaa

SEQ ID NO: 43002 - DNA, 23 bp, Homo sapiens
ttaactacatgtgccatttgaga

SEQ ID NO: 43003 - DNA, 17 bp, Homo sapiens
ttggcatcgagtccgaa

SEQ ID NO: 43004 - DNA, 23 bp, Homo sapiens
aaattttttaaaaagagtatgct

SEQ ID NO: 43005 - DNA, 16 bp, Homo sapiens
ttcagagcactgggta

SEQ ID NO: 43006 - DNA, 23 bp, Homo sapiens
gttataaactctgagggtctctt

SEQ ID NO: 43007 - DNA, 22 bp, Homo sapiens
aggaactaacattataccatta

SEQ ID NO: 43008 - DNA, 20 bp, Homo sapiens
acagatgccggcctggcaaa

SEQ ID NO: 43009 - DNA, 21 bp, Homo sapiens
ttaaatgttttgccattttct

SEQ ID NO: 43010 - DNA, 21 bp, Homo sapiens
gctattgcttcggcactacta

SEQ ID NO: 43011 - DNA, 18 bp, Homo sapiens
ctctaatggcacgtgacc

SEQ ID NO: 43012 - DNA, 18 bp, Homo sapiens
tctaccaggggtagaatg

SEQ ID NO: 43013 - DNA, 24 bp, Homo sapiens
tgcttgtgagaacatcatcagaat

SEQ ID NO: 43014 - DNA, 20 bp, Homo sapiens
caacaatctctggatgttga

SEQ ID NO: 43015 - DNA, 17 bp, Homo sapiens
aagaaatgtccaaagcg

SEQ ID NO: 43016 - DNA, 19 bp, Homo sapiens
tctggaagtttccaataaa

SEQ ID NO: 43017 - DNA, 22 bp, Homo sapiens
ggtgactctgaaggctgagcag

SEQ ID NO: 43018 - DNA, 19 bp, Homo sapiens
cttgttctcacttgacatt

SEQ ID NO: 43019 - DNA, 20 bp, Homo sapiens
gaccaccaagggcattgttt

SEQ ID NO: 43020 - DNA, 23 bp, Homo sapiens
tgacaaaataaaaagaagaatga

SEQ ID NO: 43021 - DNA, 23 bp, Homo sapiens
atgagagaagatctccatttgga

SEQ ID NO: 43022 - DNA, 18 bp, Homo sapiens
ccgagcctcgaaatagat

SEQ ID NO: 43023 - DNA, 18 bp, Homo sapiens
ggtaagcacaagaacttt

SEQ ID NO: 43024 - DNA, 16 bp, Homo sapiens
aggtgtcccacctcga

SEQ ID NO: 43025 - DNA, 20 bp, Homo sapiens
accatttggagatttatcca

SEQ ID NO: 43026 - DNA, 18 bp, Homo sapiens
tgccttgtcaattggcca

SEQ ID NO: 43027 - DNA, 20 bp, Homo sapiens
gggggcaaactcaagtatgc

SEQ ID NO: 43028 - DNA, 21 bp, Homo sapiens
gcaaaaccattgattggtatc

SEQ ID NO: 43029 - DNA, 17 bp, Homo sapiens
tcaagtgatcattcgag

SEQ ID NO: 43030 - DNA, 19 bp, Homo sapiens
tatttccattctttctgtt

SEQ ID NO: 43031 - DNA, 22 bp, Homo sapiens
aggcatatggctgctcctctga

SEQ ID NO: 43032 - DNA, 24 bp, Homo sapiens
tatagtatatccaagaagtcttct

SEQ ID NO: 43033 - DNA, 18 bp, Homo sapiens
tcattgtttggtgcaaag

SEQ ID NO: 43034 - DNA, 17 bp, Homo sapiens
tgctttgtcgcatgaaa

SEQ ID NO: 43035 - DNA, 20 bp, Homo sapiens
agtgatttctcttcttgtta

SEQ ID NO: 43036 - DNA, 17 bp, Homo sapiens
aggtcaataaccttcct

SEQ ID NO: 43037 - DNA, 17 bp, Homo sapiens
agaactgtgacccgaga

SEQ ID NO: 43038 - DNA, 23 bp, Homo sapiens
tcttctatcattatactgcaaaa

SEQ ID NO: 43039 - DNA, 23 bp, Homo sapiens
tcttatcaaagctacttatggaa

SEQ ID NO: 43040 - DNA, 19 bp, Homo sapiens
caagggtcaacttatgtac

SEQ ID NO: 43041 - DNA, 17 bp, Homo sapiens
gttgttccacgtccttg

SEQ ID NO: 43042 - DNA, 21 bp, Homo sapiens
agaacatacttgaggttgaca

SEQ ID NO: 43043 - DNA, 16 bp, Homo sapiens
aatagcccaggggaca

SEQ ID NO: 43044 - DNA, 20 bp, Homo sapiens
taggtgatcttaactgactg

SEQ ID NO: 43045 - DNA, 18 bp, Homo sapiens
ctcctgaagtgacttgag

SEQ ID NO: 43046 - DNA, 19 bp, Homo sapiens
aaatctcaatggaggtagc

SEQ ID NO: 43047 - DNA, 22 bp, Homo sapiens
aaataaaatagattaagaatat

SEQ ID NO: 43048 - DNA, 20 bp, Homo sapiens
tgattgaaaaatgtgattgt

SEQ ID NO: 43049 - DNA, 24 bp, Homo sapiens
tgatttgtactaaatatcaataac

SEQ ID NO: 43050 - DNA, 17 bp, Homo sapiens
tgagaacgcagtcgata

SEQ ID NO: 43051 - DNA, 23 bp, Homo sapiens
gtaagtgatgttgcccctgccgc

SEQ ID NO: 43052 - DNA, 19 bp, Homo sapiens
ccattacattgacatggaa

SEQ ID NO: 43053 - DNA, 19 bp, Homo sapiens
aagcgttgctaatgcagta

SEQ ID NO: 43054 - DNA, 16 bp, Homo sapiens
aaggctcagaggacta

SEQ ID NO: 43055 - DNA, 19 bp, Homo sapiens
catgcttgccgggatttta

SEQ ID NO: 43056 - DNA, 20 bp, Homo sapiens
gctggcctctgcatgcagat

SEQ ID NO: 43057 - DNA, 19 bp, Homo sapiens
cctgggcacctgtgttcca

SEQ ID NO: 43058 - DNA, 21 bp, Homo sapiens
aatatctttttcccttacata

SEQ ID NO: 43059 - DNA, 18 bp, Homo sapiens
acatcgatatgccaggta

SEQ ID NO: 43060 - DNA, 23 bp, Homo sapiens
atttatatcaaagactgagttct

SEQ ID NO: 43061 - DNA, 17 bp, Homo sapiens
cgttcacagaagtcacc

SEQ ID NO: 43062 - DNA, 19 bp, Homo sapiens
aagaaagtatatgtgttca

SEQ ID NO: 43063 - DNA, 17 bp, Homo sapiens
gcacattgctgacagtc

SEQ ID NO: 43064 - DNA, 23 bp, Homo sapiens
attacattctaactatcactaaa

SEQ ID NO: 43065 - DNA, 19 bp, Homo sapiens
tctgattgggaaatatggt

SEQ ID NO: 43066 - DNA, 17 bp, Homo sapiens
caacatcacactgctgg

SEQ ID NO: 43067 - DNA, 20 bp, Homo sapiens
tgtctacatggaaaaaatag

SEQ ID NO: 43068 - DNA, 18 bp, Homo sapiens
aagggattgccaaatgac

SEQ ID NO: 43069 - DNA, 21 bp, Homo sapiens
tatactcacttttgtcatgtt

SEQ ID NO: 43070 - DNA, 16 bp, Homo sapiens
caagtccttctgcgac

SEQ ID NO: 43071 - DNA, 24 bp, Homo sapiens
aattataaagatggcatttattac

SEQ ID NO: 43072 - DNA, 17 bp, Homo sapiens
tgttggtacctttcaca

SEQ ID NO: 43073 - DNA, 25 bp, Homo sapiens
atactattttataaaataaatggat

SEQ ID NO: 43074 - DNA, 17 bp, Homo sapiens
ttcctattgtgaccctt

SEQ ID NO: 43075 - DNA, 16 bp, Homo sapiens
gcccctcttgtgtcgc

SEQ ID NO: 43076 - DNA, 23 bp, Homo sapiens
gcattgtaatttaaacttctaaa

SEQ ID NO: 43077 - DNA, 20 bp, Homo sapiens
cacggggatatgaaggccag

SEQ ID NO: 43078 - DNA, 22 bp, Homo sapiens
gcaaagcctactgtttactatc

SEQ ID NO: 43079 - DNA, 16 bp, Homo sapiens
ttcttggcaggagcct

SEQ ID NO: 43080 - DNA, 24 bp, Homo sapiens
tgctatcagttttgttgcatcaaa

SEQ ID NO: 43081 - DNA, 18 bp, Homo sapiens
gtgcagaatcctgtgaca

SEQ ID NO: 43082 - DNA, 23 bp, Homo sapiens
gacttgctattaacctcttttgc

SEQ ID NO: 43083 - DNA, 16 bp, Homo sapiens
cctcgcgtgcatgcca

SEQ ID NO: 43084 - DNA, 16 bp, Homo sapiens
gtccaggcaaccctgg

SEQ ID NO: 43085 - DNA, 18 bp, Homo sapiens
gaatcaaggcctccaaaa

SEQ ID NO: 43086 - DNA, 19 bp, Homo sapiens
gtgccctgtgaccctgtca

SEQ ID NO: 43087 - DNA, 20 bp, Homo sapiens
gcaaaaaaaaaaaaaaaggc

SEQ ID NO: 43088 - DNA, 20 bp, Homo sapiens
aagtgtgacggctgcaagca

SEQ ID NO: 43089 - DNA, 18 bp, Homo sapiens
cagcaggtgaacagcaga

SEQ ID NO: 43090 - DNA, 24 bp, Homo sapiens
tcaaccatcatccatttgatagca

SEQ ID NO: 43091 - DNA, 16 bp, Homo sapiens
catctgctccaggcga

SEQ ID NO: 43092 - DNA, 23 bp, Homo sapiens
attattcttggaccataaaatat

SEQ ID NO: 43093 - DNA, 20 bp, Homo sapiens
tattttcaagaccatacagc

SEQ ID NO: 43094 - DNA, 21 bp, Homo sapiens
agaagtaactactctttgtca

SEQ ID NO: 43095 - DNA, 16 bp, Homo sapiens
cttgtccctggccctt

SEQ ID NO: 43096 - DNA, 16 bp, Homo sapiens
gtgacttggctcgcct

SEQ ID NO: 43097 - DNA, 16 bp, Homo sapiens
tggggctgtgggaaga

SEQ ID NO: 43098 - DNA, 20 bp, Homo sapiens
ccgctgcctgcgccatataa

SEQ ID NO: 43099 - DNA, 17 bp, Homo sapiens
gtttgaaaaacactggt

SEQ ID NO: 43100 - DNA, 24 bp, Homo sapiens
tttggcatgacactcaatgtgtaa

SEQ ID NO: 43101 - DNA, 16 bp, Homo sapiens
gccctctgccagctga

SEQ ID NO: 43102 - DNA, 19 bp, Homo sapiens
gtgagaaggctaagttcct

SEQ ID NO: 43103 - DNA, 16 bp, Homo sapiens
ttttgccaccttaccc

SEQ ID NO: 43104 - DNA, 23 bp, Homo sapiens
aaggccatttactaaaaatgttt

SEQ ID NO: 43105 - DNA, 20 bp, Homo sapiens
gcatttcagaactttgaagt

SEQ ID NO: 43106 - DNA, 20 bp, Homo sapiens
cagcgggccccagagaggct

SEQ ID NO: 43107 - DNA, 19 bp, Homo sapiens
agcaagtcagaatacatct

SEQ ID NO: 43108 - DNA, 16 bp, Homo sapiens
tgaacgagctgctgac

SEQ ID NO: 43109 - DNA, 23 bp, Homo sapiens
aattgtatacgtgagcatggggc

SEQ ID NO: 43110 - DNA, 17 bp, Homo sapiens
cctctcagcatcctgtc

SEQ ID NO: 43111 - DNA, 21 bp, Homo sapiens
cgttggctcaaagtaatattt

SEQ ID NO: 43112 - DNA, 23 bp, Homo sapiens
taataccttctgcatcccgggca

SEQ ID NO: 43113 - DNA, 22 bp, Homo sapiens
tctctattaattatgtgtttcc

SEQ ID NO: 43114 - DNA, 17 bp, Homo sapiens
tccctttctgtgttttt

SEQ ID NO: 43115 - DNA, 17 bp, Homo sapiens
agatggcgagcagaccg

SEQ ID NO: 43116 - DNA, 20 bp, Homo sapiens
tgaaactctacctttgattt

SEQ ID NO: 43117 - DNA, 16 bp, Homo sapiens
attaaggagcttgccc

SEQ ID NO: 43118 - DNA, 17 bp, Homo sapiens
cctgtttgttactgatt

SEQ ID NO: 43119 - DNA, 20 bp, Homo sapiens
ctcgagttcctagagtttca

SEQ ID NO: 43120 - DNA, 20 bp, Homo sapiens
cggcaaaatactcttcattt

SEQ ID NO: 43121 - DNA, 22 bp, Homo sapiens
ttctttaatcatctggtcaatc

SEQ ID NO: 43122 - DNA, 17 bp, Homo sapiens
tgtggcatgtttgttta

SEQ ID NO: 43123 - DNA, 18 bp, Homo sapiens
cacaccaactcatcttca

SEQ ID NO: 43124 - DNA, 26 bp, Homo sapiens
aaaagctataaaactaaatgaaactc

SEQ ID NO: 43125 - DNA, 22 bp, Homo sapiens
ttagaaaactgtaaattatctg

SEQ ID NO: 43126 - DNA, 16 bp, Homo sapiens
agggcttcagaaagag

SEQ ID NO: 43127 - DNA, 19 bp, Homo sapiens
gcaaatatctccaggttgg

SEQ ID NO: 43128 - DNA, 18 bp, Homo sapiens
acacaaaaggaaattgct

SEQ ID NO: 43129 - DNA, 19 bp, Homo sapiens
aacagcttcttcacttttt

SEQ ID NO: 43130 - DNA, 21 bp, Homo sapiens
acatgttttcttattttctca

SEQ ID NO: 43131 - DNA, 16 bp, Homo sapiens
gccagtttttcccgga

SEQ ID NO: 43132 - DNA, 18 bp, Homo sapiens
aataaaccctaaggcagt

SEQ ID NO: 43133 - DNA, 20 bp, Homo sapiens
ctctgattttatctgtggct

SEQ ID NO: 43134 - DNA, 20 bp, Homo sapiens
cagagctgcagaagcccttc

SEQ ID NO: 43135 - DNA, 16 bp, Homo sapiens
acctccaatgcagtca

SEQ ID NO: 43136 - DNA, 17 bp, Homo sapiens
aatggagaaggatctcc

SEQ ID NO: 43137 - DNA, 20 bp, Homo sapiens
cagccatgttcaacactgcc

SEQ ID NO: 43138 - DNA, 18 bp, Homo sapiens
atgcttgggaccttttga

SEQ ID NO: 43139 - DNA, 18 bp, Homo sapiens
ccccctttcagagttgtc

SEQ ID NO: 43140 - DNA, 19 bp, Homo sapiens
cagtaaatcagaaaaacat

SEQ ID NO: 43141 - DNA, 23 bp, Homo sapiens
actcttcaaggactggctaagta

SEQ ID NO: 43142 - DNA, 20 bp, Homo sapiens
tcttttaaagtgttctcaat

SEQ ID NO: 43143 - DNA, 20 bp, Homo sapiens
accttttttgctaagctttt

SEQ ID NO: 43144 - DNA, 21 bp, Homo sapiens
cacgtctatgatggagttgat

SEQ ID NO: 43145 - DNA, 23 bp, Homo sapiens
ttatgaaaatgcaattttgatgt

SEQ ID NO: 43146 - DNA, 19 bp, Homo sapiens
tttctcatcggctcccatt

SEQ ID NO: 43147 - DNA, 18 bp, Homo sapiens
agcggcaaacgacaaatt

SEQ ID NO: 43148 - DNA, 23 bp, Homo sapiens
aataattttatctccacaagaaa

SEQ ID NO: 43149 - DNA, 23 bp, Homo sapiens
tcgatgaagccaaccgtcttgca

SEQ ID NO: 43150 - DNA, 18 bp, Homo sapiens
acataggtggcaatttag

SEQ ID NO: 43151 - DNA, 22 bp, Homo sapiens
tcaaaaaaaaaaaaaaaaaaac

SEQ ID NO: 43152 - DNA, 19 bp, Homo sapiens
gcaagcttcctgtccttta

SEQ ID NO: 43153 - DNA, 24 bp, Homo sapiens
gaaattagtaaaagagaggaggct

SEQ ID NO: 43154 - DNA, 18 bp, Homo sapiens
ggacagcagatgagtcat

SEQ ID NO: 43155 - DNA, 16 bp, Homo sapiens
tgaagacatccaaact

SEQ ID NO: 43156 - DNA, 17 bp, Homo sapiens
aaaacctttggacaagc

SEQ ID NO: 43157 - DNA, 17 bp, Homo sapiens
tgacctctcccaagaaa

SEQ ID NO: 43158 - DNA, 21 bp, Homo sapiens
agtgtgttcataattaacaga

SEQ ID NO: 43159 - DNA, 22 bp, Homo sapiens
gagagccacgcagctcagttga

SEQ ID NO: 43160 - DNA, 24 bp, Homo sapiens
atataataagtagatacttcacta

SEQ ID NO: 43161 - DNA, 17 bp, Homo sapiens
tgctgtaagctttgaag

SEQ ID NO: 43162 - DNA, 17 bp, Homo sapiens
atttggaagccagattt

SEQ ID NO: 43163 - DNA, 18 bp, Homo sapiens
ttcatgtgcaagatcttt

SEQ ID NO: 43164 - DNA, 22 bp, Homo sapiens
ctgacattccttttttgaatca

SEQ ID NO: 43165 - DNA, 18 bp, Homo sapiens
aaggttgacttccattcc

SEQ ID NO: 43166 - DNA, 20 bp, Homo sapiens
ccttcaatgccactgcagcc

SEQ ID NO: 43167 - DNA, 23 bp, Homo sapiens
ataacccaaaacaaatataccaa

SEQ ID NO: 43168 - DNA, 20 bp, Homo sapiens
gagaaagttgccaaagaagc

SEQ ID NO: 43169 - DNA, 19 bp, Homo sapiens
aattatagcataccgagaa

SEQ ID NO: 43170 - DNA, 19 bp, Homo sapiens
cctaactttaactaccgaa

SEQ ID NO: 43171 - DNA, 20 bp, Homo sapiens
cctgaagcttttctgaagac

SEQ ID NO: 43172 - DNA, 20 bp, Homo sapiens
ctttcctaaaggcaaactct

SEQ ID NO: 43173 - DNA, 20 bp, Homo sapiens
atggccacactgacctttta

SEQ ID NO: 43174 - DNA, 19 bp, Homo sapiens
tggttttagatgtatgaca

SEQ ID NO: 43175 - DNA, 21 bp, Homo sapiens
ctccaatagtgtgatagaata

SEQ ID NO: 43176 - DNA, 17 bp, Homo sapiens
aggaagatgccaaaggc

SEQ ID NO: 43177 - DNA, 22 bp, Homo sapiens
tttacttgcattaaatagatta

SEQ ID NO: 43178 - DNA, 22 bp, Homo sapiens
gttagcaaatgatgtaaaaggt

SEQ ID NO: 43179 - DNA, 28 bp, Homo sapiens
gattggaaatatatttatgtatagatgc

SEQ ID NO: 43180 - DNA, 19 bp, Homo sapiens
agagatccccatttctagc

SEQ ID NO: 43181 - DNA, 27 bp, Homo sapiens
attttatattaaaataacctgaaattg

SEQ ID NO: 43182 - DNA, 19 bp, Homo sapiens
tgaatgcttaccatttgga

SEQ ID NO: 43183 - DNA, 26 bp, Homo sapiens
cttatttaatccttttttttgttttt

SEQ ID NO: 43184 - DNA, 19 bp, Homo sapiens
aaaagttaacaacagtctt

SEQ ID NO: 43185 - DNA, 18 bp, Homo sapiens
ccaggatagaaaatgctg

SEQ ID NO: 43186 - DNA, 21 bp, Homo sapiens
tgagtaagaaaaacagtatct

SEQ ID NO: 43187 - DNA, 18 bp, Homo sapiens
tttgggaaagttatcagc

SEQ ID NO: 43188 - DNA, 18 bp, Homo sapiens
gctttgtccttaacagct

SEQ ID NO: 43189 - DNA, 21 bp, Homo sapiens
ttttccctttgtaaatgtgtc

SEQ ID NO: 43190 - DNA, 21 bp, Homo sapiens
atcgaggttctggtggagctc

SEQ ID NO: 43191 - DNA, 16 bp, Homo sapiens
taagccactaactcca

SEQ ID NO: 43192 - DNA, 16 bp, Homo sapiens
ttcgttttggcgacgc

SEQ ID NO: 43193 - DNA, 19 bp, Homo sapiens
gatacagctgctaaactgc

SEQ ID NO: 43194 - DNA, 22 bp, Homo sapiens
ggaaataaatgacatcatcaca

SEQ ID NO: 43195 - DNA, 19 bp, Homo sapiens
aaagatgtactggcacaga

SEQ ID NO: 43196 - DNA, 19 bp, Homo sapiens
gagggtctttccaactcga

SEQ ID NO: 43197 - DNA, 17 bp, Homo sapiens
taaactagcagacagcg

SEQ ID NO: 43198 - DNA, 19 bp, Homo sapiens
ggaactgcatgacactcaa

SEQ ID NO: 43199 - DNA, 21 bp, Homo sapiens
catgagcgttactaaaaggta

SEQ ID NO: 43200 - DNA, 19 bp, Homo sapiens
acctgttatgaaaaatacc

SEQ ID NO: 43201 - DNA, 23 bp, Homo sapiens
caaaaccaaaatatagtacatgc

SEQ ID NO: 43202 - DNA, 21 bp, Homo sapiens
cttcctcatgaatttataatt

SEQ ID NO: 43203 - DNA, 19 bp, Homo sapiens
gcatctaccattaatactg

SEQ ID NO: 43204 - DNA, 22 bp, Homo sapiens
gcttcctgttctaaatttttga

SEQ ID NO: 43205 - DNA, 17 bp, Homo sapiens
atggccatgctttgtca

SEQ ID NO: 43206 - DNA, 17 bp, Homo sapiens
aggttatcctcaagttc

SEQ ID NO: 43207 - DNA, 17 bp, Homo sapiens
tctgtgtgtgcacgtgt

SEQ ID NO: 43208 - DNA, 18 bp, Homo sapiens
agaattggcttgtttccg

SEQ ID NO: 43209 - DNA, 19 bp, Homo sapiens
gttgccgatgcagatgcca

SEQ ID NO: 43210 - DNA, 22 bp, Homo sapiens
cattccctctatgaataatcca

SEQ ID NO: 43211 - DNA, 24 bp, Homo sapiens
atagataaactcaaacccatcaag

SEQ ID NO: 43212 - DNA, 17 bp, Homo sapiens
tcgcttcgagttaaagg

SEQ ID NO: 43213 - DNA, 23 bp, Homo sapiens
aaaggaattgataaaccaagctc

SEQ ID NO: 43214 - DNA, 22 bp, Homo sapiens
taatgagtataatggtgtctgc

SEQ ID NO: 43215 - DNA, 16 bp, Homo sapiens
tgtatgttcgaatgca

SEQ ID NO: 43216 - DNA, 18 bp, Homo sapiens
acttcaaagaagaaacga

SEQ ID NO: 43217 - DNA, 17 bp, Homo sapiens
agcaacagctgtcttta

SEQ ID NO: 43218 - DNA, 19 bp, Homo sapiens
tgagagatttactcttggt

SEQ ID NO: 43219 - DNA, 18 bp, Homo sapiens
gcctaatgaaaagttgaa

SEQ ID NO: 43220 - DNA, 17 bp, Homo sapiens
cttcaggaggtgactgc

SEQ ID NO: 43221 - DNA, 20 bp, Homo sapiens
ccatatacatttggggattc

SEQ ID NO: 43222 - DNA, 19 bp, Homo sapiens
aatattgttgtcaacgtaa

SEQ ID NO: 43223 - DNA, 17 bp, Homo sapiens
gtaagacgttgaggttt

SEQ ID NO: 43224 - DNA, 17 bp, Homo sapiens
gactttgcctttacgca

SEQ ID NO: 43225 - DNA, 20 bp, Homo sapiens
catgaagctcctaatcattt

SEQ ID NO: 43226 - DNA, 20 bp, Homo sapiens
atcaatagtcaaatctgggt

SEQ ID NO: 43227 - DNA, 21 bp, Homo sapiens
ggtctcctctttaaaggtgct

SEQ ID NO: 43228 - DNA, 27 bp, Homo sapiens
aattatcttaatctttattaagttggt

SEQ ID NO: 43229 - DNA, 19 bp, Homo sapiens
ctttctggctatagaaatg

SEQ ID NO: 43230 - DNA, 21 bp, Homo sapiens
ttgaaatggaaataggagttt

SEQ ID NO: 43231 - DNA, 18 bp, Homo sapiens
tctggagttggacgtgta

SEQ ID NO: 43232 - DNA, 18 bp, Homo sapiens
ctcccagacatgtataaa

SEQ ID NO: 43233 - DNA, 16 bp, Homo sapiens
cagggctctcacagaa

SEQ ID NO: 43234 - DNA, 23 bp, Homo sapiens
cttaaattcttaaaaacaagtct

SEQ ID NO: 43235 - DNA, 17 bp, Homo sapiens
tcgtgtaccctggagga

SEQ ID NO: 43236 - DNA, 20 bp, Homo sapiens
gatgcatatttcattttctg

SEQ ID NO: 43237 - DNA, 19 bp, Homo sapiens
cctttaatttcccagtcag

SEQ ID NO: 43238 - DNA, 18 bp, Homo sapiens
tgggagaaatggaactat

SEQ ID NO: 43239 - DNA, 20 bp, Homo sapiens
gtaattatgtcaggagatgt

SEQ ID NO: 43240 - DNA, 17 bp, Homo sapiens
agcacacaccattcgac

SEQ ID NO: 43241 - DNA, 18 bp, Homo sapiens
tgcaagttaagtaaaacg

SEQ ID NO: 43242 - DNA, 16 bp, Homo sapiens
ttgttggtggcctgac

SEQ ID NO: 43243 - DNA, 23 bp, Homo sapiens
tatgatgaaaagatgaatatgta

SEQ ID NO: 43244 - DNA, 18 bp, Homo sapiens
tttgttgtcaaagtatgt

SEQ ID NO: 43245 - DNA, 20 bp, Homo sapiens
tgataactttagtttctgct

SEQ ID NO: 43246 - DNA, 17 bp, Homo sapiens
gtgcatcctttgcagtc

SEQ ID NO: 43247 - DNA, 21 bp, Homo sapiens
tccaaattctagcaaataacg

SEQ ID NO: 43248 - DNA, 22 bp, Homo sapiens
aaaatcgaagcttttattatgc

SEQ ID NO: 43249 - DNA, 17 bp, Homo sapiens
tcactggctgcatggga

SEQ ID NO: 43250 - DNA, 16 bp, Homo sapiens
atcctttcaaacctgc

SEQ ID NO: 43251 - DNA, 16 bp, Homo sapiens
aaaagaaggtgactgc

SEQ ID NO: 43252 - DNA, 19 bp, Homo sapiens
agagatggagataagtgga

SEQ ID NO: 43253 - DNA, 19 bp, Homo sapiens
cggctgaccaatgcataac

SEQ ID NO: 43254 - DNA, 23 bp, Homo sapiens
ctacaacagcctatagtctcatt

SEQ ID NO: 43255 - DNA, 18 bp, Homo sapiens
aatgttctgaacttgaac

SEQ ID NO: 43256 - DNA, 21 bp, Homo sapiens
gatctgattcatgtgaaatgt

SEQ ID NO: 43257 - DNA, 20 bp, Homo sapiens
ctgctatgcatatgatcttt

SEQ ID NO: 43258 - DNA, 21 bp, Homo sapiens
ggggactattcaatttgatgg

SEQ ID NO: 43259 - DNA, 22 bp, Homo sapiens
caataactgatgattttaccaa

SEQ ID NO: 43260 - DNA, 16 bp, Homo sapiens
ccactgtcatgttcaa

SEQ ID NO: 43261 - DNA, 17 bp, Homo sapiens
ggctgccagacaatcat

SEQ ID NO: 43262 - DNA, 17 bp, Homo sapiens
gccacacgagacctggt

SEQ ID NO: 43263 - DNA, 23 bp, Homo sapiens
aaaattcagaaaatagtaacacc

SEQ ID NO: 43264 - DNA, 19 bp, Homo sapiens
actgacttttatgtgccca

SEQ ID NO: 43265 - DNA, 22 bp, Homo sapiens
cagagtgacatattcagcaatt

SEQ ID NO: 43266 - DNA, 21 bp, Homo sapiens
tcccatcattatggttttgat

SEQ ID NO: 43267 - DNA, 18 bp, Homo sapiens
tcatatacttctctgtgt

SEQ ID NO: 43268 - DNA, 17 bp, Homo sapiens
actgtaaaaactcacct

SEQ ID NO: 43269 - DNA, 19 bp, Homo sapiens
atttcatgagtgtggagct

SEQ ID NO: 43270 - DNA, 17 bp, Homo sapiens
cctcttgatcaggtaca

SEQ ID NO: 43271 - DNA, 20 bp, Homo sapiens
gaatggcttccgttgtcagc

SEQ ID NO: 43272 - DNA, 19 bp, Homo sapiens
agccaaaaaaatgactgta

SEQ ID NO: 43273 - DNA, 19 bp, Homo sapiens
agaattcaaaaacaaggtg

SEQ ID NO: 43274 - DNA, 24 bp, Homo sapiens
gatgttatttctgtaattattaaa

SEQ ID NO: 43275 - DNA, 22 bp, Homo sapiens
aagacgaagttgctatattctc

SEQ ID NO: 43276 - DNA, 19 bp, Homo sapiens
tctcgaattaaaccaaatt

SEQ ID NO: 43277 - DNA, 19 bp, Homo sapiens
gcaggccaccaaaatatat

SEQ ID NO: 43278 - DNA, 19 bp, Homo sapiens
attgctcaaataaaatgtt

SEQ ID NO: 43279 - DNA, 23 bp, Homo sapiens
aaaacttaatccttagctttaca

SEQ ID NO: 43280 - DNA, 22 bp, Homo sapiens
gatatagatactaatcaggagg

SEQ ID NO: 43281 - DNA, 22 bp, Homo sapiens
gggttatatgacattcttattg

SEQ ID NO: 43282 - DNA, 23 bp, Homo sapiens
tggtcttgacttgaaagcagatg

SEQ ID NO: 43283 - DNA, 18 bp, Homo sapiens
gttgttctaacatgcaac

SEQ ID NO: 43284 - DNA, 18 bp, Homo sapiens
ggggcttttgcatttctt

SEQ ID NO: 43285 - DNA, 18 bp, Homo sapiens
tacccaacccatgcactc

SEQ ID NO: 43286 - DNA, 28 bp, Homo sapiens
atttatgattaaagtttattgttttact

SEQ ID NO: 43287 - DNA, 16 bp, Homo sapiens
caaagctgtactggtg

SEQ ID NO: 43288 - DNA, 24 bp, Homo sapiens
atttttgttttttttttcctcttt

SEQ ID NO: 43289 - DNA, 16 bp, Homo sapiens
aaggggcagcaggaga

SEQ ID NO: 43290 - DNA, 16 bp, Homo sapiens
aatggaaaccagagtt

SEQ ID NO: 43291 - DNA, 25 bp, Homo sapiens
ttcttgaaatttcaatatctttgag

SEQ ID NO: 43292 - DNA, 19 bp, Homo sapiens
gcctgcatgtgtctgctcc

SEQ ID NO: 43293 - DNA, 19 bp, Homo sapiens
gaacatcctttggtaacac

SEQ ID NO: 43294 - DNA, 22 bp, Homo sapiens
taatgatattgcttttgctttt

SEQ ID NO: 43295 - DNA, 23 bp, Homo sapiens
actaagtaagtgaaatctgatat

SEQ ID NO: 43296 - DNA, 21 bp, Homo sapiens
tgaagaaatattccggctgcc

SEQ ID NO: 43297 - DNA, 21 bp, Homo sapiens
agtaggatcagtagaaaagta

SEQ ID NO: 43298 - DNA, 18 bp, Homo sapiens
agtcccgattatgttggt

SEQ ID NO: 43299 - DNA, 20 bp, Homo sapiens
tcttcaactgctcttaaact

SEQ ID NO: 43300 - DNA, 16 bp, Homo sapiens
ttggcacaggggagag

SEQ ID NO: 43301 - DNA, 23 bp, Homo sapiens
atcacattaattgcatcgaggag

SEQ ID NO: 43302 - DNA, 16 bp, Homo sapiens
gaatgatgccggactc

SEQ ID NO: 43303 - DNA, 24 bp, Homo sapiens
tcatttctaatggtttctactctt

SEQ ID NO: 43304 - DNA, 16 bp, Homo sapiens
acctgtccagtctgcc

SEQ ID NO: 43305 - DNA, 20 bp, Homo sapiens
ctaagcctggttttgtggag

SEQ ID NO: 43306 - DNA, 18 bp, Homo sapiens
aagtaagttaactgcttt

SEQ ID NO: 43307 - DNA, 17 bp, Homo sapiens
cagcaccaagaatgagt

SEQ ID NO: 43308 - DNA, 16 bp, Homo sapiens
cagtccttgctagcca

SEQ ID NO: 43309 - DNA, 24 bp, Homo sapiens
cagcaccacctaggagaaaacgaa

SEQ ID NO: 43310 - DNA, 21 bp, Homo sapiens
gatatttccagctgttttcaa

SEQ ID NO: 43311 - DNA, 16 bp, Homo sapiens
gcccctgtggagagat

SEQ ID NO: 43312 - DNA, 19 bp, Homo sapiens
gatctcagagcagacgaac

SEQ ID NO: 43313 - DNA, 20 bp, Homo sapiens
tcttccatcatgaaacagat

SEQ ID NO: 43314 - DNA, 22 bp, Homo sapiens
tgagacttctgtttaatcttca

SEQ ID NO: 43315 - DNA, 24 bp, Homo sapiens
aataataaatattttagtgctatt

SEQ ID NO: 43316 - DNA, 21 bp, Homo sapiens
tcctcaacaggggccgtctgg

SEQ ID NO: 43317 - DNA, 19 bp, Homo sapiens
cacagaggttcaggcagat

SEQ ID NO: 43318 - DNA, 19 bp, Homo sapiens
tcagaccagagccgaatct

SEQ ID NO: 43319 - DNA, 19 bp, Homo sapiens
aagtaaagaagagggaatt

SEQ ID NO: 43320 - DNA, 20 bp, Homo sapiens
cctgagaacagcgtttgctt

SEQ ID NO: 43321 - DNA, 17 bp, Homo sapiens
caactgtcaggttttgc

SEQ ID NO: 43322 - DNA, 18 bp, Homo sapiens
gctatggttgagaggggt

SEQ ID NO: 43323 - DNA, 17 bp, Homo sapiens
ggttgaaattcaggtgg

SEQ ID NO: 43324 - DNA, 20 bp, Homo sapiens
gatgtgacttatacttgttt

SEQ ID NO: 43325 - DNA, 23 bp, Homo sapiens
acagagttaataacaagattcca

SEQ ID NO: 43326 - DNA, 22 bp, Homo sapiens
gatgaaaacagaagatacatgc

SEQ ID NO: 43327 - DNA, 17 bp, Homo sapiens
acccctaatagcaagaa

SEQ ID NO: 43328 - DNA, 19 bp, Homo sapiens
gcttttcgttgggggtgct

SEQ ID NO: 43329 - DNA, 17 bp, Homo sapiens
gatcctcattgtttccc

SEQ ID NO: 43330 - DNA, 20 bp, Homo sapiens
ttttgaaggctgcatatgga

SEQ ID NO: 43331 - DNA, 19 bp, Homo sapiens
tacagctatgcaggggagg

SEQ ID NO: 43332 - DNA, 16 bp, Homo sapiens
tctgatgggcacagcg

SEQ ID NO: 43333 - DNA, 20 bp, Homo sapiens
ctaatggacttaaaaaggca

SEQ ID NO: 43334 - DNA, 18 bp, Homo sapiens
gctcaggctggataacta

SEQ ID NO: 43335 - DNA, 22 bp, Homo sapiens
aacgaaaataaaaaaatcttat

SEQ ID NO: 43336 - DNA, 21 bp, Homo sapiens
ggggataatataaacacttac

SEQ ID NO: 43337 - DNA, 18 bp, Homo sapiens
tccttcaaaaatgctgac

SEQ ID NO: 43338 - DNA, 21 bp, Homo sapiens
gaataatcttccttctgaaat

SEQ ID NO: 43339 - DNA, 16 bp, Homo sapiens
gcagctccagctgaaa

SEQ ID NO: 43340 - DNA, 23 bp, Homo sapiens
agaataggtttagataggttata

SEQ ID NO: 43341 - DNA, 17 bp, Homo sapiens
gcccaccccagttctga

SEQ ID NO: 43342 - DNA, 21 bp, Homo sapiens
ataataagtacttactatgca

SEQ ID NO: 43343 - DNA, 16 bp, Homo sapiens
cgaactgcttgctccc

SEQ ID NO: 43344 - DNA, 24 bp, Homo sapiens
taaagaattacgctaatatgtaag

SEQ ID NO: 43345 - DNA, 18 bp, Homo sapiens
accggtttttaactttgg

SEQ ID NO: 43346 - DNA, 21 bp, Homo sapiens
aacagtccataatctcctgtt

SEQ ID NO: 43347 - DNA, 23 bp, Homo sapiens
tcaacttgattaaacacaaatac

SEQ ID NO: 43348 - DNA, 18 bp, Homo sapiens
gctcttttgatagggagc

SEQ ID NO: 43349 - DNA, 21 bp, Homo sapiens
ttgtactcagtgaataaaaga

SEQ ID NO: 43350 - DNA, 17 bp, Homo sapiens
tgcatttgatgacacca

SEQ ID NO: 43351 - DNA, 21 bp, Homo sapiens
ttatttgtctgagcctgagga

SEQ ID NO: 43352 - DNA, 16 bp, Homo sapiens
cggattcagcttcggt

SEQ ID NO: 43353 - DNA, 22 bp, Homo sapiens
tctgagaaggttttactctcct

SEQ ID NO: 43354 - DNA, 17 bp, Homo sapiens
tttctcagctgaactgt

SEQ ID NO: 43355 - DNA, 18 bp, Homo sapiens
gcatgagaatgctgttat

SEQ ID NO: 43356 - DNA, 16 bp, Homo sapiens
tggggatcatggtgtg

SEQ ID NO: 43357 - DNA, 24 bp, Homo sapiens
ctcacaattgagttggaagtaaga

SEQ ID NO: 43358 - DNA, 18 bp, Homo sapiens
ttagggtactgccaatat

SEQ ID NO: 43359 - DNA, 23 bp, Homo sapiens
gcatcaatcatgctgattttgca

SEQ ID NO: 43360 - DNA, 17 bp, Homo sapiens
gccctggcaaaatatac

SEQ ID NO: 43361 - DNA, 16 bp, Homo sapiens
gggagtggggacaccc

SEQ ID NO: 43362 - DNA, 19 bp, Homo sapiens
ccaagattgtggtagttgt

SEQ ID NO: 43363 - DNA, 18 bp, Homo sapiens
attctgtaaaatgggttt

SEQ ID NO: 43364 - DNA, 21 bp, Homo sapiens
gccccatctacataaagaatt

SEQ ID NO: 43365 - DNA, 23 bp, Homo sapiens
gcactgtgtacattgtttcaatt

SEQ ID NO: 43366 - DNA, 16 bp, Homo sapiens
cacgacatccaggatg

SEQ ID NO: 43367 - DNA, 21 bp, Homo sapiens
tctgcatatgtgaaatttgtt

SEQ ID NO: 43368 - DNA, 17 bp, Homo sapiens
tttactggaccaattct

SEQ ID NO: 43369 - DNA, 21 bp, Homo sapiens
gagaagtaagcaagaaggaat

SEQ ID NO: 43370 - DNA, 23 bp, Homo sapiens
acctaataagtcaaaatatatca

SEQ ID NO: 43371 - DNA, 24 bp, Homo sapiens
aaccatcagtcccaaaaaagccga

SEQ ID NO: 43372 - DNA, 20 bp, Homo sapiens
cccttatcagaaaagatgac

SEQ ID NO: 43373 - DNA, 20 bp, Homo sapiens
cccatcaactacactacccg

SEQ ID NO: 43374 - DNA, 23 bp, Homo sapiens
aggaggcctggtggtaacagaga

SEQ ID NO: 43375 - DNA, 21 bp, Homo sapiens
atcggcaggggcctctgccat

SEQ ID NO: 43376 - DNA, 20 bp, Homo sapiens
gataactacacacatagagc

SEQ ID NO: 43377 - DNA, 18 bp, Homo sapiens
cccctctgagcatttgca

SEQ ID NO: 43378 - DNA, 19 bp, Homo sapiens
ctaaaacctgacatttgtt

SEQ ID NO: 43379 - DNA, 17 bp, Homo sapiens
aggaaatgaaagagcct

SEQ ID NO: 43380 - DNA, 17 bp, Homo sapiens
caggaatctccacatgg

SEQ ID NO: 43381 - DNA, 21 bp, Homo sapiens
actctaggaacttttattatt

SEQ ID NO: 43382 - DNA, 17 bp, Homo sapiens
tccatgttgggacatgt

SEQ ID NO: 43383 - DNA, 21 bp, Homo sapiens
tgaaattacttccataagttt

SEQ ID NO: 43384 - DNA, 23 bp, Homo sapiens
tacatgatgcagtggtggaagat

SEQ ID NO: 43385 - DNA, 20 bp, Homo sapiens
agttgtgcggaattcaaatt

SEQ ID NO: 43386 - DNA, 20 bp, Homo sapiens
tagctagcatttgaattgaa

SEQ ID NO: 43387 - DNA, 18 bp, Homo sapiens
caatacccattccatcca

SEQ ID NO: 43388 - DNA, 20 bp, Homo sapiens
aatccccatcctctaatcca

SEQ ID NO: 43389 - DNA, 22 bp, Homo sapiens
caacaatatcatgaagaaatca

SEQ ID NO: 43390 - DNA, 19 bp, Homo sapiens
gtgggattggaccttcttg

SEQ ID NO: 43391 - DNA, 17 bp, Homo sapiens
gccgggcttcaaaatat

SEQ ID NO: 43392 - DNA, 18 bp, Homo sapiens
tggggatcagtagtcaaa

SEQ ID NO: 43393 - DNA, 22 bp, Homo sapiens
caaattgaagtaatccagaagg

SEQ ID NO: 43394 - DNA, 22 bp, Homo sapiens
actttaatttgtcaagttttaa

SEQ ID NO: 43395 - DNA, 19 bp, Homo sapiens
gcatcatagacagcagtga

SEQ ID NO: 43396 - DNA, 23 bp, Homo sapiens
aatgattctggctgatgtctttc

SEQ ID NO: 43397 - DNA, 19 bp, Homo sapiens
tgtttgatcttgttggcag

SEQ ID NO: 43398 - DNA, 22 bp, Homo sapiens
tacttctttaatgaaaccatct

SEQ ID NO: 43399 - DNA, 18 bp, Homo sapiens
ctgggtttgggctttggg

SEQ ID NO: 43400 - DNA, 23 bp, Homo sapiens
atgtggacaatggtgcgggcaga

SEQ ID NO: 43401 - DNA, 16 bp, Homo sapiens
aacactcacctgggaa

SEQ ID NO: 43402 - DNA, 21 bp, Homo sapiens
gtgtgatggacaatggcataa

SEQ ID NO: 43403 - DNA, 25 bp, Homo sapiens
cacgtaaatataaatgttttcaaaa

SEQ ID NO: 43404 - DNA, 19 bp, Homo sapiens
tcgatgggaaccaggtgga

SEQ ID NO: 43405 - DNA, 18 bp, Homo sapiens
gcagattctaaagctagg

SEQ ID NO: 43406 - DNA, 18 bp, Homo sapiens
tgaccctgtgtttgttgg

SEQ ID NO: 43407 - DNA, 22 bp, Homo sapiens
gatctttctttctctacaattc

SEQ ID NO: 43408 - DNA, 16 bp, Homo sapiens
cctcggaacggaatac

SEQ ID NO: 43409 - DNA, 21 bp, Homo sapiens
taaaacagcattccaatttaa

SEQ ID NO: 43410 - DNA, 18 bp, Homo sapiens
gccttggcaaaattaacc

SEQ ID NO: 43411 - DNA, 24 bp, Homo sapiens
atatttggtgcaggacatttcaaa

SEQ ID NO: 43412 - DNA, 23 bp, Homo sapiens
cacttatttttattagttggctg

SEQ ID NO: 43413 - DNA, 20 bp, Homo sapiens
gcagtttggcctaacaacca

SEQ ID NO: 43414 - DNA, 24 bp, Homo sapiens
atataggtaaaatatatttgtttg

SEQ ID NO: 43415 - DNA, 16 bp, Homo sapiens
ggcacaggcaagccac

SEQ ID NO: 43416 - DNA, 21 bp, Homo sapiens
tagcaccatctgaatacagaa

SEQ ID NO: 43417 - DNA, 21 bp, Homo sapiens
ttcaacctgtatcatgcccag

SEQ ID NO: 43418 - DNA, 18 bp, Homo sapiens
gagctccaataatcccta

SEQ ID NO: 43419 - DNA, 19 bp, Homo sapiens
ctcattagataaaggttgt

SEQ ID NO: 43420 - DNA, 22 bp, Homo sapiens
ttcaactaaattccaggaattc

SEQ ID NO: 43421 - DNA, 16 bp, Homo sapiens
agggttgactgactgg

SEQ ID NO: 43422 - DNA, 22 bp, Homo sapiens
ccagattgtatcagaaaactga

SEQ ID NO: 43423 - DNA, 18 bp, Homo sapiens
gagcgccaagtccagaac

SEQ ID NO: 43424 - DNA, 22 bp, Homo sapiens
actataattatacaatgttgga

SEQ ID NO: 43425 - DNA, 24 bp, Homo sapiens
ctaccttgctgtgaagattaaaag

SEQ ID NO: 43426 - DNA, 16 bp, Homo sapiens
caagcagaccagcctt

SEQ ID NO: 43427 - DNA, 17 bp, Homo sapiens
agttacagttcaactga

SEQ ID NO: 43428 - DNA, 16 bp, Homo sapiens
ggggaggaaatcaggc

SEQ ID NO: 43429 - DNA, 21 bp, Homo sapiens
gtcatgataatgtctgaagta

SEQ ID NO: 43430 - DNA, 21 bp, Homo sapiens
ccgcaattctgatgtaaatat

SEQ ID NO: 43431 - DNA, 20 bp, Homo sapiens
aaggccctacagtattgaga

SEQ ID NO: 43432 - DNA, 16 bp, Homo sapiens
tccccatgccctgctg

SEQ ID NO: 43433 - DNA, 20 bp, Homo sapiens
atccttcacatcacactcta

SEQ ID NO: 43434 - DNA, 23 bp, Homo sapiens
ccttcccaagatttacagacctt

SEQ ID NO: 43435 - DNA, 22 bp, Homo sapiens
cttggattcttcacaatttgaa

SEQ ID NO: 43436 - DNA, 23 bp, Homo sapiens
ttttatacaattgagatcatcct

SEQ ID NO: 43437 - DNA, 16 bp, Homo sapiens
ttgacttctgccacct

SEQ ID NO: 43438 - DNA, 24 bp, Homo sapiens
aactcaaaactttttaattttaga

SEQ ID NO: 43439 - DNA, 21 bp, Homo sapiens
ccatagacacagttattcaac

SEQ ID NO: 43440 - DNA, 21 bp, Homo sapiens
tgacatccctaatgacagtcc

SEQ ID NO: 43441 - DNA, 23 bp, Homo sapiens
tatatttctaaattttctctctt

SEQ ID NO: 43442 - DNA, 17 bp, Homo sapiens
cagctggctggcaaggt

SEQ ID NO: 43443 - DNA, 22 bp, Homo sapiens
taaaatttttttaaaggcagaa

SEQ ID NO: 43444 - DNA, 18 bp, Homo sapiens
gggcggagaccacaggtc

SEQ ID NO: 43445 - DNA, 21 bp, Homo sapiens
aagttatgctttctctattgt

SEQ ID NO: 43446 - DNA, 16 bp, Homo sapiens
gggtggaccctggcat

SEQ ID NO: 43447 - DNA, 22 bp, Homo sapiens
aaatatcagacactgtgactca

SEQ ID NO: 43448 - DNA, 16 bp, Homo sapiens
ttgtggttgtcagtgg

SEQ ID NO: 43449 - DNA, 16 bp, Homo sapiens
tgtagtgacactgcaa

SEQ ID NO: 43450 - DNA, 22 bp, Homo sapiens
tttacctttccttttagttcct

SEQ ID NO: 43451 - DNA, 19 bp, Homo sapiens
ttggaagcatctctggcca

SEQ ID NO: 43452 - DNA, 18 bp, Homo sapiens
ccttccacctcctgaatg

SEQ ID NO: 43453 - DNA, 17 bp, Homo sapiens
tcacactgatatcaaca

SEQ ID NO: 43454 - DNA, 21 bp, Homo sapiens
gctgcagagaaaatgatttga

SEQ ID NO: 43455 - DNA, 19 bp, Homo sapiens
gtatctttcctcctgaagg

SEQ ID NO: 43456 - DNA, 16 bp, Homo sapiens
atacagggagtcaccc

SEQ ID NO: 43457 - DNA, 22 bp, Homo sapiens
tttatattctaaatataagata

SEQ ID NO: 43458 - DNA, 16 bp, Homo sapiens
agcttactgttcccca

SEQ ID NO: 43459 - DNA, 20 bp, Homo sapiens
aggatttgttcaagagaatc

SEQ ID NO: 43460 - DNA, 22 bp, Homo sapiens
ttggtcagtaaagcatatctag

SEQ ID NO: 43461 - DNA, 17 bp, Homo sapiens
tgccaggattctcctgg

SEQ ID NO: 43462 - DNA, 17 bp, Homo sapiens
gtgtgtgggcatgtgtg

SEQ ID NO: 43463 - DNA, 18 bp, Homo sapiens
tgcctagagttttcaaaa

SEQ ID NO: 43464 - DNA, 20 bp, Homo sapiens
actatattgagttaggttca

SEQ ID NO: 43465 - DNA, 16 bp, Homo sapiens
tcttccatcaccttgc

SEQ ID NO: 43466 - DNA, 19 bp, Homo sapiens
tcccttaaaaggagacagg

SEQ ID NO: 43467 - DNA, 16 bp, Homo sapiens
tgcacacacatgtgtg

SEQ ID NO: 43468 - DNA, 24 bp, Homo sapiens
atttctcttttatagctacatttt

SEQ ID NO: 43469 - DNA, 22 bp, Homo sapiens
gcaacccattatttcatgtaaa

SEQ ID NO: 43470 - DNA, 17 bp, Homo sapiens
cagactaggaattggca

SEQ ID NO: 43471 - DNA, 19 bp, Homo sapiens
aggttgatggcttcacatt

SEQ ID NO: 43472 - DNA, 20 bp, Homo sapiens
tcaaaacttagatgaattgg

SEQ ID NO: 43473 - DNA, 21 bp, Homo sapiens
ccaaagttattaataaagtct

SEQ ID NO: 43474 - DNA, 16 bp, Homo sapiens
cctcccacgactggtg

SEQ ID NO: 43475 - DNA, 27 bp, Homo sapiens
gttaacagattattatctatgaaatgt

SEQ ID NO: 43476 - DNA, 22 bp, Homo sapiens
agattgttaactacctgttttg

SEQ ID NO: 43477 - DNA, 20 bp, Homo sapiens
ttaaaagaaagaaaaggcca

SEQ ID NO: 43478 - DNA, 20 bp, Homo sapiens
tcaggtcaaggaggtataaa

SEQ ID NO: 43479 - DNA, 21 bp, Homo sapiens
acaccagctactggcacacca

SEQ ID NO: 43480 - DNA, 21 bp, Homo sapiens
ctttagttattgcatcatgtg

SEQ ID NO: 43481 - DNA, 20 bp, Homo sapiens
acatcacagaagaaatctac

SEQ ID NO: 43482 - DNA, 18 bp, Homo sapiens
atgtccatcagtcacatg

SEQ ID NO: 43483 - DNA, 16 bp, Homo sapiens
ttctggtgtcttcccc

SEQ ID NO: 43484 - DNA, 22 bp, Homo sapiens
tacctttttctgttagtggata

SEQ ID NO: 43485 - DNA, 17 bp, Homo sapiens
ccgagcaagtccgaaac

SEQ ID NO: 43486 - DNA, 23 bp, Homo sapiens
ttataaattacattattacaatt

SEQ ID NO: 43487 - DNA, 17 bp, Homo sapiens
cggatgtttccacattt

SEQ ID NO: 43488 - DNA, 17 bp, Homo sapiens
agtgaacccatccctgg

SEQ ID NO: 43489 - DNA, 19 bp, Homo sapiens
actctatgcttaagaaaat

SEQ ID NO: 43490 - DNA, 20 bp, Homo sapiens
gcagttgcaataaccttggc

SEQ ID NO: 43491 - DNA, 21 bp, Homo sapiens
gggaatttgtagagtttatac

SEQ ID NO: 43492 - DNA, 19 bp, Homo sapiens
actaccttaacccacctaa

SEQ ID NO: 43493 - DNA, 24 bp, Homo sapiens
aacgccctttcctgtgcggaccaa

SEQ ID NO: 43494 - DNA, 16 bp, Homo sapiens
tagccgtggcgtcccg

SEQ ID NO: 43495 - DNA, 16 bp, Homo sapiens
ccggtctgcctggtct

SEQ ID NO: 43496 - DNA, 22 bp, Homo sapiens
gccgtagtgctgcgcggtggcg

SEQ ID NO: 43497 - DNA, 17 bp, Homo sapiens
gggcagcgagggccggg

SEQ ID NO: 43498 - DNA, 22 bp, Homo sapiens
ctggcccccgcctccgcctccg

SEQ ID NO: 43499 - DNA, 20 bp, Homo sapiens
gcggatgctgcggacgccgg

SEQ ID NO: 43500 - DNA, 23 bp, Homo sapiens
gacccgcggaaccgtctacgctc

SEQ ID NO: 43501 - DNA, 23 bp, Homo sapiens
tacctgccgggccgcctggcctg

SEQ ID NO: 43502 - DNA, 21 bp, Homo sapiens
gcactcggcaaagaaaggaga

SEQ ID NO: 43503 - DNA, 16 bp, Homo sapiens
agcccagcttcatctg

SEQ ID NO: 43504 - DNA, 22 bp, Homo sapiens
atactttggggaaaaatttgtg

SEQ ID NO: 43505 - DNA, 17 bp, Homo sapiens
ggctttaatagcaacaa

SEQ ID NO: 43506 - DNA, 16 bp, Homo sapiens
gttaccctggcaggtt

SEQ ID NO: 43507 - DNA, 22 bp, Homo sapiens
ttccttttatactgtatattaa

SEQ ID NO: 43508 - DNA, 21 bp, Homo sapiens
tggaaccctactaatattgga

SEQ ID NO: 43509 - DNA, 16 bp, Homo sapiens
ctacaggtgcgcacca

SEQ ID NO: 43510 - DNA, 18 bp, Homo sapiens
ttgtcaagtacctactct

SEQ ID NO: 43511 - DNA, 18 bp, Homo sapiens
ctccaagtcacatcaaac

SEQ ID NO: 43512 - DNA, 23 bp, Homo sapiens
gttaaaatgtgtgataaattgaa

SEQ ID NO: 43513 - DNA, 16 bp, Homo sapiens
agtgtcccagagctgc

SEQ ID NO: 43514 - DNA, 21 bp, Homo sapiens
tgtgtagctgcctatgtaagt

SEQ ID NO: 43515 - DNA, 18 bp, Homo sapiens
ccctcctacctcctgagc

SEQ ID NO: 43516 - DNA, 16 bp, Homo sapiens
actggaatgatggttt

SEQ ID NO: 43517 - DNA, 16 bp, Homo sapiens
tccatccccaaatgga

SEQ ID NO: 43518 - DNA, 19 bp, Homo sapiens
tcacctgtagtggcgatgg

SEQ ID NO: 43519 - DNA, 23 bp, Homo sapiens
tctagtatgtataagaaatgcta

SEQ ID NO: 43520 - DNA, 20 bp, Homo sapiens
gcaagtctataaagaacacg

SEQ ID NO: 43521 - DNA, 22 bp, Homo sapiens
ttcatttctcagacaccttgtt

SEQ ID NO: 43522 - DNA, 16 bp, Homo sapiens
tcccatgagccagaca

SEQ ID NO: 43523 - DNA, 16 bp, Homo sapiens
tctgcctctcattgtt

SEQ ID NO: 43524 - DNA, 17 bp, Homo sapiens
gctctagagaagggaat

SEQ ID NO: 43525 - DNA, 18 bp, Homo sapiens
tttgctttctaaacactt

SEQ ID NO: 43526 - DNA, 19 bp, Homo sapiens
tcagctgtcgaatcataga

SEQ ID NO: 43527 - DNA, 16 bp, Homo sapiens
ggtgaacagcttgtgg

SEQ ID NO: 43528 - DNA, 19 bp, Homo sapiens
gattagaaaattttaagtt

SEQ ID NO: 43529 - DNA, 19 bp, Homo sapiens
gagactttccaacagttgg

SEQ ID NO: 43530 - DNA, 19 bp, Homo sapiens
aaaatccttgagatctgta

SEQ ID NO: 43531 - DNA, 16 bp, Homo sapiens
agggatgtggggagac

SEQ ID NO: 43532 - DNA, 22 bp, Homo sapiens
ttggtgtatgtagtatatgtaa

SEQ ID NO: 43533 - DNA, 17 bp, Homo sapiens
caagtaaggcttttggt

SEQ ID NO: 43534 - DNA, 20 bp, Homo sapiens
tatttgtagtgggatccaac

SEQ ID NO: 43535 - DNA, 18 bp, Homo sapiens
ctctctgaagctaaggta

SEQ ID NO: 43536 - DNA, 25 bp, Homo sapiens
ccatgaaagtattatttatagcaca

SEQ ID NO: 43537 - DNA, 25 bp, Homo sapiens
aataaaaataaaaaaagaagtaaag

SEQ ID NO: 43538 - DNA, 18 bp, Homo sapiens
tgccttcacatcccatat

SEQ ID NO: 43539 - DNA, 19 bp, Homo sapiens
aaggtggcaatatcctaac

SEQ ID NO: 43540 - DNA, 17 bp, Homo sapiens
accagtcacaactcaag

SEQ ID NO: 43541 - DNA, 16 bp, Homo sapiens
tgtcactgcacattca

SEQ ID NO: 43542 - DNA, 18 bp, Homo sapiens
ttaacattaggaaggaca

SEQ ID NO: 43543 - DNA, 18 bp, Homo sapiens
ggtgatcagactctgaga

SEQ ID NO: 43544 - DNA, 16 bp, Homo sapiens
atggtccaggaacacc

SEQ ID NO: 43545 - DNA, 17 bp, Homo sapiens
gcacatcaggcagaaat

SEQ ID NO: 43546 - DNA, 17 bp, Homo sapiens
atgctaatgcaggtcag

SEQ ID NO: 43547 - DNA, 18 bp, Homo sapiens
tctcaaactacagtcaac

SEQ ID NO: 43548 - DNA, 20 bp, Homo sapiens
gactccttggttcatattaa

SEQ ID NO: 43549 - DNA, 19 bp, Homo sapiens
agcataggtatgaccaaga

SEQ ID NO: 43550 - DNA, 17 bp, Homo sapiens
agcctgcatactgttta

SEQ ID NO: 43551 - DNA, 26 bp, Homo sapiens
tatttatataattttattctacatat

SEQ ID NO: 43552 - DNA, 16 bp, Homo sapiens
gctggtgaccggggcg

SEQ ID NO: 43553 - DNA, 18 bp, Homo sapiens
taactccaatccctaaac

SEQ ID NO: 43554 - DNA, 20 bp, Homo sapiens
cgacaaccagtgtttgaact

SEQ ID NO: 43555 - DNA, 20 bp, Homo sapiens
tttgcctaattttagctttc

SEQ ID NO: 43556 - DNA, 22 bp, Homo sapiens
gcctcaaattatagcatatatg

SEQ ID NO: 43557 - DNA, 20 bp, Homo sapiens
accactgtaccttacagtaa

SEQ ID NO: 43558 - DNA, 22 bp, Homo sapiens
tttattataatgtttatggaat

SEQ ID NO: 43559 - DNA, 17 bp, Homo sapiens
agttgcaaagatgcaaa

SEQ ID NO: 43560 - DNA, 23 bp, Homo sapiens
acttcaaaaagggtttttttttt

SEQ ID NO: 43561 - DNA, 19 bp, Homo sapiens
tttaaatgtacccatctca

SEQ ID NO: 43562 - DNA, 16 bp, Homo sapiens
ctggcctcttgctcgt

SEQ ID NO: 43563 - DNA, 20 bp, Homo sapiens
tcttattggattttttacgt

SEQ ID NO: 43564 - DNA, 18 bp, Homo sapiens
gctccactgtttcaagaa

SEQ ID NO: 43565 - DNA, 19 bp, Homo sapiens
gagcctgtttggataaaat

SEQ ID NO: 43566 - DNA, 16 bp, Homo sapiens
gttacctgagtggggc

SEQ ID NO: 43567 - DNA, 21 bp, Homo sapiens
ttggtagttttagcatttaaa

SEQ ID NO: 43568 - DNA, 16 bp, Homo sapiens
gcaatgcatgccacac

SEQ ID NO: 43569 - DNA, 19 bp, Homo sapiens
tttcaaagcctgactctct

SEQ ID NO: 43570 - DNA, 16 bp, Homo sapiens
atgctcaaacgctcca

SEQ ID NO: 43571 - DNA, 19 bp, Homo sapiens
gacttcagtcttcagagcc

SEQ ID NO: 43572 - DNA, 21 bp, Homo sapiens
gggaatatggaccttttatca

SEQ ID NO: 43573 - DNA, 17 bp, Homo sapiens
acaagcagggtcataga

SEQ ID NO: 43574 - DNA, 19 bp, Homo sapiens
tggatgatttacgacactc

SEQ ID NO: 43575 - DNA, 17 bp, Homo sapiens
tcttcagccaacatcct

SEQ ID NO: 43576 - DNA, 23 bp, Homo sapiens
tgtctaaatacgtttcttcttac

SEQ ID NO: 43577 - DNA, 24 bp, Homo sapiens
aaatctgaatagcatataaaagca

SEQ ID NO: 43578 - DNA, 23 bp, Homo sapiens
tgggatgaaacaataaagatcta

SEQ ID NO: 43579 - DNA, 17 bp, Homo sapiens
gtctttatcagctccct

SEQ ID NO: 43580 - DNA, 20 bp, Homo sapiens
atttccacctttagtgttcc

SEQ ID NO: 43581 - DNA, 17 bp, Homo sapiens
atccccactcagtagcc

SEQ ID NO: 43582 - DNA, 20 bp, Homo sapiens
aacgttctggtctgccgtga

SEQ ID NO: 43583 - DNA, 16 bp, Homo sapiens
aaaaagtgcagcgttc

SEQ ID NO: 43584 - DNA, 19 bp, Homo sapiens
cctgactcggggaggaagg

SEQ ID NO: 43585 - DNA, 16 bp, Homo sapiens
gtagcaccgacgagag

SEQ ID NO: 43586 - DNA, 20 bp, Homo sapiens
gttttccaaacattgtgact

SEQ ID NO: 43587 - DNA, 18 bp, Homo sapiens
ccagactggttctaactt

SEQ ID NO: 43588 - DNA, 17 bp, Homo sapiens
atctctctcgcaaaagg

SEQ ID NO: 43589 - DNA, 16 bp, Homo sapiens
gcaacagggagaaaaa

SEQ ID NO: 43590 - DNA, 16 bp, Homo sapiens
tttattccccagcact

SEQ ID NO: 43591 - DNA, 20 bp, Homo sapiens
gctcatttggaattttgccg

SEQ ID NO: 43592 - DNA, 18 bp, Homo sapiens
aaaccagcttccccaact

SEQ ID NO: 43593 - DNA, 16 bp, Homo sapiens
agtctgctagagcagt

SEQ ID NO: 43594 - DNA, 17 bp, Homo sapiens
acctgaaaaaatgagga

SEQ ID NO: 43595 - DNA, 18 bp, Homo sapiens
ctctttgccttgaatcct

SEQ ID NO: 43596 - DNA, 18 bp, Homo sapiens
tcagtcatgaaatcggca

SEQ ID NO: 43597 - DNA, 22 bp, Homo sapiens
caccatcaagtggatctttatt

SEQ ID NO: 43598 - DNA, 21 bp, Homo sapiens
ttttgatccagacccagatgg

SEQ ID NO: 43599 - DNA, 16 bp, Homo sapiens
agcatcagtgagtcct

SEQ ID NO: 43600 - DNA, 23 bp, Homo sapiens
agtgaacatcagaggtggatcct

SEQ ID NO: 43601 - DNA, 20 bp, Homo sapiens
gtggggcacaggcctggctg

SEQ ID NO: 43602 - DNA, 20 bp, Homo sapiens
cattattcagagcgagtatg

SEQ ID NO: 43603 - DNA, 16 bp, Homo sapiens
agctgaagcgagggga

SEQ ID NO: 43604 - DNA, 23 bp, Homo sapiens
cacctggagttgattcagctgca

SEQ ID NO: 43605 - DNA, 20 bp, Homo sapiens
gacatctctgccctgagaga

SEQ ID NO: 43606 - DNA, 19 bp, Homo sapiens
gtggatgtgatctgtttga

SEQ ID NO: 43607 - DNA, 24 bp, Homo sapiens
accctgcaatcgtttctgctccat

SEQ ID NO: 43608 - DNA, 17 bp, Homo sapiens
tgctgagtcatgctgtc

SEQ ID NO: 43609 - DNA, 24 bp, Homo sapiens
agttctcaaactgggtggccagct

SEQ ID NO: 43610 - DNA, 24 bp, Homo sapiens
gataccaagagtagtagctgttca

SEQ ID NO: 43611 - DNA, 23 bp, Homo sapiens
ctgcagtcttgctgtgttgccca

SEQ ID NO: 43612 - DNA, 17 bp, Homo sapiens
gcaagaccctgtctcta

SEQ ID NO: 43613 - DNA, 16 bp, Homo sapiens
tccttggacccctccc

SEQ ID NO: 43614 - DNA, 16 bp, Homo sapiens
cgcatggttcttcctg

SEQ ID NO: 43615 - DNA, 17 bp, Homo sapiens
ctgatggaacctgtttc

SEQ ID NO: 43616 - DNA, 17 bp, Homo sapiens
gagaagtggggtgggga

SEQ ID NO: 43617 - DNA, 22 bp, Homo sapiens
gttgtgttctggcggtggaaga

SEQ ID NO: 43618 - DNA, 23 bp, Homo sapiens
tagagttgctcacaaaggtcaca

SEQ ID NO: 43619 - DNA, 22 bp, Homo sapiens
atccacccacctcggcctccca

SEQ ID NO: 43620 - DNA, 16 bp, Homo sapiens
ctgcgtcccacctaga

SEQ ID NO: 43621 - DNA, 24 bp, Homo sapiens
tatggacggccttcccattgggct

SEQ ID NO: 43622 - DNA, 24 bp, Homo sapiens
tgatggaagaagtggtgcgtaggg

SEQ ID NO: 43623 - DNA, 18 bp, Homo sapiens
cagccacctgccagggtc

SEQ ID NO: 43624 - DNA, 18 bp, Homo sapiens
ctcctggcccgcaggcag

SEQ ID NO: 43625 - DNA, 24 bp, Homo sapiens
actcacttcaagtagtagccagca

SEQ ID NO: 43626 - DNA, 19 bp, Homo sapiens
ctgctgtgcacctgctccg

SEQ ID NO: 43627 - DNA, 24 bp, Homo sapiens
catcacgaccgcggggtggttctt

SEQ ID NO: 43628 - DNA, 20 bp, Homo sapiens
tgggattgtggtcatcgatg

SEQ ID NO: 43629 - DNA, 16 bp, Homo sapiens
agagaaacgttgttga

SEQ ID NO: 43630 - DNA, 23 bp, Homo sapiens
caacgctttccgtaccagccact

SEQ ID NO: 43631 - DNA, 24 bp, Homo sapiens
ggtgacgcccccgggctgggcagg

SEQ ID NO: 43632 - DNA, 19 bp, Homo sapiens
gcttcgactggccgctgct

SEQ ID NO: 43633 - DNA, 19 bp, Homo sapiens
caggcccacgccgggacac

SEQ ID NO: 43634 - DNA, 18 bp, Homo sapiens
ggaagtgcagcttcgaca

SEQ ID NO: 43635 - DNA, 24 bp, Homo sapiens
catcacttcctctgcataggggta

SEQ ID NO: 43636 - DNA, 16 bp, Homo sapiens
gctccaaatggagagg

SEQ ID NO: 43637 - DNA, 22 bp, Homo sapiens
caggttgaagtccttcaccagc

SEQ ID NO: 43638 - DNA, 22 bp, Homo sapiens
caccctccactttcgccttccc

SEQ ID NO: 43639 - DNA, 22 bp, Homo sapiens
acaagcatgaggatgcggacgt

SEQ ID NO: 43640 - DNA, 16 bp, Homo sapiens
caccccatgagccccc

SEQ ID NO: 43641 - DNA, 16 bp, Homo sapiens
caagagccagttcctc

SEQ ID NO: 43642 - DNA, 16 bp, Homo sapiens
tcaactgcaggacaca

SEQ ID NO: 43643 - DNA, 24 bp, Homo sapiens
actgcacagacgtcactggggcct

SEQ ID NO: 43644 - DNA, 20 bp, Homo sapiens
aaggacccaggagccccaac

SEQ ID NO: 43645 - DNA, 20 bp, Homo sapiens
aggctgtcggggtgctcaca

SEQ ID NO: 43646 - DNA, 24 bp, Homo sapiens
tagaaaggtttcccattgatgagg

SEQ ID NO: 43647 - DNA, 22 bp, Homo sapiens
ccagaggcagctgctggggtgc

SEQ ID NO: 43648 - DNA, 20 bp, Homo sapiens
agggagtgtgtagaagtcag

SEQ ID NO: 43649 - DNA, 22 bp, Homo sapiens
tcccagggtcagccagggtagg

SEQ ID NO: 43650 - DNA, 24 bp, Homo sapiens
gtacctgatgcacgaacgccctgc

SEQ ID NO: 43651 - DNA, 22 bp, Homo sapiens
gagaaacatcagaaagctcaga

SEQ ID NO: 43652 - DNA, 21 bp, Homo sapiens
gaatgggactgggacccaggg

SEQ ID NO: 43653 - DNA, 19 bp, Homo sapiens
gaagccagggtcaccacat

SEQ ID NO: 43654 - DNA, 16 bp, Homo sapiens
aacctgttcaagttgg

SEQ ID NO: 43655 - DNA, 18 bp, Homo sapiens
acctccaatgaatacaga

SEQ ID NO: 43656 - DNA, 21 bp, Homo sapiens
tcagccctggtctctcttgtt

SEQ ID NO: 43657 - DNA, 20 bp, Homo sapiens
acacctggcaccttaagttg

SEQ ID NO: 43658 - DNA, 22 bp, Homo sapiens
tggctgcctggcagcggtggct

SEQ ID NO: 43659 - DNA, 18 bp, Homo sapiens
catccaaaagacgcactt

SEQ ID NO: 43660 - DNA, 20 bp, Homo sapiens
ctcacacaggctgaatttta

SEQ ID NO: 43661 - DNA, 16 bp, Homo sapiens
gacacccaccacctac

SEQ ID NO: 43662 - DNA, 16 bp, Homo sapiens
gcacctttttcctggg

SEQ ID NO: 43663 - DNA, 19 bp, Homo sapiens
tttgtccagaacacatatt

SEQ ID NO: 43664 - DNA, 18 bp, Homo sapiens
cgctgagaggatcctacc

SEQ ID NO: 43665 - DNA, 22 bp, Homo sapiens
cccagagcaagggcccagcaaa

SEQ ID NO: 43666 - DNA, 22 bp, Homo sapiens
gtggtgacggtgatgtcatcga

SEQ ID NO: 43667 - DNA, 17 bp, Homo sapiens
agagtggaggccttgga

SEQ ID NO: 43668 - DNA, 20 bp, Homo sapiens
cagcgtagttgaaaaagtca

SEQ ID NO: 43669 - DNA, 16 bp, Homo sapiens
acccaccttcccgccc

SEQ ID NO: 43670 - DNA, 20 bp, Homo sapiens
accagggaccatccaatacc

SEQ ID NO: 43671 - DNA, 23 bp, Homo sapiens
ctcacaggcctccctggcctccc

SEQ ID NO: 43672 - DNA, 24 bp, Homo sapiens
ctgccctcccggctccgaatcact

SEQ ID NO: 43673 - DNA, 22 bp, Homo sapiens
caggaagaccacagggtggggc

SEQ ID NO: 43674 - DNA, 23 bp, Homo sapiens
catgaggggggctacctcccctt

SEQ ID NO: 43675 - DNA, 23 bp, Homo sapiens
ggtacccacttggaggtgtcagt

SEQ ID NO: 43676 - DNA, 24 bp, Homo sapiens
gcagccccctccccgtatctcctg

SEQ ID NO: 43677 - DNA, 16 bp, Homo sapiens
gttgttgatggcgata

SEQ ID NO: 43678 - DNA, 24 bp, Homo sapiens
catgctgcaggttatgtgagggag

SEQ ID NO: 43679 - DNA, 24 bp, Homo sapiens
aggttgctgatgtcggcctcgaag

SEQ ID NO: 43680 - DNA, 21 bp, Homo sapiens
gtagcctgatctaccccattg

SEQ ID NO: 43681 - DNA, 17 bp, Homo sapiens
cctatgccatcgtggtc

SEQ ID NO: 43682 - DNA, 20 bp, Homo sapiens
ggcacagcccccagggcagg

SEQ ID NO: 43683 - DNA, 21 bp, Homo sapiens
ctgccggagcgatggacccag

SEQ ID NO: 43684 - DNA, 22 bp, Homo sapiens
tgccgtgggtggcagctggagg

SEQ ID NO: 43685 - DNA, 16 bp, Homo sapiens
ggactggcgtctgcgg

SEQ ID NO: 43686 - DNA, 24 bp, Homo sapiens
ctgcctgctcctggccgcactgac

SEQ ID NO: 43687 - DNA, 16 bp, Homo sapiens
cttctctccacagtca

SEQ ID NO: 43688 - DNA, 22 bp, Homo sapiens
cactcttgtgcgcaggtcctgg

SEQ ID NO: 43689 - DNA, 24 bp, Homo sapiens
gggcacagccgtgcagcacactgg

SEQ ID NO: 43690 - DNA, 17 bp, Homo sapiens
acccagccgacaaaatg

SEQ ID NO: 43691 - DNA, 20 bp, Homo sapiens
agttatctgtcctttctgcc

SEQ ID NO: 43692 - DNA, 24 bp, Homo sapiens
aactggcatgtccacggtggggcc

SEQ ID NO: 43693 - DNA, 24 bp, Homo sapiens
tccagggtgctcctgttcccccgt

SEQ ID NO: 43694 - DNA, 24 bp, Homo sapiens
cgacgccggggcttcgaggagcag

SEQ ID NO: 43695 - DNA, 23 bp, Homo sapiens
ctcctgcgggccccagctcggag

SEQ ID NO: 43696 - DNA, 16 bp, Homo sapiens
gagtgcaaggagctgg

SEQ ID NO: 43697 - DNA, 24 bp, Homo sapiens
ctactcccaccgccgggctttcgg

SEQ ID NO: 43698 - DNA, 23 bp, Homo sapiens
cgttgttgtggggctgcgcgctg

SEQ ID NO: 43699 - DNA, 24 bp, Homo sapiens
ctcccacagcggccgccggtacca

SEQ ID NO: 43700 - DNA, 17 bp, Homo sapiens
gaccgggaagcatggcc

SEQ ID NO: 43701 - DNA, 21 bp, Homo sapiens
gaagctccagaggccgtccag

SEQ ID NO: 43702 - DNA, 16 bp, Homo sapiens
cccgccctacgggcac

SEQ ID NO: 43703 - DNA, 24 bp, Homo sapiens
ggggtacagcatcccgccctgcag

SEQ ID NO: 43704 - DNA, 22 bp, Homo sapiens
cactcgtcctcaaccaagatgg

SEQ ID NO: 43705 - DNA, 16 bp, Homo sapiens
ccgacccccgggccat

SEQ ID NO: 43706 - DNA, 24 bp, Homo sapiens
cgctcacgtccgcgtccccaaggg

SEQ ID NO: 43707 - DNA, 24 bp, Homo sapiens
ctcctttggaggctaggaggaccg

SEQ ID NO: 43708 - DNA, 24 bp, Homo sapiens
gagccagcccggcccgggggaccc

SEQ ID NO: 43709 - DNA, 16 bp, Homo sapiens
cttcctggagggcgat

SEQ ID NO: 43710 - DNA, 17 bp, Homo sapiens
acccggaggaccgaagc

SEQ ID NO: 43711 - DNA, 23 bp, Homo sapiens
ctccagatgatgcgcccgggagg

SEQ ID NO: 43712 - DNA, 18 bp, Homo sapiens
gtggtgactctgggaagg

SEQ ID NO: 43713 - DNA, 18 bp, Homo sapiens
gaacttctccatgatggg

SEQ ID NO: 43714 - DNA, 22 bp, Homo sapiens
tgctaccatcagacttgataag

SEQ ID NO: 43715 - DNA, 18 bp, Homo sapiens
ttgctgccttgaacatcc

SEQ ID NO: 43716 - DNA, 17 bp, Homo sapiens
gggtggaggagagacta

SEQ ID NO: 43717 - DNA, 17 bp, Homo sapiens
agtatctggtccatctc

SEQ ID NO: 43718 - DNA, 16 bp, Homo sapiens
tttgtgggtgcagtgg

SEQ ID NO: 43719 - DNA, 20 bp, Homo sapiens
acagggaaggggccttgggt

SEQ ID NO: 43720 - DNA, 17 bp, Homo sapiens
acctttgggaggtggat

SEQ ID NO: 43721 - DNA, 23 bp, Homo sapiens
caatgtgaaaccacagatgggca

SEQ ID NO: 43722 - DNA, 17 bp, Homo sapiens
gcagggctcctcaccaa

SEQ ID NO: 43723 - DNA, 17 bp, Homo sapiens
ggcagtcatcaaggcac

SEQ ID NO: 43724 - DNA, 24 bp, Homo sapiens
agttcagtttgaaggtgccctggg

SEQ ID NO: 43725 - DNA, 16 bp, Homo sapiens
caggactcagctcctg

SEQ ID NO: 43726 - DNA, 23 bp, Homo sapiens
ctccaggggtcgtaccttcaggc

SEQ ID NO: 43727 - DNA, 21 bp, Homo sapiens
caggggctctcttggctgctg

SEQ ID NO: 43728 - DNA, 22 bp, Homo sapiens
gtgctaatgctcaaagtggccc

SEQ ID NO: 43729 - DNA, 18 bp, Homo sapiens
ctacaggtggctgaggag

SEQ ID NO: 43730 - DNA, 20 bp, Homo sapiens
tcatgtcctgaggtctcaca

SEQ ID NO: 43731 - DNA, 22 bp, Homo sapiens
acatccacacagccaatgagcg

SEQ ID NO: 43732 - DNA, 24 bp, Homo sapiens
agaaaaaaagaacaggcctcagca

SEQ ID NO: 43733 - DNA, 24 bp, Homo sapiens
gctaaagcacctggtcattccggc

SEQ ID NO: 43734 - DNA, 24 bp, Homo sapiens
ggggtatggaggtaggttggcagg

SEQ ID NO: 43735 - DNA, 24 bp, Homo sapiens
gaactctaactgccccctgggctc

SEQ ID NO: 43736 - DNA, 23 bp, Homo sapiens
ggtatagaccgtgaccctgggtc

SEQ ID NO: 43737 - DNA, 22 bp, Homo sapiens
gagatggtgctcagggaggccg

SEQ ID NO: 43738 - DNA, 23 bp, Homo sapiens
gcagggaagctgcacacgggacg

SEQ ID NO: 43739 - DNA, 17 bp, Homo sapiens
agcaggtctgccgcatc

SEQ ID NO: 43740 - DNA, 21 bp, Homo sapiens
cgtgttgtcccaaccttgagg

SEQ ID NO: 43741 - DNA, 20 bp, Homo sapiens
gtaggactcacgcctctgcc

SEQ ID NO: 43742 - DNA, 22 bp, Homo sapiens
ctggctcctcagggaagcaaca

SEQ ID NO: 43743 - DNA, 18 bp, Homo sapiens
ctaggtctcctgttcagg

SEQ ID NO: 43744 - DNA, 23 bp, Homo sapiens
gtggtcacagacctcaggctgtg

SEQ ID NO: 43745 - DNA, 22 bp, Homo sapiens
atcctggagttctgggatgccc

SEQ ID NO: 43746 - DNA, 24 bp, Homo sapiens
gggagctcattaggaccatggtgg

SEQ ID NO: 43747 - DNA, 18 bp, Homo sapiens
tcttttgcccttaagact

SEQ ID NO: 43748 - DNA, 16 bp, Homo sapiens
tctgcaaatgggtgta

SEQ ID NO: 43749 - DNA, 19 bp, Homo sapiens
agtgctgcagcgtgacact

SEQ ID NO: 43750 - DNA, 16 bp, Homo sapiens
gcacctcacctggctc

SEQ ID NO: 43751 - DNA, 23 bp, Homo sapiens
cagtgtcacaggcaggccttgca

SEQ ID NO: 43752 - DNA, 23 bp, Homo sapiens
gtggctgtgggaagccaggggca

SEQ ID NO: 43753 - DNA, 23 bp, Homo sapiens
aacgtgatgttctcttcccgggg

SEQ ID NO: 43754 - DNA, 21 bp, Homo sapiens
cattgatccgcttccgcacct

SEQ ID NO: 43755 - DNA, 24 bp, Homo sapiens
ctggagccactggattctgaggtg

SEQ ID NO: 43756 - DNA, 16 bp, Homo sapiens
acccccaccaggccct

SEQ ID NO: 43757 - DNA, 16 bp, Homo sapiens
ctgaccctcctgcccc

SEQ ID NO: 43758 - DNA, 21 bp, Homo sapiens
gataaggcggttttctgtccc

SEQ ID NO: 43759 - DNA, 22 bp, Homo sapiens
gactctgagcggctgctggagg

SEQ ID NO: 43760 - DNA, 22 bp, Homo sapiens
tggcttggtcgtcaccttagcg

SEQ ID NO: 43761 - DNA, 24 bp, Homo sapiens
gaagaggctaagcgccaggtggtt

SEQ ID NO: 43762 - DNA, 21 bp, Homo sapiens
gggaggaggggcaggacgtct

SEQ ID NO: 43763 - DNA, 22 bp, Homo sapiens
cgtgtgtgtgtgtgtgtgtgtg

SEQ ID NO: 43764 - DNA, 18 bp, Homo sapiens
ctggtttcaggtgtgtct

SEQ ID NO: 43765 - DNA, 17 bp, Homo sapiens
catgaatccctgtccct

SEQ ID NO: 43766 - DNA, 16 bp, Homo sapiens
atgacctcagtgccca

SEQ ID NO: 43767 - DNA, 23 bp, Homo sapiens
gtggaccgagagctgctccgagc

SEQ ID NO: 43768 - DNA, 23 bp, Homo sapiens
catccatgctgttgagagtgatg

SEQ ID NO: 43769 - DNA, 23 bp, Homo sapiens
caaaagatccctccccccagctg

SEQ ID NO: 43770 - DNA, 24 bp, Homo sapiens
aagtgaggcacagggcaggggact

SEQ ID NO: 43771 - DNA, 21 bp, Homo sapiens
agttgggggagagggggccac

SEQ ID NO: 43772 - DNA, 19 bp, Homo sapiens
agcctgtccgtggaggtgt

SEQ ID NO: 43773 - DNA, 17 bp, Homo sapiens
caactttggggccatca

SEQ ID NO: 43774 - DNA, 17 bp, Homo sapiens
cacccactttacccatt

SEQ ID NO: 43775 - DNA, 23 bp, Homo sapiens
agtttcagaacagcttgggcgac

SEQ ID NO: 43776 - DNA, 19 bp, Homo sapiens
tgaggtcctcggccatcct

SEQ ID NO: 43777 - DNA, 17 bp, Homo sapiens
gtccccccaccgcctaa

SEQ ID NO: 43778 - DNA, 24 bp, Homo sapiens
tcagggcttacctgtaggcatctg

SEQ ID NO: 43779 - DNA, 24 bp, Homo sapiens
gtggggatgggagaggcctggtga

SEQ ID NO: 43780 - DNA, 23 bp, Homo sapiens
cacgtccgcgggcggcgggggat

SEQ ID NO: 43781 - DNA, 24 bp, Homo sapiens
ttcgctgtgcatgacccatctcag

SEQ ID NO: 43782 - DNA, 24 bp, Homo sapiens
ccttggctggtccagcgccgcaat

SEQ ID NO: 43783 - DNA, 24 bp, Homo sapiens
caaggaattcagcttcgtgcagct

SEQ ID NO: 43784 - DNA, 21 bp, Homo sapiens
atcaggctgcttcccgtgctg

SEQ ID NO: 43785 - DNA, 19 bp, Homo sapiens
tgccgctgccggcctctgt

SEQ ID NO: 43786 - DNA, 19 bp, Homo sapiens
ccaaacacacgcccagcct

SEQ ID NO: 43787 - DNA, 22 bp, Homo sapiens
gtcccacccctccgccagacct

SEQ ID NO: 43788 - DNA, 22 bp, Homo sapiens
ctggccacccaccatcagccca

SEQ ID NO: 43789 - DNA, 24 bp, Homo sapiens
ccttcagcgccagcacctctgtcc

SEQ ID NO: 43790 - DNA, 24 bp, Homo sapiens
ggtcatcaggagcccggcacactg

SEQ ID NO: 43791 - DNA, 17 bp, Homo sapiens
ggagctgatccggagca

SEQ ID NO: 43792 - DNA, 22 bp, Homo sapiens
ccccggcctcgcacctgtaagt

SEQ ID NO: 43793 - DNA, 20 bp, Homo sapiens
gggggaggggcggggcctct

SEQ ID NO: 43794 - DNA, 23 bp, Homo sapiens
cccggggtggggccctgcctgag

SEQ ID NO: 43795 - DNA, 24 bp, Homo sapiens
ggtccagcccctgtgcctccctct

SEQ ID NO: 43796 - DNA, 24 bp, Homo sapiens
agttcaagggcagccacggatgga

SEQ ID NO: 43797 - DNA, 19 bp, Homo sapiens
gcacctacaacaaagactt

SEQ ID NO: 43798 - DNA, 23 bp, Homo sapiens
tcatagtgtctgacacttcaaac

SEQ ID NO: 43799 - DNA, 23 bp, Homo sapiens
tttgttggggtattgagtgttct

SEQ ID NO: 43800 - DNA, 24 bp, Homo sapiens
gggggtgatgtcttgcctgcagcg

SEQ ID NO: 43801 - DNA, 23 bp, Homo sapiens
gctgtggggaccctgggtgccag

SEQ ID NO: 43802 - DNA, 23 bp, Homo sapiens
aaggccaccctccccgcatgccc

SEQ ID NO: 43803 - DNA, 23 bp, Homo sapiens
ctcccaggaggacaaggaagctg

SEQ ID NO: 43804 - DNA, 20 bp, Homo sapiens
gcaggagcgagcacacctct

SEQ ID NO: 43805 - DNA, 17 bp, Homo sapiens
ccactggcgtcatctct

SEQ ID NO: 43806 - DNA, 24 bp, Homo sapiens
tgagaagatggttcaagttgagag

SEQ ID NO: 43807 - DNA, 16 bp, Homo sapiens
ggtaataggcaaggtc

SEQ ID NO: 43808 - DNA, 22 bp, Homo sapiens
agggatgtcctggcagaggggc

SEQ ID NO: 43809 - DNA, 23 bp, Homo sapiens
tctggggggggcaccccatctcc

SEQ ID NO: 43810 - DNA, 23 bp, Homo sapiens
cagggctcaccactcgcccacct

SEQ ID NO: 43811 - DNA, 19 bp, Homo sapiens
acaggggtgagccaccagg

SEQ ID NO: 43812 - DNA, 24 bp, Homo sapiens
caggctctcagccccgacatgctg

SEQ ID NO: 43813 - DNA, 16 bp, Homo sapiens
ctcctggcctcaagtg

SEQ ID NO: 43814 - DNA, 24 bp, Homo sapiens
tggagtttgcggtgaggtgagatc

SEQ ID NO: 43815 - DNA, 16 bp, Homo sapiens
cggccatgaacacagc

SEQ ID NO: 43816 - DNA, 22 bp, Homo sapiens
ttgtgtcaaaaagaaaaaaaaa

SEQ ID NO: 43817 - DNA, 23 bp, Homo sapiens
atgggccgtacctgatggtctgc

SEQ ID NO: 43818 - DNA, 19 bp, Homo sapiens
agaaacctgcctcagcgcc

SEQ ID NO: 43819 - DNA, 16 bp, Homo sapiens
ctgggctccaggcacc

SEQ ID NO: 43820 - DNA, 16 bp, Homo sapiens
gaggcctccgggaaag

SEQ ID NO: 43821 - DNA, 24 bp, Homo sapiens
gcagatcacgtcgcccgagaacag

SEQ ID NO: 43822 - DNA, 24 bp, Homo sapiens
aaccagctgtcactgcaggagctg

SEQ ID NO: 43823 - DNA, 16 bp, Homo sapiens
cagtgccgcccagggc

SEQ ID NO: 43824 - DNA, 24 bp, Homo sapiens
tcctaggaagtgagcctgggtgcc

SEQ ID NO: 43825 - DNA, 16 bp, Homo sapiens
ctgctgtgcctgcagt

SEQ ID NO: 43826 - DNA, 19 bp, Homo sapiens
cctctctccccagccccct

SEQ ID NO: 43827 - DNA, 18 bp, Homo sapiens
aggaaacacacagcagcc

SEQ ID NO: 43828 - DNA, 23 bp, Homo sapiens
cacagtgtggagcagtatggtgc

SEQ ID NO: 43829 - DNA, 23 bp, Homo sapiens
tccagtccctgactgtccccact

SEQ ID NO: 43830 - DNA, 23 bp, Homo sapiens
ccgccaggtgcgggcgctactgc

SEQ ID NO: 43831 - DNA, 17 bp, Homo sapiens
tctcaatcctgatcatt

SEQ ID NO: 43832 - DNA, 19 bp, Homo sapiens
agtggaacaatgtttcgac

SEQ ID NO: 43833 - DNA, 23 bp, Homo sapiens
attaaccaaatttgttaaattaa

SEQ ID NO: 43834 - DNA, 24 bp, Homo sapiens
ttatctctttcttttttcagatat

SEQ ID NO: 43835 - DNA, 16 bp, Homo sapiens
tatggaaaagccatca

SEQ ID NO: 43836 - DNA, 18 bp, Homo sapiens
tgtttgccaacaatccat

SEQ ID NO: 43837 - DNA, 19 bp, Homo sapiens
gttactttctgtccaggtc

SEQ ID NO: 43838 - DNA, 17 bp, Homo sapiens
ttctgtgactggaattt

SEQ ID NO: 43839 - DNA, 18 bp, Homo sapiens
gaaagctttcatatctga

SEQ ID NO: 43840 - DNA, 21 bp, Homo sapiens
gtacttctgacattttggggt

SEQ ID NO: 43841 - DNA, 22 bp, Homo sapiens
caagaccatccattagtgaaga

SEQ ID NO: 43842 - DNA, 19 bp, Homo sapiens
cttttaaatattcaaaata

SEQ ID NO: 43843 - DNA, 20 bp, Homo sapiens
ggaccaatcaaaaccagact

SEQ ID NO: 43844 - DNA, 20 bp, Homo sapiens
actatgtcacttgtaatagt

SEQ ID NO: 43845 - DNA, 22 bp, Homo sapiens
taactcttcgtcaatttctttt

SEQ ID NO: 43846 - DNA, 20 bp, Homo sapiens
aattcttccagtcatcttca

SEQ ID NO: 43847 - DNA, 19 bp, Homo sapiens
ctcttgaaaaaactgacaa

SEQ ID NO: 43848 - DNA, 17 bp, Homo sapiens
tgtgactgactaatagc

SEQ ID NO: 43849 - DNA, 16 bp, Homo sapiens
gcttccttgctttcaa

SEQ ID NO: 43850 - DNA, 22 bp, Homo sapiens
ataagataatgaaacattgaaa

SEQ ID NO: 43851 - DNA, 21 bp, Homo sapiens
gggcagatatcagtattatca

SEQ ID NO: 43852 - DNA, 21 bp, Homo sapiens
tgttctggtcccttgtttata

SEQ ID NO: 43853 - DNA, 16 bp, Homo sapiens
gcttcacaagagggtt

SEQ ID NO: 43854 - DNA, 21 bp, Homo sapiens
gggtgaaacaatttttaagaa

SEQ ID NO: 43855 - DNA, 17 bp, Homo sapiens
tcaggatttgcctggag

SEQ ID NO: 43856 - DNA, 21 bp, Homo sapiens
tttggctccggtatctgcctt

SEQ ID NO: 43857 - DNA, 21 bp, Homo sapiens
tccatctttcattactacaat

SEQ ID NO: 43858 - DNA, 21 bp, Homo sapiens
gttcttgtgtaagttcttggc

SEQ ID NO: 43859 - DNA, 25 bp, Homo sapiens
cttaaaatgtttaatttttatattt

SEQ ID NO: 43860 - DNA, 16 bp, Homo sapiens
tggtctttcccaggaa

SEQ ID NO: 43861 - DNA, 21 bp, Homo sapiens
agcttgcttaatttcagttaa

SEQ ID NO: 43862 - DNA, 20 bp, Homo sapiens
acaaggaatgcaaattacca

SEQ ID NO: 43863 - DNA, 20 bp, Homo sapiens
ctcttatgaatcagaacttg

SEQ ID NO: 43864 - DNA, 22 bp, Homo sapiens
tgaagaaccaaccaaccaggaa

SEQ ID NO: 43865 - DNA, 16 bp, Homo sapiens
tgtccgagatccttcc

SEQ ID NO: 43866 - DNA, 20 bp, Homo sapiens
acaccaacatatagctttat

SEQ ID NO: 43867 - DNA, 17 bp, Homo sapiens
tgacgattcagctggag

SEQ ID NO: 43868 - DNA, 19 bp, Homo sapiens
agaggttccatttccaagt

SEQ ID NO: 43869 - DNA, 19 bp, Homo sapiens
gaagttccagctctgatag

SEQ ID NO: 43870 - DNA, 19 bp, Homo sapiens
gaattttgattcatctgga

SEQ ID NO: 43871 - DNA, 22 bp, Homo sapiens
tttctgagactaaaattgttta

SEQ ID NO: 43872 - DNA, 16 bp, Homo sapiens
cacattctccatctcc

SEQ ID NO: 43873 - DNA, 18 bp, Homo sapiens
tgcttctaagtttcttgt

SEQ ID NO: 43874 - DNA, 17 bp, Homo sapiens
agacagacttaggtcac

SEQ ID NO: 43875 - DNA, 25 bp, Homo sapiens
taatagttaaatttttaccatgtgc

SEQ ID NO: 43876 - DNA, 18 bp, Homo sapiens
tggaggccttacatggaa

SEQ ID NO: 43877 - DNA, 23 bp, Homo sapiens
tatacagttttaccaaagttgtt

SEQ ID NO: 43878 - DNA, 18 bp, Homo sapiens
gcatcagtaactgactcc

SEQ ID NO: 43879 - DNA, 20 bp, Homo sapiens
tgtacttcttttatcactca

SEQ ID NO: 43880 - DNA, 18 bp, Homo sapiens
taaatgtcctcagtgact

SEQ ID NO: 43881 - DNA, 22 bp, Homo sapiens
gcctggagtccactcgagagca

SEQ ID NO: 43882 - DNA, 29 bp, Homo sapiens
tatttttaattttattttttatttgttaa

SEQ ID NO: 43883 - DNA, 16 bp, Homo sapiens
tcagctccagtaaagg

SEQ ID NO: 43884 - DNA, 23 bp, Homo sapiens
aagctttttagatatataaggtt

SEQ ID NO: 43885 - DNA, 19 bp, Homo sapiens
tctgccagaggtagagagt

SEQ ID NO: 43886 - DNA, 21 bp, Homo sapiens
aaaaattccaaggaagataaa

SEQ ID NO: 43887 - DNA, 24 bp, Homo sapiens
gcatctaattcagaatctttttat

SEQ ID NO: 43888 - DNA, 18 bp, Homo sapiens
ctgcttaggcctggtcga

SEQ ID NO: 43889 - DNA, 22 bp, Homo sapiens
gaaagctggtcttctaaggaca

SEQ ID NO: 43890 - DNA, 20 bp, Homo sapiens
ttcttttttcctctaggtgt

SEQ ID NO: 43891 - DNA, 16 bp, Homo sapiens
tttgttgggttttgga

SEQ ID NO: 43892 - DNA, 25 bp, Homo sapiens
aatacagaaatagaatgttataaca

SEQ ID NO: 43893 - DNA, 18 bp, Homo sapiens
cacatttatctagtcgac

SEQ ID NO: 43894 - DNA, 17 bp, Homo sapiens
cagttgctgactcagtt

SEQ ID NO: 43895 - DNA, 21 bp, Homo sapiens
ggcgactagtagcagccaata

SEQ ID NO: 43896 - DNA, 16 bp, Homo sapiens
tccattgctcctcggc

SEQ ID NO: 43897 - DNA, 19 bp, Homo sapiens
tctgatgacatgatgacat

SEQ ID NO: 43898 - DNA, 17 bp, Homo sapiens
gtttgtttttcccagag

SEQ ID NO: 43899 - DNA, 20 bp, Homo sapiens
tgtaagccttctactccatc

SEQ ID NO: 43900 - DNA, 23 bp, Homo sapiens
aatacattcatatatgtatatga

SEQ ID NO: 43901 - DNA, 18 bp, Homo sapiens
gtattatcatgaccccgc

SEQ ID NO: 43902 - DNA, 22 bp, Homo sapiens
ctttaagggtttgttgtaaaaa

SEQ ID NO: 43903 - DNA, 16 bp, Homo sapiens
gctttgcagcctgtgc

SEQ ID NO: 43904 - DNA, 21 bp, Homo sapiens
atttgatgaaatagagaatcc

SEQ ID NO: 43905 - DNA, 17 bp, Homo sapiens
ctcagcaaatacattgg

SEQ ID NO: 43906 - DNA, 19 bp, Homo sapiens
aggtttcaaatatcagttc

SEQ ID NO: 43907 - DNA, 24 bp, Homo sapiens
tttatattttctttttaaataatt

SEQ ID NO: 43908 - DNA, 17 bp, Homo sapiens
acagagtcagttacttt

SEQ ID NO: 43909 - DNA, 24 bp, Homo sapiens
aaaagacatccatttaatcatatt

SEQ ID NO: 43910 - DNA, 18 bp, Homo sapiens
gcttgttcacttgctcca

SEQ ID NO: 43911 - DNA, 21 bp, Homo sapiens
catagaacttgtggtatgata

SEQ ID NO: 43912 - DNA, 16 bp, Homo sapiens
gcaagaggaggagtgg

SEQ ID NO: 43913 - DNA, 20 bp, Homo sapiens
accttactagctggggtaat

SEQ ID NO: 43914 - DNA, 24 bp, Homo sapiens
gcatagcattgtgaatgcactaaa

SEQ ID NO: 43915 - DNA, 19 bp, Homo sapiens
cttgcccatacgacaaaga

SEQ ID NO: 43916 - DNA, 26 bp, Homo sapiens
ttatgttaattttacctaaataaaaa

SEQ ID NO: 43917 - DNA, 19 bp, Homo sapiens
acttgagctctttttcata

SEQ ID NO: 43918 - DNA, 17 bp, Homo sapiens
ttctactctctcgtgca

SEQ ID NO: 43919 - DNA, 25 bp, Homo sapiens
catctgaattttttttctatacatt

SEQ ID NO: 43920 - DNA, 17 bp, Homo sapiens
ccatacaacagtattcc

SEQ ID NO: 43921 - DNA, 20 bp, Homo sapiens
ggaattgtattttctactgt

SEQ ID NO: 43922 - DNA, 28 bp, Homo sapiens
taataaaattaaaatttgttaaagtacc

SEQ ID NO: 43923 - DNA, 16 bp, Homo sapiens
aggcagatactcatgg

SEQ ID NO: 43924 - DNA, 21 bp, Homo sapiens
ctcagtaaacacttgttgact

SEQ ID NO: 43925 - DNA, 17 bp, Homo sapiens
agtgtcaacctgcataa

SEQ ID NO: 43926 - DNA, 22 bp, Homo sapiens
ccaataatacagtggttcttct

SEQ ID NO: 43927 - DNA, 23 bp, Homo sapiens
attagttttaacaacattggact

SEQ ID NO: 43928 - DNA, 18 bp, Homo sapiens
actggatagtatccatga

SEQ ID NO: 43929 - DNA, 24 bp, Homo sapiens
ggcatattttgaaaattcatatag

SEQ ID NO: 43930 - DNA, 21 bp, Homo sapiens
tgtcccaacccaggtctctag

SEQ ID NO: 43931 - DNA, 22 bp, Homo sapiens
gtagtatttgaataagcagtta

SEQ ID NO: 43932 - DNA, 18 bp, Homo sapiens
gcggagagccttttggaa

SEQ ID NO: 43933 - DNA, 23 bp, Homo sapiens
ctattgtggagaaatgtaattgt

SEQ ID NO: 43934 - DNA, 19 bp, Homo sapiens
cgtcagagtatatccacca

SEQ ID NO: 43935 - DNA, 21 bp, Homo sapiens
gctggaaacactaattttcta

SEQ ID NO: 43936 - DNA, 17 bp, Homo sapiens
tgtggctagagatttta

SEQ ID NO: 43937 - DNA, 20 bp, Homo sapiens
attcttgtcttactacaatt

SEQ ID NO: 43938 - DNA, 22 bp, Homo sapiens
tgatataaacaagttcaccgat

SEQ ID NO: 43939 - DNA, 22 bp, Homo sapiens
tttaatagtaaaacatactttc

SEQ ID NO: 43940 - DNA, 23 bp, Homo sapiens
ttttttctttaggaacaaagatg

SEQ ID NO: 43941 - DNA, 17 bp, Homo sapiens
cgatccacaagtactgt

SEQ ID NO: 43942 - DNA, 23 bp, Homo sapiens
ttctccaaatatacattcaaaaa

SEQ ID NO: 43943 - DNA, 17 bp, Homo sapiens
ctgcaggtcaagatcgg

SEQ ID NO: 43944 - DNA, 16 bp, Homo sapiens
ccccagacaactacca

SEQ ID NO: 43945 - DNA, 18 bp, Homo sapiens
acacagaatttcacatct

SEQ ID NO: 43946 - DNA, 24 bp, Homo sapiens
aattataatttatgcctctagcac

SEQ ID NO: 43947 - DNA, 20 bp, Homo sapiens
gctcaaggagttcacatatt

SEQ ID NO: 43948 - DNA, 20 bp, Homo sapiens
cattaagagaagcataaatt

SEQ ID NO: 43949 - DNA, 18 bp, Homo sapiens
gcactgattgccacaagt

SEQ ID NO: 43950 - DNA, 22 bp, Homo sapiens
taatttctataaaagggacata

SEQ ID NO: 43951 - DNA, 16 bp, Homo sapiens
ttgcttaattccagct

SEQ ID NO: 43952 - DNA, 18 bp, Homo sapiens
ctgaatgtgttggacgca

SEQ ID NO: 43953 - DNA, 25 bp, Homo sapiens
tatttttaatgaatgtataattttt

SEQ ID NO: 43954 - DNA, 19 bp, Homo sapiens
tagagattgctgagactga

SEQ ID NO: 43955 - DNA, 16 bp, Homo sapiens
tgaaagagcgatacca

SEQ ID NO: 43956 - DNA, 20 bp, Homo sapiens
atcatatcattcaaagctgg

SEQ ID NO: 43957 - DNA, 24 bp, Homo sapiens
acagtctataggacaactgtagaa

SEQ ID NO: 43958 - DNA, 18 bp, Homo sapiens
actgcctgctgtcccgga

SEQ ID NO: 43959 - DNA, 23 bp, Homo sapiens
attattctctgaagagagtagat

SEQ ID NO: 43960 - DNA, 16 bp, Homo sapiens
aggcagtgtggatgca

SEQ ID NO: 43961 - DNA, 17 bp, Homo sapiens
cttaagccagtggtgga

SEQ ID NO: 43962 - DNA, 21 bp, Homo sapiens
atatcttctgtattaaggaaa

SEQ ID NO: 43963 - DNA, 16 bp, Homo sapiens
tcaggactgtgctcat

SEQ ID NO: 43964 - DNA, 17 bp, Homo sapiens
ctttcaaaaggacaacc

SEQ ID NO: 43965 - DNA, 16 bp, Homo sapiens
acaacagatggctgca

SEQ ID NO: 43966 - DNA, 27 bp, Homo sapiens
tgatgggtatattaataaaatatagat

SEQ ID NO: 43967 - DNA, 18 bp, Homo sapiens
ttgtatgttttcaagcct

SEQ ID NO: 43968 - DNA, 22 bp, Homo sapiens
tatcaaaaacattagaaagcca

SEQ ID NO: 43969 - DNA, 16 bp, Homo sapiens
aactggatgcccatgt

SEQ ID NO: 43970 - DNA, 20 bp, Homo sapiens
aaagactagatgatatgtgt

SEQ ID NO: 43971 - DNA, 22 bp, Homo sapiens
gcaattattttctagggaagtg

SEQ ID NO: 43972 - DNA, 19 bp, Homo sapiens
tctaatgaaaaagggattt

SEQ ID NO: 43973 - DNA, 17 bp, Homo sapiens
ttgccacaatgacagga

SEQ ID NO: 43974 - DNA, 18 bp, Homo sapiens
acagtcaactctctccac

SEQ ID NO: 43975 - DNA, 20 bp, Homo sapiens
ctctcctcttcttttgtttt

SEQ ID NO: 43976 - DNA, 20 bp, Homo sapiens
ttggctaaagttgattttcc

SEQ ID NO: 43977 - DNA, 19 bp, Homo sapiens
ggacttaggaatggagctc

SEQ ID NO: 43978 - DNA, 21 bp, Homo sapiens
aaccctatataatagatggtc

SEQ ID NO: 43979 - DNA, 17 bp, Homo sapiens
tcactcacagcctcctg

SEQ ID NO: 43980 - DNA, 23 bp, Homo sapiens
agaaagataaatgaaaagttatt

SEQ ID NO: 43981 - DNA, 25 bp, Homo sapiens
ttttatcatgtaactatgtatattt

SEQ ID NO: 43982 - DNA, 17 bp, Homo sapiens
ctttcctcctgtgagta

SEQ ID NO: 43983 - DNA, 19 bp, Homo sapiens
ggaaggcaaaattcagcat

SEQ ID NO: 43984 - DNA, 17 bp, Homo sapiens
gagacaaagggcgtccc

SEQ ID NO: 43985 - DNA, 19 bp, Homo sapiens
aagcccctttctcaaaaaa

SEQ ID NO: 43986 - DNA, 24 bp, Homo sapiens
tgactttattcttccttttttaaa

SEQ ID NO: 43987 - DNA, 24 bp, Homo sapiens
tctactgatgcattattaagatca

SEQ ID NO: 43988 - DNA, 16 bp, Homo sapiens
tgcaactgtaggtcct

SEQ ID NO: 43989 - DNA, 22 bp, Homo sapiens
ctctgccagatatagtgttaaa

SEQ ID NO: 43990 - DNA, 16 bp, Homo sapiens
tgggacccgagaaaaa

SEQ ID NO: 43991 - DNA, 19 bp, Homo sapiens
accccaaagagctcagctt

SEQ ID NO: 43992 - DNA, 22 bp, Homo sapiens
aataatgatcttgcatgcataa

SEQ ID NO: 43993 - DNA, 20 bp, Homo sapiens
taccataggatctagaagga

SEQ ID NO: 43994 - DNA, 24 bp, Homo sapiens
attacagaataaaatattttaaat

SEQ ID NO: 43995 - DNA, 21 bp, Homo sapiens
tgggaaaaagaaaaagataaa

SEQ ID NO: 43996 - DNA, 19 bp, Homo sapiens
tgcaaggtgttacaaggaa

SEQ ID NO: 43997 - DNA, 24 bp, Homo sapiens
gcatttattactttctttttaata

SEQ ID NO: 43998 - DNA, 27 bp, Homo sapiens
tattttattaaatattcaataacatgc

SEQ ID NO: 43999 - DNA, 27 bp, Homo sapiens
taacttaaataaatttgacatttaaaa

SEQ ID NO: 44000 - DNA, 19 bp, Homo sapiens
tgggactcaacagaaaaat

SEQ ID NO: 44001 - DNA, 16 bp, Homo sapiens
ctgggcagcagagtga

SEQ ID NO: 44002 - DNA, 22 bp, Homo sapiens
tcagagaaaattccttcagtcc

SEQ ID NO: 44003 - DNA, 25 bp, Homo sapiens
gaagaatttattaagctggaaacta

SEQ ID NO: 44004 - DNA, 23 bp, Homo sapiens
aactactgtttaattatcataat

SEQ ID NO: 44005 - DNA, 18 bp, Homo sapiens
tttattcatggctacagc

SEQ ID NO: 44006 - DNA, 22 bp, Homo sapiens
agaacaattaaaaatgtacaac

SEQ ID NO: 44007 - DNA, 22 bp, Homo sapiens
cattactattcctttttctggc

SEQ ID NO: 44008 - DNA, 20 bp, Homo sapiens
actcaccatctttagtttcc

SEQ ID NO: 44009 - DNA, 21 bp, Homo sapiens
cactttattaggaagatcaga

SEQ ID NO: 44010 - DNA, 22 bp, Homo sapiens
ggaagcatggtggtagtagact

SEQ ID NO: 44011 - DNA, 19 bp, Homo sapiens
ccagacctgtgcctataga

SEQ ID NO: 44012 - DNA, 21 bp, Homo sapiens
aacatggcatattttatgtta

SEQ ID NO: 44013 - DNA, 19 bp, Homo sapiens
ggataactccagtggaagt

SEQ ID NO: 44014 - DNA, 19 bp, Homo sapiens
aaaggaatacaacattctt

SEQ ID NO: 44015 - DNA, 17 bp, Homo sapiens
gattccagatgacctga

SEQ ID NO: 44016 - DNA, 23 bp, Homo sapiens
aagaattttgatgtaacatatat

SEQ ID NO: 44017 - DNA, 23 bp, Homo sapiens
ttatgctatgaaatatttcttaa

SEQ ID NO: 44018 - DNA, 16 bp, Homo sapiens
ttggaattttaggggt

SEQ ID NO: 44019 - DNA, 22 bp, Homo sapiens
tgagttattatgatagcttctg

SEQ ID NO: 44020 - DNA, 23 bp, Homo sapiens
ttctatatttagtctcttcctca

SEQ ID NO: 44021 - DNA, 18 bp, Homo sapiens
gcaaagcgtaaatgtgtc

SEQ ID NO: 44022 - DNA, 20 bp, Homo sapiens
aagaattgaacaatgccatc

SEQ ID NO: 44023 - DNA, 26 bp, Homo sapiens
tttcaatttatatatgaaatactatt

SEQ ID NO: 44024 - DNA, 20 bp, Homo sapiens
ttaggtcagatcataatgaa

SEQ ID NO: 44025 - DNA, 23 bp, Homo sapiens
ttctcccaagttataaaatttat

SEQ ID NO: 44026 - DNA, 20 bp, Homo sapiens
aatgtgttatcacctgaaaa

SEQ ID NO: 44027 - DNA, 20 bp, Homo sapiens
tttttggtatatttgatggc

SEQ ID NO: 44028 - DNA, 20 bp, Homo sapiens
tgacatatggaaagctagtt

SEQ ID NO: 44029 - DNA, 23 bp, Homo sapiens
cttgtagcacacaggccttctca

SEQ ID NO: 44030 - DNA, 20 bp, Homo sapiens
gtgccattcatgtatttcca

SEQ ID NO: 44031 - DNA, 20 bp, Homo sapiens
gctctgacatctgcttctct

SEQ ID NO: 44032 - DNA, 22 bp, Homo sapiens
aatctcaacctcctagtatata

SEQ ID NO: 44033 - DNA, 18 bp, Homo sapiens
ctttggagaaagtagctt

SEQ ID NO: 44034 - DNA, 23 bp, Homo sapiens
cattcaaaaatatgcagtcaaag

SEQ ID NO: 44035 - DNA, 22 bp, Homo sapiens
catcaaaatattcctggtccca

SEQ ID NO: 44036 - DNA, 20 bp, Homo sapiens
gcattttttcctttcaatct

SEQ ID NO: 44037 - DNA, 19 bp, Homo sapiens
cagaggttgctgacgcgtt

SEQ ID NO: 44038 - DNA, 19 bp, Homo sapiens
cgagtcagagattccagtt

SEQ ID NO: 44039 - DNA, 21 bp, Homo sapiens
ttgtctagaggaacaaccttt

SEQ ID NO: 44040 - DNA, 18 bp, Homo sapiens
agaacttcaaaccaagca

SEQ ID NO: 44041 - DNA, 21 bp, Homo sapiens
caagatgtctcttgtttcttc

SEQ ID NO: 44042 - DNA, 23 bp, Homo sapiens
aagctgatgctgaatataaaaaa

SEQ ID NO: 44043 - DNA, 20 bp, Homo sapiens
aaacttgctactgatgatga

SEQ ID NO: 44044 - DNA, 18 bp, Homo sapiens
actgacaccaaactcctt

SEQ ID NO: 44045 - DNA, 22 bp, Homo sapiens
tgattcccacagtatttgactg

SEQ ID NO: 44046 - DNA, 19 bp, Homo sapiens
ctttattttctacacagtt

SEQ ID NO: 44047 - DNA, 23 bp, Homo sapiens
tcttccataactatgaagttttt

SEQ ID NO: 44048 - DNA, 20 bp, Homo sapiens
tgctgtcatattctacacta

SEQ ID NO: 44049 - DNA, 22 bp, Homo sapiens
tttggctcggcgtgtctttggc

SEQ ID NO: 44050 - DNA, 17 bp, Homo sapiens
tgggttgatcaacaaac

SEQ ID NO: 44051 - DNA, 19 bp, Homo sapiens
aggcagctggtattagtgc

SEQ ID NO: 44052 - DNA, 18 bp, Homo sapiens
tgctgtttcccttgaaca

SEQ ID NO: 44053 - DNA, 22 bp, Homo sapiens
ttctactttggactcaatgcta

SEQ ID NO: 44054 - DNA, 18 bp, Homo sapiens
gtggacaaaatgtaaagt

SEQ ID NO: 44055 - DNA, 19 bp, Homo sapiens
tttggataaatatgtacgt

SEQ ID NO: 44056 - DNA, 24 bp, Homo sapiens
aatatgcacattaaaatttgtttt

SEQ ID NO: 44057 - DNA, 19 bp, Homo sapiens
ttcgaatttgatctagaag

SEQ ID NO: 44058 - DNA, 22 bp, Homo sapiens
tcactatagtaaccattatact

SEQ ID NO: 44059 - DNA, 22 bp, Homo sapiens
agtgctgggactataggcatga

SEQ ID NO: 44060 - DNA, 19 bp, Homo sapiens
ggtatcttgtcaacaagtt

SEQ ID NO: 44061 - DNA, 26 bp, Homo sapiens
aaaccaactcagaatatataataaag

SEQ ID NO: 44062 - DNA, 25 bp, Homo sapiens
aagtttttttaaagtagttttaaat

SEQ ID NO: 44063 - DNA, 23 bp, Homo sapiens
tttaaccttaaatgagatagttc

SEQ ID NO: 44064 - DNA, 23 bp, Homo sapiens
cttaacctaaaatggtaagaaga

SEQ ID NO: 44065 - DNA, 21 bp, Homo sapiens
tgctgagaggggttccacctc

SEQ ID NO: 44066 - DNA, 21 bp, Homo sapiens
aaacagaaaagaaagattaca

SEQ ID NO: 44067 - DNA, 19 bp, Homo sapiens
acaagttggtcaaaaactt

SEQ ID NO: 44068 - DNA, 20 bp, Homo sapiens
agcatacaaattaggtgaca

SEQ ID NO: 44069 - DNA, 16 bp, Homo sapiens
ctgggtggaaggcagg

SEQ ID NO: 44070 - DNA, 22 bp, Homo sapiens
atttctattgctatattatgtg

SEQ ID NO: 44071 - DNA, 22 bp, Homo sapiens
ttcctctcatttcttatatgaa

SEQ ID NO: 44072 - DNA, 18 bp, Homo sapiens
ccccatttgagagtccaa

SEQ ID NO: 44073 - DNA, 27 bp, Homo sapiens
tgtgaattgtaataatagtttattttc

SEQ ID NO: 44074 - DNA, 19 bp, Homo sapiens
accttgatcactaaaatgc

SEQ ID NO: 44075 - DNA, 22 bp, Homo sapiens
gctacaacaaatgtagataaca

SEQ ID NO: 44076 - DNA, 21 bp, Homo sapiens
ccacttctatagcttgattct

SEQ ID NO: 44077 - DNA, 18 bp, Homo sapiens
gacttgtgggatccagag

SEQ ID NO: 44078 - DNA, 24 bp, Homo sapiens
cgactgcttcctccacctgccgcg

SEQ ID NO: 44079 - DNA, 16 bp, Homo sapiens
cttcggcggcgcccgg

SEQ ID NO: 44080 - DNA, 24 bp, Homo sapiens
tcgcctggcgggtgctgggggagg

SEQ ID NO: 44081 - DNA, 24 bp, Homo sapiens
tcggcctcgtccgaccccaggctg

SEQ ID NO: 44082 - DNA, 24 bp, Homo sapiens
tttgcggcgctagggtgggcgaac

SEQ ID NO: 44083 - DNA, 24 bp, Homo sapiens
gatgcagctgggccacgagacgcc

SEQ ID NO: 44084 - DNA, 20 bp, Homo sapiens
ccgatcgatctcctccggct

SEQ ID NO: 44085 - DNA, 24 bp, Homo sapiens
tgaaggccacagtcactgccgccc

SEQ ID NO: 44086 - DNA, 21 bp, Homo sapiens
ccactacaggcttacggcagg

SEQ ID NO: 44087 - DNA, 22 bp, Homo sapiens
ctcaccttggccaaggagcagt

SEQ ID NO: 44088 - DNA, 23 bp, Homo sapiens
ctcccgggtgatgacgtaggctg

SEQ ID NO: 44089 - DNA, 23 bp, Homo sapiens
gcgtaccggacccactgagcggg

SEQ ID NO: 44090 - DNA, 23 bp, Homo sapiens
gagcggcggaggcgcccagcgga

SEQ ID NO: 44091 - DNA, 16 bp, Homo sapiens
ggtggtgcggcccagg

SEQ ID NO: 44092 - DNA, 23 bp, Homo sapiens
aatgcagagctggagtcgtgtgt

SEQ ID NO: 44093 - DNA, 21 bp, Homo sapiens
ttagttattgtcaaagagggg

SEQ ID NO: 44094 - DNA, 18 bp, Homo sapiens
cctgtaggccatgagata

SEQ ID NO: 44095 - DNA, 21 bp, Homo sapiens
agatacactaataatcctcgc

SEQ ID NO: 44096 - DNA, 20 bp, Homo sapiens
ttttacttaagtacttactc

SEQ ID NO: 44097 - DNA, 19 bp, Homo sapiens
ccttcagtagttctatgtt

SEQ ID NO: 44098 - DNA, 22 bp, Homo sapiens
atattcacttgcttttacattg

SEQ ID NO: 44099 - DNA, 16 bp, Homo sapiens
aggccatttcaatcga

SEQ ID NO: 44100 - DNA, 21 bp, Homo sapiens
ttcaaacgaataaatacatga

SEQ ID NO: 44101 - DNA, 23 bp, Homo sapiens
ctgagaacttacgcagatcagcc

SEQ ID NO: 44102 - DNA, 18 bp, Homo sapiens
agagcatcaagtagtagt

SEQ ID NO: 44103 - DNA, 19 bp, Homo sapiens
cagcaacatatcctccagg

SEQ ID NO: 44104 - DNA, 23 bp, Homo sapiens
tttgtactgtaagaggtttaagt

SEQ ID NO: 44105 - DNA, 26 bp, Homo sapiens
aaataaatcaatacttagtttgagtt

SEQ ID NO: 44106 - DNA, 23 bp, Homo sapiens
tggtaaatattaagcaatttact

SEQ ID NO: 44107 - DNA, 18 bp, Homo sapiens
accatgtttttgcctgca

SEQ ID NO: 44108 - DNA, 16 bp, Homo sapiens
aggttctggtcctgga

SEQ ID NO: 44109 - DNA, 20 bp, Homo sapiens
accaaatgaacctaatcttt

SEQ ID NO: 44110 - DNA, 25 bp, Homo sapiens
atgataaattataaaggactatata

SEQ ID NO: 44111 - DNA, 21 bp, Homo sapiens
caccttagaaggaatacaacc

SEQ ID NO: 44112 - DNA, 25 bp, Homo sapiens
ttgttttgtagaagaattaagacat

SEQ ID NO: 44113 - DNA, 17 bp, Homo sapiens
tctagttggttgctagc

SEQ ID NO: 44114 - DNA, 19 bp, Homo sapiens
tgtgcagttaaataatgtt

SEQ ID NO: 44115 - DNA, 19 bp, Homo sapiens
gccacaacttggattgttt

SEQ ID NO: 44116 - DNA, 16 bp, Homo sapiens
tggtggaacatgcttg

SEQ ID NO: 44117 - DNA, 18 bp, Homo sapiens
catgggccatatggtaat

SEQ ID NO: 44118 - DNA, 16 bp, Homo sapiens
acgaaactccgtctca

SEQ ID NO: 44119 - DNA, 23 bp, Homo sapiens
agtctggtaatatcattaagcat

SEQ ID NO: 44120 - DNA, 22 bp, Homo sapiens
ttgattatttgaagtctgttta

SEQ ID NO: 44121 - DNA, 16 bp, Homo sapiens
tgcgtacgttagacac

SEQ ID NO: 44122 - DNA, 25 bp, Homo sapiens
ttattgaacaactctcattattacc

SEQ ID NO: 44123 - DNA, 18 bp, Homo sapiens
taagtaaatctctccaca

SEQ ID NO: 44124 - DNA, 16 bp, Homo sapiens
tgctccatcatcttgt

SEQ ID NO: 44125 - DNA, 18 bp, Homo sapiens
actgccttttataagcat

SEQ ID NO: 44126 - DNA, 21 bp, Homo sapiens
cactgaccttattctgtttga

SEQ ID NO: 44127 - DNA, 18 bp, Homo sapiens
gcatattgcttcaagaat

SEQ ID NO: 44128 - DNA, 22 bp, Homo sapiens
actctataatgcaaagtttaat

SEQ ID NO: 44129 - DNA, 19 bp, Homo sapiens
gcttgaatttagacaagat

SEQ ID NO: 44130 - DNA, 22 bp, Homo sapiens
aggttagcaagctattttaaat

SEQ ID NO: 44131 - DNA, 18 bp, Homo sapiens
aacaggtggaattgccca

SEQ ID NO: 44132 - DNA, 18 bp, Homo sapiens
tcacagatttttttgctg

SEQ ID NO: 44133 - DNA, 18 bp, Homo sapiens
cgtagcagtgacttgatt

SEQ ID NO: 44134 - DNA, 25 bp, Homo sapiens
attttgttttagataaattatttac

SEQ ID NO: 44135 - DNA, 17 bp, Homo sapiens
acttctgaacccgtggc

SEQ ID NO: 44136 - DNA, 25 bp, Homo sapiens
attactttaaactttgtgaatttat

SEQ ID NO: 44137 - DNA, 22 bp, Homo sapiens
agaaaagttgtaatggttgtaa

SEQ ID NO: 44138 - DNA, 18 bp, Homo sapiens
agataactggcaaaaatc

SEQ ID NO: 44139 - DNA, 20 bp, Homo sapiens
agaaatctctcaaagttcac

SEQ ID NO: 44140 - DNA, 24 bp, Homo sapiens
tattgatacaaagaacattcttat

SEQ ID NO: 44141 - DNA, 20 bp, Homo sapiens
cagaataaagacaggtaact

SEQ ID NO: 44142 - DNA, 17 bp, Homo sapiens
aaaccatgtgtacatgt

SEQ ID NO: 44143 - DNA, 18 bp, Homo sapiens
aagataaagcacctgtag

SEQ ID NO: 44144 - DNA, 18 bp, Homo sapiens
ttcaattaatggttggtt

SEQ ID NO: 44145 - DNA, 20 bp, Homo sapiens
cacttaccaattctacacct

SEQ ID NO: 44146 - DNA, 20 bp, Homo sapiens
gtactaggttttttcaaatt

SEQ ID NO: 44147 - DNA, 16 bp, Homo sapiens
ggggacctttaagtcc

SEQ ID NO: 44148 - DNA, 18 bp, Homo sapiens
caatagtgtcatctacag

SEQ ID NO: 44149 - DNA, 21 bp, Homo sapiens
gaagtgtttaagcaaaactca

SEQ ID NO: 44150 - DNA, 17 bp, Homo sapiens
tggtgcaggagtaatag

SEQ ID NO: 44151 - DNA, 18 bp, Homo sapiens
gctgtcacatctgcacca

SEQ ID NO: 44152 - DNA, 23 bp, Homo sapiens
gcttctcataggaacatactagc

SEQ ID NO: 44153 - DNA, 22 bp, Homo sapiens
tttttagatatctccatatcaa

SEQ ID NO: 44154 - DNA, 20 bp, Homo sapiens
tgatttcgtaaacatttgct

SEQ ID NO: 44155 - DNA, 22 bp, Homo sapiens
accagtaacctttgtattcaat

SEQ ID NO: 44156 - DNA, 19 bp, Homo sapiens
agggttcagtttggcaaag

SEQ ID NO: 44157 - DNA, 23 bp, Homo sapiens
acatcaaaaacaaatgatgtata

SEQ ID NO: 44158 - DNA, 18 bp, Homo sapiens
aggtggagttggaattga

SEQ ID NO: 44159 - DNA, 21 bp, Homo sapiens
aaaccctatatttgctaaact

SEQ ID NO: 44160 - DNA, 25 bp, Homo sapiens
caggggtttaaatttaaattgaata

SEQ ID NO: 44161 - DNA, 19 bp, Homo sapiens
tttgataagcaactgagtt

SEQ ID NO: 44162 - DNA, 24 bp, Homo sapiens
gcaccactgtactccagtctggcg

SEQ ID NO: 44163 - DNA, 19 bp, Homo sapiens
accaagagtacatcacaag

SEQ ID NO: 44164 - DNA, 20 bp, Homo sapiens
aatgaaaatgtcatcaacac

SEQ ID NO: 44165 - DNA, 18 bp, Homo sapiens
ttcaattcccagctcttc

SEQ ID NO: 44166 - DNA, 19 bp, Homo sapiens
tgtaggtgtgtatttaaca

SEQ ID NO: 44167 - DNA, 18 bp, Homo sapiens
ccaacttactttggaatt

SEQ ID NO: 44168 - DNA, 19 bp, Homo sapiens
gtggtaaagctgaagttat

SEQ ID NO: 44169 - DNA, 22 bp, Homo sapiens
tcttacttttcaaaatactgtt

SEQ ID NO: 44170 - DNA, 17 bp, Homo sapiens
aatttgggactagaaga

SEQ ID NO: 44171 - DNA, 20 bp, Homo sapiens
ttacattttgtaagtttact

SEQ ID NO: 44172 - DNA, 22 bp, Homo sapiens
ataccagatttcaaactaaaat

SEQ ID NO: 44173 - DNA, 19 bp, Homo sapiens
actcaaagataagctgaat

SEQ ID NO: 44174 - DNA, 18 bp, Homo sapiens
ctctgctttgtgagccag

SEQ ID NO: 44175 - DNA, 22 bp, Homo sapiens
tttggtgacttgtttactggaa

SEQ ID NO: 44176 - DNA, 20 bp, Homo sapiens
acaattgtagtcaatgtgca

SEQ ID NO: 44177 - DNA, 20 bp, Homo sapiens
cagaaattcattgtgtttct

SEQ ID NO: 44178 - DNA, 18 bp, Homo sapiens
ctgctcttctgatttgcc

SEQ ID NO: 44179 - DNA, 21 bp, Homo sapiens
gatgtagttgctggtccaatg

SEQ ID NO: 44180 - DNA, 17 bp, Homo sapiens
ggcacaactcacacatt

SEQ ID NO: 44181 - DNA, 21 bp, Homo sapiens
aaggaatggctggtggtgctg

SEQ ID NO: 44182 - DNA, 18 bp, Homo sapiens
tttcacagctgttaaata

SEQ ID NO: 44183 - DNA, 16 bp, Homo sapiens
agttgcttgggttggc

SEQ ID NO: 44184 - DNA, 20 bp, Homo sapiens
taaatctgtgaatgatctct

SEQ ID NO: 44185 - DNA, 18 bp, Homo sapiens
taaccagtcttctggtct

SEQ ID NO: 44186 - DNA, 18 bp, Homo sapiens
cagcatttgtcttagctc

SEQ ID NO: 44187 - DNA, 23 bp, Homo sapiens
ttgggatttattttctgaacaaa

SEQ ID NO: 44188 - DNA, 17 bp, Homo sapiens
gtgctcccagtactctg

SEQ ID NO: 44189 - DNA, 24 bp, Homo sapiens
cagttacgtagattctttttttct

SEQ ID NO: 44190 - DNA, 18 bp, Homo sapiens
gcaatgctttctagaaat

SEQ ID NO: 44191 - DNA, 20 bp, Homo sapiens
catttgctgctaacagcaga

SEQ ID NO: 44192 - DNA, 16 bp, Homo sapiens
ctggaaatgagcaacc

SEQ ID NO: 44193 - DNA, 24 bp, Homo sapiens
gatccttgggcagaaatcgacaga

SEQ ID NO: 44194 - DNA, 19 bp, Homo sapiens
ctgtgagagtgctgctggt

SEQ ID NO: 44195 - DNA, 19 bp, Homo sapiens
cttctgtgtcaccttttct

SEQ ID NO: 44196 - DNA, 19 bp, Homo sapiens
tgctccatattccaaagca

SEQ ID NO: 44197 - DNA, 20 bp, Homo sapiens
ttaaggcgtttttaagatct

SEQ ID NO: 44198 - DNA, 25 bp, Homo sapiens
tcaattctatatgttgttaataatt

SEQ ID NO: 44199 - DNA, 17 bp, Homo sapiens
agtttttgccttggaag

SEQ ID NO: 44200 - DNA, 21 bp, Homo sapiens
agggaagaaatttaaaattaa

SEQ ID NO: 44201 - DNA, 17 bp, Homo sapiens
gaagctgctcttgcttt

SEQ ID NO: 44202 - DNA, 18 bp, Homo sapiens
caaatgacgcagcaagat

SEQ ID NO: 44203 - DNA, 17 bp, Homo sapiens
tgtcatgcacatccggt

SEQ ID NO: 44204 - DNA, 19 bp, Homo sapiens
aaaagctcccaggaaattt

SEQ ID NO: 44205 - DNA, 21 bp, Homo sapiens
ttcttctgacccacaaatatt

SEQ ID NO: 44206 - DNA, 22 bp, Homo sapiens
taattcagtcctagaaattctt

SEQ ID NO: 44207 - DNA, 20 bp, Homo sapiens
ttagagaagcaaatcttgct

SEQ ID NO: 44208 - DNA, 23 bp, Homo sapiens
tataagagtattccattttgtcc

SEQ ID NO: 44209 - DNA, 20 bp, Homo sapiens
aaaagtttggagacaacgct

SEQ ID NO: 44210 - DNA, 21 bp, Homo sapiens
gacatcacagcaggtcagaga

SEQ ID NO: 44211 - DNA, 19 bp, Homo sapiens
ctcctctttcgtgggcacg

SEQ ID NO: 44212 - DNA, 23 bp, Homo sapiens
tttggcattaggagcttgagccc

SEQ ID NO: 44213 - DNA, 24 bp, Homo sapiens
agcgcatctttttaaaaactgctt

SEQ ID NO: 44214 - DNA, 16 bp, Homo sapiens
gaggtcgcctctggaa

SEQ ID NO: 44215 - DNA, 18 bp, Homo sapiens
tgctttctgttttattct

SEQ ID NO: 44216 - DNA, 17 bp, Homo sapiens
gcgctgtctgtatcctt

SEQ ID NO: 44217 - DNA, 19 bp, Homo sapiens
tctcatatttacatgtgca

SEQ ID NO: 44218 - DNA, 21 bp, Homo sapiens
agatagattgtcagcagaatc

SEQ ID NO: 44219 - DNA, 16 bp, Homo sapiens
tctgtatggagaccaa

SEQ ID NO: 44220 - DNA, 23 bp, Homo sapiens
ataatatgaatttctctcttcaa

SEQ ID NO: 44221 - DNA, 18 bp, Homo sapiens
gctggaccagaccaattt

SEQ ID NO: 44222 - DNA, 23 bp, Homo sapiens
ggctcctatttttaaatataaga

SEQ ID NO: 44223 - DNA, 24 bp, Homo sapiens
acatataccaaatcccttctgttg

SEQ ID NO: 44224 - DNA, 16 bp, Homo sapiens
tcatcttggcctccca

SEQ ID NO: 44225 - DNA, 23 bp, Homo sapiens
gtgtttggtgttgtatggtctcc

SEQ ID NO: 44226 - DNA, 16 bp, Homo sapiens
cgccgaagggcattaa

SEQ ID NO: 44227 - DNA, 22 bp, Homo sapiens
tatacttgtgtgaatcaaacta

SEQ ID NO: 44228 - DNA, 16 bp, Homo sapiens
tgagatccttacccct

SEQ ID NO: 44229 - DNA, 16 bp, Homo sapiens
tggtcccactttttat

SEQ ID NO: 44230 - DNA, 20 bp, Homo sapiens
ccagatttcgtagtcttttc

SEQ ID NO: 44231 - DNA, 19 bp, Homo sapiens
agaaaaatcctaaactcat

SEQ ID NO: 44232 - DNA, 19 bp, Homo sapiens
ggtttcttagtgtttggag

SEQ ID NO: 44233 - DNA, 24 bp, Homo sapiens
gaatctttttatatttaggggtaa

SEQ ID NO: 44234 - DNA, 17 bp, Homo sapiens
tcccagtaagagaggct

SEQ ID NO: 44235 - DNA, 21 bp, Homo sapiens
atgaccctctatataaactca

SEQ ID NO: 44236 - DNA, 18 bp, Homo sapiens
agataaatcgcgatagag

SEQ ID NO: 44237 - DNA, 19 bp, Homo sapiens
ctcagggtattttatgaga

SEQ ID NO: 44238 - DNA, 17 bp, Homo sapiens
gccaaaaatggctgggt

SEQ ID NO: 44239 - DNA, 19 bp, Homo sapiens
aggaagtcaccaaagcagt

SEQ ID NO: 44240 - DNA, 25 bp, Homo sapiens
gtattaccttcttataaatcaaact

SEQ ID NO: 44241 - DNA, 22 bp, Homo sapiens
gataacaaggaggaacgctcta

SEQ ID NO: 44242 - DNA, 22 bp, Homo sapiens
aatttatgacattaaaacatgt

SEQ ID NO: 44243 - DNA, 22 bp, Homo sapiens
tctttattgtgaggacactgct

SEQ ID NO: 44244 - DNA, 25 bp, Homo sapiens
ggcatattaaattaatttcagcatt

SEQ ID NO: 44245 - DNA, 20 bp, Homo sapiens
tgagaatagctatgtttagt

SEQ ID NO: 44246 - DNA, 23 bp, Homo sapiens
aaagaaacatttatgaacctgag

SEQ ID NO: 44247 - DNA, 26 bp, Homo sapiens
gtccaatacttattttatctagaaca

SEQ ID NO: 44248 - DNA, 22 bp, Homo sapiens
cattacctttacttaataatga

SEQ ID NO: 44249 - DNA, 24 bp, Homo sapiens
aataggtacatacttcatcaaatt

SEQ ID NO: 44250 - DNA, 26 bp, Homo sapiens
tataatatatttgtattttgtttgtt

SEQ ID NO: 44251 - DNA, 16 bp, Homo sapiens
actccgcctttccagt

SEQ ID NO: 44252 - DNA, 16 bp, Homo sapiens
gctgtcaagccgtgtt

SEQ ID NO: 44253 - DNA, 19 bp, Homo sapiens
tttccagaatagggaagct

SEQ ID NO: 44254 - DNA, 17 bp, Homo sapiens
tccaacaacctgaacaa

SEQ ID NO: 44255 - DNA, 16 bp, Homo sapiens
aggagcgatccacacg

SEQ ID NO: 44256 - DNA, 21 bp, Homo sapiens
agaaccacgaagtgtttgatc

SEQ ID NO: 44257 - DNA, 16 bp, Homo sapiens
acagaaggcagacgcc

SEQ ID NO: 44258 - DNA, 18 bp, Homo sapiens
agtttctaggggtggaag

SEQ ID NO: 44259 - DNA, 19 bp, Homo sapiens
cttcatcatcattctccct

SEQ ID NO: 44260 - DNA, 17 bp, Homo sapiens
ttgcattggcacatttc

SEQ ID NO: 44261 - DNA, 18 bp, Homo sapiens
gtgggctttttgaaaaca

SEQ ID NO: 44262 - DNA, 20 bp, Homo sapiens
ctaatctgggagttgttaca

SEQ ID NO: 44263 - DNA, 21 bp, Homo sapiens
aaaatttaatgacactgaaga

SEQ ID NO: 44264 - DNA, 16 bp, Homo sapiens
aggctgggctagggag

SEQ ID NO: 44265 - DNA, 23 bp, Homo sapiens
ttatttttgttaccatctatttg

SEQ ID NO: 44266 - DNA, 24 bp, Homo sapiens
aacagattggatattttcaatcat

SEQ ID NO: 44267 - DNA, 24 bp, Homo sapiens
aaatatgacttaaaaccttgagca

SEQ ID NO: 44268 - DNA, 19 bp, Homo sapiens
ttactgtcttaagttttca

SEQ ID NO: 44269 - DNA, 23 bp, Homo sapiens
gattgattgattgattgattgat

SEQ ID NO: 44270 - DNA, 26 bp, Homo sapiens
acatatttttaaaaaattaaggacag

SEQ ID NO: 44271 - DNA, 22 bp, Homo sapiens
gtgaaagacttgtgattacctc

SEQ ID NO: 44272 - DNA, 20 bp, Homo sapiens
tgcaatcatttgattgtcac

SEQ ID NO: 44273 - DNA, 20 bp, Homo sapiens
gaagcaatggaaaaaatgat

SEQ ID NO: 44274 - DNA, 22 bp, Homo sapiens
ttaaataacatgcccaaggtca

SEQ ID NO: 44275 - DNA, 18 bp, Homo sapiens
ggctgagctattgaagta

SEQ ID NO: 44276 - DNA, 23 bp, Homo sapiens
gcagaaagactctagagaccatg

SEQ ID NO: 44277 - DNA, 21 bp, Homo sapiens
cctttgattagtgcataggga

SEQ ID NO: 44278 - DNA, 23 bp, Homo sapiens
taaaataacatcctgaattttat

SEQ ID NO: 44279 - DNA, 16 bp, Homo sapiens
ccgccatgcgcagaac

SEQ ID NO: 44280 - DNA, 19 bp, Homo sapiens
ggaaggcagcctatgtgag

SEQ ID NO: 44281 - DNA, 19 bp, Homo sapiens
gtttattgctccaagagag

SEQ ID NO: 44282 - DNA, 20 bp, Homo sapiens
gtggtgtttttatctgtgct

SEQ ID NO: 44283 - DNA, 21 bp, Homo sapiens
tgatctattgactgattattt

SEQ ID NO: 44284 - DNA, 18 bp, Homo sapiens
accaccatctcattctgc

SEQ ID NO: 44285 - DNA, 21 bp, Homo sapiens
tagtgaaggaaatttcttttt

SEQ ID NO: 44286 - DNA, 20 bp, Homo sapiens
caaacatggtatgactctct

SEQ ID NO: 44287 - DNA, 18 bp, Homo sapiens
ggaaaagtttaaggtgaa

SEQ ID NO: 44288 - DNA, 23 bp, Homo sapiens
atattccaatgtcttatattctt

SEQ ID NO: 44289 - DNA, 23 bp, Homo sapiens
ctatttcattattaaaattcata

SEQ ID NO: 44290 - DNA, 17 bp, Homo sapiens
gacctcctcccagaagg

SEQ ID NO: 44291 - DNA, 19 bp, Homo sapiens
tgcattaatgctattctga

SEQ ID NO: 44292 - DNA, 20 bp, Homo sapiens
ggatgaaatccatattcaca

SEQ ID NO: 44293 - DNA, 20 bp, Homo sapiens
ggatttcttacaaaagcaag

SEQ ID NO: 44294 - DNA, 16 bp, Homo sapiens
tgatcctccttccagt

SEQ ID NO: 44295 - DNA, 16 bp, Homo sapiens
aatgtaacagccttct

SEQ ID NO: 44296 - DNA, 24 bp, Homo sapiens
agatattttcaatagatgcttgtt

SEQ ID NO: 44297 - DNA, 19 bp, Homo sapiens
tgggcaaatatcttagttt

SEQ ID NO: 44298 - DNA, 19 bp, Homo sapiens
atccctgttaaaaaaacac

SEQ ID NO: 44299 - DNA, 26 bp, Homo sapiens
attatgtactataaagtaataatgta

SEQ ID NO: 44300 - DNA, 22 bp, Homo sapiens
catcaccattagaagtttttct

SEQ ID NO: 44301 - DNA, 18 bp, Homo sapiens
ttgtacataaaacaagca

SEQ ID NO: 44302 - DNA, 17 bp, Homo sapiens
atctttcaggacaggag

SEQ ID NO: 44303 - DNA, 21 bp, Homo sapiens
gaaagcaaaacaaaacaataa

SEQ ID NO: 44304 - DNA, 19 bp, Homo sapiens
aaaaaaagagacatggaca

SEQ ID NO: 44305 - DNA, 17 bp, Homo sapiens
atttctcacttcttggt

SEQ ID NO: 44306 - DNA, 18 bp, Homo sapiens
tctcctaatgctcatgta

SEQ ID NO: 44307 - DNA, 16 bp, Homo sapiens
tggcggttgctggatc

SEQ ID NO: 44308 - DNA, 19 bp, Homo sapiens
cctgaaacaggaagtattt

SEQ ID NO: 44309 - DNA, 18 bp, Homo sapiens
ctgtgcttaattttaccc

SEQ ID NO: 44310 - DNA, 18 bp, Homo sapiens
agaatatacacttctgct

SEQ ID NO: 44311 - DNA, 16 bp, Homo sapiens
aatggtgccaggcata

SEQ ID NO: 44312 - DNA, 26 bp, Homo sapiens
tgatttgataatgacctaataatgat

SEQ ID NO: 44313 - DNA, 20 bp, Homo sapiens
ggcatgctttgatgacgctt

SEQ ID NO: 44314 - DNA, 18 bp, Homo sapiens
ggagaactggagccttca

SEQ ID NO: 44315 - DNA, 20 bp, Homo sapiens
gtgtgaagggttcatatgca

SEQ ID NO: 44316 - DNA, 16 bp, Homo sapiens
tttcctggattatgcc

SEQ ID NO: 44317 - DNA, 23 bp, Homo sapiens
cataaatatatgtagactaaccg

SEQ ID NO: 44318 - DNA, 21 bp, Homo sapiens
tcctatgatgaatatagatac

SEQ ID NO: 44319 - DNA, 19 bp, Homo sapiens
aaagcataggtcatgtgtt

SEQ ID NO: 44320 - DNA, 27 bp, Homo sapiens
actaaataaattgcatttgaaataatg

SEQ ID NO: 44321 - DNA, 17 bp, Homo sapiens
tccaccttctccaagaa

SEQ ID NO: 44322 - DNA, 23 bp, Homo sapiens
ggttaaagcaatagtgtgatata

SEQ ID NO: 44323 - DNA, 21 bp, Homo sapiens
accaataattagttattcacc

SEQ ID NO: 44324 - DNA, 21 bp, Homo sapiens
gcatactaaaagtgactctct

SEQ ID NO: 44325 - DNA, 20 bp, Homo sapiens
aaagcaatagagaaatgtct

SEQ ID NO: 44326 - DNA, 23 bp, Homo sapiens
gaaagacaatatagttcttggag

SEQ ID NO: 44327 - DNA, 17 bp, Homo sapiens
aacccactagccataaa

SEQ ID NO: 44328 - DNA, 16 bp, Homo sapiens
ttctttagcaaggtga

SEQ ID NO: 44329 - DNA, 18 bp, Homo sapiens
tgctacttctgcaccact

SEQ ID NO: 44330 - DNA, 22 bp, Homo sapiens
ctgttaaaacatctaggtatcc

SEQ ID NO: 44331 - DNA, 17 bp, Homo sapiens
tgcatgtagtgaactgt

SEQ ID NO: 44332 - DNA, 21 bp, Homo sapiens
tagcatgagcattataagtaa

SEQ ID NO: 44333 - DNA, 21 bp, Homo sapiens
agagaggaaatgtaatttaat

SEQ ID NO: 44334 - DNA, 18 bp, Homo sapiens
ctcaagaggtaaaatgca

SEQ ID NO: 44335 - DNA, 22 bp, Homo sapiens
ttgtatttattagactctcctt

SEQ ID NO: 44336 - DNA, 20 bp, Homo sapiens
gatcagatttgagttaatac

SEQ ID NO: 44337 - DNA, 21 bp, Homo sapiens
caaggtaccaatttaattact

SEQ ID NO: 44338 - DNA, 21 bp, Homo sapiens
tccattttagaagtgaccaaa

SEQ ID NO: 44339 - DNA, 23 bp, Homo sapiens
tgtatgatagagattatatgcaa

SEQ ID NO: 44340 - DNA, 16 bp, Homo sapiens
agctgctaccttcatg

SEQ ID NO: 44341 - DNA, 24 bp, Homo sapiens
taaagtatttataaaattgatatt

SEQ ID NO: 44342 - DNA, 18 bp, Homo sapiens
acatcccatgagttttga

SEQ ID NO: 44343 - DNA, 20 bp, Homo sapiens
aactgatggctaacaaaact

SEQ ID NO: 44344 - DNA, 18 bp, Homo sapiens
ggtctcagttaggattga

SEQ ID NO: 44345 - DNA, 25 bp, Homo sapiens
caaaatattaattttgcatgaaggt

SEQ ID NO: 44346 - DNA, 19 bp, Homo sapiens
attgtttttttgtttctgt

SEQ ID NO: 44347 - DNA, 23 bp, Homo sapiens
aactccaaaatctacagccagac

SEQ ID NO: 44348 - DNA, 19 bp, Homo sapiens
agagttgattggattgaga

SEQ ID NO: 44349 - DNA, 18 bp, Homo sapiens
gtgcagaaagaagaaatt

SEQ ID NO: 44350 - DNA, 19 bp, Homo sapiens
cttcgatgccattcatttg

SEQ ID NO: 44351 - DNA, 22 bp, Homo sapiens
aggagatgctcctgtctcctgg

SEQ ID NO: 44352 - DNA, 17 bp, Homo sapiens
cctctccctgctcagaa

SEQ ID NO: 44353 - DNA, 23 bp, Homo sapiens
agtttggggaaaaaaggaagaat

SEQ ID NO: 44354 - DNA, 17 bp, Homo sapiens
cctccttcgtgcctgaa

SEQ ID NO: 44355 - DNA, 20 bp, Homo sapiens
ttgtgcaaaagactccctta

SEQ ID NO: 44356 - DNA, 18 bp, Homo sapiens
gtctttcggtgaatgttc

SEQ ID NO: 44357 - DNA, 16 bp, Homo sapiens
aaggctgtccttagta

SEQ ID NO: 44358 - DNA, 23 bp, Homo sapiens
tatatccagttcagtcaagtttg

SEQ ID NO: 44359 - DNA, 18 bp, Homo sapiens
gtgatcagcactggcccc

SEQ ID NO: 44360 - DNA, 20 bp, Homo sapiens
ttcgttaatttcttcactta

SEQ ID NO: 44361 - DNA, 21 bp, Homo sapiens
gacacactcagttaaccaagg

SEQ ID NO: 44362 - DNA, 16 bp, Homo sapiens
attgcattctgtgggg

SEQ ID NO: 44363 - DNA, 17 bp, Homo sapiens
cactggcccctcaggca

SEQ ID NO: 44364 - DNA, 22 bp, Homo sapiens
tacaccttatcctaatcctatg

SEQ ID NO: 44365 - DNA, 18 bp, Homo sapiens
caagaaactggcttggaa

SEQ ID NO: 44366 - DNA, 19 bp, Homo sapiens
ttttacattttaacgttgc

SEQ ID NO: 44367 - DNA, 18 bp, Homo sapiens
tgacatcatacatggcat

SEQ ID NO: 44368 - DNA, 18 bp, Homo sapiens
tcgaaggtatgtgttcca

SEQ ID NO: 44369 - DNA, 23 bp, Homo sapiens
taatactattcttttattttcat

SEQ ID NO: 44370 - DNA, 24 bp, Homo sapiens
tgccagaaaaattactaagcacca

SEQ ID NO: 44371 - DNA, 19 bp, Homo sapiens
aactgtactgtcttattgt

SEQ ID NO: 44372 - DNA, 27 bp, Homo sapiens
tatcttaatttaactttaaatccagta

SEQ ID NO: 44373 - DNA, 16 bp, Homo sapiens
ggagagcataccagca

SEQ ID NO: 44374 - DNA, 24 bp, Homo sapiens
acatgtgtatatatacatatttat

SEQ ID NO: 44375 - DNA, 19 bp, Homo sapiens
aagagcttaatttttgtgc

SEQ ID NO: 44376 - DNA, 28 bp, Homo sapiens
atatatgtaatatatacatatatacata

SEQ ID NO: 44377 - DNA, 23 bp, Homo sapiens
gaacacctagtacagctgctgga

SEQ ID NO: 44378 - DNA, 18 bp, Homo sapiens
tactcactttccaaggag

SEQ ID NO: 44379 - DNA, 21 bp, Homo sapiens
ttgatattggtacacacatca

SEQ ID NO: 44380 - DNA, 19 bp, Homo sapiens
caaacatagtggattacaa

SEQ ID NO: 44381 - DNA, 17 bp, Homo sapiens
aggtgaagatgttagaa

SEQ ID NO: 44382 - DNA, 20 bp, Homo sapiens
tctttccactaccataatgc

SEQ ID NO: 44383 - DNA, 16 bp, Homo sapiens
ttggttgtgctgtggc

SEQ ID NO: 44384 - DNA, 18 bp, Homo sapiens
actatgagtactattccc

SEQ ID NO: 44385 - DNA, 19 bp, Homo sapiens
tgctcttctaatgcaaaat

SEQ ID NO: 44386 - DNA, 20 bp, Homo sapiens
ccacgtaaatgtaaaacaca

SEQ ID NO: 44387 - DNA, 24 bp, Homo sapiens
acatgtattggaaattcagtaagt

SEQ ID NO: 44388 - DNA, 17 bp, Homo sapiens
accagtggtagacctct

SEQ ID NO: 44389 - DNA, 16 bp, Homo sapiens
ttcaagacaaagggaa

SEQ ID NO: 44390 - DNA, 18 bp, Homo sapiens
aggtgcttgaagaacaga

SEQ ID NO: 44391 - DNA, 22 bp, Homo sapiens
gattatcaccagcaccagttcg

SEQ ID NO: 44392 - DNA, 21 bp, Homo sapiens
gcagtttcatttcttagacct

SEQ ID NO: 44393 - DNA, 23 bp, Homo sapiens
ctttgcttgctatgggattcttc

SEQ ID NO: 44394 - DNA, 17 bp, Homo sapiens
cagcactgccattagaa

SEQ ID NO: 44395 - DNA, 23 bp, Homo sapiens
cgaaaattttacaccacaaaatg

SEQ ID NO: 44396 - DNA, 16 bp, Homo sapiens
gacatgtgcatgccag

SEQ ID NO: 44397 - DNA, 22 bp, Homo sapiens
aaaatttctaagtctatctgat

SEQ ID NO: 44398 - DNA, 19 bp, Homo sapiens
tcaaatatggtaagaggca

SEQ ID NO: 44399 - DNA, 16 bp, Homo sapiens
actgtgatccaaactt

SEQ ID NO: 44400 - DNA, 22 bp, Homo sapiens
ttttttaataatacagacatac

SEQ ID NO: 44401 - DNA, 19 bp, Homo sapiens
tttgaggaatttgtcatct

SEQ ID NO: 44402 - DNA, 17 bp, Homo sapiens
aggacttcaaccctcaa

SEQ ID NO: 44403 - DNA, 18 bp, Homo sapiens
gcaattttggatgacctt

SEQ ID NO: 44404 - DNA, 24 bp, Homo sapiens
tgaatttactaaacttatgtctat

SEQ ID NO: 44405 - DNA, 19 bp, Homo sapiens
tgtaccctaaaacttaaag

SEQ ID NO: 44406 - DNA, 18 bp, Homo sapiens
tgcaacaaagatgtaggg

SEQ ID NO: 44407 - DNA, 25 bp, Homo sapiens
caaaaaaaaaaaaagaaataaatca

SEQ ID NO: 44408 - DNA, 19 bp, Homo sapiens
tgaggtttggaggaaatat

SEQ ID NO: 44409 - DNA, 17 bp, Homo sapiens
actcaccaacatgtttt

SEQ ID NO: 44410 - DNA, 18 bp, Homo sapiens
caagatgagtatcgcaca

SEQ ID NO: 44411 - DNA, 16 bp, Homo sapiens
cagttgtcgcagtttt

SEQ ID NO: 44412 - DNA, 21 bp, Homo sapiens
agcagaattttttttaagtag

SEQ ID NO: 44413 - DNA, 22 bp, Homo sapiens
tttattatgttgagagcatatt

SEQ ID NO: 44414 - DNA, 22 bp, Homo sapiens
tttccttttatatacacatgca

SEQ ID NO: 44415 - DNA, 24 bp, Homo sapiens
ataacaaatcatatctattcaaag

SEQ ID NO: 44416 - DNA, 18 bp, Homo sapiens
agtccttttaagcttgta

SEQ ID NO: 44417 - DNA, 24 bp, Homo sapiens
accaatgacatttgtgatatgatt

SEQ ID NO: 44418 - DNA, 18 bp, Homo sapiens
cagagctttgtggaacag

SEQ ID NO: 44419 - DNA, 20 bp, Homo sapiens
acattttgtgtttatgttat

SEQ ID NO: 44420 - DNA, 17 bp, Homo sapiens
tcatttggaaccagcgc

SEQ ID NO: 44421 - DNA, 20 bp, Homo sapiens
tcactcatcttgttacaagc

SEQ ID NO: 44422 - DNA, 19 bp, Homo sapiens
acctgttgttaaaatggaa

SEQ ID NO: 44423 - DNA, 18 bp, Homo sapiens
ggcagccttactttgaaa

SEQ ID NO: 44424 - DNA, 23 bp, Homo sapiens
gcagcattttattcattgaaaat

SEQ ID NO: 44425 - DNA, 17 bp, Homo sapiens
acctgtcaacactgcgc

SEQ ID NO: 44426 - DNA, 24 bp, Homo sapiens
aaatttgttaattactaaactcta

SEQ ID NO: 44427 - DNA, 18 bp, Homo sapiens
tcattgctgttaccttca

SEQ ID NO: 44428 - DNA, 18 bp, Homo sapiens
agatgctgtgatgaactg

SEQ ID NO: 44429 - DNA, 22 bp, Homo sapiens
actcatgatattcatggctaaa

SEQ ID NO: 44430 - DNA, 22 bp, Homo sapiens
tgaaatgtaaatttaatgtgat

SEQ ID NO: 44431 - DNA, 18 bp, Homo sapiens
gataagacttaccaagct

SEQ ID NO: 44432 - DNA, 20 bp, Homo sapiens
aacatgaggttcatttacgt

SEQ ID NO: 44433 - DNA, 19 bp, Homo sapiens
cttcctcatgctattactc

SEQ ID NO: 44434 - DNA, 20 bp, Homo sapiens
agttggtattatcctgactt

SEQ ID NO: 44435 - DNA, 20 bp, Homo sapiens
cagtgaccctcaatttatct

SEQ ID NO: 44436 - DNA, 16 bp, Homo sapiens
ccagcatagatgtgga

SEQ ID NO: 44437 - DNA, 28 bp, Homo sapiens
gttaaacttttaattatatccaattatt

SEQ ID NO: 44438 - DNA, 18 bp, Homo sapiens
tgttggcatgtcaatgaa

SEQ ID NO: 44439 - DNA, 20 bp, Homo sapiens
aaccaagtgacaaatagcaa

SEQ ID NO: 44440 - DNA, 16 bp, Homo sapiens
actttcgagagttggc

SEQ ID NO: 44441 - DNA, 18 bp, Homo sapiens
ttgtgaaattgtctgcca

SEQ ID NO: 44442 - DNA, 16 bp, Homo sapiens
ttggccccctgagggc

SEQ ID NO: 44443 - DNA, 19 bp, Homo sapiens
gatctgtgagccgagtctt

SEQ ID NO: 44444 - DNA, 21 bp, Homo sapiens
ggaaatgttctctaatatggc

SEQ ID NO: 44445 - DNA, 24 bp, Homo sapiens
caagtcaaccaaaccatacaagaa

SEQ ID NO: 44446 - DNA, 17 bp, Homo sapiens
agtctaacaaagcaagc

SEQ ID NO: 44447 - DNA, 22 bp, Homo sapiens
acgtgaagaaagatgacatctg

SEQ ID NO: 44448 - DNA, 19 bp, Homo sapiens
gttacaaatagattctgct

SEQ ID NO: 44449 - DNA, 17 bp, Homo sapiens
gaaggtggaaatgccat

SEQ ID NO: 44450 - DNA, 23 bp, Homo sapiens
taaaaataatgactccatataat

SEQ ID NO: 44451 - DNA, 24 bp, Homo sapiens
atatgaacacataaaagattcaat

SEQ ID NO: 44452 - DNA, 17 bp, Homo sapiens
cagtgttgaatttggtg

SEQ ID NO: 44453 - DNA, 17 bp, Homo sapiens
cttgatttctggagacc

SEQ ID NO: 44454 - DNA, 16 bp, Homo sapiens
tgcacctcctccctga

SEQ ID NO: 44455 - DNA, 19 bp, Homo sapiens
ttgcagtattaaaatggcg

SEQ ID NO: 44456 - DNA, 24 bp, Homo sapiens
cattggtcaggattgaaagtgtgc

SEQ ID NO: 44457 - DNA, 22 bp, Homo sapiens
aaaaagctgataacaaagtact

SEQ ID NO: 44458 - DNA, 19 bp, Homo sapiens
ggataaaatattccaatgg

SEQ ID NO: 44459 - DNA, 17 bp, Homo sapiens
ttgaatcccaagacaca

SEQ ID NO: 44460 - DNA, 23 bp, Homo sapiens
gcatggtacctatatgtcacaga

SEQ ID NO: 44461 - DNA, 16 bp, Homo sapiens
gtccttttgctcacct

SEQ ID NO: 44462 - DNA, 16 bp, Homo sapiens
actggatcagggaaga

SEQ ID NO: 44463 - DNA, 19 bp, Homo sapiens
aatttcttgagtacaagta

SEQ ID NO: 44464 - DNA, 16 bp, Homo sapiens
tccagatcgatggtgt

SEQ ID NO: 44465 - DNA, 19 bp, Homo sapiens
tgcactggagaaaaaagac

SEQ ID NO: 44466 - DNA, 18 bp, Homo sapiens
agcctttggagtgatacc

SEQ ID NO: 44467 - DNA, 22 bp, Homo sapiens
tattaaaatttgagagaacttg

SEQ ID NO: 44468 - DNA, 17 bp, Homo sapiens
tccactgttcataggga

SEQ ID NO: 44469 - DNA, 27 bp, Homo sapiens
aaataatttttctacttgaaatatttt

SEQ ID NO: 44470 - DNA, 19 bp, Homo sapiens
ccctttcaaaatcatttca

SEQ ID NO: 44471 - DNA, 25 bp, Homo sapiens
taagttattcatactttcttcttct

SEQ ID NO: 44472 - DNA, 17 bp, Homo sapiens
gcacacaaagtgtgtag

SEQ ID NO: 44473 - DNA, 21 bp, Homo sapiens
agaaaaaacttggatccctat

SEQ ID NO: 44474 - DNA, 17 bp, Homo sapiens
gttgctccaggtatgtt

SEQ ID NO: 44475 - DNA, 23 bp, Homo sapiens
gttgtaaatagacttttgctcaa

SEQ ID NO: 44476 - DNA, 16 bp, Homo sapiens
aaagtcaagcttccca

SEQ ID NO: 44477 - DNA, 24 bp, Homo sapiens
gggattggtatgaaaaacataagc

SEQ ID NO: 44478 - DNA, 16 bp, Homo sapiens
tctagccaagcacatc

SEQ ID NO: 44479 - DNA, 20 bp, Homo sapiens
tgagtgtttttaactctgtg

SEQ ID NO: 44480 - DNA, 17 bp, Homo sapiens
actggatccaaatgagc

SEQ ID NO: 44481 - DNA, 16 bp, Homo sapiens
gaacagtttcctggga

SEQ ID NO: 44482 - DNA, 19 bp, Homo sapiens
gcaggcataatgattctgt

SEQ ID NO: 44483 - DNA, 17 bp, Homo sapiens
gccatggccacaagcag

SEQ ID NO: 44484 - DNA, 16 bp, Homo sapiens
atcttgggggagaccc

SEQ ID NO: 44485 - DNA, 20 bp, Homo sapiens
tgctgcttgatgaacccagt

SEQ ID NO: 44486 - DNA, 19 bp, Homo sapiens
ggttgaaaagctgattgtg

SEQ ID NO: 44487 - DNA, 18 bp, Homo sapiens
ttactgtgcaatcagcaa

SEQ ID NO: 44488 - DNA, 28 bp, Homo sapiens
taaagaaataagtaatttaaagagataa

SEQ ID NO: 44489 - DNA, 16 bp, Homo sapiens
accaaaaattgttggc

SEQ ID NO: 44490 - DNA, 22 bp, Homo sapiens
tactgttctgtgatattatgtg

SEQ ID NO: 44491 - DNA, 22 bp, Homo sapiens
ctatcacatgtgagattgttat

SEQ ID NO: 44492 - DNA, 19 bp, Homo sapiens
agaactctaaaacaagcat

SEQ ID NO: 44493 - DNA, 19 bp, Homo sapiens
ggatggctgtatgatacat

SEQ ID NO: 44494 - DNA, 20 bp, Homo sapiens
atagaagcaatgctggaatg

SEQ ID NO: 44495 - DNA, 16 bp, Homo sapiens
gcaaaaggacacagca

SEQ ID NO: 44496 - DNA, 19 bp, Homo sapiens
tctggatggaatcgtactg

SEQ ID NO: 44497 - DNA, 19 bp, Homo sapiens
ctctggacattgcattctt

SEQ ID NO: 44498 - DNA, 16 bp, Homo sapiens
accctgtcggaggggc

SEQ ID NO: 44499 - DNA, 17 bp, Homo sapiens
ggtctgacctgccttct

SEQ ID NO: 44500 - DNA, 18 bp, Homo sapiens
ctctttcagagcagcaat

SEQ ID NO: 44501 - DNA, 19 bp, Homo sapiens
agaagagaacaaagtgcgg

SEQ ID NO: 44502 - DNA, 18 bp, Homo sapiens
tgtcaacatttatgctgc

SEQ ID NO: 44503 - DNA, 22 bp, Homo sapiens
agcctcttccggcaagccatca

SEQ ID NO: 44504 - DNA, 18 bp, Homo sapiens
gctccaattccatgaggt

SEQ ID NO: 44505 - DNA, 22 bp, Homo sapiens
caagcaagtgcaagtctaagcc

SEQ ID NO: 44506 - DNA, 22 bp, Homo sapiens
caaatgtttcttttttaaaaaa

SEQ ID NO: 44507 - DNA, 17 bp, Homo sapiens
acaaggctttagagagc

SEQ ID NO: 44508 - DNA, 16 bp, Homo sapiens
tgctctctgatgtgcc

SEQ ID NO: 44509 - DNA, 19 bp, Homo sapiens
gaagatggatacgtgacaa

SEQ ID NO: 44510 - DNA, 17 bp, Homo sapiens
aaagccagcgaccatca

SEQ ID NO: 44511 - DNA, 22 bp, Homo sapiens
gacacagtgtagggcccggccc

SEQ ID NO: 44512 - DNA, 16 bp, Homo sapiens
taagtggcattcaggg

SEQ ID NO: 44513 - DNA, 22 bp, Homo sapiens
aatcctgcgagcgatgggggca

SEQ ID NO: 44514 - DNA, 16 bp, Homo sapiens
agactgcacgcgtggc

SEQ ID NO: 44515 - DNA, 24 bp, Homo sapiens
catcctgggggatccgctccacgc

SEQ ID NO: 44516 - DNA, 16 bp, Homo sapiens
atgcagcacagggtcc

SEQ ID NO: 44517 - DNA, 23 bp, Homo sapiens
ggtctgccaccagctgtcctctt

SEQ ID NO: 44518 - DNA, 22 bp, Homo sapiens
gcaaaagaatcccgttgctgtc

SEQ ID NO: 44519 - DNA, 21 bp, Homo sapiens
agaaggtcttctgggacctgg

SEQ ID NO: 44520 - DNA, 17 bp, Homo sapiens
agtcaaatgtccggaag

SEQ ID NO: 44521 - DNA, 21 bp, Homo sapiens
cctgtgggctctgctggggga

SEQ ID NO: 44522 - DNA, 24 bp, Homo sapiens
gccagcttggagattgaccaagca

SEQ ID NO: 44523 - DNA, 20 bp, Homo sapiens
gaactggtgctggtttcaca

SEQ ID NO: 44524 - DNA, 16 bp, Homo sapiens
gtaaagggcgtgctca

SEQ ID NO: 44525 - DNA, 18 bp, Homo sapiens
tccacctgtccaacttga

SEQ ID NO: 44526 - DNA, 17 bp, Homo sapiens
tgaggcacatgtcatct

SEQ ID NO: 44527 - DNA, 23 bp, Homo sapiens
tgcctttcttgggtttcttggct

SEQ ID NO: 44528 - DNA, 16 bp, Homo sapiens
gcctgctgttgagttt

SEQ ID NO: 44529 - DNA, 18 bp, Homo sapiens
tgaccacgttgctcctgg

SEQ ID NO: 44530 - DNA, 21 bp, Homo sapiens
caaaaccagaatattgcattc

SEQ ID NO: 44531 - DNA, 18 bp, Homo sapiens
gttgagcttccaaaacag

SEQ ID NO: 44532 - DNA, 21 bp, Homo sapiens
tttgctttgaaatgaatttgt

SEQ ID NO: 44533 - DNA, 18 bp, Homo sapiens
caccacatgtggtaggtt

SEQ ID NO: 44534 - DNA, 24 bp, Homo sapiens
ttgtgatgtgaagaatgaattttg

SEQ ID NO: 44535 - DNA, 18 bp, Homo sapiens
aggaacagtgtcaaatga

SEQ ID NO: 44536 - DNA, 16 bp, Homo sapiens
cgggctggtccgagtc

SEQ ID NO: 44537 - DNA, 17 bp, Homo sapiens
gtcttcttatgggtcca

SEQ ID NO: 44538 - DNA, 24 bp, Homo sapiens
atgtttcactgccgcatggttcta

SEQ ID NO: 44539 - DNA, 16 bp, Homo sapiens
tgctcttggcttctgg

SEQ ID NO: 44540 - DNA, 24 bp, Homo sapiens
cggcctggtcagcagcctgtatct

SEQ ID NO: 44541 - DNA, 16 bp, Homo sapiens
agccccggctggagca

SEQ ID NO: 44542 - DNA, 20 bp, Homo sapiens
cttacgctaatcattaatcc

SEQ ID NO: 44543 - DNA, 23 bp, Homo sapiens
tcattaattcaaaagccatcatt

SEQ ID NO: 44544 - DNA, 16 bp, Homo sapiens
gaacttcgcacagcca

SEQ ID NO: 44545 - DNA, 22 bp, Homo sapiens
taatgcgaaagaaagttagtat

SEQ ID NO: 44546 - DNA, 17 bp, Homo sapiens
agaagaggccatagctg

SEQ ID NO: 44547 - DNA, 19 bp, Homo sapiens
cacatggtttccagtgatt

SEQ ID NO: 44548 - DNA, 18 bp, Homo sapiens
agtctgcagccactgaaa

SEQ ID NO: 44549 - DNA, 23 bp, Homo sapiens
taggagcacattccttataaagg

SEQ ID NO: 44550 - DNA, 24 bp, Homo sapiens
gctaagagtagtttcttatttgac

SEQ ID NO: 44551 - DNA, 18 bp, Homo sapiens
aacacggtgcattttttt

SEQ ID NO: 44552 - DNA, 17 bp, Homo sapiens
agtggcccaccatgcct

SEQ ID NO: 44553 - DNA, 23 bp, Homo sapiens
acttctgacatctcgattcctga

SEQ ID NO: 44554 - DNA, 18 bp, Homo sapiens
gtgcacctaatagtgaca

SEQ ID NO: 44555 - DNA, 22 bp, Homo sapiens
aggacaagtaaagtacacgtca

SEQ ID NO: 44556 - DNA, 20 bp, Homo sapiens
accacttatcaatgtccaga

SEQ ID NO: 44557 - DNA, 20 bp, Homo sapiens
tgctcacatcctatggtgtg

SEQ ID NO: 44558 - DNA, 20 bp, Homo sapiens
tgaatacatgaatagggaac

SEQ ID NO: 44559 - DNA, 20 bp, Homo sapiens
gccactggtggctaatgtat

SEQ ID NO: 44560 - DNA, 18 bp, Homo sapiens
cgtctcctaggtattcat

SEQ ID NO: 44561 - DNA, 21 bp, Homo sapiens
aagacagcttggctttcaact

SEQ ID NO: 44562 - DNA, 19 bp, Homo sapiens
gtgggctgattaatttttt

SEQ ID NO: 44563 - DNA, 20 bp, Homo sapiens
agcaaaaccatgccagagaa

SEQ ID NO: 44564 - DNA, 19 bp, Homo sapiens
catttagcatcatttggga

SEQ ID NO: 44565 - DNA, 19 bp, Homo sapiens
tgaggcttgcaaaatacag

SEQ ID NO: 44566 - DNA, 16 bp, Homo sapiens
acaattggtggcaggt

SEQ ID NO: 44567 - DNA, 22 bp, Homo sapiens
cctctgaaggaaaatcaaaaaa

SEQ ID NO: 44568 - DNA, 16 bp, Homo sapiens
ttcccctaacctgaga

SEQ ID NO: 44569 - DNA, 18 bp, Homo sapiens
cacacactgcttgacttt

SEQ ID NO: 44570 - DNA, 17 bp, Homo sapiens
tctactccaaaaatgcc

SEQ ID NO: 44571 - DNA, 20 bp, Homo sapiens
tagcatcgttcttctaacca

SEQ ID NO: 44572 - DNA, 16 bp, Homo sapiens
gctcgctttgagccag

SEQ ID NO: 44573 - DNA, 20 bp, Homo sapiens
tttttactgggtggctgata

SEQ ID NO: 44574 - DNA, 16 bp, Homo sapiens
cctggagcagctagtt

SEQ ID NO: 44575 - DNA, 20 bp, Homo sapiens
caaaactgactgtcccactg

SEQ ID NO: 44576 - DNA, 16 bp, Homo sapiens
agtgcaaacagagtgc

SEQ ID NO: 44577 - DNA, 21 bp, Homo sapiens
aagcacgctttcacctctggc

SEQ ID NO: 44578 - DNA, 24 bp, Homo sapiens
cttcaattgtattttttcctagag

SEQ ID NO: 44579 - DNA, 18 bp, Homo sapiens
agcactgagtaaactggg

SEQ ID NO: 44580 - DNA, 17 bp, Homo sapiens
agtttccaggcataagt

SEQ ID NO: 44581 - DNA, 23 bp, Homo sapiens
atccaactggcttattcttagca

SEQ ID NO: 44582 - DNA, 23 bp, Homo sapiens
gattattcgctgtactatttgag

SEQ ID NO: 44583 - DNA, 18 bp, Homo sapiens
atgaaatcacactctcag

SEQ ID NO: 44584 - DNA, 16 bp, Homo sapiens
gggcggagaagaggtt

SEQ ID NO: 44585 - DNA, 19 bp, Homo sapiens
tcaagggtcccagcatgtc

SEQ ID NO: 44586 - DNA, 16 bp, Homo sapiens
agttttacccagaggg

SEQ ID NO: 44587 - DNA, 24 bp, Homo sapiens
caatcactttgggaactagctata

SEQ ID NO: 44588 - DNA, 19 bp, Homo sapiens
actggacagacctgaatgt

SEQ ID NO: 44589 - DNA, 21 bp, Homo sapiens
ttctttgacttcaatagtaag

SEQ ID NO: 44590 - DNA, 22 bp, Homo sapiens
aagataaaggaaaagaaaatga

SEQ ID NO: 44591 - DNA, 16 bp, Homo sapiens
tgacgagaagtccctc

SEQ ID NO: 44592 - DNA, 22 bp, Homo sapiens
agaggaagaaggaaaagaaaat

SEQ ID NO: 44593 - DNA, 17 bp, Homo sapiens
gcaataggacttgctgt

SEQ ID NO: 44594 - DNA, 19 bp, Homo sapiens
acaccagttctttgtaatt

SEQ ID NO: 44595 - DNA, 22 bp, Homo sapiens
gctctcttcctttatctttatc

SEQ ID NO: 44596 - DNA, 16 bp, Homo sapiens
cttagccattgcatgc

SEQ ID NO: 44597 - DNA, 24 bp, Homo sapiens
cattttctttttgtttatcttcat

SEQ ID NO: 44598 - DNA, 18 bp, Homo sapiens
agaagcaaagcagacatg

SEQ ID NO: 44599 - DNA, 22 bp, Homo sapiens
tatgtgggaattcagcagttta

SEQ ID NO: 44600 - DNA, 17 bp, Homo sapiens
tcttgcaagactactca

SEQ ID NO: 44601 - DNA, 21 bp, Homo sapiens
tagattagtccaaatcatccc

SEQ ID NO: 44602 - DNA, 17 bp, Homo sapiens
caccgaaagaagagaca

SEQ ID NO: 44603 - DNA, 21 bp, Homo sapiens
cttagtctggggccttctcca

SEQ ID NO: 44604 - DNA, 18 bp, Homo sapiens
ttaaagcagaaggctaag

SEQ ID NO: 44605 - DNA, 18 bp, Homo sapiens
gcttgctctcgcttcaat

SEQ ID NO: 44606 - DNA, 18 bp, Homo sapiens
cagaactctcacagagtt

SEQ ID NO: 44607 - DNA, 16 bp, Homo sapiens
aaacagtttgggtgtc

SEQ ID NO: 44608 - DNA, 17 bp, Homo sapiens
aggtacccattgaaact

SEQ ID NO: 44609 - DNA, 18 bp, Homo sapiens
cttggaggggttgcttct

SEQ ID NO: 44610 - DNA, 22 bp, Homo sapiens
ctgcaatttatcctaacctgtg

SEQ ID NO: 44611 - DNA, 17 bp, Homo sapiens
ctagtgcattatccaga

SEQ ID NO: 44612 - DNA, 21 bp, Homo sapiens
gcatatctcactgtgatcaag

SEQ ID NO: 44613 - DNA, 16 bp, Homo sapiens
ggtggcccacgggttt

SEQ ID NO: 44614 - DNA, 23 bp, Homo sapiens
gtttacaaagtaaaaccaactcc

SEQ ID NO: 44615 - DNA, 21 bp, Homo sapiens
gcaaagactcatttttctctc

SEQ ID NO: 44616 - DNA, 16 bp, Homo sapiens
tgaggatcctttcaga

SEQ ID NO: 44617 - DNA, 22 bp, Homo sapiens
cttataatagttgctatttttt

SEQ ID NO: 44618 - DNA, 16 bp, Homo sapiens
aaaagattggcaaacc

SEQ ID NO: 44619 - DNA, 18 bp, Homo sapiens
ctgcacaatcacctggac

SEQ ID NO: 44620 - DNA, 21 bp, Homo sapiens
cctcctgctgctagaaggctg

SEQ ID NO: 44621 - DNA, 16 bp, Homo sapiens
actctgaaagctgggt

SEQ ID NO: 44622 - DNA, 23 bp, Homo sapiens
attttacgaatgctctcagcaca

SEQ ID NO: 44623 - DNA, 22 bp, Homo sapiens
tgtatatcatcaagcatggaga

SEQ ID NO: 44624 - DNA, 21 bp, Homo sapiens
acctaagacttttcttttatg

SEQ ID NO: 44625 - DNA, 22 bp, Homo sapiens
aaagtaactaccatttcctctt

SEQ ID NO: 44626 - DNA, 16 bp, Homo sapiens
tctccaaacaccgacc

SEQ ID NO: 44627 - DNA, 22 bp, Homo sapiens
atatttactcctctaaaagaat

SEQ ID NO: 44628 - DNA, 19 bp, Homo sapiens
gggcctccaagaacttgga

SEQ ID NO: 44629 - DNA, 20 bp, Homo sapiens
tgtctgtaaatactttaggt

SEQ ID NO: 44630 - DNA, 22 bp, Homo sapiens
tgaactctgagagcacgttatt

SEQ ID NO: 44631 - DNA, 20 bp, Homo sapiens
tgctaagattgaaatccgtt

SEQ ID NO: 44632 - DNA, 18 bp, Homo sapiens
attcaccctgaacaaatt

SEQ ID NO: 44633 - DNA, 22 bp, Homo sapiens
tttagttgtttctataagaatt

SEQ ID NO: 44634 - DNA, 17 bp, Homo sapiens
attagttgtgcatttga

SEQ ID NO: 44635 - DNA, 20 bp, Homo sapiens
gcagacaatatatattactg

SEQ ID NO: 44636 - DNA, 18 bp, Homo sapiens
caggcaaatagagaacgg

SEQ ID NO: 44637 - DNA, 18 bp, Homo sapiens
tgagtcatgacatgtcca

SEQ ID NO: 44638 - DNA, 20 bp, Homo sapiens
tgaagagagacctgtaattt

SEQ ID NO: 44639 - DNA, 17 bp, Homo sapiens
gccctcgccattgatgt

SEQ ID NO: 44640 - DNA, 22 bp, Homo sapiens
ttgactttgttaaaacataagg

SEQ ID NO: 44641 - DNA, 26 bp, Homo sapiens
tgatgtgtttatctttataaagatga

SEQ ID NO: 44642 - DNA, 21 bp, Homo sapiens
gattccatagagaaatagata

SEQ ID NO: 44643 - DNA, 21 bp, Homo sapiens
tttttctacttgtaccttggt

SEQ ID NO: 44644 - DNA, 18 bp, Homo sapiens
tgctgatgatgctgaagt

SEQ ID NO: 44645 - DNA, 22 bp, Homo sapiens
atctgatgcatctaattatgta

SEQ ID NO: 44646 - DNA, 20 bp, Homo sapiens
gtcttaagcaaatcagactc

SEQ ID NO: 44647 - DNA, 21 bp, Homo sapiens
cggacttggtatgaatataca

SEQ ID NO: 44648 - DNA, 20 bp, Homo sapiens
tttaaggatcatttagttgt

SEQ ID NO: 44649 - DNA, 18 bp, Homo sapiens
acaccattgcctacatga

SEQ ID NO: 44650 - DNA, 24 bp, Homo sapiens
ctaccttacagaattttcatcata

SEQ ID NO: 44651 - DNA, 16 bp, Homo sapiens
tgtgattggagcagct

SEQ ID NO: 44652 - DNA, 18 bp, Homo sapiens
acctagcattctttgaga

SEQ ID NO: 44653 - DNA, 23 bp, Homo sapiens
aatttgacttttattaactcatt

SEQ ID NO: 44654 - DNA, 23 bp, Homo sapiens
caagtttaggaatggagtaattg

SEQ ID NO: 44655 - DNA, 19 bp, Homo sapiens
taaaatcaagtaatcaggg

SEQ ID NO: 44656 - DNA, 17 bp, Homo sapiens
tgattggctgtagctgc

SEQ ID NO: 44657 - DNA, 19 bp, Homo sapiens
agcactgttgatctaatca

SEQ ID NO: 44658 - DNA, 22 bp, Homo sapiens
attttttttctggagtttttgt

SEQ ID NO: 44659 - DNA, 16 bp, Homo sapiens
agaagaaccagacaga

SEQ ID NO: 44660 - DNA, 17 bp, Homo sapiens
accattggtggccttcc

SEQ ID NO: 44661 - DNA, 19 bp, Homo sapiens
agtctttcaaaatgacagc

SEQ ID NO: 44662 - DNA, 23 bp, Homo sapiens
aatgtatatcttctgttttcaca

SEQ ID NO: 44663 - DNA, 18 bp, Homo sapiens
ctggagaacacaaaaact

SEQ ID NO: 44664 - DNA, 22 bp, Homo sapiens
taatagtactatattctcccaa

SEQ ID NO: 44665 - DNA, 16 bp, Homo sapiens
gtttgtggttctggaa

SEQ ID NO: 44666 - DNA, 16 bp, Homo sapiens
tttgccagtgctgtct

SEQ ID NO: 44667 - DNA, 17 bp, Homo sapiens
catctcagatacctgtg

SEQ ID NO: 44668 - DNA, 21 bp, Homo sapiens
tttggtgcaaatgacatgatt

SEQ ID NO: 44669 - DNA, 19 bp, Homo sapiens
ggcttcaaactatgaagga

SEQ ID NO: 44670 - DNA, 19 bp, Homo sapiens
atgggttatgacagcttca

SEQ ID NO: 44671 - DNA, 17 bp, Homo sapiens
acaactggatacttgct

SEQ ID NO: 44672 - DNA, 26 bp, Homo sapiens
tgttaaaaataatcaataaaggtttc

SEQ ID NO: 44673 - DNA, 21 bp, Homo sapiens
taggctgtatttcagaaacaa

SEQ ID NO: 44674 - DNA, 18 bp, Homo sapiens
cacccatctagtagtgcc

SEQ ID NO: 44675 - DNA, 18 bp, Homo sapiens
acaaatccaaagcaaggg

SEQ ID NO: 44676 - DNA, 19 bp, Homo sapiens
tgcagaataaacagcaagt

SEQ ID NO: 44677 - DNA, 19 bp, Homo sapiens
tgccatcagaaaacatgca

SEQ ID NO: 44678 - DNA, 20 bp, Homo sapiens
ccacatctgttctagaacat

SEQ ID NO: 44679 - DNA, 21 bp, Homo sapiens
tagtacacttcattttttgaa

SEQ ID NO: 44680 - DNA, 17 bp, Homo sapiens
tttgaagaggggggtca

SEQ ID NO: 44681 - DNA, 30 bp, Homo sapiens
atagttttatttaaatatatatatttaaga

SEQ ID NO: 44682 - DNA, 17 bp, Homo sapiens
ccccttcccccaagtat

SEQ ID NO: 44683 - DNA, 26 bp, Homo sapiens
ttggtttttttaaaaagacatatgaa

SEQ ID NO: 44684 - DNA, 18 bp, Homo sapiens
agactctaggtgatgatt

SEQ ID NO: 44685 - DNA, 17 bp, Homo sapiens
agcattgatgagggcag

SEQ ID NO: 44686 - DNA, 19 bp, Homo sapiens
atttgctacctcttctttg

SEQ ID NO: 44687 - DNA, 27 bp, Homo sapiens
tgatcattttaagatactttaaattgt

SEQ ID NO: 44688 - DNA, 20 bp, Homo sapiens
acatatttgtgaatgtgttc

SEQ ID NO: 44689 - DNA, 20 bp, Homo sapiens
tttccattataagggaaaag

SEQ ID NO: 44690 - DNA, 22 bp, Homo sapiens
ttgtgattggtcaacttttaca

SEQ ID NO: 44691 - DNA, 22 bp, Homo sapiens
aaacattggattaaacccaaag

SEQ ID NO: 44692 - DNA, 20 bp, Homo sapiens
gccccatgcatagttaattg

SEQ ID NO: 44693 - DNA, 19 bp, Homo sapiens
gctaaggaaacactacagg

SEQ ID NO: 44694 - DNA, 20 bp, Homo sapiens
aggcttatcattgtctaata

SEQ ID NO: 44695 - DNA, 21 bp, Homo sapiens
tgatgaaattggctaaaatta

SEQ ID NO: 44696 - DNA, 23 bp, Homo sapiens
gggatttaaagtcaaaatggtaa

SEQ ID NO: 44697 - DNA, 16 bp, Homo sapiens
ttggaaggaaccaacc

SEQ ID NO: 44698 - DNA, 20 bp, Homo sapiens
acctgaaattttgtagaagt

SEQ ID NO: 44699 - DNA, 18 bp, Homo sapiens
agaaaactaaagccaaac

SEQ ID NO: 44700 - DNA, 23 bp, Homo sapiens
tataattgttttcttgttattat

SEQ ID NO: 44701 - DNA, 23 bp, Homo sapiens
atcatctacctttatgatatgct

SEQ ID NO: 44702 - DNA, 25 bp, Homo sapiens
agtcaaacattaaataaaacaatgc

SEQ ID NO: 44703 - DNA, 16 bp, Homo sapiens
aaccgcagacaacata

SEQ ID NO: 44704 - DNA, 22 bp, Homo sapiens
attcacgtttcagtttctgcct

SEQ ID NO: 44705 - DNA, 18 bp, Homo sapiens
gcttgtcactcttgccta

SEQ ID NO: 44706 - DNA, 20 bp, Homo sapiens
aactggagtctgggctggat

SEQ ID NO: 44707 - DNA, 18 bp, Homo sapiens
gtcatttggatttcacca

SEQ ID NO: 44708 - DNA, 20 bp, Homo sapiens
ccgcaataagccagtagtgt

SEQ ID NO: 44709 - DNA, 16 bp, Homo sapiens
gagggtagtgccccaa

SEQ ID NO: 44710 - DNA, 16 bp, Homo sapiens
cagcagttccagttat

SEQ ID NO: 44711 - DNA, 16 bp, Homo sapiens
agaggcagaatggtgt

SEQ ID NO: 44712 - DNA, 22 bp, Homo sapiens
gcaaatgatcctttgcaggtta

SEQ ID NO: 44713 - DNA, 19 bp, Homo sapiens
caaaaagatgcctttaaca

SEQ ID NO: 44714 - DNA, 22 bp, Homo sapiens
tgaagtaaggaaaatagaagct

SEQ ID NO: 44715 - DNA, 17 bp, Homo sapiens
gaaagcgatgataagcc

SEQ ID NO: 44716 - DNA, 22 bp, Homo sapiens
ctcccactatgataattcaccc

SEQ ID NO: 44717 - DNA, 21 bp, Homo sapiens
acctcttcaaatgtttcatct

SEQ ID NO: 44718 - DNA, 20 bp, Homo sapiens
tttaattcgctttaagtact

SEQ ID NO: 44719 - DNA, 17 bp, Homo sapiens
gagaacatgcggtgttt

SEQ ID NO: 44720 - DNA, 17 bp, Homo sapiens
gtaatgttctgttggct

SEQ ID NO: 44721 - DNA, 16 bp, Homo sapiens
tgatgttcccctccct

SEQ ID NO: 44722 - DNA, 17 bp, Homo sapiens
ggagatctctcctcacc

SEQ ID NO: 44723 - DNA, 21 bp, Homo sapiens
tgtacgtaaatcattttctca

SEQ ID NO: 44724 - DNA, 17 bp, Homo sapiens
acaacctggtgaaaaga

SEQ ID NO: 44725 - DNA, 18 bp, Homo sapiens
aaaacacaggtcccctca

SEQ ID NO: 44726 - DNA, 16 bp, Homo sapiens
cccacaaaacaaaccg

SEQ ID NO: 44727 - DNA, 17 bp, Homo sapiens
tgggctggcttcgggtg

SEQ ID NO: 44728 - DNA, 22 bp, Homo sapiens
taatctttcccttatatctatt

SEQ ID NO: 44729 - DNA, 17 bp, Homo sapiens
gctgttctttgacgcat

SEQ ID NO: 44730 - DNA, 17 bp, Homo sapiens
aattgcaaaaaagggga

SEQ ID NO: 44731 - DNA, 16 bp, Homo sapiens
gagctgcaggcggttt

SEQ ID NO: 44732 - DNA, 21 bp, Homo sapiens
acgatgaactggacagaacca

SEQ ID NO: 44733 - DNA, 19 bp, Homo sapiens
gccagagcagaaggaaatg

SEQ ID NO: 44734 - DNA, 20 bp, Homo sapiens
ttgaattttttctgccctta

SEQ ID NO: 44735 - DNA, 18 bp, Homo sapiens
ctctggagatctgaccac

SEQ ID NO: 44736 - DNA, 16 bp, Homo sapiens
aggctgagcaatatct

SEQ ID NO: 44737 - DNA, 18 bp, Homo sapiens
gtgttgtacattcttcta

SEQ ID NO: 44738 - DNA, 20 bp, Homo sapiens
ggaccttctttcccggggtc

SEQ ID NO: 44739 - DNA, 18 bp, Homo sapiens
ctaaaaaacaagcagcat

SEQ ID NO: 44740 - DNA, 22 bp, Homo sapiens
ctgcattttgagggtcagggtt

SEQ ID NO: 44741 - DNA, 17 bp, Homo sapiens
ctgcataaagtcctact

SEQ ID NO: 44742 - DNA, 22 bp, Homo sapiens
aatgaggatataaagtttttga

SEQ ID NO: 44743 - DNA, 17 bp, Homo sapiens
accaagtcaactccagt

SEQ ID NO: 44744 - DNA, 16 bp, Homo sapiens
cctagtcaaggacaaa

SEQ ID NO: 44745 - DNA, 21 bp, Homo sapiens
catcacatacaatctctatgt

SEQ ID NO: 44746 - DNA, 25 bp, Homo sapiens
tgtatttcactttttagtttttttt

SEQ ID NO: 44747 - DNA, 22 bp, Homo sapiens
tgattgacaattaagtggaaaa

SEQ ID NO: 44748 - DNA, 19 bp, Homo sapiens
tggctcttcagacgtgact

SEQ ID NO: 44749 - DNA, 23 bp, Homo sapiens
tttaaatgcaagaatcattttta

SEQ ID NO: 44750 - DNA, 22 bp, Homo sapiens
gaacaaatacatacagaatata

SEQ ID NO: 44751 - DNA, 16 bp, Homo sapiens
aaggctctcacccaag

SEQ ID NO: 44752 - DNA, 18 bp, Homo sapiens
ggtgccaggtaaaactac

SEQ ID NO: 44753 - DNA, 20 bp, Homo sapiens
aaaagtcaacaaggtgaagc

SEQ ID NO: 44754 - DNA, 21 bp, Homo sapiens
gaaatgatgaaaatcaaggct

SEQ ID NO: 44755 - DNA, 19 bp, Homo sapiens
aaatacagagggttttcag

SEQ ID NO: 44756 - DNA, 19 bp, Homo sapiens
gctgagactgattacttgg

SEQ ID NO: 44757 - DNA, 18 bp, Homo sapiens
aattggcttgtctactaa

SEQ ID NO: 44758 - DNA, 21 bp, Homo sapiens
ctcattgttctctcctatagg

SEQ ID NO: 44759 - DNA, 16 bp, Homo sapiens
ctagctaaggagttgc

SEQ ID NO: 44760 - DNA, 18 bp, Homo sapiens
ctttgcagatacaatcct

SEQ ID NO: 44761 - DNA, 18 bp, Homo sapiens
gccataaaacattgtaac

SEQ ID NO: 44762 - DNA, 23 bp, Homo sapiens
gttctttacctttaaaagaaata

SEQ ID NO: 44763 - DNA, 22 bp, Homo sapiens
tgttggcctgaagtagatgctt

SEQ ID NO: 44764 - DNA, 18 bp, Homo sapiens
tctgatcctaaggacaaa

SEQ ID NO: 44765 - DNA, 22 bp, Homo sapiens
tctcctttttaaataaggattg

SEQ ID NO: 44766 - DNA, 16 bp, Homo sapiens
tgagaggtgcttaagt

SEQ ID NO: 44767 - DNA, 20 bp, Homo sapiens
ttttgacaggtacaaaatca

SEQ ID NO: 44768 - DNA, 20 bp, Homo sapiens
tctatgaggacagaagaaac

SEQ ID NO: 44769 - DNA, 27 bp, Homo sapiens
atcactatagcaattcattaactatat

SEQ ID NO: 44770 - DNA, 18 bp, Homo sapiens
acatctctcaaaggtaca

SEQ ID NO: 44771 - DNA, 17 bp, Homo sapiens
cagatgtggtgacctcc

SEQ ID NO: 44772 - DNA, 19 bp, Homo sapiens
agactcttcttttgcatgt

SEQ ID NO: 44773 - DNA, 23 bp, Homo sapiens
tttaaagaagtgttatggaaggg

SEQ ID NO: 44774 - DNA, 21 bp, Homo sapiens
gctcgaaagaatacagaacta

SEQ ID NO: 44775 - DNA, 22 bp, Homo sapiens
gaatgactttatgtcacttatt

SEQ ID NO: 44776 - DNA, 18 bp, Homo sapiens
ggagcaggaaaacttcca

SEQ ID NO: 44777 - DNA, 16 bp, Homo sapiens
tggaccaaagtgcaat

SEQ ID NO: 44778 - DNA, 21 bp, Homo sapiens
tggtcatttttgtttgttaat

SEQ ID NO: 44779 - DNA, 18 bp, Homo sapiens
tgccttagccactcttct

SEQ ID NO: 44780 - DNA, 19 bp, Homo sapiens
acatctttggcacttatgc

SEQ ID NO: 44781 - DNA, 18 bp, Homo sapiens
cctccaatgatgtgtgga

SEQ ID NO: 44782 - DNA, 21 bp, Homo sapiens
caaaaacagatgggtttagaa

SEQ ID NO: 44783 - DNA, 26 bp, Homo sapiens
ggtgttcaatatattcattaactgta

SEQ ID NO: 44784 - DNA, 18 bp, Homo sapiens
tgatgattatggtcaact

SEQ ID NO: 44785 - DNA, 19 bp, Homo sapiens
agcagaagaagtatcagtt

SEQ ID NO: 44786 - DNA, 23 bp, Homo sapiens
tattgactgaatttagatcactg

SEQ ID NO: 44787 - DNA, 24 bp, Homo sapiens
ggtatctctaaaaacatttcaaac

SEQ ID NO: 44788 - DNA, 21 bp, Homo sapiens
tttaagaacaatgacaaactt

SEQ ID NO: 44789 - DNA, 25 bp, Homo sapiens
ttttgaatttcttgaaattttttag

SEQ ID NO: 44790 - DNA, 22 bp, Homo sapiens
aaatgacaagtgacttttcttt

SEQ ID NO: 44791 - DNA, 20 bp, Homo sapiens
gagtttttaatcaccagtga

SEQ ID NO: 44792 - DNA, 20 bp, Homo sapiens
tcaggtacaagaaataaaac

SEQ ID NO: 44793 - DNA, 18 bp, Homo sapiens
tcactatcatcctgaagt

SEQ ID NO: 44794 - DNA, 25 bp, Homo sapiens
caaataaataaaataataataataa

SEQ ID NO: 44795 - DNA, 18 bp, Homo sapiens
gaactcaaggaagactca

SEQ ID NO: 44796 - DNA, 19 bp, Homo sapiens
catgaagtaagccataatt

SEQ ID NO: 44797 - DNA, 20 bp, Homo sapiens
tcctatgaacagtatttttt

SEQ ID NO: 44798 - DNA, 17 bp, Homo sapiens
gagatgacagtccccgt

SEQ ID NO: 44799 - DNA, 22 bp, Homo sapiens
tttacacttcatcttattcaaa

SEQ ID NO: 44800 - DNA, 16 bp, Homo sapiens
tttctttagctgacca

SEQ ID NO: 44801 - DNA, 17 bp, Homo sapiens
aaatgcctggtcataca

SEQ ID NO: 44802 - DNA, 19 bp, Homo sapiens
acactttcagtgatgaagc

SEQ ID NO: 44803 - DNA, 20 bp, Homo sapiens
agtactgagtgttaaagaca

SEQ ID NO: 44804 - DNA, 18 bp, Homo sapiens
acaggaggaagatgtcaa

SEQ ID NO: 44805 - DNA, 18 bp, Homo sapiens
acctgttagcattctaag

SEQ ID NO: 44806 - DNA, 18 bp, Homo sapiens
ggaacagttattcaagga

SEQ ID NO: 44807 - DNA, 21 bp, Homo sapiens
tattttgctactttctggtac

SEQ ID NO: 44808 - DNA, 18 bp, Homo sapiens
gcagaaaagctaagatca

SEQ ID NO: 44809 - DNA, 17 bp, Homo sapiens
tccttggcctttttcta

SEQ ID NO: 44810 - DNA, 23 bp, Homo sapiens
acttatttacagatacagattta

SEQ ID NO: 44811 - DNA, 20 bp, Homo sapiens
tttctaactctggttttgtg

SEQ ID NO: 44812 - DNA, 17 bp, Homo sapiens
aataaggagcagcatct

SEQ ID NO: 44813 - DNA, 22 bp, Homo sapiens
cacatcatccatttcccttttt

SEQ ID NO: 44814 - DNA, 18 bp, Homo sapiens
agaaacgtcttgttctct

SEQ ID NO: 44815 - DNA, 21 bp, Homo sapiens
agaatttttcacaatagattt

SEQ ID NO: 44816 - DNA, 16 bp, Homo sapiens
atctaagggaaaggga

SEQ ID NO: 44817 - DNA, 16 bp, Homo sapiens
cacaggctcattctca

SEQ ID NO: 44818 - DNA, 16 bp, Homo sapiens
tgccaaactaaatggt

SEQ ID NO: 44819 - DNA, 20 bp, Homo sapiens
caggttgtgtttgttctaaa

SEQ ID NO: 44820 - DNA, 23 bp, Homo sapiens
tccagtaatattgttaataaaat

SEQ ID NO: 44821 - DNA, 19 bp, Homo sapiens
ttgattttcttcatccctt

SEQ ID NO: 44822 - DNA, 20 bp, Homo sapiens
ctccatcagaaactactttc

SEQ ID NO: 44823 - DNA, 24 bp, Homo sapiens
gcggtcaaaaagctgcagcagcag

SEQ ID NO: 44824 - DNA, 20 bp, Homo sapiens
accaactaaattgccaagta

SEQ ID NO: 44825 - DNA, 25 bp, Homo sapiens
tctacaacagtataaaaaactttca

SEQ ID NO: 44826 - DNA, 20 bp, Homo sapiens
tagtatggtatcaaatactt

SEQ ID NO: 44827 - DNA, 23 bp, Homo sapiens
aacagacctttttttggtagacg

SEQ ID NO: 44828 - DNA, 18 bp, Homo sapiens
cagaatgctttcacaaga

SEQ ID NO: 44829 - DNA, 17 bp, Homo sapiens
agccctatctttacttt

SEQ ID NO: 44830 - DNA, 19 bp, Homo sapiens
cagggatttgagtgaaagg

SEQ ID NO: 44831 - DNA, 18 bp, Homo sapiens
tctcatcttagccaaagt

SEQ ID NO: 44832 - DNA, 24 bp, Homo sapiens
ctttgtttctctattaaagttgct

SEQ ID NO: 44833 - DNA, 18 bp, Homo sapiens
ctcctttacagtgggtgc

SEQ ID NO: 44834 - DNA, 20 bp, Homo sapiens
agtgtatttttgtctaaaaa

SEQ ID NO: 44835 - DNA, 21 bp, Homo sapiens
gactttgatttcttttggcct

SEQ ID NO: 44836 - DNA, 22 bp, Homo sapiens
aaaacctgctgacccttgtcct

SEQ ID NO: 44837 - DNA, 17 bp, Homo sapiens
cccagtgaacactacaa

SEQ ID NO: 44838 - DNA, 18 bp, Homo sapiens
gacaacctgataaagggc

SEQ ID NO: 44839 - DNA, 16 bp, Homo sapiens
actccaggaccaagcc

SEQ ID NO: 44840 - DNA, 23 bp, Homo sapiens
gatagaataataacaatagtacg

SEQ ID NO: 44841 - DNA, 19 bp, Homo sapiens
tcttctatctagcagttgt

SEQ ID NO: 44842 - DNA, 18 bp, Homo sapiens
ctgtgtcagctacgtatg

SEQ ID NO: 44843 - DNA, 19 bp, Homo sapiens
agtattccctagttaatcc

SEQ ID NO: 44844 - DNA, 21 bp, Homo sapiens
caactgacacgccttgtgaaa

SEQ ID NO: 44845 - DNA, 17 bp, Homo sapiens
gctgcttatagactgtt

SEQ ID NO: 44846 - DNA, 24 bp, Homo sapiens
tggcagccacaaatatttatggaa

SEQ ID NO: 44847 - DNA, 17 bp, Homo sapiens
ggcggtgattttcatga

SEQ ID NO: 44848 - DNA, 22 bp, Homo sapiens
gtgaatatggtcacccctagca

SEQ ID NO: 44849 - DNA, 26 bp, Homo sapiens
atacttaaactattttattctaatag

SEQ ID NO: 44850 - DNA, 19 bp, Homo sapiens
aaagttgctaacgaatcaa

SEQ ID NO: 44851 - DNA, 19 bp, Homo sapiens
agaggttgctttatcttga

SEQ ID NO: 44852 - DNA, 21 bp, Homo sapiens
aggatcacagtaattctttgt

SEQ ID NO: 44853 - DNA, 20 bp, Homo sapiens
tatagtactctgcatttgaa

SEQ ID NO: 44854 - DNA, 24 bp, Homo sapiens
caggaataggtctaagaccttgcc

SEQ ID NO: 44855 - DNA, 19 bp, Homo sapiens
gatcgtgccactgcactcc

SEQ ID NO: 44856 - DNA, 18 bp, Homo sapiens
tgactgtcagaagaaatg

SEQ ID NO: 44857 - DNA, 24 bp, Homo sapiens
aaaattcttgtatctacttttaca

SEQ ID NO: 44858 - DNA, 16 bp, Homo sapiens
ttggctccgggaacgt

SEQ ID NO: 44859 - DNA, 18 bp, Homo sapiens
ctcctacttgcagttttt

SEQ ID NO: 44860 - DNA, 16 bp, Homo sapiens
ttggaggtggggaagc

SEQ ID NO: 44861 - DNA, 23 bp, Homo sapiens
attattgactgaatccatttctt

SEQ ID NO: 44862 - DNA, 26 bp, Homo sapiens
aattactacattttactttaaaaaat

SEQ ID NO: 44863 - DNA, 19 bp, Homo sapiens
tcctgtatcaacaacacac

SEQ ID NO: 44864 - DNA, 22 bp, Homo sapiens
tcttgaattgtacttctatgtt

SEQ ID NO: 44865 - DNA, 19 bp, Homo sapiens
tgttatcaacctagcttcc

SEQ ID NO: 44866 - DNA, 18 bp, Homo sapiens
ctagggactttctcaaag

SEQ ID NO: 44867 - DNA, 16 bp, Homo sapiens
ggtctggtgcctgggg

SEQ ID NO: 44868 - DNA, 16 bp, Homo sapiens
ggacggcaggaaagaa

SEQ ID NO: 44869 - DNA, 22 bp, Homo sapiens
aatacgttaacaactactgata

SEQ ID NO: 44870 - DNA, 17 bp, Homo sapiens
tacagtttttacccacc

SEQ ID NO: 44871 - DNA, 22 bp, Homo sapiens
ttaggaaaatttagcttataac

SEQ ID NO: 44872 - DNA, 20 bp, Homo sapiens
tcactccgtttacaatttaa

SEQ ID NO: 44873 - DNA, 20 bp, Homo sapiens
ccctttgaagatttgttttc

SEQ ID NO: 44874 - DNA, 23 bp, Homo sapiens
cttaaaaaaaatactataaaggt

SEQ ID NO: 44875 - DNA, 18 bp, Homo sapiens
agatggttcatcaagagg

SEQ ID NO: 44876 - DNA, 21 bp, Homo sapiens
ttggggaactctttctttaca

SEQ ID NO: 44877 - DNA, 18 bp, Homo sapiens
actgaattcctgaaagca

SEQ ID NO: 44878 - DNA, 20 bp, Homo sapiens
cacagcaactattacatcct

SEQ ID NO: 44879 - DNA, 20 bp, Homo sapiens
gtagacaatatgtgcactca

SEQ ID NO: 44880 - DNA, 24 bp, Homo sapiens
tatcatataagtgacatcttgtta

SEQ ID NO: 44881 - DNA, 23 bp, Homo sapiens
taacttaaaacttttctttaaaa

SEQ ID NO: 44882 - DNA, 22 bp, Homo sapiens
ttgtggaggctgcttcttggac

SEQ ID NO: 44883 - DNA, 17 bp, Homo sapiens
agagagatgaaagggaa

SEQ ID NO: 44884 - DNA, 18 bp, Homo sapiens
tggacgtccacaaatgag

SEQ ID NO: 44885 - DNA, 19 bp, Homo sapiens
gccactcaagcctaaatgg

SEQ ID NO: 44886 - DNA, 18 bp, Homo sapiens
gacagaagaatgcactca

SEQ ID NO: 44887 - DNA, 20 bp, Homo sapiens
aacagttctgatagttttaa

SEQ ID NO: 44888 - DNA, 18 bp, Homo sapiens
gtctctgggaaaactgct

SEQ ID NO: 44889 - DNA, 27 bp, Homo sapiens
tcaaataacttatttttaacataagaa

SEQ ID NO: 44890 - DNA, 24 bp, Homo sapiens
taacttattctcatttacagaata

SEQ ID NO: 44891 - DNA, 17 bp, Homo sapiens
accatgacaaggtgagt

SEQ ID NO: 44892 - DNA, 26 bp, Homo sapiens
ttaaagttttaaagtactaaaaattg

SEQ ID NO: 44893 - DNA, 24 bp, Homo sapiens
gttgcaatatagcttgatttaaag

SEQ ID NO: 44894 - DNA, 17 bp, Homo sapiens
ggttacaaagggtaaca

SEQ ID NO: 44895 - DNA, 20 bp, Homo sapiens
atgcaaccaaaggctcatac

SEQ ID NO: 44896 - DNA, 20 bp, Homo sapiens
tggaagtaaattcaggtaag

SEQ ID NO: 44897 - DNA, 21 bp, Homo sapiens
ctcaccacccatggcacagag

SEQ ID NO: 44898 - DNA, 16 bp, Homo sapiens
gaatggcttttcccga

SEQ ID NO: 44899 - DNA, 26 bp, Homo sapiens
aaattcattaatcagaaatatcattt

SEQ ID NO: 44900 - DNA, 21 bp, Homo sapiens
gatgaaatccctgtattgaca

SEQ ID NO: 44901 - DNA, 26 bp, Homo sapiens
tttaaaatcaattttaaaatgtctta

SEQ ID NO: 44902 - DNA, 19 bp, Homo sapiens
tgaatgtactgagtggtaa

SEQ ID NO: 44903 - DNA, 17 bp, Homo sapiens
tcccccgacttcaaagt

SEQ ID NO: 44904 - DNA, 16 bp, Homo sapiens
gttagccacctgccta

SEQ ID NO: 44905 - DNA, 23 bp, Homo sapiens
aaggtaccatacttagaattatc

SEQ ID NO: 44906 - DNA, 17 bp, Homo sapiens
agttgagtgatcttcct

SEQ ID NO: 44907 - DNA, 19 bp, Homo sapiens
cactgccacaatataagta

SEQ ID NO: 44908 - DNA, 17 bp, Homo sapiens
tcagtcgatcagccgaa

SEQ ID NO: 44909 - DNA, 21 bp, Homo sapiens
tgacaaatcctgtgaactctc

SEQ ID NO: 44910 - DNA, 16 bp, Homo sapiens
ggcgttgagtacgttg

SEQ ID NO: 44911 - DNA, 17 bp, Homo sapiens
acccccttactggaaac

SEQ ID NO: 44912 - DNA, 19 bp, Homo sapiens
tgtgtctatcaacttatct

SEQ ID NO: 44913 - DNA, 17 bp, Homo sapiens
gttagcagttaacacag

SEQ ID NO: 44914 - DNA, 24 bp, Homo sapiens
tttgtcatacctatatcatataca

SEQ ID NO: 44915 - DNA, 19 bp, Homo sapiens
acagtttttccttccaaca

SEQ ID NO: 44916 - DNA, 19 bp, Homo sapiens
acacaagtttgacatatgt

SEQ ID NO: 44917 - DNA, 24 bp, Homo sapiens
cgccgtgctgcccgggaagaatat

SEQ ID NO: 44918 - DNA, 20 bp, Homo sapiens
cctgaggagccggaccgatg

SEQ ID NO: 44919 - DNA, 23 bp, Homo sapiens
gcagcgtccccgggcaggaacgg

SEQ ID NO: 44920 - DNA, 24 bp, Homo sapiens
caggcgccgtatccgcgctcgtct

SEQ ID NO: 44921 - DNA, 24 bp, Homo sapiens
cgaggcagtcgctaccgggaaaat

SEQ ID NO: 44922 - DNA, 22 bp, Homo sapiens
tcatccaaggcagcctgcgtgg

SEQ ID NO: 44923 - DNA, 20 bp, Homo sapiens
gcccgcggcgggcagcagtt

SEQ ID NO: 44924 - DNA, 23 bp, Homo sapiens
cgtaatagacctcatttgtctcc

SEQ ID NO: 44925 - DNA, 17 bp, Homo sapiens
ctcgggtgctgctggga

SEQ ID NO: 44926 - DNA, 20 bp, Homo sapiens
gagttaggcgcagtatggca

SEQ ID NO: 44927 - DNA, 22 bp, Homo sapiens
acaccagcgagggcacccgcag

SEQ ID NO: 44928 - DNA, 24 bp, Homo sapiens
ccactacagagatcagagtccggg

SEQ ID NO: 44929 - DNA, 18 bp, Homo sapiens
cttctctggatggcaccc

SEQ ID NO: 44930 - DNA, 24 bp, Homo sapiens
atggacttgggcccggcgctgttc

SEQ ID NO: 44931 - DNA, 22 bp, Homo sapiens
ccctcggctagcatgacccgcc

SEQ ID NO: 44932 - DNA, 17 bp, Homo sapiens
ctcgctggtgtgcgagc

SEQ ID NO: 44933 - DNA, 16 bp, Homo sapiens
cctggctcctcacctg

SEQ ID NO: 44934 - DNA, 22 bp, Homo sapiens
gtgccctcgctggtgtgggagc

SEQ ID NO: 44935 - DNA, 17 bp, Homo sapiens
agggatcaagtcttctc

SEQ ID NO: 44936 - DNA, 24 bp, Homo sapiens
cagaggctgtgcgggaccgcatca

SEQ ID NO: 44937 - DNA, 24 bp, Homo sapiens
gaggctagatcctccaggctgcca

SEQ ID NO: 44938 - DNA, 17 bp, Homo sapiens
gctcgctgaggccttca

SEQ ID NO: 44939 - DNA, 19 bp, Homo sapiens
ctgaagctggccaggggga

SEQ ID NO: 44940 - DNA, 16 bp, Homo sapiens
ctggctccccagcaac

SEQ ID NO: 44941 - DNA, 23 bp, Homo sapiens
cttccaattccgacacatgcccc

SEQ ID NO: 44942 - DNA, 17 bp, Homo sapiens
ttttgtcttgagccaaa

SEQ ID NO: 44943 - DNA, 17 bp, Homo sapiens
cctgcacgaagtacttg

SEQ ID NO: 44944 - DNA, 24 bp, Homo sapiens
gtgaatttcccatcattgtcccat

SEQ ID NO: 44945 - DNA, 16 bp, Homo sapiens
tagatggcggactgtg

SEQ ID NO: 44946 - DNA, 21 bp, Homo sapiens
gtccacaaactgtcatccgat

SEQ ID NO: 44947 - DNA, 21 bp, Homo sapiens
aaattcatagagcgcagaggg

SEQ ID NO: 44948 - DNA, 24 bp, Homo sapiens
gcacatgcactccacccaggggga

SEQ ID NO: 44949 - DNA, 16 bp, Homo sapiens
tttgtaaggcaggaca

SEQ ID NO: 44950 - DNA, 21 bp, Homo sapiens
ctgggagatctgcgggaggcc

SEQ ID NO: 44951 - DNA, 17 bp, Homo sapiens
atcaccagtcagcaccc

SEQ ID NO: 44952 - DNA, 16 bp, Homo sapiens
gtggagtgcaactcaa

SEQ ID NO: 44953 - DNA, 17 bp, Homo sapiens
agtttctgatcgtgtgc

SEQ ID NO: 44954 - DNA, 17 bp, Homo sapiens
tgttttggctttggctt

SEQ ID NO: 44955 - DNA, 24 bp, Homo sapiens
aacgtctgagagtttctaagaaat

SEQ ID NO: 44956 - DNA, 16 bp, Homo sapiens
tgccagcagaaatact

SEQ ID NO: 44957 - DNA, 21 bp, Homo sapiens
gagagtggtctttgttgggtc

SEQ ID NO: 44958 - DNA, 24 bp, Homo sapiens
agggaaagagactgagtggctggg

SEQ ID NO: 44959 - DNA, 21 bp, Homo sapiens
cctgctctgttggtggttggg

SEQ ID NO: 44960 - DNA, 19 bp, Homo sapiens
ccctgatggggcagaggag

SEQ ID NO: 44961 - DNA, 20 bp, Homo sapiens
gtgggacaatctttaaagga

SEQ ID NO: 44962 - DNA, 20 bp, Homo sapiens
ttgcctgttgaattaaacac

SEQ ID NO: 44963 - DNA, 16 bp, Homo sapiens
ggggaaaccaaaatga

SEQ ID NO: 44964 - DNA, 17 bp, Homo sapiens
ctgcaggcgagctgtcc

SEQ ID NO: 44965 - DNA, 19 bp, Homo sapiens
tagtaaccaatgttatcct

SEQ ID NO: 44966 - DNA, 16 bp, Homo sapiens
tgggtaatgctcagtc

SEQ ID NO: 44967 - DNA, 18 bp, Homo sapiens
ctgcagccggcgcgacct

SEQ ID NO: 44968 - DNA, 16 bp, Homo sapiens
ctgccacactcagaaa

SEQ ID NO: 44969 - DNA, 16 bp, Homo sapiens
tggatgggagtgggag

SEQ ID NO: 44970 - DNA, 20 bp, Homo sapiens
tgcaagtgctgggggagaga

SEQ ID NO: 44971 - DNA, 18 bp, Homo sapiens
aagttggggatgtgggta

SEQ ID NO: 44972 - DNA, 20 bp, Homo sapiens
cattggtcgctcaatctcca

SEQ ID NO: 44973 - DNA, 19 bp, Homo sapiens
accccggcaacctgcacct

SEQ ID NO: 44974 - DNA, 24 bp, Homo sapiens
ctcaaactcagagcctgcctcttc

SEQ ID NO: 44975 - DNA, 23 bp, Homo sapiens
caggaagaaatgcagagtaacgt

SEQ ID NO: 44976 - DNA, 22 bp, Homo sapiens
cggatctacagaagacacctca

SEQ ID NO: 44977 - DNA, 22 bp, Homo sapiens
gaccagctcagggccacagtgc

SEQ ID NO: 44978 - DNA, 18 bp, Homo sapiens
gttgtaggcattgatgaa

SEQ ID NO: 44979 - DNA, 23 bp, Homo sapiens
gtggattaggcattattatcttt

SEQ ID NO: 44980 - DNA, 17 bp, Homo sapiens
taggtgtggaccacttc

SEQ ID NO: 44981 - DNA, 16 bp, Homo sapiens
gttgggcgtgttgctt

SEQ ID NO: 44982 - DNA, 22 bp, Homo sapiens
acttgttgcttatgaatgaata

SEQ ID NO: 44983 - DNA, 24 bp, Homo sapiens
tccagatctcaggatggacccaag

SEQ ID NO: 44984 - DNA, 17 bp, Homo sapiens
gattgtgtcttgttctc

SEQ ID NO: 44985 - DNA, 23 bp, Homo sapiens
gctgaccttgttaactactgtta

SEQ ID NO: 44986 - DNA, 24 bp, Homo sapiens
caatgccttgctcagcaggaacaa

SEQ ID NO: 44987 - DNA, 17 bp, Homo sapiens
atgtaggggggagtcca

SEQ ID NO: 44988 - DNA, 18 bp, Homo sapiens
caccatgtccggcagagc

SEQ ID NO: 44989 - DNA, 17 bp, Homo sapiens
ttgtgcggaaggctgga

SEQ ID NO: 44990 - DNA, 17 bp, Homo sapiens
ggaggagtgggtaaaga

SEQ ID NO: 44991 - DNA, 23 bp, Homo sapiens
tgtcttgaattgcagctaaacaa

SEQ ID NO: 44992 - DNA, 20 bp, Homo sapiens
gcacctgtccctcttcttgc

SEQ ID NO: 44993 - DNA, 24 bp, Homo sapiens
ctcaagctttggtttgccttggaa

SEQ ID NO: 44994 - DNA, 20 bp, Homo sapiens
ccttggaggcggcccagtcc

SEQ ID NO: 44995 - DNA, 21 bp, Homo sapiens
cggggagcagcagcctgctct

SEQ ID NO: 44996 - DNA, 17 bp, Homo sapiens
accatctcagggttgtt

SEQ ID NO: 44997 - DNA, 22 bp, Homo sapiens
ggaacaggagcaggcgcctaca

SEQ ID NO: 44998 - DNA, 21 bp, Homo sapiens
cacaactgtggagaatacggg

SEQ ID NO: 44999 - DNA, 17 bp, Homo sapiens
ttgtgtgacatgcattt

SEQ ID NO: 45000 - DNA, 20 bp, Homo sapiens
cttccttcatcttaaaatgt

SEQ ID NO: 45001 - DNA, 16 bp, Homo sapiens
ccaggcggtcaccctc

SEQ ID NO: 45002 - DNA, 23 bp, Homo sapiens
cactcacagcaaatcgagttagg

SEQ ID NO: 45003 - DNA, 19 bp, Homo sapiens
taaagcatggtgacctcag

SEQ ID NO: 45004 - DNA, 16 bp, Homo sapiens
agctggctgaaatgct

SEQ ID NO: 45005 - DNA, 21 bp, Homo sapiens
tcatctctaaattgcaacctt

SEQ ID NO: 45006 - DNA, 23 bp, Homo sapiens
gtttctgtccgggcgctcactaa

SEQ ID NO: 45007 - DNA, 23 bp, Homo sapiens
ggaagatgctagaaaccaggctt

SEQ ID NO: 45008 - DNA, 23 bp, Homo sapiens
atggggcaggctgctgcatggtc

SEQ ID NO: 45009 - DNA, 23 bp, Homo sapiens
caaactgttgaaggactccagga

SEQ ID NO: 45010 - DNA, 16 bp, Homo sapiens
tggaaggaggatgcga

SEQ ID NO: 45011 - DNA, 24 bp, Homo sapiens
aatagtgaaagtgctaacttttat

SEQ ID NO: 45012 - DNA, 16 bp, Homo sapiens
cgcccctggccagcag

SEQ ID NO: 45013 - DNA, 22 bp, Homo sapiens
gatacgttttatattttaccac

SEQ ID NO: 45014 - DNA, 17 bp, Homo sapiens
cctcttcaactacgagg

SEQ ID NO: 45015 - DNA, 18 bp, Homo sapiens
acacccagtttccaccct

SEQ ID NO: 45016 - DNA, 21 bp, Homo sapiens
ttttttctcatcttacttttt

SEQ ID NO: 45017 - DNA, 22 bp, Homo sapiens
ggggaaggaggctgcgccgtcc

SEQ ID NO: 45018 - DNA, 23 bp, Homo sapiens
tacttctgaataggaatgaaaca

SEQ ID NO: 45019 - DNA, 17 bp, Homo sapiens
gtgatctcctgcatgtc

SEQ ID NO: 45020 - DNA, 19 bp, Homo sapiens
ggacaaaaccaaaaaacaa

SEQ ID NO: 45021 - DNA, 17 bp, Homo sapiens
tttccaggctgtggcaa

SEQ ID NO: 45022 - DNA, 16 bp, Homo sapiens
gactcccaagggaaac

SEQ ID NO: 45023 - DNA, 17 bp, Homo sapiens
aagaaaccaccagctcc

SEQ ID NO: 45024 - DNA, 21 bp, Homo sapiens
tgtctcctcaggagcaggaca

SEQ ID NO: 45025 - DNA, 24 bp, Homo sapiens
tcttgggaaccggctgacagggaa

SEQ ID NO: 45026 - DNA, 16 bp, Homo sapiens
gtcttcagccacgcgg

SEQ ID NO: 45027 - DNA, 19 bp, Homo sapiens
atggtaggtgaggatgaca

SEQ ID NO: 45028 - DNA, 16 bp, Homo sapiens
ggctcttatggccaga

SEQ ID NO: 45029 - DNA, 21 bp, Homo sapiens
agagccatgtaaagtctcgat

SEQ ID NO: 45030 - DNA, 22 bp, Homo sapiens
cacagaccatcaccggcctcct

SEQ ID NO: 45031 - DNA, 16 bp, Homo sapiens
ctctccccttgcccgc

SEQ ID NO: 45032 - DNA, 20 bp, Homo sapiens
cccaatattatttctcttac

SEQ ID NO: 45033 - DNA, 18 bp, Homo sapiens
ggaaaaagagaagacggg

SEQ ID NO: 45034 - DNA, 18 bp, Homo sapiens
gaccccacaaaggaggaa

SEQ ID NO: 45035 - DNA, 24 bp, Homo sapiens
ttgcctggacatcaaactcttgca

SEQ ID NO: 45036 - DNA, 23 bp, Homo sapiens
catgtgtgtgcagcatgtttgta

SEQ ID NO: 45037 - DNA, 16 bp, Homo sapiens
tgtctcgggagatgca

SEQ ID NO: 45038 - DNA, 17 bp, Homo sapiens
atgcccataagtacaag

SEQ ID NO: 45039 - DNA, 17 bp, Homo sapiens
ctcagcaggaagtgttg

SEQ ID NO: 45040 - DNA, 22 bp, Homo sapiens
cctgtgatggggtagccaggaa

SEQ ID NO: 45041 - DNA, 16 bp, Homo sapiens
gcaggcctggccttct

SEQ ID NO: 45042 - DNA, 24 bp, Homo sapiens
aaggcttcacctcagcgaggtcta

SEQ ID NO: 45043 - DNA, 17 bp, Homo sapiens
tggcaaaccctggtcct

SEQ ID NO: 45044 - DNA, 20 bp, Homo sapiens
gaggcccagcatgttccccc

SEQ ID NO: 45045 - DNA, 18 bp, Homo sapiens
tagacagaggggtgactc

SEQ ID NO: 45046 - DNA, 18 bp, Homo sapiens
aaacacctccaggtggag

SEQ ID NO: 45047 - DNA, 16 bp, Homo sapiens
agaaagggaggctggt

SEQ ID NO: 45048 - DNA, 23 bp, Homo sapiens
ctgcaccacgtgcatgggctgcg

SEQ ID NO: 45049 - DNA, 22 bp, Homo sapiens
ttgatggctctgaaggtgagga

SEQ ID NO: 45050 - DNA, 21 bp, Homo sapiens
caggctgctgttcccccttca

SEQ ID NO: 45051 - DNA, 19 bp, Homo sapiens
ctttatgtcctcttgggtt

SEQ ID NO: 45052 - DNA, 24 bp, Homo sapiens
tacacagcctcaacctggcccagg

SEQ ID NO: 45053 - DNA, 19 bp, Homo sapiens
ttggcatgcgccagtgcct

SEQ ID NO: 45054 - DNA, 20 bp, Homo sapiens
cactcccactctgccgaggc

SEQ ID NO: 45055 - DNA, 16 bp, Homo sapiens
gcgctggctagacatc

SEQ ID NO: 45056 - DNA, 22 bp, Homo sapiens
gaccccgcccaggcccctcccc

SEQ ID NO: 45057 - DNA, 20 bp, Homo sapiens
ctctactctctgggtcgcaa

SEQ ID NO: 45058 - DNA, 24 bp, Homo sapiens
agcatctctgcctctgccaggcgc

SEQ ID NO: 45059 - DNA, 23 bp, Homo sapiens
gaacctccctccccagtcattcc

SEQ ID NO: 45060 - DNA, 24 bp, Homo sapiens
tagaagttcctgccggagcccctg

SEQ ID NO: 45061 - DNA, 18 bp, Homo sapiens
cttcagaactaccacatc

SEQ ID NO: 45062 - DNA, 18 bp, Homo sapiens
gaacaaggcggggttgcg

SEQ ID NO: 45063 - DNA, 22 bp, Homo sapiens
ctccaggctctaccctgtgggt

SEQ ID NO: 45064 - DNA, 23 bp, Homo sapiens
gacggtgcagagcggggatcagg

SEQ ID NO: 45065 - DNA, 23 bp, Homo sapiens
aggaagggtgcagagagcacagg

SEQ ID NO: 45066 - DNA, 24 bp, Homo sapiens
gtggggctcactcaccccagctgg

SEQ ID NO: 45067 - DNA, 16 bp, Homo sapiens
ttcctacgacctgggc

SEQ ID NO: 45068 - DNA, 23 bp, Homo sapiens
cactcgctccagaaacagaccca

SEQ ID NO: 45069 - DNA, 18 bp, Homo sapiens
tgcgtgcggccctcaagg

SEQ ID NO: 45070 - DNA, 20 bp, Homo sapiens
gaagagcaggtgcaggggaa

SEQ ID NO: 45071 - DNA, 21 bp, Homo sapiens
ggccgccgcagccagcatcag

SEQ ID NO: 45072 - DNA, 24 bp, Homo sapiens
ttctgtctgccaccacccagtggg

SEQ ID NO: 45073 - DNA, 24 bp, Homo sapiens
atgacgctctttgagctggctcgg

SEQ ID NO: 45074 - DNA, 18 bp, Homo sapiens
agccagcacccaccgcaa

SEQ ID NO: 45075 - DNA, 23 bp, Homo sapiens
tgagtcctcctgtgcaaggtctg

SEQ ID NO: 45076 - DNA, 21 bp, Homo sapiens
cttctggggatgttcactgat

SEQ ID NO: 45077 - DNA, 24 bp, Homo sapiens
gggtatgcatgtctgcacccctca

SEQ ID NO: 45078 - DNA, 18 bp, Homo sapiens
cacgttggggttccgagc

SEQ ID NO: 45079 - DNA, 18 bp, Homo sapiens
aaggggtttggatgggca

SEQ ID NO: 45080 - DNA, 17 bp, Homo sapiens
tctatggaactcactgc

SEQ ID NO: 45081 - DNA, 24 bp, Homo sapiens
ccaagtaagaaatgtggggcccat

SEQ ID NO: 45082 - DNA, 16 bp, Homo sapiens
acaccagcatcgtggc

SEQ ID NO: 45083 - DNA, 24 bp, Homo sapiens
gcaggcagtgcctgggaggcaggc

SEQ ID NO: 45084 - DNA, 18 bp, Homo sapiens
ataggcgacaactgtatc

SEQ ID NO: 45085 - DNA, 23 bp, Homo sapiens
accgtgtccacgctccctgcagt

SEQ ID NO: 45086 - DNA, 16 bp, Homo sapiens
aggacactgaaggatg

SEQ ID NO: 45087 - DNA, 23 bp, Homo sapiens
cagttccgcattcaacaggagct

SEQ ID NO: 45088 - DNA, 17 bp, Homo sapiens
ccggagaatttgggatg

SEQ ID NO: 45089 - DNA, 19 bp, Homo sapiens
gttcctgatagattttctg

SEQ ID NO: 45090 - DNA, 17 bp, Homo sapiens
atcttccagtacggtga

SEQ ID NO: 45091 - DNA, 17 bp, Homo sapiens
caatctccctggcagga

SEQ ID NO: 45092 - DNA, 24 bp, Homo sapiens
ttcatgcccaggagcctgtctcgc

SEQ ID NO: 45093 - DNA, 16 bp, Homo sapiens
tgggtggtggagaggg

SEQ ID NO: 45094 - DNA, 22 bp, Homo sapiens
gaacttcctccatgccctggag

SEQ ID NO: 45095 - DNA, 24 bp, Homo sapiens
catagcactgcccgggtccctggc

SEQ ID NO: 45096 - DNA, 24 bp, Homo sapiens
gcaacttggctctttttggagagc

SEQ ID NO: 45097 - DNA, 24 bp, Homo sapiens
gtgctccttccacaccttggggct

SEQ ID NO: 45098 - DNA, 20 bp, Homo sapiens
ggaggcagccaggaggcccg

SEQ ID NO: 45099 - DNA, 21 bp, Homo sapiens
ggtggatttgaacatgacctc

SEQ ID NO: 45100 - DNA, 18 bp, Homo sapiens
cagagaccctggagtggc

SEQ ID NO: 45101 - DNA, 24 bp, Homo sapiens
gtggccaaccaggcccagccgctc

SEQ ID NO: 45102 - DNA, 17 bp, Homo sapiens
cagcccagcatcttcca

SEQ ID NO: 45103 - DNA, 24 bp, Homo sapiens
atgcactgctgagcacaaggcagc

SEQ ID NO: 45104 - DNA, 24 bp, Homo sapiens
gccagggacttctcccaggccctg

SEQ ID NO: 45105 - DNA, 23 bp, Homo sapiens
gtcccccatccccgtccctggcc

SEQ ID NO: 45106 - DNA, 20 bp, Homo sapiens
agtgctgtcgcccaacgctg

SEQ ID NO: 45107 - DNA, 18 bp, Homo sapiens
cttctatggtgtagtgga

SEQ ID NO: 45108 - DNA, 21 bp, Homo sapiens
ctgccctggcctctgtaggaa

SEQ ID NO: 45109 - DNA, 24 bp, Homo sapiens
ccccgggcgttctgcagcaccttc

SEQ ID NO: 45110 - DNA, 19 bp, Homo sapiens
caaggaggatgggatacgg

SEQ ID NO: 45111 - DNA, 24 bp, Homo sapiens
tccaccatcgggaggaacctctgc

SEQ ID NO: 45112 - DNA, 20 bp, Homo sapiens
acaaacaggcagcttctacc

SEQ ID NO: 45113 - DNA, 24 bp, Homo sapiens
aatcggttgaagcgccattcaggc

SEQ ID NO: 45114 - DNA, 17 bp, Homo sapiens
tacagacaacatcgtgg

SEQ ID NO: 45115 - DNA, 22 bp, Homo sapiens
tcactgcccaccacaggggccc

SEQ ID NO: 45116 - DNA, 18 bp, Homo sapiens
gaagctgcaacaggtgga

SEQ ID NO: 45117 - DNA, 21 bp, Homo sapiens
ctcccccctacacccaggctg

SEQ ID NO: 45118 - DNA, 16 bp, Homo sapiens
ggccccacaggtacga

SEQ ID NO: 45119 - DNA, 24 bp, Homo sapiens
gaacacgccacatttgtgcccacg

SEQ ID NO: 45120 - DNA, 24 bp, Homo sapiens
ggattgggactgcagggtggggct

SEQ ID NO: 45121 - DNA, 23 bp, Homo sapiens
tcatcctgtggggatgcaggctg

SEQ ID NO: 45122 - DNA, 20 bp, Homo sapiens
gctttagctgtgaagccgct

SEQ ID NO: 45123 - DNA, 18 bp, Homo sapiens
catgcctgctcctcccaa

SEQ ID NO: 45124 - DNA, 24 bp, Homo sapiens
acctggaagtacaccagaccttcc

SEQ ID NO: 45125 - DNA, 20 bp, Homo sapiens
ccaaaggatgcagagtgccg

SEQ ID NO: 45126 - DNA, 21 bp, Homo sapiens
gcaacaggtggctgaggctgc

SEQ ID NO: 45127 - DNA, 24 bp, Homo sapiens
gggtcctgggcagcaagggcaggg

SEQ ID NO: 45128 - DNA, 24 bp, Homo sapiens
actgggcacgagagccgcccgggt

SEQ ID NO: 45129 - DNA, 21 bp, Homo sapiens
ctgaaaatgggccctagttcc

SEQ ID NO: 45130 - DNA, 16 bp, Homo sapiens
cagaggtgtgcatggc

SEQ ID NO: 45131 - DNA, 19 bp, Homo sapiens
ctccctccagatctgcagc

SEQ ID NO: 45132 - DNA, 21 bp, Homo sapiens
agataaaaggattgcagctga

SEQ ID NO: 45133 - DNA, 17 bp, Homo sapiens
ggcagcactgtcctggg

SEQ ID NO: 45134 - DNA, 23 bp, Homo sapiens
ctcaggcagatccagggccagtt

SEQ ID NO: 45135 - DNA, 24 bp, Homo sapiens
ctttgcagggacagccagggcact

SEQ ID NO: 45136 - DNA, 19 bp, Homo sapiens
acgctcatgcacccccaat

SEQ ID NO: 45137 - DNA, 23 bp, Homo sapiens
atcagcttcgactccctccagct

SEQ ID NO: 45138 - DNA, 19 bp, Homo sapiens
atggaagtttatgagtctc

SEQ ID NO: 45139 - DNA, 20 bp, Homo sapiens
acacagtatataaaactcct

SEQ ID NO: 45140 - DNA, 18 bp, Homo sapiens
gcccggattgatgacata

SEQ ID NO: 45141 - DNA, 20 bp, Homo sapiens
aaatgctctggggagaggca

SEQ ID NO: 45142 - DNA, 21 bp, Homo sapiens
cagcatttccatcttttgtcc

SEQ ID NO: 45143 - DNA, 21 bp, Homo sapiens
aagacgccctcttttgttcag

SEQ ID NO: 45144 - DNA, 17 bp, Homo sapiens
gactagcattgccacct

SEQ ID NO: 45145 - DNA, 22 bp, Homo sapiens
caaaccaggtgctgatctccat

SEQ ID NO: 45146 - DNA, 18 bp, Homo sapiens
gtagggttggattttagg

SEQ ID NO: 45147 - DNA, 20 bp, Homo sapiens
ctctggtttcacgaagggct

SEQ ID NO: 45148 - DNA, 19 bp, Homo sapiens
caatttctttgctcctcat

SEQ ID NO: 45149 - DNA, 17 bp, Homo sapiens
cctgcgttacatcttcc

SEQ ID NO: 45150 - DNA, 18 bp, Homo sapiens
tttctgtaatcatgaggc

SEQ ID NO: 45151 - DNA, 23 bp, Homo sapiens
agaagagagtgtattgctctgac

SEQ ID NO: 45152 - DNA, 18 bp, Homo sapiens
gctggcacattcagattc

SEQ ID NO: 45153 - DNA, 17 bp, Homo sapiens
ctgcctgggctcctgtc

SEQ ID NO: 45154 - DNA, 20 bp, Homo sapiens
taaggccggtcccagtggga

SEQ ID NO: 45155 - DNA, 27 bp, Homo sapiens
gatatttaaaatatttcacaattataa

SEQ ID NO: 45156 - DNA, 23 bp, Homo sapiens
ctgttcaagacgatggaaacttc

SEQ ID NO: 45157 - DNA, 18 bp, Homo sapiens
ttgctgacattgaggagg

SEQ ID NO: 45158 - DNA, 17 bp, Homo sapiens
ggaagagtatcatcctc

SEQ ID NO: 45159 - DNA, 16 bp, Homo sapiens
gaggacaaggcagagc

SEQ ID NO: 45160 - DNA, 22 bp, Homo sapiens
atcattttctagtttaaggaac

SEQ ID NO: 45161 - DNA, 22 bp, Homo sapiens
atttcacgcccctaccatgtcc

SEQ ID NO: 45162 - DNA, 22 bp, Homo sapiens
gattgaccctggggtcgatgcg

SEQ ID NO: 45163 - DNA, 20 bp, Homo sapiens
tcttccaaactgggtaggcc

SEQ ID NO: 45164 - DNA, 16 bp, Homo sapiens
tcacagaatctgtcca

SEQ ID NO: 45165 - DNA, 21 bp, Homo sapiens
tgcaaatgtatctgatgattt

SEQ ID NO: 45166 - DNA, 19 bp, Homo sapiens
ctgccacaggccaggacat

SEQ ID NO: 45167 - DNA, 16 bp, Homo sapiens
ttgaggctgtggatgt

SEQ ID NO: 45168 - DNA, 16 bp, Homo sapiens
ctgagctccccattta

SEQ ID NO: 45169 - DNA, 19 bp, Homo sapiens
gttatgtgggtcatgaatt

SEQ ID NO: 45170 - DNA, 22 bp, Homo sapiens
ttgtgctttaggaagtggtcca

SEQ ID NO: 45171 - DNA, 19 bp, Homo sapiens
ttgtttgggtaaaacaata

SEQ ID NO: 45172 - DNA, 17 bp, Homo sapiens
tcctggagtctcttggc

SEQ ID NO: 45173 - DNA, 16 bp, Homo sapiens
gtcctcgctgatacac

SEQ ID NO: 45174 - DNA, 18 bp, Homo sapiens
ggtctcgtgtccaaaata

SEQ ID NO: 45175 - DNA, 24 bp, Homo sapiens
caaaaataacaagataaaataaaa

SEQ ID NO: 45176 - DNA, 19 bp, Homo sapiens
ttagaaacacactacagaa

SEQ ID NO: 45177 - DNA, 18 bp, Homo sapiens
tctgatatgtgctaagaa

SEQ ID NO: 45178 - DNA, 18 bp, Homo sapiens
agggtcttaaacaagcca

SEQ ID NO: 45179 - DNA, 18 bp, Homo sapiens
acttagtttggccaagaa

SEQ ID NO: 45180 - DNA, 16 bp, Homo sapiens
cgtgtttgcctgttca

SEQ ID NO: 45181 - DNA, 21 bp, Homo sapiens
ctcttgcacccctgaaaagaa

SEQ ID NO: 45182 - DNA, 18 bp, Homo sapiens
gtgggctgccttcctttg

SEQ ID NO: 45183 - DNA, 16 bp, Homo sapiens
atcgcagtttccgtgg

SEQ ID NO: 45184 - DNA, 19 bp, Homo sapiens
ggatctgacagatatcctt

SEQ ID NO: 45185 - DNA, 16 bp, Homo sapiens
caggaaggtttcttcc

SEQ ID NO: 45186 - DNA, 16 bp, Homo sapiens
atggggctccagttcc

SEQ ID NO: 45187 - DNA, 25 bp, Homo sapiens
tcagatcatgaatttatttgttttt

SEQ ID NO: 45188 - DNA, 18 bp, Homo sapiens
tcccgtcatttcactaaa

SEQ ID NO: 45189 - DNA, 18 bp, Homo sapiens
gcccccacccacctgcac

SEQ ID NO: 45190 - DNA, 21 bp, Homo sapiens
ttctgaatttgcacttaaaaa

SEQ ID NO: 45191 - DNA, 16 bp, Homo sapiens
tgggcaagatggaact

SEQ ID NO: 45192 - DNA, 17 bp, Homo sapiens
gaacaaggctttctggg

SEQ ID NO: 45193 - DNA, 20 bp, Homo sapiens
acaggcatcctcattccgct

SEQ ID NO: 45194 - DNA, 22 bp, Homo sapiens
cttcctgaacatctgcctccca

SEQ ID NO: 45195 - DNA, 24 bp, Homo sapiens
taaaagcacccattttgctgctcc

SEQ ID NO: 45196 - DNA, 21 bp, Homo sapiens
tcacaagaccttctgcattcc

SEQ ID NO: 45197 - DNA, 21 bp, Homo sapiens
tcctcaacacatgaagacttt

SEQ ID NO: 45198 - DNA, 16 bp, Homo sapiens
aggtgggaatctgtcg

SEQ ID NO: 45199 - DNA, 18 bp, Homo sapiens
aagccatcctgaaaccag

SEQ ID NO: 45200 - DNA, 16 bp, Homo sapiens
ttcacactggagggtg

SEQ ID NO: 45201 - DNA, 16 bp, Homo sapiens
cctcctccgtggggaa

SEQ ID NO: 45202 - DNA, 16 bp, Homo sapiens
accatggatgtggctc

SEQ ID NO: 45203 - DNA, 21 bp, Homo sapiens
gacccgaagtctccagggcga

SEQ ID NO: 45204 - DNA, 19 bp, Homo sapiens
caggataagtggctttcca

SEQ ID NO: 45205 - DNA, 19 bp, Homo sapiens
atcaacatggaggacaggt

SEQ ID NO: 45206 - DNA, 19 bp, Homo sapiens
ggtctgagttccctcaggc

SEQ ID NO: 45207 - DNA, 16 bp, Homo sapiens
cccatccaccaatggg

SEQ ID NO: 45208 - DNA, 16 bp, Homo sapiens
ccattttctcagtggg

SEQ ID NO: 45209 - DNA, 21 bp, Homo sapiens
ctctaccccttttctttcaca

SEQ ID NO: 45210 - DNA, 21 bp, Homo sapiens
catatttgccccgtctaggta

SEQ ID NO: 45211 - DNA, 16 bp, Homo sapiens
aaatgaaaggcgagga

SEQ ID NO: 45212 - DNA, 18 bp, Homo sapiens
tctcttcaaacaccccat

SEQ ID NO: 45213 - DNA, 19 bp, Homo sapiens
gtcattgtactttgagaca

SEQ ID NO: 45214 - DNA, 18 bp, Homo sapiens
ttgtgcttatccacctgt

SEQ ID NO: 45215 - DNA, 19 bp, Homo sapiens
tccctgttggtgatgggag

SEQ ID NO: 45216 - DNA, 18 bp, Homo sapiens
ctgtggaggtggataaat

SEQ ID NO: 45217 - DNA, 24 bp, Homo sapiens
ttcattagaatgcaagagaagaca

SEQ ID NO: 45218 - DNA, 17 bp, Homo sapiens
cgaaatcagcacatggg

SEQ ID NO: 45219 - DNA, 16 bp, Homo sapiens
catcccggcctctccc

SEQ ID NO: 45220 - DNA, 19 bp, Homo sapiens
agtctgatgatgattttgc

SEQ ID NO: 45221 - DNA, 18 bp, Homo sapiens
actgcatcgatattccca

SEQ ID NO: 45222 - DNA, 17 bp, Homo sapiens
aggtggtgtctaatttg

SEQ ID NO: 45223 - DNA, 19 bp, Homo sapiens
gtgggcacttgctgggttg

SEQ ID NO: 45224 - DNA, 23 bp, Homo sapiens
tttgcaatgacaaataattaaat

SEQ ID NO: 45225 - DNA, 17 bp, Homo sapiens
aatggctagttcacaga

SEQ ID NO: 45226 - DNA, 16 bp, Homo sapiens
tgctggactggccact

SEQ ID NO: 45227 - DNA, 17 bp, Homo sapiens
caagaaggcttggaggg

SEQ ID NO: 45228 - DNA, 19 bp, Homo sapiens
atgaaagccagaagaccta

SEQ ID NO: 45229 - DNA, 18 bp, Homo sapiens
catggtgagcaagcgcca

SEQ ID NO: 45230 - DNA, 16 bp, Homo sapiens
tgtcacgtgctggtga

SEQ ID NO: 45231 - DNA, 23 bp, Homo sapiens
tttctggtttaagtaggctcgga

SEQ ID NO: 45232 - DNA, 22 bp, Homo sapiens
aagaccttttgactccagcaga

SEQ ID NO: 45233 - DNA, 23 bp, Homo sapiens
gagggagaacacgatgcaccttc

SEQ ID NO: 45234 - DNA, 18 bp, Homo sapiens
gaaggatttgtgtgaact

SEQ ID NO: 45235 - DNA, 18 bp, Homo sapiens
gtcacagaataacacaaa

SEQ ID NO: 45236 - DNA, 16 bp, Homo sapiens
cctttgtgcctctgga

SEQ ID NO: 45237 - DNA, 20 bp, Homo sapiens
caagaatagattgctgaaac

SEQ ID NO: 45238 - DNA, 28 bp, Homo sapiens
tataatatgtatatatgcatttttgttt

SEQ ID NO: 45239 - DNA, 18 bp, Homo sapiens
cagacctggtcataacct

SEQ ID NO: 45240 - DNA, 20 bp, Homo sapiens
acatagcttttctcatcatc

SEQ ID NO: 45241 - DNA, 24 bp, Homo sapiens
agctgctgatatccttgagcttga

SEQ ID NO: 45242 - DNA, 21 bp, Homo sapiens
tgtggtggaacttaaataaat

SEQ ID NO: 45243 - DNA, 17 bp, Homo sapiens
tgcaccatgaaactgaa

SEQ ID NO: 45244 - DNA, 22 bp, Homo sapiens
aatagttcttcaatcacagaat

SEQ ID NO: 45245 - DNA, 22 bp, Homo sapiens
ggttgattgatggactatagaa

SEQ ID NO: 45246 - DNA, 21 bp, Homo sapiens
cttaggtggaagctagaacac

SEQ ID NO: 45247 - DNA, 19 bp, Homo sapiens
tggtcctacctaatatgct

SEQ ID NO: 45248 - DNA, 22 bp, Homo sapiens
ttactgcgagttcagacgaact

SEQ ID NO: 45249 - DNA, 19 bp, Homo sapiens
aaatgtatcacattagtga

SEQ ID NO: 45250 - DNA, 18 bp, Homo sapiens
cggtacatgaagaaactg

SEQ ID NO: 45251 - DNA, 23 bp, Homo sapiens
gccacccctttgttgctcttgga

SEQ ID NO: 45252 - DNA, 16 bp, Homo sapiens
ggggcccctaattctg

SEQ ID NO: 45253 - DNA, 24 bp, Homo sapiens
ttggggtagcttggaaatgagaaa

SEQ ID NO: 45254 - DNA, 22 bp, Homo sapiens
tgcattttgaaagtagatttcg

SEQ ID NO: 45255 - DNA, 22 bp, Homo sapiens
gaaatgtctttattttccagtt

SEQ ID NO: 45256 - DNA, 16 bp, Homo sapiens
gcccttctctctgagt

SEQ ID NO: 45257 - DNA, 19 bp, Homo sapiens
ctcacccatcaagtgttca

SEQ ID NO: 45258 - DNA, 16 bp, Homo sapiens
aaatacttgggagcca

SEQ ID NO: 45259 - DNA, 20 bp, Homo sapiens
aagcatgggagaggagtgca

SEQ ID NO: 45260 - DNA, 22 bp, Homo sapiens
atcagcagcagcactctgccta

SEQ ID NO: 45261 - DNA, 19 bp, Homo sapiens
ctccaggcacagttctggc

SEQ ID NO: 45262 - DNA, 23 bp, Homo sapiens
cacaagacacacaaacctgttga

SEQ ID NO: 45263 - DNA, 23 bp, Homo sapiens
atatttgatccattttgagtgct

SEQ ID NO: 45264 - DNA, 17 bp, Homo sapiens
cctggaatacctctgca

SEQ ID NO: 45265 - DNA, 18 bp, Homo sapiens
ccctgcctccaaaaatat

SEQ ID NO: 45266 - DNA, 18 bp, Homo sapiens
agtgactagcaagggata

SEQ ID NO: 45267 - DNA, 19 bp, Homo sapiens
ttgatgaaacagtcaatga

SEQ ID NO: 45268 - DNA, 22 bp, Homo sapiens
cacttgggccccttctccctca

SEQ ID NO: 45269 - DNA, 19 bp, Homo sapiens
tggagtttagagttgatgt

SEQ ID NO: 45270 - DNA, 22 bp, Homo sapiens
tagttatgatgaggaacgcatg

SEQ ID NO: 45271 - DNA, 20 bp, Homo sapiens
tgatgggattttgtttagca

SEQ ID NO: 45272 - DNA, 18 bp, Homo sapiens
acaaatcgtccagatctt

SEQ ID NO: 45273 - DNA, 17 bp, Homo sapiens
tctagccaccttcctct

SEQ ID NO: 45274 - DNA, 17 bp, Homo sapiens
gcggcagatcaattttc

SEQ ID NO: 45275 - DNA, 23 bp, Homo sapiens
tttatgaaaaaataggactgtgc

SEQ ID NO: 45276 - DNA, 21 bp, Homo sapiens
ataccttgaagattcagtgtg

SEQ ID NO: 45277 - DNA, 21 bp, Homo sapiens
accttttaatgagaaacaatg

SEQ ID NO: 45278 - DNA, 21 bp, Homo sapiens
gatctcctatcttgtgtaggt

SEQ ID NO: 45279 - DNA, 17 bp, Homo sapiens
ctgtgccatcctcaaaa

SEQ ID NO: 45280 - DNA, 23 bp, Homo sapiens
tttattattctgtgacatgtcaa

SEQ ID NO: 45281 - DNA, 20 bp, Homo sapiens
cttcactgagcagccacact

SEQ ID NO: 45282 - DNA, 17 bp, Homo sapiens
aagcaatcaccaaagca

SEQ ID NO: 45283 - DNA, 17 bp, Homo sapiens
ccctgctcgcttgagac

SEQ ID NO: 45284 - DNA, 17 bp, Homo sapiens
ggagggtacataatgcc

SEQ ID NO: 45285 - DNA, 24 bp, Homo sapiens
tttttcctcgtttctcacttgact

SEQ ID NO: 45286 - DNA, 18 bp, Homo sapiens
gcgaatatggctgccatg

SEQ ID NO: 45287 - DNA, 22 bp, Homo sapiens
ttactcaaatttatcaatttta

SEQ ID NO: 45288 - DNA, 18 bp, Homo sapiens
cccactaattgtcctcca

SEQ ID NO: 45289 - DNA, 21 bp, Homo sapiens
ttctgacaaaatcaaagtggc

SEQ ID NO: 45290 - DNA, 20 bp, Homo sapiens
ctgatcattttgttttgtcg

SEQ ID NO: 45291 - DNA, 20 bp, Homo sapiens
tggtagattgcaaacatggc

SEQ ID NO: 45292 - DNA, 20 bp, Homo sapiens
ttcaggtagtcaggcaggtt

SEQ ID NO: 45293 - DNA, 24 bp, Homo sapiens
tctcataagacaatgagccttcta

SEQ ID NO: 45294 - DNA, 16 bp, Homo sapiens
aaccagggagcaacac

SEQ ID NO: 45295 - DNA, 20 bp, Homo sapiens
aggaggtggtgaataaatga

SEQ ID NO: 45296 - DNA, 17 bp, Homo sapiens
ctggatgccttattctt

SEQ ID NO: 45297 - DNA, 22 bp, Homo sapiens
aggcattcagtagtcaggtcag

SEQ ID NO: 45298 - DNA, 18 bp, Homo sapiens
gctgggaaggaaagaagt

SEQ ID NO: 45299 - DNA, 20 bp, Homo sapiens
gtagccttgtctctccgaat

SEQ ID NO: 45300 - DNA, 20 bp, Homo sapiens
ggaacgtttagaaattgttt

SEQ ID NO: 45301 - DNA, 24 bp, Homo sapiens
tactagctcatatcccaaacagaa

SEQ ID NO: 45302 - DNA, 17 bp, Homo sapiens
tgtccgagaaagcttgg

SEQ ID NO: 45303 - DNA, 21 bp, Homo sapiens
gactcaacatggcccagttga

SEQ ID NO: 45304 - DNA, 16 bp, Homo sapiens
gctcccagagatttgg

SEQ ID NO: 45305 - DNA, 25 bp, Homo sapiens
aatcataatcacaataaaagtagag

SEQ ID NO: 45306 - DNA, 17 bp, Homo sapiens
accttttagctttgtgc

SEQ ID NO: 45307 - DNA, 22 bp, Homo sapiens
tcttccaggcatcattctcacc

SEQ ID NO: 45308 - DNA, 17 bp, Homo sapiens
caaccttgttccttttc

SEQ ID NO: 45309 - DNA, 22 bp, Homo sapiens
ggtcccccatagcccagtggca

SEQ ID NO: 45310 - DNA, 22 bp, Homo sapiens
aacacactctgcccgtcttcct

SEQ ID NO: 45311 - DNA, 16 bp, Homo sapiens
ggtggcctcaagatgc

SEQ ID NO: 45312 - DNA, 21 bp, Homo sapiens
ggcactcagtatgtatttact

SEQ ID NO: 45313 - DNA, 18 bp, Homo sapiens
cgggaacagaaaaaagta

SEQ ID NO: 45314 - DNA, 21 bp, Homo sapiens
ggggaaggtggaagactttac

SEQ ID NO: 45315 - DNA, 22 bp, Homo sapiens
aatggtaaagaaattaaggcac

SEQ ID NO: 45316 - DNA, 18 bp, Homo sapiens
tgtgaaatggacttcagt

SEQ ID NO: 45317 - DNA, 21 bp, Homo sapiens
ttgggatacgcctccacggac

SEQ ID NO: 45318 - DNA, 18 bp, Homo sapiens
tgttctttgttgtctgtc

SEQ ID NO: 45319 - DNA, 18 bp, Homo sapiens
ctctccacgagttccgta

SEQ ID NO: 45320 - DNA, 19 bp, Homo sapiens
ctgtcttactggaaaagaa

SEQ ID NO: 45321 - DNA, 23 bp, Homo sapiens
aacaacactccactgacatcttt

SEQ ID NO: 45322 - DNA, 16 bp, Homo sapiens
gggacgggatgtgggc

SEQ ID NO: 45323 - DNA, 20 bp, Homo sapiens
tgaggactccagtatatctg

SEQ ID NO: 45324 - DNA, 22 bp, Homo sapiens
gagatgcccagaagaaagtgag

SEQ ID NO: 45325 - DNA, 18 bp, Homo sapiens
ccccgttgccacccacag

SEQ ID NO: 45326 - DNA, 23 bp, Homo sapiens
aaaccctgtttcagattcacctc

SEQ ID NO: 45327 - DNA, 17 bp, Homo sapiens
gttggaatgtgcttttt

SEQ ID NO: 45328 - DNA, 23 bp, Homo sapiens
agatgaacatgacattatactga

SEQ ID NO: 45329 - DNA, 17 bp, Homo sapiens
gacttaccctcggtact

SEQ ID NO: 45330 - DNA, 20 bp, Homo sapiens
acaacagctattgtctgtgg

SEQ ID NO: 45331 - DNA, 20 bp, Homo sapiens
gagaggaaatatccaacctc

SEQ ID NO: 45332 - DNA, 16 bp, Homo sapiens
ggatgaggggactgca

SEQ ID NO: 45333 - DNA, 24 bp, Homo sapiens
agtcatactctagaaagctgacta

SEQ ID NO: 45334 - DNA, 17 bp, Homo sapiens
actcaactaccagacca

SEQ ID NO: 45335 - DNA, 24 bp, Homo sapiens
aaggccaggcgaggtggcccacaa

SEQ ID NO: 45336 - DNA, 16 bp, Homo sapiens
tcacccagtatactcc

SEQ ID NO: 45337 - DNA, 21 bp, Homo sapiens
gcacagctgcagtgcctctgc

SEQ ID NO: 45338 - DNA, 22 bp, Homo sapiens
agcattttgtgtgcttctctaa

SEQ ID NO: 45339 - DNA, 16 bp, Homo sapiens
gtgatgtcacacacca

SEQ ID NO: 45340 - DNA, 20 bp, Homo sapiens
ggtgtgttatgtaattctcc

SEQ ID NO: 45341 - DNA, 16 bp, Homo sapiens
tcaggctggtatggag

SEQ ID NO: 45342 - DNA, 22 bp, Homo sapiens
ctcgatccagagaaacccggta

SEQ ID NO: 45343 - DNA, 21 bp, Homo sapiens
catgggctattataactgctc

SEQ ID NO: 45344 - DNA, 20 bp, Homo sapiens
agtgtggaggctctgagact

SEQ ID NO: 45345 - DNA, 17 bp, Homo sapiens
ttgcaactctgcatgcc

SEQ ID NO: 45346 - DNA, 19 bp, Homo sapiens
acagtcatcctgttcctga

SEQ ID NO: 45347 - DNA, 19 bp, Homo sapiens
cttttctgagacatctgtc

SEQ ID NO: 45348 - DNA, 16 bp, Homo sapiens
gtctgtggcactgagc

SEQ ID NO: 45349 - DNA, 20 bp, Homo sapiens
tccatatagttattctgtca

SEQ ID NO: 45350 - DNA, 21 bp, Homo sapiens
gatctggtttttgcttgaaat

SEQ ID NO: 45351 - DNA, 17 bp, Homo sapiens
gagatgtcgcatacagt

SEQ ID NO: 45352 - DNA, 24 bp, Homo sapiens
aacatccgtttgaaaagacccttg

SEQ ID NO: 45353 - DNA, 19 bp, Homo sapiens
tttaatccacacattccca

SEQ ID NO: 45354 - DNA, 18 bp, Homo sapiens
gccttgcgttttaatttt

SEQ ID NO: 45355 - DNA, 20 bp, Homo sapiens
accacaaaagacaaataggc

SEQ ID NO: 45356 - DNA, 16 bp, Homo sapiens
gctttgtagtcgcaaa

SEQ ID NO: 45357 - DNA, 20 bp, Homo sapiens
acagggtcttccattttcaa

SEQ ID NO: 45358 - DNA, 20 bp, Homo sapiens
ctcagagttttccttttctt

SEQ ID NO: 45359 - DNA, 18 bp, Homo sapiens
tcaattcatcaatgctct

SEQ ID NO: 45360 - DNA, 18 bp, Homo sapiens
atttgcttccacgccacg

SEQ ID NO: 45361 - DNA, 24 bp, Homo sapiens
cacgacgacttcgctcggaggcac

SEQ ID NO: 45362 - DNA, 24 bp, Homo sapiens
gcagagctcagggtaggagccggg

SEQ ID NO: 45363 - DNA, 17 bp, Homo sapiens
agcgccgcggctggggc

SEQ ID NO: 45364 - DNA, 23 bp, Homo sapiens
ggaggccgcggagggccgggtgg

SEQ ID NO: 45365 - DNA, 23 bp, Homo sapiens
gccgcctggctgggggatcgggg

SEQ ID NO: 45366 - DNA, 24 bp, Homo sapiens
ctggtctttgtccccagggccgat

SEQ ID NO: 45367 - DNA, 21 bp, Homo sapiens
gtcctgtgccagggcgtgggg

SEQ ID NO: 45368 - DNA, 24 bp, Homo sapiens
cagaaggcgctccaggaggcgcga

SEQ ID NO: 45369 - DNA, 23 bp, Homo sapiens
gagaggggccaagagcgcggctg

SEQ ID NO: 45370 - DNA, 17 bp, Homo sapiens
gctccgcggcgcccagc

SEQ ID NO: 45371 - DNA, 24 bp, Homo sapiens
tccagcgaaaggggctccaggccg

SEQ ID NO: 45372 - DNA, 21 bp, Homo sapiens
gaccccgcggcccaggcgcag

SEQ ID NO: 45373 - DNA, 19 bp, Homo sapiens
gagcgcagcgcccattcat

SEQ ID NO: 45374 - DNA, 23 bp, Homo sapiens
ctgagccccgcccccaggtggca

SEQ ID NO: 45375 - DNA, 22 bp, Homo sapiens
gctgctgcggcgtccgcctctg

SEQ ID NO: 45376 - DNA, 22 bp, Homo sapiens
aatcatcgggggcggcgcgggg

SEQ ID NO: 45377 - DNA, 19 bp, Homo sapiens
tcggctccgcgccccagcg

SEQ ID NO: 45378 - DNA, 18 bp, Homo sapiens
ctgcagattttccagcgg

SEQ ID NO: 45379 - DNA, 22 bp, Homo sapiens
gctcgggatgagcgttccaacc

SEQ ID NO: 45380 - DNA, 24 bp, Homo sapiens
ctcagcaacgccagcaggcgtcag

SEQ ID NO: 45381 - DNA, 24 bp, Homo sapiens
ttcccagcgccaattggcctgctg

SEQ ID NO: 45382 - DNA, 16 bp, Homo sapiens
ctcatcctgcagcggg

SEQ ID NO: 45383 - DNA, 22 bp, Homo sapiens
tctagctcctgagcgggacagg

SEQ ID NO: 45384 - DNA, 23 bp, Homo sapiens
aagctggggctccacttgaccct

SEQ ID NO: 45385 - DNA, 17 bp, Homo sapiens
caggagagagggagcta

SEQ ID NO: 45386 - DNA, 16 bp, Homo sapiens
gatggccccaggacac

SEQ ID NO: 45387 - DNA, 16 bp, Homo sapiens
catcagcatatccgct

SEQ ID NO: 45388 - DNA, 23 bp, Homo sapiens
gagggaactactccccgtggccc

SEQ ID NO: 45389 - DNA, 23 bp, Homo sapiens
tcaccgcatgaagcggccctggc

SEQ ID NO: 45390 - DNA, 21 bp, Homo sapiens
ttggtgggatatgacccagaa

SEQ ID NO: 45391 - DNA, 23 bp, Homo sapiens
gccatgaccctctcaaccctctg

SEQ ID NO: 45392 - DNA, 19 bp, Homo sapiens
aaagactggacaggctaca

SEQ ID NO: 45393 - DNA, 17 bp, Homo sapiens
agggatagtgaacctcc

SEQ ID NO: 45394 - DNA, 17 bp, Homo sapiens
agagctgggaagtcgtt

SEQ ID NO: 45395 - DNA, 22 bp, Homo sapiens
tgggccttccctactcccttgt

SEQ ID NO: 45396 - DNA, 21 bp, Homo sapiens
tagccaccctcctccccagca

SEQ ID NO: 45397 - DNA, 24 bp, Homo sapiens
aactggtggtatggggcagtgagt

SEQ ID NO: 45398 - DNA, 16 bp, Homo sapiens
ctgggtcctgaggtaa

SEQ ID NO: 45399 - DNA, 21 bp, Homo sapiens
tagcaccttcctgtttgacaa

SEQ ID NO: 45400 - DNA, 19 bp, Homo sapiens
agaggggaaatccatagtt

SEQ ID NO: 45401 - DNA, 19 bp, Homo sapiens
gtaacctggctccaactgc

SEQ ID NO: 45402 - DNA, 22 bp, Homo sapiens
cttggctgtgctacgggcaggg

SEQ ID NO: 45403 - DNA, 20 bp, Homo sapiens
cagagagtgatactccttta

SEQ ID NO: 45404 - DNA, 16 bp, Homo sapiens
gcacatgaccttactg

SEQ ID NO: 45405 - DNA, 22 bp, Homo sapiens
agtctgctcgaggagtctggta

SEQ ID NO: 45406 - DNA, 16 bp, Homo sapiens
acaacagcccggatct

SEQ ID NO: 45407 - DNA, 23 bp, Homo sapiens
agttggagactcagcattggggt

SEQ ID NO: 45408 - DNA, 16 bp, Homo sapiens
cacaaacctgcaccca

SEQ ID NO: 45409 - DNA, 24 bp, Homo sapiens
tatcttttctcccgtcaccaccca

SEQ ID NO: 45410 - DNA, 16 bp, Homo sapiens
cagaaccaaagcttca

SEQ ID NO: 45411 - DNA, 23 bp, Homo sapiens
ctgccactcatgtcggtccctga

SEQ ID NO: 45412 - DNA, 16 bp, Homo sapiens
aaaagacaccaagtca

SEQ ID NO: 45413 - DNA, 16 bp, Homo sapiens
agctgggtgcccagta

SEQ ID NO: 45414 - DNA, 19 bp, Homo sapiens
agcccatcatggcaccttt

SEQ ID NO: 45415 - DNA, 24 bp, Homo sapiens
gatgggcagggagggggtgatgaa

SEQ ID NO: 45416 - DNA, 21 bp, Homo sapiens
agactcagccaagaaacccac

SEQ ID NO: 45417 - DNA, 20 bp, Homo sapiens
gtggtcaggagggagttgac

SEQ ID NO: 45418 - DNA, 17 bp, Homo sapiens
ttcctctgtcccatcca

SEQ ID NO: 45419 - DNA, 21 bp, Homo sapiens
tagatctttgaaaacaaaggt

SEQ ID NO: 45420 - DNA, 17 bp, Homo sapiens
gcaaaagcagagaagaa

SEQ ID NO: 45421 - DNA, 18 bp, Homo sapiens
taagggtgtcaggggctc

SEQ ID NO: 45422 - DNA, 19 bp, Homo sapiens
tgagatcgctcctcacgct

SEQ ID NO: 45423 - DNA, 24 bp, Homo sapiens
tggacatgggaacaggattaatgg

SEQ ID NO: 45424 - DNA, 18 bp, Homo sapiens
tagctcctggcggctgta

SEQ ID NO: 45425 - DNA, 22 bp, Homo sapiens
gaggtaaaggacctgcctgttc

SEQ ID NO: 45426 - DNA, 16 bp, Homo sapiens
gaaagttagggactcc

SEQ ID NO: 45427 - DNA, 20 bp, Homo sapiens
gtttcctgccagatattgcc

SEQ ID NO: 45428 - DNA, 17 bp, Homo sapiens
ctagcaagtctctctct

SEQ ID NO: 45429 - DNA, 17 bp, Homo sapiens
agagcccctgctaatgg

SEQ ID NO: 45430 - DNA, 20 bp, Homo sapiens
acccgagtctaagtcaccat

SEQ ID NO: 45431 - DNA, 21 bp, Homo sapiens
atctaaaggaaagatgatggt

SEQ ID NO: 45432 - DNA, 16 bp, Homo sapiens
accagtactaaccagt

SEQ ID NO: 45433 - DNA, 23 bp, Homo sapiens
tgagaagacatcagatcctgggc

SEQ ID NO: 45434 - DNA, 19 bp, Homo sapiens
tcaggtagccgccgcacat

SEQ ID NO: 45435 - DNA, 23 bp, Homo sapiens
actccggctcctatgtcaccttg

SEQ ID NO: 45436 - DNA, 17 bp, Homo sapiens
cctagccccaggatcct

SEQ ID NO: 45437 - DNA, 23 bp, Homo sapiens
acgtctggtcctaaccagtgagc

SEQ ID NO: 45438 - DNA, 23 bp, Homo sapiens
ggaatcagagcctgactctcagc

SEQ ID NO: 45439 - DNA, 19 bp, Homo sapiens
cagacactgctgctgcccc

SEQ ID NO: 45440 - DNA, 22 bp, Homo sapiens
tctcaaagaggttgtcatactt

SEQ ID NO: 45441 - DNA, 24 bp, Homo sapiens
gcgtgatggtcagtctcccaagta

SEQ ID NO: 45442 - DNA, 21 bp, Homo sapiens
gctaaatataggtacttgaaa

SEQ ID NO: 45443 - DNA, 23 bp, Homo sapiens
tcccagtagggtcagcatctgga

SEQ ID NO: 45444 - DNA, 16 bp, Homo sapiens
ttgaggttgcagttca

SEQ ID NO: 45445 - DNA, 21 bp, Homo sapiens
tccatcatgaagaagctcttg

SEQ ID NO: 45446 - DNA, 17 bp, Homo sapiens
tcagtcccagcatctct

SEQ ID NO: 45447 - DNA, 23 bp, Homo sapiens
actacatctccaatgtgctttct

SEQ ID NO: 45448 - DNA, 21 bp, Homo sapiens
tagtaatgagcgtgcagctgc

SEQ ID NO: 45449 - DNA, 20 bp, Homo sapiens
gatgtagttttcagatacct

SEQ ID NO: 45450 - DNA, 17 bp, Homo sapiens
cgtagccaaccatgaat

SEQ ID NO: 45451 - DNA, 22 bp, Homo sapiens
tgtaaaagggctctctctcccc

SEQ ID NO: 45452 - DNA, 16 bp, Homo sapiens
actgttctgagtcctg

SEQ ID NO: 45453 - DNA, 22 bp, Homo sapiens
gaggctggggccaactggaacc

SEQ ID NO: 45454 - DNA, 16 bp, Homo sapiens
aagggcaacagaagta

SEQ ID NO: 45455 - DNA, 21 bp, Homo sapiens
tgccactgtccggaaattcat

SEQ ID NO: 45456 - DNA, 16 bp, Homo sapiens
ggctcctaactttggc

SEQ ID NO: 45457 - DNA, 17 bp, Homo sapiens
tcacccctgagcaggtc

SEQ ID NO: 45458 - DNA, 18 bp, Homo sapiens
gagtttgaggctgcagtg

SEQ ID NO: 45459 - DNA, 16 bp, Homo sapiens
ttctgccccaggtggt

SEQ ID NO: 45460 - DNA, 23 bp, Homo sapiens
aacagagcaagacctcgtctcaa

SEQ ID NO: 45461 - DNA, 18 bp, Homo sapiens
aaaaaggattcaaggccc

SEQ ID NO: 45462 - DNA, 18 bp, Homo sapiens
gcccagcccttatcctcc

SEQ ID NO: 45463 - DNA, 19 bp, Homo sapiens
aattccaggccaggattca

SEQ ID NO: 45464 - DNA, 17 bp, Homo sapiens
gggcacttcctgaggtt

SEQ ID NO: 45465 - DNA, 21 bp, Homo sapiens
ctcctctgatattagagtatg

SEQ ID NO: 45466 - DNA, 22 bp, Homo sapiens
cgagaatggtagtaactagggc

SEQ ID NO: 45467 - DNA, 18 bp, Homo sapiens
cgccttccttgaagaatt

SEQ ID NO: 45468 - DNA, 24 bp, Homo sapiens
caggaattatataggaatggtcac

SEQ ID NO: 45469 - DNA, 23 bp, Homo sapiens
ctctccaggtctctccccctgta

SEQ ID NO: 45470 - DNA, 22 bp, Homo sapiens
gagacagcccactggggaccca

SEQ ID NO: 45471 - DNA, 16 bp, Homo sapiens
ggggtatggctgccca

SEQ ID NO: 45472 - DNA, 20 bp, Homo sapiens
actttggcagagatgtccga

SEQ ID NO: 45473 - DNA, 22 bp, Homo sapiens
ctgaggggcagttggtgtccta

SEQ ID NO: 45474 - DNA, 22 bp, Homo sapiens
ctcaaatagctttctaggtaca

SEQ ID NO: 45475 - DNA, 19 bp, Homo sapiens
aactaaggggtcacatgaa

SEQ ID NO: 45476 - DNA, 23 bp, Homo sapiens
cctaagggtgaaagattggcaga

SEQ ID NO: 45477 - DNA, 16 bp, Homo sapiens
gaagaggctagatcgg

SEQ ID NO: 45478 - DNA, 17 bp, Homo sapiens
tccaaggactctaggac

SEQ ID NO: 45479 - DNA, 24 bp, Homo sapiens
ttctaagactctgtactctgggct

SEQ ID NO: 45480 - DNA, 16 bp, Homo sapiens
ctcaccacagagcatc

SEQ ID NO: 45481 - DNA, 16 bp, Homo sapiens
taggcctcagtttccc

SEQ ID NO: 45482 - DNA, 20 bp, Homo sapiens
cagtggcctcatccctccga

SEQ ID NO: 45483 - DNA, 18 bp, Homo sapiens
gggaatggttgtgaatga

SEQ ID NO: 45484 - DNA, 16 bp, Homo sapiens
cagatgtgcccaggta

SEQ ID NO: 45485 - DNA, 19 bp, Homo sapiens
tccctaggtatatatagca

SEQ ID NO: 45486 - DNA, 17 bp, Homo sapiens
gtggactggaatgggta

SEQ ID NO: 45487 - DNA, 24 bp, Homo sapiens
ctcttacacttacgcccaagtatt

SEQ ID NO: 45488 - DNA, 18 bp, Homo sapiens
agggatgtaagtcagatg

SEQ ID NO: 45489 - DNA, 23 bp, Homo sapiens
atagccgacgtcatgcaagtata

SEQ ID NO: 45490 - DNA, 18 bp, Homo sapiens
gaggctgggaagacactt

SEQ ID NO: 45491 - DNA, 16 bp, Homo sapiens
ctttggtatcctggcc

SEQ ID NO: 45492 - DNA, 18 bp, Homo sapiens
aagggactgtggacacaa

SEQ ID NO: 45493 - DNA, 19 bp, Homo sapiens
gaagctgctgcagtgccgc

SEQ ID NO: 45494 - DNA, 21 bp, Homo sapiens
aagtggtagtggtggaagtgg

SEQ ID NO: 45495 - DNA, 17 bp, Homo sapiens
acctgaggaaaaagaac

SEQ ID NO: 45496 - DNA, 21 bp, Homo sapiens
caaatcctcctctatttcttc

SEQ ID NO: 45497 - DNA, 16 bp, Homo sapiens
tcctcttcacccctgt

SEQ ID NO: 45498 - DNA, 20 bp, Homo sapiens
acattaaagggaacccactt

SEQ ID NO: 45499 - DNA, 20 bp, Homo sapiens
ttttctgattgggacctgag

SEQ ID NO: 45500 - DNA, 19 bp, Homo sapiens
gaaagtttagatcaccttg

SEQ ID NO: 45501 - DNA, 18 bp, Homo sapiens
ttagtgaatttagcaggt

SEQ ID NO: 45502 - DNA, 20 bp, Homo sapiens
cacctgaagtaggacacaga

SEQ ID NO: 45503 - DNA, 16 bp, Homo sapiens
ctgccacccacctgct

SEQ ID NO: 45504 - DNA, 22 bp, Homo sapiens
taagtaggtgaacatggagctc

SEQ ID NO: 45505 - DNA, 16 bp, Homo sapiens
ctgtgggaagatgcca

SEQ ID NO: 45506 - DNA, 21 bp, Homo sapiens
ccccctctaggaccccgggct

SEQ ID NO: 45507 - DNA, 20 bp, Homo sapiens
agatgccttgactctatgtg

SEQ ID NO: 45508 - DNA, 23 bp, Homo sapiens
agttgaacccaggcctggccctg

SEQ ID NO: 45509 - DNA, 24 bp, Homo sapiens
ctgtatgcctgaggtgtttttgga

SEQ ID NO: 45510 - DNA, 16 bp, Homo sapiens
tggttccttttctggc

SEQ ID NO: 45511 - DNA, 17 bp, Homo sapiens
tcaagacactgcttctt

SEQ ID NO: 45512 - DNA, 18 bp, Homo sapiens
cggctgagcaactcctca

SEQ ID NO: 45513 - DNA, 17 bp, Homo sapiens
ctctgcatggtaccaga

SEQ ID NO: 45514 - DNA, 17 bp, Homo sapiens
tgctaccgctgcctcca

SEQ ID NO: 45515 - DNA, 22 bp, Homo sapiens
ttgaaatacagcaagactgcaa

SEQ ID NO: 45516 - DNA, 19 bp, Homo sapiens
caacctcttcaccaggctc

SEQ ID NO: 45517 - DNA, 19 bp, Homo sapiens
gagacgctgcagagcatta

SEQ ID NO: 45518 - DNA, 19 bp, Homo sapiens
agaggaaaaaacaaaaaat

SEQ ID NO: 45519 - DNA, 18 bp, Homo sapiens
caggttccctgctagggc

SEQ ID NO: 45520 - DNA, 17 bp, Homo sapiens
ctaccccattgcagaga

SEQ ID NO: 45521 - DNA, 16 bp, Homo sapiens
cctcagggcccatgaa

SEQ ID NO: 45522 - DNA, 23 bp, Homo sapiens
agcaacagggccagcaggtccaa

SEQ ID NO: 45523 - DNA, 23 bp, Homo sapiens
ttctgtaactggggtagatccat

SEQ ID NO: 45524 - DNA, 16 bp, Homo sapiens
aggtaagaggctgagg

SEQ ID NO: 45525 - DNA, 19 bp, Homo sapiens
caccccttcattgtggcac

SEQ ID NO: 45526 - DNA, 18 bp, Homo sapiens
gtcacaagaacaaaagca

SEQ ID NO: 45527 - DNA, 22 bp, Homo sapiens
atgcagttccaaagccccgcag

SEQ ID NO: 45528 - DNA, 20 bp, Homo sapiens
agaagctcaggtgagcaagg

SEQ ID NO: 45529 - DNA, 22 bp, Homo sapiens
tcccaaagattatagatacaat

SEQ ID NO: 45530 - DNA, 19 bp, Homo sapiens
gtgcttggtctggctctga

SEQ ID NO: 45531 - DNA, 18 bp, Homo sapiens
gtgcttgtgatggggtga

SEQ ID NO: 45532 - DNA, 22 bp, Homo sapiens
aattctacctcaatgagaaact

SEQ ID NO: 45533 - DNA, 17 bp, Homo sapiens
ctggagctgctagttga

SEQ ID NO: 45534 - DNA, 22 bp, Homo sapiens
aaaagagaaagaaaaaaattgt

SEQ ID NO: 45535 - DNA, 16 bp, Homo sapiens
tggaggcctctaggct

SEQ ID NO: 45536 - DNA, 22 bp, Homo sapiens
tggatcttgactagtcaagtca

SEQ ID NO: 45537 - DNA, 17 bp, Homo sapiens
agagcactgttgtactt

SEQ ID NO: 45538 - DNA, 24 bp, Homo sapiens
cttcacctggcagttccctacctc

SEQ ID NO: 45539 - DNA, 16 bp, Homo sapiens
tttgctttgtaagggt

SEQ ID NO: 45540 - DNA, 20 bp, Homo sapiens
ccagttgctgatagagccta

SEQ ID NO: 45541 - DNA, 20 bp, Homo sapiens
accgtaagatggtaaagaca

SEQ ID NO: 45542 - DNA, 21 bp, Homo sapiens
tttcagggctgcaaccaagta

SEQ ID NO: 45543 - DNA, 16 bp, Homo sapiens
cctcaggcctgtgtcc

SEQ ID NO: 45544 - DNA, 22 bp, Homo sapiens
gacacgggcctcagctaccctt

SEQ ID NO: 45545 - DNA, 16 bp, Homo sapiens
ggtctccaggagctga

SEQ ID NO: 45546 - DNA, 22 bp, Homo sapiens
cccaatccaccctaggactgtc

SEQ ID NO: 45547 - DNA, 16 bp, Homo sapiens
ccatcatgacccctgc

SEQ ID NO: 45548 - DNA, 16 bp, Homo sapiens
ctggaccaacacaggc

SEQ ID NO: 45549 - DNA, 24 bp, Homo sapiens
ttaagtggtcctccagactcatgc

SEQ ID NO: 45550 - DNA, 19 bp, Homo sapiens
tgccttgtctgggttccct

SEQ ID NO: 45551 - DNA, 19 bp, Homo sapiens
cagcatttgcctaccgcca

SEQ ID NO: 45552 - DNA, 22 bp, Homo sapiens
tgagcttggagagggctataga

SEQ ID NO: 45553 - DNA, 19 bp, Homo sapiens
gaggaattagatgctccat

SEQ ID NO: 45554 - DNA, 21 bp, Homo sapiens
tggaactgaatgggacaagag

SEQ ID NO: 45555 - DNA, 16 bp, Homo sapiens
gtggagcctctaagga

SEQ ID NO: 45556 - DNA, 23 bp, Homo sapiens
gagatgagtcaggttgctagctg

SEQ ID NO: 45557 - DNA, 18 bp, Homo sapiens
gatggagataggagaaga

SEQ ID NO: 45558 - DNA, 22 bp, Homo sapiens
tcaatccctgggcatcctgcag

SEQ ID NO: 45559 - DNA, 20 bp, Homo sapiens
gaggcctgtgtcctcaagga

SEQ ID NO: 45560 - DNA, 19 bp, Homo sapiens
agaagtaacagcagatcct

SEQ ID NO: 45561 - DNA, 17 bp, Homo sapiens
caaccagggcaaggtca

SEQ ID NO: 45562 - DNA, 16 bp, Homo sapiens
gctgaccgtcttgggg

SEQ ID NO: 45563 - DNA, 24 bp, Homo sapiens
caccaacccagccgcctgtccagt

SEQ ID NO: 45564 - DNA, 24 bp, Homo sapiens
ctgccttctgccggagctgctgtc

SEQ ID NO: 45565 - DNA, 17 bp, Homo sapiens
aaggaggagaccctcag

SEQ ID NO: 45566 - DNA, 16 bp, Homo sapiens
aggttggaacaggggc

SEQ ID NO: 45567 - DNA, 16 bp, Homo sapiens
aacaaggccaggtccc

SEQ ID NO: 45568 - DNA, 17 bp, Homo sapiens
ctgtgtgtgtgtctatg

SEQ ID NO: 45569 - DNA, 23 bp, Homo sapiens
caggccaaccaggcggtgcaggg

SEQ ID NO: 45570 - DNA, 24 bp, Homo sapiens
tttggggtcctgcaggagaggaaa

SEQ ID NO: 45571 - DNA, 17 bp, Homo sapiens
agtcccacagctccctg

SEQ ID NO: 45572 - DNA, 24 bp, Homo sapiens
atggagagaggtgcccttctctgt

SEQ ID NO: 45573 - DNA, 16 bp, Homo sapiens
agcctagagagaggtg

SEQ ID NO: 45574 - DNA, 24 bp, Homo sapiens
ataataatacctcaacctggtctg

SEQ ID NO: 45575 - DNA, 16 bp, Homo sapiens
tatcctgagggcaagc

SEQ ID NO: 45576 - DNA, 23 bp, Homo sapiens
gttgtttatcctcccatctccct

SEQ ID NO: 45577 - DNA, 16 bp, Homo sapiens
cagggctccctgcagc

SEQ ID NO: 45578 - DNA, 21 bp, Homo sapiens
gaatcagggacaatctctggc

SEQ ID NO: 45579 - DNA, 21 bp, Homo sapiens
gggattttatttggaggatct

SEQ ID NO: 45580 - DNA, 16 bp, Homo sapiens
gtgaaaccctgggcca

SEQ ID NO: 45581 - DNA, 17 bp, Homo sapiens
gagggtgggttctttat

SEQ ID NO: 45582 - DNA, 17 bp, Homo sapiens
tccaagggaagaacagg

SEQ ID NO: 45583 - DNA, 24 bp, Homo sapiens
atttgcctgtacaaagatgattcc

SEQ ID NO: 45584 - DNA, 16 bp, Homo sapiens
gaggcgacagcagttg

SEQ ID NO: 45585 - DNA, 20 bp, Homo sapiens
gagtaattatatcgatccca

SEQ ID NO: 45586 - DNA, 18 bp, Homo sapiens
gattgatcctcagtgaca

SEQ ID NO: 45587 - DNA, 22 bp, Homo sapiens
gaactgaccatcctggggagga

SEQ ID NO: 45588 - DNA, 16 bp, Homo sapiens
agccagaaatgactgg

SEQ ID NO: 45589 - DNA, 24 bp, Homo sapiens
ctgagcccttccagtgcatcctga

SEQ ID NO: 45590 - DNA, 21 bp, Homo sapiens
agatccctgaaagcgggtttg

SEQ ID NO: 45591 - DNA, 16 bp, Homo sapiens
tcgacaggccaaggta

SEQ ID NO: 45592 - DNA, 24 bp, Homo sapiens
cagtggcaagggatgcattctcca

SEQ ID NO: 45593 - DNA, 16 bp, Homo sapiens
agaccacctctgtggg

SEQ ID NO: 45594 - DNA, 19 bp, Homo sapiens
gttggggtaaatccactgc

SEQ ID NO: 45595 - DNA, 17 bp, Homo sapiens
ttcacccttcctaagtc

SEQ ID NO: 45596 - DNA, 24 bp, Homo sapiens
accgagggtgccagcaaccgtgtt

SEQ ID NO: 45597 - DNA, 21 bp, Homo sapiens
ggggagctcggcggggtgcag

SEQ ID NO: 45598 - DNA, 21 bp, Homo sapiens
cacaggtccaggcagctggag

SEQ ID NO: 45599 - DNA, 20 bp, Homo sapiens
actggcccgagagctcctta

SEQ ID NO: 45600 - DNA, 16 bp, Homo sapiens
cacagcccagcgaggg

SEQ ID NO: 45601 - DNA, 16 bp, Homo sapiens
accttgtacagatgga

SEQ ID NO: 45602 - DNA, 19 bp, Homo sapiens
tgtcctgtggccctggcga

SEQ ID NO: 45603 - DNA, 24 bp, Homo sapiens
cttctcttctgtcctgattgcaga

SEQ ID NO: 45604 - DNA, 17 bp, Homo sapiens
gacttgagttcgcagct

SEQ ID NO: 45605 - DNA, 16 bp, Homo sapiens
gtccctggacaaagga

SEQ ID NO: 45606 - DNA, 22 bp, Homo sapiens
gctttcaatgccaagacgattc

SEQ ID NO: 45607 - DNA, 18 bp, Homo sapiens
tactttggaactgatgga

SEQ ID NO: 45608 - DNA, 20 bp, Homo sapiens
gtgagttatctcagcagtgt

SEQ ID NO: 45609 - DNA, 23 bp, Homo sapiens
gaaggggcaggctctggggtcca

SEQ ID NO: 45610 - DNA, 18 bp, Homo sapiens
ctgctctgggctcctgga

SEQ ID NO: 45611 - DNA, 21 bp, Homo sapiens
cagcatcctggtacacacact

SEQ ID NO: 45612 - DNA, 18 bp, Homo sapiens
acagacacagacctcaga

SEQ ID NO: 45613 - DNA, 23 bp, Homo sapiens
tggagcagaaatgagtactagga

SEQ ID NO: 45614 - DNA, 18 bp, Homo sapiens
aatgtccagaagcagcag

SEQ ID NO: 45615 - DNA, 24 bp, Homo sapiens
atgacatcccaggcgatcgtgtgg

SEQ ID NO: 45616 - DNA, 19 bp, Homo sapiens
tctcccctgtgaaatacta

SEQ ID NO: 45617 - DNA, 18 bp, Homo sapiens
tgttgtgcaggagctctg

SEQ ID NO: 45618 - DNA, 23 bp, Homo sapiens
ttctgggggttgtttcaaagcaa

SEQ ID NO: 45619 - DNA, 23 bp, Homo sapiens
ctgcaggtcctgggctgagaggc

SEQ ID NO: 45620 - DNA, 22 bp, Homo sapiens
agtgtaaattcggccgctgcct

SEQ ID NO: 45621 - DNA, 21 bp, Homo sapiens
tggaagcaagccctggccggg

SEQ ID NO: 45622 - DNA, 23 bp, Homo sapiens
gagacgagacgctgccagcccat

SEQ ID NO: 45623 - DNA, 23 bp, Homo sapiens
ctgctgccggcacacccctcaga

SEQ ID NO: 45624 - DNA, 17 bp, Homo sapiens
gtgatctccagccttgt

SEQ ID NO: 45625 - DNA, 21 bp, Homo sapiens
gaccctggggcagatatggca

SEQ ID NO: 45626 - DNA, 18 bp, Homo sapiens
ttggcttccatgacacct

SEQ ID NO: 45627 - DNA, 16 bp, Homo sapiens
ttcgttttgcaggaga

SEQ ID NO: 45628 - DNA, 23 bp, Homo sapiens
ctgcatgtgtttggggtgggctc

SEQ ID NO: 45629 - DNA, 24 bp, Homo sapiens
ggacaggagaacgcctctgaccac

SEQ ID NO: 45630 - DNA, 16 bp, Homo sapiens
tgatgggaggcagcag

SEQ ID NO: 45631 - DNA, 24 bp, Homo sapiens
atatgccatctgtgggcagagctc

SEQ ID NO: 45632 - DNA, 23 bp, Homo sapiens
gcaattactgatgtcggcagccg

SEQ ID NO: 45633 - DNA, 21 bp, Homo sapiens
caagctcctctcagcccccca

SEQ ID NO: 45634 - DNA, 22 bp, Homo sapiens
tttgagagctggttcctgttca

SEQ ID NO: 45635 - DNA, 19 bp, Homo sapiens
caccatagtctgtgctctc

SEQ ID NO: 45636 - DNA, 23 bp, Homo sapiens
gaagaagaatttaggttgtcaac

SEQ ID NO: 45637 - DNA, 20 bp, Homo sapiens
cagcagggccgtggggggtt

SEQ ID NO: 45638 - DNA, 16 bp, Homo sapiens
ttaagccaaccgttgg

SEQ ID NO: 45639 - DNA, 22 bp, Homo sapiens
cagcccatcctccgaagtgaat

SEQ ID NO: 45640 - DNA, 18 bp, Homo sapiens
gacaggctttctgaatct

SEQ ID NO: 45641 - DNA, 19 bp, Homo sapiens
tgcgcttcctccacttctc

SEQ ID NO: 45642 - DNA, 19 bp, Homo sapiens
cactgaagcatatttctga

SEQ ID NO: 45643 - DNA, 22 bp, Homo sapiens
gtcccagaccagtaatgccttc

SEQ ID NO: 45644 - DNA, 20 bp, Homo sapiens
ctcagttgccctctgacgta

SEQ ID NO: 45645 - DNA, 21 bp, Homo sapiens
gaaaccatgtgtgaagtagat

SEQ ID NO: 45646 - DNA, 17 bp, Homo sapiens
tcccaaagactcttcag

SEQ ID NO: 45647 - DNA, 20 bp, Homo sapiens
gcttctctgagcagttcaga

SEQ ID NO: 45648 - DNA, 16 bp, Homo sapiens
ggctgggaaaagcatg

SEQ ID NO: 45649 - DNA, 22 bp, Homo sapiens
tctcatatcaaaatccacagaa

SEQ ID NO: 45650 - DNA, 19 bp, Homo sapiens
ctttccttacacttctcca

SEQ ID NO: 45651 - DNA, 24 bp, Homo sapiens
gttctgtctccctcatgctgtaga

SEQ ID NO: 45652 - DNA, 19 bp, Homo sapiens
tgttcatgctctttggatt

SEQ ID NO: 45653 - DNA, 21 bp, Homo sapiens
ctcttcccaggaaatcattct

SEQ ID NO: 45654 - DNA, 22 bp, Homo sapiens
tgggtcttttttgggcagagga

SEQ ID NO: 45655 - DNA, 19 bp, Homo sapiens
cagcagcaccatggcaaga

SEQ ID NO: 45656 - DNA, 18 bp, Homo sapiens
ttgggagcttatttttca

SEQ ID NO: 45657 - DNA, 25 bp, Homo sapiens
agatcttgatttatgttaagttaaa

SEQ ID NO: 45658 - DNA, 17 bp, Homo sapiens
tgctttgtagaagctct

SEQ ID NO: 45659 - DNA, 19 bp, Homo sapiens
tctttgtgagcaaaacagt

SEQ ID NO: 45660 - DNA, 16 bp, Homo sapiens
ggtgtgcactcctgga

SEQ ID NO: 45661 - DNA, 20 bp, Homo sapiens
aatactctcaacagcgtctt

SEQ ID NO: 45662 - DNA, 16 bp, Homo sapiens
catgtttgccggatta

SEQ ID NO: 45663 - DNA, 18 bp, Homo sapiens
tgcttgctttctccagag

SEQ ID NO: 45664 - DNA, 16 bp, Homo sapiens
tgctgaagcttatggc

SEQ ID NO: 45665 - DNA, 18 bp, Homo sapiens
atgatttccagggcccca

SEQ ID NO: 45666 - DNA, 19 bp, Homo sapiens
ttgagtttttacctctaat

SEQ ID NO: 45667 - DNA, 16 bp, Homo sapiens
caagcagcctgccacc

SEQ ID NO: 45668 - DNA, 16 bp, Homo sapiens
tccccatgatacagcc

SEQ ID NO: 45669 - DNA, 18 bp, Homo sapiens
gcaagtttctgagaaagt

SEQ ID NO: 45670 - DNA, 22 bp, Homo sapiens
aaatggaaccttttttacatca

SEQ ID NO: 45671 - DNA, 18 bp, Homo sapiens
agtatgccagttttctgg

SEQ ID NO: 45672 - DNA, 23 bp, Homo sapiens
tctcatcaacaacccggaatatg

SEQ ID NO: 45673 - DNA, 16 bp, Homo sapiens
agccccctatgttagt

SEQ ID NO: 45674 - DNA, 18 bp, Homo sapiens
ctgagaaggatcgaatgc

SEQ ID NO: 45675 - DNA, 16 bp, Homo sapiens
ggttccaattgctctt

SEQ ID NO: 45676 - DNA, 16 bp, Homo sapiens
cagccttgaaaaagca

SEQ ID NO: 45677 - DNA, 22 bp, Homo sapiens
aaatgattccaagcatctcctt

SEQ ID NO: 45678 - DNA, 22 bp, Homo sapiens
ttctgaaaggaagaagatttct

SEQ ID NO: 45679 - DNA, 23 bp, Homo sapiens
atcttttataaagcattcgatcc

SEQ ID NO: 45680 - DNA, 23 bp, Homo sapiens
tgaactttttttaatcttctttt

SEQ ID NO: 45681 - DNA, 16 bp, Homo sapiens
aagatgcagcattgct

SEQ ID NO: 45682 - DNA, 23 bp, Homo sapiens
attagccactgctgtgaccatga

SEQ ID NO: 45683 - DNA, 16 bp, Homo sapiens
cagctgacatggggag

SEQ ID NO: 45684 - DNA, 19 bp, Homo sapiens
caccacacctggccgggat

SEQ ID NO: 45685 - DNA, 18 bp, Homo sapiens
ggacgtgaacctcaggaa

SEQ ID NO: 45686 - DNA, 23 bp, Homo sapiens
aaaaacgtttggacactgctgtc

SEQ ID NO: 45687 - DNA, 21 bp, Homo sapiens
cacttattaccctgacagatg

SEQ ID NO: 45688 - DNA, 24 bp, Homo sapiens
aaaaacgacgcaggatgacaggaa

SEQ ID NO: 45689 - DNA, 20 bp, Homo sapiens
tttcttatttcttccataga

SEQ ID NO: 45690 - DNA, 22 bp, Homo sapiens
gcctcaaagaactctggctgga

SEQ ID NO: 45691 - DNA, 21 bp, Homo sapiens
ctttttagcatgaaggttttt

SEQ ID NO: 45692 - DNA, 19 bp, Homo sapiens
ccaccagggggtcaacatc

SEQ ID NO: 45693 - DNA, 20 bp, Homo sapiens
gatggtgttagagtcattct

SEQ ID NO: 45694 - DNA, 17 bp, Homo sapiens
gccactcgctcgggagc

SEQ ID NO: 45695 - DNA, 17 bp, Homo sapiens
aaactcaccaatttgct

SEQ ID NO: 45696 - DNA, 19 bp, Homo sapiens
tagcgtctgaactcagaga

SEQ ID NO: 45697 - DNA, 18 bp, Homo sapiens
aactgaacatccatttcc

SEQ ID NO: 45698 - DNA, 17 bp, Homo sapiens
cctgtttgcagcgtgag

SEQ ID NO: 45699 - DNA, 20 bp, Homo sapiens
tttgaaacctgagaagaagg

SEQ ID NO: 45700 - DNA, 17 bp, Homo sapiens
ggttgggggaatctcaa

SEQ ID NO: 45701 - DNA, 22 bp, Homo sapiens
ccattaagatgattctctctga

SEQ ID NO: 45702 - DNA, 19 bp, Homo sapiens
tagtaaatgtgacatggca

SEQ ID NO: 45703 - DNA, 20 bp, Homo sapiens
gtatgcacctatagattact

SEQ ID NO: 45704 - DNA, 25 bp, Homo sapiens
aagagataaacaaagaaaagttaaa

SEQ ID NO: 45705 - DNA, 16 bp, Homo sapiens
actttcagcactcaga

SEQ ID NO: 45706 - DNA, 17 bp, Homo sapiens
tttgctgatggcacatt

SEQ ID NO: 45707 - DNA, 21 bp, Homo sapiens
ggcacttgcatttacttttaa

SEQ ID NO: 45708 - DNA, 16 bp, Homo sapiens
agcaaaccaggatagt

SEQ ID NO: 45709 - DNA, 16 bp, Homo sapiens
catagagaccaccccc

SEQ ID NO: 45710 - DNA, 20 bp, Homo sapiens
agagcaacttctttatcaaa

SEQ ID NO: 45711 - DNA, 22 bp, Homo sapiens
atttctcttttacactttgaat

SEQ ID NO: 45712 - DNA, 22 bp, Homo sapiens
aactttttactcagcaagataa

SEQ ID NO: 45713 - DNA, 18 bp, Homo sapiens
ttaacaaagaaccacaga

SEQ ID NO: 45714 - DNA, 17 bp, Homo sapiens
gaactggattccacccc

SEQ ID NO: 45715 - DNA, 24 bp, Homo sapiens
attaagttttcctttttgtagatg

SEQ ID NO: 45716 - DNA, 16 bp, Homo sapiens
ttcaaagaagtgcaga

SEQ ID NO: 45717 - DNA, 25 bp, Homo sapiens
gagattttcctaaatataatgttta

SEQ ID NO: 45718 - DNA, 17 bp, Homo sapiens
ttgtccagaattctgtg

SEQ ID NO: 45719 - DNA, 18 bp, Homo sapiens
tggcgagaaagcaaatgt

SEQ ID NO: 45720 - DNA, 20 bp, Homo sapiens
gaattttttggctttcatct

SEQ ID NO: 45721 - DNA, 18 bp, Homo sapiens
aggaagccatctttgtaa

SEQ ID NO: 45722 - DNA, 17 bp, Homo sapiens
gattccccacaattggt

SEQ ID NO: 45723 - DNA, 20 bp, Homo sapiens
aaactaggagaaaggttcat

SEQ ID NO: 45724 - DNA, 17 bp, Homo sapiens
atgcctttactgaccaa

SEQ ID NO: 45725 - DNA, 17 bp, Homo sapiens
tgagaggacacgttttt

SEQ ID NO: 45726 - DNA, 17 bp, Homo sapiens
aacaagaagcattcacg

SEQ ID NO: 45727 - DNA, 17 bp, Homo sapiens
ttgccaacagttgacca

SEQ ID NO: 45728 - DNA, 25 bp, Homo sapiens
tttgaattacttacctaaagatctt

SEQ ID NO: 45729 - DNA, 18 bp, Homo sapiens
ataaatcggagactagga

SEQ ID NO: 45730 - DNA, 17 bp, Homo sapiens
ccaggagttcctaagga

SEQ ID NO: 45731 - DNA, 20 bp, Homo sapiens
cggcacttcagtcaatacca

SEQ ID NO: 45732 - DNA, 16 bp, Homo sapiens
gtatgggatcaggctt

SEQ ID NO: 45733 - DNA, 18 bp, Homo sapiens
ggtagagtccctgaagtc

SEQ ID NO: 45734 - DNA, 20 bp, Homo sapiens
tccaagatggctcaagattc

SEQ ID NO: 45735 - DNA, 23 bp, Homo sapiens
tctctttcaaggcttcatacatc

SEQ ID NO: 45736 - DNA, 24 bp, Homo sapiens
gaccatttccttcagtgctggaca

SEQ ID NO: 45737 - DNA, 20 bp, Homo sapiens
tgctgggtttccaaagtgga

SEQ ID NO: 45738 - DNA, 20 bp, Homo sapiens
aaagagccttttagaaatgc

SEQ ID NO: 45739 - DNA, 21 bp, Homo sapiens
tgataatcacaagaaagatct

SEQ ID NO: 45740 - DNA, 23 bp, Homo sapiens
tctttgttctattgttggttatt

SEQ ID NO: 45741 - DNA, 16 bp, Homo sapiens
tcagcgttaaaagggc

SEQ ID NO: 45742 - DNA, 23 bp, Homo sapiens
aatatcttttttgttcacagaaa

SEQ ID NO: 45743 - DNA, 24 bp, Homo sapiens
gaataaaattacctttgttgataa

SEQ ID NO: 45744 - DNA, 19 bp, Homo sapiens
ctgagatactttcaaaaga

SEQ ID NO: 45745 - DNA, 18 bp, Homo sapiens
gagaagtgtgatcagaaa

SEQ ID NO: 45746 - DNA, 17 bp, Homo sapiens
acgtggttttggccctt

SEQ ID NO: 45747 - DNA, 16 bp, Homo sapiens
tcgcaaagatgcaaga

SEQ ID NO: 45748 - DNA, 18 bp, Homo sapiens
actactacaagcactatt

SEQ ID NO: 45749 - DNA, 25 bp, Homo sapiens
atcataaaaatgtagaattcttagc

SEQ ID NO: 45750 - DNA, 16 bp, Homo sapiens
aatccaattcggcttc

SEQ ID NO: 45751 - DNA, 26 bp, Homo sapiens
taatgctttttaatgattataagcta

SEQ ID NO: 45752 - DNA, 24 bp, Homo sapiens
gaatgaactaaatgaacattataa

SEQ ID NO: 45753 - DNA, 18 bp, Homo sapiens
tgcatgctggactttgaa

SEQ ID NO: 45754 - DNA, 16 bp, Homo sapiens
accacacaaggtagct

SEQ ID NO: 45755 - DNA, 24 bp, Homo sapiens
gagctggtttgtcaaaatccaaag

SEQ ID NO: 45756 - DNA, 20 bp, Homo sapiens
tgcataaagcacttggtaaa

SEQ ID NO: 45757 - DNA, 20 bp, Homo sapiens
agagaccatatgtgctattt

SEQ ID NO: 45758 - DNA, 18 bp, Homo sapiens
acactggtacattttggt

SEQ ID NO: 45759 - DNA, 18 bp, Homo sapiens
tgggtaactactctgcat

SEQ ID NO: 45760 - DNA, 22 bp, Homo sapiens
tttttgacttgttcaaagttct

SEQ ID NO: 45761 - DNA, 20 bp, Homo sapiens
gactgttgtgttggcttact

SEQ ID NO: 45762 - DNA, 16 bp, Homo sapiens
aagtctcttggaacac

SEQ ID NO: 45763 - DNA, 25 bp, Homo sapiens
aaatttattatgttaacatccaacc

SEQ ID NO: 45764 - DNA, 17 bp, Homo sapiens
tccattatctgaaagca

SEQ ID NO: 45765 - DNA, 24 bp, Homo sapiens
gatactggaattgattaataagaa

SEQ ID NO: 45766 - DNA, 25 bp, Homo sapiens
aatttttaatgttttacattttaaa

SEQ ID NO: 45767 - DNA, 17 bp, Homo sapiens
gcaagtttttctgtgtt

SEQ ID NO: 45768 - DNA, 23 bp, Homo sapiens
agttgtattgttatttatagctg

SEQ ID NO: 45769 - DNA, 21 bp, Homo sapiens
cctatggaagaatgaggtaag

SEQ ID NO: 45770 - DNA, 24 bp, Homo sapiens
taccttctgcccatcaccctcatt

SEQ ID NO: 45771 - DNA, 19 bp, Homo sapiens
tcaatctttaggcactgaa

SEQ ID NO: 45772 - DNA, 23 bp, Homo sapiens
aaatatggctcaagttcaatata

SEQ ID NO: 45773 - DNA, 17 bp, Homo sapiens
gggggatttcagttcca

SEQ ID NO: 45774 - DNA, 20 bp, Homo sapiens
attcaatgtttaagtgttgt

SEQ ID NO: 45775 - DNA, 19 bp, Homo sapiens
actcctctcatgaaagact

SEQ ID NO: 45776 - DNA, 16 bp, Homo sapiens
agctgagaatatggga

SEQ ID NO: 45777 - DNA, 21 bp, Homo sapiens
gaacaaatttcctgtcaatgt

SEQ ID NO: 45778 - DNA, 20 bp, Homo sapiens
gacgggatagactcactctc

SEQ ID NO: 45779 - DNA, 19 bp, Homo sapiens
ctctgaacttacctgtcaa

SEQ ID NO: 45780 - DNA, 19 bp, Homo sapiens
ccactcatgcgatccactt

SEQ ID NO: 45781 - DNA, 20 bp, Homo sapiens
gtaaaaacactgcaagaatt

SEQ ID NO: 45782 - DNA, 20 bp, Homo sapiens
gccacttgagacttaaagaa

SEQ ID NO: 45783 - DNA, 25 bp, Homo sapiens
attaagaataatgttactgtaaata

SEQ ID NO: 45784 - DNA, 21 bp, Homo sapiens
agtttggtcgttatccaggag

SEQ ID NO: 45785 - DNA, 18 bp, Homo sapiens
tggaagttactaagaagg

SEQ ID NO: 45786 - DNA, 20 bp, Homo sapiens
gaagtttctaacctagaatt

SEQ ID NO: 45787 - DNA, 21 bp, Homo sapiens
gaaggcaagaataaacatact

SEQ ID NO: 45788 - DNA, 22 bp, Homo sapiens
ttacagtctactttgaatagca

SEQ ID NO: 45789 - DNA, 20 bp, Homo sapiens
tcacatgattccagatagag

SEQ ID NO: 45790 - DNA, 20 bp, Homo sapiens
gcaggtttgttacataggta

SEQ ID NO: 45791 - DNA, 21 bp, Homo sapiens
gcattggatcctttggaatga

SEQ ID NO: 45792 - DNA, 20 bp, Homo sapiens
ctaggttttaagctctgcac

SEQ ID NO: 45793 - DNA, 21 bp, Homo sapiens
gctcgagcttctttataccta

SEQ ID NO: 45794 - DNA, 21 bp, Homo sapiens
tcccccacccctcattaataa

SEQ ID NO: 45795 - DNA, 21 bp, Homo sapiens
aataatcccaacattttcttt

SEQ ID NO: 45796 - DNA, 21 bp, Homo sapiens
tgttgatggactggaagttct

SEQ ID NO: 45797 - DNA, 20 bp, Homo sapiens
gtttacttttctattttcca

SEQ ID NO: 45798 - DNA, 18 bp, Homo sapiens
aggtttattgagtgtagg

SEQ ID NO: 45799 - DNA, 20 bp, Homo sapiens
tctacttctaaaaaaaactg

SEQ ID NO: 45800 - DNA, 21 bp, Homo sapiens
caagtgatccacctgccttgg

SEQ ID NO: 45801 - DNA, 22 bp, Homo sapiens
cagtaattcctttgcactcttc

SEQ ID NO: 45802 - DNA, 20 bp, Homo sapiens
ccagcctggggttaattttc

SEQ ID NO: 45803 - DNA, 16 bp, Homo sapiens
ctgctcagccagaatg

SEQ ID NO: 45804 - DNA, 18 bp, Homo sapiens
tggctgtaatagctgact

SEQ ID NO: 45805 - DNA, 19 bp, Homo sapiens
agccagaggacaaaatgac

SEQ ID NO: 45806 - DNA, 22 bp, Homo sapiens
ctgtggaagctgtggcctttcg

SEQ ID NO: 45807 - DNA, 20 bp, Homo sapiens
tgtctatacacatgacactt

SEQ ID NO: 45808 - DNA, 22 bp, Homo sapiens
acattaaacaaattgggagtac

SEQ ID NO: 45809 - DNA, 25 bp, Homo sapiens
aaattaatttctttaaggaaatcaa

SEQ ID NO: 45810 - DNA, 22 bp, Homo sapiens
gccaaggcaggaggatcacttg

SEQ ID NO: 45811 - DNA, 19 bp, Homo sapiens
aacatctttgctataagga

SEQ ID NO: 45812 - DNA, 26 bp, Homo sapiens
tctgtctctttaaaaaaaaagaaaaa

SEQ ID NO: 45813 - DNA, 17 bp, Homo sapiens
gtcctgcatcctgaaat

SEQ ID NO: 45814 - DNA, 22 bp, Homo sapiens
actaattttttccaaacctaaa

SEQ ID NO: 45815 - DNA, 20 bp, Homo sapiens
ttatgaaatgaagccgactt

SEQ ID NO: 45816 - DNA, 18 bp, Homo sapiens
acaatgcaacattattcc

SEQ ID NO: 45817 - DNA, 22 bp, Homo sapiens
tgtagcattcttaaccatatct

SEQ ID NO: 45818 - DNA, 27 bp, Homo sapiens
ttacaaatctgatattattttagcatt

SEQ ID NO: 45819 - DNA, 16 bp, Homo sapiens
gtaacaggcttctgct

SEQ ID NO: 45820 - DNA, 21 bp, Homo sapiens
atttcagaggtgccttaactt

SEQ ID NO: 45821 - DNA, 22 bp, Homo sapiens
aaaacatcaagttttacatcat

SEQ ID NO: 45822 - DNA, 20 bp, Homo sapiens
aacttaagaatctgtttctt

SEQ ID NO: 45823 - DNA, 16 bp, Homo sapiens
tcctgttttggcctga

SEQ ID NO: 45824 - DNA, 17 bp, Homo sapiens
ttgtttcagtgtgtgaa

SEQ ID NO: 45825 - DNA, 20 bp, Homo sapiens
tcctgaaattatttctgtag

SEQ ID NO: 45826 - DNA, 18 bp, Homo sapiens
ccagggaaaagatgatgt

SEQ ID NO: 45827 - DNA, 16 bp, Homo sapiens
tggagtcttgaaagag

SEQ ID NO: 45828 - DNA, 19 bp, Homo sapiens
tcacatgtggaatggaggc

SEQ ID NO: 45829 - DNA, 16 bp, Homo sapiens
tcttacttcacaggca

SEQ ID NO: 45830 - DNA, 22 bp, Homo sapiens
ggaaagggattctggacagtca

SEQ ID NO: 45831 - DNA, 20 bp, Homo sapiens
gtacatggaccttcatgtct

SEQ ID NO: 45832 - DNA, 21 bp, Homo sapiens
atgggagagcactgtccttca

SEQ ID NO: 45833 - DNA, 18 bp, Homo sapiens
aggaatcttccaggtctt

SEQ ID NO: 45834 - DNA, 24 bp, Homo sapiens
accttcttccactgttgaagccta

SEQ ID NO: 45835 - DNA, 16 bp, Homo sapiens
gccagattccattggg

SEQ ID NO: 45836 - DNA, 17 bp, Homo sapiens
tgtgctggactgagttt

SEQ ID NO: 45837 - DNA, 21 bp, Homo sapiens
agagaaattctcccatttcaa

SEQ ID NO: 45838 - DNA, 17 bp, Homo sapiens
ttgaagccaactatggt

SEQ ID NO: 45839 - DNA, 20 bp, Homo sapiens
cccacttatgtttgacaaat

SEQ ID NO: 45840 - DNA, 17 bp, Homo sapiens
tcctcccaatgtgcaac

SEQ ID NO: 45841 - DNA, 20 bp, Homo sapiens
tacatcagatgactctttct

SEQ ID NO: 45842 - DNA, 21 bp, Homo sapiens
agtgaaattagatataagcca

SEQ ID NO: 45843 - DNA, 18 bp, Homo sapiens
tgatgtgaagcagcttaa

SEQ ID NO: 45844 - DNA, 24 bp, Homo sapiens
tttaattatctatgctgatgaatg

SEQ ID NO: 45845 - DNA, 21 bp, Homo sapiens
caaaaggtattgccattgaat

SEQ ID NO: 45846 - DNA, 19 bp, Homo sapiens
actcatttctactttctgc

SEQ ID NO: 45847 - DNA, 24 bp, Homo sapiens
tgcacccaaaagaagcagggattt

SEQ ID NO: 45848 - DNA, 25 bp, Homo sapiens
taaaataaatagaattgcttgttgt

SEQ ID NO: 45849 - DNA, 17 bp, Homo sapiens
tcaacagaagaacccag

SEQ ID NO: 45850 - DNA, 16 bp, Homo sapiens
actctttccagttctc

SEQ ID NO: 45851 - DNA, 21 bp, Homo sapiens
atgtctgtcacaatttccctt

SEQ ID NO: 45852 - DNA, 24 bp, Homo sapiens
ggacaacaggaatgagtggaaatg

SEQ ID NO: 45853 - DNA, 17 bp, Homo sapiens
ctccacctgcctagttt

SEQ ID NO: 45854 - DNA, 21 bp, Homo sapiens
gtctagcaggctcagcttcca

SEQ ID NO: 45855 - DNA, 16 bp, Homo sapiens
ggttgcaggggtagca

SEQ ID NO: 45856 - DNA, 23 bp, Homo sapiens
aactgatcatactaaagatgcgg

SEQ ID NO: 45857 - DNA, 17 bp, Homo sapiens
gcaaatagtatcatggc

SEQ ID NO: 45858 - DNA, 22 bp, Homo sapiens
gtgaaaaattgtatccaatctc

SEQ ID NO: 45859 - DNA, 22 bp, Homo sapiens
tagataatctttgctgatacag

SEQ ID NO: 45860 - DNA, 25 bp, Homo sapiens
ttctgcttagtattgtaatattaaa

SEQ ID NO: 45861 - DNA, 16 bp, Homo sapiens
tgacaggctgttttct

SEQ ID NO: 45862 - DNA, 21 bp, Homo sapiens
cgaagtcttctgttgctgata

SEQ ID NO: 45863 - DNA, 22 bp, Homo sapiens
agaaactggcaaattaaaatca

SEQ ID NO: 45864 - DNA, 19 bp, Homo sapiens
tggactcttacttaccagc

SEQ ID NO: 45865 - DNA, 19 bp, Homo sapiens
aatttaactatggcatctt

SEQ ID NO: 45866 - DNA, 18 bp, Homo sapiens
aagggaattacagaaggc

SEQ ID NO: 45867 - DNA, 22 bp, Homo sapiens
tgaatacaataacccatgaaaa

SEQ ID NO: 45868 - DNA, 22 bp, Homo sapiens
ctctctagatgaagtataccat

SEQ ID NO: 45869 - DNA, 18 bp, Homo sapiens
accggggtagctgaattc

SEQ ID NO: 45870 - DNA, 19 bp, Homo sapiens
tgattctgtcaatggagct

SEQ ID NO: 45871 - DNA, 20 bp, Homo sapiens
catcaactgcagcgtatctt

SEQ ID NO: 45872 - DNA, 16 bp, Homo sapiens
ggagaaaggacctgca

SEQ ID NO: 45873 - DNA, 21 bp, Homo sapiens
tcaaagagaaagagtaccttt

SEQ ID NO: 45874 - DNA, 22 bp, Homo sapiens
aatgtgtgcagacatgaccctt

SEQ ID NO: 45875 - DNA, 16 bp, Homo sapiens
ctggaggacctggccc

SEQ ID NO: 45876 - DNA, 22 bp, Homo sapiens
atggtagcttaatcacctactg

SEQ ID NO: 45877 - DNA, 18 bp, Homo sapiens
gatcatccaagaatcgcc

SEQ ID NO: 45878 - DNA, 17 bp, Homo sapiens
catcatcaggactgaga

SEQ ID NO: 45879 - DNA, 17 bp, Homo sapiens
atgcctgtagtcctagc

SEQ ID NO: 45880 - DNA, 16 bp, Homo sapiens
cagtgcctccaggagg

SEQ ID NO: 45881 - DNA, 17 bp, Homo sapiens
tggagatctgtgaagtt

SEQ ID NO: 45882 - DNA, 19 bp, Homo sapiens
tcttccgctccgcttttcg

SEQ ID NO: 45883 - DNA, 17 bp, Homo sapiens
tatgctgggaaagtgtc

SEQ ID NO: 45884 - DNA, 16 bp, Homo sapiens
gtcgtgagtggcagtg

SEQ ID NO: 45885 - DNA, 20 bp, Homo sapiens
tcccactacaccgtcccagt

SEQ ID NO: 45886 - DNA, 20 bp, Homo sapiens
tcttttctagatgatgaggt

SEQ ID NO: 45887 - DNA, 23 bp, Homo sapiens
cccaggatatagtcaatgtgctg

SEQ ID NO: 45888 - DNA, 16 bp, Homo sapiens
accgccctgaaagtaa

SEQ ID NO: 45889 - DNA, 20 bp, Homo sapiens
agtatttgccactcatctca

SEQ ID NO: 45890 - DNA, 19 bp, Homo sapiens
tttgcaatcattttcatcc

SEQ ID NO: 45891 - DNA, 16 bp, Homo sapiens
cttgcccgtggggtac

SEQ ID NO: 45892 - DNA, 24 bp, Homo sapiens
cacaaacacagacacagagggccc

SEQ ID NO: 45893 - DNA, 20 bp, Homo sapiens
aaacgtttattggtagttcg

SEQ ID NO: 45894 - DNA, 22 bp, Homo sapiens
acagtaatcagattgcaggcgg

SEQ ID NO: 45895 - DNA, 21 bp, Homo sapiens
tccagcccagaaaaattatat

SEQ ID NO: 45896 - DNA, 16 bp, Homo sapiens
actgcccccgcacgtc

SEQ ID NO: 45897 - DNA, 20 bp, Homo sapiens
ctttagttttttctctttgc

SEQ ID NO: 45898 - DNA, 22 bp, Homo sapiens
ctgggcttgctccttgagctct

SEQ ID NO: 45899 - DNA, 19 bp, Homo sapiens
gaaaacctagtaacctctt

SEQ ID NO: 45900 - DNA, 17 bp, Homo sapiens
agagtccagaaatgcca

SEQ ID NO: 45901 - DNA, 27 bp, Homo sapiens
aaaaattctagtgagaattaaatatta

SEQ ID NO: 45902 - DNA, 22 bp, Homo sapiens
ggtatacaaatataacagactg

SEQ ID NO: 45903 - DNA, 25 bp, Homo sapiens
atattattaagaaaacacagtaaat

SEQ ID NO: 45904 - DNA, 18 bp, Homo sapiens
tcttaactctccagtgac

SEQ ID NO: 45905 - DNA, 22 bp, Homo sapiens
caaatgaggaattctatctaaa

SEQ ID NO: 45906 - DNA, 18 bp, Homo sapiens
gcctgtttttcaggaaaa

SEQ ID NO: 45907 - DNA, 21 bp, Homo sapiens
ttggtttctataatatccagt

SEQ ID NO: 45908 - DNA, 19 bp, Homo sapiens
attttaaaaacaccgcttt

SEQ ID NO: 45909 - DNA, 16 bp, Homo sapiens
atgaagaagctgtgct

SEQ ID NO: 45910 - DNA, 20 bp, Homo sapiens
tgaacctcagaagacaagag

SEQ ID NO: 45911 - DNA, 18 bp, Homo sapiens
tgtgatgacatctgacat

SEQ ID NO: 45912 - DNA, 21 bp, Homo sapiens
cacccaacatccagaggattt

SEQ ID NO: 45913 - DNA, 17 bp, Homo sapiens
ctaggagttctcccctg

SEQ ID NO: 45914 - DNA, 18 bp, Homo sapiens
tccttctaacagcaagag

SEQ ID NO: 45915 - DNA, 22 bp, Homo sapiens
ttagatttccaagtcaagccag

SEQ ID NO: 45916 - DNA, 16 bp, Homo sapiens
gagcagaggaagcaca

SEQ ID NO: 45917 - DNA, 19 bp, Homo sapiens
aacaattatgcacagttcc

SEQ ID NO: 45918 - DNA, 22 bp, Homo sapiens
cttgagctaaagtatctgttta

SEQ ID NO: 45919 - DNA, 17 bp, Homo sapiens
tgactggggggtttaga

SEQ ID NO: 45920 - DNA, 21 bp, Homo sapiens
cctcacagaaattcagaaagt

SEQ ID NO: 45921 - DNA, 20 bp, Homo sapiens
caaaaccatggccgcatcaa

SEQ ID NO: 45922 - DNA, 17 bp, Homo sapiens
tttagattctagctgcc

SEQ ID NO: 45923 - DNA, 23 bp, Homo sapiens
gactcttgctgtagtagcttatc

SEQ ID NO: 45924 - DNA, 17 bp, Homo sapiens
cccagcttaactttacc

SEQ ID NO: 45925 - DNA, 23 bp, Homo sapiens
caagactgtctcagagtattctg

SEQ ID NO: 45926 - DNA, 16 bp, Homo sapiens
gaaagctctctcagcc

SEQ ID NO: 45927 - DNA, 22 bp, Homo sapiens
ttttaaaacctttgtagatgta

SEQ ID NO: 45928 - DNA, 16 bp, Homo sapiens
gatgcaggagcacatg

SEQ ID NO: 45929 - DNA, 16 bp, Homo sapiens
caccagctggtctttg

SEQ ID NO: 45930 - DNA, 20 bp, Homo sapiens
ctcagtcctaaatctcctct

SEQ ID NO: 45931 - DNA, 18 bp, Homo sapiens
ttccagttgccacatgtc

SEQ ID NO: 45932 - DNA, 18 bp, Homo sapiens
aagtataggaactaaggc

SEQ ID NO: 45933 - DNA, 19 bp, Homo sapiens
tgagccccgctggctcata

SEQ ID NO: 45934 - DNA, 20 bp, Homo sapiens
aaatgactgtactaactgat

SEQ ID NO: 45935 - DNA, 23 bp, Homo sapiens
aatcagagaacaggtcaggacca

SEQ ID NO: 45936 - DNA, 16 bp, Homo sapiens
taacgaagctctgaag

SEQ ID NO: 45937 - DNA, 17 bp, Homo sapiens
ttttgaagccaaggatg

SEQ ID NO: 45938 - DNA, 16 bp, Homo sapiens
tcctgcaggacctgag

SEQ ID NO: 45939 - DNA, 21 bp, Homo sapiens
taaagcaaaaagcaaaaccag

SEQ ID NO: 45940 - DNA, 20 bp, Homo sapiens
gtgaccattggtataaatga

SEQ ID NO: 45941 - DNA, 21 bp, Homo sapiens
gcttggtgaatataacttcag

SEQ ID NO: 45942 - DNA, 19 bp, Homo sapiens
tcttcagattctctgatta

SEQ ID NO: 45943 - DNA, 16 bp, Homo sapiens
ctgggaagtactcagg

SEQ ID NO: 45944 - DNA, 21 bp, Homo sapiens
acgatatgaaaaagccattgg

SEQ ID NO: 45945 - DNA, 19 bp, Homo sapiens
agagttttcaggagtggga

SEQ ID NO: 45946 - DNA, 19 bp, Homo sapiens
atacacttaagaaaatgga

SEQ ID NO: 45947 - DNA, 17 bp, Homo sapiens
accttgcctagttccaa

SEQ ID NO: 45948 - DNA, 24 bp, Homo sapiens
tatcacaagtaataaagttctcat

SEQ ID NO: 45949 - DNA, 16 bp, Homo sapiens
tgctgaggtggccaat

SEQ ID NO: 45950 - DNA, 18 bp, Homo sapiens
agctttgggtttattgct

SEQ ID NO: 45951 - DNA, 18 bp, Homo sapiens
cgctgataattagtttcc

SEQ ID NO: 45952 - DNA, 25 bp, Homo sapiens
aactgtagtttgattttatatatta

SEQ ID NO: 45953 - DNA, 24 bp, Homo sapiens
gggcttaggaatgtgggccctaga

SEQ ID NO: 45954 - DNA, 16 bp, Homo sapiens
ttctcttggcacctat

SEQ ID NO: 45955 - DNA, 21 bp, Homo sapiens
gatagcagaaaagctactgca

SEQ ID NO: 45956 - DNA, 16 bp, Homo sapiens
ctgaagaggccttgaa

SEQ ID NO: 45957 - DNA, 21 bp, Homo sapiens
aaacaagaaccaaatggcata

SEQ ID NO: 45958 - DNA, 19 bp, Homo sapiens
tgtgttctgttttgttttc

SEQ ID NO: 45959 - DNA, 21 bp, Homo sapiens
accatgaggaccaaatcaaag

SEQ ID NO: 45960 - DNA, 24 bp, Homo sapiens
gaaaaatttattgtctttttggtt

SEQ ID NO: 45961 - DNA, 20 bp, Homo sapiens
taccagatgcagcaaatatt

SEQ ID NO: 45962 - DNA, 22 bp, Homo sapiens
gccctctaaagcatatataaaa

SEQ ID NO: 45963 - DNA, 17 bp, Homo sapiens
aaaaagtacacgagctt

SEQ ID NO: 45964 - DNA, 20 bp, Homo sapiens
gacaagggtcttaaaatggc

SEQ ID NO: 45965 - DNA, 20 bp, Homo sapiens
agatactgcctatccatact

SEQ ID NO: 45966 - DNA, 20 bp, Homo sapiens
catggtgattgtcacctgca

SEQ ID NO: 45967 - DNA, 16 bp, Homo sapiens
cttgtccagcctactt

SEQ ID NO: 45968 - DNA, 22 bp, Homo sapiens
tgtgagcggatctctaccttga

SEQ ID NO: 45969 - DNA, 19 bp, Homo sapiens
tcctcataagtatgtatgc

SEQ ID NO: 45970 - DNA, 20 bp, Homo sapiens
tcttctttacatgagatgta

SEQ ID NO: 45971 - DNA, 19 bp, Homo sapiens
acgggaataaaatagacct

SEQ ID NO: 45972 - DNA, 22 bp, Homo sapiens
aagaacaccagaatgagaaagg

SEQ ID NO: 45973 - DNA, 17 bp, Homo sapiens
acgaagaccatgtaccc

SEQ ID NO: 45974 - DNA, 20 bp, Homo sapiens
caaaggatgccacctggtga

SEQ ID NO: 45975 - DNA, 17 bp, Homo sapiens
gctgggctacatgttct

SEQ ID NO: 45976 - DNA, 21 bp, Homo sapiens
gctctcatagcatcgcagaca

SEQ ID NO: 45977 - DNA, 23 bp, Homo sapiens
cttttccaaaagtcatttttatt

SEQ ID NO: 45978 - DNA, 16 bp, Homo sapiens
aactggtgcagggtac

SEQ ID NO: 45979 - DNA, 18 bp, Homo sapiens
tgtataagtcttttgtgg

SEQ ID NO: 45980 - DNA, 21 bp, Homo sapiens
acagatagattctgtgaatca

SEQ ID NO: 45981 - DNA, 22 bp, Homo sapiens
tagcaatttttaaaaatgaaca

SEQ ID NO: 45982 - DNA, 19 bp, Homo sapiens
tgttttgtcctttttttgg

SEQ ID NO: 45983 - DNA, 18 bp, Homo sapiens
aacaagaagagagaaaac

SEQ ID NO: 45984 - DNA, 18 bp, Homo sapiens
ctttctaagctgtcattt

SEQ ID NO: 45985 - DNA, 25 bp, Homo sapiens
tcaattctgtaaaaaacaagttaat

SEQ ID NO: 45986 - DNA, 18 bp, Homo sapiens
tgcatgagaaagctgaga

SEQ ID NO: 45987 - DNA, 17 bp, Homo sapiens
caagaaacacctaccaa

SEQ ID NO: 45988 - DNA, 26 bp, Homo sapiens
gaatatcttttctattctttctctgt

SEQ ID NO: 45989 - DNA, 23 bp, Homo sapiens
attagtttaagtacaaagtaagc

SEQ ID NO: 45990 - DNA, 21 bp, Homo sapiens
tgattataactggtttgtatc

SEQ ID NO: 45991 - DNA, 23 bp, Homo sapiens
atgatcataaatcagattgagat

SEQ ID NO: 45992 - DNA, 22 bp, Homo sapiens
ttctgtaatttcagagtagaaa

SEQ ID NO: 45993 - DNA, 26 bp, Homo sapiens
agtaaaaaagttaaaaaaaaaaaaaa

SEQ ID NO: 45994 - DNA, 16 bp, Homo sapiens
ttgttcatcatcgagc

SEQ ID NO: 45995 - DNA, 20 bp, Homo sapiens
agggcttttcataattttaa

SEQ ID NO: 45996 - DNA, 23 bp, Homo sapiens
aaatgttttctacttaattaaaa

SEQ ID NO: 45997 - DNA, 19 bp, Homo sapiens
atcacaagctaactagtcg

SEQ ID NO: 45998 - DNA, 19 bp, Homo sapiens
gttgtggtaattctctgtg

SEQ ID NO: 45999 - DNA, 21 bp, Homo sapiens
gaatctgagctaaaaccaggg

SEQ ID NO: 46000 - DNA, 22 bp, Homo sapiens
cttttcttgaaagtcaagataa

SEQ ID NO: 46001 - DNA, 16 bp, Homo sapiens
tgttgtgccccaggac

SEQ ID NO: 46002 - DNA, 23 bp, Homo sapiens
aaggaaaggtttacaataaacga

SEQ ID NO: 46003 - DNA, 19 bp, Homo sapiens
gcagcaatcatgtgtccca

SEQ ID NO: 46004 - DNA, 20 bp, Homo sapiens
tatgcttggtacttggctga

SEQ ID NO: 46005 - DNA, 20 bp, Homo sapiens
gtggcttgttgtgataatta

SEQ ID NO: 46006 - DNA, 22 bp, Homo sapiens
tgtaatacaagctttgtgtcct

SEQ ID NO: 46007 - DNA, 21 bp, Homo sapiens
gttgttatttgttctcttcta

SEQ ID NO: 46008 - DNA, 22 bp, Homo sapiens
cactttccgcagaacttcccca

SEQ ID NO: 46009 - DNA, 20 bp, Homo sapiens
tgttcatcagcagggctgat

SEQ ID NO: 46010 - DNA, 25 bp, Homo sapiens
actgagatattatgttgagattagg

SEQ ID NO: 46011 - DNA, 16 bp, Homo sapiens
ccatacctgccagtgt

SEQ ID NO: 46012 - DNA, 18 bp, Homo sapiens
aggactccttgataaaaa

SEQ ID NO: 46013 - DNA, 18 bp, Homo sapiens
cttgcaggttgcgtcaaa

SEQ ID NO: 46014 - DNA, 24 bp, Homo sapiens
agactccaaaagacattggagaag

SEQ ID NO: 46015 - DNA, 16 bp, Homo sapiens
agtgttagctccgagt

SEQ ID NO: 46016 - DNA, 22 bp, Homo sapiens
aaatgaagcatccctcaggcaa

SEQ ID NO: 46017 - DNA, 19 bp, Homo sapiens
cgctttttcatcaatgaca

SEQ ID NO: 46018 - DNA, 20 bp, Homo sapiens
ctcatcatatactgcaaatg

SEQ ID NO: 46019 - DNA, 19 bp, Homo sapiens
ttgcttgtgatttcagttt

SEQ ID NO: 46020 - DNA, 16 bp, Homo sapiens
tgggtgaaagctagct

SEQ ID NO: 46021 - DNA, 17 bp, Homo sapiens
agggtggtagaactatg

SEQ ID NO: 46022 - DNA, 20 bp, Homo sapiens
aaccaagccttgatacctca

SEQ ID NO: 46023 - DNA, 17 bp, Homo sapiens
cagccacgtcttaggta

SEQ ID NO: 46024 - DNA, 23 bp, Homo sapiens
atgaataaggtgtggcttatgaa

SEQ ID NO: 46025 - DNA, 17 bp, Homo sapiens
tcctgttcggtttcctt

SEQ ID NO: 46026 - DNA, 19 bp, Homo sapiens
gacccaagtccacctccaa

SEQ ID NO: 46027 - DNA, 19 bp, Homo sapiens
ctagatctgtgaatcttgc

SEQ ID NO: 46028 - DNA, 17 bp, Homo sapiens
aagtaaatttcctgctc

SEQ ID NO: 46029 - DNA, 22 bp, Homo sapiens
tttagcaaatgttgatgttgat

SEQ ID NO: 46030 - DNA, 19 bp, Homo sapiens
tcggtctgggtgcatggat

SEQ ID NO: 46031 - DNA, 23 bp, Homo sapiens
tataaataaataatgccagcatt

SEQ ID NO: 46032 - DNA, 19 bp, Homo sapiens
gccagagaaggtgactctg

SEQ ID NO: 46033 - DNA, 20 bp, Homo sapiens
aaagaggaaacaggagtaga

SEQ ID NO: 46034 - DNA, 18 bp, Homo sapiens
gtattacagctggctgat

SEQ ID NO: 46035 - DNA, 20 bp, Homo sapiens
ggtagttaaaagacctgaca

SEQ ID NO: 46036 - DNA, 16 bp, Homo sapiens
ctgcagcggtggatgg

SEQ ID NO: 46037 - DNA, 19 bp, Homo sapiens
aagcatctatgtaagtcat

SEQ ID NO: 46038 - DNA, 23 bp, Homo sapiens
agtgaaatgtcactatttttgag

SEQ ID NO: 46039 - DNA, 16 bp, Homo sapiens
atatctggccatcagc

SEQ ID NO: 46040 - DNA, 16 bp, Homo sapiens
ttgaagtaggtagtgc

SEQ ID NO: 46041 - DNA, 18 bp, Homo sapiens
tagactgattatgacccc

SEQ ID NO: 46042 - DNA, 23 bp, Homo sapiens
attttgacatggctcataactag

SEQ ID NO: 46043 - DNA, 16 bp, Homo sapiens
actgcagcttcttctg

SEQ ID NO: 46044 - DNA, 24 bp, Homo sapiens
ctcctcaaccttgatcaatagaag

SEQ ID NO: 46045 - DNA, 17 bp, Homo sapiens
gaagacgtcttcctggc

SEQ ID NO: 46046 - DNA, 20 bp, Homo sapiens
aactccatttgcttaacatg

SEQ ID NO: 46047 - DNA, 24 bp, Homo sapiens
tttgagaataatgaagatcaagat

SEQ ID NO: 46048 - DNA, 16 bp, Homo sapiens
cttcatccatctcaga

SEQ ID NO: 46049 - DNA, 20 bp, Homo sapiens
ctcagtggtttttaagtttt

SEQ ID NO: 46050 - DNA, 22 bp, Homo sapiens
gggctgaactcactgtggctta

SEQ ID NO: 46051 - DNA, 18 bp, Homo sapiens
taattaggagtggactgt

SEQ ID NO: 46052 - DNA, 19 bp, Homo sapiens
agtttcagcgggtttacat

SEQ ID NO: 46053 - DNA, 16 bp, Homo sapiens
tgactggcttctccaa

SEQ ID NO: 46054 - DNA, 20 bp, Homo sapiens
ggaagtggatttaaagtttg

SEQ ID NO: 46055 - DNA, 23 bp, Homo sapiens
atttcttgttccactcagcaaca

SEQ ID NO: 46056 - DNA, 22 bp, Homo sapiens
ttgcatttttgttttccaggtg

SEQ ID NO: 46057 - DNA, 17 bp, Homo sapiens
gattctgttcccagaag

SEQ ID NO: 46058 - DNA, 17 bp, Homo sapiens
tgcagacaccatcccct

SEQ ID NO: 46059 - DNA, 20 bp, Homo sapiens
tccaaatgaggagttctaag

SEQ ID NO: 46060 - DNA, 20 bp, Homo sapiens
ggaggttgagatgtgattat

SEQ ID NO: 46061 - DNA, 21 bp, Homo sapiens
cactgtagggtcagcacttgg

SEQ ID NO: 46062 - DNA, 19 bp, Homo sapiens
acccaaggcaattaaatat

SEQ ID NO: 46063 - DNA, 22 bp, Homo sapiens
caaaagagtaatgaccttgctg

SEQ ID NO: 46064 - DNA, 20 bp, Homo sapiens
attttgagaaacactagacc

SEQ ID NO: 46065 - DNA, 16 bp, Homo sapiens
ctgctgttcccacacc

SEQ ID NO: 46066 - DNA, 24 bp, Homo sapiens
gagtagaagggacttgattcagaa

SEQ ID NO: 46067 - DNA, 16 bp, Homo sapiens
agggtgttggtgacag

SEQ ID NO: 46068 - DNA, 17 bp, Homo sapiens
tctggttactggcatct

SEQ ID NO: 46069 - DNA, 19 bp, Homo sapiens
tcagatggcttatcttaca

SEQ ID NO: 46070 - DNA, 16 bp, Homo sapiens
tgattcacagggtgtg

SEQ ID NO: 46071 - DNA, 20 bp, Homo sapiens
ttgaaagttatttttttgtg

SEQ ID NO: 46072 - DNA, 19 bp, Homo sapiens
accacagtctgccggaaga

SEQ ID NO: 46073 - DNA, 16 bp, Homo sapiens
tcaagtgacttgtcca

SEQ ID NO: 46074 - DNA, 18 bp, Homo sapiens
ccaaacagccaaaacaaa

SEQ ID NO: 46075 - DNA, 19 bp, Homo sapiens
tcagggctggcattacctc

SEQ ID NO: 46076 - DNA, 24 bp, Homo sapiens
ctgcaggccctaggctcaggaccc

SEQ ID NO: 46077 - DNA, 21 bp, Homo sapiens
gcaagattgtgtctctgatgt

SEQ ID NO: 46078 - DNA, 18 bp, Homo sapiens
tccatcaatgacagccac

SEQ ID NO: 46079 - DNA, 18 bp, Homo sapiens
gactgttggaaactatca

SEQ ID NO: 46080 - DNA, 18 bp, Homo sapiens
tcgtccagtgccaatcat

SEQ ID NO: 46081 - DNA, 24 bp, Homo sapiens
atgaagtctgcttcccagcctcta

SEQ ID NO: 46082 - DNA, 23 bp, Homo sapiens
gtatggggtcacagggtcccaca

SEQ ID NO: 46083 - DNA, 18 bp, Homo sapiens
gaagggtcctttgaaaaa

SEQ ID NO: 46084 - DNA, 16 bp, Homo sapiens
tgcttgagataccagt

SEQ ID NO: 46085 - DNA, 19 bp, Homo sapiens
tgcatggaaagctattttt

SEQ ID NO: 46086 - DNA, 20 bp, Homo sapiens
tggaagaccttcagagagaa

SEQ ID NO: 46087 - DNA, 20 bp, Homo sapiens
cttcagcatctttgattcta

SEQ ID NO: 46088 - DNA, 18 bp, Homo sapiens
cccttctaggtaaatgac

SEQ ID NO: 46089 - DNA, 18 bp, Homo sapiens
tactttcaactacgtttt

SEQ ID NO: 46090 - DNA, 22 bp, Homo sapiens
acagctattataaagatttgga

SEQ ID NO: 46091 - DNA, 16 bp, Homo sapiens
ttcggaatggagcttt

SEQ ID NO: 46092 - DNA, 17 bp, Homo sapiens
tttacagctagggatga

SEQ ID NO: 46093 - DNA, 20 bp, Homo sapiens
gaggaatctgcattccagag

SEQ ID NO: 46094 - DNA, 20 bp, Homo sapiens
cttcatggacactttacact

SEQ ID NO: 46095 - DNA, 16 bp, Homo sapiens
ctgggcaacaagaatg

SEQ ID NO: 46096 - DNA, 21 bp, Homo sapiens
tgcatctacacaagataaacc

SEQ ID NO: 46097 - DNA, 22 bp, Homo sapiens
cctctatagctatggaaagtcc

SEQ ID NO: 46098 - DNA, 20 bp, Homo sapiens
gtgagctttcgatattgtaa

SEQ ID NO: 46099 - DNA, 20 bp, Homo sapiens
tcatctttaaggaagggaag

SEQ ID NO: 46100 - DNA, 21 bp, Homo sapiens
ttcattcattcatgtttgctg

SEQ ID NO: 46101 - DNA, 16 bp, Homo sapiens
atcctgctggttgggt

SEQ ID NO: 46102 - DNA, 17 bp, Homo sapiens
caagggacacatgggat

SEQ ID NO: 46103 - DNA, 24 bp, Homo sapiens
taagaaaaaaaaaaaagaagaaac

SEQ ID NO: 46104 - DNA, 18 bp, Homo sapiens
tgcagtcaaccagtgagc

SEQ ID NO: 46105 - DNA, 20 bp, Homo sapiens
aaaatccttttgtgttacac

SEQ ID NO: 46106 - DNA, 16 bp, Homo sapiens
tttgactccactcccg

SEQ ID NO: 46107 - DNA, 20 bp, Homo sapiens
ctggttccaagaatttctct

SEQ ID NO: 46108 - DNA, 20 bp, Homo sapiens
aaggtgtttgaatagttctg

SEQ ID NO: 46109 - DNA, 16 bp, Homo sapiens
gtcctgccacaggctc

SEQ ID NO: 46110 - DNA, 21 bp, Homo sapiens
cacaaatttgtaacaaaatta

SEQ ID NO: 46111 - DNA, 17 bp, Homo sapiens
tgctgtgagtgttgttt

SEQ ID NO: 46112 - DNA, 22 bp, Homo sapiens
tttaaagcagcacatccttgcc

SEQ ID NO: 46113 - DNA, 16 bp, Homo sapiens
ctgctttgccctggga

SEQ ID NO: 46114 - DNA, 24 bp, Homo sapiens
agaaaattttccttaattttaata

SEQ ID NO: 46115 - DNA, 22 bp, Homo sapiens
tttgattctgggatacttaagg

SEQ ID NO: 46116 - DNA, 17 bp, Homo sapiens
acctgtttctgggcaaa

SEQ ID NO: 46117 - DNA, 21 bp, Homo sapiens
ggcaggctttcaaagtagctt

SEQ ID NO: 46118 - DNA, 20 bp, Homo sapiens
ggtaacttgtggtctatggt

SEQ ID NO: 46119 - DNA, 22 bp, Homo sapiens
ctttctagagggattcatttcc

SEQ ID NO: 46120 - DNA, 17 bp, Homo sapiens
gaaggagacacagttcc

SEQ ID NO: 46121 - DNA, 18 bp, Homo sapiens
ctgttcattactggcatc

SEQ ID NO: 46122 - DNA, 19 bp, Homo sapiens
tattagttgtcttgccaat

SEQ ID NO: 46123 - DNA, 17 bp, Homo sapiens
ttgttccagtcaaggct

SEQ ID NO: 46124 - DNA, 20 bp, Homo sapiens
tgccaatgactaacttcatg

SEQ ID NO: 46125 - DNA, 24 bp, Homo sapiens
aaaagctgcttgtctgccttctga

SEQ ID NO: 46126 - DNA, 20 bp, Homo sapiens
gtttctcaaatattgactgc

SEQ ID NO: 46127 - DNA, 18 bp, Homo sapiens
taagatttgggatgggct

SEQ ID NO: 46128 - DNA, 17 bp, Homo sapiens
gccaatcctggagcagc

SEQ ID NO: 46129 - DNA, 19 bp, Homo sapiens
gggtttaactttcacagtt

SEQ ID NO: 46130 - DNA, 20 bp, Homo sapiens
atcatttttgtttgtgtttc

SEQ ID NO: 46131 - DNA, 18 bp, Homo sapiens
gtcaaaaatgggaagaaa

SEQ ID NO: 46132 - DNA, 20 bp, Homo sapiens
cagctccttagcttacagtg

SEQ ID NO: 46133 - DNA, 20 bp, Homo sapiens
accaaaatcatcctgatgga

SEQ ID NO: 46134 - DNA, 20 bp, Homo sapiens
ttgtttttttaagtcaaagc

SEQ ID NO: 46135 - DNA, 21 bp, Homo sapiens
aatcagggtctgttgacctta

SEQ ID NO: 46136 - DNA, 20 bp, Homo sapiens
atacacacacacatacataa

SEQ ID NO: 46137 - DNA, 17 bp, Homo sapiens
cagtggtatctctgtta

SEQ ID NO: 46138 - DNA, 21 bp, Homo sapiens
caaagaaattttttgaaattc

SEQ ID NO: 46139 - DNA, 18 bp, Homo sapiens
gtgtttgaatctctcttt

SEQ ID NO: 46140 - DNA, 18 bp, Homo sapiens
taaaaaagccagtgaggc

SEQ ID NO: 46141 - DNA, 21 bp, Homo sapiens
gtcttttcgttttgttttttt

SEQ ID NO: 46142 - DNA, 20 bp, Homo sapiens
ttggtcaggactccaactca

SEQ ID NO: 46143 - DNA, 16 bp, Homo sapiens
cagagctgcaacaaac

SEQ ID NO: 46144 - DNA, 26 bp, Homo sapiens
agccatgttaacaattttttaaataa

SEQ ID NO: 46145 - DNA, 18 bp, Homo sapiens
ggagtctgtgtgtgtggc

SEQ ID NO: 46146 - DNA, 21 bp, Homo sapiens
actattatggctactgatttg

SEQ ID NO: 46147 - DNA, 16 bp, Homo sapiens
tctcccagaggatgga

SEQ ID NO: 46148 - DNA, 16 bp, Homo sapiens
actcccccctcactgg

SEQ ID NO: 46149 - DNA, 20 bp, Homo sapiens
gggttaatttgcttgtgttt

SEQ ID NO: 46150 - DNA, 16 bp, Homo sapiens
ctccagaggctgtggc

SEQ ID NO: 46151 - DNA, 26 bp, Homo sapiens
ataaaagaagcattaaaaagtatttc

SEQ ID NO: 46152 - DNA, 16 bp, Homo sapiens
caatgcggccacttcc

SEQ ID NO: 46153 - DNA, 21 bp, Homo sapiens
tctcaaatgaaagtttggatt

SEQ ID NO: 46154 - DNA, 21 bp, Homo sapiens
ggattacgatttaagctatgt

SEQ ID NO: 46155 - DNA, 18 bp, Homo sapiens
tggttcagaacatggcct

SEQ ID NO: 46156 - DNA, 22 bp, Homo sapiens
tgggaggatataaattcaataa

SEQ ID NO: 46157 - DNA, 16 bp, Homo sapiens
tcaaggtccagggaat

SEQ ID NO: 46158 - DNA, 20 bp, Homo sapiens
aaatcaagggtcatacccac

SEQ ID NO: 46159 - DNA, 16 bp, Homo sapiens
cgtgggaatcacttca

SEQ ID NO: 46160 - DNA, 18 bp, Homo sapiens
tctacttctatcaggcca

SEQ ID NO: 46161 - DNA, 24 bp, Homo sapiens
tatcactattaagctatttatttt

SEQ ID NO: 46162 - DNA, 16 bp, Homo sapiens
gagagaagcactgagg

SEQ ID NO: 46163 - DNA, 17 bp, Homo sapiens
ccacttcttcaccccct

SEQ ID NO: 46164 - DNA, 17 bp, Homo sapiens
ttcagatttcgcatgat

SEQ ID NO: 46165 - DNA, 22 bp, Homo sapiens
ggggccccagccgcgctgcctg

SEQ ID NO: 46166 - DNA, 24 bp, Homo sapiens
ccgccgccgccgctgtgcctcggg

SEQ ID NO: 46167 - DNA, 21 bp, Homo sapiens
cgggggccgcgcgctctaagc

SEQ ID NO: 46168 - DNA, 24 bp, Homo sapiens
tggagcagcaggaagctagggagg

SEQ ID NO: 46169 - DNA, 24 bp, Homo sapiens
gccccatggggcgcgcccacactt

SEQ ID NO: 46170 - DNA, 17 bp, Homo sapiens
acgttccgctggaagcg

SEQ ID NO: 46171 - DNA, 24 bp, Homo sapiens
gggagcgggatcggcgcggggggc

SEQ ID NO: 46172 - DNA, 19 bp, Homo sapiens
agcccctattaacccttgg

SEQ ID NO: 46173 - DNA, 21 bp, Homo sapiens
ggtgacaggcaaacgagacta

SEQ ID NO: 46174 - DNA, 16 bp, Homo sapiens
aggactggggtgagac

SEQ ID NO: 46175 - DNA, 16 bp, Homo sapiens
cccctggacaaagaga

SEQ ID NO: 46176 - DNA, 16 bp, Homo sapiens
tgaggggtggaagctg

SEQ ID NO: 46177 - DNA, 16 bp, Homo sapiens
aattacaggcacggct

SEQ ID NO: 46178 - DNA, 18 bp, Homo sapiens
ttctcttctcctggatct

SEQ ID NO: 46179 - DNA, 23 bp, Homo sapiens
taaagagaatttgccaattatca

SEQ ID NO: 46180 - DNA, 16 bp, Homo sapiens
ctctcagccaccacca

SEQ ID NO: 46181 - DNA, 16 bp, Homo sapiens
gccttcgtccagctga

SEQ ID NO: 46182 - DNA, 24 bp, Homo sapiens
aaaggaccaggtagctgtgggtgg

SEQ ID NO: 46183 - DNA, 16 bp, Homo sapiens
cgctgcgtaaagatga

SEQ ID NO: 46184 - DNA, 24 bp, Homo sapiens
gtggggtgggctggagcaggccct

SEQ ID NO: 46185 - DNA, 17 bp, Homo sapiens
ccagctctgtgcccaag

SEQ ID NO: 46186 - DNA, 18 bp, Homo sapiens
catcctccagcggctggg

SEQ ID NO: 46187 - DNA, 16 bp, Homo sapiens
gctgcggacagcgaag

SEQ ID NO: 46188 - DNA, 23 bp, Homo sapiens
attcctttccagtcgggcttcat

SEQ ID NO: 46189 - DNA, 16 bp, Homo sapiens
aggtggacgaccgtct

SEQ ID NO: 46190 - DNA, 17 bp, Homo sapiens
cattcctgccgccttgg

SEQ ID NO: 46191 - DNA, 24 bp, Homo sapiens
gagggccaggtggtgccagcgccc

SEQ ID NO: 46192 - DNA, 23 bp, Homo sapiens
ccgggtgaaccatgccttcctct

SEQ ID NO: 46193 - DNA, 23 bp, Homo sapiens
gacaggcacccggcgctgcccgc

SEQ ID NO: 46194 - DNA, 21 bp, Homo sapiens
ctgcagttcctccccggcaag

SEQ ID NO: 46195 - DNA, 24 bp, Homo sapiens
atcttcccaaagaggaaggagccc

SEQ ID NO: 46196 - DNA, 22 bp, Homo sapiens
tcgacctcgacatgcacgacgg

SEQ ID NO: 46197 - DNA, 23 bp, Homo sapiens
cacagggtagatactgaactggc

SEQ ID NO: 46198 - DNA, 20 bp, Homo sapiens
acagtcactctggtgactgc

SEQ ID NO: 46199 - DNA, 23 bp, Homo sapiens
gtacgtgtcagcctgtccacact

SEQ ID NO: 46200 - DNA, 23 bp, Homo sapiens
acagggaccctgcactcgaccct

SEQ ID NO: 46201 - DNA, 16 bp, Homo sapiens
aaaaggtctgccagag

SEQ ID NO: 46202 - DNA, 24 bp, Homo sapiens
tccagtttgaaggtgctctctgcc

SEQ ID NO: 46203 - DNA, 16 bp, Homo sapiens
cagggctggtgtggca

SEQ ID NO: 46204 - DNA, 24 bp, Homo sapiens
cacaattactgtacccacctgagg

SEQ ID NO: 46205 - DNA, 23 bp, Homo sapiens
cctttggggcttggtgggcgtgg

SEQ ID NO: 46206 - DNA, 16 bp, Homo sapiens
ctcttctcccaagact

SEQ ID NO: 46207 - DNA, 19 bp, Homo sapiens
ggtttgggctgggcctccc

SEQ ID NO: 46208 - DNA, 21 bp, Homo sapiens
gcctggagaacttgaccactg

SEQ ID NO: 46209 - DNA, 23 bp, Homo sapiens
cagaggctgggagcatgggatca

SEQ ID NO: 46210 - DNA, 24 bp, Homo sapiens
caggggacccagggggactgtggc

SEQ ID NO: 46211 - DNA, 20 bp, Homo sapiens
gctgtgatcttctgtgatgg

SEQ ID NO: 46212 - DNA, 20 bp, Homo sapiens
aaccctcaccagcatatggc

SEQ ID NO: 46213 - DNA, 19 bp, Homo sapiens
cacaattgaagtagaaggg

SEQ ID NO: 46214 - DNA, 17 bp, Homo sapiens
gccagtaacgcacttga

SEQ ID NO: 46215 - DNA, 20 bp, Homo sapiens
ctgactttgtaaatgaagat

SEQ ID NO: 46216 - DNA, 24 bp, Homo sapiens
aacgcctcgccctgcggccgctca

SEQ ID NO: 46217 - DNA, 16 bp, Homo sapiens
ggagactctggcagga

SEQ ID NO: 46218 - DNA, 23 bp, Homo sapiens
aaaagcctccctaccaagccttc

SEQ ID NO: 46219 - DNA, 16 bp, Homo sapiens
tgctgggcggtggggg

SEQ ID NO: 46220 - DNA, 16 bp, Homo sapiens
ccagaaaacagctcca

SEQ ID NO: 46221 - DNA, 18 bp, Homo sapiens
tccgagctagtgtgggaa

SEQ ID NO: 46222 - DNA, 22 bp, Homo sapiens
agtgccacctacttcccgtcca

SEQ ID NO: 46223 - DNA, 24 bp, Homo sapiens
gggggaggtttgtgggtgctggtg

SEQ ID NO: 46224 - DNA, 16 bp, Homo sapiens
ggaacccgggaatgcc

SEQ ID NO: 46225 - DNA, 24 bp, Homo sapiens
ccgagtactcctggtagaaccagg

SEQ ID NO: 46226 - DNA, 20 bp, Homo sapiens
tcctctaaaaaacccattcc

SEQ ID NO: 46227 - DNA, 16 bp, Homo sapiens
gctgttctgggagtgc

SEQ ID NO: 46228 - DNA, 23 bp, Homo sapiens
gccagtaagccggcctctgcccg

SEQ ID NO: 46229 - DNA, 16 bp, Homo sapiens
ttccgatccaatgggc

SEQ ID NO: 46230 - DNA, 21 bp, Homo sapiens
tttatcctcatctcctgcccc

SEQ ID NO: 46231 - DNA, 16 bp, Homo sapiens
ggtctgagggggacag

SEQ ID NO: 46232 - DNA, 24 bp, Homo sapiens
gatggtacctccaacttcgggcac

SEQ ID NO: 46233 - DNA, 24 bp, Homo sapiens
ctggggctgtctggggctaggcct

SEQ ID NO: 46234 - DNA, 24 bp, Homo sapiens
ctcagctcccactggaagcaagaa

SEQ ID NO: 46235 - DNA, 17 bp, Homo sapiens
tggaggacaggaattgc

SEQ ID NO: 46236 - DNA, 22 bp, Homo sapiens
gacccaagagcagcccccggaa

SEQ ID NO: 46237 - DNA, 23 bp, Homo sapiens
ggaaaggcgtagatcctgccagg

SEQ ID NO: 46238 - DNA, 24 bp, Homo sapiens
cttgagcgatctgacaaccaggcc

SEQ ID NO: 46239 - DNA, 17 bp, Homo sapiens
ctcagtcttaccggcaa

SEQ ID NO: 46240 - DNA, 16 bp, Homo sapiens
cctggtattggccccg

SEQ ID NO: 46241 - DNA, 16 bp, Homo sapiens
accacttgaccaatgc

SEQ ID NO: 46242 - DNA, 19 bp, Homo sapiens
ggctattcgatcttccacc

SEQ ID NO: 46243 - DNA, 16 bp, Homo sapiens
gccaaggatgtaccca

SEQ ID NO: 46244 - DNA, 19 bp, Homo sapiens
ggacccaagggagactgtg

SEQ ID NO: 46245 - DNA, 20 bp, Homo sapiens
atttctcagggcagggacct

SEQ ID NO: 46246 - DNA, 18 bp, Homo sapiens
tgtgagataactcacccg

SEQ ID NO: 46247 - DNA, 22 bp, Homo sapiens
cagctgcaggcgggattgttga

SEQ ID NO: 46248 - DNA, 16 bp, Homo sapiens
ctcaggggcagtgaga

SEQ ID NO: 46249 - DNA, 21 bp, Homo sapiens
actgtctaatgctgtcttctt

SEQ ID NO: 46250 - DNA, 24 bp, Homo sapiens
ggataaagccaaatatgggtgcca

SEQ ID NO: 46251 - DNA, 21 bp, Homo sapiens
ctggaatccctggtgcacgtg

SEQ ID NO: 46252 - DNA, 23 bp, Homo sapiens
ggagggtgtactcccaaaagtag

SEQ ID NO: 46253 - DNA, 23 bp, Homo sapiens
tttggctccaggagggccgggga

SEQ ID NO: 46254 - DNA, 24 bp, Homo sapiens
gggagaagataaaccagtgggtgg

SEQ ID NO: 46255 - DNA, 18 bp, Homo sapiens
aaacatggctccaacccc

SEQ ID NO: 46256 - DNA, 24 bp, Homo sapiens
ccctgttttttgtcaccttttttt

SEQ ID NO: 46257 - DNA, 16 bp, Homo sapiens
cgggaatccccctcag

SEQ ID NO: 46258 - DNA, 24 bp, Homo sapiens
ctgggccttatggaaatccaggtc

SEQ ID NO: 46259 - DNA, 24 bp, Homo sapiens
aggggagtagtagaattggagaag

SEQ ID NO: 46260 - DNA, 19 bp, Homo sapiens
gaaacctacctttgcccca

SEQ ID NO: 46261 - DNA, 20 bp, Homo sapiens
atttaagcaagggagcaggg

SEQ ID NO: 46262 - DNA, 17 bp, Homo sapiens
gtgtggcaatttcacta

SEQ ID NO: 46263 - DNA, 18 bp, Homo sapiens
ggtggccaaagtggaatt

SEQ ID NO: 46264 - DNA, 16 bp, Homo sapiens
gatgttcccacctccc

SEQ ID NO: 46265 - DNA, 18 bp, Homo sapiens
ctcaccaggaaaggccca

SEQ ID NO: 46266 - DNA, 24 bp, Homo sapiens
ggcagcccccgagtctcctctgag

SEQ ID NO: 46267 - DNA, 16 bp, Homo sapiens
aacagtacctttcgtc

SEQ ID NO: 46268 - DNA, 20 bp, Homo sapiens
cattggaagttaccattcca

SEQ ID NO: 46269 - DNA, 16 bp, Homo sapiens
tctgcctgaagacctg

SEQ ID NO: 46270 - DNA, 24 bp, Homo sapiens
ttcctgcctcacccaccttgtctg

SEQ ID NO: 46271 - DNA, 23 bp, Homo sapiens
cacccatgtaccctgtgcccagg

SEQ ID NO: 46272 - DNA, 22 bp, Homo sapiens
ggaatccaggacctccgggacg

SEQ ID NO: 46273 - DNA, 24 bp, Homo sapiens
ctcacatggtatctgcatccatct

SEQ ID NO: 46274 - DNA, 17 bp, Homo sapiens
ggccctcacctgttctc

SEQ ID NO: 46275 - DNA, 24 bp, Homo sapiens
agtacatacggtgctgaacagggc

SEQ ID NO: 46276 - DNA, 22 bp, Homo sapiens
atctagggagggggccagagac

SEQ ID NO: 46277 - DNA, 20 bp, Homo sapiens
atgtgtcctccctgcctgat

SEQ ID NO: 46278 - DNA, 16 bp, Homo sapiens
gggtgagaggcaaaac

SEQ ID NO: 46279 - DNA, 24 bp, Homo sapiens
tcctggaccggcagggcaccccgg

SEQ ID NO: 46280 - DNA, 24 bp, Homo sapiens
gtaacctttggcccctgggctgcc

SEQ ID NO: 46281 - DNA, 22 bp, Homo sapiens
tcctgttccatctcacattcct

SEQ ID NO: 46282 - DNA, 23 bp, Homo sapiens
catcttcacatcaccatggccac

SEQ ID NO: 46283 - DNA, 24 bp, Homo sapiens
cccccagacccagagctgggcagg

SEQ ID NO: 46284 - DNA, 16 bp, Homo sapiens
ccttggcccccagccc

SEQ ID NO: 46285 - DNA, 22 bp, Homo sapiens
tgcaggggcagccaggacctga

SEQ ID NO: 46286 - DNA, 22 bp, Homo sapiens
aagacaggcttccttggtccag

SEQ ID NO: 46287 - DNA, 21 bp, Homo sapiens
atctcctaccggtccaggtaa

SEQ ID NO: 46288 - DNA, 24 bp, Homo sapiens
caaagatcgctgatctaaccccac

SEQ ID NO: 46289 - DNA, 18 bp, Homo sapiens
aaccccacccatgtggca

SEQ ID NO: 46290 - DNA, 24 bp, Homo sapiens
aaagaggcaggacttgccccagga

SEQ ID NO: 46291 - DNA, 19 bp, Homo sapiens
gctctccttatagctctga

SEQ ID NO: 46292 - DNA, 24 bp, Homo sapiens
ctgtgttttgtgtttcaggggtta

SEQ ID NO: 46293 - DNA, 16 bp, Homo sapiens
atcacccatccctcct

SEQ ID NO: 46294 - DNA, 24 bp, Homo sapiens
ctcaaggcctatgtcatcgaggag

SEQ ID NO: 46295 - DNA, 22 bp, Homo sapiens
caaacttactcgttctccatca

SEQ ID NO: 46296 - DNA, 16 bp, Homo sapiens
ggatgtgggatggcag

SEQ ID NO: 46297 - DNA, 20 bp, Homo sapiens
ctggcaggttctgctctgtt

SEQ ID NO: 46298 - DNA, 17 bp, Homo sapiens
tgaccgctctgaccccc

SEQ ID NO: 46299 - DNA, 16 bp, Homo sapiens
actcgactcaagtgca

SEQ ID NO: 46300 - DNA, 23 bp, Homo sapiens
gctcttcggcctgccagggtctg

SEQ ID NO: 46301 - DNA, 19 bp, Homo sapiens
ctgatgtgcatgtcactgg

SEQ ID NO: 46302 - DNA, 18 bp, Homo sapiens
gacacggaaaatctttac

SEQ ID NO: 46303 - DNA, 23 bp, Homo sapiens
ctctgtgacttcctgccgtgggt

SEQ ID NO: 46304 - DNA, 23 bp, Homo sapiens
caggtggccagggcagcgtggcc

SEQ ID NO: 46305 - DNA, 23 bp, Homo sapiens
gctggcatcctgccctgacctct

SEQ ID NO: 46306 - DNA, 16 bp, Homo sapiens
acatgcggcccccaca

SEQ ID NO: 46307 - DNA, 24 bp, Homo sapiens
cctggcaagaggggcaagatgggt

SEQ ID NO: 46308 - DNA, 18 bp, Homo sapiens
ttgtcgatggtaggggtg

SEQ ID NO: 46309 - DNA, 23 bp, Homo sapiens
aggatttccatccagtccaggag

SEQ ID NO: 46310 - DNA, 16 bp, Homo sapiens
actgcttggacattgt

SEQ ID NO: 46311 - DNA, 23 bp, Homo sapiens
taaaatctgctgtgtgttcactc

SEQ ID NO: 46312 - DNA, 24 bp, Homo sapiens
ccctgaaggtgacaacactaacct

SEQ ID NO: 46313 - DNA, 16 bp, Homo sapiens
cagggctgggatttga

SEQ ID NO: 46314 - DNA, 24 bp, Homo sapiens
tcctggagtctttggggaaagagg

SEQ ID NO: 46315 - DNA, 24 bp, Homo sapiens
caaactccaggccaggctcaggaa

SEQ ID NO: 46316 - DNA, 22 bp, Homo sapiens
gcatcaatgtacttacaatgag

SEQ ID NO: 46317 - DNA, 24 bp, Homo sapiens
ttcagctctgaaagaccccaccag

SEQ ID NO: 46318 - DNA, 17 bp, Homo sapiens
ctccccacacgctggct

SEQ ID NO: 46319 - DNA, 17 bp, Homo sapiens
agatgggacaagtaacc

SEQ ID NO: 46320 - DNA, 17 bp, Homo sapiens
tgggggtttgatgagag

SEQ ID NO: 46321 - DNA, 24 bp, Homo sapiens
ctgccaggcccccctggagtcccc

SEQ ID NO: 46322 - DNA, 22 bp, Homo sapiens
gcactttagtgaaggtctctgg

SEQ ID NO: 46323 - DNA, 16 bp, Homo sapiens
ccttgggtcccgggta

SEQ ID NO: 46324 - DNA, 22 bp, Homo sapiens
gcgtctttggaagcccaggccc

SEQ ID NO: 46325 - DNA, 18 bp, Homo sapiens
gtcgggggtgcccagctt

SEQ ID NO: 46326 - DNA, 19 bp, Homo sapiens
ctgtgggccactgctcaca

SEQ ID NO: 46327 - DNA, 20 bp, Homo sapiens
atcctgccatcctcccttcc

SEQ ID NO: 46328 - DNA, 23 bp, Homo sapiens
aggagtgttgggtccgattggct

SEQ ID NO: 46329 - DNA, 17 bp, Homo sapiens
tgagattggagtcattt

SEQ ID NO: 46330 - DNA, 20 bp, Homo sapiens
ttcagatcaccttatcacct

SEQ ID NO: 46331 - DNA, 22 bp, Homo sapiens
ggatctagcacggggtcttgca

SEQ ID NO: 46332 - DNA, 23 bp, Homo sapiens
gagaaatcagcagcagcctccgg

SEQ ID NO: 46333 - DNA, 24 bp, Homo sapiens
gtggcctagagtcccatcacagct

SEQ ID NO: 46334 - DNA, 16 bp, Homo sapiens
taggggaggccagagg

SEQ ID NO: 46335 - DNA, 16 bp, Homo sapiens
cggactgaaaggtgat

SEQ ID NO: 46336 - DNA, 22 bp, Homo sapiens
cttggaatccgggatctcctga

SEQ ID NO: 46337 - DNA, 16 bp, Homo sapiens
gatccgacttgggaaa

SEQ ID NO: 46338 - DNA, 24 bp, Homo sapiens
gaacagcagggcaggggcaggggc

SEQ ID NO: 46339 - DNA, 21 bp, Homo sapiens
cttccagaacccacgtggcct

SEQ ID NO: 46340 - DNA, 17 bp, Homo sapiens
caggtgggtccttgctc

SEQ ID NO: 46341 - DNA, 17 bp, Homo sapiens
aaggggttccaggtgtg

SEQ ID NO: 46342 - DNA, 19 bp, Homo sapiens
gaagagatgacaagaggat

SEQ ID NO: 46343 - DNA, 24 bp, Homo sapiens
ggtgtgatccaagccagagcccac

SEQ ID NO: 46344 - DNA, 18 bp, Homo sapiens
gtacttaccagaggccct

SEQ ID NO: 46345 - DNA, 16 bp, Homo sapiens
ctctgggcctgggacc

SEQ ID NO: 46346 - DNA, 22 bp, Homo sapiens
cccagccacattacacgatcag

SEQ ID NO: 46347 - DNA, 19 bp, Homo sapiens
ctcactaaccccagcctgc

SEQ ID NO: 46348 - DNA, 16 bp, Homo sapiens
tgcttgcccccaggag

SEQ ID NO: 46349 - DNA, 16 bp, Homo sapiens
cccggtgcacggggga

SEQ ID NO: 46350 - DNA, 23 bp, Homo sapiens
atggttagcaagtgcaggaggca

SEQ ID NO: 46351 - DNA, 16 bp, Homo sapiens
cgggaaacccaatgga

SEQ ID NO: 46352 - DNA, 18 bp, Homo sapiens
ttatgcacatgcttctga

SEQ ID NO: 46353 - DNA, 22 bp, Homo sapiens
gaccgagtcccagcagcagcca

SEQ ID NO: 46354 - DNA, 24 bp, Homo sapiens
agggggttcatggaaggtggggtc

SEQ ID NO: 46355 - DNA, 17 bp, Homo sapiens
ctgtgtgacctaaagca

SEQ ID NO: 46356 - DNA, 19 bp, Homo sapiens
agtcggagacaaaggatcc

SEQ ID NO: 46357 - DNA, 21 bp, Homo sapiens
aaggggaaaataaatgattgc

SEQ ID NO: 46358 - DNA, 24 bp, Homo sapiens
tgaggactgtgggatcaaggtggt

SEQ ID NO: 46359 - DNA, 20 bp, Homo sapiens
caggtactcaccttcatgcc

SEQ ID NO: 46360 - DNA, 24 bp, Homo sapiens
atgagatggaaacccggtcagtct

SEQ ID NO: 46361 - DNA, 17 bp, Homo sapiens
cagccagcccctgtggt

SEQ ID NO: 46362 - DNA, 24 bp, Homo sapiens
ccgtgggtgaccctgctctctgct

SEQ ID NO: 46363 - DNA, 19 bp, Homo sapiens
agaggcggtacctccatct

SEQ ID NO: 46364 - DNA, 18 bp, Homo sapiens
gacaatggcccagaaggc

SEQ ID NO: 46365 - DNA, 16 bp, Homo sapiens
cggcaggcctcgggct

SEQ ID NO: 46366 - DNA, 24 bp, Homo sapiens
gaggagcagacagctctgcagaaa

SEQ ID NO: 46367 - DNA, 23 bp, Homo sapiens
aatcaggccaggatgggcagtgg

SEQ ID NO: 46368 - DNA, 16 bp, Homo sapiens
cctgcgatggagatgg

SEQ ID NO: 46369 - DNA, 17 bp, Homo sapiens
gggctccagcccaagct

SEQ ID NO: 46370 - DNA, 24 bp, Homo sapiens
cttctccccagggtaagcctggag

SEQ ID NO: 46371 - DNA, 22 bp, Homo sapiens
tgtataggatgagctggtgggt

SEQ ID NO: 46372 - DNA, 24 bp, Homo sapiens
gccagtggagcctctgccctgggt

SEQ ID NO: 46373 - DNA, 24 bp, Homo sapiens
agtgacactcacctccaagccagg

SEQ ID NO: 46374 - DNA, 16 bp, Homo sapiens
ctctcctctgtccatc

SEQ ID NO: 46375 - DNA, 16 bp, Homo sapiens
tgtgcacagctggctc

SEQ ID NO: 46376 - DNA, 17 bp, Homo sapiens
tggattaactttctcct

SEQ ID NO: 46377 - DNA, 16 bp, Homo sapiens
ctggtccaaggccctc

SEQ ID NO: 46378 - DNA, 20 bp, Homo sapiens
gacccatggggccgccaggg

SEQ ID NO: 46379 - DNA, 24 bp, Homo sapiens
tggccacctggtggactcagggtt

SEQ ID NO: 46380 - DNA, 22 bp, Homo sapiens
atctccaggtcccctcaccttc

SEQ ID NO: 46381 - DNA, 23 bp, Homo sapiens
cagctgtggataccctgtgccag

SEQ ID NO: 46382 - DNA, 22 bp, Homo sapiens
ttggggcttgacttggggccca

SEQ ID NO: 46383 - DNA, 16 bp, Homo sapiens
cccacttacctgtctc

SEQ ID NO: 46384 - DNA, 22 bp, Homo sapiens
caatactttgttctaaacagga

SEQ ID NO: 46385 - DNA, 19 bp, Homo sapiens
ggaggcccggcctggatgg

SEQ ID NO: 46386 - DNA, 24 bp, Homo sapiens
ctgctctcccacaggccccggccg

SEQ ID NO: 46387 - DNA, 18 bp, Homo sapiens
gataagatccctggttca

SEQ ID NO: 46388 - DNA, 17 bp, Homo sapiens
gtaagggcccaataaat

SEQ ID NO: 46389 - DNA, 24 bp, Homo sapiens
ccaggaggtctagactttcatctc

SEQ ID NO: 46390 - DNA, 20 bp, Homo sapiens
ctggagttgttctgagaatt

SEQ ID NO: 46391 - DNA, 23 bp, Homo sapiens
gcagggggaaccaggggatcctg

SEQ ID NO: 46392 - DNA, 19 bp, Homo sapiens
cccagagagaggcagcgct

SEQ ID NO: 46393 - DNA, 23 bp, Homo sapiens
caccacttaccttttctcccacg

SEQ ID NO: 46394 - DNA, 16 bp, Homo sapiens
tgggagacacctggga

SEQ ID NO: 46395 - DNA, 24 bp, Homo sapiens
tcttcacctttttacaatttcaaa

SEQ ID NO: 46396 - DNA, 19 bp, Homo sapiens
attcacgttgtttctcttg

SEQ ID NO: 46397 - DNA, 16 bp, Homo sapiens
ggtcaggagagaggct

SEQ ID NO: 46398 - DNA, 20 bp, Homo sapiens
ctggtcggggagccaggaat

SEQ ID NO: 46399 - DNA, 23 bp, Homo sapiens
cttgggtccaggcacgcctgggg

SEQ ID NO: 46400 - DNA, 17 bp, Homo sapiens
ccttgagcaaaccccta

SEQ ID NO: 46401 - DNA, 16 bp, Homo sapiens
gcaacaggagagggca

SEQ ID NO: 46402 - DNA, 23 bp, Homo sapiens
ccacagagccaccccacagccat

SEQ ID NO: 46403 - DNA, 18 bp, Homo sapiens
tggtcattctgaacgtct

SEQ ID NO: 46404 - DNA, 24 bp, Homo sapiens
ggtgatcgtggcatgatgggaccc

SEQ ID NO: 46405 - DNA, 21 bp, Homo sapiens
ctcggtcggctcagccccagt

SEQ ID NO: 46406 - DNA, 21 bp, Homo sapiens
tccatgaaccgcttaccccag

SEQ ID NO: 46407 - DNA, 16 bp, Homo sapiens
gggtccaggctctcca

SEQ ID NO: 46408 - DNA, 21 bp, Homo sapiens
ctagctgctgtcctcctggct

SEQ ID NO: 46409 - DNA, 19 bp, Homo sapiens
cagccacctaacccttatc

SEQ ID NO: 46410 - DNA, 20 bp, Homo sapiens
aggaagcttccatagctgat

SEQ ID NO: 46411 - DNA, 16 bp, Homo sapiens
ctggcctcaagtgatc

SEQ ID NO: 46412 - DNA, 16 bp, Homo sapiens
caggtggtatggggac

SEQ ID NO: 46413 - DNA, 24 bp, Homo sapiens
cagtccttccatgtggaggctgct

SEQ ID NO: 46414 - DNA, 16 bp, Homo sapiens
cttacccgacgtccct

SEQ ID NO: 46415 - DNA, 24 bp, Homo sapiens
ctgcaggccttcaagctttgcccc

SEQ ID NO: 46416 - DNA, 24 bp, Homo sapiens
ctctggcagatggccctgttccaa

SEQ ID NO: 46417 - DNA, 23 bp, Homo sapiens
aaaaaggggcctctccaaactct

SEQ ID NO: 46418 - DNA, 17 bp, Homo sapiens
tgctatgaaagtcacag

SEQ ID NO: 46419 - DNA, 17 bp, Homo sapiens
catgaggggagcaaagg

SEQ ID NO: 46420 - DNA, 24 bp, Homo sapiens
cacgagggtgaccacctcagtggg

SEQ ID NO: 46421 - DNA, 23 bp, Homo sapiens
ggtcggtaccttcaggcccctgg

SEQ ID NO: 46422 - DNA, 22 bp, Homo sapiens
gtgcaggggaaggccccaggct

SEQ ID NO: 46423 - DNA, 21 bp, Homo sapiens
ttgttcacgattcctgaccca

SEQ ID NO: 46424 - DNA, 23 bp, Homo sapiens
gggagacccctgctgtccggtgt

SEQ ID NO: 46425 - DNA, 17 bp, Homo sapiens
tccatggggctcccttt

SEQ ID NO: 46426 - DNA, 23 bp, Homo sapiens
gaccagctggggagcaagggtcc

SEQ ID NO: 46427 - DNA, 24 bp, Homo sapiens
caggccggcccggtctgccctggg

SEQ ID NO: 46428 - DNA, 23 bp, Homo sapiens
atctgcaccatggaaagggggca

SEQ ID NO: 46429 - DNA, 16 bp, Homo sapiens
ggagggggcctgcagc

SEQ ID NO: 46430 - DNA, 18 bp, Homo sapiens
ggggtccctttttgggga

SEQ ID NO: 46431 - DNA, 21 bp, Homo sapiens
cagccacaccctggaagcaca

SEQ ID NO: 46432 - DNA, 24 bp, Homo sapiens
ctgcttcccacagggccctccagg

SEQ ID NO: 46433 - DNA, 24 bp, Homo sapiens
tagagaatttcaagaactggtgct

SEQ ID NO: 46434 - DNA, 24 bp, Homo sapiens
atgtcaggccaaggccaagcaggc

SEQ ID NO: 46435 - DNA, 19 bp, Homo sapiens
aaagtggttattatcagca

SEQ ID NO: 46436 - DNA, 21 bp, Homo sapiens
atctgagcctgtaatgacccc

SEQ ID NO: 46437 - DNA, 23 bp, Homo sapiens
gtgcagggcaggtgggcaaccag

SEQ ID NO: 46438 - DNA, 16 bp, Homo sapiens
ctcgagaggctttcct

SEQ ID NO: 46439 - DNA, 23 bp, Homo sapiens
cagcacatcctctcttctctggg

SEQ ID NO: 46440 - DNA, 16 bp, Homo sapiens
aaggaaagggctctta

SEQ ID NO: 46441 - DNA, 19 bp, Homo sapiens
ccaaatacactaggatggc

SEQ ID NO: 46442 - DNA, 23 bp, Homo sapiens
ttctccttatctgaccacctggc

SEQ ID NO: 46443 - DNA, 21 bp, Homo sapiens
ggcctaaggtcacctttacct

SEQ ID NO: 46444 - DNA, 24 bp, Homo sapiens
cgccaccaaccccaaggcctggcc

SEQ ID NO: 46445 - DNA, 23 bp, Homo sapiens
aggcaccaagggcctcccaggag

SEQ ID NO: 46446 - DNA, 24 bp, Homo sapiens
atctctcctggaggcccaattggc

SEQ ID NO: 46447 - DNA, 16 bp, Homo sapiens
ctaggggtgtgcttca

SEQ ID NO: 46448 - DNA, 23 bp, Homo sapiens
tacatccccagcagcatcatggg

SEQ ID NO: 46449 - DNA, 24 bp, Homo sapiens
ccctccagatcccaaagagggccc

SEQ ID NO: 46450 - DNA, 17 bp, Homo sapiens
acagggaatggcagaaa

SEQ ID NO: 46451 - DNA, 19 bp, Homo sapiens
ccctcagggaccccagggg

SEQ ID NO: 46452 - DNA, 21 bp, Homo sapiens
taccctctctgccagggcgtc

SEQ ID NO: 46453 - DNA, 24 bp, Homo sapiens
ctagttccagctccaagctccaag

SEQ ID NO: 46454 - DNA, 24 bp, Homo sapiens
ttcatcccggcttccccaggaagg

SEQ ID NO: 46455 - DNA, 16 bp, Homo sapiens
tgaccctgggtgttct

SEQ ID NO: 46456 - DNA, 23 bp, Homo sapiens
ccaccatctgggagctggtttca

SEQ ID NO: 46457 - DNA, 18 bp, Homo sapiens
ccagggggcagctcttgc

SEQ ID NO: 46458 - DNA, 17 bp, Homo sapiens
aacccattatcccagcc

SEQ ID NO: 46459 - DNA, 18 bp, Homo sapiens
cagtgggagaaccgggcc

SEQ ID NO: 46460 - DNA, 24 bp, Homo sapiens
tggtgttttacgatttctctgtgg

SEQ ID NO: 46461 - DNA, 21 bp, Homo sapiens
gcttcaacttacccgttgccc

SEQ ID NO: 46462 - DNA, 18 bp, Homo sapiens
aaagtcagagctggtgga

SEQ ID NO: 46463 - DNA, 23 bp, Homo sapiens
gaaaagccggtctcttcccctgc

SEQ ID NO: 46464 - DNA, 20 bp, Homo sapiens
cacccgcaaggacttttgtt

SEQ ID NO: 46465 - DNA, 20 bp, Homo sapiens
tgtagacattcatagtctat

SEQ ID NO: 46466 - DNA, 23 bp, Homo sapiens
ctcctggggagcagggcctcatt

SEQ ID NO: 46467 - DNA, 16 bp, Homo sapiens
ccactgtgtgccaggg

SEQ ID NO: 46468 - DNA, 19 bp, Homo sapiens
taaaagggcacttaccttc

SEQ ID NO: 46469 - DNA, 24 bp, Homo sapiens
cagggtcctgccccagggaggggg

SEQ ID NO: 46470 - DNA, 16 bp, Homo sapiens
ttaggtcttggatggg

SEQ ID NO: 46471 - DNA, 16 bp, Homo sapiens
tcctctttctccatca

SEQ ID NO: 46472 - DNA, 24 bp, Homo sapiens
aagctgctgtcaatgggagctgga

SEQ ID NO: 46473 - DNA, 24 bp, Homo sapiens
gacagtggccccatgggacctgat

SEQ ID NO: 46474 - DNA, 24 bp, Homo sapiens
tgggcttggcagccgagtcacagc

SEQ ID NO: 46475 - DNA, 16 bp, Homo sapiens
tctcgccatgttctcc

SEQ ID NO: 46476 - DNA, 23 bp, Homo sapiens
tctagggaccagttggctgtgga

SEQ ID NO: 46477 - DNA, 17 bp, Homo sapiens
gacaccagtgacgccag

SEQ ID NO: 46478 - DNA, 24 bp, Homo sapiens
gcacttggcaactaacttattctc

SEQ ID NO: 46479 - DNA, 21 bp, Homo sapiens
aggcatgagagttcagggtac

SEQ ID NO: 46480 - DNA, 22 bp, Homo sapiens
gagacccagggcctgatggaga

SEQ ID NO: 46481 - DNA, 16 bp, Homo sapiens
agcagaagatccttca

SEQ ID NO: 46482 - DNA, 23 bp, Homo sapiens
gacgggccccccggcccccctgg

SEQ ID NO: 46483 - DNA, 21 bp, Homo sapiens
tgggaaattaggtcaggctca

SEQ ID NO: 46484 - DNA, 22 bp, Homo sapiens
acacctaccttggctccagtgc

SEQ ID NO: 46485 - DNA, 17 bp, Homo sapiens
ctgcctccagagccgac

SEQ ID NO: 46486 - DNA, 18 bp, Homo sapiens
agggatgtggggaaggga

SEQ ID NO: 46487 - DNA, 24 bp, Homo sapiens
ttcctctcttctctcatctttctc

SEQ ID NO: 46488 - DNA, 16 bp, Homo sapiens
aacaggaggaaagaca

SEQ ID NO: 46489 - DNA, 22 bp, Homo sapiens
aaatcagggaagcaaggcgaga

SEQ ID NO: 46490 - DNA, 21 bp, Homo sapiens
cagggtctccagggacgccca

SEQ ID NO: 46491 - DNA, 23 bp, Homo sapiens
acttgataggcctgcgtccctcc

SEQ ID NO: 46492 - DNA, 16 bp, Homo sapiens
caccgttggtcccagg

SEQ ID NO: 46493 - DNA, 24 bp, Homo sapiens
ctccgtcctgttgggcctggtgac

SEQ ID NO: 46494 - DNA, 24 bp, Homo sapiens
tgtctcctttcctgcccttggttc

SEQ ID NO: 46495 - DNA, 19 bp, Homo sapiens
caaggacagctgggtgaga

SEQ ID NO: 46496 - DNA, 22 bp, Homo sapiens
gagcaccaggtgttcagctaat

SEQ ID NO: 46497 - DNA, 19 bp, Homo sapiens
taaagggtcccggggcagc

SEQ ID NO: 46498 - DNA, 24 bp, Homo sapiens
taatgttactggctttccgccttg

SEQ ID NO: 46499 - DNA, 21 bp, Homo sapiens
ggtgatatctgcttacatcat

SEQ ID NO: 46500 - DNA, 16 bp, Homo sapiens
cggagcggggctggag

SEQ ID NO: 46501 - DNA, 22 bp, Homo sapiens
gctggcatgggcctgtgtttcc

SEQ ID NO: 46502 - DNA, 16 bp, Homo sapiens
ctccataccaacgagg

SEQ ID NO: 46503 - DNA, 20 bp, Homo sapiens
cacatcttcagtattccagg

SEQ ID NO: 46504 - DNA, 23 bp, Homo sapiens
caaggagaaccgggactggctgg

SEQ ID NO: 46505 - DNA, 17 bp, Homo sapiens
cacatctggaaggccag

SEQ ID NO: 46506 - DNA, 21 bp, Homo sapiens
cttttggtccaggaggtccaa

SEQ ID NO: 46507 - DNA, 16 bp, Homo sapiens
ctggggcagagctggg

SEQ ID NO: 46508 - DNA, 16 bp, Homo sapiens
tcagacacgagggtgc

SEQ ID NO: 46509 - DNA, 23 bp, Homo sapiens
cctttgtccttcctgagtcctca

SEQ ID NO: 46510 - DNA, 16 bp, Homo sapiens
acaggcttctccagcc

SEQ ID NO: 46511 - DNA, 24 bp, Homo sapiens
ggacacaaaggcattgtgggaccc

SEQ ID NO: 46512 - DNA, 20 bp, Homo sapiens
tcctgcgggctgggcacagt

SEQ ID NO: 46513 - DNA, 17 bp, Homo sapiens
accagcctgagtctggc

SEQ ID NO: 46514 - DNA, 18 bp, Homo sapiens
cagggggcccctcagcct

SEQ ID NO: 46515 - DNA, 22 bp, Homo sapiens
ccatctgtaaccctaagcaggc

SEQ ID NO: 46516 - DNA, 16 bp, Homo sapiens
cacctaggacgccaca

SEQ ID NO: 46517 - DNA, 24 bp, Homo sapiens
aattccccacattccccaggagca

SEQ ID NO: 46518 - DNA, 20 bp, Homo sapiens
cggagctctcagggacctgg

SEQ ID NO: 46519 - DNA, 24 bp, Homo sapiens
ggagcagggcgaggacggcaaggc

SEQ ID NO: 46520 - DNA, 22 bp, Homo sapiens
aaatttgggccaccaggtgcca

SEQ ID NO: 46521 - DNA, 16 bp, Homo sapiens
gttccccgcggtctcc

SEQ ID NO: 46522 - DNA, 19 bp, Homo sapiens
gtgggccgatcaggggcca

SEQ ID NO: 46523 - DNA, 17 bp, Homo sapiens
atgcccgatcctgccag

SEQ ID NO: 46524 - DNA, 17 bp, Homo sapiens
ccagggctggcatcctt

SEQ ID NO: 46525 - DNA, 16 bp, Homo sapiens
gcacagaagcctggga

SEQ ID NO: 46526 - DNA, 24 bp, Homo sapiens
gtcattcagggccctgtgggtgat

SEQ ID NO: 46527 - DNA, 17 bp, Homo sapiens
ctgtccctggaagccaa

SEQ ID NO: 46528 - DNA, 17 bp, Homo sapiens
tatcagagctcctacct

SEQ ID NO: 46529 - DNA, 24 bp, Homo sapiens
aagcaccactcacgggttggccct

SEQ ID NO: 46530 - DNA, 23 bp, Homo sapiens
atgtctagaaagaacaagaactt

SEQ ID NO: 46531 - DNA, 20 bp, Homo sapiens
gttctttaattcccactgct

SEQ ID NO: 46532 - DNA, 22 bp, Homo sapiens
atgggcccccctcacctgtctc

SEQ ID NO: 46533 - DNA, 21 bp, Homo sapiens
aaacagaaatggctgccccag

SEQ ID NO: 46534 - DNA, 24 bp, Homo sapiens
gcctccgtggaaagccaggccagc

SEQ ID NO: 46535 - DNA, 23 bp, Homo sapiens
atcctttgggtcccggccacccc

SEQ ID NO: 46536 - DNA, 22 bp, Homo sapiens
tggggatgcccccagaacctgc

SEQ ID NO: 46537 - DNA, 16 bp, Homo sapiens
ggactcagtctccctg

SEQ ID NO: 46538 - DNA, 22 bp, Homo sapiens
gagactggccaccctccccggg

SEQ ID NO: 46539 - DNA, 22 bp, Homo sapiens
ctgcctcgcagcctctgcagcc

SEQ ID NO: 46540 - DNA, 24 bp, Homo sapiens
tttgcaggggcatccgggaccccg

SEQ ID NO: 46541 - DNA, 20 bp, Homo sapiens
atggggtcatggccagaagc

SEQ ID NO: 46542 - DNA, 23 bp, Homo sapiens
ctccggcctggggcccctgcctt

SEQ ID NO: 46543 - DNA, 18 bp, Homo sapiens
atctgtggcatcagatgt

SEQ ID NO: 46544 - DNA, 20 bp, Homo sapiens
gtggggggcgggcagggagg

SEQ ID NO: 46545 - DNA, 24 bp, Homo sapiens
cagagcccctagggtcccacacct

SEQ ID NO: 46546 - DNA, 19 bp, Homo sapiens
gggtacataaaaagctggt

SEQ ID NO: 46547 - DNA, 24 bp, Homo sapiens
cagggaccaaagggaaagcaaggc

SEQ ID NO: 46548 - DNA, 24 bp, Homo sapiens
atgccctcgaggccctgtctcccc

SEQ ID NO: 46549 - DNA, 22 bp, Homo sapiens
gtgactacagctgctgtttcca

SEQ ID NO: 46550 - DNA, 24 bp, Homo sapiens
tcccgctcacctgctgtcctgctt

SEQ ID NO: 46551 - DNA, 21 bp, Homo sapiens
cactccctgcaccaaatgccc

SEQ ID NO: 46552 - DNA, 16 bp, Homo sapiens
ggggaagttcccctac

SEQ ID NO: 46553 - DNA, 16 bp, Homo sapiens
ccggggcgtggtgggg

SEQ ID NO: 46554 - DNA, 23 bp, Homo sapiens
agagaacttctggatgtgttggt

SEQ ID NO: 46555 - DNA, 23 bp, Homo sapiens
ttcctggcagggacgggcaagca

SEQ ID NO: 46556 - DNA, 24 bp, Homo sapiens
tccagccacatcacacacaggccg

SEQ ID NO: 46557 - DNA, 22 bp, Homo sapiens
cacacctggatttcctctcttc

SEQ ID NO: 46558 - DNA, 22 bp, Homo sapiens
cacccagggtttgcccaggcgt

SEQ ID NO: 46559 - DNA, 19 bp, Homo sapiens
attaagaggtatctgacct

SEQ ID NO: 46560 - DNA, 24 bp, Homo sapiens
aagagaccctcctctgcctgcttt

SEQ ID NO: 46561 - DNA, 16 bp, Homo sapiens
agggtcggaaccacta

SEQ ID NO: 46562 - DNA, 22 bp, Homo sapiens
ccatgggccctgctgggaagag

SEQ ID NO: 46563 - DNA, 20 bp, Homo sapiens
ctgacggagaaaggtcaaca

SEQ ID NO: 46564 - DNA, 17 bp, Homo sapiens
ccaggattcaaggtcag

SEQ ID NO: 46565 - DNA, 16 bp, Homo sapiens
caccaggcctccattt

SEQ ID NO: 46566 - DNA, 21 bp, Homo sapiens
ccgttctgccctctgttcctc

SEQ ID NO: 46567 - DNA, 22 bp, Homo sapiens
gtggaatcactgttctggctct

SEQ ID NO: 46568 - DNA, 22 bp, Homo sapiens
tattctttggcgctcactcacc

SEQ ID NO: 46569 - DNA, 22 bp, Homo sapiens
ccactttgactggtaatttttt

SEQ ID NO: 46570 - DNA, 17 bp, Homo sapiens
ttgtacatgtaggtgta

SEQ ID NO: 46571 - DNA, 19 bp, Homo sapiens
ctgggtccccctggcaagc

SEQ ID NO: 46572 - DNA, 23 bp, Homo sapiens
tgtcacagagcaaggaggtggct

SEQ ID NO: 46573 - DNA, 16 bp, Homo sapiens
cctgggtccaaaggcc

SEQ ID NO: 46574 - DNA, 19 bp, Homo sapiens
catctagtttgtgagctgt

SEQ ID NO: 46575 - DNA, 16 bp, Homo sapiens
cttgggtccgaagaga

SEQ ID NO: 46576 - DNA, 18 bp, Homo sapiens
gaaaggctgggagggaaa

SEQ ID NO: 46577 - DNA, 24 bp, Homo sapiens
aaatgaatgaatggggtgaatgga

SEQ ID NO: 46578 - DNA, 16 bp, Homo sapiens
gaccatgagctcactc

SEQ ID NO: 46579 - DNA, 22 bp, Homo sapiens
attctggctgttttccagccaa

SEQ ID NO: 46580 - DNA, 16 bp, Homo sapiens
ttcccaggaatggcag

SEQ ID NO: 46581 - DNA, 19 bp, Homo sapiens
cctggatgcctttgaagcc

SEQ ID NO: 46582 - DNA, 17 bp, Homo sapiens
ggtaaggcctctcttga

SEQ ID NO: 46583 - DNA, 21 bp, Homo sapiens
aatcatctctgctccgacagc

SEQ ID NO: 46584 - DNA, 24 bp, Homo sapiens
gggagctgtgggggccctttaccc

SEQ ID NO: 46585 - DNA, 17 bp, Homo sapiens
gcaagaggaggatgaag

SEQ ID NO: 46586 - DNA, 24 bp, Homo sapiens
acagggcccgcctggagacattgg

SEQ ID NO: 46587 - DNA, 16 bp, Homo sapiens
acggcaggagtgaagg

SEQ ID NO: 46588 - DNA, 24 bp, Homo sapiens
caaatgaggggctcaggagatgca

SEQ ID NO: 46589 - DNA, 16 bp, Homo sapiens
tccaatccccacacat

SEQ ID NO: 46590 - DNA, 22 bp, Homo sapiens
gacgctcgggctgccctccacc

SEQ ID NO: 46591 - DNA, 17 bp, Homo sapiens
actgagtcacagagaca

SEQ ID NO: 46592 - DNA, 16 bp, Homo sapiens
catgagcctttctgtc

SEQ ID NO: 46593 - DNA, 24 bp, Homo sapiens
ccagtgagacagggcccagaggtg

SEQ ID NO: 46594 - DNA, 22 bp, Homo sapiens
gaatcctgggaccttcgggact

SEQ ID NO: 46595 - DNA, 20 bp, Homo sapiens
cttacccagtccccacggct

SEQ ID NO: 46596 - DNA, 24 bp, Homo sapiens
ggtccccttgccttcctggctcca

SEQ ID NO: 46597 - DNA, 23 bp, Homo sapiens
ctctgggagcccacccctccccc

SEQ ID NO: 46598 - DNA, 17 bp, Homo sapiens
gaaatggggcttcacct

SEQ ID NO: 46599 - DNA, 16 bp, Homo sapiens
gagggagacagaagca

SEQ ID NO: 46600 - DNA, 23 bp, Homo sapiens
agggtccgaagggtgacaaaggc

SEQ ID NO: 46601 - DNA, 16 bp, Homo sapiens
ccccgccccacagccc

SEQ ID NO: 46602 - DNA, 20 bp, Homo sapiens
gatgcagcactgcaggggcg

SEQ ID NO: 46603 - DNA, 24 bp, Homo sapiens
acgggatgacggaggtccggaggg

SEQ ID NO: 46604 - DNA, 23 bp, Homo sapiens
aggttccctaactctctcccctg

SEQ ID NO: 46605 - DNA, 23 bp, Homo sapiens
ctccccaacccagtccctcctca

SEQ ID NO: 46606 - DNA, 19 bp, Homo sapiens
ccggtggtacattctctcc

SEQ ID NO: 46607 - DNA, 22 bp, Homo sapiens
aagatgcacccagcactcagtt

SEQ ID NO: 46608 - DNA, 23 bp, Homo sapiens
attgtccctgggtcccaggtctg

SEQ ID NO: 46609 - DNA, 21 bp, Homo sapiens
caaggcttagtctgccggtga

SEQ ID NO: 46610 - DNA, 20 bp, Homo sapiens
tgtggaccagggctcactct

SEQ ID NO: 46611 - DNA, 17 bp, Homo sapiens
tgccctatactctccta

SEQ ID NO: 46612 - DNA, 19 bp, Homo sapiens
ggataggaccccctggagg

SEQ ID NO: 46613 - DNA, 19 bp, Homo sapiens
cccaccaagcctccgggaa

SEQ ID NO: 46614 - DNA, 16 bp, Homo sapiens
aaacccctcaggcctt

SEQ ID NO: 46615 - DNA, 24 bp, Homo sapiens
atggtctccctggtctcctgacac

SEQ ID NO: 46616 - DNA, 16 bp, Homo sapiens
tccctagacccagctt

SEQ ID NO: 46617 - DNA, 18 bp, Homo sapiens
cttcttttgcagggtcct

SEQ ID NO: 46618 - DNA, 18 bp, Homo sapiens
aatggcagggtcagcttt

SEQ ID NO: 46619 - DNA, 16 bp, Homo sapiens
ccatccacgtctggaa

SEQ ID NO: 46620 - DNA, 20 bp, Homo sapiens
gagggcatatgacttggcca

SEQ ID NO: 46621 - DNA, 24 bp, Homo sapiens
cccaggaagggatcccacatgggg

SEQ ID NO: 46622 - DNA, 16 bp, Homo sapiens
gtgtggagaaccctgg

SEQ ID NO: 46623 - DNA, 16 bp, Homo sapiens
gccacatggaaggcac

SEQ ID NO: 46624 - DNA, 24 bp, Homo sapiens
aagatgatcttggggcagctttcc

SEQ ID NO: 46625 - DNA, 22 bp, Homo sapiens
agtacaaacccccatttgtgga

SEQ ID NO: 46626 - DNA, 23 bp, Homo sapiens
ttcttgtctgcaaaataaagaga

SEQ ID NO: 46627 - DNA, 19 bp, Homo sapiens
ggtagtgtaaggttttaaa

SEQ ID NO: 46628 - DNA, 18 bp, Homo sapiens
ctcccaggttgtgagaac

SEQ ID NO: 46629 - DNA, 16 bp, Homo sapiens
ggggttctctttggtg

SEQ ID NO: 46630 - DNA, 16 bp, Homo sapiens
gtcccaatgaccaccc

SEQ ID NO: 46631 - DNA, 19 bp, Homo sapiens
ggaagccttctcaccatcc

SEQ ID NO: 46632 - DNA, 23 bp, Homo sapiens
ctggaccagggaggagagatctt

SEQ ID NO: 46633 - DNA, 18 bp, Homo sapiens
gcggaaatcaaatactcc

SEQ ID NO: 46634 - DNA, 22 bp, Homo sapiens
gcattaagacgcccctgggcac

SEQ ID NO: 46635 - DNA, 24 bp, Homo sapiens
tgactgctgagtgaataaatgact

SEQ ID NO: 46636 - DNA, 16 bp, Homo sapiens
gagcagaagatggtgg

SEQ ID NO: 46637 - DNA, 18 bp, Homo sapiens
gagcagccaaggtttgga

SEQ ID NO: 46638 - DNA, 17 bp, Homo sapiens
ctgacttcatgctcacc

SEQ ID NO: 46639 - DNA, 21 bp, Homo sapiens
tgatgggcttgagacacgtct

SEQ ID NO: 46640 - DNA, 17 bp, Homo sapiens
caaggaatgggctcatc

SEQ ID NO: 46641 - DNA, 16 bp, Homo sapiens
atagaggcagacagcc

SEQ ID NO: 46642 - DNA, 22 bp, Homo sapiens
caggtacctactgggtggatcc

SEQ ID NO: 46643 - DNA, 17 bp, Homo sapiens
aagacaggcacagctca

SEQ ID NO: 46644 - DNA, 21 bp, Homo sapiens
gcaacttcactcatggtggac

SEQ ID NO: 46645 - DNA, 22 bp, Homo sapiens
cccaatttatagataaggaaac

SEQ ID NO: 46646 - DNA, 20 bp, Homo sapiens
ccgtctatcaagtgggcaca

SEQ ID NO: 46647 - DNA, 20 bp, Homo sapiens
ggtcacctcggagcttagca

SEQ ID NO: 46648 - DNA, 18 bp, Homo sapiens
ctatccctgttccctcca

SEQ ID NO: 46649 - DNA, 24 bp, Homo sapiens
ttggctggggtctgcccagtgccc

SEQ ID NO: 46650 - DNA, 16 bp, Homo sapiens
gagccgctcactgccg

SEQ ID NO: 46651 - DNA, 17 bp, Homo sapiens
gacccccagcttcaaaa

SEQ ID NO: 46652 - DNA, 16 bp, Homo sapiens
agatgaatttcctgca

SEQ ID NO: 46653 - DNA, 24 bp, Homo sapiens
aagggcctaggaggggctctgaga

SEQ ID NO: 46654 - DNA, 20 bp, Homo sapiens
gccttaacatgaccgtgtgg

SEQ ID NO: 46655 - DNA, 23 bp, Homo sapiens
aatcttataatagaaacacattt

SEQ ID NO: 46656 - DNA, 17 bp, Homo sapiens
gggcctggaatggacag

SEQ ID NO: 46657 - DNA, 24 bp, Homo sapiens
acacaaagatgaaatcatatctat

SEQ ID NO: 46658 - DNA, 16 bp, Homo sapiens
tggatggctgcaaggt

SEQ ID NO: 46659 - DNA, 22 bp, Homo sapiens
cttacaagaataaaaagagtgg

SEQ ID NO: 46660 - DNA, 16 bp, Homo sapiens
ccggaaggtgaagagt

SEQ ID NO: 46661 - DNA, 21 bp, Homo sapiens
gaaatacagtatagccattaa

SEQ ID NO: 46662 - DNA, 16 bp, Homo sapiens
tccctgatgaggcagg

SEQ ID NO: 46663 - DNA, 22 bp, Homo sapiens
gtatgataagaatcacgatgga

SEQ ID NO: 46664 - DNA, 17 bp, Homo sapiens
agagtggccacgaggtc

SEQ ID NO: 46665 - DNA, 17 bp, Homo sapiens
ctggcatcagacactct

SEQ ID NO: 46666 - DNA, 22 bp, Homo sapiens
ctggagccatctgcccctcagt

SEQ ID NO: 46667 - DNA, 24 bp, Homo sapiens
ccatcatcagtgtggacaacctcc

SEQ ID NO: 46668 - DNA, 20 bp, Homo sapiens
gcagacaacagctggggtct

SEQ ID NO: 46669 - DNA, 24 bp, Homo sapiens
acctgcgtgcttcctctgacctct

SEQ ID NO: 46670 - DNA, 16 bp, Homo sapiens
ggcactgaaggtgaac

SEQ ID NO: 46671 - DNA, 22 bp, Homo sapiens
cacgaggtgtccaggccgccac

SEQ ID NO: 46672 - DNA, 20 bp, Homo sapiens
gacaaggctgtccaaggcca

SEQ ID NO: 46673 - DNA, 23 bp, Homo sapiens
gctccctcaccagataggcaatg

SEQ ID NO: 46674 - DNA, 21 bp, Homo sapiens
ctggctgtctcagggtcactc

SEQ ID NO: 46675 - DNA, 16 bp, Homo sapiens
gcagggggcagacagg

SEQ ID NO: 46676 - DNA, 23 bp, Homo sapiens
aaaggctccgtggttctggccta

SEQ ID NO: 46677 - DNA, 24 bp, Homo sapiens
agagaagaggccaggcttgaatga

SEQ ID NO: 46678 - DNA, 17 bp, Homo sapiens
aacaaggctatgacgtc

SEQ ID NO: 46679 - DNA, 21 bp, Homo sapiens
gaatctcacctctccaggcct

SEQ ID NO: 46680 - DNA, 16 bp, Homo sapiens
tgccttcttcctggct

SEQ ID NO: 46681 - DNA, 21 bp, Homo sapiens
tggaatggaagctgtctctgt

SEQ ID NO: 46682 - DNA, 23 bp, Homo sapiens
catcaccgccccactcccagccc

SEQ ID NO: 46683 - DNA, 23 bp, Homo sapiens
actcagggctccccccaggggct

SEQ ID NO: 46684 - DNA, 19 bp, Homo sapiens
gaagacacactggaaggga

SEQ ID NO: 46685 - DNA, 16 bp, Homo sapiens
gaagacttcgaggaag

SEQ ID NO: 46686 - DNA, 16 bp, Homo sapiens
aacaagagggttcaca

SEQ ID NO: 46687 - DNA, 17 bp, Homo sapiens
cagtgtgctgggattga

SEQ ID NO: 46688 - DNA, 18 bp, Homo sapiens
agatgaactcctccacaa

SEQ ID NO: 46689 - DNA, 24 bp, Homo sapiens
agcaccaggtacagcgggggtggc

SEQ ID NO: 46690 - DNA, 23 bp, Homo sapiens
aagagaggtgcccaggaggtagc

SEQ ID NO: 46691 - DNA, 19 bp, Homo sapiens
ccagatggcccctgtcctt

SEQ ID NO: 46692 - DNA, 18 bp, Homo sapiens
acttggccccctcccgct

SEQ ID NO: 46693 - DNA, 21 bp, Homo sapiens
tcattgaggatgtcagcaggg

SEQ ID NO: 46694 - DNA, 17 bp, Homo sapiens
atctccctctgcccggc

SEQ ID NO: 46695 - DNA, 19 bp, Homo sapiens
gcactgtatgaggaccgct

SEQ ID NO: 46696 - DNA, 22 bp, Homo sapiens
gaggcacaccaggaaaccgctc

SEQ ID NO: 46697 - DNA, 16 bp, Homo sapiens
aaacaagtggaaatcg

SEQ ID NO: 46698 - DNA, 16 bp, Homo sapiens
ctctcattggggtcta

SEQ ID NO: 46699 - DNA, 17 bp, Homo sapiens
tagcagctgagctcaaa

SEQ ID NO: 46700 - DNA, 20 bp, Homo sapiens
atgtgtacacgctctgccca

SEQ ID NO: 46701 - DNA, 23 bp, Homo sapiens
tgctgcagatgctagtgctccct

SEQ ID NO: 46702 - DNA, 16 bp, Homo sapiens
actccagaacccccat

SEQ ID NO: 46703 - DNA, 23 bp, Homo sapiens
agattctgtgcctgtcctgtgga

SEQ ID NO: 46704 - DNA, 24 bp, Homo sapiens
caggggaacgatcaggtccggttt

SEQ ID NO: 46705 - DNA, 24 bp, Homo sapiens
cagcgaagggagcctccccagcag

SEQ ID NO: 46706 - DNA, 21 bp, Homo sapiens
atggggctccctctcaccctc

SEQ ID NO: 46707 - DNA, 20 bp, Homo sapiens
atcaggtcattgcggccctt

SEQ ID NO: 46708 - DNA, 22 bp, Homo sapiens
cccccatgggcccctcccagga

SEQ ID NO: 46709 - DNA, 16 bp, Homo sapiens
gggggctatagggaaa

SEQ ID NO: 46710 - DNA, 24 bp, Homo sapiens
cacagctcggccctcccggctctg

SEQ ID NO: 46711 - DNA, 19 bp, Homo sapiens
gtcagtcccggcctaggcc

SEQ ID NO: 46712 - DNA, 22 bp, Homo sapiens
gcctgaattctacaaccggttc

SEQ ID NO: 46713 - DNA, 21 bp, Homo sapiens
aggggacagaggccacgtgtg

SEQ ID NO: 46714 - DNA, 19 bp, Homo sapiens
caatagggtccccccaggg

SEQ ID NO: 46715 - DNA, 21 bp, Homo sapiens
tccatgctccacgggttcttg

SEQ ID NO: 46716 - DNA, 20 bp, Homo sapiens
ttgtctgaatgggggccaga

SEQ ID NO: 46717 - DNA, 19 bp, Homo sapiens
aggaccaaggatgggtgga

SEQ ID NO: 46718 - DNA, 24 bp, Homo sapiens
acggacctcacgcgtccttccagc

SEQ ID NO: 46719 - DNA, 19 bp, Homo sapiens
tgtgggggtcaccaggacg

SEQ ID NO: 46720 - DNA, 24 bp, Homo sapiens
gggattcccatcccggtcactccc

SEQ ID NO: 46721 - DNA, 20 bp, Homo sapiens
gagccgggcgcttcgacctc

SEQ ID NO: 46722 - DNA, 20 bp, Homo sapiens
gtgactatggtgggcccaga

SEQ ID NO: 46723 - DNA, 23 bp, Homo sapiens
gaggagatggggtttgggggatt

SEQ ID NO: 46724 - DNA, 23 bp, Homo sapiens
agagtaaaaggcagaccaggctc

SEQ ID NO: 46725 - DNA, 17 bp, Homo sapiens
aaatacatcagacagca

SEQ ID NO: 46726 - DNA, 21 bp, Homo sapiens
gacatgccatgtccctcccca

SEQ ID NO: 46727 - DNA, 24 bp, Homo sapiens
aacacaggcagggctcggccccag

SEQ ID NO: 46728 - DNA, 24 bp, Homo sapiens
aggctggaatcctggagaacccca

SEQ ID NO: 46729 - DNA, 24 bp, Homo sapiens
ggtcctgggtcttcgtgtagagac

SEQ ID NO: 46730 - DNA, 20 bp, Homo sapiens
cccaccagctggtggggaaa

SEQ ID NO: 46731 - DNA, 17 bp, Homo sapiens
taccttttttgaactcg

SEQ ID NO: 46732 - DNA, 24 bp, Homo sapiens
aggtgggctgtagggtgtccaggg

SEQ ID NO: 46733 - DNA, 16 bp, Homo sapiens
ggggaaaggagccagg

SEQ ID NO: 46734 - DNA, 24 bp, Homo sapiens
agaaccaagcgcctccaggtctct

SEQ ID NO: 46735 - DNA, 17 bp, Homo sapiens
cctgaactctagcttcc

SEQ ID NO: 46736 - DNA, 17 bp, Homo sapiens
gacattctcgagatcga

SEQ ID NO: 46737 - DNA, 22 bp, Homo sapiens
tctctccctgcagcaggcctca

SEQ ID NO: 46738 - DNA, 18 bp, Homo sapiens
gtctggtgggtggtgcca

SEQ ID NO: 46739 - DNA, 19 bp, Homo sapiens
tgtcacatccatttaaggc

SEQ ID NO: 46740 - DNA, 16 bp, Homo sapiens
gggctgcagacactca

SEQ ID NO: 46741 - DNA, 24 bp, Homo sapiens
tgcagactcctccgctgagccggg

SEQ ID NO: 46742 - DNA, 23 bp, Homo sapiens
acaaccattagctgcaacggtcc

SEQ ID NO: 46743 - DNA, 24 bp, Homo sapiens
gtgaaggtgaccaacgtcaaggat

SEQ ID NO: 46744 - DNA, 22 bp, Homo sapiens
ggaaactctgtggctatgggga

SEQ ID NO: 46745 - DNA, 24 bp, Homo sapiens
catgtacctgaacgaagtcgcgtg

SEQ ID NO: 46746 - DNA, 24 bp, Homo sapiens
tccagtgggcacctggactaggtg

SEQ ID NO: 46747 - DNA, 22 bp, Homo sapiens
tgaagcggttctccacgatgtc

SEQ ID NO: 46748 - DNA, 23 bp, Homo sapiens
cctgaaatgctgcctaatgtgtg

SEQ ID NO: 46749 - DNA, 16 bp, Homo sapiens
cgaggcaggccctgag

SEQ ID NO: 46750 - DNA, 24 bp, Homo sapiens
ggtgggtgactctgagccttgcgg

SEQ ID NO: 46751 - DNA, 20 bp, Homo sapiens
acggagcatgggggtagtag

SEQ ID NO: 46752 - DNA, 23 bp, Homo sapiens
caagcatggcgtgggccgtattg

SEQ ID NO: 46753 - DNA, 16 bp, Homo sapiens
ggcaggagggaaactg

SEQ ID NO: 46754 - DNA, 16 bp, Homo sapiens
aaggatggtgcctgct

SEQ ID NO: 46755 - DNA, 20 bp, Homo sapiens
cttgtctcctgtcagacgac

SEQ ID NO: 46756 - DNA, 17 bp, Homo sapiens
ggccttgtttgattttg

SEQ ID NO: 46757 - DNA, 21 bp, Homo sapiens
cagtttgggtttcatgcgttt

SEQ ID NO: 46758 - DNA, 18 bp, Homo sapiens
ggcagccatagagtctta

SEQ ID NO: 46759 - DNA, 17 bp, Homo sapiens
ggtatctacgagacccc

SEQ ID NO: 46760 - DNA, 17 bp, Homo sapiens
gaggggagggccaggcc

SEQ ID NO: 46761 - DNA, 24 bp, Homo sapiens
gaggccttcaccatggaccgggaa

SEQ ID NO: 46762 - DNA, 16 bp, Homo sapiens
tggggtctcacatgag

SEQ ID NO: 46763 - DNA, 20 bp, Homo sapiens
ctggcaagcgcacattgtgc

SEQ ID NO: 46764 - DNA, 24 bp, Homo sapiens
tccactcgctcctgggacttggcg

SEQ ID NO: 46765 - DNA, 20 bp, Homo sapiens
gtaaaccatggggcaccctt

SEQ ID NO: 46766 - DNA, 22 bp, Homo sapiens
gactcccggccgaggatgtaca

SEQ ID NO: 46767 - DNA, 17 bp, Homo sapiens
ctagtggtatcctgttt

SEQ ID NO: 46768 - DNA, 17 bp, Homo sapiens
agaatgaggtgtggggc

SEQ ID NO: 46769 - DNA, 21 bp, Homo sapiens
gtgaatttgtccgccactgca

SEQ ID NO: 46770 - DNA, 23 bp, Homo sapiens
gacatgtgctcaggcacagatgt

SEQ ID NO: 46771 - DNA, 18 bp, Homo sapiens
gtcctcaagggccaggtg

SEQ ID NO: 46772 - DNA, 20 bp, Homo sapiens
ggagcatagtggtgtctata

SEQ ID NO: 46773 - DNA, 17 bp, Homo sapiens
caatggaaagccgacgt

SEQ ID NO: 46774 - DNA, 18 bp, Homo sapiens
acctgagggaattgatgt

SEQ ID NO: 46775 - DNA, 24 bp, Homo sapiens
atctgggaggtggggctgcttctg

SEQ ID NO: 46776 - DNA, 22 bp, Homo sapiens
gctctcaaagcctaccctttac

SEQ ID NO: 46777 - DNA, 18 bp, Homo sapiens
gctgagctgacaagcttc

SEQ ID NO: 46778 - DNA, 16 bp, Homo sapiens
cagggcagggcagcag

SEQ ID NO: 46779 - DNA, 19 bp, Homo sapiens
gatgccaccgggttcatca

SEQ ID NO: 46780 - DNA, 20 bp, Homo sapiens
tggagggcaggaggggccag

SEQ ID NO: 46781 - DNA, 18 bp, Homo sapiens
gtctatttggcagtgacc

SEQ ID NO: 46782 - DNA, 20 bp, Homo sapiens
tcttaacaaacagctgcccc

SEQ ID NO: 46783 - DNA, 19 bp, Homo sapiens
tagcgcctgtacttggggg

SEQ ID NO: 46784 - DNA, 23 bp, Homo sapiens
gttattgttaatttacatttttc

SEQ ID NO: 46785 - DNA, 16 bp, Homo sapiens
ccccactacgctgcca

SEQ ID NO: 46786 - DNA, 24 bp, Homo sapiens
aggaatatcatcgtctccagagca

SEQ ID NO: 46787 - DNA, 23 bp, Homo sapiens
cagcccccagagagggagctgtg

SEQ ID NO: 46788 - DNA, 24 bp, Homo sapiens
gggttaccccgacttccctgccag

SEQ ID NO: 46789 - DNA, 22 bp, Homo sapiens
ccttgacgccctggccccactt

SEQ ID NO: 46790 - DNA, 22 bp, Homo sapiens
gagggtgctggcagggaacgga

SEQ ID NO: 46791 - DNA, 24 bp, Homo sapiens
gctccctcgtgtgaggtgcagggt

SEQ ID NO: 46792 - DNA, 21 bp, Homo sapiens
tgtacccagacaccagcttgg

SEQ ID NO: 46793 - DNA, 24 bp, Homo sapiens
tctacctcatccagccaggaggcg

SEQ ID NO: 46794 - DNA, 22 bp, Homo sapiens
cccatcccccgccgccccgcag

SEQ ID NO: 46795 - DNA, 24 bp, Homo sapiens
gtggataggtcagaactgggtccg

SEQ ID NO: 46796 - DNA, 22 bp, Homo sapiens
catggaggcctggcaggcccag

SEQ ID NO: 46797 - DNA, 23 bp, Homo sapiens
ggctcccgagggcacaaggccca

SEQ ID NO: 46798 - DNA, 22 bp, Homo sapiens
acccacccaggccttgggccgg

SEQ ID NO: 46799 - DNA, 21 bp, Homo sapiens
gggctgggggccagggaggct

SEQ ID NO: 46800 - DNA, 23 bp, Homo sapiens
cagatgagccttccttggcggaa

SEQ ID NO: 46801 - DNA, 24 bp, Homo sapiens
ctgccgggacgcagctctcggtac

SEQ ID NO: 46802 - DNA, 23 bp, Homo sapiens
atgggactctgaggggccgcagg

SEQ ID NO: 46803 - DNA, 24 bp, Homo sapiens
gaagttgcccagggctcccgaggg

SEQ ID NO: 46804 - DNA, 21 bp, Homo sapiens
acctgtcatgtggtgtggggc

SEQ ID NO: 46805 - DNA, 24 bp, Homo sapiens
gaggccattggccgggcccatttc

SEQ ID NO: 46806 - DNA, 17 bp, Homo sapiens
tcaggaggggcaggaca

SEQ ID NO: 46807 - DNA, 22 bp, Homo sapiens
gaaagtagaacttaaggagtcc

SEQ ID NO: 46808 - DNA, 17 bp, Homo sapiens
gtatttccgcaacatga

SEQ ID NO: 46809 - DNA, 23 bp, Homo sapiens
gggacccctgcgaccccgccgac

SEQ ID NO: 46810 - DNA, 24 bp, Homo sapiens
ttccagaaccgccgggccaaggag

SEQ ID NO: 46811 - DNA, 24 bp, Homo sapiens
taccggggaaggagacctcagcgt

SEQ ID NO: 46812 - DNA, 23 bp, Homo sapiens
ccttgggggcccccgcagagccg

SEQ ID NO: 46813 - DNA, 24 bp, Homo sapiens
ttggagccgccgcgggagcgcttc

SEQ ID NO: 46814 - DNA, 16 bp, Homo sapiens
ggacatgcgcgtggtg

SEQ ID NO: 46815 - DNA, 24 bp, Homo sapiens
cggcgtccttcttcagcctcttct

SEQ ID NO: 46816 - DNA, 23 bp, Homo sapiens
agcgcttacaacacctcgcccaa

SEQ ID NO: 46817 - DNA, 23 bp, Homo sapiens
gggcggggtgagcggccgcccgg

SEQ ID NO: 46818 - DNA, 17 bp, Homo sapiens
ggccacggccaagcggc

SEQ ID NO: 46819 - DNA, 24 bp, Homo sapiens
aagcaggggcgagcgctgacctgc

SEQ ID NO: 46820 - DNA, 22 bp, Homo sapiens
ggggtccggccggggccggagg

SEQ ID NO: 46821 - DNA, 16 bp, Homo sapiens
gtggcgcgccggcttg

SEQ ID NO: 46822 - DNA, 19 bp, Homo sapiens
atgggggtgggcacctgag

SEQ ID NO: 46823 - DNA, 22 bp, Homo sapiens
cttggcggtgatggtcgtgcgc

SEQ ID NO: 46824 - DNA, 18 bp, Homo sapiens
cgtttttgccaatcgctc

SEQ ID NO: 46825 - DNA, 19 bp, Homo sapiens
gtgactccgccgttcccgg

SEQ ID NO: 46826 - DNA, 21 bp, Homo sapiens
ctcatggaggacagccggctc

SEQ ID NO: 46827 - DNA, 24 bp, Homo sapiens
cccccttagtgagcgcttggggag

SEQ ID NO: 46828 - DNA, 18 bp, Homo sapiens
ctgctttgcctgcgtcgt

SEQ ID NO: 46829 - DNA, 24 bp, Homo sapiens
ccatttttttcagaccaggaaagg

SEQ ID NO: 46830 - DNA, 24 bp, Homo sapiens
cagctgggcatcccgcccacgcag

SEQ ID NO: 46831 - DNA, 24 bp, Homo sapiens
ttggcggtttcgtagtccgccttg

SEQ ID NO: 46832 - DNA, 18 bp, Homo sapiens
cgcgctgagcccggccct

SEQ ID NO: 46833 - DNA, 23 bp, Homo sapiens
cgcccgtggccagctgccgcttg

SEQ ID NO: 46834 - DNA, 17 bp, Homo sapiens
ttcccaggcagccgctt

SEQ ID NO: 46835 - DNA, 24 bp, Homo sapiens
gtcctgggcgcggcgcaccacctg

SEQ ID NO: 46836 - DNA, 16 bp, Homo sapiens
ccaggctggcgaccac

SEQ ID NO: 46837 - DNA, 16 bp, Homo sapiens
ccacccttaatttggc

SEQ ID NO: 46838 - DNA, 21 bp, Homo sapiens
tgcttcagccgaggggagagc

SEQ ID NO: 46839 - DNA, 23 bp, Homo sapiens
gattgcgagagacgcaggcttcg

SEQ ID NO: 46840 - DNA, 20 bp, Homo sapiens
cgccactggcacagcaagtg

SEQ ID NO: 46841 - DNA, 24 bp, Homo sapiens
gagtccctggggcaggcgtgccct

SEQ ID NO: 46842 - DNA, 16 bp, Homo sapiens
gtgcgctggctgtgac

SEQ ID NO: 46843 - DNA, 21 bp, Homo sapiens
aaaagtcgtccttgcagtaaa

SEQ ID NO: 46844 - DNA, 23 bp, Homo sapiens
gtggcttcactgcctcctggtct

SEQ ID NO: 46845 - DNA, 24 bp, Homo sapiens
gcgtgtggcagtcgctgcacttga

SEQ ID NO: 46846 - DNA, 21 bp, Homo sapiens
ctcggcagccctgagtcctgt

SEQ ID NO: 46847 - DNA, 23 bp, Homo sapiens
aagcggtccaggatgtgctggtc

SEQ ID NO: 46848 - DNA, 20 bp, Homo sapiens
aaatacaggctgaggcgccc

SEQ ID NO: 46849 - DNA, 24 bp, Homo sapiens
cgggagtcggcgggaggcgacctg

SEQ ID NO: 46850 - DNA, 24 bp, Homo sapiens
actcccgcccagatcctctagctc

SEQ ID NO: 46851 - DNA, 16 bp, Homo sapiens
gacgccgggcggcggg

SEQ ID NO: 46852 - DNA, 23 bp, Homo sapiens
atctcctggtctccccggtgcag

SEQ ID NO: 46853 - DNA, 23 bp, Homo sapiens
ttggacgccggttcggggctatt

SEQ ID NO: 46854 - DNA, 16 bp, Homo sapiens
cagtgctagcagcagg

SEQ ID NO: 46855 - DNA, 21 bp, Homo sapiens
gaggctccgggccccagggcg

SEQ ID NO: 46856 - DNA, 24 bp, Homo sapiens
gctccccgcgcgcctccatgggtc

SEQ ID NO: 46857 - DNA, 21 bp, Homo sapiens
gggatctggaaactcactctc

SEQ ID NO: 46858 - DNA, 16 bp, Homo sapiens
cgcgaccgagcgaggc

SEQ ID NO: 46859 - DNA, 24 bp, Homo sapiens
cggcgggactttctttgcctggcc

SEQ ID NO: 46860 - DNA, 18 bp, Homo sapiens
gaggagcgcgtctcgcgc

SEQ ID NO: 46861 - DNA, 17 bp, Homo sapiens
cgtttctgtcctcagtg

SEQ ID NO: 46862 - DNA, 22 bp, Homo sapiens
ctccctgccccgcacgacgcgg

SEQ ID NO: 46863 - DNA, 22 bp, Homo sapiens
cagacggcggcggccccgggcc

SEQ ID NO: 46864 - DNA, 24 bp, Homo sapiens
ggggcgggcagcgggcgcctcctt

SEQ ID NO: 46865 - DNA, 19 bp, Homo sapiens
tgagtgcaaatctgtctct

SEQ ID NO: 46866 - DNA, 17 bp, Homo sapiens
agctttggatgggcccc

SEQ ID NO: 46867 - DNA, 22 bp, Homo sapiens
gtgcatgatataaattccatac

SEQ ID NO: 46868 - DNA, 19 bp, Homo sapiens
acagtaagaacatcaagga

SEQ ID NO: 46869 - DNA, 27 bp, Homo sapiens
ttattaaaaatgtaagtaaaaattaat

SEQ ID NO: 46870 - DNA, 16 bp, Homo sapiens
aagccactaaggaaca

SEQ ID NO: 46871 - DNA, 24 bp, Homo sapiens
gtcattggtatatggaggttgttc

SEQ ID NO: 46872 - DNA, 18 bp, Homo sapiens
atgcaagaccaactctgg

SEQ ID NO: 46873 - DNA, 21 bp, Homo sapiens
tgtggtcactatgaaattcca

SEQ ID NO: 46874 - DNA, 19 bp, Homo sapiens
tgacacatgaggagaatgt

SEQ ID NO: 46875 - DNA, 17 bp, Homo sapiens
aactgtgcttttcagcc

SEQ ID NO: 46876 - DNA, 21 bp, Homo sapiens
acttaaaagttgcttcccctg

SEQ ID NO: 46877 - DNA, 24 bp, Homo sapiens
cagggcaaggggcaaatgtaacca

SEQ ID NO: 46878 - DNA, 17 bp, Homo sapiens
tgcacagaatggttctg

SEQ ID NO: 46879 - DNA, 18 bp, Homo sapiens
tgataatgtgttcagagg

SEQ ID NO: 46880 - DNA, 16 bp, Homo sapiens
cagagaaaccgtcttc

SEQ ID NO: 46881 - DNA, 20 bp, Homo sapiens
tttcttaaagggccctccca

SEQ ID NO: 46882 - DNA, 18 bp, Homo sapiens
agttagttgttgatcgag

SEQ ID NO: 46883 - DNA, 19 bp, Homo sapiens
acggcgggttctcaccaca

SEQ ID NO: 46884 - DNA, 23 bp, Homo sapiens
tttatttgatagtgactcacata

SEQ ID NO: 46885 - DNA, 20 bp, Homo sapiens
actgtggatactaggatggt

SEQ ID NO: 46886 - DNA, 19 bp, Homo sapiens
gacagctttctaaatgtca

SEQ ID NO: 46887 - DNA, 18 bp, Homo sapiens
gctggtttcatactctcg

SEQ ID NO: 46888 - DNA, 25 bp, Homo sapiens
gatgaaaggaaatgtatgttaataa

SEQ ID NO: 46889 - DNA, 20 bp, Homo sapiens
tggacaacatatatattcac

SEQ ID NO: 46890 - DNA, 17 bp, Homo sapiens
aaccaaaagaagtcgcc

SEQ ID NO: 46891 - DNA, 23 bp, Homo sapiens
ttgatcaatttcctccctttcaa

SEQ ID NO: 46892 - DNA, 16 bp, Homo sapiens
gtcagtctggaggtcc

SEQ ID NO: 46893 - DNA, 18 bp, Homo sapiens
catcacagcaaaacttcc

SEQ ID NO: 46894 - DNA, 17 bp, Homo sapiens
tggaaggaggtgtggaa

SEQ ID NO: 46895 - DNA, 19 bp, Homo sapiens
tcagagtttgctcctggcg

SEQ ID NO: 46896 - DNA, 18 bp, Homo sapiens
aagtacagaccctgaagc

SEQ ID NO: 46897 - DNA, 21 bp, Homo sapiens
gctggtacctgatagccccat

SEQ ID NO: 46898 - DNA, 21 bp, Homo sapiens
gaacctaagatggaagaagaa

SEQ ID NO: 46899 - DNA, 17 bp, Homo sapiens
ttctgattcctcctcac

SEQ ID NO: 46900 - DNA, 19 bp, Homo sapiens
gttgaggaggtcaaggaag

SEQ ID NO: 46901 - DNA, 18 bp, Homo sapiens
tcagggatatcttgagct

SEQ ID NO: 46902 - DNA, 18 bp, Homo sapiens
agagtcagaaggagaaaa

SEQ ID NO: 46903 - DNA, 20 bp, Homo sapiens
ttcttcttcttctgagtgtt

SEQ ID NO: 46904 - DNA, 16 bp, Homo sapiens
gagacaccctctgagg

SEQ ID NO: 46905 - DNA, 20 bp, Homo sapiens
ctcctctttcctacccttga

SEQ ID NO: 46906 - DNA, 19 bp, Homo sapiens
actgaatacagtgaagaag

SEQ ID NO: 46907 - DNA, 19 bp, Homo sapiens
cacaatgtttttccttgct

SEQ ID NO: 46908 - DNA, 17 bp, Homo sapiens
agaggaagcaacagaaa

SEQ ID NO: 46909 - DNA, 16 bp, Homo sapiens
actctcctcctcctca

SEQ ID NO: 46910 - DNA, 18 bp, Homo sapiens
aagagtggcagagacgcc

SEQ ID NO: 46911 - DNA, 19 bp, Homo sapiens
cagactcactgaactcaga

SEQ ID NO: 46912 - DNA, 20 bp, Homo sapiens
ttccccatgatttttaagaa

SEQ ID NO: 46913 - DNA, 23 bp, Homo sapiens
attcctcctctgattctacagtg

SEQ ID NO: 46914 - DNA, 17 bp, Homo sapiens
aaaaaccaccagcagct

SEQ ID NO: 46915 - DNA, 19 bp, Homo sapiens
ttatcttcttcctcaaggc

SEQ ID NO: 46916 - DNA, 20 bp, Homo sapiens
aaaaaaccaaaggttgaaat

SEQ ID NO: 46917 - DNA, 20 bp, Homo sapiens
ctcttttatcagctaatcct

SEQ ID NO: 46918 - DNA, 18 bp, Homo sapiens
gctatctccaagctgaca

SEQ ID NO: 46919 - DNA, 21 bp, Homo sapiens
ttccatgttgtgtatgtaggc

SEQ ID NO: 46920 - DNA, 18 bp, Homo sapiens
agctatcacccacagatt

SEQ ID NO: 46921 - DNA, 19 bp, Homo sapiens
actaggctctctaatttca

SEQ ID NO: 46922 - DNA, 23 bp, Homo sapiens
ttctgtctatatgcagtagaaat

SEQ ID NO: 46923 - DNA, 21 bp, Homo sapiens
ttcctccaaagacaaggcaat

SEQ ID NO: 46924 - DNA, 16 bp, Homo sapiens
gtgaggtggttggtga

SEQ ID NO: 46925 - DNA, 21 bp, Homo sapiens
gtgaaaggaatttctaaaagc

SEQ ID NO: 46926 - DNA, 20 bp, Homo sapiens
tatgaaatgcctcaatatgg

SEQ ID NO: 46927 - DNA, 25 bp, Homo sapiens
atatttttcttggaatattatctta

SEQ ID NO: 46928 - DNA, 21 bp, Homo sapiens
actcatggtagattctacaga

SEQ ID NO: 46929 - DNA, 19 bp, Homo sapiens
ctcatattcttcctcagct

SEQ ID NO: 46930 - DNA, 19 bp, Homo sapiens
ggtgctgtgtaaatatctg

SEQ ID NO: 46931 - DNA, 17 bp, Homo sapiens
acaatcgacggcgactc

SEQ ID NO: 46932 - DNA, 17 bp, Homo sapiens
tggccaggaatatggac

SEQ ID NO: 46933 - DNA, 17 bp, Homo sapiens
gtgagatcgacatgaca

SEQ ID NO: 46934 - DNA, 23 bp, Homo sapiens
ttttcaaatgcaatttttctttt

SEQ ID NO: 46935 - DNA, 30 bp, Homo sapiens
aataatttcctattaataaaatattaaaat

SEQ ID NO: 46936 - DNA, 21 bp, Homo sapiens
tcatggaattctaggtgtaga

SEQ ID NO: 46937 - DNA, 20 bp, Homo sapiens
cccatgctcataactgtaat

SEQ ID NO: 46938 - DNA, 23 bp, Homo sapiens
aattttaattgctttaactgaca

SEQ ID NO: 46939 - DNA, 24 bp, Homo sapiens
tgatgaggttaatatctttttaaa

SEQ ID NO: 46940 - DNA, 19 bp, Homo sapiens
tgaacaatattgtcgaggg

SEQ ID NO: 46941 - DNA, 23 bp, Homo sapiens
ggggtaaaataatagagtcttct

SEQ ID NO: 46942 - DNA, 16 bp, Homo sapiens
tgtgcccttcagaagt

SEQ ID NO: 46943 - DNA, 20 bp, Homo sapiens
gatcaacaagaggtttgccc

SEQ ID NO: 46944 - DNA, 20 bp, Homo sapiens
gtagctaacatgtacagtca

SEQ ID NO: 46945 - DNA, 17 bp, Homo sapiens
ttgtttttcagttccct

SEQ ID NO: 46946 - DNA, 16 bp, Homo sapiens
ccaaaaggcatcctca

SEQ ID NO: 46947 - DNA, 24 bp, Homo sapiens
gatgtgatttccatatttgttact

SEQ ID NO: 46948 - DNA, 18 bp, Homo sapiens
ttaagtcctctatgacac

SEQ ID NO: 46949 - DNA, 22 bp, Homo sapiens
tttgtgcgtagatagttttttt

SEQ ID NO: 46950 - DNA, 18 bp, Homo sapiens
tccacagagtgtgtctgt

SEQ ID NO: 46951 - DNA, 23 bp, Homo sapiens
ttctgctaagtttttaacgtgtc

SEQ ID NO: 46952 - DNA, 16 bp, Homo sapiens
cctccaccacctcctt

SEQ ID NO: 46953 - DNA, 16 bp, Homo sapiens
gttgatagctgtgtca

SEQ ID NO: 46954 - DNA, 16 bp, Homo sapiens
ttccgtttcaacgtct

SEQ ID NO: 46955 - DNA, 20 bp, Homo sapiens
tcgtgcatttaacacctgtt

SEQ ID NO: 46956 - DNA, 19 bp, Homo sapiens
tttttgtcctcctccctct

SEQ ID NO: 46957 - DNA, 20 bp, Homo sapiens
gtggagggcaaggaatagaa

SEQ ID NO: 46958 - DNA, 17 bp, Homo sapiens
ttctcctcctcctgctc

SEQ ID NO: 46959 - DNA, 21 bp, Homo sapiens
gaagaggtggtgttgggggac

SEQ ID NO: 46960 - DNA, 17 bp, Homo sapiens
caccaaacatctctcct

SEQ ID NO: 46961 - DNA, 17 bp, Homo sapiens
agggatagaaggaggag

SEQ ID NO: 46962 - DNA, 20 bp, Homo sapiens
agacacctatttgtatgtta

SEQ ID NO: 46963 - DNA, 18 bp, Homo sapiens
ggaggaggagcaagagga

SEQ ID NO: 46964 - DNA, 16 bp, Homo sapiens
cttggaactttctcct

SEQ ID NO: 46965 - DNA, 21 bp, Homo sapiens
gaggagggggaaggggacagg

SEQ ID NO: 46966 - DNA, 17 bp, Homo sapiens
aagaactgtggaactca

SEQ ID NO: 46967 - DNA, 21 bp, Homo sapiens
atttctttcggtttcaatagg

SEQ ID NO: 46968 - DNA, 20 bp, Homo sapiens
ttcagactcttcattttgct

SEQ ID NO: 46969 - DNA, 17 bp, Homo sapiens
aacacaaggccttgaag

SEQ ID NO: 46970 - DNA, 18 bp, Homo sapiens
gaaataaggcaaggtgaa

SEQ ID NO: 46971 - DNA, 19 bp, Homo sapiens
ttaggttctgatttgagtt

SEQ ID NO: 46972 - DNA, 17 bp, Homo sapiens
aagaggtagcagcaatc

SEQ ID NO: 46973 - DNA, 20 bp, Homo sapiens
tgagaagtgaggcctgggaa

SEQ ID NO: 46974 - DNA, 16 bp, Homo sapiens
gcagtggcaaggcacc

SEQ ID NO: 46975 - DNA, 17 bp, Homo sapiens
ccttctatcatcagtgt

SEQ ID NO: 46976 - DNA, 16 bp, Homo sapiens
cagcttacccaggagg

SEQ ID NO: 46977 - DNA, 19 bp, Homo sapiens
cttcagttgtaagcaatgg

SEQ ID NO: 46978 - DNA, 16 bp, Homo sapiens
agccaagagtaagtct

SEQ ID NO: 46979 - DNA, 17 bp, Homo sapiens
tttcagctttctgcctg

SEQ ID NO: 46980 - DNA, 21 bp, Homo sapiens
acaaattcagacatttcacag

SEQ ID NO: 46981 - DNA, 16 bp, Homo sapiens
ttcctcatcagcctcc

SEQ ID NO: 46982 - DNA, 20 bp, Homo sapiens
tgatgaggatgacttaagtg

SEQ ID NO: 46983 - DNA, 19 bp, Homo sapiens
atcttttctcttgggcccc

SEQ ID NO: 46984 - DNA, 19 bp, Homo sapiens
tgtagacggatcacttaag

SEQ ID NO: 46985 - DNA, 18 bp, Homo sapiens
acaaaatctgttctctgt

SEQ ID NO: 46986 - DNA, 17 bp, Homo sapiens
tcaacaagttgtgatgc

SEQ ID NO: 46987 - DNA, 16 bp, Homo sapiens
ggattatgggcactta

SEQ ID NO: 46988 - DNA, 18 bp, Homo sapiens
cttttccttctctaccat

SEQ ID NO: 46989 - DNA, 18 bp, Homo sapiens
acttcagtttgttgctct

SEQ ID NO: 46990 - DNA, 16 bp, Homo sapiens
aagctgtgtcacaact

SEQ ID NO: 46991 - DNA, 17 bp, Homo sapiens
ggaagaaaagggcatca

SEQ ID NO: 46992 - DNA, 18 bp, Homo sapiens
tgtttggcctttgatgtt

SEQ ID NO: 46993 - DNA, 16 bp, Homo sapiens
tcccctgctttgttga

SEQ ID NO: 46994 - DNA, 19 bp, Homo sapiens
ttttctgtttctcacctgt

SEQ ID NO: 46995 - DNA, 18 bp, Homo sapiens
gtaagtgagtctgtggca

SEQ ID NO: 46996 - DNA, 19 bp, Homo sapiens
cctgctcatattttcagaa

SEQ ID NO: 46997 - DNA, 23 bp, Homo sapiens
ttaatctgttctattgtatctat

SEQ ID NO: 46998 - DNA, 22 bp, Homo sapiens
taaaaacatgccttttttttga

SEQ ID NO: 46999 - DNA, 21 bp, Homo sapiens
tcaacttaacctttcttagat

SEQ ID NO: 47000 - DNA, 16 bp, Homo sapiens
ccaggtgcgcatctct

SEQ ID NO: 47001 - DNA, 24 bp, Homo sapiens
aataaaataaatagtccatgtagg

SEQ ID NO: 47002 - DNA, 16 bp, Homo sapiens
ggctaaaccagcagtg

SEQ ID NO: 47003 - DNA, 23 bp, Homo sapiens
ccacacagaattcagtaaaaccc

SEQ ID NO: 47004 - DNA, 18 bp, Homo sapiens
actttatccaagacgtca

SEQ ID NO: 47005 - DNA, 18 bp, Homo sapiens
tgtctccaagttcttcat

SEQ ID NO: 47006 - DNA, 22 bp, Homo sapiens
ttaaaaggtggcttattgataa

SEQ ID NO: 47007 - DNA, 17 bp, Homo sapiens
tggtgcaggagccggca

SEQ ID NO: 47008 - DNA, 24 bp, Homo sapiens
gtttataaattgatgtttgtgtaa

SEQ ID NO: 47009 - DNA, 19 bp, Homo sapiens
gtgcagtctttgtacactc

SEQ ID NO: 47010 - DNA, 21 bp, Homo sapiens
ccaattgtctaaaatcagctc

SEQ ID NO: 47011 - DNA, 20 bp, Homo sapiens
tttcttactcttgctttccc

SEQ ID NO: 47012 - DNA, 17 bp, Homo sapiens
acgcaaaacaagggaat

SEQ ID NO: 47013 - DNA, 22 bp, Homo sapiens
tcatgatttagaataaatcaga

SEQ ID NO: 47014 - DNA, 18 bp, Homo sapiens
cgggtttctcttttccta

SEQ ID NO: 47015 - DNA, 22 bp, Homo sapiens
tagttttcttagtctgtcatta

SEQ ID NO: 47016 - DNA, 19 bp, Homo sapiens
ctgttttccttttgaagaa

SEQ ID NO: 47017 - DNA, 20 bp, Homo sapiens
atcctctgctgcattcctgc

SEQ ID NO: 47018 - DNA, 24 bp, Homo sapiens
atctcagagtagttgcaccatcaa

SEQ ID NO: 47019 - DNA, 18 bp, Homo sapiens
agagaggagaaagtctag

SEQ ID NO: 47020 - DNA, 23 bp, Homo sapiens
ttctgcaatgacttctgaggaac

SEQ ID NO: 47021 - DNA, 16 bp, Homo sapiens
gggaaggaggacgcat

SEQ ID NO: 47022 - DNA, 16 bp, Homo sapiens
caccaagatggcagga

SEQ ID NO: 47023 - DNA, 24 bp, Homo sapiens
ctaacaataaagatttttggatgg

SEQ ID NO: 47024 - DNA, 20 bp, Homo sapiens
ccttctgtgtatcctagact

SEQ ID NO: 47025 - DNA, 25 bp, Homo sapiens
ttacaaaaagattttatttttaaaa

SEQ ID NO: 47026 - DNA, 16 bp, Homo sapiens
gatctccagaatgcgt

SEQ ID NO: 47027 - DNA, 18 bp, Homo sapiens
catgagacttctgactca

SEQ ID NO: 47028 - DNA, 17 bp, Homo sapiens
atcaagtagtttgccat

SEQ ID NO: 47029 - DNA, 19 bp, Homo sapiens
tttaaggcatgagaatcct

SEQ ID NO: 47030 - DNA, 17 bp, Homo sapiens
gcaattgacccccaaac

SEQ ID NO: 47031 - DNA, 18 bp, Homo sapiens
ttggtgggttttaaactt

SEQ ID NO: 47032 - DNA, 16 bp, Homo sapiens
cgccggcatggagatg

SEQ ID NO: 47033 - DNA, 22 bp, Homo sapiens
gttgctattgtaaccaaagagc

SEQ ID NO: 47034 - DNA, 16 bp, Homo sapiens
tcttggatcgctatgt

SEQ ID NO: 47035 - DNA, 18 bp, Homo sapiens
atcgatggctctgttggt

SEQ ID NO: 47036 - DNA, 16 bp, Homo sapiens
actcccagaaagccca

SEQ ID NO: 47037 - DNA, 17 bp, Homo sapiens
cttctagggaaaaggca

SEQ ID NO: 47038 - DNA, 17 bp, Homo sapiens
aaaactaggctgtcatc

SEQ ID NO: 47039 - DNA, 17 bp, Homo sapiens
tggcaccaggaatttgt

SEQ ID NO: 47040 - DNA, 16 bp, Homo sapiens
ttgggtggttggcaca

SEQ ID NO: 47041 - DNA, 20 bp, Homo sapiens
caatgtgcctcctactctag

SEQ ID NO: 47042 - DNA, 22 bp, Homo sapiens
atccatgtaacacacctgcaca

SEQ ID NO: 47043 - DNA, 21 bp, Homo sapiens
tgttttttcttctttcaggtc

SEQ ID NO: 47044 - DNA, 22 bp, Homo sapiens
aatcatggtcatataaaaataa

SEQ ID NO: 47045 - DNA, 19 bp, Homo sapiens
ggaagaggtaatgtggggg

SEQ ID NO: 47046 - DNA, 23 bp, Homo sapiens
tatctttttttccactagagtag

SEQ ID NO: 47047 - DNA, 26 bp, Homo sapiens
aatgtatatatatttgttcctgaatt

SEQ ID NO: 47048 - DNA, 22 bp, Homo sapiens
ctgattgaccacggagacctga

SEQ ID NO: 47049 - DNA, 23 bp, Homo sapiens
ttacatattcctaaactatagtg

SEQ ID NO: 47050 - DNA, 16 bp, Homo sapiens
tattgcaactgacgac

SEQ ID NO: 47051 - DNA, 23 bp, Homo sapiens
tgaaaacccgttttaaattaatc

SEQ ID NO: 47052 - DNA, 17 bp, Homo sapiens
acagggcttatcaaaac

SEQ ID NO: 47053 - DNA, 16 bp, Homo sapiens
gctacttccctttcct

SEQ ID NO: 47054 - DNA, 19 bp, Homo sapiens
cagactcataataccacca

SEQ ID NO: 47055 - DNA, 18 bp, Homo sapiens
gtcccttcccatagtcgt

SEQ ID NO: 47056 - DNA, 16 bp, Homo sapiens
tttttcccctccgtct

SEQ ID NO: 47057 - DNA, 18 bp, Homo sapiens
atggaagagcatagcagt

SEQ ID NO: 47058 - DNA, 21 bp, Homo sapiens
cttacaaacaaaagtaagcca

SEQ ID NO: 47059 - DNA, 20 bp, Homo sapiens
tccctctttaattggtggta

SEQ ID NO: 47060 - DNA, 21 bp, Homo sapiens
ccagaaaaaacagacatttag

SEQ ID NO: 47061 - DNA, 25 bp, Homo sapiens
ttacctgatataatctgtattgagt

SEQ ID NO: 47062 - DNA, 17 bp, Homo sapiens
tcggaggtgtatctgaa

SEQ ID NO: 47063 - DNA, 22 bp, Homo sapiens
gtttatacagcataagtatgca

SEQ ID NO: 47064 - DNA, 20 bp, Homo sapiens
tacattgagattcaggatga

SEQ ID NO: 47065 - DNA, 22 bp, Homo sapiens
gcaaaacctgagcttttacttt

SEQ ID NO: 47066 - DNA, 21 bp, Homo sapiens
cccccatgaataaccaccaat

SEQ ID NO: 47067 - DNA, 21 bp, Homo sapiens
cagaagtaaacattcttgcat

SEQ ID NO: 47068 - DNA, 24 bp, Homo sapiens
atttattttcaatgtttccaaaaa

SEQ ID NO: 47069 - DNA, 20 bp, Homo sapiens
aacactgggggatgattatt

SEQ ID NO: 47070 - DNA, 16 bp, Homo sapiens
tgtcccctgaatttgg

SEQ ID NO: 47071 - DNA, 16 bp, Homo sapiens
ggaagtggtccttgcc

SEQ ID NO: 47072 - DNA, 19 bp, Homo sapiens
atctttctatgttgtccac

SEQ ID NO: 47073 - DNA, 17 bp, Homo sapiens
tgtgaatggacctctgg

SEQ ID NO: 47074 - DNA, 16 bp, Homo sapiens
aattagcagagacacc

SEQ ID NO: 47075 - DNA, 24 bp, Homo sapiens
gaccaggtaattgtattttaattt

SEQ ID NO: 47076 - DNA, 18 bp, Homo sapiens
aactcggagattggcaag

SEQ ID NO: 47077 - DNA, 18 bp, Homo sapiens
aatcacagtgccttttaa

SEQ ID NO: 47078 - DNA, 16 bp, Homo sapiens
gcttgtcctggtctca

SEQ ID NO: 47079 - DNA, 18 bp, Homo sapiens
agccagcattttgtcact

SEQ ID NO: 47080 - DNA, 21 bp, Homo sapiens
ggatttttaatcgagttcagg

SEQ ID NO: 47081 - DNA, 19 bp, Homo sapiens
tgctgctgccattaatcaa

SEQ ID NO: 47082 - DNA, 23 bp, Homo sapiens
caattttattagaaaacaataga

SEQ ID NO: 47083 - DNA, 18 bp, Homo sapiens
tgcagacctcctccagta

SEQ ID NO: 47084 - DNA, 18 bp, Homo sapiens
aagtttactggttgatgg

SEQ ID NO: 47085 - DNA, 21 bp, Homo sapiens
ctgtgaacgtaaagttacatc

SEQ ID NO: 47086 - DNA, 22 bp, Homo sapiens
aacaatggagtacacaatactt

SEQ ID NO: 47087 - DNA, 16 bp, Homo sapiens
gtgagggcagagggta

SEQ ID NO: 47088 - DNA, 22 bp, Homo sapiens
ccatggtccctttggtggcaag

SEQ ID NO: 47089 - DNA, 23 bp, Homo sapiens
ttaaccatttaaaaatttaaact

SEQ ID NO: 47090 - DNA, 19 bp, Homo sapiens
cacagtgaagattcttgtc

SEQ ID NO: 47091 - DNA, 24 bp, Homo sapiens
aaattggaagtctactcataaatt

SEQ ID NO: 47092 - DNA, 16 bp, Homo sapiens
gttggtggtggttgct

SEQ ID NO: 47093 - DNA, 22 bp, Homo sapiens
catttcgtgtatttcaaaatcg

SEQ ID NO: 47094 - DNA, 25 bp, Homo sapiens
atacatataaaaattgtgctgttac

SEQ ID NO: 47095 - DNA, 20 bp, Homo sapiens
gtgggatctcaccaggatgt

SEQ ID NO: 47096 - DNA, 20 bp, Homo sapiens
ggaaatgatcattgcttccc

SEQ ID NO: 47097 - DNA, 24 bp, Homo sapiens
catcacaggctccccatcatcaaa

SEQ ID NO: 47098 - DNA, 19 bp, Homo sapiens
acgagtcaatcttaatgaa

SEQ ID NO: 47099 - DNA, 25 bp, Homo sapiens
atttaaaaaaattaaaaaggagaaa

SEQ ID NO: 47100 - DNA, 17 bp, Homo sapiens
gtttccttaccctgcca

SEQ ID NO: 47101 - DNA, 20 bp, Homo sapiens
gccaaattctctatcaaaaa

SEQ ID NO: 47102 - DNA, 25 bp, Homo sapiens
attaataattttattttagggatta

SEQ ID NO: 47103 - DNA, 23 bp, Homo sapiens
taaaaattgttgtaggttcttca

SEQ ID NO: 47104 - DNA, 25 bp, Homo sapiens
gaattttaaagatccatttaatatt

SEQ ID NO: 47105 - DNA, 19 bp, Homo sapiens
cttcttccacttcaaaaat

SEQ ID NO: 47106 - DNA, 18 bp, Homo sapiens
tcagctctgaaagaatga

SEQ ID NO: 47107 - DNA, 18 bp, Homo sapiens
cacacgacttgcaggtaa

SEQ ID NO: 47108 - DNA, 19 bp, Homo sapiens
tgaaatatgctctgtacct

SEQ ID NO: 47109 - DNA, 18 bp, Homo sapiens
acctatcacaacagttta

SEQ ID NO: 47110 - DNA, 24 bp, Homo sapiens
gtatgaataaatagggtgaaattt

SEQ ID NO: 47111 - DNA, 18 bp, Homo sapiens
tcctcctgtctttagtaa

SEQ ID NO: 47112 - DNA, 23 bp, Homo sapiens
tgttaaggatttttctcagtaca

SEQ ID NO: 47113 - DNA, 18 bp, Homo sapiens
cctggtttcaactgaagt

SEQ ID NO: 47114 - DNA, 21 bp, Homo sapiens
ggagggtctgcatcttcagca

SEQ ID NO: 47115 - DNA, 20 bp, Homo sapiens
cagtggtaaataagttgtgt

SEQ ID NO: 47116 - DNA, 19 bp, Homo sapiens
caccatccctttgtatatt

SEQ ID NO: 47117 - DNA, 16 bp, Homo sapiens
cctctgaggtgccagt

SEQ ID NO: 47118 - DNA, 19 bp, Homo sapiens
tgccacctggtattgctac

SEQ ID NO: 47119 - DNA, 19 bp, Homo sapiens
gggtctggtaccactgtgt

SEQ ID NO: 47120 - DNA, 16 bp, Homo sapiens
cagaccaagaagcaag

SEQ ID NO: 47121 - DNA, 19 bp, Homo sapiens
ggaacaaaacctacatgta

SEQ ID NO: 47122 - DNA, 19 bp, Homo sapiens
cactacatccatttacagg

SEQ ID NO: 47123 - DNA, 20 bp, Homo sapiens
ctttacaatcactgtgacag

SEQ ID NO: 47124 - DNA, 16 bp, Homo sapiens
accttggagcaaatgt

SEQ ID NO: 47125 - DNA, 20 bp, Homo sapiens
ggcctctaccagaaaagtga

SEQ ID NO: 47126 - DNA, 20 bp, Homo sapiens
tttctttattttggtaacgt

SEQ ID NO: 47127 - DNA, 21 bp, Homo sapiens
cttaaaagcgatagttctcct

SEQ ID NO: 47128 - DNA, 19 bp, Homo sapiens
gtcctcgttaaattgatgc

SEQ ID NO: 47129 - DNA, 16 bp, Homo sapiens
ccggtaagacacattt

SEQ ID NO: 47130 - DNA, 22 bp, Homo sapiens
tcttccctggtaaattattaaa

SEQ ID NO: 47131 - DNA, 16 bp, Homo sapiens
agagaatttgccagct

SEQ ID NO: 47132 - DNA, 23 bp, Homo sapiens
aaattaaaatccaacttggtatg

SEQ ID NO: 47133 - DNA, 19 bp, Homo sapiens
aaggttttggacattgatg

SEQ ID NO: 47134 - DNA, 19 bp, Homo sapiens
ccctaatagcaaatctcct

SEQ ID NO: 47135 - DNA, 18 bp, Homo sapiens
ttgttgtggcaacagatg

SEQ ID NO: 47136 - DNA, 21 bp, Homo sapiens
tatttgaaggatggtagtccc

SEQ ID NO: 47137 - DNA, 17 bp, Homo sapiens
gcatttacacagcagtg

SEQ ID NO: 47138 - DNA, 16 bp, Homo sapiens
tgaacacaggactgtt

SEQ ID NO: 47139 - DNA, 16 bp, Homo sapiens
tcaagtgcactacagt

SEQ ID NO: 47140 - DNA, 19 bp, Homo sapiens
ttgaatgacgagggtgtac

SEQ ID NO: 47141 - DNA, 21 bp, Homo sapiens
tgaatttttttgtttttttgt

SEQ ID NO: 47142 - DNA, 20 bp, Homo sapiens
ctgacttctctgttaagctt

SEQ ID NO: 47143 - DNA, 19 bp, Homo sapiens
ttggttagaaaaataccat

SEQ ID NO: 47144 - DNA, 19 bp, Homo sapiens
ttaaagttacccaaactgt

SEQ ID NO: 47145 - DNA, 20 bp, Homo sapiens
tgttttaaattttgcattgt

SEQ ID NO: 47146 - DNA, 24 bp, Homo sapiens
tgaaagttaattaaaatatatagg

SEQ ID NO: 47147 - DNA, 17 bp, Homo sapiens
tctgtggtggaagaaga

SEQ ID NO: 47148 - DNA, 21 bp, Homo sapiens
tccagcacagtcatttaacag

SEQ ID NO: 47149 - DNA, 19 bp, Homo sapiens
tggtgacagatgtcaatga

SEQ ID NO: 47150 - DNA, 20 bp, Homo sapiens
ctctttgaaaaactacatat

SEQ ID NO: 47151 - DNA, 18 bp, Homo sapiens
tagctcctctcacattta

SEQ ID NO: 47152 - DNA, 17 bp, Homo sapiens
caaaggcattggcttct

SEQ ID NO: 47153 - DNA, 17 bp, Homo sapiens
tgcttttcagatagaca

SEQ ID NO: 47154 - DNA, 18 bp, Homo sapiens
caaacactggagcattgt

SEQ ID NO: 47155 - DNA, 23 bp, Homo sapiens
tttttaatttttttattttttta

SEQ ID NO: 47156 - DNA, 24 bp, Homo sapiens
ggtgcatgtattaatagcctgttg

SEQ ID NO: 47157 - DNA, 16 bp, Homo sapiens
gaaagcactgatcgct

SEQ ID NO: 47158 - DNA, 24 bp, Homo sapiens
atgaaaaacattaattcatgtctg

SEQ ID NO: 47159 - DNA, 17 bp, Homo sapiens
tgtttgtttgttttgtc

SEQ ID NO: 47160 - DNA, 17 bp, Homo sapiens
ttttaaaaccccttcac

SEQ ID NO: 47161 - DNA, 23 bp, Homo sapiens
gctatcaaaagtaattcactata

SEQ ID NO: 47162 - DNA, 20 bp, Homo sapiens
aagctgtgatgatcagaatg

SEQ ID NO: 47163 - DNA, 27 bp, Homo sapiens
cagaatgaatcttagtattatacatct

SEQ ID NO: 47164 - DNA, 16 bp, Homo sapiens
gaatccccgtgctagt

SEQ ID NO: 47165 - DNA, 19 bp, Homo sapiens
tcagaattatcctcccagc

SEQ ID NO: 47166 - DNA, 18 bp, Homo sapiens
gactcaataacatatgcc

SEQ ID NO: 47167 - DNA, 22 bp, Homo sapiens
acaactacaaacagctgaaagc

SEQ ID NO: 47168 - DNA, 20 bp, Homo sapiens
cgccatatcaattacttgat

SEQ ID NO: 47169 - DNA, 25 bp, Homo sapiens
catttttttaaagtaggaaatcatt

SEQ ID NO: 47170 - DNA, 20 bp, Homo sapiens
gtcatggacattctgtgcta

SEQ ID NO: 47171 - DNA, 21 bp, Homo sapiens
aggatctccattctcaatggc

SEQ ID NO: 47172 - DNA, 19 bp, Homo sapiens
tgtttgattttacaccttg

SEQ ID NO: 47173 - DNA, 16 bp, Homo sapiens
gccatgagggttggtg

SEQ ID NO: 47174 - DNA, 22 bp, Homo sapiens
actagagtggaggcaagcatgt

SEQ ID NO: 47175 - DNA, 18 bp, Homo sapiens
ccaccaaataatcaaagc

SEQ ID NO: 47176 - DNA, 19 bp, Homo sapiens
agcttgtcactttagaatt

SEQ ID NO: 47177 - DNA, 22 bp, Homo sapiens
aaccatcttcttttcctctctt

SEQ ID NO: 47178 - DNA, 18 bp, Homo sapiens
ttaataaaacagcaccaa

SEQ ID NO: 47179 - DNA, 18 bp, Homo sapiens
gtaaacccaacaactgaa

SEQ ID NO: 47180 - DNA, 16 bp, Homo sapiens
tgggaagcgaggaggg

SEQ ID NO: 47181 - DNA, 20 bp, Homo sapiens
tttctatcctttcattttga

SEQ ID NO: 47182 - DNA, 16 bp, Homo sapiens
gcagcggataatgctc

SEQ ID NO: 47183 - DNA, 23 bp, Homo sapiens
tctctctgattttctgatctaat

SEQ ID NO: 47184 - DNA, 18 bp, Homo sapiens
ggcttatcaccatcgctc

SEQ ID NO: 47185 - DNA, 19 bp, Homo sapiens
taattacagggttaaacgg

SEQ ID NO: 47186 - DNA, 22 bp, Homo sapiens
atcacatatgaaatccttgttg

SEQ ID NO: 47187 - DNA, 24 bp, Homo sapiens
taaattaccttcgctctgcaggag

SEQ ID NO: 47188 - DNA, 20 bp, Homo sapiens
atgttgtgattttcaattcc

SEQ ID NO: 47189 - DNA, 18 bp, Homo sapiens
gactatcatttccacccc

SEQ ID NO: 47190 - DNA, 19 bp, Homo sapiens
agcaagcttcttttgttgg

SEQ ID NO: 47191 - DNA, 19 bp, Homo sapiens
agtctccctgagccccaac

SEQ ID NO: 47192 - DNA, 19 bp, Homo sapiens
acaaaaaacaaaaaacagt

SEQ ID NO: 47193 - DNA, 22 bp, Homo sapiens
aaaagtaacagaaatttaaagc

SEQ ID NO: 47194 - DNA, 22 bp, Homo sapiens
ttccctgaaatatcctatgatg

SEQ ID NO: 47195 - DNA, 20 bp, Homo sapiens
tcaatttctgtttcttaagt

SEQ ID NO: 47196 - DNA, 16 bp, Homo sapiens
agccagtcatcgtcaa

SEQ ID NO: 47197 - DNA, 20 bp, Homo sapiens
aacagctttgagtgtacact

SEQ ID NO: 47198 - DNA, 19 bp, Homo sapiens
acatctctactaagtgtat

SEQ ID NO: 47199 - DNA, 19 bp, Homo sapiens
gtctgtataaacatacaca

SEQ ID NO: 47200 - DNA, 18 bp, Homo sapiens
tacctgtaagaaacttgt

SEQ ID NO: 47201 - DNA, 21 bp, Homo sapiens
tcatttgcatccatcacttga

SEQ ID NO: 47202 - DNA, 19 bp, Homo sapiens
gtctctattacgtcctttt

SEQ ID NO: 47203 - DNA, 17 bp, Homo sapiens
ggacagggaagaacagc

SEQ ID NO: 47204 - DNA, 20 bp, Homo sapiens
aatgtatttttcccccaagt

SEQ ID NO: 47205 - DNA, 17 bp, Homo sapiens
acacctcagtcttcacc

SEQ ID NO: 47206 - DNA, 20 bp, Homo sapiens
ccatacaaacatacatacat

SEQ ID NO: 47207 - DNA, 22 bp, Homo sapiens
tgaaacgatgtcattttttttc

SEQ ID NO: 47208 - DNA, 18 bp, Homo sapiens
aaaggtgtaagtttgctg

SEQ ID NO: 47209 - DNA, 24 bp, Homo sapiens
ataaatttcaaacattaacttcta

SEQ ID NO: 47210 - DNA, 19 bp, Homo sapiens
gcgagtaataccagtctgt

SEQ ID NO: 47211 - DNA, 26 bp, Homo sapiens
ctagttaaatatcttttatcgttaga

SEQ ID NO: 47212 - DNA, 18 bp, Homo sapiens
agctctgggtcttttgtc

SEQ ID NO: 47213 - DNA, 21 bp, Homo sapiens
attttaaaccaatgaagtaag

SEQ ID NO: 47214 - DNA, 23 bp, Homo sapiens
atttatttcatgtttaatttgcg

SEQ ID NO: 47215 - DNA, 25 bp, Homo sapiens
tataagggataatgaagtaatacct

SEQ ID NO: 47216 - DNA, 17 bp, Homo sapiens
gtggtttgctttttctt

SEQ ID NO: 47217 - DNA, 18 bp, Homo sapiens
ataaaccacagcaattaa

SEQ ID NO: 47218 - DNA, 18 bp, Homo sapiens
tgggtcacaatgctaata

SEQ ID NO: 47219 - DNA, 17 bp, Homo sapiens
tccactgggtggaacct

SEQ ID NO: 47220 - DNA, 25 bp, Homo sapiens
ttttaaaatatccttgttttggaat

SEQ ID NO: 47221 - DNA, 19 bp, Homo sapiens
tctcaatttgacttcacct

SEQ ID NO: 47222 - DNA, 23 bp, Homo sapiens
gtgacttaattctctcttctcta

SEQ ID NO: 47223 - DNA, 21 bp, Homo sapiens
gttatcaaggctatatcctgg

SEQ ID NO: 47224 - DNA, 18 bp, Homo sapiens
gatttgttacacaaacaa

SEQ ID NO: 47225 - DNA, 20 bp, Homo sapiens
gtctacacattgaaatactg

SEQ ID NO: 47226 - DNA, 21 bp, Homo sapiens
gtccttgtccagagctactat

SEQ ID NO: 47227 - DNA, 25 bp, Homo sapiens
tctaaatattttcttttcttttcaa

SEQ ID NO: 47228 - DNA, 19 bp, Homo sapiens
ctcccactggggcagattc

SEQ ID NO: 47229 - DNA, 24 bp, Homo sapiens
cctatatattgcatgaaaagtgaa

SEQ ID NO: 47230 - DNA, 19 bp, Homo sapiens
tgattgttttcatccagta

SEQ ID NO: 47231 - DNA, 22 bp, Homo sapiens
tttatattttcaaatggccctt

SEQ ID NO: 47232 - DNA, 17 bp, Homo sapiens
ttgtcttgttcagccta

SEQ ID NO: 47233 - DNA, 19 bp, Homo sapiens
gtgggcttcgcttattttc

SEQ ID NO: 47234 - DNA, 16 bp, Homo sapiens
agtctcctggagccag

SEQ ID NO: 47235 - DNA, 20 bp, Homo sapiens
ttttataacataaaactgcc

SEQ ID NO: 47236 - DNA, 16 bp, Homo sapiens
ccagggactcctgagg

SEQ ID NO: 47237 - DNA, 19 bp, Homo sapiens
tcataaacacaaggaaata

SEQ ID NO: 47238 - DNA, 18 bp, Homo sapiens
agaaaaagcagatacaca

SEQ ID NO: 47239 - DNA, 18 bp, Homo sapiens
agtctctgtttactggct

SEQ ID NO: 47240 - DNA, 24 bp, Homo sapiens
taattgtgaaacttaatttactaa

SEQ ID NO: 47241 - DNA, 21 bp, Homo sapiens
tatggaaaaatcgtgggtaat

SEQ ID NO: 47242 - DNA, 19 bp, Homo sapiens
ttgaggaagcaaatatctt

SEQ ID NO: 47243 - DNA, 17 bp, Homo sapiens
aaccgccatcagatagg

SEQ ID NO: 47244 - DNA, 22 bp, Homo sapiens
aagtaacaatcatgtcaaataa

SEQ ID NO: 47245 - DNA, 17 bp, Homo sapiens
accccattattgttacg

SEQ ID NO: 47246 - DNA, 26 bp, Homo sapiens
atttgttactgtaagattctagaata

SEQ ID NO: 47247 - DNA, 24 bp, Homo sapiens
atccttcatgaagtattagtaatg

SEQ ID NO: 47248 - DNA, 19 bp, Homo sapiens
acaaggatggaatagagga

SEQ ID NO: 47249 - DNA, 20 bp, Homo sapiens
acttgagtttactgtctcag

SEQ ID NO: 47250 - DNA, 18 bp, Homo sapiens
ggcttggattggtggcgt

SEQ ID NO: 47251 - DNA, 19 bp, Homo sapiens
ctcccccttaacattcaaa

SEQ ID NO: 47252 - DNA, 18 bp, Homo sapiens
ttatcaagctgccatacc

SEQ ID NO: 47253 - DNA, 19 bp, Homo sapiens
tgtgcatatactgagtttt

SEQ ID NO: 47254 - DNA, 19 bp, Homo sapiens
ggtccaatgtttcttcctt

SEQ ID NO: 47255 - DNA, 17 bp, Homo sapiens
tcccattgggttttaaa

SEQ ID NO: 47256 - DNA, 16 bp, Homo sapiens
atgagaggcgaaccac

SEQ ID NO: 47257 - DNA, 22 bp, Homo sapiens
atttaccggagttctcaactca

SEQ ID NO: 47258 - DNA, 23 bp, Homo sapiens
gctattgtgcctaatttctataa

SEQ ID NO: 47259 - DNA, 23 bp, Homo sapiens
gtgtttggcacaaggacacaagg

SEQ ID NO: 47260 - DNA, 22 bp, Homo sapiens
cactgtgagagtggtggtggtg

SEQ ID NO: 47261 - DNA, 21 bp, Homo sapiens
cctttctccatctataagagt

SEQ ID NO: 47262 - DNA, 20 bp, Homo sapiens
aaggaagaggctcaactatg

SEQ ID NO: 47263 - DNA, 16 bp, Homo sapiens
cacagagctctccaag

SEQ ID NO: 47264 - DNA, 18 bp, Homo sapiens
tttgcagacatccaatga

SEQ ID NO: 47265 - DNA, 20 bp, Homo sapiens
cataaattcacagaagaaat

SEQ ID NO: 47266 - DNA, 24 bp, Homo sapiens
aatccaaaatattgagttattaat

SEQ ID NO: 47267 - DNA, 19 bp, Homo sapiens
gtagcgagtcttatcttca

SEQ ID NO: 47268 - DNA, 24 bp, Homo sapiens
tatagtcattctattttcagatga

SEQ ID NO: 47269 - DNA, 17 bp, Homo sapiens
aggggaatttcaaaggt

SEQ ID NO: 47270 - DNA, 18 bp, Homo sapiens
tggacagatagagtatgt

SEQ ID NO: 47271 - DNA, 20 bp, Homo sapiens
agtatcattactaatctggt

SEQ ID NO: 47272 - DNA, 16 bp, Homo sapiens
tcacaggattttcagg

SEQ ID NO: 47273 - DNA, 23 bp, Homo sapiens
aaatcattaattttattcctttt

SEQ ID NO: 47274 - DNA, 24 bp, Homo sapiens
gcagttgataaaatgaaaattgat

SEQ ID NO: 47275 - DNA, 20 bp, Homo sapiens
ccggatcatctggattatac

SEQ ID NO: 47276 - DNA, 21 bp, Homo sapiens
tggtatcttcctttaggtaat

SEQ ID NO: 47277 - DNA, 23 bp, Homo sapiens
ctatatctgtagctccattgtct

SEQ ID NO: 47278 - DNA, 18 bp, Homo sapiens
tgtaaggctcaaaactgt

SEQ ID NO: 47279 - DNA, 17 bp, Homo sapiens
caagcatgaaagctact

SEQ ID NO: 47280 - DNA, 21 bp, Homo sapiens
ttcttgatatttctaaacagt

SEQ ID NO: 47281 - DNA, 20 bp, Homo sapiens
tgggcactattatctaccat

SEQ ID NO: 47282 - DNA, 28 bp, Homo sapiens
ttattgtatatagttagatacatatatc

SEQ ID NO: 47283 - DNA, 19 bp, Homo sapiens
cagccaccgatgaacatac

SEQ ID NO: 47284 - DNA, 17 bp, Homo sapiens
gacctcattcactgtgg

SEQ ID NO: 47285 - DNA, 19 bp, Homo sapiens
cagtgatgagaagctttgt

SEQ ID NO: 47286 - DNA, 19 bp, Homo sapiens
tctctcaccactattcgca

SEQ ID NO: 47287 - DNA, 23 bp, Homo sapiens
attattataatttaaaaataaac

SEQ ID NO: 47288 - DNA, 18 bp, Homo sapiens
ggacctgcaccacaatgg

SEQ ID NO: 47289 - DNA, 16 bp, Homo sapiens
cctgaacagcaccgga

SEQ ID NO: 47290 - DNA, 21 bp, Homo sapiens
gttgctatactcaggaaataa

SEQ ID NO: 47291 - DNA, 22 bp, Homo sapiens
ctttctttaaaggataatgtgg

SEQ ID NO: 47292 - DNA, 24 bp, Homo sapiens
acacacacatagacatttaaatta

SEQ ID NO: 47293 - DNA, 16 bp, Homo sapiens
ctggtggacaacatgc

SEQ ID NO: 47294 - DNA, 16 bp, Homo sapiens
tccagaactcttccgg

SEQ ID NO: 47295 - DNA, 23 bp, Homo sapiens
gctaaagaattcatatgagtaga

SEQ ID NO: 47296 - DNA, 24 bp, Homo sapiens
gatccatcaacacccagtaatcca

SEQ ID NO: 47297 - DNA, 21 bp, Homo sapiens
acagttgagtattttcagctt

SEQ ID NO: 47298 - DNA, 18 bp, Homo sapiens
gcagtccctttgatcagc

SEQ ID NO: 47299 - DNA, 20 bp, Homo sapiens
aaagcatgaatttccagaga

SEQ ID NO: 47300 - DNA, 17 bp, Homo sapiens
accaccagctaccatag

SEQ ID NO: 47301 - DNA, 20 bp, Homo sapiens
tggatttgggttgaaacttt

SEQ ID NO: 47302 - DNA, 19 bp, Homo sapiens
gtgcccctgcagtcaatta

SEQ ID NO: 47303 - DNA, 19 bp, Homo sapiens
tgaagaaaaccctcttaga

SEQ ID NO: 47304 - DNA, 23 bp, Homo sapiens
gattttcctttttaaatattaat

SEQ ID NO: 47305 - DNA, 21 bp, Homo sapiens
tttcttcatcaatagcaacta

SEQ ID NO: 47306 - DNA, 25 bp, Homo sapiens
tggttattataaaatgtttttaaat

SEQ ID NO: 47307 - DNA, 17 bp, Homo sapiens
tggcaatatgagggtaa

SEQ ID NO: 47308 - DNA, 24 bp, Homo sapiens
caaacataattggactttaattgt

SEQ ID NO: 47309 - DNA, 22 bp, Homo sapiens
tcctttctttcttccatttttc

SEQ ID NO: 47310 - DNA, 22 bp, Homo sapiens
tttaataatgttctaaagagaa

SEQ ID NO: 47311 - DNA, 22 bp, Homo sapiens
tgtataatgctttttatatcct

SEQ ID NO: 47312 - DNA, 20 bp, Homo sapiens
ttggggtttttatttttgtc

SEQ ID NO: 47313 - DNA, 22 bp, Homo sapiens
tctgatttcacttttctaagct

SEQ ID NO: 47314 - DNA, 16 bp, Homo sapiens
agggatcatcctgggc

SEQ ID NO: 47315 - DNA, 26 bp, Homo sapiens
ctttcaatcataaactacaaattagc

SEQ ID NO: 47316 - DNA, 17 bp, Homo sapiens
agctttgagtgaacttt

SEQ ID NO: 47317 - DNA, 16 bp, Homo sapiens
tggctcgctctaaagg

SEQ ID NO: 47318 - DNA, 23 bp, Homo sapiens
tataacagattaatgaacatgtc

SEQ ID NO: 47319 - DNA, 22 bp, Homo sapiens
tggcccaagcagatttcaaaga

SEQ ID NO: 47320 - DNA, 19 bp, Homo sapiens
gtggcacaggtaattaact

SEQ ID NO: 47321 - DNA, 24 bp, Homo sapiens
ctttctcccatgtgctcctaaacc

SEQ ID NO: 47322 - DNA, 23 bp, Homo sapiens
tccagagatcagcaccaaaagcc

SEQ ID NO: 47323 - DNA, 24 bp, Homo sapiens
tcccagccccagttctctctggag

SEQ ID NO: 47324 - DNA, 23 bp, Homo sapiens
cctcccgtgcagaggctgcccat

SEQ ID NO: 47325 - DNA, 24 bp, Homo sapiens
ccacccaggaagcttctcaccctc

SEQ ID NO: 47326 - DNA, 16 bp, Homo sapiens
gtcccagagcacaaag

SEQ ID NO: 47327 - DNA, 16 bp, Homo sapiens
cagctgccacgtggcc

SEQ ID NO: 47328 - DNA, 17 bp, Homo sapiens
gcaactgaggcccagag

SEQ ID NO: 47329 - DNA, 18 bp, Homo sapiens
gcaggatagtgacttcca

SEQ ID NO: 47330 - DNA, 18 bp, Homo sapiens
gatcagcaggtatgtatc

SEQ ID NO: 47331 - DNA, 24 bp, Homo sapiens
cacaggctcagtgcccactgcagc

SEQ ID NO: 47332 - DNA, 17 bp, Homo sapiens
caccccaggccatctgc

SEQ ID NO: 47333 - DNA, 20 bp, Homo sapiens
ggtacttggctgacgctctt

SEQ ID NO: 47334 - DNA, 19 bp, Homo sapiens
aaaatcaggtggaagatga

SEQ ID NO: 47335 - DNA, 21 bp, Homo sapiens
cttcaccaaccacttctttga

SEQ ID NO: 47336 - DNA, 22 bp, Homo sapiens
gagtgccctgtccctggaggca

SEQ ID NO: 47337 - DNA, 24 bp, Homo sapiens
ggtcattgtccatgtcttgggcca

SEQ ID NO: 47338 - DNA, 19 bp, Homo sapiens
ctgctggaggattgctgaa

SEQ ID NO: 47339 - DNA, 18 bp, Homo sapiens
actgcaaagaagcgagag

SEQ ID NO: 47340 - DNA, 24 bp, Homo sapiens
gcaaggtaggaaggcataaacgtg

SEQ ID NO: 47341 - DNA, 18 bp, Homo sapiens
gcaagtcatacctctctg

SEQ ID NO: 47342 - DNA, 23 bp, Homo sapiens
ctccaggttcttctgtgacccag

SEQ ID NO: 47343 - DNA, 22 bp, Homo sapiens
atggcgggccgtccttccccca

SEQ ID NO: 47344 - DNA, 18 bp, Homo sapiens
gtctggggaggaggcctc

SEQ ID NO: 47345 - DNA, 16 bp, Homo sapiens
ggaagatgccactgtg

SEQ ID NO: 47346 - DNA, 22 bp, Homo sapiens
ggctccggcagccactggacag

SEQ ID NO: 47347 - DNA, 22 bp, Homo sapiens
ctgcttccccaacccaaagggc

SEQ ID NO: 47348 - DNA, 16 bp, Homo sapiens
gtggtcgctgacagag

SEQ ID NO: 47349 - DNA, 23 bp, Homo sapiens
caggcaagctcctagggcaatcc

SEQ ID NO: 47350 - DNA, 17 bp, Homo sapiens
aggggtccagaaatcct

SEQ ID NO: 47351 - DNA, 24 bp, Homo sapiens
caggacctcagcaccgcctaactg

SEQ ID NO: 47352 - DNA, 16 bp, Homo sapiens
acctggcaagagaaag

SEQ ID NO: 47353 - DNA, 23 bp, Homo sapiens
aagtcagagttcaccgtggagtt

SEQ ID NO: 47354 - DNA, 16 bp, Homo sapiens
aaatgtgggcgcgttg

SEQ ID NO: 47355 - DNA, 17 bp, Homo sapiens
atgttcctggggtcaca

SEQ ID NO: 47356 - DNA, 23 bp, Homo sapiens
tctgataccctcaagggtaaccc

SEQ ID NO: 47357 - DNA, 23 bp, Homo sapiens
agagtcaggtggcggcgctaatt

SEQ ID NO: 47358 - DNA, 16 bp, Homo sapiens
cacctgactcttcacc

SEQ ID NO: 47359 - DNA, 16 bp, Homo sapiens
ggggatgtgaatgaca

SEQ ID NO: 47360 - DNA, 17 bp, Homo sapiens
tcgccaacctgctcaga

SEQ ID NO: 47361 - DNA, 16 bp, Homo sapiens
cacgatgaagatgggc

SEQ ID NO: 47362 - DNA, 24 bp, Homo sapiens
aaatgacaaggcctcgggtctggt

SEQ ID NO: 47363 - DNA, 20 bp, Homo sapiens
ttgggaggggggctggaagg

SEQ ID NO: 47364 - DNA, 24 bp, Homo sapiens
ctcagccctgatggcgcagctgct

SEQ ID NO: 47365 - DNA, 20 bp, Homo sapiens
tctcgtagtccagctcccgg

SEQ ID NO: 47366 - DNA, 24 bp, Homo sapiens
ccccagaatacaccagtggggacg

SEQ ID NO: 47367 - DNA, 21 bp, Homo sapiens
ggggccccagcatggagactc

SEQ ID NO: 47368 - DNA, 22 bp, Homo sapiens
gggggcagcgtcctctactcct

SEQ ID NO: 47369 - DNA, 19 bp, Homo sapiens
tcaatgtcccattggaatg

SEQ ID NO: 47370 - DNA, 17 bp, Homo sapiens
gcggtatcgtcacagtg

SEQ ID NO: 47371 - DNA, 20 bp, Homo sapiens
catttctatcatgactgtca

SEQ ID NO: 47372 - DNA, 22 bp, Homo sapiens
ctcacggtcaacgccacagtga

SEQ ID NO: 47373 - DNA, 24 bp, Homo sapiens
gcccttccctgctggagtgcaaga

SEQ ID NO: 47374 - DNA, 19 bp, Homo sapiens
ggacatctgtgatgatgat

SEQ ID NO: 47375 - DNA, 19 bp, Homo sapiens
cacggtgcaggtctgtgtg

SEQ ID NO: 47376 - DNA, 16 bp, Homo sapiens
gctcgtagatgttggt

SEQ ID NO: 47377 - DNA, 18 bp, Homo sapiens
caacctaaggctgtgtgt

SEQ ID NO: 47378 - DNA, 16 bp, Homo sapiens
ggaagtccctctgaga

SEQ ID NO: 47379 - DNA, 23 bp, Homo sapiens
tccaccctggccaacttggccat

SEQ ID NO: 47380 - DNA, 16 bp, Homo sapiens
gaggagccaaggagga

SEQ ID NO: 47381 - DNA, 21 bp, Homo sapiens
tcaacctgccttacagcacca

SEQ ID NO: 47382 - DNA, 23 bp, Homo sapiens
gaactgcagtgtgtgcccagggc

SEQ ID NO: 47383 - DNA, 19 bp, Homo sapiens
cgtcctttatcctggtcta

SEQ ID NO: 47384 - DNA, 22 bp, Homo sapiens
gggttgcccttgcagccaggat

SEQ ID NO: 47385 - DNA, 17 bp, Homo sapiens
gaggagagaggggcagc

SEQ ID NO: 47386 - DNA, 22 bp, Homo sapiens
aaagaaagacagcagccagggg

SEQ ID NO: 47387 - DNA, 16 bp, Homo sapiens
cctcagagcctgagat

SEQ ID NO: 47388 - DNA, 24 bp, Homo sapiens
cggtgcgcatcatcaccgccatag

SEQ ID NO: 47389 - DNA, 16 bp, Homo sapiens
gactgtccctgtagtc

SEQ ID NO: 47390 - DNA, 16 bp, Homo sapiens
gatgtagtccagggca

SEQ ID NO: 47391 - DNA, 21 bp, Homo sapiens
taactgatgagtctttaatgc

SEQ ID NO: 47392 - DNA, 23 bp, Homo sapiens
tcaggatgaagccatggctgtac

SEQ ID NO: 47393 - DNA, 23 bp, Homo sapiens
cagctccatgcccccctgccctg

SEQ ID NO: 47394 - DNA, 16 bp, Homo sapiens
aggggcatctcctcta

SEQ ID NO: 47395 - DNA, 21 bp, Homo sapiens
cagggaataccaacagcatct

SEQ ID NO: 47396 - DNA, 22 bp, Homo sapiens
ttccggcgccaccaccgggggc

SEQ ID NO: 47397 - DNA, 22 bp, Homo sapiens
cctgctggaccgggagaacccc

SEQ ID NO: 47398 - DNA, 19 bp, Homo sapiens
ctgatggggccctgggcac

SEQ ID NO: 47399 - DNA, 21 bp, Homo sapiens
aaaatggggatactaatgata

SEQ ID NO: 47400 - DNA, 18 bp, Homo sapiens
aaggtcgtggtgactgta

SEQ ID NO: 47401 - DNA, 17 bp, Homo sapiens
cattgaggcacagtggc

SEQ ID NO: 47402 - DNA, 16 bp, Homo sapiens
tactcggagctgttga

SEQ ID NO: 47403 - DNA, 20 bp, Homo sapiens
ctgtgattagctgccttcac

SEQ ID NO: 47404 - DNA, 17 bp, Homo sapiens
tggatgaagagtggaag

SEQ ID NO: 47405 - DNA, 23 bp, Homo sapiens
tgaacgatgaccgcaccccatct

SEQ ID NO: 47406 - DNA, 17 bp, Homo sapiens
tgggtggtgggtctgca

SEQ ID NO: 47407 - DNA, 24 bp, Homo sapiens
catcaatgacaatgccccggagtt

SEQ ID NO: 47408 - DNA, 21 bp, Homo sapiens
ggtgccgcaatgtttgtttct

SEQ ID NO: 47409 - DNA, 17 bp, Homo sapiens
tcggctttgcccttcca

SEQ ID NO: 47410 - DNA, 22 bp, Homo sapiens
actagtgatttttttttcagcc

SEQ ID NO: 47411 - DNA, 17 bp, Homo sapiens
cacatggcccatgcaga

SEQ ID NO: 47412 - DNA, 19 bp, Homo sapiens
catatggaaacatgtgctt

SEQ ID NO: 47413 - DNA, 17 bp, Homo sapiens
aggtcctcagctataaa

SEQ ID NO: 47414 - DNA, 24 bp, Homo sapiens
gaggctggggacagctgctcctct

SEQ ID NO: 47415 - DNA, 22 bp, Homo sapiens
ctccccactgtgcccaccacaa

SEQ ID NO: 47416 - DNA, 19 bp, Homo sapiens
ctgtcttttctctctggtt

SEQ ID NO: 47417 - DNA, 16 bp, Homo sapiens
ctgggggcctgagagg

SEQ ID NO: 47418 - DNA, 18 bp, Homo sapiens
catatcctttgactgacc

SEQ ID NO: 47419 - DNA, 19 bp, Homo sapiens
tggagctgctctgggaaag

SEQ ID NO: 47420 - DNA, 24 bp, Homo sapiens
ggagatgatgaagtggtgggagtt

SEQ ID NO: 47421 - DNA, 21 bp, Homo sapiens
aagcagctctgggctcactct

SEQ ID NO: 47422 - DNA, 23 bp, Homo sapiens
tccagtgggatggccacccgaat

SEQ ID NO: 47423 - DNA, 17 bp, Homo sapiens
cttcctgactggcttct

SEQ ID NO: 47424 - DNA, 16 bp, Homo sapiens
tccaaaatgccagtga

SEQ ID NO: 47425 - DNA, 24 bp, Homo sapiens
tgtttgaggtgtacttggtgggga

SEQ ID NO: 47426 - DNA, 20 bp, Homo sapiens
tctaagggaatcttctaccc

SEQ ID NO: 47427 - DNA, 23 bp, Homo sapiens
ggggaaggcggacattcgtattc

SEQ ID NO: 47428 - DNA, 22 bp, Homo sapiens
ctgccgtctcttggagggctta

SEQ ID NO: 47429 - DNA, 16 bp, Homo sapiens
gtcaggcacactctca

SEQ ID NO: 47430 - DNA, 20 bp, Homo sapiens
tgggatgggcagagactcta

SEQ ID NO: 47431 - DNA, 17 bp, Homo sapiens
gatgggccggttgtcat

SEQ ID NO: 47432 - DNA, 18 bp, Homo sapiens
cttacagggacaaggact

SEQ ID NO: 47433 - DNA, 22 bp, Homo sapiens
gactgtcagcacagaggtcccc

SEQ ID NO: 47434 - DNA, 23 bp, Homo sapiens
ctgcacccccagctctttgccaa

SEQ ID NO: 47435 - DNA, 23 bp, Homo sapiens
ctcaccacagtcggccctggaga

SEQ ID NO: 47436 - DNA, 20 bp, Homo sapiens
actctcatcaatgaaaatga

SEQ ID NO: 47437 - DNA, 21 bp, Homo sapiens
tttgggggtgcctccttccct

SEQ ID NO: 47438 - DNA, 16 bp, Homo sapiens
cctgtacgagaacgtc

SEQ ID NO: 47439 - DNA, 16 bp, Homo sapiens
tcctgaagagtccaaa

SEQ ID NO: 47440 - DNA, 17 bp, Homo sapiens
ctgcagggccactgagc

SEQ ID NO: 47441 - DNA, 23 bp, Homo sapiens
gctcagtctcgtcacccctcagg

SEQ ID NO: 47442 - DNA, 22 bp, Homo sapiens
tttgtccaagggacctcagcaa

SEQ ID NO: 47443 - DNA, 23 bp, Homo sapiens
ctcccagcccaccctcactgagt

SEQ ID NO: 47444 - DNA, 24 bp, Homo sapiens
tggcagcaggctttcaccaggcct

SEQ ID NO: 47445 - DNA, 22 bp, Homo sapiens
agtctcacctgtcagggtcatc

SEQ ID NO: 47446 - DNA, 24 bp, Homo sapiens
ctgggccaaaggagacgtgcgaga

SEQ ID NO: 47447 - DNA, 16 bp, Homo sapiens
ctggggagggccaagg

SEQ ID NO: 47448 - DNA, 20 bp, Homo sapiens
gcagtaatgacttcttgttc

SEQ ID NO: 47449 - DNA, 16 bp, Homo sapiens
tagccacaggacccag

SEQ ID NO: 47450 - DNA, 22 bp, Homo sapiens
ggggaagtcagctacttcttca

SEQ ID NO: 47451 - DNA, 18 bp, Homo sapiens
aatcagcatgatgagtcc

SEQ ID NO: 47452 - DNA, 18 bp, Homo sapiens
gacttcatttgtttctgt

SEQ ID NO: 47453 - DNA, 17 bp, Homo sapiens
cccgtcccgggcaatga

SEQ ID NO: 47454 - DNA, 21 bp, Homo sapiens
catcaacaagcctgttttaaa

SEQ ID NO: 47455 - DNA, 18 bp, Homo sapiens
ttgtcgttgacatccaac

SEQ ID NO: 47456 - DNA, 23 bp, Homo sapiens
caggttctcgctggacaaggaca

SEQ ID NO: 47457 - DNA, 16 bp, Homo sapiens
gaaggctcgttctccc

SEQ ID NO: 47458 - DNA, 23 bp, Homo sapiens
ctcatccagcgcttcaccctgac

SEQ ID NO: 47459 - DNA, 21 bp, Homo sapiens
aaggctaagataaatggcagg

SEQ ID NO: 47460 - DNA, 16 bp, Homo sapiens
gtcaggatcaatgtgt

SEQ ID NO: 47461 - DNA, 19 bp, Homo sapiens
cctgtctcataaaaacaaa

SEQ ID NO: 47462 - DNA, 17 bp, Homo sapiens
gggtgctctgcgggaga

SEQ ID NO: 47463 - DNA, 16 bp, Homo sapiens
tttggggccgcaatga

SEQ ID NO: 47464 - DNA, 20 bp, Homo sapiens
taggtgatctggttgttggg

SEQ ID NO: 47465 - DNA, 18 bp, Homo sapiens
tggatcacccaaaaaagg

SEQ ID NO: 47466 - DNA, 23 bp, Homo sapiens
gccctcgtacaggctgatgtcga

SEQ ID NO: 47467 - DNA, 23 bp, Homo sapiens
caccctcttctggcccccagtct

SEQ ID NO: 47468 - DNA, 22 bp, Homo sapiens
agagccccccagccctcctcct

SEQ ID NO: 47469 - DNA, 24 bp, Homo sapiens
tttcaggcaacagatgaagactcc

SEQ ID NO: 47470 - DNA, 17 bp, Homo sapiens
gagtgtcagggagacaa

SEQ ID NO: 47471 - DNA, 24 bp, Homo sapiens
gcatctgcctttggcagctacttc

SEQ ID NO: 47472 - DNA, 21 bp, Homo sapiens
gggcgactcaggccacatcct

SEQ ID NO: 47473 - DNA, 19 bp, Homo sapiens
cagtcaggaaacctcagtc

SEQ ID NO: 47474 - DNA, 21 bp, Homo sapiens
agataaatcagcccattggat

SEQ ID NO: 47475 - DNA, 21 bp, Homo sapiens
ctggcccgggccatgccagcc

SEQ ID NO: 47476 - DNA, 22 bp, Homo sapiens
gtgacagggacggtgctgttga

SEQ ID NO: 47477 - DNA, 21 bp, Homo sapiens
catctcaagtctgcttacaga

SEQ ID NO: 47478 - DNA, 18 bp, Homo sapiens
cttacactagcagggcaa

SEQ ID NO: 47479 - DNA, 22 bp, Homo sapiens
ccctggattatgaacagatatc

SEQ ID NO: 47480 - DNA, 16 bp, Homo sapiens
agccaaggaggtgggg

SEQ ID NO: 47481 - DNA, 24 bp, Homo sapiens
catggatgctggcaacccccctct

SEQ ID NO: 47482 - DNA, 17 bp, Homo sapiens
agagacttgctaagggc

SEQ ID NO: 47483 - DNA, 21 bp, Homo sapiens
ctccctgctgacacctcacct

SEQ ID NO: 47484 - DNA, 20 bp, Homo sapiens
atgatgttctccaccacgga

SEQ ID NO: 47485 - DNA, 24 bp, Homo sapiens
cagacctagcctgactccttggtg

SEQ ID NO: 47486 - DNA, 19 bp, Homo sapiens
ctggctgcctacctccatg

SEQ ID NO: 47487 - DNA, 24 bp, Homo sapiens
ctccctgcagcctcctgcaacctg

SEQ ID NO: 47488 - DNA, 16 bp, Homo sapiens
tggacctcccacaatt

SEQ ID NO: 47489 - DNA, 18 bp, Homo sapiens
aagcccgcctacttcgtc

SEQ ID NO: 47490 - DNA, 19 bp, Homo sapiens
gtaactagatgtttccaaa

SEQ ID NO: 47491 - DNA, 18 bp, Homo sapiens
gcaacaggcaggcctccc

SEQ ID NO: 47492 - DNA, 24 bp, Homo sapiens
gactcctggccgtactcccgggag

SEQ ID NO: 47493 - DNA, 18 bp, Homo sapiens
ctcttgggccagcgcaaa

SEQ ID NO: 47494 - DNA, 24 bp, Homo sapiens
ctcacctgagcgggcattgatccg

SEQ ID NO: 47495 - DNA, 16 bp, Homo sapiens
agcagcaccccctgcc

SEQ ID NO: 47496 - DNA, 17 bp, Homo sapiens
ggacagtcagcctcagg

SEQ ID NO: 47497 - DNA, 24 bp, Homo sapiens
tgttcctgaatgccacagacctgg

SEQ ID NO: 47498 - DNA, 19 bp, Homo sapiens
ggtctgctcaaaactgaaa

SEQ ID NO: 47499 - DNA, 17 bp, Homo sapiens
ttggaaggctccaccca

SEQ ID NO: 47500 - DNA, 19 bp, Homo sapiens
gtgagcaccagctcaggaa

SEQ ID NO: 47501 - DNA, 20 bp, Homo sapiens
gatgtattcagacttggtct

SEQ ID NO: 47502 - DNA, 24 bp, Homo sapiens
tttctcgtgcaagttctcaccctc

SEQ ID NO: 47503 - DNA, 19 bp, Homo sapiens
gtggcgatgccagttttct

SEQ ID NO: 47504 - DNA, 24 bp, Homo sapiens
cctggcccacccaaaccctctcac

SEQ ID NO: 47505 - DNA, 16 bp, Homo sapiens
gcagggagcagcagcc

SEQ ID NO: 47506 - DNA, 24 bp, Homo sapiens
accaccacgtctctgcttgaccga

SEQ ID NO: 47507 - DNA, 18 bp, Homo sapiens
ccttgctcattctcacaa

SEQ ID NO: 47508 - DNA, 24 bp, Homo sapiens
gggggtgtgggccacaaccagaaa

SEQ ID NO: 47509 - DNA, 20 bp, Homo sapiens
cccaggctctgcccaaggct

SEQ ID NO: 47510 - DNA, 16 bp, Homo sapiens
atgtagtagggtgcgt

SEQ ID NO: 47511 - DNA, 21 bp, Homo sapiens
attgcccgtgggcatctgagc

SEQ ID NO: 47512 - DNA, 24 bp, Homo sapiens
ctgctctgccaccacctaccgtgg

SEQ ID NO: 47513 - DNA, 24 bp, Homo sapiens
tgggtgtgtctcccagcgcccctt

SEQ ID NO: 47514 - DNA, 16 bp, Homo sapiens
tggaatcgcagtggga

SEQ ID NO: 47515 - DNA, 22 bp, Homo sapiens
gacaaccaccccacgtggaagg

SEQ ID NO: 47516 - DNA, 17 bp, Homo sapiens
actctattgcaagagcc

SEQ ID NO: 47517 - DNA, 20 bp, Homo sapiens
ccctccagactctgatgtga

SEQ ID NO: 47518 - DNA, 24 bp, Homo sapiens
ctctcggacccccctaccgggccc

SEQ ID NO: 47519 - DNA, 21 bp, Homo sapiens
gtggctggatgctgtacacca

SEQ ID NO: 47520 - DNA, 20 bp, Homo sapiens
caggaccaacgtctgagctc

SEQ ID NO: 47521 - DNA, 16 bp, Homo sapiens
gcgtgggtggtgcgga

SEQ ID NO: 47522 - DNA, 24 bp, Homo sapiens
ccaggcgcggctcagtgaaggggt

SEQ ID NO: 47523 - DNA, 20 bp, Homo sapiens
agtaacagagacgacgattt

SEQ ID NO: 47524 - DNA, 18 bp, Homo sapiens
gagaatggcaccctggtg

SEQ ID NO: 47525 - DNA, 23 bp, Homo sapiens
cagggacacccgcagcctaaggt

SEQ ID NO: 47526 - DNA, 24 bp, Homo sapiens
caacagcaccacgggcaagatccg

SEQ ID NO: 47527 - DNA, 21 bp, Homo sapiens
tcttggtgatcagacatagac

SEQ ID NO: 47528 - DNA, 16 bp, Homo sapiens
catgaggccgagctga

SEQ ID NO: 47529 - DNA, 16 bp, Homo sapiens
ttccctcagggtgctc

SEQ ID NO: 47530 - DNA, 16 bp, Homo sapiens
ctaggctgcttcctgg

SEQ ID NO: 47531 - DNA, 19 bp, Homo sapiens
cattgtcattgagatccaa

SEQ ID NO: 47532 - DNA, 23 bp, Homo sapiens
cctctcaccacttgccttcttcc

SEQ ID NO: 47533 - DNA, 16 bp, Homo sapiens
ccgccgggatgccttc

SEQ ID NO: 47534 - DNA, 19 bp, Homo sapiens
tctcgccctggtcttccca

SEQ ID NO: 47535 - DNA, 24 bp, Homo sapiens
gcacccactgcccacctctgggct

SEQ ID NO: 47536 - DNA, 17 bp, Homo sapiens
cagtgtttgtgaacctc

SEQ ID NO: 47537 - DNA, 18 bp, Homo sapiens
gacccagctcctcccctg

SEQ ID NO: 47538 - DNA, 22 bp, Homo sapiens
ccttttgtggccgaggtgcttg

SEQ ID NO: 47539 - DNA, 21 bp, Homo sapiens
ccatctccctatccttttcct

SEQ ID NO: 47540 - DNA, 22 bp, Homo sapiens
cctgggagggtgccctggggac

SEQ ID NO: 47541 - DNA, 21 bp, Homo sapiens
atgcggtaggacaccaggccg

SEQ ID NO: 47542 - DNA, 24 bp, Homo sapiens
tagctgcagccaagtgtggcttgg

SEQ ID NO: 47543 - DNA, 22 bp, Homo sapiens
ggtggtggtgaccaccacgccg

SEQ ID NO: 47544 - DNA, 24 bp, Homo sapiens
atccatcccagtgtcccctcccca

SEQ ID NO: 47545 - DNA, 24 bp, Homo sapiens
gtgcctgcatcactggccaccacc

SEQ ID NO: 47546 - DNA, 23 bp, Homo sapiens
tcgacctcgatgagggcctgaac

SEQ ID NO: 47547 - DNA, 24 bp, Homo sapiens
agcccctgcgccccctcaccatgg

SEQ ID NO: 47548 - DNA, 22 bp, Homo sapiens
tggacttcctcatcaacagcag

SEQ ID NO: 47549 - DNA, 17 bp, Homo sapiens
ctacccctgcccctgac

SEQ ID NO: 47550 - DNA, 19 bp, Homo sapiens
cgcatcgcggagtaccagc

SEQ ID NO: 47551 - DNA, 22 bp, Homo sapiens
cctcattaacaagggagcctgt

SEQ ID NO: 47552 - DNA, 18 bp, Homo sapiens
cagcacgctcaccatcca

SEQ ID NO: 47553 - DNA, 22 bp, Homo sapiens
gggccctgggcttatggccagg

SEQ ID NO: 47554 - DNA, 17 bp, Homo sapiens
ttgtacacggccgggaa

SEQ ID NO: 47555 - DNA, 22 bp, Homo sapiens
cttgggaattcattccctactt

SEQ ID NO: 47556 - DNA, 16 bp, Homo sapiens
gtccgtgcagttcagc

SEQ ID NO: 47557 - DNA, 24 bp, Homo sapiens
tgggtcttctgcggcagaagccag

SEQ ID NO: 47558 - DNA, 24 bp, Homo sapiens
tgggcggaggccggggcagcacct

SEQ ID NO: 47559 - DNA, 24 bp, Homo sapiens
gaacgacgagacgcccaccttctt

SEQ ID NO: 47560 - DNA, 18 bp, Homo sapiens
tctggctgtccatctggg

SEQ ID NO: 47561 - DNA, 24 bp, Homo sapiens
gacgtgccacgcgagttccgggtg

SEQ ID NO: 47562 - DNA, 24 bp, Homo sapiens
caccaccagaggctaaagcccaac

SEQ ID NO: 47563 - DNA, 22 bp, Homo sapiens
gctcagctacttcatcacaggt

SEQ ID NO: 47564 - DNA, 24 bp, Homo sapiens
cagtccagagtgatccagctgcaa

SEQ ID NO: 47565 - DNA, 24 bp, Homo sapiens
cctcctggggccctgcctccaccc

SEQ ID NO: 47566 - DNA, 19 bp, Homo sapiens
atcgcggtaacccacgctg

SEQ ID NO: 47567 - DNA, 24 bp, Homo sapiens
agcagcacagcctcccactcctgg

SEQ ID NO: 47568 - DNA, 17 bp, Homo sapiens
caggatgagcatgtagg

SEQ ID NO: 47569 - DNA, 24 bp, Homo sapiens
cgcttcccctggccgggagctctg

SEQ ID NO: 47570 - DNA, 18 bp, Homo sapiens
gaactctgcccagatcac

SEQ ID NO: 47571 - DNA, 16 bp, Homo sapiens
gatgggaagttcagcg

SEQ ID NO: 47572 - DNA, 20 bp, Homo sapiens
cactggcatctgggcagagt

SEQ ID NO: 47573 - DNA, 24 bp, Homo sapiens
ggtgggcctggaccgggagaccac

SEQ ID NO: 47574 - DNA, 16 bp, Homo sapiens
catgcccggcaagtgc

SEQ ID NO: 47575 - DNA, 19 bp, Homo sapiens
gtggctgtgcccgtgtgtc

SEQ ID NO: 47576 - DNA, 21 bp, Homo sapiens
cagatggggcggaacagggca

SEQ ID NO: 47577 - DNA, 24 bp, Homo sapiens
gcctcatagctgctctgcagaaag

SEQ ID NO: 47578 - DNA, 22 bp, Homo sapiens
acaggaagtgtgcccctctctc

SEQ ID NO: 47579 - DNA, 17 bp, Homo sapiens
gggccacctgcctgcaa

SEQ ID NO: 47580 - DNA, 24 bp, Homo sapiens
agacaacggccctgtagggaagcg

SEQ ID NO: 47581 - DNA, 24 bp, Homo sapiens
cactgagcatgtgccctcagggcc

SEQ ID NO: 47582 - DNA, 22 bp, Homo sapiens
gatgtgaatgacaaccggccca

SEQ ID NO: 47583 - DNA, 23 bp, Homo sapiens
ccttccagagcagcggacccacc

SEQ ID NO: 47584 - DNA, 22 bp, Homo sapiens
catccctgaaggccacagcatc

SEQ ID NO: 47585 - DNA, 18 bp, Homo sapiens
gtccccttgtctcccaca

SEQ ID NO: 47586 - DNA, 22 bp, Homo sapiens
taccatggaggatgcggtacca

SEQ ID NO: 47587 - DNA, 24 bp, Homo sapiens
gcaggatggggtaggatgcgtgaa

SEQ ID NO: 47588 - DNA, 19 bp, Homo sapiens
gctctgccctcccctgggc

SEQ ID NO: 47589 - DNA, 22 bp, Homo sapiens
gctgggtggcattcaagaagta

SEQ ID NO: 47590 - DNA, 16 bp, Homo sapiens
tatggccctgggggtt

SEQ ID NO: 47591 - DNA, 20 bp, Homo sapiens
gagggcgagtttgggcgtgt

SEQ ID NO: 47592 - DNA, 18 bp, Homo sapiens
ctccagcttcctctccac

SEQ ID NO: 47593 - DNA, 23 bp, Homo sapiens
ggccctcgcatcaggagcccatt

SEQ ID NO: 47594 - DNA, 23 bp, Homo sapiens
cacaaggaggggactggtgaact

SEQ ID NO: 47595 - DNA, 17 bp, Homo sapiens
taggcctccactatcag

SEQ ID NO: 47596 - DNA, 24 bp, Homo sapiens
gacttctgggcagggccggtgttc

SEQ ID NO: 47597 - DNA, 24 bp, Homo sapiens
ctgaggtcagcaccccagcccgcc

SEQ ID NO: 47598 - DNA, 17 bp, Homo sapiens
gatccatgtcagcaatg

SEQ ID NO: 47599 - DNA, 16 bp, Homo sapiens
cgccaactaatggcct

SEQ ID NO: 47600 - DNA, 17 bp, Homo sapiens
catcccacgtgctgata

SEQ ID NO: 47601 - DNA, 24 bp, Homo sapiens
acctgtcaccgaacccttaggccc

SEQ ID NO: 47602 - DNA, 22 bp, Homo sapiens
gggggcctcatcgttgatgtcc

SEQ ID NO: 47603 - DNA, 23 bp, Homo sapiens
agggagctcacagcaggcccagg

SEQ ID NO: 47604 - DNA, 21 bp, Homo sapiens
ttccaatgcctgcggtctctc

SEQ ID NO: 47605 - DNA, 24 bp, Homo sapiens
caagccctgggcttcccagcctcc

SEQ ID NO: 47606 - DNA, 17 bp, Homo sapiens
tcctcctgccagcctca

SEQ ID NO: 47607 - DNA, 22 bp, Homo sapiens
cacaggtgattgtgtacgtgga

SEQ ID NO: 47608 - DNA, 24 bp, Homo sapiens
cagggatgaccgtttcgaaggagg

SEQ ID NO: 47609 - DNA, 24 bp, Homo sapiens
agtacagccgtctggggcttcgag

SEQ ID NO: 47610 - DNA, 21 bp, Homo sapiens
atcccagcagcccctccctgg

SEQ ID NO: 47611 - DNA, 22 bp, Homo sapiens
aagccacagaccgagactctgg

SEQ ID NO: 47612 - DNA, 21 bp, Homo sapiens
cacatcctctgctgcatctct

SEQ ID NO: 47613 - DNA, 24 bp, Homo sapiens
ctcgtcaatctcaaacttcccctc

SEQ ID NO: 47614 - DNA, 19 bp, Homo sapiens
gccacccagggggtatggg

SEQ ID NO: 47615 - DNA, 21 bp, Homo sapiens
gtagctggtcttggtctcgta

SEQ ID NO: 47616 - DNA, 24 bp, Homo sapiens
ctcagttctatctgggactgcaca

SEQ ID NO: 47617 - DNA, 18 bp, Homo sapiens
ctgcagaagccctggttg

SEQ ID NO: 47618 - DNA, 24 bp, Homo sapiens
ctaccgcatcctgtcgggcgcaga

SEQ ID NO: 47619 - DNA, 17 bp, Homo sapiens
tgaggcattggagaact

SEQ ID NO: 47620 - DNA, 24 bp, Homo sapiens
tcaccgtgaattacctggactacg

SEQ ID NO: 47621 - DNA, 21 bp, Homo sapiens
cgatggagtaggcctggaccc

SEQ ID NO: 47622 - DNA, 18 bp, Homo sapiens
ctgaccaggccccgccct

SEQ ID NO: 47623 - DNA, 21 bp, Homo sapiens
tttggcctgggtgctggtgta

SEQ ID NO: 47624 - DNA, 23 bp, Homo sapiens
gagctggacgaggccgtgcagtt

SEQ ID NO: 47625 - DNA, 20 bp, Homo sapiens
aagaaatggtgctccctgcc

SEQ ID NO: 47626 - DNA, 19 bp, Homo sapiens
ggcactgggtactgagatt

SEQ ID NO: 47627 - DNA, 20 bp, Homo sapiens
tatgacaaagaggagagtgc

SEQ ID NO: 47628 - DNA, 19 bp, Homo sapiens
gtaccgcttcaacgcctac

SEQ ID NO: 47629 - DNA, 16 bp, Homo sapiens
caagcagctgggacta

SEQ ID NO: 47630 - DNA, 21 bp, Homo sapiens
acgccatcacggtgaggggct

SEQ ID NO: 47631 - DNA, 16 bp, Homo sapiens
aaacgcagctcactgc

SEQ ID NO: 47632 - DNA, 22 bp, Homo sapiens
gaagaggtggcttcccagtgga

SEQ ID NO: 47633 - DNA, 16 bp, Homo sapiens
ttctcacggtccacca

SEQ ID NO: 47634 - DNA, 24 bp, Homo sapiens
tcctggggaagttatgccggacag

SEQ ID NO: 47635 - DNA, 16 bp, Homo sapiens
tggagtccaccttggg

SEQ ID NO: 47636 - DNA, 24 bp, Homo sapiens
agaatgaccagggttaacaagggt

SEQ ID NO: 47637 - DNA, 18 bp, Homo sapiens
aagtgtcatggccagcga

SEQ ID NO: 47638 - DNA, 24 bp, Homo sapiens
gtgatcacagtccagggcctggtg

SEQ ID NO: 47639 - DNA, 16 bp, Homo sapiens
tatcaagaccctcgcc

SEQ ID NO: 47640 - DNA, 24 bp, Homo sapiens
tggtggcagatgacggcggcccca

SEQ ID NO: 47641 - DNA, 21 bp, Homo sapiens
cagccatgccacaccttccca

SEQ ID NO: 47642 - DNA, 20 bp, Homo sapiens
cagccaacagcacaggggaa

SEQ ID NO: 47643 - DNA, 24 bp, Homo sapiens
gagggtggcacctccagagacact

SEQ ID NO: 47644 - DNA, 16 bp, Homo sapiens
tctctgggagaggtgg

SEQ ID NO: 47645 - DNA, 23 bp, Homo sapiens
catttgcatctttgccttttctc

SEQ ID NO: 47646 - DNA, 23 bp, Homo sapiens
aggggcctgaactcaggtgtgag

SEQ ID NO: 47647 - DNA, 19 bp, Homo sapiens
ctcctttgtaaagtcagga

SEQ ID NO: 47648 - DNA, 18 bp, Homo sapiens
gtcggaggtgaagtcaaa

SEQ ID NO: 47649 - DNA, 24 bp, Homo sapiens
cagaacccactggggatctggtcc

SEQ ID NO: 47650 - DNA, 23 bp, Homo sapiens
gtcccaggccttgacagtagcca

SEQ ID NO: 47651 - DNA, 24 bp, Homo sapiens
ggggaaggaggctgtaggtctctg

SEQ ID NO: 47652 - DNA, 21 bp, Homo sapiens
tggtggatcctggctgtttca

SEQ ID NO: 47653 - DNA, 21 bp, Homo sapiens
gagaatgacaacagcccccgg

SEQ ID NO: 47654 - DNA, 24 bp, Homo sapiens
gatgggggtggctcagaaggcccc

SEQ ID NO: 47655 - DNA, 22 bp, Homo sapiens
gaggactgccctgtgggccagc

SEQ ID NO: 47656 - DNA, 16 bp, Homo sapiens
cacagactgggtgatt

SEQ ID NO: 47657 - DNA, 21 bp, Homo sapiens
agatgaatcacttctgcttaa

SEQ ID NO: 47658 - DNA, 22 bp, Homo sapiens
gtcattggtggtgacgatctca

SEQ ID NO: 47659 - DNA, 23 bp, Homo sapiens
agggcccacgtgggcagaggagg

SEQ ID NO: 47660 - DNA, 22 bp, Homo sapiens
gaggatgtagtgatccagctct

SEQ ID NO: 47661 - DNA, 23 bp, Homo sapiens
ctccacacctgctcacccctcac

SEQ ID NO: 47662 - DNA, 16 bp, Homo sapiens
tctaggcacttagcca

SEQ ID NO: 47663 - DNA, 24 bp, Homo sapiens
caacatcgcgggggcctttgagat

SEQ ID NO: 47664 - DNA, 20 bp, Homo sapiens
ggcactgaccaccagagtgt

SEQ ID NO: 47665 - DNA, 22 bp, Homo sapiens
tggccaggcccctggacagaga

SEQ ID NO: 47666 - DNA, 22 bp, Homo sapiens
cccagggctggccaggccaccc

SEQ ID NO: 47667 - DNA, 16 bp, Homo sapiens
atggtcacctgcagga

SEQ ID NO: 47668 - DNA, 22 bp, Homo sapiens
atgctccccactgattgcacag

SEQ ID NO: 47669 - DNA, 19 bp, Homo sapiens
cattcacactgacattgta

SEQ ID NO: 47670 - DNA, 16 bp, Homo sapiens
gactccagttgccctc

SEQ ID NO: 47671 - DNA, 20 bp, Homo sapiens
ttggctcgtgcccacggtcc

SEQ ID NO: 47672 - DNA, 18 bp, Homo sapiens
cacggaagaaggaccaca

SEQ ID NO: 47673 - DNA, 19 bp, Homo sapiens
ccatgagatctgagggacc

SEQ ID NO: 47674 - DNA, 16 bp, Homo sapiens
cgagagcccctttgga

SEQ ID NO: 47675 - DNA, 16 bp, Homo sapiens
cacagaatgttcgctg

SEQ ID NO: 47676 - DNA, 16 bp, Homo sapiens
gtggctctcacctgga

SEQ ID NO: 47677 - DNA, 21 bp, Homo sapiens
agatgcagcaaagcttttggg

SEQ ID NO: 47678 - DNA, 16 bp, Homo sapiens
gtccttgttgccctcg

SEQ ID NO: 47679 - DNA, 24 bp, Homo sapiens
gtgccagactgtgccccaatgcct

SEQ ID NO: 47680 - DNA, 24 bp, Homo sapiens
gctcgcggtcaggcggggcaggcc

SEQ ID NO: 47681 - DNA, 23 bp, Homo sapiens
aacgtgggtggaggtactgctgt

SEQ ID NO: 47682 - DNA, 22 bp, Homo sapiens
cagggttggggtgccctcgtcc

SEQ ID NO: 47683 - DNA, 24 bp, Homo sapiens
gtgttctgtcctactacatcaccg

SEQ ID NO: 47684 - DNA, 18 bp, Homo sapiens
gcggagctgccctggccc

SEQ ID NO: 47685 - DNA, 22 bp, Homo sapiens
gcatcagcggtgagatcgccac

SEQ ID NO: 47686 - DNA, 24 bp, Homo sapiens
taaaggagttgtcaaggattcgcc

SEQ ID NO: 47687 - DNA, 20 bp, Homo sapiens
cacctggtggccactgtgga

SEQ ID NO: 47688 - DNA, 23 bp, Homo sapiens
aggcctccgtaaggggaggccat

SEQ ID NO: 47689 - DNA, 18 bp, Homo sapiens
ctctctaccagcctgtga

SEQ ID NO: 47690 - DNA, 19 bp, Homo sapiens
gaacatgggcgcgttatca

SEQ ID NO: 47691 - DNA, 18 bp, Homo sapiens
gagtcacatggagtgagt

SEQ ID NO: 47692 - DNA, 17 bp, Homo sapiens
gaggctggtgttgagcg

SEQ ID NO: 47693 - DNA, 23 bp, Homo sapiens
cctctggccacctgaccaaggac

SEQ ID NO: 47694 - DNA, 16 bp, Homo sapiens
atggcataggtgactg

SEQ ID NO: 47695 - DNA, 24 bp, Homo sapiens
tgaccattgtggatgagaatgata

SEQ ID NO: 47696 - DNA, 24 bp, Homo sapiens
cctgccatcagctgctgaccatgt

SEQ ID NO: 47697 - DNA, 16 bp, Homo sapiens
ctggatgagggcccag

SEQ ID NO: 47698 - DNA, 21 bp, Homo sapiens
tccagtgtcactgaactcctt

SEQ ID NO: 47699 - DNA, 22 bp, Homo sapiens
ctggatgagggtcccaacggca

SEQ ID NO: 47700 - DNA, 24 bp, Homo sapiens
acttttcatcctcccacactgagt

SEQ ID NO: 47701 - DNA, 24 bp, Homo sapiens
caacaccttccgcatcgacagaca

SEQ ID NO: 47702 - DNA, 16 bp, Homo sapiens
agctctttggcagcag

SEQ ID NO: 47703 - DNA, 16 bp, Homo sapiens
tagggggtggcagtgg

SEQ ID NO: 47704 - DNA, 16 bp, Homo sapiens
ggggcactggtctgtg

SEQ ID NO: 47705 - DNA, 22 bp, Homo sapiens
aaattggtcagagggtgctgca

SEQ ID NO: 47706 - DNA, 20 bp, Homo sapiens
ccaagttggggctgtgtccc

SEQ ID NO: 47707 - DNA, 17 bp, Homo sapiens
cagggtgtcatcactgc

SEQ ID NO: 47708 - DNA, 23 bp, Homo sapiens
caatcttcccctaaccccttccc

SEQ ID NO: 47709 - DNA, 20 bp, Homo sapiens
acaccctgatcgtcactgcc

SEQ ID NO: 47710 - DNA, 20 bp, Homo sapiens
agtgagttgctgagattagg

SEQ ID NO: 47711 - DNA, 18 bp, Homo sapiens
tcatccacatgcatagct

SEQ ID NO: 47712 - DNA, 20 bp, Homo sapiens
agtcccgggggaaggtaggc

SEQ ID NO: 47713 - DNA, 19 bp, Homo sapiens
gggcctcatgaggcagaat

SEQ ID NO: 47714 - DNA, 17 bp, Homo sapiens
aaggtccacactctggg

SEQ ID NO: 47715 - DNA, 23 bp, Homo sapiens
ccagcacaaagctggctggggtg

SEQ ID NO: 47716 - DNA, 18 bp, Homo sapiens
tccatccatgatgctgta

SEQ ID NO: 47717 - DNA, 24 bp, Homo sapiens
tgaatgtgaatgacatcaacgaca

SEQ ID NO: 47718 - DNA, 23 bp, Homo sapiens
cctgagcgggtgtgcaggtgaga

SEQ ID NO: 47719 - DNA, 21 bp, Homo sapiens
tgaagtcactgagggccagcc

SEQ ID NO: 47720 - DNA, 22 bp, Homo sapiens
ggacaaaatcacacaatggtga

SEQ ID NO: 47721 - DNA, 16 bp, Homo sapiens
aacgggcaggtggagt

SEQ ID NO: 47722 - DNA, 22 bp, Homo sapiens
aataagaggtgggagaagatta

SEQ ID NO: 47723 - DNA, 20 bp, Homo sapiens
cttagcaccccctccacagg

SEQ ID NO: 47724 - DNA, 24 bp, Homo sapiens
ggccccagctgtcccccacctgtg

SEQ ID NO: 47725 - DNA, 16 bp, Homo sapiens
atggtcaggttgtaga

SEQ ID NO: 47726 - DNA, 24 bp, Homo sapiens
tcctggggtctccacagttcctgc

SEQ ID NO: 47727 - DNA, 21 bp, Homo sapiens
agcgggtggggcccccagact

SEQ ID NO: 47728 - DNA, 21 bp, Homo sapiens
gagtttgtgatctctcctgtg

SEQ ID NO: 47729 - DNA, 21 bp, Homo sapiens
cacaagggtaacaatgtttac

SEQ ID NO: 47730 - DNA, 24 bp, Homo sapiens
gctggaccgggagaccatcgcctt

SEQ ID NO: 47731 - DNA, 23 bp, Homo sapiens
ctattaagggccccaggggcagg

SEQ ID NO: 47732 - DNA, 19 bp, Homo sapiens
cactcagctccacagtgag

SEQ ID NO: 47733 - DNA, 16 bp, Homo sapiens
gatgtccagcacccgg

SEQ ID NO: 47734 - DNA, 23 bp, Homo sapiens
ctttcttctccatgaccaactgc

SEQ ID NO: 47735 - DNA, 23 bp, Homo sapiens
gacagggctgttctcgctgatgg

SEQ ID NO: 47736 - DNA, 23 bp, Homo sapiens
ctcctcggttgccatgcacaaca

SEQ ID NO: 47737 - DNA, 22 bp, Homo sapiens
tgaggcgtgcattgcagccact

SEQ ID NO: 47738 - DNA, 18 bp, Homo sapiens
tgctggtggggatccggg

SEQ ID NO: 47739 - DNA, 22 bp, Homo sapiens
cctaccgtggcattgatgaaga

SEQ ID NO: 47740 - DNA, 24 bp, Homo sapiens
ctgaacctgcccatgaacatcacc

SEQ ID NO: 47741 - DNA, 16 bp, Homo sapiens
agggtcctctttttca

SEQ ID NO: 47742 - DNA, 24 bp, Homo sapiens
atgtcctggccagtgacgctgaca

SEQ ID NO: 47743 - DNA, 17 bp, Homo sapiens
ctcatcccagtgcagga

SEQ ID NO: 47744 - DNA, 16 bp, Homo sapiens
gagcgggccttcttca

SEQ ID NO: 47745 - DNA, 23 bp, Homo sapiens
cacagtgacgatccctgtctggg

SEQ ID NO: 47746 - DNA, 23 bp, Homo sapiens
gagaccctgccgacccacatttt

SEQ ID NO: 47747 - DNA, 17 bp, Homo sapiens
acagaaatggtcagctt

SEQ ID NO: 47748 - DNA, 18 bp, Homo sapiens
caagcagagcagttggca

SEQ ID NO: 47749 - DNA, 17 bp, Homo sapiens
ctcccaccagtgccctc

SEQ ID NO: 47750 - DNA, 21 bp, Homo sapiens
ctcaccaccctccacatccca

SEQ ID NO: 47751 - DNA, 21 bp, Homo sapiens
tatgctgcctgcaggaggggt

SEQ ID NO: 47752 - DNA, 21 bp, Homo sapiens
gcgagcggatcccagagtaca

SEQ ID NO: 47753 - DNA, 16 bp, Homo sapiens
ctgggatttgaagcca

SEQ ID NO: 47754 - DNA, 16 bp, Homo sapiens
tgccctcttgtatgtc

SEQ ID NO: 47755 - DNA, 18 bp, Homo sapiens
gtggttgtcattctcatc

SEQ ID NO: 47756 - DNA, 21 bp, Homo sapiens
tttctgatcatccacctctgt

SEQ ID NO: 47757 - DNA, 23 bp, Homo sapiens
acctaccagcgggagagttttcc

SEQ ID NO: 47758 - DNA, 24 bp, Homo sapiens
ggggcactttgctgagcatggcct

SEQ ID NO: 47759 - DNA, 23 bp, Homo sapiens
cctcaggcatcccaggccccagt

SEQ ID NO: 47760 - DNA, 22 bp, Homo sapiens
ttgcttctgatcttcctttctg

SEQ ID NO: 47761 - DNA, 19 bp, Homo sapiens
ctcccgcacccactggggt

SEQ ID NO: 47762 - DNA, 24 bp, Homo sapiens
cctaccaggcagaggtgatggaaa

SEQ ID NO: 47763 - DNA, 24 bp, Homo sapiens
cgttcagtctgccaaggctgccgc

SEQ ID NO: 47764 - DNA, 24 bp, Homo sapiens
tcttggtctgcatccagggccagg

SEQ ID NO: 47765 - DNA, 24 bp, Homo sapiens
cacctcacctccctcccctctcat

SEQ ID NO: 47766 - DNA, 24 bp, Homo sapiens
gtcaaagaggccactctgggcacc

SEQ ID NO: 47767 - DNA, 24 bp, Homo sapiens
aggtgggagggcagggggctgggt

SEQ ID NO: 47768 - DNA, 20 bp, Homo sapiens
agaatcaggctgggagtgct

SEQ ID NO: 47769 - DNA, 22 bp, Homo sapiens
cctctcacggtgctcaatgggc

SEQ ID NO: 47770 - DNA, 17 bp, Homo sapiens
agcctgggtccagcact

SEQ ID NO: 47771 - DNA, 16 bp, Homo sapiens
ctaccagctgctgggt

SEQ ID NO: 47772 - DNA, 16 bp, Homo sapiens
atataacccagctgca

SEQ ID NO: 47773 - DNA, 17 bp, Homo sapiens
ggtcaatgatgacacct

SEQ ID NO: 47774 - DNA, 22 bp, Homo sapiens
tctttcatctctgtcccatggt

SEQ ID NO: 47775 - DNA, 16 bp, Homo sapiens
gagcagcccgatgtcc

SEQ ID NO: 47776 - DNA, 18 bp, Homo sapiens
cttcccaccgcacccctt

SEQ ID NO: 47777 - DNA, 23 bp, Homo sapiens
ctaaaggtgggccggttgtcatt

SEQ ID NO: 47778 - DNA, 18 bp, Homo sapiens
gtgaccgtgaggtcaggt

SEQ ID NO: 47779 - DNA, 18 bp, Homo sapiens
ctgtcccctgcttaccag

SEQ ID NO: 47780 - DNA, 24 bp, Homo sapiens
cccatcctggagctgctgctgctg

SEQ ID NO: 47781 - DNA, 24 bp, Homo sapiens
gtccaacctgaggctccagtcccc

SEQ ID NO: 47782 - DNA, 17 bp, Homo sapiens
tcctggatgacaatgac

SEQ ID NO: 47783 - DNA, 24 bp, Homo sapiens
agtgtgttctacactcaccctgct

SEQ ID NO: 47784 - DNA, 22 bp, Homo sapiens
tgtccatctgctagagaactgc

SEQ ID NO: 47785 - DNA, 19 bp, Homo sapiens
aataacatgccattttcct

SEQ ID NO: 47786 - DNA, 19 bp, Homo sapiens
cactgtcctcatctgtggc

SEQ ID NO: 47787 - DNA, 21 bp, Homo sapiens
aatgctgtcaaggctgtcatg

SEQ ID NO: 47788 - DNA, 16 bp, Homo sapiens
aatgaggaagcggtcc

SEQ ID NO: 47789 - DNA, 24 bp, Homo sapiens
tggtagatctttctggaagaggcc

SEQ ID NO: 47790 - DNA, 20 bp, Homo sapiens
gactcctgctcctctctgtc

SEQ ID NO: 47791 - DNA, 24 bp, Homo sapiens
ttctcagtccttcaagtcacagcc

SEQ ID NO: 47792 - DNA, 23 bp, Homo sapiens
gacaatggctgtgcccgagagag

SEQ ID NO: 47793 - DNA, 22 bp, Homo sapiens
aatagaagctggggctcaggac

SEQ ID NO: 47794 - DNA, 16 bp, Homo sapiens
tggatggggttgagga

SEQ ID NO: 47795 - DNA, 24 bp, Homo sapiens
gttggtaatgccaccatcgacaga

SEQ ID NO: 47796 - DNA, 21 bp, Homo sapiens
tcaatggccgtgatattggca

SEQ ID NO: 47797 - DNA, 20 bp, Homo sapiens
gaccggggcaccgttcctct

SEQ ID NO: 47798 - DNA, 17 bp, Homo sapiens
gtcgtccttggccacaa

SEQ ID NO: 47799 - DNA, 24 bp, Homo sapiens
gacatcaatgactcccgccccgag

SEQ ID NO: 47800 - DNA, 19 bp, Homo sapiens
tacctgtgttgatattcac

SEQ ID NO: 47801 - DNA, 24 bp, Homo sapiens
gagtcggctgagccaggcactgtc

SEQ ID NO: 47802 - DNA, 16 bp, Homo sapiens
ggagcgaggagacagg

SEQ ID NO: 47803 - DNA, 17 bp, Homo sapiens
gtaccacattgtcggca

SEQ ID NO: 47804 - DNA, 18 bp, Homo sapiens
gggagagaagagagtagc

SEQ ID NO: 47805 - DNA, 18 bp, Homo sapiens
gacgcctttgctgtgaat

SEQ ID NO: 47806 - DNA, 16 bp, Homo sapiens
ccaagcttatgaggag

SEQ ID NO: 47807 - DNA, 24 bp, Homo sapiens
taggtggcaaccagctcccgattc

SEQ ID NO: 47808 - DNA, 17 bp, Homo sapiens
tggggaccgtcatcctt

SEQ ID NO: 47809 - DNA, 19 bp, Homo sapiens
ctgacagagcgctctggta

SEQ ID NO: 47810 - DNA, 18 bp, Homo sapiens
agattttagggggttctt

SEQ ID NO: 47811 - DNA, 22 bp, Homo sapiens
ctgattggctctgagtgaccaa

SEQ ID NO: 47812 - DNA, 23 bp, Homo sapiens
tgtaatggtgaagtcccccatga

SEQ ID NO: 47813 - DNA, 22 bp, Homo sapiens
ctgggtcttgttgctccctccc

SEQ ID NO: 47814 - DNA, 24 bp, Homo sapiens
tctcagtgattgacaatgccagcg

SEQ ID NO: 47815 - DNA, 20 bp, Homo sapiens
ctcacggtggctgccacctt

SEQ ID NO: 47816 - DNA, 19 bp, Homo sapiens
ctgcagcctgagggtcagg

SEQ ID NO: 47817 - DNA, 16 bp, Homo sapiens
caaagggcttgaactg

SEQ ID NO: 47818 - DNA, 23 bp, Homo sapiens
tgccatgctcacccggcttggct

SEQ ID NO: 47819 - DNA, 20 bp, Homo sapiens
cagcaatgagtgtggtccca

SEQ ID NO: 47820 - DNA, 23 bp, Homo sapiens
gtccttcccctctccctcactcc

SEQ ID NO: 47821 - DNA, 24 bp, Homo sapiens
accaggtccagcagggtgtaggtg

SEQ ID NO: 47822 - DNA, 22 bp, Homo sapiens
gacgtcaatgacaatacgcccc

SEQ ID NO: 47823 - DNA, 21 bp, Homo sapiens
ctgacagatttctaacctacc

SEQ ID NO: 47824 - DNA, 20 bp, Homo sapiens
tggagggggccacccctggg

SEQ ID NO: 47825 - DNA, 24 bp, Homo sapiens
cacagaggggctgtggtctctctt

SEQ ID NO: 47826 - DNA, 20 bp, Homo sapiens
ccttaatgggctggtcacct

SEQ ID NO: 47827 - DNA, 24 bp, Homo sapiens
ggcatctggaatctggcatggaat

SEQ ID NO: 47828 - DNA, 24 bp, Homo sapiens
gtccagctggaggactcctcggca

SEQ ID NO: 47829 - DNA, 24 bp, Homo sapiens
tagtccactgtccggttggcaatg

SEQ ID NO: 47830 - DNA, 20 bp, Homo sapiens
gtggtgctgcctgaccaccc

SEQ ID NO: 47831 - DNA, 16 bp, Homo sapiens
gacccgttgtctgagg

SEQ ID NO: 47832 - DNA, 16 bp, Homo sapiens
atactttggagagctg

SEQ ID NO: 47833 - DNA, 18 bp, Homo sapiens
ggggttgttgtcattgat

SEQ ID NO: 47834 - DNA, 22 bp, Homo sapiens
ctctgtgtcttagggaaggtca

SEQ ID NO: 47835 - DNA, 22 bp, Homo sapiens
atgggcgcaggtcctggaccca

SEQ ID NO: 47836 - DNA, 22 bp, Homo sapiens
tcaactttaccgtgagggcctc

SEQ ID NO: 47837 - DNA, 24 bp, Homo sapiens
cactcccagggggcttagaggctg

SEQ ID NO: 47838 - DNA, 20 bp, Homo sapiens
ctacctggaaatcgtggaca

SEQ ID NO: 47839 - DNA, 16 bp, Homo sapiens
gccctagaactcactg

SEQ ID NO: 47840 - DNA, 16 bp, Homo sapiens
catcttcctctcccac

SEQ ID NO: 47841 - DNA, 24 bp, Homo sapiens
tgagtcagcatcagtggcagtgac

SEQ ID NO: 47842 - DNA, 20 bp, Homo sapiens
gcttgatgcctgcatcagtg

SEQ ID NO: 47843 - DNA, 16 bp, Homo sapiens
aaacttgctctctcca

SEQ ID NO: 47844 - DNA, 24 bp, Homo sapiens
cttggcctactctctctccctgcc

SEQ ID NO: 47845 - DNA, 20 bp, Homo sapiens
tgggtccttcccacttccaa

SEQ ID NO: 47846 - DNA, 20 bp, Homo sapiens
gcacaatcatcctgacagtc

SEQ ID NO: 47847 - DNA, 18 bp, Homo sapiens
tccaggcgacaagaccca

SEQ ID NO: 47848 - DNA, 21 bp, Homo sapiens
gagtacagccttggagatgga

SEQ ID NO: 47849 - DNA, 16 bp, Homo sapiens
ctctgagaacagggtt

SEQ ID NO: 47850 - DNA, 19 bp, Homo sapiens
agagcaagaagagccccta

SEQ ID NO: 47851 - DNA, 19 bp, Homo sapiens
gatatagtggtccttcttc

SEQ ID NO: 47852 - DNA, 23 bp, Homo sapiens
ttgttcagtgtcaaatctccaga

SEQ ID NO: 47853 - DNA, 18 bp, Homo sapiens
aattttcgcgacggttgc

SEQ ID NO: 47854 - DNA, 22 bp, Homo sapiens
aatatcttttgaatgattgaag

SEQ ID NO: 47855 - DNA, 19 bp, Homo sapiens
ttgttgcctccacaacccc

SEQ ID NO: 47856 - DNA, 18 bp, Homo sapiens
tctctggaccgggagaag

SEQ ID NO: 47857 - DNA, 20 bp, Homo sapiens
tcaaaggggaccggggggct

SEQ ID NO: 47858 - DNA, 16 bp, Homo sapiens
cctggggatgtagcca

SEQ ID NO: 47859 - DNA, 22 bp, Homo sapiens
agggggttaaataagttgcttc

SEQ ID NO: 47860 - DNA, 16 bp, Homo sapiens
agaactgtggccggca

SEQ ID NO: 47861 - DNA, 20 bp, Homo sapiens
caggctggtgcctgtccttc

SEQ ID NO: 47862 - DNA, 16 bp, Homo sapiens
tggtgatgaccgaggt

SEQ ID NO: 47863 - DNA, 22 bp, Homo sapiens
aggctgccccatcctgctcctt

SEQ ID NO: 47864 - DNA, 16 bp, Homo sapiens
tcaagtgagtaggtca

SEQ ID NO: 47865 - DNA, 21 bp, Homo sapiens
tccaagtgctggatgtcaatg

SEQ ID NO: 47866 - DNA, 22 bp, Homo sapiens
ctccccctcccaccccccaaga

SEQ ID NO: 47867 - DNA, 19 bp, Homo sapiens
gtgtatgagaatgagccgg

SEQ ID NO: 47868 - DNA, 23 bp, Homo sapiens
aggagagtagctctggttgagac

SEQ ID NO: 47869 - DNA, 23 bp, Homo sapiens
ggatgaaggtcccaatggagagt

SEQ ID NO: 47870 - DNA, 24 bp, Homo sapiens
tgtggtcaccaagcccgagtccat

SEQ ID NO: 47871 - DNA, 16 bp, Homo sapiens
gacacccatgatgtct

SEQ ID NO: 47872 - DNA, 24 bp, Homo sapiens
tccaccatctgtggccaccacggt

SEQ ID NO: 47873 - DNA, 24 bp, Homo sapiens
gccaggagtagagggaagcgtggg

SEQ ID NO: 47874 - DNA, 17 bp, Homo sapiens
tgtcattgacgtcgatg

SEQ ID NO: 47875 - DNA, 23 bp, Homo sapiens
tgccagaggccttccatgtggac

SEQ ID NO: 47876 - DNA, 19 bp, Homo sapiens
gagtacctctctgatgtgg

SEQ ID NO: 47877 - DNA, 24 bp, Homo sapiens
gtcctacgagaagttcagtctgac

SEQ ID NO: 47878 - DNA, 19 bp, Homo sapiens
actcttctaggccacagct

SEQ ID NO: 47879 - DNA, 19 bp, Homo sapiens
caccatgctcctggtggag

SEQ ID NO: 47880 - DNA, 20 bp, Homo sapiens
tttttttttcctggagctac

SEQ ID NO: 47881 - DNA, 16 bp, Homo sapiens
cggcaccatcctccac

SEQ ID NO: 47882 - DNA, 22 bp, Homo sapiens
cagaagcccagaatccaggaga

SEQ ID NO: 47883 - DNA, 24 bp, Homo sapiens
ttgtccgtggcgtagacctcgtac

SEQ ID NO: 47884 - DNA, 24 bp, Homo sapiens
tgctgtaagctgttgaggacattc

SEQ ID NO: 47885 - DNA, 23 bp, Homo sapiens
cccggttgcccgcagtcttcagg

SEQ ID NO: 47886 - DNA, 18 bp, Homo sapiens
ggagctgagattctttca

SEQ ID NO: 47887 - DNA, 23 bp, Homo sapiens
ccaggcgctgagcagtctggatg

SEQ ID NO: 47888 - DNA, 20 bp, Homo sapiens
ctgcgctccaacgtgtacga

SEQ ID NO: 47889 - DNA, 16 bp, Homo sapiens
cccgcccctcgcaccg

SEQ ID NO: 47890 - DNA, 24 bp, Homo sapiens
aacggggcggtgcgctacagcttc

SEQ ID NO: 47891 - DNA, 22 bp, Homo sapiens
tcccctagggactttccaggag

SEQ ID NO: 47892 - DNA, 20 bp, Homo sapiens
ccaatcagcggcctcatcca

SEQ ID NO: 47893 - DNA, 24 bp, Homo sapiens
aagagcacagtcagaggaaaagac

SEQ ID NO: 47894 - DNA, 23 bp, Homo sapiens
atagtctcgtatggcactggctg

SEQ ID NO: 47895 - DNA, 24 bp, Homo sapiens
gggggcgggtcttgcacctcgcct

SEQ ID NO: 47896 - DNA, 20 bp, Homo sapiens
aaaaggggttcgttgtcatc

SEQ ID NO: 47897 - DNA, 24 bp, Homo sapiens
ccccaagccaatcccctctcccag

SEQ ID NO: 47898 - DNA, 16 bp, Homo sapiens
tccctgtgtgggtgtg

SEQ ID NO: 47899 - DNA, 17 bp, Homo sapiens
cttggtggccagcgacc

SEQ ID NO: 47900 - DNA, 17 bp, Homo sapiens
gtctagccaaatgtgta

SEQ ID NO: 47901 - DNA, 18 bp, Homo sapiens
cctggaggacatcgatga

SEQ ID NO: 47902 - DNA, 17 bp, Homo sapiens
cacagctgctcaataaa

SEQ ID NO: 47903 - DNA, 22 bp, Homo sapiens
catgctttgctcccttgaggtt

SEQ ID NO: 47904 - DNA, 18 bp, Homo sapiens
ccgcgtggtgagtgctca

SEQ ID NO: 47905 - DNA, 22 bp, Homo sapiens
taaactccctcagcacctacaa

SEQ ID NO: 47906 - DNA, 21 bp, Homo sapiens
aagtagtacacgatcgcgttg

SEQ ID NO: 47907 - DNA, 24 bp, Homo sapiens
gtcttcccttggccccatgtgatg

SEQ ID NO: 47908 - DNA, 21 bp, Homo sapiens
atctctagccccagggtaatc

SEQ ID NO: 47909 - DNA, 24 bp, Homo sapiens
taccagctgctgacagtgcctgag

SEQ ID NO: 47910 - DNA, 24 bp, Homo sapiens
cggctgagggtgggatcatggcac

SEQ ID NO: 47911 - DNA, 16 bp, Homo sapiens
cagtggatgcagatga

SEQ ID NO: 47912 - DNA, 16 bp, Homo sapiens
caccagcagacaccca

SEQ ID NO: 47913 - DNA, 21 bp, Homo sapiens
cagacagagctagtgccctga

SEQ ID NO: 47914 - DNA, 18 bp, Homo sapiens
gattgctggaggccttga

SEQ ID NO: 47915 - DNA, 24 bp, Homo sapiens
ctgctcctggccctgccccctcac

SEQ ID NO: 47916 - DNA, 22 bp, Homo sapiens
ctgcagtgtgaggtcagcaacc

SEQ ID NO: 47917 - DNA, 23 bp, Homo sapiens
aacttccatctgcagcccgatgg

SEQ ID NO: 47918 - DNA, 24 bp, Homo sapiens
ctcagccttggtgaagcgtggtgg

SEQ ID NO: 47919 - DNA, 24 bp, Homo sapiens
gaagccatcttctccttcatcgtc

SEQ ID NO: 47920 - DNA, 23 bp, Homo sapiens
tggcagggcaggggccaccccac

SEQ ID NO: 47921 - DNA, 21 bp, Homo sapiens
gtggaccctccccaaccctcg

SEQ ID NO: 47922 - DNA, 24 bp, Homo sapiens
ctctgagcccaccttggcgtcggt

SEQ ID NO: 47923 - DNA, 23 bp, Homo sapiens
ctagaggacatcaacgaccagcc

SEQ ID NO: 47924 - DNA, 20 bp, Homo sapiens
gaagacaaggctgttgttgc

SEQ ID NO: 47925 - DNA, 22 bp, Homo sapiens
cagggactggagcctgggcacg

SEQ ID NO: 47926 - DNA, 23 bp, Homo sapiens
gaagacctggcccacatcttcag

SEQ ID NO: 47927 - DNA, 24 bp, Homo sapiens
ctcttcctgcaggggtggccaccg

SEQ ID NO: 47928 - DNA, 24 bp, Homo sapiens
agtgactgagaggtcatggctaga

SEQ ID NO: 47929 - DNA, 20 bp, Homo sapiens
cctggatgcagacattggca

SEQ ID NO: 47930 - DNA, 18 bp, Homo sapiens
atcctgtggtgctcccac

SEQ ID NO: 47931 - DNA, 23 bp, Homo sapiens
ctacttccgggcccttgccaacg

SEQ ID NO: 47932 - DNA, 18 bp, Homo sapiens
agaacggattgctgaata

SEQ ID NO: 47933 - DNA, 23 bp, Homo sapiens
catcgttcccacttgcctgtcac

SEQ ID NO: 47934 - DNA, 24 bp, Homo sapiens
aagtagccggggctgtaggccatg

SEQ ID NO: 47935 - DNA, 19 bp, Homo sapiens
ctcccctagatgtgcccac

SEQ ID NO: 47936 - DNA, 23 bp, Homo sapiens
gtagatgccgatgatggccgtgt

SEQ ID NO: 47937 - DNA, 22 bp, Homo sapiens
gggcactgagtctctgagccgt

SEQ ID NO: 47938 - DNA, 18 bp, Homo sapiens
gggatctcgttaatgacg

SEQ ID NO: 47939 - DNA, 23 bp, Homo sapiens
gcgcaccttcgacctcttcatgg

SEQ ID NO: 47940 - DNA, 21 bp, Homo sapiens
ttgacaatggccccagtgatg

SEQ ID NO: 47941 - DNA, 23 bp, Homo sapiens
tgtggcccgagacctggcaggcc

SEQ ID NO: 47942 - DNA, 20 bp, Homo sapiens
ctccctccactgccccggcc

SEQ ID NO: 47943 - DNA, 24 bp, Homo sapiens
gggacgaccagcgcgtcaagatcg

SEQ ID NO: 47944 - DNA, 16 bp, Homo sapiens
ccctggcctttgcaca

SEQ ID NO: 47945 - DNA, 18 bp, Homo sapiens
tcatccacctgctctcca

SEQ ID NO: 47946 - DNA, 20 bp, Homo sapiens
gggagaactttatcaaagct

SEQ ID NO: 47947 - DNA, 24 bp, Homo sapiens
tgattggcaccgtgcctggtcctc

SEQ ID NO: 47948 - DNA, 17 bp, Homo sapiens
caccacgtggataagca

SEQ ID NO: 47949 - DNA, 24 bp, Homo sapiens
agggaagggcagaaggggttccta

SEQ ID NO: 47950 - DNA, 24 bp, Homo sapiens
caggctgacagtccaaacacaggc

SEQ ID NO: 47951 - DNA, 24 bp, Homo sapiens
gtggccacaccctacaatacccct

SEQ ID NO: 47952 - DNA, 16 bp, Homo sapiens
tttggtgtgtcccctc

SEQ ID NO: 47953 - DNA, 18 bp, Homo sapiens
gaactttgcgcagacaga

SEQ ID NO: 47954 - DNA, 16 bp, Homo sapiens
ctgccccagtctggga

SEQ ID NO: 47955 - DNA, 16 bp, Homo sapiens
ctgctccttgttctca

SEQ ID NO: 47956 - DNA, 18 bp, Homo sapiens
ctcaatcttgcaaggctt

SEQ ID NO: 47957 - DNA, 19 bp, Homo sapiens
cagccggacagagatggca

SEQ ID NO: 47958 - DNA, 24 bp, Homo sapiens
gagcagactgtcggtggtggggga

SEQ ID NO: 47959 - DNA, 24 bp, Homo sapiens
gcagtggggagggcggctagggct

SEQ ID NO: 47960 - DNA, 24 bp, Homo sapiens
ccagggtgatccagatgatcgatg

SEQ ID NO: 47961 - DNA, 17 bp, Homo sapiens
ccaggacgatgatcgcc

SEQ ID NO: 47962 - DNA, 24 bp, Homo sapiens
aacgtcctggacgtgcagcctgcc

SEQ ID NO: 47963 - DNA, 20 bp, Homo sapiens
acactcacacagtcctgtag

SEQ ID NO: 47964 - DNA, 24 bp, Homo sapiens
cctgcaggtacccggcgaccgtgc

SEQ ID NO: 47965 - DNA, 16 bp, Homo sapiens
cgtggccatccgggag

SEQ ID NO: 47966 - DNA, 24 bp, Homo sapiens
ctggtcctgctcccgcagatggcg

SEQ ID NO: 47967 - DNA, 16 bp, Homo sapiens
ggagagaagcagagag

SEQ ID NO: 47968 - DNA, 22 bp, Homo sapiens
atgctctttgtcctcatgaact

SEQ ID NO: 47969 - DNA, 17 bp, Homo sapiens
tatggccctcacttacc

SEQ ID NO: 47970 - DNA, 24 bp, Homo sapiens
ccatcagggggccgaccacctgct

SEQ ID NO: 47971 - DNA, 23 bp, Homo sapiens
ctgagccaggcttgtggctccgg

SEQ ID NO: 47972 - DNA, 24 bp, Homo sapiens
gtcagcttggcccccctcaccagc

SEQ ID NO: 47973 - DNA, 23 bp, Homo sapiens
tggtgttggggggtgagggagga

SEQ ID NO: 47974 - DNA, 24 bp, Homo sapiens
gccattgtggctggctcagctggt

SEQ ID NO: 47975 - DNA, 22 bp, Homo sapiens
agtgggctggggacctggagtg

SEQ ID NO: 47976 - DNA, 23 bp, Homo sapiens
ccatcaaaggagtacttgttggt

SEQ ID NO: 47977 - DNA, 16 bp, Homo sapiens
atgccccgcaccccat

SEQ ID NO: 47978 - DNA, 22 bp, Homo sapiens
cagctgggtcctggcaggactc

SEQ ID NO: 47979 - DNA, 24 bp, Homo sapiens
ctatgcccctcccctccatgcccc

SEQ ID NO: 47980 - DNA, 17 bp, Homo sapiens
ggggcgcccacagcctg

SEQ ID NO: 47981 - DNA, 24 bp, Homo sapiens
atcgacatcatggacatgcctaac

SEQ ID NO: 47982 - DNA, 23 bp, Homo sapiens
cataggatcctgctggaaccagg

SEQ ID NO: 47983 - DNA, 24 bp, Homo sapiens
cttcaccctccctccaccctcaga

SEQ ID NO: 47984 - DNA, 24 bp, Homo sapiens
atagtgcctttcactgacttgggg

SEQ ID NO: 47985 - DNA, 23 bp, Homo sapiens
gggcctcaagttccaggggatgc

SEQ ID NO: 47986 - DNA, 23 bp, Homo sapiens
gagtagacaggtgcccttccagc

SEQ ID NO: 47987 - DNA, 23 bp, Homo sapiens
accaaaggcaatccagactgaca

SEQ ID NO: 47988 - DNA, 17 bp, Homo sapiens
agggttggctctgcagt

SEQ ID NO: 47989 - DNA, 23 bp, Homo sapiens
caccacaggcaccagggcctcac

SEQ ID NO: 47990 - DNA, 21 bp, Homo sapiens
gtaggtcatcctcatgctccg

SEQ ID NO: 47991 - DNA, 23 bp, Homo sapiens
gaaatgggcaggatgtggggtga

SEQ ID NO: 47992 - DNA, 21 bp, Homo sapiens
ctggctcacatgggtgcgcgt

SEQ ID NO: 47993 - DNA, 24 bp, Homo sapiens
cacccttttccctccccaactgca

SEQ ID NO: 47994 - DNA, 23 bp, Homo sapiens
ccagaggttgcaaagacccagcc

SEQ ID NO: 47995 - DNA, 21 bp, Homo sapiens
gaacctggagctggccgccca

SEQ ID NO: 47996 - DNA, 16 bp, Homo sapiens
cccacacacatgtaca

SEQ ID NO: 47997 - DNA, 17 bp, Homo sapiens
gacctgtggaacagccc

SEQ ID NO: 47998 - DNA, 23 bp, Homo sapiens
cagctgctggctcacgcccaaaa

SEQ ID NO: 47999 - DNA, 22 bp, Homo sapiens
cacaaggggcaggggtggaggg

SEQ ID NO: 48000 - DNA, 19 bp, Homo sapiens
gcaatgttgtcatactcct

SEQ ID NO: 48001 - DNA, 23 bp, Homo sapiens
ttctttaaggggtggccccctcc

SEQ ID NO: 48002 - DNA, 17 bp, Homo sapiens
gagcctgcagggaaggc

SEQ ID NO: 48003 - DNA, 23 bp, Homo sapiens
aacatcccctctccccagggaac

SEQ ID NO: 48004 - DNA, 17 bp, Homo sapiens
ctctaccaccctgtgtt

SEQ ID NO: 48005 - DNA, 24 bp, Homo sapiens
gaccgatacctgcgggctgccatc

SEQ ID NO: 48006 - DNA, 16 bp, Homo sapiens
ccccatcagccctggt

SEQ ID NO: 48007 - DNA, 24 bp, Homo sapiens
attcgtgaggggccaatcaaggtg

SEQ ID NO: 48008 - DNA, 22 bp, Homo sapiens
gtaatcctccaggaccaccttc

SEQ ID NO: 48009 - DNA, 16 bp, Homo sapiens
ctgatcctctgcccta

SEQ ID NO: 48010 - DNA, 18 bp, Homo sapiens
ggcaggaggaggcttttt

SEQ ID NO: 48011 - DNA, 24 bp, Homo sapiens
gagggagtgggcgaggggcggggc

SEQ ID NO: 48012 - DNA, 21 bp, Homo sapiens
atccccaggctggggcacagc

SEQ ID NO: 48013 - DNA, 16 bp, Homo sapiens
cagggctcgctgctga

SEQ ID NO: 48014 - DNA, 16 bp, Homo sapiens
gagctccagagacata

SEQ ID NO: 48015 - DNA, 23 bp, Homo sapiens
tctttgcacagcggatggtgcaa

SEQ ID NO: 48016 - DNA, 18 bp, Homo sapiens
aagcagatcctgctgtct

SEQ ID NO: 48017 - DNA, 18 bp, Homo sapiens
caacttaagcattcatga

SEQ ID NO: 48018 - DNA, 17 bp, Homo sapiens
gggctgtggtctcctgg

SEQ ID NO: 48019 - DNA, 23 bp, Homo sapiens
ctgctgcggtaggagcccaaggt

SEQ ID NO: 48020 - DNA, 23 bp, Homo sapiens
catggatcccatcgggccccttg

SEQ ID NO: 48021 - DNA, 24 bp, Homo sapiens
tccacctgctcaccccttgggcat

SEQ ID NO: 48022 - DNA, 23 bp, Homo sapiens
ttcctcgggcaggctgttgaggt

SEQ ID NO: 48023 - DNA, 22 bp, Homo sapiens
tacagactgagctggacgagga

SEQ ID NO: 48024 - DNA, 23 bp, Homo sapiens
aaggcagtggcctcggcagcggt

SEQ ID NO: 48025 - DNA, 18 bp, Homo sapiens
aagccaccagtggagctc

SEQ ID NO: 48026 - DNA, 21 bp, Homo sapiens
cgtcgcgaagtttgtgcaggg

SEQ ID NO: 48027 - DNA, 16 bp, Homo sapiens
ctgctggccaccgacc

SEQ ID NO: 48028 - DNA, 22 bp, Homo sapiens
cacaaggcttccctgtctagtc

SEQ ID NO: 48029 - DNA, 23 bp, Homo sapiens
cctgggccgctcgctggagacgc

SEQ ID NO: 48030 - DNA, 24 bp, Homo sapiens
ccgaccggccctgtccctgccctt

SEQ ID NO: 48031 - DNA, 21 bp, Homo sapiens
cacagaatccgccaaatccac

SEQ ID NO: 48032 - DNA, 23 bp, Homo sapiens
ctgatgcgggctgccagggccaa

SEQ ID NO: 48033 - DNA, 16 bp, Homo sapiens
agatcacagagctgtg

SEQ ID NO: 48034 - DNA, 26 bp, Homo sapiens
tggaggctttataataaaattattaa

SEQ ID NO: 48035 - DNA, 24 bp, Homo sapiens
ttttcttggatataaaaaaacaaa

SEQ ID NO: 48036 - DNA, 16 bp, Homo sapiens
attccggaatgggagc

SEQ ID NO: 48037 - DNA, 21 bp, Homo sapiens
gcaaacacattttcacatgac

SEQ ID NO: 48038 - DNA, 16 bp, Homo sapiens
gatgtctacgacgtca

SEQ ID NO: 48039 - DNA, 22 bp, Homo sapiens
ctgatatttcctcattagatta

SEQ ID NO: 48040 - DNA, 19 bp, Homo sapiens
cacatacaatgtgaaggac

SEQ ID NO: 48041 - DNA, 18 bp, Homo sapiens
atgaagtcaagatgctcc

SEQ ID NO: 48042 - DNA, 16 bp, Homo sapiens
aacaacaacaacgagg

SEQ ID NO: 48043 - DNA, 20 bp, Homo sapiens
ctgagtcagtaagatattga

SEQ ID NO: 48044 - DNA, 19 bp, Homo sapiens
tagtcaaacttactagaca

SEQ ID NO: 48045 - DNA, 17 bp, Homo sapiens
agtcggcacaagcatgt

SEQ ID NO: 48046 - DNA, 17 bp, Homo sapiens
gtgccggtaatggcaac

SEQ ID NO: 48047 - DNA, 16 bp, Homo sapiens
gaagcagtgccaagaa

SEQ ID NO: 48048 - DNA, 16 bp, Homo sapiens
caactcctgcaaacat

SEQ ID NO: 48049 - DNA, 22 bp, Homo sapiens
cagataactcttttccaaatta

SEQ ID NO: 48050 - DNA, 17 bp, Homo sapiens
ggctggctttcttgatg

SEQ ID NO: 48051 - DNA, 16 bp, Homo sapiens
tccgaggttgtggcta

SEQ ID NO: 48052 - DNA, 25 bp, Homo sapiens
ctggttgtaatgaaaataattcttg

SEQ ID NO: 48053 - DNA, 21 bp, Homo sapiens
catttaaaataatgccttgga

SEQ ID NO: 48054 - DNA, 20 bp, Homo sapiens
gcaacacaagcacgatgaca

SEQ ID NO: 48055 - DNA, 20 bp, Homo sapiens
gtggatgtatatacaacaca

SEQ ID NO: 48056 - DNA, 18 bp, Homo sapiens
aagcaggttgtctttcta

SEQ ID NO: 48057 - DNA, 18 bp, Homo sapiens
caccttaatgctgttttc

SEQ ID NO: 48058 - DNA, 20 bp, Homo sapiens
tttacatgaaccccaaatgc

SEQ ID NO: 48059 - DNA, 19 bp, Homo sapiens
gagattatggctctagttt

SEQ ID NO: 48060 - DNA, 16 bp, Homo sapiens
agttccagcaggagaa

SEQ ID NO: 48061 - DNA, 22 bp, Homo sapiens
tgtatgtatttttatagggcag

SEQ ID NO: 48062 - DNA, 18 bp, Homo sapiens
tgttttcttctgtgtgga

SEQ ID NO: 48063 - DNA, 20 bp, Homo sapiens
aaagactctttagagttctg

SEQ ID NO: 48064 - DNA, 16 bp, Homo sapiens
gtggctgggtacccac

SEQ ID NO: 48065 - DNA, 18 bp, Homo sapiens
agcacattcacagataaa

SEQ ID NO: 48066 - DNA, 19 bp, Homo sapiens
tgggtttctttttattttg

SEQ ID NO: 48067 - DNA, 22 bp, Homo sapiens
aatttctctcattaaatccaca

SEQ ID NO: 48068 - DNA, 16 bp, Homo sapiens
ctgaggtgagtcacgg

SEQ ID NO: 48069 - DNA, 21 bp, Homo sapiens
cagtatgacatgagtgcaaac

SEQ ID NO: 48070 - DNA, 17 bp, Homo sapiens
cactggttgccattctc

SEQ ID NO: 48071 - DNA, 20 bp, Homo sapiens
tctttgtctccaaataagtc

SEQ ID NO: 48072 - DNA, 16 bp, Homo sapiens
cacccctgggtctgga

SEQ ID NO: 48073 - DNA, 17 bp, Homo sapiens
gccctatggccaaatta

SEQ ID NO: 48074 - DNA, 24 bp, Homo sapiens
ctgatatcaaaacgcaggggagga

SEQ ID NO: 48075 - DNA, 23 bp, Homo sapiens
tggctaaaaggattaaaatgttt

SEQ ID NO: 48076 - DNA, 18 bp, Homo sapiens
caggaggaaatctgcggg

SEQ ID NO: 48077 - DNA, 19 bp, Homo sapiens
aattcctgttttctgtcct

SEQ ID NO: 48078 - DNA, 18 bp, Homo sapiens
tgatctggtaatcgtcct

SEQ ID NO: 48079 - DNA, 20 bp, Homo sapiens
gagagggcgtcgcgagtgac

SEQ ID NO: 48080 - DNA, 22 bp, Homo sapiens
cacaggacccagggcaaaaaac

SEQ ID NO: 48081 - DNA, 16 bp, Homo sapiens
gtcaagtgttttggct

SEQ ID NO: 48082 - DNA, 21 bp, Homo sapiens
tttcatagaagactaaatgtt

SEQ ID NO: 48083 - DNA, 20 bp, Homo sapiens
caagtgtattatgtgggtca

SEQ ID NO: 48084 - DNA, 24 bp, Homo sapiens
tttaaaaataaatggaatttgaac

SEQ ID NO: 48085 - DNA, 20 bp, Homo sapiens
atggcaaaatatgacctacc

SEQ ID NO: 48086 - DNA, 19 bp, Homo sapiens
aaactctgtaatgaagaat

SEQ ID NO: 48087 - DNA, 18 bp, Homo sapiens
gtgtgctctattttatgt

SEQ ID NO: 48088 - DNA, 20 bp, Homo sapiens
atagtggtgccttgagaatg

SEQ ID NO: 48089 - DNA, 16 bp, Homo sapiens
tggttttcccagctgt

SEQ ID NO: 48090 - DNA, 22 bp, Homo sapiens
gaatgaagttaatggaagctgg

SEQ ID NO: 48091 - DNA, 20 bp, Homo sapiens
cactctcagtttctcaggat

SEQ ID NO: 48092 - DNA, 22 bp, Homo sapiens
gacactaacttcccctctcata

SEQ ID NO: 48093 - DNA, 16 bp, Homo sapiens
tttgacgtgtggatgg

SEQ ID NO: 48094 - DNA, 24 bp, Homo sapiens
tggaagcctgttgtctgctttaag

SEQ ID NO: 48095 - DNA, 17 bp, Homo sapiens
tagtaactgggtcacaa

SEQ ID NO: 48096 - DNA, 23 bp, Homo sapiens
atatacctgaaagcccagaattc

SEQ ID NO: 48097 - DNA, 17 bp, Homo sapiens
tgaatgtttttcaggtc

SEQ ID NO: 48098 - DNA, 20 bp, Homo sapiens
gtatttcctctgctgttgcc

SEQ ID NO: 48099 - DNA, 24 bp, Homo sapiens
cgaatgttctatttagcaagatat

SEQ ID NO: 48100 - DNA, 17 bp, Homo sapiens
gctgctgttggcaaggt

SEQ ID NO: 48101 - DNA, 21 bp, Homo sapiens
agtacatcactatgtcaatct

SEQ ID NO: 48102 - DNA, 16 bp, Homo sapiens
aactggtttgggacct

SEQ ID NO: 48103 - DNA, 21 bp, Homo sapiens
aattatttttctttgccttgc

SEQ ID NO: 48104 - DNA, 21 bp, Homo sapiens
acagaagatggatatattctg

SEQ ID NO: 48105 - DNA, 21 bp, Homo sapiens
aatcccatttcaatgttttta

SEQ ID NO: 48106 - DNA, 19 bp, Homo sapiens
ttttctctacagagtgaaa

SEQ ID NO: 48107 - DNA, 22 bp, Homo sapiens
ctggtttttacttttaagagcc

SEQ ID NO: 48108 - DNA, 18 bp, Homo sapiens
ttgttaatgtgggagact

SEQ ID NO: 48109 - DNA, 19 bp, Homo sapiens
tgaggaattcggttaaggc

SEQ ID NO: 48110 - DNA, 21 bp, Homo sapiens
agactaaaatttcaatgacaa

SEQ ID NO: 48111 - DNA, 18 bp, Homo sapiens
tagggaatccccagtaag

SEQ ID NO: 48112 - DNA, 17 bp, Homo sapiens
cctgcattctgaggggt

SEQ ID NO: 48113 - DNA, 22 bp, Homo sapiens
ataaagagatgaatgtatgggt

SEQ ID NO: 48114 - DNA, 25 bp, Homo sapiens
actgttttattatacagaatgaaaa

SEQ ID NO: 48115 - DNA, 24 bp, Homo sapiens
gcattttaaaagtacataactttg

SEQ ID NO: 48116 - DNA, 19 bp, Homo sapiens
gtgggagcattaagttacc

SEQ ID NO: 48117 - DNA, 20 bp, Homo sapiens
cacagctgtcagtttccctc

SEQ ID NO: 48118 - DNA, 21 bp, Homo sapiens
atttgtttcatattttccttt

SEQ ID NO: 48119 - DNA, 21 bp, Homo sapiens
ccaccaaccccaagaaccgca

SEQ ID NO: 48120 - DNA, 18 bp, Homo sapiens
ctgggaacacccagctca

SEQ ID NO: 48121 - DNA, 22 bp, Homo sapiens
ttcctggacaagctcctgctta

SEQ ID NO: 48122 - DNA, 22 bp, Homo sapiens
tttttaactagaaacattgatc

SEQ ID NO: 48123 - DNA, 16 bp, Homo sapiens
gggtagatacccgcaa

SEQ ID NO: 48124 - DNA, 19 bp, Homo sapiens
gacatagaccaattgtgct

SEQ ID NO: 48125 - DNA, 19 bp, Homo sapiens
ttctcctccagtttcccat

SEQ ID NO: 48126 - DNA, 17 bp, Homo sapiens
ctgtgaggcaggggcta

SEQ ID NO: 48127 - DNA, 18 bp, Homo sapiens
caggtcccacagaggaca

SEQ ID NO: 48128 - DNA, 16 bp, Homo sapiens
gaggggaagaaggtgg

SEQ ID NO: 48129 - DNA, 18 bp, Homo sapiens
cttgacagagcctgtgta

SEQ ID NO: 48130 - DNA, 18 bp, Homo sapiens
actgcagaggtggactat

SEQ ID NO: 48131 - DNA, 16 bp, Homo sapiens
ccctgttcctctccca

SEQ ID NO: 48132 - DNA, 24 bp, Homo sapiens
tctaaaaaagaaaaatgatgtgaa

SEQ ID NO: 48133 - DNA, 18 bp, Homo sapiens
ctcactgctggtcaggaa

SEQ ID NO: 48134 - DNA, 24 bp, Homo sapiens
agatgggaaggaaatgtgtgaaag

SEQ ID NO: 48135 - DNA, 16 bp, Homo sapiens
agctagcaggagcctg

SEQ ID NO: 48136 - DNA, 22 bp, Homo sapiens
tgttcggtagaggatgggaagg

SEQ ID NO: 48137 - DNA, 18 bp, Homo sapiens
ctgcacatccacccaccc

SEQ ID NO: 48138 - DNA, 24 bp, Homo sapiens
ggctccaatggcgagtttcctttc

SEQ ID NO: 48139 - DNA, 23 bp, Homo sapiens
gcctcagcatgtcccagaagagg

SEQ ID NO: 48140 - DNA, 24 bp, Homo sapiens
gtgcgccaggccatgcccaagaac

SEQ ID NO: 48141 - DNA, 23 bp, Homo sapiens
gaggtgagagcaggcagaaggag

SEQ ID NO: 48142 - DNA, 16 bp, Homo sapiens
gccatgctgacggtca

SEQ ID NO: 48143 - DNA, 24 bp, Homo sapiens
ttgggtcctgtctccttgttctgc

SEQ ID NO: 48144 - DNA, 22 bp, Homo sapiens
gcactgctcatgcggccacgat

SEQ ID NO: 48145 - DNA, 16 bp, Homo sapiens
ctggtccaggcctcct

SEQ ID NO: 48146 - DNA, 16 bp, Homo sapiens
cctcctcttggtctca

SEQ ID NO: 48147 - DNA, 22 bp, Homo sapiens
agccactcaagccacagtggag

SEQ ID NO: 48148 - DNA, 24 bp, Homo sapiens
ctatagctgccgttcatgtgaagc

SEQ ID NO: 48149 - DNA, 23 bp, Homo sapiens
tggtggtgaccccttgctactat

SEQ ID NO: 48150 - DNA, 21 bp, Homo sapiens
gtggtcaggtaagcctcccaa

SEQ ID NO: 48151 - DNA, 17 bp, Homo sapiens
atatgacccactgtgat

SEQ ID NO: 48152 - DNA, 18 bp, Homo sapiens
gtgttggctgggacactg

SEQ ID NO: 48153 - DNA, 24 bp, Homo sapiens
gtccaggtggccctgtagtgaagc

SEQ ID NO: 48154 - DNA, 18 bp, Homo sapiens
atattcgggtgctgggaa

SEQ ID NO: 48155 - DNA, 24 bp, Homo sapiens
cttgggacctggggcggctgccct

SEQ ID NO: 48156 - DNA, 23 bp, Homo sapiens
aaaaggaggagaggaccccagcc

SEQ ID NO: 48157 - DNA, 19 bp, Homo sapiens
tctccaatccctgtggtgc

SEQ ID NO: 48158 - DNA, 22 bp, Homo sapiens
ccaaggttggaaacagatctca

SEQ ID NO: 48159 - DNA, 22 bp, Homo sapiens
ggatgcagtggtcacgctttcc

SEQ ID NO: 48160 - DNA, 18 bp, Homo sapiens
gagatgccctcaagaaag

SEQ ID NO: 48161 - DNA, 16 bp, Homo sapiens
cagcccaatcctggtc

SEQ ID NO: 48162 - DNA, 20 bp, Homo sapiens
ctctgtcgtgcgggctctct

SEQ ID NO: 48163 - DNA, 16 bp, Homo sapiens
atcagaaagccagccg

SEQ ID NO: 48164 - DNA, 24 bp, Homo sapiens
tcattccaccacacttacccggcc

SEQ ID NO: 48165 - DNA, 21 bp, Homo sapiens
tatctcttggtcacccatgac

SEQ ID NO: 48166 - DNA, 23 bp, Homo sapiens
acatttgctgttgcaggtgacca

SEQ ID NO: 48167 - DNA, 18 bp, Homo sapiens
atctgcagacccagcccc

SEQ ID NO: 48168 - DNA, 22 bp, Homo sapiens
aggattttcaggtgttggctgg

SEQ ID NO: 48169 - DNA, 22 bp, Homo sapiens
tcagacaggtaagcggcgtggc

SEQ ID NO: 48170 - DNA, 23 bp, Homo sapiens
tctctctggaaatgtatactctg

SEQ ID NO: 48171 - DNA, 16 bp, Homo sapiens
gagcccccaggacatt

SEQ ID NO: 48172 - DNA, 24 bp, Homo sapiens
aagtgacatagaaatctgtatcta

SEQ ID NO: 48173 - DNA, 21 bp, Homo sapiens
tgctgcagtttctgggcatct

SEQ ID NO: 48174 - DNA, 16 bp, Homo sapiens
gaggggagaggctctg

SEQ ID NO: 48175 - DNA, 16 bp, Homo sapiens
caggccgcgcccccgc

SEQ ID NO: 48176 - DNA, 20 bp, Homo sapiens
cgtctgcgccctggccaatg

SEQ ID NO: 48177 - DNA, 23 bp, Homo sapiens
actgagtggggcctggtgccagc

SEQ ID NO: 48178 - DNA, 17 bp, Homo sapiens
gggcaatgggaagatgc

SEQ ID NO: 48179 - DNA, 23 bp, Homo sapiens
ttctgggagtcacaaggagttcc

SEQ ID NO: 48180 - DNA, 20 bp, Homo sapiens
attcccaatgtaccctgggt

SEQ ID NO: 48181 - DNA, 21 bp, Homo sapiens
caggggcctccatagtagcca

SEQ ID NO: 48182 - DNA, 22 bp, Homo sapiens
gacttcaatgttctgaaagtga

SEQ ID NO: 48183 - DNA, 18 bp, Homo sapiens
atgcgcagtgcctcctcc

SEQ ID NO: 48184 - DNA, 22 bp, Homo sapiens
aaatttctcagtctcttctaac

SEQ ID NO: 48185 - DNA, 17 bp, Homo sapiens
gagatgggctcaggcca

SEQ ID NO: 48186 - DNA, 23 bp, Homo sapiens
cagggctgaagaaaatcatggac

SEQ ID NO: 48187 - DNA, 22 bp, Homo sapiens
ctgccaccctcatccccctgtg

SEQ ID NO: 48188 - DNA, 23 bp, Homo sapiens
tgcaggagctgagccccgctgag

SEQ ID NO: 48189 - DNA, 20 bp, Homo sapiens
tgcctgtgaaaggctgcctg

SEQ ID NO: 48190 - DNA, 22 bp, Homo sapiens
tgacatggagggtggtctaggt

SEQ ID NO: 48191 - DNA, 16 bp, Homo sapiens
cagctggcccggcgcc

SEQ ID NO: 48192 - DNA, 20 bp, Homo sapiens
tcaggatggccactgcagac

SEQ ID NO: 48193 - DNA, 22 bp, Homo sapiens
tcaggtgctacgagctgctggc

SEQ ID NO: 48194 - DNA, 16 bp, Homo sapiens
ggaggacaggatgcaa

SEQ ID NO: 48195 - DNA, 23 bp, Homo sapiens
ccttcctccccaggaagctcctg

SEQ ID NO: 48196 - DNA, 23 bp, Homo sapiens
ggatacgggaggcctcccagagg

SEQ ID NO: 48197 - DNA, 16 bp, Homo sapiens
ggcctctggcgctgga

SEQ ID NO: 48198 - DNA, 24 bp, Homo sapiens
tcagtggggatgacagacaggtgc

SEQ ID NO: 48199 - DNA, 22 bp, Homo sapiens
aggcccacatgcaggggcctag

SEQ ID NO: 48200 - DNA, 22 bp, Homo sapiens
gttcttgctgtagtagcgcagg

SEQ ID NO: 48201 - DNA, 23 bp, Homo sapiens
ctctccgacgactcagtgcctat

SEQ ID NO: 48202 - DNA, 16 bp, Homo sapiens
atttctgggtctgagg

SEQ ID NO: 48203 - DNA, 23 bp, Homo sapiens
cctccctgtcctccctcctcagg

SEQ ID NO: 48204 - DNA, 21 bp, Homo sapiens
gcgagcacttatcacccaaat

SEQ ID NO: 48205 - DNA, 24 bp, Homo sapiens
agccaggccgcaagcccggtgcgt

SEQ ID NO: 48206 - DNA, 22 bp, Homo sapiens
ctgtagtagtctcctcccagca

SEQ ID NO: 48207 - DNA, 20 bp, Homo sapiens
agatgaaaaaacaaggtcca

SEQ ID NO: 48208 - DNA, 18 bp, Homo sapiens
ctggagtttgtacccctg

SEQ ID NO: 48209 - DNA, 19 bp, Homo sapiens
ctctgaactctggctccca

SEQ ID NO: 48210 - DNA, 21 bp, Homo sapiens
caccacgctgctgttccagga

SEQ ID NO: 48211 - DNA, 23 bp, Homo sapiens
atgagacagacagacaacaattc

SEQ ID NO: 48212 - DNA, 20 bp, Homo sapiens
ttttccccaggtctggtctc

SEQ ID NO: 48213 - DNA, 16 bp, Homo sapiens
tcctggcccagggact

SEQ ID NO: 48214 - DNA, 16 bp, Homo sapiens
tcggaggtgagagctg

SEQ ID NO: 48215 - DNA, 16 bp, Homo sapiens
ggagcagtagaaatcc

SEQ ID NO: 48216 - DNA, 21 bp, Homo sapiens
gcagtgcccgggtactaggag

SEQ ID NO: 48217 - DNA, 16 bp, Homo sapiens
cagctggatcagagac

SEQ ID NO: 48218 - DNA, 20 bp, Homo sapiens
tcaacaaatacttgtcgagc

SEQ ID NO: 48219 - DNA, 16 bp, Homo sapiens
tcgtcggagttgggca

SEQ ID NO: 48220 - DNA, 24 bp, Homo sapiens
ttgggcctgctgcccagcgcactc

SEQ ID NO: 48221 - DNA, 22 bp, Homo sapiens
cacttcatctatgtggaccgca

SEQ ID NO: 48222 - DNA, 23 bp, Homo sapiens
ccaatattggctgaggcccaccc

SEQ ID NO: 48223 - DNA, 20 bp, Homo sapiens
taagcaccttaactcagacc

SEQ ID NO: 48224 - DNA, 24 bp, Homo sapiens
ttttgacaaaggcagccagcggcc

SEQ ID NO: 48225 - DNA, 17 bp, Homo sapiens
actgggcacagctagaa

SEQ ID NO: 48226 - DNA, 24 bp, Homo sapiens
gagggaaggcgccaccatctgccc

SEQ ID NO: 48227 - DNA, 16 bp, Homo sapiens
ggggcttagctgaaat

SEQ ID NO: 48228 - DNA, 21 bp, Homo sapiens
ggaagtcttctaggtaggtga

SEQ ID NO: 48229 - DNA, 20 bp, Homo sapiens
gccactatgtcccattattt

SEQ ID NO: 48230 - DNA, 16 bp, Homo sapiens
ctggaaggacttcttg

SEQ ID NO: 48231 - DNA, 24 bp, Homo sapiens
atatatcccccttccctggggccc

SEQ ID NO: 48232 - DNA, 24 bp, Homo sapiens
cagggcagggtctggggcccgtac

SEQ ID NO: 48233 - DNA, 24 bp, Homo sapiens
gcagatccaagaggcttgttgggc

SEQ ID NO: 48234 - DNA, 21 bp, Homo sapiens
gcaggaccaagtgcagaggct

SEQ ID NO: 48235 - DNA, 24 bp, Homo sapiens
atgttcctcctgctcttcaccagc

SEQ ID NO: 48236 - DNA, 18 bp, Homo sapiens
gctgaactttctgaccac

SEQ ID NO: 48237 - DNA, 24 bp, Homo sapiens
aagctcgggctgcgtgaaggaagt

SEQ ID NO: 48238 - DNA, 24 bp, Homo sapiens
ctctcgtgctcaggctgctccagg

SEQ ID NO: 48239 - DNA, 19 bp, Homo sapiens
ccgcactgcacttaccgca

SEQ ID NO: 48240 - DNA, 24 bp, Homo sapiens
gaacaaggtggtccacacagggcg

SEQ ID NO: 48241 - DNA, 21 bp, Homo sapiens
ctcccctgctgggggctgtgg

SEQ ID NO: 48242 - DNA, 17 bp, Homo sapiens
gtggtccacaaggggga

SEQ ID NO: 48243 - DNA, 23 bp, Homo sapiens
gcttcagcttcccacatgcctgg

SEQ ID NO: 48244 - DNA, 22 bp, Homo sapiens
gcttctccacgcggtgctccac

SEQ ID NO: 48245 - DNA, 16 bp, Homo sapiens
gagcacctggctggag

SEQ ID NO: 48246 - DNA, 24 bp, Homo sapiens
ctgataaatgaagggcagtggtgg

SEQ ID NO: 48247 - DNA, 24 bp, Homo sapiens
gactttggcctggacctcactgga

SEQ ID NO: 48248 - DNA, 21 bp, Homo sapiens
acacgacccaccccttgtcct

SEQ ID NO: 48249 - DNA, 24 bp, Homo sapiens
tgcattggccagaagggcagattt

SEQ ID NO: 48250 - DNA, 24 bp, Homo sapiens
cttttggagaaagccttggcctta

SEQ ID NO: 48251 - DNA, 22 bp, Homo sapiens
tcatttcataatagggaaaaca

SEQ ID NO: 48252 - DNA, 24 bp, Homo sapiens
cctcgtgggagacctgcgccagag

SEQ ID NO: 48253 - DNA, 24 bp, Homo sapiens
gacaggaacccaggcccattggcc

SEQ ID NO: 48254 - DNA, 17 bp, Homo sapiens
agaagaagctgaaggaa

SEQ ID NO: 48255 - DNA, 21 bp, Homo sapiens
ctgcctcttccccaggtgggg

SEQ ID NO: 48256 - DNA, 17 bp, Homo sapiens
cagcgcgcccctggccc

SEQ ID NO: 48257 - DNA, 23 bp, Homo sapiens
ccctcgattcttgacaaacttgt

SEQ ID NO: 48258 - DNA, 23 bp, Homo sapiens
agggttggcacgtcttccccagg

SEQ ID NO: 48259 - DNA, 21 bp, Homo sapiens
gcagggaggccccgggctccg

SEQ ID NO: 48260 - DNA, 18 bp, Homo sapiens
catcaacctggtgctcct

SEQ ID NO: 48261 - DNA, 23 bp, Homo sapiens
tcagctgggacagaaccagggcc

SEQ ID NO: 48262 - DNA, 22 bp, Homo sapiens
acgtgaaggaaagctactgccc

SEQ ID NO: 48263 - DNA, 16 bp, Homo sapiens
gaacggggctgcccct

SEQ ID NO: 48264 - DNA, 19 bp, Homo sapiens
ctggttccccactgccctg

SEQ ID NO: 48265 - DNA, 19 bp, Homo sapiens
tgaggggctctcctaccct

SEQ ID NO: 48266 - DNA, 16 bp, Homo sapiens
ctctcactgcagctct

SEQ ID NO: 48267 - DNA, 19 bp, Homo sapiens
tacatggtgtggggcacta

SEQ ID NO: 48268 - DNA, 23 bp, Homo sapiens
ggagctaaaaatgattatttctt

SEQ ID NO: 48269 - DNA, 17 bp, Homo sapiens
ccttctggggccggaag

SEQ ID NO: 48270 - DNA, 23 bp, Homo sapiens
ctggagctgcgagggcaggttca

SEQ ID NO: 48271 - DNA, 23 bp, Homo sapiens
atctggctggaggggggcacccc

SEQ ID NO: 48272 - DNA, 17 bp, Homo sapiens
gtgggcaggaggagggc

SEQ ID NO: 48273 - DNA, 21 bp, Homo sapiens
acatctcatggtacttacatc

SEQ ID NO: 48274 - DNA, 17 bp, Homo sapiens
tactcactgcggcatct

SEQ ID NO: 48275 - DNA, 16 bp, Homo sapiens
gctgaggttgtggggg

SEQ ID NO: 48276 - DNA, 24 bp, Homo sapiens
acctgaagggcatccatggggggg

SEQ ID NO: 48277 - DNA, 17 bp, Homo sapiens
aacttaggatgaagggg

SEQ ID NO: 48278 - DNA, 16 bp, Homo sapiens
aggctccagtggaccc

SEQ ID NO: 48279 - DNA, 24 bp, Homo sapiens
tcatcaacagctttagggatcagt

SEQ ID NO: 48280 - DNA, 17 bp, Homo sapiens
gaaagcaggaggaaaca

SEQ ID NO: 48281 - DNA, 16 bp, Homo sapiens
gaagatggggagccgc

SEQ ID NO: 48282 - DNA, 16 bp, Homo sapiens
tgaggagtacttcaca

SEQ ID NO: 48283 - DNA, 16 bp, Homo sapiens
aagccttaggaggcac

SEQ ID NO: 48284 - DNA, 18 bp, Homo sapiens
agctgggagagcctctca

SEQ ID NO: 48285 - DNA, 24 bp, Homo sapiens
ctgtcgctcgcagctagctattgt

SEQ ID NO: 48286 - DNA, 16 bp, Homo sapiens
aggcgaccaggccttt

SEQ ID NO: 48287 - DNA, 21 bp, Homo sapiens
caggggaaggagctggtgtga

SEQ ID NO: 48288 - DNA, 24 bp, Homo sapiens
ggggagctctgcagagacggtgtg

SEQ ID NO: 48289 - DNA, 24 bp, Homo sapiens
tggaatggagaaggtggctcaggt

SEQ ID NO: 48290 - DNA, 21 bp, Homo sapiens
gagcagccagaacatccccgt

SEQ ID NO: 48291 - DNA, 24 bp, Homo sapiens
ccctgctctcccaggagggatggg

SEQ ID NO: 48292 - DNA, 23 bp, Homo sapiens
ataggagctaaccagcctctccc

SEQ ID NO: 48293 - DNA, 23 bp, Homo sapiens
ccctgactccacgaagtgcacag

SEQ ID NO: 48294 - DNA, 24 bp, Homo sapiens
ggaggggtggaggcttctctgtga

SEQ ID NO: 48295 - DNA, 22 bp, Homo sapiens
gtggagtgagggctccaggcct

SEQ ID NO: 48296 - DNA, 21 bp, Homo sapiens
tccctgggaagtctgaggacc

SEQ ID NO: 48297 - DNA, 23 bp, Homo sapiens
tacatctgaaagcagtgggaaag

SEQ ID NO: 48298 - DNA, 20 bp, Homo sapiens
ctcatcctcctggttcagga

SEQ ID NO: 48299 - DNA, 24 bp, Homo sapiens
aaacatggagtccccagggggagc

SEQ ID NO: 48300 - DNA, 22 bp, Homo sapiens
tgggtggccatgctcctgtgtc

SEQ ID NO: 48301 - DNA, 24 bp, Homo sapiens
ctaatggcctccctctgcccagaa

SEQ ID NO: 48302 - DNA, 16 bp, Homo sapiens
gctccacactccttta

SEQ ID NO: 48303 - DNA, 16 bp, Homo sapiens
ggggtagaggtcctga

SEQ ID NO: 48304 - DNA, 24 bp, Homo sapiens
ttaattaattgtatttgtgccttg

SEQ ID NO: 48305 - DNA, 16 bp, Homo sapiens
gagctggcactgtggc

SEQ ID NO: 48306 - DNA, 16 bp, Homo sapiens
tgctcgtgcactccaa

SEQ ID NO: 48307 - DNA, 24 bp, Homo sapiens
aggtttcaggcttcatggaggagg

SEQ ID NO: 48308 - DNA, 21 bp, Homo sapiens
cacgtcatccaggctgtcaac

SEQ ID NO: 48309 - DNA, 21 bp, Homo sapiens
ccataggggagtgagaaggcc

SEQ ID NO: 48310 - DNA, 16 bp, Homo sapiens
ggagcgactgattcac

SEQ ID NO: 48311 - DNA, 24 bp, Homo sapiens
tcacctagagtagaatgccagcag

SEQ ID NO: 48312 - DNA, 24 bp, Homo sapiens
cccagggcttggagtggggcaagg

SEQ ID NO: 48313 - DNA, 21 bp, Homo sapiens
ccccgctcggggctggtgttg

SEQ ID NO: 48314 - DNA, 21 bp, Homo sapiens
aagtatctggtgcagagtcca

SEQ ID NO: 48315 - DNA, 18 bp, Homo sapiens
tcacagagctgggggtga

SEQ ID NO: 48316 - DNA, 17 bp, Homo sapiens
gtgttatccaggatcga

SEQ ID NO: 48317 - DNA, 16 bp, Homo sapiens
tggaggtgactactgg

SEQ ID NO: 48318 - DNA, 24 bp, Homo sapiens
caaccctccatatggccagaaaga

SEQ ID NO: 48319 - DNA, 19 bp, Homo sapiens
ttccagagcctgctgtgga

SEQ ID NO: 48320 - DNA, 23 bp, Homo sapiens
cttcattcattagggttaaaaca

SEQ ID NO: 48321 - DNA, 22 bp, Homo sapiens
cctctctggctctgcccccagg

SEQ ID NO: 48322 - DNA, 19 bp, Homo sapiens
tcaagtcctgaggactccc

SEQ ID NO: 48323 - DNA, 21 bp, Homo sapiens
actgtggtcctttggttgggt

SEQ ID NO: 48324 - DNA, 22 bp, Homo sapiens
gctcccgcaggcggctgtaggt

SEQ ID NO: 48325 - DNA, 16 bp, Homo sapiens
ttcccagctgtgtggg

SEQ ID NO: 48326 - DNA, 16 bp, Homo sapiens
gtctgggggccgcagc

SEQ ID NO: 48327 - DNA, 16 bp, Homo sapiens
gagggtcagaccagat

SEQ ID NO: 48328 - DNA, 17 bp, Homo sapiens
tgcactttgggctggtg

SEQ ID NO: 48329 - DNA, 21 bp, Homo sapiens
gctgggggcagtatgtgaaaa

SEQ ID NO: 48330 - DNA, 16 bp, Homo sapiens
gagagcgagggggacc

SEQ ID NO: 48331 - DNA, 17 bp, Homo sapiens
cgagggtgctcggcaaa

SEQ ID NO: 48332 - DNA, 21 bp, Homo sapiens
gacactggcctgcctgtgcct

SEQ ID NO: 48333 - DNA, 24 bp, Homo sapiens
ggataagatgaccgtccacagtca

SEQ ID NO: 48334 - DNA, 16 bp, Homo sapiens
ctggcttgtctgcaga

SEQ ID NO: 48335 - DNA, 22 bp, Homo sapiens
atacagcttccgccgcaggtcc

SEQ ID NO: 48336 - DNA, 21 bp, Homo sapiens
ttggaactttagactccttta

SEQ ID NO: 48337 - DNA, 24 bp, Homo sapiens
atgaacaggcattctccaaactgc

SEQ ID NO: 48338 - DNA, 24 bp, Homo sapiens
cctgcttctccacggaaaatggca

SEQ ID NO: 48339 - DNA, 22 bp, Homo sapiens
ggtttgataagatgccgtttct

SEQ ID NO: 48340 - DNA, 16 bp, Homo sapiens
tagccccggtcatcat

SEQ ID NO: 48341 - DNA, 23 bp, Homo sapiens
cctgtggactccccatcaagctg

SEQ ID NO: 48342 - DNA, 18 bp, Homo sapiens
ctgtgaaattttccccca

SEQ ID NO: 48343 - DNA, 23 bp, Homo sapiens
ccaggtgaaggacatacaggaag

SEQ ID NO: 48344 - DNA, 20 bp, Homo sapiens
cccttgatatcaaggcctga

SEQ ID NO: 48345 - DNA, 21 bp, Homo sapiens
cttctccagcatcgtcatgga

SEQ ID NO: 48346 - DNA, 22 bp, Homo sapiens
ctttttgctcccctccctacca

SEQ ID NO: 48347 - DNA, 16 bp, Homo sapiens
gtctaggtgtgaagga

SEQ ID NO: 48348 - DNA, 21 bp, Homo sapiens
cagatcaggagtttgaagaga

SEQ ID NO: 48349 - DNA, 16 bp, Homo sapiens
gtgaacacaggttttc

SEQ ID NO: 48350 - DNA, 16 bp, Homo sapiens
ctggcagatgaagtgc

SEQ ID NO: 48351 - DNA, 22 bp, Homo sapiens
tatccacccctcctgggactgc

SEQ ID NO: 48352 - DNA, 16 bp, Homo sapiens
tactcagactgagctc

SEQ ID NO: 48353 - DNA, 16 bp, Homo sapiens
cgaacttcagccggag

SEQ ID NO: 48354 - DNA, 16 bp, Homo sapiens
atgcctggtgtgcaga

SEQ ID NO: 48355 - DNA, 16 bp, Homo sapiens
ccctcagtggccacca

SEQ ID NO: 48356 - DNA, 22 bp, Homo sapiens
ttttagtaaaatattcagaaat

SEQ ID NO: 48357 - DNA, 16 bp, Homo sapiens
tggtggctggtgtggc

SEQ ID NO: 48358 - DNA, 18 bp, Homo sapiens
ttattaggcagaatccag

SEQ ID NO: 48359 - DNA, 20 bp, Homo sapiens
ctggcccatcactttggcaa

SEQ ID NO: 48360 - DNA, 24 bp, Homo sapiens
agtagttggacttagggaacaaag

SEQ ID NO: 48361 - DNA, 21 bp, Homo sapiens
gctaatcatgttcatacctct

SEQ ID NO: 48362 - DNA, 21 bp, Homo sapiens
tagtgatacttgtgggccagg

SEQ ID NO: 48363 - DNA, 20 bp, Homo sapiens
ctgcttttattttatggttg

SEQ ID NO: 48364 - DNA, 24 bp, Homo sapiens
ctgcactggtggggtgaattcttt

SEQ ID NO: 48365 - DNA, 19 bp, Homo sapiens
aactgatgtaagaggtttc

SEQ ID NO: 48366 - DNA, 19 bp, Homo sapiens
caggagctgtgggaggaag

SEQ ID NO: 48367 - DNA, 18 bp, Homo sapiens
aatttctgggttaaggca

SEQ ID NO: 48368 - DNA, 21 bp, Homo sapiens
cagaataatccagccttatcc

SEQ ID NO: 48369 - DNA, 21 bp, Homo sapiens
ttctttcagggcaataatgat

SEQ ID NO: 48370 - DNA, 18 bp, Homo sapiens
agctgctattagcaatat

SEQ ID NO: 48371 - DNA, 25 bp, Homo sapiens
ctttcttcttttaatatactttttt

SEQ ID NO: 48372 - DNA, 24 bp, Homo sapiens
aaataaaagaaactaaaacgatcc

SEQ ID NO: 48373 - DNA, 16 bp, Homo sapiens
ttgccacactgagtga

SEQ ID NO: 48374 - DNA, 17 bp, Homo sapiens
actgtaccctgttactt

SEQ ID NO: 48375 - DNA, 16 bp, Homo sapiens
agaaagtgctcggtgc

SEQ ID NO: 48376 - DNA, 17 bp, Homo sapiens
gggaaagaaaacatcaa

SEQ ID NO: 48377 - DNA, 16 bp, Homo sapiens
gtcctttggggatctg

SEQ ID NO: 48378 - DNA, 21 bp, Homo sapiens
ttgtcacagtgcagctcactc

SEQ ID NO: 48379 - DNA, 20 bp, Homo sapiens
tattggtctattttcccacc

SEQ ID NO: 48380 - DNA, 17 bp, Homo sapiens
ccaggccatcactaaag

SEQ ID NO: 48381 - DNA, 16 bp, Homo sapiens
gtggagacagagaaga

SEQ ID NO: 48382 - DNA, 19 bp, Homo sapiens
cataacagcatcaggagtg

SEQ ID NO: 48383 - DNA, 18 bp, Homo sapiens
ctgggcaggttggtatca

SEQ ID NO: 48384 - DNA, 18 bp, Homo sapiens
gtagaccaccagcagcct

SEQ ID NO: 48385 - DNA, 17 bp, Homo sapiens
gaagtctgccgttactg

SEQ ID NO: 48386 - DNA, 19 bp, Homo sapiens
cagaaacccaagagtcttc

SEQ ID NO: 48387 - DNA, 16 bp, Homo sapiens
cacaactgtgttcact

SEQ ID NO: 48388 - DNA, 21 bp, Homo sapiens
aaacctgtcttgtaaccttga

SEQ ID NO: 48389 - DNA, 23 bp, Homo sapiens
gagggcaggagccagggctgggc

SEQ ID NO: 48390 - DNA, 19 bp, Homo sapiens
ccttgccccacagggcagt

SEQ ID NO: 48391 - DNA, 16 bp, Homo sapiens
gacctcaccctgtgga

SEQ ID NO: 48392 - DNA, 17 bp, Homo sapiens
ctgtttgaggttgctag

SEQ ID NO: 48393 - DNA, 17 bp, Homo sapiens
gaagtccaactcctaag

SEQ ID NO: 48394 - DNA, 17 bp, Homo sapiens
ctctgccctgactttta

SEQ ID NO: 48395 - DNA, 24 bp, Homo sapiens
agtagcaatttgtactgatggtat

SEQ ID NO: 48396 - DNA, 24 bp, Homo sapiens
ctggggcagctctggcggagtgac

SEQ ID NO: 48397 - DNA, 24 bp, Homo sapiens
gtcagccgactacagagaagggta

SEQ ID NO: 48398 - DNA, 18 bp, Homo sapiens
caaaggagtccgggggct

SEQ ID NO: 48399 - DNA, 24 bp, Homo sapiens
ggctggctagggtccaggccgggg

SEQ ID NO: 48400 - DNA, 17 bp, Homo sapiens
agtcagacagagccagc

SEQ ID NO: 48401 - DNA, 22 bp, Homo sapiens
tgccccgctacggagcgtcact

SEQ ID NO: 48402 - DNA, 24 bp, Homo sapiens
atgtaacctggcaggatggccttg

SEQ ID NO: 48403 - DNA, 20 bp, Homo sapiens
aagacgggaccgccggagcc

SEQ ID NO: 48404 - DNA, 18 bp, Homo sapiens
ttgggcaggtgaggttcc

SEQ ID NO: 48405 - DNA, 16 bp, Homo sapiens
ctggcgctggcgctgg

SEQ ID NO: 48406 - DNA, 18 bp, Homo sapiens
cagccccttcagtgctca

SEQ ID NO: 48407 - DNA, 22 bp, Homo sapiens
cagaggctcaccctctttctcc

SEQ ID NO: 48408 - DNA, 19 bp, Homo sapiens
agcccagcgcaccagcatc

SEQ ID NO: 48409 - DNA, 16 bp, Homo sapiens
gtctttgggtggggga

SEQ ID NO: 48410 - DNA, 16 bp, Homo sapiens
caaactcagtgatgga

SEQ ID NO: 48411 - DNA, 17 bp, Homo sapiens
atcaacctcgggctgaa

SEQ ID NO: 48412 - DNA, 19 bp, Homo sapiens
ggccacggagcccacgcga

SEQ ID NO: 48413 - DNA, 18 bp, Homo sapiens
agcttggtgcactgagtc

SEQ ID NO: 48414 - DNA, 22 bp, Homo sapiens
ggacaatggattggcacacggc

SEQ ID NO: 48415 - DNA, 16 bp, Homo sapiens
ttggcctggttcctct

SEQ ID NO: 48416 - DNA, 16 bp, Homo sapiens
gatgggctcagcactg

SEQ ID NO: 48417 - DNA, 22 bp, Homo sapiens
cactgcagaaggaacccaatgt

SEQ ID NO: 48418 - DNA, 24 bp, Homo sapiens
caaagagatgttccaagatgagaa

SEQ ID NO: 48419 - DNA, 24 bp, Homo sapiens
aatctgctgaagatagcaccacct

SEQ ID NO: 48420 - DNA, 17 bp, Homo sapiens
ctggggctggggggcta

SEQ ID NO: 48421 - DNA, 24 bp, Homo sapiens
catggtggaggtgtggagacgctc

SEQ ID NO: 48422 - DNA, 24 bp, Homo sapiens
gtccgtgccctccaggtagtcatg

SEQ ID NO: 48423 - DNA, 21 bp, Homo sapiens
cacctgtgggcactgggacat

SEQ ID NO: 48424 - DNA, 16 bp, Homo sapiens
ggcaggccagaacccc

SEQ ID NO: 48425 - DNA, 17 bp, Homo sapiens
cccccaaaccccctagc

SEQ ID NO: 48426 - DNA, 24 bp, Homo sapiens
cagggtcctcaggggcaggtcaca

SEQ ID NO: 48427 - DNA, 24 bp, Homo sapiens
cctcttcctcactgacctgcactg

SEQ ID NO: 48428 - DNA, 24 bp, Homo sapiens
cctgtccagtacaccatatcaaaa

SEQ ID NO: 48429 - DNA, 21 bp, Homo sapiens
ccactgtgctgccgccggggt

SEQ ID NO: 48430 - DNA, 16 bp, Homo sapiens
gcagttggtcctgacg

SEQ ID NO: 48431 - DNA, 23 bp, Homo sapiens
cggatactggggcgaatacagca

SEQ ID NO: 48432 - DNA, 22 bp, Homo sapiens
ccacagcagggtacactggcac

SEQ ID NO: 48433 - DNA, 19 bp, Homo sapiens
gctgggcccagccggccct

SEQ ID NO: 48434 - DNA, 16 bp, Homo sapiens
cctcaatgaagggggg

SEQ ID NO: 48435 - DNA, 22 bp, Homo sapiens
atgatgtctggcaccagactcg

SEQ ID NO: 48436 - DNA, 24 bp, Homo sapiens
gggcttcggcaggcagccagggct

SEQ ID NO: 48437 - DNA, 20 bp, Homo sapiens
ttgtgaggaagttcctgggg

SEQ ID NO: 48438 - DNA, 18 bp, Homo sapiens
tcttttcccttcctgggt

SEQ ID NO: 48439 - DNA, 18 bp, Homo sapiens
ctgtcaatagcttccctc

SEQ ID NO: 48440 - DNA, 19 bp, Homo sapiens
atgctagagcaatcagaga

SEQ ID NO: 48441 - DNA, 17 bp, Homo sapiens
agcgatggccaaggctt

SEQ ID NO: 48442 - DNA, 22 bp, Homo sapiens
aaaacagtagaaagggaaggag

SEQ ID NO: 48443 - DNA, 17 bp, Homo sapiens
ttatcgtccgtggaaac

SEQ ID NO: 48444 - DNA, 16 bp, Homo sapiens
cggagaccggggtatg

SEQ ID NO: 48445 - DNA, 18 bp, Homo sapiens
gctccttgcaggtgggga

SEQ ID NO: 48446 - DNA, 17 bp, Homo sapiens
agttgatcaagagccag

SEQ ID NO: 48447 - DNA, 24 bp, Homo sapiens
cagcacaggaggaccaggattgga

SEQ ID NO: 48448 - DNA, 16 bp, Homo sapiens
atcctcagcagcctga

SEQ ID NO: 48449 - DNA, 23 bp, Homo sapiens
ggggggttctatgctctttcccc

SEQ ID NO: 48450 - DNA, 19 bp, Homo sapiens
caacaggagcctgcttgtc

SEQ ID NO: 48451 - DNA, 17 bp, Homo sapiens
gttcccgtgagaacttc

SEQ ID NO: 48452 - DNA, 16 bp, Homo sapiens
aacacttgttgggaat

SEQ ID NO: 48453 - DNA, 21 bp, Homo sapiens
gtggctggtgggggagcttca

SEQ ID NO: 48454 - DNA, 21 bp, Homo sapiens
cagaagttttattttcctggc

SEQ ID NO: 48455 - DNA, 19 bp, Homo sapiens
gtaataattccagctccag

SEQ ID NO: 48456 - DNA, 21 bp, Homo sapiens
actgttgaaagccttcattca

SEQ ID NO: 48457 - DNA, 19 bp, Homo sapiens
cagacactcaccctgtccc

SEQ ID NO: 48458 - DNA, 17 bp, Homo sapiens
gccctgattaccatcct

SEQ ID NO: 48459 - DNA, 16 bp, Homo sapiens
ctccccactccatggg

SEQ ID NO: 48460 - DNA, 18 bp, Homo sapiens
cagggcactgtctgaaga

SEQ ID NO: 48461 - DNA, 16 bp, Homo sapiens
gaggggtaggaagaca

SEQ ID NO: 48462 - DNA, 16 bp, Homo sapiens
agcagccagggtgttc

SEQ ID NO: 48463 - DNA, 18 bp, Homo sapiens
accatccctgttgtccca

SEQ ID NO: 48464 - DNA, 18 bp, Homo sapiens
ctcagagtctcttcatca

SEQ ID NO: 48465 - DNA, 24 bp, Homo sapiens
ggagaaagagggcatcctatctcc

SEQ ID NO: 48466 - DNA, 16 bp, Homo sapiens
ttaaggccgatgtagg

SEQ ID NO: 48467 - DNA, 24 bp, Homo sapiens
tgtagtaccttctggccaggtatg

SEQ ID NO: 48468 - DNA, 24 bp, Homo sapiens
ccaacctccttcccctatcccacc

SEQ ID NO: 48469 - DNA, 23 bp, Homo sapiens
gtggatgaatttgaggtcttcta

SEQ ID NO: 48470 - DNA, 16 bp, Homo sapiens
gtaactccagggaggg

SEQ ID NO: 48471 - DNA, 16 bp, Homo sapiens
cagtgcaactacctac

SEQ ID NO: 48472 - DNA, 20 bp, Homo sapiens
tctatttggtacacacggta

SEQ ID NO: 48473 - DNA, 16 bp, Homo sapiens
ttatcctggagttggt

SEQ ID NO: 48474 - DNA, 19 bp, Homo sapiens
gtcagattcaggatgtagg

SEQ ID NO: 48475 - DNA, 23 bp, Homo sapiens
aaagcatgggcaggatgtgtggc

SEQ ID NO: 48476 - DNA, 20 bp, Homo sapiens
ttctcgagccctgtagagaa

SEQ ID NO: 48477 - DNA, 24 bp, Homo sapiens
cagccccacatccttgcaggttac

SEQ ID NO: 48478 - DNA, 17 bp, Homo sapiens
cgcatgcgatataccag

SEQ ID NO: 48479 - DNA, 17 bp, Homo sapiens
gtggtcctggaccatga

SEQ ID NO: 48480 - DNA, 16 bp, Homo sapiens
gggtgggtggccctta

SEQ ID NO: 48481 - DNA, 22 bp, Homo sapiens
cataccgcactggcagcttctc

SEQ ID NO: 48482 - DNA, 24 bp, Homo sapiens
gtcagcacgggcagagagctgggc

SEQ ID NO: 48483 - DNA, 24 bp, Homo sapiens
aacacactgcctaccgcctggcac

SEQ ID NO: 48484 - DNA, 16 bp, Homo sapiens
gggcctctgggaggct

SEQ ID NO: 48485 - DNA, 21 bp, Homo sapiens
agaccttctggtttctctacc

SEQ ID NO: 48486 - DNA, 21 bp, Homo sapiens
acatcaagaactttcccaaat

SEQ ID NO: 48487 - DNA, 16 bp, Homo sapiens
gctactctttgtgccc

SEQ ID NO: 48488 - DNA, 16 bp, Homo sapiens
gatgatcttgcctggt

SEQ ID NO: 48489 - DNA, 22 bp, Homo sapiens
ccacctgatgccagatgggagc

SEQ ID NO: 48490 - DNA, 23 bp, Homo sapiens
cagctccaggaaaggagaaggtc

SEQ ID NO: 48491 - DNA, 22 bp, Homo sapiens
tagcatagtgacaagtgccttg

SEQ ID NO: 48492 - DNA, 23 bp, Homo sapiens
ctgcgcaagcgcagcgtgcccat

SEQ ID NO: 48493 - DNA, 24 bp, Homo sapiens
ctgaggctggcccagcctcacacc

SEQ ID NO: 48494 - DNA, 20 bp, Homo sapiens
cttgatgaggaccacagcct

SEQ ID NO: 48495 - DNA, 22 bp, Homo sapiens
gtacacacgcgtgtggggggcc

SEQ ID NO: 48496 - DNA, 22 bp, Homo sapiens
actactccaagtttggcaacac

SEQ ID NO: 48497 - DNA, 19 bp, Homo sapiens
ctgaacttgggcttggcct

SEQ ID NO: 48498 - DNA, 24 bp, Homo sapiens
tgagatcctgtggggccagcgctt

SEQ ID NO: 48499 - DNA, 23 bp, Homo sapiens
ctgaggcgagggtcagagcttcc

SEQ ID NO: 48500 - DNA, 22 bp, Homo sapiens
aggcgtggtggaaaccacgggc

SEQ ID NO: 48501 - DNA, 23 bp, Homo sapiens
gcagagtggtgtgggcactttga

SEQ ID NO: 48502 - DNA, 16 bp, Homo sapiens
gcacccagcgacctgc

SEQ ID NO: 48503 - DNA, 22 bp, Homo sapiens
cctcctcagctacaatgggcac

SEQ ID NO: 48504 - DNA, 23 bp, Homo sapiens
gcatcttcctggtggccccgctg

SEQ ID NO: 48505 - DNA, 24 bp, Homo sapiens
taggaggtgcgggcctgggtggtg

SEQ ID NO: 48506 - DNA, 21 bp, Homo sapiens
gtggtgcccctccaccaggtg

SEQ ID NO: 48507 - DNA, 24 bp, Homo sapiens
atgatctcgaggtcctggtggtgg

SEQ ID NO: 48508 - DNA, 20 bp, Homo sapiens
catgatcatcagcgccacca

SEQ ID NO: 48509 - DNA, 24 bp, Homo sapiens
gcatcaatgacatggtagatgatc

SEQ ID NO: 48510 - DNA, 16 bp, Homo sapiens
ctgcgccacggccgcc

SEQ ID NO: 48511 - DNA, 19 bp, Homo sapiens
gttctccatggggatgtcc

SEQ ID NO: 48512 - DNA, 20 bp, Homo sapiens
atgaagactgcccaagccca

SEQ ID NO: 48513 - DNA, 16 bp, Homo sapiens
gtaccacctgcatgtg

SEQ ID NO: 48514 - DNA, 16 bp, Homo sapiens
gtgcagaacatcgtgg

SEQ ID NO: 48515 - DNA, 17 bp, Homo sapiens
cacacgtagcatgaagc

SEQ ID NO: 48516 - DNA, 24 bp, Homo sapiens
tccaagtgactattggctttgggg

SEQ ID NO: 48517 - DNA, 19 bp, Homo sapiens
aagatgagggtctcagccc

SEQ ID NO: 48518 - DNA, 17 bp, Homo sapiens
gtcaccagcatccactc

SEQ ID NO: 48519 - DNA, 24 bp, Homo sapiens
caagcatgatggcgttgatcatga

SEQ ID NO: 48520 - DNA, 19 bp, Homo sapiens
gtggctcatcgccttcgcc

SEQ ID NO: 48521 - DNA, 23 bp, Homo sapiens
cagtgggcactcctcagtcacca

SEQ ID NO: 48522 - DNA, 18 bp, Homo sapiens
acattgctcatcttcacc

SEQ ID NO: 48523 - DNA, 24 bp, Homo sapiens
agaaaaggaaggcagacgagaagg

SEQ ID NO: 48524 - DNA, 24 bp, Homo sapiens
agaacatccgggagcagggccgct

SEQ ID NO: 48525 - DNA, 21 bp, Homo sapiens
ggggccaggtcaccgtgggcg

SEQ ID NO: 48526 - DNA, 16 bp, Homo sapiens
agggcccgctttgtgt

SEQ ID NO: 48527 - DNA, 23 bp, Homo sapiens
cagccagctgcacaggaaggaca

SEQ ID NO: 48528 - DNA, 16 bp, Homo sapiens
gaggaatacgtgctga

SEQ ID NO: 48529 - DNA, 22 bp, Homo sapiens
cagcgtggtgaacacgtcctgc

SEQ ID NO: 48530 - DNA, 20 bp, Homo sapiens
cgatgggggaagcccctccc

SEQ ID NO: 48531 - DNA, 24 bp, Homo sapiens
ccacgttgcagttgcctttcttgg

SEQ ID NO: 48532 - DNA, 24 bp, Homo sapiens
gagaaggtgcccaccgagaggact

SEQ ID NO: 48533 - DNA, 23 bp, Homo sapiens
ggcagggtcctctgccaggcgtg

SEQ ID NO: 48534 - DNA, 17 bp, Homo sapiens
tggggagttatctcaga

SEQ ID NO: 48535 - DNA, 22 bp, Homo sapiens
tctactgaacccaccatccacc

SEQ ID NO: 48536 - DNA, 23 bp, Homo sapiens
ccagagaagctgctcagccggaa

SEQ ID NO: 48537 - DNA, 25 bp, Homo sapiens
ggaaataatcaaatctatttattta

SEQ ID NO: 48538 - DNA, 17 bp, Homo sapiens
gtgcagacctggtgatc

SEQ ID NO: 48539 - DNA, 24 bp, Homo sapiens
gtatgggcagggtccgaatgtggg

SEQ ID NO: 48540 - DNA, 18 bp, Homo sapiens
ttcccaccatcctgaccc

SEQ ID NO: 48541 - DNA, 24 bp, Homo sapiens
cgaaggaggcgaagacgctgtcct

SEQ ID NO: 48542 - DNA, 16 bp, Homo sapiens
tcatcctcctcctcca

SEQ ID NO: 48543 - DNA, 22 bp, Homo sapiens
ggatggcaccccgcttcaggac

SEQ ID NO: 48544 - DNA, 21 bp, Homo sapiens
tgtagtcacatccaccccagg

SEQ ID NO: 48545 - DNA, 23 bp, Homo sapiens
aaggtggtgatgacagccttcgc

SEQ ID NO: 48546 - DNA, 19 bp, Homo sapiens
tcagggttctttcttgatt

SEQ ID NO: 48547 - DNA, 23 bp, Homo sapiens
tgggcaggtgagccaacagctgt

SEQ ID NO: 48548 - DNA, 17 bp, Homo sapiens
ggccagtcctgtccctg

SEQ ID NO: 48549 - DNA, 24 bp, Homo sapiens
ggtcagatgggagctgagccacag

SEQ ID NO: 48550 - DNA, 24 bp, Homo sapiens
taccgcgatggtgaccacagtgcg

SEQ ID NO: 48551 - DNA, 20 bp, Homo sapiens
gagtgccgggaacctgttca

SEQ ID NO: 48552 - DNA, 19 bp, Homo sapiens
cccagctcttttcattttc

SEQ ID NO: 48553 - DNA, 16 bp, Homo sapiens
gccttcgtgaggaaga

SEQ ID NO: 48554 - DNA, 16 bp, Homo sapiens
gactacttcgtgcaaa

SEQ ID NO: 48555 - DNA, 21 bp, Homo sapiens
ccatcatcacagaaggcgggg

SEQ ID NO: 48556 - DNA, 24 bp, Homo sapiens
catggtcccatggaggggcccagg

SEQ ID NO: 48557 - DNA, 21 bp, Homo sapiens
tccactcacagcacaagatta

SEQ ID NO: 48558 - DNA, 17 bp, Homo sapiens
tgatgaagatgctggtc

SEQ ID NO: 48559 - DNA, 23 bp, Homo sapiens
gacacacacccacctatttgccc

SEQ ID NO: 48560 - DNA, 23 bp, Homo sapiens
ctgtccctggctgaaattctccc

SEQ ID NO: 48561 - DNA, 21 bp, Homo sapiens
ccagctgaagctggtggtgaa

SEQ ID NO: 48562 - DNA, 17 bp, Homo sapiens
ccaggcttcagactcca

SEQ ID NO: 48563 - DNA, 23 bp, Homo sapiens
cagatttaacctggaccctgaga

SEQ ID NO: 48564 - DNA, 20 bp, Homo sapiens
ccatccttacagggtccttg

SEQ ID NO: 48565 - DNA, 16 bp, Homo sapiens
caggcaggaccctgct

SEQ ID NO: 48566 - DNA, 18 bp, Homo sapiens
ctcctggcagtgccttca

SEQ ID NO: 48567 - DNA, 20 bp, Homo sapiens
ttctcccagccagacctcca

SEQ ID NO: 48568 - DNA, 24 bp, Homo sapiens
cacagtgtgctatctgagcacttc

SEQ ID NO: 48569 - DNA, 24 bp, Homo sapiens
ccgtcctcttcagcggcaccatcc

SEQ ID NO: 48570 - DNA, 23 bp, Homo sapiens
ggcctgatgggatggagaagggc

SEQ ID NO: 48571 - DNA, 19 bp, Homo sapiens
atcgccaaactgccgctgc

SEQ ID NO: 48572 - DNA, 16 bp, Homo sapiens
ctctttgtgctccaga

SEQ ID NO: 48573 - DNA, 16 bp, Homo sapiens
cctgcaccctcactgg

SEQ ID NO: 48574 - DNA, 23 bp, Homo sapiens
tgaggggtggtggggctcaccgg

SEQ ID NO: 48575 - DNA, 16 bp, Homo sapiens
gatgaggcctcagccc

SEQ ID NO: 48576 - DNA, 24 bp, Homo sapiens
tgatggagaggcgtgagcgcaggg

SEQ ID NO: 48577 - DNA, 16 bp, Homo sapiens
tggtggacacgttcga

SEQ ID NO: 48578 - DNA, 17 bp, Homo sapiens
ctgcatgggtcccagtg

SEQ ID NO: 48579 - DNA, 23 bp, Homo sapiens
tttccagatcgggatctgcggcc

SEQ ID NO: 48580 - DNA, 23 bp, Homo sapiens
ctcctgtcatgtctgaccacgtg

SEQ ID NO: 48581 - DNA, 17 bp, Homo sapiens
catagaggctattccca

SEQ ID NO: 48582 - DNA, 21 bp, Homo sapiens
ggtgcccgccttacaactcac

SEQ ID NO: 48583 - DNA, 18 bp, Homo sapiens
accaggccaaaaagatac

SEQ ID NO: 48584 - DNA, 22 bp, Homo sapiens
agaaggaggacttcccactgcc

SEQ ID NO: 48585 - DNA, 22 bp, Homo sapiens
cacaggcccagggcaggagact

SEQ ID NO: 48586 - DNA, 22 bp, Homo sapiens
cgtgcgctacgacagctccctg

SEQ ID NO: 48587 - DNA, 16 bp, Homo sapiens
cacgaggtgactgcga

SEQ ID NO: 48588 - DNA, 23 bp, Homo sapiens
caccatcgctgatcccaaagaac

SEQ ID NO: 48589 - DNA, 23 bp, Homo sapiens
ctgtcctgcagcattgggttggg

SEQ ID NO: 48590 - DNA, 21 bp, Homo sapiens
ttcggatactagctgtggccc

SEQ ID NO: 48591 - DNA, 23 bp, Homo sapiens
gacgtgcttcagcaccggcttca

SEQ ID NO: 48592 - DNA, 19 bp, Homo sapiens
gagtccaaggaggagtgtg

SEQ ID NO: 48593 - DNA, 21 bp, Homo sapiens
gatcttcccttggtctggcca

SEQ ID NO: 48594 - DNA, 20 bp, Homo sapiens
aaccgaggcagagagctacg

SEQ ID NO: 48595 - DNA, 24 bp, Homo sapiens
ctgggctcagccaccaggcatggg

SEQ ID NO: 48596 - DNA, 17 bp, Homo sapiens
cagacatggagctccag

SEQ ID NO: 48597 - DNA, 22 bp, Homo sapiens
ctcccttgtggcccccaaccca

SEQ ID NO: 48598 - DNA, 20 bp, Homo sapiens
gtgcgccactggcttgctcc

SEQ ID NO: 48599 - DNA, 16 bp, Homo sapiens
cacccaggagcccctc

SEQ ID NO: 48600 - DNA, 16 bp, Homo sapiens
ctccagccttaagaag

SEQ ID NO: 48601 - DNA, 24 bp, Homo sapiens
atggatgcgcttcacagcccccag

SEQ ID NO: 48602 - DNA, 18 bp, Homo sapiens
cagggagggctgctctga

SEQ ID NO: 48603 - DNA, 17 bp, Homo sapiens
ctacgccctaatggtga

SEQ ID NO: 48604 - DNA, 24 bp, Homo sapiens
cttcctgcccgcactgtccctctg

SEQ ID NO: 48605 - DNA, 17 bp, Homo sapiens
ggtgacctccatctcca

SEQ ID NO: 48606 - DNA, 16 bp, Homo sapiens
ctcatgtctccagtga

SEQ ID NO: 48607 - DNA, 22 bp, Homo sapiens
gcccaggtcagctcctctccct

SEQ ID NO: 48608 - DNA, 23 bp, Homo sapiens
ctctgccctagcccactgccgct

SEQ ID NO: 48609 - DNA, 23 bp, Homo sapiens
tctctgccccgaaaaggagtgag

SEQ ID NO: 48610 - DNA, 24 bp, Homo sapiens
cagagagctccctgtgcagggagt

SEQ ID NO: 48611 - DNA, 22 bp, Homo sapiens
cttgtgtgtgtctggtgacgtg

SEQ ID NO: 48612 - DNA, 16 bp, Homo sapiens
ggctggaagtccgaat

SEQ ID NO: 48613 - DNA, 17 bp, Homo sapiens
gctgggggaagcaggaa

SEQ ID NO: 48614 - DNA, 17 bp, Homo sapiens
agcttctcgaatacaca

SEQ ID NO: 48615 - DNA, 23 bp, Homo sapiens
tcatccccaggtacctgtgtgct

SEQ ID NO: 48616 - DNA, 22 bp, Homo sapiens
gtggaccaacactgttccctta

SEQ ID NO: 48617 - DNA, 20 bp, Homo sapiens
agaggggaatagcacttgcc

SEQ ID NO: 48618 - DNA, 24 bp, Homo sapiens
gtctggggactggaggggccctgg

SEQ ID NO: 48619 - DNA, 16 bp, Homo sapiens
gttgttggagtctgtg

SEQ ID NO: 48620 - DNA, 16 bp, Homo sapiens
ggacattccagagagg

SEQ ID NO: 48621 - DNA, 16 bp, Homo sapiens
aaaccgtagaaggact

SEQ ID NO: 48622 - DNA, 16 bp, Homo sapiens
gagagaacgtgtcctt

SEQ ID NO: 48623 - DNA, 16 bp, Homo sapiens
gccacagggacctgca

SEQ ID NO: 48624 - DNA, 20 bp, Homo sapiens
ctgtgccccctggccccacc

SEQ ID NO: 48625 - DNA, 16 bp, Homo sapiens
taggcttcaggcccag

SEQ ID NO: 48626 - DNA, 24 bp, Homo sapiens
tacctgaaggcccggatggtggtg

SEQ ID NO: 48627 - DNA, 22 bp, Homo sapiens
tcacggggtaagaagctgaggc

SEQ ID NO: 48628 - DNA, 22 bp, Homo sapiens
aagctgggtggtgtcatccagc

SEQ ID NO: 48629 - DNA, 17 bp, Homo sapiens
gtgctacttcatccaga

SEQ ID NO: 48630 - DNA, 23 bp, Homo sapiens
tttgtttttattttttggaggga

SEQ ID NO: 48631 - DNA, 18 bp, Homo sapiens
ccgtcatctcctatgtca

SEQ ID NO: 48632 - DNA, 22 bp, Homo sapiens
tctagcaagtacaccaaactgc

SEQ ID NO: 48633 - DNA, 24 bp, Homo sapiens
cagcacatcccatccacgctggag

SEQ ID NO: 48634 - DNA, 24 bp, Homo sapiens
ccatcacctggacgccacccggaa

SEQ ID NO: 48635 - DNA, 20 bp, Homo sapiens
cactctaaacacagtcaata

SEQ ID NO: 48636 - DNA, 18 bp, Homo sapiens
gggccacgaggaacacag

SEQ ID NO: 48637 - DNA, 20 bp, Homo sapiens
gactcagtctcaaaaaaata

SEQ ID NO: 48638 - DNA, 22 bp, Homo sapiens
gtggagcggctcaggcactcca

SEQ ID NO: 48639 - DNA, 20 bp, Homo sapiens
cacgagggaggccccagccc

SEQ ID NO: 48640 - DNA, 17 bp, Homo sapiens
ggagcatcctgaacaga

SEQ ID NO: 48641 - DNA, 20 bp, Homo sapiens
ttcttcccagagggctgtga

SEQ ID NO: 48642 - DNA, 20 bp, Homo sapiens
tggacaaatgagtaactctt

SEQ ID NO: 48643 - DNA, 18 bp, Homo sapiens
gtccgaggtgtctctgga

SEQ ID NO: 48644 - DNA, 21 bp, Homo sapiens
agagacacttacatgaaataa

SEQ ID NO: 48645 - DNA, 24 bp, Homo sapiens
ctggtcgatggtgttacagtcaga

SEQ ID NO: 48646 - DNA, 16 bp, Homo sapiens
atacaggccagatgtc

SEQ ID NO: 48647 - DNA, 16 bp, Homo sapiens
cttcttgcacaaggag

SEQ ID NO: 48648 - DNA, 16 bp, Homo sapiens
gccaagagactgcacc

SEQ ID NO: 48649 - DNA, 21 bp, Homo sapiens
aagcttgtgacaggttgtata

SEQ ID NO: 48650 - DNA, 17 bp, Homo sapiens
gcattgtgctgtgcctc

SEQ ID NO: 48651 - DNA, 22 bp, Homo sapiens
agagaacagtgacttgctcaca

SEQ ID NO: 48652 - DNA, 16 bp, Homo sapiens
gaaggagtgcaccctc

SEQ ID NO: 48653 - DNA, 21 bp, Homo sapiens
ctaggatgatccggtttagca

SEQ ID NO: 48654 - DNA, 21 bp, Homo sapiens
agtggggatgggggaagggct

SEQ ID NO: 48655 - DNA, 17 bp, Homo sapiens
cagtgacagacgtgacg

SEQ ID NO: 48656 - DNA, 23 bp, Homo sapiens
ctgcagccaggaactgctccctc

SEQ ID NO: 48657 - DNA, 24 bp, Homo sapiens
aacaccatggcatagacagtctgg

SEQ ID NO: 48658 - DNA, 20 bp, Homo sapiens
ctggtggccatcgactactg

SEQ ID NO: 48659 - DNA, 22 bp, Homo sapiens
gagttccagggtgcccatgggc

SEQ ID NO: 48660 - DNA, 22 bp, Homo sapiens
cctccgccggcatcctgctcct

SEQ ID NO: 48661 - DNA, 23 bp, Homo sapiens
cgccagtcacacctggctgaggg

SEQ ID NO: 48662 - DNA, 16 bp, Homo sapiens
gtccatgctgcaccag

SEQ ID NO: 48663 - DNA, 24 bp, Homo sapiens
tgtcggtccacttggccagccagt

SEQ ID NO: 48664 - DNA, 23 bp, Homo sapiens
tagccacagagtgggttcttgcg

SEQ ID NO: 48665 - DNA, 17 bp, Homo sapiens
agaagaccagcaacgac

SEQ ID NO: 48666 - DNA, 18 bp, Homo sapiens
cagtaagtggggataaaa

SEQ ID NO: 48667 - DNA, 17 bp, Homo sapiens
tgggatctcagcacgct

SEQ ID NO: 48668 - DNA, 16 bp, Homo sapiens
tgtggtgcagtagtgt

SEQ ID NO: 48669 - DNA, 21 bp, Homo sapiens
ctctcagctgcctcctctgca

SEQ ID NO: 48670 - DNA, 21 bp, Homo sapiens
ctcgagggatggccttctgca

SEQ ID NO: 48671 - DNA, 23 bp, Homo sapiens
cagagggaagccatttaatcaaa

SEQ ID NO: 48672 - DNA, 19 bp, Homo sapiens
gactgtcacagagagaaaa

SEQ ID NO: 48673 - DNA, 19 bp, Homo sapiens
ctctctgtggctgatcaga

SEQ ID NO: 48674 - DNA, 16 bp, Homo sapiens
ccccttcccccaccaa

SEQ ID NO: 48675 - DNA, 20 bp, Homo sapiens
ccttcctcctcttcctcatc

SEQ ID NO: 48676 - DNA, 20 bp, Homo sapiens
caggcagggacaaagtagaa

SEQ ID NO: 48677 - DNA, 19 bp, Homo sapiens
cctggggtggctctgtggc

SEQ ID NO: 48678 - DNA, 21 bp, Homo sapiens
ctgtctctcctctggtaggag

SEQ ID NO: 48679 - DNA, 24 bp, Homo sapiens
tgaatgccagctctttgagcactg

SEQ ID NO: 48680 - DNA, 23 bp, Homo sapiens
ttcctggggcactaaggacagga

SEQ ID NO: 48681 - DNA, 20 bp, Homo sapiens
tcattgccatgaaggatggc

SEQ ID NO: 48682 - DNA, 23 bp, Homo sapiens
catccaggggtggctgcttggcc

SEQ ID NO: 48683 - DNA, 16 bp, Homo sapiens
ccattcctccccagcc

SEQ ID NO: 48684 - DNA, 18 bp, Homo sapiens
ggttcatgagggtcttcc

SEQ ID NO: 48685 - DNA, 16 bp, Homo sapiens
agtgaggaaagggatg

SEQ ID NO: 48686 - DNA, 23 bp, Homo sapiens
cttgagggtaccctccctctgga

SEQ ID NO: 48687 - DNA, 20 bp, Homo sapiens
atgttggttggggtaggtta

SEQ ID NO: 48688 - DNA, 21 bp, Homo sapiens
tgaaatgcccagcatgcataa

SEQ ID NO: 48689 - DNA, 16 bp, Homo sapiens
gaggacagtggtctta

SEQ ID NO: 48690 - DNA, 16 bp, Homo sapiens
agttgctaccaagaca

SEQ ID NO: 48691 - DNA, 20 bp, Homo sapiens
ctctggatatccatctgagt

SEQ ID NO: 48692 - DNA, 23 bp, Homo sapiens
cagccctgccccctatagcctga

SEQ ID NO: 48693 - DNA, 24 bp, Homo sapiens
caccatgcctttccctaccctcta

SEQ ID NO: 48694 - DNA, 23 bp, Homo sapiens
caggtactgtagcttgtgggtca

SEQ ID NO: 48695 - DNA, 22 bp, Homo sapiens
tagagcagagttgatagaactc

SEQ ID NO: 48696 - DNA, 21 bp, Homo sapiens
ggatgccggcctgcattaagt

SEQ ID NO: 48697 - DNA, 20 bp, Homo sapiens
caaggcccagagaggttggg

SEQ ID NO: 48698 - DNA, 24 bp, Homo sapiens
ccctatcactaggatgataaggca

SEQ ID NO: 48699 - DNA, 16 bp, Homo sapiens
cgccagcgaatcagtg

SEQ ID NO: 48700 - DNA, 19 bp, Homo sapiens
agattgttggatgatggtg

SEQ ID NO: 48701 - DNA, 18 bp, Homo sapiens
gaatggctgagggcatga

SEQ ID NO: 48702 - DNA, 17 bp, Homo sapiens
cagagaccaggacccca

SEQ ID NO: 48703 - DNA, 17 bp, Homo sapiens
ccaggcctccatcccaa

SEQ ID NO: 48704 - DNA, 24 bp, Homo sapiens
ctggtagagggctcgggccacact

SEQ ID NO: 48705 - DNA, 24 bp, Homo sapiens
attcagtaaacacgtgcaagttcc

SEQ ID NO: 48706 - DNA, 22 bp, Homo sapiens
aacctgtcaaaggacatcatca

SEQ ID NO: 48707 - DNA, 16 bp, Homo sapiens
ccagacatcgacatcc

SEQ ID NO: 48708 - DNA, 19 bp, Homo sapiens
caatgtctcctatttccta

SEQ ID NO: 48709 - DNA, 16 bp, Homo sapiens
ccctgcctctacccac

SEQ ID NO: 48710 - DNA, 24 bp, Homo sapiens
ggttgggggtcctggctttgaaaa

SEQ ID NO: 48711 - DNA, 17 bp, Homo sapiens
tacccagagactaatga

SEQ ID NO: 48712 - DNA, 17 bp, Homo sapiens
ggtctggtctccatggg

SEQ ID NO: 48713 - DNA, 16 bp, Homo sapiens
tttgcttgcacccaag

SEQ ID NO: 48714 - DNA, 19 bp, Homo sapiens
aggtgcaccatatggagag

SEQ ID NO: 48715 - DNA, 17 bp, Homo sapiens
aaaccatggctgctaaa

SEQ ID NO: 48716 - DNA, 20 bp, Homo sapiens
gtgatcgatggaggggcccg

SEQ ID NO: 48717 - DNA, 20 bp, Homo sapiens
caccccctactcccgccctg

SEQ ID NO: 48718 - DNA, 22 bp, Homo sapiens
cccctccacatcctgcctccct

SEQ ID NO: 48719 - DNA, 17 bp, Homo sapiens
tctgagccatcagcttg

SEQ ID NO: 48720 - DNA, 23 bp, Homo sapiens
caaagatgatgttctcctccaca

SEQ ID NO: 48721 - DNA, 16 bp, Homo sapiens
agaggccacactaagc

SEQ ID NO: 48722 - DNA, 20 bp, Homo sapiens
gagccacctggtggagcaca

SEQ ID NO: 48723 - DNA, 22 bp, Homo sapiens
cagtatgcctttcctcccctgc

SEQ ID NO: 48724 - DNA, 24 bp, Homo sapiens
ggctggggtctgggggctgcccag

SEQ ID NO: 48725 - DNA, 23 bp, Homo sapiens
tcatgttgggttggagggagctc

SEQ ID NO: 48726 - DNA, 21 bp, Homo sapiens
ggagttgaccctggggggcaa

SEQ ID NO: 48727 - DNA, 18 bp, Homo sapiens
ctctctatgcagcatttg

SEQ ID NO: 48728 - DNA, 17 bp, Homo sapiens
ccagcagccttcctgac

SEQ ID NO: 48729 - DNA, 20 bp, Homo sapiens
gtaggctgcacatccctgaa

SEQ ID NO: 48730 - DNA, 16 bp, Homo sapiens
gcgtgatggaaaggca

SEQ ID NO: 48731 - DNA, 16 bp, Homo sapiens
ctaccccttccctttg

SEQ ID NO: 48732 - DNA, 18 bp, Homo sapiens
atttggaaaccctgggaa

SEQ ID NO: 48733 - DNA, 17 bp, Homo sapiens
tcctctcctatctcgct

SEQ ID NO: 48734 - DNA, 16 bp, Homo sapiens
tgcagaaggtctcagg

SEQ ID NO: 48735 - DNA, 23 bp, Homo sapiens
agcatttattgagtcctcactga

SEQ ID NO: 48736 - DNA, 18 bp, Homo sapiens
tgactatgatcgtggggc

SEQ ID NO: 48737 - DNA, 23 bp, Homo sapiens
tgaggaggatggttaaaaggaga

SEQ ID NO: 48738 - DNA, 22 bp, Homo sapiens
aatggttgttcagactcccccg

SEQ ID NO: 48739 - DNA, 16 bp, Homo sapiens
ctccagaagacagccc

SEQ ID NO: 48740 - DNA, 23 bp, Homo sapiens
aagaaagaaaacaggggccccag

SEQ ID NO: 48741 - DNA, 23 bp, Homo sapiens
gagcgaggacttgccgcagccca

SEQ ID NO: 48742 - DNA, 18 bp, Homo sapiens
tttccagaaggaaaggat

SEQ ID NO: 48743 - DNA, 21 bp, Homo sapiens
acacggaagcctctagaatgt

SEQ ID NO: 48744 - DNA, 16 bp, Homo sapiens
tggaccccagatggaa

SEQ ID NO: 48745 - DNA, 21 bp, Homo sapiens
aatgagcagagagtaggtgct

SEQ ID NO: 48746 - DNA, 16 bp, Homo sapiens
ttctctcctgggcggt

SEQ ID NO: 48747 - DNA, 20 bp, Homo sapiens
gtgggacatggggaggggca

SEQ ID NO: 48748 - DNA, 22 bp, Homo sapiens
gtcttttggctttcatggagga

SEQ ID NO: 48749 - DNA, 22 bp, Homo sapiens
gtgatgttggacagtgtgggga

SEQ ID NO: 48750 - DNA, 23 bp, Homo sapiens
tcagcatgagaaggccagtctcc

SEQ ID NO: 48751 - DNA, 22 bp, Homo sapiens
gggggtccccccacttggtggt

SEQ ID NO: 48752 - DNA, 18 bp, Homo sapiens
gagcctggtccccagtgc

SEQ ID NO: 48753 - DNA, 24 bp, Homo sapiens
caggcagggtgacctctgcagagg

SEQ ID NO: 48754 - DNA, 16 bp, Homo sapiens
gggttgtgaaccgcaa

SEQ ID NO: 48755 - DNA, 23 bp, Homo sapiens
ctccctctgggagttggtgctgg

SEQ ID NO: 48756 - DNA, 21 bp, Homo sapiens
ggggctcccttccctacacag

SEQ ID NO: 48757 - DNA, 18 bp, Homo sapiens
agcatcgccatctgcact

SEQ ID NO: 48758 - DNA, 24 bp, Homo sapiens
ggtcctctaaggcccaaaacttgg

SEQ ID NO: 48759 - DNA, 23 bp, Homo sapiens
cgacaatcctcccgggctggacg

SEQ ID NO: 48760 - DNA, 22 bp, Homo sapiens
gcaagtaccaggcggtggtgag

SEQ ID NO: 48761 - DNA, 23 bp, Homo sapiens
gtgaggacccactgggctgggag

SEQ ID NO: 48762 - DNA, 22 bp, Homo sapiens
cagtgcagagatccgtgaggag

SEQ ID NO: 48763 - DNA, 21 bp, Homo sapiens
aaaaggcagaagtccgacaca

SEQ ID NO: 48764 - DNA, 16 bp, Homo sapiens
gaggggtgtctctgtg

SEQ ID NO: 48765 - DNA, 23 bp, Homo sapiens
agtagcaaggggaggccgggcac

SEQ ID NO: 48766 - DNA, 23 bp, Homo sapiens
gatcctgctcagagctctctatc

SEQ ID NO: 48767 - DNA, 18 bp, Homo sapiens
gctcatggggggcacact

SEQ ID NO: 48768 - DNA, 17 bp, Homo sapiens
atgcccactggtctgcc

SEQ ID NO: 48769 - DNA, 18 bp, Homo sapiens
ccaatgtccctctgacca

SEQ ID NO: 48770 - DNA, 24 bp, Homo sapiens
tatcttggtcacaccgctgttcct

SEQ ID NO: 48771 - DNA, 24 bp, Homo sapiens
tccgggaccaaacagctgtggttt

SEQ ID NO: 48772 - DNA, 21 bp, Homo sapiens
ttcttcaaagaggccgacttc

SEQ ID NO: 48773 - DNA, 22 bp, Homo sapiens
ctgcctgcccagtgccctcgcc

SEQ ID NO: 48774 - DNA, 17 bp, Homo sapiens
caccctggcctcacttg

SEQ ID NO: 48775 - DNA, 24 bp, Homo sapiens
acggtagatcggaccacactggac

SEQ ID NO: 48776 - DNA, 18 bp, Homo sapiens
cagccctctcatttccct

SEQ ID NO: 48777 - DNA, 19 bp, Homo sapiens
gcaaaggccacggagggcg

SEQ ID NO: 48778 - DNA, 16 bp, Homo sapiens
ggggatgatgaaggtg

SEQ ID NO: 48779 - DNA, 16 bp, Homo sapiens
gagttggggaggggcc

SEQ ID NO: 48780 - DNA, 16 bp, Homo sapiens
ttcatgaacacggcca

SEQ ID NO: 48781 - DNA, 24 bp, Homo sapiens
ctgtggagcctgtcttctgaggcc

SEQ ID NO: 48782 - DNA, 17 bp, Homo sapiens
catctccatgtgtagct

SEQ ID NO: 48783 - DNA, 23 bp, Homo sapiens
cagacgccctccccctccaccct

SEQ ID NO: 48784 - DNA, 20 bp, Homo sapiens
tactggagctgtgccccaca

SEQ ID NO: 48785 - DNA, 24 bp, Homo sapiens
actatgaggacagctgcaatgggg

SEQ ID NO: 48786 - DNA, 21 bp, Homo sapiens
ggagcttagctatcagagcca

SEQ ID NO: 48787 - DNA, 17 bp, Homo sapiens
gacccgcaggaaggaga

SEQ ID NO: 48788 - DNA, 21 bp, Homo sapiens
ctcctgcttctgtccctgcac

SEQ ID NO: 48789 - DNA, 17 bp, Homo sapiens
atcaagctgctgaagct

SEQ ID NO: 48790 - DNA, 19 bp, Homo sapiens
cagcacccagggctggctg

SEQ ID NO: 48791 - DNA, 18 bp, Homo sapiens
ctcggggacccctgcagg

SEQ ID NO: 48792 - DNA, 24 bp, Homo sapiens
agatggcaaaggccctgaggctgg

SEQ ID NO: 48793 - DNA, 24 bp, Homo sapiens
cagtattgacactcaggccttcct

SEQ ID NO: 48794 - DNA, 23 bp, Homo sapiens
gaagatgttctcccaggcgtaca

SEQ ID NO: 48795 - DNA, 20 bp, Homo sapiens
agtcaatgggggaggaggct

SEQ ID NO: 48796 - DNA, 16 bp, Homo sapiens
gccgctcattggaata

SEQ ID NO: 48797 - DNA, 21 bp, Homo sapiens
caggcccagcggagcacactg

SEQ ID NO: 48798 - DNA, 23 bp, Homo sapiens
aagctgaggcctggacaggtgaa

SEQ ID NO: 48799 - DNA, 16 bp, Homo sapiens
tggagcagctgtcatc

SEQ ID NO: 48800 - DNA, 16 bp, Homo sapiens
gtgtgggaggagacct

SEQ ID NO: 48801 - DNA, 23 bp, Homo sapiens
ccttcctcagatcattgtgggtg

SEQ ID NO: 48802 - DNA, 24 bp, Homo sapiens
acacacacctttgggcactcacca

SEQ ID NO: 48803 - DNA, 21 bp, Homo sapiens
gggattttgccagcacctcct

SEQ ID NO: 48804 - DNA, 16 bp, Homo sapiens
gacaggagccagtaga

SEQ ID NO: 48805 - DNA, 19 bp, Homo sapiens
atttggaaacctgggcacc

SEQ ID NO: 48806 - DNA, 23 bp, Homo sapiens
cgagtatgtagtagaggagaatc

SEQ ID NO: 48807 - DNA, 23 bp, Homo sapiens
gtatgggacaggagggacccaga

SEQ ID NO: 48808 - DNA, 19 bp, Homo sapiens
catgtggtttttcttcttg

SEQ ID NO: 48809 - DNA, 16 bp, Homo sapiens
aagcatggagtggaag

SEQ ID NO: 48810 - DNA, 17 bp, Homo sapiens
gggagaaatgactgctg

SEQ ID NO: 48811 - DNA, 19 bp, Homo sapiens
gttgtgtgtcctgctgccc

SEQ ID NO: 48812 - DNA, 19 bp, Homo sapiens
tctcatttctagaccaaga

SEQ ID NO: 48813 - DNA, 18 bp, Homo sapiens
tagcccagaggtttgggc

SEQ ID NO: 48814 - DNA, 18 bp, Homo sapiens
caggtggcatctggtgtg

SEQ ID NO: 48815 - DNA, 23 bp, Homo sapiens
gcaaccagattacagatctgtcc

SEQ ID NO: 48816 - DNA, 17 bp, Homo sapiens
ttacagagctgctctag

SEQ ID NO: 48817 - DNA, 25 bp, Homo sapiens
caggtgcataattttattgtaaatc

SEQ ID NO: 48818 - DNA, 18 bp, Homo sapiens
ggccattgaaactggaat

SEQ ID NO: 48819 - DNA, 22 bp, Homo sapiens
gggcaacaaaaaataaatttac

SEQ ID NO: 48820 - DNA, 16 bp, Homo sapiens
tgttccttgccctcct

SEQ ID NO: 48821 - DNA, 23 bp, Homo sapiens
tggacattattcctaataatggt

SEQ ID NO: 48822 - DNA, 19 bp, Homo sapiens
tttctcggggtttactttg

SEQ ID NO: 48823 - DNA, 18 bp, Homo sapiens
cctgtattgctcctctca

SEQ ID NO: 48824 - DNA, 18 bp, Homo sapiens
gtcattttgctggcaatg

SEQ ID NO: 48825 - DNA, 21 bp, Homo sapiens
tgcagaaatgtcctttgcagt

SEQ ID NO: 48826 - DNA, 19 bp, Homo sapiens
ccagagggtcttgtaataa

SEQ ID NO: 48827 - DNA, 23 bp, Homo sapiens
cattggcaaggaactcttgggat

SEQ ID NO: 48828 - DNA, 22 bp, Homo sapiens
tttagttggatttatcagtctg

SEQ ID NO: 48829 - DNA, 22 bp, Homo sapiens
ttgaccagatgtagagtattct

SEQ ID NO: 48830 - DNA, 23 bp, Homo sapiens
gcatctttgggatcgtggaccac

SEQ ID NO: 48831 - DNA, 24 bp, Homo sapiens
gtgaggagccactccagtgtggcc

SEQ ID NO: 48832 - DNA, 19 bp, Homo sapiens
cagcagcactttccgcatc

SEQ ID NO: 48833 - DNA, 18 bp, Homo sapiens
ctgaaaaccatctagagg

SEQ ID NO: 48834 - DNA, 24 bp, Homo sapiens
attcagggcactcaaggtgcccgg

SEQ ID NO: 48835 - DNA, 24 bp, Homo sapiens
tggaagacgtcgttctccttccca

SEQ ID NO: 48836 - DNA, 21 bp, Homo sapiens
aattagccctcaggcactctg

SEQ ID NO: 48837 - DNA, 23 bp, Homo sapiens
aagcccagcaggtcggccaagat

SEQ ID NO: 48838 - DNA, 23 bp, Homo sapiens
ctgggtttccccagacaacagga

SEQ ID NO: 48839 - DNA, 19 bp, Homo sapiens
atggctgagtgcctgccag

SEQ ID NO: 48840 - DNA, 17 bp, Homo sapiens
acttgctgattccatga

SEQ ID NO: 48841 - DNA, 16 bp, Homo sapiens
ctggttcactgtgtga

SEQ ID NO: 48842 - DNA, 18 bp, Homo sapiens
tgagggccctcaccaact

SEQ ID NO: 48843 - DNA, 23 bp, Homo sapiens
ctcttgtcccaccaggattttga

SEQ ID NO: 48844 - DNA, 16 bp, Homo sapiens
aagactgcccacaaga

SEQ ID NO: 48845 - DNA, 20 bp, Homo sapiens
aaccagaaggcagtgaatag

SEQ ID NO: 48846 - DNA, 21 bp, Homo sapiens
tacgcttcctgcagcccttcg

SEQ ID NO: 48847 - DNA, 24 bp, Homo sapiens
caaaggcctcgcagagccgttggt

SEQ ID NO: 48848 - DNA, 21 bp, Homo sapiens
catcttcttcaagacaccgag

SEQ ID NO: 48849 - DNA, 24 bp, Homo sapiens
tggctcgcaagtcgatgggcttct

SEQ ID NO: 48850 - DNA, 16 bp, Homo sapiens
agtggtgagaagttgg

SEQ ID NO: 48851 - DNA, 20 bp, Homo sapiens
tttggacagcagattcacga

SEQ ID NO: 48852 - DNA, 19 bp, Homo sapiens
ccccatctgttagagatca

SEQ ID NO: 48853 - DNA, 16 bp, Homo sapiens
ggaggcttcacctccc

SEQ ID NO: 48854 - DNA, 17 bp, Homo sapiens
tggccaagaagtgttgg

SEQ ID NO: 48855 - DNA, 22 bp, Homo sapiens
ctatcctgaaatttccgccacg

SEQ ID NO: 48856 - DNA, 22 bp, Homo sapiens
gctgctggtgatcctctatggg

SEQ ID NO: 48857 - DNA, 23 bp, Homo sapiens
ccttctcagtttggctgagaagc

SEQ ID NO: 48858 - DNA, 23 bp, Homo sapiens
ttgtcaagttcttggaccacgcc

SEQ ID NO: 48859 - DNA, 23 bp, Homo sapiens
cagagcctctgcttcccacccca

SEQ ID NO: 48860 - DNA, 24 bp, Homo sapiens
tctctcctcggcagccctgctggt

SEQ ID NO: 48861 - DNA, 21 bp, Homo sapiens
acattgacctccacgaggagc

SEQ ID NO: 48862 - DNA, 21 bp, Homo sapiens
acattatgtgagtgtacacac

SEQ ID NO: 48863 - DNA, 19 bp, Homo sapiens
cgtagctgcgagaagccga

SEQ ID NO: 48864 - DNA, 16 bp, Homo sapiens
actcggaaatgtacac

SEQ ID NO: 48865 - DNA, 19 bp, Homo sapiens
gatgaaggccagggtccaa

SEQ ID NO: 48866 - DNA, 22 bp, Homo sapiens
gtctatcctccttcaccagact

SEQ ID NO: 48867 - DNA, 19 bp, Homo sapiens
gtggtctactatcacaaca

SEQ ID NO: 48868 - DNA, 24 bp, Homo sapiens
tattccaaatctctactgtttaga

SEQ ID NO: 48869 - DNA, 17 bp, Homo sapiens
aatcccaccatctgcac

SEQ ID NO: 48870 - DNA, 18 bp, Homo sapiens
atgaatgaaggtactgcc

SEQ ID NO: 48871 - DNA, 16 bp, Homo sapiens
ttgcagtacttagcat

SEQ ID NO: 48872 - DNA, 19 bp, Homo sapiens
gaagttggaagtctcgatg

SEQ ID NO: 48873 - DNA, 19 bp, Homo sapiens
gtgatgctataaaggttca

SEQ ID NO: 48874 - DNA, 21 bp, Homo sapiens
gaacgccatcccggctggcat

SEQ ID NO: 48875 - DNA, 16 bp, Homo sapiens
ctctgcccagcccata

SEQ ID NO: 48876 - DNA, 17 bp, Homo sapiens
cccagctcagagaggtt

SEQ ID NO: 48877 - DNA, 16 bp, Homo sapiens
ttcatgctgctcttcg

SEQ ID NO: 48878 - DNA, 24 bp, Homo sapiens
taacaaaagacatgggcttgtgga

SEQ ID NO: 48879 - DNA, 17 bp, Homo sapiens
acatccaccacagcaca

SEQ ID NO: 48880 - DNA, 17 bp, Homo sapiens
ctggagcagattcactt

SEQ ID NO: 48881 - DNA, 17 bp, Homo sapiens
catcctgcctctgactg

SEQ ID NO: 48882 - DNA, 20 bp, Homo sapiens
cctctgcaatctcacacacc

SEQ ID NO: 48883 - DNA, 19 bp, Homo sapiens
atggacccaatgcccaagc

SEQ ID NO: 48884 - DNA, 16 bp, Homo sapiens
gggaaatgaagccatg

SEQ ID NO: 48885 - DNA, 19 bp, Homo sapiens
gacgtttagtttgtgtgta

SEQ ID NO: 48886 - DNA, 22 bp, Homo sapiens
gctggtgtgcgagtgcggggac

SEQ ID NO: 48887 - DNA, 24 bp, Homo sapiens
gtggtgccgcacgtcttcctactc

SEQ ID NO: 48888 - DNA, 24 bp, Homo sapiens
aggcggacggcggtcgcgggccgg

SEQ ID NO: 48889 - DNA, 17 bp, Homo sapiens
accgggtggaccagggg

SEQ ID NO: 48890 - DNA, 24 bp, Homo sapiens
tcctccctccctgctctcccgtcc

SEQ ID NO: 48891 - DNA, 16 bp, Homo sapiens
ccgcgcccgcgccgcc

SEQ ID NO: 48892 - DNA, 24 bp, Homo sapiens
gaagaggatggggaaggtgatgaa

SEQ ID NO: 48893 - DNA, 24 bp, Homo sapiens
ggcggcggagctgcaagggacaga

SEQ ID NO: 48894 - DNA, 24 bp, Homo sapiens
caaagcagccgttgttgaggaccc

SEQ ID NO: 48895 - DNA, 21 bp, Homo sapiens
gaggccagcggggctgggcgg

SEQ ID NO: 48896 - DNA, 24 bp, Homo sapiens
tgccgcagaaggccaggggcatgg

SEQ ID NO: 48897 - DNA, 16 bp, Homo sapiens
agtccaaaaggggaaa

SEQ ID NO: 48898 - DNA, 21 bp, Homo sapiens
agtttgagattcctgggtgat

SEQ ID NO: 48899 - DNA, 19 bp, Homo sapiens
ctgagtgtgcacccacaaa

SEQ ID NO: 48900 - DNA, 19 bp, Homo sapiens
ctctcaaggctgatccgag

SEQ ID NO: 48901 - DNA, 16 bp, Homo sapiens
ttgtgctgccagagtg

SEQ ID NO: 48902 - DNA, 20 bp, Homo sapiens
tcctaacggtgaatttggtt

SEQ ID NO: 48903 - DNA, 16 bp, Homo sapiens
ggctggtgtgtagcca

SEQ ID NO: 48904 - DNA, 24 bp, Homo sapiens
ctgaggaattccactgtggccaac

SEQ ID NO: 48905 - DNA, 21 bp, Homo sapiens
ttgaagaccgtgctgccgtgc

SEQ ID NO: 48906 - DNA, 22 bp, Homo sapiens
cttgtgtaccctccagacgcca

SEQ ID NO: 48907 - DNA, 22 bp, Homo sapiens
agagcttctcttccctcctccg

SEQ ID NO: 48908 - DNA, 20 bp, Homo sapiens
tgcaagcagcagggacacac

SEQ ID NO: 48909 - DNA, 24 bp, Homo sapiens
atggagctctgcctgggagtaacc

SEQ ID NO: 48910 - DNA, 24 bp, Homo sapiens
ctccagctgcaggaggaacccgtg

SEQ ID NO: 48911 - DNA, 21 bp, Homo sapiens
taattctggaacccaggggct

SEQ ID NO: 48912 - DNA, 22 bp, Homo sapiens
gttgggggctttcagctacgga

SEQ ID NO: 48913 - DNA, 17 bp, Homo sapiens
ctctagtccaggagttt

SEQ ID NO: 48914 - DNA, 24 bp, Homo sapiens
ctccccacaggactggatcgacct

SEQ ID NO: 48915 - DNA, 22 bp, Homo sapiens
gccattccttcaggctgggaga

SEQ ID NO: 48916 - DNA, 22 bp, Homo sapiens
gtgccggggcagatgcaccatc

SEQ ID NO: 48917 - DNA, 24 bp, Homo sapiens
ctggagaaggaagaagaggtctca

SEQ ID NO: 48918 - DNA, 19 bp, Homo sapiens
gtgggaagaaggtgcagcc

SEQ ID NO: 48919 - DNA, 24 bp, Homo sapiens
cctttggggggcagacggcaacca

SEQ ID NO: 48920 - DNA, 24 bp, Homo sapiens
aaccacaggctggatggggtatgg

SEQ ID NO: 48921 - DNA, 17 bp, Homo sapiens
agattgtgacagactac

SEQ ID NO: 48922 - DNA, 23 bp, Homo sapiens
gaatgaggcatcctattgtgaga

SEQ ID NO: 48923 - DNA, 24 bp, Homo sapiens
atcagcctcatctgcctgcaggtg

SEQ ID NO: 48924 - DNA, 23 bp, Homo sapiens
gtgagggaggaaaggagggaggg

SEQ ID NO: 48925 - DNA, 16 bp, Homo sapiens
ccctttgccaagccct

SEQ ID NO: 48926 - DNA, 16 bp, Homo sapiens
cagcctcagccagggt

SEQ ID NO: 48927 - DNA, 18 bp, Homo sapiens
ctttctgagtccacatga

SEQ ID NO: 48928 - DNA, 19 bp, Homo sapiens
tctcgtcccctttcacaat

SEQ ID NO: 48929 - DNA, 24 bp, Homo sapiens
ccatcccatgcccccagggattgg

SEQ ID NO: 48930 - DNA, 22 bp, Homo sapiens
aaggtggtcgtttctgctgtgt

SEQ ID NO: 48931 - DNA, 24 bp, Homo sapiens
gcattctccagcaaccgtcagccc

SEQ ID NO: 48932 - DNA, 16 bp, Homo sapiens
caggagggatccttag

SEQ ID NO: 48933 - DNA, 22 bp, Homo sapiens
cccgtctaaccactgtatcatc

SEQ ID NO: 48934 - DNA, 22 bp, Homo sapiens
tccttggtgcccaggtgtccac

SEQ ID NO: 48935 - DNA, 20 bp, Homo sapiens
gcagctccccgctcatacac

SEQ ID NO: 48936 - DNA, 24 bp, Homo sapiens
tttctccagatggcactgccggtg

SEQ ID NO: 48937 - DNA, 24 bp, Homo sapiens
cgccttccagggccaggtctaagg

SEQ ID NO: 48938 - DNA, 24 bp, Homo sapiens
agagcagatcatggggaaggatgt

SEQ ID NO: 48939 - DNA, 21 bp, Homo sapiens
ggaggacagtggggacctgag

SEQ ID NO: 48940 - DNA, 18 bp, Homo sapiens
ccttcaggccagctcaaa

SEQ ID NO: 48941 - DNA, 23 bp, Homo sapiens
accaagggaggaggggcaggcac

SEQ ID NO: 48942 - DNA, 23 bp, Homo sapiens
gtgctctgtggggcccagtgtcc

SEQ ID NO: 48943 - DNA, 24 bp, Homo sapiens
accttcttgatgcgtaggagccgg

SEQ ID NO: 48944 - DNA, 16 bp, Homo sapiens
cagttgaagaccagta

SEQ ID NO: 48945 - DNA, 17 bp, Homo sapiens
tcgtgggaagagcagct

SEQ ID NO: 48946 - DNA, 24 bp, Homo sapiens
taaagccctccctttgcttccagg

SEQ ID NO: 48947 - DNA, 18 bp, Homo sapiens
caaggcccagaatgcacc

SEQ ID NO: 48948 - DNA, 19 bp, Homo sapiens
gaccattcatccccctact

SEQ ID NO: 48949 - DNA, 22 bp, Homo sapiens
gttcctggggttacttgtccag

SEQ ID NO: 48950 - DNA, 20 bp, Homo sapiens
atcccgtaccctggccgtgc

SEQ ID NO: 48951 - DNA, 24 bp, Homo sapiens
cttcctcatatttccggaaatcct

SEQ ID NO: 48952 - DNA, 16 bp, Homo sapiens
tgcgcaggcaatggag

SEQ ID NO: 48953 - DNA, 16 bp, Homo sapiens
ccacaggagatgttga

SEQ ID NO: 48954 - DNA, 17 bp, Homo sapiens
catggacctgaccaggt

SEQ ID NO: 48955 - DNA, 16 bp, Homo sapiens
ggggcagccaagacct

SEQ ID NO: 48956 - DNA, 24 bp, Homo sapiens
gggggtggtggggagacctccaga

SEQ ID NO: 48957 - DNA, 16 bp, Homo sapiens
gactgctcggggaggg

SEQ ID NO: 48958 - DNA, 16 bp, Homo sapiens
taaaccaccatcctct

SEQ ID NO: 48959 - DNA, 18 bp, Homo sapiens
aatttcatctacaggcca

SEQ ID NO: 48960 - DNA, 17 bp, Homo sapiens
catctgtgatctgcatt

SEQ ID NO: 48961 - DNA, 24 bp, Homo sapiens
cagcctccacgaggccctggcgtg

SEQ ID NO: 48962 - DNA, 16 bp, Homo sapiens
gaggtagccctggtct

SEQ ID NO: 48963 - DNA, 16 bp, Homo sapiens
ctcacctgggtccctg

SEQ ID NO: 48964 - DNA, 23 bp, Homo sapiens
cttaccagaacttcagatttcac

SEQ ID NO: 48965 - DNA, 19 bp, Homo sapiens
catatgcatgggtgtagat

SEQ ID NO: 48966 - DNA, 18 bp, Homo sapiens
gtttggagatggtggaca

SEQ ID NO: 48967 - DNA, 24 bp, Homo sapiens
ctcatctctctgctgaggatcaca

SEQ ID NO: 48968 - DNA, 21 bp, Homo sapiens
acatgcaggatgtccacacat

SEQ ID NO: 48969 - DNA, 21 bp, Homo sapiens
cagtgggaagcccactaactc

SEQ ID NO: 48970 - DNA, 23 bp, Homo sapiens
gtttctttctgtctccactctca

SEQ ID NO: 48971 - DNA, 22 bp, Homo sapiens
catcccttccgcactggggaca

SEQ ID NO: 48972 - DNA, 24 bp, Homo sapiens
tctccccactcttcctacttccaa

SEQ ID NO: 48973 - DNA, 18 bp, Homo sapiens
caagacctcactcccacc

SEQ ID NO: 48974 - DNA, 24 bp, Homo sapiens
ggtgggaagctctgttcagggaca

SEQ ID NO: 48975 - DNA, 21 bp, Homo sapiens
tcctctccatgggtgcagcgc

SEQ ID NO: 48976 - DNA, 16 bp, Homo sapiens
ccactggattgcctgt

SEQ ID NO: 48977 - DNA, 24 bp, Homo sapiens
aacccaccccacaaggtcccggcg

SEQ ID NO: 48978 - DNA, 24 bp, Homo sapiens
cttccagcgccgagggcagtgggc

SEQ ID NO: 48979 - DNA, 16 bp, Homo sapiens
caagactccctctgcc

SEQ ID NO: 48980 - DNA, 20 bp, Homo sapiens
ggagggatgggaatgggggg

SEQ ID NO: 48981 - DNA, 16 bp, Homo sapiens
actgcacctgcacacc

SEQ ID NO: 48982 - DNA, 22 bp, Homo sapiens
catggccagataagggaaggac

SEQ ID NO: 48983 - DNA, 21 bp, Homo sapiens
cacagggcccccgcctccccc

SEQ ID NO: 48984 - DNA, 23 bp, Homo sapiens
ggtggggcatcacaggcaaggca

SEQ ID NO: 48985 - DNA, 16 bp, Homo sapiens
tggagctctaagcaga

SEQ ID NO: 48986 - DNA, 16 bp, Homo sapiens
gtccaggtcagtggtg

SEQ ID NO: 48987 - DNA, 23 bp, Homo sapiens
gtggtgggtctccagtagcaaga

SEQ ID NO: 48988 - DNA, 23 bp, Homo sapiens
ggtggggccaggggagacacaga

SEQ ID NO: 48989 - DNA, 24 bp, Homo sapiens
atggcctcagctgggcatccaggt

SEQ ID NO: 48990 - DNA, 17 bp, Homo sapiens
cctcctcctcaagaggg

SEQ ID NO: 48991 - DNA, 22 bp, Homo sapiens
gtcaaacgcgcctcgagcagat

SEQ ID NO: 48992 - DNA, 18 bp, Homo sapiens
gtgaggctagtgacgttt

SEQ ID NO: 48993 - DNA, 24 bp, Homo sapiens
tctgagacagagcgggaagacctt

SEQ ID NO: 48994 - DNA, 24 bp, Homo sapiens
tgggtcattctgaagacagcagga

SEQ ID NO: 48995 - DNA, 19 bp, Homo sapiens
ttattcaaatgtgcccttt

SEQ ID NO: 48996 - DNA, 17 bp, Homo sapiens
cagcagaggaaatctgc

SEQ ID NO: 48997 - DNA, 17 bp, Homo sapiens
ctcacagtactctggag

SEQ ID NO: 48998 - DNA, 22 bp, Homo sapiens
tgaatcttttccgattcttcaa

SEQ ID NO: 48999 - DNA, 24 bp, Homo sapiens
ctcccttgctgctgcctccttgag

SEQ ID NO: 49000 - DNA, 22 bp, Homo sapiens
aggtggcatgatctctctctcc

SEQ ID NO: 49001 - DNA, 22 bp, Homo sapiens
gagaaagaggaaatgctggaga

SEQ ID NO: 49002 - DNA, 18 bp, Homo sapiens
atgccatttgaggagaac

SEQ ID NO: 49003 - DNA, 20 bp, Homo sapiens
aggacttgagaaagaataag

SEQ ID NO: 49004 - DNA, 17 bp, Homo sapiens
gtcccagggttgcttgc

SEQ ID NO: 49005 - DNA, 18 bp, Homo sapiens
aatgccacatctactcag

SEQ ID NO: 49006 - DNA, 21 bp, Homo sapiens
gatctttagctgcttttcctt

SEQ ID NO: 49007 - DNA, 17 bp, Homo sapiens
gtgaggactggatgccc

SEQ ID NO: 49008 - DNA, 23 bp, Homo sapiens
ttttgctcaaactccagttcttt

SEQ ID NO: 49009 - DNA, 17 bp, Homo sapiens
atgtccagagtggtgag

SEQ ID NO: 49010 - DNA, 24 bp, Homo sapiens
ttcttcttatcttttcctttctga

SEQ ID NO: 49011 - DNA, 21 bp, Homo sapiens
ctgccatttgatgtcagcctg

SEQ ID NO: 49012 - DNA, 19 bp, Homo sapiens
tagcttttggatggtttta

SEQ ID NO: 49013 - DNA, 19 bp, Homo sapiens
agtcacaccatttagtgtt

SEQ ID NO: 49014 - DNA, 17 bp, Homo sapiens
cccatggatgctctggc

SEQ ID NO: 49015 - DNA, 22 bp, Homo sapiens
ccacagcaaactaagcagcaca

SEQ ID NO: 49016 - DNA, 21 bp, Homo sapiens
tctgccaatgctgtttatctc

SEQ ID NO: 49017 - DNA, 19 bp, Homo sapiens
gaatttgccatcgtaacga

SEQ ID NO: 49018 - DNA, 23 bp, Homo sapiens
tgtacagtgcttgggccaagctg

SEQ ID NO: 49019 - DNA, 16 bp, Homo sapiens
acctgagctcgagccc

SEQ ID NO: 49020 - DNA, 16 bp, Homo sapiens
gctgggcccctgaagc

SEQ ID NO: 49021 - DNA, 24 bp, Homo sapiens
cccaagtcccttttggttcaccag

SEQ ID NO: 49022 - DNA, 24 bp, Homo sapiens
gtaaagcagagcagccaggccagg

SEQ ID NO: 49023 - DNA, 22 bp, Homo sapiens
tcccatggaggaagctgattac

SEQ ID NO: 49024 - DNA, 17 bp, Homo sapiens
tccatccaggtcatctg

SEQ ID NO: 49025 - DNA, 22 bp, Homo sapiens
agagcaaaaaacctttgctctg

SEQ ID NO: 49026 - DNA, 23 bp, Homo sapiens
tggggcagatggtctctgaccca

SEQ ID NO: 49027 - DNA, 19 bp, Homo sapiens
cagctactcttgcctaaaa

SEQ ID NO: 49028 - DNA, 19 bp, Homo sapiens
ctatccatctaggaggtgg

SEQ ID NO: 49029 - DNA, 19 bp, Homo sapiens
gattgtagaggaggaagag

SEQ ID NO: 49030 - DNA, 22 bp, Homo sapiens
cttagcctctcccctcggctca

SEQ ID NO: 49031 - DNA, 17 bp, Homo sapiens
atgcaggagatgggcct

SEQ ID NO: 49032 - DNA, 24 bp, Homo sapiens
tgtacctcagcagtgatggtttta

SEQ ID NO: 49033 - DNA, 21 bp, Homo sapiens
gcttgattcatcatgactaga

SEQ ID NO: 49034 - DNA, 18 bp, Homo sapiens
tcccattgcttcttaaac

SEQ ID NO: 49035 - DNA, 21 bp, Homo sapiens
tatgacaggctttactacaaa

SEQ ID NO: 49036 - DNA, 21 bp, Homo sapiens
ttcagaaggagaaaagaaatt

SEQ ID NO: 49037 - DNA, 21 bp, Homo sapiens
aaactggttctggaggcagcc

SEQ ID NO: 49038 - DNA, 21 bp, Homo sapiens
cagtaaggaagagttcatttc

SEQ ID NO: 49039 - DNA, 18 bp, Homo sapiens
cacagacacgcgtggagc

SEQ ID NO: 49040 - DNA, 16 bp, Homo sapiens
gcctcctaggaaggga

SEQ ID NO: 49041 - DNA, 24 bp, Homo sapiens
attttcctctgctgccttctgggc

SEQ ID NO: 49042 - DNA, 18 bp, Homo sapiens
ctgacctaccaccaaact

SEQ ID NO: 49043 - DNA, 23 bp, Homo sapiens
atgcagaagcggctggcgatgga

SEQ ID NO: 49044 - DNA, 21 bp, Homo sapiens
gaggaagttggctggggacac

SEQ ID NO: 49045 - DNA, 22 bp, Homo sapiens
cagaccgggagcggctggcaga

SEQ ID NO: 49046 - DNA, 16 bp, Homo sapiens
cgggacagggcatcca

SEQ ID NO: 49047 - DNA, 22 bp, Homo sapiens
ggttccccgggggctgagcaag

SEQ ID NO: 49048 - DNA, 24 bp, Homo sapiens
gctgctcctggaggatcttgttgg

SEQ ID NO: 49049 - DNA, 20 bp, Homo sapiens
atggtgctgagaagaccacc

SEQ ID NO: 49050 - DNA, 22 bp, Homo sapiens
cagctcacgctgccgcgcctct

SEQ ID NO: 49051 - DNA, 16 bp, Homo sapiens
gaggacttctgcccag

SEQ ID NO: 49052 - DNA, 19 bp, Homo sapiens
tccctgacccaaacttctt

SEQ ID NO: 49053 - DNA, 20 bp, Homo sapiens
tgtaaatgtgctgaagagta

SEQ ID NO: 49054 - DNA, 23 bp, Homo sapiens
gcttcagggaaggagaccagcca

SEQ ID NO: 49055 - DNA, 20 bp, Homo sapiens
ctgcctggactgctgtggtc

SEQ ID NO: 49056 - DNA, 22 bp, Homo sapiens
ctggggatgaaggtcaaggggc

SEQ ID NO: 49057 - DNA, 16 bp, Homo sapiens
atctccacaccccact

SEQ ID NO: 49058 - DNA, 24 bp, Homo sapiens
aatggagatggtcaggctgcggct

SEQ ID NO: 49059 - DNA, 17 bp, Homo sapiens
ctctaacctggatcaca

SEQ ID NO: 49060 - DNA, 22 bp, Homo sapiens
gacagtgggccgaggcctgaca

SEQ ID NO: 49061 - DNA, 21 bp, Homo sapiens
actaatctttctccatttccc

SEQ ID NO: 49062 - DNA, 16 bp, Homo sapiens
ggtggtggggatgaga

SEQ ID NO: 49063 - DNA, 19 bp, Homo sapiens
gacccagagcccctggggg

SEQ ID NO: 49064 - DNA, 23 bp, Homo sapiens
agacccccacatctcacctcctt

SEQ ID NO: 49065 - DNA, 21 bp, Homo sapiens
caactgctccattcatcagga

SEQ ID NO: 49066 - DNA, 16 bp, Homo sapiens
tggtcccctatctggt

SEQ ID NO: 49067 - DNA, 23 bp, Homo sapiens
caaacatccccagtctgtgaagc

SEQ ID NO: 49068 - DNA, 20 bp, Homo sapiens
atctttatcagccatgtgaa

SEQ ID NO: 49069 - DNA, 22 bp, Homo sapiens
actgaaagagggccatgtggaa

SEQ ID NO: 49070 - DNA, 23 bp, Homo sapiens
gaatcccgagcacacatttccca

SEQ ID NO: 49071 - DNA, 19 bp, Homo sapiens
gacccaatttccagtgggc

SEQ ID NO: 49072 - DNA, 24 bp, Homo sapiens
gccttcagtcctcagctcatgagt

SEQ ID NO: 49073 - DNA, 23 bp, Homo sapiens
ccacctcagcagacagggagcca

SEQ ID NO: 49074 - DNA, 16 bp, Homo sapiens
agaaatcaggctggag

SEQ ID NO: 49075 - DNA, 22 bp, Homo sapiens
cagaccctgtatctaacaaaaa

SEQ ID NO: 49076 - DNA, 17 bp, Homo sapiens
ggaaaacaaggagaaga

SEQ ID NO: 49077 - DNA, 19 bp, Homo sapiens
ctcggaagtggcagtgagg

SEQ ID NO: 49078 - DNA, 18 bp, Homo sapiens
tgattctgcttctatctc

SEQ ID NO: 49079 - DNA, 24 bp, Homo sapiens
ctggccacgaatgaccccagggca

SEQ ID NO: 49080 - DNA, 23 bp, Homo sapiens
ttcagcagtgctcgccctgcaga

SEQ ID NO: 49081 - DNA, 19 bp, Homo sapiens
gctgatgaagaccttcttc

SEQ ID NO: 49082 - DNA, 16 bp, Homo sapiens
gctggtgcagacacat

SEQ ID NO: 49083 - DNA, 24 bp, Homo sapiens
gtggatcagtttgtgtcggaatct

SEQ ID NO: 49084 - DNA, 23 bp, Homo sapiens
cagcggtgtgctggctgccctgg

SEQ ID NO: 49085 - DNA, 20 bp, Homo sapiens
tattttcccttcccatcagc

SEQ ID NO: 49086 - DNA, 21 bp, Homo sapiens
gagcaagccctcccttcagga

SEQ ID NO: 49087 - DNA, 17 bp, Homo sapiens
gtggatctggatgtggg

SEQ ID NO: 49088 - DNA, 22 bp, Homo sapiens
caggaggtctggcccttacccc

SEQ ID NO: 49089 - DNA, 16 bp, Homo sapiens
gtccggctcccaccat

SEQ ID NO: 49090 - DNA, 16 bp, Homo sapiens
catcaggagagctgat

SEQ ID NO: 49091 - DNA, 19 bp, Homo sapiens
tttgaggaaccaggcccca

SEQ ID NO: 49092 - DNA, 19 bp, Homo sapiens
tgtcctaacccctgtgcct

SEQ ID NO: 49093 - DNA, 22 bp, Homo sapiens
ccactggcccagaagcagggct

SEQ ID NO: 49094 - DNA, 24 bp, Homo sapiens
gagggagggcgggggagcaggtca

SEQ ID NO: 49095 - DNA, 19 bp, Homo sapiens
cccacagggaagagttggc

SEQ ID NO: 49096 - DNA, 19 bp, Homo sapiens
taacggtgggagggaggga

SEQ ID NO: 49097 - DNA, 21 bp, Homo sapiens
caagaaaactgtgtccatcaa

SEQ ID NO: 49098 - DNA, 16 bp, Homo sapiens
ccgtcatggagtactg

SEQ ID NO: 49099 - DNA, 22 bp, Homo sapiens
gtccggatcaatggatattcca

SEQ ID NO: 49100 - DNA, 22 bp, Homo sapiens
gtactgccctgctcccccgccc

SEQ ID NO: 49101 - DNA, 16 bp, Homo sapiens
cacctggtgctccctg

SEQ ID NO: 49102 - DNA, 21 bp, Homo sapiens
tcactcacgtctcactttgat

SEQ ID NO: 49103 - DNA, 16 bp, Homo sapiens
ccttttccggagagca

SEQ ID NO: 49104 - DNA, 24 bp, Homo sapiens
acctcctcatgggtacaggaggag

SEQ ID NO: 49105 - DNA, 16 bp, Homo sapiens
agggtgggttggttga

SEQ ID NO: 49106 - DNA, 18 bp, Homo sapiens
ctgatttctatgagccta

SEQ ID NO: 49107 - DNA, 16 bp, Homo sapiens
tctcccacctcatcaa

SEQ ID NO: 49108 - DNA, 19 bp, Homo sapiens
ctcagaaaagtgggtgacc

SEQ ID NO: 49109 - DNA, 17 bp, Homo sapiens
ctgcaccccgaaggcct

SEQ ID NO: 49110 - DNA, 23 bp, Homo sapiens
ggaggcaggaggtccgaggccct

SEQ ID NO: 49111 - DNA, 19 bp, Homo sapiens
caccatcaccgacctctcc

SEQ ID NO: 49112 - DNA, 24 bp, Homo sapiens
agcccgacgctgtctgcctgaccg

SEQ ID NO: 49113 - DNA, 23 bp, Homo sapiens
agccaccaggctggaggcagggg

SEQ ID NO: 49114 - DNA, 24 bp, Homo sapiens
ctccaggccaccacgcacactcag

SEQ ID NO: 49115 - DNA, 21 bp, Homo sapiens
cactgaagcaccaggtggaat

SEQ ID NO: 49116 - DNA, 24 bp, Homo sapiens
tccttcagcttcctgccacacagg

SEQ ID NO: 49117 - DNA, 22 bp, Homo sapiens
ctggtcatcaatgaacccagcc

SEQ ID NO: 49118 - DNA, 24 bp, Homo sapiens
actgccccgcccagggtgatctct

SEQ ID NO: 49119 - DNA, 16 bp, Homo sapiens
ccggcatctccacagg

SEQ ID NO: 49120 - DNA, 24 bp, Homo sapiens
cctggagcgccggggggtcagctg

SEQ ID NO: 49121 - DNA, 21 bp, Homo sapiens
tgaaatggcttcctcttggaa

SEQ ID NO: 49122 - DNA, 16 bp, Homo sapiens
atcaaacagaggcaga

SEQ ID NO: 49123 - DNA, 16 bp, Homo sapiens
agctctgggcttttca

SEQ ID NO: 49124 - DNA, 16 bp, Homo sapiens
cacgtccatggtcctg

SEQ ID NO: 49125 - DNA, 18 bp, Homo sapiens
agttgctgaaatgagtga

SEQ ID NO: 49126 - DNA, 22 bp, Homo sapiens
ggattttctgattgaaaatgat

SEQ ID NO: 49127 - DNA, 17 bp, Homo sapiens
caccctctgagctcctc

SEQ ID NO: 49128 - DNA, 24 bp, Homo sapiens
ggtctgctatgggggcgggtgctg

SEQ ID NO: 49129 - DNA, 17 bp, Homo sapiens
caagtggcccacaagag

SEQ ID NO: 49130 - DNA, 16 bp, Homo sapiens
cctgaaaagctgctgg

SEQ ID NO: 49131 - DNA, 22 bp, Homo sapiens
gcacatcatagagatagtcctt

SEQ ID NO: 49132 - DNA, 17 bp, Homo sapiens
gatgcattggggtcaga

SEQ ID NO: 49133 - DNA, 24 bp, Homo sapiens
cctggcccagccatggaccgaaaa

SEQ ID NO: 49134 - DNA, 23 bp, Homo sapiens
ccagcccaaccagagccatcagg

SEQ ID NO: 49135 - DNA, 16 bp, Homo sapiens
gcagccgggcacccga

SEQ ID NO: 49136 - DNA, 24 bp, Homo sapiens
caccccctacccaccgcgcccagg

SEQ ID NO: 49137 - DNA, 16 bp, Homo sapiens
cccgcccccagctccg

SEQ ID NO: 49138 - DNA, 23 bp, Homo sapiens
cttatgccggaattctcgggcca

SEQ ID NO: 49139 - DNA, 24 bp, Homo sapiens
gacatccgagcgagggccacttgc

SEQ ID NO: 49140 - DNA, 21 bp, Homo sapiens
aaagggaccagcgactcacac

SEQ ID NO: 49141 - DNA, 23 bp, Homo sapiens
gagtgccgcgggcgggcagaggg

SEQ ID NO: 49142 - DNA, 24 bp, Homo sapiens
gctagagaatggagggtttaggtc

SEQ ID NO: 49143 - DNA, 16 bp, Homo sapiens
ctgctccgggagccgc

SEQ ID NO: 49144 - DNA, 23 bp, Homo sapiens
gggtgggcgggaccgcggaagcc

SEQ ID NO: 49145 - DNA, 19 bp, Homo sapiens
gtaccctcgccccctcatt

SEQ ID NO: 49146 - DNA, 24 bp, Homo sapiens
gtagcattataccacccgttcaga

SEQ ID NO: 49147 - DNA, 18 bp, Homo sapiens
ttgcagcgtctagtttcc

SEQ ID NO: 49148 - DNA, 17 bp, Homo sapiens
aagccttccttaccttt

SEQ ID NO: 49149 - DNA, 16 bp, Homo sapiens
tccggcccatcccact

SEQ ID NO: 49150 - DNA, 18 bp, Homo sapiens
aggttcttggtaggaatt

SEQ ID NO: 49151 - DNA, 17 bp, Homo sapiens
aaatcctgttctttctg

SEQ ID NO: 49152 - DNA, 16 bp, Homo sapiens
aggaggcctgccttgc

SEQ ID NO: 49153 - DNA, 24 bp, Homo sapiens
ttcatatttctgtataaaggtaag

SEQ ID NO: 49154 - DNA, 18 bp, Homo sapiens
gtttatgtatcctgctgc

SEQ ID NO: 49155 - DNA, 19 bp, Homo sapiens
aagataaaggaggagcatc

SEQ ID NO: 49156 - DNA, 19 bp, Homo sapiens
ctgagactgatgtcctctt

SEQ ID NO: 49157 - DNA, 21 bp, Homo sapiens
aaggagtggaaatattctctg

SEQ ID NO: 49158 - DNA, 20 bp, Homo sapiens
atgctgtttgcaaactctgg

SEQ ID NO: 49159 - DNA, 21 bp, Homo sapiens
tatgatagtcaacctaggtta

SEQ ID NO: 49160 - DNA, 17 bp, Homo sapiens
actggatgtggtgatgc

SEQ ID NO: 49161 - DNA, 18 bp, Homo sapiens
agcagcaacttgaaactt

SEQ ID NO: 49162 - DNA, 19 bp, Homo sapiens
ctctcctaagcctcaaact

SEQ ID NO: 49163 - DNA, 17 bp, Homo sapiens
gccacgctaatactgag

SEQ ID NO: 49164 - DNA, 22 bp, Homo sapiens
cactcaggattattttttgtgc

SEQ ID NO: 49165 - DNA, 20 bp, Homo sapiens
ggagtacgtaggtctgcagc

SEQ ID NO: 49166 - DNA, 20 bp, Homo sapiens
ccaggaaaagcagaccattt

SEQ ID NO: 49167 - DNA, 16 bp, Homo sapiens
gtaaaagctctgagcc

SEQ ID NO: 49168 - DNA, 21 bp, Homo sapiens
gaaacctctgccagcgaaaga

SEQ ID NO: 49169 - DNA, 18 bp, Homo sapiens
agaaatggtccctcagca

SEQ ID NO: 49170 - DNA, 22 bp, Homo sapiens
tgccatgatggcctcctattac

SEQ ID NO: 49171 - DNA, 19 bp, Homo sapiens
cttaggcttcagaagaata

SEQ ID NO: 49172 - DNA, 18 bp, Homo sapiens
atggcatcttgctcttct

SEQ ID NO: 49173 - DNA, 16 bp, Homo sapiens
ggaaaggcaatcccat

SEQ ID NO: 49174 - DNA, 16 bp, Homo sapiens
tgggctgctggctgaa

SEQ ID NO: 49175 - DNA, 17 bp, Homo sapiens
cagggaagatactctcc

SEQ ID NO: 49176 - DNA, 16 bp, Homo sapiens
accaattctcactggt

SEQ ID NO: 49177 - DNA, 19 bp, Homo sapiens
ccagctgctctcattcact

SEQ ID NO: 49178 - DNA, 19 bp, Homo sapiens
tgagttgcttgcccaaatg

SEQ ID NO: 49179 - DNA, 18 bp, Homo sapiens
tcttttatgtgtcaggca

SEQ ID NO: 49180 - DNA, 18 bp, Homo sapiens
aaggggattataagtcaa

SEQ ID NO: 49181 - DNA, 17 bp, Homo sapiens
atgcacagcaagtgaaa

SEQ ID NO: 49182 - DNA, 23 bp, Homo sapiens
ttatcattaataaaacattaacc

SEQ ID NO: 49183 - DNA, 20 bp, Homo sapiens
gatgtccatggtctcctcca

SEQ ID NO: 49184 - DNA, 22 bp, Homo sapiens
ccggtgcatgtaaatacagtat

SEQ ID NO: 49185 - DNA, 18 bp, Homo sapiens
tgaacttggtccttgact

SEQ ID NO: 49186 - DNA, 18 bp, Homo sapiens
agatactgttctaggaaa

SEQ ID NO: 49187 - DNA, 18 bp, Homo sapiens
tgactgacatcatcactt

SEQ ID NO: 49188 - DNA, 24 bp, Homo sapiens
gagtttttttaagagcagtgtttc

SEQ ID NO: 49189 - DNA, 22 bp, Homo sapiens
aggtttttggtttttgttttta

SEQ ID NO: 49190 - DNA, 22 bp, Homo sapiens
gtttgcatcagaagagctcgtt

SEQ ID NO: 49191 - DNA, 17 bp, Homo sapiens
gggtcagattgcaaatg

SEQ ID NO: 49192 - DNA, 17 bp, Homo sapiens
agaactgagaccaaaca

SEQ ID NO: 49193 - DNA, 17 bp, Homo sapiens
agctttaagacgttggt

SEQ ID NO: 49194 - DNA, 18 bp, Homo sapiens
ttttaaaagcagtccatt

SEQ ID NO: 49195 - DNA, 18 bp, Homo sapiens
ccttgtgggagagaacct

SEQ ID NO: 49196 - DNA, 20 bp, Homo sapiens
gaattgactttttctgtcaa

SEQ ID NO: 49197 - DNA, 18 bp, Homo sapiens
gcaacaaattcaaattcc

SEQ ID NO: 49198 - DNA, 21 bp, Homo sapiens
accccatcttcagaaaaagga

SEQ ID NO: 49199 - DNA, 17 bp, Homo sapiens
ccagtgttgcatttaga

SEQ ID NO: 49200 - DNA, 18 bp, Homo sapiens
tgtggaaattgatgaggt

SEQ ID NO: 49201 - DNA, 21 bp, Homo sapiens
tcaagtgacccgcctgcctca

SEQ ID NO: 49202 - DNA, 17 bp, Homo sapiens
caaggacatccatagca

SEQ ID NO: 49203 - DNA, 16 bp, Homo sapiens
tggagctgtttgactt

SEQ ID NO: 49204 - DNA, 16 bp, Homo sapiens
ggggcacccagcacgg

SEQ ID NO: 49205 - DNA, 22 bp, Homo sapiens
actcaataggttttatctgagc

SEQ ID NO: 49206 - DNA, 20 bp, Homo sapiens
cacgccccactgcgcctcgc

SEQ ID NO: 49207 - DNA, 24 bp, Homo sapiens
tcttcccaaagcgactcctgaggg

SEQ ID NO: 49208 - DNA, 21 bp, Homo sapiens
gacacgtactctgggttattc

SEQ ID NO: 49209 - DNA, 18 bp, Homo sapiens
tttggagacatagacttg

SEQ ID NO: 49210 - DNA, 24 bp, Homo sapiens
gcttgttgataatctccaaggctc

SEQ ID NO: 49211 - DNA, 18 bp, Homo sapiens
aatgcagtactaaacgcg

SEQ ID NO: 49212 - DNA, 19 bp, Homo sapiens
acgtggtgtctaaatatct

SEQ ID NO: 49213 - DNA, 22 bp, Homo sapiens
acagacccgtttttttcaaatg

SEQ ID NO: 49214 - DNA, 17 bp, Homo sapiens
catatgtatcgcctcgc

SEQ ID NO: 49215 - DNA, 20 bp, Homo sapiens
tactaagttttggtctagcc

SEQ ID NO: 49216 - DNA, 17 bp, Homo sapiens
gtcactcaggtggaaca

SEQ ID NO: 49217 - DNA, 20 bp, Homo sapiens
ccttaaggaaaggggactcc

SEQ ID NO: 49218 - DNA, 20 bp, Homo sapiens
gctaacttagatccgtaact

SEQ ID NO: 49219 - DNA, 16 bp, Homo sapiens
tcgatcccagagccgg

SEQ ID NO: 49220 - DNA, 16 bp, Homo sapiens
atgttgaaaccccgtc

SEQ ID NO: 49221 - DNA, 21 bp, Homo sapiens
acttgaacaacttcagcctct

SEQ ID NO: 49222 - DNA, 19 bp, Homo sapiens
cttgaaaggggcagaggaa

SEQ ID NO: 49223 - DNA, 16 bp, Homo sapiens
ctcctgcaccactgag

SEQ ID NO: 49224 - DNA, 22 bp, Homo sapiens
gtacaggaatgatgagatcaga

SEQ ID NO: 49225 - DNA, 21 bp, Homo sapiens
aagttttgcctcacatacgag

SEQ ID NO: 49226 - DNA, 19 bp, Homo sapiens
acaagcacgttgtgtcctc

SEQ ID NO: 49227 - DNA, 20 bp, Homo sapiens
gacatatcagcatgccctgc

SEQ ID NO: 49228 - DNA, 21 bp, Homo sapiens
cgcacgaagtcgcatgactca

SEQ ID NO: 49229 - DNA, 24 bp, Homo sapiens
aaaaaaatgttgacaatgaagtcc

SEQ ID NO: 49230 - DNA, 24 bp, Homo sapiens
cctctcggaagagccgggtcatgg

SEQ ID NO: 49231 - DNA, 18 bp, Homo sapiens
gagctgtgatcatgctac

SEQ ID NO: 49232 - DNA, 24 bp, Homo sapiens
gaaacacccaacgccacccggccc

SEQ ID NO: 49233 - DNA, 20 bp, Homo sapiens
aagaaatgtcgcacgagccc

SEQ ID NO: 49234 - DNA, 23 bp, Homo sapiens
atgccgggtttcgggccttccct

SEQ ID NO: 49235 - DNA, 17 bp, Homo sapiens
aacgacgtggatttcca

SEQ ID NO: 49236 - DNA, 17 bp, Homo sapiens
tgctcacgacaaaaccc

SEQ ID NO: 49237 - DNA, 17 bp, Homo sapiens
tctctcaagtgtcaaga

SEQ ID NO: 49238 - DNA, 21 bp, Homo sapiens
gccagctgcacaaaggcgtct

SEQ ID NO: 49239 - DNA, 20 bp, Homo sapiens
aatttccttctgggtgtgcg

SEQ ID NO: 49240 - DNA, 19 bp, Homo sapiens
ctacgaatgggaaggaatg

SEQ ID NO: 49241 - DNA, 17 bp, Homo sapiens
gaaaacgtttgtgtact

SEQ ID NO: 49242 - DNA, 19 bp, Homo sapiens
cagggaggtctctataacc

SEQ ID NO: 49243 - DNA, 17 bp, Homo sapiens
ttccgtaccccaccagg

SEQ ID NO: 49244 - DNA, 24 bp, Homo sapiens
ctcagtggtcttcaactgagctca

SEQ ID NO: 49245 - DNA, 17 bp, Homo sapiens
agcctccagctgggcta

SEQ ID NO: 49246 - DNA, 17 bp, Homo sapiens
tcaaatgtgtttcccat

SEQ ID NO: 49247 - DNA, 16 bp, Homo sapiens
tgtaccactgttagtt

SEQ ID NO: 49248 - DNA, 17 bp, Homo sapiens
ccgggatgtcccactgc

SEQ ID NO: 49249 - DNA, 19 bp, Homo sapiens
aactttgtaacatctctgc

SEQ ID NO: 49250 - DNA, 21 bp, Homo sapiens
ttgcagtgcccatcctccgca

SEQ ID NO: 49251 - DNA, 18 bp, Homo sapiens
ggagatcagatccacctc

SEQ ID NO: 49252 - DNA, 16 bp, Homo sapiens
ctgaacactcctgggc

SEQ ID NO: 49253 - DNA, 16 bp, Homo sapiens
ggtttgacaagtcgtt

SEQ ID NO: 49254 - DNA, 17 bp, Homo sapiens
ttcaaaagcaacttcca

SEQ ID NO: 49255 - DNA, 18 bp, Homo sapiens
ggtgcaatgtctcctcat

SEQ ID NO: 49256 - DNA, 20 bp, Homo sapiens
ggtgggccacgatcggcgca

SEQ ID NO: 49257 - DNA, 17 bp, Homo sapiens
ctgttagagggacaggt

SEQ ID NO: 49258 - DNA, 22 bp, Homo sapiens
tttttgaagacaacaaacgtga

SEQ ID NO: 49259 - DNA, 22 bp, Homo sapiens
agactccatttcaaaaaataaa

SEQ ID NO: 49260 - DNA, 16 bp, Homo sapiens
acccggatacgtcaat

SEQ ID NO: 49261 - DNA, 23 bp, Homo sapiens
tagcattatagatacttaggggt

SEQ ID NO: 49262 - DNA, 16 bp, Homo sapiens
agaaagcagcgttctt

SEQ ID NO: 49263 - DNA, 20 bp, Homo sapiens
catgggcaaactcctgtctc

SEQ ID NO: 49264 - DNA, 16 bp, Homo sapiens
aggtgtcgtcaggcct

SEQ ID NO: 49265 - DNA, 19 bp, Homo sapiens
gtagagatttggcgtagct

SEQ ID NO: 49266 - DNA, 18 bp, Homo sapiens
atcgctgcaggtcgggct

SEQ ID NO: 49267 - DNA, 19 bp, Homo sapiens
cagtttcatctaacgtcac

SEQ ID NO: 49268 - DNA, 20 bp, Homo sapiens
gagttttccttcgagaaatt

SEQ ID NO: 49269 - DNA, 20 bp, Homo sapiens
tttttcccacgtccaaaata

SEQ ID NO: 49270 - DNA, 19 bp, Homo sapiens
caggtgagagtccttccag

SEQ ID NO: 49271 - DNA, 24 bp, Homo sapiens
ccatgtccccattgctcttgagac

SEQ ID NO: 49272 - DNA, 21 bp, Homo sapiens
tacctcggagcctcagcccgg

SEQ ID NO: 49273 - DNA, 24 bp, Homo sapiens
gtggggagtcccgtgccaggattc

SEQ ID NO: 49274 - DNA, 24 bp, Homo sapiens
atgggcggctgctgaagccccggg

SEQ ID NO: 49275 - DNA, 17 bp, Homo sapiens
ctccaccaccccccaaa

SEQ ID NO: 49276 - DNA, 23 bp, Homo sapiens
agacagcaagcacatcgtcgtgt

SEQ ID NO: 49277 - DNA, 23 bp, Homo sapiens
gtgagggctgccagcctggcctc

SEQ ID NO: 49278 - DNA, 21 bp, Homo sapiens
ctcttggttttgtgtctccaa

SEQ ID NO: 49279 - DNA, 23 bp, Homo sapiens
ctgcatctgctgctccatctccc

SEQ ID NO: 49280 - DNA, 22 bp, Homo sapiens
agcagggactcccatgcccttt

SEQ ID NO: 49281 - DNA, 22 bp, Homo sapiens
ttgaagtagcgtcctcgatggt

SEQ ID NO: 49282 - DNA, 16 bp, Homo sapiens
taaaacgtcttgagga

SEQ ID NO: 49283 - DNA, 19 bp, Homo sapiens
cctaagacagacaaaggaa

SEQ ID NO: 49284 - DNA, 16 bp, Homo sapiens
agtgggagcggatgtt

SEQ ID NO: 49285 - DNA, 22 bp, Homo sapiens
tctcaggaagggtcagcaaaaa

SEQ ID NO: 49286 - DNA, 25 bp, Homo sapiens
gttgttggtttgaaatatatttttg

SEQ ID NO: 49287 - DNA, 18 bp, Homo sapiens
atggaaagtgccgattct

SEQ ID NO: 49288 - DNA, 23 bp, Homo sapiens
gattacaggcgtgagccaccgca

SEQ ID NO: 49289 - DNA, 21 bp, Homo sapiens
tcctgggatccgggaagtatt

SEQ ID NO: 49290 - DNA, 18 bp, Homo sapiens
atggtctccatctactga

SEQ ID NO: 49291 - DNA, 19 bp, Homo sapiens
atcccaaaagacgaatctg

SEQ ID NO: 49292 - DNA, 18 bp, Homo sapiens
aactgctaacctcagatg

SEQ ID NO: 49293 - DNA, 19 bp, Homo sapiens
catgccatcctgctttaca

SEQ ID NO: 49294 - DNA, 24 bp, Homo sapiens
gtgagaccctgtgcccggccacaa

SEQ ID NO: 49295 - DNA, 17 bp, Homo sapiens
gctgtatatccttccaa

SEQ ID NO: 49296 - DNA, 18 bp, Homo sapiens
ctctgtaaagctgtttga

SEQ ID NO: 49297 - DNA, 25 bp, Homo sapiens
gctgtgattatttaaatttgcttat

SEQ ID NO: 49298 - DNA, 18 bp, Homo sapiens
tttcctcccggtccagtt

SEQ ID NO: 49299 - DNA, 24 bp, Homo sapiens
tatgtatgtatattgatgcatctc

SEQ ID NO: 49300 - DNA, 18 bp, Homo sapiens
ttgctgcctgaatgtgag

SEQ ID NO: 49301 - DNA, 24 bp, Homo sapiens
gaggacgagggccgctcatggtga

SEQ ID NO: 49302 - DNA, 21 bp, Homo sapiens
ggagcatgagccaatccccag

SEQ ID NO: 49303 - DNA, 20 bp, Homo sapiens
ttgtctggtgtttgcgccca

SEQ ID NO: 49304 - DNA, 24 bp, Homo sapiens
ctctgtggacagacccgccgcccc

SEQ ID NO: 49305 - DNA, 16 bp, Homo sapiens
ctctgggctgctgcca

SEQ ID NO: 49306 - DNA, 20 bp, Homo sapiens
accatggcataatagttgct

SEQ ID NO: 49307 - DNA, 23 bp, Homo sapiens
tccctgttctggaatggcccctg

SEQ ID NO: 49308 - DNA, 17 bp, Homo sapiens
caccagtcgctcaccta

SEQ ID NO: 49309 - DNA, 22 bp, Homo sapiens
ttacagtggtatttgaagttaa

SEQ ID NO: 49310 - DNA, 20 bp, Homo sapiens
tagggtgtgattttggctaa

SEQ ID NO: 49311 - DNA, 17 bp, Homo sapiens
cttcaaacggatgacag

SEQ ID NO: 49312 - DNA, 23 bp, Homo sapiens
caaaattagcgtcttcatacgga

SEQ ID NO: 49313 - DNA, 22 bp, Homo sapiens
gatttttttttcccccaataat

SEQ ID NO: 49314 - DNA, 16 bp, Homo sapiens
agcccaccaggatttt

SEQ ID NO: 49315 - DNA, 17 bp, Homo sapiens
cctaaggcacaagtgag

SEQ ID NO: 49316 - DNA, 22 bp, Homo sapiens
aaaatcttgagcaagtgctgtc

SEQ ID NO: 49317 - DNA, 17 bp, Homo sapiens
ggattacaagcatgagc

SEQ ID NO: 49318 - DNA, 18 bp, Homo sapiens
cctgccggtcccggctgt

SEQ ID NO: 49319 - DNA, 17 bp, Homo sapiens
accgctgaaggctactt

SEQ ID NO: 49320 - DNA, 20 bp, Homo sapiens
gtatggtcaagatcttttca

SEQ ID NO: 49321 - DNA, 16 bp, Homo sapiens
agccttaatccacaga

SEQ ID NO: 49322 - DNA, 16 bp, Homo sapiens
ggtgccttcagagtag

SEQ ID NO: 49323 - DNA, 17 bp, Homo sapiens
ctgttcacagtgtcttt

SEQ ID NO: 49324 - DNA, 22 bp, Homo sapiens
gtcattctcccatccaagtact

SEQ ID NO: 49325 - DNA, 19 bp, Homo sapiens
caacatgggttttcggcct

SEQ ID NO: 49326 - DNA, 16 bp, Homo sapiens
gtgtcatggtgactca

SEQ ID NO: 49327 - DNA, 21 bp, Homo sapiens
gatgttcactgagcacggcaa

SEQ ID NO: 49328 - DNA, 23 bp, Homo sapiens
ccaaccaagcatagagggagaaa

SEQ ID NO: 49329 - DNA, 19 bp, Homo sapiens
gtgggtggccctcatcgtc

SEQ ID NO: 49330 - DNA, 24 bp, Homo sapiens
ttcttcccaaagcccaaactgtcc

SEQ ID NO: 49331 - DNA, 16 bp, Homo sapiens
atgtccagccagacga

SEQ ID NO: 49332 - DNA, 22 bp, Homo sapiens
tcttggtggcacgactcatctt

SEQ ID NO: 49333 - DNA, 18 bp, Homo sapiens
gtggcaccgtgtggcctc

SEQ ID NO: 49334 - DNA, 24 bp, Homo sapiens
cactttcagggagtagcgcatggt

SEQ ID NO: 49335 - DNA, 16 bp, Homo sapiens
tacctggggcaggctg

SEQ ID NO: 49336 - DNA, 23 bp, Homo sapiens
aacagcacgccgctgaccacgtt

SEQ ID NO: 49337 - DNA, 21 bp, Homo sapiens
taacagcacccaggagacagg

SEQ ID NO: 49338 - DNA, 20 bp, Homo sapiens
tacgccaagatcgacccctc

SEQ ID NO: 49339 - DNA, 23 bp, Homo sapiens
atggaatccagaacagtgacaat

SEQ ID NO: 49340 - DNA, 16 bp, Homo sapiens
ccggcaagcccctcca

SEQ ID NO: 49341 - DNA, 21 bp, Homo sapiens
taacttcccagacaattggag

SEQ ID NO: 49342 - DNA, 16 bp, Homo sapiens
tgtgggaggacaccgc

SEQ ID NO: 49343 - DNA, 22 bp, Homo sapiens
ttgatttttgcaattattccta

SEQ ID NO: 49344 - DNA, 18 bp, Homo sapiens
actgcctgctgtcccagc

SEQ ID NO: 49345 - DNA, 17 bp, Homo sapiens
gataagccaactggagg

SEQ ID NO: 49346 - DNA, 20 bp, Homo sapiens
gggagagtcccagctagtgg

SEQ ID NO: 49347 - DNA, 18 bp, Homo sapiens
tccagtgagctaaagtct

SEQ ID NO: 49348 - DNA, 17 bp, Homo sapiens
tctctggacttcattcc

SEQ ID NO: 49349 - DNA, 23 bp, Homo sapiens
caggtaagtgatatgcagtcgcc

SEQ ID NO: 49350 - DNA, 16 bp, Homo sapiens
ggtcactccggacggg

SEQ ID NO: 49351 - DNA, 21 bp, Homo sapiens
cgttcttagatattaaaaggc

SEQ ID NO: 49352 - DNA, 17 bp, Homo sapiens
ctccttctccttccagg

SEQ ID NO: 49353 - DNA, 22 bp, Homo sapiens
ctgatgaacttctttttccagg

SEQ ID NO: 49354 - DNA, 17 bp, Homo sapiens
tggcacttctgtatgag

SEQ ID NO: 49355 - DNA, 20 bp, Homo sapiens
ctcagccgcaggtcaatccc

SEQ ID NO: 49356 - DNA, 21 bp, Homo sapiens
ggtctgttgatgaaaagtatt

SEQ ID NO: 49357 - DNA, 18 bp, Homo sapiens
cagtgccttaccgcctgc

SEQ ID NO: 49358 - DNA, 24 bp, Homo sapiens
gctctctccagtttacagatgagg

SEQ ID NO: 49359 - DNA, 21 bp, Homo sapiens
accgctgcctccgggacgagc

SEQ ID NO: 49360 - DNA, 17 bp, Homo sapiens
catggacctggcagaac

SEQ ID NO: 49361 - DNA, 16 bp, Homo sapiens
cacctgctgccctact

SEQ ID NO: 49362 - DNA, 24 bp, Homo sapiens
cccttagaagattccaggcagcag

SEQ ID NO: 49363 - DNA, 16 bp, Homo sapiens
ttcaactacgtcggcg

SEQ ID NO: 49364 - DNA, 24 bp, Homo sapiens
cggccgtacttgctggcgcagcgg

SEQ ID NO: 49365 - DNA, 24 bp, Homo sapiens
tacacatccgccgatgggcagagg

SEQ ID NO: 49366 - DNA, 21 bp, Homo sapiens
gccatgtagatgatgtagaag

SEQ ID NO: 49367 - DNA, 24 bp, Homo sapiens
tccgccgcacggatgggcgctgcc

SEQ ID NO: 49368 - DNA, 23 bp, Homo sapiens
ccaggctgcccatcaggtcgccg

SEQ ID NO: 49369 - DNA, 17 bp, Homo sapiens
ggtgggctactacatct

SEQ ID NO: 49370 - DNA, 24 bp, Homo sapiens
agcccgacaccagcagcttgctgt

SEQ ID NO: 49371 - DNA, 22 bp, Homo sapiens
ggtctgtacttggtgtaccacc

SEQ ID NO: 49372 - DNA, 24 bp, Homo sapiens
atgaccttgggcttcctgccccag

SEQ ID NO: 49373 - DNA, 24 bp, Homo sapiens
ctcctgtcctctccctgggcaaag

SEQ ID NO: 49374 - DNA, 18 bp, Homo sapiens
ttggccacccggaagatg

SEQ ID NO: 49375 - DNA, 24 bp, Homo sapiens
aggcaaggcgtgtgtcagaggcag

SEQ ID NO: 49376 - DNA, 17 bp, Homo sapiens
cggggtggacagctgca

SEQ ID NO: 49377 - DNA, 18 bp, Homo sapiens
cacaacagccctcaaggt

SEQ ID NO: 49378 - DNA, 20 bp, Homo sapiens
ctccctggctgctggcccaa

SEQ ID NO: 49379 - DNA, 17 bp, Homo sapiens
ctggggcgactgtgtct

SEQ ID NO: 49380 - DNA, 19 bp, Homo sapiens
ctagaaacagggggcagct

SEQ ID NO: 49381 - DNA, 21 bp, Homo sapiens
acgaaacctggtacctgaaga

SEQ ID NO: 49382 - DNA, 19 bp, Homo sapiens
gcttagcatgtgtctgcca

SEQ ID NO: 49383 - DNA, 24 bp, Homo sapiens
gagggccgggggtggtcagcggct

SEQ ID NO: 49384 - DNA, 17 bp, Homo sapiens
gtaaagataaggcagcc

SEQ ID NO: 49385 - DNA, 24 bp, Homo sapiens
agcaccccctgctgcatctgcgtg

SEQ ID NO: 49386 - DNA, 17 bp, Homo sapiens
agatgtcaatggtcttc

SEQ ID NO: 49387 - DNA, 16 bp, Homo sapiens
cagggaaggaacagcc

SEQ ID NO: 49388 - DNA, 24 bp, Homo sapiens
cccaaggatggcttccttcaccaa

SEQ ID NO: 49389 - DNA, 21 bp, Homo sapiens
cacagccatgtgaccaatgcc

SEQ ID NO: 49390 - DNA, 22 bp, Homo sapiens
cagctgactctcttttacaagc

SEQ ID NO: 49391 - DNA, 16 bp, Homo sapiens
cgtcgcctggaccctc

SEQ ID NO: 49392 - DNA, 19 bp, Homo sapiens
ttcccccagagcctgccgg

SEQ ID NO: 49393 - DNA, 16 bp, Homo sapiens
gagtttaaccctcgga

SEQ ID NO: 49394 - DNA, 17 bp, Homo sapiens
ggacgttgaccaggacc

SEQ ID NO: 49395 - DNA, 24 bp, Homo sapiens
atcttttatttatatttttaagca

SEQ ID NO: 49396 - DNA, 21 bp, Homo sapiens
tgcgaaggacaggttgatgag

SEQ ID NO: 49397 - DNA, 24 bp, Homo sapiens
cagtgctgggctctcgctaagtaa

SEQ ID NO: 49398 - DNA, 23 bp, Homo sapiens
cagcttgaagtcaaaccacttcc

SEQ ID NO: 49399 - DNA, 17 bp, Homo sapiens
atggccagcttctgcct

SEQ ID NO: 49400 - DNA, 24 bp, Homo sapiens
gttgtaaaagaaattgcctgtgaa

SEQ ID NO: 49401 - DNA, 16 bp, Homo sapiens
gtcaagggctacttct

SEQ ID NO: 49402 - DNA, 16 bp, Homo sapiens
ggattctcagtgctca

SEQ ID NO: 49403 - DNA, 18 bp, Homo sapiens
aactggatcccactgctg

SEQ ID NO: 49404 - DNA, 19 bp, Homo sapiens
ggtgaagtttgcactttct

SEQ ID NO: 49405 - DNA, 16 bp, Homo sapiens
ctgctctggtttgcaa

SEQ ID NO: 49406 - DNA, 16 bp, Homo sapiens
cgctggtggggaagaa

SEQ ID NO: 49407 - DNA, 20 bp, Homo sapiens
atctgcaggggttgtgaaca

SEQ ID NO: 49408 - DNA, 23 bp, Homo sapiens
tagccaaggatgttggcgcacca

SEQ ID NO: 49409 - DNA, 19 bp, Homo sapiens
catgcttcagcccagccaa

SEQ ID NO: 49410 - DNA, 22 bp, Homo sapiens
caggacaggagatgagcgtttg

SEQ ID NO: 49411 - DNA, 18 bp, Homo sapiens
cagatgagggtccgcagc

SEQ ID NO: 49412 - DNA, 18 bp, Homo sapiens
ttgatctgatacttgttc

SEQ ID NO: 49413 - DNA, 24 bp, Homo sapiens
tcaatggttttgaggcctggtgct

SEQ ID NO: 49414 - DNA, 18 bp, Homo sapiens
tctgccataagtttctac

SEQ ID NO: 49415 - DNA, 17 bp, Homo sapiens
gtcttagggacaaagca

SEQ ID NO: 49416 - DNA, 21 bp, Homo sapiens
gcggggggtgatcaggctgct

SEQ ID NO: 49417 - DNA, 24 bp, Homo sapiens
atgagaacgggagcctggggaggg

SEQ ID NO: 49418 - DNA, 20 bp, Homo sapiens
gactatgattgtgattctca

SEQ ID NO: 49419 - DNA, 18 bp, Homo sapiens
ctcctacgtagccgggta

SEQ ID NO: 49420 - DNA, 16 bp, Homo sapiens
caaaacccacagccca

SEQ ID NO: 49421 - DNA, 22 bp, Homo sapiens
tgaggatgaatctgaacatgtc

SEQ ID NO: 49422 - DNA, 23 bp, Homo sapiens
cctataacgaggaaagccgccca

SEQ ID NO: 49423 - DNA, 23 bp, Homo sapiens
cagatgtcaacctgagccaggat

SEQ ID NO: 49424 - DNA, 20 bp, Homo sapiens
cctgtggtggacatcgtcac

SEQ ID NO: 49425 - DNA, 24 bp, Homo sapiens
agcaggagggcacgctccccacct

SEQ ID NO: 49426 - DNA, 23 bp, Homo sapiens
cttcatcgtctactacttcatca

SEQ ID NO: 49427 - DNA, 21 bp, Homo sapiens
tgacccacaaggtatagagct

SEQ ID NO: 49428 - DNA, 16 bp, Homo sapiens
ggaggtggactggttt

SEQ ID NO: 49429 - DNA, 24 bp, Homo sapiens
ccagatgtccgagagccgagcatg

SEQ ID NO: 49430 - DNA, 24 bp, Homo sapiens
agagcctcttagggtcctggtggg

SEQ ID NO: 49431 - DNA, 18 bp, Homo sapiens
tggtcacaagccatgatg

SEQ ID NO: 49432 - DNA, 16 bp, Homo sapiens
cttctgtcatggggta

SEQ ID NO: 49433 - DNA, 24 bp, Homo sapiens
agatgacgctcgccagtgaaaacc

SEQ ID NO: 49434 - DNA, 23 bp, Homo sapiens
taattccttactttataaagtgg

SEQ ID NO: 49435 - DNA, 16 bp, Homo sapiens
accaatgacagaaccg

SEQ ID NO: 49436 - DNA, 24 bp, Homo sapiens
aaaaaaaatcttttttaaaaaggt

SEQ ID NO: 49437 - DNA, 16 bp, Homo sapiens
gcccaatggctgcaaa

SEQ ID NO: 49438 - DNA, 18 bp, Homo sapiens
ctctgagaccacacttta

SEQ ID NO: 49439 - DNA, 19 bp, Homo sapiens
aacagggaaaggtggtgtc

SEQ ID NO: 49440 - DNA, 16 bp, Homo sapiens
gcccttgagatgcggt

SEQ ID NO: 49441 - DNA, 16 bp, Homo sapiens
accgggaagatgtgca

SEQ ID NO: 49442 - DNA, 16 bp, Homo sapiens
gttgggttgcgatttt

SEQ ID NO: 49443 - DNA, 20 bp, Homo sapiens
gagggttcccttgagggagg

SEQ ID NO: 49444 - DNA, 23 bp, Homo sapiens
ggcctggggaggacaggccaccc

SEQ ID NO: 49445 - DNA, 21 bp, Homo sapiens
gctcaaggcttccagggctgg

SEQ ID NO: 49446 - DNA, 21 bp, Homo sapiens
agagaacaccctggggagggt

SEQ ID NO: 49447 - DNA, 24 bp, Homo sapiens
aactgtgcctggcccagtgggcag

SEQ ID NO: 49448 - DNA, 21 bp, Homo sapiens
acaggtttcagactaggcctc

SEQ ID NO: 49449 - DNA, 16 bp, Homo sapiens
gcactgctccagaagg

SEQ ID NO: 49450 - DNA, 17 bp, Homo sapiens
cacgtcgaactcctgcc

SEQ ID NO: 49451 - DNA, 24 bp, Homo sapiens
ccccttgtgtggttggctcagagc

SEQ ID NO: 49452 - DNA, 16 bp, Homo sapiens
atcatccaccacctgg

SEQ ID NO: 49453 - DNA, 19 bp, Homo sapiens
ctccaatccccctccctgc

SEQ ID NO: 49454 - DNA, 22 bp, Homo sapiens
gtcagcccaggtctgaccccaa

SEQ ID NO: 49455 - DNA, 16 bp, Homo sapiens
tggatggacctgagat

SEQ ID NO: 49456 - DNA, 16 bp, Homo sapiens
tgggggcatgggcatg

SEQ ID NO: 49457 - DNA, 16 bp, Homo sapiens
gactctgggcaggtcc

SEQ ID NO: 49458 - DNA, 18 bp, Homo sapiens
ctgttagaactgacagtg

SEQ ID NO: 49459 - DNA, 23 bp, Homo sapiens
tccacgccgtggaccgacgtggg

SEQ ID NO: 49460 - DNA, 16 bp, Homo sapiens
cccgcgctcccgcccg

SEQ ID NO: 49461 - DNA, 24 bp, Homo sapiens
gcggataagcaggttgcgcaagat

SEQ ID NO: 49462 - DNA, 20 bp, Homo sapiens
aggagagcacgctgacgttc

SEQ ID NO: 49463 - DNA, 24 bp, Homo sapiens
gagggggcctggacgggcaccggg

SEQ ID NO: 49464 - DNA, 24 bp, Homo sapiens
aacgcaacgcacatcaagcctatg

SEQ ID NO: 49465 - DNA, 24 bp, Homo sapiens
cccggcagggcggggccggaggca

SEQ ID NO: 49466 - DNA, 22 bp, Homo sapiens
ctgggggacctcaacgaggcgg

SEQ ID NO: 49467 - DNA, 21 bp, Homo sapiens
cagcaggggccccggggtcca

SEQ ID NO: 49468 - DNA, 23 bp, Homo sapiens
cagctcctaaggaggcccgattc

SEQ ID NO: 49469 - DNA, 22 bp, Homo sapiens
agtagatggagagcagctggta

SEQ ID NO: 49470 - DNA, 19 bp, Homo sapiens
ctcttccctccagggtgct

SEQ ID NO: 49471 - DNA, 16 bp, Homo sapiens
tgtgggggggcatctc

SEQ ID NO: 49472 - DNA, 23 bp, Homo sapiens
gtctcccacatggaatcagcgag

SEQ ID NO: 49473 - DNA, 18 bp, Homo sapiens
gatgcagcactggtctcg

SEQ ID NO: 49474 - DNA, 24 bp, Homo sapiens
ctggtggctgtgaacccctaccag

SEQ ID NO: 49475 - DNA, 22 bp, Homo sapiens
acagttggagctctaggtccta

SEQ ID NO: 49476 - DNA, 20 bp, Homo sapiens
ataccaacaagaagattggg

SEQ ID NO: 49477 - DNA, 16 bp, Homo sapiens
gcttgatggcatttcc

SEQ ID NO: 49478 - DNA, 18 bp, Homo sapiens
tcaacatgaaacgcaaca

SEQ ID NO: 49479 - DNA, 20 bp, Homo sapiens
aggggaggtgattttctaca

SEQ ID NO: 49480 - DNA, 23 bp, Homo sapiens
ctgggcccttgagccctgcccca

SEQ ID NO: 49481 - DNA, 16 bp, Homo sapiens
ctgatggctgccagga

SEQ ID NO: 49482 - DNA, 21 bp, Homo sapiens
gagctggtggatggtgcagcc

SEQ ID NO: 49483 - DNA, 16 bp, Homo sapiens
taccttccagaatggg

SEQ ID NO: 49484 - DNA, 24 bp, Homo sapiens
ttgtgacaggtcctgccactccct

SEQ ID NO: 49485 - DNA, 23 bp, Homo sapiens
gggtgtcactggcaaagcccgct

SEQ ID NO: 49486 - DNA, 18 bp, Homo sapiens
cacaaagctgatcctgca

SEQ ID NO: 49487 - DNA, 22 bp, Homo sapiens
aaacggcttgagttgtcattgc

SEQ ID NO: 49488 - DNA, 16 bp, Homo sapiens
cagcaggtcttggagg

SEQ ID NO: 49489 - DNA, 19 bp, Homo sapiens
aatcttcgcgccctcgatg

SEQ ID NO: 49490 - DNA, 22 bp, Homo sapiens
gtgggaccaggcagtggggcgg

SEQ ID NO: 49491 - DNA, 16 bp, Homo sapiens
ctggggctcaggccca

SEQ ID NO: 49492 - DNA, 24 bp, Homo sapiens
agcatttgggaatgccaagaccat

SEQ ID NO: 49493 - DNA, 20 bp, Homo sapiens
gcaatacgggcaggtgggcc

SEQ ID NO: 49494 - DNA, 24 bp, Homo sapiens
gacatccacttcaacaagcggggc

SEQ ID NO: 49495 - DNA, 20 bp, Homo sapiens
ggatttccagcacagaggga

SEQ ID NO: 49496 - DNA, 23 bp, Homo sapiens
gaaaagtcacgtgtctgtcgcca

SEQ ID NO: 49497 - DNA, 20 bp, Homo sapiens
cccgtattgctgcctgcttc

SEQ ID NO: 49498 - DNA, 17 bp, Homo sapiens
cagcatgcagtagaaca

SEQ ID NO: 49499 - DNA, 17 bp, Homo sapiens
cttctccacaagccatt

SEQ ID NO: 49500 - DNA, 16 bp, Homo sapiens
gttgtagtcagaggcc

SEQ ID NO: 49501 - DNA, 16 bp, Homo sapiens
tctggccctcctcccc

SEQ ID NO: 49502 - DNA, 17 bp, Homo sapiens
tacaatcctagggtggg

SEQ ID NO: 49503 - DNA, 22 bp, Homo sapiens
tggatgaaaggaactaccacgt

SEQ ID NO: 49504 - DNA, 21 bp, Homo sapiens
agaagctggcacctgagccct

SEQ ID NO: 49505 - DNA, 23 bp, Homo sapiens
gaagaagaagctgggcttgggcc

SEQ ID NO: 49506 - DNA, 22 bp, Homo sapiens
ttggtggcagcaatggccagga

SEQ ID NO: 49507 - DNA, 24 bp, Homo sapiens
ttgtggtgctcaccgggtgaggtc

SEQ ID NO: 49508 - DNA, 16 bp, Homo sapiens
atggcggagcggatgt

SEQ ID NO: 49509 - DNA, 20 bp, Homo sapiens
gcagaaagggccttttgggc

SEQ ID NO: 49510 - DNA, 23 bp, Homo sapiens
caggatggcagccaggagcttcg

SEQ ID NO: 49511 - DNA, 24 bp, Homo sapiens
acgtcctcttgcaccccactctcc

SEQ ID NO: 49512 - DNA, 24 bp, Homo sapiens
aggggtggggcagggcgagtgtgg

SEQ ID NO: 49513 - DNA, 24 bp, Homo sapiens
cgggtggacagccaggagtacgcc

SEQ ID NO: 49514 - DNA, 16 bp, Homo sapiens
agaaactgagctgcca

SEQ ID NO: 49515 - DNA, 22 bp, Homo sapiens
acaccgagaactgggagatctc

SEQ ID NO: 49516 - DNA, 23 bp, Homo sapiens
ctgttcaaatctacccacaggcg

SEQ ID NO: 49517 - DNA, 18 bp, Homo sapiens
agaacctcacaggcatcc

SEQ ID NO: 49518 - DNA, 24 bp, Homo sapiens
ctgatgccctccctggacagggca

SEQ ID NO: 49519 - DNA, 23 bp, Homo sapiens
ggaggggagagaggccaggcact

SEQ ID NO: 49520 - DNA, 20 bp, Homo sapiens
ctgtccccttgcccctgttg

SEQ ID NO: 49521 - DNA, 23 bp, Homo sapiens
gtggttcctacatcccagccccc

SEQ ID NO: 49522 - DNA, 20 bp, Homo sapiens
gcacatttgaaaacctggat

SEQ ID NO: 49523 - DNA, 19 bp, Homo sapiens
ggttgcttctccatattga

SEQ ID NO: 49524 - DNA, 24 bp, Homo sapiens
agctgcatccctgcttgaggtcag

SEQ ID NO: 49525 - DNA, 22 bp, Homo sapiens
ggtgcggctagtcaggcagctc

SEQ ID NO: 49526 - DNA, 23 bp, Homo sapiens
gtgcttagtggaggcagtggtct

SEQ ID NO: 49527 - DNA, 16 bp, Homo sapiens
cagtgcctgttccctg

SEQ ID NO: 49528 - DNA, 22 bp, Homo sapiens
gtgtgggtggagggaggggcag

SEQ ID NO: 49529 - DNA, 17 bp, Homo sapiens
ggggtagggcgagcaag

SEQ ID NO: 49530 - DNA, 23 bp, Homo sapiens
aggtgaaccccccagacctgatg

SEQ ID NO: 49531 - DNA, 21 bp, Homo sapiens
ccagatgtctacccacctccc

SEQ ID NO: 49532 - DNA, 24 bp, Homo sapiens
ggagacggtgtccaccccactgag

SEQ ID NO: 49533 - DNA, 22 bp, Homo sapiens
atgggcacctgggactcaagga

SEQ ID NO: 49534 - DNA, 24 bp, Homo sapiens
gcaggaaaaggggtctccaggcag

SEQ ID NO: 49535 - DNA, 18 bp, Homo sapiens
cgttgatcttgtccacaa

SEQ ID NO: 49536 - DNA, 16 bp, Homo sapiens
cactttgttccacaca

SEQ ID NO: 49537 - DNA, 22 bp, Homo sapiens
atgtccaggaggccgatggacc

SEQ ID NO: 49538 - DNA, 16 bp, Homo sapiens
ccgggggagggtgtgg

SEQ ID NO: 49539 - DNA, 22 bp, Homo sapiens
aattcccatgagcagagcccca

SEQ ID NO: 49540 - DNA, 17 bp, Homo sapiens
gcggctgttcgtgtgga

SEQ ID NO: 49541 - DNA, 16 bp, Homo sapiens
cttcgcaagggagaga

SEQ ID NO: 49542 - DNA, 24 bp, Homo sapiens
tcccaggatgtgaagaactctcgc

SEQ ID NO: 49543 - DNA, 23 bp, Homo sapiens
gaaagggagagggtccaccgtga

SEQ ID NO: 49544 - DNA, 24 bp, Homo sapiens
tgagaactttgctgtgaacaggta

SEQ ID NO: 49545 - DNA, 16 bp, Homo sapiens
gagggaggtggacttg

SEQ ID NO: 49546 - DNA, 17 bp, Homo sapiens
acaaagaactgctgcag

SEQ ID NO: 49547 - DNA, 22 bp, Homo sapiens
tgatggggatagcttgctaatg

SEQ ID NO: 49548 - DNA, 19 bp, Homo sapiens
cagccagtcaatgctctcc

SEQ ID NO: 49549 - DNA, 21 bp, Homo sapiens
catggtggggcctgaacaaca

SEQ ID NO: 49550 - DNA, 23 bp, Homo sapiens
gagatgatgttcatgggcttgtt

SEQ ID NO: 49551 - DNA, 16 bp, Homo sapiens
atcaacttcgccaatg

SEQ ID NO: 49552 - DNA, 21 bp, Homo sapiens
gaggcggcagcaggaccggcc

SEQ ID NO: 49553 - DNA, 24 bp, Homo sapiens
gagcaggaggaatatgacctggag

SEQ ID NO: 49554 - DNA, 17 bp, Homo sapiens
aggaaagccggggctca

SEQ ID NO: 49555 - DNA, 17 bp, Homo sapiens
ggatgccctggacatga

SEQ ID NO: 49556 - DNA, 19 bp, Homo sapiens
ctatacttgaattggcccc

SEQ ID NO: 49557 - DNA, 20 bp, Homo sapiens
ctgggagttcagcttgtgta

SEQ ID NO: 49558 - DNA, 19 bp, Homo sapiens
tagaaataaaaggagggga

SEQ ID NO: 49559 - DNA, 20 bp, Homo sapiens
ttgatgccaaactgggtctc

SEQ ID NO: 49560 - DNA, 20 bp, Homo sapiens
gaggggagtggggcccatgg

SEQ ID NO: 49561 - DNA, 21 bp, Homo sapiens
gtgacagacagccggcagccc

SEQ ID NO: 49562 - DNA, 17 bp, Homo sapiens
caccaccatgttacaca

SEQ ID NO: 49563 - DNA, 20 bp, Homo sapiens
aattccggatatcttattcc

SEQ ID NO: 49564 - DNA, 17 bp, Homo sapiens
atcccccccaagaacaa

SEQ ID NO: 49565 - DNA, 22 bp, Homo sapiens
ggccattttagtcaagttcata

SEQ ID NO: 49566 - DNA, 22 bp, Homo sapiens
tctactatgagacccaaggtac

SEQ ID NO: 49567 - DNA, 24 bp, Homo sapiens
ttgggcaagtctctgtcccctcca

SEQ ID NO: 49568 - DNA, 21 bp, Homo sapiens
gaggagtggaccagctggata

SEQ ID NO: 49569 - DNA, 18 bp, Homo sapiens
actaggtggattttgagg

SEQ ID NO: 49570 - DNA, 16 bp, Homo sapiens
cggcttaccatggcga

SEQ ID NO: 49571 - DNA, 24 bp, Homo sapiens
cagagctggtgagaggtgactgct

SEQ ID NO: 49572 - DNA, 16 bp, Homo sapiens
aagggcagggcttaga

SEQ ID NO: 49573 - DNA, 16 bp, Homo sapiens
tgcatggggacattat

SEQ ID NO: 49574 - DNA, 16 bp, Homo sapiens
gccacagcaaagctcc

SEQ ID NO: 49575 - DNA, 23 bp, Homo sapiens
agatcttccaggccgatgtcgcc

SEQ ID NO: 49576 - DNA, 24 bp, Homo sapiens
caggctccagctcagaaggtgggg

SEQ ID NO: 49577 - DNA, 16 bp, Homo sapiens
cttgaactggctgcta

SEQ ID NO: 49578 - DNA, 23 bp, Homo sapiens
tccctcaaaccctgaccccgctg

SEQ ID NO: 49579 - DNA, 16 bp, Homo sapiens
tgcatcgcacaaagaa

SEQ ID NO: 49580 - DNA, 22 bp, Homo sapiens
actggatggggcaggcacagcc

SEQ ID NO: 49581 - DNA, 24 bp, Homo sapiens
tagccgccacccgccaaccccagg

SEQ ID NO: 49582 - DNA, 19 bp, Homo sapiens
cgctcgcccacacttagca

SEQ ID NO: 49583 - DNA, 20 bp, Homo sapiens
cacatccttcactcccaccc

SEQ ID NO: 49584 - DNA, 24 bp, Homo sapiens
cgctgggtgcctgccagcccttct

SEQ ID NO: 49585 - DNA, 22 bp, Homo sapiens
aatagggggccttgttttgtaa

SEQ ID NO: 49586 - DNA, 17 bp, Homo sapiens
ctgagtaccgcagctgg

SEQ ID NO: 49587 - DNA, 22 bp, Homo sapiens
tcctcccatgccgtgtggactt

SEQ ID NO: 49588 - DNA, 16 bp, Homo sapiens
agctgtagcggatggg

SEQ ID NO: 49589 - DNA, 24 bp, Homo sapiens
cagggctgcctcccagcaggagcc

SEQ ID NO: 49590 - DNA, 24 bp, Homo sapiens
gccctgtacctgcttgtaggccgg

SEQ ID NO: 49591 - DNA, 23 bp, Homo sapiens
cagctgttcgaccggcacctgtg

SEQ ID NO: 49592 - DNA, 18 bp, Homo sapiens
tgggacccttgcccagcc

SEQ ID NO: 49593 - DNA, 16 bp, Homo sapiens
gagctggctaccccat

SEQ ID NO: 49594 - DNA, 17 bp, Homo sapiens
cacctgagaggtcaagc

SEQ ID NO: 49595 - DNA, 20 bp, Homo sapiens
gtgctgctgccaggtgtgaa

SEQ ID NO: 49596 - DNA, 21 bp, Homo sapiens
gctggcaagtcccgcggaggt

SEQ ID NO: 49597 - DNA, 23 bp, Homo sapiens
caggacccagctgaggtcacact

SEQ ID NO: 49598 - DNA, 23 bp, Homo sapiens
agaaagatcttggttttgcctat

SEQ ID NO: 49599 - DNA, 22 bp, Homo sapiens
ctcagcctcggggacactccgg

SEQ ID NO: 49600 - DNA, 19 bp, Homo sapiens
gggaatttacagccccccc

SEQ ID NO: 49601 - DNA, 21 bp, Homo sapiens
catcctcactccagggcgacc

SEQ ID NO: 49602 - DNA, 16 bp, Homo sapiens
gcagaaaggatctcaa

SEQ ID NO: 49603 - DNA, 19 bp, Homo sapiens
ccacgatgactggcagata

SEQ ID NO: 49604 - DNA, 16 bp, Homo sapiens
ccttccccaccagaga

SEQ ID NO: 49605 - DNA, 22 bp, Homo sapiens
gtgggaggctgccccaggggcc

SEQ ID NO: 49606 - DNA, 16 bp, Homo sapiens
aggatgactctgtcgg

SEQ ID NO: 49607 - DNA, 20 bp, Homo sapiens
cctgtgctcccagtgaagga

SEQ ID NO: 49608 - DNA, 24 bp, Homo sapiens
tgaggaggggaggagctggtggga

SEQ ID NO: 49609 - DNA, 20 bp, Homo sapiens
gaccttgtggggcgctgctc

SEQ ID NO: 49610 - DNA, 18 bp, Homo sapiens
ttcatgcgggcagagcag

SEQ ID NO: 49611 - DNA, 19 bp, Homo sapiens
aagtggagcgggacaaagc

SEQ ID NO: 49612 - DNA, 16 bp, Homo sapiens
tgcatgccatgcatgt

SEQ ID NO: 49613 - DNA, 19 bp, Homo sapiens
ggattcaaagacaggtgcg

SEQ ID NO: 49614 - DNA, 19 bp, Homo sapiens
gaggaagctgaggcacaga

SEQ ID NO: 49615 - DNA, 19 bp, Homo sapiens
ttgtgaccccgccagtgcc

SEQ ID NO: 49616 - DNA, 22 bp, Homo sapiens
gtcacagagctgggactcagcg

SEQ ID NO: 49617 - DNA, 16 bp, Homo sapiens
tgtttgggcaagagca

SEQ ID NO: 49618 - DNA, 24 bp, Homo sapiens
ctctggacactgctcacccgcgcc

SEQ ID NO: 49619 - DNA, 17 bp, Homo sapiens
aggctgtgctgcctggg

SEQ ID NO: 49620 - DNA, 24 bp, Homo sapiens
aagaacgctgccacactgatccag

SEQ ID NO: 49621 - DNA, 20 bp, Homo sapiens
ccagacttcggtctggagga

SEQ ID NO: 49622 - DNA, 24 bp, Homo sapiens
gaactttctaacgatgggggggca

SEQ ID NO: 49623 - DNA, 17 bp, Homo sapiens
gtgcagcttccgggagc

SEQ ID NO: 49624 - DNA, 22 bp, Homo sapiens
gtgcctgtctgagagtggaggc

SEQ ID NO: 49625 - DNA, 24 bp, Homo sapiens
gcgcaccagataggcgcggcagcg

SEQ ID NO: 49626 - DNA, 23 bp, Homo sapiens
ctggaatgggacagcaggctctg

SEQ ID NO: 49627 - DNA, 22 bp, Homo sapiens
cccgggcataggcctgcacggt

SEQ ID NO: 49628 - DNA, 23 bp, Homo sapiens
ctgcggctgcaggccctgcaccg

SEQ ID NO: 49629 - DNA, 22 bp, Homo sapiens
tatggacttgctccctcacctc

SEQ ID NO: 49630 - DNA, 16 bp, Homo sapiens
atcatccagttccagg

SEQ ID NO: 49631 - DNA, 22 bp, Homo sapiens
ctggccaacacctgagggtgat

SEQ ID NO: 49632 - DNA, 21 bp, Homo sapiens
caccgcctctgggctgtgctc

SEQ ID NO: 49633 - DNA, 19 bp, Homo sapiens
tatgtgcactcctcagagc

SEQ ID NO: 49634 - DNA, 18 bp, Homo sapiens
caccaacgcctcagggct

SEQ ID NO: 49635 - DNA, 18 bp, Homo sapiens
gaggcgccacagatactg

SEQ ID NO: 49636 - DNA, 22 bp, Homo sapiens
gaatttcttgattacctcactt

SEQ ID NO: 49637 - DNA, 16 bp, Homo sapiens
cttggcgctcatctcc

SEQ ID NO: 49638 - DNA, 24 bp, Homo sapiens
ttgggtgggtggagctggtgggaa

SEQ ID NO: 49639 - DNA, 16 bp, Homo sapiens
ctaaggtgcctggagg

SEQ ID NO: 49640 - DNA, 24 bp, Homo sapiens
tgccctctggatgcccccttccct

SEQ ID NO: 49641 - DNA, 23 bp, Homo sapiens
gaaggctgcagcaccgggtgaca

SEQ ID NO: 49642 - DNA, 17 bp, Homo sapiens
gaagagaagcttcggaa

SEQ ID NO: 49643 - DNA, 16 bp, Homo sapiens
ctcaggcaatgctggc

SEQ ID NO: 49644 - DNA, 24 bp, Homo sapiens
gttgagaggcctctgagtggtcca

SEQ ID NO: 49645 - DNA, 21 bp, Homo sapiens
ctcccgctcagcgtcctcacg

SEQ ID NO: 49646 - DNA, 24 bp, Homo sapiens
gtcaggaggtggggactgaggccc

SEQ ID NO: 49647 - DNA, 23 bp, Homo sapiens
atggcgggccctttccatctgct

SEQ ID NO: 49648 - DNA, 18 bp, Homo sapiens
tgaggctgtggcaccggg

SEQ ID NO: 49649 - DNA, 19 bp, Homo sapiens
tgaagtccccaggaagcca

SEQ ID NO: 49650 - DNA, 23 bp, Homo sapiens
caggagcgcctggcccagctggc

SEQ ID NO: 49651 - DNA, 20 bp, Homo sapiens
tagcctggtacctcaaagcc

SEQ ID NO: 49652 - DNA, 23 bp, Homo sapiens
gccgctcggcggaagaaggagct

SEQ ID NO: 49653 - DNA, 17 bp, Homo sapiens
agaaggagggaggatca

SEQ ID NO: 49654 - DNA, 18 bp, Homo sapiens
cagacatggtggacaaga

SEQ ID NO: 49655 - DNA, 22 bp, Homo sapiens
agcccggacccagttcatctct

SEQ ID NO: 49656 - DNA, 22 bp, Homo sapiens
caggagggccaggcacctagtg

SEQ ID NO: 49657 - DNA, 22 bp, Homo sapiens
ttgagatggggtcgtaccctgt

SEQ ID NO: 49658 - DNA, 20 bp, Homo sapiens
catcctcgtcaggcaggggc

SEQ ID NO: 49659 - DNA, 18 bp, Homo sapiens
gcagccttgaacttctgg

SEQ ID NO: 49660 - DNA, 22 bp, Homo sapiens
gtggttgtcccctggaagtagg

SEQ ID NO: 49661 - DNA, 16 bp, Homo sapiens
cagggcatacctcttg

SEQ ID NO: 49662 - DNA, 17 bp, Homo sapiens
gtcatggtagagcagtg

SEQ ID NO: 49663 - DNA, 23 bp, Homo sapiens
gtggaggaggacctggatgcagc

SEQ ID NO: 49664 - DNA, 24 bp, Homo sapiens
tagccccagccctggccccaccca

SEQ ID NO: 49665 - DNA, 21 bp, Homo sapiens
agtataaatttgccaagttcg

SEQ ID NO: 49666 - DNA, 16 bp, Homo sapiens
cagggacccaccaccc

SEQ ID NO: 49667 - DNA, 16 bp, Homo sapiens
gccactcaaacagcca

SEQ ID NO: 49668 - DNA, 22 bp, Homo sapiens
cgcatggtcagccctcaggctg

SEQ ID NO: 49669 - DNA, 24 bp, Homo sapiens
tgatccagaccgccagggctgcct

SEQ ID NO: 49670 - DNA, 22 bp, Homo sapiens
tagtcttcactgcggtgcccag

SEQ ID NO: 49671 - DNA, 23 bp, Homo sapiens
gccatcactcatggctgtgtggt

SEQ ID NO: 49672 - DNA, 20 bp, Homo sapiens
ccactccccaaaccgccagg

SEQ ID NO: 49673 - DNA, 16 bp, Homo sapiens
gtcttcttgcccaggg

SEQ ID NO: 49674 - DNA, 23 bp, Homo sapiens
ctctgacatgcgcgctctgcccc

SEQ ID NO: 49675 - DNA, 22 bp, Homo sapiens
atccagagggcaccttggcctc

SEQ ID NO: 49676 - DNA, 23 bp, Homo sapiens
gggggacctccctgagcccaagt

SEQ ID NO: 49677 - DNA, 19 bp, Homo sapiens
gaggagcccaaggctggtg

SEQ ID NO: 49678 - DNA, 21 bp, Homo sapiens
tgtgatgaccaagatttatga

SEQ ID NO: 49679 - DNA, 23 bp, Homo sapiens
tagacaaaggagggtggcaggca

SEQ ID NO: 49680 - DNA, 20 bp, Homo sapiens
gcagggcgagggcgaggtga

SEQ ID NO: 49681 - DNA, 22 bp, Homo sapiens
gcctcacactgctcttcttctg

SEQ ID NO: 49682 - DNA, 20 bp, Homo sapiens
agtgtgggggacaccctgta

SEQ ID NO: 49683 - DNA, 23 bp, Homo sapiens
cctcacctcctctgtgagcttgg

SEQ ID NO: 49684 - DNA, 24 bp, Homo sapiens
ttgctgtcgggggtctcgacattg

SEQ ID NO: 49685 - DNA, 22 bp, Homo sapiens
gtgctccagcctaggccaccta

SEQ ID NO: 49686 - DNA, 23 bp, Homo sapiens
ctgcaggcccagctccccgaggg

SEQ ID NO: 49687 - DNA, 16 bp, Homo sapiens
aggacagacagtgtcc

SEQ ID NO: 49688 - DNA, 20 bp, Homo sapiens
tgactctgaaaaagaagtcc

SEQ ID NO: 49689 - DNA, 23 bp, Homo sapiens
cccagcatctgctgtgcacgtgg

SEQ ID NO: 49690 - DNA, 17 bp, Homo sapiens
ttgccctgcactgtgga

SEQ ID NO: 49691 - DNA, 24 bp, Homo sapiens
tcactccttagattctgttttctg

SEQ ID NO: 49692 - DNA, 24 bp, Homo sapiens
cgcaggatgccattgccgatgatg

SEQ ID NO: 49693 - DNA, 24 bp, Homo sapiens
tggctggcaggggaacacccctaa

SEQ ID NO: 49694 - DNA, 22 bp, Homo sapiens
aagactttcaggccctggtgtc

SEQ ID NO: 49695 - DNA, 16 bp, Homo sapiens
tgacggggagtccaca

SEQ ID NO: 49696 - DNA, 22 bp, Homo sapiens
aaacccaggcctgcttggctta

SEQ ID NO: 49697 - DNA, 16 bp, Homo sapiens
caacctggagaagctg

SEQ ID NO: 49698 - DNA, 22 bp, Homo sapiens
agaaagatgaaataactccacc

SEQ ID NO: 49699 - DNA, 18 bp, Homo sapiens
gtgccgggaggcggggac

SEQ ID NO: 49700 - DNA, 21 bp, Homo sapiens
cagaccccagcccttggctca

SEQ ID NO: 49701 - DNA, 21 bp, Homo sapiens
tgtgggtcagctgcttgctga

SEQ ID NO: 49702 - DNA, 21 bp, Homo sapiens
gtggtcttggcaagttggaga

SEQ ID NO: 49703 - DNA, 23 bp, Homo sapiens
gaaacagcccacgcagagagaca

SEQ ID NO: 49704 - DNA, 19 bp, Homo sapiens
gaccggggctgttcctgtg

SEQ ID NO: 49705 - DNA, 16 bp, Homo sapiens
cactccaggaggccag

SEQ ID NO: 49706 - DNA, 24 bp, Homo sapiens
cccagggacgagatctactgccag

SEQ ID NO: 49707 - DNA, 23 bp, Homo sapiens
gaccaggccctttggagcccctg

SEQ ID NO: 49708 - DNA, 16 bp, Homo sapiens
cggggctggattctcg

SEQ ID NO: 49709 - DNA, 23 bp, Homo sapiens
tgagaggagggggtgccaggaag

SEQ ID NO: 49710 - DNA, 18 bp, Homo sapiens
cccgtggatgaagttccg

SEQ ID NO: 49711 - DNA, 23 bp, Homo sapiens
gagctgagagggtagggaagcca

SEQ ID NO: 49712 - DNA, 23 bp, Homo sapiens
gtcccattgacaaaggtccttct

SEQ ID NO: 49713 - DNA, 23 bp, Homo sapiens
gagggcctggcggctgccctcaa

SEQ ID NO: 49714 - DNA, 16 bp, Homo sapiens
tgcatacacacgcacg

SEQ ID NO: 49715 - DNA, 21 bp, Homo sapiens
ggtactctggctgcagtacct

SEQ ID NO: 49716 - DNA, 16 bp, Homo sapiens
gagtgcactggacaca

SEQ ID NO: 49717 - DNA, 22 bp, Homo sapiens
gtactgtgaggagcgcctgaga

SEQ ID NO: 49718 - DNA, 21 bp, Homo sapiens
gaacttgagggtaggtgtctg

SEQ ID NO: 49719 - DNA, 17 bp, Homo sapiens
tgtgacagggacaagca

SEQ ID NO: 49720 - DNA, 22 bp, Homo sapiens
gtcagcagggtcttggtggtcc

SEQ ID NO: 49721 - DNA, 22 bp, Homo sapiens
ctccaaccccacagaaagcaga

SEQ ID NO: 49722 - DNA, 16 bp, Homo sapiens
gatcttgtcggccagc

SEQ ID NO: 49723 - DNA, 19 bp, Homo sapiens
ggaccccacaaaccctctt

SEQ ID NO: 49724 - DNA, 16 bp, Homo sapiens
ggccataccttgtcaa

SEQ ID NO: 49725 - DNA, 24 bp, Homo sapiens
tcatgttgcccgtgacattcatgg

SEQ ID NO: 49726 - DNA, 22 bp, Homo sapiens
gtggcagcactggcagcccgga

SEQ ID NO: 49727 - DNA, 22 bp, Homo sapiens
caaggagctctgcaacgcgctg

SEQ ID NO: 49728 - DNA, 16 bp, Homo sapiens
cacaggctcaggggga

SEQ ID NO: 49729 - DNA, 19 bp, Homo sapiens
ctctacattgccctgtttg

SEQ ID NO: 49730 - DNA, 16 bp, Homo sapiens
ggcttagagcccaggg

SEQ ID NO: 49731 - DNA, 18 bp, Homo sapiens
gatggcgtccatgacgtg

SEQ ID NO: 49732 - DNA, 24 bp, Homo sapiens
gtgtccctgcccctcgctgggcct

SEQ ID NO: 49733 - DNA, 16 bp, Homo sapiens
ggggcgttgcgctcct

SEQ ID NO: 49734 - DNA, 19 bp, Homo sapiens
ctcatagtccttccctgac

SEQ ID NO: 49735 - DNA, 22 bp, Homo sapiens
tggccacgttgtcctcggaggg

SEQ ID NO: 49736 - DNA, 20 bp, Homo sapiens
gtcctccctgggcagcggca

SEQ ID NO: 49737 - DNA, 16 bp, Homo sapiens
ctgtactccccaaact

SEQ ID NO: 49738 - DNA, 23 bp, Homo sapiens
cgccaaggagcagggcgcccagg

SEQ ID NO: 49739 - DNA, 24 bp, Homo sapiens
aacgtggaaagcaggaggctgtga

SEQ ID NO: 49740 - DNA, 22 bp, Homo sapiens
gaggtcttcacgccctggcaca

SEQ ID NO: 49741 - DNA, 21 bp, Homo sapiens
gtcaggctcaccccagcctga

SEQ ID NO: 49742 - DNA, 24 bp, Homo sapiens
accagcaggtggtgcgaggagtca

SEQ ID NO: 49743 - DNA, 16 bp, Homo sapiens
gagccccctgaagtag

SEQ ID NO: 49744 - DNA, 17 bp, Homo sapiens
acaaagtactgctggga

SEQ ID NO: 49745 - DNA, 24 bp, Homo sapiens
ccaggctctgagagctacaggagg

SEQ ID NO: 49746 - DNA, 16 bp, Homo sapiens
ggggatgtaggtgggc

SEQ ID NO: 49747 - DNA, 24 bp, Homo sapiens
gaagggcttcctggaggggcctgg

SEQ ID NO: 49748 - DNA, 24 bp, Homo sapiens
cttcttgtgggcggcgatggccag

SEQ ID NO: 49749 - DNA, 18 bp, Homo sapiens
gacctggctgagctggcc

SEQ ID NO: 49750 - DNA, 16 bp, Homo sapiens
ttggttgttcaggtcc

SEQ ID NO: 49751 - DNA, 23 bp, Homo sapiens
tcctggagcgcctcctgaacctc

SEQ ID NO: 49752 - DNA, 16 bp, Homo sapiens
aggtgccatcccatcc

SEQ ID NO: 49753 - DNA, 21 bp, Homo sapiens
gacgctggagaagtgggccca

SEQ ID NO: 49754 - DNA, 17 bp, Homo sapiens
ggctgcagacagatggg

SEQ ID NO: 49755 - DNA, 21 bp, Homo sapiens
aagcgggcataactgaccaca

SEQ ID NO: 49756 - DNA, 18 bp, Homo sapiens
ctgctcctggctagaagg

SEQ ID NO: 49757 - DNA, 17 bp, Homo sapiens
ggggtacctgagaattt

SEQ ID NO: 49758 - DNA, 22 bp, Homo sapiens
tatgttgtcttctgtccctctg

SEQ ID NO: 49759 - DNA, 20 bp, Homo sapiens
aatttgtaggctgtgggctg

SEQ ID NO: 49760 - DNA, 16 bp, Homo sapiens
gaaggtcaaagaggat

SEQ ID NO: 49761 - DNA, 16 bp, Homo sapiens
gtgggctggagctaca

SEQ ID NO: 49762 - DNA, 20 bp, Homo sapiens
tccaggttttatgaagccta

SEQ ID NO: 49763 - DNA, 23 bp, Homo sapiens
cctactgcactttgggttttggc

SEQ ID NO: 49764 - DNA, 17 bp, Homo sapiens
agttgacggccacgatg

SEQ ID NO: 49765 - DNA, 22 bp, Homo sapiens
tctataaaatagaaatcagtgt

SEQ ID NO: 49766 - DNA, 16 bp, Homo sapiens
gatctctgggaaggac

SEQ ID NO: 49767 - DNA, 24 bp, Homo sapiens
agaagggctgggcctgggtgtggg

SEQ ID NO: 49768 - DNA, 16 bp, Homo sapiens
ctgtctgtctgcatct

SEQ ID NO: 49769 - DNA, 24 bp, Homo sapiens
tctccccaagaacgacgtcatcgt

SEQ ID NO: 49770 - DNA, 17 bp, Homo sapiens
ggccacttcatgcctct

SEQ ID NO: 49771 - DNA, 23 bp, Homo sapiens
gagcaggagcaggtacttctgga

SEQ ID NO: 49772 - DNA, 18 bp, Homo sapiens
gaggtgccagaggggtct

SEQ ID NO: 49773 - DNA, 22 bp, Homo sapiens
aggaattagacaggcaaaggag

SEQ ID NO: 49774 - DNA, 22 bp, Homo sapiens
gcagcacagccaagatcagagc

SEQ ID NO: 49775 - DNA, 24 bp, Homo sapiens
atgcctgactctggccaggccagc

SEQ ID NO: 49776 - DNA, 16 bp, Homo sapiens
ccaacacggagaacag

SEQ ID NO: 49777 - DNA, 24 bp, Homo sapiens
gccacgtctcccactggttggggc

SEQ ID NO: 49778 - DNA, 16 bp, Homo sapiens
ccccttgatggtggcc

SEQ ID NO: 49779 - DNA, 21 bp, Homo sapiens
gtgtctggctctcactgggct

SEQ ID NO: 49780 - DNA, 17 bp, Homo sapiens
ctaggaaggtgaccacc

SEQ ID NO: 49781 - DNA, 18 bp, Homo sapiens
gactgaccccggcggggc

SEQ ID NO: 49782 - DNA, 20 bp, Homo sapiens
ctcaccggggttggggttat

SEQ ID NO: 49783 - DNA, 24 bp, Homo sapiens
aacgacggcccccagcttcacgct

SEQ ID NO: 49784 - DNA, 18 bp, Homo sapiens
actaagacagtctgcata

SEQ ID NO: 49785 - DNA, 19 bp, Homo sapiens
aatgctgaggacattcgtg

SEQ ID NO: 49786 - DNA, 23 bp, Homo sapiens
aacctcttttcttcataaatctc

SEQ ID NO: 49787 - DNA, 23 bp, Homo sapiens
aagtatgttgtggccctgcagga

SEQ ID NO: 49788 - DNA, 24 bp, Homo sapiens
caggagagtagcccactctggtga

SEQ ID NO: 49789 - DNA, 17 bp, Homo sapiens
gatgatgaggtctccct

SEQ ID NO: 49790 - DNA, 24 bp, Homo sapiens
cagagtggcaagtgggcagacatg

SEQ ID NO: 49791 - DNA, 17 bp, Homo sapiens
gtcctctcattgatgcc

SEQ ID NO: 49792 - DNA, 24 bp, Homo sapiens
ctcagcctgtctctgcccccatgg

SEQ ID NO: 49793 - DNA, 24 bp, Homo sapiens
ggtggcatggtgacagtgggcatg

SEQ ID NO: 49794 - DNA, 22 bp, Homo sapiens
tcaggcttcctcagctttgcca

SEQ ID NO: 49795 - DNA, 20 bp, Homo sapiens
ctaatggcacctcccaccca

SEQ ID NO: 49796 - DNA, 23 bp, Homo sapiens
aggtcatgaactcgggctgggcc

SEQ ID NO: 49797 - DNA, 18 bp, Homo sapiens
agatgcactagaccgtta

SEQ ID NO: 49798 - DNA, 22 bp, Homo sapiens
ttccccaccgacagtgtgtacg

SEQ ID NO: 49799 - DNA, 16 bp, Homo sapiens
cacaggtttgagcact

SEQ ID NO: 49800 - DNA, 24 bp, Homo sapiens
gaccccaaggaggaacggggctcc

SEQ ID NO: 49801 - DNA, 21 bp, Homo sapiens
ctccgccgttcgcagctgcaa

SEQ ID NO: 49802 - DNA, 23 bp, Homo sapiens
tctcccagagtccagaaggcttc

SEQ ID NO: 49803 - DNA, 20 bp, Homo sapiens
ctgaagtagtcataggaaaa

SEQ ID NO: 49804 - DNA, 24 bp, Homo sapiens
gagagctgacctgagccccctgtc

SEQ ID NO: 49805 - DNA, 16 bp, Homo sapiens
gaagcctgcagctcct

SEQ ID NO: 49806 - DNA, 23 bp, Homo sapiens
cagaggcaggacgttgtccggct

SEQ ID NO: 49807 - DNA, 16 bp, Homo sapiens
ggccctgctcacaggt

SEQ ID NO: 49808 - DNA, 21 bp, Homo sapiens
caagccctacacgctggagga

SEQ ID NO: 49809 - DNA, 23 bp, Homo sapiens
cagtgactgccagtgactcgcct

SEQ ID NO: 49810 - DNA, 18 bp, Homo sapiens
gacaccatgacacggctc

SEQ ID NO: 49811 - DNA, 23 bp, Homo sapiens
cctggtgcccactctcagcctct

SEQ ID NO: 49812 - DNA, 22 bp, Homo sapiens
ttcttgagcagcgcctgcttga

SEQ ID NO: 49813 - DNA, 23 bp, Homo sapiens
gtttctccccggggctgccagcg

SEQ ID NO: 49814 - DNA, 22 bp, Homo sapiens
ggatatcaatgaaggccaggca

SEQ ID NO: 49815 - DNA, 23 bp, Homo sapiens
gcccccacccaagcacacgctga

SEQ ID NO: 49816 - DNA, 24 bp, Homo sapiens
ggcagtgtgcagacgaaggccctg

SEQ ID NO: 49817 - DNA, 23 bp, Homo sapiens
ccggctgtggagccacacgcggg

SEQ ID NO: 49818 - DNA, 23 bp, Homo sapiens
ggggtactccatcaaccctcccc

SEQ ID NO: 49819 - DNA, 21 bp, Homo sapiens
gaggagctctcgcaggaggcc

SEQ ID NO: 49820 - DNA, 19 bp, Homo sapiens
ctgtgaggaggcggagaga

SEQ ID NO: 49821 - DNA, 19 bp, Homo sapiens
gagcgtgtcctcttggacg

SEQ ID NO: 49822 - DNA, 18 bp, Homo sapiens
gagggcccagggtcacag

SEQ ID NO: 49823 - DNA, 24 bp, Homo sapiens
gtccttcaggggctcggctttcag

SEQ ID NO: 49824 - DNA, 17 bp, Homo sapiens
gaccccaggccagtgct

SEQ ID NO: 49825 - DNA, 17 bp, Homo sapiens
cctggctcacctgatgt

SEQ ID NO: 49826 - DNA, 17 bp, Homo sapiens
caagtacatgggcgact

SEQ ID NO: 49827 - DNA, 17 bp, Homo sapiens
caggagggtaagagctg

SEQ ID NO: 49828 - DNA, 24 bp, Homo sapiens
gaccagatctttgagggtcccctg

SEQ ID NO: 49829 - DNA, 24 bp, Homo sapiens
atgagcagctcccggctctgtgtg

SEQ ID NO: 49830 - DNA, 21 bp, Homo sapiens
agatcctgaagcagctgaccg

SEQ ID NO: 49831 - DNA, 24 bp, Homo sapiens
ggtagggtgaggggtcctgagata

SEQ ID NO: 49832 - DNA, 24 bp, Homo sapiens
gatgttgctgggtgggaaaaggcc

SEQ ID NO: 49833 - DNA, 23 bp, Homo sapiens
gagcagctgaggggtacatggcc

SEQ ID NO: 49834 - DNA, 21 bp, Homo sapiens
tcgatggcgagtgggcagtgc

SEQ ID NO: 49835 - DNA, 22 bp, Homo sapiens
ctgcccctgctggagcccacgc

SEQ ID NO: 49836 - DNA, 22 bp, Homo sapiens
gtgtctgtccctgcccctggtg

SEQ ID NO: 49837 - DNA, 24 bp, Homo sapiens
gctgctctggctgtgcacgggcct

SEQ ID NO: 49838 - DNA, 22 bp, Homo sapiens
ggtcctcatccccaaggggctc

SEQ ID NO: 49839 - DNA, 22 bp, Homo sapiens
cttcctgcagtcccgaaagcac

SEQ ID NO: 49840 - DNA, 21 bp, Homo sapiens
caggatccgcacctccgtcta

SEQ ID NO: 49841 - DNA, 16 bp, Homo sapiens
ggagggtacttccggg

SEQ ID NO: 49842 - DNA, 17 bp, Homo sapiens
ccggtcacatcatagga

SEQ ID NO: 49843 - DNA, 19 bp, Homo sapiens
aagtagactttgtggaaaa

SEQ ID NO: 49844 - DNA, 24 bp, Homo sapiens
ctccaagtgtcccggtcccctggt

SEQ ID NO: 49845 - DNA, 23 bp, Homo sapiens
agcccggccctgtcctgggcact

SEQ ID NO: 49846 - DNA, 23 bp, Homo sapiens
gccttttcagaaacgggtcccgg

SEQ ID NO: 49847 - DNA, 24 bp, Homo sapiens
cggcaaatgtcaggtgatggggga

SEQ ID NO: 49848 - DNA, 22 bp, Homo sapiens
atccagcacaagaccacccaga

SEQ ID NO: 49849 - DNA, 17 bp, Homo sapiens
ggagtcgatggccttcg

SEQ ID NO: 49850 - DNA, 17 bp, Homo sapiens
ccttttgttaaatgcca

SEQ ID NO: 49851 - DNA, 18 bp, Homo sapiens
gagcagcctggtggcgat

SEQ ID NO: 49852 - DNA, 19 bp, Homo sapiens
gctcagtataggaggcata

SEQ ID NO: 49853 - DNA, 24 bp, Homo sapiens
ggcaaaggacccaccttgtctgca

SEQ ID NO: 49854 - DNA, 24 bp, Homo sapiens
gaaaggccctgcaggagcccagtg

SEQ ID NO: 49855 - DNA, 22 bp, Homo sapiens
tcttccgtctgctgtccgtaag

SEQ ID NO: 49856 - DNA, 23 bp, Homo sapiens
ccaaggccaaggacttctgccag

SEQ ID NO: 49857 - DNA, 22 bp, Homo sapiens
tggaagaagatggccagatgcc

SEQ ID NO: 49858 - DNA, 18 bp, Homo sapiens
cctctttgtcaaaattgc

SEQ ID NO: 49859 - DNA, 21 bp, Homo sapiens
aacaaagtcaaagaagaagtc

SEQ ID NO: 49860 - DNA, 18 bp, Homo sapiens
ccttccggctgggagtgg

SEQ ID NO: 49861 - DNA, 16 bp, Homo sapiens
cctcattaccgtcctt

SEQ ID NO: 49862 - DNA, 20 bp, Homo sapiens
tgggaaggtcagaaaatgca

SEQ ID NO: 49863 - DNA, 16 bp, Homo sapiens
gcacagccccgagccc

SEQ ID NO: 49864 - DNA, 17 bp, Homo sapiens
agcgttcctgagaatga

SEQ ID NO: 49865 - DNA, 17 bp, Homo sapiens
tcacgtcccgagcccag

SEQ ID NO: 49866 - DNA, 24 bp, Homo sapiens
tggataaagaaagctcggcccatc

SEQ ID NO: 49867 - DNA, 21 bp, Homo sapiens
gagtgagggcacaattcctgc

SEQ ID NO: 49868 - DNA, 19 bp, Homo sapiens
gcccagagcagggaagtgt

SEQ ID NO: 49869 - DNA, 24 bp, Homo sapiens
tgggatccttccctggcaccgtgg

SEQ ID NO: 49870 - DNA, 23 bp, Homo sapiens
gcctgagtgagggcctcctctgg

SEQ ID NO: 49871 - DNA, 17 bp, Homo sapiens
aactagagtgcagaggt

SEQ ID NO: 49872 - DNA, 21 bp, Homo sapiens
ctgggtgaccgactgccctgt

SEQ ID NO: 49873 - DNA, 16 bp, Homo sapiens
aggtcagtgggtctct

SEQ ID NO: 49874 - DNA, 23 bp, Homo sapiens
tcatgaagaagctgtggaccacc

SEQ ID NO: 49875 - DNA, 24 bp, Homo sapiens
tggggctccagtggtcttggcagg

SEQ ID NO: 49876 - DNA, 24 bp, Homo sapiens
ctgtccctgtcctgtgccgtatcc

SEQ ID NO: 49877 - DNA, 20 bp, Homo sapiens
ctcccgcgtgcacttgtggt

SEQ ID NO: 49878 - DNA, 16 bp, Homo sapiens
cggggtaaggtggtag

SEQ ID NO: 49879 - DNA, 18 bp, Homo sapiens
taggacttgtcctcctcg

SEQ ID NO: 49880 - DNA, 20 bp, Homo sapiens
cacttctgccaggtccctgc

SEQ ID NO: 49881 - DNA, 21 bp, Homo sapiens
caggtgagacctgccggataa

SEQ ID NO: 49882 - DNA, 16 bp, Homo sapiens
tatctccgaggctacc

SEQ ID NO: 49883 - DNA, 24 bp, Homo sapiens
ccattcagggccccaccattcccg

SEQ ID NO: 49884 - DNA, 23 bp, Homo sapiens
cgctgatctacagggtcaagttc

SEQ ID NO: 49885 - DNA, 19 bp, Homo sapiens
cacctccctgggctgctgg

SEQ ID NO: 49886 - DNA, 20 bp, Homo sapiens
ctgcgggagctggtgcccca

SEQ ID NO: 49887 - DNA, 20 bp, Homo sapiens
gataaggcaggtggaggaac

SEQ ID NO: 49888 - DNA, 20 bp, Homo sapiens
acttccctgcgtgcttgttg

SEQ ID NO: 49889 - DNA, 23 bp, Homo sapiens
gagggtgcagacggggctggagt

SEQ ID NO: 49890 - DNA, 22 bp, Homo sapiens
aaggctgagccaaaggtgggcc

SEQ ID NO: 49891 - DNA, 21 bp, Homo sapiens
gcctgccctgagcaggcctgt

SEQ ID NO: 49892 - DNA, 24 bp, Homo sapiens
atgccctgttcccctcctcctctg

SEQ ID NO: 49893 - DNA, 16 bp, Homo sapiens
gtcgcctacttcaaca

SEQ ID NO: 49894 - DNA, 22 bp, Homo sapiens
ggtgtccaaggccatggctctt

SEQ ID NO: 49895 - DNA, 23 bp, Homo sapiens
ggccttcctgaagctcatcttca

SEQ ID NO: 49896 - DNA, 21 bp, Homo sapiens
taagacgctaagctgggacaa

SEQ ID NO: 49897 - DNA, 20 bp, Homo sapiens
gcggaggtggaagccatagg

SEQ ID NO: 49898 - DNA, 21 bp, Homo sapiens
ctgaccccatacttgttgatg

SEQ ID NO: 49899 - DNA, 18 bp, Homo sapiens
gctgactttatcccagct

SEQ ID NO: 49900 - DNA, 16 bp, Homo sapiens
gaagcccgcccccact

SEQ ID NO: 49901 - DNA, 16 bp, Homo sapiens
ccatctgatgccttct

SEQ ID NO: 49902 - DNA, 16 bp, Homo sapiens
ggtggctaggagggct

SEQ ID NO: 49903 - DNA, 19 bp, Homo sapiens
ctgagatcctcctaattgc

SEQ ID NO: 49904 - DNA, 16 bp, Homo sapiens
agcaaacgctgacagc

SEQ ID NO: 49905 - DNA, 20 bp, Homo sapiens
agggggaggcacctgcttcc

SEQ ID NO: 49906 - DNA, 24 bp, Homo sapiens
ggaagtaggtgttgccgctgctcc

SEQ ID NO: 49907 - DNA, 23 bp, Homo sapiens
atgggctcctctgagggcctgag

SEQ ID NO: 49908 - DNA, 22 bp, Homo sapiens
ctcaccagtgacgtctcgcaga

SEQ ID NO: 49909 - DNA, 23 bp, Homo sapiens
cagggcccaggccgtgcctctct

SEQ ID NO: 49910 - DNA, 16 bp, Homo sapiens
tacgctgcaggcaagg

SEQ ID NO: 49911 - DNA, 19 bp, Homo sapiens
cccttcaccaagatctcca

SEQ ID NO: 49912 - DNA, 19 bp, Homo sapiens
acccttgcccacgacccca

SEQ ID NO: 49913 - DNA, 19 bp, Homo sapiens
acttggtgcgcgggagcaa

SEQ ID NO: 49914 - DNA, 23 bp, Homo sapiens
cccttcaattgtgcagatgggag

SEQ ID NO: 49915 - DNA, 17 bp, Homo sapiens
tttgctcatggctgtga

SEQ ID NO: 49916 - DNA, 24 bp, Homo sapiens
ttctgcccattgcagattcctggg

SEQ ID NO: 49917 - DNA, 23 bp, Homo sapiens
tcgagagcaggcatggaaccagc

SEQ ID NO: 49918 - DNA, 24 bp, Homo sapiens
cgtgtgctcgcttatcttctcacc

SEQ ID NO: 49919 - DNA, 16 bp, Homo sapiens
gcataagtcttcccca

SEQ ID NO: 49920 - DNA, 24 bp, Homo sapiens
cttcctacattagccagatgctca

SEQ ID NO: 49921 - DNA, 23 bp, Homo sapiens
aacatcagaggcccagttggtat

SEQ ID NO: 49922 - DNA, 23 bp, Homo sapiens
cgcaggccgattcgatgctgatc

SEQ ID NO: 49923 - DNA, 22 bp, Homo sapiens
tctgaggcaccgcggctgcggg

SEQ ID NO: 49924 - DNA, 22 bp, Homo sapiens
gacatggacagcgggggcaggt

SEQ ID NO: 49925 - DNA, 22 bp, Homo sapiens
cttcgtacctcgttttttggct

SEQ ID NO: 49926 - DNA, 22 bp, Homo sapiens
ctcggagcccgaaccctggctg

SEQ ID NO: 49927 - DNA, 24 bp, Homo sapiens
gcatgtccggggtgcgcgcagtgc

SEQ ID NO: 49928 - DNA, 24 bp, Homo sapiens
ctgcgctggacccggcgcccggcc

SEQ ID NO: 49929 - DNA, 22 bp, Homo sapiens
gggcctggatggcaccgagacg

SEQ ID NO: 49930 - DNA, 22 bp, Homo sapiens
gaccgggggactcgggcagcgg

SEQ ID NO: 49931 - DNA, 24 bp, Homo sapiens
tggcgcgtctggcccagcggatag

SEQ ID NO: 49932 - DNA, 23 bp, Homo sapiens
ttctcgcacgcacaagatcaccc

SEQ ID NO: 49933 - DNA, 20 bp, Homo sapiens
gaccgagggcgacgcgcagg

SEQ ID NO: 49934 - DNA, 23 bp, Homo sapiens
aacaaaaagatgacgaccaagta

SEQ ID NO: 49935 - DNA, 23 bp, Homo sapiens
ttaacaaagttttaagaaacggt

SEQ ID NO: 49936 - DNA, 16 bp, Homo sapiens
cactgagtcccaaggc

SEQ ID NO: 49937 - DNA, 26 bp, Homo sapiens
aaatttaattaattatttctcctttt

SEQ ID NO: 49938 - DNA, 21 bp, Homo sapiens
ttatccctaacaatactgaga

SEQ ID NO: 49939 - DNA, 23 bp, Homo sapiens
gtaacgaatacttctgtatttct

SEQ ID NO: 49940 - DNA, 16 bp, Homo sapiens
tacctgttttggagga

SEQ ID NO: 49941 - DNA, 17 bp, Homo sapiens
ccttccctttggccttg

SEQ ID NO: 49942 - DNA, 16 bp, Homo sapiens
aagggtcctgggattt

SEQ ID NO: 49943 - DNA, 18 bp, Homo sapiens
gatgtgtgttctctatga

SEQ ID NO: 49944 - DNA, 22 bp, Homo sapiens
aaatcttcatctggacttaatt

SEQ ID NO: 49945 - DNA, 19 bp, Homo sapiens
ttgatcctgtctctcagga

SEQ ID NO: 49946 - DNA, 22 bp, Homo sapiens
agttggacaaagaaataggtta

SEQ ID NO: 49947 - DNA, 18 bp, Homo sapiens
ttgtgctgctccagcaag

SEQ ID NO: 49948 - DNA, 19 bp, Homo sapiens
cctcctttttgctttttgt

SEQ ID NO: 49949 - DNA, 20 bp, Homo sapiens
agcttgttttcttggttttc

SEQ ID NO: 49950 - DNA, 20 bp, Homo sapiens
taaaaatcctgcagaactgc

SEQ ID NO: 49951 - DNA, 16 bp, Homo sapiens
gtttccagtgttgccg

SEQ ID NO: 49952 - DNA, 21 bp, Homo sapiens
ttgatatctaaaaagaagtca

SEQ ID NO: 49953 - DNA, 23 bp, Homo sapiens
taataattattcatacctgcact

SEQ ID NO: 49954 - DNA, 23 bp, Homo sapiens
gggcagaaagactgactaaatca

SEQ ID NO: 49955 - DNA, 18 bp, Homo sapiens
ccttccaaagtgctagga

SEQ ID NO: 49956 - DNA, 24 bp, Homo sapiens
ttctgagcttttgcgattacggca

SEQ ID NO: 49957 - DNA, 17 bp, Homo sapiens
atgttgcctgggctcat

SEQ ID NO: 49958 - DNA, 20 bp, Homo sapiens
cggagatctgagctacagaa

SEQ ID NO: 49959 - DNA, 18 bp, Homo sapiens
tctttcctttgttcacca

SEQ ID NO: 49960 - DNA, 22 bp, Homo sapiens
gatctgtattctttattacttc

SEQ ID NO: 49961 - DNA, 19 bp, Homo sapiens
ggggacttactttgtgatt

SEQ ID NO: 49962 - DNA, 16 bp, Homo sapiens
ttggacatcaagagga

SEQ ID NO: 49963 - DNA, 21 bp, Homo sapiens
tgtcggaataatatgttaact

SEQ ID NO: 49964 - DNA, 25 bp, Homo sapiens
aaattacttgaaaaatattttgaca

SEQ ID NO: 49965 - DNA, 17 bp, Homo sapiens
ttcctcatcatggtaca

SEQ ID NO: 49966 - DNA, 19 bp, Homo sapiens
tgaaacctatatgacaaca

SEQ ID NO: 49967 - DNA, 19 bp, Homo sapiens
tacctgaagattactgtcc

SEQ ID NO: 49968 - DNA, 18 bp, Homo sapiens
aggtcgtttgaagaggtt

SEQ ID NO: 49969 - DNA, 21 bp, Homo sapiens
gcatatatcaaggtatttgtc

SEQ ID NO: 49970 - DNA, 21 bp, Homo sapiens
agctcaaataagaccagaaat

SEQ ID NO: 49971 - DNA, 22 bp, Homo sapiens
gttaactttttttgtttttgtt

SEQ ID NO: 49972 - DNA, 25 bp, Homo sapiens
cttacttcaaactatctattttttc

SEQ ID NO: 49973 - DNA, 16 bp, Homo sapiens
taggtgacctcggcac

SEQ ID NO: 49974 - DNA, 22 bp, Homo sapiens
acagctattcactaatagttta

SEQ ID NO: 49975 - DNA, 16 bp, Homo sapiens
tctgtgccgcttctaa

SEQ ID NO: 49976 - DNA, 21 bp, Homo sapiens
accgtaatgtagtgttttcct

SEQ ID NO: 49977 - DNA, 21 bp, Homo sapiens
gggacttgtgatttaatttga

SEQ ID NO: 49978 - DNA, 22 bp, Homo sapiens
taatgcataatatggttagata

SEQ ID NO: 49979 - DNA, 16 bp, Homo sapiens
gctgctcttactcgga

SEQ ID NO: 49980 - DNA, 17 bp, Homo sapiens
cacattggcagacaaaa

SEQ ID NO: 49981 - DNA, 19 bp, Homo sapiens
taccttctctgtcctagtc

SEQ ID NO: 49982 - DNA, 18 bp, Homo sapiens
gcacagctctctcgggaa

SEQ ID NO: 49983 - DNA, 18 bp, Homo sapiens
cactatggatagcacact

SEQ ID NO: 49984 - DNA, 18 bp, Homo sapiens
agattatctctcagccct

SEQ ID NO: 49985 - DNA, 18 bp, Homo sapiens
tcatttgaggaatggcac

SEQ ID NO: 49986 - DNA, 21 bp, Homo sapiens
ggtctgatcttcaagtttaga

SEQ ID NO: 49987 - DNA, 17 bp, Homo sapiens
acataaaggtggtcctc

SEQ ID NO: 49988 - DNA, 19 bp, Homo sapiens
ttatgcctttccatatttc

SEQ ID NO: 49989 - DNA, 19 bp, Homo sapiens
cagcgcaaagaaaaacatt

SEQ ID NO: 49990 - DNA, 23 bp, Homo sapiens
aaataggcttgcagttatctatt

SEQ ID NO: 49991 - DNA, 16 bp, Homo sapiens
cagcagacgagaggag

SEQ ID NO: 49992 - DNA, 19 bp, Homo sapiens
tgctactgagaagcaatgt

SEQ ID NO: 49993 - DNA, 18 bp, Homo sapiens
cacacagcaaggatcttt

SEQ ID NO: 49994 - DNA, 20 bp, Homo sapiens
ggatgaggcatcatgatgga

SEQ ID NO: 49995 - DNA, 24 bp, Homo sapiens
aggttggattgttttcatatgtgg

SEQ ID NO: 49996 - DNA, 16 bp, Homo sapiens
gcttgaggacccgaaa

SEQ ID NO: 49997 - DNA, 22 bp, Homo sapiens
atattatgtagcatttactatg

SEQ ID NO: 49998 - DNA, 21 bp, Homo sapiens
cttgtttaattattttttcca

SEQ ID NO: 49999 - DNA, 16 bp, Homo sapiens
aaacagaccttgagtt

SEQ ID NO: 50000 - DNA, 22 bp, Homo sapiens
gaaaaaacagaaaacagtaact

SEQ ID NO: 50001 - DNA, 20 bp, Homo sapiens
tggccacaagagaatgagac

SEQ ID NO: 50002 - DNA, 18 bp, Homo sapiens
agcatcccaaaaaagtgt

SEQ ID NO: 50003 - DNA, 19 bp, Homo sapiens
ttacagtccagtgaagggc

SEQ ID NO: 50004 - DNA, 17 bp, Homo sapiens
ccagtctatgaccgcaa

SEQ ID NO: 50005 - DNA, 16 bp, Homo sapiens
tcggcttgctaagctg

SEQ ID NO: 50006 - DNA, 23 bp, Homo sapiens
tagtggtagtttaaaaaagtagt

SEQ ID NO: 50007 - DNA, 22 bp, Homo sapiens
tcacactagattcataaacatc

SEQ ID NO: 50008 - DNA, 22 bp, Homo sapiens
ttcctatcattttgtatggtga

SEQ ID NO: 50009 - DNA, 17 bp, Homo sapiens
ttattttggccacttac

SEQ ID NO: 50010 - DNA, 17 bp, Homo sapiens
tgcaaccattgacagct

SEQ ID NO: 50011 - DNA, 26 bp, Homo sapiens
aaccaaatgcttaatataattactca

SEQ ID NO: 50012 - DNA, 22 bp, Homo sapiens
tcattggtcaaatatcaatgat

SEQ ID NO: 50013 - DNA, 16 bp, Homo sapiens
aaacactctacagctt

SEQ ID NO: 50014 - DNA, 18 bp, Homo sapiens
atgaacaaatatgcaagt

SEQ ID NO: 50015 - DNA, 21 bp, Homo sapiens
gttgcagtgagctgagatcac

SEQ ID NO: 50016 - DNA, 19 bp, Homo sapiens
tatgtacaactcgaatctg

SEQ ID NO: 50017 - DNA, 28 bp, Homo sapiens
actttgtctaaaaaataataatattttc

SEQ ID NO: 50018 - DNA, 18 bp, Homo sapiens
acagaagaaaatcctgta

SEQ ID NO: 50019 - DNA, 19 bp, Homo sapiens
aattttgaacatctctgat

SEQ ID NO: 50020 - DNA, 21 bp, Homo sapiens
tgttctttaagtagctatgcg

SEQ ID NO: 50021 - DNA, 16 bp, Homo sapiens
attggagttgagcaga

SEQ ID NO: 50022 - DNA, 23 bp, Homo sapiens
aaaaaattttttttcttcttaca

SEQ ID NO: 50023 - DNA, 16 bp, Homo sapiens
caggagcaggagctac

SEQ ID NO: 50024 - DNA, 19 bp, Homo sapiens
cctccccctaagttacgca

SEQ ID NO: 50025 - DNA, 16 bp, Homo sapiens
ccataaccttggcgag

SEQ ID NO: 50026 - DNA, 19 bp, Homo sapiens
agtagtcagtgagcacccc

SEQ ID NO: 50027 - DNA, 23 bp, Homo sapiens
tggcagatgcattaccaatgctc

SEQ ID NO: 50028 - DNA, 21 bp, Homo sapiens
agatatctctgctgactgtca

SEQ ID NO: 50029 - DNA, 17 bp, Homo sapiens
gcagcagaaagtacctg

SEQ ID NO: 50030 - DNA, 23 bp, Homo sapiens
accaggtacatgcagttcagcaa

SEQ ID NO: 50031 - DNA, 23 bp, Homo sapiens
acccatatttaattattaaaact

SEQ ID NO: 50032 - DNA, 16 bp, Homo sapiens
tgtgggacttggacct

SEQ ID NO: 50033 - DNA, 23 bp, Homo sapiens
caaataaacattcggtgtaaata

SEQ ID NO: 50034 - DNA, 20 bp, Homo sapiens
ccccaagtggtgactatgct

SEQ ID NO: 50035 - DNA, 20 bp, Homo sapiens
agaagttagagtttttctct

SEQ ID NO: 50036 - DNA, 19 bp, Homo sapiens
tgaaccataatcttgctgc

SEQ ID NO: 50037 - DNA, 18 bp, Homo sapiens
aagttggtagacaaagtt

SEQ ID NO: 50038 - DNA, 20 bp, Homo sapiens
tgactccatttgttatcttg

SEQ ID NO: 50039 - DNA, 21 bp, Homo sapiens
tccttgttatttctagtttgg

SEQ ID NO: 50040 - DNA, 16 bp, Homo sapiens
tttcgaccttccattt

SEQ ID NO: 50041 - DNA, 23 bp, Homo sapiens
gttcgtaatggacctgaaagtgg

SEQ ID NO: 50042 - DNA, 24 bp, Homo sapiens
acatctggaaaaaatcatagtaga

SEQ ID NO: 50043 - DNA, 18 bp, Homo sapiens
ttccaaaaagtgatgttt

SEQ ID NO: 50044 - DNA, 19 bp, Homo sapiens
gtgcttatagttgatctgc

SEQ ID NO: 50045 - DNA, 18 bp, Homo sapiens
aagaagttcagtggaata

SEQ ID NO: 50046 - DNA, 23 bp, Homo sapiens
aataaacatttcctaattattat

SEQ ID NO: 50047 - DNA, 18 bp, Homo sapiens
tgtctgcacttagccctt

SEQ ID NO: 50048 - DNA, 20 bp, Homo sapiens
cacaatttcagaacacacat

SEQ ID NO: 50049 - DNA, 22 bp, Homo sapiens
cctctaattgtacagttaaatc

SEQ ID NO: 50050 - DNA, 16 bp, Homo sapiens
tctagttgacggcagc

SEQ ID NO: 50051 - DNA, 18 bp, Homo sapiens
tttttcacacctctttct

SEQ ID NO: 50052 - DNA, 23 bp, Homo sapiens
cttatttcaaggaaaaattgaat

SEQ ID NO: 50053 - DNA, 20 bp, Homo sapiens
atgtattttttttacagaca

SEQ ID NO: 50054 - DNA, 20 bp, Homo sapiens
ggcgcttaaatttctcaact

SEQ ID NO: 50055 - DNA, 16 bp, Homo sapiens
tctgcttatctgctgc

SEQ ID NO: 50056 - DNA, 17 bp, Homo sapiens
tggaatctgaatgccga

SEQ ID NO: 50057 - DNA, 23 bp, Homo sapiens
aggtagtaaattacttaaattca

SEQ ID NO: 50058 - DNA, 29 bp, Homo sapiens
gaaaaataaagacagtaaaataaatttga

SEQ ID NO: 50059 - DNA, 24 bp, Homo sapiens
tcctttttattttcagaaagaagt

SEQ ID NO: 50060 - DNA, 21 bp, Homo sapiens
aatgttaagacttacacacaa

SEQ ID NO: 50061 - DNA, 16 bp, Homo sapiens
aacatctagatcggca

SEQ ID NO: 50062 - DNA, 23 bp, Homo sapiens
atattaaatgccaaattcatatg

SEQ ID NO: 50063 - DNA, 22 bp, Homo sapiens
tttaattgttttatttgttttt

SEQ ID NO: 50064 - DNA, 19 bp, Homo sapiens
tgatacatttggttttgct

SEQ ID NO: 50065 - DNA, 24 bp, Homo sapiens
tggtttaaaagttgctctttgtga

SEQ ID NO: 50066 - DNA, 17 bp, Homo sapiens
tttgaccaaactactga

SEQ ID NO: 50067 - DNA, 20 bp, Homo sapiens
caacgagtttctgaaattgc

SEQ ID NO: 50068 - DNA, 25 bp, Homo sapiens
aatctgttaagccatttatttataa

SEQ ID NO: 50069 - DNA, 21 bp, Homo sapiens
gaaagaaacagaatgtctgag

SEQ ID NO: 50070 - DNA, 19 bp, Homo sapiens
ttatgcaacagttaagtcc

SEQ ID NO: 50071 - DNA, 16 bp, Homo sapiens
agatgcaggaaatcag

SEQ ID NO: 50072 - DNA, 22 bp, Homo sapiens
aaataaaaatcattatatgtac

SEQ ID NO: 50073 - DNA, 22 bp, Homo sapiens
tgatataatttaagagttcttg

SEQ ID NO: 50074 - DNA, 26 bp, Homo sapiens
ttctctacaaaagaagtttagttaat

SEQ ID NO: 50075 - DNA, 17 bp, Homo sapiens
tgctacaatcagctccg

SEQ ID NO: 50076 - DNA, 20 bp, Homo sapiens
tccaagtgtcttatttttgt

SEQ ID NO: 50077 - DNA, 16 bp, Homo sapiens
ccactgttgctgagat

SEQ ID NO: 50078 - DNA, 18 bp, Homo sapiens
agcacctaggctaaaatg

SEQ ID NO: 50079 - DNA, 18 bp, Homo sapiens
tggtgaagtttcatttca

SEQ ID NO: 50080 - DNA, 16 bp, Homo sapiens
gtgctatttacggagc

SEQ ID NO: 50081 - DNA, 17 bp, Homo sapiens
ctgttaaactgtcaggt

SEQ ID NO: 50082 - DNA, 20 bp, Homo sapiens
agaaaatactggtgtgaaat

SEQ ID NO: 50083 - DNA, 24 bp, Homo sapiens
aaaagctacataataaataaaaat

SEQ ID NO: 50084 - DNA, 25 bp, Homo sapiens
tataagataaaattaaatactgatg

SEQ ID NO: 50085 - DNA, 19 bp, Homo sapiens
gaaggtttcagatagagcc

SEQ ID NO: 50086 - DNA, 22 bp, Homo sapiens
agtgcagttttaaaatcctttt

SEQ ID NO: 50087 - DNA, 16 bp, Homo sapiens
agcatcctttggtaac

SEQ ID NO: 50088 - DNA, 22 bp, Homo sapiens
cattttgatttttaaaaaatca

SEQ ID NO: 50089 - DNA, 16 bp, Homo sapiens
actgaatagccttgga

SEQ ID NO: 50090 - DNA, 18 bp, Homo sapiens
tctctgtgtacttcaggc

SEQ ID NO: 50091 - DNA, 16 bp, Homo sapiens
tggtcttgcaagatca

SEQ ID NO: 50092 - DNA, 19 bp, Homo sapiens
aattcatgctgttaccaaa

SEQ ID NO: 50093 - DNA, 21 bp, Homo sapiens
ctgttatgatggatcaatgtt

SEQ ID NO: 50094 - DNA, 19 bp, Homo sapiens
tttggactttttttccaag

SEQ ID NO: 50095 - DNA, 22 bp, Homo sapiens
aagagctgctaagatatgattt

SEQ ID NO: 50096 - DNA, 19 bp, Homo sapiens
tgtttgaaaattagggttt

SEQ ID NO: 50097 - DNA, 19 bp, Homo sapiens
tcctaattcacacactcga

SEQ ID NO: 50098 - DNA, 19 bp, Homo sapiens
tgtacagtttgttccccct

SEQ ID NO: 50099 - DNA, 19 bp, Homo sapiens
aagaatcattaagcctatg

SEQ ID NO: 50100 - DNA, 16 bp, Homo sapiens
agagctcttcaggtct

SEQ ID NO: 50101 - DNA, 19 bp, Homo sapiens
gctcctttcggatgatgga

SEQ ID NO: 50102 - DNA, 17 bp, Homo sapiens
tggctgtcaactttcga

SEQ ID NO: 50103 - DNA, 19 bp, Homo sapiens
tgtttgaatgaagaagcaa

SEQ ID NO: 50104 - DNA, 16 bp, Homo sapiens
ttggactcaacatagg

SEQ ID NO: 50105 - DNA, 19 bp, Homo sapiens
ccagaggaaagtcatatcc

SEQ ID NO: 50106 - DNA, 23 bp, Homo sapiens
caactgcaaatttatatccatca

SEQ ID NO: 50107 - DNA, 26 bp, Homo sapiens
tcaaattctaaaaactctatgaaaaa

SEQ ID NO: 50108 - DNA, 22 bp, Homo sapiens
aatagagtttgtcaaggatctt

SEQ ID NO: 50109 - DNA, 24 bp, Homo sapiens
tagcagatcatataagttgtataa

SEQ ID NO: 50110 - DNA, 16 bp, Homo sapiens
tctaacgctgatgcag

SEQ ID NO: 50111 - DNA, 18 bp, Homo sapiens
ttacgaaatcctgaagaa

SEQ ID NO: 50112 - DNA, 20 bp, Homo sapiens
tgtaaacagagtacatacat

SEQ ID NO: 50113 - DNA, 18 bp, Homo sapiens
ttactgtacctggtgaca

SEQ ID NO: 50114 - DNA, 18 bp, Homo sapiens
tcaacaaaatggagaagt

SEQ ID NO: 50115 - DNA, 21 bp, Homo sapiens
agcccaaaatgcccagtttaa

SEQ ID NO: 50116 - DNA, 19 bp, Homo sapiens
ataggaagtagaggaaagt

SEQ ID NO: 50117 - DNA, 18 bp, Homo sapiens
gttgcatgtacagagtca

SEQ ID NO: 50118 - DNA, 21 bp, Homo sapiens
ttgaattgatggcagatatct

SEQ ID NO: 50119 - DNA, 23 bp, Homo sapiens
gtgtagtagtgtaagattgagaa

SEQ ID NO: 50120 - DNA, 20 bp, Homo sapiens
gtggtgatacgagatcgtgc

SEQ ID NO: 50121 - DNA, 19 bp, Homo sapiens
cctagttctattttcttcc

SEQ ID NO: 50122 - DNA, 22 bp, Homo sapiens
gctcaaaaaaaaaaaaaagaaa

SEQ ID NO: 50123 - DNA, 18 bp, Homo sapiens
cactttaccaaggcacaa

SEQ ID NO: 50124 - DNA, 17 bp, Homo sapiens
tccttggagatttctca

SEQ ID NO: 50125 - DNA, 21 bp, Homo sapiens
ctgaaagttttctgaaaaata

SEQ ID NO: 50126 - DNA, 21 bp, Homo sapiens
acagtgtcccttgcaaaagga

SEQ ID NO: 50127 - DNA, 21 bp, Homo sapiens
ctagtaataggtttgggggta

SEQ ID NO: 50128 - DNA, 19 bp, Homo sapiens
cagaagtcacagaatgatt

SEQ ID NO: 50129 - DNA, 22 bp, Homo sapiens
tttaggaagtaggacatagtaa

SEQ ID NO: 50130 - DNA, 18 bp, Homo sapiens
ggtaaacttgcaggatac

SEQ ID NO: 50131 - DNA, 19 bp, Homo sapiens
tggtgattctctaattagg

SEQ ID NO: 50132 - DNA, 16 bp, Homo sapiens
tgtcgctgttggggta

SEQ ID NO: 50133 - DNA, 22 bp, Homo sapiens
aatgtgatggaatagttttcaa

SEQ ID NO: 50134 - DNA, 18 bp, Homo sapiens
acctcttgtcttgacaca

SEQ ID NO: 50135 - DNA, 20 bp, Homo sapiens
ttaatatcaaagtatcctgc

SEQ ID NO: 50136 - DNA, 20 bp, Homo sapiens
acaccaaattttattccaga

SEQ ID NO: 50137 - DNA, 20 bp, Homo sapiens
tgatgatactatctcagctt

SEQ ID NO: 50138 - DNA, 18 bp, Homo sapiens
caagtaagccaaagtttt

SEQ ID NO: 50139 - DNA, 18 bp, Homo sapiens
ccttacggaagttgcatt

SEQ ID NO: 50140 - DNA, 20 bp, Homo sapiens
cccagtaaataacttccaga

SEQ ID NO: 50141 - DNA, 25 bp, Homo sapiens
aaaagtcagatttattaaaactctg

SEQ ID NO: 50142 - DNA, 20 bp, Homo sapiens
tgtgtgtttatctgtaagtc

SEQ ID NO: 50143 - DNA, 20 bp, Homo sapiens
agttctgagcaaatacaagc

SEQ ID NO: 50144 - DNA, 19 bp, Homo sapiens
ctgaagtaacaaactatga

SEQ ID NO: 50145 - DNA, 16 bp, Homo sapiens
tgaggttgacagagaa

SEQ ID NO: 50146 - DNA, 16 bp, Homo sapiens
ttaagtcttctcggcc

SEQ ID NO: 50147 - DNA, 18 bp, Homo sapiens
gtggtcagtgccaaagtc

SEQ ID NO: 50148 - DNA, 20 bp, Homo sapiens
aacagtttttatgttcattt

SEQ ID NO: 50149 - DNA, 21 bp, Homo sapiens
agcttctatttacttcacaca

SEQ ID NO: 50150 - DNA, 18 bp, Homo sapiens
aaagtctttgcccctcca

SEQ ID NO: 50151 - DNA, 17 bp, Homo sapiens
agtcaccctctaactga

SEQ ID NO: 50152 - DNA, 24 bp, Homo sapiens
ttatagtcctgcagtatgctgttt

SEQ ID NO: 50153 - DNA, 19 bp, Homo sapiens
cagcatgctaatgaactta

SEQ ID NO: 50154 - DNA, 18 bp, Homo sapiens
atgggaatagagcaaaat

SEQ ID NO: 50155 - DNA, 17 bp, Homo sapiens
aataaagccatctggca

SEQ ID NO: 50156 - DNA, 20 bp, Homo sapiens
tgaaatggctcttattctat

SEQ ID NO: 50157 - DNA, 23 bp, Homo sapiens
aaaaacaaacataatatttaata

SEQ ID NO: 50158 - DNA, 20 bp, Homo sapiens
tccaattcttcacaggtaat

SEQ ID NO: 50159 - DNA, 21 bp, Homo sapiens
agactcacaagaattttctcc

SEQ ID NO: 50160 - DNA, 24 bp, Homo sapiens
ttttaatctaggatccaaatttta

SEQ ID NO: 50161 - DNA, 16 bp, Homo sapiens
ttctggcacgctttgg

SEQ ID NO: 50162 - DNA, 18 bp, Homo sapiens
agtattctttacatggct

SEQ ID NO: 50163 - DNA, 23 bp, Homo sapiens
atcatctttgtaattaaagctat

SEQ ID NO: 50164 - DNA, 22 bp, Homo sapiens
ttgtagtaattttcctcatctt

SEQ ID NO: 50165 - DNA, 18 bp, Homo sapiens
tgcaatttttttggacca

SEQ ID NO: 50166 - DNA, 24 bp, Homo sapiens
aactgtaaagctgcaatgaatttt

SEQ ID NO: 50167 - DNA, 18 bp, Homo sapiens
agtccgaagaagagaagc

SEQ ID NO: 50168 - DNA, 23 bp, Homo sapiens
aatagttcttctacttctgagaa

SEQ ID NO: 50169 - DNA, 24 bp, Homo sapiens
gaatgatgtagatactaggttaat

SEQ ID NO: 50170 - DNA, 18 bp, Homo sapiens
acattctctcacaatggt

SEQ ID NO: 50171 - DNA, 23 bp, Homo sapiens
ggcaaagcattaggtacttggtt

SEQ ID NO: 50172 - DNA, 21 bp, Homo sapiens
gcgatccagtgattccttgag

SEQ ID NO: 50173 - DNA, 23 bp, Homo sapiens
gataaagaagaactttcattctc

SEQ ID NO: 50174 - DNA, 16 bp, Homo sapiens
tctcacctcagatgag

SEQ ID NO: 50175 - DNA, 17 bp, Homo sapiens
gatggactttttaacca

SEQ ID NO: 50176 - DNA, 18 bp, Homo sapiens
ctccttcctaacagttta

SEQ ID NO: 50177 - DNA, 23 bp, Homo sapiens
ccagtattggcttctctgtccac

SEQ ID NO: 50178 - DNA, 21 bp, Homo sapiens
gccactttgcttttaaaatga

SEQ ID NO: 50179 - DNA, 18 bp, Homo sapiens
tcagaacagcttctgaat

SEQ ID NO: 50180 - DNA, 22 bp, Homo sapiens
atctcctagttgtttttagagc

SEQ ID NO: 50181 - DNA, 16 bp, Homo sapiens
ggacacccaccaaaag

SEQ ID NO: 50182 - DNA, 25 bp, Homo sapiens
ttttgttttttaatatgtatgtaga

SEQ ID NO: 50183 - DNA, 21 bp, Homo sapiens
ttggctttctggaataattct

SEQ ID NO: 50184 - DNA, 24 bp, Homo sapiens
ttatgaaatatatatatttttatt

SEQ ID NO: 50185 - DNA, 23 bp, Homo sapiens
atacatttcattcaaatttatcc

SEQ ID NO: 50186 - DNA, 16 bp, Homo sapiens
gtccggtgttcacgtc

SEQ ID NO: 50187 - DNA, 18 bp, Homo sapiens
gggttaacctgcataaaa

SEQ ID NO: 50188 - DNA, 17 bp, Homo sapiens
agctgaagaggaagcat

SEQ ID NO: 50189 - DNA, 28 bp, Homo sapiens
aattaaacaattaaaacaatttaaaaaa

SEQ ID NO: 50190 - DNA, 19 bp, Homo sapiens
tgtatgactacgtggaact

SEQ ID NO: 50191 - DNA, 18 bp, Homo sapiens
tgaattcctcatttgtct

SEQ ID NO: 50192 - DNA, 23 bp, Homo sapiens
tttattttatagtatgtccaaga

SEQ ID NO: 50193 - DNA, 16 bp, Homo sapiens
ttgctcaagcaacgtg

SEQ ID NO: 50194 - DNA, 22 bp, Homo sapiens
tttaactggaatttgcattttt

SEQ ID NO: 50195 - DNA, 17 bp, Homo sapiens
tgggtgacagagaaaga

SEQ ID NO: 50196 - DNA, 23 bp, Homo sapiens
aggagaaagtatcactctgttta

SEQ ID NO: 50197 - DNA, 16 bp, Homo sapiens
ctggaaaccaggaggt

SEQ ID NO: 50198 - DNA, 16 bp, Homo sapiens
ctaggtggtacatgcc

SEQ ID NO: 50199 - DNA, 23 bp, Homo sapiens
agttattataactctaagaaaag

SEQ ID NO: 50200 - DNA, 19 bp, Homo sapiens
ttagctttgatgttaacaa

SEQ ID NO: 50201 - DNA, 25 bp, Homo sapiens
taaactatttatctacattccattc

SEQ ID NO: 50202 - DNA, 18 bp, Homo sapiens
gcaaaacaggaagcatac

SEQ ID NO: 50203 - DNA, 17 bp, Homo sapiens
ttctttgttgcttggtt

SEQ ID NO: 50204 - DNA, 18 bp, Homo sapiens
tgcatccttatttacaaa

SEQ ID NO: 50205 - DNA, 17 bp, Homo sapiens
tggctttttcctgcgat

SEQ ID NO: 50206 - DNA, 19 bp, Homo sapiens
ccgcacctggccttaattt

SEQ ID NO: 50207 - DNA, 23 bp, Homo sapiens
ttcgaactcccgacctcaggtga

SEQ ID NO: 50208 - DNA, 23 bp, Homo sapiens
atttccattagtatcatcttcca

SEQ ID NO: 50209 - DNA, 23 bp, Homo sapiens
atgtgagccactgtgcccagcct

SEQ ID NO: 50210 - DNA, 19 bp, Homo sapiens
tactatcagggtaatcgtt

SEQ ID NO: 50211 - DNA, 23 bp, Homo sapiens
aagaagccatcttgaacatcttt

SEQ ID NO: 50212 - DNA, 19 bp, Homo sapiens
atgtatttacctatggtac

SEQ ID NO: 50213 - DNA, 20 bp, Homo sapiens
tgaccgtggagaagtagaat

SEQ ID NO: 50214 - DNA, 17 bp, Homo sapiens
tcaatgaggcctcttat

SEQ ID NO: 50215 - DNA, 19 bp, Homo sapiens
gtcatccatgaatctattt

SEQ ID NO: 50216 - DNA, 17 bp, Homo sapiens
agaaaggaacaatccta

SEQ ID NO: 50217 - DNA, 18 bp, Homo sapiens
agagagccaaagtaccat

SEQ ID NO: 50218 - DNA, 18 bp, Homo sapiens
gacttttgaagctttcag

SEQ ID NO: 50219 - DNA, 19 bp, Homo sapiens
acttgagcatgtctaagaa

SEQ ID NO: 50220 - DNA, 18 bp, Homo sapiens
tttttgtgaagaggagga

SEQ ID NO: 50221 - DNA, 17 bp, Homo sapiens
gctgccctaaaggacac

SEQ ID NO: 50222 - DNA, 22 bp, Homo sapiens
tagtgttaatgagtgcttttta

SEQ ID NO: 50223 - DNA, 18 bp, Homo sapiens
agggatttggtaggttct

SEQ ID NO: 50224 - DNA, 18 bp, Homo sapiens
tctgtcaaagcaagatct

SEQ ID NO: 50225 - DNA, 20 bp, Homo sapiens
gcaacatcagataaaatcca

SEQ ID NO: 50226 - DNA, 19 bp, Homo sapiens
gctcagaccaatactgtgt

SEQ ID NO: 50227 - DNA, 20 bp, Homo sapiens
tttcaattcttcaaagacac

SEQ ID NO: 50228 - DNA, 18 bp, Homo sapiens
aattgattctagcacgct

SEQ ID NO: 50229 - DNA, 16 bp, Homo sapiens
agcacgttaaaagtgt

SEQ ID NO: 50230 - DNA, 19 bp, Homo sapiens
gctgttctcaaactcctga

SEQ ID NO: 50231 - DNA, 19 bp, Homo sapiens
tcaagaacatcttccattg

SEQ ID NO: 50232 - DNA, 16 bp, Homo sapiens
tgagccactgcacccg

SEQ ID NO: 50233 - DNA, 22 bp, Homo sapiens
tataactttaaagtgaacataa

SEQ ID NO: 50234 - DNA, 21 bp, Homo sapiens
tggataaacctgatttttttc

SEQ ID NO: 50235 - DNA, 19 bp, Homo sapiens
ctgtggtaaaaaaaaaaaa

SEQ ID NO: 50236 - DNA, 18 bp, Homo sapiens
cctggagaagagtacccc

SEQ ID NO: 50237 - DNA, 24 bp, Homo sapiens
ggacatggtttaaaatagttttac

SEQ ID NO: 50238 - DNA, 20 bp, Homo sapiens
cgtaagaaattaaaacctta

SEQ ID NO: 50239 - DNA, 16 bp, Homo sapiens
tgtgttctcagagtcc

SEQ ID NO: 50240 - DNA, 21 bp, Homo sapiens
ttaagcttataaagttgaact

SEQ ID NO: 50241 - DNA, 21 bp, Homo sapiens
ggaccacaaaatagactgtac

SEQ ID NO: 50242 - DNA, 17 bp, Homo sapiens
cgtcgtgaccaagatgt

SEQ ID NO: 50243 - DNA, 21 bp, Homo sapiens
aatcactgatgtggatacaaa

SEQ ID NO: 50244 - DNA, 18 bp, Homo sapiens
aggtcaaagcaatatgga

SEQ ID NO: 50245 - DNA, 20 bp, Homo sapiens
acacaaattacattctgcta

SEQ ID NO: 50246 - DNA, 19 bp, Homo sapiens
gtaattggagcattttggt

SEQ ID NO: 50247 - DNA, 17 bp, Homo sapiens
tggcaaggtgagtatgt

SEQ ID NO: 50248 - DNA, 18 bp, Homo sapiens
ggcaatttactagggcca

SEQ ID NO: 50249 - DNA, 21 bp, Homo sapiens
agaaagacatattggaagtaa

SEQ ID NO: 50250 - DNA, 23 bp, Homo sapiens
aaaattttcaatggagatcttac

SEQ ID NO: 50251 - DNA, 24 bp, Homo sapiens
gaatgattatttaactttggaaaa

SEQ ID NO: 50252 - DNA, 21 bp, Homo sapiens
gggaaaagaactgtggttaaa

SEQ ID NO: 50253 - DNA, 23 bp, Homo sapiens
aatatatattctctgtaagaatg

SEQ ID NO: 50254 - DNA, 18 bp, Homo sapiens
ggaaagtcttttcccatt

SEQ ID NO: 50255 - DNA, 24 bp, Homo sapiens
ttttgcatttttttagtaagatct

SEQ ID NO: 50256 - DNA, 18 bp, Homo sapiens
gccaacatgcgaacttgg

SEQ ID NO: 50257 - DNA, 24 bp, Homo sapiens
taatgagtaatttttctctatttc

SEQ ID NO: 50258 - DNA, 20 bp, Homo sapiens
cagcattccaaatacttcat

SEQ ID NO: 50259 - DNA, 17 bp, Homo sapiens
tgggccattcttaatgt

SEQ ID NO: 50260 - DNA, 24 bp, Homo sapiens
ttagctatttttaatattgcaact

SEQ ID NO: 50261 - DNA, 21 bp, Homo sapiens
tacacaatttcttgctgacaa

SEQ ID NO: 50262 - DNA, 24 bp, Homo sapiens
tgacagaagtataagaattaagaa

SEQ ID NO: 50263 - DNA, 18 bp, Homo sapiens
acctggaagaatctccct

SEQ ID NO: 50264 - DNA, 21 bp, Homo sapiens
agctagtatgttattatgtct

SEQ ID NO: 50265 - DNA, 20 bp, Homo sapiens
cctgagctttcaagtatgca

SEQ ID NO: 50266 - DNA, 20 bp, Homo sapiens
agtagggtttgaaattagaa

SEQ ID NO: 50267 - DNA, 21 bp, Homo sapiens
agcaagcatatgataacagca

SEQ ID NO: 50268 - DNA, 20 bp, Homo sapiens
aagattgttccaggacacga

SEQ ID NO: 50269 - DNA, 20 bp, Homo sapiens
actggattataaactctctt

SEQ ID NO: 50270 - DNA, 20 bp, Homo sapiens
tcagcaaacagcttttgaaa

SEQ ID NO: 50271 - DNA, 20 bp, Homo sapiens
ccagaaagaatgcagtttca

SEQ ID NO: 50272 - DNA, 20 bp, Homo sapiens
ttcttgtaccaaaagacaga

SEQ ID NO: 50273 - DNA, 18 bp, Homo sapiens
caacgtcagtaaaacaga

SEQ ID NO: 50274 - DNA, 20 bp, Homo sapiens
gcttgtcaaaaaatctggag

SEQ ID NO: 50275 - DNA, 16 bp, Homo sapiens
ggcaaacaaagcctgt

SEQ ID NO: 50276 - DNA, 20 bp, Homo sapiens
tttacattacattttttttt

SEQ ID NO: 50277 - DNA, 21 bp, Homo sapiens
tactcatccatatataccttt

SEQ ID NO: 50278 - DNA, 25 bp, Homo sapiens
tttggatgaaatttataatagaaaa

SEQ ID NO: 50279 - DNA, 20 bp, Homo sapiens
aaatctagctttaacttttt

SEQ ID NO: 50280 - DNA, 18 bp, Homo sapiens
tgtagccctatctgcgaa

SEQ ID NO: 50281 - DNA, 19 bp, Homo sapiens
ccaatattcccaacctaaa

SEQ ID NO: 50282 - DNA, 19 bp, Homo sapiens
agaacctcaccttgtgaaa

SEQ ID NO: 50283 - DNA, 19 bp, Homo sapiens
actgtgccagttgagtaca

SEQ ID NO: 50284 - DNA, 19 bp, Homo sapiens
aaagtcttctaaacgtcta

SEQ ID NO: 50285 - DNA, 22 bp, Homo sapiens
aaaagttgaatgaatgttgttt

SEQ ID NO: 50286 - DNA, 22 bp, Homo sapiens
tcagtatcttgaagatttagcc

SEQ ID NO: 50287 - DNA, 24 bp, Homo sapiens
taaatgatttatttttttcatttt

SEQ ID NO: 50288 - DNA, 24 bp, Homo sapiens
acttacctatagaaatcctcaata

SEQ ID NO: 50289 - DNA, 18 bp, Homo sapiens
gtttctgaaacttttgga

SEQ ID NO: 50290 - DNA, 21 bp, Homo sapiens
gctaagtattgttaactaatt

SEQ ID NO: 50291 - DNA, 24 bp, Homo sapiens
tttagattatctggttttggaatg

SEQ ID NO: 50292 - DNA, 17 bp, Homo sapiens
ggctcccacacacacat

SEQ ID NO: 50293 - DNA, 28 bp, Homo sapiens
tccttttattttattaaactacacaaat

SEQ ID NO: 50294 - DNA, 26 bp, Homo sapiens
ctatttagaatttacttaatttttcc

SEQ ID NO: 50295 - DNA, 17 bp, Homo sapiens
tctaatcaccagatgtg

SEQ ID NO: 50296 - DNA, 23 bp, Homo sapiens
tctggataaagtatgatacttta

SEQ ID NO: 50297 - DNA, 17 bp, Homo sapiens
aagacttttccagtcct

SEQ ID NO: 50298 - DNA, 22 bp, Homo sapiens
aattttacttggaaaagttata

SEQ ID NO: 50299 - DNA, 16 bp, Homo sapiens
accctcataggcaaaa

SEQ ID NO: 50300 - DNA, 21 bp, Homo sapiens
tgttataaggttttgattcca

SEQ ID NO: 50301 - DNA, 24 bp, Homo sapiens
tttcacttttaagcatatcataga

SEQ ID NO: 50302 - DNA, 22 bp, Homo sapiens
ttgctaatcagattcaagagga

SEQ ID NO: 50303 - DNA, 19 bp, Homo sapiens
tcagggaatgaaaagtaca

SEQ ID NO: 50304 - DNA, 25 bp, Homo sapiens
gtaaatattcttccttattttgcct

SEQ ID NO: 50305 - DNA, 22 bp, Homo sapiens
tatataaatacgaataaatcga

SEQ ID NO: 50306 - DNA, 17 bp, Homo sapiens
agagactgctaccaagg

SEQ ID NO: 50307 - DNA, 19 bp, Homo sapiens
aaaaaattcatgggttggc

SEQ ID NO: 50308 - DNA, 25 bp, Homo sapiens
gtagagttatttataatcttgtaaa

SEQ ID NO: 50309 - DNA, 18 bp, Homo sapiens
cgtcatcaataactccac

SEQ ID NO: 50310 - DNA, 20 bp, Homo sapiens
aatacttttggaaataaggt

SEQ ID NO: 50311 - DNA, 18 bp, Homo sapiens
ccctgaaaagtcacagag

SEQ ID NO: 50312 - DNA, 26 bp, Homo sapiens
atataaaatattaaatatattttaat

SEQ ID NO: 50313 - DNA, 21 bp, Homo sapiens
ccaataaacttctttaaaaac

SEQ ID NO: 50314 - DNA, 17 bp, Homo sapiens
ccagagattgtggtgga

SEQ ID NO: 50315 - DNA, 27 bp, Homo sapiens
tttttaaagaaaattttttaaaaagag

SEQ ID NO: 50316 - DNA, 24 bp, Homo sapiens
ttctagtgccagtcagagcactga

SEQ ID NO: 50317 - DNA, 24 bp, Homo sapiens
tgtgattttattgaaagtatagtt

SEQ ID NO: 50318 - DNA, 16 bp, Homo sapiens
aggcaaatgttgcttt

SEQ ID NO: 50319 - DNA, 24 bp, Homo sapiens
attaaaatctaaattttcattttg

SEQ ID NO: 50320 - DNA, 18 bp, Homo sapiens
acagggcttttggaaaga

SEQ ID NO: 50321 - DNA, 17 bp, Homo sapiens
tgactgtattttttccc

SEQ ID NO: 50322 - DNA, 21 bp, Homo sapiens
caaagtttttttagctaaaaa

SEQ ID NO: 50323 - DNA, 16 bp, Homo sapiens
tttccatcgcatgtga

SEQ ID NO: 50324 - DNA, 25 bp, Homo sapiens
ttttcctttttaattatgagataaa

SEQ ID NO: 50325 - DNA, 19 bp, Homo sapiens
ccaagttaaaaagcatttt

SEQ ID NO: 50326 - DNA, 22 bp, Homo sapiens
cttaatgtaacattttgtactt

SEQ ID NO: 50327 - DNA, 18 bp, Homo sapiens
gctgcttgctcacatatg

SEQ ID NO: 50328 - DNA, 26 bp, Homo sapiens
gttattttaaatataaaatgtgtagg

SEQ ID NO: 50329 - DNA, 22 bp, Homo sapiens
ctaacaaacaggtgatatattt

SEQ ID NO: 50330 - DNA, 18 bp, Homo sapiens
tattgtagccgagtatct

SEQ ID NO: 50331 - DNA, 17 bp, Homo sapiens
gaacaaaggcccaagct

SEQ ID NO: 50332 - DNA, 19 bp, Homo sapiens
atcagaaaattcttcttgc

SEQ ID NO: 50333 - DNA, 22 bp, Homo sapiens
ttggtctaaatatgttatttac

SEQ ID NO: 50334 - DNA, 18 bp, Homo sapiens
aagaagcacagaattctt

SEQ ID NO: 50335 - DNA, 19 bp, Homo sapiens
acaaaacaaaacaaagcaa

SEQ ID NO: 50336 - DNA, 24 bp, Homo sapiens
agatataaaaagtggcttaggagg

SEQ ID NO: 50337 - DNA, 18 bp, Homo sapiens
gatgcagtgagccgtgac

SEQ ID NO: 50338 - DNA, 21 bp, Homo sapiens
ttctgcattttgctgatgtga

SEQ ID NO: 50339 - DNA, 18 bp, Homo sapiens
acaaagggagaagctacg

SEQ ID NO: 50340 - DNA, 21 bp, Homo sapiens
aggcatataagaattagagat

SEQ ID NO: 50341 - DNA, 16 bp, Homo sapiens
tagagcatccttacag

SEQ ID NO: 50342 - DNA, 21 bp, Homo sapiens
aattttccagaacttactggt

SEQ ID NO: 50343 - DNA, 16 bp, Homo sapiens
tgaacctccacctgct

SEQ ID NO: 50344 - DNA, 17 bp, Homo sapiens
tggatgtgtcattacgt

SEQ ID NO: 50345 - DNA, 24 bp, Homo sapiens
cttctaacaatactttatatattt

SEQ ID NO: 50346 - DNA, 18 bp, Homo sapiens
cagacagccgtgacttac

SEQ ID NO: 50347 - DNA, 22 bp, Homo sapiens
atattctcaataaaatcaccaa

SEQ ID NO: 50348 - DNA, 18 bp, Homo sapiens
cacttataccccttgtgt

SEQ ID NO: 50349 - DNA, 21 bp, Homo sapiens
gctctgtaattgattacaaag

SEQ ID NO: 50350 - DNA, 18 bp, Homo sapiens
ttcaacaagtccaatacc

SEQ ID NO: 50351 - DNA, 16 bp, Homo sapiens
gctgggtatcttagac

SEQ ID NO: 50352 - DNA, 22 bp, Homo sapiens
tctaaaagcttaatcgtgatat

SEQ ID NO: 50353 - DNA, 23 bp, Homo sapiens
attttatcatttattacagtaag

SEQ ID NO: 50354 - DNA, 22 bp, Homo sapiens
tatttgattttttgctgagtaa

SEQ ID NO: 50355 - DNA, 24 bp, Homo sapiens
aattttttctttttaaattatatt

SEQ ID NO: 50356 - DNA, 25 bp, Homo sapiens
ataaaaaatagtagatgatgaaatt

SEQ ID NO: 50357 - DNA, 24 bp, Homo sapiens
acaaggataatgaaaacctctata

SEQ ID NO: 50358 - DNA, 23 bp, Homo sapiens
agattccattttttactgctaga

SEQ ID NO: 50359 - DNA, 22 bp, Homo sapiens
ttaaggatttgcgtattactca

SEQ ID NO: 50360 - DNA, 16 bp, Homo sapiens
gagccaatgtgcctgg

SEQ ID NO: 50361 - DNA, 17 bp, Homo sapiens
acattgtagggtttgca

SEQ ID NO: 50362 - DNA, 21 bp, Homo sapiens
tgcatcataaacacttactga

SEQ ID NO: 50363 - DNA, 18 bp, Homo sapiens
agacatgagtcagtgtct

SEQ ID NO: 50364 - DNA, 18 bp, Homo sapiens
ttatgtagttccagttgt

SEQ ID NO: 50365 - DNA, 19 bp, Homo sapiens
tatttcacaggcttaacca

SEQ ID NO: 50366 - DNA, 22 bp, Homo sapiens
atagcccatgtcatttaaaatt

SEQ ID NO: 50367 - DNA, 18 bp, Homo sapiens
accattttctctcagtaa

SEQ ID NO: 50368 - DNA, 21 bp, Homo sapiens
gtctgtgacaatgaaaccaag

SEQ ID NO: 50369 - DNA, 18 bp, Homo sapiens
ggatcttcgaagacaact

SEQ ID NO: 50370 - DNA, 22 bp, Homo sapiens
accagttttacagttagatgag

SEQ ID NO: 50371 - DNA, 19 bp, Homo sapiens
tcattccctacatattttt

SEQ ID NO: 50372 - DNA, 17 bp, Homo sapiens
tggataactgcaacaaa

SEQ ID NO: 50373 - DNA, 18 bp, Homo sapiens
agaagttttctagtcaga

SEQ ID NO: 50374 - DNA, 17 bp, Homo sapiens
tcacgcagcgcatgact

SEQ ID NO: 50375 - DNA, 23 bp, Homo sapiens
gtcttcatgctagtttaaactaa

SEQ ID NO: 50376 - DNA, 20 bp, Homo sapiens
aacatacagtaaaaatacag

SEQ ID NO: 50377 - DNA, 21 bp, Homo sapiens
ttatggtgaaactagttgtca

SEQ ID NO: 50378 - DNA, 18 bp, Homo sapiens
cctaggctacaaacctgt

SEQ ID NO: 50379 - DNA, 19 bp, Homo sapiens
cctctgtctcccaaagtgc

SEQ ID NO: 50380 - DNA, 22 bp, Homo sapiens
tatggtagagaaatctatagga

SEQ ID NO: 50381 - DNA, 19 bp, Homo sapiens
tgaagtacagaaaaacagc

SEQ ID NO: 50382 - DNA, 21 bp, Homo sapiens
cttcaaataacttaagggcct

SEQ ID NO: 50383 - DNA, 21 bp, Homo sapiens
tgatctcttacctatgactct

SEQ ID NO: 50384 - DNA, 18 bp, Homo sapiens
ccaatcttctaccagtgt

SEQ ID NO: 50385 - DNA, 16 bp, Homo sapiens
tgggagaagtgggtcc

SEQ ID NO: 50386 - DNA, 22 bp, Homo sapiens
aagtatcattctccatgaatgt

SEQ ID NO: 50387 - DNA, 19 bp, Homo sapiens
gcatcttataccaaggccc

SEQ ID NO: 50388 - DNA, 23 bp, Homo sapiens
cataaagacactgagatttaaaa

SEQ ID NO: 50389 - DNA, 16 bp, Homo sapiens
tgctgacctacctgaa

SEQ ID NO: 50390 - DNA, 21 bp, Homo sapiens
acttttatttgatattggaga

SEQ ID NO: 50391 - DNA, 18 bp, Homo sapiens
tgtccagtctttgtggct

SEQ ID NO: 50392 - DNA, 24 bp, Homo sapiens
attttagttttgaaattttttcag

SEQ ID NO: 50393 - DNA, 16 bp, Homo sapiens
ggctgtagataggcca

SEQ ID NO: 50394 - DNA, 19 bp, Homo sapiens
gtgtacttgataggcattt

SEQ ID NO: 50395 - DNA, 20 bp, Homo sapiens
tgttttagatatgctgggta

SEQ ID NO: 50396 - DNA, 19 bp, Homo sapiens
acctgtttgaaaaacattt

SEQ ID NO: 50397 - DNA, 25 bp, Homo sapiens
gttagtacaatactatttcaagcaa

SEQ ID NO: 50398 - DNA, 16 bp, Homo sapiens
gatccaatgctggcct

SEQ ID NO: 50399 - DNA, 18 bp, Homo sapiens
taacacattccctggatt

SEQ ID NO: 50400 - DNA, 20 bp, Homo sapiens
aaacataaatgttttcatct

SEQ ID NO: 50401 - DNA, 17 bp, Homo sapiens
tcatccaggccttcaaa

SEQ ID NO: 50402 - DNA, 24 bp, Homo sapiens
atttagctttattcagaaagattt

SEQ ID NO: 50403 - DNA, 17 bp, Homo sapiens
gcacaagtcagtgtctt

SEQ ID NO: 50404 - DNA, 21 bp, Homo sapiens
tttccacttctcttatttaca

SEQ ID NO: 50405 - DNA, 16 bp, Homo sapiens
ttcacacattggcttt

SEQ ID NO: 50406 - DNA, 20 bp, Homo sapiens
acaaagaaaacccttttgaa

SEQ ID NO: 50407 - DNA, 23 bp, Homo sapiens
actctttagataaacaggtcata

SEQ ID NO: 50408 - DNA, 22 bp, Homo sapiens
tcatgacatttggataaagaca

SEQ ID NO: 50409 - DNA, 20 bp, Homo sapiens
aaatttacaacagtttgagt

SEQ ID NO: 50410 - DNA, 24 bp, Homo sapiens
acaaaatgtgaaattcttcaatta

SEQ ID NO: 50411 - DNA, 20 bp, Homo sapiens
tgttttttgtttgttttttt

SEQ ID NO: 50412 - DNA, 23 bp, Homo sapiens
atatcatgaatcaagtatggaag

SEQ ID NO: 50413 - DNA, 22 bp, Homo sapiens
ttagaaatttaatatgtcaacg

SEQ ID NO: 50414 - DNA, 17 bp, Homo sapiens
ccctgaacatgtgtaga

SEQ ID NO: 50415 - DNA, 22 bp, Homo sapiens
ctcatttttactcaaactattg

SEQ ID NO: 50416 - DNA, 16 bp, Homo sapiens
ttgcaggggttgtgga

SEQ ID NO: 50417 - DNA, 19 bp, Homo sapiens
tgtcagactgtacttccat

SEQ ID NO: 50418 - DNA, 17 bp, Homo sapiens
tctctagaactgagttt

SEQ ID NO: 50419 - DNA, 19 bp, Homo sapiens
atcatggagaaatctgctt

SEQ ID NO: 50420 - DNA, 27 bp, Homo sapiens
aacaaatttagaggttatagatttaat

SEQ ID NO: 50421 - DNA, 18 bp, Homo sapiens
ttctcgcaaacgagccga

SEQ ID NO: 50422 - DNA, 16 bp, Homo sapiens
aacttgttgcaactgt

SEQ ID NO: 50423 - DNA, 20 bp, Homo sapiens
tttcttttaaaagcaaaaga

SEQ ID NO: 50424 - DNA, 22 bp, Homo sapiens
gcattgttctttgtgatttttt

SEQ ID NO: 50425 - DNA, 20 bp, Homo sapiens
actgcccaccagaaccttat

SEQ ID NO: 50426 - DNA, 17 bp, Homo sapiens
gcaacactcattacatt

SEQ ID NO: 50427 - DNA, 19 bp, Homo sapiens
tgtgtaagcaagaatgcct

SEQ ID NO: 50428 - DNA, 22 bp, Homo sapiens
taatcatgttaaaattcagccg

SEQ ID NO: 50429 - DNA, 18 bp, Homo sapiens
tttttccgatgctgtttg

SEQ ID NO: 50430 - DNA, 24 bp, Homo sapiens
ttactgcaaggagatataaatatc

SEQ ID NO: 50431 - DNA, 20 bp, Homo sapiens
catgagaagacaaaagaggt

SEQ ID NO: 50432 - DNA, 25 bp, Homo sapiens
tgtttataggtatatattggggaaa

SEQ ID NO: 50433 - DNA, 19 bp, Homo sapiens
ggcaacttctagataattt

SEQ ID NO: 50434 - DNA, 24 bp, Homo sapiens
tgttaagcagtcactaccattgta

SEQ ID NO: 50435 - DNA, 17 bp, Homo sapiens
ctgcatagatttctgca

SEQ ID NO: 50436 - DNA, 20 bp, Homo sapiens
agtgaatgacattatatctc

SEQ ID NO: 50437 - DNA, 24 bp, Homo sapiens
ttaaaaaccaaaaattctaaattc

SEQ ID NO: 50438 - DNA, 21 bp, Homo sapiens
gatgctttctggctggattta

SEQ ID NO: 50439 - DNA, 19 bp, Homo sapiens
caggaggcaaaataaatct

SEQ ID NO: 50440 - DNA, 17 bp, Homo sapiens
acagctttactctatgc

SEQ ID NO: 50441 - DNA, 26 bp, Homo sapiens
taaaaatttattataatttcacttta

SEQ ID NO: 50442 - DNA, 18 bp, Homo sapiens
tccttttccatcctaggt

SEQ ID NO: 50443 - DNA, 19 bp, Homo sapiens
caagctagaaatagttgta

SEQ ID NO: 50444 - DNA, 19 bp, Homo sapiens
ctgttttgtttgccacctt

SEQ ID NO: 50445 - DNA, 19 bp, Homo sapiens
gagcctctaatatttacct

SEQ ID NO: 50446 - DNA, 22 bp, Homo sapiens
gagcttccaaatagtatgttct

SEQ ID NO: 50447 - DNA, 20 bp, Homo sapiens
gcatctgtacagtgtctata

SEQ ID NO: 50448 - DNA, 16 bp, Homo sapiens
gaagaaggaagccaga

SEQ ID NO: 50449 - DNA, 23 bp, Homo sapiens
attttatatatatgatgcttagt

SEQ ID NO: 50450 - DNA, 20 bp, Homo sapiens
actggaataagtttacaggt

SEQ ID NO: 50451 - DNA, 22 bp, Homo sapiens
tgtttgaactgtatttcagaac

SEQ ID NO: 50452 - DNA, 16 bp, Homo sapiens
tctggctcccctatac

SEQ ID NO: 50453 - DNA, 19 bp, Homo sapiens
aacatttagagttgggagt

SEQ ID NO: 50454 - DNA, 21 bp, Homo sapiens
aaaatgcaatttacctagtaa

SEQ ID NO: 50455 - DNA, 18 bp, Homo sapiens
agaccgattttttttcct

SEQ ID NO: 50456 - DNA, 19 bp, Homo sapiens
tagctttgggttttacaca

SEQ ID NO: 50457 - DNA, 24 bp, Homo sapiens
tctcttagaaatctacagaagtat

SEQ ID NO: 50458 - DNA, 18 bp, Homo sapiens
tgccccacattgcttcgt

SEQ ID NO: 50459 - DNA, 22 bp, Homo sapiens
agatgttacaacccattactag

SEQ ID NO: 50460 - DNA, 23 bp, Homo sapiens
tacctgaatgattcctgcctggc

SEQ ID NO: 50461 - DNA, 19 bp, Homo sapiens
atgaaggagttatgtgtgt

SEQ ID NO: 50462 - DNA, 17 bp, Homo sapiens
aacctcagcactacact

SEQ ID NO: 50463 - DNA, 20 bp, Homo sapiens
agactacgaacatatgaaca

SEQ ID NO: 50464 - DNA, 20 bp, Homo sapiens
taagttctagtcttatctct

SEQ ID NO: 50465 - DNA, 20 bp, Homo sapiens
agcaatcccctcatcaacac

SEQ ID NO: 50466 - DNA, 16 bp, Homo sapiens
atccctctgcttcagg

SEQ ID NO: 50467 - DNA, 21 bp, Homo sapiens
aaagtgctgagattacaggca

SEQ ID NO: 50468 - DNA, 20 bp, Homo sapiens
ttttaaatagacggaaagaa

SEQ ID NO: 50469 - DNA, 19 bp, Homo sapiens
tgtgaactaaaatttgtct

SEQ ID NO: 50470 - DNA, 19 bp, Homo sapiens
tgcttggtaatgaagttct

SEQ ID NO: 50471 - DNA, 23 bp, Homo sapiens
tctgttgatatctttgattactt

SEQ ID NO: 50472 - DNA, 24 bp, Homo sapiens
aaaaaatcaagtcaaatttcttac

SEQ ID NO: 50473 - DNA, 16 bp, Homo sapiens
tttgggactctgccat

SEQ ID NO: 50474 - DNA, 24 bp, Homo sapiens
tattcatagaagagaaaaacagtt

SEQ ID NO: 50475 - DNA, 21 bp, Homo sapiens
gtgtgtgtgtgtgtatatata

SEQ ID NO: 50476 - DNA, 16 bp, Homo sapiens
ccattgcacttccgtc

SEQ ID NO: 50477 - DNA, 23 bp, Homo sapiens
gaatttaaatgactcataaaatt

SEQ ID NO: 50478 - DNA, 19 bp, Homo sapiens
ttgtagagcattgtacaat

SEQ ID NO: 50479 - DNA, 20 bp, Homo sapiens
agaatggagaaatgttaatt

SEQ ID NO: 50480 - DNA, 20 bp, Homo sapiens
tacctggcatatttgagact

SEQ ID NO: 50481 - DNA, 17 bp, Homo sapiens
tcttagggttctgtttt

SEQ ID NO: 50482 - DNA, 19 bp, Homo sapiens
agttttcagaaaagaagcc

SEQ ID NO: 50483 - DNA, 18 bp, Homo sapiens
ggaaccagttaccatgaa

SEQ ID NO: 50484 - DNA, 18 bp, Homo sapiens
cacagccaccaagtcttt

SEQ ID NO: 50485 - DNA, 21 bp, Homo sapiens
tctctacattttatgaaagtc

SEQ ID NO: 50486 - DNA, 20 bp, Homo sapiens
gggtcagttgtattttgttt

SEQ ID NO: 50487 - DNA, 16 bp, Homo sapiens
tcaaggctgcgcttac

SEQ ID NO: 50488 - DNA, 20 bp, Homo sapiens
tattagatcagtagcaaagc

SEQ ID NO: 50489 - DNA, 16 bp, Homo sapiens
atgctttccagctctc

SEQ ID NO: 50490 - DNA, 21 bp, Homo sapiens
tatttccctgaaaacctcttc

SEQ ID NO: 50491 - DNA, 17 bp, Homo sapiens
aagctgcactttaggat

SEQ ID NO: 50492 - DNA, 18 bp, Homo sapiens
gaagtggaagagatgtgt

SEQ ID NO: 50493 - DNA, 16 bp, Homo sapiens
atgagccaccgtgccc

SEQ ID NO: 50494 - DNA, 22 bp, Homo sapiens
acacttagcaggttgcaggcca

SEQ ID NO: 50495 - DNA, 23 bp, Homo sapiens
atatatacttcagagagttgtct

SEQ ID NO: 50496 - DNA, 22 bp, Homo sapiens
actacaaaagttcctttgtatt

SEQ ID NO: 50497 - DNA, 20 bp, Homo sapiens
gccatgataggctcctgaaa

SEQ ID NO: 50498 - DNA, 24 bp, Homo sapiens
atagtttttttttttttttttttc

SEQ ID NO: 50499 - DNA, 18 bp, Homo sapiens
tctttgtgagttgtccat

SEQ ID NO: 50500 - DNA, 20 bp, Homo sapiens
gatcagtcacacatagacaa

SEQ ID NO: 50501 - DNA, 23 bp, Homo sapiens
ttgaaagttctggccagtataga

SEQ ID NO: 50502 - DNA, 19 bp, Homo sapiens
gcttctcaaggacagtgat

SEQ ID NO: 50503 - DNA, 18 bp, Homo sapiens
gtcaagaggtaagatgac

SEQ ID NO: 50504 - DNA, 20 bp, Homo sapiens
ggagatcctgatggaaaagg

SEQ ID NO: 50505 - DNA, 23 bp, Homo sapiens
ctatctcttaatgacatttcttt

SEQ ID NO: 50506 - DNA, 16 bp, Homo sapiens
acaccttgtagaactc

SEQ ID NO: 50507 - DNA, 22 bp, Homo sapiens
cagatctaattccaaaatggga

SEQ ID NO: 50508 - DNA, 17 bp, Homo sapiens
tgcagacagagaggtcc

SEQ ID NO: 50509 - DNA, 16 bp, Homo sapiens
actcagagactccaca

SEQ ID NO: 50510 - DNA, 23 bp, Homo sapiens
aatgaatggtagttgctgctttc

SEQ ID NO: 50511 - DNA, 19 bp, Homo sapiens
cttgagaatactcagggca

SEQ ID NO: 50512 - DNA, 22 bp, Homo sapiens
ttattcccatatgtcattttca

SEQ ID NO: 50513 - DNA, 19 bp, Homo sapiens
tccagccaataaaaaaaac

SEQ ID NO: 50514 - DNA, 16 bp, Homo sapiens
ttcagttagctgtgga

SEQ ID NO: 50515 - DNA, 24 bp, Homo sapiens
aaattgttattaaaaatattttaa

SEQ ID NO: 50516 - DNA, 19 bp, Homo sapiens
tgggcaaaaaaggagcaga

SEQ ID NO: 50517 - DNA, 23 bp, Homo sapiens
aagactagttttacaatatcttg

SEQ ID NO: 50518 - DNA, 17 bp, Homo sapiens
gatgccagctgtgcagc

SEQ ID NO: 50519 - DNA, 20 bp, Homo sapiens
cctcagacattctgtgtatg

SEQ ID NO: 50520 - DNA, 21 bp, Homo sapiens
tttttttttcccacccaccaa

SEQ ID NO: 50521 - DNA, 18 bp, Homo sapiens
gcatgatgaccgcaggat

SEQ ID NO: 50522 - DNA, 17 bp, Homo sapiens
ggcagttgggtacagtc

SEQ ID NO: 50523 - DNA, 21 bp, Homo sapiens
gcatattcatgctaagtaact

SEQ ID NO: 50524 - DNA, 17 bp, Homo sapiens
cccagcctaaaacttac

SEQ ID NO: 50525 - DNA, 22 bp, Homo sapiens
gaaaaataaaaccatactttta

SEQ ID NO: 50526 - DNA, 21 bp, Homo sapiens
cagaaacgtgcttagaaaatc

SEQ ID NO: 50527 - DNA, 16 bp, Homo sapiens
ttcactccaccctaga

SEQ ID NO: 50528 - DNA, 20 bp, Homo sapiens
tgggccgtgggttggacaag

SEQ ID NO: 50529 - DNA, 18 bp, Homo sapiens
ttttccatttcttagctc

SEQ ID NO: 50530 - DNA, 26 bp, Homo sapiens
tataagttaaattttagtgtattacc

SEQ ID NO: 50531 - DNA, 18 bp, Homo sapiens
agttttcaattctttggt

SEQ ID NO: 50532 - DNA, 24 bp, Homo sapiens
aatataatttaaattggttgtgtt

SEQ ID NO: 50533 - DNA, 18 bp, Homo sapiens
cttcctctttggctcttt

SEQ ID NO: 50534 - DNA, 17 bp, Homo sapiens
gaaagtagtgatgagct

SEQ ID NO: 50535 - DNA, 18 bp, Homo sapiens
ttgtcacttgtagaaacc

SEQ ID NO: 50536 - DNA, 22 bp, Homo sapiens
agcccggttttcagatactcaa

SEQ ID NO: 50537 - DNA, 17 bp, Homo sapiens
aaagaccaagtcactct

SEQ ID NO: 50538 - DNA, 18 bp, Homo sapiens
aacaagcaagctctcctg

SEQ ID NO: 50539 - DNA, 21 bp, Homo sapiens
ccaaaagaccaagataatcta

SEQ ID NO: 50540 - DNA, 18 bp, Homo sapiens
attcagacaaacaggtaa

SEQ ID NO: 50541 - DNA, 23 bp, Homo sapiens
aagacaaaagtaagtttattccc

SEQ ID NO: 50542 - DNA, 18 bp, Homo sapiens
tgcacgcagggctaattc

SEQ ID NO: 50543 - DNA, 17 bp, Homo sapiens
aacccaacttttttcat

SEQ ID NO: 50544 - DNA, 20 bp, Homo sapiens
cacttaataagcagttgata

SEQ ID NO: 50545 - DNA, 20 bp, Homo sapiens
catggcttttgtgttttacc

SEQ ID NO: 50546 - DNA, 20 bp, Homo sapiens
cagaattttcaagccagagg

SEQ ID NO: 50547 - DNA, 20 bp, Homo sapiens
cagcgagagctggagttgga

SEQ ID NO: 50548 - DNA, 17 bp, Homo sapiens
agaatattgggctgagt

SEQ ID NO: 50549 - DNA, 19 bp, Homo sapiens
atgtaaagcagttgaaaat

SEQ ID NO: 50550 - DNA, 16 bp, Homo sapiens
caaagaggtatacacg

SEQ ID NO: 50551 - DNA, 23 bp, Homo sapiens
gatatgtgggtattccgactttg

SEQ ID NO: 50552 - DNA, 22 bp, Homo sapiens
tttagaaaactacaaaatgcta

SEQ ID NO: 50553 - DNA, 18 bp, Homo sapiens
aagaaatgaaggaaaaca

SEQ ID NO: 50554 - DNA, 17 bp, Homo sapiens
tctagcagccaattggt

SEQ ID NO: 50555 - DNA, 23 bp, Homo sapiens
ctaatagaggagcactgtcttaa

SEQ ID NO: 50556 - DNA, 20 bp, Homo sapiens
ggtttacttacattattgag

SEQ ID NO: 50557 - DNA, 23 bp, Homo sapiens
tgtttcttaattttgtgtctttt

SEQ ID NO: 50558 - DNA, 25 bp, Homo sapiens
ggtatatatactttatataatatat

SEQ ID NO: 50559 - DNA, 22 bp, Homo sapiens
aaatttttgcctcttatgtacc

SEQ ID NO: 50560 - DNA, 20 bp, Homo sapiens
tgtgatgtgagaagacaaaa

SEQ ID NO: 50561 - DNA, 19 bp, Homo sapiens
aggatttcatgaagtcctc

SEQ ID NO: 50562 - DNA, 16 bp, Homo sapiens
ttcctcataggcctct

SEQ ID NO: 50563 - DNA, 21 bp, Homo sapiens
gccagtataataaacaaagtg

SEQ ID NO: 50564 - DNA, 21 bp, Homo sapiens
tacccactgcagtatctagac

SEQ ID NO: 50565 - DNA, 16 bp, Homo sapiens
ctggctacctctggtt

SEQ ID NO: 50566 - DNA, 24 bp, Homo sapiens
tatttttttgtttatttgcataaa

SEQ ID NO: 50567 - DNA, 22 bp, Homo sapiens
gtttaatccaaatacctcatca

SEQ ID NO: 50568 - DNA, 16 bp, Homo sapiens
tcaatggatcaccccc

SEQ ID NO: 50569 - DNA, 28 bp, Homo sapiens
acaagattttaaaaagaaatattctagg

SEQ ID NO: 50570 - DNA, 21 bp, Homo sapiens
agatgaatttctgactaaacc

SEQ ID NO: 50571 - DNA, 16 bp, Homo sapiens
cgtgagccaccgtgcc

SEQ ID NO: 50572 - DNA, 21 bp, Homo sapiens
atgtatctttgatgtatttca

SEQ ID NO: 50573 - DNA, 24 bp, Homo sapiens
tcctacttctgatagtacatatta

SEQ ID NO: 50574 - DNA, 22 bp, Homo sapiens
attccattgtctagatttgtgc

SEQ ID NO: 50575 - DNA, 22 bp, Homo sapiens
gctaatataatataagcatcac

SEQ ID NO: 50576 - DNA, 24 bp, Homo sapiens
actctgagaagtttaaatgttggg

SEQ ID NO: 50577 - DNA, 25 bp, Homo sapiens
cgtttcttctttaaaaaaaacatac

SEQ ID NO: 50578 - DNA, 21 bp, Homo sapiens
atcgaacagaggctgcaaata

SEQ ID NO: 50579 - DNA, 19 bp, Homo sapiens
gatttacttattaggctct

SEQ ID NO: 50580 - DNA, 18 bp, Homo sapiens
agtgttgaggcactttgt

SEQ ID NO: 50581 - DNA, 20 bp, Homo sapiens
gggaatgctgaagccatcag

SEQ ID NO: 50582 - DNA, 17 bp, Homo sapiens
gaagactcagagaagta

SEQ ID NO: 50583 - DNA, 23 bp, Homo sapiens
ctgcatagtggccaaagcccaga

SEQ ID NO: 50584 - DNA, 22 bp, Homo sapiens
tagggacaacaacatcttctaa

SEQ ID NO: 50585 - DNA, 18 bp, Homo sapiens
gggccagtggtatctgct

SEQ ID NO: 50586 - DNA, 22 bp, Homo sapiens
aaaaaaaatttagtttaaaaaa

SEQ ID NO: 50587 - DNA, 20 bp, Homo sapiens
agtttgtcactaaaatctct

SEQ ID NO: 50588 - DNA, 20 bp, Homo sapiens
tgccaatatttaaccaattt

SEQ ID NO: 50589 - DNA, 24 bp, Homo sapiens
attactaaacttaagaatttagaa

SEQ ID NO: 50590 - DNA, 20 bp, Homo sapiens
gcttgggcaaaggaaatata

SEQ ID NO: 50591 - DNA, 20 bp, Homo sapiens
gagcgtgagccaccacaccc

SEQ ID NO: 50592 - DNA, 22 bp, Homo sapiens
cgaaattctgctttaaatgact

SEQ ID NO: 50593 - DNA, 26 bp, Homo sapiens
catttgtttctctgtttaatattaaa

SEQ ID NO: 50594 - DNA, 19 bp, Homo sapiens
tccttgccatcggaaccta

SEQ ID NO: 50595 - DNA, 20 bp, Homo sapiens
gtgtatctgacctattatca

SEQ ID NO: 50596 - DNA, 17 bp, Homo sapiens
actctaagggctaagcc

SEQ ID NO: 50597 - DNA, 20 bp, Homo sapiens
atctggtgactatacagtca

SEQ ID NO: 50598 - DNA, 19 bp, Homo sapiens
aaataaagacaaaatccca

SEQ ID NO: 50599 - DNA, 25 bp, Homo sapiens
tttaccaaaaataatagattgtgta

SEQ ID NO: 50600 - DNA, 21 bp, Homo sapiens
tggttctagaaaataatgcat

SEQ ID NO: 50601 - DNA, 20 bp, Homo sapiens
tctaaatgaaagaatggcag

SEQ ID NO: 50602 - DNA, 17 bp, Homo sapiens
ctggaagacctgttgca

SEQ ID NO: 50603 - DNA, 21 bp, Homo sapiens
gtgcacagatgctcagattgg

SEQ ID NO: 50604 - DNA, 23 bp, Homo sapiens
agtacagatagttaatttcctct

SEQ ID NO: 50605 - DNA, 20 bp, Homo sapiens
aaaataaactgtacttgttt

SEQ ID NO: 50606 - DNA, 20 bp, Homo sapiens
ccaaccaaatggcatctttt

SEQ ID NO: 50607 - DNA, 24 bp, Homo sapiens
atgacctgagacaagatgctgtca

SEQ ID NO: 50608 - DNA, 16 bp, Homo sapiens
tcccaccttggcctcc

SEQ ID NO: 50609 - DNA, 16 bp, Homo sapiens
tcaagatggggtctca

SEQ ID NO: 50610 - DNA, 23 bp, Homo sapiens
attggtttcctccaaggagcttt

SEQ ID NO: 50611 - DNA, 16 bp, Homo sapiens
tggggacagttcctgt

SEQ ID NO: 50612 - DNA, 20 bp, Homo sapiens
aaaaatgctttgcactgact

SEQ ID NO: 50613 - DNA, 18 bp, Homo sapiens
tgaaatcatttggcctgt

SEQ ID NO: 50614 - DNA, 22 bp, Homo sapiens
aaattaaaaggtatttaatctg

SEQ ID NO: 50615 - DNA, 23 bp, Homo sapiens
tcttacaataacctttaattttg

SEQ ID NO: 50616 - DNA, 20 bp, Homo sapiens
gtggtgttcttgaatggtgc

SEQ ID NO: 50617 - DNA, 19 bp, Homo sapiens
ttaaagtttttttgtattc

SEQ ID NO: 50618 - DNA, 18 bp, Homo sapiens
gatggtgctcataaaaga

SEQ ID NO: 50619 - DNA, 20 bp, Homo sapiens
cactttcattctgatgagtt

SEQ ID NO: 50620 - DNA, 16 bp, Homo sapiens
tgcttccctgtccaga

SEQ ID NO: 50621 - DNA, 16 bp, Homo sapiens
ttttggcaaacatcca

SEQ ID NO: 50622 - DNA, 22 bp, Homo sapiens
attgcccctatatctgtcatat

SEQ ID NO: 50623 - DNA, 17 bp, Homo sapiens
tctcaaaccaaatagct

SEQ ID NO: 50624 - DNA, 24 bp, Homo sapiens
tgaaaaataattatatatattctc

SEQ ID NO: 50625 - DNA, 20 bp, Homo sapiens
actatatgtacaagaagatt

SEQ ID NO: 50626 - DNA, 21 bp, Homo sapiens
agaaatatgaagtcttcatgg

SEQ ID NO: 50627 - DNA, 17 bp, Homo sapiens
aagtgctgaatcaaaca

SEQ ID NO: 50628 - DNA, 24 bp, Homo sapiens
cttctgcatggaaaaattcttgga

SEQ ID NO: 50629 - DNA, 18 bp, Homo sapiens
agatgggttggttactaa

SEQ ID NO: 50630 - DNA, 19 bp, Homo sapiens
agctacttcttctattggt

SEQ ID NO: 50631 - DNA, 21 bp, Homo sapiens
tgagttaaactcaacatggcc

SEQ ID NO: 50632 - DNA, 22 bp, Homo sapiens
actgctcatttatcaagatatt

SEQ ID NO: 50633 - DNA, 18 bp, Homo sapiens
gattataccaagtcagtg

SEQ ID NO: 50634 - DNA, 23 bp, Homo sapiens
gaatagatacatagattttatta

SEQ ID NO: 50635 - DNA, 21 bp, Homo sapiens
gaatcagtgatttcagattgt

SEQ ID NO: 50636 - DNA, 23 bp, Homo sapiens
tatatttgtaatatcttggtagg

SEQ ID NO: 50637 - DNA, 21 bp, Homo sapiens
ggtgatagacatgtacagaat

SEQ ID NO: 50638 - DNA, 21 bp, Homo sapiens
ggacaactgtttatgctgaaa

SEQ ID NO: 50639 - DNA, 22 bp, Homo sapiens
agtgacaaagatgaggaaggca

SEQ ID NO: 50640 - DNA, 16 bp, Homo sapiens
aactgtctcaggagta

SEQ ID NO: 50641 - DNA, 18 bp, Homo sapiens
taggtaacatgtggtttc

SEQ ID NO: 50642 - DNA, 16 bp, Homo sapiens
agacaccttcaacacc

SEQ ID NO: 50643 - DNA, 17 bp, Homo sapiens
agctgtcaaacctccta

SEQ ID NO: 50644 - DNA, 20 bp, Homo sapiens
tgcccagcccatgtaatttt

SEQ ID NO: 50645 - DNA, 22 bp, Homo sapiens
gaacagggcaaaatccttccta

SEQ ID NO: 50646 - DNA, 16 bp, Homo sapiens
cctcccacttcagcct

SEQ ID NO: 50647 - DNA, 23 bp, Homo sapiens
attgtggatggcatgggcattac

SEQ ID NO: 50648 - DNA, 22 bp, Homo sapiens
caaacgtctaatgaaagcccac

SEQ ID NO: 50649 - DNA, 17 bp, Homo sapiens
cagagtttcctgagagt

SEQ ID NO: 50650 - DNA, 16 bp, Homo sapiens
aagcataggctcagca

SEQ ID NO: 50651 - DNA, 18 bp, Homo sapiens
gtctacctggtaagaaaa

SEQ ID NO: 50652 - DNA, 21 bp, Homo sapiens
cattggtgtgtaacaaaatcc

SEQ ID NO: 50653 - DNA, 18 bp, Homo sapiens
catccccctatgttaaaa

SEQ ID NO: 50654 - DNA, 24 bp, Homo sapiens
agaaaaccatggaagtgatgagaa

SEQ ID NO: 50655 - DNA, 16 bp, Homo sapiens
ggatgtgtgaaaaggc

SEQ ID NO: 50656 - DNA, 17 bp, Homo sapiens
catggtccagtcaaaga

SEQ ID NO: 50657 - DNA, 20 bp, Homo sapiens
tgttcccctcccccatcaac

SEQ ID NO: 50658 - DNA, 16 bp, Homo sapiens
tagggtgaagctcagt

SEQ ID NO: 50659 - DNA, 26 bp, Homo sapiens
actgtttctaagtatgtgattaaaat

SEQ ID NO: 50660 - DNA, 19 bp, Homo sapiens
aggaccttcttaaaatact

SEQ ID NO: 50661 - DNA, 22 bp, Homo sapiens
tctatatgatccactctttgac

SEQ ID NO: 50662 - DNA, 18 bp, Homo sapiens
agtgaggtgaacagttta

SEQ ID NO: 50663 - DNA, 17 bp, Homo sapiens
gcagaggccggaagatg

SEQ ID NO: 50664 - DNA, 18 bp, Homo sapiens
tcagctactttgttgaaa

SEQ ID NO: 50665 - DNA, 17 bp, Homo sapiens
gaaatctcaggtgagca

SEQ ID NO: 50666 - DNA, 16 bp, Homo sapiens
gagcacagtgccttct

SEQ ID NO: 50667 - DNA, 19 bp, Homo sapiens
ttttcttattcccaaggcc

SEQ ID NO: 50668 - DNA, 17 bp, Homo sapiens
ggctgagatttttgggg

SEQ ID NO: 50669 - DNA, 21 bp, Homo sapiens
ccttagtgatattgaccagag

SEQ ID NO: 50670 - DNA, 18 bp, Homo sapiens
ggctgaatgaaagggtaa

SEQ ID NO: 50671 - DNA, 17 bp, Homo sapiens
aaaggagtggaagaagg

SEQ ID NO: 50672 - DNA, 20 bp, Homo sapiens
atccctacttaaagtatgtt

SEQ ID NO: 50673 - DNA, 19 bp, Homo sapiens
tcatacagcaggccataga

SEQ ID NO: 50674 - DNA, 21 bp, Homo sapiens
gtggtgattaaatcaagtatt

SEQ ID NO: 50675 - DNA, 16 bp, Homo sapiens
cacgaggaagtcagct

SEQ ID NO: 50676 - DNA, 17 bp, Homo sapiens
atcgcggcagtgtcagg

SEQ ID NO: 50677 - DNA, 22 bp, Homo sapiens
ccagaaactcttccaggtgtgg

SEQ ID NO: 50678 - DNA, 18 bp, Homo sapiens
gctaatgttacatttggt

SEQ ID NO: 50679 - DNA, 16 bp, Homo sapiens
aaagaggcgtgcaggg

SEQ ID NO: 50680 - DNA, 22 bp, Homo sapiens
ttttacaccccttcctgctatc

SEQ ID NO: 50681 - DNA, 20 bp, Homo sapiens
tgtttggaaaatcttcgagt

SEQ ID NO: 50682 - DNA, 18 bp, Homo sapiens
gctcatgttttgtaccat

SEQ ID NO: 50683 - DNA, 20 bp, Homo sapiens
aaagtttcaaaagcttgatt

SEQ ID NO: 50684 - DNA, 19 bp, Homo sapiens
cagtcctgttctgggccaa

SEQ ID NO: 50685 - DNA, 19 bp, Homo sapiens
aaagcagaagaatcatcat

SEQ ID NO: 50686 - DNA, 17 bp, Homo sapiens
aaccatagacccagagc

SEQ ID NO: 50687 - DNA, 21 bp, Homo sapiens
acagcatgtctactagaaaaa

SEQ ID NO: 50688 - DNA, 20 bp, Homo sapiens
tgtcctctaggtgtttgtag

SEQ ID NO: 50689 - DNA, 19 bp, Homo sapiens
caaaaacccctggagtgcg

SEQ ID NO: 50690 - DNA, 19 bp, Homo sapiens
aagagtatttcttcacggc

SEQ ID NO: 50691 - DNA, 22 bp, Homo sapiens
tagttcatctttcctaaaagct

SEQ ID NO: 50692 - DNA, 17 bp, Homo sapiens
gggccttgatttttttt

SEQ ID NO: 50693 - DNA, 19 bp, Homo sapiens
gggtctgcagtcagattat

SEQ ID NO: 50694 - DNA, 21 bp, Homo sapiens
gagaagtgagacatggcctta

SEQ ID NO: 50695 - DNA, 17 bp, Homo sapiens
gtcagcattgtggaatt

SEQ ID NO: 50696 - DNA, 19 bp, Homo sapiens
acctcttccctagggagca

SEQ ID NO: 50697 - DNA, 17 bp, Homo sapiens
cttcccagactgtgtat

SEQ ID NO: 50698 - DNA, 17 bp, Homo sapiens
caagaaaggagcggggg

SEQ ID NO: 50699 - DNA, 22 bp, Homo sapiens
actaggtatttgttactatgga

SEQ ID NO: 50700 - DNA, 24 bp, Homo sapiens
ggtcatcaaactcgcaatactgca

SEQ ID NO: 50701 - DNA, 20 bp, Homo sapiens
tctaattgctgtcaaattgc

SEQ ID NO: 50702 - DNA, 21 bp, Homo sapiens
attgttataagcatcttcaca

SEQ ID NO: 50703 - DNA, 23 bp, Homo sapiens
tcatttccaagatcactggattt

SEQ ID NO: 50704 - DNA, 22 bp, Homo sapiens
gagaaggccgtaacgtcactga

SEQ ID NO: 50705 - DNA, 22 bp, Homo sapiens
aaaggaacaggactcagatgaa

SEQ ID NO: 50706 - DNA, 16 bp, Homo sapiens
gagaggtgccagtaac

SEQ ID NO: 50707 - DNA, 22 bp, Homo sapiens
atgttgtcagtgagaaagctgt

SEQ ID NO: 50708 - DNA, 19 bp, Homo sapiens
agtcaattactttgtgatc

SEQ ID NO: 50709 - DNA, 22 bp, Homo sapiens
actcagggaagggcatgttggg

SEQ ID NO: 50710 - DNA, 21 bp, Homo sapiens
ttccctttagttactgaatga

SEQ ID NO: 50711 - DNA, 19 bp, Homo sapiens
catctgatcgccaggtcaa

SEQ ID NO: 50712 - DNA, 22 bp, Homo sapiens
tttcacatgtggtctaattttt

SEQ ID NO: 50713 - DNA, 18 bp, Homo sapiens
tggctacgacctaaataa

SEQ ID NO: 50714 - DNA, 26 bp, Homo sapiens
aatttaatagtattatttaatattta

SEQ ID NO: 50715 - DNA, 19 bp, Homo sapiens
ttccctcattctcatagat

SEQ ID NO: 50716 - DNA, 23 bp, Homo sapiens
attgcggtcttggctcaggcctg

SEQ ID NO: 50717 - DNA, 23 bp, Homo sapiens
aagagaactttagtataggtaga

SEQ ID NO: 50718 - DNA, 21 bp, Homo sapiens
atcccatccatctgtgtctta

SEQ ID NO: 50719 - DNA, 19 bp, Homo sapiens
caaagtatgggctgtataa

SEQ ID NO: 50720 - DNA, 16 bp, Homo sapiens
atgttggcaaccagca

SEQ ID NO: 50721 - DNA, 16 bp, Homo sapiens
ttcgaggacctgggat

SEQ ID NO: 50722 - DNA, 16 bp, Homo sapiens
tctgctgctcagccct

SEQ ID NO: 50723 - DNA, 18 bp, Homo sapiens
tttccttgccaatagaca

SEQ ID NO: 50724 - DNA, 17 bp, Homo sapiens
ttttctcaggcaagtgc

SEQ ID NO: 50725 - DNA, 16 bp, Homo sapiens
agcaaggctcctgtct

SEQ ID NO: 50726 - DNA, 19 bp, Homo sapiens
cttgcttgtctgatttggt

SEQ ID NO: 50727 - DNA, 20 bp, Homo sapiens
agaatcagtagaacaaagtt

SEQ ID NO: 50728 - DNA, 21 bp, Homo sapiens
caaactcatacagctgtctct

SEQ ID NO: 50729 - DNA, 16 bp, Homo sapiens
cacgtgggtatgatgt

SEQ ID NO: 50730 - DNA, 23 bp, Homo sapiens
ctcaacaacacttacatcttcta

SEQ ID NO: 50731 - DNA, 22 bp, Homo sapiens
ctctggcatgtccacagttata

SEQ ID NO: 50732 - DNA, 17 bp, Homo sapiens
tcagttgatgaccttgt

SEQ ID NO: 50733 - DNA, 19 bp, Homo sapiens
aaaggaaagacatattctc

SEQ ID NO: 50734 - DNA, 22 bp, Homo sapiens
atacctcagccattgcccctga

SEQ ID NO: 50735 - DNA, 16 bp, Homo sapiens
gccattgtctgaggta

SEQ ID NO: 50736 - DNA, 18 bp, Homo sapiens
aacgggggtgtctttgtt

SEQ ID NO: 50737 - DNA, 16 bp, Homo sapiens
cagtttctccacaagg

SEQ ID NO: 50738 - DNA, 16 bp, Homo sapiens
ggagagtgttttgcaa

SEQ ID NO: 50739 - DNA, 20 bp, Homo sapiens
gtgtaaaggaatctctctgc

SEQ ID NO: 50740 - DNA, 21 bp, Homo sapiens
ctccaatgactaattcttcaa

SEQ ID NO: 50741 - DNA, 21 bp, Homo sapiens
ttgcttccctctgtttttgtt

SEQ ID NO: 50742 - DNA, 25 bp, Homo sapiens
ggtgttaacattttttttcttctaa

SEQ ID NO: 50743 - DNA, 23 bp, Homo sapiens
gctgatttgcagggtctttaaaa

SEQ ID NO: 50744 - DNA, 22 bp, Homo sapiens
acggttctatttattatctact

SEQ ID NO: 50745 - DNA, 19 bp, Homo sapiens
tgcattatctaaaaactgt

SEQ ID NO: 50746 - DNA, 23 bp, Homo sapiens
gagaagttctgaaattgcttaaa

SEQ ID NO: 50747 - DNA, 20 bp, Homo sapiens
ttaaccagtgcttgttctaa

SEQ ID NO: 50748 - DNA, 19 bp, Homo sapiens
acttgcaatgcaagtttat

SEQ ID NO: 50749 - DNA, 17 bp, Homo sapiens
ggctttccagaatgtct

SEQ ID NO: 50750 - DNA, 23 bp, Homo sapiens
aaaatattgtgaagaaaaaccca

SEQ ID NO: 50751 - DNA, 16 bp, Homo sapiens
tgatgatcgccactcc

SEQ ID NO: 50752 - DNA, 17 bp, Homo sapiens
acttagtatggctgaat

SEQ ID NO: 50753 - DNA, 21 bp, Homo sapiens
tttatgtgtcaggctaatgtc

SEQ ID NO: 50754 - DNA, 21 bp, Homo sapiens
aagttcttgtttcttggtgca

SEQ ID NO: 50755 - DNA, 22 bp, Homo sapiens
ccagaagacatttatctattaa

SEQ ID NO: 50756 - DNA, 22 bp, Homo sapiens
gctgtccaaggcgaatgaggcg

SEQ ID NO: 50757 - DNA, 18 bp, Homo sapiens
tcatgtgctaagattgct

SEQ ID NO: 50758 - DNA, 22 bp, Homo sapiens
ggacttgtagtccagaaagtcc

SEQ ID NO: 50759 - DNA, 19 bp, Homo sapiens
ggtgaaaactatagtgtgg

SEQ ID NO: 50760 - DNA, 20 bp, Homo sapiens
tgtgcatttatattacccaa

SEQ ID NO: 50761 - DNA, 26 bp, Homo sapiens
tttttaataggaaaagaattctaagt

SEQ ID NO: 50762 - DNA, 19 bp, Homo sapiens
tcaaatgtgagccaaccct

SEQ ID NO: 50763 - DNA, 17 bp, Homo sapiens
cagacttccactttgtg

SEQ ID NO: 50764 - DNA, 20 bp, Homo sapiens
catctgtcaggtagtccaca

SEQ ID NO: 50765 - DNA, 23 bp, Homo sapiens
ttgacttgagtaattatcttttt

SEQ ID NO: 50766 - DNA, 23 bp, Homo sapiens
gatagacagggtgtaattataat

SEQ ID NO: 50767 - DNA, 23 bp, Homo sapiens
aagtgttgggattctaggcgtga

SEQ ID NO: 50768 - DNA, 16 bp, Homo sapiens
tagaacacgttcctct

SEQ ID NO: 50769 - DNA, 21 bp, Homo sapiens
aaaatgactaattgtaaaagc

SEQ ID NO: 50770 - DNA, 19 bp, Homo sapiens
aggacttgtaattgtccct

SEQ ID NO: 50771 - DNA, 21 bp, Homo sapiens
atattctgcatctgtagggct

SEQ ID NO: 50772 - DNA, 16 bp, Homo sapiens
tcaggcactggtctaa

SEQ ID NO: 50773 - DNA, 17 bp, Homo sapiens
accagtaactccaaccc

SEQ ID NO: 50774 - DNA, 20 bp, Homo sapiens
cctaggattattagcgttta

SEQ ID NO: 50775 - DNA, 21 bp, Homo sapiens
acatatttacatgatatgggt

SEQ ID NO: 50776 - DNA, 19 bp, Homo sapiens
tctcagatcaatgtgtggt

SEQ ID NO: 50777 - DNA, 25 bp, Homo sapiens
ccaagaaatcctttaacattaattg

SEQ ID NO: 50778 - DNA, 15 bp, Homo sapiens
ggaggggaactgcag

SEQ ID NO: 50779 - DNA, 22 bp, Homo sapiens
taaaagccattataaaaaaaga

SEQ ID NO: 50780 - DNA, 17 bp, Homo sapiens
agagccagtatcctgac

SEQ ID NO: 50781 - DNA, 24 bp, Homo sapiens
tttccctgcaaaaaaggtctgata

SEQ ID NO: 50782 - DNA, 18 bp, Homo sapiens
ttgtcgtttttgcttcct

SEQ ID NO: 50783 - DNA, 20 bp, Homo sapiens
tcttggatcttctgccagga

SEQ ID NO: 50784 - DNA, 21 bp, Homo sapiens
agtattaaggagcttttcttt

SEQ ID NO: 50785 - DNA, 18 bp, Homo sapiens
gattatgtgggtactttc

SEQ ID NO: 50786 - DNA, 20 bp, Homo sapiens
tgtcatgtgtagaaaaaaat

SEQ ID NO: 50787 - DNA, 22 bp, Homo sapiens
tcaattaaaattcacattaaat

SEQ ID NO: 50788 - DNA, 17 bp, Homo sapiens
gacaccgctaaagaaaa

SEQ ID NO: 50789 - DNA, 18 bp, Homo sapiens
agatcataccagattccc

SEQ ID NO: 50790 - DNA, 16 bp, Homo sapiens
tctgggctgtgtgtct

SEQ ID NO: 50791 - DNA, 25 bp, Homo sapiens
gttaaattaacaaaattgaattaac

SEQ ID NO: 50792 - DNA, 17 bp, Homo sapiens
gcttagagctgaccatt

SEQ ID NO: 50793 - DNA, 16 bp, Homo sapiens
agagctttggttttct

SEQ ID NO: 50794 - DNA, 16 bp, Homo sapiens
cggacgaccaggacga

SEQ ID NO: 50795 - DNA, 24 bp, Homo sapiens
aaaaccaaacctacccaaggataa

SEQ ID NO: 50796 - DNA, 24 bp, Homo sapiens
gctgggcggctgcctgggggtctt

SEQ ID NO: 50797 - DNA, 23 bp, Homo sapiens
aagagagcaacaaaccgggtagt

SEQ ID NO: 50798 - DNA, 16 bp, Homo sapiens
gcagcccccgccacct

SEQ ID NO: 50799 - DNA, 24 bp, Homo sapiens
gttaccatgccgccgagcacttcg

SEQ ID NO: 50800 - DNA, 21 bp, Homo sapiens
ggggtcaccccggagcctgtc

SEQ ID NO: 50801 - DNA, 21 bp, Homo sapiens
gttcccgcagccaccccgaag

SEQ ID NO: 50802 - DNA, 22 bp, Homo sapiens
tattccttcggctggtcggcct

SEQ ID NO: 50803 - DNA, 23 bp, Homo sapiens
ctgggctgcaggagggcaggtgg

SEQ ID NO: 50804 - DNA, 21 bp, Homo sapiens
cgcctagggagaaaacgtctg

SEQ ID NO: 50805 - DNA, 26 bp, Homo sapiens
agttgaaaatttcatataattttatt

SEQ ID NO: 50806 - DNA, 18 bp, Homo sapiens
gctgcttctgaagagttt

SEQ ID NO: 50807 - DNA, 19 bp, Homo sapiens
aggaaatactacagttcgg

SEQ ID NO: 50808 - DNA, 19 bp, Homo sapiens
aagagaaggtaaaaaaact

SEQ ID NO: 50809 - DNA, 26 bp, Homo sapiens
ataaagttaataaatagttaaatgaa

SEQ ID NO: 50810 - DNA, 24 bp, Homo sapiens
attttttgaagaaattgaagatct

SEQ ID NO: 50811 - DNA, 17 bp, Homo sapiens
aggactttcttcttcat

SEQ ID NO: 50812 - DNA, 21 bp, Homo sapiens
ccattaggaggaaataaagaa

SEQ ID NO: 50813 - DNA, 20 bp, Homo sapiens
ccaattgttctgaaagtttt

SEQ ID NO: 50814 - DNA, 17 bp, Homo sapiens
tctccttgttcaaacgt

SEQ ID NO: 50815 - DNA, 26 bp, Homo sapiens
cttccttgtaattatacttaagatct

SEQ ID NO: 50816 - DNA, 18 bp, Homo sapiens
tctgcctttattgctgta

SEQ ID NO: 50817 - DNA, 18 bp, Homo sapiens
ccagttcttttttcagct

SEQ ID NO: 50818 - DNA, 25 bp, Homo sapiens
gttaactctaatatgttaggaatag

SEQ ID NO: 50819 - DNA, 17 bp, Homo sapiens
acacagctcaaaatgtc

SEQ ID NO: 50820 - DNA, 24 bp, Homo sapiens
tataagatgttattactgaatttt

SEQ ID NO: 50821 - DNA, 25 bp, Homo sapiens
tgagtctaatttgtatgactttttc

SEQ ID NO: 50822 - DNA, 20 bp, Homo sapiens
tagttttcaacagctgtttt

SEQ ID NO: 50823 - DNA, 22 bp, Homo sapiens
tgtatctctgttctctagaaca

SEQ ID NO: 50824 - DNA, 19 bp, Homo sapiens
gctgcttttctagatctga

SEQ ID NO: 50825 - DNA, 19 bp, Homo sapiens
atcctgaagtatttcagcc

SEQ ID NO: 50826 - DNA, 22 bp, Homo sapiens
ctttagttgatcagcatctgtt

SEQ ID NO: 50827 - DNA, 21 bp, Homo sapiens
tattaatagcacagagagaca

SEQ ID NO: 50828 - DNA, 23 bp, Homo sapiens
gaattaatccatcagatagaagc

SEQ ID NO: 50829 - DNA, 21 bp, Homo sapiens
gagacaatgatcagaaatctg

SEQ ID NO: 50830 - DNA, 26 bp, Homo sapiens
tttttttaacacattatcattgtgtt

SEQ ID NO: 50831 - DNA, 18 bp, Homo sapiens
gggtagctaacatgtttt

SEQ ID NO: 50832 - DNA, 20 bp, Homo sapiens
tactgtacatcactagttca

SEQ ID NO: 50833 - DNA, 20 bp, Homo sapiens
ccactttggtccttgttagc

SEQ ID NO: 50834 - DNA, 19 bp, Homo sapiens
acattgtagcattgagagt

SEQ ID NO: 50835 - DNA, 21 bp, Homo sapiens
tgaaaaagagtgattagcatt

SEQ ID NO: 50836 - DNA, 16 bp, Homo sapiens
gtgctgagacagagca

SEQ ID NO: 50837 - DNA, 18 bp, Homo sapiens
gtcgaaaaatgcttgtct

SEQ ID NO: 50838 - DNA, 18 bp, Homo sapiens
ggcaaaccttatcttcta

SEQ ID NO: 50839 - DNA, 25 bp, Homo sapiens
tttttttttaaagaaaaaaacaaag

SEQ ID NO: 50840 - DNA, 19 bp, Homo sapiens
tttaatattacgctttgtt

SEQ ID NO: 50841 - DNA, 24 bp, Homo sapiens
gaacttgaagctcccgtttaaggc

SEQ ID NO: 50842 - DNA, 19 bp, Homo sapiens
acttgttgaatgaatggtg

SEQ ID NO: 50843 - DNA, 19 bp, Homo sapiens
gatccaaagtttctggctt

SEQ ID NO: 50844 - DNA, 16 bp, Homo sapiens
aagcaacagagagaga

SEQ ID NO: 50845 - DNA, 25 bp, Homo sapiens
ttaatagagtccatttttatctata

SEQ ID NO: 50846 - DNA, 22 bp, Homo sapiens
gttaaaagaattggaaactgat

SEQ ID NO: 50847 - DNA, 25 bp, Homo sapiens
ttatgcattattttatcatgtaaag

SEQ ID NO: 50848 - DNA, 20 bp, Homo sapiens
tttgccatgtctatactttt

SEQ ID NO: 50849 - DNA, 25 bp, Homo sapiens
cattgtatttgttaactttttgttc

SEQ ID NO: 50850 - DNA, 22 bp, Homo sapiens
attcttgcttatttttagtaca

SEQ ID NO: 50851 - DNA, 19 bp, Homo sapiens
tgctttgattttttttggc

SEQ ID NO: 50852 - DNA, 19 bp, Homo sapiens
ccactttttaatgctaaat

SEQ ID NO: 50853 - DNA, 20 bp, Homo sapiens
gtctccaacaatactacaac

SEQ ID NO: 50854 - DNA, 20 bp, Homo sapiens
cagaggtccacagcttgaag

SEQ ID NO: 50855 - DNA, 22 bp, Homo sapiens
actgttcatcaggaagaaacca

SEQ ID NO: 50856 - DNA, 17 bp, Homo sapiens
tgagaagatgacagttc

SEQ ID NO: 50857 - DNA, 20 bp, Homo sapiens
aatgattaaactttgtacaa

SEQ ID NO: 50858 - DNA, 16 bp, Homo sapiens
actgatgctgcagaga

SEQ ID NO: 50859 - DNA, 17 bp, Homo sapiens
tttccagctcttactgt

SEQ ID NO: 50860 - DNA, 21 bp, Homo sapiens
actgaatctatgagaacagta

SEQ ID NO: 50861 - DNA, 16 bp, Homo sapiens
accagtctcttctagt

SEQ ID NO: 50862 - DNA, 18 bp, Homo sapiens
gcatttagagccccaggt

SEQ ID NO: 50863 - DNA, 20 bp, Homo sapiens
tctttgctatccgtaatttc

SEQ ID NO: 50864 - DNA, 18 bp, Homo sapiens
gctgaaaatgaaaggctt

SEQ ID NO: 50865 - DNA, 22 bp, Homo sapiens
caattcctcaatctcttaatat

SEQ ID NO: 50866 - DNA, 16 bp, Homo sapiens
tgggcatcagttgagc

SEQ ID NO: 50867 - DNA, 19 bp, Homo sapiens
tccaagaggtattaagtaa

SEQ ID NO: 50868 - DNA, 24 bp, Homo sapiens
tttgataatgtatactttttattt

SEQ ID NO: 50869 - DNA, 16 bp, Homo sapiens
agttctttacgaagcc

SEQ ID NO: 50870 - DNA, 20 bp, Homo sapiens
ggtttctaaaactactttga

SEQ ID NO: 50871 - DNA, 17 bp, Homo sapiens
ttcatagtgcatgctca

SEQ ID NO: 50872 - DNA, 20 bp, Homo sapiens
acttcgttctcactaatatt

SEQ ID NO: 50873 - DNA, 17 bp, Homo sapiens
ataacccttagccttgc

SEQ ID NO: 50874 - DNA, 23 bp, Homo sapiens
actagtgaaaaaatggctaatat

SEQ ID NO: 50875 - DNA, 19 bp, Homo sapiens
attgtattcattaaagcca

SEQ ID NO: 50876 - DNA, 19 bp, Homo sapiens
agtagttgaaaaagtccag

SEQ ID NO: 50877 - DNA, 20 bp, Homo sapiens
caaaacgtaaaatattcccc

SEQ ID NO: 50878 - DNA, 16 bp, Homo sapiens
gtctggtagaagtgga

SEQ ID NO: 50879 - DNA, 22 bp, Homo sapiens
tttcattttcctgctcaatatt

SEQ ID NO: 50880 - DNA, 17 bp, Homo sapiens
ttgttggtacttcgtat

SEQ ID NO: 50881 - DNA, 21 bp, Homo sapiens
tcaactgttcattttctctct

SEQ ID NO: 50882 - DNA, 23 bp, Homo sapiens
gaattaatacagttttgacttca

SEQ ID NO: 50883 - DNA, 18 bp, Homo sapiens
ttccagttctgggattgt

SEQ ID NO: 50884 - DNA, 24 bp, Homo sapiens
ataaaatactttgagacacataga

SEQ ID NO: 50885 - DNA, 17 bp, Homo sapiens
agcagaagttcagcgga

SEQ ID NO: 50886 - DNA, 19 bp, Homo sapiens
cactgaaactacagggcac

SEQ ID NO: 50887 - DNA, 23 bp, Homo sapiens
gttatctttcagaatcaagtcag

SEQ ID NO: 50888 - DNA, 17 bp, Homo sapiens
tttctggcttatcactg

SEQ ID NO: 50889 - DNA, 17 bp, Homo sapiens
tttgccttttcttttca

SEQ ID NO: 50890 - DNA, 20 bp, Homo sapiens
atacccctctaacatggcca

SEQ ID NO: 50891 - DNA, 23 bp, Homo sapiens
tatagagaccctattatttggtt

SEQ ID NO: 50892 - DNA, 21 bp, Homo sapiens
tcacacatttccttcaaatct

SEQ ID NO: 50893 - DNA, 17 bp, Homo sapiens
agtaggccttcaacaaa

SEQ ID NO: 50894 - DNA, 16 bp, Homo sapiens
tcagcttgaacaagca

SEQ ID NO: 50895 - DNA, 26 bp, Homo sapiens
catgatatattaggaatatgcatttt

SEQ ID NO: 50896 - DNA, 17 bp, Homo sapiens
agaacaggagcttcaga

SEQ ID NO: 50897 - DNA, 17 bp, Homo sapiens
aggaaggagttttaggc

SEQ ID NO: 50898 - DNA, 23 bp, Homo sapiens
atattcctaatttcatttccctg

SEQ ID NO: 50899 - DNA, 18 bp, Homo sapiens
tggcaaatctttatttgc

SEQ ID NO: 50900 - DNA, 20 bp, Homo sapiens
tttgacagtattttcttatc

SEQ ID NO: 50901 - DNA, 18 bp, Homo sapiens
acaacttcaagttttcct

SEQ ID NO: 50902 - DNA, 16 bp, Homo sapiens
gctttcaccagaacac

SEQ ID NO: 50903 - DNA, 16 bp, Homo sapiens
acacatcactacctgt

SEQ ID NO: 50904 - DNA, 19 bp, Homo sapiens
aagaaaaacttcatgcttt

SEQ ID NO: 50905 - DNA, 16 bp, Homo sapiens
atgcttttggccagat

SEQ ID NO: 50906 - DNA, 16 bp, Homo sapiens
accaagctcttcctcg

SEQ ID NO: 50907 - DNA, 20 bp, Homo sapiens
aacatggaaaaaagaaaaaa

SEQ ID NO: 50908 - DNA, 20 bp, Homo sapiens
gtacaacagaaaaaagatga

SEQ ID NO: 50909 - DNA, 22 bp, Homo sapiens
tgaaaactgtttttctaaagca

SEQ ID NO: 50910 - DNA, 23 bp, Homo sapiens
atatagtgttaataaacacactg

SEQ ID NO: 50911 - DNA, 19 bp, Homo sapiens
aatcttctacaacagaatc

SEQ ID NO: 50912 - DNA, 23 bp, Homo sapiens
taatactaattttgatatcctaa

SEQ ID NO: 50913 - DNA, 19 bp, Homo sapiens
gagaaatcttgacttagaa

SEQ ID NO: 50914 - DNA, 18 bp, Homo sapiens
acatgggaaaagaaaaca

SEQ ID NO: 50915 - DNA, 17 bp, Homo sapiens
caggttttgggaatacg

SEQ ID NO: 50916 - DNA, 19 bp, Homo sapiens
tttctaggggtcaaccagt

SEQ ID NO: 50917 - DNA, 17 bp, Homo sapiens
gccgataaagagaaact

SEQ ID NO: 50918 - DNA, 23 bp, Homo sapiens
tatacaatatatcattttctaag

SEQ ID NO: 50919 - DNA, 16 bp, Homo sapiens
tgcaattgaaaagcca

SEQ ID NO: 50920 - DNA, 16 bp, Homo sapiens
tgactccaaagctcgt

SEQ ID NO: 50921 - DNA, 20 bp, Homo sapiens
cgttgtaaattagcttatga

SEQ ID NO: 50922 - DNA, 16 bp, Homo sapiens
tttcctctgcaaagta

SEQ ID NO: 50923 - DNA, 22 bp, Homo sapiens
cagttgaatactttgaaggatc

SEQ ID NO: 50924 - DNA, 23 bp, Homo sapiens
tcatagataataaatgatcattt

SEQ ID NO: 50925 - DNA, 17 bp, Homo sapiens
agaaggaattcgaaaca

SEQ ID NO: 50926 - DNA, 20 bp, Homo sapiens
agctatataatttccaggtc

SEQ ID NO: 50927 - DNA, 23 bp, Homo sapiens
tattgttacagaatgctaaagaa

SEQ ID NO: 50928 - DNA, 18 bp, Homo sapiens
aactcacttggcaaaaag

SEQ ID NO: 50929 - DNA, 26 bp, Homo sapiens
aattgataaatcataaagaaaattta

SEQ ID NO: 50930 - DNA, 20 bp, Homo sapiens
cccctctttctcttttaact

SEQ ID NO: 50931 - DNA, 24 bp, Homo sapiens
gcaaaatgaacatatttacatatt

SEQ ID NO: 50932 - DNA, 20 bp, Homo sapiens
cttcccacctaattaattct

SEQ ID NO: 50933 - DNA, 19 bp, Homo sapiens
acgttattcaatactgctt

SEQ ID NO: 50934 - DNA, 17 bp, Homo sapiens
agaaccaattagaggga

SEQ ID NO: 50935 - DNA, 19 bp, Homo sapiens
gtcatcaaattaaggcagt

SEQ ID NO: 50936 - DNA, 18 bp, Homo sapiens
ggcaaacccctgacagat

SEQ ID NO: 50937 - DNA, 22 bp, Homo sapiens
ttaagcatataagtcagtatgt

SEQ ID NO: 50938 - DNA, 23 bp, Homo sapiens
tttactgtctattttgttttaca

SEQ ID NO: 50939 - DNA, 16 bp, Homo sapiens
cctccacctttccctc

SEQ ID NO: 50940 - DNA, 18 bp, Homo sapiens
tagaaagtatggtcagtg

SEQ ID NO: 50941 - DNA, 23 bp, Homo sapiens
tcttcaattagactttgtttatt

SEQ ID NO: 50942 - DNA, 18 bp, Homo sapiens
cacaatagaagtcacaaa

SEQ ID NO: 50943 - DNA, 19 bp, Homo sapiens
agaggaaattgatcaagag

SEQ ID NO: 50944 - DNA, 25 bp, Homo sapiens
ttaacaaataccatagataaaatga

SEQ ID NO: 50945 - DNA, 19 bp, Homo sapiens
acttaaataatgaactgca

SEQ ID NO: 50946 - DNA, 23 bp, Homo sapiens
aaatcagacattatcagagttaa

SEQ ID NO: 50947 - DNA, 20 bp, Homo sapiens
ttgaaagaagcacttaaaac

SEQ ID NO: 50948 - DNA, 17 bp, Homo sapiens
ttgccttttcagttcat

SEQ ID NO: 50949 - DNA, 24 bp, Homo sapiens
tacctttctttttctcttattaga

SEQ ID NO: 50950 - DNA, 23 bp, Homo sapiens
attataggctttttgtttctttt

SEQ ID NO: 50951 - DNA, 25 bp, Homo sapiens
ttataatggtatattttctgtttta

SEQ ID NO: 50952 - DNA, 19 bp, Homo sapiens
tctctgtttttacttgttt

SEQ ID NO: 50953 - DNA, 23 bp, Homo sapiens
tttgtggttattttttttctctt

SEQ ID NO: 50954 - DNA, 19 bp, Homo sapiens
tcttcaacttgtgtctaat

SEQ ID NO: 50955 - DNA, 20 bp, Homo sapiens
cttattgttgaaaaatgcat

SEQ ID NO: 50956 - DNA, 16 bp, Homo sapiens
aggcccatctcaatgt

SEQ ID NO: 50957 - DNA, 18 bp, Homo sapiens
tccctattcatcaacaaa

SEQ ID NO: 50958 - DNA, 17 bp, Homo sapiens
ttagaactccgggcaga

SEQ ID NO: 50959 - DNA, 26 bp, Homo sapiens
ttatcagaaattttgttacattaaca

SEQ ID NO: 50960 - DNA, 22 bp, Homo sapiens
ttttcctttaaaaattacattt

SEQ ID NO: 50961 - DNA, 21 bp, Homo sapiens
atcaacgatttgttgaacatt

SEQ ID NO: 50962 - DNA, 19 bp, Homo sapiens
agtaggaagtaataaagct

SEQ ID NO: 50963 - DNA, 16 bp, Homo sapiens
tcagcagctgctgtca

SEQ ID NO: 50964 - DNA, 20 bp, Homo sapiens
aagttgagttgttaatttgt

SEQ ID NO: 50965 - DNA, 21 bp, Homo sapiens
tctaaaataccttgtttaaca

SEQ ID NO: 50966 - DNA, 20 bp, Homo sapiens
tgagaaatctagtagaacgg

SEQ ID NO: 50967 - DNA, 22 bp, Homo sapiens
cggagatttatactaccatctt

SEQ ID NO: 50968 - DNA, 21 bp, Homo sapiens
cacagtgtttaaaatctgaac

SEQ ID NO: 50969 - DNA, 24 bp, Homo sapiens
catatttttcctaaatgttgataa

SEQ ID NO: 50970 - DNA, 16 bp, Homo sapiens
aagcggaagtagagga

SEQ ID NO: 50971 - DNA, 18 bp, Homo sapiens
taattggctctttagccg

SEQ ID NO: 50972 - DNA, 20 bp, Homo sapiens
acacacacacacatatgttt

SEQ ID NO: 50973 - DNA, 17 bp, Homo sapiens
tgcttctttttgagcct

SEQ ID NO: 50974 - DNA, 24 bp, Homo sapiens
tgactggtccagaagatactttaa

SEQ ID NO: 50975 - DNA, 20 bp, Homo sapiens
aaatcacttgaatctgggag

SEQ ID NO: 50976 - DNA, 20 bp, Homo sapiens
tcactgaattaaaagtaaaa

SEQ ID NO: 50977 - DNA, 25 bp, Homo sapiens
ataaaaatgagacaatatacttaaa

SEQ ID NO: 50978 - DNA, 19 bp, Homo sapiens
actcttggtcaaactaaag

SEQ ID NO: 50979 - DNA, 26 bp, Homo sapiens
ttatgtttatcttcattatatcactt

SEQ ID NO: 50980 - DNA, 16 bp, Homo sapiens
tttattcgtctggctg

SEQ ID NO: 50981 - DNA, 23 bp, Homo sapiens
cttactgtaatttgatattttca

SEQ ID NO: 50982 - DNA, 25 bp, Homo sapiens
aatatattcatattttataggattt

SEQ ID NO: 50983 - DNA, 20 bp, Homo sapiens
tccaaatcttgtgatacttt

SEQ ID NO: 50984 - DNA, 19 bp, Homo sapiens
ttgaggaaccaaattaaaa

SEQ ID NO: 50985 - DNA, 17 bp, Homo sapiens
tctgttccatctcagcc

SEQ ID NO: 50986 - DNA, 20 bp, Homo sapiens
ctttaagccttcattgccta

SEQ ID NO: 50987 - DNA, 23 bp, Homo sapiens
ggagtgggagactgtttcattaa

SEQ ID NO: 50988 - DNA, 21 bp, Homo sapiens
gtgaacagcggtgagctacag

SEQ ID NO: 50989 - DNA, 19 bp, Homo sapiens
cagattagaactacaggct

SEQ ID NO: 50990 - DNA, 21 bp, Homo sapiens
gcaacaaaaagggtaacttcc

SEQ ID NO: 50991 - DNA, 18 bp, Homo sapiens
aacaggagcaaagagaaa

SEQ ID NO: 50992 - DNA, 23 bp, Homo sapiens
tggtcacaaaaatcaataaagaa

SEQ ID NO: 50993 - DNA, 19 bp, Homo sapiens
taaggtcttcaaaatgtga

SEQ ID NO: 50994 - DNA, 22 bp, Homo sapiens
tatttagtgaactatcagcctg

SEQ ID NO: 50995 - DNA, 17 bp, Homo sapiens
tactgtttcttcctcat

SEQ ID NO: 50996 - DNA, 18 bp, Homo sapiens
tcctcatgtttcttcaca

SEQ ID NO: 50997 - DNA, 19 bp, Homo sapiens
tgacagaggtgtaatccaa

SEQ ID NO: 50998 - DNA, 20 bp, Homo sapiens
gcaagcaaggttaaatcaaa

SEQ ID NO: 50999 - DNA, 21 bp, Homo sapiens
gcaagaaaagaaataccactt

SEQ ID NO: 51000 - DNA, 17 bp, Homo sapiens
accaaaatctcaccaca

SEQ ID NO: 51001 - DNA, 22 bp, Homo sapiens
taatggataacagcataactca

SEQ ID NO: 51002 - DNA, 16 bp, Homo sapiens
ttgcctgccactgcag

SEQ ID NO: 51003 - DNA, 23 bp, Homo sapiens
gatacttctttaatacttcttct

SEQ ID NO: 51004 - DNA, 21 bp, Homo sapiens
gctttaaggttagcagaacaa

SEQ ID NO: 51005 - DNA, 18 bp, Homo sapiens
atgagcaattttcaatgt

SEQ ID NO: 51006 - DNA, 23 bp, Homo sapiens
ggaaaaagatactttaatgattt

SEQ ID NO: 51007 - DNA, 19 bp, Homo sapiens
tgagcttttctctttctgc

SEQ ID NO: 51008 - DNA, 20 bp, Homo sapiens
agtgaattttttttggctaa

SEQ ID NO: 51009 - DNA, 18 bp, Homo sapiens
tgtctcttgacagtatat

SEQ ID NO: 51010 - DNA, 22 bp, Homo sapiens
gaattagtcagtttaaccttat

SEQ ID NO: 51011 - DNA, 16 bp, Homo sapiens
tctagaaacacgggca

SEQ ID NO: 51012 - DNA, 23 bp, Homo sapiens
tagtgaaattagcaatagattca

SEQ ID NO: 51013 - DNA, 19 bp, Homo sapiens
gccccttccaaatcaactt

SEQ ID NO: 51014 - DNA, 21 bp, Homo sapiens
tttagaaagccccccaaacat

SEQ ID NO: 51015 - DNA, 26 bp, Homo sapiens
ttaaaaaacatactatttcttaatag

SEQ ID NO: 51016 - DNA, 20 bp, Homo sapiens
acctcttctagtgatttgca

SEQ ID NO: 51017 - DNA, 22 bp, Homo sapiens
gttttatcatacagctgtaaaa

SEQ ID NO: 51018 - DNA, 16 bp, Homo sapiens
tccttagagcgatctc

SEQ ID NO: 51019 - DNA, 22 bp, Homo sapiens
cctgtatcagatgtaattttaa

SEQ ID NO: 51020 - DNA, 20 bp, Homo sapiens
tgtagcttcttcaaactatt

SEQ ID NO: 51021 - DNA, 24 bp, Homo sapiens
gcattgagagtaactattaatttt

SEQ ID NO: 51022 - DNA, 18 bp, Homo sapiens
agacatttttgaccgtca

SEQ ID NO: 51023 - DNA, 25 bp, Homo sapiens
aaatatacaatataacatcaattaa

SEQ ID NO: 51024 - DNA, 20 bp, Homo sapiens
catgaagaaagacaaatggc

SEQ ID NO: 51025 - DNA, 19 bp, Homo sapiens
taacactctagactatgct

SEQ ID NO: 51026 - DNA, 16 bp, Homo sapiens
gcctgttatgtgcctg

SEQ ID NO: 51027 - DNA, 23 bp, Homo sapiens
atttagtatttcattttgctgac

SEQ ID NO: 51028 - DNA, 22 bp, Homo sapiens
aataattacagtttcttcaatg

SEQ ID NO: 51029 - DNA, 17 bp, Homo sapiens
ctctttgatcccaggcc

SEQ ID NO: 51030 - DNA, 19 bp, Homo sapiens
caggagaatggcatgaacc

SEQ ID NO: 51031 - DNA, 22 bp, Homo sapiens
ttgaataacataatttctgaat

SEQ ID NO: 51032 - DNA, 23 bp, Homo sapiens
cttagggaaaaaaatgaaataaa

SEQ ID NO: 51033 - DNA, 27 bp, Homo sapiens
ttgtgtatataaattgtaaatcttagg

SEQ ID NO: 51034 - DNA, 17 bp, Homo sapiens
tgctgattgtacgttca

SEQ ID NO: 51035 - DNA, 24 bp, Homo sapiens
ttaaaatcattatcatcaatggag

SEQ ID NO: 51036 - DNA, 16 bp, Homo sapiens
tccttgactaattccc

SEQ ID NO: 51037 - DNA, 21 bp, Homo sapiens
tgtcatgtagtttgacaaaag

SEQ ID NO: 51038 - DNA, 19 bp, Homo sapiens
tgccagttgattacctaag

SEQ ID NO: 51039 - DNA, 16 bp, Homo sapiens
tgtactgccagctaca

SEQ ID NO: 51040 - DNA, 17 bp, Homo sapiens
aaaattaaagggcctgg

SEQ ID NO: 51041 - DNA, 17 bp, Homo sapiens
gttccagctatgtttgc

SEQ ID NO: 51042 - DNA, 22 bp, Homo sapiens
tgcaagaaatgaaaaattctca

SEQ ID NO: 51043 - DNA, 21 bp, Homo sapiens
gtctcttaaaaaaaaaaatca

SEQ ID NO: 51044 - DNA, 19 bp, Homo sapiens
caggaaaagttctccaaaa

SEQ ID NO: 51045 - DNA, 21 bp, Homo sapiens
aagtgcttattaactcttcca

SEQ ID NO: 51046 - DNA, 17 bp, Homo sapiens
acatctgcgccaaacaa

SEQ ID NO: 51047 - DNA, 23 bp, Homo sapiens
ccatatttctatgttcttgttga

SEQ ID NO: 51048 - DNA, 18 bp, Homo sapiens
gatgaaaaagaacaggct

SEQ ID NO: 51049 - DNA, 21 bp, Homo sapiens
gtagttgaatcattgttttgg

SEQ ID NO: 51050 - DNA, 19 bp, Homo sapiens
ttggagtcaattacatcta

SEQ ID NO: 51051 - DNA, 23 bp, Homo sapiens
actaaactgtcgtcgtagagact

SEQ ID NO: 51052 - DNA, 18 bp, Homo sapiens
tgcaccaacataatgtct

SEQ ID NO: 51053 - DNA, 19 bp, Homo sapiens
tccaaacgagcataataga

SEQ ID NO: 51054 - DNA, 29 bp, Homo sapiens
aacttactacaaatatatattttttttaa

SEQ ID NO: 51055 - DNA, 18 bp, Homo sapiens
taggcctccatcttctgc

SEQ ID NO: 51056 - DNA, 22 bp, Homo sapiens
cttagtaaattgtgaattttaa

SEQ ID NO: 51057 - DNA, 21 bp, Homo sapiens
tagcctcactcagttgaagag

SEQ ID NO: 51058 - DNA, 23 bp, Homo sapiens
tggtaattatttgtattaaagca

SEQ ID NO: 51059 - DNA, 22 bp, Homo sapiens
gaaggctgcaatgagccttgaa

SEQ ID NO: 51060 - DNA, 19 bp, Homo sapiens
aacaatctagggacaagga

SEQ ID NO: 51061 - DNA, 18 bp, Homo sapiens
tcgaaacaaacaaaaagt

SEQ ID NO: 51062 - DNA, 20 bp, Homo sapiens
cctagactgagagagatttc

SEQ ID NO: 51063 - DNA, 18 bp, Homo sapiens
gtggattctatgtagaag

SEQ ID NO: 51064 - DNA, 21 bp, Homo sapiens
ttttgaattttggcatttact

SEQ ID NO: 51065 - DNA, 21 bp, Homo sapiens
ttgcattctgagggactctac

SEQ ID NO: 51066 - DNA, 22 bp, Homo sapiens
tacaaagaagagatagatgctg

SEQ ID NO: 51067 - DNA, 18 bp, Homo sapiens
tgtcttctggcaatatca

SEQ ID NO: 51068 - DNA, 23 bp, Homo sapiens
attatttaaccctgttaaaaccg

SEQ ID NO: 51069 - DNA, 23 bp, Homo sapiens
cggattctagaattagagaagaa

SEQ ID NO: 51070 - DNA, 22 bp, Homo sapiens
gaaatcagtatcaattactact

SEQ ID NO: 51071 - DNA, 24 bp, Homo sapiens
ttaagagatgaattagctgatagt

SEQ ID NO: 51072 - DNA, 21 bp, Homo sapiens
caaattaaagaagatacatct

SEQ ID NO: 51073 - DNA, 17 bp, Homo sapiens
acatttccttagcttac

SEQ ID NO: 51074 - DNA, 24 bp, Homo sapiens
aacttttagttccatttcattctt

SEQ ID NO: 51075 - DNA, 21 bp, Homo sapiens
gcagtactttaaaagctaaat

SEQ ID NO: 51076 - DNA, 20 bp, Homo sapiens
cacttactgccttgctcaca

SEQ ID NO: 51077 - DNA, 20 bp, Homo sapiens
tctgttcttaacacttcaca

SEQ ID NO: 51078 - DNA, 20 bp, Homo sapiens
gcatccaaattgattttggt

SEQ ID NO: 51079 - DNA, 24 bp, Homo sapiens
ttaaatcttttatttatttattac

SEQ ID NO: 51080 - DNA, 17 bp, Homo sapiens
acggacttcgttaaagc

SEQ ID NO: 51081 - DNA, 20 bp, Homo sapiens
ttcagagatccagacaaacc

SEQ ID NO: 51082 - DNA, 17 bp, Homo sapiens
gctggaaatgaaggaat

SEQ ID NO: 51083 - DNA, 25 bp, Homo sapiens
tataattgtatgataaaacttataa

SEQ ID NO: 51084 - DNA, 20 bp, Homo sapiens
gataaggcaaagaaatcaat

SEQ ID NO: 51085 - DNA, 16 bp, Homo sapiens
acgttcctccatttgc

SEQ ID NO: 51086 - DNA, 21 bp, Homo sapiens
aacagcatgagattgacttaa

SEQ ID NO: 51087 - DNA, 19 bp, Homo sapiens
gttcagcccgctgcctttc

SEQ ID NO: 51088 - DNA, 21 bp, Homo sapiens
ccatggaactataatgctttc

SEQ ID NO: 51089 - DNA, 19 bp, Homo sapiens
tggaaacaatgtcactgtt

SEQ ID NO: 51090 - DNA, 20 bp, Homo sapiens
aggaagtaacagagctaaga

SEQ ID NO: 51091 - DNA, 21 bp, Homo sapiens
agtacaggattattcatctgc

SEQ ID NO: 51092 - DNA, 22 bp, Homo sapiens
aaacttcacactattgaacaag

SEQ ID NO: 51093 - DNA, 23 bp, Homo sapiens
tttagtcaaaatacttcctttta

SEQ ID NO: 51094 - DNA, 19 bp, Homo sapiens
aacatctccttaaaagaac

SEQ ID NO: 51095 - DNA, 26 bp, Homo sapiens
tattcattattagatgttaatcattt

SEQ ID NO: 51096 - DNA, 20 bp, Homo sapiens
tttgtggtattggtctgaat

SEQ ID NO: 51097 - DNA, 16 bp, Homo sapiens
ctgttcccaggcttgt

SEQ ID NO: 51098 - DNA, 18 bp, Homo sapiens
aaaactggattgtgagtt

SEQ ID NO: 51099 - DNA, 16 bp, Homo sapiens
agactccacttgttct

SEQ ID NO: 51100 - DNA, 25 bp, Homo sapiens
atatatatatgtatgtgtttgtatg

SEQ ID NO: 51101 - DNA, 17 bp, Homo sapiens
tgtgagccaccgcacct

SEQ ID NO: 51102 - DNA, 22 bp, Homo sapiens
agaatgatcattcttgtggcag

SEQ ID NO: 51103 - DNA, 17 bp, Homo sapiens
ctcctgaactcgtgatc

SEQ ID NO: 51104 - DNA, 21 bp, Homo sapiens
gctgccacaataaagataata

SEQ ID NO: 51105 - DNA, 25 bp, Homo sapiens
aaaatatttataactaaactgaatg

SEQ ID NO: 51106 - DNA, 23 bp, Homo sapiens
catcttgcaaaaagataatatgc

SEQ ID NO: 51107 - DNA, 17 bp, Homo sapiens
aaatgcaggcaaacttt

SEQ ID NO: 51108 - DNA, 18 bp, Homo sapiens
gaactagaactggctaat

SEQ ID NO: 51109 - DNA, 18 bp, Homo sapiens
tggctaatttcacaaggt

SEQ ID NO: 51110 - DNA, 20 bp, Homo sapiens
aggaaatggccattttcaag

SEQ ID NO: 51111 - DNA, 20 bp, Homo sapiens
acttgttctttgaacaagca

SEQ ID NO: 51112 - DNA, 18 bp, Homo sapiens
tagtgcttgaccagaaaa

SEQ ID NO: 51113 - DNA, 18 bp, Homo sapiens
cagttcattgtactgttt

SEQ ID NO: 51114 - DNA, 26 bp, Homo sapiens
atattttaaaaatgattttaaaattc

SEQ ID NO: 51115 - DNA, 20 bp, Homo sapiens
acaactttttggagagctgc

SEQ ID NO: 51116 - DNA, 18 bp, Homo sapiens
ggctgaagtttgtgaaaa

SEQ ID NO: 51117 - DNA, 26 bp, Homo sapiens
aaatgttaataaatgttaactattaa

SEQ ID NO: 51118 - DNA, 16 bp, Homo sapiens
ggagcgacaacttaga

SEQ ID NO: 51119 - DNA, 22 bp, Homo sapiens
tatttgaaatttttcatagtca

SEQ ID NO: 51120 - DNA, 16 bp, Homo sapiens
actgttttgcaagtga

SEQ ID NO: 51121 - DNA, 16 bp, Homo sapiens
ttgcaaacacccaatt

SEQ ID NO: 51122 - DNA, 20 bp, Homo sapiens
caatgctcttcagatggatt

SEQ ID NO: 51123 - DNA, 21 bp, Homo sapiens
tcttttgcttctcattttctt

SEQ ID NO: 51124 - DNA, 20 bp, Homo sapiens
acaaagtaggatagctagat

SEQ ID NO: 51125 - DNA, 21 bp, Homo sapiens
agtgatttttcattcacttgc

SEQ ID NO: 51126 - DNA, 24 bp, Homo sapiens
agatgctataaaagtaaaagaata

SEQ ID NO: 51127 - DNA, 17 bp, Homo sapiens
catttcatccgaatcca

SEQ ID NO: 51128 - DNA, 26 bp, Homo sapiens
gaaaacagaatctaaaacaataaaag

SEQ ID NO: 51129 - DNA, 20 bp, Homo sapiens
acatccatattacttgttga

SEQ ID NO: 51130 - DNA, 23 bp, Homo sapiens
attaggtttacagtattgtcttt

SEQ ID NO: 51131 - DNA, 22 bp, Homo sapiens
gttttacttacattatattctt

SEQ ID NO: 51132 - DNA, 22 bp, Homo sapiens
cctcttgtgttgagaaaacttt

SEQ ID NO: 51133 - DNA, 24 bp, Homo sapiens
agttttctcttttcctcttttatt

SEQ ID NO: 51134 - DNA, 21 bp, Homo sapiens
aaccctttttaaatgaaagtt

SEQ ID NO: 51135 - DNA, 19 bp, Homo sapiens
gtctccataaataagttcc

SEQ ID NO: 51136 - DNA, 17 bp, Homo sapiens
tttgctgtaattcgtca

SEQ ID NO: 51137 - DNA, 18 bp, Homo sapiens
aggaagaagaagaaggga

SEQ ID NO: 51138 - DNA, 22 bp, Homo sapiens
tcaggaactagaaaataaagaa

SEQ ID NO: 51139 - DNA, 23 bp, Homo sapiens
aacaagaatatactgcaattata

SEQ ID NO: 51140 - DNA, 23 bp, Homo sapiens
aaattcagcatttattctattgt

SEQ ID NO: 51141 - DNA, 20 bp, Homo sapiens
acaacaaactttgttgatga

SEQ ID NO: 51142 - DNA, 17 bp, Homo sapiens
cagatttggtgactttt

SEQ ID NO: 51143 - DNA, 27 bp, Homo sapiens
agagaatcttctaaattctttaacttt

SEQ ID NO: 51144 - DNA, 20 bp, Homo sapiens
tgccagtatcattaattctc

SEQ ID NO: 51145 - DNA, 22 bp, Homo sapiens
ggtgatggaaaaattaaaataa

SEQ ID NO: 51146 - DNA, 22 bp, Homo sapiens
tcaaatgttgtttttaaaggaa

SEQ ID NO: 51147 - DNA, 22 bp, Homo sapiens
tgatttttgttattcacatgta

SEQ ID NO: 51148 - DNA, 19 bp, Homo sapiens
tggatttttttttccagat

SEQ ID NO: 51149 - DNA, 25 bp, Homo sapiens
gtaacaaatgtattaaatattcatt

SEQ ID NO: 51150 - DNA, 20 bp, Homo sapiens
gggcattcacatatctgtca

SEQ ID NO: 51151 - DNA, 20 bp, Homo sapiens
cccatcaggtaagtcaattc

SEQ ID NO: 51152 - DNA, 22 bp, Homo sapiens
aatctcatacctaggcatttct

SEQ ID NO: 51153 - DNA, 23 bp, Homo sapiens
ctagtttctttttcaagatggtc

SEQ ID NO: 51154 - DNA, 16 bp, Homo sapiens
tcacagcagttggcaa

SEQ ID NO: 51155 - DNA, 28 bp, Homo sapiens
tcttaatattgaaagaattaattcaagg

SEQ ID NO: 51156 - DNA, 22 bp, Homo sapiens
ccggaagaaatgaagaattaag

SEQ ID NO: 51157 - DNA, 25 bp, Homo sapiens
aaaaatttcctattaaatctacatt

SEQ ID NO: 51158 - DNA, 20 bp, Homo sapiens
aatgcagaaggaatctttga

SEQ ID NO: 51159 - DNA, 18 bp, Homo sapiens
ctcacctttaaattagct

SEQ ID NO: 51160 - DNA, 17 bp, Homo sapiens
tactgtttttctccaca

SEQ ID NO: 51161 - DNA, 17 bp, Homo sapiens
tccctgagctcctgtct

SEQ ID NO: 51162 - DNA, 22 bp, Homo sapiens
gcaatgaaaataggaaaatgct

SEQ ID NO: 51163 - DNA, 18 bp, Homo sapiens
tcaaatgcagactcgcat

SEQ ID NO: 51164 - DNA, 27 bp, Homo sapiens
aaagttttatagattcataaataagaa

SEQ ID NO: 51165 - DNA, 20 bp, Homo sapiens
gaaaagtattgaaagcagct

SEQ ID NO: 51166 - DNA, 18 bp, Homo sapiens
gttaaaggaggagaaaca

SEQ ID NO: 51167 - DNA, 24 bp, Homo sapiens
caaatgactaaaaatatctcatca

SEQ ID NO: 51168 - DNA, 21 bp, Homo sapiens
aacttgaagaaggtatgaaag

SEQ ID NO: 51169 - DNA, 18 bp, Homo sapiens
tctctaaagtgatagggg

SEQ ID NO: 51170 - DNA, 19 bp, Homo sapiens
ccaatgagaaaactgtgta

SEQ ID NO: 51171 - DNA, 17 bp, Homo sapiens
tcaaggctagggataat

SEQ ID NO: 51172 - DNA, 24 bp, Homo sapiens
gtatatgtgaaatatttgtcatct

SEQ ID NO: 51173 - DNA, 17 bp, Homo sapiens
tccttaattgcttgcaa

SEQ ID NO: 51174 - DNA, 25 bp, Homo sapiens
atttatagttgaatttttttgtatg

SEQ ID NO: 51175 - DNA, 17 bp, Homo sapiens
aggacagtgatagccaa

SEQ ID NO: 51176 - DNA, 18 bp, Homo sapiens
acagaggtaattaggagt

SEQ ID NO: 51177 - DNA, 22 bp, Homo sapiens
ttttcagaatgaatttctttca

SEQ ID NO: 51178 - DNA, 18 bp, Homo sapiens
aggcccatgattttaagt

SEQ ID NO: 51179 - DNA, 26 bp, Homo sapiens
tttcttaacttgaaaattatagactt

SEQ ID NO: 51180 - DNA, 25 bp, Homo sapiens
ttacatttattctgaaatttggcta

SEQ ID NO: 51181 - DNA, 18 bp, Homo sapiens
tgtcttcatagctcgttt

SEQ ID NO: 51182 - DNA, 22 bp, Homo sapiens
attagttctcttgaaagaaatt

SEQ ID NO: 51183 - DNA, 22 bp, Homo sapiens
ggatttattgagcctcaaaaat

SEQ ID NO: 51184 - DNA, 17 bp, Homo sapiens
gccgagatcgcgccact

SEQ ID NO: 51185 - DNA, 18 bp, Homo sapiens
ctgaacctaactgaaaac

SEQ ID NO: 51186 - DNA, 27 bp, Homo sapiens
cgtctcaaaaaaaaaaaaaaaaaaaaa

SEQ ID NO: 51187 - DNA, 24 bp, Homo sapiens
ggagggttattttaatgtttttag

SEQ ID NO: 51188 - DNA, 17 bp, Homo sapiens
tttgattgtgcttcact

SEQ ID NO: 51189 - DNA, 17 bp, Homo sapiens
acctttgcattaaaact

SEQ ID NO: 51190 - DNA, 18 bp, Homo sapiens
tccttgagaaatgttttc

SEQ ID NO: 51191 - DNA, 20 bp, Homo sapiens
gctaaatgagaagcttgtat

SEQ ID NO: 51192 - DNA, 17 bp, Homo sapiens
tggctcaagaaagagga

SEQ ID NO: 51193 - DNA, 19 bp, Homo sapiens
aatttgtagcagatccaca

SEQ ID NO: 51194 - DNA, 18 bp, Homo sapiens
tactttgcagattgaaag

SEQ ID NO: 51195 - DNA, 18 bp, Homo sapiens
tccagacaactcacttat

SEQ ID NO: 51196 - DNA, 17 bp, Homo sapiens
aggcaagtgtggtagtc

SEQ ID NO: 51197 - DNA, 18 bp, Homo sapiens
tgcacttctttttcctct

SEQ ID NO: 51198 - DNA, 18 bp, Homo sapiens
agcaaacacttaaaacag

SEQ ID NO: 51199 - DNA, 19 bp, Homo sapiens
tcgttcttcctctagactt

SEQ ID NO: 51200 - DNA, 18 bp, Homo sapiens
ttgctttctattgtaggc

SEQ ID NO: 51201 - DNA, 20 bp, Homo sapiens
cagccaagaaaataatcaac

SEQ ID NO: 51202 - DNA, 18 bp, Homo sapiens
ccagttgcttgatggtat

SEQ ID NO: 51203 - DNA, 21 bp, Homo sapiens
gttttcagctctgtactgctg

SEQ ID NO: 51204 - DNA, 18 bp, Homo sapiens
ttctttcacagaaagtta

SEQ ID NO: 51205 - DNA, 18 bp, Homo sapiens
tgtctttggttcaaggcc

SEQ ID NO: 51206 - DNA, 21 bp, Homo sapiens
cacttcaatcaggttagctcc

SEQ ID NO: 51207 - DNA, 21 bp, Homo sapiens
gaagatcagtgatttccttga

SEQ ID NO: 51208 - DNA, 25 bp, Homo sapiens
tttgaaaaaagcattaaactactta

SEQ ID NO: 51209 - DNA, 24 bp, Homo sapiens
accaaattaaaataagagatcgag

SEQ ID NO: 51210 - DNA, 19 bp, Homo sapiens
cttgtaaatcaggttgcgc

SEQ ID NO: 51211 - DNA, 20 bp, Homo sapiens
tggatatttttcagggagta

SEQ ID NO: 51212 - DNA, 18 bp, Homo sapiens
cctcattttcatcaagga

SEQ ID NO: 51213 - DNA, 22 bp, Homo sapiens
tcatgaacttgataaatttatt

SEQ ID NO: 51214 - DNA, 22 bp, Homo sapiens
aatatttcaatctctcgatctc

SEQ ID NO: 51215 - DNA, 27 bp, Homo sapiens
ataaaaaaccagtgtaatgatataaat

SEQ ID NO: 51216 - DNA, 17 bp, Homo sapiens
acgacagcatcttctaa

SEQ ID NO: 51217 - DNA, 22 bp, Homo sapiens
aggtttcaatagtttagtataa

SEQ ID NO: 51218 - DNA, 16 bp, Homo sapiens
tgctagggaaaaggat

SEQ ID NO: 51219 - DNA, 21 bp, Homo sapiens
gttttttaaatggtatgcagt

SEQ ID NO: 51220 - DNA, 23 bp, Homo sapiens
gttagacattttaaaagagaaaa

SEQ ID NO: 51221 - DNA, 17 bp, Homo sapiens
tccttgaatgacaagat

SEQ ID NO: 51222 - DNA, 17 bp, Homo sapiens
actctgtaggtgcttca

SEQ ID NO: 51223 - DNA, 20 bp, Homo sapiens
cagagcctcaactaattctt

SEQ ID NO: 51224 - DNA, 18 bp, Homo sapiens
catgttgggatcactgat

SEQ ID NO: 51225 - DNA, 18 bp, Homo sapiens
tctctcagcctctttagt

SEQ ID NO: 51226 - DNA, 22 bp, Homo sapiens
tcttacaaatataaaatgacaa

SEQ ID NO: 51227 - DNA, 18 bp, Homo sapiens
ctgttgagaaagggttga

SEQ ID NO: 51228 - DNA, 21 bp, Homo sapiens
acaaatgtaagcactagtaat

SEQ ID NO: 51229 - DNA, 25 bp, Homo sapiens
aaaagaatacttgtattattgaaga

SEQ ID NO: 51230 - DNA, 20 bp, Homo sapiens
ataaaattcaaatggagaaa

SEQ ID NO: 51231 - DNA, 21 bp, Homo sapiens
cagtcaaattaagatgctcac

SEQ ID NO: 51232 - DNA, 25 bp, Homo sapiens
taaagtcgttaaaaacataattgta

SEQ ID NO: 51233 - DNA, 24 bp, Homo sapiens
aggttaatattcatgaagggatat

SEQ ID NO: 51234 - DNA, 19 bp, Homo sapiens
ctttggagctcatttttca

SEQ ID NO: 51235 - DNA, 19 bp, Homo sapiens
tgttctacagtcttgttga

SEQ ID NO: 51236 - DNA, 17 bp, Homo sapiens
ctacttgttcggtgagc

SEQ ID NO: 51237 - DNA, 21 bp, Homo sapiens
tcattgtgtattacagttgaa

SEQ ID NO: 51238 - DNA, 17 bp, Homo sapiens
cagcttgatgctgataa

SEQ ID NO: 51239 - DNA, 19 bp, Homo sapiens
acacttggtagtaccagcc

SEQ ID NO: 51240 - DNA, 22 bp, Homo sapiens
aaattattgagtatcagcaaat

SEQ ID NO: 51241 - DNA, 19 bp, Homo sapiens
cgttcagagttccaactgt

SEQ ID NO: 51242 - DNA, 23 bp, Homo sapiens
ccttttgcataacagattctatt

SEQ ID NO: 51243 - DNA, 18 bp, Homo sapiens
tgctgtagagccataaca

SEQ ID NO: 51244 - DNA, 20 bp, Homo sapiens
tcataaatctactaacggtg

SEQ ID NO: 51245 - DNA, 22 bp, Homo sapiens
gttatgtaacatttgctgatac

SEQ ID NO: 51246 - DNA, 20 bp, Homo sapiens
aaggaacagagattatgcca

SEQ ID NO: 51247 - DNA, 19 bp, Homo sapiens
aaaggacagttctagagct

SEQ ID NO: 51248 - DNA, 21 bp, Homo sapiens
gatgatccaattatggtagct

SEQ ID NO: 51249 - DNA, 18 bp, Homo sapiens
aaacgtgttataaaccag

SEQ ID NO: 51250 - DNA, 22 bp, Homo sapiens
aataactttgtcttttaggtgc

SEQ ID NO: 51251 - DNA, 28 bp, Homo sapiens
aatttaaatctaaaatacaaaaagaaaa

SEQ ID NO: 51252 - DNA, 25 bp, Homo sapiens
tataatgtatatgtaaatatgcaca

SEQ ID NO: 51253 - DNA, 18 bp, Homo sapiens
tttgcattgacagctacc

SEQ ID NO: 51254 - DNA, 23 bp, Homo sapiens
gtatgtatgtgtatataagtatg

SEQ ID NO: 51255 - DNA, 17 bp, Homo sapiens
ctgtaagctcctgcacc

SEQ ID NO: 51256 - DNA, 19 bp, Homo sapiens
ggtgattggagaaacacat

SEQ ID NO: 51257 - DNA, 22 bp, Homo sapiens
aatagatcagttaaaaaaagaa

SEQ ID NO: 51258 - DNA, 21 bp, Homo sapiens
aaaagacagacaaaaattcac

SEQ ID NO: 51259 - DNA, 19 bp, Homo sapiens
tggagaagatgactgatga

SEQ ID NO: 51260 - DNA, 25 bp, Homo sapiens
agtaatgagataatatgaagtctga

SEQ ID NO: 51261 - DNA, 23 bp, Homo sapiens
aatgagaaaattgaagttcagaa

SEQ ID NO: 51262 - DNA, 19 bp, Homo sapiens
agttgataatgatcgtttt

SEQ ID NO: 51263 - DNA, 26 bp, Homo sapiens
gtttttttaaaattactttttaatta

SEQ ID NO: 51264 - DNA, 25 bp, Homo sapiens
gctttcattctattatattcatcag

SEQ ID NO: 51265 - DNA, 20 bp, Homo sapiens
tctttttttctagaggacac

SEQ ID NO: 51266 - DNA, 19 bp, Homo sapiens
tttctcatttcttgattct

SEQ ID NO: 51267 - DNA, 23 bp, Homo sapiens
tcttgattcaatttgatttaatt

SEQ ID NO: 51268 - DNA, 21 bp, Homo sapiens
tcaaagatgtaatttatttca

SEQ ID NO: 51269 - DNA, 18 bp, Homo sapiens
ggaagacagtgactaccg

SEQ ID NO: 51270 - DNA, 23 bp, Homo sapiens
acatgtagggctaaatattatat

SEQ ID NO: 51271 - DNA, 17 bp, Homo sapiens
tgactaccagaaacaaa

SEQ ID NO: 51272 - DNA, 18 bp, Homo sapiens
tgaattgacttctagcca

SEQ ID NO: 51273 - DNA, 23 bp, Homo sapiens
gttttgtaattgaatgttgtgtt

SEQ ID NO: 51274 - DNA, 18 bp, Homo sapiens
tttttagacaactgtgat

SEQ ID NO: 51275 - DNA, 22 bp, Homo sapiens
tgggaatttaaaatatgttgtg

SEQ ID NO: 51276 - DNA, 21 bp, Homo sapiens
agtgtttctttctgtgaatct

SEQ ID NO: 51277 - DNA, 17 bp, Homo sapiens
ttctgtagaacaaacgt

SEQ ID NO: 51278 - DNA, 17 bp, Homo sapiens
tctgaaggtaaccaaac

SEQ ID NO: 51279 - DNA, 26 bp, Homo sapiens
ttagtttctgattattatttttaatt

SEQ ID NO: 51280 - DNA, 18 bp, Homo sapiens
aaatagtgctctcacaac

SEQ ID NO: 51281 - DNA, 22 bp, Homo sapiens
gtattctttctttggttattca

SEQ ID NO: 51282 - DNA, 19 bp, Homo sapiens
cacctttttctttagacgt

SEQ ID NO: 51283 - DNA, 21 bp, Homo sapiens
tatttccctgagacaaagtca

SEQ ID NO: 51284 - DNA, 18 bp, Homo sapiens
ttttagttggctcttcga

SEQ ID NO: 51285 - DNA, 24 bp, Homo sapiens
ccagtcctggttaaaatataaatt

SEQ ID NO: 51286 - DNA, 24 bp, Homo sapiens
tttgtctcaaaaaaaaaaaaaatt

SEQ ID NO: 51287 - DNA, 20 bp, Homo sapiens
tttgttgaaccaccacaact

SEQ ID NO: 51288 - DNA, 16 bp, Homo sapiens
ttctgcctcctcattt

SEQ ID NO: 51289 - DNA, 20 bp, Homo sapiens
tgatgacaaaatgaacagtg

SEQ ID NO: 51290 - DNA, 18 bp, Homo sapiens
agatagagaattggagga

SEQ ID NO: 51291 - DNA, 26 bp, Homo sapiens
ataacatacaatataaaaattgatat

SEQ ID NO: 51292 - DNA, 17 bp, Homo sapiens
tggacgagatactcggt

SEQ ID NO: 51293 - DNA, 19 bp, Homo sapiens
tgaacagtgaagattcatg

SEQ ID NO: 51294 - DNA, 24 bp, Homo sapiens
aatgggattaatttatactttggg

SEQ ID NO: 51295 - DNA, 19 bp, Homo sapiens
ttctccaactccttttcca

SEQ ID NO: 51296 - DNA, 19 bp, Homo sapiens
tgcaaatttaaattcagca

SEQ ID NO: 51297 - DNA, 20 bp, Homo sapiens
agttggcaaatttcattacg

SEQ ID NO: 51298 - DNA, 28 bp, Homo sapiens
gtaagttaaattaaaaaaaaaaaagttc

SEQ ID NO: 51299 - DNA, 20 bp, Homo sapiens
cttagtactatataaggcac

SEQ ID NO: 51300 - DNA, 26 bp, Homo sapiens
aaatcaattaaaaactaaagtaatga

SEQ ID NO: 51301 - DNA, 24 bp, Homo sapiens
accatgattacaatcatccttata

SEQ ID NO: 51302 - DNA, 19 bp, Homo sapiens
tgttttgtggtaactaatc

SEQ ID NO: 51303 - DNA, 22 bp, Homo sapiens
aaacaattcaaaataaaattaa

SEQ ID NO: 51304 - DNA, 19 bp, Homo sapiens
accttataatcatgatgga

SEQ ID NO: 51305 - DNA, 19 bp, Homo sapiens
cagttcattttccagtttc

SEQ ID NO: 51306 - DNA, 22 bp, Homo sapiens
cagatccataaaataggagtct

SEQ ID NO: 51307 - DNA, 15 bp, Homo sapiens
ggagctggctttgga

SEQ ID NO: 51308 - DNA, 28 bp, Homo sapiens
aaaaataaactgaatatatatattttat

SEQ ID NO: 51309 - DNA, 17 bp, Homo sapiens
tccagtataaaggcata

SEQ ID NO: 51310 - DNA, 25 bp, Homo sapiens
aaatggaattcattatttaatacca

SEQ ID NO: 51311 - DNA, 18 bp, Homo sapiens
ctggcactaaggatcata

SEQ ID NO: 51312 - DNA, 20 bp, Homo sapiens
tgttcttctccagctttttc

SEQ ID NO: 51313 - DNA, 22 bp, Homo sapiens
acaaaaacaaaaaccaaaaact

SEQ ID NO: 51314 - DNA, 21 bp, Homo sapiens
acactaaaatacttaattcac

SEQ ID NO: 51315 - DNA, 20 bp, Homo sapiens
tgagctaaaaagtgaaaagc

SEQ ID NO: 51316 - DNA, 18 bp, Homo sapiens
ccaggtattttcacaaag

SEQ ID NO: 51317 - DNA, 23 bp, Homo sapiens
attttgcttgaaggttataaaat

SEQ ID NO: 51318 - DNA, 21 bp, Homo sapiens
gccaaacctatagttaaaacc

SEQ ID NO: 51319 - DNA, 23 bp, Homo sapiens
tgaatttatttttttcagggaca

SEQ ID NO: 51320 - DNA, 20 bp, Homo sapiens
ggtgtatcacattttcttgc

SEQ ID NO: 51321 - DNA, 21 bp, Homo sapiens
ggtgcttaattggtcaataat

SEQ ID NO: 51322 - DNA, 22 bp, Homo sapiens
agaaaagcaactgttttatatt

SEQ ID NO: 51323 - DNA, 17 bp, Homo sapiens
acctgccccgtcaagaa

SEQ ID NO: 51324 - DNA, 22 bp, Homo sapiens
gattgtgacaattatagttgtc

SEQ ID NO: 51325 - DNA, 20 bp, Homo sapiens
gaaagaattcaagatgccac

SEQ ID NO: 51326 - DNA, 25 bp, Homo sapiens
taatcataagttaatgtatatatct

SEQ ID NO: 51327 - DNA, 18 bp, Homo sapiens
tactgtgtaccttgaaaa

SEQ ID NO: 51328 - DNA, 19 bp, Homo sapiens
aaattatctgccagttctt

SEQ ID NO: 51329 - DNA, 19 bp, Homo sapiens
tgctaacatcagaaagtta

SEQ ID NO: 51330 - DNA, 20 bp, Homo sapiens
tccagtttatattaggtggc

SEQ ID NO: 51331 - DNA, 19 bp, Homo sapiens
ctggtcagtgggctatatt

SEQ ID NO: 51332 - DNA, 16 bp, Homo sapiens
tttcccagaaggagga

SEQ ID NO: 51333 - DNA, 18 bp, Homo sapiens
ggccaaactgctaagcat

SEQ ID NO: 51334 - DNA, 21 bp, Homo sapiens
tcaacgtgagaattaaaatgt

SEQ ID NO: 51335 - DNA, 16 bp, Homo sapiens
tgctgaggtagatggt

SEQ ID NO: 51336 - DNA, 18 bp, Homo sapiens
tgtggaaatgattaaggt

SEQ ID NO: 51337 - DNA, 19 bp, Homo sapiens
gcttctttgtgtatcctcc

SEQ ID NO: 51338 - DNA, 19 bp, Homo sapiens
tgttttggaagaggaatga

SEQ ID NO: 51339 - DNA, 24 bp, Homo sapiens
tattgtgaaacatatttaacatat

SEQ ID NO: 51340 - DNA, 18 bp, Homo sapiens
tttggacccattgtgtac

SEQ ID NO: 51341 - DNA, 21 bp, Homo sapiens
ttgattgtaaatgtgtatcat

SEQ ID NO: 51342 - DNA, 17 bp, Homo sapiens
agaagtacatagttgct

SEQ ID NO: 51343 - DNA, 18 bp, Homo sapiens
accatttaatacccacat

SEQ ID NO: 51344 - DNA, 26 bp, Homo sapiens
acattgtttttatagaactagtatat

SEQ ID NO: 51345 - DNA, 18 bp, Homo sapiens
aacataatcaatgttgct

SEQ ID NO: 51346 - DNA, 22 bp, Homo sapiens
ggaaatgtatattgtgtgagca

SEQ ID NO: 51347 - DNA, 16 bp, Homo sapiens
ttgcgccattgcactc

SEQ ID NO: 51348 - DNA, 16 bp, Homo sapiens
tatcgaaaccgtttcc

SEQ ID NO: 51349 - DNA, 22 bp, Homo sapiens
aaaaataaaaagagaaatttca

SEQ ID NO: 51350 - DNA, 18 bp, Homo sapiens
tgttctcagggacttcta

SEQ ID NO: 51351 - DNA, 19 bp, Homo sapiens
gcatgtatacactcaccca

SEQ ID NO: 51352 - DNA, 19 bp, Homo sapiens
aggaagtttgtttgcctga

SEQ ID NO: 51353 - DNA, 23 bp, Homo sapiens
ttcctgcagctcatgcatatgaa

SEQ ID NO: 51354 - DNA, 20 bp, Homo sapiens
ttgttaggtcaggattatcc

SEQ ID NO: 51355 - DNA, 16 bp, Homo sapiens
tggggaacatggattc

SEQ ID NO: 51356 - DNA, 23 bp, Homo sapiens
tcagcaaatataccaacttggga

SEQ ID NO: 51357 - DNA, 20 bp, Homo sapiens
tatgattgtggtcaatgttg

SEQ ID NO: 51358 - DNA, 18 bp, Homo sapiens
atctcaacttgcaactcc

SEQ ID NO: 51359 - DNA, 16 bp, Homo sapiens
cgtttctcatgtggtt

SEQ ID NO: 51360 - DNA, 20 bp, Homo sapiens
taggccttttggtctgttcc

SEQ ID NO: 51361 - DNA, 25 bp, Homo sapiens
aaatatgttttgataattaggtttg

SEQ ID NO: 51362 - DNA, 24 bp, Homo sapiens
attcaggtttatttgcataattaa

SEQ ID NO: 51363 - DNA, 28 bp, Homo sapiens
ttaaaaaatgtattttctattgaagttt

SEQ ID NO: 51364 - DNA, 23 bp, Homo sapiens
tttcttatgtcatccaactggcc

SEQ ID NO: 51365 - DNA, 24 bp, Homo sapiens
agtagtattaaaagtttaagttat

SEQ ID NO: 51366 - DNA, 21 bp, Homo sapiens
ttcttctcccatgatttcaaa

SEQ ID NO: 51367 - DNA, 23 bp, Homo sapiens
acatccacaaaataacttaaact

SEQ ID NO: 51368 - DNA, 20 bp, Homo sapiens
ctgtaaaccagtaactgaca

SEQ ID NO: 51369 - DNA, 21 bp, Homo sapiens
ttagaacagtgcttaatagac

SEQ ID NO: 51370 - DNA, 25 bp, Homo sapiens
tgtgatatctgatctacttatattt

SEQ ID NO: 51371 - DNA, 22 bp, Homo sapiens
tttgtgattactcttatactaa

SEQ ID NO: 51372 - DNA, 22 bp, Homo sapiens
gttaaaaatcagaactaagatt

SEQ ID NO: 51373 - DNA, 21 bp, Homo sapiens
tttgtccttatatgctttgtg

SEQ ID NO: 51374 - DNA, 23 bp, Homo sapiens
aaaagatgtatatgtagtcacag

SEQ ID NO: 51375 - DNA, 21 bp, Homo sapiens
taatattccaccaactcagga

SEQ ID NO: 51376 - DNA, 16 bp, Homo sapiens
aaaaccatagagcctg

SEQ ID NO: 51377 - DNA, 18 bp, Homo sapiens
ggtctggaacacatgcta

SEQ ID NO: 51378 - DNA, 19 bp, Homo sapiens
aacacttgataaggatgta

SEQ ID NO: 51379 - DNA, 19 bp, Homo sapiens
agtcattacttacaatgcg

SEQ ID NO: 51380 - DNA, 21 bp, Homo sapiens
atcatagtaggattcctgagt

SEQ ID NO: 51381 - DNA, 22 bp, Homo sapiens
gatagcatttaaaccatttttg

SEQ ID NO: 51382 - DNA, 17 bp, Homo sapiens
ggaagcatttttgagca

SEQ ID NO: 51383 - DNA, 20 bp, Homo sapiens
cattctgctcttcttagagt

SEQ ID NO: 51384 - DNA, 22 bp, Homo sapiens
ggggtttcaccgtgttgcccag

SEQ ID NO: 51385 - DNA, 18 bp, Homo sapiens
cttgtctgacagagaaat

SEQ ID NO: 51386 - DNA, 17 bp, Homo sapiens
gtgcagccactgaatat

SEQ ID NO: 51387 - DNA, 23 bp, Homo sapiens
aaaaagtttagaataagacaata

SEQ ID NO: 51388 - DNA, 21 bp, Homo sapiens
aaagtgcgccattctgaggat

SEQ ID NO: 51389 - DNA, 19 bp, Homo sapiens
ttctggtagccagtgttcg

SEQ ID NO: 51390 - DNA, 21 bp, Homo sapiens
tccagagtttgtaatatgtta

SEQ ID NO: 51391 - DNA, 23 bp, Homo sapiens
cttcatcaaagacttgagatata

SEQ ID NO: 51392 - DNA, 20 bp, Homo sapiens
agaaagaaaaaagtccatct

SEQ ID NO: 51393 - DNA, 16 bp, Homo sapiens
aggcaaactgcatatc

SEQ ID NO: 51394 - DNA, 21 bp, Homo sapiens
accatgctaaatttatagctc

SEQ ID NO: 51395 - DNA, 19 bp, Homo sapiens
attcttcagggaacctgtc

SEQ ID NO: 51396 - DNA, 19 bp, Homo sapiens
accgtatctaacatttgca

SEQ ID NO: 51397 - DNA, 18 bp, Homo sapiens
ctcacatgcctcacatga

SEQ ID NO: 51398 - DNA, 19 bp, Homo sapiens
agtcatcaaatattagagc

SEQ ID NO: 51399 - DNA, 27 bp, Homo sapiens
ccctcagatatgtaaataaaattctaa

SEQ ID NO: 51400 - DNA, 17 bp, Homo sapiens
agttctgaacacaagca

SEQ ID NO: 51401 - DNA, 20 bp, Homo sapiens
ggcatacttcactgatagca

SEQ ID NO: 51402 - DNA, 19 bp, Homo sapiens
ttcttgcataacaatccgg

SEQ ID NO: 51403 - DNA, 20 bp, Homo sapiens
tgagttacatgtagaattct

SEQ ID NO: 51404 - DNA, 20 bp, Homo sapiens
gtgaatccaaacttgctatt

SEQ ID NO: 51405 - DNA, 25 bp, Homo sapiens
tgactagttattaccacattatata

SEQ ID NO: 51406 - DNA, 19 bp, Homo sapiens
cttttagttgcctcccagt

SEQ ID NO: 51407 - DNA, 18 bp, Homo sapiens
ccttaaagtgacccgtta

SEQ ID NO: 51408 - DNA, 22 bp, Homo sapiens
attattagggttattgggtaaa

SEQ ID NO: 51409 - DNA, 18 bp, Homo sapiens
ttgggctttttgccatgg

SEQ ID NO: 51410 - DNA, 22 bp, Homo sapiens
gttccatggccggcacagggaa

SEQ ID NO: 51411 - DNA, 17 bp, Homo sapiens
cacataggcgttactga

SEQ ID NO: 51412 - DNA, 17 bp, Homo sapiens
tactcttcctgagcatg

SEQ ID NO: 51413 - DNA, 19 bp, Homo sapiens
gaaaagaaaatcacaggga

SEQ ID NO: 51414 - DNA, 22 bp, Homo sapiens
gatcttggaaatactttttttt

SEQ ID NO: 51415 - DNA, 17 bp, Homo sapiens
tgacaaaagaaaagccc

SEQ ID NO: 51416 - DNA, 22 bp, Homo sapiens
gctgcagctttcttccaagtaa

SEQ ID NO: 51417 - DNA, 19 bp, Homo sapiens
cctggacttggagaccaca

SEQ ID NO: 51418 - DNA, 20 bp, Homo sapiens
tctactgttctctttttctt

SEQ ID NO: 51419 - DNA, 19 bp, Homo sapiens
ttgacttttcctgcagtga

SEQ ID NO: 51420 - DNA, 16 bp, Homo sapiens
acaatcagagatgggg

SEQ ID NO: 51421 - DNA, 20 bp, Homo sapiens
aaacaggttcataaaagcat

SEQ ID NO: 51422 - DNA, 22 bp, Homo sapiens
gggtgtgagtttccactctaaa

SEQ ID NO: 51423 - DNA, 22 bp, Homo sapiens
aaaaaatcaagctataataaca

SEQ ID NO: 51424 - DNA, 21 bp, Homo sapiens
ctggtcatgaccattcacttt

SEQ ID NO: 51425 - DNA, 16 bp, Homo sapiens
gtccaagtcagccttg

SEQ ID NO: 51426 - DNA, 21 bp, Homo sapiens
agacactcctaagctgtttgg

SEQ ID NO: 51427 - DNA, 21 bp, Homo sapiens
agttgagtctcaataccttgg

SEQ ID NO: 51428 - DNA, 18 bp, Homo sapiens
tcatttgtttcatctgtt

SEQ ID NO: 51429 - DNA, 16 bp, Homo sapiens
agcccaggaagaggtg

SEQ ID NO: 51430 - DNA, 16 bp, Homo sapiens
atgatctcagcaaggc

SEQ ID NO: 51431 - DNA, 17 bp, Homo sapiens
cccaaagaaaaacgctt

SEQ ID NO: 51432 - DNA, 23 bp, Homo sapiens
atgtctccatgttccagttgcaa

SEQ ID NO: 51433 - DNA, 19 bp, Homo sapiens
cgaaaatttagttagtccc

SEQ ID NO: 51434 - DNA, 17 bp, Homo sapiens
atttaccaggggaattt

SEQ ID NO: 51435 - DNA, 19 bp, Homo sapiens
aacagtggaggtggacaca

SEQ ID NO: 51436 - DNA, 16 bp, Homo sapiens
taaacttcgggaagcg

SEQ ID NO: 51437 - DNA, 18 bp, Homo sapiens
gccaccacaatacatttt

SEQ ID NO: 51438 - DNA, 22 bp, Homo sapiens
cgcctctggaagaagtgttatg

SEQ ID NO: 51439 - DNA, 20 bp, Homo sapiens
gcttctattgccaacaagtg

SEQ ID NO: 51440 - DNA, 21 bp, Homo sapiens
agttttggtccctcccttgtg

SEQ ID NO: 51441 - DNA, 17 bp, Homo sapiens
gaagtagccaaaagagg

SEQ ID NO: 51442 - DNA, 22 bp, Homo sapiens
catcgtttgtattttgaaacgt

SEQ ID NO: 51443 - DNA, 19 bp, Homo sapiens
cccaaaccagactcactat

SEQ ID NO: 51444 - DNA, 16 bp, Homo sapiens
tggatggttttccact

SEQ ID NO: 51445 - DNA, 23 bp, Homo sapiens
aaaatcatgtttctgttttttcc

SEQ ID NO: 51446 - DNA, 18 bp, Homo sapiens
ctataggcaccttcaact

SEQ ID NO: 51447 - DNA, 18 bp, Homo sapiens
gaaaactcagactcaaag

SEQ ID NO: 51448 - DNA, 19 bp, Homo sapiens
tcaccttttggaataatat

SEQ ID NO: 51449 - DNA, 16 bp, Homo sapiens
cacaaggacgacatgc

SEQ ID NO: 51450 - DNA, 23 bp, Homo sapiens
gtgatttatgttgttctcttact

SEQ ID NO: 51451 - DNA, 16 bp, Homo sapiens
gaccaagcatgcaatg

SEQ ID NO: 51452 - DNA, 22 bp, Homo sapiens
cacagagaatcattattttaaa

SEQ ID NO: 51453 - DNA, 17 bp, Homo sapiens
aaacagtgtctcttact

SEQ ID NO: 51454 - DNA, 24 bp, Homo sapiens
gttttatgctcccattcttatttg

SEQ ID NO: 51455 - DNA, 18 bp, Homo sapiens
caggaggtggaggtactg

SEQ ID NO: 51456 - DNA, 21 bp, Homo sapiens
atcaaacccacaggacaagac

SEQ ID NO: 51457 - DNA, 18 bp, Homo sapiens
agcaagaatccctcttct

SEQ ID NO: 51458 - DNA, 21 bp, Homo sapiens
tcgcacatccctgattacagt

SEQ ID NO: 51459 - DNA, 17 bp, Homo sapiens
gagattacaggcgtcag

SEQ ID NO: 51460 - DNA, 20 bp, Homo sapiens
caactccaatactcccagta

SEQ ID NO: 51461 - DNA, 16 bp, Homo sapiens
agcctgcgattgggat

SEQ ID NO: 51462 - DNA, 21 bp, Homo sapiens
cagcattactgattctttatt

SEQ ID NO: 51463 - DNA, 16 bp, Homo sapiens
cgagggctgcccaggt

SEQ ID NO: 51464 - DNA, 23 bp, Homo sapiens
aataatgattaagaagaaaatat

SEQ ID NO: 51465 - DNA, 22 bp, Homo sapiens
gccagaagtcattttattttct

SEQ ID NO: 51466 - DNA, 16 bp, Homo sapiens
aatccccaccatccca

SEQ ID NO: 51467 - DNA, 23 bp, Homo sapiens
cttaatttctttttataaaggga

SEQ ID NO: 51468 - DNA, 19 bp, Homo sapiens
atccttaatccaggaacct

SEQ ID NO: 51469 - DNA, 17 bp, Homo sapiens
taaagcacttgtgagtg

SEQ ID NO: 51470 - DNA, 16 bp, Homo sapiens
tggtcaagtgatccac

SEQ ID NO: 51471 - DNA, 16 bp, Homo sapiens
tgggaaggatgtctgg

SEQ ID NO: 51472 - DNA, 17 bp, Homo sapiens
ctggcctgatatttgac

SEQ ID NO: 51473 - DNA, 18 bp, Homo sapiens
cacattcatcgcatcgaa

SEQ ID NO: 51474 - DNA, 20 bp, Homo sapiens
aagtgacttccacgctagac

SEQ ID NO: 51475 - DNA, 20 bp, Homo sapiens
ttaaaaggatgtttttcgaa

SEQ ID NO: 51476 - DNA, 16 bp, Homo sapiens
aaatcatctggccaga

SEQ ID NO: 51477 - DNA, 17 bp, Homo sapiens
aaactaaaccaaaccca

SEQ ID NO: 51478 - DNA, 21 bp, Homo sapiens
aaataaacttctgggacagcc

SEQ ID NO: 51479 - DNA, 16 bp, Homo sapiens
tacccttctacctcca

SEQ ID NO: 51480 - DNA, 18 bp, Homo sapiens
aggtaggcaagtggctca

SEQ ID NO: 51481 - DNA, 18 bp, Homo sapiens
acaatcctcgagtgacaa

SEQ ID NO: 51482 - DNA, 24 bp, Homo sapiens
ggcaatgaagagctagagaaagga

SEQ ID NO: 51483 - DNA, 19 bp, Homo sapiens
caccatgggttcggaatat

SEQ ID NO: 51484 - DNA, 18 bp, Homo sapiens
atccctgtaccacactaa

SEQ ID NO: 51485 - DNA, 19 bp, Homo sapiens
gtcgttttgaagataacga

SEQ ID NO: 51486 - DNA, 19 bp, Homo sapiens
gtcctgtacctggtgtgtt

SEQ ID NO: 51487 - DNA, 20 bp, Homo sapiens
tcacatcttcatatgccaag

SEQ ID NO: 51488 - DNA, 20 bp, Homo sapiens
gaatctgcccgttggtgaca

SEQ ID NO: 51489 - DNA, 16 bp, Homo sapiens
gcagacgggcagaagg

SEQ ID NO: 51490 - DNA, 19 bp, Homo sapiens
tcgcaatgagtacctcagt

SEQ ID NO: 51491 - DNA, 21 bp, Homo sapiens
tcttttgcattttttgtaatg

SEQ ID NO: 51492 - DNA, 22 bp, Homo sapiens
aagtcctgcatatttattatgg

SEQ ID NO: 51493 - DNA, 18 bp, Homo sapiens
ttccaatcaactcacctc

SEQ ID NO: 51494 - DNA, 24 bp, Homo sapiens
aagaattgaataagcaaactaaga

SEQ ID NO: 51495 - DNA, 22 bp, Homo sapiens
acatttttaacatcttaacctt

SEQ ID NO: 51496 - DNA, 17 bp, Homo sapiens
gttgtattcagaggcca

SEQ ID NO: 51497 - DNA, 19 bp, Homo sapiens
tggctgatggcgctcagat

SEQ ID NO: 51498 - DNA, 18 bp, Homo sapiens
ggtgcttcatccttgaga

SEQ ID NO: 51499 - DNA, 19 bp, Homo sapiens
tcaatggtcatgttcttct

SEQ ID NO: 51500 - DNA, 18 bp, Homo sapiens
gcgagactgtgtctcaaa

SEQ ID NO: 51501 - DNA, 22 bp, Homo sapiens
tcagttttagaagcgctacact

SEQ ID NO: 51502 - DNA, 20 bp, Homo sapiens
taaaagtaaggagtgaggct

SEQ ID NO: 51503 - DNA, 20 bp, Homo sapiens
ttcaaggaaacaaatcaact

SEQ ID NO: 51504 - DNA, 22 bp, Homo sapiens
tgtttatcagctaaactttggg

SEQ ID NO: 51505 - DNA, 19 bp, Homo sapiens
cctggattagtgctaatgc

SEQ ID NO: 51506 - DNA, 17 bp, Homo sapiens
tgtgccaggctaattgc

SEQ ID NO: 51507 - DNA, 18 bp, Homo sapiens
cagcctcatgatgtggaa

SEQ ID NO: 51508 - DNA, 20 bp, Homo sapiens
agattttctggcaattttgt

SEQ ID NO: 51509 - DNA, 18 bp, Homo sapiens
agcttgtgttgtgatgca

SEQ ID NO: 51510 - DNA, 17 bp, Homo sapiens
agccaaatcttgcatta

SEQ ID NO: 51511 - DNA, 18 bp, Homo sapiens
tctaagggtagcttacta

SEQ ID NO: 51512 - DNA, 18 bp, Homo sapiens
acttgaatcaacagtcat

SEQ ID NO: 51513 - DNA, 17 bp, Homo sapiens
tgtagttgaagatgccc

SEQ ID NO: 51514 - DNA, 20 bp, Homo sapiens
aagattctcaaagaaaaaca

SEQ ID NO: 51515 - DNA, 16 bp, Homo sapiens
agtgttctgccagaca

SEQ ID NO: 51516 - DNA, 28 bp, Homo sapiens
aatgcaattaaatttaaaataacatacc

SEQ ID NO: 51517 - DNA, 18 bp, Homo sapiens
gcttcctttttttggacc

SEQ ID NO: 51518 - DNA, 21 bp, Homo sapiens
tttaagcagtccagagtgggc

SEQ ID NO: 51519 - DNA, 20 bp, Homo sapiens
taccaatgtctcagttgttg

SEQ ID NO: 51520 - DNA, 21 bp, Homo sapiens
ctttgtgcatttttagaaaag

SEQ ID NO: 51521 - DNA, 16 bp, Homo sapiens
ttttcattctgccagt

SEQ ID NO: 51522 - DNA, 23 bp, Homo sapiens
ctcagaattttgttattcaaaca

SEQ ID NO: 51523 - DNA, 16 bp, Homo sapiens
tcctggacccagccct

SEQ ID NO: 51524 - DNA, 20 bp, Homo sapiens
tccttagtactgtcaaaaac

SEQ ID NO: 51525 - DNA, 16 bp, Homo sapiens
ttccagtgagaagcag

SEQ ID NO: 51526 - DNA, 18 bp, Homo sapiens
tgcaacattgaaaatgtc

SEQ ID NO: 51527 - DNA, 18 bp, Homo sapiens
agtatgacaagcttctca

SEQ ID NO: 51528 - DNA, 16 bp, Homo sapiens
tgttggctggcagggc

SEQ ID NO: 51529 - DNA, 28 bp, Homo sapiens
aaagtcttcatttgttaaaatattatca

SEQ ID NO: 51530 - DNA, 18 bp, Homo sapiens
gcaaacactctaactgct

SEQ ID NO: 51531 - DNA, 22 bp, Homo sapiens
gcaaaatttcctgtctaataga

SEQ ID NO: 51532 - DNA, 19 bp, Homo sapiens
taaactgtatttgcttttt

SEQ ID NO: 51533 - DNA, 18 bp, Homo sapiens
acaaaatcctgtgtaccc

SEQ ID NO: 51534 - DNA, 17 bp, Homo sapiens
tgctctaagcaaaccgt

SEQ ID NO: 51535 - DNA, 22 bp, Homo sapiens
ttactcttgagaggaaatcaaa

SEQ ID NO: 51536 - DNA, 18 bp, Homo sapiens
tgcatgaaaatggctgac

SEQ ID NO: 51537 - DNA, 18 bp, Homo sapiens
cccaaggatttctctaat

SEQ ID NO: 51538 - DNA, 21 bp, Homo sapiens
gagccaccatgcctggcctgt

SEQ ID NO: 51539 - DNA, 18 bp, Homo sapiens
actacagcaggtcagaga

SEQ ID NO: 51540 - DNA, 21 bp, Homo sapiens
agttcattagcatgatgactg

SEQ ID NO: 51541 - DNA, 18 bp, Homo sapiens
ccgattgacgttgtttac

SEQ ID NO: 51542 - DNA, 21 bp, Homo sapiens
gaccttattacatcgccacat

SEQ ID NO: 51543 - DNA, 21 bp, Homo sapiens
ttggaaaaatgcatttaagct

SEQ ID NO: 51544 - DNA, 17 bp, Homo sapiens
ctgctcctcctccatct

SEQ ID NO: 51545 - DNA, 22 bp, Homo sapiens
agagatttttttcataatctct

SEQ ID NO: 51546 - DNA, 19 bp, Homo sapiens
tctgtgccattcacccagg

SEQ ID NO: 51547 - DNA, 19 bp, Homo sapiens
cagctacagtttgaaaaca

SEQ ID NO: 51548 - DNA, 20 bp, Homo sapiens
atgtgctgctaaagtgaaca

SEQ ID NO: 51549 - DNA, 20 bp, Homo sapiens
ccatgttttgtttgattcct

SEQ ID NO: 51550 - DNA, 23 bp, Homo sapiens
atctataactcagaaagacccct

SEQ ID NO: 51551 - DNA, 19 bp, Homo sapiens
tgatgcgaagaaaacgttt

SEQ ID NO: 51552 - DNA, 24 bp, Homo sapiens
gatttaggtccaaataatagattt

SEQ ID NO: 51553 - DNA, 21 bp, Homo sapiens
cccatttctctagcaattcta

SEQ ID NO: 51554 - DNA, 20 bp, Homo sapiens
gcaatattgtctctatagga

SEQ ID NO: 51555 - DNA, 19 bp, Homo sapiens
acacgatgtatgtggtagg

SEQ ID NO: 51556 - DNA, 24 bp, Homo sapiens
gagacagggcgatcgcctgagctc

SEQ ID NO: 51557 - DNA, 23 bp, Homo sapiens
ctctacgtgtgcttcttgggcgt

SEQ ID NO: 51558 - DNA, 24 bp, Homo sapiens
ccccgtctctaataatgaaaaaat

SEQ ID NO: 51559 - DNA, 18 bp, Homo sapiens
gatgctgttcaagctcct

SEQ ID NO: 51560 - DNA, 24 bp, Homo sapiens
agtgcagggtcgaggcgcccggtc

SEQ ID NO: 51561 - DNA, 23 bp, Homo sapiens
ctgaggcggcggcggcggcggcg

SEQ ID NO: 51562 - DNA, 24 bp, Homo sapiens
aaggcggagacgatggtgacaacg

SEQ ID NO: 51563 - DNA, 24 bp, Homo sapiens
cgcccggaggctgtgacctgcgcg

SEQ ID NO: 51564 - DNA, 24 bp, Homo sapiens
tgggacaggcaggtataggtctgt

SEQ ID NO: 51565 - DNA, 16 bp, Homo sapiens
tcctttgcagtgccct

SEQ ID NO: 51566 - DNA, 19 bp, Homo sapiens
ggatttaaggctgttattt

SEQ ID NO: 51567 - DNA, 24 bp, Homo sapiens
cttgaagagtttttgcttattata

SEQ ID NO: 51568 - DNA, 21 bp, Homo sapiens
gaaagaaatagttggatctcc

SEQ ID NO: 51569 - DNA, 17 bp, Homo sapiens
cagctcatccaagaagc

SEQ ID NO: 51570 - DNA, 22 bp, Homo sapiens
gctttactttattttctggagg

SEQ ID NO: 51571 - DNA, 22 bp, Homo sapiens
aaaacatgcaagtacttatacc

SEQ ID NO: 51572 - DNA, 19 bp, Homo sapiens
gttcttctccatcaatgaa

SEQ ID NO: 51573 - DNA, 16 bp, Homo sapiens
ttgaggtcttggacaa

SEQ ID NO: 51574 - DNA, 23 bp, Homo sapiens
aatatttcaataaatttattatt

SEQ ID NO: 51575 - DNA, 22 bp, Homo sapiens
tcttaggaactttgctgccaca

SEQ ID NO: 51576 - DNA, 22 bp, Homo sapiens
tcgattactgagaaaccgagtg

SEQ ID NO: 51577 - DNA, 16 bp, Homo sapiens
agactacctttctcca

SEQ ID NO: 51578 - DNA, 16 bp, Homo sapiens
tcttaagctgctgggt

SEQ ID NO: 51579 - DNA, 20 bp, Homo sapiens
aagaccctgctctagggagg

SEQ ID NO: 51580 - DNA, 23 bp, Homo sapiens
cgaactgagaagggccgaggtat

SEQ ID NO: 51581 - DNA, 17 bp, Homo sapiens
caacagagaacggaaga

SEQ ID NO: 51582 - DNA, 19 bp, Homo sapiens
tattacgtggcagagagtt

SEQ ID NO: 51583 - DNA, 23 bp, Homo sapiens
gtctatggtacaaagttgctgta

SEQ ID NO: 51584 - DNA, 16 bp, Homo sapiens
ctggagctggagaaga

SEQ ID NO: 51585 - DNA, 16 bp, Homo sapiens
accagtcaggaggccc

SEQ ID NO: 51586 - DNA, 21 bp, Homo sapiens
cagtgataataacttttcact

SEQ ID NO: 51587 - DNA, 20 bp, Homo sapiens
tttctccttggcatcattaa

SEQ ID NO: 51588 - DNA, 17 bp, Homo sapiens
agagaaggggcacaaat

SEQ ID NO: 51589 - DNA, 19 bp, Homo sapiens
cagtgtaattttggatggc

SEQ ID NO: 51590 - DNA, 19 bp, Homo sapiens
caaagtaatttggctcaca

SEQ ID NO: 51591 - DNA, 16 bp, Homo sapiens
cagtactgtaggcccc

SEQ ID NO: 51592 - DNA, 24 bp, Homo sapiens
tagctgctaaggtaccaatcactg

SEQ ID NO: 51593 - DNA, 16 bp, Homo sapiens
ctctgcaaacaaggag

SEQ ID NO: 51594 - DNA, 19 bp, Homo sapiens
gggtttcaacaatattgaa

SEQ ID NO: 51595 - DNA, 18 bp, Homo sapiens
atagagtgtgctctcaga

SEQ ID NO: 51596 - DNA, 19 bp, Homo sapiens
cttggttcctgtgaaggtc

SEQ ID NO: 51597 - DNA, 22 bp, Homo sapiens
caaaataatgctttactatcta

SEQ ID NO: 51598 - DNA, 19 bp, Homo sapiens
atgcctttatggagtctcc

SEQ ID NO: 51599 - DNA, 22 bp, Homo sapiens
agtccactgactcacatgccaa

SEQ ID NO: 51600 - DNA, 23 bp, Homo sapiens
aatctatcaaaatgtgaagtttc

SEQ ID NO: 51601 - DNA, 17 bp, Homo sapiens
aattggccttgcctctc

SEQ ID NO: 51602 - DNA, 18 bp, Homo sapiens
tccccagataacctggct

SEQ ID NO: 51603 - DNA, 16 bp, Homo sapiens
ggttctgtggttccaa

SEQ ID NO: 51604 - DNA, 16 bp, Homo sapiens
ctatagcactccacca

SEQ ID NO: 51605 - DNA, 21 bp, Homo sapiens
atgtgggctgttctgaaggca

SEQ ID NO: 51606 - DNA, 19 bp, Homo sapiens
atgtattcatcaggtgcac

SEQ ID NO: 51607 - DNA, 18 bp, Homo sapiens
cttcccagaaccacacac

SEQ ID NO: 51608 - DNA, 16 bp, Homo sapiens
agctgttgggacatgt

SEQ ID NO: 51609 - DNA, 19 bp, Homo sapiens
cttgcagagggcatgagga

SEQ ID NO: 51610 - DNA, 16 bp, Homo sapiens
ggcttaaacctcctcc

SEQ ID NO: 51611 - DNA, 18 bp, Homo sapiens
acctataactagaaggct

SEQ ID NO: 51612 - DNA, 19 bp, Homo sapiens
taagcctaaaagagttatt

SEQ ID NO: 51613 - DNA, 20 bp, Homo sapiens
ctgcgatctgaaaacaaggg

SEQ ID NO: 51614 - DNA, 19 bp, Homo sapiens
ctgccttttatgatcccaa

SEQ ID NO: 51615 - DNA, 22 bp, Homo sapiens
ttggatggagcaaatctccaga

SEQ ID NO: 51616 - DNA, 17 bp, Homo sapiens
ctgcacacagtacatca

SEQ ID NO: 51617 - DNA, 16 bp, Homo sapiens
ctagtcctgtggacca

SEQ ID NO: 51618 - DNA, 16 bp, Homo sapiens
ctggcctgctttcctc

SEQ ID NO: 51619 - DNA, 22 bp, Homo sapiens
aaagatggcgctcattgtgcct

SEQ ID NO: 51620 - DNA, 20 bp, Homo sapiens
tgatgagctttgagttttct

SEQ ID NO: 51621 - DNA, 16 bp, Homo sapiens
catgggcttggatcca

SEQ ID NO: 51622 - DNA, 18 bp, Homo sapiens
gttatgtgtactactcca

SEQ ID NO: 51623 - DNA, 22 bp, Homo sapiens
gccacccaagaaatcccgagag

SEQ ID NO: 51624 - DNA, 23 bp, Homo sapiens
ctagctagaaagcagcgaggcag

SEQ ID NO: 51625 - DNA, 20 bp, Homo sapiens
agtgaaatttagttcttcct

SEQ ID NO: 51626 - DNA, 19 bp, Homo sapiens
tggcttccatgaagataac

SEQ ID NO: 51627 - DNA, 17 bp, Homo sapiens
tcatacttgcctccaca

SEQ ID NO: 51628 - DNA, 17 bp, Homo sapiens
ataaaacccatgcttgc

SEQ ID NO: 51629 - DNA, 22 bp, Homo sapiens
ctcccccaactttctgcagggc

SEQ ID NO: 51630 - DNA, 19 bp, Homo sapiens
ggaatacatggaggaagaa

SEQ ID NO: 51631 - DNA, 22 bp, Homo sapiens
aaacgtcttccagctggggaat

SEQ ID NO: 51632 - DNA, 16 bp, Homo sapiens
cctgcttgagacacct

SEQ ID NO: 51633 - DNA, 20 bp, Homo sapiens
tgtgattgtactcatagcaa

SEQ ID NO: 51634 - DNA, 16 bp, Homo sapiens
cacaggttctggtccc

SEQ ID NO: 51635 - DNA, 19 bp, Homo sapiens
ctgtgccccatgttttctt

SEQ ID NO: 51636 - DNA, 21 bp, Homo sapiens
cctatatcaagatgtggaatt

SEQ ID NO: 51637 - DNA, 16 bp, Homo sapiens
gtttaaacacaccccc

SEQ ID NO: 51638 - DNA, 21 bp, Homo sapiens
gtaccgtgcaagacggaagca

SEQ ID NO: 51639 - DNA, 17 bp, Homo sapiens
aaggcaggactcttcat

SEQ ID NO: 51640 - DNA, 18 bp, Homo sapiens
tgaagccttgaaaaatca

SEQ ID NO: 51641 - DNA, 18 bp, Homo sapiens
gcaggctaggggtgtgtt

SEQ ID NO: 51642 - DNA, 16 bp, Homo sapiens
cactgtcatggcttga

SEQ ID NO: 51643 - DNA, 21 bp, Homo sapiens
cggtagttgtaggcaatgtca

SEQ ID NO: 51644 - DNA, 17 bp, Homo sapiens
taggagagctaagttta

SEQ ID NO: 51645 - DNA, 18 bp, Homo sapiens
ccaatcagattctcagct

SEQ ID NO: 51646 - DNA, 20 bp, Homo sapiens
aagtgtttgttgaacaagtg

SEQ ID NO: 51647 - DNA, 18 bp, Homo sapiens
cttctctgtgtttcagtg

SEQ ID NO: 51648 - DNA, 16 bp, Homo sapiens
gaggagaggcactgaa

SEQ ID NO: 51649 - DNA, 16 bp, Homo sapiens
cacttctgatctcagc

SEQ ID NO: 51650 - DNA, 24 bp, Homo sapiens
gtcagcatccagttccgctccata

SEQ ID NO: 51651 - DNA, 17 bp, Homo sapiens
atagtaatttgggggtt

SEQ ID NO: 51652 - DNA, 18 bp, Homo sapiens
gttcttgggaaccagggc

SEQ ID NO: 51653 - DNA, 29 bp, Homo sapiens
tttccaatacatatatattaattttgctt

SEQ ID NO: 51654 - DNA, 18 bp, Homo sapiens
tcttgaggcatgacattg

SEQ ID NO: 51655 - DNA, 24 bp, Homo sapiens
tacatatatttaaatatgctgtta

SEQ ID NO: 51656 - DNA, 20 bp, Homo sapiens
tgagtatgaatttttcaccc

SEQ ID NO: 51657 - DNA, 17 bp, Homo sapiens
tgttgcaaaattcctct

SEQ ID NO: 51658 - DNA, 20 bp, Homo sapiens
ggagaatgatgtaaacctga

SEQ ID NO: 51659 - DNA, 24 bp, Homo sapiens
gtgaaagctcatggacagtggcac

SEQ ID NO: 51660 - DNA, 16 bp, Homo sapiens
tttggcctgcgttagt

SEQ ID NO: 51661 - DNA, 23 bp, Homo sapiens
agcaggcaggctacgtttatcca

SEQ ID NO: 51662 - DNA, 24 bp, Homo sapiens
aaaaataattgtattcttgaactc

SEQ ID NO: 51663 - DNA, 16 bp, Homo sapiens
tcaatgtgggtcaggt

SEQ ID NO: 51664 - DNA, 22 bp, Homo sapiens
ttgaatgacttaactaaggtca

SEQ ID NO: 51665 - DNA, 17 bp, Homo sapiens
ttctcactcaaagaaga

SEQ ID NO: 51666 - DNA, 22 bp, Homo sapiens
atctgcctgttccagatcctgt

SEQ ID NO: 51667 - DNA, 18 bp, Homo sapiens
atcctgtaggaaacaagc

SEQ ID NO: 51668 - DNA, 19 bp, Homo sapiens
gctacgacattatccaaga

SEQ ID NO: 51669 - DNA, 18 bp, Homo sapiens
catggaggtttaacagga

SEQ ID NO: 51670 - DNA, 20 bp, Homo sapiens
ctttggccaatgcaccaact

SEQ ID NO: 51671 - DNA, 22 bp, Homo sapiens
atatagctcattgtattgcaag

SEQ ID NO: 51672 - DNA, 18 bp, Homo sapiens
ttgcagttgtcttcaata

SEQ ID NO: 51673 - DNA, 16 bp, Homo sapiens
gcttgggcaggaaact

SEQ ID NO: 51674 - DNA, 24 bp, Homo sapiens
cttccaacgaattcagacttctta

SEQ ID NO: 51675 - DNA, 16 bp, Homo sapiens
aaaagccagagacctc

SEQ ID NO: 51676 - DNA, 21 bp, Homo sapiens
gatctctttctctggaggccc

SEQ ID NO: 51677 - DNA, 17 bp, Homo sapiens
tagtgcgaggttaaaac

SEQ ID NO: 51678 - DNA, 18 bp, Homo sapiens
ccaaagtcagagagtttc

SEQ ID NO: 51679 - DNA, 19 bp, Homo sapiens
cgttactgtgcggagatgc

SEQ ID NO: 51680 - DNA, 18 bp, Homo sapiens
tggcaagaggtgtagatc

SEQ ID NO: 51681 - DNA, 22 bp, Homo sapiens
ggggaatcaagagaaaatatac

SEQ ID NO: 51682 - DNA, 21 bp, Homo sapiens
tctctgggtgagctcttcagg

SEQ ID NO: 51683 - DNA, 16 bp, Homo sapiens
tccagactcagtgact

SEQ ID NO: 51684 - DNA, 20 bp, Homo sapiens
tcgccatggagggatcctcc

SEQ ID NO: 51685 - DNA, 17 bp, Homo sapiens
gacccagttagcgttga

SEQ ID NO: 51686 - DNA, 18 bp, Homo sapiens
gccgatgggtcatttttc

SEQ ID NO: 51687 - DNA, 16 bp, Homo sapiens
tgcacaatgtgcccag

SEQ ID NO: 51688 - DNA, 23 bp, Homo sapiens
catatctggctagcgtgaagaga

SEQ ID NO: 51689 - DNA, 19 bp, Homo sapiens
ccctgtgcccggcgtggtg

SEQ ID NO: 51690 - DNA, 16 bp, Homo sapiens
cagatgggagagaccg

SEQ ID NO: 51691 - DNA, 21 bp, Homo sapiens
gagggggtgcgggaatgctgc

SEQ ID NO: 51692 - DNA, 22 bp, Homo sapiens
gttgagccccataatgtcacgt

SEQ ID NO: 51693 - DNA, 22 bp, Homo sapiens
cacagatgagcctcggctttca

SEQ ID NO: 51694 - DNA, 22 bp, Homo sapiens
aggttcaggttgagcggtggca

SEQ ID NO: 51695 - DNA, 24 bp, Homo sapiens
tttaagaacttggccacgttcgca

SEQ ID NO: 51696 - DNA, 21 bp, Homo sapiens
tgtttaaacccacctgtgatg

SEQ ID NO: 51697 - DNA, 24 bp, Homo sapiens
tgtgtggctggatggctcagagat

SEQ ID NO: 51698 - DNA, 24 bp, Homo sapiens
gggaggcaagatcagctcggcgct

SEQ ID NO: 51699 - DNA, 19 bp, Homo sapiens
ctctccctctccccatctc

SEQ ID NO: 51700 - DNA, 16 bp, Homo sapiens
gcacacctttcccacc

SEQ ID NO: 51701 - DNA, 24 bp, Homo sapiens
ttcctctccctctcccttgggccc

SEQ ID NO: 51702 - DNA, 21 bp, Homo sapiens
tcctggaggcagaacactgcc

SEQ ID NO: 51703 - DNA, 24 bp, Homo sapiens
cggcggcacacggcccggcagaaa

SEQ ID NO: 51704 - DNA, 21 bp, Homo sapiens
tcccagccctgcccactctgg

SEQ ID NO: 51705 - DNA, 22 bp, Homo sapiens
agtacaccagccagctcccacc

SEQ ID NO: 51706 - DNA, 23 bp, Homo sapiens
agggacttggggaactggaggac

SEQ ID NO: 51707 - DNA, 17 bp, Homo sapiens
gagtataccacgttcaa

SEQ ID NO: 51708 - DNA, 24 bp, Homo sapiens
agagcccatgtgtgtctgtcactg

SEQ ID NO: 51709 - DNA, 24 bp, Homo sapiens
tggttcccgccatggtctggtggg

SEQ ID NO: 51710 - DNA, 24 bp, Homo sapiens
acctacaggcaggatgaaggccgt

SEQ ID NO: 51711 - DNA, 16 bp, Homo sapiens
ttctgagccagtggaa

SEQ ID NO: 51712 - DNA, 24 bp, Homo sapiens
cactgctccagctccaggatgggc

SEQ ID NO: 51713 - DNA, 21 bp, Homo sapiens
cctggcgacaccatgctcctc

SEQ ID NO: 51714 - DNA, 18 bp, Homo sapiens
ctacgagcaaggctaact

SEQ ID NO: 51715 - DNA, 24 bp, Homo sapiens
atcttgactgtcactttctgtcgc

SEQ ID NO: 51716 - DNA, 17 bp, Homo sapiens
ctaggagagtcccctga

SEQ ID NO: 51717 - DNA, 21 bp, Homo sapiens
ttgccggcgtattaggtggcg

SEQ ID NO: 51718 - DNA, 22 bp, Homo sapiens
acttaagtgagcctcccgggcc

SEQ ID NO: 51719 - DNA, 17 bp, Homo sapiens
gacacattgccaaacca

SEQ ID NO: 51720 - DNA, 17 bp, Homo sapiens
aatgtgcactggatctg

SEQ ID NO: 51721 - DNA, 19 bp, Homo sapiens
gcattttacagatgaagaa

SEQ ID NO: 51722 - DNA, 16 bp, Homo sapiens
taggtttgctctggaa

SEQ ID NO: 51723 - DNA, 17 bp, Homo sapiens
caaagagtaactggtgg

SEQ ID NO: 51724 - DNA, 22 bp, Homo sapiens
tgtttatggcaagacagggcct

SEQ ID NO: 51725 - DNA, 23 bp, Homo sapiens
gaagattcccagcttgggtgaga

SEQ ID NO: 51726 - DNA, 20 bp, Homo sapiens
gcaagaaaaataacatggct

SEQ ID NO: 51727 - DNA, 17 bp, Homo sapiens
ttctgtgactaattcca

SEQ ID NO: 51728 - DNA, 19 bp, Homo sapiens
agccttgtggagctgacca

SEQ ID NO: 51729 - DNA, 18 bp, Homo sapiens
caagtgtttgaagccgtg

SEQ ID NO: 51730 - DNA, 18 bp, Homo sapiens
gacaacctccgaggctgc

SEQ ID NO: 51731 - DNA, 18 bp, Homo sapiens
catttttttccacagggt

SEQ ID NO: 51732 - DNA, 19 bp, Homo sapiens
tcgactcaaacgcaacctc

SEQ ID NO: 51733 - DNA, 24 bp, Homo sapiens
tgaaagtttaaaaaaaaaaaaaca

SEQ ID NO: 51734 - DNA, 16 bp, Homo sapiens
atctgtagttcccacg

SEQ ID NO: 51735 - DNA, 16 bp, Homo sapiens
tccagcctggatgaca

SEQ ID NO: 51736 - DNA, 22 bp, Homo sapiens
ctgtgaaggtactagaaaaccc

SEQ ID NO: 51737 - DNA, 19 bp, Homo sapiens
atgattagcccaacagggc

SEQ ID NO: 51738 - DNA, 22 bp, Homo sapiens
cacagccttcctcgaagacacc

SEQ ID NO: 51739 - DNA, 24 bp, Homo sapiens
cgcctggtatattatactttaaag

SEQ ID NO: 51740 - DNA, 16 bp, Homo sapiens
ctgtgtaagccatccc

SEQ ID NO: 51741 - DNA, 22 bp, Homo sapiens
ccatgagtatttctttgcattt

SEQ ID NO: 51742 - DNA, 16 bp, Homo sapiens
gtaagtgctgcctctg

SEQ ID NO: 51743 - DNA, 19 bp, Homo sapiens
atcttggggatcctgggtg

SEQ ID NO: 51744 - DNA, 21 bp, Homo sapiens
gtttgctattagaaaggatct

SEQ ID NO: 51745 - DNA, 24 bp, Homo sapiens
tacctggtctctggcgcccacgtg

SEQ ID NO: 51746 - DNA, 17 bp, Homo sapiens
tatccccgtttccagag

SEQ ID NO: 51747 - DNA, 24 bp, Homo sapiens
gagacgtcacctgacggttgccgc

SEQ ID NO: 51748 - DNA, 22 bp, Homo sapiens
ggagccgtcttggcctggggag

SEQ ID NO: 51749 - DNA, 22 bp, Homo sapiens
accacgattcacggcaggtgtt

SEQ ID NO: 51750 - DNA, 22 bp, Homo sapiens
ggacgggaacctggcggggtca

SEQ ID NO: 51751 - DNA, 22 bp, Homo sapiens
acgccctgagggccgcggctct

SEQ ID NO: 51752 - DNA, 21 bp, Homo sapiens
aaattgaaacctgagcggtgg

SEQ ID NO: 51753 - DNA, 16 bp, Homo sapiens
caggccaagacggctc

SEQ ID NO: 51754 - DNA, 23 bp, Homo sapiens
caatgggaaacaagtccctggga

SEQ ID NO: 51755 - DNA, 20 bp, Homo sapiens
gtggcatctggagtttcacc

SEQ ID NO: 51756 - DNA, 21 bp, Homo sapiens
tgtgttatttgctaattagat

SEQ ID NO: 51757 - DNA, 19 bp, Homo sapiens
ctttgtgttgggaaatgct

SEQ ID NO: 51758 - DNA, 20 bp, Homo sapiens
ttcacagtgttcatgattgc

SEQ ID NO: 51759 - DNA, 24 bp, Homo sapiens
atccctctcatgctgtctatttct

SEQ ID NO: 51760 - DNA, 20 bp, Homo sapiens
gcaacgcctggccttgtccc

SEQ ID NO: 51761 - DNA, 21 bp, Homo sapiens
tttttgacttcccagaacaat

SEQ ID NO: 51762 - DNA, 17 bp, Homo sapiens
tgtacgtcttctatgtc

SEQ ID NO: 51763 - DNA, 19 bp, Homo sapiens
gcaaattccagacactgca

SEQ ID NO: 51764 - DNA, 16 bp, Homo sapiens
tgtggtggacctacac

SEQ ID NO: 51765 - DNA, 19 bp, Homo sapiens
acacaaagcagtccacagt

SEQ ID NO: 51766 - DNA, 21 bp, Homo sapiens
gataaagagtgaatttaagga

SEQ ID NO: 51767 - DNA, 16 bp, Homo sapiens
ggagaagccgtcgtac

SEQ ID NO: 51768 - DNA, 24 bp, Homo sapiens
cctagtggccatgcacgtggccta

SEQ ID NO: 51769 - DNA, 22 bp, Homo sapiens
gaagaagatgctgcttgtgtag

SEQ ID NO: 51770 - DNA, 20 bp, Homo sapiens
atctcccacatccggctatg

SEQ ID NO: 51771 - DNA, 22 bp, Homo sapiens
ctgggttttgatctcctcgatg

SEQ ID NO: 51772 - DNA, 16 bp, Homo sapiens
actttgtctgcaacac

SEQ ID NO: 51773 - DNA, 21 bp, Homo sapiens
cttcttctcatgtctccggta

SEQ ID NO: 51774 - DNA, 24 bp, Homo sapiens
ttcatttttcgcattatgatcctc

SEQ ID NO: 51775 - DNA, 20 bp, Homo sapiens
aagatcagctgcagggccca

SEQ ID NO: 51776 - DNA, 16 bp, Homo sapiens
gggggtgtgaacaaac

SEQ ID NO: 51777 - DNA, 24 bp, Homo sapiens
agcacacgttcttgcagcctggct

SEQ ID NO: 51778 - DNA, 18 bp, Homo sapiens
gtcttttccagagcaaac

SEQ ID NO: 51779 - DNA, 19 bp, Homo sapiens
cacctcctttgcagccaca

SEQ ID NO: 51780 - DNA, 17 bp, Homo sapiens
cagagaagtctccctgt

SEQ ID NO: 51781 - DNA, 21 bp, Homo sapiens
gatctttccaatgctggtgga

SEQ ID NO: 51782 - DNA, 17 bp, Homo sapiens
gttgtgtaagagttggt

SEQ ID NO: 51783 - DNA, 16 bp, Homo sapiens
gtcatggctcccagaa

SEQ ID NO: 51784 - DNA, 21 bp, Homo sapiens
cagcccccgctgtgaggtcaa

SEQ ID NO: 51785 - DNA, 16 bp, Homo sapiens
agacttggactaatgg

SEQ ID NO: 51786 - DNA, 23 bp, Homo sapiens
atcagatacaccatccatcaacg

SEQ ID NO: 51787 - DNA, 17 bp, Homo sapiens
cataagctccagagagc

SEQ ID NO: 51788 - DNA, 20 bp, Homo sapiens
gtatctaaacacagaaaagg

SEQ ID NO: 51789 - DNA, 17 bp, Homo sapiens
tgctatccaggctgcca

SEQ ID NO: 51790 - DNA, 21 bp, Homo sapiens
acctgctctaaattgtttact

SEQ ID NO: 51791 - DNA, 18 bp, Homo sapiens
ctgcatcttcactttcat

SEQ ID NO: 51792 - DNA, 18 bp, Homo sapiens
gaagcaggggtaagttct

SEQ ID NO: 51793 - DNA, 22 bp, Homo sapiens
cctgggagtaagtcttcaggca

SEQ ID NO: 51794 - DNA, 22 bp, Homo sapiens
atggaactgtagcctcgtacta

SEQ ID NO: 51795 - DNA, 19 bp, Homo sapiens
ttctcagcgatgttggcga

SEQ ID NO: 51796 - DNA, 24 bp, Homo sapiens
ctgaccgggcagccctttgacaca

SEQ ID NO: 51797 - DNA, 16 bp, Homo sapiens
gccactttccgcacca

SEQ ID NO: 51798 - DNA, 22 bp, Homo sapiens
gtaccggggcctcaccgactgc

SEQ ID NO: 51799 - DNA, 22 bp, Homo sapiens
gggtttttttaaacaaataaaa

SEQ ID NO: 51800 - DNA, 18 bp, Homo sapiens
aagggtaccagtccagca

SEQ ID NO: 51801 - DNA, 16 bp, Homo sapiens
gcttctgccagcaggt

SEQ ID NO: 51802 - DNA, 17 bp, Homo sapiens
gtgttgcccaggctggt

SEQ ID NO: 51803 - DNA, 19 bp, Homo sapiens
aacacatgggctcaagtga

SEQ ID NO: 51804 - DNA, 17 bp, Homo sapiens
aaggcagaggcgaagga

SEQ ID NO: 51805 - DNA, 22 bp, Homo sapiens
atgccctcacgcccggctcctt

SEQ ID NO: 51806 - DNA, 17 bp, Homo sapiens
ctcatacatggtctgca

SEQ ID NO: 51807 - DNA, 22 bp, Homo sapiens
gtgagtgccaaaggaatgaaga

SEQ ID NO: 51808 - DNA, 16 bp, Homo sapiens
acgtttgtgcccaagt

SEQ ID NO: 51809 - DNA, 18 bp, Homo sapiens
gaatgcagccgccggttc

SEQ ID NO: 51810 - DNA, 20 bp, Homo sapiens
ctgccactttagtacaatgt

SEQ ID NO: 51811 - DNA, 16 bp, Homo sapiens
tgaagtgccggctgca

SEQ ID NO: 51812 - DNA, 22 bp, Homo sapiens
aaatctctgataggggaaagca

SEQ ID NO: 51813 - DNA, 20 bp, Homo sapiens
gggccatctttcctaagaat

SEQ ID NO: 51814 - DNA, 20 bp, Homo sapiens
acaaaatcagcttcttcctt

SEQ ID NO: 51815 - DNA, 16 bp, Homo sapiens
agcctggtacttctcg

SEQ ID NO: 51816 - DNA, 22 bp, Homo sapiens
ttgtcttttcttccttcccacc

SEQ ID NO: 51817 - DNA, 18 bp, Homo sapiens
ttgatctccctgatgcaa

SEQ ID NO: 51818 - DNA, 19 bp, Homo sapiens
acagtgtggtctgtcatca

SEQ ID NO: 51819 - DNA, 16 bp, Homo sapiens
gagcaaacaccatcac

SEQ ID NO: 51820 - DNA, 19 bp, Homo sapiens
ggactctcaagcactttac

SEQ ID NO: 51821 - DNA, 19 bp, Homo sapiens
gagccaccaatgtggggag

SEQ ID NO: 51822 - DNA, 22 bp, Homo sapiens
atgaactgagccggtccttttt

SEQ ID NO: 51823 - DNA, 16 bp, Homo sapiens
caactgcctgccacca

SEQ ID NO: 51824 - DNA, 16 bp, Homo sapiens
gggaacaagagctttg

SEQ ID NO: 51825 - DNA, 16 bp, Homo sapiens
gcaagccagaggcaaa

SEQ ID NO: 51826 - DNA, 16 bp, Homo sapiens
catctacctgcagcca

SEQ ID NO: 51827 - DNA, 17 bp, Homo sapiens
ctgttttccagacatgg

SEQ ID NO: 51828 - DNA, 23 bp, Homo sapiens
gttcttgagacaaaataccattt

SEQ ID NO: 51829 - DNA, 21 bp, Homo sapiens
tgaaaaacaggtatttactca

SEQ ID NO: 51830 - DNA, 17 bp, Homo sapiens
ggagttggtgggatttg

SEQ ID NO: 51831 - DNA, 21 bp, Homo sapiens
gatcacaggcatgagccacca

SEQ ID NO: 51832 - DNA, 16 bp, Homo sapiens
cgatctcctgacctca

SEQ ID NO: 51833 - DNA, 18 bp, Homo sapiens
agtctatttaggaaaagc

SEQ ID NO: 51834 - DNA, 17 bp, Homo sapiens
agggaatgctcgaatca

SEQ ID NO: 51835 - DNA, 17 bp, Homo sapiens
gtctgggtttgcatgtg

SEQ ID NO: 51836 - DNA, 19 bp, Homo sapiens
tatgcttccaactggttca

SEQ ID NO: 51837 - DNA, 22 bp, Homo sapiens
caaaggagggattgttgcagtc

SEQ ID NO: 51838 - DNA, 16 bp, Homo sapiens
ctgtagtcctcaaaca

SEQ ID NO: 51839 - DNA, 19 bp, Homo sapiens
ctggactgaaacctactat

SEQ ID NO: 51840 - DNA, 21 bp, Homo sapiens
caaaattcccaagaaatcaga

SEQ ID NO: 51841 - DNA, 18 bp, Homo sapiens
acgaatatagcaggaagt

SEQ ID NO: 51842 - DNA, 19 bp, Homo sapiens
tgcaaaatagaggttcttc

SEQ ID NO: 51843 - DNA, 24 bp, Homo sapiens
tggtctctgctcctgaatggcagg

SEQ ID NO: 51844 - DNA, 24 bp, Homo sapiens
tatccagggagcggaagtccccaa

SEQ ID NO: 51845 - DNA, 16 bp, Homo sapiens
tccgacaagccatctc

SEQ ID NO: 51846 - DNA, 23 bp, Homo sapiens
cctgctcagcttgtggtgagtgg

SEQ ID NO: 51847 - DNA, 19 bp, Homo sapiens
cagggccacaccatgggac

SEQ ID NO: 51848 - DNA, 23 bp, Homo sapiens
agtcatcagatgtactgctcctc

SEQ ID NO: 51849 - DNA, 21 bp, Homo sapiens
gaagcccctgacggcatccca

SEQ ID NO: 51850 - DNA, 24 bp, Homo sapiens
atcatcgtctgctgcagcgctgtg

SEQ ID NO: 51851 - DNA, 24 bp, Homo sapiens
ttcctgctttccagctataagaag

SEQ ID NO: 51852 - DNA, 19 bp, Homo sapiens
catagctgacctggtccca

SEQ ID NO: 51853 - DNA, 23 bp, Homo sapiens
tcaccaggcttagaaaaaaaaaa

SEQ ID NO: 51854 - DNA, 16 bp, Homo sapiens
tgcctatgtgcacact

SEQ ID NO: 51855 - DNA, 19 bp, Homo sapiens
gaaactcttgaggttttga

SEQ ID NO: 51856 - DNA, 19 bp, Homo sapiens
gtgcctcatacctctccag

SEQ ID NO: 51857 - DNA, 23 bp, Homo sapiens
cagcctcctctgtgtctgtggtg

SEQ ID NO: 51858 - DNA, 24 bp, Homo sapiens
gcagcatttgtcccaggtgaatga

SEQ ID NO: 51859 - DNA, 16 bp, Homo sapiens
tgtcttcatgcccatc

SEQ ID NO: 51860 - DNA, 18 bp, Homo sapiens
cagaatgacaaggcctcc

SEQ ID NO: 51861 - DNA, 22 bp, Homo sapiens
ctgaagccctctcctggctcct

SEQ ID NO: 51862 - DNA, 23 bp, Homo sapiens
cacttgagctgcagggatgagag

SEQ ID NO: 51863 - DNA, 22 bp, Homo sapiens
ctgagcacgccaggtggagacc

SEQ ID NO: 51864 - DNA, 21 bp, Homo sapiens
atccagggctgcagcacaatg

SEQ ID NO: 51865 - DNA, 21 bp, Homo sapiens
catttaaagacatataaagca

SEQ ID NO: 51866 - DNA, 19 bp, Homo sapiens
catcaacctggtcctggca

SEQ ID NO: 51867 - DNA, 21 bp, Homo sapiens
ctctagccagccagtgagtga

SEQ ID NO: 51868 - DNA, 21 bp, Homo sapiens
atttgctggatgtggtggcta

SEQ ID NO: 51869 - DNA, 21 bp, Homo sapiens
gaagcctttctgggcgcagct

SEQ ID NO: 51870 - DNA, 24 bp, Homo sapiens
tgggtgctgggagggcaatgggca

SEQ ID NO: 51871 - DNA, 19 bp, Homo sapiens
ccaaccaggttataaatca

SEQ ID NO: 51872 - DNA, 16 bp, Homo sapiens
atcgaggcagccgacg

SEQ ID NO: 51873 - DNA, 16 bp, Homo sapiens
ggaaaggtgaatgcta

SEQ ID NO: 51874 - DNA, 18 bp, Homo sapiens
atgactccccggccttgg

SEQ ID NO: 51875 - DNA, 21 bp, Homo sapiens
cagtgaggaaggggtctgccc

SEQ ID NO: 51876 - DNA, 21 bp, Homo sapiens
aggtccaggagctccagaata

SEQ ID NO: 51877 - DNA, 17 bp, Homo sapiens
ctcactctgataaggac

SEQ ID NO: 51878 - DNA, 23 bp, Homo sapiens
ccttttgtcttaggttggcatca

SEQ ID NO: 51879 - DNA, 18 bp, Homo sapiens
cacacccatgtctgcctg

SEQ ID NO: 51880 - DNA, 21 bp, Homo sapiens
aacttgaggtttctgctgcta

SEQ ID NO: 51881 - DNA, 24 bp, Homo sapiens
tggcgactttcttccctttattct

SEQ ID NO: 51882 - DNA, 18 bp, Homo sapiens
gtgtggttgaccaacatc

SEQ ID NO: 51883 - DNA, 21 bp, Homo sapiens
acctctgcaaagactttgttg

SEQ ID NO: 51884 - DNA, 16 bp, Homo sapiens
caaccggaagacagcc

SEQ ID NO: 51885 - DNA, 24 bp, Homo sapiens
gagagaaaagcatccagcaaggga

SEQ ID NO: 51886 - DNA, 23 bp, Homo sapiens
aagcaggaggctgccctggctgt

SEQ ID NO: 51887 - DNA, 21 bp, Homo sapiens
cttttgtctctaactgctttt

SEQ ID NO: 51888 - DNA, 16 bp, Homo sapiens
ggctggttcgctccag

SEQ ID NO: 51889 - DNA, 24 bp, Homo sapiens
tgtacctgggtggcaatagctctg

SEQ ID NO: 51890 - DNA, 19 bp, Homo sapiens
agaacattgcaagtgtggt

SEQ ID NO: 51891 - DNA, 16 bp, Homo sapiens
ccatgctctgcagcgt

SEQ ID NO: 51892 - DNA, 22 bp, Homo sapiens
aaaccacattgtgttatataat

SEQ ID NO: 51893 - DNA, 19 bp, Homo sapiens
atcatcccacagagcacac

SEQ ID NO: 51894 - DNA, 23 bp, Homo sapiens
agaaaagacaaaaagacaatctt

SEQ ID NO: 51895 - DNA, 16 bp, Homo sapiens
gacgctatgacagacc

SEQ ID NO: 51896 - DNA, 23 bp, Homo sapiens
tgtcttcttttcttttataaagg

SEQ ID NO: 51897 - DNA, 17 bp, Homo sapiens
gctgattggaaaccgtg

SEQ ID NO: 51898 - DNA, 20 bp, Homo sapiens
gagagcggaaggaaggcaga

SEQ ID NO: 51899 - DNA, 22 bp, Homo sapiens
ttggaccatttagaaataacca

SEQ ID NO: 51900 - DNA, 19 bp, Homo sapiens
gtctgtcctttcatctcgt

SEQ ID NO: 51901 - DNA, 22 bp, Homo sapiens
tcagaatggttaaaaggatatt

SEQ ID NO: 51902 - DNA, 18 bp, Homo sapiens
gttgcgcctcagccactc

SEQ ID NO: 51903 - DNA, 18 bp, Homo sapiens
ttttttttgtcctaaagg

SEQ ID NO: 51904 - DNA, 16 bp, Homo sapiens
agtcacctgaatgagg

SEQ ID NO: 51905 - DNA, 24 bp, Homo sapiens
cttagccatgaaccgtctgccgca

SEQ ID NO: 51906 - DNA, 20 bp, Homo sapiens
aattgggtgcaaagtcagca

SEQ ID NO: 51907 - DNA, 22 bp, Homo sapiens
gtttgacccacctctactttta

SEQ ID NO: 51908 - DNA, 16 bp, Homo sapiens
cttggaacagagacct

SEQ ID NO: 51909 - DNA, 16 bp, Homo sapiens
gaaggctgccagcctc

SEQ ID NO: 51910 - DNA, 22 bp, Homo sapiens
ctccctttcacttcacccctct

SEQ ID NO: 51911 - DNA, 17 bp, Homo sapiens
caggatgccttccacgt

SEQ ID NO: 51912 - DNA, 18 bp, Homo sapiens
tttccgctgctctcttgc

SEQ ID NO: 51913 - DNA, 22 bp, Homo sapiens
actgcctggaagtccgtgcagt

SEQ ID NO: 51914 - DNA, 17 bp, Homo sapiens
gtggcaagggctgactg

SEQ ID NO: 51915 - DNA, 16 bp, Homo sapiens
gtgaacaccccttggg

SEQ ID NO: 51916 - DNA, 21 bp, Homo sapiens
gttttccagaccacacagaga

SEQ ID NO: 51917 - DNA, 22 bp, Homo sapiens
gatgtggccacactgcccctca

SEQ ID NO: 51918 - DNA, 19 bp, Homo sapiens
gtgaggaataaaagagcat

SEQ ID NO: 51919 - DNA, 24 bp, Homo sapiens
ttgacaagactggcaccattaccc

SEQ ID NO: 51920 - DNA, 16 bp, Homo sapiens
gtatttggtgactgcc

SEQ ID NO: 51921 - DNA, 18 bp, Homo sapiens
ctgtattgtggtcagtga

SEQ ID NO: 51922 - DNA, 16 bp, Homo sapiens
cagaaccttcctgagg

SEQ ID NO: 51923 - DNA, 20 bp, Homo sapiens
gtttcctgtctgaggcaggt

SEQ ID NO: 51924 - DNA, 19 bp, Homo sapiens
ctggggacgccatgggtaa

SEQ ID NO: 51925 - DNA, 18 bp, Homo sapiens
gaaccctgagattgaacg

SEQ ID NO: 51926 - DNA, 21 bp, Homo sapiens
gctactgttgttattcccagt

SEQ ID NO: 51927 - DNA, 17 bp, Homo sapiens
gggtggccgcgcagaac

SEQ ID NO: 51928 - DNA, 24 bp, Homo sapiens
cactgctgtcttgagtggctctca

SEQ ID NO: 51929 - DNA, 16 bp, Homo sapiens
tgcattgcctgcccct

SEQ ID NO: 51930 - DNA, 21 bp, Homo sapiens
ttcatctctcaggatggggaa

SEQ ID NO: 51931 - DNA, 21 bp, Homo sapiens
aagcacatctcccagacagag

SEQ ID NO: 51932 - DNA, 16 bp, Homo sapiens
cctcccttgatgagga

SEQ ID NO: 51933 - DNA, 23 bp, Homo sapiens
ctgggagcttccttattgaactc

SEQ ID NO: 51934 - DNA, 16 bp, Homo sapiens
gtggccagccccaggg

SEQ ID NO: 51935 - DNA, 23 bp, Homo sapiens
aagttcgtcacgttgtgtccagt

SEQ ID NO: 51936 - DNA, 20 bp, Homo sapiens
ctggaaagcaaaccggatga

SEQ ID NO: 51937 - DNA, 18 bp, Homo sapiens
gtaacgtgttctctatga

SEQ ID NO: 51938 - DNA, 20 bp, Homo sapiens
tcctactctggcttagattt

SEQ ID NO: 51939 - DNA, 18 bp, Homo sapiens
acgttggtggtatggatt

SEQ ID NO: 51940 - DNA, 16 bp, Homo sapiens
aaagcccagtgaatct

SEQ ID NO: 51941 - DNA, 16 bp, Homo sapiens
gctgaccggtttagtg

SEQ ID NO: 51942 - DNA, 19 bp, Homo sapiens
acacaaccaccatatagcc

SEQ ID NO: 51943 - DNA, 16 bp, Homo sapiens
aggttgtaatttccca

SEQ ID NO: 51944 - DNA, 21 bp, Homo sapiens
acaccaaaatcgataaaaccg

SEQ ID NO: 51945 - DNA, 19 bp, Homo sapiens
tgtggttaaatgaaggaga

SEQ ID NO: 51946 - DNA, 18 bp, Homo sapiens
tgggacaaaatatccact

SEQ ID NO: 51947 - DNA, 21 bp, Homo sapiens
agaaattatgtgaagagttct

SEQ ID NO: 51948 - DNA, 18 bp, Homo sapiens
aggctcagatgtcaaagg

SEQ ID NO: 51949 - DNA, 20 bp, Homo sapiens
aaagattgggataatctcct

SEQ ID NO: 51950 - DNA, 16 bp, Homo sapiens
aagctacccacgtggg

SEQ ID NO: 51951 - DNA, 18 bp, Homo sapiens
aaaactgtctgatttccc

SEQ ID NO: 51952 - DNA, 16 bp, Homo sapiens
aacccggaagcactgt

SEQ ID NO: 51953 - DNA, 26 bp, Homo sapiens
gttagttttaaaaatttcttcattac

SEQ ID NO: 51954 - DNA, 16 bp, Homo sapiens
gggctgagcaagtgac

SEQ ID NO: 51955 - DNA, 16 bp, Homo sapiens
agtggtgtcattgccc

SEQ ID NO: 51956 - DNA, 17 bp, Homo sapiens
tttcatgttccctcagg

SEQ ID NO: 51957 - DNA, 18 bp, Homo sapiens
tttatagaccccgcaatt

SEQ ID NO: 51958 - DNA, 16 bp, Homo sapiens
aaagtcctggaaggca

SEQ ID NO: 51959 - DNA, 20 bp, Homo sapiens
ctagacgtaggaaagagaca

SEQ ID NO: 51960 - DNA, 16 bp, Homo sapiens
ctggtgcagcggggcg

SEQ ID NO: 51961 - DNA, 20 bp, Homo sapiens
tgctatgatatcctcctgag

SEQ ID NO: 51962 - DNA, 16 bp, Homo sapiens
gaatgagtggccatgt

SEQ ID NO: 51963 - DNA, 17 bp, Homo sapiens
catcagccatggtattg

SEQ ID NO: 51964 - DNA, 22 bp, Homo sapiens
tcagtataagcaaatacagtgt

SEQ ID NO: 51965 - DNA, 17 bp, Homo sapiens
caccttgacgatatcgc

SEQ ID NO: 51966 - DNA, 22 bp, Homo sapiens
ctggtattcagcagctgcacga

SEQ ID NO: 51967 - DNA, 18 bp, Homo sapiens
ttcaatgccttgctttcg

SEQ ID NO: 51968 - DNA, 17 bp, Homo sapiens
aagccacagaagccacc

SEQ ID NO: 51969 - DNA, 24 bp, Homo sapiens
tgcccacactcacaaggtctattg

SEQ ID NO: 51970 - DNA, 20 bp, Homo sapiens
tcacattctggttatttcct

SEQ ID NO: 51971 - DNA, 23 bp, Homo sapiens
gattgatagataccaaccacaaa

SEQ ID NO: 51972 - DNA, 17 bp, Homo sapiens
ccacgcttgtgactctc

SEQ ID NO: 51973 - DNA, 23 bp, Homo sapiens
ttgtcctcaccaagggtcacaac

SEQ ID NO: 51974 - DNA, 18 bp, Homo sapiens
aacgcccacctgcagagc

SEQ ID NO: 51975 - DNA, 22 bp, Homo sapiens
gactagagcaccttaattatat

SEQ ID NO: 51976 - DNA, 17 bp, Homo sapiens
cgacacgccccccatgc

SEQ ID NO: 51977 - DNA, 21 bp, Homo sapiens
aattagtaattctaaacatgg

SEQ ID NO: 51978 - DNA, 16 bp, Homo sapiens
tctctggtcatcctgg

SEQ ID NO: 51979 - DNA, 19 bp, Homo sapiens
cagctcttttctgaacctg

SEQ ID NO: 51980 - DNA, 22 bp, Homo sapiens
tgagacacaggtcagccaacat

SEQ ID NO: 51981 - DNA, 20 bp, Homo sapiens
gcccagggcaatgaacacaa

SEQ ID NO: 51982 - DNA, 20 bp, Homo sapiens
gtccttgtctttcagctcct

SEQ ID NO: 51983 - DNA, 18 bp, Homo sapiens
gccttctcagccacagca

SEQ ID NO: 51984 - DNA, 16 bp, Homo sapiens
ttggccctgtgtcgct

SEQ ID NO: 51985 - DNA, 20 bp, Homo sapiens
tgtggccaggacgatgagca

SEQ ID NO: 51986 - DNA, 16 bp, Homo sapiens
aggaagaagtactgtc

SEQ ID NO: 51987 - DNA, 17 bp, Homo sapiens
gaagtaccacccaccga

SEQ ID NO: 51988 - DNA, 16 bp, Homo sapiens
gcagcaactgcctggg

SEQ ID NO: 51989 - DNA, 19 bp, Homo sapiens
caacatcattccaggactg

SEQ ID NO: 51990 - DNA, 24 bp, Homo sapiens
ttaaaccaagctaaagcactatgt

SEQ ID NO: 51991 - DNA, 21 bp, Homo sapiens
tggccttaatgatctatatgc

SEQ ID NO: 51992 - DNA, 23 bp, Homo sapiens
gcatggaagggagaggtctgccc

SEQ ID NO: 51993 - DNA, 18 bp, Homo sapiens
gctttccaggtggaagaa

SEQ ID NO: 51994 - DNA, 22 bp, Homo sapiens
agatgagatttagaatggacag

SEQ ID NO: 51995 - DNA, 19 bp, Homo sapiens
ggggagtggcttgtaatcc

SEQ ID NO: 51996 - DNA, 21 bp, Homo sapiens
ggggctcgttgctgggtatca

SEQ ID NO: 51997 - DNA, 16 bp, Homo sapiens
ctggtggtctgtccca

SEQ ID NO: 51998 - DNA, 20 bp, Homo sapiens
caccaggctgcacaggaaag

SEQ ID NO: 51999 - DNA, 22 bp, Homo sapiens
aacgctcatcacttggaccaca

SEQ ID NO: 52000 - DNA, 24 bp, Homo sapiens
agggtaaaggcagctaatccagga

SEQ ID NO: 52001 - DNA, 20 bp, Homo sapiens
ccctctctttttaatgacaa

SEQ ID NO: 52002 - DNA, 20 bp, Homo sapiens
ttgggcccaggtagaggaag

SEQ ID NO: 52003 - DNA, 17 bp, Homo sapiens
gctgaaaagtgctttct

SEQ ID NO: 52004 - DNA, 16 bp, Homo sapiens
atttccatcttgtggt

SEQ ID NO: 52005 - DNA, 18 bp, Homo sapiens
agaaaacccacaaagtct

SEQ ID NO: 52006 - DNA, 19 bp, Homo sapiens
aagcatgaaagccaatttc

SEQ ID NO: 52007 - DNA, 16 bp, Homo sapiens
ttatcggtccacggga

SEQ ID NO: 52008 - DNA, 21 bp, Homo sapiens
ggaaaagttgaagaattttgg

SEQ ID NO: 52009 - DNA, 18 bp, Homo sapiens
ggcatcacttatgcctcc

SEQ ID NO: 52010 - DNA, 24 bp, Homo sapiens
cactgattatatattactgttttt

SEQ ID NO: 52011 - DNA, 16 bp, Homo sapiens
tgacctgcgcgtcctg

SEQ ID NO: 52012 - DNA, 25 bp, Homo sapiens
cttacctcaataattttgataatat

SEQ ID NO: 52013 - DNA, 16 bp, Homo sapiens
acaggctttccttgat

SEQ ID NO: 52014 - DNA, 21 bp, Homo sapiens
ctttgctggtggcaagggcaa

SEQ ID NO: 52015 - DNA, 16 bp, Homo sapiens
gctgaggagggaaagg

SEQ ID NO: 52016 - DNA, 19 bp, Homo sapiens
ctatgttgtggacacagga

SEQ ID NO: 52017 - DNA, 21 bp, Homo sapiens
gaacaagtcattgttgtcggc

SEQ ID NO: 52018 - DNA, 17 bp, Homo sapiens
cagcagtcatggaggac

SEQ ID NO: 52019 - DNA, 18 bp, Homo sapiens
accagacacgtccaagat

SEQ ID NO: 52020 - DNA, 17 bp, Homo sapiens
cccagaggtcatccagc

SEQ ID NO: 52021 - DNA, 23 bp, Homo sapiens
gcaaactgtcagaagcctgtaac

SEQ ID NO: 52022 - DNA, 24 bp, Homo sapiens
atgacctgatggttccaggtgttc

SEQ ID NO: 52023 - DNA, 22 bp, Homo sapiens
tgttgccatcggagcctgcgta

SEQ ID NO: 52024 - DNA, 22 bp, Homo sapiens
ttcggttatattgactgtgtca

SEQ ID NO: 52025 - DNA, 17 bp, Homo sapiens
ctgagctatctcgaggg

SEQ ID NO: 52026 - DNA, 18 bp, Homo sapiens
agtgtttgaaaactgctg

SEQ ID NO: 52027 - DNA, 22 bp, Homo sapiens
ctgccatcaaggcaaccaacac

SEQ ID NO: 52028 - DNA, 20 bp, Homo sapiens
tgtgtctaacatagaaagga

SEQ ID NO: 52029 - DNA, 22 bp, Homo sapiens
tataatgaacttgctacctggt

SEQ ID NO: 52030 - DNA, 17 bp, Homo sapiens
gcagtggcaccgcagaa

SEQ ID NO: 52031 - DNA, 23 bp, Homo sapiens
tctgaagggagaatacgaggtct

SEQ ID NO: 52032 - DNA, 16 bp, Homo sapiens
ggaggctccctgcaaa

SEQ ID NO: 52033 - DNA, 17 bp, Homo sapiens
cagcttctttctgcaga

SEQ ID NO: 52034 - DNA, 17 bp, Homo sapiens
ccatggtgcaaactaca

SEQ ID NO: 52035 - DNA, 20 bp, Homo sapiens
cctttgatctgtaagaagca

SEQ ID NO: 52036 - DNA, 19 bp, Homo sapiens
ctgacattttatcctagaa

SEQ ID NO: 52037 - DNA, 16 bp, Homo sapiens
tgtccggggcatggtt

SEQ ID NO: 52038 - DNA, 16 bp, Homo sapiens
gagccctgaaacctct

SEQ ID NO: 52039 - DNA, 23 bp, Homo sapiens
gatgtaggtgtaccatctgtagt

SEQ ID NO: 52040 - DNA, 17 bp, Homo sapiens
tagttactggagcccag

SEQ ID NO: 52041 - DNA, 24 bp, Homo sapiens
agagggttagtagaacagctttct

SEQ ID NO: 52042 - DNA, 20 bp, Homo sapiens
agctgctatagaagacatgg

SEQ ID NO: 52043 - DNA, 19 bp, Homo sapiens
tttgttccactgttgacat

SEQ ID NO: 52044 - DNA, 19 bp, Homo sapiens
gggactgcaacagttcttt

SEQ ID NO: 52045 - DNA, 21 bp, Homo sapiens
gagctataagacacaaagaga

SEQ ID NO: 52046 - DNA, 18 bp, Homo sapiens
tccattgaaggcatgatc

SEQ ID NO: 52047 - DNA, 24 bp, Homo sapiens
gtaccagaaacgactgaagcctca

SEQ ID NO: 52048 - DNA, 16 bp, Homo sapiens
tgcagtaccactctga

SEQ ID NO: 52049 - DNA, 23 bp, Homo sapiens
tgggctaattacagagggattat

SEQ ID NO: 52050 - DNA, 24 bp, Homo sapiens
agtgggacagatcacaggtcttcc

SEQ ID NO: 52051 - DNA, 20 bp, Homo sapiens
caccccttccagttgggaga

SEQ ID NO: 52052 - DNA, 16 bp, Homo sapiens
cacttccacctgggaa

SEQ ID NO: 52053 - DNA, 16 bp, Homo sapiens
gcaatggcaatcagag

SEQ ID NO: 52054 - DNA, 19 bp, Homo sapiens
aaactgcccaagtaaagta

SEQ ID NO: 52055 - DNA, 17 bp, Homo sapiens
gagccaggggaatgaga

SEQ ID NO: 52056 - DNA, 18 bp, Homo sapiens
aaaatattggccagctcc

SEQ ID NO: 52057 - DNA, 20 bp, Homo sapiens
tcaggaagagaaactttaaa

SEQ ID NO: 52058 - DNA, 23 bp, Homo sapiens
tgtggtcaccctccaactgagaa

SEQ ID NO: 52059 - DNA, 20 bp, Homo sapiens
gctggtacaagaagggtcat

SEQ ID NO: 52060 - DNA, 17 bp, Homo sapiens
tcttctgctaaccagaa

SEQ ID NO: 52061 - DNA, 21 bp, Homo sapiens
tgaatactttgaacccctagg

SEQ ID NO: 52062 - DNA, 17 bp, Homo sapiens
tcccttaagcctgggac

SEQ ID NO: 52063 - DNA, 19 bp, Homo sapiens
tacaatgcattccatctat

SEQ ID NO: 52064 - DNA, 17 bp, Homo sapiens
tcagggaccatgtaaat

SEQ ID NO: 52065 - DNA, 24 bp, Homo sapiens
ccaaggtctcagaattattaaaat

SEQ ID NO: 52066 - DNA, 17 bp, Homo sapiens
tcactcagcaaccaaga

SEQ ID NO: 52067 - DNA, 21 bp, Homo sapiens
tttgtaaccgctcaatatcaa

SEQ ID NO: 52068 - DNA, 16 bp, Homo sapiens
ctgtgtcagctccatt

SEQ ID NO: 52069 - DNA, 24 bp, Homo sapiens
cagcttcaaatcccatgtcattta

SEQ ID NO: 52070 - DNA, 22 bp, Homo sapiens
aaggtccttgcctgcccaggag

SEQ ID NO: 52071 - DNA, 20 bp, Homo sapiens
tgataagtgatgacggcctc

SEQ ID NO: 52072 - DNA, 21 bp, Homo sapiens
aaattggggacatgggcttcg

SEQ ID NO: 52073 - DNA, 24 bp, Homo sapiens
cttgcagtttccggaccttgcctt

SEQ ID NO: 52074 - DNA, 22 bp, Homo sapiens
aggcagtgccactgtgaaatat

SEQ ID NO: 52075 - DNA, 16 bp, Homo sapiens
gagcttgaccacagcc

SEQ ID NO: 52076 - DNA, 21 bp, Homo sapiens
cattgaggacaggatttccaa

SEQ ID NO: 52077 - DNA, 24 bp, Homo sapiens
ttccttctgcaatgctggcctcga

SEQ ID NO: 52078 - DNA, 21 bp, Homo sapiens
cttctcaggtggccaccagca

SEQ ID NO: 52079 - DNA, 16 bp, Homo sapiens
aaccgatggcacatat

SEQ ID NO: 52080 - DNA, 20 bp, Homo sapiens
aagagttttgcttttgacaa

SEQ ID NO: 52081 - DNA, 23 bp, Homo sapiens
gctgatgatgcctttcaaattgg

SEQ ID NO: 52082 - DNA, 25 bp, Homo sapiens
tttttagatcttatctaagctttct

SEQ ID NO: 52083 - DNA, 17 bp, Homo sapiens
catgcccaagatcctga

SEQ ID NO: 52084 - DNA, 18 bp, Homo sapiens
ctgggatgttgtagaaaa

SEQ ID NO: 52085 - DNA, 20 bp, Homo sapiens
tccagaccaccttcatagcc

SEQ ID NO: 52086 - DNA, 18 bp, Homo sapiens
cttctacccttgggatat

SEQ ID NO: 52087 - DNA, 21 bp, Homo sapiens
cccaggcacgggtaggcaaag

SEQ ID NO: 52088 - DNA, 21 bp, Homo sapiens
ggagagacagatcacagccag

SEQ ID NO: 52089 - DNA, 22 bp, Homo sapiens
ggggtctggctcggccttccct

SEQ ID NO: 52090 - DNA, 23 bp, Homo sapiens
gaccttttgctctgagccagatc

SEQ ID NO: 52091 - DNA, 23 bp, Homo sapiens
cgcggggaggaaaatcctcctgg

SEQ ID NO: 52092 - DNA, 16 bp, Homo sapiens
cgcctcctctcccggg

SEQ ID NO: 52093 - DNA, 23 bp, Homo sapiens
actttccgactggccccttctct

SEQ ID NO: 52094 - DNA, 22 bp, Homo sapiens
caaatgaaggggcggttcccgg

SEQ ID NO: 52095 - DNA, 24 bp, Homo sapiens
gttgggaggagccccggtgacaga

SEQ ID NO: 52096 - DNA, 21 bp, Homo sapiens
cgtcagctccagagcttggcc

SEQ ID NO: 52097 - DNA, 19 bp, Homo sapiens
ttcataaaagatgacgccc

SEQ ID NO: 52098 - DNA, 17 bp, Homo sapiens
gtgggaggagcatgcgc

SEQ ID NO: 52099 - DNA, 23 bp, Homo sapiens
accttcctggactgcaaagtgtg

SEQ ID NO: 52100 - DNA, 22 bp, Homo sapiens
tctacctcctgcgccatcaggc

SEQ ID NO: 52101 - DNA, 18 bp, Homo sapiens
gccggaacctgcgcttgg

SEQ ID NO: 52102 - DNA, 22 bp, Homo sapiens
caccaggaagcgcgtccccgag

SEQ ID NO: 52103 - DNA, 16 bp, Homo sapiens
ctggcggctccgcgca

SEQ ID NO: 52104 - DNA, 24 bp, Homo sapiens
gggatgcccgagacccgggaccag

SEQ ID NO: 52105 - DNA, 24 bp, Homo sapiens
ctccggaagtactgggtgcagcct

SEQ ID NO: 52106 - DNA, 17 bp, Homo sapiens
agtgcgcgcgccgccgc

SEQ ID NO: 52107 - DNA, 23 bp, Homo sapiens
agatgcggcggggcgcgggcgcg

SEQ ID NO: 52108 - DNA, 22 bp, Homo sapiens
gagcaggggtccccgccccagc

SEQ ID NO: 52109 - DNA, 24 bp, Homo sapiens
ctttggctcgcggtggttccgggc

SEQ ID NO: 52110 - DNA, 23 bp, Homo sapiens
cgctccgagcgtcacccggcgct

SEQ ID NO: 52111 - DNA, 21 bp, Homo sapiens
tggccggtgccctacaagtga

SEQ ID NO: 52112 - DNA, 16 bp, Homo sapiens
aaggatcaggttttgg

SEQ ID NO: 52113 - DNA, 20 bp, Homo sapiens
tttattaactatggtccgac

SEQ ID NO: 52114 - DNA, 17 bp, Homo sapiens
tcaccctccataactgg

SEQ ID NO: 52115 - DNA, 20 bp, Homo sapiens
aaagacgtgagaagaatcag

SEQ ID NO: 52116 - DNA, 17 bp, Homo sapiens
cccaggaggtctccata

SEQ ID NO: 52117 - DNA, 20 bp, Homo sapiens
ttaggcgctttgacttccgt

SEQ ID NO: 52118 - DNA, 24 bp, Homo sapiens
ataaccaaatcattgaattaacca

SEQ ID NO: 52119 - DNA, 16 bp, Homo sapiens
gctcacctatcccagt

SEQ ID NO: 52120 - DNA, 20 bp, Homo sapiens
accaacatgatctaaagtca

SEQ ID NO: 52121 - DNA, 16 bp, Homo sapiens
agccccagtatgggaa

SEQ ID NO: 52122 - DNA, 23 bp, Homo sapiens
tcaagattacaaaatctgatagt

SEQ ID NO: 52123 - DNA, 22 bp, Homo sapiens
ggggccacagagtggatatgac

SEQ ID NO: 52124 - DNA, 18 bp, Homo sapiens
ccattgtgtagttcttgc

SEQ ID NO: 52125 - DNA, 16 bp, Homo sapiens
tttgtgatgtgccaca

SEQ ID NO: 52126 - DNA, 17 bp, Homo sapiens
catttcaggtcggagat

SEQ ID NO: 52127 - DNA, 23 bp, Homo sapiens
gtgtcacagttgcttttatacat

SEQ ID NO: 52128 - DNA, 18 bp, Homo sapiens
ccagtgaacatcatcaat

SEQ ID NO: 52129 - DNA, 19 bp, Homo sapiens
cagaagtacattaactggc

SEQ ID NO: 52130 - DNA, 17 bp, Homo sapiens
ttttcacaacttacctg

SEQ ID NO: 52131 - DNA, 19 bp, Homo sapiens
ggcaactgtacatttcccc

SEQ ID NO: 52132 - DNA, 24 bp, Homo sapiens
ctgaaatgtttcaatggaagtata

SEQ ID NO: 52133 - DNA, 18 bp, Homo sapiens
ctgcctgcttttttgagg

SEQ ID NO: 52134 - DNA, 20 bp, Homo sapiens
ccaaagtttaatggttccaa

SEQ ID NO: 52135 - DNA, 23 bp, Homo sapiens
caagtagcaactatatcaggtaa

SEQ ID NO: 52136 - DNA, 21 bp, Homo sapiens
gccgaggtgggaggatcactt

SEQ ID NO: 52137 - DNA, 16 bp, Homo sapiens
gtttcacccactttgc

SEQ ID NO: 52138 - DNA, 16 bp, Homo sapiens
accaccgcactctagc

SEQ ID NO: 52139 - DNA, 16 bp, Homo sapiens
ctgcccccttttctgg

SEQ ID NO: 52140 - DNA, 21 bp, Homo sapiens
aacatgattagctttgttcac

SEQ ID NO: 52141 - DNA, 17 bp, Homo sapiens
aacttgttaaaggtcct

SEQ ID NO: 52142 - DNA, 21 bp, Homo sapiens
ggaaacatgttcaaccaaatg

SEQ ID NO: 52143 - DNA, 23 bp, Homo sapiens
tgtaaagaaatattcttgtatag

SEQ ID NO: 52144 - DNA, 18 bp, Homo sapiens
tggaatgtaaaagccagc

SEQ ID NO: 52145 - DNA, 17 bp, Homo sapiens
tttcctgttggcccaaa

SEQ ID NO: 52146 - DNA, 21 bp, Homo sapiens
tgttccaaatttgtgttaagg

SEQ ID NO: 52147 - DNA, 18 bp, Homo sapiens
ttagttggcaaatgtggt

SEQ ID NO: 52148 - DNA, 23 bp, Homo sapiens
agaacatagaaaccaactataca

SEQ ID NO: 52149 - DNA, 20 bp, Homo sapiens
aatagaactgtttgtgcaca

SEQ ID NO: 52150 - DNA, 18 bp, Homo sapiens
gaaacatctgtttttggg

SEQ ID NO: 52151 - DNA, 22 bp, Homo sapiens
ttattttaataaaagggaattt

SEQ ID NO: 52152 - DNA, 17 bp, Homo sapiens
attaccccttcaaacca

SEQ ID NO: 52153 - DNA, 23 bp, Homo sapiens
ttaaggtgttttataaaccagag

SEQ ID NO: 52154 - DNA, 19 bp, Homo sapiens
gcaaatttttgatgcagtg

SEQ ID NO: 52155 - DNA, 17 bp, Homo sapiens
aagtaaaatcaccccct

SEQ ID NO: 52156 - DNA, 22 bp, Homo sapiens
ggtttttacctatgaaattccc

SEQ ID NO: 52157 - DNA, 19 bp, Homo sapiens
gcaattctgctgatgtgca

SEQ ID NO: 52158 - DNA, 20 bp, Homo sapiens
tcagaaacaaaacactctct

SEQ ID NO: 52159 - DNA, 24 bp, Homo sapiens
gcagcgaccagcggtgctgtcccg

SEQ ID NO: 52160 - DNA, 24 bp, Homo sapiens
ctttccgcaagttagggggcgggg

SEQ ID NO: 52161 - DNA, 21 bp, Homo sapiens
agggtccgcagcgccgcgctc

SEQ ID NO: 52162 - DNA, 24 bp, Homo sapiens
gctccccttctccaccccctccgg

SEQ ID NO: 52163 - DNA, 16 bp, Homo sapiens
tagaagcccagtgaag

SEQ ID NO: 52164 - DNA, 24 bp, Homo sapiens
acaatggcggggttctgggtcggg

SEQ ID NO: 52165 - DNA, 23 bp, Homo sapiens
ggaaccggggcgcgggggcagcc

SEQ ID NO: 52166 - DNA, 22 bp, Homo sapiens
gccgccgcagcagctgatgctg

SEQ ID NO: 52167 - DNA, 24 bp, Homo sapiens
ttcccttttgtaattatatttatg

SEQ ID NO: 52168 - DNA, 17 bp, Homo sapiens
ggatcatatcccactga

SEQ ID NO: 52169 - DNA, 17 bp, Homo sapiens
agaacctaactggaaga

SEQ ID NO: 52170 - DNA, 24 bp, Homo sapiens
aaaccatgataagtttaatttagt

SEQ ID NO: 52171 - DNA, 22 bp, Homo sapiens
agtatttgcaatttattttgct

SEQ ID NO: 52172 - DNA, 18 bp, Homo sapiens
ccacacagccttaacaaa

SEQ ID NO: 52173 - DNA, 20 bp, Homo sapiens
atggtgtcccgtaatcttgg

SEQ ID NO: 52174 - DNA, 16 bp, Homo sapiens
tacctaaagactgagc

SEQ ID NO: 52175 - DNA, 25 bp, Homo sapiens
agtacatttaatattactgtaagta

SEQ ID NO: 52176 - DNA, 17 bp, Homo sapiens
cacccgacatgcaattt

SEQ ID NO: 52177 - DNA, 23 bp, Homo sapiens
attagggttatattcagtgttga

SEQ ID NO: 52178 - DNA, 22 bp, Homo sapiens
cacacttaaaggggtttaataa

SEQ ID NO: 52179 - DNA, 22 bp, Homo sapiens
ccatcggtttaaaagtaacaat

SEQ ID NO: 52180 - DNA, 20 bp, Homo sapiens
ttcttgcaagttctaataac

SEQ ID NO: 52181 - DNA, 23 bp, Homo sapiens
aaattcttgttgctaatagagga

SEQ ID NO: 52182 - DNA, 19 bp, Homo sapiens
acttacagaactagcatca

SEQ ID NO: 52183 - DNA, 24 bp, Homo sapiens
tattttccattttactctgaaatt

SEQ ID NO: 52184 - DNA, 21 bp, Homo sapiens
tgtatgtctcactttttctgc

SEQ ID NO: 52185 - DNA, 26 bp, Homo sapiens
cattaatatattttaaaataggttat

SEQ ID NO: 52186 - DNA, 20 bp, Homo sapiens
gtgaacaagtaaacagtttt

SEQ ID NO: 52187 - DNA, 20 bp, Homo sapiens
ttgccatccacagtgatgtt

SEQ ID NO: 52188 - DNA, 21 bp, Homo sapiens
tcctgagtttatttgttgcat

SEQ ID NO: 52189 - DNA, 16 bp, Homo sapiens
gggagctgggccaaca

SEQ ID NO: 52190 - DNA, 20 bp, Homo sapiens
aaatgataggcagaacaatc

SEQ ID NO: 52191 - DNA, 16 bp, Homo sapiens
gggccctggttttctt

SEQ ID NO: 52192 - DNA, 18 bp, Homo sapiens
tctttttgctgggcgcat

SEQ ID NO: 52193 - DNA, 17 bp, Homo sapiens
gctttctgctcactaca

SEQ ID NO: 52194 - DNA, 17 bp, Homo sapiens
ggcggatgaggctgtct

SEQ ID NO: 52195 - DNA, 18 bp, Homo sapiens
catgaactaactgcaaca

SEQ ID NO: 52196 - DNA, 19 bp, Homo sapiens
atgccatcatggaagccat

SEQ ID NO: 52197 - DNA, 20 bp, Homo sapiens
ttctgatcctagaaatgtga

SEQ ID NO: 52198 - DNA, 17 bp, Homo sapiens
tctggcaaattctttgt

SEQ ID NO: 52199 - DNA, 19 bp, Homo sapiens
ttcaagggctcttgaacag

SEQ ID NO: 52200 - DNA, 19 bp, Homo sapiens
actgctttctgaaaaagaa

SEQ ID NO: 52201 - DNA, 19 bp, Homo sapiens
gcttttgcaatatgataaa

SEQ ID NO: 52202 - DNA, 19 bp, Homo sapiens
aaagaactgctgggttaat

SEQ ID NO: 52203 - DNA, 22 bp, Homo sapiens
aggttatggattcctttcagaa

SEQ ID NO: 52204 - DNA, 18 bp, Homo sapiens
catgtgtgtcaggtccaa

SEQ ID NO: 52205 - DNA, 24 bp, Homo sapiens
aaactgttgtttctgcaataaaaa

SEQ ID NO: 52206 - DNA, 19 bp, Homo sapiens
aacctctgctttcttagct

SEQ ID NO: 52207 - DNA, 24 bp, Homo sapiens
aaattgtgactccacatcatgctc

SEQ ID NO: 52208 - DNA, 23 bp, Homo sapiens
aataaaagttaaagtagcttctc

SEQ ID NO: 52209 - DNA, 18 bp, Homo sapiens
gcagcagaagatgtcgtt

SEQ ID NO: 52210 - DNA, 22 bp, Homo sapiens
ccaaaaaagcaatagttacatt

SEQ ID NO: 52211 - DNA, 25 bp, Homo sapiens
gacaagattgaaagcaaattattag

SEQ ID NO: 52212 - DNA, 22 bp, Homo sapiens
ttttaaacatatatacatgtat

SEQ ID NO: 52213 - DNA, 18 bp, Homo sapiens
tggagtagtcaaggtgag

SEQ ID NO: 52214 - DNA, 19 bp, Homo sapiens
acattccacttatggtatt

SEQ ID NO: 52215 - DNA, 18 bp, Homo sapiens
aggacttaccaatttccc

SEQ ID NO: 52216 - DNA, 20 bp, Homo sapiens
attgaacattaaatgaatcg

SEQ ID NO: 52217 - DNA, 18 bp, Homo sapiens
cctgttgactcaaccgta

SEQ ID NO: 52218 - DNA, 18 bp, Homo sapiens
attgtgcaatgcctcatg

SEQ ID NO: 52219 - DNA, 20 bp, Homo sapiens
ccagagcaacaagtaatcaa

SEQ ID NO: 52220 - DNA, 19 bp, Homo sapiens
aagaagctgtcagaattgc

SEQ ID NO: 52221 - DNA, 22 bp, Homo sapiens
ctggtgttactttcctggtgtt

SEQ ID NO: 52222 - DNA, 16 bp, Homo sapiens
tgcgcatgcctttccc

SEQ ID NO: 52223 - DNA, 20 bp, Homo sapiens
aattattgttttctgcgtta

SEQ ID NO: 52224 - DNA, 23 bp, Homo sapiens
gtaactgcaattttcatcaaaag

SEQ ID NO: 52225 - DNA, 19 bp, Homo sapiens
agtctgaacttctgtctaa

SEQ ID NO: 52226 - DNA, 22 bp, Homo sapiens
tgtaattactccattatgcttt

SEQ ID NO: 52227 - DNA, 16 bp, Homo sapiens
cagcaggtggtggtgg

SEQ ID NO: 52228 - DNA, 21 bp, Homo sapiens
aggaaggtttccacataattt

SEQ ID NO: 52229 - DNA, 18 bp, Homo sapiens
aggtttttgcttttttca

SEQ ID NO: 52230 - DNA, 16 bp, Homo sapiens
ccaaaactagaagcag

SEQ ID NO: 52231 - DNA, 23 bp, Homo sapiens
atgatagctctatttgttttgtt

SEQ ID NO: 52232 - DNA, 19 bp, Homo sapiens
tgtaccaacctggatttct

SEQ ID NO: 52233 - DNA, 16 bp, Homo sapiens
cccctccctctccccc

SEQ ID NO: 52234 - DNA, 25 bp, Homo sapiens
aaaagataattccaataggattaaa

SEQ ID NO: 52235 - DNA, 18 bp, Homo sapiens
gtcatctcaagaagctgc

SEQ ID NO: 52236 - DNA, 20 bp, Homo sapiens
acggaaagtacaacagattc

SEQ ID NO: 52237 - DNA, 20 bp, Homo sapiens
tttattgataatcctcgtca

SEQ ID NO: 52238 - DNA, 20 bp, Homo sapiens
agttttcctttgttaacatg

SEQ ID NO: 52239 - DNA, 19 bp, Homo sapiens
ttgagcactctctttcatt

SEQ ID NO: 52240 - DNA, 19 bp, Homo sapiens
ttaaaaaccaagagatgtt

SEQ ID NO: 52241 - DNA, 20 bp, Homo sapiens
gtttcttaggagacttacct

SEQ ID NO: 52242 - DNA, 18 bp, Homo sapiens
gggtgtggttatatggtt

SEQ ID NO: 52243 - DNA, 20 bp, Homo sapiens
gcgtcagtgaatgatgaatg

SEQ ID NO: 52244 - DNA, 23 bp, Homo sapiens
acatgggaatgctttatggctta

SEQ ID NO: 52245 - DNA, 16 bp, Homo sapiens
gagccgtgattgcacc

SEQ ID NO: 52246 - DNA, 21 bp, Homo sapiens
gtggaggaagcaccaaggtaa

SEQ ID NO: 52247 - DNA, 25 bp, Homo sapiens
taatatagtcaacatatattataaa

SEQ ID NO: 52248 - DNA, 18 bp, Homo sapiens
tacagcttgttctcccat

SEQ ID NO: 52249 - DNA, 22 bp, Homo sapiens
tagatgatctatatctgagtaa

SEQ ID NO: 52250 - DNA, 17 bp, Homo sapiens
agagtccacaaggaact

SEQ ID NO: 52251 - DNA, 18 bp, Homo sapiens
tgatttttgtccgaaatg

SEQ ID NO: 52252 - DNA, 17 bp, Homo sapiens
acagttgttgttacctg

SEQ ID NO: 52253 - DNA, 21 bp, Homo sapiens
ttggatgcggagactcgaaga

SEQ ID NO: 52254 - DNA, 21 bp, Homo sapiens
tttataaaacaaaaaagggtg

SEQ ID NO: 52255 - DNA, 16 bp, Homo sapiens
tctgctgggaccgtgg

SEQ ID NO: 52256 - DNA, 17 bp, Homo sapiens
gcacaagcataaaaact

SEQ ID NO: 52257 - DNA, 20 bp, Homo sapiens
atgaatacaagactccaggt

SEQ ID NO: 52258 - DNA, 17 bp, Homo sapiens
ccaggccagtaatgcat

SEQ ID NO: 52259 - DNA, 20 bp, Homo sapiens
ttcaaatgttacattcgatt

SEQ ID NO: 52260 - DNA, 17 bp, Homo sapiens
cagcttgtttgtgcctg

SEQ ID NO: 52261 - DNA, 21 bp, Homo sapiens
ttgtttctatttatttaccct

SEQ ID NO: 52262 - DNA, 20 bp, Homo sapiens
aacaccattcattttacctc

SEQ ID NO: 52263 - DNA, 20 bp, Homo sapiens
gttgagcatcctgtcacaga

SEQ ID NO: 52264 - DNA, 16 bp, Homo sapiens
acctcattgtttggct

SEQ ID NO: 52265 - DNA, 19 bp, Homo sapiens
ttgctaagggctaccctct

SEQ ID NO: 52266 - DNA, 27 bp, Homo sapiens
tttttttctgatttaattatggattac

SEQ ID NO: 52267 - DNA, 18 bp, Homo sapiens
tcgggtttatgctgaggt

SEQ ID NO: 52268 - DNA, 20 bp, Homo sapiens
acattctaagttgtctagcg

SEQ ID NO: 52269 - DNA, 20 bp, Homo sapiens
ttggtactgagacaatctcc

SEQ ID NO: 52270 - DNA, 19 bp, Homo sapiens
accatatgttgaaaataga

SEQ ID NO: 52271 - DNA, 16 bp, Homo sapiens
aacccttcagctggta

SEQ ID NO: 52272 - DNA, 24 bp, Homo sapiens
cttgtgctgatttatatttcaaag

SEQ ID NO: 52273 - DNA, 16 bp, Homo sapiens
accctttggtgttgac

SEQ ID NO: 52274 - DNA, 20 bp, Homo sapiens
aagtcttttggtttaccatc

SEQ ID NO: 52275 - DNA, 21 bp, Homo sapiens
tgaaaaaaatttgttttcaac

SEQ ID NO: 52276 - DNA, 18 bp, Homo sapiens
cacttcctggttggatgc

SEQ ID NO: 52277 - DNA, 22 bp, Homo sapiens
aaatgttatttgagattgaaat

SEQ ID NO: 52278 - DNA, 25 bp, Homo sapiens
gaaatcaaataatccattgagaaat

SEQ ID NO: 52279 - DNA, 25 bp, Homo sapiens
gttacaaaaaaatatctacacaata

SEQ ID NO: 52280 - DNA, 17 bp, Homo sapiens
ttcagataaaggcccag

SEQ ID NO: 52281 - DNA, 17 bp, Homo sapiens
gtccgagtggacagtgg

SEQ ID NO: 52282 - DNA, 17 bp, Homo sapiens
cctgctctgctttcaca

SEQ ID NO: 52283 - DNA, 25 bp, Homo sapiens
taaaaaatcataattgacatgtatt

SEQ ID NO: 52284 - DNA, 16 bp, Homo sapiens
tccagtgcatctgcca

SEQ ID NO: 52285 - DNA, 23 bp, Homo sapiens
aaatctgttatgaaatattttaa

SEQ ID NO: 52286 - DNA, 21 bp, Homo sapiens
ggacaccatatacaataacca

SEQ ID NO: 52287 - DNA, 30 bp, Homo sapiens
agttctaaatatatatatatattgggtttt

SEQ ID NO: 52288 - DNA, 18 bp, Homo sapiens
gcaaatgtgctgtgccat

SEQ ID NO: 52289 - DNA, 16 bp, Homo sapiens
gaggcactgaagagaa

SEQ ID NO: 52290 - DNA, 17 bp, Homo sapiens
ttggtatggtggtttga

SEQ ID NO: 52291 - DNA, 19 bp, Homo sapiens
tgataccacaagttcagat

SEQ ID NO: 52292 - DNA, 18 bp, Homo sapiens
gttgattatcacctctcg

SEQ ID NO: 52293 - DNA, 21 bp, Homo sapiens
aatcttgaatggtttctgcta

SEQ ID NO: 52294 - DNA, 19 bp, Homo sapiens
gccatcaggatacacatcg

SEQ ID NO: 52295 - DNA, 24 bp, Homo sapiens
attcaatttttcactgattcattg

SEQ ID NO: 52296 - DNA, 24 bp, Homo sapiens
taaagtataaaaataacaacttta

SEQ ID NO: 52297 - DNA, 21 bp, Homo sapiens
atattgcattacttcgagagg

SEQ ID NO: 52298 - DNA, 23 bp, Homo sapiens
aagtataatataagccaaaaggc

SEQ ID NO: 52299 - DNA, 20 bp, Homo sapiens
cagcactaaatttctctccg

SEQ ID NO: 52300 - DNA, 17 bp, Homo sapiens
tgccaataactggttct

SEQ ID NO: 52301 - DNA, 22 bp, Homo sapiens
gctgcataatagatgccctata

SEQ ID NO: 52302 - DNA, 23 bp, Homo sapiens
cataccttgaattttcttgaaaa

SEQ ID NO: 52303 - DNA, 26 bp, Homo sapiens
cagatgttaaaataaatgattgattg

SEQ ID NO: 52304 - DNA, 19 bp, Homo sapiens
tcctatgtagactggatta

SEQ ID NO: 52305 - DNA, 21 bp, Homo sapiens
gctaaccaagagtgagaagaa

SEQ ID NO: 52306 - DNA, 18 bp, Homo sapiens
ctccaaagacccataaga

SEQ ID NO: 52307 - DNA, 18 bp, Homo sapiens
ccagttaagagcacaaca

SEQ ID NO: 52308 - DNA, 21 bp, Homo sapiens
ggcaattcaaattcatagata

SEQ ID NO: 52309 - DNA, 17 bp, Homo sapiens
ttttactgagagctccc

SEQ ID NO: 52310 - DNA, 16 bp, Homo sapiens
tggcagttttagcctg

SEQ ID NO: 52311 - DNA, 16 bp, Homo sapiens
tcaccgagaacactga

SEQ ID NO: 52312 - DNA, 27 bp, Homo sapiens
agaaataataatataaaattattaact

SEQ ID NO: 52313 - DNA, 18 bp, Homo sapiens
caggttaaaaatggcttt

SEQ ID NO: 52314 - DNA, 21 bp, Homo sapiens
attaaaccagacatagccaac

SEQ ID NO: 52315 - DNA, 19 bp, Homo sapiens
tcctaaagaagatgaaaaa

SEQ ID NO: 52316 - DNA, 18 bp, Homo sapiens
agcatcaaacaatgggtc

SEQ ID NO: 52317 - DNA, 18 bp, Homo sapiens
gtgctggtcacatttagt

SEQ ID NO: 52318 - DNA, 17 bp, Homo sapiens
gttgtttgggagccatc

SEQ ID NO: 52319 - DNA, 17 bp, Homo sapiens
gacagtcctctgagtgc

SEQ ID NO: 52320 - DNA, 22 bp, Homo sapiens
aacttgagatcagttttctgtc

SEQ ID NO: 52321 - DNA, 18 bp, Homo sapiens
aggtgctgacaaggattc

SEQ ID NO: 52322 - DNA, 18 bp, Homo sapiens
ttgatgggtcgaaactaa

SEQ ID NO: 52323 - DNA, 24 bp, Homo sapiens
gtaaaaagtataaggtgaataaaa

SEQ ID NO: 52324 - DNA, 16 bp, Homo sapiens
tcagcgttgatggcac

SEQ ID NO: 52325 - DNA, 21 bp, Homo sapiens
cctttttatggccaaataata

SEQ ID NO: 52326 - DNA, 16 bp, Homo sapiens
acttaccactgtacca

SEQ ID NO: 52327 - DNA, 18 bp, Homo sapiens
gttgatggacatttgggt

SEQ ID NO: 52328 - DNA, 19 bp, Homo sapiens
cacatgagctacaactagt

SEQ ID NO: 52329 - DNA, 22 bp, Homo sapiens
atatgagttcattttatatctc

SEQ ID NO: 52330 - DNA, 20 bp, Homo sapiens
tcatttgtaaaggcaaaaaa

SEQ ID NO: 52331 - DNA, 17 bp, Homo sapiens
agcattcagtttcttgg

SEQ ID NO: 52332 - DNA, 16 bp, Homo sapiens
ctgcggcaagtctggt

SEQ ID NO: 52333 - DNA, 19 bp, Homo sapiens
aatttaaggctcttactgt

SEQ ID NO: 52334 - DNA, 17 bp, Homo sapiens
ggcatcggggaacgcag

SEQ ID NO: 52335 - DNA, 24 bp, Homo sapiens
atgctacttttgaggaaaatttca

SEQ ID NO: 52336 - DNA, 16 bp, Homo sapiens
acacagcccttaccgc

SEQ ID NO: 52337 - DNA, 22 bp, Homo sapiens
acaaggtgaatatcttaaccag

SEQ ID NO: 52338 - DNA, 16 bp, Homo sapiens
tgtgccgttagccgtc

SEQ ID NO: 52339 - DNA, 16 bp, Homo sapiens
gactgaggacacaagc

SEQ ID NO: 52340 - DNA, 19 bp, Homo sapiens
aatcgattttgctgtttag

SEQ ID NO: 52341 - DNA, 21 bp, Homo sapiens
gtctctgtcaagcctggagac

SEQ ID NO: 52342 - DNA, 19 bp, Homo sapiens
tcctaaagatgagcttgga

SEQ ID NO: 52343 - DNA, 21 bp, Homo sapiens
cagctgtcatactattctgca

SEQ ID NO: 52344 - DNA, 23 bp, Homo sapiens
cacatattttggggcatttgaca

SEQ ID NO: 52345 - DNA, 16 bp, Homo sapiens
ggccggcctgggctga

SEQ ID NO: 52346 - DNA, 21 bp, Homo sapiens
gaatgcttttaaaacttctgc

SEQ ID NO: 52347 - DNA, 16 bp, Homo sapiens
tctgtggccctttcca

SEQ ID NO: 52348 - DNA, 21 bp, Homo sapiens
tttgtgtgattgaagccatga

SEQ ID NO: 52349 - DNA, 17 bp, Homo sapiens
ggcagaatggcaaaagc

SEQ ID NO: 52350 - DNA, 18 bp, Homo sapiens
caccagggtcccttcgat

SEQ ID NO: 52351 - DNA, 24 bp, Homo sapiens
tccacgagcagatccccttctcca

SEQ ID NO: 52352 - DNA, 16 bp, Homo sapiens
tgcaggactgtgcatt

SEQ ID NO: 52353 - DNA, 19 bp, Homo sapiens
atggctaattaaattgggt

SEQ ID NO: 52354 - DNA, 19 bp, Homo sapiens
ttcttactctcccctcccc

SEQ ID NO: 52355 - DNA, 16 bp, Homo sapiens
gcacaggggtgttcct

SEQ ID NO: 52356 - DNA, 20 bp, Homo sapiens
actgtcaagctggagacaca

SEQ ID NO: 52357 - DNA, 21 bp, Homo sapiens
ttggtgattttttggcagaat

SEQ ID NO: 52358 - DNA, 20 bp, Homo sapiens
aaccactgagaaccagccac

SEQ ID NO: 52359 - DNA, 16 bp, Homo sapiens
actgagctgggacatt

SEQ ID NO: 52360 - DNA, 23 bp, Homo sapiens
acgaatcactggataccattgga

SEQ ID NO: 52361 - DNA, 17 bp, Homo sapiens
gtctgataacttgccct

SEQ ID NO: 52362 - DNA, 22 bp, Homo sapiens
gtcaagagtctcagcagactca

SEQ ID NO: 52363 - DNA, 23 bp, Homo sapiens
ttggtttttttctgtcggagtaa

SEQ ID NO: 52364 - DNA, 16 bp, Homo sapiens
agtctcttctgctggg

SEQ ID NO: 52365 - DNA, 24 bp, Homo sapiens
agaggcataaaacagcagtcttga

SEQ ID NO: 52366 - DNA, 22 bp, Homo sapiens
atttttctctttctccagataa

SEQ ID NO: 52367 - DNA, 16 bp, Homo sapiens
tttctcctccactttc

SEQ ID NO: 52368 - DNA, 23 bp, Homo sapiens
tctaggattcatagttaaaccaa

SEQ ID NO: 52369 - DNA, 21 bp, Homo sapiens
tacgatctgtactgggatttc

SEQ ID NO: 52370 - DNA, 18 bp, Homo sapiens
agcagccctcatgattta

SEQ ID NO: 52371 - DNA, 24 bp, Homo sapiens
gttgccactccaccaccagtttta

SEQ ID NO: 52372 - DNA, 16 bp, Homo sapiens
accgcacctatctcct

SEQ ID NO: 52373 - DNA, 17 bp, Homo sapiens
ccaaaaagacaagacct

SEQ ID NO: 52374 - DNA, 19 bp, Homo sapiens
ctttacccccatctctgct

SEQ ID NO: 52375 - DNA, 22 bp, Homo sapiens
atgggcgtcccagttccctttc

SEQ ID NO: 52376 - DNA, 24 bp, Homo sapiens
ccaaggcctcccgtgtcctcaata

SEQ ID NO: 52377 - DNA, 24 bp, Homo sapiens
tttttctcttagatattcagtcta

SEQ ID NO: 52378 - DNA, 16 bp, Homo sapiens
tcaggtagctataggt

SEQ ID NO: 52379 - DNA, 24 bp, Homo sapiens
gattatttctgaatttttgattta

SEQ ID NO: 52380 - DNA, 22 bp, Homo sapiens
tacaaccatcaggctcaggaat

SEQ ID NO: 52381 - DNA, 17 bp, Homo sapiens
gtaccaagcaccactat

SEQ ID NO: 52382 - DNA, 22 bp, Homo sapiens
cacggccttgctgcttttagac

SEQ ID NO: 52383 - DNA, 17 bp, Homo sapiens
aaggacagtcttacagc

SEQ ID NO: 52384 - DNA, 24 bp, Homo sapiens
aaagaaatcataaaattcatgact

SEQ ID NO: 52385 - DNA, 20 bp, Homo sapiens
tggatggagttataaaggaa

SEQ ID NO: 52386 - DNA, 19 bp, Homo sapiens
gatatttaggttatgctgt

SEQ ID NO: 52387 - DNA, 17 bp, Homo sapiens
cctagctggcttatttc

SEQ ID NO: 52388 - DNA, 20 bp, Homo sapiens
ctggtgaaggtgacattgac

SEQ ID NO: 52389 - DNA, 19 bp, Homo sapiens
gaatgagttgaccctaaat

SEQ ID NO: 52390 - DNA, 17 bp, Homo sapiens
catgggctcacattcac

SEQ ID NO: 52391 - DNA, 19 bp, Homo sapiens
attctgacttctaattggg

SEQ ID NO: 52392 - DNA, 21 bp, Homo sapiens
aggccggcgccttctcccccg

SEQ ID NO: 52393 - DNA, 18 bp, Homo sapiens
gctcctggcgctcagcac

SEQ ID NO: 52394 - DNA, 17 bp, Homo sapiens
gagggatccgcccagcc

SEQ ID NO: 52395 - DNA, 23 bp, Homo sapiens
cttctttcccgagcttggaactt

SEQ ID NO: 52396 - DNA, 19 bp, Homo sapiens
cacagagggcgcgggaacc

SEQ ID NO: 52397 - DNA, 24 bp, Homo sapiens
tgactgggctcctccccgggcccg

SEQ ID NO: 52398 - DNA, 20 bp, Homo sapiens
ctgcaccggttcggcctggg

SEQ ID NO: 52399 - DNA, 22 bp, Homo sapiens
ttccggagccgggggcggggcg

SEQ ID NO: 52400 - DNA, 18 bp, Homo sapiens
tgcacagtttgacaactt

SEQ ID NO: 52401 - DNA, 21 bp, Homo sapiens
tcattatttttagtctcaaaa

SEQ ID NO: 52402 - DNA, 18 bp, Homo sapiens
atccctgtgaattttcca

SEQ ID NO: 52403 - DNA, 21 bp, Homo sapiens
aaccaaaaccaaaaagaaggg

SEQ ID NO: 52404 - DNA, 19 bp, Homo sapiens
ctttctactctagggtcat

SEQ ID NO: 52405 - DNA, 17 bp, Homo sapiens
ttagcgtgtggcttcca

SEQ ID NO: 52406 - DNA, 17 bp, Homo sapiens
tcaagaaacagacttca

SEQ ID NO: 52407 - DNA, 20 bp, Homo sapiens
ttccaattgcagcccagcca

SEQ ID NO: 52408 - DNA, 18 bp, Homo sapiens
gctgtggttaagtcttga

SEQ ID NO: 52409 - DNA, 21 bp, Homo sapiens
ttgtcattcagcatgccagag

SEQ ID NO: 52410 - DNA, 20 bp, Homo sapiens
tacagcaaaaaaatggtata

SEQ ID NO: 52411 - DNA, 22 bp, Homo sapiens
gattctttgtctctcttcatta

SEQ ID NO: 52412 - DNA, 22 bp, Homo sapiens
gataatatttttgtgttacagc

SEQ ID NO: 52413 - DNA, 19 bp, Homo sapiens
gaaatgcacaacaaaagag

SEQ ID NO: 52414 - DNA, 16 bp, Homo sapiens
agaaccccactgaatt

SEQ ID NO: 52415 - DNA, 19 bp, Homo sapiens
atagttaacgtgagtgtat

SEQ ID NO: 52416 - DNA, 17 bp, Homo sapiens
ctgggaatgaagggaca

SEQ ID NO: 52417 - DNA, 26 bp, Homo sapiens
ataactttctataattgtaaactatt

SEQ ID NO: 52418 - DNA, 19 bp, Homo sapiens
tctggatttttgcaaatgg

SEQ ID NO: 52419 - DNA, 16 bp, Homo sapiens
aacaccttgggttgaa

SEQ ID NO: 52420 - DNA, 18 bp, Homo sapiens
gtgttcattgcaggaaga

SEQ ID NO: 52421 - DNA, 21 bp, Homo sapiens
caaagtaacatagcccataag

SEQ ID NO: 52422 - DNA, 18 bp, Homo sapiens
tgcaggaccaatctgact

SEQ ID NO: 52423 - DNA, 20 bp, Homo sapiens
aaccctgtaagatccatttg

SEQ ID NO: 52424 - DNA, 20 bp, Homo sapiens
tgacatatctgtactatgtt

SEQ ID NO: 52425 - DNA, 21 bp, Homo sapiens
ctaatcaaaataccaccttta

SEQ ID NO: 52426 - DNA, 19 bp, Homo sapiens
tagcaaatcacattctcac

SEQ ID NO: 52427 - DNA, 23 bp, Homo sapiens
gggtctctatgtatacatcacac

SEQ ID NO: 52428 - DNA, 21 bp, Homo sapiens
caatttgcagctttgtggtca

SEQ ID NO: 52429 - DNA, 17 bp, Homo sapiens
ggctgccgatgcatcca

SEQ ID NO: 52430 - DNA, 22 bp, Homo sapiens
cacatctattaggttcttgaaa

SEQ ID NO: 52431 - DNA, 17 bp, Homo sapiens
ctggcgagcatcacttc

SEQ ID NO: 52432 - DNA, 17 bp, Homo sapiens
acaagggtatttcagcc

SEQ ID NO: 52433 - DNA, 18 bp, Homo sapiens
tgaagctccaaactttgc

SEQ ID NO: 52434 - DNA, 23 bp, Homo sapiens
gtctcctataatactgattgtgt

SEQ ID NO: 52435 - DNA, 20 bp, Homo sapiens
cttctgaaggatttgatact

SEQ ID NO: 52436 - DNA, 16 bp, Homo sapiens
acttggcgtagcgtga

SEQ ID NO: 52437 - DNA, 24 bp, Homo sapiens
ttatttaaaagctttcagaagtgt

SEQ ID NO: 52438 - DNA, 22 bp, Homo sapiens
aaatacaccagtttgatcagca

SEQ ID NO: 52439 - DNA, 23 bp, Homo sapiens
acaaaaattaatgtatctttatt

SEQ ID NO: 52440 - DNA, 22 bp, Homo sapiens
gatttaccataaagtaatgcaa

SEQ ID NO: 52441 - DNA, 18 bp, Homo sapiens
ccttcccaagtacctata

SEQ ID NO: 52442 - DNA, 24 bp, Homo sapiens
gagatgtaggaggtaaatgaatgt

SEQ ID NO: 52443 - DNA, 18 bp, Homo sapiens
ttcacactcaccactctc

SEQ ID NO: 52444 - DNA, 20 bp, Homo sapiens
agaaatcaacacactactgt

SEQ ID NO: 52445 - DNA, 17 bp, Homo sapiens
tttcagctccttgacag

SEQ ID NO: 52446 - DNA, 18 bp, Homo sapiens
caacattgaaatcatcct

SEQ ID NO: 52447 - DNA, 18 bp, Homo sapiens
tattctgtccacatgaga

SEQ ID NO: 52448 - DNA, 19 bp, Homo sapiens
ctgcctttgcgaccagtgg

SEQ ID NO: 52449 - DNA, 18 bp, Homo sapiens
tgtttaggaagttctaac

SEQ ID NO: 52450 - DNA, 22 bp, Homo sapiens
caggctcagtgtgaaactgcca

SEQ ID NO: 52451 - DNA, 16 bp, Homo sapiens
tcaccatccaccaaga

SEQ ID NO: 52452 - DNA, 20 bp, Homo sapiens
accaaacttggaaaaacatc

SEQ ID NO: 52453 - DNA, 25 bp, Homo sapiens
aacacacaaacttataaaaataaaa

SEQ ID NO: 52454 - DNA, 21 bp, Homo sapiens
cagccatgcttttttgtcttt

SEQ ID NO: 52455 - DNA, 19 bp, Homo sapiens
tttactgttggaataccca

SEQ ID NO: 52456 - DNA, 16 bp, Homo sapiens
ttcttgctggtactga

SEQ ID NO: 52457 - DNA, 20 bp, Homo sapiens
atccagctgcttaaaaagaa

SEQ ID NO: 52458 - DNA, 29 bp, Homo sapiens
taaaaatattattatttaatatttgaggt

SEQ ID NO: 52459 - DNA, 20 bp, Homo sapiens
cctgctagattaaagcaagt

SEQ ID NO: 52460 - DNA, 18 bp, Homo sapiens
tcaatgtgtcacaacaat

SEQ ID NO: 52461 - DNA, 22 bp, Homo sapiens
tgcaaactgttaaaagttcata

SEQ ID NO: 52462 - DNA, 24 bp, Homo sapiens
ggataatgtatgtgattttttttt

SEQ ID NO: 52463 - DNA, 25 bp, Homo sapiens
tataaattcttaaatcaaaactaaa

SEQ ID NO: 52464 - DNA, 21 bp, Homo sapiens
ggcattaactgttgaactttt

SEQ ID NO: 52465 - DNA, 16 bp, Homo sapiens
agaacaaaggtggcaa

SEQ ID NO: 52466 - DNA, 25 bp, Homo sapiens
aaagtctttaaaaatgtgaaataaa

SEQ ID NO: 52467 - DNA, 21 bp, Homo sapiens
cttagaatgtttatgactctg

SEQ ID NO: 52468 - DNA, 22 bp, Homo sapiens
tacgactcatggctaaaatttt

SEQ ID NO: 52469 - DNA, 16 bp, Homo sapiens
aagctacgtagctctg

SEQ ID NO: 52470 - DNA, 23 bp, Homo sapiens
tgcttatgtatttacatgtaaaa

SEQ ID NO: 52471 - DNA, 17 bp, Homo sapiens
cactcagtttactcaac

SEQ ID NO: 52472 - DNA, 18 bp, Homo sapiens
gttaatccaatagcaaca

SEQ ID NO: 52473 - DNA, 22 bp, Homo sapiens
aaatactattattaccattttt

SEQ ID NO: 52474 - DNA, 16 bp, Homo sapiens
aagccatcagtcagag

SEQ ID NO: 52475 - DNA, 17 bp, Homo sapiens
agcttgtttggatgaat

SEQ ID NO: 52476 - DNA, 18 bp, Homo sapiens
gtaataccagccaggttg

SEQ ID NO: 52477 - DNA, 20 bp, Homo sapiens
agtctagttacccaaaatat

SEQ ID NO: 52478 - DNA, 18 bp, Homo sapiens
gagccatggagtgggcac

SEQ ID NO: 52479 - DNA, 24 bp, Homo sapiens
aatctatacttaaaacacgcatag

SEQ ID NO: 52480 - DNA, 18 bp, Homo sapiens
ggaatttagtggctagtt

SEQ ID NO: 52481 - DNA, 20 bp, Homo sapiens
gtctcttagagaagaattta

SEQ ID NO: 52482 - DNA, 17 bp, Homo sapiens
tcacaagttgtcttggt

SEQ ID NO: 52483 - DNA, 19 bp, Homo sapiens
acaggagattctaccacgt

SEQ ID NO: 52484 - DNA, 24 bp, Homo sapiens
ttgtcatttatgtagatgtgtatt

SEQ ID NO: 52485 - DNA, 19 bp, Homo sapiens
cccataaggcaactgttca

SEQ ID NO: 52486 - DNA, 21 bp, Homo sapiens
tgtgaataaatttagacaact

SEQ ID NO: 52487 - DNA, 24 bp, Homo sapiens
ggtataggtatacaaatagatgac

SEQ ID NO: 52488 - DNA, 19 bp, Homo sapiens
tagtgacatgggtgcaggc

SEQ ID NO: 52489 - DNA, 19 bp, Homo sapiens
taggctggaagaataagga

SEQ ID NO: 52490 - DNA, 17 bp, Homo sapiens
tgcaaagttgactggga

SEQ ID NO: 52491 - DNA, 20 bp, Homo sapiens
tgataagaactctaaaaggt

SEQ ID NO: 52492 - DNA, 16 bp, Homo sapiens
cattgacttccaccct

SEQ ID NO: 52493 - DNA, 21 bp, Homo sapiens
ttctgatttaaaatgcgaccc

SEQ ID NO: 52494 - DNA, 25 bp, Homo sapiens
gaagactcgtatttttatatactca

SEQ ID NO: 52495 - DNA, 16 bp, Homo sapiens
ccaaagcttcttccca

SEQ ID NO: 52496 - DNA, 21 bp, Homo sapiens
gcttagattcattatctacct

SEQ ID NO: 52497 - DNA, 25 bp, Homo sapiens
aaaagagaaaataatgaactatgag

SEQ ID NO: 52498 - DNA, 22 bp, Homo sapiens
ctgcatccatgctccttgatgc

SEQ ID NO: 52499 - DNA, 19 bp, Homo sapiens
agctaccttctgagaatgt

SEQ ID NO: 52500 - DNA, 17 bp, Homo sapiens
atcaaggtctccagcga

SEQ ID NO: 52501 - DNA, 17 bp, Homo sapiens
aagcaatcagaaactgc

SEQ ID NO: 52502 - DNA, 24 bp, Homo sapiens
tcatttgtatcctttcatatgttc

SEQ ID NO: 52503 - DNA, 19 bp, Homo sapiens
aaccaccttgaagagttcg

SEQ ID NO: 52504 - DNA, 18 bp, Homo sapiens
aacgctgatttgtaaaga

SEQ ID NO: 52505 - DNA, 19 bp, Homo sapiens
cacttgctatgattttcac

SEQ ID NO: 52506 - DNA, 17 bp, Homo sapiens
agcctctgtctgagaaa

SEQ ID NO: 52507 - DNA, 23 bp, Homo sapiens
gattttgcttgaattttatgtca

SEQ ID NO: 52508 - DNA, 17 bp, Homo sapiens
ttgttttgcagatttgg

SEQ ID NO: 52509 - DNA, 19 bp, Homo sapiens
tttccaacacaaatttcct

SEQ ID NO: 52510 - DNA, 18 bp, Homo sapiens
aatggtatcgtaacgata

SEQ ID NO: 52511 - DNA, 24 bp, Homo sapiens
ttattcactaaaaagttaaaaaca

SEQ ID NO: 52512 - DNA, 21 bp, Homo sapiens
gcaggatatcccataaagtta

SEQ ID NO: 52513 - DNA, 18 bp, Homo sapiens
tgacctctcattccaaat

SEQ ID NO: 52514 - DNA, 22 bp, Homo sapiens
ggtcacaggtacttagtttgtg

SEQ ID NO: 52515 - DNA, 16 bp, Homo sapiens
tgtcgtgacctggatt

SEQ ID NO: 52516 - DNA, 19 bp, Homo sapiens
ggttagtcaaaaagtacca

SEQ ID NO: 52517 - DNA, 16 bp, Homo sapiens
tccctggatggctggg

SEQ ID NO: 52518 - DNA, 23 bp, Homo sapiens
atgtccaaaactgaatcatattt

SEQ ID NO: 52519 - DNA, 17 bp, Homo sapiens
caccgttatacctcctc

SEQ ID NO: 52520 - DNA, 16 bp, Homo sapiens
ttggcgcccacaatcc

SEQ ID NO: 52521 - DNA, 18 bp, Homo sapiens
ttttgctagttgaatgct

SEQ ID NO: 52522 - DNA, 16 bp, Homo sapiens
gccagtcgaaaccttt

SEQ ID NO: 52523 - DNA, 21 bp, Homo sapiens
gattggaaaggatttcaataa

SEQ ID NO: 52524 - DNA, 16 bp, Homo sapiens
aagggcaaagaaagga

SEQ ID NO: 52525 - DNA, 18 bp, Homo sapiens
gaagctaagaagaggaat

SEQ ID NO: 52526 - DNA, 24 bp, Homo sapiens
gcatactggtagcattaatgacat

SEQ ID NO: 52527 - DNA, 18 bp, Homo sapiens
tcccacatgcattatgca

SEQ ID NO: 52528 - DNA, 22 bp, Homo sapiens
tttaaaagttaaaggaaaagag

SEQ ID NO: 52529 - DNA, 22 bp, Homo sapiens
agtaccattcatggatcattac

SEQ ID NO: 52530 - DNA, 22 bp, Homo sapiens
taccaatgagtgtaatattggg

SEQ ID NO: 52531 - DNA, 19 bp, Homo sapiens
actgcttttgtgaagtgtg

SEQ ID NO: 52532 - DNA, 18 bp, Homo sapiens
cggaaataattctcatct

SEQ ID NO: 52533 - DNA, 21 bp, Homo sapiens
atcatccatcctttagttgtg

SEQ ID NO: 52534 - DNA, 28 bp, Homo sapiens
tctatataatatttttaaataattacag

SEQ ID NO: 52535 - DNA, 20 bp, Homo sapiens
tgcctctttgcatattttaa

SEQ ID NO: 52536 - DNA, 20 bp, Homo sapiens
tcaatctcaaaagtgttggt

SEQ ID NO: 52537 - DNA, 23 bp, Homo sapiens
catacaatacaacactatgttaa

SEQ ID NO: 52538 - DNA, 19 bp, Homo sapiens
taaaatgttgatgggagaa

SEQ ID NO: 52539 - DNA, 22 bp, Homo sapiens
agttttgcttttgtttttgcgt

SEQ ID NO: 52540 - DNA, 18 bp, Homo sapiens
ccatcaccacctatttcc

SEQ ID NO: 52541 - DNA, 20 bp, Homo sapiens
gcctcacaattctagttttt

SEQ ID NO: 52542 - DNA, 20 bp, Homo sapiens
ccagagccctatcgttctca

SEQ ID NO: 52543 - DNA, 19 bp, Homo sapiens
tccaaaagtaatgtgccat

SEQ ID NO: 52544 - DNA, 23 bp, Homo sapiens
catacttttgaaaactttttttt

SEQ ID NO: 52545 - DNA, 19 bp, Homo sapiens
tcaccatccaatttctaaa

SEQ ID NO: 52546 - DNA, 17 bp, Homo sapiens
gtataccaggtggtgtg

SEQ ID NO: 52547 - DNA, 24 bp, Homo sapiens
ttcattaccttaaagagataatcc

SEQ ID NO: 52548 - DNA, 16 bp, Homo sapiens
agacaacttgtgagga

SEQ ID NO: 52549 - DNA, 16 bp, Homo sapiens
gcagcgggcccgcccc

SEQ ID NO: 52550 - DNA, 20 bp, Homo sapiens
gacgggctgggccgggagtt

SEQ ID NO: 52551 - DNA, 23 bp, Homo sapiens
gagagtggagccggtggaaacgc

SEQ ID NO: 52552 - DNA, 24 bp, Homo sapiens
gcggtgcccttgctgctgtgtgcg

SEQ ID NO: 52553 - DNA, 21 bp, Homo sapiens
ccacggggcgggctcttgccg

SEQ ID NO: 52554 - DNA, 16 bp, Homo sapiens
ggcaacgccgagcgaa

SEQ ID NO: 52555 - DNA, 22 bp, Homo sapiens
ctgaccgcgccgatgccgtcga

SEQ ID NO: 52556 - DNA, 22 bp, Homo sapiens
gacccgcctccctgggcgccgg

SEQ ID NO: 52557 - DNA, 23 bp, Homo sapiens
gcgccgccgggcgccagcagcgc

SEQ ID NO: 52558 - DNA, 16 bp, Homo sapiens
ggcgtcagcatcagcg

SEQ ID NO: 52559 - DNA, 16 bp, Homo sapiens
ccgcagtcatagcttt

SEQ ID NO: 52560 - DNA, 17 bp, Homo sapiens
gcttcttttctcaacac

SEQ ID NO: 52561 - DNA, 21 bp, Homo sapiens
cgatagatacgggcaggaggc

SEQ ID NO: 52562 - DNA, 22 bp, Homo sapiens
tggaatccaccttccctgcgtt

SEQ ID NO: 52563 - DNA, 22 bp, Homo sapiens
ggcctctgacgcagctggcgga

SEQ ID NO: 52564 - DNA, 20 bp, Homo sapiens
tgagatgctggggaagagcc

SEQ ID NO: 52565 - DNA, 23 bp, Homo sapiens
tatcgctcgcgtgtctgtggtca

SEQ ID NO: 52566 - DNA, 16 bp, Homo sapiens
gaatcgggacctggtg

SEQ ID NO: 52567 - DNA, 17 bp, Homo sapiens
acctggtggagcacttt

SEQ ID NO: 52568 - DNA, 19 bp, Homo sapiens
tcatctcacataagggaaa

SEQ ID NO: 52569 - DNA, 18 bp, Homo sapiens
ccatgagtggccctacca

SEQ ID NO: 52570 - DNA, 24 bp, Homo sapiens
gaagctggcaggcgatcacggttg

SEQ ID NO: 52571 - DNA, 23 bp, Homo sapiens
ctcgccacacgccaccccagcag

SEQ ID NO: 52572 - DNA, 24 bp, Homo sapiens
tcggcgggccgcctagggtgattg

SEQ ID NO: 52573 - DNA, 24 bp, Homo sapiens
cacgggcaaaagcgagtgggcccg

SEQ ID NO: 52574 - DNA, 21 bp, Homo sapiens
aagcctggattggtggagcta

SEQ ID NO: 52575 - DNA, 24 bp, Homo sapiens
gaagggggtcagtctcctcacctg

SEQ ID NO: 52576 - DNA, 24 bp, Homo sapiens
gcagagatggcgactgcgactcgg

SEQ ID NO: 52577 - DNA, 22 bp, Homo sapiens
gggaccaggcaggaaggaggcc

SEQ ID NO: 52578 - DNA, 23 bp, Homo sapiens
ggccgccgcttgccggcttcgtt

SEQ ID NO: 52579 - DNA, 20 bp, Homo sapiens
gcgctcccaacggcccacgg

SEQ ID NO: 52580 - DNA, 24 bp, Homo sapiens
atcaatgggctaagcgaggagcag

SEQ ID NO: 52581 - DNA, 20 bp, Homo sapiens
tgaagaccttaagaaagagg

SEQ ID NO: 52582 - DNA, 16 bp, Homo sapiens
gccaggtgctcctgaa

SEQ ID NO: 52583 - DNA, 16 bp, Homo sapiens
tttcagtctgatgctg

SEQ ID NO: 52584 - DNA, 16 bp, Homo sapiens
tcccaactcactcgca

SEQ ID NO: 52585 - DNA, 24 bp, Homo sapiens
tgtgtctgggtagtggagatgctg

SEQ ID NO: 52586 - DNA, 16 bp, Homo sapiens
tgagctcttccaggca

SEQ ID NO: 52587 - DNA, 16 bp, Homo sapiens
agaccatggctaagtt

SEQ ID NO: 52588 - DNA, 24 bp, Homo sapiens
caatgagacccaaacacttcagag

SEQ ID NO: 52589 - DNA, 22 bp, Homo sapiens
agcaatgagttcaagaacctgc

SEQ ID NO: 52590 - DNA, 22 bp, Homo sapiens
gggagtggggctgagctgcact

SEQ ID NO: 52591 - DNA, 19 bp, Homo sapiens
atgcccaatacgcccaggt

SEQ ID NO: 52592 - DNA, 16 bp, Homo sapiens
tctaagaatgcagccc

SEQ ID NO: 52593 - DNA, 17 bp, Homo sapiens
aagggcacataagaaaa

SEQ ID NO: 52594 - DNA, 16 bp, Homo sapiens
ctgccttcccctcaac

SEQ ID NO: 52595 - DNA, 19 bp, Homo sapiens
gttctgggtttctttaagc

SEQ ID NO: 52596 - DNA, 17 bp, Homo sapiens
ttggaagcagctgggga

SEQ ID NO: 52597 - DNA, 24 bp, Homo sapiens
atagaagagtgtcctgttctctgg

SEQ ID NO: 52598 - DNA, 23 bp, Homo sapiens
gtccactgagcttgtaagcaggt

SEQ ID NO: 52599 - DNA, 16 bp, Homo sapiens
cacatgctccaggtag

SEQ ID NO: 52600 - DNA, 22 bp, Homo sapiens
atttggagtaggtgctacaagg

SEQ ID NO: 52601 - DNA, 16 bp, Homo sapiens
gtgggcaccgtaactg

SEQ ID NO: 52602 - DNA, 17 bp, Homo sapiens
gatttaatctgggctgc

SEQ ID NO: 52603 - DNA, 19 bp, Homo sapiens
gatacttctctttctgggc

SEQ ID NO: 52604 - DNA, 17 bp, Homo sapiens
tccggcctgggctacct

SEQ ID NO: 52605 - DNA, 17 bp, Homo sapiens
tcttttagttggtggtt

SEQ ID NO: 52606 - DNA, 24 bp, Homo sapiens
gagcttccggagcagtggggctca

SEQ ID NO: 52607 - DNA, 22 bp, Homo sapiens
tggttcatggcagcatgctaca

SEQ ID NO: 52608 - DNA, 24 bp, Homo sapiens
tgtacgcaatgggaatgaggccca

SEQ ID NO: 52609 - DNA, 23 bp, Homo sapiens
gcttagaagagacttctaggact

SEQ ID NO: 52610 - DNA, 20 bp, Homo sapiens
gcttcatagagacaacatca

SEQ ID NO: 52611 - DNA, 21 bp, Homo sapiens
ttaatgtggacaggaagaggc

SEQ ID NO: 52612 - DNA, 20 bp, Homo sapiens
tgtacctctgcccattttgg

SEQ ID NO: 52613 - DNA, 20 bp, Homo sapiens
ctgttgggggttttccttgc

SEQ ID NO: 52614 - DNA, 21 bp, Homo sapiens
gaaagttctggaaacccagca

SEQ ID NO: 52615 - DNA, 18 bp, Homo sapiens
gcccaatgcaggctctga

SEQ ID NO: 52616 - DNA, 16 bp, Homo sapiens
tcagccaggccataga

SEQ ID NO: 52617 - DNA, 18 bp, Homo sapiens
ccattcaggatgtagtga

SEQ ID NO: 52618 - DNA, 16 bp, Homo sapiens
agcaacaattgtgggt

SEQ ID NO: 52619 - DNA, 19 bp, Homo sapiens
tgtcttggcatagacaatc

SEQ ID NO: 52620 - DNA, 23 bp, Homo sapiens
cttcttgctcagcagaaggtcta

SEQ ID NO: 52621 - DNA, 20 bp, Homo sapiens
ctcaccttctccacaatgaa

SEQ ID NO: 52622 - DNA, 24 bp, Homo sapiens
aaatagccaacatcctgcccttag

SEQ ID NO: 52623 - DNA, 17 bp, Homo sapiens
ggctatctctggtacca

SEQ ID NO: 52624 - DNA, 20 bp, Homo sapiens
actaatggccctgatgctga

SEQ ID NO: 52625 - DNA, 21 bp, Homo sapiens
ccacctctgggggccttgcag

SEQ ID NO: 52626 - DNA, 23 bp, Homo sapiens
cagcttctcggggcatcacagcc

SEQ ID NO: 52627 - DNA, 19 bp, Homo sapiens
gaaggtcccggggggagca

SEQ ID NO: 52628 - DNA, 21 bp, Homo sapiens
ctcacaggtgttagagcccct

SEQ ID NO: 52629 - DNA, 18 bp, Homo sapiens
ataggaaggtgagtgcct

SEQ ID NO: 52630 - DNA, 19 bp, Homo sapiens
gggctccccgattcccggt

SEQ ID NO: 52631 - DNA, 16 bp, Homo sapiens
aaccaggaccaccttt

SEQ ID NO: 52632 - DNA, 16 bp, Homo sapiens
agaggctttctcaact

SEQ ID NO: 52633 - DNA, 16 bp, Homo sapiens
ctggacaagctgggga

SEQ ID NO: 52634 - DNA, 17 bp, Homo sapiens
cagccccagctcacagc

SEQ ID NO: 52635 - DNA, 21 bp, Homo sapiens
ggaaggggttcacttgatcct

SEQ ID NO: 52636 - DNA, 16 bp, Homo sapiens
atcagcacgtagacac

SEQ ID NO: 52637 - DNA, 24 bp, Homo sapiens
gtgacatattttagtgccttactt

SEQ ID NO: 52638 - DNA, 17 bp, Homo sapiens
ctctcacacttacccaa

SEQ ID NO: 52639 - DNA, 24 bp, Homo sapiens
tgaggaggctgtggacagctctct

SEQ ID NO: 52640 - DNA, 24 bp, Homo sapiens
aggggaaggctgctgctgctcatg

SEQ ID NO: 52641 - DNA, 24 bp, Homo sapiens
catcctgggccatgagaataaggg

SEQ ID NO: 52642 - DNA, 21 bp, Homo sapiens
tttcatctcccaggagagagc

SEQ ID NO: 52643 - DNA, 20 bp, Homo sapiens
ctggccggggggcctcttgg

SEQ ID NO: 52644 - DNA, 23 bp, Homo sapiens
tccaggaccgcttgcatgagcct

SEQ ID NO: 52645 - DNA, 22 bp, Homo sapiens
tcagtgccgtaactgtggcaag

SEQ ID NO: 52646 - DNA, 19 bp, Homo sapiens
agtggccgatcttctggcc

SEQ ID NO: 52647 - DNA, 19 bp, Homo sapiens
cttcccacgctagcatttt

SEQ ID NO: 52648 - DNA, 23 bp, Homo sapiens
tctcttttcaaagaaaactttag

SEQ ID NO: 52649 - DNA, 17 bp, Homo sapiens
gcctttctcctttctga

SEQ ID NO: 52650 - DNA, 22 bp, Homo sapiens
agctcaatttgctagaggagac

SEQ ID NO: 52651 - DNA, 20 bp, Homo sapiens
gcacgtgagggaagcctttg

SEQ ID NO: 52652 - DNA, 22 bp, Homo sapiens
ctctgtggccctaactcccaca

SEQ ID NO: 52653 - DNA, 16 bp, Homo sapiens
gccatgaggcgggtgt

SEQ ID NO: 52654 - DNA, 19 bp, Homo sapiens
ctctccatgcccctgcttc

SEQ ID NO: 52655 - DNA, 16 bp, Homo sapiens
cttagcagtgcaatgg

SEQ ID NO: 52656 - DNA, 24 bp, Homo sapiens
ttttggtaactgagagagtgttcc

SEQ ID NO: 52657 - DNA, 21 bp, Homo sapiens
agacagcaagtctcagcagct

SEQ ID NO: 52658 - DNA, 24 bp, Homo sapiens
caggggaagatggctgacatgtac

SEQ ID NO: 52659 - DNA, 19 bp, Homo sapiens
atcacacctgcacagtcct

SEQ ID NO: 52660 - DNA, 18 bp, Homo sapiens
caaggcctgcgatgaggg

SEQ ID NO: 52661 - DNA, 17 bp, Homo sapiens
caaaacactgaatgccg

SEQ ID NO: 52662 - DNA, 24 bp, Homo sapiens
gtcggggagaggcgggggcagtgg

SEQ ID NO: 52663 - DNA, 24 bp, Homo sapiens
tctgaagcagccacaggccccagg

SEQ ID NO: 52664 - DNA, 24 bp, Homo sapiens
gccctgctgaccccagcttcctcc

SEQ ID NO: 52665 - DNA, 20 bp, Homo sapiens
tgtgccacacaggtagccct

SEQ ID NO: 52666 - DNA, 19 bp, Homo sapiens
aaggaaggactagtgtatt

SEQ ID NO: 52667 - DNA, 16 bp, Homo sapiens
ctcgaagaaagcggcc

SEQ ID NO: 52668 - DNA, 24 bp, Homo sapiens
tctttaatcaccctctcctcctgt

SEQ ID NO: 52669 - DNA, 16 bp, Homo sapiens
gctctgccgatgacca

SEQ ID NO: 52670 - DNA, 17 bp, Homo sapiens
ttgtcaatcacttcctt

SEQ ID NO: 52671 - DNA, 20 bp, Homo sapiens
ggccactaggtgcaggaaaa

SEQ ID NO: 52672 - DNA, 20 bp, Homo sapiens
tacatcaatgactttcccat

SEQ ID NO: 52673 - DNA, 21 bp, Homo sapiens
caggagggcctgctgtgggca

SEQ ID NO: 52674 - DNA, 24 bp, Homo sapiens
ctgggaccagcgaggtgaggcggc

SEQ ID NO: 52675 - DNA, 18 bp, Homo sapiens
ctgttgtggagaactcaa

SEQ ID NO: 52676 - DNA, 21 bp, Homo sapiens
gtgaggggcttcgggaccttg

SEQ ID NO: 52677 - DNA, 18 bp, Homo sapiens
gcaggcgcagctgcagcc

SEQ ID NO: 52678 - DNA, 16 bp, Homo sapiens
agagagacagaggttc

SEQ ID NO: 52679 - DNA, 23 bp, Homo sapiens
tacctgtgggatcctcccccagg

SEQ ID NO: 52680 - DNA, 22 bp, Homo sapiens
caggcctcccgcaggcaggcag

SEQ ID NO: 52681 - DNA, 20 bp, Homo sapiens
aacctctggcccttaccctg

SEQ ID NO: 52682 - DNA, 21 bp, Homo sapiens
agctctgatgagctccacagt

SEQ ID NO: 52683 - DNA, 24 bp, Homo sapiens
tgcccacagccggcggggctgggt

SEQ ID NO: 52684 - DNA, 24 bp, Homo sapiens
gaaggagtctccaggcagatgggg

SEQ ID NO: 52685 - DNA, 24 bp, Homo sapiens
gacacttctccagatggaagagtc

SEQ ID NO: 52686 - DNA, 20 bp, Homo sapiens
atagatgccatagtgcttcc

SEQ ID NO: 52687 - DNA, 24 bp, Homo sapiens
tgaggactgggaaagggacccgag

SEQ ID NO: 52688 - DNA, 22 bp, Homo sapiens
cctgtagatgagcctccgccgt

SEQ ID NO: 52689 - DNA, 16 bp, Homo sapiens
ggcccagccctgcccc

SEQ ID NO: 52690 - DNA, 17 bp, Homo sapiens
ctcacccctccagaacc

SEQ ID NO: 52691 - DNA, 16 bp, Homo sapiens
ggagacagcagcagcg

SEQ ID NO: 52692 - DNA, 18 bp, Homo sapiens
atgccctgagccatgggc

SEQ ID NO: 52693 - DNA, 17 bp, Homo sapiens
tcttcaagaggagcgta

SEQ ID NO: 52694 - DNA, 19 bp, Homo sapiens
atccctgcccccacctggc

SEQ ID NO: 52695 - DNA, 23 bp, Homo sapiens
ctgggcgtctgcccctgaggggt

SEQ ID NO: 52696 - DNA, 20 bp, Homo sapiens
ctgcaggcacttcttcagcc

SEQ ID NO: 52697 - DNA, 22 bp, Homo sapiens
gggcttgggcaaaaatgtccaa

SEQ ID NO: 52698 - DNA, 23 bp, Homo sapiens
ctgcccatttcttgtcacctccc

SEQ ID NO: 52699 - DNA, 21 bp, Homo sapiens
ggtctcctcttcacctgcagg

SEQ ID NO: 52700 - DNA, 16 bp, Homo sapiens
gttctgcacggctggg

SEQ ID NO: 52701 - DNA, 24 bp, Homo sapiens
gcccaccgcaaccagtgccaggcc

SEQ ID NO: 52702 - DNA, 16 bp, Homo sapiens
agtgttggactccatg

SEQ ID NO: 52703 - DNA, 24 bp, Homo sapiens
aggacggtgaggcgggggctggcc

SEQ ID NO: 52704 - DNA, 20 bp, Homo sapiens
gtgtggggccccgtgggctg

SEQ ID NO: 52705 - DNA, 24 bp, Homo sapiens
ggcgtgtcgtcctgacccttcctg

SEQ ID NO: 52706 - DNA, 24 bp, Homo sapiens
tttcagctgttataaggctggcca

SEQ ID NO: 52707 - DNA, 16 bp, Homo sapiens
caggtccacctggaca

SEQ ID NO: 52708 - DNA, 24 bp, Homo sapiens
ccaagccctgctgtgccctcagct

SEQ ID NO: 52709 - DNA, 21 bp, Homo sapiens
tggctcccccggccccggcag

SEQ ID NO: 52710 - DNA, 24 bp, Homo sapiens
gagccccgggggagggaggatcaa

SEQ ID NO: 52711 - DNA, 16 bp, Homo sapiens
tgggccaccacttcat

SEQ ID NO: 52712 - DNA, 17 bp, Homo sapiens
gaggttgtgatcttagc

SEQ ID NO: 52713 - DNA, 16 bp, Homo sapiens
gaggatggtgagtggg

SEQ ID NO: 52714 - DNA, 20 bp, Homo sapiens
atggagaggaggggaactca

SEQ ID NO: 52715 - DNA, 24 bp, Homo sapiens
ggtcacagcagggctgcagcgcct

SEQ ID NO: 52716 - DNA, 21 bp, Homo sapiens
gaagagtaggcgagccgaggt

SEQ ID NO: 52717 - DNA, 24 bp, Homo sapiens
cacctcccgagaagcaggcgctaa

SEQ ID NO: 52718 - DNA, 17 bp, Homo sapiens
gaagggcaggctggaga

SEQ ID NO: 52719 - DNA, 24 bp, Homo sapiens
ttgatgtcaccagcaatgaccctg

SEQ ID NO: 52720 - DNA, 18 bp, Homo sapiens
gtgggccgcctgacccca

SEQ ID NO: 52721 - DNA, 23 bp, Homo sapiens
ctgcggcctggacagcatccatg

SEQ ID NO: 52722 - DNA, 21 bp, Homo sapiens
ccatccaagctgtgtgcattc

SEQ ID NO: 52723 - DNA, 18 bp, Homo sapiens
aacctgcctgtgttctcc

SEQ ID NO: 52724 - DNA, 19 bp, Homo sapiens
aggagaaagagttcactcc

SEQ ID NO: 52725 - DNA, 24 bp, Homo sapiens
cattctcgggtcccaggacagcac

SEQ ID NO: 52726 - DNA, 16 bp, Homo sapiens
ctcgggcggtgccagc

SEQ ID NO: 52727 - DNA, 24 bp, Homo sapiens
gaggctccagactgagccagagaa

SEQ ID NO: 52728 - DNA, 16 bp, Homo sapiens
acgcgtctccatgctg

SEQ ID NO: 52729 - DNA, 22 bp, Homo sapiens
gatcctgctggaagaggcgtgg

SEQ ID NO: 52730 - DNA, 23 bp, Homo sapiens
tcatgcaggcaaactccgtgggg

SEQ ID NO: 52731 - DNA, 18 bp, Homo sapiens
ctctggacagctgtcctc

SEQ ID NO: 52732 - DNA, 24 bp, Homo sapiens
aattcccactcaaggtttgggcag

SEQ ID NO: 52733 - DNA, 18 bp, Homo sapiens
cagggccggctcacgctg

SEQ ID NO: 52734 - DNA, 23 bp, Homo sapiens
acacatctgcacacatgggggta

SEQ ID NO: 52735 - DNA, 23 bp, Homo sapiens
ctcggttccgggcattggcggtg

SEQ ID NO: 52736 - DNA, 16 bp, Homo sapiens
aggagaagggagtcca

SEQ ID NO: 52737 - DNA, 24 bp, Homo sapiens
aggatccttcaggccccgcgtctc

SEQ ID NO: 52738 - DNA, 21 bp, Homo sapiens
gtggctcctctgggcctggca

SEQ ID NO: 52739 - DNA, 24 bp, Homo sapiens
gggccttgctgtgctggctcagca

SEQ ID NO: 52740 - DNA, 24 bp, Homo sapiens
ctgcagccagaaccctgggccacc

SEQ ID NO: 52741 - DNA, 20 bp, Homo sapiens
cagatgagtgggtgggcgca

SEQ ID NO: 52742 - DNA, 16 bp, Homo sapiens
cactggtgctgcttct

SEQ ID NO: 52743 - DNA, 22 bp, Homo sapiens
gtctaatcagtgagctctggga

SEQ ID NO: 52744 - DNA, 21 bp, Homo sapiens
gccttgcaggaccagtcccaa

SEQ ID NO: 52745 - DNA, 17 bp, Homo sapiens
cctgggacaccatagat

SEQ ID NO: 52746 - DNA, 20 bp, Homo sapiens
agccaccacgcctggcctga

SEQ ID NO: 52747 - DNA, 16 bp, Homo sapiens
aacctcaaagacggga

SEQ ID NO: 52748 - DNA, 21 bp, Homo sapiens
ggacctcatctctcctctcct

SEQ ID NO: 52749 - DNA, 20 bp, Homo sapiens
tctccattggagtattccct

SEQ ID NO: 52750 - DNA, 17 bp, Homo sapiens
tagtgctcagaagctgg

SEQ ID NO: 52751 - DNA, 17 bp, Homo sapiens
gagtgcttggaaacatt

SEQ ID NO: 52752 - DNA, 17 bp, Homo sapiens
aaattgctcctgctcct

SEQ ID NO: 52753 - DNA, 16 bp, Homo sapiens
gaattgctggggcaaa

SEQ ID NO: 52754 - DNA, 22 bp, Homo sapiens
ctcctctttttccgcaagacca

SEQ ID NO: 52755 - DNA, 19 bp, Homo sapiens
agctgctatgaatattctt

SEQ ID NO: 52756 - DNA, 20 bp, Homo sapiens
ccacattactctttattgaa

SEQ ID NO: 52757 - DNA, 21 bp, Homo sapiens
cccctcaatgtaggcttctgt

SEQ ID NO: 52758 - DNA, 16 bp, Homo sapiens
caggcaaggggcacga

SEQ ID NO: 52759 - DNA, 24 bp, Homo sapiens
ctgaggggcttatcttgccatttc

SEQ ID NO: 52760 - DNA, 19 bp, Homo sapiens
ctggctccactaccattca

SEQ ID NO: 52761 - DNA, 16 bp, Homo sapiens
aaatggggaaggagag

SEQ ID NO: 52762 - DNA, 17 bp, Homo sapiens
gtctgttcaaactcctg

SEQ ID NO: 52763 - DNA, 20 bp, Homo sapiens
agaatctctggaattgagat

SEQ ID NO: 52764 - DNA, 24 bp, Homo sapiens
ctgaatactttttatcgcagttgg

SEQ ID NO: 52765 - DNA, 18 bp, Homo sapiens
gacatctgacctgacatt

SEQ ID NO: 52766 - DNA, 23 bp, Homo sapiens
ctgtaagtgttagctattgttaa

SEQ ID NO: 52767 - DNA, 18 bp, Homo sapiens
ttttcctccaggcccaga

SEQ ID NO: 52768 - DNA, 22 bp, Homo sapiens
atctggcctgctccgccttgcg

SEQ ID NO: 52769 - DNA, 16 bp, Homo sapiens
cctgtggatgtccagc

SEQ ID NO: 52770 - DNA, 20 bp, Homo sapiens
tgtgacaaacgttcataggc

SEQ ID NO: 52771 - DNA, 20 bp, Homo sapiens
gctcataacaaggtattgat

SEQ ID NO: 52772 - DNA, 23 bp, Homo sapiens
tttcggcaacagcccctgctctg

SEQ ID NO: 52773 - DNA, 24 bp, Homo sapiens
agtgaatattgcacacaaatcttc

SEQ ID NO: 52774 - DNA, 16 bp, Homo sapiens
aggcttgtatgtgggg

SEQ ID NO: 52775 - DNA, 22 bp, Homo sapiens
gaaagaagggtactagtccaga

SEQ ID NO: 52776 - DNA, 17 bp, Homo sapiens
gttgttgcttgttttcc

SEQ ID NO: 52777 - DNA, 24 bp, Homo sapiens
aactcctgctctcaggcccaaccc

SEQ ID NO: 52778 - DNA, 16 bp, Homo sapiens
gggccacattgggaag

SEQ ID NO: 52779 - DNA, 16 bp, Homo sapiens
ttgtgttgtccacata

SEQ ID NO: 52780 - DNA, 16 bp, Homo sapiens
gaggcaggaaggtctg

SEQ ID NO: 52781 - DNA, 16 bp, Homo sapiens
agggtccctctcaacc

SEQ ID NO: 52782 - DNA, 20 bp, Homo sapiens
ctgaaccgtatatcctatgg

SEQ ID NO: 52783 - DNA, 23 bp, Homo sapiens
catttactaactggaaatgtctg

SEQ ID NO: 52784 - DNA, 24 bp, Homo sapiens
tgaaggagctggaactggtcacca

SEQ ID NO: 52785 - DNA, 21 bp, Homo sapiens
tcctttggttagcaaggagag

SEQ ID NO: 52786 - DNA, 19 bp, Homo sapiens
ttcagccagacacaatcat

SEQ ID NO: 52787 - DNA, 20 bp, Homo sapiens
gtagaaatccttccagtcag

SEQ ID NO: 52788 - DNA, 16 bp, Homo sapiens
cccaggaatctcctca

SEQ ID NO: 52789 - DNA, 23 bp, Homo sapiens
gagagaagggcccggaagccggc

SEQ ID NO: 52790 - DNA, 16 bp, Homo sapiens
tgctgctggggaacag

SEQ ID NO: 52791 - DNA, 23 bp, Homo sapiens
aatatcctctcgccacacctgta

SEQ ID NO: 52792 - DNA, 17 bp, Homo sapiens
aagggctatgtggtgtg

SEQ ID NO: 52793 - DNA, 23 bp, Homo sapiens
ccgaccattaaagcccaatccaa

SEQ ID NO: 52794 - DNA, 20 bp, Homo sapiens
taagcagacacttactagac

SEQ ID NO: 52795 - DNA, 18 bp, Homo sapiens
cagagggaggcactgctg

SEQ ID NO: 52796 - DNA, 18 bp, Homo sapiens
tggccaggctcaacccct

SEQ ID NO: 52797 - DNA, 17 bp, Homo sapiens
attatcaaacacctcct

SEQ ID NO: 52798 - DNA, 17 bp, Homo sapiens
ttggagtggttggtttt

SEQ ID NO: 52799 - DNA, 21 bp, Homo sapiens
gtctttcccctgggctgaaaa

SEQ ID NO: 52800 - DNA, 16 bp, Homo sapiens
gtgaggacttcaagca

SEQ ID NO: 52801 - DNA, 19 bp, Homo sapiens
caagggaaccctgcaggga

SEQ ID NO: 52802 - DNA, 19 bp, Homo sapiens
tttctcttgggattcagga

SEQ ID NO: 52803 - DNA, 16 bp, Homo sapiens
ccacaggaggaccccc

SEQ ID NO: 52804 - DNA, 22 bp, Homo sapiens
atagggggccaggtgactaatc

SEQ ID NO: 52805 - DNA, 16 bp, Homo sapiens
gaaggactccagctgc

SEQ ID NO: 52806 - DNA, 16 bp, Homo sapiens
ggcttctgagatcctt

SEQ ID NO: 52807 - DNA, 23 bp, Homo sapiens
aaagtcctggatctctgggttgg

SEQ ID NO: 52808 - DNA, 17 bp, Homo sapiens
catcttggaggagatga

SEQ ID NO: 52809 - DNA, 19 bp, Homo sapiens
aatgtgagcccatacagac

SEQ ID NO: 52810 - DNA, 22 bp, Homo sapiens
tacctatgagttcatgagcaca

SEQ ID NO: 52811 - DNA, 22 bp, Homo sapiens
gtgctaacttctattctgagta

SEQ ID NO: 52812 - DNA, 16 bp, Homo sapiens
ttgctactctgggtct

SEQ ID NO: 52813 - DNA, 23 bp, Homo sapiens
accagcaggtgaaatcaacctca

SEQ ID NO: 52814 - DNA, 17 bp, Homo sapiens
gtgacactcatatgggg

SEQ ID NO: 52815 - DNA, 22 bp, Homo sapiens
ctgacttctaagaagaatgtgc

SEQ ID NO: 52816 - DNA, 17 bp, Homo sapiens
cacttgtcttgctttgt

SEQ ID NO: 52817 - DNA, 16 bp, Homo sapiens
caaaggtgccagaggg

SEQ ID NO: 52818 - DNA, 17 bp, Homo sapiens
gtgtctgtgagtgccta

SEQ ID NO: 52819 - DNA, 24 bp, Homo sapiens
ccaaagtgagttcttcctatctaa

SEQ ID NO: 52820 - DNA, 19 bp, Homo sapiens
gggtatccgtgtgcttgca

SEQ ID NO: 52821 - DNA, 21 bp, Homo sapiens
ttctaaggaccaaggctggga

SEQ ID NO: 52822 - DNA, 16 bp, Homo sapiens
ccacatctacacagca

SEQ ID NO: 52823 - DNA, 23 bp, Homo sapiens
agcataacaagcagagtccctct

SEQ ID NO: 52824 - DNA, 16 bp, Homo sapiens
aggaagtgtgaacctg

SEQ ID NO: 52825 - DNA, 16 bp, Homo sapiens
tggccaggagtgtcaa

SEQ ID NO: 52826 - DNA, 18 bp, Homo sapiens
ggttttctgatatctggg

SEQ ID NO: 52827 - DNA, 19 bp, Homo sapiens
gacctccttcacatcctgt

SEQ ID NO: 52828 - DNA, 21 bp, Homo sapiens
acttctgggaaattatgatca

SEQ ID NO: 52829 - DNA, 19 bp, Homo sapiens
cccatatgagagcttcact

SEQ ID NO: 52830 - DNA, 20 bp, Homo sapiens
ttcccctatattggtctaaa

SEQ ID NO: 52831 - DNA, 18 bp, Homo sapiens
gtcatggcgtacaataaa

SEQ ID NO: 52832 - DNA, 24 bp, Homo sapiens
ggccacagccagattcagacattg

SEQ ID NO: 52833 - DNA, 21 bp, Homo sapiens
gtttgaggctgaaaccggaga

SEQ ID NO: 52834 - DNA, 23 bp, Homo sapiens
tctcatgagctctggaaaagtga

SEQ ID NO: 52835 - DNA, 16 bp, Homo sapiens
gcaggtcaagcctgta

SEQ ID NO: 52836 - DNA, 16 bp, Homo sapiens
ggaacacgttcaattt

SEQ ID NO: 52837 - DNA, 24 bp, Homo sapiens
gacttcaggtgatccgcccacctc

SEQ ID NO: 52838 - DNA, 18 bp, Homo sapiens
ggatacatctcgccatta

SEQ ID NO: 52839 - DNA, 24 bp, Homo sapiens
cccagtccatacattccctctcta

SEQ ID NO: 52840 - DNA, 20 bp, Homo sapiens
agttctttatcaacaagact

SEQ ID NO: 52841 - DNA, 16 bp, Homo sapiens
atcaccctagaactct

SEQ ID NO: 52842 - DNA, 22 bp, Homo sapiens
atctccctgtgcccccatagta

SEQ ID NO: 52843 - DNA, 22 bp, Homo sapiens
tccaggatgctagagagtggca

SEQ ID NO: 52844 - DNA, 18 bp, Homo sapiens
ctgagaacagtcacagat

SEQ ID NO: 52845 - DNA, 23 bp, Homo sapiens
gaggaaagcggggaaagtcctca

SEQ ID NO: 52846 - DNA, 21 bp, Homo sapiens
gcttgtttggaaatctgctga

SEQ ID NO: 52847 - DNA, 20 bp, Homo sapiens
cctcttccatttctactggg

SEQ ID NO: 52848 - DNA, 17 bp, Homo sapiens
cactccctgagtcttta

SEQ ID NO: 52849 - DNA, 22 bp, Homo sapiens
tctaggattctcaatattggga

SEQ ID NO: 52850 - DNA, 18 bp, Homo sapiens
ccaaatgttatgctctgc

SEQ ID NO: 52851 - DNA, 17 bp, Homo sapiens
gtccacacttactgtgc

SEQ ID NO: 52852 - DNA, 18 bp, Homo sapiens
tatccccttttcatcagt

SEQ ID NO: 52853 - DNA, 20 bp, Homo sapiens
tgaccataaatgatgaccag

SEQ ID NO: 52854 - DNA, 18 bp, Homo sapiens
tgcagtgagcagggactg

SEQ ID NO: 52855 - DNA, 19 bp, Homo sapiens
tctgagaatagaaaacctt

SEQ ID NO: 52856 - DNA, 19 bp, Homo sapiens
tctctctctcttttaatca

SEQ ID NO: 52857 - DNA, 24 bp, Homo sapiens
tttaaaatatatggtcttactgtt

SEQ ID NO: 52858 - DNA, 20 bp, Homo sapiens
cagagaggagtaaacactgg

SEQ ID NO: 52859 - DNA, 17 bp, Homo sapiens
ccatcctacagctgtct

SEQ ID NO: 52860 - DNA, 21 bp, Homo sapiens
ttctgcataggaaaaactcat

SEQ ID NO: 52861 - DNA, 21 bp, Homo sapiens
agtcacacctggatgtaacca

SEQ ID NO: 52862 - DNA, 18 bp, Homo sapiens
cccagggtcaagggggac

SEQ ID NO: 52863 - DNA, 16 bp, Homo sapiens
ttcctagggaaacggc

SEQ ID NO: 52864 - DNA, 24 bp, Homo sapiens
ttacagcttcagacaagtgtttgc

SEQ ID NO: 52865 - DNA, 16 bp, Homo sapiens
ggtcttggttttgcct

SEQ ID NO: 52866 - DNA, 24 bp, Homo sapiens
ttctccactgactccaaagtagga

SEQ ID NO: 52867 - DNA, 17 bp, Homo sapiens
ggtaaatgccatgtcct

SEQ ID NO: 52868 - DNA, 20 bp, Homo sapiens
attcttctccagtgtatgcc

SEQ ID NO: 52869 - DNA, 16 bp, Homo sapiens
gaggggcacaacgaga

SEQ ID NO: 52870 - DNA, 22 bp, Homo sapiens
atctttggatgaaaacctaatg

SEQ ID NO: 52871 - DNA, 22 bp, Homo sapiens
gaggccttccagcgctatcgtg

SEQ ID NO: 52872 - DNA, 24 bp, Homo sapiens
gctggacaaaagcccatagggcgt

SEQ ID NO: 52873 - DNA, 24 bp, Homo sapiens
ttcaattccagtacgatgtcagct

SEQ ID NO: 52874 - DNA, 20 bp, Homo sapiens
tcagggcccaggaacagggc

SEQ ID NO: 52875 - DNA, 16 bp, Homo sapiens
gcctcagaacttccaa

SEQ ID NO: 52876 - DNA, 24 bp, Homo sapiens
caagacccggaaccgaaaagcagg

SEQ ID NO: 52877 - DNA, 19 bp, Homo sapiens
ctttggttttcgctgctgc

SEQ ID NO: 52878 - DNA, 24 bp, Homo sapiens
ctgagcagccgggctgcgcggccg

SEQ ID NO: 52879 - DNA, 16 bp, Homo sapiens
tctcacgtggccagcc

SEQ ID NO: 52880 - DNA, 24 bp, Homo sapiens
gacgtagcgctggtcggaggtttg

SEQ ID NO: 52881 - DNA, 21 bp, Homo sapiens
cagagccgcctctggtcacgt

SEQ ID NO: 52882 - DNA, 24 bp, Homo sapiens
ctgcgaacgctgccgccagcagca

SEQ ID NO: 52883 - DNA, 16 bp, Homo sapiens
tcaggtccaggccgga

SEQ ID NO: 52884 - DNA, 23 bp, Homo sapiens
aaaagtcaggtaggagcctccgg

SEQ ID NO: 52885 - DNA, 24 bp, Homo sapiens
cgagaagacgccgtagggcaggtt

SEQ ID NO: 52886 - DNA, 22 bp, Homo sapiens
caggggggcggggccgggcctg

SEQ ID NO: 52887 - DNA, 16 bp, Homo sapiens
ctccctccccgcgccc

SEQ ID NO: 52888 - DNA, 21 bp, Homo sapiens
taggcccgcagccgtgccggg

SEQ ID NO: 52889 - DNA, 18 bp, Homo sapiens
ctccatcccgcccctcat

SEQ ID NO: 52890 - DNA, 16 bp, Homo sapiens
acttccccatccacaa

SEQ ID NO: 52891 - DNA, 18 bp, Homo sapiens
gcgggactcgagcccata

SEQ ID NO: 52892 - DNA, 20 bp, Homo sapiens
tccaggatctggtcgccaat

SEQ ID NO: 52893 - DNA, 20 bp, Homo sapiens
ctgcatacagggccacctaa

SEQ ID NO: 52894 - DNA, 16 bp, Homo sapiens
catcctggtgtttgga

SEQ ID NO: 52895 - DNA, 21 bp, Homo sapiens
taaatgagccaagcccagcca

SEQ ID NO: 52896 - DNA, 16 bp, Homo sapiens
aagtgccactgaggtc

SEQ ID NO: 52897 - DNA, 18 bp, Homo sapiens
caagaccgaggataggtg

SEQ ID NO: 52898 - DNA, 19 bp, Homo sapiens
ttcgatggcattacctcta

SEQ ID NO: 52899 - DNA, 19 bp, Homo sapiens
cacctctttactggtcctg

SEQ ID NO: 52900 - DNA, 19 bp, Homo sapiens
ctaccagtttgtctgtctc

SEQ ID NO: 52901 - DNA, 22 bp, Homo sapiens
caggttgatgaataaatgacaa

SEQ ID NO: 52902 - DNA, 16 bp, Homo sapiens
cactctcgcctccttc

SEQ ID NO: 52903 - DNA, 23 bp, Homo sapiens
gagagaagtggcaagggctggca

SEQ ID NO: 52904 - DNA, 16 bp, Homo sapiens
tccgaagttcggtgtc

SEQ ID NO: 52905 - DNA, 21 bp, Homo sapiens
ggttttcctgtacgtgatctt

SEQ ID NO: 52906 - DNA, 18 bp, Homo sapiens
ttcacctcccctgctgca

SEQ ID NO: 52907 - DNA, 17 bp, Homo sapiens
ctgggtcaggctgcctg

SEQ ID NO: 52908 - DNA, 19 bp, Homo sapiens
tctgacttggccacactaa

SEQ ID NO: 52909 - DNA, 23 bp, Homo sapiens
gagccaagccaggctcagagatg

SEQ ID NO: 52910 - DNA, 17 bp, Homo sapiens
gtgaaaggttcagcata

SEQ ID NO: 52911 - DNA, 21 bp, Homo sapiens
gtgaagagactgcactcacct

SEQ ID NO: 52912 - DNA, 18 bp, Homo sapiens
tgtggataatcttgggga

SEQ ID NO: 52913 - DNA, 19 bp, Homo sapiens
cagaaccaaagcacctggc

SEQ ID NO: 52914 - DNA, 23 bp, Homo sapiens
tacttgactttgaagcccctggt

SEQ ID NO: 52915 - DNA, 16 bp, Homo sapiens
cagagcccctcctcca

SEQ ID NO: 52916 - DNA, 18 bp, Homo sapiens
caccttccagccaccata

SEQ ID NO: 52917 - DNA, 23 bp, Homo sapiens
atattttatattgcatttggtgc

SEQ ID NO: 52918 - DNA, 22 bp, Homo sapiens
gaacatgattccgacgttggta

SEQ ID NO: 52919 - DNA, 20 bp, Homo sapiens
tgtgtaaacagtattgtgtg

SEQ ID NO: 52920 - DNA, 16 bp, Homo sapiens
atttggcccagttcat

SEQ ID NO: 52921 - DNA, 16 bp, Homo sapiens
catgtgggttgctgat

SEQ ID NO: 52922 - DNA, 17 bp, Homo sapiens
acttggcagctcctgag

SEQ ID NO: 52923 - DNA, 20 bp, Homo sapiens
cttctattcctctcggcagc

SEQ ID NO: 52924 - DNA, 17 bp, Homo sapiens
ttccagaggttgcaaca

SEQ ID NO: 52925 - DNA, 24 bp, Homo sapiens
gagaatgcgttgatgccaaattgg

SEQ ID NO: 52926 - DNA, 23 bp, Homo sapiens
atgtatgtaccacagtttgttta

SEQ ID NO: 52927 - DNA, 16 bp, Homo sapiens
acagaggaggcacggc

SEQ ID NO: 52928 - DNA, 24 bp, Homo sapiens
ctgttgatttttgagccatgtgta

SEQ ID NO: 52929 - DNA, 17 bp, Homo sapiens
cacagtcatcaggtttc

SEQ ID NO: 52930 - DNA, 24 bp, Homo sapiens
aaagttaattgacaacatataaca

SEQ ID NO: 52931 - DNA, 16 bp, Homo sapiens
aactctctgtgtggga

SEQ ID NO: 52932 - DNA, 16 bp, Homo sapiens
cagtgggctaccatgg

SEQ ID NO: 52933 - DNA, 24 bp, Homo sapiens
accatatacgggaggcttagctgg

SEQ ID NO: 52934 - DNA, 22 bp, Homo sapiens
aatccgaaggcccatgggacag

SEQ ID NO: 52935 - DNA, 18 bp, Homo sapiens
atcaagctcacttaccat

SEQ ID NO: 52936 - DNA, 16 bp, Homo sapiens
ccagctctctgttccc

SEQ ID NO: 52937 - DNA, 24 bp, Homo sapiens
catggtgcggggagccatcccaaa

SEQ ID NO: 52938 - DNA, 21 bp, Homo sapiens
ttttttttttttttctggtgt

SEQ ID NO: 52939 - DNA, 16 bp, Homo sapiens
aggtggggacacagag

SEQ ID NO: 52940 - DNA, 16 bp, Homo sapiens
acatggagctggaaat

SEQ ID NO: 52941 - DNA, 19 bp, Homo sapiens
ctgacctctgacttagaaa

SEQ ID NO: 52942 - DNA, 16 bp, Homo sapiens
cttggaaatggggatc

SEQ ID NO: 52943 - DNA, 18 bp, Homo sapiens
tggagtttggaaatacct

SEQ ID NO: 52944 - DNA, 19 bp, Homo sapiens
cagagctccagtaattacc

SEQ ID NO: 52945 - DNA, 24 bp, Homo sapiens
gcagatcagctccagattctaatg

SEQ ID NO: 52946 - DNA, 20 bp, Homo sapiens
gatcttcagcttctatgaaa

SEQ ID NO: 52947 - DNA, 22 bp, Homo sapiens
ctggaaacagattgggagagcc

SEQ ID NO: 52948 - DNA, 18 bp, Homo sapiens
tttgatacccagaccccc

SEQ ID NO: 52949 - DNA, 21 bp, Homo sapiens
gtccttatgaacgactggagt

SEQ ID NO: 52950 - DNA, 18 bp, Homo sapiens
tgaatgctcttgcccctt

SEQ ID NO: 52951 - DNA, 19 bp, Homo sapiens
aaaactcttcccaaggaat

SEQ ID NO: 52952 - DNA, 22 bp, Homo sapiens
atggcagtgctaggtgtctctg

SEQ ID NO: 52953 - DNA, 16 bp, Homo sapiens
aaagggcatgagagca

SEQ ID NO: 52954 - DNA, 19 bp, Homo sapiens
ccctgatcagcctttgtaa

SEQ ID NO: 52955 - DNA, 23 bp, Homo sapiens
cagaggcagcagggctgggtttg

SEQ ID NO: 52956 - DNA, 22 bp, Homo sapiens
gggagtatgtccctctcgggcc

SEQ ID NO: 52957 - DNA, 16 bp, Homo sapiens
tcctgatggtctgcat

SEQ ID NO: 52958 - DNA, 24 bp, Homo sapiens
cgtgggtggtgcccatggatgctc

SEQ ID NO: 52959 - DNA, 20 bp, Homo sapiens
ggaagtaatcgtggccagga

SEQ ID NO: 52960 - DNA, 24 bp, Homo sapiens
cctactgctatccagggacacagt

SEQ ID NO: 52961 - DNA, 22 bp, Homo sapiens
gttgatgtcaaatgtgtagggc

SEQ ID NO: 52962 - DNA, 16 bp, Homo sapiens
cctaggggagcaggtg

SEQ ID NO: 52963 - DNA, 23 bp, Homo sapiens
cagagctcctggccatgtcagtc

SEQ ID NO: 52964 - DNA, 24 bp, Homo sapiens
agctcagcccacctgccagtgacc

SEQ ID NO: 52965 - DNA, 20 bp, Homo sapiens
gtgccctcacccttgccaaa

SEQ ID NO: 52966 - DNA, 16 bp, Homo sapiens
tatctgtgccatgacg

SEQ ID NO: 52967 - DNA, 16 bp, Homo sapiens
ccctcctctttccttt

SEQ ID NO: 52968 - DNA, 17 bp, Homo sapiens
ttggacttgcatatggt

SEQ ID NO: 52969 - DNA, 22 bp, Homo sapiens
agactctaagtgaaatcatgtt

SEQ ID NO: 52970 - DNA, 17 bp, Homo sapiens
agtctctctttccctca

SEQ ID NO: 52971 - DNA, 23 bp, Homo sapiens
tttattttcctccctgatgcatg

SEQ ID NO: 52972 - DNA, 16 bp, Homo sapiens
aggctgacccatcatc

SEQ ID NO: 52973 - DNA, 19 bp, Homo sapiens
atgagccaggcggctacca

SEQ ID NO: 52974 - DNA, 16 bp, Homo sapiens
ctctgtgaccccatgg

SEQ ID NO: 52975 - DNA, 22 bp, Homo sapiens
aggacaatgtgtccttactata

SEQ ID NO: 52976 - DNA, 24 bp, Homo sapiens
caggttgcagccgttgacagagtg

SEQ ID NO: 52977 - DNA, 24 bp, Homo sapiens
ggggaaaggccagggaaggcggtc

SEQ ID NO: 52978 - DNA, 16 bp, Homo sapiens
agatactcaccggccc

SEQ ID NO: 52979 - DNA, 24 bp, Homo sapiens
taggctaagcctgccgctgctcat

SEQ ID NO: 52980 - DNA, 16 bp, Homo sapiens
cccttggggctgtgtg

SEQ ID NO: 52981 - DNA, 20 bp, Homo sapiens
ggacgatgctgcagcagctc

SEQ ID NO: 52982 - DNA, 23 bp, Homo sapiens
gaagacagagttgtgagatacac

SEQ ID NO: 52983 - DNA, 21 bp, Homo sapiens
gacctcctggcttctgggacc

SEQ ID NO: 52984 - DNA, 17 bp, Homo sapiens
aggcatctctgcagtga

SEQ ID NO: 52985 - DNA, 23 bp, Homo sapiens
aggtctatgggcttcgttccctt

SEQ ID NO: 52986 - DNA, 17 bp, Homo sapiens
ccctgccacttctcggg

SEQ ID NO: 52987 - DNA, 23 bp, Homo sapiens
acctgttatgatgacttcatccc

SEQ ID NO: 52988 - DNA, 22 bp, Homo sapiens
ccaaggcataaattcatgttat

SEQ ID NO: 52989 - DNA, 16 bp, Homo sapiens
agtgcatggcgggcaa

SEQ ID NO: 52990 - DNA, 16 bp, Homo sapiens
atgttggaactgtcgt

SEQ ID NO: 52991 - DNA, 16 bp, Homo sapiens
gtcaggatgcgtgaga

SEQ ID NO: 52992 - DNA, 23 bp, Homo sapiens
tcagaccaggaagtttctgctgg

SEQ ID NO: 52993 - DNA, 19 bp, Homo sapiens
cagcttccgtggagggtta

SEQ ID NO: 52994 - DNA, 16 bp, Homo sapiens
cagcacactggccaaa

SEQ ID NO: 52995 - DNA, 24 bp, Homo sapiens
atggcaccttcctgcctcgggcca

SEQ ID NO: 52996 - DNA, 24 bp, Homo sapiens
ttgagccctttgtttccagaagag

SEQ ID NO: 52997 - DNA, 23 bp, Homo sapiens
gttggttccggtgagcccagcaa

SEQ ID NO: 52998 - DNA, 18 bp, Homo sapiens
caggcctacagcccgagg

SEQ ID NO: 52999 - DNA, 16 bp, Homo sapiens
ggggatggttaccgca

SEQ ID NO: 53000 - DNA, 22 bp, Homo sapiens
cagctgcatctgcggcagtgca

SEQ ID NO: 53001 - DNA, 22 bp, Homo sapiens
ccgctttcccaggggccccctg

SEQ ID NO: 53002 - DNA, 19 bp, Homo sapiens
cagccctgggcgaagatcc

SEQ ID NO: 53003 - DNA, 23 bp, Homo sapiens
ctgcaacctggcggggggccacc

SEQ ID NO: 53004 - DNA, 17 bp, Homo sapiens
cgacgaatcggaggagg

SEQ ID NO: 53005 - DNA, 21 bp, Homo sapiens
gtggccaacccagcctcccag

SEQ ID NO: 53006 - DNA, 24 bp, Homo sapiens
ctcgggagctgcagctcggaggct

SEQ ID NO: 53007 - DNA, 24 bp, Homo sapiens
gagcctcctcggccacgaccactg

SEQ ID NO: 53008 - DNA, 16 bp, Homo sapiens
cccgctggtccggtgc

SEQ ID NO: 53009 - DNA, 22 bp, Homo sapiens
gactccacgtccccggcctcct

SEQ ID NO: 53010 - DNA, 19 bp, Homo sapiens
cagggcgcgggccagcgtg

SEQ ID NO: 53011 - DNA, 23 bp, Homo sapiens
cggactcccgcagccacagcctc

SEQ ID NO: 53012 - DNA, 23 bp, Homo sapiens
ctcgatcttggtcaggctctggc

SEQ ID NO: 53013 - DNA, 22 bp, Homo sapiens
gacgacgcccagacgagcgcgc

SEQ ID NO: 53014 - DNA, 21 bp, Homo sapiens
ctcgctgagacccagcacggc

SEQ ID NO: 53015 - DNA, 23 bp, Homo sapiens
gagcgggagaaactgcgcatgcg

SEQ ID NO: 53016 - DNA, 23 bp, Homo sapiens
cgggcagccccaaggggaccccg

SEQ ID NO: 53017 - DNA, 23 bp, Homo sapiens
ctccctccttggcgccggccggc

SEQ ID NO: 53018 - DNA, 23 bp, Homo sapiens
ttgcccctgcccctccgcctgcg

SEQ ID NO: 53019 - DNA, 24 bp, Homo sapiens
atccgctacatcggccacctatcg

SEQ ID NO: 53020 - DNA, 21 bp, Homo sapiens
ttgcccctgtccttgcccctg

SEQ ID NO: 53021 - DNA, 18 bp, Homo sapiens
ggcgcaggcagcgcgggg

SEQ ID NO: 53022 - DNA, 17 bp, Homo sapiens
atccccaggacgcctcg

SEQ ID NO: 53023 - DNA, 23 bp, Homo sapiens
ccgtggccccgcagaggcgcaga

SEQ ID NO: 53024 - DNA, 16 bp, Homo sapiens
acccccctccccaggc

SEQ ID NO: 53025 - DNA, 23 bp, Homo sapiens
ggggcaagggcaggggcaaggac

SEQ ID NO: 53026 - DNA, 22 bp, Homo sapiens
ggacgaatacgggggcgactgt

SEQ ID NO: 53027 - DNA, 22 bp, Homo sapiens
cgggcctggtctccgccgtcct

SEQ ID NO: 53028 - DNA, 24 bp, Homo sapiens
acgactgcgtccagggacagcctt

SEQ ID NO: 53029 - DNA, 24 bp, Homo sapiens
gagcccaagccgcacccgagcgcc

SEQ ID NO: 53030 - DNA, 24 bp, Homo sapiens
cggccagctccaaagttgctgggg

SEQ ID NO: 53031 - DNA, 16 bp, Homo sapiens
cttactgccccaagat

SEQ ID NO: 53032 - DNA, 24 bp, Homo sapiens
tctctgcagactggaggctgggga

SEQ ID NO: 53033 - DNA, 16 bp, Homo sapiens
tggacgccaccccaag

SEQ ID NO: 53034 - DNA, 19 bp, Homo sapiens
cgttagataatcctggagt

SEQ ID NO: 53035 - DNA, 23 bp, Homo sapiens
cggaacccaccagtgccctggac

SEQ ID NO: 53036 - DNA, 20 bp, Homo sapiens
cttaacttcccagggtccca

SEQ ID NO: 53037 - DNA, 21 bp, Homo sapiens
gtctcccgagccagtcctctt

SEQ ID NO: 53038 - DNA, 17 bp, Homo sapiens
gggcaggagagatggag

SEQ ID NO: 53039 - DNA, 24 bp, Homo sapiens
tgtccggatgctgccagccatacc

SEQ ID NO: 53040 - DNA, 16 bp, Homo sapiens
ctgtggctccagcacc

SEQ ID NO: 53041 - DNA, 23 bp, Homo sapiens
tatcagggagtagcccactaacc

SEQ ID NO: 53042 - DNA, 16 bp, Homo sapiens
gcttcactgagctgga

SEQ ID NO: 53043 - DNA, 23 bp, Homo sapiens
ctccagagccctgtctgtcgctg

SEQ ID NO: 53044 - DNA, 20 bp, Homo sapiens
agatcttcttgccaaagttc

SEQ ID NO: 53045 - DNA, 21 bp, Homo sapiens
gcctcagacccccgggaggtg

SEQ ID NO: 53046 - DNA, 23 bp, Homo sapiens
tgattcctggatggaaagaggga

SEQ ID NO: 53047 - DNA, 19 bp, Homo sapiens
cagggaccgggcgccgcct

SEQ ID NO: 53048 - DNA, 19 bp, Homo sapiens
acatgaaaagccactaatt

SEQ ID NO: 53049 - DNA, 17 bp, Homo sapiens
gttcagtggctgccctg

SEQ ID NO: 53050 - DNA, 16 bp, Homo sapiens
aaacactgcttccctg

SEQ ID NO: 53051 - DNA, 22 bp, Homo sapiens
aaacagtctattgaccaaaaaa

SEQ ID NO: 53052 - DNA, 17 bp, Homo sapiens
ggctgagtgacgttcta

SEQ ID NO: 53053 - DNA, 17 bp, Homo sapiens
atgcctgtttgaatcaa

SEQ ID NO: 53054 - DNA, 18 bp, Homo sapiens
cagtcaaaacacttacga

SEQ ID NO: 53055 - DNA, 21 bp, Homo sapiens
tgcaaagtacctaactccact

SEQ ID NO: 53056 - DNA, 23 bp, Homo sapiens
tttaaagagaagatatctcatgt

SEQ ID NO: 53057 - DNA, 19 bp, Homo sapiens
aataatctacaggagcaac

SEQ ID NO: 53058 - DNA, 20 bp, Homo sapiens
agtgggaaaatcaatgaatc

SEQ ID NO: 53059 - DNA, 20 bp, Homo sapiens
tctttcaaaaccaaaatttt

SEQ ID NO: 53060 - DNA, 24 bp, Homo sapiens
caatttaagttacctgataaattt

SEQ ID NO: 53061 - DNA, 19 bp, Homo sapiens
tagttacagatacattgtt

SEQ ID NO: 53062 - DNA, 19 bp, Homo sapiens
acaattaatgtaacctgtg

SEQ ID NO: 53063 - DNA, 19 bp, Homo sapiens
aggaaaagtcttcggtaac

SEQ ID NO: 53064 - DNA, 21 bp, Homo sapiens
tcttaaaatggatccatctaa

SEQ ID NO: 53065 - DNA, 16 bp, Homo sapiens
agaagtccttgaccct

SEQ ID NO: 53066 - DNA, 21 bp, Homo sapiens
aaaaagaaaacatcttcagat

SEQ ID NO: 53067 - DNA, 19 bp, Homo sapiens
gcaagaaatctggcaataa

SEQ ID NO: 53068 - DNA, 23 bp, Homo sapiens
tattaagaaataaagatgttaat

SEQ ID NO: 53069 - DNA, 20 bp, Homo sapiens
ccgggatttctttacagttg

SEQ ID NO: 53070 - DNA, 18 bp, Homo sapiens
cccaacaccacaaatcag

SEQ ID NO: 53071 - DNA, 23 bp, Homo sapiens
caatcattgatggtacttaaaga

SEQ ID NO: 53072 - DNA, 19 bp, Homo sapiens
aacacagagaggtggatca

SEQ ID NO: 53073 - DNA, 21 bp, Homo sapiens
gggtggtgtaacaaatgattt

SEQ ID NO: 53074 - DNA, 17 bp, Homo sapiens
atgcactacccaaaaca

SEQ ID NO: 53075 - DNA, 19 bp, Homo sapiens
ttctcttacccttttttga

SEQ ID NO: 53076 - DNA, 19 bp, Homo sapiens
atttagttcttcaccagat

SEQ ID NO: 53077 - DNA, 18 bp, Homo sapiens
ggtggaggcaaatcagtc

SEQ ID NO: 53078 - DNA, 22 bp, Homo sapiens
gactttgatacttctgagactt

SEQ ID NO: 53079 - DNA, 18 bp, Homo sapiens
aaccattctgagtcatcc

SEQ ID NO: 53080 - DNA, 20 bp, Homo sapiens
taagagtaagcactgctcag

SEQ ID NO: 53081 - DNA, 22 bp, Homo sapiens
agcatcttcatttatatgcact

SEQ ID NO: 53082 - DNA, 18 bp, Homo sapiens
acaacaaacacagtaaag

SEQ ID NO: 53083 - DNA, 22 bp, Homo sapiens
agataaaataattgttacctct

SEQ ID NO: 53084 - DNA, 17 bp, Homo sapiens
actgaggaacagaagga

SEQ ID NO: 53085 - DNA, 16 bp, Homo sapiens
ttcccaatggctagct

SEQ ID NO: 53086 - DNA, 20 bp, Homo sapiens
tcgatgatggccccattgct

SEQ ID NO: 53087 - DNA, 21 bp, Homo sapiens
cagattattcaaaaagcacca

SEQ ID NO: 53088 - DNA, 23 bp, Homo sapiens
ctctgaaaactcatttggaagat

SEQ ID NO: 53089 - DNA, 18 bp, Homo sapiens
gaataaataagccagcat

SEQ ID NO: 53090 - DNA, 21 bp, Homo sapiens
cagttgaatgtaattcagctt

SEQ ID NO: 53091 - DNA, 17 bp, Homo sapiens
tgtttgtgacttgccag

SEQ ID NO: 53092 - DNA, 18 bp, Homo sapiens
gaaggtggaacaaaatcc

SEQ ID NO: 53093 - DNA, 21 bp, Homo sapiens
tcattagtggttaacaaatct

SEQ ID NO: 53094 - DNA, 20 bp, Homo sapiens
tagctagtttacctaaggca

SEQ ID NO: 53095 - DNA, 18 bp, Homo sapiens
agaagaagaatttggaag

SEQ ID NO: 53096 - DNA, 25 bp, Homo sapiens
tattataaactaaattaaacaattt

SEQ ID NO: 53097 - DNA, 20 bp, Homo sapiens
tgatgatgatgattatgata

SEQ ID NO: 53098 - DNA, 21 bp, Homo sapiens
ggctttcacttgaatgtaaaa

SEQ ID NO: 53099 - DNA, 16 bp, Homo sapiens
tcctcttcaaaatgcc

SEQ ID NO: 53100 - DNA, 23 bp, Homo sapiens
accagctaaagaagttttataat

SEQ ID NO: 53101 - DNA, 17 bp, Homo sapiens
agatcttttgatgtgct

SEQ ID NO: 53102 - DNA, 19 bp, Homo sapiens
tctgatcagtggtagaaaa

SEQ ID NO: 53103 - DNA, 17 bp, Homo sapiens
gtgctggtttctggatt

SEQ ID NO: 53104 - DNA, 17 bp, Homo sapiens
gtatgattggcttaaca

SEQ ID NO: 53105 - DNA, 20 bp, Homo sapiens
cgttgttttcaaaagtaagt

SEQ ID NO: 53106 - DNA, 19 bp, Homo sapiens
cagaaaagaggatgttctt

SEQ ID NO: 53107 - DNA, 23 bp, Homo sapiens
ctacaaatctgccattttataac

SEQ ID NO: 53108 - DNA, 16 bp, Homo sapiens
tgcaggagctgaatcc

SEQ ID NO: 53109 - DNA, 19 bp, Homo sapiens
ttcaggcaaatgctggcta

SEQ ID NO: 53110 - DNA, 16 bp, Homo sapiens
tgaataagctgctgct

SEQ ID NO: 53111 - DNA, 16 bp, Homo sapiens
ctgccttggcctcccc

SEQ ID NO: 53112 - DNA, 20 bp, Homo sapiens
cacaatccaaaagtttcagt

SEQ ID NO: 53113 - DNA, 24 bp, Homo sapiens
atgcctagccaagacttttttttt

SEQ ID NO: 53114 - DNA, 16 bp, Homo sapiens
ccagaagggggaaaat

SEQ ID NO: 53115 - DNA, 17 bp, Homo sapiens
gataagtttacagcagc

SEQ ID NO: 53116 - DNA, 22 bp, Homo sapiens
cagaaagcctgaacattttgcc

SEQ ID NO: 53117 - DNA, 19 bp, Homo sapiens
ttgatactattcctgatga

SEQ ID NO: 53118 - DNA, 24 bp, Homo sapiens
tttgaaaagtaaacaaatcaaaaa

SEQ ID NO: 53119 - DNA, 21 bp, Homo sapiens
agcagcggaacataaggtatc

SEQ ID NO: 53120 - DNA, 19 bp, Homo sapiens
cgttagaagtttccttctg

SEQ ID NO: 53121 - DNA, 24 bp, Homo sapiens
aacattcgtattcatgtttttaag

SEQ ID NO: 53122 - DNA, 16 bp, Homo sapiens
tctccacaatgagcca

SEQ ID NO: 53123 - DNA, 21 bp, Homo sapiens
atttggtatgaaaactacaga

SEQ ID NO: 53124 - DNA, 17 bp, Homo sapiens
tagaattccctgtaggg

SEQ ID NO: 53125 - DNA, 19 bp, Homo sapiens
gttgttctcttttctctct

SEQ ID NO: 53126 - DNA, 16 bp, Homo sapiens
taaacagtccccagga

SEQ ID NO: 53127 - DNA, 19 bp, Homo sapiens
aaagtgatgccagtcttct

SEQ ID NO: 53128 - DNA, 18 bp, Homo sapiens
aaaggcctttcaaaaaga

SEQ ID NO: 53129 - DNA, 19 bp, Homo sapiens
ctatggagggtgattcctg

SEQ ID NO: 53130 - DNA, 16 bp, Homo sapiens
tggtgtttcagcccag

SEQ ID NO: 53131 - DNA, 20 bp, Homo sapiens
ctcaaattctgtttctcctg

SEQ ID NO: 53132 - DNA, 16 bp, Homo sapiens
agcagtgcttgtgaga

SEQ ID NO: 53133 - DNA, 16 bp, Homo sapiens
ctctgccaccaggaag

SEQ ID NO: 53134 - DNA, 17 bp, Homo sapiens
ggaaggttgggtttctc

SEQ ID NO: 53135 - DNA, 17 bp, Homo sapiens
gtaagtagcaactgggc

SEQ ID NO: 53136 - DNA, 18 bp, Homo sapiens
atgtcttcccagtcatca

SEQ ID NO: 53137 - DNA, 24 bp, Homo sapiens
aagctcttatttcccaggaaatgt

SEQ ID NO: 53138 - DNA, 20 bp, Homo sapiens
gaccttccttgatgggttga

SEQ ID NO: 53139 - DNA, 24 bp, Homo sapiens
aataaatgacttagaaagagaaac

SEQ ID NO: 53140 - DNA, 18 bp, Homo sapiens
actggaagacagtctgtc

SEQ ID NO: 53141 - DNA, 21 bp, Homo sapiens
actttgatgatgatgatgact

SEQ ID NO: 53142 - DNA, 23 bp, Homo sapiens
ttattttaaacttaccagtataa

SEQ ID NO: 53143 - DNA, 16 bp, Homo sapiens
ccacagctgcctatca

SEQ ID NO: 53144 - DNA, 22 bp, Homo sapiens
tggtttttcttatataattcct

SEQ ID NO: 53145 - DNA, 19 bp, Homo sapiens
aaagactttcctcagccaa

SEQ ID NO: 53146 - DNA, 19 bp, Homo sapiens
tcatcagtagaaatttgca

SEQ ID NO: 53147 - DNA, 18 bp, Homo sapiens
ctcagagtcaattcagaa

SEQ ID NO: 53148 - DNA, 19 bp, Homo sapiens
gtttcagatttctggatgc

SEQ ID NO: 53149 - DNA, 16 bp, Homo sapiens
agaactgtgctgcagg

SEQ ID NO: 53150 - DNA, 22 bp, Homo sapiens
atgaaaaatcttcatcatttcc

SEQ ID NO: 53151 - DNA, 19 bp, Homo sapiens
gctaaagctgtactttcac

SEQ ID NO: 53152 - DNA, 18 bp, Homo sapiens
gcagcattgatcgcctct

SEQ ID NO: 53153 - DNA, 18 bp, Homo sapiens
agacaagtcagcacaaaa

SEQ ID NO: 53154 - DNA, 20 bp, Homo sapiens
cctgccaattcacttctaaa

SEQ ID NO: 53155 - DNA, 17 bp, Homo sapiens
tttcctcatacaaagga

SEQ ID NO: 53156 - DNA, 19 bp, Homo sapiens
tgtgtaggtggtcttttta

SEQ ID NO: 53157 - DNA, 17 bp, Homo sapiens
actaatcagctagaggc

SEQ ID NO: 53158 - DNA, 17 bp, Homo sapiens
tgctttctcactatggt

SEQ ID NO: 53159 - DNA, 21 bp, Homo sapiens
tatcctgatgccgactggtat

SEQ ID NO: 53160 - DNA, 25 bp, Homo sapiens
ttgcctaaatataatagtttgagtc

SEQ ID NO: 53161 - DNA, 17 bp, Homo sapiens
ccccaggagaaacacag

SEQ ID NO: 53162 - DNA, 18 bp, Homo sapiens
atatgccttggtgtccta

SEQ ID NO: 53163 - DNA, 18 bp, Homo sapiens
aggaagtcagcttttgga

SEQ ID NO: 53164 - DNA, 16 bp, Homo sapiens
acagaacctgacagat

SEQ ID NO: 53165 - DNA, 21 bp, Homo sapiens
agaggactgaaatttaattgt

SEQ ID NO: 53166 - DNA, 16 bp, Homo sapiens
ccagctccctgcctgt

SEQ ID NO: 53167 - DNA, 18 bp, Homo sapiens
actgctgtgctttatttt

SEQ ID NO: 53168 - DNA, 16 bp, Homo sapiens
tcgtagatcaagtcca

SEQ ID NO: 53169 - DNA, 19 bp, Homo sapiens
aaatgtatgtacttacata

SEQ ID NO: 53170 - DNA, 22 bp, Homo sapiens
aatatttgtagcttctgagtca

SEQ ID NO: 53171 - DNA, 20 bp, Homo sapiens
aggtttgatatgtgactaat

SEQ ID NO: 53172 - DNA, 18 bp, Homo sapiens
accttttctggagtgaca

SEQ ID NO: 53173 - DNA, 22 bp, Homo sapiens
aatgtataaaattgaaattgtt

SEQ ID NO: 53174 - DNA, 29 bp, Homo sapiens
ttgttaaaatcttaaaaatatatgtattc

SEQ ID NO: 53175 - DNA, 19 bp, Homo sapiens
ggtgataagactgactcag

SEQ ID NO: 53176 - DNA, 19 bp, Homo sapiens
gggtttctggatgaaagtt

SEQ ID NO: 53177 - DNA, 23 bp, Homo sapiens
gacccaatcataaaacttctata

SEQ ID NO: 53178 - DNA, 17 bp, Homo sapiens
cctcggcttcccaaagt

SEQ ID NO: 53179 - DNA, 18 bp, Homo sapiens
gcttcctctcatagagat

SEQ ID NO: 53180 - DNA, 23 bp, Homo sapiens
tttaatacagcttaagttgtgat

SEQ ID NO: 53181 - DNA, 23 bp, Homo sapiens
tataaaaaacagtatttacctga

SEQ ID NO: 53182 - DNA, 22 bp, Homo sapiens
gtgtttcagtgtttttacatgt

SEQ ID NO: 53183 - DNA, 22 bp, Homo sapiens
tgtgggtttttattcagtaaat

SEQ ID NO: 53184 - DNA, 18 bp, Homo sapiens
tcatttctactctggaga

SEQ ID NO: 53185 - DNA, 21 bp, Homo sapiens
ctcaatgtattaagaactacc

SEQ ID NO: 53186 - DNA, 19 bp, Homo sapiens
gcacattgtgtcagtcagg

SEQ ID NO: 53187 - DNA, 20 bp, Homo sapiens
acatactaccaacaatatat

SEQ ID NO: 53188 - DNA, 18 bp, Homo sapiens
ttctggcgaagcatattc

SEQ ID NO: 53189 - DNA, 22 bp, Homo sapiens
ttttactgaagaataaggtagt

SEQ ID NO: 53190 - DNA, 16 bp, Homo sapiens
tctgtaccctgggatt

SEQ ID NO: 53191 - DNA, 21 bp, Homo sapiens
aggaagctccaagtagtctga

SEQ ID NO: 53192 - DNA, 16 bp, Homo sapiens
atacgtgacgtgcaac

SEQ ID NO: 53193 - DNA, 24 bp, Homo sapiens
gattttcgtcaagattacaaaaga

SEQ ID NO: 53194 - DNA, 20 bp, Homo sapiens
agcgccacaggtgattctaa

SEQ ID NO: 53195 - DNA, 24 bp, Homo sapiens
gtgatggctcttacggccacagct

SEQ ID NO: 53196 - DNA, 16 bp, Homo sapiens
ctgccatcgggttaca

SEQ ID NO: 53197 - DNA, 16 bp, Homo sapiens
cagacctcaggtgtaa

SEQ ID NO: 53198 - DNA, 17 bp, Homo sapiens
aactccacccctcatga

SEQ ID NO: 53199 - DNA, 18 bp, Homo sapiens
tttaggctttttcggtaa

SEQ ID NO: 53200 - DNA, 20 bp, Homo sapiens
tgggggttaggattttaggg

SEQ ID NO: 53201 - DNA, 17 bp, Homo sapiens
tgtactcacatgggtgg

SEQ ID NO: 53202 - DNA, 25 bp, Homo sapiens
tattttctcataataactaaatttt

SEQ ID NO: 53203 - DNA, 23 bp, Homo sapiens
tttatatatcttattgtggtact

SEQ ID NO: 53204 - DNA, 22 bp, Homo sapiens
ataatctgaaatactatgtatt

SEQ ID NO: 53205 - DNA, 20 bp, Homo sapiens
tgctctataaagagcaagtt

SEQ ID NO: 53206 - DNA, 20 bp, Homo sapiens
cctagaatggatcagaaagc

SEQ ID NO: 53207 - DNA, 16 bp, Homo sapiens
tcgcctggagaggcag

SEQ ID NO: 53208 - DNA, 24 bp, Homo sapiens
ccagcagtataagaacactacggg

SEQ ID NO: 53209 - DNA, 17 bp, Homo sapiens
gccagcatggtaagcaa

SEQ ID NO: 53210 - DNA, 21 bp, Homo sapiens
ttgtgtttttgtttatgttaa

SEQ ID NO: 53211 - DNA, 18 bp, Homo sapiens
tgacagccatcctgatta

SEQ ID NO: 53212 - DNA, 20 bp, Homo sapiens
gggataatttactgcctctc

SEQ ID NO: 53213 - DNA, 19 bp, Homo sapiens
gcatgtttggttatatgct

SEQ ID NO: 53214 - DNA, 18 bp, Homo sapiens
acagagagatgggctcgc

SEQ ID NO: 53215 - DNA, 22 bp, Homo sapiens
cagtcttattttgatgtttact

SEQ ID NO: 53216 - DNA, 17 bp, Homo sapiens
aagtgcagcagaagtgg

SEQ ID NO: 53217 - DNA, 25 bp, Homo sapiens
tttttttatgaaagaaaaagcaact

SEQ ID NO: 53218 - DNA, 19 bp, Homo sapiens
actaaatagttggaccaag

SEQ ID NO: 53219 - DNA, 18 bp, Homo sapiens
aatcacaaatcgcacgtc

SEQ ID NO: 53220 - DNA, 21 bp, Homo sapiens
agtaaaacaaatgatagagct

SEQ ID NO: 53221 - DNA, 16 bp, Homo sapiens
tccagctctgccagat

SEQ ID NO: 53222 - DNA, 21 bp, Homo sapiens
gccttatgaatctaataagct

SEQ ID NO: 53223 - DNA, 17 bp, Homo sapiens
tcagtctggtcacatca

SEQ ID NO: 53224 - DNA, 21 bp, Homo sapiens
catttggaatggggattgaca

SEQ ID NO: 53225 - DNA, 18 bp, Homo sapiens
aggctgaagatgacagaa

SEQ ID NO: 53226 - DNA, 21 bp, Homo sapiens
aatctgtggagggttactacc

SEQ ID NO: 53227 - DNA, 20 bp, Homo sapiens
gattatttaaggaaaactgg

SEQ ID NO: 53228 - DNA, 19 bp, Homo sapiens
gcctgcttttctataccta

SEQ ID NO: 53229 - DNA, 26 bp, Homo sapiens
ttttataataaaaatgaactaaaata

SEQ ID NO: 53230 - DNA, 24 bp, Homo sapiens
ttataatatagaatgccatgttga

SEQ ID NO: 53231 - DNA, 17 bp, Homo sapiens
tgtaccatgctatacaa

SEQ ID NO: 53232 - DNA, 26 bp, Homo sapiens
ttaaagttatatgaatctattctaaa

SEQ ID NO: 53233 - DNA, 17 bp, Homo sapiens
tccattttcaccaaagt

SEQ ID NO: 53234 - DNA, 24 bp, Homo sapiens
agtatgtcttactatagtcttcat

SEQ ID NO: 53235 - DNA, 20 bp, Homo sapiens
tgttttacagcaattatcac

SEQ ID NO: 53236 - DNA, 18 bp, Homo sapiens
gagaaactcacttcaata

SEQ ID NO: 53237 - DNA, 25 bp, Homo sapiens
tttttaaagtaagagaaaaaaaatt

SEQ ID NO: 53238 - DNA, 20 bp, Homo sapiens
ggagaatacagcttttggcc

SEQ ID NO: 53239 - DNA, 19 bp, Homo sapiens
ctttcccctgttaatctgt

SEQ ID NO: 53240 - DNA, 16 bp, Homo sapiens
acacccagatgtttct

SEQ ID NO: 53241 - DNA, 22 bp, Homo sapiens
agttgttctagaacttagataa

SEQ ID NO: 53242 - DNA, 21 bp, Homo sapiens
caatacttttcacatcgtcag

SEQ ID NO: 53243 - DNA, 17 bp, Homo sapiens
ttggtctggaaatgggt

SEQ ID NO: 53244 - DNA, 19 bp, Homo sapiens
ccagaaggacctacatgtt

SEQ ID NO: 53245 - DNA, 18 bp, Homo sapiens
tctaggcattgttacctt

SEQ ID NO: 53246 - DNA, 16 bp, Homo sapiens
acagatgacttaccca

SEQ ID NO: 53247 - DNA, 16 bp, Homo sapiens
agatgtgactgacgat

SEQ ID NO: 53248 - DNA, 20 bp, Homo sapiens
agtttttctatgtacttgta

SEQ ID NO: 53249 - DNA, 21 bp, Homo sapiens
tcatcacaaggaatgagaaat

SEQ ID NO: 53250 - DNA, 22 bp, Homo sapiens
ttttgttacttaaaagttttat

SEQ ID NO: 53251 - DNA, 18 bp, Homo sapiens
gctggtcgacattttctt

SEQ ID NO: 53252 - DNA, 22 bp, Homo sapiens
gaaattttagcgttctactcaa

SEQ ID NO: 53253 - DNA, 20 bp, Homo sapiens
cagatccttttccaaatata

SEQ ID NO: 53254 - DNA, 23 bp, Homo sapiens
gggtttgtgatctattccatctg

SEQ ID NO: 53255 - DNA, 17 bp, Homo sapiens
tcttgtcaagtatcagc

SEQ ID NO: 53256 - DNA, 18 bp, Homo sapiens
gagggtgatgatatacgt

SEQ ID NO: 53257 - DNA, 19 bp, Homo sapiens
cgagcatcacataagcgat

SEQ ID NO: 53258 - DNA, 20 bp, Homo sapiens
agagtgcaaaaatccagtca

SEQ ID NO: 53259 - DNA, 22 bp, Homo sapiens
ataaaataaacatgaaaaatac

SEQ ID NO: 53260 - DNA, 22 bp, Homo sapiens
acaatgccgaaagactttttaa

SEQ ID NO: 53261 - DNA, 18 bp, Homo sapiens
gcttggacaaagacacta

SEQ ID NO: 53262 - DNA, 17 bp, Homo sapiens
tgccaatgaccaggcga

SEQ ID NO: 53263 - DNA, 24 bp, Homo sapiens
ttaagaaaaacagaatatgttcgt

SEQ ID NO: 53264 - DNA, 17 bp, Homo sapiens
aatggcaatttaaaggt

SEQ ID NO: 53265 - DNA, 16 bp, Homo sapiens
agatggagaatgcaca

SEQ ID NO: 53266 - DNA, 19 bp, Homo sapiens
ctaacgctttttgtttttt

SEQ ID NO: 53267 - DNA, 16 bp, Homo sapiens
ccccccaaaaatgcaa

SEQ ID NO: 53268 - DNA, 19 bp, Homo sapiens
gcagacttctgtaagttct

SEQ ID NO: 53269 - DNA, 21 bp, Homo sapiens
agtgcacatatacccactcct

SEQ ID NO: 53270 - DNA, 19 bp, Homo sapiens
tgagagtgacggtattaaa

SEQ ID NO: 53271 - DNA, 23 bp, Homo sapiens
aaacagaaaattccagcagtgtg

SEQ ID NO: 53272 - DNA, 20 bp, Homo sapiens
cctattaatctgtgccacgt

SEQ ID NO: 53273 - DNA, 20 bp, Homo sapiens
tggttaaaaaatgtcttgga

SEQ ID NO: 53274 - DNA, 18 bp, Homo sapiens
agaaacaaaccactgaga

SEQ ID NO: 53275 - DNA, 22 bp, Homo sapiens
agtttttggtgtccattacttc

SEQ ID NO: 53276 - DNA, 16 bp, Homo sapiens
gcactccagcccgggt

SEQ ID NO: 53277 - DNA, 16 bp, Homo sapiens
tgctgcctctgaggtg

SEQ ID NO: 53278 - DNA, 18 bp, Homo sapiens
caccatcaatttgaagca

SEQ ID NO: 53279 - DNA, 21 bp, Homo sapiens
accctgcagttagttggcact

SEQ ID NO: 53280 - DNA, 21 bp, Homo sapiens
tcagagtatttctgtaatact

SEQ ID NO: 53281 - DNA, 22 bp, Homo sapiens
cagtgggttttctatgggtgat

SEQ ID NO: 53282 - DNA, 20 bp, Homo sapiens
cgcttcacattaaacaggct

SEQ ID NO: 53283 - DNA, 20 bp, Homo sapiens
tctgatcctgaggttttgct

SEQ ID NO: 53284 - DNA, 18 bp, Homo sapiens
aggtgtaggaagcattca

SEQ ID NO: 53285 - DNA, 24 bp, Homo sapiens
aaatatggtgcggaagtgatttca

SEQ ID NO: 53286 - DNA, 18 bp, Homo sapiens
actagtgtcctctcagag

SEQ ID NO: 53287 - DNA, 21 bp, Homo sapiens
ggggctttgtgcagtaaaaaa

SEQ ID NO: 53288 - DNA, 16 bp, Homo sapiens
tgctgctggacaggct

SEQ ID NO: 53289 - DNA, 24 bp, Homo sapiens
tggcagggaagcagctaggtatct

SEQ ID NO: 53290 - DNA, 17 bp, Homo sapiens
caaagtagtgggaagat

SEQ ID NO: 53291 - DNA, 18 bp, Homo sapiens
aaaacacgtggaccagtg

SEQ ID NO: 53292 - DNA, 16 bp, Homo sapiens
cctttgggaggctggc

SEQ ID NO: 53293 - DNA, 18 bp, Homo sapiens
gttccccagggataagcc

SEQ ID NO: 53294 - DNA, 22 bp, Homo sapiens
ttgaaaaagatgtcacaaaaca

SEQ ID NO: 53295 - DNA, 22 bp, Homo sapiens
ctgaggagctcgacgaggaaat

SEQ ID NO: 53296 - DNA, 16 bp, Homo sapiens
caaagcaaggcagagc

SEQ ID NO: 53297 - DNA, 16 bp, Homo sapiens
ggaaaaagatgccagc

SEQ ID NO: 53298 - DNA, 19 bp, Homo sapiens
tgtcactccattaacaact

SEQ ID NO: 53299 - DNA, 19 bp, Homo sapiens
gtggttccaaggcaaaggg

SEQ ID NO: 53300 - DNA, 16 bp, Homo sapiens
accttacctagggggc

SEQ ID NO: 53301 - DNA, 17 bp, Homo sapiens
ggatccaatgatgctgg

SEQ ID NO: 53302 - DNA, 20 bp, Homo sapiens
ggaagtggtattgtagctct

SEQ ID NO: 53303 - DNA, 18 bp, Homo sapiens
gtggagccataatcccca

SEQ ID NO: 53304 - DNA, 23 bp, Homo sapiens
attttgatttttttctttgtcac

SEQ ID NO: 53305 - DNA, 19 bp, Homo sapiens
ggttgttatgagaatgcat

SEQ ID NO: 53306 - DNA, 18 bp, Homo sapiens
ccaaaacgaaatcctcca

SEQ ID NO: 53307 - DNA, 17 bp, Homo sapiens
agtcacagatggtcaga

SEQ ID NO: 53308 - DNA, 19 bp, Homo sapiens
gcgacatcaggagccaata

SEQ ID NO: 53309 - DNA, 28 bp, Homo sapiens
agcatttatttaaatattaatagagacg

SEQ ID NO: 53310 - DNA, 19 bp, Homo sapiens
ccgtttcttaagccttcat

SEQ ID NO: 53311 - DNA, 20 bp, Homo sapiens
ctgtggggaccagaagagtg

SEQ ID NO: 53312 - DNA, 20 bp, Homo sapiens
gccgcccggccccgcgcagg

SEQ ID NO: 53313 - DNA, 24 bp, Homo sapiens
caggcggccttgacgttggtcttg

SEQ ID NO: 53314 - DNA, 16 bp, Homo sapiens
cagccaatgagcgccg

SEQ ID NO: 53315 - DNA, 23 bp, Homo sapiens
gagcctcacctctccagggcctc

SEQ ID NO: 53316 - DNA, 24 bp, Homo sapiens
taaaccctggcgcgctcgcgggcc

SEQ ID NO: 53317 - DNA, 16 bp, Homo sapiens
ggttgagggtggcctg

SEQ ID NO: 53318 - DNA, 24 bp, Homo sapiens
atggtgctgtctcctgccgacaag

SEQ ID NO: 53319 - DNA, 23 bp, Homo sapiens
ggaaggacaggaacatcctgcgg

SEQ ID NO: 53320 - DNA, 21 bp, Homo sapiens
acgctggcgagtatggtgcgg

SEQ ID NO: 53321 - DNA, 24 bp, Homo sapiens
acctgggcagagccgtggctcagg

SEQ ID NO: 53322 - DNA, 23 bp, Homo sapiens
gggctcctcgcccgcccggaccc

SEQ ID NO: 53323 - DNA, 23 bp, Homo sapiens
gtcgtccacgtgcgccacggcgt

SEQ ID NO: 53324 - DNA, 24 bp, Homo sapiens
ccaaaccccacccctcactctgct

SEQ ID NO: 53325 - DNA, 24 bp, Homo sapiens
cgggtccacccgaagcttgtgcgc

SEQ ID NO: 53326 - DNA, 24 bp, Homo sapiens
caagacctacttcccgcacttcga

SEQ ID NO: 53327 - DNA, 22 bp, Homo sapiens
gaaggcgccatctcgcccctcg

SEQ ID NO: 53328 - DNA, 24 bp, Homo sapiens
aggtggccgacgcgctgaccaacg

SEQ ID NO: 53329 - DNA, 23 bp, Homo sapiens
cagccgccgcctgcgctacacct

SEQ ID NO: 53330 - DNA, 20 bp, Homo sapiens
ctgagcgacctgcacgcgca

SEQ ID NO: 53331 - DNA, 20 bp, Homo sapiens
tcaccagcaggcagtggctt

SEQ ID NO: 53332 - DNA, 24 bp, Homo sapiens
cggcgggccgggagcgatctgggt

SEQ ID NO: 53333 - DNA, 24 bp, Homo sapiens
acttgtccagggaggcgtgcaccg

SEQ ID NO: 53334 - DNA, 21 bp, Homo sapiens
cacgcgggttgcgggaggtgt

SEQ ID NO: 53335 - DNA, 18 bp, Homo sapiens
aggctccagcttaacggt

SEQ ID NO: 53336 - DNA, 24 bp, Homo sapiens
cactgaccctcttctctgcacagc

SEQ ID NO: 53337 - DNA, 23 bp, Homo sapiens
agggccggtgcaaggaggggagg

SEQ ID NO: 53338 - DNA, 20 bp, Homo sapiens
cgagttcacccctgcggtgc

SEQ ID NO: 53339 - DNA, 21 bp, Homo sapiens
agagagaacccaggcacacac

SEQ ID NO: 53340 - DNA, 18 bp, Homo sapiens
tgacctccaaataccgtt

SEQ ID NO: 53341 - DNA, 17 bp, Homo sapiens
gagaggtccttggtctg

SEQ ID NO: 53342 - DNA, 16 bp, Homo sapiens
caacgggccctcctcc

SEQ ID NO: 53343 - DNA, 24 bp, Homo sapiens
caggcccacctcagcttcccctcc

SEQ ID NO: 53344 - DNA, 23 bp, Homo sapiens
cgccccgcgtgcacccccagggg

SEQ ID NO: 53345 - DNA, 24 bp, Homo sapiens
gacagcaccatggtgggttctctc

SEQ ID NO: 53346 - DNA, 22 bp, Homo sapiens
cgggactcccctgcggtccagg

SEQ ID NO: 53347 - DNA, 22 bp, Homo sapiens
cagcgtgcgcgccgaccttacc

SEQ ID NO: 53348 - DNA, 18 bp, Homo sapiens
cccggccgggcgtgcccc

SEQ ID NO: 53349 - DNA, 16 bp, Homo sapiens
gtcggagcaggggagg

SEQ ID NO: 53350 - DNA, 24 bp, Homo sapiens
gcactcttctggtccccacagact

SEQ ID NO: 53351 - DNA, 22 bp, Homo sapiens
ggtggggtttgggtccggggcc

SEQ ID NO: 53352 - DNA, 22 bp, Homo sapiens
caacgtcaaggccgcctggggt

SEQ ID NO: 53353 - DNA, 24 bp, Homo sapiens
ggaagtaggtcttggtggtgggga

SEQ ID NO: 53354 - DNA, 24 bp, Homo sapiens
ccctggagaggtgaggctccctcc

SEQ ID NO: 53355 - DNA, 23 bp, Homo sapiens
caccttcttgccgtggcccttaa

SEQ ID NO: 53356 - DNA, 24 bp, Homo sapiens
ggacccacaggccaccctcaaccg

SEQ ID NO: 53357 - DNA, 23 bp, Homo sapiens
cagggcggacagcgcgttgggca

SEQ ID NO: 53358 - DNA, 24 bp, Homo sapiens
cttctccccgcaggatgttcctgt

SEQ ID NO: 53359 - DNA, 16 bp, Homo sapiens
gctcaccttgaagttg

SEQ ID NO: 53360 - DNA, 24 bp, Homo sapiens
ctgagccacggctctgcccaggtt

SEQ ID NO: 53361 - DNA, 23 bp, Homo sapiens
gatcctctgccctgcgaggaagg

SEQ ID NO: 53362 - DNA, 24 bp, Homo sapiens
gccgtggcgcacgtggacgacatg

SEQ ID NO: 53363 - DNA, 24 bp, Homo sapiens
ggtcagtggggccgagggcccagg

SEQ ID NO: 53364 - DNA, 16 bp, Homo sapiens
ttcgggtggacccggt

SEQ ID NO: 53365 - DNA, 16 bp, Homo sapiens
ggccagggtcaccagc

SEQ ID NO: 53366 - DNA, 24 bp, Homo sapiens
tgggtcgaggggcgagatggcgcc

SEQ ID NO: 53367 - DNA, 22 bp, Homo sapiens
gctcacagaagccaggaacttg

SEQ ID NO: 53368 - DNA, 24 bp, Homo sapiens
gaggtgtagcgcaggcggcggctg

SEQ ID NO: 53369 - DNA, 22 bp, Homo sapiens
aaggggcaagaagcatggccac

SEQ ID NO: 53370 - DNA, 24 bp, Homo sapiens
tgcacagctcctaagccactgcct

SEQ ID NO: 53371 - DNA, 24 bp, Homo sapiens
actttattcaaagaccacgggggt

SEQ ID NO: 53372 - DNA, 22 bp, Homo sapiens
ctgcggtgcacgcctccctgga

SEQ ID NO: 53373 - DNA, 17 bp, Homo sapiens
tttgctgagggaaaaaa

SEQ ID NO: 53374 - DNA, 24 bp, Homo sapiens
ccgagagcccgaggagcaacagga

SEQ ID NO: 53375 - DNA, 23 bp, Homo sapiens
cgcgcccctcggcctcccaatgg

SEQ ID NO: 53376 - DNA, 24 bp, Homo sapiens
gtgcagagcgcgcgcggggcctgg

SEQ ID NO: 53377 - DNA, 23 bp, Homo sapiens
cttccggtccccgtggtcacgtg

SEQ ID NO: 53378 - DNA, 16 bp, Homo sapiens
acctgccggcgcgggc

SEQ ID NO: 53379 - DNA, 22 bp, Homo sapiens
cgcgatggcggcggggctggcg

SEQ ID NO: 53380 - DNA, 16 bp, Homo sapiens
agcccgcgaggctgct

SEQ ID NO: 53381 - DNA, 19 bp, Homo sapiens
ggccgtccgcgtccccagg

SEQ ID NO: 53382 - DNA, 22 bp, Homo sapiens
gttgttcaccctacgggaagcg

SEQ ID NO: 53383 - DNA, 24 bp, Homo sapiens
cacggtctcgctccccgtagggcc

SEQ ID NO: 53384 - DNA, 18 bp, Homo sapiens
acacgggtgaaggatccc

SEQ ID NO: 53385 - DNA, 24 bp, Homo sapiens
gaggagcccaacgcgtttgggtga

SEQ ID NO: 53386 - DNA, 24 bp, Homo sapiens
catcctccactgttgctgctcccc

SEQ ID NO: 53387 - DNA, 23 bp, Homo sapiens
cgggcccgttccccgctgacctt

SEQ ID NO: 53388 - DNA, 17 bp, Homo sapiens
acaaaccaatgctttag

SEQ ID NO: 53389 - DNA, 18 bp, Homo sapiens
gcctccaggccaagaggg

SEQ ID NO: 53390 - DNA, 24 bp, Homo sapiens
gtgagccaagatcatgccactgca

SEQ ID NO: 53391 - DNA, 16 bp, Homo sapiens
ctcacgtggactccac

SEQ ID NO: 53392 - DNA, 24 bp, Homo sapiens
tcaaaaaaaaagaaaactggtcct

SEQ ID NO: 53393 - DNA, 17 bp, Homo sapiens
ggacacagatggcatga

SEQ ID NO: 53394 - DNA, 16 bp, Homo sapiens
accctggggatcagtg

SEQ ID NO: 53395 - DNA, 16 bp, Homo sapiens
gtctgctcgtgctggg

SEQ ID NO: 53396 - DNA, 23 bp, Homo sapiens
tctcgggcaagtgcttcagcctg

SEQ ID NO: 53397 - DNA, 24 bp, Homo sapiens
gcgctgctgctttgggatccctgc

SEQ ID NO: 53398 - DNA, 24 bp, Homo sapiens
ggctggggcgcagcctgcggaccc

SEQ ID NO: 53399 - DNA, 20 bp, Homo sapiens
tcgtgccagatgctggggag

SEQ ID NO: 53400 - DNA, 21 bp, Homo sapiens
ttctgcccgttccacaacgtg

SEQ ID NO: 53401 - DNA, 19 bp, Homo sapiens
caggcgtcaccgtccctca

SEQ ID NO: 53402 - DNA, 24 bp, Homo sapiens
atcctcgggtgagtggggccgggg

SEQ ID NO: 53403 - DNA, 23 bp, Homo sapiens
actggggcccctcttcccgggct

SEQ ID NO: 53404 - DNA, 22 bp, Homo sapiens
ggcctcacgtgccgtgcccgtg

SEQ ID NO: 53405 - DNA, 24 bp, Homo sapiens
ccggttgctttttccacacgccag

SEQ ID NO: 53406 - DNA, 23 bp, Homo sapiens
aacaccttcacgggcatgtggat

SEQ ID NO: 53407 - DNA, 23 bp, Homo sapiens
gggggtctcgaacgtcagcgcgt

SEQ ID NO: 53408 - DNA, 24 bp, Homo sapiens
gagcaaggtggggcctcagacggg

SEQ ID NO: 53409 - DNA, 23 bp, Homo sapiens
tgggctcaactgcgtcccgcacc

SEQ ID NO: 53410 - DNA, 24 bp, Homo sapiens
cacctacccacgttccctccccag

SEQ ID NO: 53411 - DNA, 21 bp, Homo sapiens
aaccctggcccccagcactac

SEQ ID NO: 53412 - DNA, 24 bp, Homo sapiens
atgtgtccgagccgagcacctgcg

SEQ ID NO: 53413 - DNA, 23 bp, Homo sapiens
tctggcagggttgggtacactga

SEQ ID NO: 53414 - DNA, 17 bp, Homo sapiens
cttgctaggtaggggtg

SEQ ID NO: 53415 - DNA, 23 bp, Homo sapiens
ggtgatcagctcatcggccaggt

SEQ ID NO: 53416 - DNA, 23 bp, Homo sapiens
gcacgcagccctgctggaggccc

SEQ ID NO: 53417 - DNA, 24 bp, Homo sapiens
gcaggggcagcacccagctcccag

SEQ ID NO: 53418 - DNA, 16 bp, Homo sapiens
ttctcttgggtcctca

SEQ ID NO: 53419 - DNA, 18 bp, Homo sapiens
ctcaaaaagtgtcctcag

SEQ ID NO: 53420 - DNA, 17 bp, Homo sapiens
ggaccaggtagagcagg

SEQ ID NO: 53421 - DNA, 16 bp, Homo sapiens
ggacctccctccagct

SEQ ID NO: 53422 - DNA, 22 bp, Homo sapiens
cggggtggcccctggtgggcct

SEQ ID NO: 53423 - DNA, 17 bp, Homo sapiens
caccacctccccccaat

SEQ ID NO: 53424 - DNA, 24 bp, Homo sapiens
ttcagggccatgagaagttgctga

SEQ ID NO: 53425 - DNA, 17 bp, Homo sapiens
accaaccacaaaaagag

SEQ ID NO: 53426 - DNA, 17 bp, Homo sapiens
aaaatgaacccacccag

SEQ ID NO: 53427 - DNA, 16 bp, Homo sapiens
cgtgctgggtgagcaa

SEQ ID NO: 53428 - DNA, 21 bp, Homo sapiens
ctggaaaactgcaggaaggta

SEQ ID NO: 53429 - DNA, 24 bp, Homo sapiens
ggtggcgagtgtgatggtgagcct

SEQ ID NO: 53430 - DNA, 22 bp, Homo sapiens
cctgggctttcccttgaactct

SEQ ID NO: 53431 - DNA, 17 bp, Homo sapiens
aagtttctgccaaaaca

SEQ ID NO: 53432 - DNA, 24 bp, Homo sapiens
gagatcaaaaggctgaaaggtttg

SEQ ID NO: 53433 - DNA, 22 bp, Homo sapiens
tcctgggtcaccccgcagctgc

SEQ ID NO: 53434 - DNA, 23 bp, Homo sapiens
acaggtgagtcacctgtggggag

SEQ ID NO: 53435 - DNA, 22 bp, Homo sapiens
ctctcggccgcgtccacctctg

SEQ ID NO: 53436 - DNA, 20 bp, Homo sapiens
gtgaggactggccacctggt

SEQ ID NO: 53437 - DNA, 21 bp, Homo sapiens
tctctgagcacaagcctggtc

SEQ ID NO: 53438 - DNA, 16 bp, Homo sapiens
gcccagagccaagtct

SEQ ID NO: 53439 - DNA, 21 bp, Homo sapiens
gttatttttatcagtatggga

SEQ ID NO: 53440 - DNA, 16 bp, Homo sapiens
tctgtccagtgggtgg

SEQ ID NO: 53441 - DNA, 25 bp, Homo sapiens
acagtaactattttgttatttttgc

SEQ ID NO: 53442 - DNA, 18 bp, Homo sapiens
ccttcaacctatcttcag

SEQ ID NO: 53443 - DNA, 24 bp, Homo sapiens
ccgtgactattgagtgtgaatgca

SEQ ID NO: 53444 - DNA, 18 bp, Homo sapiens
tttacaatgtgacagcca

SEQ ID NO: 53445 - DNA, 22 bp, Homo sapiens
cattcagtcaggcccctgacca

SEQ ID NO: 53446 - DNA, 16 bp, Homo sapiens
ataaaggagcctccca

SEQ ID NO: 53447 - DNA, 24 bp, Homo sapiens
tccatcacgtgtcccagggctgaa

SEQ ID NO: 53448 - DNA, 21 bp, Homo sapiens
gtggtgataatgatgaaggaa

SEQ ID NO: 53449 - DNA, 22 bp, Homo sapiens
ggcgaatgtatagatgtgggat

SEQ ID NO: 53450 - DNA, 20 bp, Homo sapiens
gcaagacatccataagcagg

SEQ ID NO: 53451 - DNA, 22 bp, Homo sapiens
gtagtccacgaagatgcccaca

SEQ ID NO: 53452 - DNA, 21 bp, Homo sapiens
ctggccgccgttactgggagg

SEQ ID NO: 53453 - DNA, 17 bp, Homo sapiens
acgcctggtactcattt

SEQ ID NO: 53454 - DNA, 16 bp, Homo sapiens
gcccgcaaagatttga

SEQ ID NO: 53455 - DNA, 16 bp, Homo sapiens
gtcatgttccctttcc

SEQ ID NO: 53456 - DNA, 21 bp, Homo sapiens
cctcatcttctctgatgatct

SEQ ID NO: 53457 - DNA, 24 bp, Homo sapiens
atgctgtcttgtctccaacctcca

SEQ ID NO: 53458 - DNA, 24 bp, Homo sapiens
acctaggtattcaaattttctttg

SEQ ID NO: 53459 - DNA, 21 bp, Homo sapiens
cccagaacaatgatacagctg

SEQ ID NO: 53460 - DNA, 23 bp, Homo sapiens
taccctgtccctgtttcctgcag

SEQ ID NO: 53461 - DNA, 21 bp, Homo sapiens
tttccaagtctaacactcttc

SEQ ID NO: 53462 - DNA, 16 bp, Homo sapiens
gccctggcctgctgga

SEQ ID NO: 53463 - DNA, 22 bp, Homo sapiens
atccagaatcacattaactgca

SEQ ID NO: 53464 - DNA, 16 bp, Homo sapiens
agttccggagctgatt

SEQ ID NO: 53465 - DNA, 16 bp, Homo sapiens
ccctacagggttctcc

SEQ ID NO: 53466 - DNA, 19 bp, Homo sapiens
gtaatttagcccctcttaa

SEQ ID NO: 53467 - DNA, 17 bp, Homo sapiens
gtaggggagagcacagg

SEQ ID NO: 53468 - DNA, 22 bp, Homo sapiens
atacccaacatagcatgcaggg

SEQ ID NO: 53469 - DNA, 23 bp, Homo sapiens
ttaccagcatgtgcctgagcgcc

SEQ ID NO: 53470 - DNA, 19 bp, Homo sapiens
tgactcattagaccacagt

SEQ ID NO: 53471 - DNA, 18 bp, Homo sapiens
tcctgagcattagcatta

SEQ ID NO: 53472 - DNA, 19 bp, Homo sapiens
gtaggagaaaggtcatggc

SEQ ID NO: 53473 - DNA, 16 bp, Homo sapiens
aaggaaccccctgctt

SEQ ID NO: 53474 - DNA, 17 bp, Homo sapiens
gttgacttgaggggccc

SEQ ID NO: 53475 - DNA, 17 bp, Homo sapiens
caggccatgttggggac

SEQ ID NO: 53476 - DNA, 18 bp, Homo sapiens
cctggggggcctgccatg

SEQ ID NO: 53477 - DNA, 16 bp, Homo sapiens
ctctctgctccctttc

SEQ ID NO: 53478 - DNA, 26 bp, Homo sapiens
ggtttttttttttgtcttctaaatag

SEQ ID NO: 53479 - DNA, 16 bp, Homo sapiens
tgctgacctgccttca

SEQ ID NO: 53480 - DNA, 24 bp, Homo sapiens
cccaggccagcacacaccattacc

SEQ ID NO: 53481 - DNA, 18 bp, Homo sapiens
tgctcacttcctccctaa

SEQ ID NO: 53482 - DNA, 17 bp, Homo sapiens
gaagagcacaaagtact

SEQ ID NO: 53483 - DNA, 19 bp, Homo sapiens
gacagatggaggagaggtt

SEQ ID NO: 53484 - DNA, 21 bp, Homo sapiens
gaccactcctcaagagataaa

SEQ ID NO: 53485 - DNA, 16 bp, Homo sapiens
ggctctgggctatgtg

SEQ ID NO: 53486 - DNA, 17 bp, Homo sapiens
ctggtcaacagtctttt

SEQ ID NO: 53487 - DNA, 23 bp, Homo sapiens
caagcccatctacctgagaagta

SEQ ID NO: 53488 - DNA, 17 bp, Homo sapiens
tgtggagaatgtagttc

SEQ ID NO: 53489 - DNA, 23 bp, Homo sapiens
gtggaggagttggatcttttgtt

SEQ ID NO: 53490 - DNA, 16 bp, Homo sapiens
cctctgaatccaggga

SEQ ID NO: 53491 - DNA, 16 bp, Homo sapiens
gaggctttgggaagct

SEQ ID NO: 53492 - DNA, 16 bp, Homo sapiens
gcctggtaaccgacag

SEQ ID NO: 53493 - DNA, 19 bp, Homo sapiens
ttgggaacatctccctccc

SEQ ID NO: 53494 - DNA, 16 bp, Homo sapiens
gcggggagctaaaagt

SEQ ID NO: 53495 - DNA, 23 bp, Homo sapiens
caagacaccccagggtacaccac

SEQ ID NO: 53496 - DNA, 17 bp, Homo sapiens
ttgaagaaaggtgctcc

SEQ ID NO: 53497 - DNA, 20 bp, Homo sapiens
aaaggggtctgggcacaaga

SEQ ID NO: 53498 - DNA, 18 bp, Homo sapiens
tgattggggaactggagg

SEQ ID NO: 53499 - DNA, 22 bp, Homo sapiens
aggggcttcacccacttgttcc

SEQ ID NO: 53500 - DNA, 18 bp, Homo sapiens
cagatcaggaaggcatat

SEQ ID NO: 53501 - DNA, 24 bp, Homo sapiens
catcctgataggcacaggggaccc

SEQ ID NO: 53502 - DNA, 23 bp, Homo sapiens
tgtactacttcctggagcagcaa

SEQ ID NO: 53503 - DNA, 22 bp, Homo sapiens
ctgactggcactccttggcctc

SEQ ID NO: 53504 - DNA, 16 bp, Homo sapiens
acaaactgaagcgctg

SEQ ID NO: 53505 - DNA, 17 bp, Homo sapiens
ggatacgcgggtgtcat

SEQ ID NO: 53506 - DNA, 17 bp, Homo sapiens
ctggacatccacgtcca

SEQ ID NO: 53507 - DNA, 17 bp, Homo sapiens
agtgaggccacaaagaa

SEQ ID NO: 53508 - DNA, 21 bp, Homo sapiens
aggccttgaagaggcagcata

SEQ ID NO: 53509 - DNA, 23 bp, Homo sapiens
tcctctgcacccgctgcttcagc

SEQ ID NO: 53510 - DNA, 18 bp, Homo sapiens
tctacagggatgagctta

SEQ ID NO: 53511 - DNA, 19 bp, Homo sapiens
ggggaggagcagcgatcct

SEQ ID NO: 53512 - DNA, 19 bp, Homo sapiens
gtggccatccctgctgccc

SEQ ID NO: 53513 - DNA, 20 bp, Homo sapiens
ctgtttttccagaagaaaat

SEQ ID NO: 53514 - DNA, 16 bp, Homo sapiens
cctcccagggacggat

SEQ ID NO: 53515 - DNA, 18 bp, Homo sapiens
ctccagagttggcaccag

SEQ ID NO: 53516 - DNA, 21 bp, Homo sapiens
ctcactgccttctcctcccca

SEQ ID NO: 53517 - DNA, 20 bp, Homo sapiens
tgagcacccctccccatgcc

SEQ ID NO: 53518 - DNA, 22 bp, Homo sapiens
cagatgctccagctgcttctga

SEQ ID NO: 53519 - DNA, 23 bp, Homo sapiens
ccctctttgctggactggtttat

SEQ ID NO: 53520 - DNA, 16 bp, Homo sapiens
agtctgagtcaggagc

SEQ ID NO: 53521 - DNA, 16 bp, Homo sapiens
acccagagttgttggg

SEQ ID NO: 53522 - DNA, 21 bp, Homo sapiens
cctgaagcaggtccagctgct

SEQ ID NO: 53523 - DNA, 24 bp, Homo sapiens
cctggcagagaagagcccacaggc

SEQ ID NO: 53524 - DNA, 18 bp, Homo sapiens
ctcccatgaaaggaagag

SEQ ID NO: 53525 - DNA, 23 bp, Homo sapiens
gggcgcacccggtggccttggtg

SEQ ID NO: 53526 - DNA, 22 bp, Homo sapiens
tttctgggcacccccaggcctc

SEQ ID NO: 53527 - DNA, 24 bp, Homo sapiens
ggctcatcgtgatcctcacagaag

SEQ ID NO: 53528 - DNA, 19 bp, Homo sapiens
ggaaggagacccagttgac

SEQ ID NO: 53529 - DNA, 16 bp, Homo sapiens
gcttaggcttcccggg

SEQ ID NO: 53530 - DNA, 19 bp, Homo sapiens
actgcatgtccccaggaag

SEQ ID NO: 53531 - DNA, 16 bp, Homo sapiens
gtgagcggctgcctga

SEQ ID NO: 53532 - DNA, 20 bp, Homo sapiens
gtgtccgctgtgctttgtga

SEQ ID NO: 53533 - DNA, 16 bp, Homo sapiens
cacacaggtaccgtca

SEQ ID NO: 53534 - DNA, 19 bp, Homo sapiens
aagctaggaagtgggcaga

SEQ ID NO: 53535 - DNA, 22 bp, Homo sapiens
ctcgcagccgtgtctggtggcc

SEQ ID NO: 53536 - DNA, 18 bp, Homo sapiens
ggaaggccctggaaatcc

SEQ ID NO: 53537 - DNA, 22 bp, Homo sapiens
cttggcctccagcaatcctccc

SEQ ID NO: 53538 - DNA, 22 bp, Homo sapiens
gaatctggactcggcaacagaa

SEQ ID NO: 53539 - DNA, 16 bp, Homo sapiens
ggccagccattctttc

SEQ ID NO: 53540 - DNA, 16 bp, Homo sapiens
gcccgcaaatccagaa

SEQ ID NO: 53541 - DNA, 17 bp, Homo sapiens
cggtgaccgaatgttct

SEQ ID NO: 53542 - DNA, 19 bp, Homo sapiens
gtgtacctgccctcgggaa

SEQ ID NO: 53543 - DNA, 24 bp, Homo sapiens
ctccatccggagtgggccttgccc

SEQ ID NO: 53544 - DNA, 16 bp, Homo sapiens
gaggctgcaggggctg

SEQ ID NO: 53545 - DNA, 23 bp, Homo sapiens
ttttcctctagagtcaggagaat

SEQ ID NO: 53546 - DNA, 20 bp, Homo sapiens
gcagggcgctagaggggggc

SEQ ID NO: 53547 - DNA, 24 bp, Homo sapiens
gtgacctcaaggcttctaggtcgc

SEQ ID NO: 53548 - DNA, 18 bp, Homo sapiens
gcagggcaagcctcggac

SEQ ID NO: 53549 - DNA, 23 bp, Homo sapiens
cactccttctgccccggggcgcc

SEQ ID NO: 53550 - DNA, 23 bp, Homo sapiens
gagggggctgtcgaggaagcccc

SEQ ID NO: 53551 - DNA, 16 bp, Homo sapiens
ggacctcggcctggcc

SEQ ID NO: 53552 - DNA, 24 bp, Homo sapiens
gaacggccctcggccgtacggggg

SEQ ID NO: 53553 - DNA, 21 bp, Homo sapiens
gcccggcagggccgggctccg

SEQ ID NO: 53554 - DNA, 16 bp, Homo sapiens
aacaagcccaggagcc

SEQ ID NO: 53555 - DNA, 22 bp, Homo sapiens
ttctctctgcgtttgctcaggg

SEQ ID NO: 53556 - DNA, 21 bp, Homo sapiens
ccagaatattccacacaagaa

SEQ ID NO: 53557 - DNA, 20 bp, Homo sapiens
ctgcaccgcaggctggcagc

SEQ ID NO: 53558 - DNA, 24 bp, Homo sapiens
cctctgccctgaatcttgggccct

SEQ ID NO: 53559 - DNA, 17 bp, Homo sapiens
gtctggagtcttcaggc

SEQ ID NO: 53560 - DNA, 16 bp, Homo sapiens
cccgttgttttcctca

SEQ ID NO: 53561 - DNA, 16 bp, Homo sapiens
tctgtgccgttttctt

SEQ ID NO: 53562 - DNA, 16 bp, Homo sapiens
gcctgctggccgagga

SEQ ID NO: 53563 - DNA, 24 bp, Homo sapiens
gacctgagactcccaatccccagg

SEQ ID NO: 53564 - DNA, 17 bp, Homo sapiens
tactatggggaagagta

SEQ ID NO: 53565 - DNA, 24 bp, Homo sapiens
tcccacaaagcagccagcactcag

SEQ ID NO: 53566 - DNA, 24 bp, Homo sapiens
ctccaggatcccccggagccagat

SEQ ID NO: 53567 - DNA, 24 bp, Homo sapiens
gaatggctgccctgtggagctcct

SEQ ID NO: 53568 - DNA, 21 bp, Homo sapiens
ctatgacttcgagaagttcaa

SEQ ID NO: 53569 - DNA, 23 bp, Homo sapiens
ctgcagggtgagctgcacggcgt

SEQ ID NO: 53570 - DNA, 17 bp, Homo sapiens
cagcaccatggctaaga

SEQ ID NO: 53571 - DNA, 23 bp, Homo sapiens
cttcaccggcctggctctctgga

SEQ ID NO: 53572 - DNA, 18 bp, Homo sapiens
caaggacagaggcttctt

SEQ ID NO: 53573 - DNA, 19 bp, Homo sapiens
ggtgttctgcagcttgaac

SEQ ID NO: 53574 - DNA, 23 bp, Homo sapiens
ccaagacacagagcatttcctgt

SEQ ID NO: 53575 - DNA, 20 bp, Homo sapiens
tggacagcagatggtcacta

SEQ ID NO: 53576 - DNA, 23 bp, Homo sapiens
ccatccacgtcgaagaggcagag

SEQ ID NO: 53577 - DNA, 23 bp, Homo sapiens
gttatgggaacggagtcccctcc

SEQ ID NO: 53578 - DNA, 16 bp, Homo sapiens
gccagcagcccgccgg

SEQ ID NO: 53579 - DNA, 22 bp, Homo sapiens
aagttccgggccgagttcctcg

SEQ ID NO: 53580 - DNA, 22 bp, Homo sapiens
ccccttggcgcctaccctgggt

SEQ ID NO: 53581 - DNA, 23 bp, Homo sapiens
ggggacatggcagcgcctggccc

SEQ ID NO: 53582 - DNA, 17 bp, Homo sapiens
cctccagtgcacccaga

SEQ ID NO: 53583 - DNA, 19 bp, Homo sapiens
tgcctcaatttttgtagga

SEQ ID NO: 53584 - DNA, 29 bp, Homo sapiens
tttttctttaatttttaaataagaaaata

SEQ ID NO: 53585 - DNA, 17 bp, Homo sapiens
gttgctcctgcactttc

SEQ ID NO: 53586 - DNA, 18 bp, Homo sapiens
tcctgattattgtgtggc

SEQ ID NO: 53587 - DNA, 25 bp, Homo sapiens
cctcataagaagttaatcttttacc

SEQ ID NO: 53588 - DNA, 20 bp, Homo sapiens
attaccaaagaaatggatga

SEQ ID NO: 53589 - DNA, 20 bp, Homo sapiens
gaaagcccgccatatgggga

SEQ ID NO: 53590 - DNA, 19 bp, Homo sapiens
gtaggcggatcggactttg

SEQ ID NO: 53591 - DNA, 19 bp, Homo sapiens
tggattaaaagcagaggaa

SEQ ID NO: 53592 - DNA, 19 bp, Homo sapiens
ggaacttttttccatactc

SEQ ID NO: 53593 - DNA, 19 bp, Homo sapiens
ctttgtatgctaccaagcc

SEQ ID NO: 53594 - DNA, 21 bp, Homo sapiens
tccttgctggagtttagcggt

SEQ ID NO: 53595 - DNA, 22 bp, Homo sapiens
aatagtatatagtaattcagat

SEQ ID NO: 53596 - DNA, 18 bp, Homo sapiens
attctttgcattctaagt

SEQ ID NO: 53597 - DNA, 17 bp, Homo sapiens
ccgttcctcatcttcct

SEQ ID NO: 53598 - DNA, 19 bp, Homo sapiens
tgtgtttccagaaaatggc

SEQ ID NO: 53599 - DNA, 17 bp, Homo sapiens
aatagtcacatggttca

SEQ ID NO: 53600 - DNA, 22 bp, Homo sapiens
gaaataagagaaggaattaaac

SEQ ID NO: 53601 - DNA, 21 bp, Homo sapiens
gctcagacagtagttgattaa

SEQ ID NO: 53602 - DNA, 16 bp, Homo sapiens
ttttcagcaatcgtgg

SEQ ID NO: 53603 - DNA, 17 bp, Homo sapiens
tgttaaaagcaaaccca

SEQ ID NO: 53604 - DNA, 21 bp, Homo sapiens
gaaaatgctcctgctaaatca

SEQ ID NO: 53605 - DNA, 16 bp, Homo sapiens
ggagaatgcccacatt

SEQ ID NO: 53606 - DNA, 17 bp, Homo sapiens
ggtgaggccctaatcca

SEQ ID NO: 53607 - DNA, 17 bp, Homo sapiens
ggcgggctaaatatcag

SEQ ID NO: 53608 - DNA, 22 bp, Homo sapiens
aattaaactcccgaagaagagg

SEQ ID NO: 53609 - DNA, 17 bp, Homo sapiens
cacagtagttcatggct

SEQ ID NO: 53610 - DNA, 16 bp, Homo sapiens
caataggggacacgtt

SEQ ID NO: 53611 - DNA, 20 bp, Homo sapiens
ctctgctttttagaatttcc

SEQ ID NO: 53612 - DNA, 17 bp, Homo sapiens
tttcagaaagacgtact

SEQ ID NO: 53613 - DNA, 20 bp, Homo sapiens
tgaataacgtgtttttggag

SEQ ID NO: 53614 - DNA, 17 bp, Homo sapiens
catgaaccaccacacca

SEQ ID NO: 53615 - DNA, 19 bp, Homo sapiens
cgaaatgggatgttaaacg

SEQ ID NO: 53616 - DNA, 21 bp, Homo sapiens
attgagttctacgaactcgat

SEQ ID NO: 53617 - DNA, 20 bp, Homo sapiens
tagatctgctacaaactttt

SEQ ID NO: 53618 - DNA, 24 bp, Homo sapiens
gacccccatctcaaaaactaaaca

SEQ ID NO: 53619 - DNA, 20 bp, Homo sapiens
ggaacacaggcaatatatac

SEQ ID NO: 53620 - DNA, 19 bp, Homo sapiens
aactgtgctttctaaactg

SEQ ID NO: 53621 - DNA, 17 bp, Homo sapiens
tcaatagctcactggcc

SEQ ID NO: 53622 - DNA, 21 bp, Homo sapiens
tctcagaaagaaaatataaga

SEQ ID NO: 53623 - DNA, 19 bp, Homo sapiens
gtctatagactggactgct

SEQ ID NO: 53624 - DNA, 18 bp, Homo sapiens
ctcacgttttccataggt

SEQ ID NO: 53625 - DNA, 24 bp, Homo sapiens
caatgtagaattaatttctagaac

SEQ ID NO: 53626 - DNA, 18 bp, Homo sapiens
ttgtcccatccatcagga

SEQ ID NO: 53627 - DNA, 19 bp, Homo sapiens
gaaaatcaaccttggcaac

SEQ ID NO: 53628 - DNA, 22 bp, Homo sapiens
tttgtctccaaagaaataaatg

SEQ ID NO: 53629 - DNA, 16 bp, Homo sapiens
cattagcccctttttc

SEQ ID NO: 53630 - DNA, 16 bp, Homo sapiens
gcgcaaatgcaacaat

SEQ ID NO: 53631 - DNA, 24 bp, Homo sapiens
cagatcagctttgatgtctttcct

SEQ ID NO: 53632 - DNA, 16 bp, Homo sapiens
gcgggtgggtaaagtg

SEQ ID NO: 53633 - DNA, 24 bp, Homo sapiens
catgtggaaaatgacggttataag

SEQ ID NO: 53634 - DNA, 18 bp, Homo sapiens
ttagaggggaaggtggct

SEQ ID NO: 53635 - DNA, 19 bp, Homo sapiens
caattgtactcacgttcct

SEQ ID NO: 53636 - DNA, 16 bp, Homo sapiens
cggagtagcccatggt

SEQ ID NO: 53637 - DNA, 23 bp, Homo sapiens
ctgcccagttaaatcttgttttt

SEQ ID NO: 53638 - DNA, 16 bp, Homo sapiens
cccacgttaggagaac

SEQ ID NO: 53639 - DNA, 16 bp, Homo sapiens
gacagacgagggggag

SEQ ID NO: 53640 - DNA, 19 bp, Homo sapiens
ctcggctctggccaccgaa

SEQ ID NO: 53641 - DNA, 24 bp, Homo sapiens
atgaccatgagatcttcacagacc

SEQ ID NO: 53642 - DNA, 24 bp, Homo sapiens
acatgcctggcatagcatgcagag

SEQ ID NO: 53643 - DNA, 17 bp, Homo sapiens
gatctgtgaactgctgt

SEQ ID NO: 53644 - DNA, 19 bp, Homo sapiens
gcaagggaaacaaggcttc

SEQ ID NO: 53645 - DNA, 22 bp, Homo sapiens
ggatctccctgtcggggctcct

SEQ ID NO: 53646 - DNA, 23 bp, Homo sapiens
gagcacagttcatggagggtctc

SEQ ID NO: 53647 - DNA, 20 bp, Homo sapiens
cagaccagtgatgagcaccg

SEQ ID NO: 53648 - DNA, 24 bp, Homo sapiens
cacaggtgaatgtgacctgcgtcc

SEQ ID NO: 53649 - DNA, 22 bp, Homo sapiens
tccagggacacccagggcaggg

SEQ ID NO: 53650 - DNA, 24 bp, Homo sapiens
gaggaagtcatgcagaggcaaagc

SEQ ID NO: 53651 - DNA, 23 bp, Homo sapiens
ccttccacaacatcgccctggag

SEQ ID NO: 53652 - DNA, 24 bp, Homo sapiens
tgcaggtggccgccattgcaaact

SEQ ID NO: 53653 - DNA, 18 bp, Homo sapiens
tcttcctgatcattctgt

SEQ ID NO: 53654 - DNA, 22 bp, Homo sapiens
gtgaggcttcagtcccagacat

SEQ ID NO: 53655 - DNA, 21 bp, Homo sapiens
cctcaacctggtgttcctgct

SEQ ID NO: 53656 - DNA, 22 bp, Homo sapiens
ccttgcccggccaatgctgacc

SEQ ID NO: 53657 - DNA, 16 bp, Homo sapiens
ctccttccctgccccg

SEQ ID NO: 53658 - DNA, 16 bp, Homo sapiens
ggagcccctcatacag

SEQ ID NO: 53659 - DNA, 16 bp, Homo sapiens
gcagccctctccttca

SEQ ID NO: 53660 - DNA, 24 bp, Homo sapiens
agaaagccgaaccacacgtctgcc

SEQ ID NO: 53661 - DNA, 20 bp, Homo sapiens
ctactgcactccagcctgga

SEQ ID NO: 53662 - DNA, 16 bp, Homo sapiens
ctcttctctccgctgc

SEQ ID NO: 53663 - DNA, 22 bp, Homo sapiens
acacttcccactgatagtggga

SEQ ID NO: 53664 - DNA, 22 bp, Homo sapiens
tcctctcctccccccaacccta

SEQ ID NO: 53665 - DNA, 24 bp, Homo sapiens
agccaaggtgggagtgaagtgagg

SEQ ID NO: 53666 - DNA, 19 bp, Homo sapiens
atgcagctgccctgcccag

SEQ ID NO: 53667 - DNA, 24 bp, Homo sapiens
cccaggtgaaacggatgcgacagc

SEQ ID NO: 53668 - DNA, 24 bp, Homo sapiens
gtcacgctcagcaataccgctggt

SEQ ID NO: 53669 - DNA, 16 bp, Homo sapiens
tctggtacctgaggtt

SEQ ID NO: 53670 - DNA, 16 bp, Homo sapiens
tctggtatttgttgca

SEQ ID NO: 53671 - DNA, 24 bp, Homo sapiens
catcccgctccccccggtgcctac

SEQ ID NO: 53672 - DNA, 24 bp, Homo sapiens
gaggggtgctaggaggggtgtgga

SEQ ID NO: 53673 - DNA, 18 bp, Homo sapiens
ccctcgctcctcttacca

SEQ ID NO: 53674 - DNA, 16 bp, Homo sapiens
ggtcgtagtttacttt

SEQ ID NO: 53675 - DNA, 21 bp, Homo sapiens
cagaaaaagaggagttcaaac

SEQ ID NO: 53676 - DNA, 16 bp, Homo sapiens
caggccccccgcttat

SEQ ID NO: 53677 - DNA, 19 bp, Homo sapiens
cagccccaatcgccacctc

SEQ ID NO: 53678 - DNA, 21 bp, Homo sapiens
ggaaaggtggacagtgttcaa

SEQ ID NO: 53679 - DNA, 23 bp, Homo sapiens
cctggttaatgaaatactcggca

SEQ ID NO: 53680 - DNA, 16 bp, Homo sapiens
ctgcccttctctctct

SEQ ID NO: 53681 - DNA, 19 bp, Homo sapiens
cctggaaaaggcagaagat

SEQ ID NO: 53682 - DNA, 23 bp, Homo sapiens
cactgttgcgtggtctggttaat

SEQ ID NO: 53683 - DNA, 20 bp, Homo sapiens
ataccccagccatcatccga

SEQ ID NO: 53684 - DNA, 23 bp, Homo sapiens
ccattttaaccatttttaagtgt

SEQ ID NO: 53685 - DNA, 19 bp, Homo sapiens
ctcgtcctcaacaagtatt

SEQ ID NO: 53686 - DNA, 16 bp, Homo sapiens
aagcagagagcgcagc

SEQ ID NO: 53687 - DNA, 20 bp, Homo sapiens
tctctttcccctcttaactt

SEQ ID NO: 53688 - DNA, 18 bp, Homo sapiens
tcctagctatttcttgtt

SEQ ID NO: 53689 - DNA, 21 bp, Homo sapiens
agagaaagaaagtgacctctc

SEQ ID NO: 53690 - DNA, 19 bp, Homo sapiens
tagatggtccctggggacc

SEQ ID NO: 53691 - DNA, 22 bp, Homo sapiens
ggttcttatgaggggctgccgg

SEQ ID NO: 53692 - DNA, 19 bp, Homo sapiens
agtgagctacccatctttg

SEQ ID NO: 53693 - DNA, 16 bp, Homo sapiens
gagatgtgagcaacaa

SEQ ID NO: 53694 - DNA, 18 bp, Homo sapiens
cctcagcagaccctgctg

SEQ ID NO: 53695 - DNA, 24 bp, Homo sapiens
ggactgggggagctgggctgctgg

SEQ ID NO: 53696 - DNA, 23 bp, Homo sapiens
aagttttctctccttggacccct

SEQ ID NO: 53697 - DNA, 23 bp, Homo sapiens
ctaggtcctcctgaatgttcctg

SEQ ID NO: 53698 - DNA, 24 bp, Homo sapiens
agggcagggatacccagcatggac

SEQ ID NO: 53699 - DNA, 24 bp, Homo sapiens
accccaggtaagcaggtggagcag

SEQ ID NO: 53700 - DNA, 23 bp, Homo sapiens
ccaggtaggacagggcccccagc

SEQ ID NO: 53701 - DNA, 24 bp, Homo sapiens
ggtcttcgctagcatctcatcagg

SEQ ID NO: 53702 - DNA, 24 bp, Homo sapiens
gatcacggccctgggaaggagaac

SEQ ID NO: 53703 - DNA, 19 bp, Homo sapiens
gtgtggcaaggtgtggtgt

SEQ ID NO: 53704 - DNA, 24 bp, Homo sapiens
atgggacagcctctccccacactc

SEQ ID NO: 53705 - DNA, 23 bp, Homo sapiens
tctattggagcctctatgagctg

SEQ ID NO: 53706 - DNA, 22 bp, Homo sapiens
gagaggaaggtgacctccccaa

SEQ ID NO: 53707 - DNA, 23 bp, Homo sapiens
gaagggacacgcaggggagtggg

SEQ ID NO: 53708 - DNA, 21 bp, Homo sapiens
ggttgccttttctcattctgt

SEQ ID NO: 53709 - DNA, 17 bp, Homo sapiens
caggcttctaagggtga

SEQ ID NO: 53710 - DNA, 21 bp, Homo sapiens
ctcaccccctcagcccccggg

SEQ ID NO: 53711 - DNA, 17 bp, Homo sapiens
acaaatgctctgatgtg

SEQ ID NO: 53712 - DNA, 21 bp, Homo sapiens
gggaggctgggatggctgaga

SEQ ID NO: 53713 - DNA, 24 bp, Homo sapiens
cactcaccacacaggctggtcccc

SEQ ID NO: 53714 - DNA, 16 bp, Homo sapiens
cctacaggtctgggtg

SEQ ID NO: 53715 - DNA, 19 bp, Homo sapiens
acaaatcccactgacgaga

SEQ ID NO: 53716 - DNA, 22 bp, Homo sapiens
ctcctggcggacatcctcccca

SEQ ID NO: 53717 - DNA, 17 bp, Homo sapiens
ctactctcagcatctca

SEQ ID NO: 53718 - DNA, 23 bp, Homo sapiens
ggttgggagggttgtcccctgga

SEQ ID NO: 53719 - DNA, 22 bp, Homo sapiens
caccctgcctcccactaccctc

SEQ ID NO: 53720 - DNA, 17 bp, Homo sapiens
ctgtgtttgtagcaggc

SEQ ID NO: 53721 - DNA, 23 bp, Homo sapiens
acaatttgatgacgagtgtgggg

SEQ ID NO: 53722 - DNA, 23 bp, Homo sapiens
aaactcttgacacacaactaagg

SEQ ID NO: 53723 - DNA, 19 bp, Homo sapiens
agtgctgggattacaagtg

SEQ ID NO: 53724 - DNA, 22 bp, Homo sapiens
gtggacccaggcccaacgccga

SEQ ID NO: 53725 - DNA, 20 bp, Homo sapiens
atgacagtcccagctgggta

SEQ ID NO: 53726 - DNA, 20 bp, Homo sapiens
tgtgtgtctatccctctgcc

SEQ ID NO: 53727 - DNA, 16 bp, Homo sapiens
caaggaccaggtgaga

SEQ ID NO: 53728 - DNA, 20 bp, Homo sapiens
tcagtcactgctgacccaaa

SEQ ID NO: 53729 - DNA, 17 bp, Homo sapiens
atgagctgttgtggggg

SEQ ID NO: 53730 - DNA, 21 bp, Homo sapiens
caagtgatccgcccgcctcag

SEQ ID NO: 53731 - DNA, 22 bp, Homo sapiens
ctgtgcccagccagagactgga

SEQ ID NO: 53732 - DNA, 16 bp, Homo sapiens
agttgagacctgtcct

SEQ ID NO: 53733 - DNA, 18 bp, Homo sapiens
ccatggtggtggtggtag

SEQ ID NO: 53734 - DNA, 16 bp, Homo sapiens
caggtaagggaaggtt

SEQ ID NO: 53735 - DNA, 20 bp, Homo sapiens
ctcttgtggctaaggatgtc

SEQ ID NO: 53736 - DNA, 16 bp, Homo sapiens
ttgaatgaggatggga

SEQ ID NO: 53737 - DNA, 20 bp, Homo sapiens
caaaggcccagcagcctgga

SEQ ID NO: 53738 - DNA, 22 bp, Homo sapiens
aggagtgaagtttggaaatttt

SEQ ID NO: 53739 - DNA, 20 bp, Homo sapiens
ctccctctgttggaccatca

SEQ ID NO: 53740 - DNA, 24 bp, Homo sapiens
tatttgtgggttcagctcctttgc

SEQ ID NO: 53741 - DNA, 19 bp, Homo sapiens
ggtgggggtcatgccctct

SEQ ID NO: 53742 - DNA, 23 bp, Homo sapiens
acttccctcttctcatgccattg

SEQ ID NO: 53743 - DNA, 17 bp, Homo sapiens
gagagctgactcggccc

SEQ ID NO: 53744 - DNA, 24 bp, Homo sapiens
caccgcgttcttccaatgcgcgcc

SEQ ID NO: 53745 - DNA, 24 bp, Homo sapiens
agggtgagtattcccgcccaccct

SEQ ID NO: 53746 - DNA, 24 bp, Homo sapiens
cggtctcctcccctgggagagcga

SEQ ID NO: 53747 - DNA, 18 bp, Homo sapiens
gacctgaacttgatgcga

SEQ ID NO: 53748 - DNA, 24 bp, Homo sapiens
accgctccttgcgtgtcctcccgg

SEQ ID NO: 53749 - DNA, 22 bp, Homo sapiens
agaccctcatccctcccgtggg

SEQ ID NO: 53750 - DNA, 16 bp, Homo sapiens
gtggtcgttccatgag

SEQ ID NO: 53751 - DNA, 20 bp, Homo sapiens
ctagacaagccggagctggg

SEQ ID NO: 53752 - DNA, 20 bp, Homo sapiens
cgagcctgcacagcctccca

SEQ ID NO: 53753 - DNA, 22 bp, Homo sapiens
atgaaaaagtatacaaaacttc

SEQ ID NO: 53754 - DNA, 23 bp, Homo sapiens
aagctctccatgccctccagtct

SEQ ID NO: 53755 - DNA, 26 bp, Homo sapiens
atgaattatagattatatacaccaga

SEQ ID NO: 53756 - DNA, 16 bp, Homo sapiens
tttgatgcacgagcag

SEQ ID NO: 53757 - DNA, 17 bp, Homo sapiens
agcatttactgaggagt

SEQ ID NO: 53758 - DNA, 18 bp, Homo sapiens
agcctttccaaagaaaaa

SEQ ID NO: 53759 - DNA, 18 bp, Homo sapiens
ctctgtattgcttgtaga

SEQ ID NO: 53760 - DNA, 18 bp, Homo sapiens
gtgaactttggacttctg

SEQ ID NO: 53761 - DNA, 18 bp, Homo sapiens
ataccttcaccatctgct

SEQ ID NO: 53762 - DNA, 23 bp, Homo sapiens
gacgcttcagcttcaccaaagcg

SEQ ID NO: 53763 - DNA, 16 bp, Homo sapiens
tcacgtcgaccttgcc

SEQ ID NO: 53764 - DNA, 24 bp, Homo sapiens
gcacccttggagccagcaaaaaga

SEQ ID NO: 53765 - DNA, 16 bp, Homo sapiens
tggtcagtgaccctcc

SEQ ID NO: 53766 - DNA, 21 bp, Homo sapiens
gttggttgcacaaactgagca

SEQ ID NO: 53767 - DNA, 18 bp, Homo sapiens
cgtggtgatttcttctca

SEQ ID NO: 53768 - DNA, 17 bp, Homo sapiens
cccttcctgaaacatgt

SEQ ID NO: 53769 - DNA, 23 bp, Homo sapiens
ggataattggaaactttaacatt

SEQ ID NO: 53770 - DNA, 19 bp, Homo sapiens
caggtcctgctcgtcctct

SEQ ID NO: 53771 - DNA, 23 bp, Homo sapiens
taacaattctaatagttcatata

SEQ ID NO: 53772 - DNA, 19 bp, Homo sapiens
tctaggaggaaggcgatct

SEQ ID NO: 53773 - DNA, 20 bp, Homo sapiens
agagagacatcttaaaagct

SEQ ID NO: 53774 - DNA, 20 bp, Homo sapiens
gagaaccccgatgttcggct

SEQ ID NO: 53775 - DNA, 22 bp, Homo sapiens
ttttggcatttttttttctttt

SEQ ID NO: 53776 - DNA, 22 bp, Homo sapiens
acagagatctactttatgtaaa

SEQ ID NO: 53777 - DNA, 24 bp, Homo sapiens
aaacaggtatttttaaaaatacag

SEQ ID NO: 53778 - DNA, 23 bp, Homo sapiens
taggcatctcttgtttttgtagt

SEQ ID NO: 53779 - DNA, 20 bp, Homo sapiens
ctggagctgttttcttttcc

SEQ ID NO: 53780 - DNA, 19 bp, Homo sapiens
tttatgctactggtttgac

SEQ ID NO: 53781 - DNA, 17 bp, Homo sapiens
ccgtgtcacttccaaaa

SEQ ID NO: 53782 - DNA, 23 bp, Homo sapiens
tgaatattagagaaataaacttt

SEQ ID NO: 53783 - DNA, 16 bp, Homo sapiens
ctatccaacggctgtt

SEQ ID NO: 53784 - DNA, 20 bp, Homo sapiens
agacaaacataaaagtctat

SEQ ID NO: 53785 - DNA, 22 bp, Homo sapiens
gaaaaaattcggattgagatca

SEQ ID NO: 53786 - DNA, 19 bp, Homo sapiens
ccactgcccactcttgggt

SEQ ID NO: 53787 - DNA, 27 bp, Homo sapiens
ggatctttttgttcaattattttattt

SEQ ID NO: 53788 - DNA, 19 bp, Homo sapiens
agaatcgacactcaacaaa

SEQ ID NO: 53789 - DNA, 17 bp, Homo sapiens
agcccattggccttcgt

SEQ ID NO: 53790 - DNA, 19 bp, Homo sapiens
ggcttagagctatgatctc

SEQ ID NO: 53791 - DNA, 19 bp, Homo sapiens
aaagatctgaagattggcc

SEQ ID NO: 53792 - DNA, 18 bp, Homo sapiens
cagaggtgggcggatcat

SEQ ID NO: 53793 - DNA, 22 bp, Homo sapiens
tgtctcccgggctggggtgcag

SEQ ID NO: 53794 - DNA, 24 bp, Homo sapiens
tattatgcatttaatgtgcttctt

SEQ ID NO: 53795 - DNA, 20 bp, Homo sapiens
atcccatctacttgggaggc

SEQ ID NO: 53796 - DNA, 16 bp, Homo sapiens
aggagagggaatgagt

SEQ ID NO: 53797 - DNA, 17 bp, Homo sapiens
gagctgagatcgcgcta

SEQ ID NO: 53798 - DNA, 17 bp, Homo sapiens
gtggatggtgatgtcat

SEQ ID NO: 53799 - DNA, 25 bp, Homo sapiens
accatacataaaaatttcttgtagt

SEQ ID NO: 53800 - DNA, 18 bp, Homo sapiens
ctgtattattccaggtcc

SEQ ID NO: 53801 - DNA, 20 bp, Homo sapiens
aaagtttttccagaaatagt

SEQ ID NO: 53802 - DNA, 23 bp, Homo sapiens
gtgtaaatgttacccttttattt

SEQ ID NO: 53803 - DNA, 18 bp, Homo sapiens
gtgaatgaaaggcagcct

SEQ ID NO: 53804 - DNA, 19 bp, Homo sapiens
ggtgtgtgcttgtttctct

SEQ ID NO: 53805 - DNA, 16 bp, Homo sapiens
cttggagataggacct

SEQ ID NO: 53806 - DNA, 21 bp, Homo sapiens
tctgtaaacaaatttgctact

SEQ ID NO: 53807 - DNA, 21 bp, Homo sapiens
aattccacctaactacaacta

SEQ ID NO: 53808 - DNA, 20 bp, Homo sapiens
ttggcatcttctgaagatga

SEQ ID NO: 53809 - DNA, 24 bp, Homo sapiens
acaggtatcgtgaagtagacgcta

SEQ ID NO: 53810 - DNA, 20 bp, Homo sapiens
tgcagcaaggaaaagatgat

SEQ ID NO: 53811 - DNA, 17 bp, Homo sapiens
aacaaagcacagggtta

SEQ ID NO: 53812 - DNA, 17 bp, Homo sapiens
tttcttcaggtttcaca

SEQ ID NO: 53813 - DNA, 17 bp, Homo sapiens
ccaagtcctctgttatt

SEQ ID NO: 53814 - DNA, 21 bp, Homo sapiens
ctgttccagcaataatgctat

SEQ ID NO: 53815 - DNA, 19 bp, Homo sapiens
ttcagatagtaaagacaca

SEQ ID NO: 53816 - DNA, 27 bp, Homo sapiens
gtctcatacatattacatatctgtata

SEQ ID NO: 53817 - DNA, 18 bp, Homo sapiens
ttacctcatctacactgc

SEQ ID NO: 53818 - DNA, 17 bp, Homo sapiens
tatgctgactgttccac

SEQ ID NO: 53819 - DNA, 19 bp, Homo sapiens
ttccaaggaagtcatatat

SEQ ID NO: 53820 - DNA, 18 bp, Homo sapiens
ctcctgaagataggaagg

SEQ ID NO: 53821 - DNA, 24 bp, Homo sapiens
tataagacaaagtatttaagaacc

SEQ ID NO: 53822 - DNA, 26 bp, Homo sapiens
ttgggatttagtaataaataaaaaat

SEQ ID NO: 53823 - DNA, 16 bp, Homo sapiens
cttgggaacatgtgga

SEQ ID NO: 53824 - DNA, 17 bp, Homo sapiens
tgttacatttgctgcca

SEQ ID NO: 53825 - DNA, 19 bp, Homo sapiens
ctacctctggtgaaatttc

SEQ ID NO: 53826 - DNA, 28 bp, Homo sapiens
ttttaaagaatataaataccattttatt

SEQ ID NO: 53827 - DNA, 20 bp, Homo sapiens
atatatagtgccgaaacaca

SEQ ID NO: 53828 - DNA, 18 bp, Homo sapiens
acgtttaacacctgtaga

SEQ ID NO: 53829 - DNA, 21 bp, Homo sapiens
attcacctgtttccatttaaa

SEQ ID NO: 53830 - DNA, 17 bp, Homo sapiens
cagtctgacacattggt

SEQ ID NO: 53831 - DNA, 24 bp, Homo sapiens
tttgttatgaaaaaatcagtattt

SEQ ID NO: 53832 - DNA, 18 bp, Homo sapiens
cacccccaccaaaaaaaa

SEQ ID NO: 53833 - DNA, 16 bp, Homo sapiens
tccacgaaagatacct

SEQ ID NO: 53834 - DNA, 25 bp, Homo sapiens
gacttttaatttttttacaagtata

SEQ ID NO: 53835 - DNA, 20 bp, Homo sapiens
ttggtgcctaagacaaacca

SEQ ID NO: 53836 - DNA, 16 bp, Homo sapiens
aaagacttcctccagc

SEQ ID NO: 53837 - DNA, 23 bp, Homo sapiens
ataagactttagctattattatt

SEQ ID NO: 53838 - DNA, 19 bp, Homo sapiens
gtggatcaataacaactga

SEQ ID NO: 53839 - DNA, 25 bp, Homo sapiens
aagctttatattcaaaattttatac

SEQ ID NO: 53840 - DNA, 19 bp, Homo sapiens
tcaaaagcatcctgctggc

SEQ ID NO: 53841 - DNA, 17 bp, Homo sapiens
tgctaacagaggatgct

SEQ ID NO: 53842 - DNA, 22 bp, Homo sapiens
aacttcactctagcattaatta

SEQ ID NO: 53843 - DNA, 22 bp, Homo sapiens
aatttcctaagtcttcagttgt

SEQ ID NO: 53844 - DNA, 19 bp, Homo sapiens
gtctcttaaagtagggagt

SEQ ID NO: 53845 - DNA, 22 bp, Homo sapiens
tccatttcaatataacatggat

SEQ ID NO: 53846 - DNA, 25 bp, Homo sapiens
aagccaaaattatttttaaagtagg

SEQ ID NO: 53847 - DNA, 21 bp, Homo sapiens
tgcacatagagcgactagtaa

SEQ ID NO: 53848 - DNA, 16 bp, Homo sapiens
agtcaatgtgcctctg

SEQ ID NO: 53849 - DNA, 19 bp, Homo sapiens
actgagaagaggttagggt

SEQ ID NO: 53850 - DNA, 20 bp, Homo sapiens
gtcagagtctctgagttttt

SEQ ID NO: 53851 - DNA, 22 bp, Homo sapiens
aggtataattttgttttgtttt

SEQ ID NO: 53852 - DNA, 23 bp, Homo sapiens
ttgatgatcatatgtatttccca

SEQ ID NO: 53853 - DNA, 22 bp, Homo sapiens
atacacctgtcatgtgccaacg

SEQ ID NO: 53854 - DNA, 18 bp, Homo sapiens
ttgattttgcagaccatg

SEQ ID NO: 53855 - DNA, 23 bp, Homo sapiens
ctcctgggtatcactatcatcaa

SEQ ID NO: 53856 - DNA, 16 bp, Homo sapiens
accacctgcagtcccg

SEQ ID NO: 53857 - DNA, 17 bp, Homo sapiens
tattcattggcactggg

SEQ ID NO: 53858 - DNA, 20 bp, Homo sapiens
aactcagttctacagattcc

SEQ ID NO: 53859 - DNA, 23 bp, Homo sapiens
ctgggaatgatagctgtatcatg

SEQ ID NO: 53860 - DNA, 25 bp, Homo sapiens
tatttccttaatataaatatgtatg

SEQ ID NO: 53861 - DNA, 20 bp, Homo sapiens
gtgtggctgcaggtggcttg

SEQ ID NO: 53862 - DNA, 22 bp, Homo sapiens
acaaaattatcttatttggggc

SEQ ID NO: 53863 - DNA, 21 bp, Homo sapiens
gaagttcatttaagttgccat

SEQ ID NO: 53864 - DNA, 21 bp, Homo sapiens
tttccattagaataaaagttt

SEQ ID NO: 53865 - DNA, 20 bp, Homo sapiens
tttttaccacttcctgtgag

SEQ ID NO: 53866 - DNA, 16 bp, Homo sapiens
agaaagggcaaaggct

SEQ ID NO: 53867 - DNA, 24 bp, Homo sapiens
ctgtgaaaatgattttagtttaaa

SEQ ID NO: 53868 - DNA, 17 bp, Homo sapiens
tggaatactggttccga

SEQ ID NO: 53869 - DNA, 21 bp, Homo sapiens
tcataaaagggtcttaaagcc

SEQ ID NO: 53870 - DNA, 19 bp, Homo sapiens
ttaaccttgggttatgtac

SEQ ID NO: 53871 - DNA, 23 bp, Homo sapiens
atttgatgttatataccccaaag

SEQ ID NO: 53872 - DNA, 18 bp, Homo sapiens
taatgcataatgccattg

SEQ ID NO: 53873 - DNA, 16 bp, Homo sapiens
gggaactcttaatcgg

SEQ ID NO: 53874 - DNA, 20 bp, Homo sapiens
tatttgccaatctcacatca

SEQ ID NO: 53875 - DNA, 21 bp, Homo sapiens
tgctcggcatcagtgacgttt

SEQ ID NO: 53876 - DNA, 19 bp, Homo sapiens
tttcacgaaattcttgaaa

SEQ ID NO: 53877 - DNA, 21 bp, Homo sapiens
tgctctaaaggcacctttaat

SEQ ID NO: 53878 - DNA, 16 bp, Homo sapiens
gaggtccaccaggctt

SEQ ID NO: 53879 - DNA, 24 bp, Homo sapiens
taaaccaaattagtaattcaaaca

SEQ ID NO: 53880 - DNA, 19 bp, Homo sapiens
tcttgttcatgttaatgac

SEQ ID NO: 53881 - DNA, 18 bp, Homo sapiens
gtacaaaatattcggccg

SEQ ID NO: 53882 - DNA, 16 bp, Homo sapiens
aactacagacaactcc

SEQ ID NO: 53883 - DNA, 19 bp, Homo sapiens
tgtttcatattctgtgcta

SEQ ID NO: 53884 - DNA, 16 bp, Homo sapiens
acaggcatctggagat

SEQ ID NO: 53885 - DNA, 24 bp, Homo sapiens
tatattgcaaaaataagtcattaa

SEQ ID NO: 53886 - DNA, 17 bp, Homo sapiens
agaacgaggcgaaaatc

SEQ ID NO: 53887 - DNA, 19 bp, Homo sapiens
tcgggatgaaggcctcgca

SEQ ID NO: 53888 - DNA, 17 bp, Homo sapiens
accagaaatcatgccag

SEQ ID NO: 53889 - DNA, 24 bp, Homo sapiens
cataggtacagaaagtgacaggct

SEQ ID NO: 53890 - DNA, 17 bp, Homo sapiens
gtcttctcttgcagccc

SEQ ID NO: 53891 - DNA, 19 bp, Homo sapiens
tttgttgatatggatttca

SEQ ID NO: 53892 - DNA, 16 bp, Homo sapiens
cacttcaaaagccagt

SEQ ID NO: 53893 - DNA, 19 bp, Homo sapiens
aattcatcaacagagtcat

SEQ ID NO: 53894 - DNA, 18 bp, Homo sapiens
acagaaaaacagtgtagt

SEQ ID NO: 53895 - DNA, 16 bp, Homo sapiens
atcctttaattgggct

SEQ ID NO: 53896 - DNA, 18 bp, Homo sapiens
aggaatactgctggaacc

SEQ ID NO: 53897 - DNA, 21 bp, Homo sapiens
agtatgttcatcttcttgata

SEQ ID NO: 53898 - DNA, 17 bp, Homo sapiens
taggcgtaaacacagca

SEQ ID NO: 53899 - DNA, 17 bp, Homo sapiens
gacccgtaagatggaaa

SEQ ID NO: 53900 - DNA, 19 bp, Homo sapiens
aaatccattcctctagtta

SEQ ID NO: 53901 - DNA, 25 bp, Homo sapiens
aatagaactaatcataagtattaaa

SEQ ID NO: 53902 - DNA, 19 bp, Homo sapiens
gtttatggatacgtgcagc

SEQ ID NO: 53903 - DNA, 18 bp, Homo sapiens
gctcctactatttccagg

SEQ ID NO: 53904 - DNA, 22 bp, Homo sapiens
agttcataatcttgctgcaaat

SEQ ID NO: 53905 - DNA, 18 bp, Homo sapiens
tgccaagcataattttct

SEQ ID NO: 53906 - DNA, 18 bp, Homo sapiens
tgctaattatgcaacaca

SEQ ID NO: 53907 - DNA, 23 bp, Homo sapiens
gtgatatgttagtagattacaat

SEQ ID NO: 53908 - DNA, 16 bp, Homo sapiens
tgagagagctgcaagc

SEQ ID NO: 53909 - DNA, 24 bp, Homo sapiens
ttagaaaataaatcatcagaatat

SEQ ID NO: 53910 - DNA, 20 bp, Homo sapiens
ggagacctttcctttttagt

SEQ ID NO: 53911 - DNA, 27 bp, Homo sapiens
acattacctgataatctttattaattt

SEQ ID NO: 53912 - DNA, 23 bp, Homo sapiens
aatttttgtttcagtcataaaac

SEQ ID NO: 53913 - DNA, 16 bp, Homo sapiens
caccgtttctgcatga

SEQ ID NO: 53914 - DNA, 27 bp, Homo sapiens
attgatcaatcaatgaattatttattg

SEQ ID NO: 53915 - DNA, 18 bp, Homo sapiens
tcactatctactttcact

SEQ ID NO: 53916 - DNA, 22 bp, Homo sapiens
gcagtcctgatatatatatcag

SEQ ID NO: 53917 - DNA, 20 bp, Homo sapiens
tgttgacatgttacatacat

SEQ ID NO: 53918 - DNA, 19 bp, Homo sapiens
cttaatctattgcaggaga

SEQ ID NO: 53919 - DNA, 20 bp, Homo sapiens
tcattctccaaatgtaaggg

SEQ ID NO: 53920 - DNA, 20 bp, Homo sapiens
ttgaatacttggaatgtctc

SEQ ID NO: 53921 - DNA, 19 bp, Homo sapiens
agacatgaaaatcacgatg

SEQ ID NO: 53922 - DNA, 17 bp, Homo sapiens
tgtcttgtagacttagt

SEQ ID NO: 53923 - DNA, 20 bp, Homo sapiens
actcaattcatcagcattaa

SEQ ID NO: 53924 - DNA, 18 bp, Homo sapiens
tggaacataaactacctg

SEQ ID NO: 53925 - DNA, 18 bp, Homo sapiens
gtatctggaacaaaagca

SEQ ID NO: 53926 - DNA, 17 bp, Homo sapiens
tgctttcgctttgtagt

SEQ ID NO: 53927 - DNA, 24 bp, Homo sapiens
gtgtggactttatttttaagatca

SEQ ID NO: 53928 - DNA, 26 bp, Homo sapiens
aattctgagttttatttcttaaataa

SEQ ID NO: 53929 - DNA, 21 bp, Homo sapiens
caggaattaaagtaatttgaa

SEQ ID NO: 53930 - DNA, 17 bp, Homo sapiens
tcatcaagttgttgctt

SEQ ID NO: 53931 - DNA, 19 bp, Homo sapiens
tgctagctcagtttccttt

SEQ ID NO: 53932 - DNA, 24 bp, Homo sapiens
ttctcttgaacgagtttttcattt

SEQ ID NO: 53933 - DNA, 16 bp, Homo sapiens
gagcaaccactgaatt

SEQ ID NO: 53934 - DNA, 19 bp, Homo sapiens
aagtctgacttaacagaca

SEQ ID NO: 53935 - DNA, 21 bp, Homo sapiens
gcggggatactggcaaacagt

SEQ ID NO: 53936 - DNA, 22 bp, Homo sapiens
catgaagagcaatggaagttaa

SEQ ID NO: 53937 - DNA, 24 bp, Homo sapiens
aacattagatgtctgaaatgagta

SEQ ID NO: 53938 - DNA, 16 bp, Homo sapiens
agctttccttgcatgt

SEQ ID NO: 53939 - DNA, 21 bp, Homo sapiens
caaggatttcagttttgtctg

SEQ ID NO: 53940 - DNA, 16 bp, Homo sapiens
atgacagtggtctctg

SEQ ID NO: 53941 - DNA, 16 bp, Homo sapiens
tttcagctgttgctcc

SEQ ID NO: 53942 - DNA, 16 bp, Homo sapiens
ccttggtttcaacagc

SEQ ID NO: 53943 - DNA, 22 bp, Homo sapiens
ttattacaatgcctttaaaaag

SEQ ID NO: 53944 - DNA, 17 bp, Homo sapiens
gaaaaggaacgggaact

SEQ ID NO: 53945 - DNA, 20 bp, Homo sapiens
ttgttgctaattctttgatc

SEQ ID NO: 53946 - DNA, 28 bp, Homo sapiens
tttatataatatttacttaatatgtaat

SEQ ID NO: 53947 - DNA, 19 bp, Homo sapiens
aaagagctcaaacaagaca

SEQ ID NO: 53948 - DNA, 20 bp, Homo sapiens
accttctctcatatagagtt

SEQ ID NO: 53949 - DNA, 24 bp, Homo sapiens
ttatcatagttttcctttaaaagt

SEQ ID NO: 53950 - DNA, 19 bp, Homo sapiens
acaatataagtggtctggt

SEQ ID NO: 53951 - DNA, 22 bp, Homo sapiens
taacaactatattttgctgtgc

SEQ ID NO: 53952 - DNA, 16 bp, Homo sapiens
gctgcagtcttgagaa

SEQ ID NO: 53953 - DNA, 22 bp, Homo sapiens
tacaattttgaaatatctctat

SEQ ID NO: 53954 - DNA, 18 bp, Homo sapiens
gccacgatgctttgatgg

SEQ ID NO: 53955 - DNA, 18 bp, Homo sapiens
aatgcaacagatggctaa

SEQ ID NO: 53956 - DNA, 23 bp, Homo sapiens
aaataatgtttgaaagatgttct

SEQ ID NO: 53957 - DNA, 19 bp, Homo sapiens
agaatgtaattgtttctca

SEQ ID NO: 53958 - DNA, 27 bp, Homo sapiens
aattcatttatagaattgtaatcattt

SEQ ID NO: 53959 - DNA, 20 bp, Homo sapiens
gcatgtttaattcatcccca

SEQ ID NO: 53960 - DNA, 20 bp, Homo sapiens
gcacgtatacatcatttgtt

SEQ ID NO: 53961 - DNA, 17 bp, Homo sapiens
ttcagcaatggaaggaa

SEQ ID NO: 53962 - DNA, 24 bp, Homo sapiens
aatccttcaaaattatgttctagt

SEQ ID NO: 53963 - DNA, 17 bp, Homo sapiens
attcgggacaatgtaga

SEQ ID NO: 53964 - DNA, 21 bp, Homo sapiens
cttttgaatcctttgcatctc

SEQ ID NO: 53965 - DNA, 17 bp, Homo sapiens
cttgcgttttttacttc

SEQ ID NO: 53966 - DNA, 19 bp, Homo sapiens
acctcttgaagctgaataa

SEQ ID NO: 53967 - DNA, 25 bp, Homo sapiens
atataaatattttctatgtaacatt

SEQ ID NO: 53968 - DNA, 20 bp, Homo sapiens
gctgtttatgaagcttaatc

SEQ ID NO: 53969 - DNA, 20 bp, Homo sapiens
aataattaatctgtcctgca

SEQ ID NO: 53970 - DNA, 23 bp, Homo sapiens
tgacagcagttagtaggtcgagc

SEQ ID NO: 53971 - DNA, 20 bp, Homo sapiens
tgaggagaaaagaaaatgaa

SEQ ID NO: 53972 - DNA, 23 bp, Homo sapiens
ttttaaatagactagataaactt

SEQ ID NO: 53973 - DNA, 19 bp, Homo sapiens
aagaggccagatagaggag

SEQ ID NO: 53974 - DNA, 22 bp, Homo sapiens
cttatcaaagtgatatttctgt

SEQ ID NO: 53975 - DNA, 19 bp, Homo sapiens
ttttcctcaaactacaagt

SEQ ID NO: 53976 - DNA, 19 bp, Homo sapiens
agctgaagaagagataact

SEQ ID NO: 53977 - DNA, 17 bp, Homo sapiens
acttctgcttgctcttt

SEQ ID NO: 53978 - DNA, 16 bp, Homo sapiens
caagtgctctaactcc

SEQ ID NO: 53979 - DNA, 21 bp, Homo sapiens
tcacatttaatctgctactat

SEQ ID NO: 53980 - DNA, 22 bp, Homo sapiens
cctttttctgagaacatgttat

SEQ ID NO: 53981 - DNA, 20 bp, Homo sapiens
caaaatatggcaacagttta

SEQ ID NO: 53982 - DNA, 23 bp, Homo sapiens
tgtatttcagtggagcaaactgt

SEQ ID NO: 53983 - DNA, 24 bp, Homo sapiens
tactttgtttttaggtataaaatt

SEQ ID NO: 53984 - DNA, 19 bp, Homo sapiens
tcaataaccaaagttctca

SEQ ID NO: 53985 - DNA, 19 bp, Homo sapiens
agcaaatcaaagatccttc

SEQ ID NO: 53986 - DNA, 18 bp, Homo sapiens
tttctcctctggcttctt

SEQ ID NO: 53987 - DNA, 19 bp, Homo sapiens
tgtgtactataaaacacat

SEQ ID NO: 53988 - DNA, 23 bp, Homo sapiens
gagtttctgctacatctgcatct

SEQ ID NO: 53989 - DNA, 18 bp, Homo sapiens
tgaaaatgctggtttaca

SEQ ID NO: 53990 - DNA, 25 bp, Homo sapiens
attatttttctcttcctaaagacac

SEQ ID NO: 53991 - DNA, 19 bp, Homo sapiens
ggttacaggcaaactccat

SEQ ID NO: 53992 - DNA, 22 bp, Homo sapiens
ttttttttgtgttaaacaatct

SEQ ID NO: 53993 - DNA, 18 bp, Homo sapiens
aacaaaatgaaaccctca

SEQ ID NO: 53994 - DNA, 21 bp, Homo sapiens
tttacctttcctggggcattc

SEQ ID NO: 53995 - DNA, 19 bp, Homo sapiens
cgagatgtggaaatggaag

SEQ ID NO: 53996 - DNA, 24 bp, Homo sapiens
tgttaatacgagattgtacattat

SEQ ID NO: 53997 - DNA, 19 bp, Homo sapiens
ggctagttaatgacaagaa

SEQ ID NO: 53998 - DNA, 22 bp, Homo sapiens
gctgtttggctgaaatcagtct

SEQ ID NO: 53999 - DNA, 21 bp, Homo sapiens
tctcacattccttttcatctt

SEQ ID NO: 54000 - DNA, 20 bp, Homo sapiens
ctcttgcagctgctcaatca

SEQ ID NO: 54001 - DNA, 17 bp, Homo sapiens
cactgaagtcttcacag

SEQ ID NO: 54002 - DNA, 18 bp, Homo sapiens
accaacccgctcatatct

SEQ ID NO: 54003 - DNA, 18 bp, Homo sapiens
aaggattcttcacaggca

SEQ ID NO: 54004 - DNA, 24 bp, Homo sapiens
ctgaccaattaggcttacaaagaa

SEQ ID NO: 54005 - DNA, 18 bp, Homo sapiens
gtttctactctgtggact

SEQ ID NO: 54006 - DNA, 22 bp, Homo sapiens
ttctgactggctgatgtgtgtg

SEQ ID NO: 54007 - DNA, 21 bp, Homo sapiens
acaaccattgaagaatgaaaa

SEQ ID NO: 54008 - DNA, 17 bp, Homo sapiens
ttgaaaacagccatcat

SEQ ID NO: 54009 - DNA, 17 bp, Homo sapiens
catgagcaggtctgtat

SEQ ID NO: 54010 - DNA, 18 bp, Homo sapiens
atgccagtgggttgttga

SEQ ID NO: 54011 - DNA, 17 bp, Homo sapiens
gctgtgcctattttctg

SEQ ID NO: 54012 - DNA, 19 bp, Homo sapiens
attctaagcagaaaaaccc

SEQ ID NO: 54013 - DNA, 20 bp, Homo sapiens
gtgcaaaaaatcttggcaaa

SEQ ID NO: 54014 - DNA, 24 bp, Homo sapiens
tggtttattattctagtttgcaag

SEQ ID NO: 54015 - DNA, 16 bp, Homo sapiens
taaacagcatgcccgc

SEQ ID NO: 54016 - DNA, 21 bp, Homo sapiens
acatcctgccttgttccaaac

SEQ ID NO: 54017 - DNA, 16 bp, Homo sapiens
tgtcagtcgtgaggaa

SEQ ID NO: 54018 - DNA, 22 bp, Homo sapiens
accataccctccaaattttact

SEQ ID NO: 54019 - DNA, 17 bp, Homo sapiens
tcttggcatttttgcag

SEQ ID NO: 54020 - DNA, 16 bp, Homo sapiens
cctcctgcttgcgggc

SEQ ID NO: 54021 - DNA, 25 bp, Homo sapiens
agtgcatcagagattatattaatat

SEQ ID NO: 54022 - DNA, 18 bp, Homo sapiens
tctgtcttccagttcctc

SEQ ID NO: 54023 - DNA, 22 bp, Homo sapiens
aacattttctaaagcaatctta

SEQ ID NO: 54024 - DNA, 17 bp, Homo sapiens
gtccgtgttgttgaagt

SEQ ID NO: 54025 - DNA, 22 bp, Homo sapiens
agtaaaataccatatgtgttct

SEQ ID NO: 54026 - DNA, 18 bp, Homo sapiens
gcctgtgaaagatacagg

SEQ ID NO: 54027 - DNA, 20 bp, Homo sapiens
tagttacttaaatggtttgg

SEQ ID NO: 54028 - DNA, 17 bp, Homo sapiens
tttcttttttccacagc

SEQ ID NO: 54029 - DNA, 22 bp, Homo sapiens
agtcagtgatcaaagttcataa

SEQ ID NO: 54030 - DNA, 23 bp, Homo sapiens
tttcgttttatttggttcattcc

SEQ ID NO: 54031 - DNA, 21 bp, Homo sapiens
ccattccaaagaggtttagac

SEQ ID NO: 54032 - DNA, 16 bp, Homo sapiens
ctccaagcagcacatg

SEQ ID NO: 54033 - DNA, 19 bp, Homo sapiens
tcaaaatcatgcgagtggg

SEQ ID NO: 54034 - DNA, 19 bp, Homo sapiens
actcaccaaggttattttc

SEQ ID NO: 54035 - DNA, 19 bp, Homo sapiens
aaagaaccaggtgatcact

SEQ ID NO: 54036 - DNA, 20 bp, Homo sapiens
ccagcataggtttttaacag

SEQ ID NO: 54037 - DNA, 21 bp, Homo sapiens
taatttcatgtctaacaatct

SEQ ID NO: 54038 - DNA, 16 bp, Homo sapiens
agaagctgtccccact

SEQ ID NO: 54039 - DNA, 21 bp, Homo sapiens
agtataactcttttccctcct

SEQ ID NO: 54040 - DNA, 17 bp, Homo sapiens
catcccgacaagcagtg

SEQ ID NO: 54041 - DNA, 19 bp, Homo sapiens
tttcaataattccctcacc

SEQ ID NO: 54042 - DNA, 21 bp, Homo sapiens
ctaggccgactgactgaaaca

SEQ ID NO: 54043 - DNA, 20 bp, Homo sapiens
ctgttgggaaacctcaaagc

SEQ ID NO: 54044 - DNA, 17 bp, Homo sapiens
cagccccaatatgaatt

SEQ ID NO: 54045 - DNA, 22 bp, Homo sapiens
tctatgaccttaatagagactt

SEQ ID NO: 54046 - DNA, 18 bp, Homo sapiens
tacagatcaaagtgcagt

SEQ ID NO: 54047 - DNA, 22 bp, Homo sapiens
aatgatgtcaaatttctactga

SEQ ID NO: 54048 - DNA, 18 bp, Homo sapiens
ttgcttgatttactgctt

SEQ ID NO: 54049 - DNA, 23 bp, Homo sapiens
cttttctttgtatgtctaagaaa

SEQ ID NO: 54050 - DNA, 22 bp, Homo sapiens
tatatccatttagcaagtctct

SEQ ID NO: 54051 - DNA, 19 bp, Homo sapiens
tcaaagcaaactagcagtt

SEQ ID NO: 54052 - DNA, 24 bp, Homo sapiens
ggtcatagaggacatgcattttca

SEQ ID NO: 54053 - DNA, 22 bp, Homo sapiens
gctgatcattctaatttgatcc

SEQ ID NO: 54054 - DNA, 21 bp, Homo sapiens
acaatttatacttctattggt

SEQ ID NO: 54055 - DNA, 16 bp, Homo sapiens
tctccaggtggatgaa

SEQ ID NO: 54056 - DNA, 22 bp, Homo sapiens
tttaaccctgcacctgtactaa

SEQ ID NO: 54057 - DNA, 20 bp, Homo sapiens
tgtcttttcatttgtctggg

SEQ ID NO: 54058 - DNA, 18 bp, Homo sapiens
agctccgaccagcaaact

SEQ ID NO: 54059 - DNA, 21 bp, Homo sapiens
cgggaagtagcttaattggta

SEQ ID NO: 54060 - DNA, 18 bp, Homo sapiens
tctgatgcactgaatgat

SEQ ID NO: 54061 - DNA, 18 bp, Homo sapiens
ctctccaatactagttca

SEQ ID NO: 54062 - DNA, 18 bp, Homo sapiens
ccttcaagtagaagcgga

SEQ ID NO: 54063 - DNA, 21 bp, Homo sapiens
tcactataacataagtacatt

SEQ ID NO: 54064 - DNA, 20 bp, Homo sapiens
atattgatttggctggtgat

SEQ ID NO: 54065 - DNA, 20 bp, Homo sapiens
accacattctcacaaatgca

SEQ ID NO: 54066 - DNA, 19 bp, Homo sapiens
aacatctgaggatgctaaa

SEQ ID NO: 54067 - DNA, 16 bp, Homo sapiens
agacaggaaaatccgc

SEQ ID NO: 54068 - DNA, 23 bp, Homo sapiens
tatgcacaataattttgttgagt

SEQ ID NO: 54069 - DNA, 22 bp, Homo sapiens
atgccattgactggatgatatc

SEQ ID NO: 54070 - DNA, 23 bp, Homo sapiens
taatgcagtttgtaatttctttg

SEQ ID NO: 54071 - DNA, 22 bp, Homo sapiens
gccacctgcatataaaaataaa

SEQ ID NO: 54072 - DNA, 19 bp, Homo sapiens
cccacctcactttggactg

SEQ ID NO: 54073 - DNA, 19 bp, Homo sapiens
acactcacattcagaatgc

SEQ ID NO: 54074 - DNA, 17 bp, Homo sapiens
tccatggtctaagtgtt

SEQ ID NO: 54075 - DNA, 21 bp, Homo sapiens
tcattgtgttcattttcaagg

SEQ ID NO: 54076 - DNA, 16 bp, Homo sapiens
acctctccactaagtt

SEQ ID NO: 54077 - DNA, 21 bp, Homo sapiens
catatctagaggcacattaaa

SEQ ID NO: 54078 - DNA, 19 bp, Homo sapiens
aaacacacttgaaatggag

SEQ ID NO: 54079 - DNA, 19 bp, Homo sapiens
tttctcaacaaagcagtaa

SEQ ID NO: 54080 - DNA, 16 bp, Homo sapiens
accgagccatacaaca

SEQ ID NO: 54081 - DNA, 23 bp, Homo sapiens
attttagcaatatttttattaca

SEQ ID NO: 54082 - DNA, 20 bp, Homo sapiens
gtgagccaatcagttatgtt

SEQ ID NO: 54083 - DNA, 24 bp, Homo sapiens
tatcatatttactgctaccaatat

SEQ ID NO: 54084 - DNA, 16 bp, Homo sapiens
tcgacaagacagctcc

SEQ ID NO: 54085 - DNA, 21 bp, Homo sapiens
ctaaaggattctactgtgtaa

SEQ ID NO: 54086 - DNA, 23 bp, Homo sapiens
ctatacaaaacaattctcttgtg

SEQ ID NO: 54087 - DNA, 21 bp, Homo sapiens
caatggtaaagttaacataac

SEQ ID NO: 54088 - DNA, 16 bp, Homo sapiens
tgatgacccagaagtg

SEQ ID NO: 54089 - DNA, 19 bp, Homo sapiens
agcgcatacatggagaatc

SEQ ID NO: 54090 - DNA, 19 bp, Homo sapiens
tgtagtactttaaccctca

SEQ ID NO: 54091 - DNA, 20 bp, Homo sapiens
ttctttttacaggtttcaaa

SEQ ID NO: 54092 - DNA, 16 bp, Homo sapiens
tctgcacttgaaggca

SEQ ID NO: 54093 - DNA, 23 bp, Homo sapiens
acagaaccattaaatggtttctc

SEQ ID NO: 54094 - DNA, 20 bp, Homo sapiens
cagcattcacaacctctcca

SEQ ID NO: 54095 - DNA, 19 bp, Homo sapiens
tacatcttgccctcctcta

SEQ ID NO: 54096 - DNA, 19 bp, Homo sapiens
catccgagcagtattgatt

SEQ ID NO: 54097 - DNA, 21 bp, Homo sapiens
cctgcttctgtaacccacgaa

SEQ ID NO: 54098 - DNA, 17 bp, Homo sapiens
ccaaagttggagttgtt

SEQ ID NO: 54099 - DNA, 24 bp, Homo sapiens
aggcacaatagggatgcagatgga

SEQ ID NO: 54100 - DNA, 16 bp, Homo sapiens
accgtgttagccaaga

SEQ ID NO: 54101 - DNA, 22 bp, Homo sapiens
taaaaattccttctgcaaaaat

SEQ ID NO: 54102 - DNA, 16 bp, Homo sapiens
ctacaggcgcccacca

SEQ ID NO: 54103 - DNA, 16 bp, Homo sapiens
cgcatttccacttcta

SEQ ID NO: 54104 - DNA, 23 bp, Homo sapiens
gagacaggagaatggcatgaacc

SEQ ID NO: 54105 - DNA, 16 bp, Homo sapiens
tccacaccacgctctc

SEQ ID NO: 54106 - DNA, 16 bp, Homo sapiens
gaattggccagtccac

SEQ ID NO: 54107 - DNA, 20 bp, Homo sapiens
tgtgagtactgtcttaccat

SEQ ID NO: 54108 - DNA, 25 bp, Homo sapiens
ttaaaattgatattagttcagtgtt

SEQ ID NO: 54109 - DNA, 20 bp, Homo sapiens
attccccaggctgactgaga

SEQ ID NO: 54110 - DNA, 26 bp, Homo sapiens
ttactataataataataatatgctgg

SEQ ID NO: 54111 - DNA, 17 bp, Homo sapiens
gatgcccatcagcctcg

SEQ ID NO: 54112 - DNA, 18 bp, Homo sapiens
ttcaagacgaaagcatat

SEQ ID NO: 54113 - DNA, 17 bp, Homo sapiens
gctgagtcagaagaagc

SEQ ID NO: 54114 - DNA, 21 bp, Homo sapiens
tggcaatgacactctcattct

SEQ ID NO: 54115 - DNA, 16 bp, Homo sapiens
ctgagatgaggggcaa

SEQ ID NO: 54116 - DNA, 19 bp, Homo sapiens
tccattacctggtcacatt

SEQ ID NO: 54117 - DNA, 18 bp, Homo sapiens
tacctggttatacttgcg

SEQ ID NO: 54118 - DNA, 16 bp, Homo sapiens
gagttccagcaacaga

SEQ ID NO: 54119 - DNA, 16 bp, Homo sapiens
agttggggagaactta

SEQ ID NO: 54120 - DNA, 20 bp, Homo sapiens
ctgcactggtgtccatgagg

SEQ ID NO: 54121 - DNA, 20 bp, Homo sapiens
aatatcaggaaatttcacct

SEQ ID NO: 54122 - DNA, 19 bp, Homo sapiens
aaaaacaaaaacctaagtt

SEQ ID NO: 54123 - DNA, 17 bp, Homo sapiens
agggagattaccggatg

SEQ ID NO: 54124 - DNA, 20 bp, Homo sapiens
gtacaaatacttcaggtgaa

SEQ ID NO: 54125 - DNA, 16 bp, Homo sapiens
ccgaactggggaggtc

SEQ ID NO: 54126 - DNA, 23 bp, Homo sapiens
cgtgactttttaaggatttttct

SEQ ID NO: 54127 - DNA, 20 bp, Homo sapiens
ggtttttaaacatgtagcat

SEQ ID NO: 54128 - DNA, 16 bp, Homo sapiens
tgtggccatccatccg

SEQ ID NO: 54129 - DNA, 20 bp, Homo sapiens
tgaaaactgctagactaaat

SEQ ID NO: 54130 - DNA, 21 bp, Homo sapiens
aaattgtccttaaagatgacc

SEQ ID NO: 54131 - DNA, 18 bp, Homo sapiens
ttggccccagcagtcata

SEQ ID NO: 54132 - DNA, 21 bp, Homo sapiens
tagcaggaagaatgtgtcaag

SEQ ID NO: 54133 - DNA, 19 bp, Homo sapiens
tcatgcttttgaccttaat

SEQ ID NO: 54134 - DNA, 21 bp, Homo sapiens
ctgaagtttacatcccaatgt

SEQ ID NO: 54135 - DNA, 20 bp, Homo sapiens
cttctgtgctaattattaaa

SEQ ID NO: 54136 - DNA, 20 bp, Homo sapiens
tctgaattatacctgaactt

SEQ ID NO: 54137 - DNA, 20 bp, Homo sapiens
actggagaattaaagttagt

SEQ ID NO: 54138 - DNA, 17 bp, Homo sapiens
tcattcactccatcaga

SEQ ID NO: 54139 - DNA, 17 bp, Homo sapiens
ggttatgccctttccaa

SEQ ID NO: 54140 - DNA, 19 bp, Homo sapiens
ttcgactgaaaaagaattt

SEQ ID NO: 54141 - DNA, 18 bp, Homo sapiens
tgtgtttttgtggattgt

SEQ ID NO: 54142 - DNA, 21 bp, Homo sapiens
cgcctgaatatcaaaggctaa

SEQ ID NO: 54143 - DNA, 19 bp, Homo sapiens
caaggagtgtgaagtctta

SEQ ID NO: 54144 - DNA, 16 bp, Homo sapiens
ccaactgtgccattgg

SEQ ID NO: 54145 - DNA, 18 bp, Homo sapiens
acattccccactaatgga

SEQ ID NO: 54146 - DNA, 17 bp, Homo sapiens
gagaggtgactatctgc

SEQ ID NO: 54147 - DNA, 20 bp, Homo sapiens
cataacatacagctctgtct

SEQ ID NO: 54148 - DNA, 19 bp, Homo sapiens
tggatctgaggattttgat

SEQ ID NO: 54149 - DNA, 21 bp, Homo sapiens
gtttggagatgccccagcact

SEQ ID NO: 54150 - DNA, 18 bp, Homo sapiens
ttgtttgcacttactcac

SEQ ID NO: 54151 - DNA, 19 bp, Homo sapiens
ggttaccatagttcgaggt

SEQ ID NO: 54152 - DNA, 16 bp, Homo sapiens
tggcagaagcagcatg

SEQ ID NO: 54153 - DNA, 22 bp, Homo sapiens
cttccttaaaaactcggatatc

SEQ ID NO: 54154 - DNA, 16 bp, Homo sapiens
cctcccattagaggga

SEQ ID NO: 54155 - DNA, 18 bp, Homo sapiens
aagagaagagaaagacga

SEQ ID NO: 54156 - DNA, 19 bp, Homo sapiens
atgttaattccttggcctt

SEQ ID NO: 54157 - DNA, 20 bp, Homo sapiens
caccaaaatcagccaggaga

SEQ ID NO: 54158 - DNA, 16 bp, Homo sapiens
tggagaaacgatggca

SEQ ID NO: 54159 - DNA, 20 bp, Homo sapiens
tcatttggctgaacacacaa

SEQ ID NO: 54160 - DNA, 20 bp, Homo sapiens
gaatagcattcattcgtgtt

SEQ ID NO: 54161 - DNA, 19 bp, Homo sapiens
tcaccatcaaagtcacaca

SEQ ID NO: 54162 - DNA, 18 bp, Homo sapiens
caccaactctactgagta

SEQ ID NO: 54163 - DNA, 20 bp, Homo sapiens
tgaaggagaggattacacaa

SEQ ID NO: 54164 - DNA, 17 bp, Homo sapiens
ggcaattgtgctctgca

SEQ ID NO: 54165 - DNA, 26 bp, Homo sapiens
taatgcacagaattataaatattatt

SEQ ID NO: 54166 - DNA, 18 bp, Homo sapiens
atgcaattgtgctgggga

SEQ ID NO: 54167 - DNA, 18 bp, Homo sapiens
aaatgcttaagggtacca

SEQ ID NO: 54168 - DNA, 20 bp, Homo sapiens
gcctgcatattatcgtgtct

SEQ ID NO: 54169 - DNA, 21 bp, Homo sapiens
cacttccttcatgattgaaac

SEQ ID NO: 54170 - DNA, 18 bp, Homo sapiens
gttttactcaaaatctgc

SEQ ID NO: 54171 - DNA, 20 bp, Homo sapiens
ggaagaaatgtctcccaatg

SEQ ID NO: 54172 - DNA, 24 bp, Homo sapiens
aagtagattattatccatatgtgc

SEQ ID NO: 54173 - DNA, 19 bp, Homo sapiens
agttccgagtacataaagc

SEQ ID NO: 54174 - DNA, 20 bp, Homo sapiens
tttggcttatgatgtctaca

SEQ ID NO: 54175 - DNA, 21 bp, Homo sapiens
actataacagtcatacaacaa

SEQ ID NO: 54176 - DNA, 18 bp, Homo sapiens
tgcaggcgtattgaaccc

SEQ ID NO: 54177 - DNA, 21 bp, Homo sapiens
tggacattaatgagtaatgac

SEQ ID NO: 54178 - DNA, 16 bp, Homo sapiens
gccccctggaatctga

SEQ ID NO: 54179 - DNA, 20 bp, Homo sapiens
tgtagaacaaatccgaatta

SEQ ID NO: 54180 - DNA, 20 bp, Homo sapiens
aggtttttattcataatcct

SEQ ID NO: 54181 - DNA, 18 bp, Homo sapiens
gcatcatagccaagctca

SEQ ID NO: 54182 - DNA, 24 bp, Homo sapiens
aaaaatgtatgatactaatttttt

SEQ ID NO: 54183 - DNA, 18 bp, Homo sapiens
atgctgagaagagaaaca

SEQ ID NO: 54184 - DNA, 18 bp, Homo sapiens
ttaaagtgacctcttgtt

SEQ ID NO: 54185 - DNA, 18 bp, Homo sapiens
ctgacatgctggttccgt

SEQ ID NO: 54186 - DNA, 22 bp, Homo sapiens
cgggactcacccgtgcctggcg

SEQ ID NO: 54187 - DNA, 23 bp, Homo sapiens
gaccggttgccgggcaacacggg

SEQ ID NO: 54188 - DNA, 24 bp, Homo sapiens
gtgttcaccctgaaactgcgccac

SEQ ID NO: 54189 - DNA, 24 bp, Homo sapiens
ggggcgcggccggcggagatcctg

SEQ ID NO: 54190 - DNA, 17 bp, Homo sapiens
cagcttccagccctcct

SEQ ID NO: 54191 - DNA, 24 bp, Homo sapiens
cggttaccttgcccgtttgggtgg

SEQ ID NO: 54192 - DNA, 16 bp, Homo sapiens
aggtagtgtccctgca

SEQ ID NO: 54193 - DNA, 24 bp, Homo sapiens
tatggccaccattcgggggctgat

SEQ ID NO: 54194 - DNA, 19 bp, Homo sapiens
gcggtacctggacgggttc

SEQ ID NO: 54195 - DNA, 16 bp, Homo sapiens
caggtggaattgtgca

SEQ ID NO: 54196 - DNA, 17 bp, Homo sapiens
tgaaaagttagggaagt

SEQ ID NO: 54197 - DNA, 19 bp, Homo sapiens
ggggaggaccgaggccaga

SEQ ID NO: 54198 - DNA, 22 bp, Homo sapiens
gcttgaataactgcatgttctt

SEQ ID NO: 54199 - DNA, 23 bp, Homo sapiens
ggagattctaggcctggcctgag

SEQ ID NO: 54200 - DNA, 19 bp, Homo sapiens
gtgagactgtctcagaaca

SEQ ID NO: 54201 - DNA, 23 bp, Homo sapiens
aatggattctggaggtgtcagac

SEQ ID NO: 54202 - DNA, 23 bp, Homo sapiens
gtccccgcgcagccccagctcaa

SEQ ID NO: 54203 - DNA, 23 bp, Homo sapiens
actgacggaggcggggaagcacg

SEQ ID NO: 54204 - DNA, 23 bp, Homo sapiens
agtaccaggaggccctcagcagg

SEQ ID NO: 54205 - DNA, 20 bp, Homo sapiens
ccgggtgggtggctgcagcc

SEQ ID NO: 54206 - DNA, 16 bp, Homo sapiens
cagccccagccgtgtg

SEQ ID NO: 54207 - DNA, 23 bp, Homo sapiens
cttaccatgaccgcccagttgca

SEQ ID NO: 54208 - DNA, 16 bp, Homo sapiens
cagcccgttagagctc

SEQ ID NO: 54209 - DNA, 22 bp, Homo sapiens
ctggtgctgctggacgaccgag

SEQ ID NO: 54210 - DNA, 16 bp, Homo sapiens
ccggggccgctgcagg

SEQ ID NO: 54211 - DNA, 24 bp, Homo sapiens
gggaggagggcaggccaccaagca

SEQ ID NO: 54212 - DNA, 23 bp, Homo sapiens
cacgaagctgcccctgatcttcc

SEQ ID NO: 54213 - DNA, 24 bp, Homo sapiens
gaggcggcgggcagggtgcagagg

SEQ ID NO: 54214 - DNA, 21 bp, Homo sapiens
attgatttctgccctgggcag

SEQ ID NO: 54215 - DNA, 17 bp, Homo sapiens
cactgcctcagcagcca

SEQ ID NO: 54216 - DNA, 22 bp, Homo sapiens
cgaggcccctcacggccgcagg

SEQ ID NO: 54217 - DNA, 24 bp, Homo sapiens
cctgggtcccgtcccaggtggaag

SEQ ID NO: 54218 - DNA, 20 bp, Homo sapiens
acaggcagacaaggcccctc

SEQ ID NO: 54219 - DNA, 16 bp, Homo sapiens
cctgaaacgttctgcc

SEQ ID NO: 54220 - DNA, 24 bp, Homo sapiens
caaggctcacttctggacctggac

SEQ ID NO: 54221 - DNA, 24 bp, Homo sapiens
tgtggagggggtggagttcctgcc

SEQ ID NO: 54222 - DNA, 23 bp, Homo sapiens
gcctatcttctattaccgtggcg

SEQ ID NO: 54223 - DNA, 16 bp, Homo sapiens
tctggatagagatggg

SEQ ID NO: 54224 - DNA, 16 bp, Homo sapiens
caggtggccccagcgt

SEQ ID NO: 54225 - DNA, 24 bp, Homo sapiens
gtacctgtctgaagttctcccagg

SEQ ID NO: 54226 - DNA, 22 bp, Homo sapiens
tatcaaccaagacctcacgtgg

SEQ ID NO: 54227 - DNA, 17 bp, Homo sapiens
ccatcagcgtgtcgcca

SEQ ID NO: 54228 - DNA, 24 bp, Homo sapiens
cctctcgtctcaggcacccctgcc

SEQ ID NO: 54229 - DNA, 16 bp, Homo sapiens
gggccattgatggcct

SEQ ID NO: 54230 - DNA, 24 bp, Homo sapiens
aggagggctgctgggcctgggggt

SEQ ID NO: 54231 - DNA, 19 bp, Homo sapiens
ggcagcatcatggacctct

SEQ ID NO: 54232 - DNA, 21 bp, Homo sapiens
atcgggggaaggggccggggc

SEQ ID NO: 54233 - DNA, 16 bp, Homo sapiens
ggtgcagagtgccctg

SEQ ID NO: 54234 - DNA, 24 bp, Homo sapiens
gagggtggggaggaggttgaggcc

SEQ ID NO: 54235 - DNA, 23 bp, Homo sapiens
tatctgtagacccagctgggcag

SEQ ID NO: 54236 - DNA, 24 bp, Homo sapiens
caagggccaggctggtggtgaaga

SEQ ID NO: 54237 - DNA, 18 bp, Homo sapiens
caggccttgtgaccccgc

SEQ ID NO: 54238 - DNA, 18 bp, Homo sapiens
ggggtgcgtggaggctga

SEQ ID NO: 54239 - DNA, 23 bp, Homo sapiens
tttgaaggagggatgagggagcc

SEQ ID NO: 54240 - DNA, 21 bp, Homo sapiens
agcacggggtgcatgggggag

SEQ ID NO: 54241 - DNA, 23 bp, Homo sapiens
gacaagggcccctctctcccagg

SEQ ID NO: 54242 - DNA, 23 bp, Homo sapiens
caggcctggacctgctgcccggc

SEQ ID NO: 54243 - DNA, 23 bp, Homo sapiens
gtctcagtgactcagtggggagg

SEQ ID NO: 54244 - DNA, 21 bp, Homo sapiens
ccctggccaccatgcgagggc

SEQ ID NO: 54245 - DNA, 19 bp, Homo sapiens
cggatcatgcactccagcc

SEQ ID NO: 54246 - DNA, 24 bp, Homo sapiens
ccacacagaaaggggccgttgctg

SEQ ID NO: 54247 - DNA, 23 bp, Homo sapiens
gtcggacaacggcgctgccctca

SEQ ID NO: 54248 - DNA, 22 bp, Homo sapiens
tggacccagagggacccttcat

SEQ ID NO: 54249 - DNA, 23 bp, Homo sapiens
gaagatactggagctcctccaag

SEQ ID NO: 54250 - DNA, 20 bp, Homo sapiens
caggcactcttcgctgacac

SEQ ID NO: 54251 - DNA, 23 bp, Homo sapiens
agatgccttttgtcaccatcctg

SEQ ID NO: 54252 - DNA, 20 bp, Homo sapiens
ttgttcgggggcggaaatga

SEQ ID NO: 54253 - DNA, 19 bp, Homo sapiens
aatcacagtatgccgttgg

SEQ ID NO: 54254 - DNA, 17 bp, Homo sapiens
cgcgacgtgcaggtctt

SEQ ID NO: 54255 - DNA, 18 bp, Homo sapiens
gaggccggccagtttcac

SEQ ID NO: 54256 - DNA, 21 bp, Homo sapiens
ccggacggcgtctccatacct

SEQ ID NO: 54257 - DNA, 19 bp, Homo sapiens
ctgatcccaggccagtgga

SEQ ID NO: 54258 - DNA, 23 bp, Homo sapiens
actgggctgtcgacgccacgcac

SEQ ID NO: 54259 - DNA, 19 bp, Homo sapiens
gcctaaatgccacggtact

SEQ ID NO: 54260 - DNA, 18 bp, Homo sapiens
aagccctggacttcatta

SEQ ID NO: 54261 - DNA, 23 bp, Homo sapiens
cagcgaggtctatgctccatgga

SEQ ID NO: 54262 - DNA, 24 bp, Homo sapiens
acggggaccgtgggaggcatgagg

SEQ ID NO: 54263 - DNA, 24 bp, Homo sapiens
aagggtttggaggcatagacgggt

SEQ ID NO: 54264 - DNA, 21 bp, Homo sapiens
gtgggacgcgtggggacgggg

SEQ ID NO: 54265 - DNA, 24 bp, Homo sapiens
tggtgccgtgcctgtctcttaatg

SEQ ID NO: 54266 - DNA, 17 bp, Homo sapiens
gagggtgatgaggtccc

SEQ ID NO: 54267 - DNA, 23 bp, Homo sapiens
gttcttttcagatattatgaaga

SEQ ID NO: 54268 - DNA, 21 bp, Homo sapiens
ctgtccccacgcctcccacag

SEQ ID NO: 54269 - DNA, 21 bp, Homo sapiens
cagggagaacgggactttctt

SEQ ID NO: 54270 - DNA, 16 bp, Homo sapiens
gggcgaggatggtgcg

SEQ ID NO: 54271 - DNA, 22 bp, Homo sapiens
catgagccatgacgcccagccc

SEQ ID NO: 54272 - DNA, 23 bp, Homo sapiens
tcttcagattaataggaaattct

SEQ ID NO: 54273 - DNA, 17 bp, Homo sapiens
agaagccaccaaaccaa

SEQ ID NO: 54274 - DNA, 16 bp, Homo sapiens
caaggccaggcccaac

SEQ ID NO: 54275 - DNA, 16 bp, Homo sapiens
catgagtggcgacttg

SEQ ID NO: 54276 - DNA, 18 bp, Homo sapiens
ctgaagcacggatttgat

SEQ ID NO: 54277 - DNA, 20 bp, Homo sapiens
gttcaggacgtgggagggga

SEQ ID NO: 54278 - DNA, 21 bp, Homo sapiens
cgtggggtccctgaagtgtcc

SEQ ID NO: 54279 - DNA, 16 bp, Homo sapiens
gtacacagggatgttg

SEQ ID NO: 54280 - DNA, 16 bp, Homo sapiens
ttttgtgaaggtggta

SEQ ID NO: 54281 - DNA, 17 bp, Homo sapiens
ggggatccaaaccactc

SEQ ID NO: 54282 - DNA, 18 bp, Homo sapiens
ttttgtccctgccgtgcc

SEQ ID NO: 54283 - DNA, 22 bp, Homo sapiens
gtcacgctggcctgcacaggga

SEQ ID NO: 54284 - DNA, 16 bp, Homo sapiens
ggagcttctgaagaag

SEQ ID NO: 54285 - DNA, 23 bp, Homo sapiens
gtttcccacccaagacaccctcc

SEQ ID NO: 54286 - DNA, 22 bp, Homo sapiens
gctcttccagcctacacaccgc

SEQ ID NO: 54287 - DNA, 24 bp, Homo sapiens
aggccaggaagtggatggagcagg

SEQ ID NO: 54288 - DNA, 23 bp, Homo sapiens
tcctgttaggatggggttggtgg

SEQ ID NO: 54289 - DNA, 24 bp, Homo sapiens
ccgacaatcttgctgacgtagccg

SEQ ID NO: 54290 - DNA, 16 bp, Homo sapiens
ccccgaggggccagtg

SEQ ID NO: 54291 - DNA, 24 bp, Homo sapiens
ctgggatgccgcccacaatctcct

SEQ ID NO: 54292 - DNA, 23 bp, Homo sapiens
aggaagccagctaggggggcctg

SEQ ID NO: 54293 - DNA, 17 bp, Homo sapiens
tacccatccgcaatggc

SEQ ID NO: 54294 - DNA, 21 bp, Homo sapiens
cacctgcagcttgccacccga

SEQ ID NO: 54295 - DNA, 23 bp, Homo sapiens
acacccttcttatccagtttctg

SEQ ID NO: 54296 - DNA, 23 bp, Homo sapiens
ctgcccaaccctgcaccccaagg

SEQ ID NO: 54297 - DNA, 23 bp, Homo sapiens
ctgtcacgcgtctgtctactcgt

SEQ ID NO: 54298 - DNA, 23 bp, Homo sapiens
gggcgttggtggtgtagaagcca

SEQ ID NO: 54299 - DNA, 24 bp, Homo sapiens
gtggagacgctaacggggattgac

SEQ ID NO: 54300 - DNA, 18 bp, Homo sapiens
ctgggatttgatgagaaa

SEQ ID NO: 54301 - DNA, 24 bp, Homo sapiens
ctgcagaagggctgcttttcccaa

SEQ ID NO: 54302 - DNA, 21 bp, Homo sapiens
aggaatagacaaggttgatgc

SEQ ID NO: 54303 - DNA, 23 bp, Homo sapiens
gtgacctcggggtgtatggagag

SEQ ID NO: 54304 - DNA, 24 bp, Homo sapiens
gcctgttgggctcaccccttcctg

SEQ ID NO: 54305 - DNA, 23 bp, Homo sapiens
aagcacctgcagaaggcgctcat

SEQ ID NO: 54306 - DNA, 19 bp, Homo sapiens
gggttggcagaatagaagt

SEQ ID NO: 54307 - DNA, 24 bp, Homo sapiens
acagggtggtgctggcttccacgg

SEQ ID NO: 54308 - DNA, 24 bp, Homo sapiens
aaattcggggtctctctggagggc

SEQ ID NO: 54309 - DNA, 22 bp, Homo sapiens
cacgcacgcaggcgatgctggg

SEQ ID NO: 54310 - DNA, 16 bp, Homo sapiens
tgcacgcacgcaggcg

SEQ ID NO: 54311 - DNA, 24 bp, Homo sapiens
catggtgccaagagcgtgtcgggg

SEQ ID NO: 54312 - DNA, 17 bp, Homo sapiens
cctgaagaccaagcaga

SEQ ID NO: 54313 - DNA, 22 bp, Homo sapiens
cagagctcggccaaaccccagc

SEQ ID NO: 54314 - DNA, 24 bp, Homo sapiens
gccagctcctgcgagcatgcagat

SEQ ID NO: 54315 - DNA, 19 bp, Homo sapiens
gccagcccaaacctcagca

SEQ ID NO: 54316 - DNA, 24 bp, Homo sapiens
gtacagacatacgagggcctgtgt

SEQ ID NO: 54317 - DNA, 18 bp, Homo sapiens
cacgctgtctttcgcctc

SEQ ID NO: 54318 - DNA, 18 bp, Homo sapiens
acgataactgggcttctg

SEQ ID NO: 54319 - DNA, 24 bp, Homo sapiens
ctcctcccagcctgacaccagcat

SEQ ID NO: 54320 - DNA, 22 bp, Homo sapiens
ctcctccccgcgcggggcctcc

SEQ ID NO: 54321 - DNA, 16 bp, Homo sapiens
ggatgggggcctcggg

SEQ ID NO: 54322 - DNA, 21 bp, Homo sapiens
caccccgcccgcccttccccc

SEQ ID NO: 54323 - DNA, 16 bp, Homo sapiens
tggcggcggttgtcgc

SEQ ID NO: 54324 - DNA, 18 bp, Homo sapiens
cccggccctgccccgtcc

SEQ ID NO: 54325 - DNA, 21 bp, Homo sapiens
aagggccggcggacgctcgct

SEQ ID NO: 54326 - DNA, 23 bp, Homo sapiens
gatgttggggggctgcggggcgc

SEQ ID NO: 54327 - DNA, 19 bp, Homo sapiens
gcggactctggccccgccc

SEQ ID NO: 54328 - DNA, 23 bp, Homo sapiens
ctgccaccacctcgtcgccgcga

SEQ ID NO: 54329 - DNA, 22 bp, Homo sapiens
gctgagtgactcggggccggac

SEQ ID NO: 54330 - DNA, 16 bp, Homo sapiens
agcaggctgcccctga

SEQ ID NO: 54331 - DNA, 24 bp, Homo sapiens
agcagtcgaggagatttgtaatcc

SEQ ID NO: 54332 - DNA, 16 bp, Homo sapiens
tcacagctgctggctg

SEQ ID NO: 54333 - DNA, 24 bp, Homo sapiens
tgtaataaattatttacacgggag

SEQ ID NO: 54334 - DNA, 16 bp, Homo sapiens
tcccctgtggtctgag

SEQ ID NO: 54335 - DNA, 19 bp, Homo sapiens
gctcctgggacaggtcagc

SEQ ID NO: 54336 - DNA, 23 bp, Homo sapiens
aattgacagctgcctgggccatg

SEQ ID NO: 54337 - DNA, 23 bp, Homo sapiens
ctctgggtcgcagtccccacgat

SEQ ID NO: 54338 - DNA, 23 bp, Homo sapiens
gcttctcacacgtggcagaggta

SEQ ID NO: 54339 - DNA, 22 bp, Homo sapiens
atgccgcccactaggcctcaga

SEQ ID NO: 54340 - DNA, 16 bp, Homo sapiens
aacaaaagctcgtctt

SEQ ID NO: 54341 - DNA, 16 bp, Homo sapiens
ccagccaggcaggcac

SEQ ID NO: 54342 - DNA, 17 bp, Homo sapiens
gtcttctaacctgtgag

SEQ ID NO: 54343 - DNA, 18 bp, Homo sapiens
gcccaaggtgggcatctt

SEQ ID NO: 54344 - DNA, 18 bp, Homo sapiens
aaagaatgttccggcaca

SEQ ID NO: 54345 - DNA, 24 bp, Homo sapiens
accgaggtattaactgcagcagaa

SEQ ID NO: 54346 - DNA, 17 bp, Homo sapiens
ggcaggtgcaagggcca

SEQ ID NO: 54347 - DNA, 22 bp, Homo sapiens
gccctagagagaaaacaggcaa

SEQ ID NO: 54348 - DNA, 17 bp, Homo sapiens
gctggggatacaagcac

SEQ ID NO: 54349 - DNA, 18 bp, Homo sapiens
ccatagtctgcatgctgt

SEQ ID NO: 54350 - DNA, 19 bp, Homo sapiens
aagaggccttcctgcatgt

SEQ ID NO: 54351 - DNA, 19 bp, Homo sapiens
gagctcccctggaggtggg

SEQ ID NO: 54352 - DNA, 21 bp, Homo sapiens
atttgtcactatgtctttacc

SEQ ID NO: 54353 - DNA, 22 bp, Homo sapiens
gctcctgccagctggaggtgaa

SEQ ID NO: 54354 - DNA, 16 bp, Homo sapiens
cagatgagcagtatcc

SEQ ID NO: 54355 - DNA, 22 bp, Homo sapiens
aagtacatgtccacagcaacat

SEQ ID NO: 54356 - DNA, 22 bp, Homo sapiens
ccagacccccatctcagcacct

SEQ ID NO: 54357 - DNA, 17 bp, Homo sapiens
ttcgctttttacaggta

SEQ ID NO: 54358 - DNA, 24 bp, Homo sapiens
aaggtagcaggtgatgccaaggga

SEQ ID NO: 54359 - DNA, 19 bp, Homo sapiens
ctcaggctggggcggctcc

SEQ ID NO: 54360 - DNA, 23 bp, Homo sapiens
cttcccatctggcgggacccaga

SEQ ID NO: 54361 - DNA, 18 bp, Homo sapiens
gcactgataataggcaga

SEQ ID NO: 54362 - DNA, 23 bp, Homo sapiens
ctgaccagccctgtgggtggagg

SEQ ID NO: 54363 - DNA, 16 bp, Homo sapiens
cacactatccccacag

SEQ ID NO: 54364 - DNA, 16 bp, Homo sapiens
ccacacggaggaggag

SEQ ID NO: 54365 - DNA, 16 bp, Homo sapiens
atcctggctggcactc

SEQ ID NO: 54366 - DNA, 21 bp, Homo sapiens
aatggagcttataaacttact

SEQ ID NO: 54367 - DNA, 17 bp, Homo sapiens
agacctgccaaaggctt

SEQ ID NO: 54368 - DNA, 19 bp, Homo sapiens
tgcctctgaaaagagcggc

SEQ ID NO: 54369 - DNA, 24 bp, Homo sapiens
accctcctacccatgggagcacca

SEQ ID NO: 54370 - DNA, 19 bp, Homo sapiens
actctctgtcaactgaaag

SEQ ID NO: 54371 - DNA, 18 bp, Homo sapiens
acttacaataagcaaaga

SEQ ID NO: 54372 - DNA, 18 bp, Homo sapiens
gattgctgcacaaacgtg

SEQ ID NO: 54373 - DNA, 20 bp, Homo sapiens
aaaaaaaaaaaaacccacgg

SEQ ID NO: 54374 - DNA, 20 bp, Homo sapiens
attggttttccttttcttct

SEQ ID NO: 54375 - DNA, 19 bp, Homo sapiens
tcctgagctagtctggaaa

SEQ ID NO: 54376 - DNA, 23 bp, Homo sapiens
tagaatgacagcacaggtaattt

SEQ ID NO: 54377 - DNA, 19 bp, Homo sapiens
cacagtgggagaggacacc

SEQ ID NO: 54378 - DNA, 19 bp, Homo sapiens
ggatttatggcctagatgt

SEQ ID NO: 54379 - DNA, 16 bp, Homo sapiens
agcaggcccatcaagg

SEQ ID NO: 54380 - DNA, 18 bp, Homo sapiens
ttctcaattaagctgtct

SEQ ID NO: 54381 - DNA, 18 bp, Homo sapiens
tcaggaagcagctaaaga

SEQ ID NO: 54382 - DNA, 21 bp, Homo sapiens
cttgctccaagccacatattt

SEQ ID NO: 54383 - DNA, 16 bp, Homo sapiens
tggctctcagctgctg

SEQ ID NO: 54384 - DNA, 24 bp, Homo sapiens
atagcactgattgaaaccaagctt

SEQ ID NO: 54385 - DNA, 16 bp, Homo sapiens
cgttctctctgtccca

SEQ ID NO: 54386 - DNA, 19 bp, Homo sapiens
tcctctctctcgcagtcca

SEQ ID NO: 54387 - DNA, 17 bp, Homo sapiens
tgggaataaggacttgg

SEQ ID NO: 54388 - DNA, 23 bp, Homo sapiens
gttgaatcgcaaagtgcagtgca

SEQ ID NO: 54389 - DNA, 24 bp, Homo sapiens
tagtttctgatggtcctgaaaccc

SEQ ID NO: 54390 - DNA, 16 bp, Homo sapiens
tgcagaagctacaaga

SEQ ID NO: 54391 - DNA, 23 bp, Homo sapiens
ctcacacgagaggctgcccacac

SEQ ID NO: 54392 - DNA, 17 bp, Homo sapiens
gagcctggagcctgtgc

SEQ ID NO: 54393 - DNA, 21 bp, Homo sapiens
ttgagcaggtcccgaagtgca

SEQ ID NO: 54394 - DNA, 20 bp, Homo sapiens
gtgtccatctcagccaccct

SEQ ID NO: 54395 - DNA, 23 bp, Homo sapiens
actcgctggcaaactgccggcct

SEQ ID NO: 54396 - DNA, 24 bp, Homo sapiens
gagtgtgggcctgtagtggcctgt

SEQ ID NO: 54397 - DNA, 23 bp, Homo sapiens
ggcagtgtctcctccaccggcag

SEQ ID NO: 54398 - DNA, 17 bp, Homo sapiens
ctgctttgagccttaat

SEQ ID NO: 54399 - DNA, 24 bp, Homo sapiens
catactggccaagtgccagacgaa

SEQ ID NO: 54400 - DNA, 23 bp, Homo sapiens
gatgcattttccctgagatggta

SEQ ID NO: 54401 - DNA, 24 bp, Homo sapiens
gcagggcctcctgaacgcctgtct

SEQ ID NO: 54402 - DNA, 17 bp, Homo sapiens
gtggagtctcccactca

SEQ ID NO: 54403 - DNA, 16 bp, Homo sapiens
ctctactagttgtggg

SEQ ID NO: 54404 - DNA, 21 bp, Homo sapiens
agagcagaggtcaaaattaag

SEQ ID NO: 54405 - DNA, 22 bp, Homo sapiens
cctctcgtggccttctcagaac

SEQ ID NO: 54406 - DNA, 19 bp, Homo sapiens
gaggggtctctgctccgca

SEQ ID NO: 54407 - DNA, 23 bp, Homo sapiens
gaggtgccctgacacaggacatc

SEQ ID NO: 54408 - DNA, 22 bp, Homo sapiens
gcaggaggtcagcggtttgtga

SEQ ID NO: 54409 - DNA, 19 bp, Homo sapiens
tgtgggcttttcttacctg

SEQ ID NO: 54410 - DNA, 24 bp, Homo sapiens
gaagctgacaggaggatccaccca

SEQ ID NO: 54411 - DNA, 19 bp, Homo sapiens
gtgtttttctcaaaactga

SEQ ID NO: 54412 - DNA, 20 bp, Homo sapiens
ctgaagaagtgggcagtgat

SEQ ID NO: 54413 - DNA, 16 bp, Homo sapiens
ggcccggtcagcccag

SEQ ID NO: 54414 - DNA, 20 bp, Homo sapiens
gtgggtggggtcctccctca

SEQ ID NO: 54415 - DNA, 21 bp, Homo sapiens
cactgccagatgcgagcagtt

SEQ ID NO: 54416 - DNA, 24 bp, Homo sapiens
tgaaccctttcctcagtaattcac

SEQ ID NO: 54417 - DNA, 24 bp, Homo sapiens
tccaggatcctcctccgcctgcct

SEQ ID NO: 54418 - DNA, 23 bp, Homo sapiens
tgttagcgccacaggcactgaca

SEQ ID NO: 54419 - DNA, 22 bp, Homo sapiens
agcccttgggaaggagcagagt

SEQ ID NO: 54420 - DNA, 20 bp, Homo sapiens
agagttgaccaagtggaaga

SEQ ID NO: 54421 - DNA, 16 bp, Homo sapiens
caacagtggccctggg

SEQ ID NO: 54422 - DNA, 22 bp, Homo sapiens
gaagctgctgccgcagaggaca

SEQ ID NO: 54423 - DNA, 21 bp, Homo sapiens
ctgccagccttcagagacaga

SEQ ID NO: 54424 - DNA, 23 bp, Homo sapiens
ggggtggggacacacagacaagt

SEQ ID NO: 54425 - DNA, 16 bp, Homo sapiens
tgagattttccgcaga

SEQ ID NO: 54426 - DNA, 20 bp, Homo sapiens
gtcatgagatgctgccctgc

SEQ ID NO: 54427 - DNA, 22 bp, Homo sapiens
ctgacctggagctgcagcaaga

SEQ ID NO: 54428 - DNA, 16 bp, Homo sapiens
gtacattagcagctcc

SEQ ID NO: 54429 - DNA, 16 bp, Homo sapiens
cccgaggccttcctgt

SEQ ID NO: 54430 - DNA, 24 bp, Homo sapiens
ttgtcagagcctggagccgtctgc

SEQ ID NO: 54431 - DNA, 17 bp, Homo sapiens
cactgtggagacctctc

SEQ ID NO: 54432 - DNA, 16 bp, Homo sapiens
gccgagaggcactatg

SEQ ID NO: 54433 - DNA, 18 bp, Homo sapiens
tgcaatttcaaagtgatt

SEQ ID NO: 54434 - DNA, 19 bp, Homo sapiens
gcacaggaaatgaggatat

SEQ ID NO: 54435 - DNA, 17 bp, Homo sapiens
ctcggcctcccaaagtt

SEQ ID NO: 54436 - DNA, 16 bp, Homo sapiens
agcacgcggcttaaat

SEQ ID NO: 54437 - DNA, 16 bp, Homo sapiens
aggagaactgggaact

SEQ ID NO: 54438 - DNA, 24 bp, Homo sapiens
aactcacctgcaatctggaaataa

SEQ ID NO: 54439 - DNA, 16 bp, Homo sapiens
tgactaatgtgagggt

SEQ ID NO: 54440 - DNA, 19 bp, Homo sapiens
tctgagtggtcataactcc

SEQ ID NO: 54441 - DNA, 23 bp, Homo sapiens
gagtgtgtctgtgagggtgttgc

SEQ ID NO: 54442 - DNA, 16 bp, Homo sapiens
tgcgtgtaccattctt

SEQ ID NO: 54443 - DNA, 23 bp, Homo sapiens
agacccaccctaagctaattaga

SEQ ID NO: 54444 - DNA, 16 bp, Homo sapiens
gcgatccatgagcact

SEQ ID NO: 54445 - DNA, 19 bp, Homo sapiens
tattagtcctgtccctcca

SEQ ID NO: 54446 - DNA, 20 bp, Homo sapiens
cgaagcatttctcagaattg

SEQ ID NO: 54447 - DNA, 23 bp, Homo sapiens
gtggaaatccatcagtgcgttga

SEQ ID NO: 54448 - DNA, 21 bp, Homo sapiens
tagtgctgtgtgtcccttact

SEQ ID NO: 54449 - DNA, 24 bp, Homo sapiens
ctgaagccgaggactcagggagaa

SEQ ID NO: 54450 - DNA, 17 bp, Homo sapiens
agacagtgaggtctcat

SEQ ID NO: 54451 - DNA, 24 bp, Homo sapiens
aatttcttttctattttttgtaga

SEQ ID NO: 54452 - DNA, 20 bp, Homo sapiens
acacctggagctggaaattc

SEQ ID NO: 54453 - DNA, 18 bp, Homo sapiens
cctcaaactcctggattc

SEQ ID NO: 54454 - DNA, 19 bp, Homo sapiens
gccatcatgcctggccagg

SEQ ID NO: 54455 - DNA, 17 bp, Homo sapiens
actgcgtatgagatgaa

SEQ ID NO: 54456 - DNA, 18 bp, Homo sapiens
gagcatcagcttcaggtt

SEQ ID NO: 54457 - DNA, 18 bp, Homo sapiens
ctaaggtttctttcctgt

SEQ ID NO: 54458 - DNA, 17 bp, Homo sapiens
aaccttccgagaggtgt

SEQ ID NO: 54459 - DNA, 24 bp, Homo sapiens
cgggacgtggcatgatgcagggga

SEQ ID NO: 54460 - DNA, 23 bp, Homo sapiens
ggagacccttgcaccttccttct

SEQ ID NO: 54461 - DNA, 17 bp, Homo sapiens
acaaaccctagactcag

SEQ ID NO: 54462 - DNA, 24 bp, Homo sapiens
tcatgttcagattgttctcagagg

SEQ ID NO: 54463 - DNA, 18 bp, Homo sapiens
catcttcctctttcaaca

SEQ ID NO: 54464 - DNA, 16 bp, Homo sapiens
cgcaatgaagaaacgg

SEQ ID NO: 54465 - DNA, 22 bp, Homo sapiens
agctctctgccagtctgcagaa

SEQ ID NO: 54466 - DNA, 21 bp, Homo sapiens
gttgtgtgtgtgggctgttga

SEQ ID NO: 54467 - DNA, 20 bp, Homo sapiens
gtcctcctcagaaagaggct

SEQ ID NO: 54468 - DNA, 20 bp, Homo sapiens
aacgtggggtcgtgtattgc

SEQ ID NO: 54469 - DNA, 21 bp, Homo sapiens
tgactcaggagctgccccatg

SEQ ID NO: 54470 - DNA, 19 bp, Homo sapiens
agttttcttcccagtcacg

SEQ ID NO: 54471 - DNA, 18 bp, Homo sapiens
cacaaagcggcagcagac

SEQ ID NO: 54472 - DNA, 25 bp, Homo sapiens
catttatatgttataatttctgttt

SEQ ID NO: 54473 - DNA, 20 bp, Homo sapiens
tggcagaatggaaaaatagg

SEQ ID NO: 54474 - DNA, 22 bp, Homo sapiens
taaattcagttttatgaaattc

SEQ ID NO: 54475 - DNA, 24 bp, Homo sapiens
gataagcagctgcacaaagtatct

SEQ ID NO: 54476 - DNA, 19 bp, Homo sapiens
cacaacaaacgaaccaaaa

SEQ ID NO: 54477 - DNA, 16 bp, Homo sapiens
acctgtaggacgaggg

SEQ ID NO: 54478 - DNA, 23 bp, Homo sapiens
ctaaaaagtggttatctttgggt

SEQ ID NO: 54479 - DNA, 17 bp, Homo sapiens
atgtgggtcctcctgca

SEQ ID NO: 54480 - DNA, 22 bp, Homo sapiens
catgtgtcacttttcgagagag

SEQ ID NO: 54481 - DNA, 21 bp, Homo sapiens
gtgctggggttggctgccctg

SEQ ID NO: 54482 - DNA, 24 bp, Homo sapiens
tcacttcaggcagaagaacaagga

SEQ ID NO: 54483 - DNA, 20 bp, Homo sapiens
gtctgctctgccaccctcat

SEQ ID NO: 54484 - DNA, 20 bp, Homo sapiens
ggacaggaaggccagcacca

SEQ ID NO: 54485 - DNA, 16 bp, Homo sapiens
ccaggctgctacttct

SEQ ID NO: 54486 - DNA, 24 bp, Homo sapiens
ctggactcacccaggtgcacggcc

SEQ ID NO: 54487 - DNA, 22 bp, Homo sapiens
cagctgctccgtcaccaggtga

SEQ ID NO: 54488 - DNA, 24 bp, Homo sapiens
aggctcgggccctgcaacgagaat

SEQ ID NO: 54489 - DNA, 19 bp, Homo sapiens
gtgaggaccatgtgtggac

SEQ ID NO: 54490 - DNA, 23 bp, Homo sapiens
gaattttccagggcactgaagac

SEQ ID NO: 54491 - DNA, 17 bp, Homo sapiens
ctagtactgatggtttc

SEQ ID NO: 54492 - DNA, 16 bp, Homo sapiens
gtggcccccatgaagg

SEQ ID NO: 54493 - DNA, 18 bp, Homo sapiens
gctctttcttcggccgct

SEQ ID NO: 54494 - DNA, 20 bp, Homo sapiens
gagcactgcagggagcacac

SEQ ID NO: 54495 - DNA, 20 bp, Homo sapiens
ttgggaagcactgcagaaga

SEQ ID NO: 54496 - DNA, 19 bp, Homo sapiens
ctgatggctgcctccagtg

SEQ ID NO: 54497 - DNA, 23 bp, Homo sapiens
ttgatgaaactcagcatcgccgc

SEQ ID NO: 54498 - DNA, 22 bp, Homo sapiens
tcatgagaactgtgtctctgca

SEQ ID NO: 54499 - DNA, 24 bp, Homo sapiens
gacttggcccagcaagaggtggca

SEQ ID NO: 54500 - DNA, 19 bp, Homo sapiens
atgtctgtggcgggagcgc

SEQ ID NO: 54501 - DNA, 18 bp, Homo sapiens
cctctccgggggagcgac

SEQ ID NO: 54502 - DNA, 19 bp, Homo sapiens
attgtaacatgccctccaa

SEQ ID NO: 54503 - DNA, 18 bp, Homo sapiens
ccctggtacaccgctgcc

SEQ ID NO: 54504 - DNA, 18 bp, Homo sapiens
gcagcgttgagatatcaa

SEQ ID NO: 54505 - DNA, 17 bp, Homo sapiens
cagaaattgagagaagg

SEQ ID NO: 54506 - DNA, 17 bp, Homo sapiens
tggcagtgatttctgaa

SEQ ID NO: 54507 - DNA, 18 bp, Homo sapiens
ctgctttgttctgagccc

SEQ ID NO: 54508 - DNA, 24 bp, Homo sapiens
tgtatccctcctttcggggttctt

SEQ ID NO: 54509 - DNA, 24 bp, Homo sapiens
ctcggcgtgttgatgctgagctga

SEQ ID NO: 54510 - DNA, 16 bp, Homo sapiens
aggatccgtggaatcg

SEQ ID NO: 54511 - DNA, 24 bp, Homo sapiens
caggacagccctcagtctttcaga

SEQ ID NO: 54512 - DNA, 16 bp, Homo sapiens
aaatcctgcggggcga

SEQ ID NO: 54513 - DNA, 20 bp, Homo sapiens
caccttgtctcaaaaaaggt

SEQ ID NO: 54514 - DNA, 16 bp, Homo sapiens
actgggagagctgaga

SEQ ID NO: 54515 - DNA, 23 bp, Homo sapiens
ctggactactaggaagacacacc

SEQ ID NO: 54516 - DNA, 23 bp, Homo sapiens
tgcagccctgggagtgagggcag

SEQ ID NO: 54517 - DNA, 19 bp, Homo sapiens
accacaggctgcacacatg

SEQ ID NO: 54518 - DNA, 17 bp, Homo sapiens
gtgaagagtcctgttga

SEQ ID NO: 54519 - DNA, 19 bp, Homo sapiens
ctggctggggtctgtcatg

SEQ ID NO: 54520 - DNA, 17 bp, Homo sapiens
cagcagcttggaagttc

SEQ ID NO: 54521 - DNA, 20 bp, Homo sapiens
tcctcagcagagttgggttc

SEQ ID NO: 54522 - DNA, 16 bp, Homo sapiens
agggaagacacctcat

SEQ ID NO: 54523 - DNA, 22 bp, Homo sapiens
ccacagctggcactgggcgtca

SEQ ID NO: 54524 - DNA, 21 bp, Homo sapiens
tactccacctactgccaggcc

SEQ ID NO: 54525 - DNA, 17 bp, Homo sapiens
cagccacccccgagctc

SEQ ID NO: 54526 - DNA, 20 bp, Homo sapiens
agctgacttaattgtattgt

SEQ ID NO: 54527 - DNA, 16 bp, Homo sapiens
aaagcacaagtcccag

SEQ ID NO: 54528 - DNA, 28 bp, Homo sapiens
ttaaatttaatatgtttttattttataa

SEQ ID NO: 54529 - DNA, 17 bp, Homo sapiens
agcagcagagcaggcct

SEQ ID NO: 54530 - DNA, 19 bp, Homo sapiens
tttttttgtaaaaacaggc

SEQ ID NO: 54531 - DNA, 24 bp, Homo sapiens
aaaaaaaaaaaaagtaaccaacca

SEQ ID NO: 54532 - DNA, 16 bp, Homo sapiens
ccacagctccccaaag

SEQ ID NO: 54533 - DNA, 22 bp, Homo sapiens
ggtctaacaaatttctctacag

SEQ ID NO: 54534 - DNA, 17 bp, Homo sapiens
tgtgaccagttgtgtag

SEQ ID NO: 54535 - DNA, 21 bp, Homo sapiens
ctggaagtagtcatccccttc

SEQ ID NO: 54536 - DNA, 21 bp, Homo sapiens
tacgtgtcccacttcctcccc

SEQ ID NO: 54537 - DNA, 22 bp, Homo sapiens
aacgccacacgggagtcaggga

SEQ ID NO: 54538 - DNA, 16 bp, Homo sapiens
gactgatgcactgtct

SEQ ID NO: 54539 - DNA, 20 bp, Homo sapiens
tgacaaggaaagtccttgct

SEQ ID NO: 54540 - DNA, 21 bp, Homo sapiens
gtgagccctcgcagtccactc

SEQ ID NO: 54541 - DNA, 19 bp, Homo sapiens
ccactcgaggtgtgagcag

SEQ ID NO: 54542 - DNA, 16 bp, Homo sapiens
cttgtcccggaactgt

SEQ ID NO: 54543 - DNA, 21 bp, Homo sapiens
cagaaatgggacacactccaa

SEQ ID NO: 54544 - DNA, 24 bp, Homo sapiens
tgaaaaggccatcatggtgtttga

SEQ ID NO: 54545 - DNA, 24 bp, Homo sapiens
ctgcacaccctgcaggcatcagag

SEQ ID NO: 54546 - DNA, 17 bp, Homo sapiens
ttcctttcctccctgta

SEQ ID NO: 54547 - DNA, 18 bp, Homo sapiens
cacactgcagctgctaga

SEQ ID NO: 54548 - DNA, 23 bp, Homo sapiens
caaggaagcacaggttgagtgtg

SEQ ID NO: 54549 - DNA, 19 bp, Homo sapiens
actgggatgttccccgtat

SEQ ID NO: 54550 - DNA, 17 bp, Homo sapiens
ctgtgcgcacagcatgt

SEQ ID NO: 54551 - DNA, 17 bp, Homo sapiens
gcaacacagaggcccgc

SEQ ID NO: 54552 - DNA, 24 bp, Homo sapiens
tctatagaaaacatgggactctac

SEQ ID NO: 54553 - DNA, 20 bp, Homo sapiens
catgagactgggaaggctga

SEQ ID NO: 54554 - DNA, 18 bp, Homo sapiens
ccagcagaaactgctttg

SEQ ID NO: 54555 - DNA, 22 bp, Homo sapiens
catggtgggcgtgactggctga

SEQ ID NO: 54556 - DNA, 18 bp, Homo sapiens
caagacacggctggccga

SEQ ID NO: 54557 - DNA, 22 bp, Homo sapiens
cagctgatgacaaatcctcgta

SEQ ID NO: 54558 - DNA, 16 bp, Homo sapiens
cacccacccctggttc

SEQ ID NO: 54559 - DNA, 19 bp, Homo sapiens
tgagaacaagaaaacaaag

SEQ ID NO: 54560 - DNA, 16 bp, Homo sapiens
gcagttcccagactaa

SEQ ID NO: 54561 - DNA, 16 bp, Homo sapiens
gggacagcttgccttg

SEQ ID NO: 54562 - DNA, 19 bp, Homo sapiens
aagggctgtgtttctctac

SEQ ID NO: 54563 - DNA, 18 bp, Homo sapiens
ggagggagcggtacttgc

SEQ ID NO: 54564 - DNA, 22 bp, Homo sapiens
ggcttgtgttttaattttacta

SEQ ID NO: 54565 - DNA, 21 bp, Homo sapiens
caccataaacggcttggggaa

SEQ ID NO: 54566 - DNA, 21 bp, Homo sapiens
tggtcttcctgtttacgttct

SEQ ID NO: 54567 - DNA, 24 bp, Homo sapiens
agagcagatctgcaggaggctctt

SEQ ID NO: 54568 - DNA, 22 bp, Homo sapiens
tctctccacacaggcctccttt

SEQ ID NO: 54569 - DNA, 20 bp, Homo sapiens
gaagcaccagaaatcatgga

SEQ ID NO: 54570 - DNA, 20 bp, Homo sapiens
acaggacactgcctaggtgg

SEQ ID NO: 54571 - DNA, 23 bp, Homo sapiens
tcaaaaggcacgagttctgacaa

SEQ ID NO: 54572 - DNA, 16 bp, Homo sapiens
gacactgcctaggtgg

SEQ ID NO: 54573 - DNA, 21 bp, Homo sapiens
gtagcctcgtgtgctcccaaa

SEQ ID NO: 54574 - DNA, 17 bp, Homo sapiens
tcctcggcacacgcaga

SEQ ID NO: 54575 - DNA, 24 bp, Homo sapiens
ttgtgcgccaggcagcactggagg

SEQ ID NO: 54576 - DNA, 18 bp, Homo sapiens
tgctcactcacatgacag

SEQ ID NO: 54577 - DNA, 24 bp, Homo sapiens
tggcccaggcattcgagagctgcc

SEQ ID NO: 54578 - DNA, 17 bp, Homo sapiens
gggaagatcaggtatta

SEQ ID NO: 54579 - DNA, 20 bp, Homo sapiens
ggctgcccttgccttgctgt

SEQ ID NO: 54580 - DNA, 18 bp, Homo sapiens
catatgacaggaacgcag

SEQ ID NO: 54581 - DNA, 24 bp, Homo sapiens
gtgcacagtctccttctggaatac

SEQ ID NO: 54582 - DNA, 17 bp, Homo sapiens
catgctgtccagctggc

SEQ ID NO: 54583 - DNA, 21 bp, Homo sapiens
ttgcacttgacatgctgtaat

SEQ ID NO: 54584 - DNA, 18 bp, Homo sapiens
aagaatgttccatcgaca

SEQ ID NO: 54585 - DNA, 23 bp, Homo sapiens
ctggcagagagtgctctcctttg

SEQ ID NO: 54586 - DNA, 18 bp, Homo sapiens
ctcacccacagtcagctg

SEQ ID NO: 54587 - DNA, 22 bp, Homo sapiens
gtgatgctgagtgcagaggagt

SEQ ID NO: 54588 - DNA, 20 bp, Homo sapiens
agcaccaccgggctcgcgta

SEQ ID NO: 54589 - DNA, 19 bp, Homo sapiens
cacattggtttgcttggat

SEQ ID NO: 54590 - DNA, 24 bp, Homo sapiens
gaaagcagacaaccagggcagaca

SEQ ID NO: 54591 - DNA, 16 bp, Homo sapiens
gtgagggggctgcggt

SEQ ID NO: 54592 - DNA, 18 bp, Homo sapiens
gaacttcttgcaaatggc

SEQ ID NO: 54593 - DNA, 16 bp, Homo sapiens
tgtgaggggagagacg

SEQ ID NO: 54594 - DNA, 24 bp, Homo sapiens
cctgacctgagtggtggccttgat

SEQ ID NO: 54595 - DNA, 22 bp, Homo sapiens
atgctgttcagatgcagagaga

SEQ ID NO: 54596 - DNA, 17 bp, Homo sapiens
tccacggcaggcagcat

SEQ ID NO: 54597 - DNA, 20 bp, Homo sapiens
acaactttttgatctctgac

SEQ ID NO: 54598 - DNA, 24 bp, Homo sapiens
agctcagaagcaggtataatacca

SEQ ID NO: 54599 - DNA, 23 bp, Homo sapiens
ctcgtcgccgcacacggggagag

SEQ ID NO: 54600 - DNA, 17 bp, Homo sapiens
gtccgcgcaaagctcca

SEQ ID NO: 54601 - DNA, 17 bp, Homo sapiens
gcccagctgtcttgtct

SEQ ID NO: 54602 - DNA, 22 bp, Homo sapiens
aaggatatttagtaacaatctc

SEQ ID NO: 54603 - DNA, 16 bp, Homo sapiens
tcataccctgactcag

SEQ ID NO: 54604 - DNA, 18 bp, Homo sapiens
agaggtcctagaattcct

SEQ ID NO: 54605 - DNA, 20 bp, Homo sapiens
ggagtgttcagtggacacac

SEQ ID NO: 54606 - DNA, 21 bp, Homo sapiens
gcaatccccaaaatgggtagc

SEQ ID NO: 54607 - DNA, 24 bp, Homo sapiens
attggtgggtggcgtgcaaggcac

SEQ ID NO: 54608 - DNA, 23 bp, Homo sapiens
cagcacagggctgtgagtgagta

SEQ ID NO: 54609 - DNA, 18 bp, Homo sapiens
ccttccttgcttaaagaa

SEQ ID NO: 54610 - DNA, 20 bp, Homo sapiens
ctgtggaaattacactgcca

SEQ ID NO: 54611 - DNA, 17 bp, Homo sapiens
ctgccacctccttggat

SEQ ID NO: 54612 - DNA, 21 bp, Homo sapiens
tgccaaattaaagagccaaga

SEQ ID NO: 54613 - DNA, 23 bp, Homo sapiens
ccgacctcatcctcacaggaaaa

SEQ ID NO: 54614 - DNA, 18 bp, Homo sapiens
aggtgctggtatgttcct

SEQ ID NO: 54615 - DNA, 19 bp, Homo sapiens
ctcacgcacgttatcgtaa

SEQ ID NO: 54616 - DNA, 19 bp, Homo sapiens
gttgcacttgacgctttgg

SEQ ID NO: 54617 - DNA, 19 bp, Homo sapiens
agctctggaagtgtttaaa

SEQ ID NO: 54618 - DNA, 16 bp, Homo sapiens
tttctggtgggctgcc

SEQ ID NO: 54619 - DNA, 21 bp, Homo sapiens
caggcaggccaccctcaggaa

SEQ ID NO: 54620 - DNA, 19 bp, Homo sapiens
ttgatggatgtgggccctc

SEQ ID NO: 54621 - DNA, 17 bp, Homo sapiens
tgtactccagcagccaa

SEQ ID NO: 54622 - DNA, 22 bp, Homo sapiens
gtatcccttcacagctctgaaa

SEQ ID NO: 54623 - DNA, 20 bp, Homo sapiens
acattctattttgacaggtc

SEQ ID NO: 54624 - DNA, 21 bp, Homo sapiens
acatacagaggagaaatacct

SEQ ID NO: 54625 - DNA, 16 bp, Homo sapiens
tcttgtgtgatgcagg

SEQ ID NO: 54626 - DNA, 19 bp, Homo sapiens
aactaagtcatttacagtc

SEQ ID NO: 54627 - DNA, 18 bp, Homo sapiens
tcgtgatccgcccgcctc

SEQ ID NO: 54628 - DNA, 22 bp, Homo sapiens
aaacaccctgacttgatcatta

SEQ ID NO: 54629 - DNA, 20 bp, Homo sapiens
ggggatttcagaaaaactca

SEQ ID NO: 54630 - DNA, 17 bp, Homo sapiens
acaaacagcacgtttca

SEQ ID NO: 54631 - DNA, 24 bp, Homo sapiens
atgtccataaataactttggtttt

SEQ ID NO: 54632 - DNA, 23 bp, Homo sapiens
taaggacggctccttccgctaaa

SEQ ID NO: 54633 - DNA, 16 bp, Homo sapiens
gcccctctgaagtgga

SEQ ID NO: 54634 - DNA, 24 bp, Homo sapiens
ttttcaggctccacagttcttctc

SEQ ID NO: 54635 - DNA, 16 bp, Homo sapiens
cgttcctcaggttagg

SEQ ID NO: 54636 - DNA, 22 bp, Homo sapiens
atcagtcaagtaaaatgcaacc

SEQ ID NO: 54637 - DNA, 21 bp, Homo sapiens
gatggaagcatcctgccagca

SEQ ID NO: 54638 - DNA, 19 bp, Homo sapiens
cacggagagacaggctgtt

SEQ ID NO: 54639 - DNA, 20 bp, Homo sapiens
gacatgcatgctgtgggatc

SEQ ID NO: 54640 - DNA, 19 bp, Homo sapiens
cacagatcaaaatgagttt

SEQ ID NO: 54641 - DNA, 18 bp, Homo sapiens
cccctgatgatgggattt

SEQ ID NO: 54642 - DNA, 24 bp, Homo sapiens
gaaagcatggccctggcgacgtca

SEQ ID NO: 54643 - DNA, 18 bp, Homo sapiens
agtgacagcaaaaaactg

SEQ ID NO: 54644 - DNA, 24 bp, Homo sapiens
agcacagattcctgaagagccacg

SEQ ID NO: 54645 - DNA, 19 bp, Homo sapiens
cctccaggtctagtctagt

SEQ ID NO: 54646 - DNA, 16 bp, Homo sapiens
tgtggcatcttcacgt

SEQ ID NO: 54647 - DNA, 18 bp, Homo sapiens
agccagaaatcaaacccg

SEQ ID NO: 54648 - DNA, 21 bp, Homo sapiens
ggggtttttttgtttttgttt

SEQ ID NO: 54649 - DNA, 17 bp, Homo sapiens
actgcaaaaacagtaac

SEQ ID NO: 54650 - DNA, 19 bp, Homo sapiens
aagaacctaagttgaacat

SEQ ID NO: 54651 - DNA, 18 bp, Homo sapiens
acaatgccttgtacgtga

SEQ ID NO: 54652 - DNA, 17 bp, Homo sapiens
gatgtgtttcaggctct

SEQ ID NO: 54653 - DNA, 16 bp, Homo sapiens
ttccaatccacagatg

SEQ ID NO: 54654 - DNA, 18 bp, Homo sapiens
agtatgttctcccgtctt

SEQ ID NO: 54655 - DNA, 18 bp, Homo sapiens
gaagcttggagaattccc

SEQ ID NO: 54656 - DNA, 22 bp, Homo sapiens
tgtaatctctcttttcagaaga

SEQ ID NO: 54657 - DNA, 16 bp, Homo sapiens
tgcctggaacactgga

SEQ ID NO: 54658 - DNA, 18 bp, Homo sapiens
tggttgggaaaataggac

SEQ ID NO: 54659 - DNA, 24 bp, Homo sapiens
ttccataattcttgacagaaggaa

SEQ ID NO: 54660 - DNA, 16 bp, Homo sapiens
gagagtaagacaccag

SEQ ID NO: 54661 - DNA, 21 bp, Homo sapiens
aaactctaacagggaagacag

SEQ ID NO: 54662 - DNA, 16 bp, Homo sapiens
gggacagatctgcacg

SEQ ID NO: 54663 - DNA, 21 bp, Homo sapiens
acctgaaacaatactaaagct

SEQ ID NO: 54664 - DNA, 16 bp, Homo sapiens
ggatcaagcctcaagg

SEQ ID NO: 54665 - DNA, 18 bp, Homo sapiens
gtttcctcatctttgctg

SEQ ID NO: 54666 - DNA, 20 bp, Homo sapiens
gtctcatgtgttaagagaaa

SEQ ID NO: 54667 - DNA, 17 bp, Homo sapiens
tccgctggagccgtgca

SEQ ID NO: 54668 - DNA, 17 bp, Homo sapiens
tttttgtgctgcatctt

SEQ ID NO: 54669 - DNA, 22 bp, Homo sapiens
gaatacccacgggaacccccag

SEQ ID NO: 54670 - DNA, 23 bp, Homo sapiens
tcatcaaattctcatttttatct

SEQ ID NO: 54671 - DNA, 17 bp, Homo sapiens
gaagcccaagagcaagt

SEQ ID NO: 54672 - DNA, 16 bp, Homo sapiens
acagttctgaggccta

SEQ ID NO: 54673 - DNA, 16 bp, Homo sapiens
ccatcgcctgagaaaa

SEQ ID NO: 54674 - DNA, 20 bp, Homo sapiens
tgttttggattctaggtaga

SEQ ID NO: 54675 - DNA, 17 bp, Homo sapiens
aacccttctgcaattca

SEQ ID NO: 54676 - DNA, 16 bp, Homo sapiens
caggcgtgagccacta

SEQ ID NO: 54677 - DNA, 22 bp, Homo sapiens
aaatgaactagaatgattagca

SEQ ID NO: 54678 - DNA, 17 bp, Homo sapiens
tggtctcgaactcttga

SEQ ID NO: 54679 - DNA, 18 bp, Homo sapiens
tttttacacagtggacct

SEQ ID NO: 54680 - DNA, 16 bp, Homo sapiens
caggttggtccagaac

SEQ ID NO: 54681 - DNA, 24 bp, Homo sapiens
gaatcagctgtgcgcctcctgcga

SEQ ID NO: 54682 - DNA, 19 bp, Homo sapiens
ccaccgcgcccgccgcctc

SEQ ID NO: 54683 - DNA, 16 bp, Homo sapiens
agggtcaagagggaaa

SEQ ID NO: 54684 - DNA, 19 bp, Homo sapiens
aaaaccccgaacctaaatc

SEQ ID NO: 54685 - DNA, 16 bp, Homo sapiens
ggggaccccgtgtgtg

SEQ ID NO: 54686 - DNA, 22 bp, Homo sapiens
aaagggcattcaggtcctgatg

SEQ ID NO: 54687 - DNA, 19 bp, Homo sapiens
ccccggcccctcttcggga

SEQ ID NO: 54688 - DNA, 19 bp, Homo sapiens
tcaggattatatttttccc

SEQ ID NO: 54689 - DNA, 23 bp, Homo sapiens
ccgggtccgaggcagccgcgccg

SEQ ID NO: 54690 - DNA, 24 bp, Homo sapiens
cgcctcgggccaggacccaggggg

SEQ ID NO: 54691 - DNA, 22 bp, Homo sapiens
cgtccggggatccgaccggcgg

SEQ ID NO: 54692 - DNA, 22 bp, Homo sapiens
gggagccgccgccggggctgta

SEQ ID NO: 54693 - DNA, 24 bp, Homo sapiens
gaaaccgtcccgggccggacgccg

SEQ ID NO: 54694 - DNA, 16 bp, Homo sapiens
ggtgtgcgcgcctggc

SEQ ID NO: 54695 - DNA, 22 bp, Homo sapiens
ctcggcccaggccctccggcgg

SEQ ID NO: 54696 - DNA, 24 bp, Homo sapiens
caggaccaacatggccacgacgca

SEQ ID NO: 54697 - DNA, 21 bp, Homo sapiens
gctcagaacttgtaacagaaa

SEQ ID NO: 54698 - DNA, 20 bp, Homo sapiens
tccaaagatagcaacctttt

SEQ ID NO: 54699 - DNA, 23 bp, Homo sapiens
gccctttgggtaaagtctcattt

SEQ ID NO: 54700 - DNA, 16 bp, Homo sapiens
gcgccattctctagcc

SEQ ID NO: 54701 - DNA, 24 bp, Homo sapiens
ttgatctctcttctgaattgcaga

SEQ ID NO: 54702 - DNA, 18 bp, Homo sapiens
actgctctggggttagta

SEQ ID NO: 54703 - DNA, 18 bp, Homo sapiens
tgctgaagaacatataca

SEQ ID NO: 54704 - DNA, 21 bp, Homo sapiens
ccaagattttcaaggtcaaaa

SEQ ID NO: 54705 - DNA, 18 bp, Homo sapiens
cggagtatttctggttaa

SEQ ID NO: 54706 - DNA, 18 bp, Homo sapiens
cacctaccacttttcaca

SEQ ID NO: 54707 - DNA, 18 bp, Homo sapiens
tggaggtaaaaccattta

SEQ ID NO: 54708 - DNA, 16 bp, Homo sapiens
gactgcatgtacggac

SEQ ID NO: 54709 - DNA, 16 bp, Homo sapiens
tgtgacctgaatcgca

SEQ ID NO: 54710 - DNA, 23 bp, Homo sapiens
aaaagaatgtaagttttcatata

SEQ ID NO: 54711 - DNA, 18 bp, Homo sapiens
tgagcccttctcacttca

SEQ ID NO: 54712 - DNA, 23 bp, Homo sapiens
ttttcatattaaagatttggcga

SEQ ID NO: 54713 - DNA, 22 bp, Homo sapiens
aaaaataatgtcataggaatct

SEQ ID NO: 54714 - DNA, 21 bp, Homo sapiens
tgtttatattatctcaggcac

SEQ ID NO: 54715 - DNA, 16 bp, Homo sapiens
cctggaatcctcaaga

SEQ ID NO: 54716 - DNA, 17 bp, Homo sapiens
tgtcagaagatttgcca

SEQ ID NO: 54717 - DNA, 27 bp, Homo sapiens
ttgctaacttataaattaataacatta

SEQ ID NO: 54718 - DNA, 22 bp, Homo sapiens
caaaagacagtgaagattccta

SEQ ID NO: 54719 - DNA, 20 bp, Homo sapiens
ccctcataactgttttctga

SEQ ID NO: 54720 - DNA, 22 bp, Homo sapiens
ctaacatggggtgcactcttat

SEQ ID NO: 54721 - DNA, 16 bp, Homo sapiens
ccccaaccaccaagcc

SEQ ID NO: 54722 - DNA, 16 bp, Homo sapiens
ataaacgtagcagggt

SEQ ID NO: 54723 - DNA, 21 bp, Homo sapiens
aaagctgtcttaccaatctta

SEQ ID NO: 54724 - DNA, 17 bp, Homo sapiens
ccacaggatacttggct

SEQ ID NO: 54725 - DNA, 21 bp, Homo sapiens
gttgaagcaaagagaacaaaa

SEQ ID NO: 54726 - DNA, 16 bp, Homo sapiens
ttctctgagtttcagc

SEQ ID NO: 54727 - DNA, 17 bp, Homo sapiens
ctggctccactaccctg

SEQ ID NO: 54728 - DNA, 16 bp, Homo sapiens
cagctctcagaacccc

SEQ ID NO: 54729 - DNA, 25 bp, Homo sapiens
atggtttacctttttaataatttta

SEQ ID NO: 54730 - DNA, 25 bp, Homo sapiens
attgaaatgatgtataaaatcaaga

SEQ ID NO: 54731 - DNA, 27 bp, Homo sapiens
cttagttttataatatattttcatact

SEQ ID NO: 54732 - DNA, 18 bp, Homo sapiens
tttaaatgtttggtggtt

SEQ ID NO: 54733 - DNA, 24 bp, Homo sapiens
taggtatagaagttggtcctcagc

SEQ ID NO: 54734 - DNA, 22 bp, Homo sapiens
aaattttaaaaagcacttcata

SEQ ID NO: 54735 - DNA, 23 bp, Homo sapiens
agaaaaatgattaaacatgctct

SEQ ID NO: 54736 - DNA, 20 bp, Homo sapiens
aacaaatgttacctgcagat

SEQ ID NO: 54737 - DNA, 17 bp, Homo sapiens
gttgccattgatacata

SEQ ID NO: 54738 - DNA, 20 bp, Homo sapiens
tgctgtatgagctataaact

SEQ ID NO: 54739 - DNA, 24 bp, Homo sapiens
gcgccattgaggtctataaaatta

SEQ ID NO: 54740 - DNA, 23 bp, Homo sapiens
catcttccctatctacactcagt

SEQ ID NO: 54741 - DNA, 22 bp, Homo sapiens
attgctgctatcatccatccta

SEQ ID NO: 54742 - DNA, 22 bp, Homo sapiens
acgacccaatgtcagcgcagtc

SEQ ID NO: 54743 - DNA, 19 bp, Homo sapiens
agagttaaaaacatgggat

SEQ ID NO: 54744 - DNA, 24 bp, Homo sapiens
atctcttttaaaacaacagaatac

SEQ ID NO: 54745 - DNA, 16 bp, Homo sapiens
ttcacaaacacggggt

SEQ ID NO: 54746 - DNA, 21 bp, Homo sapiens
agaggagaaaaaccaaatata

SEQ ID NO: 54747 - DNA, 18 bp, Homo sapiens
ttgcattgagcgttagtt

SEQ ID NO: 54748 - DNA, 21 bp, Homo sapiens
ggaaaccactgcatcctgggg

SEQ ID NO: 54749 - DNA, 17 bp, Homo sapiens
gacaccgtgtaagatgt

SEQ ID NO: 54750 - DNA, 20 bp, Homo sapiens
ggcggagactgtaccgtgta

SEQ ID NO: 54751 - DNA, 19 bp, Homo sapiens
gcagttgaataaggcacaa

SEQ ID NO: 54752 - DNA, 21 bp, Homo sapiens
aagaagcttttgcaaagacaa

SEQ ID NO: 54753 - DNA, 22 bp, Homo sapiens
attaatttaagaaatgtgctta

SEQ ID NO: 54754 - DNA, 20 bp, Homo sapiens
ggccgtgatgcaaagccctg

SEQ ID NO: 54755 - DNA, 17 bp, Homo sapiens
ttctctacgagcttcag

SEQ ID NO: 54756 - DNA, 20 bp, Homo sapiens
gctccagagggcagattgtc

SEQ ID NO: 54757 - DNA, 17 bp, Homo sapiens
ctctagccaccatttcc

SEQ ID NO: 54758 - DNA, 22 bp, Homo sapiens
tctctcttgctgtttttcttcc

SEQ ID NO: 54759 - DNA, 20 bp, Homo sapiens
gcagacagagacatgtggtc

SEQ ID NO: 54760 - DNA, 22 bp, Homo sapiens
gactatttttatcctttttccc

SEQ ID NO: 54761 - DNA, 18 bp, Homo sapiens
tggggaaggaagctaacc

SEQ ID NO: 54762 - DNA, 16 bp, Homo sapiens
gttctccagctttacg

SEQ ID NO: 54763 - DNA, 23 bp, Homo sapiens
gagagtcagagctcaggagttca

SEQ ID NO: 54764 - DNA, 24 bp, Homo sapiens
tgagcggagctgagcacagcgcca

SEQ ID NO: 54765 - DNA, 24 bp, Homo sapiens
ctgaactctgacccagtgcctcat

SEQ ID NO: 54766 - DNA, 19 bp, Homo sapiens
tctgaaatctgaacagact

SEQ ID NO: 54767 - DNA, 18 bp, Homo sapiens
actgttcctcctgtcgta

SEQ ID NO: 54768 - DNA, 16 bp, Homo sapiens
tagcaccatccctttt

SEQ ID NO: 54769 - DNA, 20 bp, Homo sapiens
gaaggcctacgggagcacga

SEQ ID NO: 54770 - DNA, 20 bp, Homo sapiens
aacgaaatgtgatttcaaaa

SEQ ID NO: 54771 - DNA, 17 bp, Homo sapiens
cctaactgcttgagagt

SEQ ID NO: 54772 - DNA, 18 bp, Homo sapiens
catccgttaagattggtt

SEQ ID NO: 54773 - DNA, 20 bp, Homo sapiens
gatctcactgtccagcttct

SEQ ID NO: 54774 - DNA, 17 bp, Homo sapiens
gacctgtttccaccagc

SEQ ID NO: 54775 - DNA, 20 bp, Homo sapiens
aatgcaaccctggtgatcac

SEQ ID NO: 54776 - DNA, 17 bp, Homo sapiens
agacaccaacaaagcca

SEQ ID NO: 54777 - DNA, 21 bp, Homo sapiens
ctggtgggcgcagcgtctctc

SEQ ID NO: 54778 - DNA, 19 bp, Homo sapiens
tccaacattttgagatgtc

SEQ ID NO: 54779 - DNA, 18 bp, Homo sapiens
ggtgcgtccctccgttcc

SEQ ID NO: 54780 - DNA, 16 bp, Homo sapiens
agcctacccggtctga

SEQ ID NO: 54781 - DNA, 24 bp, Homo sapiens
tcggtaactgtacgtggcatcgga

SEQ ID NO: 54782 - DNA, 16 bp, Homo sapiens
aggagactcccacgtg

SEQ ID NO: 54783 - DNA, 23 bp, Homo sapiens
tggagtgacaaactcctcttttc

SEQ ID NO: 54784 - DNA, 16 bp, Homo sapiens
gtatcctcgggctgga

SEQ ID NO: 54785 - DNA, 17 bp, Homo sapiens
aaatcactccaatcaga

SEQ ID NO: 54786 - DNA, 24 bp, Homo sapiens
aaagtagatccagccaatcacctg

SEQ ID NO: 54787 - DNA, 21 bp, Homo sapiens
tgacaagaagggggccgtgct

SEQ ID NO: 54788 - DNA, 18 bp, Homo sapiens
tttccgcctccaattcat

SEQ ID NO: 54789 - DNA, 23 bp, Homo sapiens
ctcatcccggtccccaaactcct

SEQ ID NO: 54790 - DNA, 16 bp, Homo sapiens
gaacgccctgctccta

SEQ ID NO: 54791 - DNA, 18 bp, Homo sapiens
ttagcatcataaaccagg

SEQ ID NO: 54792 - DNA, 16 bp, Homo sapiens
ggtaggcagacagaag

SEQ ID NO: 54793 - DNA, 17 bp, Homo sapiens
ctcaggtgatcatgaat

SEQ ID NO: 54794 - DNA, 21 bp, Homo sapiens
ccagtccttaccccccaccct

SEQ ID NO: 54795 - DNA, 23 bp, Homo sapiens
gaatacactgtaggccacgaagc

SEQ ID NO: 54796 - DNA, 16 bp, Homo sapiens
ctccacccccgccagt

SEQ ID NO: 54797 - DNA, 23 bp, Homo sapiens
agatgtagggcaggcaaggccgt

SEQ ID NO: 54798 - DNA, 24 bp, Homo sapiens
cagtcttcaccccctgccctgtct

SEQ ID NO: 54799 - DNA, 17 bp, Homo sapiens
gtgggagaagctgggtg

SEQ ID NO: 54800 - DNA, 19 bp, Homo sapiens
cttcgtggctctgaacctg

SEQ ID NO: 54801 - DNA, 16 bp, Homo sapiens
tcgttgctgttcacgg

SEQ ID NO: 54802 - DNA, 16 bp, Homo sapiens
ccctacatcaaggtac

SEQ ID NO: 54803 - DNA, 17 bp, Homo sapiens
gcactgcacgatgatga

SEQ ID NO: 54804 - DNA, 23 bp, Homo sapiens
cgtggtggcccggctgcccctca

SEQ ID NO: 54805 - DNA, 23 bp, Homo sapiens
gtgaggtggggtggcgggtgttg

SEQ ID NO: 54806 - DNA, 20 bp, Homo sapiens
caaataccccaacggagtga

SEQ ID NO: 54807 - DNA, 16 bp, Homo sapiens
aatgaacacacaccct

SEQ ID NO: 54808 - DNA, 23 bp, Homo sapiens
gcggttgtcctcacgctgatcat

SEQ ID NO: 54809 - DNA, 23 bp, Homo sapiens
cgagcaccaggaagccgatggca

SEQ ID NO: 54810 - DNA, 21 bp, Homo sapiens
tcaaggccagggtccagcctc

SEQ ID NO: 54811 - DNA, 16 bp, Homo sapiens
cactcccactgcagcc

SEQ ID NO: 54812 - DNA, 22 bp, Homo sapiens
cttgctcagccccggcgtggcc

SEQ ID NO: 54813 - DNA, 20 bp, Homo sapiens
aaatacttgaccagcgtgac

SEQ ID NO: 54814 - DNA, 16 bp, Homo sapiens
gtggccagcgcgtgtc

SEQ ID NO: 54815 - DNA, 24 bp, Homo sapiens
atgtagctctcacctctcctgcca

SEQ ID NO: 54816 - DNA, 20 bp, Homo sapiens
atttgtcaccatgatcgtgg

SEQ ID NO: 54817 - DNA, 23 bp, Homo sapiens
tgtggctttccgtcctgtttcct

SEQ ID NO: 54818 - DNA, 24 bp, Homo sapiens
cttctgcttctcctacatcaagct

SEQ ID NO: 54819 - DNA, 16 bp, Homo sapiens
gcaggctggcctcccc

SEQ ID NO: 54820 - DNA, 20 bp, Homo sapiens
cagccctcagtgcttttgta

SEQ ID NO: 54821 - DNA, 22 bp, Homo sapiens
gagccaaggccccagtgggagg

SEQ ID NO: 54822 - DNA, 21 bp, Homo sapiens
ggaacatctgcaggaggctga

SEQ ID NO: 54823 - DNA, 20 bp, Homo sapiens
atgaggcagccgcccagccc

SEQ ID NO: 54824 - DNA, 23 bp, Homo sapiens
atgccccagccgcagggtggcca

SEQ ID NO: 54825 - DNA, 22 bp, Homo sapiens
caggcctacatgaacttttact

SEQ ID NO: 54826 - DNA, 20 bp, Homo sapiens
atcccaggtgggggtggagc

SEQ ID NO: 54827 - DNA, 24 bp, Homo sapiens
ggacttcaccgggggcagcttcag

SEQ ID NO: 54828 - DNA, 19 bp, Homo sapiens
acaaagcctccagctacga

SEQ ID NO: 54829 - DNA, 21 bp, Homo sapiens
ggtctccgaagatcagcgtcc

SEQ ID NO: 54830 - DNA, 21 bp, Homo sapiens
gagagacccacctaggggcct

SEQ ID NO: 54831 - DNA, 18 bp, Homo sapiens
gaagaagacgacgtcgaa

SEQ ID NO: 54832 - DNA, 17 bp, Homo sapiens
caccaccccacaagctc

SEQ ID NO: 54833 - DNA, 17 bp, Homo sapiens
tgggtgctagttcagct

SEQ ID NO: 54834 - DNA, 24 bp, Homo sapiens
cttctgtcccccggctgctaacag

SEQ ID NO: 54835 - DNA, 20 bp, Homo sapiens
ttcgctgggtgaggccttcc

SEQ ID NO: 54836 - DNA, 24 bp, Homo sapiens
gactcggggtcttctccatcgtct

SEQ ID NO: 54837 - DNA, 16 bp, Homo sapiens
tctcctctgtccgcac

SEQ ID NO: 54838 - DNA, 24 bp, Homo sapiens
agaaagagaccggggtatgaccag

SEQ ID NO: 54839 - DNA, 24 bp, Homo sapiens
ctggcacacagggctggctcagtg

SEQ ID NO: 54840 - DNA, 20 bp, Homo sapiens
caagcttggtgcccagtcct

SEQ ID NO: 54841 - DNA, 22 bp, Homo sapiens
cagaggccattcaatagcctgc

SEQ ID NO: 54842 - DNA, 24 bp, Homo sapiens
ctgcaaggtcagcccttcaagctg

SEQ ID NO: 54843 - DNA, 20 bp, Homo sapiens
gtggcaccgtcgccttgaca

SEQ ID NO: 54844 - DNA, 17 bp, Homo sapiens
tgatctctgggaatgca

SEQ ID NO: 54845 - DNA, 22 bp, Homo sapiens
ctctggcagccgtctcaggcag

SEQ ID NO: 54846 - DNA, 23 bp, Homo sapiens
ggcctaaccccaaagtcctagcc

SEQ ID NO: 54847 - DNA, 20 bp, Homo sapiens
aaactaccagcgtttctgca

SEQ ID NO: 54848 - DNA, 24 bp, Homo sapiens
caaaactaaattaagacccccaaa

SEQ ID NO: 54849 - DNA, 16 bp, Homo sapiens
gatgaagtcagagccc

SEQ ID NO: 54850 - DNA, 22 bp, Homo sapiens
cagtcccagataaggcctacta

SEQ ID NO: 54851 - DNA, 22 bp, Homo sapiens
cccctgcaaaagtggggtgcgg

SEQ ID NO: 54852 - DNA, 18 bp, Homo sapiens
ccccatcatgcttacctt

SEQ ID NO: 54853 - DNA, 16 bp, Homo sapiens
ccttcccttctccaac

SEQ ID NO: 54854 - DNA, 23 bp, Homo sapiens
gcttctatctcctttcccattat

SEQ ID NO: 54855 - DNA, 21 bp, Homo sapiens
ggcagcggccgagggagccgt

SEQ ID NO: 54856 - DNA, 21 bp, Homo sapiens
atcgctggtggctggccaggt

SEQ ID NO: 54857 - DNA, 19 bp, Homo sapiens
ggagggagggagggagcta

SEQ ID NO: 54858 - DNA, 19 bp, Homo sapiens
aactatagatgcttccttc

SEQ ID NO: 54859 - DNA, 20 bp, Homo sapiens
ctccttctgtgctggcagga

SEQ ID NO: 54860 - DNA, 20 bp, Homo sapiens
gaccccctaccgcctgccga

SEQ ID NO: 54861 - DNA, 18 bp, Homo sapiens
cctgaggcaaacatggag

SEQ ID NO: 54862 - DNA, 22 bp, Homo sapiens
agaaacctgagggagaactagg

SEQ ID NO: 54863 - DNA, 23 bp, Homo sapiens
gaacgcagggccgggctccaggg

SEQ ID NO: 54864 - DNA, 16 bp, Homo sapiens
gccgccccaagctcgc

SEQ ID NO: 54865 - DNA, 16 bp, Homo sapiens
cccggtgcactgtgga

SEQ ID NO: 54866 - DNA, 21 bp, Homo sapiens
ccagggccgctgcccaccgtc

SEQ ID NO: 54867 - DNA, 22 bp, Homo sapiens
gtgcaggacgccagagctgggt

SEQ ID NO: 54868 - DNA, 22 bp, Homo sapiens
gggctgccccaggagcgccgtg

SEQ ID NO: 54869 - DNA, 24 bp, Homo sapiens
gagatgcaggcggctcggatggcc

SEQ ID NO: 54870 - DNA, 22 bp, Homo sapiens
tgcggtgacttacctgagcggc

SEQ ID NO: 54871 - DNA, 22 bp, Homo sapiens
aggtctgtgtgtgacaagaggg

SEQ ID NO: 54872 - DNA, 24 bp, Homo sapiens
gatccctgccgatggcgggcgccg

SEQ ID NO: 54873 - DNA, 24 bp, Homo sapiens
tgaacccccactccccacagctcg

SEQ ID NO: 54874 - DNA, 16 bp, Homo sapiens
cccctactttcggcga

SEQ ID NO: 54875 - DNA, 23 bp, Homo sapiens
ctgcccggcggccctatgccggg

SEQ ID NO: 54876 - DNA, 23 bp, Homo sapiens
acctgcctactgctcagtcgccg

SEQ ID NO: 54877 - DNA, 20 bp, Homo sapiens
ctggtcagagcgtcagaggg

SEQ ID NO: 54878 - DNA, 24 bp, Homo sapiens
gcgaaactaggggaaaggtcaccg

SEQ ID NO: 54879 - DNA, 23 bp, Homo sapiens
ttgggtctggctaaggtccacct

SEQ ID NO: 54880 - DNA, 16 bp, Homo sapiens
cttgacacagcggaag

SEQ ID NO: 54881 - DNA, 16 bp, Homo sapiens
cccacagcaaaggact

SEQ ID NO: 54882 - DNA, 19 bp, Homo sapiens
ctggacaagtcagattccc

SEQ ID NO: 54883 - DNA, 16 bp, Homo sapiens
tcccttaccggacggg

SEQ ID NO: 54884 - DNA, 22 bp, Homo sapiens
gtaggtagccccgaggccaggt

SEQ ID NO: 54885 - DNA, 24 bp, Homo sapiens
ggacaggctggtcaggccaggctg

SEQ ID NO: 54886 - DNA, 21 bp, Homo sapiens
tctctctgcccaggaatctaa

SEQ ID NO: 54887 - DNA, 17 bp, Homo sapiens
caccagctctttaagaa

SEQ ID NO: 54888 - DNA, 18 bp, Homo sapiens
agatcaggtgttcccata

SEQ ID NO: 54889 - DNA, 16 bp, Homo sapiens
cctcaccagggaccaa

SEQ ID NO: 54890 - DNA, 16 bp, Homo sapiens
cagggtggtttcccct

SEQ ID NO: 54891 - DNA, 17 bp, Homo sapiens
ctggggaaggcacagga

SEQ ID NO: 54892 - DNA, 19 bp, Homo sapiens
aacgaagagcagacacagt

SEQ ID NO: 54893 - DNA, 16 bp, Homo sapiens
tgccaagtggtctcct

SEQ ID NO: 54894 - DNA, 22 bp, Homo sapiens
aggtaaggaatgactcggggct

SEQ ID NO: 54895 - DNA, 21 bp, Homo sapiens
aaggcccacaccacccagctc

SEQ ID NO: 54896 - DNA, 21 bp, Homo sapiens
aaaggagcctggatgtgggat

SEQ ID NO: 54897 - DNA, 19 bp, Homo sapiens
ccaagctggggtatggcat

SEQ ID NO: 54898 - DNA, 16 bp, Homo sapiens
ctctggagatggtgga

SEQ ID NO: 54899 - DNA, 17 bp, Homo sapiens
tgcttagaagagacctt

SEQ ID NO: 54900 - DNA, 20 bp, Homo sapiens
tggtctgcaagtgcccagtg

SEQ ID NO: 54901 - DNA, 20 bp, Homo sapiens
ctgcatgtaaattgtgttat

SEQ ID NO: 54902 - DNA, 20 bp, Homo sapiens
ttgcacaccccacttctttt

SEQ ID NO: 54903 - DNA, 23 bp, Homo sapiens
agggtaatgcccacgccaaggtc

SEQ ID NO: 54904 - DNA, 23 bp, Homo sapiens
ccctaggtcaggaactgccctag

SEQ ID NO: 54905 - DNA, 17 bp, Homo sapiens
ttgtgccaaagagcagg

SEQ ID NO: 54906 - DNA, 20 bp, Homo sapiens
gtcaggtccccctgcagcca

SEQ ID NO: 54907 - DNA, 17 bp, Homo sapiens
cctggctctcctagggt

SEQ ID NO: 54908 - DNA, 17 bp, Homo sapiens
gagatcgtgggcatgca

SEQ ID NO: 54909 - DNA, 22 bp, Homo sapiens
ccatctgataatctaagtgcca

SEQ ID NO: 54910 - DNA, 17 bp, Homo sapiens
catcggtttcaaaggca

SEQ ID NO: 54911 - DNA, 18 bp, Homo sapiens
caaccagcacactgtgat

SEQ ID NO: 54912 - DNA, 21 bp, Homo sapiens
ccccaagctggcatctggtga

SEQ ID NO: 54913 - DNA, 17 bp, Homo sapiens
gaaggttttggggaggc

SEQ ID NO: 54914 - DNA, 16 bp, Homo sapiens
ctgcatctgacccgct

SEQ ID NO: 54915 - DNA, 23 bp, Homo sapiens
atactcccaggtgttaaggggga

SEQ ID NO: 54916 - DNA, 20 bp, Homo sapiens
cttccattgagggtatagta

SEQ ID NO: 54917 - DNA, 21 bp, Homo sapiens
gctcatcagaacttggggtaa

SEQ ID NO: 54918 - DNA, 24 bp, Homo sapiens
cagtggggcctggaattgggcgga

SEQ ID NO: 54919 - DNA, 18 bp, Homo sapiens
tgtctaaccgagccctca

SEQ ID NO: 54920 - DNA, 18 bp, Homo sapiens
cccccattactgtggaag

SEQ ID NO: 54921 - DNA, 16 bp, Homo sapiens
cagcccctgtggaaaa

SEQ ID NO: 54922 - DNA, 16 bp, Homo sapiens
ctgtggctggatctgt

SEQ ID NO: 54923 - DNA, 20 bp, Homo sapiens
cctgcctcccatttctcccc

SEQ ID NO: 54924 - DNA, 22 bp, Homo sapiens
ctcactgggtaatgcccccgaa

SEQ ID NO: 54925 - DNA, 24 bp, Homo sapiens
gtcctccacgccctgaatatccca

SEQ ID NO: 54926 - DNA, 24 bp, Homo sapiens
aacagccatctgcccaggagccca

SEQ ID NO: 54927 - DNA, 22 bp, Homo sapiens
ttgccaagacaccagttacaga

SEQ ID NO: 54928 - DNA, 19 bp, Homo sapiens
aaaggccacattcagtcca

SEQ ID NO: 54929 - DNA, 16 bp, Homo sapiens
gtggtggagaggggct

SEQ ID NO: 54930 - DNA, 22 bp, Homo sapiens
gcctccttagccctcagggcct

SEQ ID NO: 54931 - DNA, 16 bp, Homo sapiens
aaagaacacctctgct

SEQ ID NO: 54932 - DNA, 24 bp, Homo sapiens
agtggtcgtcattcctccctggtg

SEQ ID NO: 54933 - DNA, 19 bp, Homo sapiens
aaccttgaagccactccca

SEQ ID NO: 54934 - DNA, 19 bp, Homo sapiens
gttgaacacacctctgctt

SEQ ID NO: 54935 - DNA, 23 bp, Homo sapiens
gatgcctctcatggtacctgcca

SEQ ID NO: 54936 - DNA, 22 bp, Homo sapiens
atgggcatcaaggcttcaaaca

SEQ ID NO: 54937 - DNA, 18 bp, Homo sapiens
ttctgtttgggttaccta

SEQ ID NO: 54938 - DNA, 21 bp, Homo sapiens
acgtgctgggtgaggttggga

SEQ ID NO: 54939 - DNA, 17 bp, Homo sapiens
tagtgtagggagtgcct

SEQ ID NO: 54940 - DNA, 22 bp, Homo sapiens
atggaaggtttggcatggctgc

SEQ ID NO: 54941 - DNA, 18 bp, Homo sapiens
cagtctacgctggatgga

SEQ ID NO: 54942 - DNA, 18 bp, Homo sapiens
gacttgctagcttaggtc

SEQ ID NO: 54943 - DNA, 17 bp, Homo sapiens
ccagcttctcctggatc

SEQ ID NO: 54944 - DNA, 18 bp, Homo sapiens
ctctggcgcaagcccagc

SEQ ID NO: 54945 - DNA, 16 bp, Homo sapiens
gggagaggggcttggg

SEQ ID NO: 54946 - DNA, 20 bp, Homo sapiens
cagcgggatgtgtggaccct

SEQ ID NO: 54947 - DNA, 16 bp, Homo sapiens
ccaggtgctgctgggg

SEQ ID NO: 54948 - DNA, 24 bp, Homo sapiens
ggggagaaaattcacaactttggg

SEQ ID NO: 54949 - DNA, 17 bp, Homo sapiens
aagctgagctgactatg

SEQ ID NO: 54950 - DNA, 17 bp, Homo sapiens
ctccctggtccatgtta

SEQ ID NO: 54951 - DNA, 19 bp, Homo sapiens
tgcctgacctgacaagcta

SEQ ID NO: 54952 - DNA, 16 bp, Homo sapiens
catgcctgggacctca

SEQ ID NO: 54953 - DNA, 21 bp, Homo sapiens
ccaagtctgacaaagcccttt

SEQ ID NO: 54954 - DNA, 19 bp, Homo sapiens
gacaaagaacagatgagac

SEQ ID NO: 54955 - DNA, 23 bp, Homo sapiens
catggcttacatggtgagtgcta

SEQ ID NO: 54956 - DNA, 23 bp, Homo sapiens
aagcccataccccccatgatttg

SEQ ID NO: 54957 - DNA, 21 bp, Homo sapiens
ccgccatcagcaaaatctttg

SEQ ID NO: 54958 - DNA, 24 bp, Homo sapiens
atgtgcctacccacccctggccca

SEQ ID NO: 54959 - DNA, 18 bp, Homo sapiens
ggtgctcagctcccaaaa

SEQ ID NO: 54960 - DNA, 16 bp, Homo sapiens
ctctactccaggttcc

SEQ ID NO: 54961 - DNA, 20 bp, Homo sapiens
ggtgacagatgaatgcatcc

SEQ ID NO: 54962 - DNA, 17 bp, Homo sapiens
aaacagccgaagaatgt

SEQ ID NO: 54963 - DNA, 18 bp, Homo sapiens
ttctgcagagcctcggct

SEQ ID NO: 54964 - DNA, 22 bp, Homo sapiens
gtcctccccacctctaccccca

SEQ ID NO: 54965 - DNA, 24 bp, Homo sapiens
tataatttgtgtggccctgtgcta

SEQ ID NO: 54966 - DNA, 16 bp, Homo sapiens
agagagctcctttcct

SEQ ID NO: 54967 - DNA, 16 bp, Homo sapiens
ggatctttgaggggac

SEQ ID NO: 54968 - DNA, 16 bp, Homo sapiens
ctcctagcaggaggcc

SEQ ID NO: 54969 - DNA, 24 bp, Homo sapiens
gctgtatggtaagacagagaattg

SEQ ID NO: 54970 - DNA, 16 bp, Homo sapiens
caccaccctgccctcc

SEQ ID NO: 54971 - DNA, 16 bp, Homo sapiens
ctcttcccccatagga

SEQ ID NO: 54972 - DNA, 24 bp, Homo sapiens
gactcaggccgctgcccagccctg

SEQ ID NO: 54973 - DNA, 24 bp, Homo sapiens
taaagaatccctttgggaatgctg

SEQ ID NO: 54974 - DNA, 17 bp, Homo sapiens
cccctggccacttacca

SEQ ID NO: 54975 - DNA, 24 bp, Homo sapiens
gtaggcttagggccagagccaggg

SEQ ID NO: 54976 - DNA, 16 bp, Homo sapiens
acagtgcggggctcag

SEQ ID NO: 54977 - DNA, 22 bp, Homo sapiens
ctcttcctctcaggcgggcagg

SEQ ID NO: 54978 - DNA, 24 bp, Homo sapiens
gttttatcagcttggcctccacca

SEQ ID NO: 54979 - DNA, 20 bp, Homo sapiens
gagttgagtcggagtggcga

SEQ ID NO: 54980 - DNA, 20 bp, Homo sapiens
ggaaagggaggggcggaatg

SEQ ID NO: 54981 - DNA, 24 bp, Homo sapiens
cagggactgcagccgatggcccct

SEQ ID NO: 54982 - DNA, 16 bp, Homo sapiens
ttcatctgtccggtag

SEQ ID NO: 54983 - DNA, 24 bp, Homo sapiens
cgggctctggagcagtttgccact

SEQ ID NO: 54984 - DNA, 16 bp, Homo sapiens
accaccatggcataga

SEQ ID NO: 54985 - DNA, 23 bp, Homo sapiens
gattgtcagtaagtgagctctac

SEQ ID NO: 54986 - DNA, 19 bp, Homo sapiens
ctgggatccaggcccaggc

SEQ ID NO: 54987 - DNA, 18 bp, Homo sapiens
cacccccacccccacccc

SEQ ID NO: 54988 - DNA, 16 bp, Homo sapiens
actcagggatcttgag

SEQ ID NO: 54989 - DNA, 18 bp, Homo sapiens
ggggccatcgacctctat

SEQ ID NO: 54990 - DNA, 18 bp, Homo sapiens
ctcgatacaccaggtgtc

SEQ ID NO: 54991 - DNA, 24 bp, Homo sapiens
ggcaggcagggaatgcctgagccg

SEQ ID NO: 54992 - DNA, 24 bp, Homo sapiens
gagggaaggaggggttgggcctgc

SEQ ID NO: 54993 - DNA, 24 bp, Homo sapiens
tattttcatctcctgcttcctgcc

SEQ ID NO: 54994 - DNA, 23 bp, Homo sapiens
ctgccaggggtcagactgcaggg

SEQ ID NO: 54995 - DNA, 19 bp, Homo sapiens
agcatgagaaaatgctctg

SEQ ID NO: 54996 - DNA, 18 bp, Homo sapiens
caccccgctccaccaagg

SEQ ID NO: 54997 - DNA, 17 bp, Homo sapiens
gtgagggctggaggtgc

SEQ ID NO: 54998 - DNA, 23 bp, Homo sapiens
gcacataactgggacaggccctg

SEQ ID NO: 54999 - DNA, 24 bp, Homo sapiens
gatccgagagggcatggccgccct

SEQ ID NO: 55000 - DNA, 19 bp, Homo sapiens
ttcgggacaaaccagggcc

SEQ ID NO: 55001 - DNA, 22 bp, Homo sapiens
gcaacttcaaaagcatctccaa

SEQ ID NO: 55002 - DNA, 22 bp, Homo sapiens
atttttattatttgcgaggcag

SEQ ID NO: 55003 - DNA, 24 bp, Homo sapiens
cgtgcggtcacgagacgcccccaa

SEQ ID NO: 55004 - DNA, 17 bp, Homo sapiens
gccccggccaggagaag

SEQ ID NO: 55005 - DNA, 24 bp, Homo sapiens
gagcccgggcttagccttcgggtc

SEQ ID NO: 55006 - DNA, 20 bp, Homo sapiens
cagccgggccacgagcgccc

SEQ ID NO: 55007 - DNA, 24 bp, Homo sapiens
gccccaccccctggccgtcgcggg

SEQ ID NO: 55008 - DNA, 19 bp, Homo sapiens
ttggcagccagagcgcgct

SEQ ID NO: 55009 - DNA, 21 bp, Homo sapiens
gtggccgcggcggtgggggtc

SEQ ID NO: 55010 - DNA, 23 bp, Homo sapiens
gagccgcgcacccgcacgcgcgc

SEQ ID NO: 55011 - DNA, 16 bp, Homo sapiens
ggcggccgtgcgggcg

SEQ ID NO: 55012 - DNA, 24 bp, Homo sapiens
cacgtggcagccacagaagtcgcg

SEQ ID NO: 55013 - DNA, 24 bp, Homo sapiens
cggccgacttctccgtgtcggtgg

SEQ ID NO: 55014 - DNA, 23 bp, Homo sapiens
gtcagctcccccggcacggctgg

SEQ ID NO: 55015 - DNA, 23 bp, Homo sapiens
cagcctgggcggcggcggcgcgg

SEQ ID NO: 55016 - DNA, 24 bp, Homo sapiens
ggtaagcgcctcgggcggacgcgg

SEQ ID NO: 55017 - DNA, 24 bp, Homo sapiens
gccgcggggctgcaccgctacctg

SEQ ID NO: 55018 - DNA, 24 bp, Homo sapiens
ttccggccagcgctccccgctcag

SEQ ID NO: 55019 - DNA, 24 bp, Homo sapiens
cagctgcgcctgccgcggccactg

SEQ ID NO: 55020 - DNA, 21 bp, Homo sapiens
gaaaggcagagtggctggctc

SEQ ID NO: 55021 - DNA, 22 bp, Homo sapiens
ctggtctcagctccacctgggg

SEQ ID NO: 55022 - DNA, 24 bp, Homo sapiens
cagcgggcccagtcccaccacacg

SEQ ID NO: 55023 - DNA, 21 bp, Homo sapiens
cccctcccctctcctctaggt

SEQ ID NO: 55024 - DNA, 21 bp, Homo sapiens
ctccaggccagtgccaggttg

SEQ ID NO: 55025 - DNA, 23 bp, Homo sapiens
cagggtgggatgcgcccctgctc

SEQ ID NO: 55026 - DNA, 17 bp, Homo sapiens
atagaggagggtgggga

SEQ ID NO: 55027 - DNA, 22 bp, Homo sapiens
cgcaaagctactctttcgtgtg

SEQ ID NO: 55028 - DNA, 22 bp, Homo sapiens
cttctagagagagacactgcgc

SEQ ID NO: 55029 - DNA, 23 bp, Homo sapiens
ggatggcgctgaatggcatcaac

SEQ ID NO: 55030 - DNA, 16 bp, Homo sapiens
ccggaagcctcagttt

SEQ ID NO: 55031 - DNA, 20 bp, Homo sapiens
cacctactcacaggtctctt

SEQ ID NO: 55032 - DNA, 21 bp, Homo sapiens
agaactcattgatctctgcct

SEQ ID NO: 55033 - DNA, 23 bp, Homo sapiens
gttcggattttgtctcagtagcc

SEQ ID NO: 55034 - DNA, 19 bp, Homo sapiens
catcccaggtgtgcaggtt

SEQ ID NO: 55035 - DNA, 21 bp, Homo sapiens
aatgaatgaatgaatgaatga

SEQ ID NO: 55036 - DNA, 17 bp, Homo sapiens
ccatccttttacctgca

SEQ ID NO: 55037 - DNA, 20 bp, Homo sapiens
gtacctggccttgggcctga

SEQ ID NO: 55038 - DNA, 17 bp, Homo sapiens
ggcctaataccaccctt

SEQ ID NO: 55039 - DNA, 20 bp, Homo sapiens
cttcctggcctgggggcgaa

SEQ ID NO: 55040 - DNA, 23 bp, Homo sapiens
agaaggccctcatctcccaggat

SEQ ID NO: 55041 - DNA, 24 bp, Homo sapiens
ctcctggcacatcaagcagcttta

SEQ ID NO: 55042 - DNA, 24 bp, Homo sapiens
tcggtgatagatggtcatgggccc

SEQ ID NO: 55043 - DNA, 16 bp, Homo sapiens
atgccccgcgaatgca

SEQ ID NO: 55044 - DNA, 23 bp, Homo sapiens
aactgaggcggggggctgcgtgt

SEQ ID NO: 55045 - DNA, 21 bp, Homo sapiens
taaaattccctctctgagcta

SEQ ID NO: 55046 - DNA, 16 bp, Homo sapiens
acccttccttctgttc

SEQ ID NO: 55047 - DNA, 24 bp, Homo sapiens
tacaggcgtgagccactgcgcccg

SEQ ID NO: 55048 - DNA, 21 bp, Homo sapiens
atgaccccagtgctgcctgca

SEQ ID NO: 55049 - DNA, 16 bp, Homo sapiens
aactgcccatcttcgt

SEQ ID NO: 55050 - DNA, 20 bp, Homo sapiens
caaagccatagaggcaagag

SEQ ID NO: 55051 - DNA, 16 bp, Homo sapiens
aatatggggtcttccg

SEQ ID NO: 55052 - DNA, 19 bp, Homo sapiens
ctatggtgaacactatggc

SEQ ID NO: 55053 - DNA, 16 bp, Homo sapiens
tgtggtctgtgccaaa

SEQ ID NO: 55054 - DNA, 18 bp, Homo sapiens
ctcaggtcaatgtcacga

SEQ ID NO: 55055 - DNA, 16 bp, Homo sapiens
ctgcggcaaggtagga

SEQ ID NO: 55056 - DNA, 22 bp, Homo sapiens
ctgctccttccttctggctccg

SEQ ID NO: 55057 - DNA, 18 bp, Homo sapiens
ctctcccaccccacccag

SEQ ID NO: 55058 - DNA, 17 bp, Homo sapiens
agagctgatcaaagagt

SEQ ID NO: 55059 - DNA, 16 bp, Homo sapiens
gtccctctgcctaccc

SEQ ID NO: 55060 - DNA, 23 bp, Homo sapiens
atgcagccaccttcctcagagcc

SEQ ID NO: 55061 - DNA, 17 bp, Homo sapiens
gtacacgtgcttggtaa

SEQ ID NO: 55062 - DNA, 24 bp, Homo sapiens
tggtgctggaagagccagccttgg

SEQ ID NO: 55063 - DNA, 24 bp, Homo sapiens
tggtgggggtcatgggaagccatg

SEQ ID NO: 55064 - DNA, 16 bp, Homo sapiens
cacagctcccagcaca

SEQ ID NO: 55065 - DNA, 21 bp, Homo sapiens
ctgggccctctgtttcatcac

SEQ ID NO: 55066 - DNA, 21 bp, Homo sapiens
ggaggcagtgcgggtatacac

SEQ ID NO: 55067 - DNA, 24 bp, Homo sapiens
gtggatactgaggctgtgtggctg

SEQ ID NO: 55068 - DNA, 24 bp, Homo sapiens
aagaccatggtttcccccaaagtt

SEQ ID NO: 55069 - DNA, 21 bp, Homo sapiens
ggcccgcccagatcagggctg

SEQ ID NO: 55070 - DNA, 22 bp, Homo sapiens
gagttggggaagaggcgggcag

SEQ ID NO: 55071 - DNA, 23 bp, Homo sapiens
ctggacctgtttgctgagagcca

SEQ ID NO: 55072 - DNA, 23 bp, Homo sapiens
agggaatagaccacttcgttctg

SEQ ID NO: 55073 - DNA, 23 bp, Homo sapiens
catctggtgcatgctgcacaact

SEQ ID NO: 55074 - DNA, 16 bp, Homo sapiens
ccaggctgccaaatct

SEQ ID NO: 55075 - DNA, 24 bp, Homo sapiens
ctgtgaacggaggcccagaagctg

SEQ ID NO: 55076 - DNA, 22 bp, Homo sapiens
cagtagcctccacgctgcccct

SEQ ID NO: 55077 - DNA, 20 bp, Homo sapiens
atggcccccgagggcatcag

SEQ ID NO: 55078 - DNA, 20 bp, Homo sapiens
ggctacgattgtggcccctg

SEQ ID NO: 55079 - DNA, 17 bp, Homo sapiens
cgaaaggacccagtgcc

SEQ ID NO: 55080 - DNA, 19 bp, Homo sapiens
atcagatcggttgtaccag

SEQ ID NO: 55081 - DNA, 24 bp, Homo sapiens
gtatggggtctcccacccggacgc

SEQ ID NO: 55082 - DNA, 23 bp, Homo sapiens
gaaggcggggctggtggccaggg

SEQ ID NO: 55083 - DNA, 23 bp, Homo sapiens
gtacaactgctccggggaggcct

SEQ ID NO: 55084 - DNA, 24 bp, Homo sapiens
tagtacaagctgaccagctcctgc

SEQ ID NO: 55085 - DNA, 24 bp, Homo sapiens
ccgtccctacagatgaataccagc

SEQ ID NO: 55086 - DNA, 17 bp, Homo sapiens
ccagccctcaacaggga

SEQ ID NO: 55087 - DNA, 24 bp, Homo sapiens
cggctgctgctcacatctgctccc

SEQ ID NO: 55088 - DNA, 24 bp, Homo sapiens
caagaagcggctgtcactagccag

SEQ ID NO: 55089 - DNA, 24 bp, Homo sapiens
acctcactcggcaggcagtgcagg

SEQ ID NO: 55090 - DNA, 19 bp, Homo sapiens
gcctcggcctcactgactg

SEQ ID NO: 55091 - DNA, 24 bp, Homo sapiens
gcgcctacctgagcaaggagctgg

SEQ ID NO: 55092 - DNA, 24 bp, Homo sapiens
agtccaggatgttgccttctggcc

SEQ ID NO: 55093 - DNA, 24 bp, Homo sapiens
gagctgctgccggcactggacgag

SEQ ID NO: 55094 - DNA, 24 bp, Homo sapiens
cgccagcgaggggtgtagtagttg

SEQ ID NO: 55095 - DNA, 24 bp, Homo sapiens
tagagcaggcccgagcagcggcag

SEQ ID NO: 55096 - DNA, 21 bp, Homo sapiens
aactggtgctgttggaaaggg

SEQ ID NO: 55097 - DNA, 16 bp, Homo sapiens
gctaccagctgacctt

SEQ ID NO: 55098 - DNA, 18 bp, Homo sapiens
ctctgcttgctgagaacg

SEQ ID NO: 55099 - DNA, 23 bp, Homo sapiens
ctggcggggttggtggccaacta

SEQ ID NO: 55100 - DNA, 22 bp, Homo sapiens
gtaatatttgaggaagatcttc

SEQ ID NO: 55101 - DNA, 21 bp, Homo sapiens
ttgacagtgtggcccagggca

SEQ ID NO: 55102 - DNA, 16 bp, Homo sapiens
aaacaaggcccagtgg

SEQ ID NO: 55103 - DNA, 24 bp, Homo sapiens
gtcttccaactggagcaggccttc

SEQ ID NO: 55104 - DNA, 16 bp, Homo sapiens
ctgggttatcctgtga

SEQ ID NO: 55105 - DNA, 23 bp, Homo sapiens
gagacactgtggacctggccaag

SEQ ID NO: 55106 - DNA, 19 bp, Homo sapiens
caggtcatttccctccaat

SEQ ID NO: 55107 - DNA, 17 bp, Homo sapiens
ccaaagtcatggagaac

SEQ ID NO: 55108 - DNA, 19 bp, Homo sapiens
acagggcatataaaacagg

SEQ ID NO: 55109 - DNA, 17 bp, Homo sapiens
caagatgaaccagtcct

SEQ ID NO: 55110 - DNA, 23 bp, Homo sapiens
ccaccaagcctggaataactgca

SEQ ID NO: 55111 - DNA, 17 bp, Homo sapiens
atggaaccagatgggga

SEQ ID NO: 55112 - DNA, 20 bp, Homo sapiens
ggatggaggaaggaatgaat

SEQ ID NO: 55113 - DNA, 16 bp, Homo sapiens
tgagccagtctccaat

SEQ ID NO: 55114 - DNA, 17 bp, Homo sapiens
taccaagactcccagga

SEQ ID NO: 55115 - DNA, 16 bp, Homo sapiens
tgccagcctcttttct

SEQ ID NO: 55116 - DNA, 19 bp, Homo sapiens
cttctacgtcctcttcccc

SEQ ID NO: 55117 - DNA, 17 bp, Homo sapiens
gtggcttcctgaatagc

SEQ ID NO: 55118 - DNA, 21 bp, Homo sapiens
aactcctttgggtagctgtga

SEQ ID NO: 55119 - DNA, 17 bp, Homo sapiens
cttccccctttatgtag

SEQ ID NO: 55120 - DNA, 20 bp, Homo sapiens
aggaagtgtcatgaaatatc

SEQ ID NO: 55121 - DNA, 20 bp, Homo sapiens
tagtagtcagtatccaaaac

SEQ ID NO: 55122 - DNA, 21 bp, Homo sapiens
aggcaacatgtgaaatccttc

SEQ ID NO: 55123 - DNA, 16 bp, Homo sapiens
gtccagtctcacaggt

SEQ ID NO: 55124 - DNA, 24 bp, Homo sapiens
gggcaaaagcattcattcagtaac

SEQ ID NO: 55125 - DNA, 22 bp, Homo sapiens
agtttcatccataacaggtaaa

SEQ ID NO: 55126 - DNA, 23 bp, Homo sapiens
agcgtccatactggtgggttttg

SEQ ID NO: 55127 - DNA, 18 bp, Homo sapiens
ccaattgaagagcatgac

SEQ ID NO: 55128 - DNA, 18 bp, Homo sapiens
aagcagttccctgtaacc

SEQ ID NO: 55129 - DNA, 24 bp, Homo sapiens
tggatggtaagatgggtggatgga

SEQ ID NO: 55130 - DNA, 18 bp, Homo sapiens
accatcacgtagtataca

SEQ ID NO: 55131 - DNA, 20 bp, Homo sapiens
aatgggtagatgggtggata

SEQ ID NO: 55132 - DNA, 17 bp, Homo sapiens
ttaccgaaatctgtagg

SEQ ID NO: 55133 - DNA, 22 bp, Homo sapiens
agatgaggaccttttcaccttt

SEQ ID NO: 55134 - DNA, 16 bp, Homo sapiens
agctacagagagagct

SEQ ID NO: 55135 - DNA, 22 bp, Homo sapiens
ctggccatgccatgggcacagc

SEQ ID NO: 55136 - DNA, 18 bp, Homo sapiens
cagcggctgcccaggtgt

SEQ ID NO: 55137 - DNA, 23 bp, Homo sapiens
tccatctttcagggaaagataaa

SEQ ID NO: 55138 - DNA, 17 bp, Homo sapiens
cagaatcccaaccacaa

SEQ ID NO: 55139 - DNA, 19 bp, Homo sapiens
aaaattccactgagagcac

SEQ ID NO: 55140 - DNA, 19 bp, Homo sapiens
cttgatgaggaaaatgagc

SEQ ID NO: 55141 - DNA, 18 bp, Homo sapiens
tttctttgctgaaggatc

SEQ ID NO: 55142 - DNA, 16 bp, Homo sapiens
ttgggggagaaggaag

SEQ ID NO: 55143 - DNA, 20 bp, Homo sapiens
tgcttgaatgtcattttgtg

SEQ ID NO: 55144 - DNA, 21 bp, Homo sapiens
tacacacaggatgtggctgga

SEQ ID NO: 55145 - DNA, 17 bp, Homo sapiens
cacgaatctaccttgct

SEQ ID NO: 55146 - DNA, 17 bp, Homo sapiens
tcatttcaagttgctca

SEQ ID NO: 55147 - DNA, 16 bp, Homo sapiens
gtggatgtggctgaaa

SEQ ID NO: 55148 - DNA, 22 bp, Homo sapiens
catctgtgatttaattccacag

SEQ ID NO: 55149 - DNA, 16 bp, Homo sapiens
gaagctgaacaggaag

SEQ ID NO: 55150 - DNA, 21 bp, Homo sapiens
cacctctagcaaaggtcccaa

SEQ ID NO: 55151 - DNA, 16 bp, Homo sapiens
ctccagagtccacagg

SEQ ID NO: 55152 - DNA, 22 bp, Homo sapiens
cattgctgttgcagaaactttc

SEQ ID NO: 55153 - DNA, 16 bp, Homo sapiens
gcaaagggtgtggtgt

SEQ ID NO: 55154 - DNA, 24 bp, Homo sapiens
aaatattttctcattaccttcttc

SEQ ID NO: 55155 - DNA, 16 bp, Homo sapiens
acatgctggagttgag

SEQ ID NO: 55156 - DNA, 20 bp, Homo sapiens
actgggtgtagacctcctgt

SEQ ID NO: 55157 - DNA, 17 bp, Homo sapiens
ctacaatagagctgagg

SEQ ID NO: 55158 - DNA, 24 bp, Homo sapiens
agcagccagaatgggtccacattg

SEQ ID NO: 55159 - DNA, 16 bp, Homo sapiens
agctcgacttgggatg

SEQ ID NO: 55160 - DNA, 23 bp, Homo sapiens
ctttggcctggggctggctctca

SEQ ID NO: 55161 - DNA, 17 bp, Homo sapiens
gatgacactgacggatg

SEQ ID NO: 55162 - DNA, 24 bp, Homo sapiens
aaactcagcaagtggctcccattc

SEQ ID NO: 55163 - DNA, 16 bp, Homo sapiens
tcttacaacgacttct

SEQ ID NO: 55164 - DNA, 17 bp, Homo sapiens
tttgactccttgaaacc

SEQ ID NO: 55165 - DNA, 18 bp, Homo sapiens
aaatagtagtcctcctca

SEQ ID NO: 55166 - DNA, 20 bp, Homo sapiens
ctgcaagagtgcggtagtgc

SEQ ID NO: 55167 - DNA, 19 bp, Homo sapiens
aattccacgacggcagaat

SEQ ID NO: 55168 - DNA, 24 bp, Homo sapiens
aggtcctgggccagccgcacaaga

SEQ ID NO: 55169 - DNA, 18 bp, Homo sapiens
gctgtgatgcccattgac

SEQ ID NO: 55170 - DNA, 17 bp, Homo sapiens
ggacaagatgggggata

SEQ ID NO: 55171 - DNA, 24 bp, Homo sapiens
ttatttccacagggtagggagaag

SEQ ID NO: 55172 - DNA, 23 bp, Homo sapiens
cctagtgagcccctctggaaccc

SEQ ID NO: 55173 - DNA, 24 bp, Homo sapiens
ggaatttcccagcttttctggttc

SEQ ID NO: 55174 - DNA, 19 bp, Homo sapiens
gaggccttccgtcgagccc

SEQ ID NO: 55175 - DNA, 17 bp, Homo sapiens
aggagagcactggcctc

SEQ ID NO: 55176 - DNA, 19 bp, Homo sapiens
agtgcagagagaaatacca

SEQ ID NO: 55177 - DNA, 24 bp, Homo sapiens
cagggctgctgtgagctaggagac

SEQ ID NO: 55178 - DNA, 20 bp, Homo sapiens
ctaggtatgtcccctccccc

SEQ ID NO: 55179 - DNA, 21 bp, Homo sapiens
tttcccgggcctcctgcatgc

SEQ ID NO: 55180 - DNA, 20 bp, Homo sapiens
aaaaggatgcggagtgtgtt

SEQ ID NO: 55181 - DNA, 21 bp, Homo sapiens
tgctatttggctgccatatgg

SEQ ID NO: 55182 - DNA, 22 bp, Homo sapiens
cagccgtaaccatgtggctggc

SEQ ID NO: 55183 - DNA, 24 bp, Homo sapiens
atgctgacctggggtggccagctg

SEQ ID NO: 55184 - DNA, 19 bp, Homo sapiens
agtccaggtgagtgacttg

SEQ ID NO: 55185 - DNA, 23 bp, Homo sapiens
tgctggctgaacccttccagacg

SEQ ID NO: 55186 - DNA, 17 bp, Homo sapiens
ctccgcacagagaccac

SEQ ID NO: 55187 - DNA, 24 bp, Homo sapiens
cgattccatgaaggccctgcaggg

SEQ ID NO: 55188 - DNA, 22 bp, Homo sapiens
tctagagagagcagaaacctga

SEQ ID NO: 55189 - DNA, 24 bp, Homo sapiens
tcagggctaaggtgccctgaggca

SEQ ID NO: 55190 - DNA, 20 bp, Homo sapiens
ttcccaagaatgggaataag

SEQ ID NO: 55191 - DNA, 20 bp, Homo sapiens
ggaaggtgacagtgcctgtg

SEQ ID NO: 55192 - DNA, 18 bp, Homo sapiens
gtattagccttgaggtaa

SEQ ID NO: 55193 - DNA, 21 bp, Homo sapiens
tagatattggaacctgattca

SEQ ID NO: 55194 - DNA, 17 bp, Homo sapiens
ggaggacctctcctatg

SEQ ID NO: 55195 - DNA, 22 bp, Homo sapiens
aaggaaggggttaatactgaag

SEQ ID NO: 55196 - DNA, 16 bp, Homo sapiens
gtggagcttggcacgg

SEQ ID NO: 55197 - DNA, 22 bp, Homo sapiens
cctacagaaggacaggaccata

SEQ ID NO: 55198 - DNA, 16 bp, Homo sapiens
tggccccagtcttctc

SEQ ID NO: 55199 - DNA, 23 bp, Homo sapiens
ttgaaggatcctggtatccgtac

SEQ ID NO: 55200 - DNA, 16 bp, Homo sapiens
ctaggcctgtgtcatt

SEQ ID NO: 55201 - DNA, 23 bp, Homo sapiens
gaaaaacctcctcagctcagcca

SEQ ID NO: 55202 - DNA, 18 bp, Homo sapiens
ctatgggtaaccatgata

SEQ ID NO: 55203 - DNA, 24 bp, Homo sapiens
ttgtcgctaatggaggggggcaga

SEQ ID NO: 55204 - DNA, 16 bp, Homo sapiens
taccgtgtggaaggct

SEQ ID NO: 55205 - DNA, 18 bp, Homo sapiens
aattcccaattatctcca

SEQ ID NO: 55206 - DNA, 16 bp, Homo sapiens
ccagatgcactcccgg

SEQ ID NO: 55207 - DNA, 24 bp, Homo sapiens
gttcttagggcctagggcatgtgg

SEQ ID NO: 55208 - DNA, 24 bp, Homo sapiens
ggttcccctcaagcagtgctgtct

SEQ ID NO: 55209 - DNA, 20 bp, Homo sapiens
cagcaccacagccccatagc

SEQ ID NO: 55210 - DNA, 17 bp, Homo sapiens
gaggatgaatcttctgg

SEQ ID NO: 55211 - DNA, 22 bp, Homo sapiens
aggacctcacagtagagcacag

SEQ ID NO: 55212 - DNA, 22 bp, Homo sapiens
ctcctttttataggacaaggtg

SEQ ID NO: 55213 - DNA, 20 bp, Homo sapiens
cacaggcggccttcaccaag

SEQ ID NO: 55214 - DNA, 22 bp, Homo sapiens
cttgtcattggccacaaggaga

SEQ ID NO: 55215 - DNA, 16 bp, Homo sapiens
gctgagctactcacca

SEQ ID NO: 55216 - DNA, 18 bp, Homo sapiens
cagactcctatttcccac

SEQ ID NO: 55217 - DNA, 22 bp, Homo sapiens
gtgaatgggtaggagaagtgag

SEQ ID NO: 55218 - DNA, 24 bp, Homo sapiens
agtaacacagacctgcaccaccaa

SEQ ID NO: 55219 - DNA, 22 bp, Homo sapiens
gaacccacacacaagtcaccca

SEQ ID NO: 55220 - DNA, 24 bp, Homo sapiens
agcttactatatttggtctttggc

SEQ ID NO: 55221 - DNA, 23 bp, Homo sapiens
ataaaacctcaaatgccatccca

SEQ ID NO: 55222 - DNA, 21 bp, Homo sapiens
aagaaaagaaaaaagaaactg

SEQ ID NO: 55223 - DNA, 16 bp, Homo sapiens
cattgccagggacttg

SEQ ID NO: 55224 - DNA, 20 bp, Homo sapiens
ctgccacatccccctctccg

SEQ ID NO: 55225 - DNA, 16 bp, Homo sapiens
gctgggcttgaccagt

SEQ ID NO: 55226 - DNA, 17 bp, Homo sapiens
ctctacgtccacttctt

SEQ ID NO: 55227 - DNA, 22 bp, Homo sapiens
tgatctatgaccttgaaaagaa

SEQ ID NO: 55228 - DNA, 19 bp, Homo sapiens
aaaagctaaaatagcttcc

SEQ ID NO: 55229 - DNA, 23 bp, Homo sapiens
gaccaaatgcctctagatctgtc

SEQ ID NO: 55230 - DNA, 18 bp, Homo sapiens
gacttgctctcagggtgt

SEQ ID NO: 55231 - DNA, 24 bp, Homo sapiens
cttacgagcagttggcaattctac

SEQ ID NO: 55232 - DNA, 17 bp, Homo sapiens
gaaactcagtggtgagt

SEQ ID NO: 55233 - DNA, 17 bp, Homo sapiens
taaatggagaggtcggt

SEQ ID NO: 55234 - DNA, 20 bp, Homo sapiens
cctctgcgtttccaggaaag

SEQ ID NO: 55235 - DNA, 18 bp, Homo sapiens
caggcctgctgatccttt

SEQ ID NO: 55236 - DNA, 24 bp, Homo sapiens
ctaccagagtggaggagactattc

SEQ ID NO: 55237 - DNA, 22 bp, Homo sapiens
ctagtggcaggtcgtctgcaga

SEQ ID NO: 55238 - DNA, 23 bp, Homo sapiens
agatctatgctagcaagacactt

SEQ ID NO: 55239 - DNA, 16 bp, Homo sapiens
tggagaagtgtcaggg

SEQ ID NO: 55240 - DNA, 24 bp, Homo sapiens
atgttgcaaaacacataacaagga

SEQ ID NO: 55241 - DNA, 16 bp, Homo sapiens
ttatggccggcacaag

SEQ ID NO: 55242 - DNA, 17 bp, Homo sapiens
tttgggcctttaagaga

SEQ ID NO: 55243 - DNA, 18 bp, Homo sapiens
tcagaactgaactttggt

SEQ ID NO: 55244 - DNA, 19 bp, Homo sapiens
aaacacagctcacagtgct

SEQ ID NO: 55245 - DNA, 17 bp, Homo sapiens
gtgcttacgcctccagc

SEQ ID NO: 55246 - DNA, 22 bp, Homo sapiens
ctacgaggctgctgagatactc

SEQ ID NO: 55247 - DNA, 23 bp, Homo sapiens
tatgatcaaaaacttctgtctga

SEQ ID NO: 55248 - DNA, 23 bp, Homo sapiens
gacaatgtttccccccacgcaca

SEQ ID NO: 55249 - DNA, 19 bp, Homo sapiens
gcaaggcttttcccgagca

SEQ ID NO: 55250 - DNA, 18 bp, Homo sapiens
gaccttacaggattgaga

SEQ ID NO: 55251 - DNA, 17 bp, Homo sapiens
ggctcatcccttggata

SEQ ID NO: 55252 - DNA, 21 bp, Homo sapiens
ctgggctgggagctatcccag

SEQ ID NO: 55253 - DNA, 23 bp, Homo sapiens
gccgttcccgctcctcctcctcc

SEQ ID NO: 55254 - DNA, 19 bp, Homo sapiens
acagccacttttatcatca

SEQ ID NO: 55255 - DNA, 16 bp, Homo sapiens
ctgcttctccccctcc

SEQ ID NO: 55256 - DNA, 23 bp, Homo sapiens
gtccctggttttctaaggcccta

SEQ ID NO: 55257 - DNA, 17 bp, Homo sapiens
gtgatcacagtaaagcc

SEQ ID NO: 55258 - DNA, 17 bp, Homo sapiens
agaacagatgaaggact

SEQ ID NO: 55259 - DNA, 18 bp, Homo sapiens
ggcttggctataagaagt

SEQ ID NO: 55260 - DNA, 16 bp, Homo sapiens
gaaggaatgccagtct

SEQ ID NO: 55261 - DNA, 18 bp, Homo sapiens
atctcttcttgtttccct

SEQ ID NO: 55262 - DNA, 22 bp, Homo sapiens
gtcctttgaggcccgtgaagtc

SEQ ID NO: 55263 - DNA, 21 bp, Homo sapiens
tggaagaaagttttaccatga

SEQ ID NO: 55264 - DNA, 22 bp, Homo sapiens
aggacatgttcatacttcttat

SEQ ID NO: 55265 - DNA, 16 bp, Homo sapiens
catcatggcagacctg

SEQ ID NO: 55266 - DNA, 19 bp, Homo sapiens
agaaggaagaaaaagtccc

SEQ ID NO: 55267 - DNA, 17 bp, Homo sapiens
gagccctcagaagagtt

SEQ ID NO: 55268 - DNA, 21 bp, Homo sapiens
ggagagctggtgagaggagaa

SEQ ID NO: 55269 - DNA, 21 bp, Homo sapiens
cagggaagtgacctttctgtg

SEQ ID NO: 55270 - DNA, 24 bp, Homo sapiens
ccactcactttttatagggcccca

SEQ ID NO: 55271 - DNA, 20 bp, Homo sapiens
gctcaaacttcccattctga

SEQ ID NO: 55272 - DNA, 16 bp, Homo sapiens
tgttcctgacaaactc

SEQ ID NO: 55273 - DNA, 20 bp, Homo sapiens
gtcatttctgtttgtcaaat

SEQ ID NO: 55274 - DNA, 16 bp, Homo sapiens
ggcgtcgccggcagga

SEQ ID NO: 55275 - DNA, 24 bp, Homo sapiens
tttttaaattaattacaaagtaat

SEQ ID NO: 55276 - DNA, 16 bp, Homo sapiens
gagaatgaccactgca

SEQ ID NO: 55277 - DNA, 21 bp, Homo sapiens
atgcaaaactacccaacttta

SEQ ID NO: 55278 - DNA, 16 bp, Homo sapiens
ctccatgtggccctga

SEQ ID NO: 55279 - DNA, 18 bp, Homo sapiens
cacatccctcgcctgtcc

SEQ ID NO: 55280 - DNA, 20 bp, Homo sapiens
ggcggaacctgtggggttca

SEQ ID NO: 55281 - DNA, 17 bp, Homo sapiens
aaggcacctcgctggct

SEQ ID NO: 55282 - DNA, 17 bp, Homo sapiens
ttctattccaggctggc

SEQ ID NO: 55283 - DNA, 22 bp, Homo sapiens
aaccgacgaatctttacctaca

SEQ ID NO: 55284 - DNA, 22 bp, Homo sapiens
aggctacttgtctccccttact

SEQ ID NO: 55285 - DNA, 19 bp, Homo sapiens
ctttggattatcagtaccg

SEQ ID NO: 55286 - DNA, 17 bp, Homo sapiens
agaggaagcaaagatgg

SEQ ID NO: 55287 - DNA, 17 bp, Homo sapiens
tggtaacctcagtttga

SEQ ID NO: 55288 - DNA, 21 bp, Homo sapiens
ctatcagagtcagtgtaggta

SEQ ID NO: 55289 - DNA, 19 bp, Homo sapiens
ttaaacagttacagaagca

SEQ ID NO: 55290 - DNA, 19 bp, Homo sapiens
tccagcttcaggatctcct

SEQ ID NO: 55291 - DNA, 19 bp, Homo sapiens
tcattagtttagtgttggt

SEQ ID NO: 55292 - DNA, 21 bp, Homo sapiens
tcattttggtacagatctact

SEQ ID NO: 55293 - DNA, 21 bp, Homo sapiens
ccctatgttacaatgcccttt

SEQ ID NO: 55294 - DNA, 17 bp, Homo sapiens
ggtggacaccgcccaga

SEQ ID NO: 55295 - DNA, 19 bp, Homo sapiens
ggaaatcactttggcaata

SEQ ID NO: 55296 - DNA, 20 bp, Homo sapiens
aaccacagaacaagaagtgg

SEQ ID NO: 55297 - DNA, 18 bp, Homo sapiens
gacaagagacactggctc

SEQ ID NO: 55298 - DNA, 24 bp, Homo sapiens
ttactaaattgctgaattccagct

SEQ ID NO: 55299 - DNA, 21 bp, Homo sapiens
caatctcctcctcttcgtctt

SEQ ID NO: 55300 - DNA, 24 bp, Homo sapiens
aaaaaaaaaaaaaaaaaagccaca

SEQ ID NO: 55301 - DNA, 16 bp, Homo sapiens
gccgagctcgggaagg

SEQ ID NO: 55302 - DNA, 23 bp, Homo sapiens
agtatagtatttgttatctcact

SEQ ID NO: 55303 - DNA, 16 bp, Homo sapiens
cttgacagagtccacc

SEQ ID NO: 55304 - DNA, 23 bp, Homo sapiens
ataattagtattagatggcacat

SEQ ID NO: 55305 - DNA, 22 bp, Homo sapiens
ttgtttcccccatccttgcttt

SEQ ID NO: 55306 - DNA, 23 bp, Homo sapiens
aaaagtggccaagtctatgaggt

SEQ ID NO: 55307 - DNA, 16 bp, Homo sapiens
cacctcctctccgttg

SEQ ID NO: 55308 - DNA, 18 bp, Homo sapiens
tgtgattctttgcaggtg

SEQ ID NO: 55309 - DNA, 17 bp, Homo sapiens
tacggatagtgaaagaa

SEQ ID NO: 55310 - DNA, 21 bp, Homo sapiens
cggagaccgtctggagcactg

SEQ ID NO: 55311 - DNA, 24 bp, Homo sapiens
gcagaaagtggggacctcagaaca

SEQ ID NO: 55312 - DNA, 16 bp, Homo sapiens
aaaacagagcggcgcg

SEQ ID NO: 55313 - DNA, 23 bp, Homo sapiens
atggggcctcggggctggggcgg

SEQ ID NO: 55314 - DNA, 24 bp, Homo sapiens
ccgtgacgggaacggcgggttgcg

SEQ ID NO: 55315 - DNA, 24 bp, Homo sapiens
gggagcgatacactgcctccccgg

SEQ ID NO: 55316 - DNA, 16 bp, Homo sapiens
cggcttgggctgcact

SEQ ID NO: 55317 - DNA, 22 bp, Homo sapiens
atcgggaggcgacggaggtgct

SEQ ID NO: 55318 - DNA, 24 bp, Homo sapiens
ctatatgaagtgggctgatggctg

SEQ ID NO: 55319 - DNA, 19 bp, Homo sapiens
agttggccacacagtgcaa

SEQ ID NO: 55320 - DNA, 24 bp, Homo sapiens
gaaaaggtagagggcgaagactca

SEQ ID NO: 55321 - DNA, 23 bp, Homo sapiens
taccgatcaccgcttaccatgta

SEQ ID NO: 55322 - DNA, 23 bp, Homo sapiens
ccgattttcaggccaaagttttc

SEQ ID NO: 55323 - DNA, 20 bp, Homo sapiens
ctgtgcaaatgaggaaactg

SEQ ID NO: 55324 - DNA, 17 bp, Homo sapiens
tggacaaattcctagga

SEQ ID NO: 55325 - DNA, 23 bp, Homo sapiens
cgagaaattgcactgcttcccga

SEQ ID NO: 55326 - DNA, 23 bp, Homo sapiens
tgagaacctggagctgtcctggc

SEQ ID NO: 55327 - DNA, 23 bp, Homo sapiens
aactgctcggccagctcagggtt

SEQ ID NO: 55328 - DNA, 16 bp, Homo sapiens
ccacaccctccctctg

SEQ ID NO: 55329 - DNA, 21 bp, Homo sapiens
gtgttccgacatgctgatcga

SEQ ID NO: 55330 - DNA, 24 bp, Homo sapiens
gtgtacgtcaagaagcgcagcgag

SEQ ID NO: 55331 - DNA, 16 bp, Homo sapiens
cgccctgcctggccac

SEQ ID NO: 55332 - DNA, 19 bp, Homo sapiens
gaacatcgacatcatgccc

SEQ ID NO: 55333 - DNA, 19 bp, Homo sapiens
atttggtctactctaactg

SEQ ID NO: 55334 - DNA, 22 bp, Homo sapiens
cacgggcatccagtgctcgatc

SEQ ID NO: 55335 - DNA, 21 bp, Homo sapiens
ccaggaatttccttgcctgca

SEQ ID NO: 55336 - DNA, 16 bp, Homo sapiens
cctcgacatggttaac

SEQ ID NO: 55337 - DNA, 23 bp, Homo sapiens
ctcagcatccagccctgggagcc

SEQ ID NO: 55338 - DNA, 18 bp, Homo sapiens
ctccactttcttccggaa

SEQ ID NO: 55339 - DNA, 21 bp, Homo sapiens
agtataccagggtgacgtctt

SEQ ID NO: 55340 - DNA, 16 bp, Homo sapiens
caggaggaagccttac

SEQ ID NO: 55341 - DNA, 16 bp, Homo sapiens
gagacccggggagtta

SEQ ID NO: 55342 - DNA, 23 bp, Homo sapiens
cacagctggggcagtgcatccct

SEQ ID NO: 55343 - DNA, 21 bp, Homo sapiens
gagctggagcagaccatccgt

SEQ ID NO: 55344 - DNA, 16 bp, Homo sapiens
gtagcagctggtcccc

SEQ ID NO: 55345 - DNA, 24 bp, Homo sapiens
acgttaacgccatcatgcagctcg

SEQ ID NO: 55346 - DNA, 21 bp, Homo sapiens
atattattttacccccaggaa

SEQ ID NO: 55347 - DNA, 19 bp, Homo sapiens
actcttcatagatgtcaat

SEQ ID NO: 55348 - DNA, 22 bp, Homo sapiens
gatgggaaaagcccctggctat

SEQ ID NO: 55349 - DNA, 16 bp, Homo sapiens
gttttagctgaagggt

SEQ ID NO: 55350 - DNA, 24 bp, Homo sapiens
aatctgaaaggacctccatttact

SEQ ID NO: 55351 - DNA, 16 bp, Homo sapiens
gggggtgacggagggt

SEQ ID NO: 55352 - DNA, 23 bp, Homo sapiens
gagcactgcatcaagcagaacaa

SEQ ID NO: 55353 - DNA, 16 bp, Homo sapiens
tgctgcacccagggca

SEQ ID NO: 55354 - DNA, 16 bp, Homo sapiens
tggaagtgatggagga

SEQ ID NO: 55355 - DNA, 16 bp, Homo sapiens
ccacttctctgctggg

SEQ ID NO: 55356 - DNA, 17 bp, Homo sapiens
gtgccaggagaggtgtg

SEQ ID NO: 55357 - DNA, 21 bp, Homo sapiens
atgccactgcctgggggacag

SEQ ID NO: 55358 - DNA, 16 bp, Homo sapiens
tgcccgctgaaaatcc

SEQ ID NO: 55359 - DNA, 22 bp, Homo sapiens
gaaattggggaacctcacatcc

SEQ ID NO: 55360 - DNA, 16 bp, Homo sapiens
aggaccccgctgcttc

SEQ ID NO: 55361 - DNA, 22 bp, Homo sapiens
gaaatcaagagggctgccacac

SEQ ID NO: 55362 - DNA, 21 bp, Homo sapiens
ttgacctcctgcccctccctc

SEQ ID NO: 55363 - DNA, 17 bp, Homo sapiens
gtggcatactcctgctt

SEQ ID NO: 55364 - DNA, 22 bp, Homo sapiens
gagtgtgttcctcctcgactgc

SEQ ID NO: 55365 - DNA, 17 bp, Homo sapiens
atctgggacctgggtga

SEQ ID NO: 55366 - DNA, 18 bp, Homo sapiens
aggtggaccagggggtgc

SEQ ID NO: 55367 - DNA, 16 bp, Homo sapiens
aacgtcacgagtggag

SEQ ID NO: 55368 - DNA, 20 bp, Homo sapiens
ctgccaccatgcccccgcta

SEQ ID NO: 55369 - DNA, 20 bp, Homo sapiens
ttacctatctgtccattgta

SEQ ID NO: 55370 - DNA, 16 bp, Homo sapiens
ccgggcctggtgggga

SEQ ID NO: 55371 - DNA, 19 bp, Homo sapiens
aacaagagcaaaattccat

SEQ ID NO: 55372 - DNA, 22 bp, Homo sapiens
gcctgaacttgctctgaagcca

SEQ ID NO: 55373 - DNA, 22 bp, Homo sapiens
tggtaggaaactcaggctgatt

SEQ ID NO: 55374 - DNA, 16 bp, Homo sapiens
cggtggctggactcaa

SEQ ID NO: 55375 - DNA, 24 bp, Homo sapiens
aaccagaagcagcagccccctctc

SEQ ID NO: 55376 - DNA, 16 bp, Homo sapiens
aagctgagaagcactc

SEQ ID NO: 55377 - DNA, 16 bp, Homo sapiens
tccttcttcatctcct

SEQ ID NO: 55378 - DNA, 24 bp, Homo sapiens
tactgcccctcccttccctcctct

SEQ ID NO: 55379 - DNA, 22 bp, Homo sapiens
tggtggcggagctatccaccat

SEQ ID NO: 55380 - DNA, 22 bp, Homo sapiens
tctcaaaataaaatgtgttaaa

SEQ ID NO: 55381 - DNA, 17 bp, Homo sapiens
ggctgcagtcgaagacg

SEQ ID NO: 55382 - DNA, 19 bp, Homo sapiens
gtgaaccaagatcgtgcca

SEQ ID NO: 55383 - DNA, 20 bp, Homo sapiens
gaactgtggacagaacagca

SEQ ID NO: 55384 - DNA, 16 bp, Homo sapiens
gggctcgctcatcttt

SEQ ID NO: 55385 - DNA, 16 bp, Homo sapiens
tcctttgtggcccagt

SEQ ID NO: 55386 - DNA, 23 bp, Homo sapiens
tccagggagatggcccccaaggc

SEQ ID NO: 55387 - DNA, 18 bp, Homo sapiens
aaaagccaggggaaatac

SEQ ID NO: 55388 - DNA, 19 bp, Homo sapiens
atgcaagtcggggaaggga

SEQ ID NO: 55389 - DNA, 21 bp, Homo sapiens
catgtggtgggacatccgaaa

SEQ ID NO: 55390 - DNA, 20 bp, Homo sapiens
gggttccacgagcacctgat

SEQ ID NO: 55391 - DNA, 22 bp, Homo sapiens
accaagaaggaacagttggaaa

SEQ ID NO: 55392 - DNA, 16 bp, Homo sapiens
ttgtaaaggccacaca

SEQ ID NO: 55393 - DNA, 21 bp, Homo sapiens
cccgggaagagtggggactgc

SEQ ID NO: 55394 - DNA, 24 bp, Homo sapiens
ttgcaggagatgacgatgccctgc

SEQ ID NO: 55395 - DNA, 17 bp, Homo sapiens
ctttctagcgcctgcag

SEQ ID NO: 55396 - DNA, 23 bp, Homo sapiens
tggggccatgatggcccgggaag

SEQ ID NO: 55397 - DNA, 16 bp, Homo sapiens
aattgatggttcgtgg

SEQ ID NO: 55398 - DNA, 23 bp, Homo sapiens
tgtccagtcgccaaccgtcagga

SEQ ID NO: 55399 - DNA, 22 bp, Homo sapiens
aagttcatggtggggaccgagc

SEQ ID NO: 55400 - DNA, 16 bp, Homo sapiens
ttggtccacatgatgg

SEQ ID NO: 55401 - DNA, 16 bp, Homo sapiens
aagattgtgtgcacct

SEQ ID NO: 55402 - DNA, 22 bp, Homo sapiens
cagctgggctccctccatcccc

SEQ ID NO: 55403 - DNA, 24 bp, Homo sapiens
agagaaaccccttctacccgaaga

SEQ ID NO: 55404 - DNA, 24 bp, Homo sapiens
ggtgtttgtggaaaggtttttctc

SEQ ID NO: 55405 - DNA, 21 bp, Homo sapiens
gaagacagccgggaatcgtcc

SEQ ID NO: 55406 - DNA, 22 bp, Homo sapiens
tgagctgtggatgagtgaggtc

SEQ ID NO: 55407 - DNA, 17 bp, Homo sapiens
agaaaacggtcggcctc

SEQ ID NO: 55408 - DNA, 23 bp, Homo sapiens
cctagcaagactctgagatcctg

SEQ ID NO: 55409 - DNA, 16 bp, Homo sapiens
cactgctcgaacatga

SEQ ID NO: 55410 - DNA, 24 bp, Homo sapiens
ctcagaagcctctgtccctccaac

SEQ ID NO: 55411 - DNA, 19 bp, Homo sapiens
ctgaggacctggatgcaca

SEQ ID NO: 55412 - DNA, 23 bp, Homo sapiens
ctcactgatgctgcctggagccc

SEQ ID NO: 55413 - DNA, 19 bp, Homo sapiens
ccacacactgcacacgtgc

SEQ ID NO: 55414 - DNA, 16 bp, Homo sapiens
ggatatctgggacttc

SEQ ID NO: 55415 - DNA, 18 bp, Homo sapiens
aagcaatcgctgcagtca

SEQ ID NO: 55416 - DNA, 19 bp, Homo sapiens
tccgagtttgaacttcatc

SEQ ID NO: 55417 - DNA, 22 bp, Homo sapiens
cagctgggagccgcaggcgatg

SEQ ID NO: 55418 - DNA, 23 bp, Homo sapiens
agggccaagtggctgagcctccc

SEQ ID NO: 55419 - DNA, 19 bp, Homo sapiens
tcattcctctggagggtag

SEQ ID NO: 55420 - DNA, 23 bp, Homo sapiens
tcctctacctgggtctgcccggc

SEQ ID NO: 55421 - DNA, 16 bp, Homo sapiens
ctggagggattttccc

SEQ ID NO: 55422 - DNA, 24 bp, Homo sapiens
tgcctccgggtgcaggacaatggg

SEQ ID NO: 55423 - DNA, 23 bp, Homo sapiens
ggggtgggagggcggggccatct

SEQ ID NO: 55424 - DNA, 23 bp, Homo sapiens
ctggaggtctcgcctgggctctc

SEQ ID NO: 55425 - DNA, 17 bp, Homo sapiens
acctatttatggagccc

SEQ ID NO: 55426 - DNA, 16 bp, Homo sapiens
ccttccttgacaccag

SEQ ID NO: 55427 - DNA, 18 bp, Homo sapiens
atctcccggtgcctggcc

SEQ ID NO: 55428 - DNA, 22 bp, Homo sapiens
tggagagcaaggagagctcagc

SEQ ID NO: 55429 - DNA, 16 bp, Homo sapiens
cctcatcggtctgctc

SEQ ID NO: 55430 - DNA, 24 bp, Homo sapiens
gccatcctgccctctccccaccgg

SEQ ID NO: 55431 - DNA, 18 bp, Homo sapiens
gaagatgatgtcgaagaa

SEQ ID NO: 55432 - DNA, 17 bp, Homo sapiens
cgagagaagatcctgga

SEQ ID NO: 55433 - DNA, 17 bp, Homo sapiens
tacaggcactggcgtca

SEQ ID NO: 55434 - DNA, 24 bp, Homo sapiens
gggtaaggcggagggcagggatga

SEQ ID NO: 55435 - DNA, 22 bp, Homo sapiens
cagaagcagaacccaagtgcca

SEQ ID NO: 55436 - DNA, 18 bp, Homo sapiens
gtcagcaaggccgaggag

SEQ ID NO: 55437 - DNA, 19 bp, Homo sapiens
ttaagatctagcaggtaag

SEQ ID NO: 55438 - DNA, 19 bp, Homo sapiens
aggcagacgccataaagct

SEQ ID NO: 55439 - DNA, 18 bp, Homo sapiens
cactgtctgggccctcac

SEQ ID NO: 55440 - DNA, 24 bp, Homo sapiens
tctccctcctccaccacctggtct

SEQ ID NO: 55441 - DNA, 23 bp, Homo sapiens
agcgacccaggcttcagccattt

SEQ ID NO: 55442 - DNA, 17 bp, Homo sapiens
gacttctaggctaagtc

SEQ ID NO: 55443 - DNA, 24 bp, Homo sapiens
gggagtggggaaggcctgtcccct

SEQ ID NO: 55444 - DNA, 16 bp, Homo sapiens
aataccaagaggtggg

SEQ ID NO: 55445 - DNA, 20 bp, Homo sapiens
ccaagtccagaagaagacca

SEQ ID NO: 55446 - DNA, 16 bp, Homo sapiens
agcccaccacccagtg

SEQ ID NO: 55447 - DNA, 19 bp, Homo sapiens
gggatgaagaagtggaaga

SEQ ID NO: 55448 - DNA, 22 bp, Homo sapiens
tctcaagcagccgatggagcca

SEQ ID NO: 55449 - DNA, 24 bp, Homo sapiens
aggtaccacattggaggcacaagt

SEQ ID NO: 55450 - DNA, 23 bp, Homo sapiens
ctgccactcacccccagcccgcc

SEQ ID NO: 55451 - DNA, 24 bp, Homo sapiens
acagagccgtgggactggcctgca

SEQ ID NO: 55452 - DNA, 24 bp, Homo sapiens
acatccaggtgggcgggcaccagg

SEQ ID NO: 55453 - DNA, 21 bp, Homo sapiens
ctcacaagcacagcaccttgg

SEQ ID NO: 55454 - DNA, 21 bp, Homo sapiens
cttcggtggctgcacggtgac

SEQ ID NO: 55455 - DNA, 22 bp, Homo sapiens
cgccgtagtgctcctgtaagag

SEQ ID NO: 55456 - DNA, 24 bp, Homo sapiens
ctggtggaggctgcgcttgctgtg

SEQ ID NO: 55457 - DNA, 22 bp, Homo sapiens
gctgccgctcctgcccgcccag

SEQ ID NO: 55458 - DNA, 22 bp, Homo sapiens
cccttcaatatcctctctgcag

SEQ ID NO: 55459 - DNA, 24 bp, Homo sapiens
gtggggagcagcggaggcctccag

SEQ ID NO: 55460 - DNA, 16 bp, Homo sapiens
aggtgaggccctctgg

SEQ ID NO: 55461 - DNA, 17 bp, Homo sapiens
tgccataaaccccaggc

SEQ ID NO: 55462 - DNA, 18 bp, Homo sapiens
ctgagacgtggcgactac

SEQ ID NO: 55463 - DNA, 24 bp, Homo sapiens
cagctcacctcatagtcgtctctg

SEQ ID NO: 55464 - DNA, 20 bp, Homo sapiens
cttccggcgggcccggcacg

SEQ ID NO: 55465 - DNA, 22 bp, Homo sapiens
cctgtgcccggcaggagcgggg

SEQ ID NO: 55466 - DNA, 21 bp, Homo sapiens
gagaaggcggctgctgactcc

SEQ ID NO: 55467 - DNA, 23 bp, Homo sapiens
catgaggcggccaaaggctctgt

SEQ ID NO: 55468 - DNA, 24 bp, Homo sapiens
cagccagggccactgccatcaccg

SEQ ID NO: 55469 - DNA, 24 bp, Homo sapiens
gtgcgccgaatctcccccaccacg

SEQ ID NO: 55470 - DNA, 16 bp, Homo sapiens
gtctgagagagccagg

SEQ ID NO: 55471 - DNA, 16 bp, Homo sapiens
ctgctgagattggaac

SEQ ID NO: 55472 - DNA, 21 bp, Homo sapiens
aagtggcccgggcgctgggca

SEQ ID NO: 55473 - DNA, 24 bp, Homo sapiens
gaaggccctggagatcggggtccc

SEQ ID NO: 55474 - DNA, 23 bp, Homo sapiens
ctctaatgtccgccactccctgg

SEQ ID NO: 55475 - DNA, 24 bp, Homo sapiens
gcagggagcacagccgcctccagg

SEQ ID NO: 55476 - DNA, 22 bp, Homo sapiens
ccttggagaccagcctggtgcc

SEQ ID NO: 55477 - DNA, 23 bp, Homo sapiens
cagttgtacctcccggaggcttt

SEQ ID NO: 55478 - DNA, 22 bp, Homo sapiens
ctgcctggcgcagcaagcacac

SEQ ID NO: 55479 - DNA, 24 bp, Homo sapiens
gccgccgcacagggtactcgctgg

SEQ ID NO: 55480 - DNA, 24 bp, Homo sapiens
ctcccctcgtcccctcccgccctg

SEQ ID NO: 55481 - DNA, 23 bp, Homo sapiens
cagcttggggtccgagagtggca

SEQ ID NO: 55482 - DNA, 23 bp, Homo sapiens
gttcatctcacttatgggacaga

SEQ ID NO: 55483 - DNA, 22 bp, Homo sapiens
caatgggggagatgacgaggcc

SEQ ID NO: 55484 - DNA, 16 bp, Homo sapiens
gtgtgtcagcaggccg

SEQ ID NO: 55485 - DNA, 22 bp, Homo sapiens
ccacccaggagctgctgagtgc

SEQ ID NO: 55486 - DNA, 20 bp, Homo sapiens
ccctagcctccccacctcac

SEQ ID NO: 55487 - DNA, 21 bp, Homo sapiens
gtcaatgagcagcgcgtggcc

SEQ ID NO: 55488 - DNA, 19 bp, Homo sapiens
tatggagggggtggcaggg

SEQ ID NO: 55489 - DNA, 24 bp, Homo sapiens
gccacagggcatccctgcgaagct

SEQ ID NO: 55490 - DNA, 16 bp, Homo sapiens
cccagccctccttccc

SEQ ID NO: 55491 - DNA, 20 bp, Homo sapiens
gagtctgcagtacagggtga

SEQ ID NO: 55492 - DNA, 24 bp, Homo sapiens
tccttggaagtggccacgtacacc

SEQ ID NO: 55493 - DNA, 24 bp, Homo sapiens
agtggcttcaatgacactccaggg

SEQ ID NO: 55494 - DNA, 19 bp, Homo sapiens
cagtgcagtggtggtcagc

SEQ ID NO: 55495 - DNA, 18 bp, Homo sapiens
ctggagacctcagggaag

SEQ ID NO: 55496 - DNA, 24 bp, Homo sapiens
atcctcccaggcagcccctcttac

SEQ ID NO: 55497 - DNA, 22 bp, Homo sapiens
gacagagctgctggaggaaggt

SEQ ID NO: 55498 - DNA, 18 bp, Homo sapiens
cagctgctaggccgttgc

SEQ ID NO: 55499 - DNA, 17 bp, Homo sapiens
caccccccaggggcact

SEQ ID NO: 55500 - DNA, 22 bp, Homo sapiens
gtgggtcccttggcccagcagg

SEQ ID NO: 55501 - DNA, 21 bp, Homo sapiens
cccgaccttctgggggcatca

SEQ ID NO: 55502 - DNA, 16 bp, Homo sapiens
tggagcctgggactcc

SEQ ID NO: 55503 - DNA, 23 bp, Homo sapiens
tccccacagtgtatcagacaaat

SEQ ID NO: 55504 - DNA, 23 bp, Homo sapiens
caccacctctgagggtgccgatg

SEQ ID NO: 55505 - DNA, 24 bp, Homo sapiens
ctagtatcagtgaggacttggctc

SEQ ID NO: 55506 - DNA, 16 bp, Homo sapiens
gagctcatgacggtgc

SEQ ID NO: 55507 - DNA, 22 bp, Homo sapiens
tgacatagttggcccaccgagg

SEQ ID NO: 55508 - DNA, 23 bp, Homo sapiens
cattggagaggcttactccagct

SEQ ID NO: 55509 - DNA, 24 bp, Homo sapiens
tggaaactgcagccgctggggctc

SEQ ID NO: 55510 - DNA, 16 bp, Homo sapiens
gaggttcagaacctga

SEQ ID NO: 55511 - DNA, 21 bp, Homo sapiens
atccttgcgggggctgcccac

SEQ ID NO: 55512 - DNA, 21 bp, Homo sapiens
cagggctcaagcccccaaggt

SEQ ID NO: 55513 - DNA, 19 bp, Homo sapiens
ggggaacacacggactaca

SEQ ID NO: 55514 - DNA, 23 bp, Homo sapiens
cgcagctgcccgccccacatctc

SEQ ID NO: 55515 - DNA, 17 bp, Homo sapiens
gttcggggccgagcccg

SEQ ID NO: 55516 - DNA, 21 bp, Homo sapiens
gccctcctcggcggccgggac

SEQ ID NO: 55517 - DNA, 18 bp, Homo sapiens
ctgctttgagacagcccc

SEQ ID NO: 55518 - DNA, 24 bp, Homo sapiens
taggcagcaccaggccctggttgt

SEQ ID NO: 55519 - DNA, 21 bp, Homo sapiens
cgagcatcccgcgccgacggg

SEQ ID NO: 55520 - DNA, 23 bp, Homo sapiens
cccggcgctgacacggccagctc

SEQ ID NO: 55521 - DNA, 20 bp, Homo sapiens
tccgggcgcggggcggggct

SEQ ID NO: 55522 - DNA, 23 bp, Homo sapiens
ggcctcggccagcagctccgcga

SEQ ID NO: 55523 - DNA, 18 bp, Homo sapiens
attcccacgggagttgcg

SEQ ID NO: 55524 - DNA, 24 bp, Homo sapiens
ggacagctcctacaggcctgcggg

SEQ ID NO: 55525 - DNA, 24 bp, Homo sapiens
cagcagggcaacacccaccctggc

SEQ ID NO: 55526 - DNA, 23 bp, Homo sapiens
cagacggccaggagccggtggga

SEQ ID NO: 55527 - DNA, 20 bp, Homo sapiens
gttgatgtctcagagctgct

SEQ ID NO: 55528 - DNA, 24 bp, Homo sapiens
aggaaatcatggagtaggatgtgc

SEQ ID NO: 55529 - DNA, 21 bp, Homo sapiens
ctgctgagcccgctttcttct

SEQ ID NO: 55530 - DNA, 22 bp, Homo sapiens
gtgagctgggtgagtctcctcc

SEQ ID NO: 55531 - DNA, 24 bp, Homo sapiens
catgggagtgaggcacccgccctg

SEQ ID NO: 55532 - DNA, 22 bp, Homo sapiens
gacggccggggtgtgcctgggc

SEQ ID NO: 55533 - DNA, 24 bp, Homo sapiens
ttggcaaccgctgcactcctgggg

SEQ ID NO: 55534 - DNA, 22 bp, Homo sapiens
ccttgtcaggggcgcaatcgaa

SEQ ID NO: 55535 - DNA, 21 bp, Homo sapiens
agctgagtggctcctccccag

SEQ ID NO: 55536 - DNA, 16 bp, Homo sapiens
ttgcagggatgtagca

SEQ ID NO: 55537 - DNA, 24 bp, Homo sapiens
ccagcagaccagggccccgggatg

SEQ ID NO: 55538 - DNA, 23 bp, Homo sapiens
ttgtagctggggtagctgggtgg

SEQ ID NO: 55539 - DNA, 17 bp, Homo sapiens
gacgtcccccccaacag

SEQ ID NO: 55540 - DNA, 22 bp, Homo sapiens
gggtggtacgggtcagggtggc

SEQ ID NO: 55541 - DNA, 22 bp, Homo sapiens
gaacagtgcgaggcccgcggct

SEQ ID NO: 55542 - DNA, 16 bp, Homo sapiens
tcatcacgtccagccg

SEQ ID NO: 55543 - DNA, 24 bp, Homo sapiens
ccagatggggcagccctggtgctt

SEQ ID NO: 55544 - DNA, 24 bp, Homo sapiens
ctctgccctggccgccgcccccgc

SEQ ID NO: 55545 - DNA, 23 bp, Homo sapiens
tgagctcctctgaaatgggctac

SEQ ID NO: 55546 - DNA, 24 bp, Homo sapiens
cacagtggtgcaacatgcacccca

SEQ ID NO: 55547 - DNA, 24 bp, Homo sapiens
ccccaaggacatcctgaccctgcg

SEQ ID NO: 55548 - DNA, 18 bp, Homo sapiens
ggggcgctgccattgtct

SEQ ID NO: 55549 - DNA, 20 bp, Homo sapiens
ctggctctgcagatgaggga

SEQ ID NO: 55550 - DNA, 16 bp, Homo sapiens
cggggtctccaagggc

SEQ ID NO: 55551 - DNA, 23 bp, Homo sapiens
ccacatccatgtgtggctgcacc

SEQ ID NO: 55552 - DNA, 18 bp, Homo sapiens
atcaccccgaagggctcc

SEQ ID NO: 55553 - DNA, 16 bp, Homo sapiens
ggctgtggggaacatc

SEQ ID NO: 55554 - DNA, 16 bp, Homo sapiens
tggcacagagcccaga

SEQ ID NO: 55555 - DNA, 24 bp, Homo sapiens
ctaacaggcgctacgaggtgccct

SEQ ID NO: 55556 - DNA, 24 bp, Homo sapiens
ccatcgtgtgagaaacaaacgcgt

SEQ ID NO: 55557 - DNA, 16 bp, Homo sapiens
tctacagcgtggagtt

SEQ ID NO: 55558 - DNA, 16 bp, Homo sapiens
cccgtcgccctccccg

SEQ ID NO: 55559 - DNA, 24 bp, Homo sapiens
ggaactggtccgcaaagaacaggg

SEQ ID NO: 55560 - DNA, 24 bp, Homo sapiens
tgctgcagggctggccaggccact

SEQ ID NO: 55561 - DNA, 18 bp, Homo sapiens
aggtgctcggcgaggcct

SEQ ID NO: 55562 - DNA, 22 bp, Homo sapiens
tgggtgctctcaggctcgtgtg

SEQ ID NO: 55563 - DNA, 20 bp, Homo sapiens
aaggtcccggttccacaggg

SEQ ID NO: 55564 - DNA, 24 bp, Homo sapiens
caggctgaacacgacggtggcgcc

SEQ ID NO: 55565 - DNA, 16 bp, Homo sapiens
ctgcgctccccagctc

SEQ ID NO: 55566 - DNA, 17 bp, Homo sapiens
cctcgcagtatatcaca

SEQ ID NO: 55567 - DNA, 24 bp, Homo sapiens
aggtagaaagggtgagacccgtag

SEQ ID NO: 55568 - DNA, 24 bp, Homo sapiens
tcagcaccagctggaccaggatca

SEQ ID NO: 55569 - DNA, 24 bp, Homo sapiens
acccatggcattgctgtttagcag

SEQ ID NO: 55570 - DNA, 20 bp, Homo sapiens
cgggcgggggcactgagctg

SEQ ID NO: 55571 - DNA, 24 bp, Homo sapiens
cagtctccagggcaggcagcacgg

SEQ ID NO: 55572 - DNA, 23 bp, Homo sapiens
catgtcccagcccggtgcgaacc

SEQ ID NO: 55573 - DNA, 17 bp, Homo sapiens
agaaaacacaaggccca

SEQ ID NO: 55574 - DNA, 21 bp, Homo sapiens
gtcggcacacggggtgttcct

SEQ ID NO: 55575 - DNA, 22 bp, Homo sapiens
taagggcagggctcggctgcag

SEQ ID NO: 55576 - DNA, 24 bp, Homo sapiens
cacggcttccccaggccactctga

SEQ ID NO: 55577 - DNA, 23 bp, Homo sapiens
gggctctgggcccaggaagatgt

SEQ ID NO: 55578 - DNA, 24 bp, Homo sapiens
gtgattggcccatctgtggggtgc

SEQ ID NO: 55579 - DNA, 17 bp, Homo sapiens
cggccagggagcaggcc

SEQ ID NO: 55580 - DNA, 24 bp, Homo sapiens
agctgcttcccttccagatgtggt

SEQ ID NO: 55581 - DNA, 22 bp, Homo sapiens
tgaacgggtatcctgcaggcca

SEQ ID NO: 55582 - DNA, 24 bp, Homo sapiens
cgacaggtgggatcctggatgtct

SEQ ID NO: 55583 - DNA, 16 bp, Homo sapiens
tggaggagtagcccca

SEQ ID NO: 55584 - DNA, 21 bp, Homo sapiens
ctggacgttgtgggtagggcc

SEQ ID NO: 55585 - DNA, 22 bp, Homo sapiens
caccccaactcaccagggggaa

SEQ ID NO: 55586 - DNA, 23 bp, Homo sapiens
ctccctccctcatgaagtcggcg

SEQ ID NO: 55587 - DNA, 21 bp, Homo sapiens
tctgctggggcctgaggagac

SEQ ID NO: 55588 - DNA, 23 bp, Homo sapiens
actggggcctgggcttccacctg

SEQ ID NO: 55589 - DNA, 17 bp, Homo sapiens
gagtccatgtagtccag

SEQ ID NO: 55590 - DNA, 20 bp, Homo sapiens
tggtggagaacatgaccagg

SEQ ID NO: 55591 - DNA, 24 bp, Homo sapiens
ggtgcagctcctgcaccatggccg

SEQ ID NO: 55592 - DNA, 22 bp, Homo sapiens
caaggggctggccgggacgcgt

SEQ ID NO: 55593 - DNA, 24 bp, Homo sapiens
caaagacccacagtgtgggggcac

SEQ ID NO: 55594 - DNA, 24 bp, Homo sapiens
aggacgtccagtggaacgacctgg

SEQ ID NO: 55595 - DNA, 16 bp, Homo sapiens
aggatgacgctgcaca

SEQ ID NO: 55596 - DNA, 21 bp, Homo sapiens
gatggcttccgggacttcccg

SEQ ID NO: 55597 - DNA, 22 bp, Homo sapiens
aacttcttgatattccctcgat

SEQ ID NO: 55598 - DNA, 23 bp, Homo sapiens
ccctggctcctctccaggcaggc

SEQ ID NO: 55599 - DNA, 16 bp, Homo sapiens
tagggcctgtagctcc

SEQ ID NO: 55600 - DNA, 20 bp, Homo sapiens
catgatgtcatccccagcct

SEQ ID NO: 55601 - DNA, 16 bp, Homo sapiens
caatcagcggctggcc

SEQ ID NO: 55602 - DNA, 18 bp, Homo sapiens
ccagggctctgggccacc

SEQ ID NO: 55603 - DNA, 20 bp, Homo sapiens
ctgccggctccccctggctg

SEQ ID NO: 55604 - DNA, 20 bp, Homo sapiens
cagctcgggccctgccggga

SEQ ID NO: 55605 - DNA, 23 bp, Homo sapiens
attcctctcagctgtcccactgg

SEQ ID NO: 55606 - DNA, 24 bp, Homo sapiens
tttcatcaccaacgagaccggcca

SEQ ID NO: 55607 - DNA, 24 bp, Homo sapiens
gtggagaaagagctgctcattgac

SEQ ID NO: 55608 - DNA, 16 bp, Homo sapiens
gctgtggggttggtga

SEQ ID NO: 55609 - DNA, 18 bp, Homo sapiens
ccactaagagtgaggctg

SEQ ID NO: 55610 - DNA, 23 bp, Homo sapiens
acttacaatccacatgccgtcga

SEQ ID NO: 55611 - DNA, 23 bp, Homo sapiens
aggccctgggtggggccgggtct

SEQ ID NO: 55612 - DNA, 22 bp, Homo sapiens
agagtgaggagggtggggtagt

SEQ ID NO: 55613 - DNA, 24 bp, Homo sapiens
ccgggtccactgccttccccgact

SEQ ID NO: 55614 - DNA, 23 bp, Homo sapiens
gaagttggaaggctcgttcatgt

SEQ ID NO: 55615 - DNA, 24 bp, Homo sapiens
ggctgagttccatgaccaggtgcc

SEQ ID NO: 55616 - DNA, 19 bp, Homo sapiens
acgtagggtgggttctcca

SEQ ID NO: 55617 - DNA, 23 bp, Homo sapiens
ctgagcatccccaaggcctctgg

SEQ ID NO: 55618 - DNA, 23 bp, Homo sapiens
agacaagggagtctctgatttga

SEQ ID NO: 55619 - DNA, 16 bp, Homo sapiens
cgcttctcttgcagga

SEQ ID NO: 55620 - DNA, 23 bp, Homo sapiens
ccctttccccgctggcccatctg

SEQ ID NO: 55621 - DNA, 17 bp, Homo sapiens
ggctgccccaacaatga

SEQ ID NO: 55622 - DNA, 24 bp, Homo sapiens
ccagccccacagaggcgtggggag

SEQ ID NO: 55623 - DNA, 24 bp, Homo sapiens
gtgtggagagaaactggtggctgg

SEQ ID NO: 55624 - DNA, 23 bp, Homo sapiens
cagcgacctgcacaggggctcct

SEQ ID NO: 55625 - DNA, 23 bp, Homo sapiens
gtggccctcacctgtgggaggcg

SEQ ID NO: 55626 - DNA, 24 bp, Homo sapiens
ggaggaagctccctggaaaccagc

SEQ ID NO: 55627 - DNA, 21 bp, Homo sapiens
ctgcagaggccccaaccttgt

SEQ ID NO: 55628 - DNA, 22 bp, Homo sapiens
gcggccaccatctgtgcctcca

SEQ ID NO: 55629 - DNA, 16 bp, Homo sapiens
cgccagcgggccccgg

SEQ ID NO: 55630 - DNA, 16 bp, Homo sapiens
gcctgaccgaagccat

SEQ ID NO: 55631 - DNA, 23 bp, Homo sapiens
gtgcccgcagacatgggcagtag

SEQ ID NO: 55632 - DNA, 24 bp, Homo sapiens
atcggccgtggccagcaaaggtcg

SEQ ID NO: 55633 - DNA, 24 bp, Homo sapiens
cagaaagctccttgctcccagctc

SEQ ID NO: 55634 - DNA, 20 bp, Homo sapiens
cacggaggaggcgagctgct

SEQ ID NO: 55635 - DNA, 23 bp, Homo sapiens
tccacacagccctcacggtgtcc

SEQ ID NO: 55636 - DNA, 23 bp, Homo sapiens
aagcctcccatagaggcccccgg

SEQ ID NO: 55637 - DNA, 23 bp, Homo sapiens
ccatttgtgatctcccgctcgac

SEQ ID NO: 55638 - DNA, 24 bp, Homo sapiens
cagctcaggccaagtgacccagag

SEQ ID NO: 55639 - DNA, 24 bp, Homo sapiens
gggacgtgtggagctcctgggagc

SEQ ID NO: 55640 - DNA, 24 bp, Homo sapiens
aggttaaactgcaggatttctggg

SEQ ID NO: 55641 - DNA, 17 bp, Homo sapiens
ctgctcagcagagtaga

SEQ ID NO: 55642 - DNA, 21 bp, Homo sapiens
gtgttgcccaggaagccgcag

SEQ ID NO: 55643 - DNA, 22 bp, Homo sapiens
ccccacccacttagcaggtggg

SEQ ID NO: 55644 - DNA, 16 bp, Homo sapiens
cgcatgaaggggtaga

SEQ ID NO: 55645 - DNA, 19 bp, Homo sapiens
ctgaggaccagcctgactc

SEQ ID NO: 55646 - DNA, 16 bp, Homo sapiens
gatcgcccacctgcca

SEQ ID NO: 55647 - DNA, 23 bp, Homo sapiens
gtgcctctggtcggggccgacgt

SEQ ID NO: 55648 - DNA, 24 bp, Homo sapiens
agccacccagcatggggtgcttct

SEQ ID NO: 55649 - DNA, 23 bp, Homo sapiens
gcgctggacccagctgggggcct

SEQ ID NO: 55650 - DNA, 18 bp, Homo sapiens
gtgctggggccgcggtcc

SEQ ID NO: 55651 - DNA, 16 bp, Homo sapiens
ctgaagctgtacggct

SEQ ID NO: 55652 - DNA, 24 bp, Homo sapiens
ccctgggaatcccacccctgctgg

SEQ ID NO: 55653 - DNA, 22 bp, Homo sapiens
tagaggtgggggaggagtgcgt

SEQ ID NO: 55654 - DNA, 16 bp, Homo sapiens
gggactccaggggacc

SEQ ID NO: 55655 - DNA, 17 bp, Homo sapiens
ctccaggaagaggggcc

SEQ ID NO: 55656 - DNA, 24 bp, Homo sapiens
cgcctgccctgcagccccaggagc

SEQ ID NO: 55657 - DNA, 23 bp, Homo sapiens
gcctgggagttacgtgcccctcc

SEQ ID NO: 55658 - DNA, 23 bp, Homo sapiens
gaggaaggccctcaccctgcgct

SEQ ID NO: 55659 - DNA, 16 bp, Homo sapiens
ctcagcggcaacctgc

SEQ ID NO: 55660 - DNA, 23 bp, Homo sapiens
cgtcgcgggggagaccgtggccc

SEQ ID NO: 55661 - DNA, 21 bp, Homo sapiens
ctggtggtccacagtccaggt

SEQ ID NO: 55662 - DNA, 24 bp, Homo sapiens
ggcaccttgagctccagagagcag

SEQ ID NO: 55663 - DNA, 23 bp, Homo sapiens
gtcacttcggccttcccggcctg

SEQ ID NO: 55664 - DNA, 22 bp, Homo sapiens
catatgagccagccccatccca

SEQ ID NO: 55665 - DNA, 20 bp, Homo sapiens
tagggtccccagactcaccg

SEQ ID NO: 55666 - DNA, 22 bp, Homo sapiens
caggttccccaaggactctagc

SEQ ID NO: 55667 - DNA, 23 bp, Homo sapiens
tggtcacaccaactgggtggagg

SEQ ID NO: 55668 - DNA, 18 bp, Homo sapiens
tcatcaccccagtgctcc

SEQ ID NO: 55669 - DNA, 18 bp, Homo sapiens
tgggggcctggcacatgg

SEQ ID NO: 55670 - DNA, 24 bp, Homo sapiens
ttgggcacatggtacgacctgcag

SEQ ID NO: 55671 - DNA, 23 bp, Homo sapiens
gagtctgcgcctgaagtcacagt

SEQ ID NO: 55672 - DNA, 16 bp, Homo sapiens
ctgtggatggctggct

SEQ ID NO: 55673 - DNA, 16 bp, Homo sapiens
cccgggagatggagag

SEQ ID NO: 55674 - DNA, 16 bp, Homo sapiens
ggaggtggacgttgat

SEQ ID NO: 55675 - DNA, 23 bp, Homo sapiens
cggcccagaatcctcaaagcaac

SEQ ID NO: 55676 - DNA, 24 bp, Homo sapiens
tgcagtgtgctgtccacaccccca

SEQ ID NO: 55677 - DNA, 24 bp, Homo sapiens
ctcccacccccacctgcagctccc

SEQ ID NO: 55678 - DNA, 23 bp, Homo sapiens
tcagaagccccacctgggcctct

SEQ ID NO: 55679 - DNA, 16 bp, Homo sapiens
gcccccctggacacca

SEQ ID NO: 55680 - DNA, 22 bp, Homo sapiens
gccctccccacctcactggcct

SEQ ID NO: 55681 - DNA, 23 bp, Homo sapiens
tggttgtgaggccagggccctgg

SEQ ID NO: 55682 - DNA, 24 bp, Homo sapiens
gttccagcccctgcggccgcaggt

SEQ ID NO: 55683 - DNA, 16 bp, Homo sapiens
cacccttggtcagggc

SEQ ID NO: 55684 - DNA, 24 bp, Homo sapiens
tgctgtaccagcctagcattcccg

SEQ ID NO: 55685 - DNA, 16 bp, Homo sapiens
ctcgctccagcacttc

SEQ ID NO: 55686 - DNA, 18 bp, Homo sapiens
catcacgtgtccttccct

SEQ ID NO: 55687 - DNA, 21 bp, Homo sapiens
ctgcccaccagcctgagcagc

SEQ ID NO: 55688 - DNA, 22 bp, Homo sapiens
ccatggccctggctgtggccct

SEQ ID NO: 55689 - DNA, 24 bp, Homo sapiens
aggtagccatcgtgggacccccaa

SEQ ID NO: 55690 - DNA, 19 bp, Homo sapiens
acgatggagagagcctgga

SEQ ID NO: 55691 - DNA, 23 bp, Homo sapiens
acggccccactgctcactctagg

SEQ ID NO: 55692 - DNA, 23 bp, Homo sapiens
cactggtcacacgtaccagctca

SEQ ID NO: 55693 - DNA, 22 bp, Homo sapiens
gtgtacacagagggaggtcacc

SEQ ID NO: 55694 - DNA, 20 bp, Homo sapiens
ctgctggggcgccgtggcca

SEQ ID NO: 55695 - DNA, 18 bp, Homo sapiens
cagctgtctgctgacacc

SEQ ID NO: 55696 - DNA, 16 bp, Homo sapiens
tggtgtcggggctgta

SEQ ID NO: 55697 - DNA, 23 bp, Homo sapiens
ggcccagaacacgatcgtgaatg

SEQ ID NO: 55698 - DNA, 20 bp, Homo sapiens
caccttctgccccctgcacc

SEQ ID NO: 55699 - DNA, 24 bp, Homo sapiens
tgcagaaggtgactgtcctgggcg

SEQ ID NO: 55700 - DNA, 24 bp, Homo sapiens
caaagacccccttgggaggtccca

SEQ ID NO: 55701 - DNA, 24 bp, Homo sapiens
ccctgtctccaacttcacctacag

SEQ ID NO: 55702 - DNA, 23 bp, Homo sapiens
cgagacacagatgtccaggacct

SEQ ID NO: 55703 - DNA, 20 bp, Homo sapiens
agggccagacggagctgccc

SEQ ID NO: 55704 - DNA, 21 bp, Homo sapiens
gagactaacacactccgcccg

SEQ ID NO: 55705 - DNA, 24 bp, Homo sapiens
cggggccagatggagccgccttct

SEQ ID NO: 55706 - DNA, 21 bp, Homo sapiens
cagctgctgcccgcacacagg

SEQ ID NO: 55707 - DNA, 22 bp, Homo sapiens
tttgtgctctctcttttccagg

SEQ ID NO: 55708 - DNA, 16 bp, Homo sapiens
cggcttggaatggtta

SEQ ID NO: 55709 - DNA, 24 bp, Homo sapiens
gagcagtttctcgtcagctggtgt

SEQ ID NO: 55710 - DNA, 16 bp, Homo sapiens
tgtgcattcctgagtt

SEQ ID NO: 55711 - DNA, 16 bp, Homo sapiens
cactgaagagcgatac

SEQ ID NO: 55712 - DNA, 20 bp, Homo sapiens
ttggcaccatccggtgttca

SEQ ID NO: 55713 - DNA, 22 bp, Homo sapiens
ctgcagaaataagaaaaagtct

SEQ ID NO: 55714 - DNA, 23 bp, Homo sapiens
gaccgacccttagacacagttca

SEQ ID NO: 55715 - DNA, 19 bp, Homo sapiens
gtcttccaaagtgggatta

SEQ ID NO: 55716 - DNA, 18 bp, Homo sapiens
cgttcgcgctctgttcct

SEQ ID NO: 55717 - DNA, 16 bp, Homo sapiens
atgtggtctcactctg

SEQ ID NO: 55718 - DNA, 16 bp, Homo sapiens
tcccctggatgggttt

SEQ ID NO: 55719 - DNA, 16 bp, Homo sapiens
agccactcacggatta

SEQ ID NO: 55720 - DNA, 18 bp, Homo sapiens
atgaccattagtatgagt

SEQ ID NO: 55721 - DNA, 20 bp, Homo sapiens
gccaaatctcaaattttcca

SEQ ID NO: 55722 - DNA, 18 bp, Homo sapiens
cctttcagtaatgtcctt

SEQ ID NO: 55723 - DNA, 18 bp, Homo sapiens
gtgttcagtggaatcaca

SEQ ID NO: 55724 - DNA, 20 bp, Homo sapiens
actgagtaagacagggagaa

SEQ ID NO: 55725 - DNA, 20 bp, Homo sapiens
ggaagtgtttttgttcaatt

SEQ ID NO: 55726 - DNA, 21 bp, Homo sapiens
acatcctgaagtagaatatct

SEQ ID NO: 55727 - DNA, 16 bp, Homo sapiens
actcaggaggctgggg

SEQ ID NO: 55728 - DNA, 24 bp, Homo sapiens
caatccctccaaattttgtaagtg

SEQ ID NO: 55729 - DNA, 17 bp, Homo sapiens
gagcgcgcggaagaggc

SEQ ID NO: 55730 - DNA, 21 bp, Homo sapiens
tgaaagcttgcaatccttaga

SEQ ID NO: 55731 - DNA, 16 bp, Homo sapiens
ggagttctgcagccac

SEQ ID NO: 55732 - DNA, 19 bp, Homo sapiens
tgaggaggattactttgtg

SEQ ID NO: 55733 - DNA, 20 bp, Homo sapiens
ctagggtcttcaacaggaag

SEQ ID NO: 55734 - DNA, 17 bp, Homo sapiens
catgtgggcaagtgcct

SEQ ID NO: 55735 - DNA, 22 bp, Homo sapiens
ctagcacccagggtgccctggg

SEQ ID NO: 55736 - DNA, 16 bp, Homo sapiens
gtgaacgctctggtta

SEQ ID NO: 55737 - DNA, 17 bp, Homo sapiens
ggtacagtaagattggt

SEQ ID NO: 55738 - DNA, 16 bp, Homo sapiens
actcctccagcactca

SEQ ID NO: 55739 - DNA, 16 bp, Homo sapiens
tatgtggctctggggc

SEQ ID NO: 55740 - DNA, 21 bp, Homo sapiens
gtatcttactccatctttagg

SEQ ID NO: 55741 - DNA, 16 bp, Homo sapiens
tggtctgcagtcatca

SEQ ID NO: 55742 - DNA, 23 bp, Homo sapiens
aagtgaaacaggagctagggaca

SEQ ID NO: 55743 - DNA, 16 bp, Homo sapiens
cggtgtgtccctgggc

SEQ ID NO: 55744 - DNA, 18 bp, Homo sapiens
gatacagcgttcagactg

SEQ ID NO: 55745 - DNA, 18 bp, Homo sapiens
ccagtgtgttttatgtct

SEQ ID NO: 55746 - DNA, 18 bp, Homo sapiens
gatggtggcacacatgat

SEQ ID NO: 55747 - DNA, 23 bp, Homo sapiens
gtgacaggatgaacacgcagtgt

SEQ ID NO: 55748 - DNA, 19 bp, Homo sapiens
tggtcaccagaaatatcgc

SEQ ID NO: 55749 - DNA, 16 bp, Homo sapiens
aaggttttctgcaagg

SEQ ID NO: 55750 - DNA, 22 bp, Homo sapiens
atggtcaggtactgttcgtaga

SEQ ID NO: 55751 - DNA, 20 bp, Homo sapiens
aactcctttgcccagcaccc

SEQ ID NO: 55752 - DNA, 17 bp, Homo sapiens
cgaaaccatgggcatta

SEQ ID NO: 55753 - DNA, 17 bp, Homo sapiens
cagaacccaacctgaaa

SEQ ID NO: 55754 - DNA, 19 bp, Homo sapiens
acctctgctgactttattg

SEQ ID NO: 55755 - DNA, 19 bp, Homo sapiens
ccagtgtaggccctttgct

SEQ ID NO: 55756 - DNA, 16 bp, Homo sapiens
cttggccatggcacca

SEQ ID NO: 55757 - DNA, 21 bp, Homo sapiens
gaaatactcggtaggcactgc

SEQ ID NO: 55758 - DNA, 16 bp, Homo sapiens
gacacccaggattctt

SEQ ID NO: 55759 - DNA, 20 bp, Homo sapiens
gtcgggctttcttcagagcg

SEQ ID NO: 55760 - DNA, 19 bp, Homo sapiens
gtgattttgcttagcctca

SEQ ID NO: 55761 - DNA, 22 bp, Homo sapiens
gtcatgaagtacgtggctccga

SEQ ID NO: 55762 - DNA, 17 bp, Homo sapiens
ggccttcttcatccctg

SEQ ID NO: 55763 - DNA, 18 bp, Homo sapiens
tttcggataaccctaacc

SEQ ID NO: 55764 - DNA, 21 bp, Homo sapiens
accaggacagggtggggcgga

SEQ ID NO: 55765 - DNA, 18 bp, Homo sapiens
ctccggaaggcaaacaga

SEQ ID NO: 55766 - DNA, 24 bp, Homo sapiens
tcctagttttctactgcaaattaa

SEQ ID NO: 55767 - DNA, 21 bp, Homo sapiens
cttctaacagtcctccctgca

SEQ ID NO: 55768 - DNA, 18 bp, Homo sapiens
ccctttgccacacttggg

SEQ ID NO: 55769 - DNA, 17 bp, Homo sapiens
aatgcccctcactgtca

SEQ ID NO: 55770 - DNA, 16 bp, Homo sapiens
cccctgaggcctctgt

SEQ ID NO: 55771 - DNA, 20 bp, Homo sapiens
ttagataaggggaaagatta

SEQ ID NO: 55772 - DNA, 19 bp, Homo sapiens
atgaatgactgaggaaagg

SEQ ID NO: 55773 - DNA, 16 bp, Homo sapiens
gaagccacagtcgtct

SEQ ID NO: 55774 - DNA, 22 bp, Homo sapiens
aaataggtataaactgaggcac

SEQ ID NO: 55775 - DNA, 20 bp, Homo sapiens
ctctctagtacccgaatagg

SEQ ID NO: 55776 - DNA, 18 bp, Homo sapiens
ggaaagatttggtaaagg

SEQ ID NO: 55777 - DNA, 21 bp, Homo sapiens
ttaagaaaaagtactgaaact

SEQ ID NO: 55778 - DNA, 16 bp, Homo sapiens
tgtccactcgacagca

SEQ ID NO: 55779 - DNA, 22 bp, Homo sapiens
gctcatgtagtttttcttttga

SEQ ID NO: 55780 - DNA, 17 bp, Homo sapiens
ggacgagggggcgaagc

SEQ ID NO: 55781 - DNA, 16 bp, Homo sapiens
ttaacgcggcgcagct

SEQ ID NO: 55782 - DNA, 20 bp, Homo sapiens
acattttgcataaaaacaac

SEQ ID NO: 55783 - DNA, 17 bp, Homo sapiens
ccaaggggcagaacatg

SEQ ID NO: 55784 - DNA, 24 bp, Homo sapiens
gcctgagctgactgcctggctgag

SEQ ID NO: 55785 - DNA, 23 bp, Homo sapiens
tacctgcatgcgggtccgcctgt

SEQ ID NO: 55786 - DNA, 18 bp, Homo sapiens
ggtactgactagttgtcc

SEQ ID NO: 55787 - DNA, 20 bp, Homo sapiens
cttttatctttctttcagga

SEQ ID NO: 55788 - DNA, 16 bp, Homo sapiens
cagcccatgccgccgc

SEQ ID NO: 55789 - DNA, 20 bp, Homo sapiens
tcttattctccatgatcctc

SEQ ID NO: 55790 - DNA, 23 bp, Homo sapiens
ccttcctccaggacaaagtacac

SEQ ID NO: 55791 - DNA, 22 bp, Homo sapiens
ctggtggtgttaggaatcatga

SEQ ID NO: 55792 - DNA, 24 bp, Homo sapiens
tgaaataatccaccatgtaggagt

SEQ ID NO: 55793 - DNA, 21 bp, Homo sapiens
cccacaccagcagtgcactgc

SEQ ID NO: 55794 - DNA, 17 bp, Homo sapiens
gcagtcctgaacaaagt

SEQ ID NO: 55795 - DNA, 20 bp, Homo sapiens
gcagttagaagcaggcactt

SEQ ID NO: 55796 - DNA, 23 bp, Homo sapiens
cttatgattcatttgttgttcca

SEQ ID NO: 55797 - DNA, 24 bp, Homo sapiens
tcatcagctaaagaagttaaaaaa

SEQ ID NO: 55798 - DNA, 20 bp, Homo sapiens
gctttttgtgtgtgcttaag

SEQ ID NO: 55799 - DNA, 18 bp, Homo sapiens
gagactgatccaatccaa

SEQ ID NO: 55800 - DNA, 16 bp, Homo sapiens
gccctgtactccctat

SEQ ID NO: 55801 - DNA, 23 bp, Homo sapiens
aacacccacaaatattgctatct

SEQ ID NO: 55802 - DNA, 17 bp, Homo sapiens
ttctgctaaaggactgg

SEQ ID NO: 55803 - DNA, 25 bp, Homo sapiens
tttgctttttttttagatacatttt

SEQ ID NO: 55804 - DNA, 16 bp, Homo sapiens
cgtccaggcctcagag

SEQ ID NO: 55805 - DNA, 24 bp, Homo sapiens
tggcttcttagaaggcatgtgata

SEQ ID NO: 55806 - DNA, 17 bp, Homo sapiens
ctgtcccctcagaaaaa

SEQ ID NO: 55807 - DNA, 17 bp, Homo sapiens
cataccacaattggtct

SEQ ID NO: 55808 - DNA, 22 bp, Homo sapiens
gtctatttaatttgagtctaga

SEQ ID NO: 55809 - DNA, 21 bp, Homo sapiens
gaagaagcgaaacaaacagct

SEQ ID NO: 55810 - DNA, 18 bp, Homo sapiens
gtctcttggggttagaca

SEQ ID NO: 55811 - DNA, 17 bp, Homo sapiens
aaaagatgtctagccga

SEQ ID NO: 55812 - DNA, 16 bp, Homo sapiens
ctctctctttgcggga

SEQ ID NO: 55813 - DNA, 24 bp, Homo sapiens
gctagctgcttcctctagattcta

SEQ ID NO: 55814 - DNA, 16 bp, Homo sapiens
tgacgcagagcccttc

SEQ ID NO: 55815 - DNA, 24 bp, Homo sapiens
ttacctcttgacgtttaatgtcta

SEQ ID NO: 55816 - DNA, 18 bp, Homo sapiens
ttgtatctgtacatgcac

SEQ ID NO: 55817 - DNA, 23 bp, Homo sapiens
cagaagaaagtcaatgaagactg

SEQ ID NO: 55818 - DNA, 16 bp, Homo sapiens
tggtgtaatgtccagc

SEQ ID NO: 55819 - DNA, 17 bp, Homo sapiens
atgttcctgtcatcctt

SEQ ID NO: 55820 - DNA, 25 bp, Homo sapiens
aaaaagaaaaaaaaaaaaaggaagc

SEQ ID NO: 55821 - DNA, 16 bp, Homo sapiens
cttcaaggggaaaccc

SEQ ID NO: 55822 - DNA, 16 bp, Homo sapiens
ggctcagcagactaca

SEQ ID NO: 55823 - DNA, 19 bp, Homo sapiens
tggcgttgttattgagaaa

SEQ ID NO: 55824 - DNA, 20 bp, Homo sapiens
aaatgctacagtctcagaaa

SEQ ID NO: 55825 - DNA, 19 bp, Homo sapiens
gctaatcgtctactaatca

SEQ ID NO: 55826 - DNA, 21 bp, Homo sapiens
gcccagctgctgatccagggt

SEQ ID NO: 55827 - DNA, 21 bp, Homo sapiens
aatactctgagaacattggag

SEQ ID NO: 55828 - DNA, 19 bp, Homo sapiens
gtccacagcaagtcaagac

SEQ ID NO: 55829 - DNA, 18 bp, Homo sapiens
aagtcatcccgttcctgg

SEQ ID NO: 55830 - DNA, 24 bp, Homo sapiens
acaggtcacactcacgaatgcgga

SEQ ID NO: 55831 - DNA, 18 bp, Homo sapiens
gtggcttgctccttgggt

SEQ ID NO: 55832 - DNA, 23 bp, Homo sapiens
aacagatgctgagccctgtgaga

SEQ ID NO: 55833 - DNA, 24 bp, Homo sapiens
tctcaggtggattcgaaggtctca

SEQ ID NO: 55834 - DNA, 16 bp, Homo sapiens
cactccaacagccagc

SEQ ID NO: 55835 - DNA, 16 bp, Homo sapiens
acaagtgggacagaca

SEQ ID NO: 55836 - DNA, 19 bp, Homo sapiens
agggcaacccaatgtagct

SEQ ID NO: 55837 - DNA, 20 bp, Homo sapiens
gaattgtacattcaactcta

SEQ ID NO: 55838 - DNA, 19 bp, Homo sapiens
agatgcccgcgatgcctag

SEQ ID NO: 55839 - DNA, 21 bp, Homo sapiens
gaatgaagaaaatagatgtag

SEQ ID NO: 55840 - DNA, 16 bp, Homo sapiens
atttccctagccttgg

SEQ ID NO: 55841 - DNA, 17 bp, Homo sapiens
atggcagttttaaacat

SEQ ID NO: 55842 - DNA, 18 bp, Homo sapiens
aactaaatcgtgaaagtg

SEQ ID NO: 55843 - DNA, 18 bp, Homo sapiens
ctgctgttaacctctaga

SEQ ID NO: 55844 - DNA, 23 bp, Homo sapiens
gtgaaaaactacaagaatcccaa

SEQ ID NO: 55845 - DNA, 16 bp, Homo sapiens
ttcatgtgccccaagg

SEQ ID NO: 55846 - DNA, 21 bp, Homo sapiens
tgtcagttagtttaactaaaa

SEQ ID NO: 55847 - DNA, 19 bp, Homo sapiens
aacggtgaagacatcactg

SEQ ID NO: 55848 - DNA, 16 bp, Homo sapiens
aaaacgtggcctttgt

SEQ ID NO: 55849 - DNA, 20 bp, Homo sapiens
ttcagcagtgaaggaaatgg

SEQ ID NO: 55850 - DNA, 16 bp, Homo sapiens
gcgccattgcacttca

SEQ ID NO: 55851 - DNA, 16 bp, Homo sapiens
agaagctccagagggc

SEQ ID NO: 55852 - DNA, 18 bp, Homo sapiens
tacgtaactcagatctgc

SEQ ID NO: 55853 - DNA, 16 bp, Homo sapiens
tacaataacgccactg

SEQ ID NO: 55854 - DNA, 17 bp, Homo sapiens
aagtgtctagcttccca

SEQ ID NO: 55855 - DNA, 18 bp, Homo sapiens
aattttctgcatgcttgt

SEQ ID NO: 55856 - DNA, 22 bp, Homo sapiens
tcactctttttcccaggcctgg

SEQ ID NO: 55857 - DNA, 16 bp, Homo sapiens
tacagtccatagctcc

SEQ ID NO: 55858 - DNA, 16 bp, Homo sapiens
aatcacaagggcagtg

SEQ ID NO: 55859 - DNA, 16 bp, Homo sapiens
cagtgttcccgtggct

SEQ ID NO: 55860 - DNA, 23 bp, Homo sapiens
aggtaagaaattaacaaaactgc

SEQ ID NO: 55861 - DNA, 17 bp, Homo sapiens
agggctcctgcctctct

SEQ ID NO: 55862 - DNA, 18 bp, Homo sapiens
atgacaaaaccgagatga

SEQ ID NO: 55863 - DNA, 19 bp, Homo sapiens
ggtccctgatgtcttgagg

SEQ ID NO: 55864 - DNA, 18 bp, Homo sapiens
catagcctcccaacacaa

SEQ ID NO: 55865 - DNA, 20 bp, Homo sapiens
agggcccatgttgtccttag

SEQ ID NO: 55866 - DNA, 18 bp, Homo sapiens
tcatggagcaaacttgta

SEQ ID NO: 55867 - DNA, 19 bp, Homo sapiens
gaccctgtctcaaaaaaaa

SEQ ID NO: 55868 - DNA, 18 bp, Homo sapiens
ggacgacttctttgtgta

SEQ ID NO: 55869 - DNA, 22 bp, Homo sapiens
gttgtttgctcacctctgggtt

SEQ ID NO: 55870 - DNA, 20 bp, Homo sapiens
caccattttgagtgtgttaa

SEQ ID NO: 55871 - DNA, 23 bp, Homo sapiens
ccaagaatggtgtctaccaatga

SEQ ID NO: 55872 - DNA, 20 bp, Homo sapiens
gagactgtgacacttcaaga

SEQ ID NO: 55873 - DNA, 22 bp, Homo sapiens
aaagtgcgtgtggtaatcggca

SEQ ID NO: 55874 - DNA, 23 bp, Homo sapiens
aaatcttctttcaggttcttgac

SEQ ID NO: 55875 - DNA, 21 bp, Homo sapiens
gaatggctgttctggaagtaa

SEQ ID NO: 55876 - DNA, 21 bp, Homo sapiens
gcaatgctgattaatcaagat

SEQ ID NO: 55877 - DNA, 22 bp, Homo sapiens
tgaaagaggggccaagcagatg

SEQ ID NO: 55878 - DNA, 19 bp, Homo sapiens
ctctccctcatcttaggaa

SEQ ID NO: 55879 - DNA, 19 bp, Homo sapiens
tcgatggctatttgtaagt

SEQ ID NO: 55880 - DNA, 17 bp, Homo sapiens
ttggacctccgcttgac

SEQ ID NO: 55881 - DNA, 22 bp, Homo sapiens
taagattttcaagatataccat

SEQ ID NO: 55882 - DNA, 22 bp, Homo sapiens
catccgggcccctctcactgac

SEQ ID NO: 55883 - DNA, 22 bp, Homo sapiens
catgtaaaagccagcaaaccac

SEQ ID NO: 55884 - DNA, 18 bp, Homo sapiens
gcctggaaaaagagtact

SEQ ID NO: 55885 - DNA, 24 bp, Homo sapiens
ggttacctggtgcagtatctgtat

SEQ ID NO: 55886 - DNA, 19 bp, Homo sapiens
tttgtccgggtcacaacca

SEQ ID NO: 55887 - DNA, 19 bp, Homo sapiens
aaatgtgtttgtcagtgag

SEQ ID NO: 55888 - DNA, 23 bp, Homo sapiens
aaaccctggctgtgtcattttct

SEQ ID NO: 55889 - DNA, 21 bp, Homo sapiens
aaaggcccaaagtgctggtca

SEQ ID NO: 55890 - DNA, 16 bp, Homo sapiens
tttgagggctgcttga

SEQ ID NO: 55891 - DNA, 21 bp, Homo sapiens
ctgaccagaggtcaactggat

SEQ ID NO: 55892 - DNA, 23 bp, Homo sapiens
aacctccaccttcccttcctctc

SEQ ID NO: 55893 - DNA, 21 bp, Homo sapiens
cagtaatgaagaccagcgaga

SEQ ID NO: 55894 - DNA, 16 bp, Homo sapiens
gcaactaatgctttcc

SEQ ID NO: 55895 - DNA, 17 bp, Homo sapiens
tgtgaacagccgcctca

SEQ ID NO: 55896 - DNA, 17 bp, Homo sapiens
gataggtagctgagggc

SEQ ID NO: 55897 - DNA, 16 bp, Homo sapiens
aggcaaggaccatgtc

SEQ ID NO: 55898 - DNA, 23 bp, Homo sapiens
aaacggtattttgtctccgagta

SEQ ID NO: 55899 - DNA, 20 bp, Homo sapiens
cacctcacccactgctgcaa

SEQ ID NO: 55900 - DNA, 17 bp, Homo sapiens
actgtgatgaagtccac

SEQ ID NO: 55901 - DNA, 19 bp, Homo sapiens
cccttttattcatggacaa

SEQ ID NO: 55902 - DNA, 16 bp, Homo sapiens
ggccaggaggaggaag

SEQ ID NO: 55903 - DNA, 21 bp, Homo sapiens
agctatattgctatcgatggg

SEQ ID NO: 55904 - DNA, 16 bp, Homo sapiens
agcagagggacccaga

SEQ ID NO: 55905 - DNA, 18 bp, Homo sapiens
gcttgtgttttttggagc

SEQ ID NO: 55906 - DNA, 19 bp, Homo sapiens
catggaggtatttgtttct

SEQ ID NO: 55907 - DNA, 16 bp, Homo sapiens
gatccttggcttggac

SEQ ID NO: 55908 - DNA, 24 bp, Homo sapiens
ctcaaagtgccagtgggcaatttt

SEQ ID NO: 55909 - DNA, 19 bp, Homo sapiens
tgccaagactgctctattg

SEQ ID NO: 55910 - DNA, 20 bp, Homo sapiens
gtagcaccacactgcaaaaa

SEQ ID NO: 55911 - DNA, 22 bp, Homo sapiens
cccatgaacaatgccaccaaag

SEQ ID NO: 55912 - DNA, 18 bp, Homo sapiens
tgacatacatggcgtcca

SEQ ID NO: 55913 - DNA, 22 bp, Homo sapiens
attgagatttgtactcaacaca

SEQ ID NO: 55914 - DNA, 16 bp, Homo sapiens
tggggcttggggccac

SEQ ID NO: 55915 - DNA, 16 bp, Homo sapiens
cagtgggcttttcttt

SEQ ID NO: 55916 - DNA, 16 bp, Homo sapiens
tccacagactcgtcac

SEQ ID NO: 55917 - DNA, 23 bp, Homo sapiens
aagcagcaaaacataatttaatt

SEQ ID NO: 55918 - DNA, 21 bp, Homo sapiens
aattctttcatagagatgggg

SEQ ID NO: 55919 - DNA, 21 bp, Homo sapiens
aataaggacaatggacaggca

SEQ ID NO: 55920 - DNA, 20 bp, Homo sapiens
taagcaattctcttgcctca

SEQ ID NO: 55921 - DNA, 21 bp, Homo sapiens
ctgtgtgggaaggacgctgac

SEQ ID NO: 55922 - DNA, 21 bp, Homo sapiens
agttccttggctttaaaacaa

SEQ ID NO: 55923 - DNA, 16 bp, Homo sapiens
acaatgcctgccggga

SEQ ID NO: 55924 - DNA, 19 bp, Homo sapiens
aaaacacaggagtgatggt

SEQ ID NO: 55925 - DNA, 17 bp, Homo sapiens
tgaattacagcaagcat

SEQ ID NO: 55926 - DNA, 20 bp, Homo sapiens
atccagttggtggcattaca

SEQ ID NO: 55927 - DNA, 19 bp, Homo sapiens
agcatggtgcatatggagt

SEQ ID NO: 55928 - DNA, 21 bp, Homo sapiens
cattacttgagggggcctcca

SEQ ID NO: 55929 - DNA, 19 bp, Homo sapiens
agccaatttaaagggaatc

SEQ ID NO: 55930 - DNA, 23 bp, Homo sapiens
atttttatattcgttgcagttca

SEQ ID NO: 55931 - DNA, 16 bp, Homo sapiens
acaatactacgtcgga

SEQ ID NO: 55932 - DNA, 19 bp, Homo sapiens
atttcctggccaatggaac

SEQ ID NO: 55933 - DNA, 20 bp, Homo sapiens
tgttacagctactgaagatt

SEQ ID NO: 55934 - DNA, 24 bp, Homo sapiens
aaaaggaacaatttgctctgctgt

SEQ ID NO: 55935 - DNA, 16 bp, Homo sapiens
actgaacctgttttgt

SEQ ID NO: 55936 - DNA, 17 bp, Homo sapiens
ccattggcaaaactctg

SEQ ID NO: 55937 - DNA, 17 bp, Homo sapiens
tgtgtgagatcatgcag

SEQ ID NO: 55938 - DNA, 19 bp, Homo sapiens
ggtttgtaacaggatcaac

SEQ ID NO: 55939 - DNA, 23 bp, Homo sapiens
ttgtcactttacagtaagtttaa

SEQ ID NO: 55940 - DNA, 17 bp, Homo sapiens
gggctacatgtcagctc

SEQ ID NO: 55941 - DNA, 23 bp, Homo sapiens
ttaacatgaagttttaagtttag

SEQ ID NO: 55942 - DNA, 16 bp, Homo sapiens
caacctgcagctgcct

SEQ ID NO: 55943 - DNA, 30 bp, Homo sapiens
tataatatacatataatatagacatataat

SEQ ID NO: 55944 - DNA, 19 bp, Homo sapiens
gtccaggattcttctttgg

SEQ ID NO: 55945 - DNA, 20 bp, Homo sapiens
ctgagcattaccagttcaca

SEQ ID NO: 55946 - DNA, 21 bp, Homo sapiens
ccttactctaactgttgccta

SEQ ID NO: 55947 - DNA, 19 bp, Homo sapiens
ggacagaaactgtagaggc

SEQ ID NO: 55948 - DNA, 18 bp, Homo sapiens
acccttttgtacttcaaa

SEQ ID NO: 55949 - DNA, 20 bp, Homo sapiens
acatcacaacagagactgac

SEQ ID NO: 55950 - DNA, 20 bp, Homo sapiens
agtaaatgtgtagcctttta

SEQ ID NO: 55951 - DNA, 16 bp, Homo sapiens
ccaaaaccattgccaa

SEQ ID NO: 55952 - DNA, 20 bp, Homo sapiens
gacttaagcctgttagtctc

SEQ ID NO: 55953 - DNA, 17 bp, Homo sapiens
gtatggagagtgtggaa

SEQ ID NO: 55954 - DNA, 19 bp, Homo sapiens
agaggatcttgtgatcagc

SEQ ID NO: 55955 - DNA, 17 bp, Homo sapiens
ccctggtaacactgaag

SEQ ID NO: 55956 - DNA, 20 bp, Homo sapiens
cactaagtcatatccatcct

SEQ ID NO: 55957 - DNA, 19 bp, Homo sapiens
gcattggaagtttctgtga

SEQ ID NO: 55958 - DNA, 21 bp, Homo sapiens
cttgtccccatatgcaattcc

SEQ ID NO: 55959 - DNA, 25 bp, Homo sapiens
tttggtctgctttaattaatatttt

SEQ ID NO: 55960 - DNA, 24 bp, Homo sapiens
agagagcgtggccggagacagaaa

SEQ ID NO: 55961 - DNA, 24 bp, Homo sapiens
gaccgctcgcggcctggcccttgg

SEQ ID NO: 55962 - DNA, 24 bp, Homo sapiens
cagaccaacttccccaggacccgg

SEQ ID NO: 55963 - DNA, 24 bp, Homo sapiens
ctccggggagcccaaccagccgaa

SEQ ID NO: 55964 - DNA, 23 bp, Homo sapiens
ggccccgccacgtccccacaggg

SEQ ID NO: 55965 - DNA, 16 bp, Homo sapiens
cgctcctcctgcgcgg

SEQ ID NO: 55966 - DNA, 24 bp, Homo sapiens
ggacacagtagcagcaggaggagg

SEQ ID NO: 55967 - DNA, 23 bp, Homo sapiens
cgacgccttcttccttcctgacc

SEQ ID NO: 55968 - DNA, 21 bp, Homo sapiens
gtatacacttcttagcaagca

SEQ ID NO: 55969 - DNA, 16 bp, Homo sapiens
gtgaccaggctgggac

SEQ ID NO: 55970 - DNA, 22 bp, Homo sapiens
tttaattagcctagcttttttg

SEQ ID NO: 55971 - DNA, 17 bp, Homo sapiens
gtcataatctgtggctg

SEQ ID NO: 55972 - DNA, 18 bp, Homo sapiens
catcttgatggcctctgc

SEQ ID NO: 55973 - DNA, 18 bp, Homo sapiens
atggggtcctgctcccca

SEQ ID NO: 55974 - DNA, 24 bp, Homo sapiens
tttctcatccacactctgcagcaa

SEQ ID NO: 55975 - DNA, 22 bp, Homo sapiens
gttcaataaactgggggtaggg

SEQ ID NO: 55976 - DNA, 21 bp, Homo sapiens
gacaagaagcggggggatgga

SEQ ID NO: 55977 - DNA, 22 bp, Homo sapiens
agcccccagtgccaatgctaga

SEQ ID NO: 55978 - DNA, 24 bp, Homo sapiens
aaggtggaggtcaccaacaccagc

SEQ ID NO: 55979 - DNA, 23 bp, Homo sapiens
aatgtgagattggggcatctcag

SEQ ID NO: 55980 - DNA, 22 bp, Homo sapiens
ctgcgcaaggtgcgcctggagc

SEQ ID NO: 55981 - DNA, 24 bp, Homo sapiens
ggaagaggtctctccaggtgagtc

SEQ ID NO: 55982 - DNA, 23 bp, Homo sapiens
cctcttcgagcggggcagcacag

SEQ ID NO: 55983 - DNA, 23 bp, Homo sapiens
agatggtggccacgccggtgctg

SEQ ID NO: 55984 - DNA, 24 bp, Homo sapiens
tgaccatctttggggccaacggag

SEQ ID NO: 55985 - DNA, 24 bp, Homo sapiens
gagcagtagccactgctgtcgtgc

SEQ ID NO: 55986 - DNA, 22 bp, Homo sapiens
gtacgaagtcatcgtgacaaca

SEQ ID NO: 55987 - DNA, 24 bp, Homo sapiens
agcgtctccaggaagaagcggtct

SEQ ID NO: 55988 - DNA, 16 bp, Homo sapiens
ttaccaagacgacaga

SEQ ID NO: 55989 - DNA, 17 bp, Homo sapiens
ctcccgcttgcctgtgt

SEQ ID NO: 55990 - DNA, 22 bp, Homo sapiens
tttaactgtgactgcctcatcc

SEQ ID NO: 55991 - DNA, 24 bp, Homo sapiens
atcagtgcctgcccctggctcata

SEQ ID NO: 55992 - DNA, 23 bp, Homo sapiens
cagcctcggctggggtctgctta

SEQ ID NO: 55993 - DNA, 19 bp, Homo sapiens
gaccttgctggcaaagctc

SEQ ID NO: 55994 - DNA, 17 bp, Homo sapiens
ccttgggaagggatcat

SEQ ID NO: 55995 - DNA, 17 bp, Homo sapiens
cttcctcttgaggggga

SEQ ID NO: 55996 - DNA, 23 bp, Homo sapiens
aatttgaagttaaacaagaatcc

SEQ ID NO: 55997 - DNA, 20 bp, Homo sapiens
aagaccatcaccatcaccga

SEQ ID NO: 55998 - DNA, 18 bp, Homo sapiens
atcttgaccttgaagaag

SEQ ID NO: 55999 - DNA, 16 bp, Homo sapiens
caccttgccagggaag

SEQ ID NO: 56000 - DNA, 16 bp, Homo sapiens
cagtccctgccccatg

SEQ ID NO: 56001 - DNA, 22 bp, Homo sapiens
gggggaccacagacacgtttga

SEQ ID NO: 56002 - DNA, 22 bp, Homo sapiens
cacattgccgtactccatctcg

SEQ ID NO: 56003 - DNA, 16 bp, Homo sapiens
ttacctgcttcagtgg

SEQ ID NO: 56004 - DNA, 23 bp, Homo sapiens
tctctcttggggataaaccggtc

SEQ ID NO: 56005 - DNA, 24 bp, Homo sapiens
ctcctgcttgccatcccatccctg

SEQ ID NO: 56006 - DNA, 20 bp, Homo sapiens
gtagatgctgtcaaactcaa

SEQ ID NO: 56007 - DNA, 17 bp, Homo sapiens
tgggtgcttgcacagga

SEQ ID NO: 56008 - DNA, 19 bp, Homo sapiens
ccgatccaaagagtttctc

SEQ ID NO: 56009 - DNA, 18 bp, Homo sapiens
atttgtgtacctatggct

SEQ ID NO: 56010 - DNA, 17 bp, Homo sapiens
agaaacgggcaacggag

SEQ ID NO: 56011 - DNA, 22 bp, Homo sapiens
tacctacccaccccccaccact

SEQ ID NO: 56012 - DNA, 18 bp, Homo sapiens
ctgcttcccctgtgctga

SEQ ID NO: 56013 - DNA, 23 bp, Homo sapiens
tgcctagaagaattttccatgag

SEQ ID NO: 56014 - DNA, 18 bp, Homo sapiens
cctaagatcaaatgaagg

SEQ ID NO: 56015 - DNA, 23 bp, Homo sapiens
cagacgttctccctggtttcgcc

SEQ ID NO: 56016 - DNA, 16 bp, Homo sapiens
ctacaacgcctcaatc

SEQ ID NO: 56017 - DNA, 19 bp, Homo sapiens
caccaaacagcatttagga

SEQ ID NO: 56018 - DNA, 18 bp, Homo sapiens
gtgacgggcagacggtcc

SEQ ID NO: 56019 - DNA, 23 bp, Homo sapiens
tggcacctgacccccctccagct

SEQ ID NO: 56020 - DNA, 16 bp, Homo sapiens
aactcccgcgacgaga

SEQ ID NO: 56021 - DNA, 16 bp, Homo sapiens
ctgagccaatgatctc

SEQ ID NO: 56022 - DNA, 19 bp, Homo sapiens
gtcttttccacagggatat

SEQ ID NO: 56023 - DNA, 22 bp, Homo sapiens
atcttgttgttggcacaggcaa

SEQ ID NO: 56024 - DNA, 16 bp, Homo sapiens
gtggggatgtagaagt

SEQ ID NO: 56025 - DNA, 18 bp, Homo sapiens
agtcacactggaagtgga

SEQ ID NO: 56026 - DNA, 17 bp, Homo sapiens
caacaaggagatcaagg

SEQ ID NO: 56027 - DNA, 23 bp, Homo sapiens
agctcagatgccagccaggaaat

SEQ ID NO: 56028 - DNA, 22 bp, Homo sapiens
tcatactgatggaagcatcaat

SEQ ID NO: 56029 - DNA, 16 bp, Homo sapiens
ttccctgacatgctga

SEQ ID NO: 56030 - DNA, 19 bp, Homo sapiens
gtaatcagagtcaatgtgc

SEQ ID NO: 56031 - DNA, 16 bp, Homo sapiens
ctgaagcagtcggcaa

SEQ ID NO: 56032 - DNA, 21 bp, Homo sapiens
cctcccaccaacctggccttg

SEQ ID NO: 56033 - DNA, 17 bp, Homo sapiens
ggcactgatgccaacgt

SEQ ID NO: 56034 - DNA, 22 bp, Homo sapiens
ttgcagaggtggcccaagctca

SEQ ID NO: 56035 - DNA, 17 bp, Homo sapiens
ggactgtgtgtcaaaga

SEQ ID NO: 56036 - DNA, 19 bp, Homo sapiens
ctcaaacttgttccagttt

SEQ ID NO: 56037 - DNA, 16 bp, Homo sapiens
gtactctgtccacctg

SEQ ID NO: 56038 - DNA, 20 bp, Homo sapiens
ccccgaagatgatgatgaac

SEQ ID NO: 56039 - DNA, 19 bp, Homo sapiens
atgctttgtccagacagaa

SEQ ID NO: 56040 - DNA, 17 bp, Homo sapiens
tgatggagtggacctcc

SEQ ID NO: 56041 - DNA, 18 bp, Homo sapiens
aggccttatgaagaaaaa

SEQ ID NO: 56042 - DNA, 19 bp, Homo sapiens
cagcggaagggcaagaaga

SEQ ID NO: 56043 - DNA, 19 bp, Homo sapiens
cggttggagtggtaaggga

SEQ ID NO: 56044 - DNA, 21 bp, Homo sapiens
agatcctactgaagaacatga

SEQ ID NO: 56045 - DNA, 24 bp, Homo sapiens
ggtcttaactgcgacggtgtagga

SEQ ID NO: 56046 - DNA, 17 bp, Homo sapiens
gctggtggaggtgaggg

SEQ ID NO: 56047 - DNA, 24 bp, Homo sapiens
acacatttcacacaccagggtctt

SEQ ID NO: 56048 - DNA, 17 bp, Homo sapiens
cttgtctcaggtctggg

SEQ ID NO: 56049 - DNA, 24 bp, Homo sapiens
atagtagaacatggtcaggtctcc

SEQ ID NO: 56050 - DNA, 23 bp, Homo sapiens
tgattaattcatgccaaagggca

SEQ ID NO: 56051 - DNA, 16 bp, Homo sapiens
aagatgcggatccgga

SEQ ID NO: 56052 - DNA, 17 bp, Homo sapiens
cagtgacatttgtgctt

SEQ ID NO: 56053 - DNA, 22 bp, Homo sapiens
tttgagcgggagcagaacgaca

SEQ ID NO: 56054 - DNA, 22 bp, Homo sapiens
ggtgggtggtggctggaaggaa

SEQ ID NO: 56055 - DNA, 16 bp, Homo sapiens
aaccctccccaatggc

SEQ ID NO: 56056 - DNA, 16 bp, Homo sapiens
actgcccaggccatca

SEQ ID NO: 56057 - DNA, 16 bp, Homo sapiens
tgctgagtaaaggcct

SEQ ID NO: 56058 - DNA, 16 bp, Homo sapiens
ccatgatgaaggtgtc

SEQ ID NO: 56059 - DNA, 16 bp, Homo sapiens
cagaggagatgcagct

SEQ ID NO: 56060 - DNA, 16 bp, Homo sapiens
ggaaggcctcatggtc

SEQ ID NO: 56061 - DNA, 24 bp, Homo sapiens
caggggatgtggttggcgggggca

SEQ ID NO: 56062 - DNA, 19 bp, Homo sapiens
gcagagggggagagttgaa

SEQ ID NO: 56063 - DNA, 21 bp, Homo sapiens
gactcagcacctgcattcctc

SEQ ID NO: 56064 - DNA, 23 bp, Homo sapiens
gtacctggctttctttttgtcca

SEQ ID NO: 56065 - DNA, 21 bp, Homo sapiens
cagtgtgtctctttctctggt

SEQ ID NO: 56066 - DNA, 22 bp, Homo sapiens
ggtcatgaagatgttggagtca

SEQ ID NO: 56067 - DNA, 22 bp, Homo sapiens
gctgtccaggcatttacagttg

SEQ ID NO: 56068 - DNA, 16 bp, Homo sapiens
gacctcttggatgcca

SEQ ID NO: 56069 - DNA, 16 bp, Homo sapiens
ggatgccccagtgatg

SEQ ID NO: 56070 - DNA, 17 bp, Homo sapiens
gttgaactgtaactgct

SEQ ID NO: 56071 - DNA, 23 bp, Homo sapiens
cacctcaacctgcactgccctgg

SEQ ID NO: 56072 - DNA, 24 bp, Homo sapiens
cccctgagagctgctggctggtgg

SEQ ID NO: 56073 - DNA, 20 bp, Homo sapiens
aatgttcaccaccatggcat

SEQ ID NO: 56074 - DNA, 20 bp, Homo sapiens
agttgtgcccagatcgtcac

SEQ ID NO: 56075 - DNA, 24 bp, Homo sapiens
ctctgtccttggccagccagcagt

SEQ ID NO: 56076 - DNA, 16 bp, Homo sapiens
ctgggaagaagcactg

SEQ ID NO: 56077 - DNA, 24 bp, Homo sapiens
actgccaaacacaactcttccacc

SEQ ID NO: 56078 - DNA, 23 bp, Homo sapiens
ggctgtaattatatctgcaaaat

SEQ ID NO: 56079 - DNA, 18 bp, Homo sapiens
aaagtcacctggctagtt

SEQ ID NO: 56080 - DNA, 16 bp, Homo sapiens
tctgtggaggagttct

SEQ ID NO: 56081 - DNA, 24 bp, Homo sapiens
gtaggctgttcttcccaccctgca

SEQ ID NO: 56082 - DNA, 22 bp, Homo sapiens
gatgatgaacgtagtaagcgca

SEQ ID NO: 56083 - DNA, 17 bp, Homo sapiens
ctagggtggtcactatc

SEQ ID NO: 56084 - DNA, 16 bp, Homo sapiens
agcacaaggacgcggc

SEQ ID NO: 56085 - DNA, 16 bp, Homo sapiens
tccaagcctgcgacgt

SEQ ID NO: 56086 - DNA, 22 bp, Homo sapiens
ctgttatgaacctgagccccgt

SEQ ID NO: 56087 - DNA, 17 bp, Homo sapiens
tcgggggtagtccaacc

SEQ ID NO: 56088 - DNA, 19 bp, Homo sapiens
agaggtcacttccaaatct

SEQ ID NO: 56089 - DNA, 23 bp, Homo sapiens
agaaagatgaaggctcggctgtc

SEQ ID NO: 56090 - DNA, 23 bp, Homo sapiens
agataacttaccagtctgaaggg

SEQ ID NO: 56091 - DNA, 21 bp, Homo sapiens
ttctggggataaaacaggtaa

SEQ ID NO: 56092 - DNA, 17 bp, Homo sapiens
gatgtcgacatcagcac

SEQ ID NO: 56093 - DNA, 17 bp, Homo sapiens
ggtgatggtggggctca

SEQ ID NO: 56094 - DNA, 16 bp, Homo sapiens
agcagcaactgcagca

SEQ ID NO: 56095 - DNA, 24 bp, Homo sapiens
ttccatgtgcctggcccccgtcca

SEQ ID NO: 56096 - DNA, 23 bp, Homo sapiens
ggaggtgctggagctgcaactgc

SEQ ID NO: 56097 - DNA, 24 bp, Homo sapiens
acgtagtcagccatgggcccggtc

SEQ ID NO: 56098 - DNA, 18 bp, Homo sapiens
tgagccaaggggtatata

SEQ ID NO: 56099 - DNA, 19 bp, Homo sapiens
cgatctcccagaagtcagc

SEQ ID NO: 56100 - DNA, 23 bp, Homo sapiens
gcgctggctctccctgaagaagg

SEQ ID NO: 56101 - DNA, 16 bp, Homo sapiens
tgggagagcaggactg

SEQ ID NO: 56102 - DNA, 17 bp, Homo sapiens
gaaggtggagatctgga

SEQ ID NO: 56103 - DNA, 23 bp, Homo sapiens
ctaggcatgaggatggccacagg

SEQ ID NO: 56104 - DNA, 19 bp, Homo sapiens
gtcatctacaagatcaagc

SEQ ID NO: 56105 - DNA, 21 bp, Homo sapiens
ctctcgagtcgcccatcctcc

SEQ ID NO: 56106 - DNA, 16 bp, Homo sapiens
gagtccccacatctgg

SEQ ID NO: 56107 - DNA, 23 bp, Homo sapiens
aactcgtcctcgttggtgtcatt

SEQ ID NO: 56108 - DNA, 16 bp, Homo sapiens
gaaggaaggtcccaga

SEQ ID NO: 56109 - DNA, 22 bp, Homo sapiens
cacttggagttgtcatggcgga

SEQ ID NO: 56110 - DNA, 17 bp, Homo sapiens
tttgggcctggagggct

SEQ ID NO: 56111 - DNA, 17 bp, Homo sapiens
cttgcaagggaagggca

SEQ ID NO: 56112 - DNA, 21 bp, Homo sapiens
ctggggagcgataccttggca

SEQ ID NO: 56113 - DNA, 19 bp, Homo sapiens
ttcctggatgtccccagga

SEQ ID NO: 56114 - DNA, 21 bp, Homo sapiens
ttcctggggcagggacggatg

SEQ ID NO: 56115 - DNA, 21 bp, Homo sapiens
ggagaggagggaaggagggta

SEQ ID NO: 56116 - DNA, 20 bp, Homo sapiens
gtctgtctgtcccaccacct

SEQ ID NO: 56117 - DNA, 19 bp, Homo sapiens
ccggttctctgacttgcca

SEQ ID NO: 56118 - DNA, 22 bp, Homo sapiens
ctcctacaaatccagttcctca

SEQ ID NO: 56119 - DNA, 23 bp, Homo sapiens
tagatggtgatgtacaccttggc

SEQ ID NO: 56120 - DNA, 22 bp, Homo sapiens
aattgagcaaacaaaaggaagg

SEQ ID NO: 56121 - DNA, 19 bp, Homo sapiens
ccgagtacagcacaactgg

SEQ ID NO: 56122 - DNA, 16 bp, Homo sapiens
acctctgtgagcctca

SEQ ID NO: 56123 - DNA, 17 bp, Homo sapiens
acatgaaagatgggtcc

SEQ ID NO: 56124 - DNA, 21 bp, Homo sapiens
actcctgggtgaagaggctta

SEQ ID NO: 56125 - DNA, 17 bp, Homo sapiens
gaggatgacaaaaagac

SEQ ID NO: 56126 - DNA, 23 bp, Homo sapiens
ctggagccttcccatggtgatga

SEQ ID NO: 56127 - DNA, 20 bp, Homo sapiens
tttctgcctcaccccagggt

SEQ ID NO: 56128 - DNA, 18 bp, Homo sapiens
ttccttgtagacttgccg

SEQ ID NO: 56129 - DNA, 16 bp, Homo sapiens
agctgatgaatccctg

SEQ ID NO: 56130 - DNA, 21 bp, Homo sapiens
catatggaaccagttctcgaa

SEQ ID NO: 56131 - DNA, 21 bp, Homo sapiens
tcctgtggcttttacattatt

SEQ ID NO: 56132 - DNA, 20 bp, Homo sapiens
catgggaaagtcaaggtctc

SEQ ID NO: 56133 - DNA, 16 bp, Homo sapiens
ctgctctcacgtggac

SEQ ID NO: 56134 - DNA, 20 bp, Homo sapiens
ttttatctcaataaggctga

SEQ ID NO: 56135 - DNA, 21 bp, Homo sapiens
tgtgggagaaatcattgaaaa

SEQ ID NO: 56136 - DNA, 16 bp, Homo sapiens
gctctggaaagggaca

SEQ ID NO: 56137 - DNA, 19 bp, Homo sapiens
ctggatctttcagctaaca

SEQ ID NO: 56138 - DNA, 23 bp, Homo sapiens
tttatccgggaggagcctgcgga

SEQ ID NO: 56139 - DNA, 16 bp, Homo sapiens
atgcaaagggactcag

SEQ ID NO: 56140 - DNA, 21 bp, Homo sapiens
tgttattatggccaatccgaa

SEQ ID NO: 56141 - DNA, 18 bp, Homo sapiens
gtgtgtcaaggacaatgg

SEQ ID NO: 56142 - DNA, 24 bp, Homo sapiens
ctggttgcttggatgtactgaggc

SEQ ID NO: 56143 - DNA, 16 bp, Homo sapiens
ggaacagaagcagttc

SEQ ID NO: 56144 - DNA, 22 bp, Homo sapiens
cagtgcatcaggatgaagggca

SEQ ID NO: 56145 - DNA, 18 bp, Homo sapiens
tcatcatctatggctgcg

SEQ ID NO: 56146 - DNA, 20 bp, Homo sapiens
ctgtctgacctactccatcc

SEQ ID NO: 56147 - DNA, 20 bp, Homo sapiens
cttacgagatcaccctctac

SEQ ID NO: 56148 - DNA, 24 bp, Homo sapiens
gggaggcagacttcctctcaaaga

SEQ ID NO: 56149 - DNA, 19 bp, Homo sapiens
gtttgttttctgttctctc

SEQ ID NO: 56150 - DNA, 23 bp, Homo sapiens
ttctgctgggtgcacacggcatc

SEQ ID NO: 56151 - DNA, 16 bp, Homo sapiens
ttccccagtgcaaggg

SEQ ID NO: 56152 - DNA, 21 bp, Homo sapiens
agcagcaaagacatcactggt

SEQ ID NO: 56153 - DNA, 22 bp, Homo sapiens
acagagtcagaaaattcaggac

SEQ ID NO: 56154 - DNA, 16 bp, Homo sapiens
gacgggtccatcatca

SEQ ID NO: 56155 - DNA, 24 bp, Homo sapiens
acagtcaatcctgaaggaagaact

SEQ ID NO: 56156 - DNA, 20 bp, Homo sapiens
gatgccccatctcttgggaa

SEQ ID NO: 56157 - DNA, 21 bp, Homo sapiens
cagagaagggctggccttgcc

SEQ ID NO: 56158 - DNA, 16 bp, Homo sapiens
gtctcctctctctcta

SEQ ID NO: 56159 - DNA, 18 bp, Homo sapiens
tgcatggaagaggtctct

SEQ ID NO: 56160 - DNA, 22 bp, Homo sapiens
gaaggaagtcaggagtccctga

SEQ ID NO: 56161 - DNA, 24 bp, Homo sapiens
agcggccacagggaaacgtcatgc

SEQ ID NO: 56162 - DNA, 18 bp, Homo sapiens
tagcaatgctgcaagcaa

SEQ ID NO: 56163 - DNA, 21 bp, Homo sapiens
caaaccagcctggggccttgc

SEQ ID NO: 56164 - DNA, 21 bp, Homo sapiens
ctgggagacctgtggaaagtc

SEQ ID NO: 56165 - DNA, 24 bp, Homo sapiens
ttaaggaagctgtgtcattacaga

SEQ ID NO: 56166 - DNA, 18 bp, Homo sapiens
acagcgataagtttgaga

SEQ ID NO: 56167 - DNA, 17 bp, Homo sapiens
acctgtccatggtcctt

SEQ ID NO: 56168 - DNA, 20 bp, Homo sapiens
gtcatgctggggtcatctga

SEQ ID NO: 56169 - DNA, 16 bp, Homo sapiens
gtgttgtcatggccaa

SEQ ID NO: 56170 - DNA, 22 bp, Homo sapiens
ggtcattttgaaaagggattaa

SEQ ID NO: 56171 - DNA, 18 bp, Homo sapiens
gatttcaatgctgtccct

SEQ ID NO: 56172 - DNA, 16 bp, Homo sapiens
aggtggccaatggatg

SEQ ID NO: 56173 - DNA, 22 bp, Homo sapiens
gagaaaaagaaaatttttagaa

SEQ ID NO: 56174 - DNA, 19 bp, Homo sapiens
ctaatgtcttcatcacact

SEQ ID NO: 56175 - DNA, 16 bp, Homo sapiens
ttgagagacaaaagca

SEQ ID NO: 56176 - DNA, 21 bp, Homo sapiens
cagataaatctaccacattct

SEQ ID NO: 56177 - DNA, 16 bp, Homo sapiens
tggtctccctggggaa

SEQ ID NO: 56178 - DNA, 18 bp, Homo sapiens
tcctttcatgaaaggaac

SEQ ID NO: 56179 - DNA, 23 bp, Homo sapiens
ccagtgtcatcctgtgtgccaaa

SEQ ID NO: 56180 - DNA, 16 bp, Homo sapiens
ggggtagagggagtga

SEQ ID NO: 56181 - DNA, 21 bp, Homo sapiens
ttaaccccagtctttatggtc

SEQ ID NO: 56182 - DNA, 22 bp, Homo sapiens
gtgacaacaaccccctcgacaa

SEQ ID NO: 56183 - DNA, 24 bp, Homo sapiens
gactgtcaagggaggaagttccca

SEQ ID NO: 56184 - DNA, 20 bp, Homo sapiens
ggagctgttgccagtggatg

SEQ ID NO: 56185 - DNA, 22 bp, Homo sapiens
gttagggagaggcagaggggag

SEQ ID NO: 56186 - DNA, 16 bp, Homo sapiens
actttccatgccaacg

SEQ ID NO: 56187 - DNA, 16 bp, Homo sapiens
ctccagggccaggttg

SEQ ID NO: 56188 - DNA, 22 bp, Homo sapiens
cctggacgagacctttctaaga

SEQ ID NO: 56189 - DNA, 19 bp, Homo sapiens
tctgtggcagcacatagga

SEQ ID NO: 56190 - DNA, 16 bp, Homo sapiens
cagacaggggagagtt

SEQ ID NO: 56191 - DNA, 21 bp, Homo sapiens
catcatcttcctccactgcca

SEQ ID NO: 56192 - DNA, 17 bp, Homo sapiens
agtacacctcaccctta

SEQ ID NO: 56193 - DNA, 16 bp, Homo sapiens
aacagagcaggctggt

SEQ ID NO: 56194 - DNA, 16 bp, Homo sapiens
ccacccccagtcttct

SEQ ID NO: 56195 - DNA, 17 bp, Homo sapiens
catctatgccattgacc

SEQ ID NO: 56196 - DNA, 24 bp, Homo sapiens
gagcaacacccctccctgcccact

SEQ ID NO: 56197 - DNA, 16 bp, Homo sapiens
gaggggtaggtcttac

SEQ ID NO: 56198 - DNA, 21 bp, Homo sapiens
taatgtctattctgtccagga

SEQ ID NO: 56199 - DNA, 21 bp, Homo sapiens
ctcaccattggcctctggctg

SEQ ID NO: 56200 - DNA, 18 bp, Homo sapiens
gaatcttggtcagggccc

SEQ ID NO: 56201 - DNA, 18 bp, Homo sapiens
acaccagactactaagtg

SEQ ID NO: 56202 - DNA, 19 bp, Homo sapiens
agtatcagtgttactgaag

SEQ ID NO: 56203 - DNA, 16 bp, Homo sapiens
gaacgacccctgaaga

SEQ ID NO: 56204 - DNA, 24 bp, Homo sapiens
gtcacactgccaaacacagcagcc

SEQ ID NO: 56205 - DNA, 23 bp, Homo sapiens
tgcccaaggccggcactgatgct

SEQ ID NO: 56206 - DNA, 22 bp, Homo sapiens
aacccacagcccccacccaggg

SEQ ID NO: 56207 - DNA, 24 bp, Homo sapiens
acactgcatctttctgtgtctaca

SEQ ID NO: 56208 - DNA, 24 bp, Homo sapiens
aaatttgttggacttgtctgactt

SEQ ID NO: 56209 - DNA, 16 bp, Homo sapiens
ggatctgagaggctgt

SEQ ID NO: 56210 - DNA, 18 bp, Homo sapiens
agatggttaggtagacgt

SEQ ID NO: 56211 - DNA, 24 bp, Homo sapiens
tgggcagtttcagtcccaggttag

SEQ ID NO: 56212 - DNA, 16 bp, Homo sapiens
tcataggtgtttcctg

SEQ ID NO: 56213 - DNA, 21 bp, Homo sapiens
agctggcaagccgggtcctga

SEQ ID NO: 56214 - DNA, 23 bp, Homo sapiens
atttgggaaccatgatgggtgcc

SEQ ID NO: 56215 - DNA, 19 bp, Homo sapiens
caccgctggctggcccggg

SEQ ID NO: 56216 - DNA, 22 bp, Homo sapiens
ctgcccccagtgggcccccttt

SEQ ID NO: 56217 - DNA, 17 bp, Homo sapiens
gaagaggaggagtttgg

SEQ ID NO: 56218 - DNA, 22 bp, Homo sapiens
ccaccccccacgacccacttac

SEQ ID NO: 56219 - DNA, 20 bp, Homo sapiens
gaagaggagtcgtcctcatc

SEQ ID NO: 56220 - DNA, 24 bp, Homo sapiens
aagttcgttgtcctccttgccccg

SEQ ID NO: 56221 - DNA, 16 bp, Homo sapiens
ctgcagaggaagaaga

SEQ ID NO: 56222 - DNA, 22 bp, Homo sapiens
caatcacctcctgcatccccgg

SEQ ID NO: 56223 - DNA, 18 bp, Homo sapiens
ggaagaagaaggagaagg

SEQ ID NO: 56224 - DNA, 24 bp, Homo sapiens
cctcctctgacgaggactcctctg

SEQ ID NO: 56225 - DNA, 22 bp, Homo sapiens
ttcgtggacaccgtgtggctgc

SEQ ID NO: 56226 - DNA, 24 bp, Homo sapiens
cgctgcccttcctcttcttcttct

SEQ ID NO: 56227 - DNA, 24 bp, Homo sapiens
gtgggcgaggtctataagctccgg

SEQ ID NO: 56228 - DNA, 24 bp, Homo sapiens
ttgagcagctgccgcagcttgtcc

SEQ ID NO: 56229 - DNA, 21 bp, Homo sapiens
gctggggccacgacagccgct

SEQ ID NO: 56230 - DNA, 24 bp, Homo sapiens
aggtccacctcccgcaccaccagg

SEQ ID NO: 56231 - DNA, 22 bp, Homo sapiens
tagcaaacaggccttgtgcctg

SEQ ID NO: 56232 - DNA, 24 bp, Homo sapiens
caaagccctcgcccgtgtgcccga

SEQ ID NO: 56233 - DNA, 20 bp, Homo sapiens
ggaggtggtggaaggatctg

SEQ ID NO: 56234 - DNA, 22 bp, Homo sapiens
ttttaggccgaaagctcaggtc

SEQ ID NO: 56235 - DNA, 17 bp, Homo sapiens
ctctccagccgctcaaa

SEQ ID NO: 56236 - DNA, 17 bp, Homo sapiens
cattctcgggtgagtat

SEQ ID NO: 56237 - DNA, 16 bp, Homo sapiens
accagtgcccgagtct

SEQ ID NO: 56238 - DNA, 20 bp, Homo sapiens
cactgagcctgctgttggca

SEQ ID NO: 56239 - DNA, 21 bp, Homo sapiens
ctgcacgtgcccacccagtgg

SEQ ID NO: 56240 - DNA, 20 bp, Homo sapiens
cccgttcaaaaacttttgag

SEQ ID NO: 56241 - DNA, 20 bp, Homo sapiens
ggaaaggtttgttttgttac

SEQ ID NO: 56242 - DNA, 24 bp, Homo sapiens
cctttctctccatagatctgcatg

SEQ ID NO: 56243 - DNA, 24 bp, Homo sapiens
gaggagaggattagataagtgaat

SEQ ID NO: 56244 - DNA, 20 bp, Homo sapiens
aaatctcaacctcatagtgg

SEQ ID NO: 56245 - DNA, 17 bp, Homo sapiens
aggtggagctgtatccc

SEQ ID NO: 56246 - DNA, 23 bp, Homo sapiens
ctgcaggaccctaccagcagcac

SEQ ID NO: 56247 - DNA, 18 bp, Homo sapiens
agtacacctttcccgcca

SEQ ID NO: 56248 - DNA, 23 bp, Homo sapiens
ccctcagccccatcccccatggg

SEQ ID NO: 56249 - DNA, 24 bp, Homo sapiens
acagcactggcatgcatgccagct

SEQ ID NO: 56250 - DNA, 21 bp, Homo sapiens
atttctggatctccaccacct

SEQ ID NO: 56251 - DNA, 17 bp, Homo sapiens
caccctcactcgggttt

SEQ ID NO: 56252 - DNA, 17 bp, Homo sapiens
tccagccagcggttggc

SEQ ID NO: 56253 - DNA, 21 bp, Homo sapiens
ttttgtgctggtgtttgggga

SEQ ID NO: 56254 - DNA, 22 bp, Homo sapiens
atctgaacgctgcccaggaacc

SEQ ID NO: 56255 - DNA, 16 bp, Homo sapiens
gattccagctttccca

SEQ ID NO: 56256 - DNA, 24 bp, Homo sapiens
attcccaagtgtgctttttctctt

SEQ ID NO: 56257 - DNA, 16 bp, Homo sapiens
ctttgaacgtggccgg

SEQ ID NO: 56258 - DNA, 19 bp, Homo sapiens
tgtgtctgtgtgtggacat

SEQ ID NO: 56259 - DNA, 18 bp, Homo sapiens
ggggataaatctgacacc

SEQ ID NO: 56260 - DNA, 18 bp, Homo sapiens
ggtgggatgatgtcacat

SEQ ID NO: 56261 - DNA, 17 bp, Homo sapiens
tcagcttgaagactggg

SEQ ID NO: 56262 - DNA, 23 bp, Homo sapiens
tctcgagggtgaactcatccacc

SEQ ID NO: 56263 - DNA, 16 bp, Homo sapiens
aaccccttcccttcct

SEQ ID NO: 56264 - DNA, 24 bp, Homo sapiens
gacaagaagaacttgcttgatggt

SEQ ID NO: 56265 - DNA, 16 bp, Homo sapiens
caaacctccagctcca

SEQ ID NO: 56266 - DNA, 17 bp, Homo sapiens
cgtgctggccccagaga

SEQ ID NO: 56267 - DNA, 18 bp, Homo sapiens
aagttgcagggctgctta

SEQ ID NO: 56268 - DNA, 19 bp, Homo sapiens
ctccagacactccctcgga

SEQ ID NO: 56269 - DNA, 23 bp, Homo sapiens
ggacaaggataaggatgatgggc

SEQ ID NO: 56270 - DNA, 19 bp, Homo sapiens
gtgctcgtgttttcttgaa

SEQ ID NO: 56271 - DNA, 24 bp, Homo sapiens
ttgattgtctgcctgctccaccca

SEQ ID NO: 56272 - DNA, 22 bp, Homo sapiens
cacacccagcacctggtcatca

SEQ ID NO: 56273 - DNA, 19 bp, Homo sapiens
tgctaaagtcaaagctctg

SEQ ID NO: 56274 - DNA, 18 bp, Homo sapiens
ggtagcaactctcggacc

SEQ ID NO: 56275 - DNA, 16 bp, Homo sapiens
cccactccaggctagg

SEQ ID NO: 56276 - DNA, 24 bp, Homo sapiens
gaggggcagcctgagagcgacaac

SEQ ID NO: 56277 - DNA, 17 bp, Homo sapiens
tatagccttaagccact

SEQ ID NO: 56278 - DNA, 16 bp, Homo sapiens
caaaggctccggcagc

SEQ ID NO: 56279 - DNA, 18 bp, Homo sapiens
aaacacagggatcataac

SEQ ID NO: 56280 - DNA, 16 bp, Homo sapiens
ttcactatcgagtctg

SEQ ID NO: 56281 - DNA, 17 bp, Homo sapiens
tgagacatgggaactcc

SEQ ID NO: 56282 - DNA, 24 bp, Homo sapiens
cccttggtgtttgggtcctggggt

SEQ ID NO: 56283 - DNA, 16 bp, Homo sapiens
ctgtccaggtaccagc

SEQ ID NO: 56284 - DNA, 18 bp, Homo sapiens
ggagttgcctaacccatc

SEQ ID NO: 56285 - DNA, 17 bp, Homo sapiens
cacattccgcatggtga

SEQ ID NO: 56286 - DNA, 16 bp, Homo sapiens
gattccccagttcccc

SEQ ID NO: 56287 - DNA, 16 bp, Homo sapiens
aacggctgctctacaa

SEQ ID NO: 56288 - DNA, 16 bp, Homo sapiens
ccagcatcagctcaac

SEQ ID NO: 56289 - DNA, 19 bp, Homo sapiens
ttgaaggtgctgggaccga

SEQ ID NO: 56290 - DNA, 23 bp, Homo sapiens
gaactgggaggaaggggatgagt

SEQ ID NO: 56291 - DNA, 16 bp, Homo sapiens
cctctctctgcctgcc

SEQ ID NO: 56292 - DNA, 24 bp, Homo sapiens
gtctgtgttattcctgcagttgta

SEQ ID NO: 56293 - DNA, 22 bp, Homo sapiens
atcagagcttagaagtgggagc

SEQ ID NO: 56294 - DNA, 18 bp, Homo sapiens
cagagatagacgttggca

SEQ ID NO: 56295 - DNA, 18 bp, Homo sapiens
tagttgggaggaaggggg

SEQ ID NO: 56296 - DNA, 24 bp, Homo sapiens
cttttccaagccagtcttgaggca

SEQ ID NO: 56297 - DNA, 19 bp, Homo sapiens
gagatagtgagggaaatga

SEQ ID NO: 56298 - DNA, 24 bp, Homo sapiens
gaagatgcaaagcagacaagactc

SEQ ID NO: 56299 - DNA, 23 bp, Homo sapiens
cactctgaacaaagacaagtaca

SEQ ID NO: 56300 - DNA, 21 bp, Homo sapiens
gagttccactgcctcccagga

SEQ ID NO: 56301 - DNA, 16 bp, Homo sapiens
cctggtgcaccaactt

SEQ ID NO: 56302 - DNA, 23 bp, Homo sapiens
cactgttgggccttctgcagtca

SEQ ID NO: 56303 - DNA, 16 bp, Homo sapiens
tggcttctctgcaatg

SEQ ID NO: 56304 - DNA, 21 bp, Homo sapiens
ccagccagcggttgcaattga

SEQ ID NO: 56305 - DNA, 19 bp, Homo sapiens
caggaaaccaggaacaaat

SEQ ID NO: 56306 - DNA, 17 bp, Homo sapiens
gagttctggttctggat

SEQ ID NO: 56307 - DNA, 16 bp, Homo sapiens
ccttttcagtccctat

SEQ ID NO: 56308 - DNA, 16 bp, Homo sapiens
ttgagctcccggatct

SEQ ID NO: 56309 - DNA, 20 bp, Homo sapiens
gtcattgaaaagggaccatc

SEQ ID NO: 56310 - DNA, 22 bp, Homo sapiens
cagctatgagaataaacacatt

SEQ ID NO: 56311 - DNA, 24 bp, Homo sapiens
gtgcatctcaccctttctaaatgc

SEQ ID NO: 56312 - DNA, 16 bp, Homo sapiens
ccatcctcactgctga

SEQ ID NO: 56313 - DNA, 22 bp, Homo sapiens
cgaatcttataaaacctgccaa

SEQ ID NO: 56314 - DNA, 16 bp, Homo sapiens
gtggttcaaacccggc

SEQ ID NO: 56315 - DNA, 19 bp, Homo sapiens
tttttgtcttcaaacttgg

SEQ ID NO: 56316 - DNA, 19 bp, Homo sapiens
tcccatcttcatccagatt

SEQ ID NO: 56317 - DNA, 20 bp, Homo sapiens
ggacgaatgccctacatccc

SEQ ID NO: 56318 - DNA, 16 bp, Homo sapiens
ttcccttggtccctgt

SEQ ID NO: 56319 - DNA, 17 bp, Homo sapiens
acttctcgattatgccg

SEQ ID NO: 56320 - DNA, 20 bp, Homo sapiens
tggtaatatgaaaatctctt

SEQ ID NO: 56321 - DNA, 18 bp, Homo sapiens
atctgtccgccccttctg

SEQ ID NO: 56322 - DNA, 16 bp, Homo sapiens
gtgtataccccgccct

SEQ ID NO: 56323 - DNA, 20 bp, Homo sapiens
ttctttaggtcggttgtcca

SEQ ID NO: 56324 - DNA, 18 bp, Homo sapiens
ctttggagagtggagctg

SEQ ID NO: 56325 - DNA, 17 bp, Homo sapiens
agctctatgagatggtg

SEQ ID NO: 56326 - DNA, 16 bp, Homo sapiens
ttgagaagcaggagtg

SEQ ID NO: 56327 - DNA, 16 bp, Homo sapiens
gaccttcccttgtagc

SEQ ID NO: 56328 - DNA, 23 bp, Homo sapiens
cctctgctgaccctggctgagag

SEQ ID NO: 56329 - DNA, 18 bp, Homo sapiens
atgccggagacactgtgc

SEQ ID NO: 56330 - DNA, 17 bp, Homo sapiens
cttcttcctgagagaca

SEQ ID NO: 56331 - DNA, 16 bp, Homo sapiens
tctaaatgtggggctg

SEQ ID NO: 56332 - DNA, 22 bp, Homo sapiens
tctcatccagccagttgctaca

SEQ ID NO: 56333 - DNA, 22 bp, Homo sapiens
agatttaatgagataggcaaca

SEQ ID NO: 56334 - DNA, 17 bp, Homo sapiens
aatgtgggtgtcaacag

SEQ ID NO: 56335 - DNA, 24 bp, Homo sapiens
aagagattgcccatgcactctgta

SEQ ID NO: 56336 - DNA, 17 bp, Homo sapiens
catcttccacatcgagc

SEQ ID NO: 56337 - DNA, 23 bp, Homo sapiens
gtacttgcaagttaaagaggaga

SEQ ID NO: 56338 - DNA, 19 bp, Homo sapiens
aataagaacagtgggaaaa

SEQ ID NO: 56339 - DNA, 16 bp, Homo sapiens
cacagaaccagcctct

SEQ ID NO: 56340 - DNA, 24 bp, Homo sapiens
gggatgtccggggggctggtacca

SEQ ID NO: 56341 - DNA, 17 bp, Homo sapiens
ggctaaggaggacagcc

SEQ ID NO: 56342 - DNA, 19 bp, Homo sapiens
ctctttcctgttgtttcca

SEQ ID NO: 56343 - DNA, 20 bp, Homo sapiens
cacgccgccctccaggaaga

SEQ ID NO: 56344 - DNA, 16 bp, Homo sapiens
gtaaccaggaagggga

SEQ ID NO: 56345 - DNA, 22 bp, Homo sapiens
tgaccaagtagattttggattt

SEQ ID NO: 56346 - DNA, 20 bp, Homo sapiens
tggcatctggaggagtagga

SEQ ID NO: 56347 - DNA, 16 bp, Homo sapiens
aacccagtgggacaga

SEQ ID NO: 56348 - DNA, 18 bp, Homo sapiens
gatggcaaaatccaaagg

SEQ ID NO: 56349 - DNA, 24 bp, Homo sapiens
gacccagctggctcctgtttgatc

SEQ ID NO: 56350 - DNA, 21 bp, Homo sapiens
gatattgggaacaaaagaaaa

SEQ ID NO: 56351 - DNA, 22 bp, Homo sapiens
ggcagaaagtgaaatacccaaa

SEQ ID NO: 56352 - DNA, 16 bp, Homo sapiens
accctcaacaacactt

SEQ ID NO: 56353 - DNA, 17 bp, Homo sapiens
cgcccactaagatatcc

SEQ ID NO: 56354 - DNA, 23 bp, Homo sapiens
agatatcagtacattcttaaagt

SEQ ID NO: 56355 - DNA, 24 bp, Homo sapiens
ccagcggttaagggggaagtcata

SEQ ID NO: 56356 - DNA, 16 bp, Homo sapiens
tcctggacacagttgt

SEQ ID NO: 56357 - DNA, 24 bp, Homo sapiens
taaggaggacagaatggctggcca

SEQ ID NO: 56358 - DNA, 19 bp, Homo sapiens
gcagctgatgaagatcaat

SEQ ID NO: 56359 - DNA, 24 bp, Homo sapiens
agagaggaaagttgggactgagat

SEQ ID NO: 56360 - DNA, 18 bp, Homo sapiens
ggacaactttgaaaaggg

SEQ ID NO: 56361 - DNA, 24 bp, Homo sapiens
aggccacagggactgcagagaagc

SEQ ID NO: 56362 - DNA, 22 bp, Homo sapiens
ggtctttttgtaatttcttttg

SEQ ID NO: 56363 - DNA, 20 bp, Homo sapiens
ccccttattgttgtggccaa

SEQ ID NO: 56364 - DNA, 18 bp, Homo sapiens
tggaagagcatctttcag

SEQ ID NO: 56365 - DNA, 21 bp, Homo sapiens
caggatgaacctgtcttcagc

SEQ ID NO: 56366 - DNA, 16 bp, Homo sapiens
tcagagactggaggga

SEQ ID NO: 56367 - DNA, 17 bp, Homo sapiens
ggtcactccaaaccaca

SEQ ID NO: 56368 - DNA, 16 bp, Homo sapiens
attggtgcagggacag

SEQ ID NO: 56369 - DNA, 18 bp, Homo sapiens
aagctgccttcctctgcc

SEQ ID NO: 56370 - DNA, 18 bp, Homo sapiens
gtttttctctctccttgt

SEQ ID NO: 56371 - DNA, 23 bp, Homo sapiens
cttatgaaaaaaataattcaaac

SEQ ID NO: 56372 - DNA, 16 bp, Homo sapiens
tggtgtggtagctact

SEQ ID NO: 56373 - DNA, 18 bp, Homo sapiens
ttgatgaagacatcagca

SEQ ID NO: 56374 - DNA, 19 bp, Homo sapiens
gttttttgctctgttattg

SEQ ID NO: 56375 - DNA, 23 bp, Homo sapiens
ggggcttccccttggccctaacc

SEQ ID NO: 56376 - DNA, 17 bp, Homo sapiens
aaggtgaccgccagtgg

SEQ ID NO: 56377 - DNA, 17 bp, Homo sapiens
agactgcccagagcaag

SEQ ID NO: 56378 - DNA, 20 bp, Homo sapiens
acatgaagaggcctcatctc

SEQ ID NO: 56379 - DNA, 22 bp, Homo sapiens
ctagggagggatggcaggcagg

SEQ ID NO: 56380 - DNA, 20 bp, Homo sapiens
caggattgagcatgacaaca

SEQ ID NO: 56381 - DNA, 24 bp, Homo sapiens
gttgaagctggccagcaggtcacg

SEQ ID NO: 56382 - DNA, 20 bp, Homo sapiens
ggaaggggtgctgtttcagt

SEQ ID NO: 56383 - DNA, 17 bp, Homo sapiens
aagtagtaacggagatg

SEQ ID NO: 56384 - DNA, 21 bp, Homo sapiens
aagtaacaacaacaacagaat

SEQ ID NO: 56385 - DNA, 18 bp, Homo sapiens
agctggcattcaagcccg

SEQ ID NO: 56386 - DNA, 18 bp, Homo sapiens
actgtgattcaggatgac

SEQ ID NO: 56387 - DNA, 16 bp, Homo sapiens
agggcaacgtcgatgt

SEQ ID NO: 56388 - DNA, 19 bp, Homo sapiens
gtaattcatacccagaaat

SEQ ID NO: 56389 - DNA, 17 bp, Homo sapiens
gccaacagctgatctgc

SEQ ID NO: 56390 - DNA, 24 bp, Homo sapiens
caccctcaatcctagtcaggcgcc

SEQ ID NO: 56391 - DNA, 16 bp, Homo sapiens
aggagtgggatgatgg

SEQ ID NO: 56392 - DNA, 16 bp, Homo sapiens
tctcacccggaacaca

SEQ ID NO: 56393 - DNA, 17 bp, Homo sapiens
ctgggaaccatgtcaga

SEQ ID NO: 56394 - DNA, 16 bp, Homo sapiens
tctgtcattagcagag

SEQ ID NO: 56395 - DNA, 17 bp, Homo sapiens
gccaatgtcttcatcac

SEQ ID NO: 56396 - DNA, 19 bp, Homo sapiens
cttctccccagagaagcag

SEQ ID NO: 56397 - DNA, 17 bp, Homo sapiens
tcctccagtgtatgaag

SEQ ID NO: 56398 - DNA, 17 bp, Homo sapiens
aggatcccaccaaggcc

SEQ ID NO: 56399 - DNA, 17 bp, Homo sapiens
gattctccaggcccaca

SEQ ID NO: 56400 - DNA, 18 bp, Homo sapiens
attctctccaaaaagcgt

SEQ ID NO: 56401 - DNA, 19 bp, Homo sapiens
ctacaggatgcagcaggga

SEQ ID NO: 56402 - DNA, 18 bp, Homo sapiens
gtggctgtgaccacttca

SEQ ID NO: 56403 - DNA, 23 bp, Homo sapiens
gccttcttactccgaggggatat

SEQ ID NO: 56404 - DNA, 16 bp, Homo sapiens
ctgctgaactacgcct

SEQ ID NO: 56405 - DNA, 20 bp, Homo sapiens
ccgaaatcttagaatgactc

SEQ ID NO: 56406 - DNA, 16 bp, Homo sapiens
aagaaaaggcggagga

SEQ ID NO: 56407 - DNA, 24 bp, Homo sapiens
cagctgcaccacccgccccccgca

SEQ ID NO: 56408 - DNA, 20 bp, Homo sapiens
gtgtgaggaggcggcacagt

SEQ ID NO: 56409 - DNA, 23 bp, Homo sapiens
cagctccccctcgtcgtcctccg

SEQ ID NO: 56410 - DNA, 16 bp, Homo sapiens
gctataggagggccgt

SEQ ID NO: 56411 - DNA, 24 bp, Homo sapiens
gccaggaagtcgatgtccttcttc

SEQ ID NO: 56412 - DNA, 18 bp, Homo sapiens
cagcaccttgggcacggg

SEQ ID NO: 56413 - DNA, 24 bp, Homo sapiens
gctgctggtgacacacagctggga

SEQ ID NO: 56414 - DNA, 19 bp, Homo sapiens
ctactacgccttcccacag

SEQ ID NO: 56415 - DNA, 24 bp, Homo sapiens
gggaaagcttctggtgacacacag

SEQ ID NO: 56416 - DNA, 23 bp, Homo sapiens
cttccggagggagaacatccgta

SEQ ID NO: 56417 - DNA, 18 bp, Homo sapiens
caggaaggcacggaggag

SEQ ID NO: 56418 - DNA, 17 bp, Homo sapiens
gacctggtgccatcccc

SEQ ID NO: 56419 - DNA, 24 bp, Homo sapiens
tttggtcaccaggggcgtgatcat

SEQ ID NO: 56420 - DNA, 21 bp, Homo sapiens
atctgtaaacactcttcaatg

SEQ ID NO: 56421 - DNA, 24 bp, Homo sapiens
ggtgggaccagcgccatcacctcc

SEQ ID NO: 56422 - DNA, 16 bp, Homo sapiens
tgccctgccacgtgcc

SEQ ID NO: 56423 - DNA, 20 bp, Homo sapiens
gggcacctgcgtctcctggt

SEQ ID NO: 56424 - DNA, 23 bp, Homo sapiens
aagtagctgggagtacaggcaca

SEQ ID NO: 56425 - DNA, 23 bp, Homo sapiens
gttcatttagaaatcaaagtcct

SEQ ID NO: 56426 - DNA, 22 bp, Homo sapiens
aaagatgaggtcttgctctgta

SEQ ID NO: 56427 - DNA, 16 bp, Homo sapiens
accttgctacctgggg

SEQ ID NO: 56428 - DNA, 22 bp, Homo sapiens
atctgcccacctcggccttcca

SEQ ID NO: 56429 - DNA, 17 bp, Homo sapiens
tgaagttccccatgggt

SEQ ID NO: 56430 - DNA, 16 bp, Homo sapiens
caggcaaaggactttg

SEQ ID NO: 56431 - DNA, 18 bp, Homo sapiens
ggagctgatgaagtccaa

SEQ ID NO: 56432 - DNA, 21 bp, Homo sapiens
cagggggtcaggaagggaccc

SEQ ID NO: 56433 - DNA, 24 bp, Homo sapiens
cacagaaccacgcctttcgcctgc

SEQ ID NO: 56434 - DNA, 23 bp, Homo sapiens
ccccatccaaggtcacttcctgg

SEQ ID NO: 56435 - DNA, 24 bp, Homo sapiens
ggggaagcccctctgcccacaccc

SEQ ID NO: 56436 - DNA, 24 bp, Homo sapiens
aacatgatggtgatgtctgagtac

SEQ ID NO: 56437 - DNA, 22 bp, Homo sapiens
acacaccagttcaacttcatca

SEQ ID NO: 56438 - DNA, 22 bp, Homo sapiens
gtgaggacgccccccggcttca

SEQ ID NO: 56439 - DNA, 21 bp, Homo sapiens
tccgtgcagggatcctgtacg

SEQ ID NO: 56440 - DNA, 24 bp, Homo sapiens
gtggccagtggtcaggacggaggt

SEQ ID NO: 56441 - DNA, 24 bp, Homo sapiens
ctgggggatgagccgggtgaggct

SEQ ID NO: 56442 - DNA, 22 bp, Homo sapiens
tcccagcaagtcagagagaacc

SEQ ID NO: 56443 - DNA, 16 bp, Homo sapiens
tgggagccccacctct

SEQ ID NO: 56444 - DNA, 23 bp, Homo sapiens
ctcctccgagagtgggtacgtgt

SEQ ID NO: 56445 - DNA, 18 bp, Homo sapiens
gaggatgtggcacccacc

SEQ ID NO: 56446 - DNA, 22 bp, Homo sapiens
cacacccacttgggctctgtcc

SEQ ID NO: 56447 - DNA, 17 bp, Homo sapiens
ccctgtcctctcttttt

SEQ ID NO: 56448 - DNA, 16 bp, Homo sapiens
ggctgcattggagctg

SEQ ID NO: 56449 - DNA, 17 bp, Homo sapiens
ctctcgggagtccccct

SEQ ID NO: 56450 - DNA, 23 bp, Homo sapiens
accatcaaagtgaccgtcaggca

SEQ ID NO: 56451 - DNA, 16 bp, Homo sapiens
cactgcttcctggggg

SEQ ID NO: 56452 - DNA, 24 bp, Homo sapiens
ccccacctgcagaaagggagcggc

SEQ ID NO: 56453 - DNA, 23 bp, Homo sapiens
tgagcattggatcatcgagtgca

SEQ ID NO: 56454 - DNA, 24 bp, Homo sapiens
cacctctgacagccccaggccccc

SEQ ID NO: 56455 - DNA, 22 bp, Homo sapiens
ctggaggtgggctttggcatgg

SEQ ID NO: 56456 - DNA, 24 bp, Homo sapiens
gggtcctggagggcctgcgggcag

SEQ ID NO: 56457 - DNA, 22 bp, Homo sapiens
cctaagcccgccccacctagtg

SEQ ID NO: 56458 - DNA, 24 bp, Homo sapiens
ggagccgctggaagacgccgtcat

SEQ ID NO: 56459 - DNA, 17 bp, Homo sapiens
ctcctccaggcagtctc

SEQ ID NO: 56460 - DNA, 20 bp, Homo sapiens
ctttgacgctgcgatggcca

SEQ ID NO: 56461 - DNA, 16 bp, Homo sapiens
agccctgctctgcacg

SEQ ID NO: 56462 - DNA, 24 bp, Homo sapiens
tccccgtgaacgcctccgtgtgcc

SEQ ID NO: 56463 - DNA, 20 bp, Homo sapiens
cggtgatggagcgctgggag

SEQ ID NO: 56464 - DNA, 23 bp, Homo sapiens
cgccccggcgggagggtgggctg

SEQ ID NO: 56465 - DNA, 24 bp, Homo sapiens
ggggcggcgcccgcggcctacgac

SEQ ID NO: 56466 - DNA, 23 bp, Homo sapiens
tttcccctgcgcccccgggggcg

SEQ ID NO: 56467 - DNA, 21 bp, Homo sapiens
agcatgagcgcccccagcgcg

SEQ ID NO: 56468 - DNA, 24 bp, Homo sapiens
gcggcggccagcgcgtgcatatag

SEQ ID NO: 56469 - DNA, 22 bp, Homo sapiens
ctgcagggagcgggcccgggcg

SEQ ID NO: 56470 - DNA, 22 bp, Homo sapiens
caggtgcgtgtccgctgcgtcg

SEQ ID NO: 56471 - DNA, 21 bp, Homo sapiens
gcgcgcgtcctctcgcgggtc

SEQ ID NO: 56472 - DNA, 24 bp, Homo sapiens
agttctcgccgggcgcgaagatgg

SEQ ID NO: 56473 - DNA, 24 bp, Homo sapiens
ctctgggctaccgggtcacgtgac

SEQ ID NO: 56474 - DNA, 22 bp, Homo sapiens
ctgagttcggggccccacggtg

SEQ ID NO: 56475 - DNA, 23 bp, Homo sapiens
aagccgcgccgcgagggagcgag

SEQ ID NO: 56476 - DNA, 24 bp, Homo sapiens
ggagcttagaaaaaaagagactag

SEQ ID NO: 56477 - DNA, 18 bp, Homo sapiens
gtacccgcctgcgtcccg

SEQ ID NO: 56478 - DNA, 23 bp, Homo sapiens
cgcccaagttctaggagccgtct

SEQ ID NO: 56479 - DNA, 22 bp, Homo sapiens
caggttttctggttttctttag

SEQ ID NO: 56480 - DNA, 16 bp, Homo sapiens
ggggccggtgaaggcc

SEQ ID NO: 56481 - DNA, 20 bp, Homo sapiens
gacatgaagatagggcgtgt

SEQ ID NO: 56482 - DNA, 21 bp, Homo sapiens
cagggactcatgaaaaagtat

SEQ ID NO: 56483 - DNA, 24 bp, Homo sapiens
caggcctcaccccagtgccctctc

SEQ ID NO: 56484 - DNA, 22 bp, Homo sapiens
caggatcttgaccacttgcagc

SEQ ID NO: 56485 - DNA, 23 bp, Homo sapiens
ccaaccccgggtatgggacccag

SEQ ID NO: 56486 - DNA, 24 bp, Homo sapiens
cacaggtggccttcagctggggcc

SEQ ID NO: 56487 - DNA, 18 bp, Homo sapiens
ccttcgccgtcgtctcaa

SEQ ID NO: 56488 - DNA, 16 bp, Homo sapiens
gcctcggccttccaaa

SEQ ID NO: 56489 - DNA, 22 bp, Homo sapiens
agggccgcaagccctgcaagct

SEQ ID NO: 56490 - DNA, 23 bp, Homo sapiens
aagcaaagaaatgcacaagtgaa

SEQ ID NO: 56491 - DNA, 22 bp, Homo sapiens
tgttctcttcccggaatgtcac

SEQ ID NO: 56492 - DNA, 21 bp, Homo sapiens
cccagtggacatctgcagggc

SEQ ID NO: 56493 - DNA, 23 bp, Homo sapiens
ggtgtcatccgctccgtccgagt

SEQ ID NO: 56494 - DNA, 24 bp, Homo sapiens
gagatacaccccaacccccatcct

SEQ ID NO: 56495 - DNA, 18 bp, Homo sapiens
cctggtccacagcatgga

SEQ ID NO: 56496 - DNA, 24 bp, Homo sapiens
tgtttgggctcagtaatcagctgg

SEQ ID NO: 56497 - DNA, 16 bp, Homo sapiens
cacctgcccgcccacc

SEQ ID NO: 56498 - DNA, 24 bp, Homo sapiens
acacctcttcctgctgggctactc

SEQ ID NO: 56499 - DNA, 16 bp, Homo sapiens
gctctctgcagcccac

SEQ ID NO: 56500 - DNA, 23 bp, Homo sapiens
cgggagcagctgtaccaggccat

SEQ ID NO: 56501 - DNA, 16 bp, Homo sapiens
gacacgtcaggcaacg

SEQ ID NO: 56502 - DNA, 23 bp, Homo sapiens
gtgctggtgggcaggcaggtgca

SEQ ID NO: 56503 - DNA, 24 bp, Homo sapiens
agagagcaagccctgagccattgg

SEQ ID NO: 56504 - DNA, 24 bp, Homo sapiens
gtgggcgggcaggtgcaggtgggt

SEQ ID NO: 56505 - DNA, 24 bp, Homo sapiens
cggatcaatgtcaaatgtgtcgtt

SEQ ID NO: 56506 - DNA, 21 bp, Homo sapiens
cttctctgcccacagtacctg

SEQ ID NO: 56507 - DNA, 23 bp, Homo sapiens
cagctcaggctcccaacagtgaa

SEQ ID NO: 56508 - DNA, 21 bp, Homo sapiens
gtggtgggggtgacccttgga

SEQ ID NO: 56509 - DNA, 23 bp, Homo sapiens
aagtgctggtattataggcgtga

SEQ ID NO: 56510 - DNA, 22 bp, Homo sapiens
gaggccacgtggacccggccaa

SEQ ID NO: 56511 - DNA, 24 bp, Homo sapiens
aatatggctcattcagtaaaacat

SEQ ID NO: 56512 - DNA, 19 bp, Homo sapiens
caagagggtgagatcgtcg

SEQ ID NO: 56513 - DNA, 20 bp, Homo sapiens
ctggggaagcacagggaaga

SEQ ID NO: 56514 - DNA, 21 bp, Homo sapiens
tgagcaggcagtacttgtgga

SEQ ID NO: 56515 - DNA, 24 bp, Homo sapiens
cctccccggccccctgaggccctt

SEQ ID NO: 56516 - DNA, 16 bp, Homo sapiens
tagttgctggggtgag

SEQ ID NO: 56517 - DNA, 20 bp, Homo sapiens
cccgagcggccccctccgcc

SEQ ID NO: 56518 - DNA, 16 bp, Homo sapiens
ctcacccagcaggcac

SEQ ID NO: 56519 - DNA, 21 bp, Homo sapiens
tacaagaacctcacgctcaaa

SEQ ID NO: 56520 - DNA, 16 bp, Homo sapiens
acattgaccagcctag

SEQ ID NO: 56521 - DNA, 21 bp, Homo sapiens
agggcccccccgcccgcgctg

SEQ ID NO: 56522 - DNA, 22 bp, Homo sapiens
cagtccgggatctcattattga

SEQ ID NO: 56523 - DNA, 19 bp, Homo sapiens
cacgtggcaggggacgctg

SEQ ID NO: 56524 - DNA, 23 bp, Homo sapiens
ctgccctggaactcaggagccct

SEQ ID NO: 56525 - DNA, 24 bp, Homo sapiens
gaccctcacccgagcctcctgcct

SEQ ID NO: 56526 - DNA, 16 bp, Homo sapiens
cgcacgcttgcccttg

SEQ ID NO: 56527 - DNA, 24 bp, Homo sapiens
ccattaacctccagagcctcatca

SEQ ID NO: 56528 - DNA, 21 bp, Homo sapiens
ttggcagccccaagccccaag

SEQ ID NO: 56529 - DNA, 17 bp, Homo sapiens
gtgtgctttgttgtcaa

SEQ ID NO: 56530 - DNA, 21 bp, Homo sapiens
gagtgtcttgggagcactggc

SEQ ID NO: 56531 - DNA, 24 bp, Homo sapiens
aagacactggggtgcttacactcc

SEQ ID NO: 56532 - DNA, 24 bp, Homo sapiens
tctgtcaggccacctgtcatgtgg

SEQ ID NO: 56533 - DNA, 22 bp, Homo sapiens
gacaggccagggcccctggtca

SEQ ID NO: 56534 - DNA, 20 bp, Homo sapiens
cccaactggcccccacagat

SEQ ID NO: 56535 - DNA, 24 bp, Homo sapiens
gcggattcctggggaggtcacggc

SEQ ID NO: 56536 - DNA, 23 bp, Homo sapiens
tcagcctggagacccaggcccac

SEQ ID NO: 56537 - DNA, 16 bp, Homo sapiens
gggggatctcagcaca

SEQ ID NO: 56538 - DNA, 17 bp, Homo sapiens
gttcttgactcacccca

SEQ ID NO: 56539 - DNA, 17 bp, Homo sapiens
gaggaaggacagggagc

SEQ ID NO: 56540 - DNA, 20 bp, Homo sapiens
cagccccctaggtctccagc

SEQ ID NO: 56541 - DNA, 20 bp, Homo sapiens
acacatgacgcagaagcctc

SEQ ID NO: 56542 - DNA, 24 bp, Homo sapiens
ccatgccatccttggccctacccg

SEQ ID NO: 56543 - DNA, 17 bp, Homo sapiens
aggaccctcaaagccct

SEQ ID NO: 56544 - DNA, 24 bp, Homo sapiens
cctgtttgacgtggtggtcatcct

SEQ ID NO: 56545 - DNA, 18 bp, Homo sapiens
atgaaccccacaaactcc

SEQ ID NO: 56546 - DNA, 16 bp, Homo sapiens
ggcttcctgctgcaga

SEQ ID NO: 56547 - DNA, 20 bp, Homo sapiens
ggatgtaccagccattgaca

SEQ ID NO: 56548 - DNA, 24 bp, Homo sapiens
cccgcctggccctggggcgataaa

SEQ ID NO: 56549 - DNA, 24 bp, Homo sapiens
ttggcctcgatgccgatcttcatg

SEQ ID NO: 56550 - DNA, 24 bp, Homo sapiens
ctcaccccgcctgccttctgcagg

SEQ ID NO: 56551 - DNA, 16 bp, Homo sapiens
cactgacagcagggat

SEQ ID NO: 56552 - DNA, 23 bp, Homo sapiens
catcagcctgtgggagcggctgg

SEQ ID NO: 56553 - DNA, 22 bp, Homo sapiens
cgtcaacctatctggcccagcc

SEQ ID NO: 56554 - DNA, 24 bp, Homo sapiens
cagcgatgtgctcaccatctcggg

SEQ ID NO: 56555 - DNA, 16 bp, Homo sapiens
aggaggatgctgcaga

SEQ ID NO: 56556 - DNA, 24 bp, Homo sapiens
tcctgccaacaccctgggccccag

SEQ ID NO: 56557 - DNA, 17 bp, Homo sapiens
attgtagttgtggaaga

SEQ ID NO: 56558 - DNA, 23 bp, Homo sapiens
ctcccccaggccccccaaaggaa

SEQ ID NO: 56559 - DNA, 18 bp, Homo sapiens
tttggagggtgtggagta

SEQ ID NO: 56560 - DNA, 24 bp, Homo sapiens
acttggcgagctacgacgtctgca

SEQ ID NO: 56561 - DNA, 23 bp, Homo sapiens
caggtaggaggaggaggcttgca

SEQ ID NO: 56562 - DNA, 17 bp, Homo sapiens
gatccgctacctgacct

SEQ ID NO: 56563 - DNA, 22 bp, Homo sapiens
tgggcagggccacccgcagtgt

SEQ ID NO: 56564 - DNA, 21 bp, Homo sapiens
cccactggctcccatgaccac

SEQ ID NO: 56565 - DNA, 24 bp, Homo sapiens
atccagccacagaagcagtagccc

SEQ ID NO: 56566 - DNA, 23 bp, Homo sapiens
tctgggtgcccacagctgacctg

SEQ ID NO: 56567 - DNA, 24 bp, Homo sapiens
caatgtcagggacatcaggggtta

SEQ ID NO: 56568 - DNA, 21 bp, Homo sapiens
ccaacccagatcctcatcgcc

SEQ ID NO: 56569 - DNA, 24 bp, Homo sapiens
ctcccagcagtcaccaaggggtca

SEQ ID NO: 56570 - DNA, 23 bp, Homo sapiens
ctgctgctgcgtggctgtcatct

SEQ ID NO: 56571 - DNA, 17 bp, Homo sapiens
aataatggcacagggtc

SEQ ID NO: 56572 - DNA, 24 bp, Homo sapiens
cgaccattcacatggtgaccgcag

SEQ ID NO: 56573 - DNA, 21 bp, Homo sapiens
cacaaacatgtcgtccccatt

SEQ ID NO: 56574 - DNA, 24 bp, Homo sapiens
ccagctcctagccatttgcatggg

SEQ ID NO: 56575 - DNA, 24 bp, Homo sapiens
aggtagagctgggagaagagccac

SEQ ID NO: 56576 - DNA, 19 bp, Homo sapiens
cttggctccctctgacccc

SEQ ID NO: 56577 - DNA, 21 bp, Homo sapiens
gcgatgaagaggctgagcacc

SEQ ID NO: 56578 - DNA, 16 bp, Homo sapiens
tgttctcgctcatcaa

SEQ ID NO: 56579 - DNA, 23 bp, Homo sapiens
ccgagctcagggctgggtgcatg

SEQ ID NO: 56580 - DNA, 23 bp, Homo sapiens
caggcgcagcagggccgcagcag

SEQ ID NO: 56581 - DNA, 16 bp, Homo sapiens
gttcaccctgcggtgt

SEQ ID NO: 56582 - DNA, 20 bp, Homo sapiens
gcctcttcatctacatggtg

SEQ ID NO: 56583 - DNA, 22 bp, Homo sapiens
gttctgaaccaccctctttttg

SEQ ID NO: 56584 - DNA, 24 bp, Homo sapiens
ctctgtgcaagcaaactgtggaac

SEQ ID NO: 56585 - DNA, 22 bp, Homo sapiens
gtcctggcactgtgcgatgtag

SEQ ID NO: 56586 - DNA, 24 bp, Homo sapiens
gcccggaggtgggaagcgatgcag

SEQ ID NO: 56587 - DNA, 24 bp, Homo sapiens
cagcagagaaggctgcaggccgag

SEQ ID NO: 56588 - DNA, 24 bp, Homo sapiens
aggttgggagccactttcaggctg

SEQ ID NO: 56589 - DNA, 19 bp, Homo sapiens
tccctaacctccaatctga

SEQ ID NO: 56590 - DNA, 19 bp, Homo sapiens
cagaggagagcgagctgca

SEQ ID NO: 56591 - DNA, 16 bp, Homo sapiens
aggaaggaagcaggga

SEQ ID NO: 56592 - DNA, 22 bp, Homo sapiens
caagttccgccgcgggagcggc

SEQ ID NO: 56593 - DNA, 17 bp, Homo sapiens
caacggcagtcaggtcg

SEQ ID NO: 56594 - DNA, 23 bp, Homo sapiens
gagtcccgggtctggcacattca

SEQ ID NO: 56595 - DNA, 20 bp, Homo sapiens
aaaagcaaaccctacaaata

SEQ ID NO: 56596 - DNA, 21 bp, Homo sapiens
gaaaactgacgcccctcttcc

SEQ ID NO: 56597 - DNA, 19 bp, Homo sapiens
gtccgacacgaaaggtcca

SEQ ID NO: 56598 - DNA, 17 bp, Homo sapiens
ctggtgaattgattcga

SEQ ID NO: 56599 - DNA, 20 bp, Homo sapiens
cccctctaacaagcaaataa

SEQ ID NO: 56600 - DNA, 19 bp, Homo sapiens
aatccgcactttcctggcc

SEQ ID NO: 56601 - DNA, 24 bp, Homo sapiens
ctgagtcttagtagtagcgtttta

SEQ ID NO: 56602 - DNA, 19 bp, Homo sapiens
cacaccccaccaaactccg

SEQ ID NO: 56603 - DNA, 23 bp, Homo sapiens
tctgcccccggagcaggaggctt

SEQ ID NO: 56604 - DNA, 22 bp, Homo sapiens
atcgtggggtgagtcagaggaa

SEQ ID NO: 56605 - DNA, 22 bp, Homo sapiens
tccttccattgaactgaggcca

SEQ ID NO: 56606 - DNA, 16 bp, Homo sapiens
gagacagattcgggga

SEQ ID NO: 56607 - DNA, 21 bp, Homo sapiens
gttggccgggtccagctggta

SEQ ID NO: 56608 - DNA, 16 bp, Homo sapiens
agcctccaggctcaag

SEQ ID NO: 56609 - DNA, 23 bp, Homo sapiens
ctctgccccataccctcatgacc

SEQ ID NO: 56610 - DNA, 17 bp, Homo sapiens
ctccaccttcaccatca

SEQ ID NO: 56611 - DNA, 18 bp, Homo sapiens
cacctgccggccccaggt

SEQ ID NO: 56612 - DNA, 19 bp, Homo sapiens
agaagagaaacctggcttt

SEQ ID NO: 56613 - DNA, 16 bp, Homo sapiens
tttgttgtccacttga

SEQ ID NO: 56614 - DNA, 21 bp, Homo sapiens
cttgaacttgagggtgagaag

SEQ ID NO: 56615 - DNA, 24 bp, Homo sapiens
cgtggtctcctgcaggcgggtgat

SEQ ID NO: 56616 - DNA, 16 bp, Homo sapiens
cagtttgccgtaggag

SEQ ID NO: 56617 - DNA, 24 bp, Homo sapiens
atgggcccagatgagttggggcaa

SEQ ID NO: 56618 - DNA, 17 bp, Homo sapiens
gtgcacctgctcacgct

SEQ ID NO: 56619 - DNA, 18 bp, Homo sapiens
ctccttctcaattttgcc

SEQ ID NO: 56620 - DNA, 18 bp, Homo sapiens
ctccaactcagccccgcc

SEQ ID NO: 56621 - DNA, 21 bp, Homo sapiens
ctcaggttacgtccggaatcc

SEQ ID NO: 56622 - DNA, 22 bp, Homo sapiens
tacaacctagccctgcctcctg

SEQ ID NO: 56623 - DNA, 24 bp, Homo sapiens
ccatttcggggccccagctggcca

SEQ ID NO: 56624 - DNA, 24 bp, Homo sapiens
cctgtcacggccctggccgctcct

SEQ ID NO: 56625 - DNA, 16 bp, Homo sapiens
gcactgggcggggact

SEQ ID NO: 56626 - DNA, 16 bp, Homo sapiens
ccgggtggcggcgccg

SEQ ID NO: 56627 - DNA, 24 bp, Homo sapiens
taattatggccaaatggatccccg

SEQ ID NO: 56628 - DNA, 18 bp, Homo sapiens
ctgcagccgccggacacc

SEQ ID NO: 56629 - DNA, 22 bp, Homo sapiens
ctggtagacttcaatccggtcc

SEQ ID NO: 56630 - DNA, 24 bp, Homo sapiens
tggagaacgggtcgggggcgtggg

SEQ ID NO: 56631 - DNA, 22 bp, Homo sapiens
ggaggagccccgagattgtagg

SEQ ID NO: 56632 - DNA, 22 bp, Homo sapiens
ctctccccccaggtgcaccgaa

SEQ ID NO: 56633 - DNA, 24 bp, Homo sapiens
caggacctcctgctccgccaggag

SEQ ID NO: 56634 - DNA, 24 bp, Homo sapiens
ttacccagtttctggcccaaggac

SEQ ID NO: 56635 - DNA, 18 bp, Homo sapiens
caggtggcgccctcgcac

SEQ ID NO: 56636 - DNA, 20 bp, Homo sapiens
ttcatcctcatccgttcctc

SEQ ID NO: 56637 - DNA, 24 bp, Homo sapiens
atactccgcgtccatcgtccttca

SEQ ID NO: 56638 - DNA, 22 bp, Homo sapiens
agagcaaaactccgtctcaaag

SEQ ID NO: 56639 - DNA, 16 bp, Homo sapiens
tgactgaccgctccca

SEQ ID NO: 56640 - DNA, 16 bp, Homo sapiens
tgaaagcagagaactg

SEQ ID NO: 56641 - DNA, 23 bp, Homo sapiens
ctggggttggggttgactgccct

SEQ ID NO: 56642 - DNA, 18 bp, Homo sapiens
gaggaccctggctcggat

SEQ ID NO: 56643 - DNA, 16 bp, Homo sapiens
acctcgatagaaaggg

SEQ ID NO: 56644 - DNA, 23 bp, Homo sapiens
tctcaggctgctgcccccctggg

SEQ ID NO: 56645 - DNA, 18 bp, Homo sapiens
gaaactactatccagtca

SEQ ID NO: 56646 - DNA, 19 bp, Homo sapiens
tgggagttgaagggtgaaa

SEQ ID NO: 56647 - DNA, 23 bp, Homo sapiens
cccaaccccaggcgggattatcg

SEQ ID NO: 56648 - DNA, 17 bp, Homo sapiens
tgcagataaggggtgat

SEQ ID NO: 56649 - DNA, 22 bp, Homo sapiens
aaaaaaaaaaaaaaaaaagagt

SEQ ID NO: 56650 - DNA, 17 bp, Homo sapiens
accgtgatgtaaatccg

SEQ ID NO: 56651 - DNA, 16 bp, Homo sapiens
cgagatcgcgccactg

SEQ ID NO: 56652 - DNA, 20 bp, Homo sapiens
gttcagtttccaggtgggtc

SEQ ID NO: 56653 - DNA, 24 bp, Homo sapiens
gattacaggcgtgagccactgcac

SEQ ID NO: 56654 - DNA, 19 bp, Homo sapiens
gacacaccgctggagacaa

SEQ ID NO: 56655 - DNA, 19 bp, Homo sapiens
cccacactcatgtaatcag

SEQ ID NO: 56656 - DNA, 24 bp, Homo sapiens
caaccttgccatcccattgggtac

SEQ ID NO: 56657 - DNA, 23 bp, Homo sapiens
cagaccaccccctcagtgctctc

SEQ ID NO: 56658 - DNA, 21 bp, Homo sapiens
tgagtggcacaggctgggaga

SEQ ID NO: 56659 - DNA, 22 bp, Homo sapiens
ccattgctgtctgtgtagaagc

SEQ ID NO: 56660 - DNA, 23 bp, Homo sapiens
gtacccaggacagcggcacctgg

SEQ ID NO: 56661 - DNA, 23 bp, Homo sapiens
gacctccttcccccaggtgtcgc

SEQ ID NO: 56662 - DNA, 20 bp, Homo sapiens
tggtgcaggaggtgcaccag

SEQ ID NO: 56663 - DNA, 24 bp, Homo sapiens
taaacccctctgcccttgcttcca

SEQ ID NO: 56664 - DNA, 22 bp, Homo sapiens
ggactcacctctgctcaggtac

SEQ ID NO: 56665 - DNA, 24 bp, Homo sapiens
tatcggccccaccgaccactctag

SEQ ID NO: 56666 - DNA, 23 bp, Homo sapiens
tgactgaaggttgaccttgatgt

SEQ ID NO: 56667 - DNA, 19 bp, Homo sapiens
aacaccaagctgagaagtt

SEQ ID NO: 56668 - DNA, 22 bp, Homo sapiens
aaaagagcgagactccgtctca

SEQ ID NO: 56669 - DNA, 16 bp, Homo sapiens
tgagccgctgggctca

SEQ ID NO: 56670 - DNA, 20 bp, Homo sapiens
gcccactgatctgaaggaaa

SEQ ID NO: 56671 - DNA, 18 bp, Homo sapiens
tgacaacgaaagtgacca

SEQ ID NO: 56672 - DNA, 22 bp, Homo sapiens
accctcttgggctccataactt

SEQ ID NO: 56673 - DNA, 19 bp, Homo sapiens
ctagggccccttacctgac

SEQ ID NO: 56674 - DNA, 24 bp, Homo sapiens
cctgaccttcaccaggtggatctg

SEQ ID NO: 56675 - DNA, 16 bp, Homo sapiens
ttcttctggtaaggga

SEQ ID NO: 56676 - DNA, 21 bp, Homo sapiens
gtctgaagatgtaggcacctg

SEQ ID NO: 56677 - DNA, 17 bp, Homo sapiens
ggctgttgatggagatt

SEQ ID NO: 56678 - DNA, 19 bp, Homo sapiens
cctggagttggggcaggtg

SEQ ID NO: 56679 - DNA, 24 bp, Homo sapiens
acaaacccatctgtggaccctttt

SEQ ID NO: 56680 - DNA, 17 bp, Homo sapiens
caccctcaggcctggtg

SEQ ID NO: 56681 - DNA, 25 bp, Homo sapiens
gtctcaaaaaaaaaaaaagaaaaaa

SEQ ID NO: 56682 - DNA, 19 bp, Homo sapiens
aggagttgctgattcatgt

SEQ ID NO: 56683 - DNA, 16 bp, Homo sapiens
gtgagccaagattgca

SEQ ID NO: 56684 - DNA, 17 bp, Homo sapiens
aaggacactgaggctca

SEQ ID NO: 56685 - DNA, 20 bp, Homo sapiens
cacagcccatccccagaaga

SEQ ID NO: 56686 - DNA, 24 bp, Homo sapiens
gttgtgacaggaggtcataagcct

SEQ ID NO: 56687 - DNA, 19 bp, Homo sapiens
gcttcagcacctattcagt

SEQ ID NO: 56688 - DNA, 23 bp, Homo sapiens
atgacacttcaaatttgtcacag

SEQ ID NO: 56689 - DNA, 19 bp, Homo sapiens
agctcagacagccaggcgc

SEQ ID NO: 56690 - DNA, 19 bp, Homo sapiens
ttaaagcaggggaccagga

SEQ ID NO: 56691 - DNA, 24 bp, Homo sapiens
tttccatgggtactcttgactcag

SEQ ID NO: 56692 - DNA, 17 bp, Homo sapiens
agcgaggcacctgggct

SEQ ID NO: 56693 - DNA, 18 bp, Homo sapiens
cccatctcaggactcttt

SEQ ID NO: 56694 - DNA, 24 bp, Homo sapiens
gaggctgagaacagcagctccgga

SEQ ID NO: 56695 - DNA, 17 bp, Homo sapiens
ctctgcaatcatttcct

SEQ ID NO: 56696 - DNA, 23 bp, Homo sapiens
tgatattaaggggcagagggaga

SEQ ID NO: 56697 - DNA, 21 bp, Homo sapiens
tacggctgccggtcagcgaag

SEQ ID NO: 56698 - DNA, 17 bp, Homo sapiens
gaagcaggcgatatcca

SEQ ID NO: 56699 - DNA, 18 bp, Homo sapiens
ccccagttccaggtcatc

SEQ ID NO: 56700 - DNA, 18 bp, Homo sapiens
gggggaatattcgttgtt

SEQ ID NO: 56701 - DNA, 17 bp, Homo sapiens
ctgtgcaaagtgggtgg

SEQ ID NO: 56702 - DNA, 20 bp, Homo sapiens
gtccttcacaacgaaaacgc

SEQ ID NO: 56703 - DNA, 20 bp, Homo sapiens
aacgcatctcgagggggctt

SEQ ID NO: 56704 - DNA, 17 bp, Homo sapiens
caggggattataaacga

SEQ ID NO: 56705 - DNA, 24 bp, Homo sapiens
ggtcctagtgtggtcacggcactt

SEQ ID NO: 56706 - DNA, 19 bp, Homo sapiens
acagctaaacatcagcatc

SEQ ID NO: 56707 - DNA, 19 bp, Homo sapiens
cagcttcgcagcccacgta

SEQ ID NO: 56708 - DNA, 16 bp, Homo sapiens
cttctgagcaacgcgc

SEQ ID NO: 56709 - DNA, 23 bp, Homo sapiens
aactaccccctctaaagcccatc

SEQ ID NO: 56710 - DNA, 22 bp, Homo sapiens
tgaggagaggggaggagtcagg

SEQ ID NO: 56711 - DNA, 24 bp, Homo sapiens
cgccgtctggctgagcgggcagat

SEQ ID NO: 56712 - DNA, 17 bp, Homo sapiens
ttttggggcgactcttg

SEQ ID NO: 56713 - DNA, 24 bp, Homo sapiens
atctttgaagcctctgagccgcgc

SEQ ID NO: 56714 - DNA, 18 bp, Homo sapiens
gccagcttgcggcaggct

SEQ ID NO: 56715 - DNA, 22 bp, Homo sapiens
ccacgagcccttgtagccccgc

SEQ ID NO: 56716 - DNA, 18 bp, Homo sapiens
cagcatcacgacgccgtc

SEQ ID NO: 56717 - DNA, 17 bp, Homo sapiens
caggccctggccccgcc

SEQ ID NO: 56718 - DNA, 22 bp, Homo sapiens
ctcagctgagtcccacagaacc

SEQ ID NO: 56719 - DNA, 23 bp, Homo sapiens
cgcgcacctcgcaaggcccccag

SEQ ID NO: 56720 - DNA, 23 bp, Homo sapiens
ttaaagcctctaagaatcctgcc

SEQ ID NO: 56721 - DNA, 23 bp, Homo sapiens
cacgtgctggcgggaggtgccgc

SEQ ID NO: 56722 - DNA, 23 bp, Homo sapiens
tctctcaaagtgctgggattaca

SEQ ID NO: 56723 - DNA, 16 bp, Homo sapiens
gtgcacccctcagtaa

SEQ ID NO: 56724 - DNA, 22 bp, Homo sapiens
cactgcactccagcctgggaga

SEQ ID NO: 56725 - DNA, 22 bp, Homo sapiens
aaaaaaagaagaaactcgaggg

SEQ ID NO: 56726 - DNA, 21 bp, Homo sapiens
ggcatgcagccccgaggcccg

SEQ ID NO: 56727 - DNA, 24 bp, Homo sapiens
ttcccctcttgggcccgacactta

SEQ ID NO: 56728 - DNA, 21 bp, Homo sapiens
aacgctacgagcgcctcagct

SEQ ID NO: 56729 - DNA, 20 bp, Homo sapiens
tggccgccaggcccaccagc

SEQ ID NO: 56730 - DNA, 24 bp, Homo sapiens
tcttcccttacgcggatggccccc

SEQ ID NO: 56731 - DNA, 19 bp, Homo sapiens
tatgttggggcgcccagcc

SEQ ID NO: 56732 - DNA, 24 bp, Homo sapiens
tgggtcatgaccctgccctcaatg

SEQ ID NO: 56733 - DNA, 21 bp, Homo sapiens
ctacccacctgcaggaagttg

SEQ ID NO: 56734 - DNA, 18 bp, Homo sapiens
cacctggtatttggggaa

SEQ ID NO: 56735 - DNA, 20 bp, Homo sapiens
gaaaagtaaccggtccagaa

SEQ ID NO: 56736 - DNA, 18 bp, Homo sapiens
cagtgtccatgttctcta

SEQ ID NO: 56737 - DNA, 24 bp, Homo sapiens
atgtttcactgacctacagcggca

SEQ ID NO: 56738 - DNA, 24 bp, Homo sapiens
caggaaggtgcggactcccgaggg

SEQ ID NO: 56739 - DNA, 16 bp, Homo sapiens
caagctccccagtttc

SEQ ID NO: 56740 - DNA, 17 bp, Homo sapiens
aaactgaacctatggga

SEQ ID NO: 56741 - DNA, 24 bp, Homo sapiens
aggtaacaagcgggggtggagtag

SEQ ID NO: 56742 - DNA, 18 bp, Homo sapiens
gacttcagccaaaattca

SEQ ID NO: 56743 - DNA, 23 bp, Homo sapiens
ttgttttgagctgctaagtgtgt

SEQ ID NO: 56744 - DNA, 16 bp, Homo sapiens
aatgccaacatgtggt

SEQ ID NO: 56745 - DNA, 23 bp, Homo sapiens
atagaaaacaaagacagcactga

SEQ ID NO: 56746 - DNA, 16 bp, Homo sapiens
tgcagggccggtatta

SEQ ID NO: 56747 - DNA, 21 bp, Homo sapiens
acatgtgcacaagggtaccac

SEQ ID NO: 56748 - DNA, 20 bp, Homo sapiens
aacacagctatacacaggga

SEQ ID NO: 56749 - DNA, 23 bp, Homo sapiens
atgagcttgtcaaggttcttgaa

SEQ ID NO: 56750 - DNA, 17 bp, Homo sapiens
gtgccatacccccaccc

SEQ ID NO: 56751 - DNA, 18 bp, Homo sapiens
tcatcacagtgtggttgg

SEQ ID NO: 56752 - DNA, 20 bp, Homo sapiens
cagtgagccgagatcgcacc

SEQ ID NO: 56753 - DNA, 16 bp, Homo sapiens
gagtacaacgccaagg

SEQ ID NO: 56754 - DNA, 23 bp, Homo sapiens
aaaaaaattaaaaataaggagaa

SEQ ID NO: 56755 - DNA, 16 bp, Homo sapiens
aggaatctgtgctggg

SEQ ID NO: 56756 - DNA, 18 bp, Homo sapiens
ttgtatataccggactcg

SEQ ID NO: 56757 - DNA, 22 bp, Homo sapiens
gtgatgggccaccccttgaact

SEQ ID NO: 56758 - DNA, 20 bp, Homo sapiens
ttaggaagtaatcgaccagc

SEQ ID NO: 56759 - DNA, 24 bp, Homo sapiens
acacaaattctgaagcccatcctg

SEQ ID NO: 56760 - DNA, 17 bp, Homo sapiens
ctgatcgacacacagca

SEQ ID NO: 56761 - DNA, 18 bp, Homo sapiens
aattcctatagtctggga

SEQ ID NO: 56762 - DNA, 16 bp, Homo sapiens
gcctgaagcccccgac

SEQ ID NO: 56763 - DNA, 24 bp, Homo sapiens
caaaaggaaatgcagggcctttgt

SEQ ID NO: 56764 - DNA, 18 bp, Homo sapiens
caagataagtgggtacgg

SEQ ID NO: 56765 - DNA, 22 bp, Homo sapiens
gatatcaagcccagggcccttc

SEQ ID NO: 56766 - DNA, 21 bp, Homo sapiens
ttttcctccctcatccccaga

SEQ ID NO: 56767 - DNA, 16 bp, Homo sapiens
ctaccagtgaagaggt

SEQ ID NO: 56768 - DNA, 23 bp, Homo sapiens
cctgcccctcccaagcagagggg

SEQ ID NO: 56769 - DNA, 19 bp, Homo sapiens
tgctccatctccagcttct

SEQ ID NO: 56770 - DNA, 18 bp, Homo sapiens
gggatcataggcaagagc

SEQ ID NO: 56771 - DNA, 22 bp, Homo sapiens
agaagccgtcgaagcccatctg

SEQ ID NO: 56772 - DNA, 24 bp, Homo sapiens
aaaagccactggctttacggctca

SEQ ID NO: 56773 - DNA, 16 bp, Homo sapiens
ggcacattgacccctt

SEQ ID NO: 56774 - DNA, 20 bp, Homo sapiens
ctggtccttgtgagattgca

SEQ ID NO: 56775 - DNA, 22 bp, Homo sapiens
accagatgacacttgggctgcg

SEQ ID NO: 56776 - DNA, 23 bp, Homo sapiens
agagtgagtgaagaagtgggccc

SEQ ID NO: 56777 - DNA, 23 bp, Homo sapiens
tcgccaatggtggctgggtgatg

SEQ ID NO: 56778 - DNA, 21 bp, Homo sapiens
ctgctcccgagagtggccgaa

SEQ ID NO: 56779 - DNA, 24 bp, Homo sapiens
tcccactcctggctctgaccgctg

SEQ ID NO: 56780 - DNA, 21 bp, Homo sapiens
gccaaatgtgtcctccagaaa

SEQ ID NO: 56781 - DNA, 16 bp, Homo sapiens
ccagaaatgtgtacac

SEQ ID NO: 56782 - DNA, 19 bp, Homo sapiens
gtggctgcctcatcgttca

SEQ ID NO: 56783 - DNA, 23 bp, Homo sapiens
cagggggcctctttcccatatct

SEQ ID NO: 56784 - DNA, 17 bp, Homo sapiens
cacacaggaagtcgtgc

SEQ ID NO: 56785 - DNA, 18 bp, Homo sapiens
aggcggagcgacacgcat

SEQ ID NO: 56786 - DNA, 16 bp, Homo sapiens
gtcgcttcatttacgt

SEQ ID NO: 56787 - DNA, 22 bp, Homo sapiens
accagagatgcagaagcagaag

SEQ ID NO: 56788 - DNA, 19 bp, Homo sapiens
cacgccggtgtgcagtaca

SEQ ID NO: 56789 - DNA, 20 bp, Homo sapiens
ggcgcacaaggtctcgcacg

SEQ ID NO: 56790 - DNA, 16 bp, Homo sapiens
ctctgctgttccctga

SEQ ID NO: 56791 - DNA, 20 bp, Homo sapiens
gggagaagaaggcaatctcc

SEQ ID NO: 56792 - DNA, 23 bp, Homo sapiens
tagggtggggccagtgctaccct

SEQ ID NO: 56793 - DNA, 21 bp, Homo sapiens
agatgaccgagtccaggatgt

SEQ ID NO: 56794 - DNA, 22 bp, Homo sapiens
gatggggactggtccctgggat

SEQ ID NO: 56795 - DNA, 16 bp, Homo sapiens
taacagggataaggct

SEQ ID NO: 56796 - DNA, 23 bp, Homo sapiens
acatgatgacgtgggctggctca

SEQ ID NO: 56797 - DNA, 18 bp, Homo sapiens
caaaccctggatattagg

SEQ ID NO: 56798 - DNA, 23 bp, Homo sapiens
gtgcagacatgccccacagtgca

SEQ ID NO: 56799 - DNA, 18 bp, Homo sapiens
ttacagggaccatgggga

SEQ ID NO: 56800 - DNA, 16 bp, Homo sapiens
ctgcagcccccgacct

SEQ ID NO: 56801 - DNA, 22 bp, Homo sapiens
aaaagtactggtccacggtttt

SEQ ID NO: 56802 - DNA, 20 bp, Homo sapiens
ctcctctgcacataggcgag

SEQ ID NO: 56803 - DNA, 20 bp, Homo sapiens
gttcagcatgttcggctgca

SEQ ID NO: 56804 - DNA, 22 bp, Homo sapiens
tttgttgctggcggctgccggt

SEQ ID NO: 56805 - DNA, 22 bp, Homo sapiens
agaccacactgtcatatcatca

SEQ ID NO: 56806 - DNA, 16 bp, Homo sapiens
ccatgtcccgcgccct

SEQ ID NO: 56807 - DNA, 24 bp, Homo sapiens
cacctctagactgtattctgggtt

SEQ ID NO: 56808 - DNA, 21 bp, Homo sapiens
ccatgggcgcctacgcgcggg

SEQ ID NO: 56809 - DNA, 24 bp, Homo sapiens
cactcacctcgtatcccccggccc

SEQ ID NO: 56810 - DNA, 22 bp, Homo sapiens
ctgggggcggggcgtttgcccg

SEQ ID NO: 56811 - DNA, 23 bp, Homo sapiens
gaggcgggagcggtggccgcagg

SEQ ID NO: 56812 - DNA, 19 bp, Homo sapiens
ctccagaccgcgccctggc

SEQ ID NO: 56813 - DNA, 21 bp, Homo sapiens
ccgcgagcgcagacccccgaa

SEQ ID NO: 56814 - DNA, 21 bp, Homo sapiens
tccgcggctcagcagccgcac

SEQ ID NO: 56815 - DNA, 24 bp, Homo sapiens
gtgaaccgggaggtactaccaggt

SEQ ID NO: 56816 - DNA, 24 bp, Homo sapiens
cgaccccacactgaccggtctgcg

SEQ ID NO: 56817 - DNA, 18 bp, Homo sapiens
tgacacccccgctcctgt

SEQ ID NO: 56818 - DNA, 24 bp, Homo sapiens
aaagtcaccccggaaagtccctaa

SEQ ID NO: 56819 - DNA, 22 bp, Homo sapiens
gagcatggccctgagaggcgtc

SEQ ID NO: 56820 - DNA, 24 bp, Homo sapiens
cttacacttagccagttggctctg

SEQ ID NO: 56821 - DNA, 24 bp, Homo sapiens
cttcgcacgtgggtctcgtcggcg

SEQ ID NO: 56822 - DNA, 16 bp, Homo sapiens
ctgcggcagacagaca

SEQ ID NO: 56823 - DNA, 24 bp, Homo sapiens
aaggagggaggaactgggggttta

SEQ ID NO: 56824 - DNA, 16 bp, Homo sapiens
ctggccacgaccctgc

SEQ ID NO: 56825 - DNA, 24 bp, Homo sapiens
gcagagaaaggcgggagaacacag

SEQ ID NO: 56826 - DNA, 23 bp, Homo sapiens
gagtgcgctgtgcctgcggggcc

SEQ ID NO: 56827 - DNA, 22 bp, Homo sapiens
gtcagctgctcctccagcacca

SEQ ID NO: 56828 - DNA, 22 bp, Homo sapiens
gcactagccggggggcgacatg

SEQ ID NO: 56829 - DNA, 21 bp, Homo sapiens
catgagtctctcctggcagta

SEQ ID NO: 56830 - DNA, 20 bp, Homo sapiens
cagtgatcttgcggactgga

SEQ ID NO: 56831 - DNA, 22 bp, Homo sapiens
cagtctcagggcacccaccagc

SEQ ID NO: 56832 - DNA, 21 bp, Homo sapiens
gagtttgactggcaggacccg

SEQ ID NO: 56833 - DNA, 21 bp, Homo sapiens
gaagccccagccccaaggaca

SEQ ID NO: 56834 - DNA, 24 bp, Homo sapiens
tcatcagggacaccttccgcacct

SEQ ID NO: 56835 - DNA, 17 bp, Homo sapiens
tgaaaaactgcaaaggg

SEQ ID NO: 56836 - DNA, 24 bp, Homo sapiens
atcgcaacgaaggtgggcgggctg

SEQ ID NO: 56837 - DNA, 18 bp, Homo sapiens
tacctttgatggtggggc

SEQ ID NO: 56838 - DNA, 16 bp, Homo sapiens
acctcaaggcccctct

SEQ ID NO: 56839 - DNA, 24 bp, Homo sapiens
gagggaaggaggaagaggctttca

SEQ ID NO: 56840 - DNA, 16 bp, Homo sapiens
aatttgggcactggtc

SEQ ID NO: 56841 - DNA, 19 bp, Homo sapiens
aaaggaaagaaaaggaaaa

SEQ ID NO: 56842 - DNA, 24 bp, Homo sapiens
atgggggagttgggtgtgctgggc

SEQ ID NO: 56843 - DNA, 16 bp, Homo sapiens
cataggccacagacga

SEQ ID NO: 56844 - DNA, 24 bp, Homo sapiens
ctcagctagggccagcttggtgcc

SEQ ID NO: 56845 - DNA, 16 bp, Homo sapiens
ggactggacactcatc

SEQ ID NO: 56846 - DNA, 18 bp, Homo sapiens
ctgggcagggccctgttc

SEQ ID NO: 56847 - DNA, 16 bp, Homo sapiens
tacttctgccgctgtt

SEQ ID NO: 56848 - DNA, 23 bp, Homo sapiens
caggatatggctgtgctggggtt

SEQ ID NO: 56849 - DNA, 17 bp, Homo sapiens
gacctcagagactgtct

SEQ ID NO: 56850 - DNA, 24 bp, Homo sapiens
gtggacagtggctacaggtcggcg

SEQ ID NO: 56851 - DNA, 22 bp, Homo sapiens
ttatgctatctttgagataggg

SEQ ID NO: 56852 - DNA, 23 bp, Homo sapiens
ctatgcctatggcagcgaggaac

SEQ ID NO: 56853 - DNA, 16 bp, Homo sapiens
cagggatcagatctcc

SEQ ID NO: 56854 - DNA, 24 bp, Homo sapiens
tctggaactcctgacctcaattga

SEQ ID NO: 56855 - DNA, 24 bp, Homo sapiens
gtctccatgctgctggggtcactt

SEQ ID NO: 56856 - DNA, 23 bp, Homo sapiens
tgacaggcgtgagccactgcacc

SEQ ID NO: 56857 - DNA, 17 bp, Homo sapiens
gtcccattgagggtgta

SEQ ID NO: 56858 - DNA, 24 bp, Homo sapiens
gggaccaggcagccttgtgacttt

SEQ ID NO: 56859 - DNA, 21 bp, Homo sapiens
gaccagtgcccctttgcccct

SEQ ID NO: 56860 - DNA, 16 bp, Homo sapiens
cacagagcccaacagc

SEQ ID NO: 56861 - DNA, 21 bp, Homo sapiens
actacaaacagatcggccata

SEQ ID NO: 56862 - DNA, 16 bp, Homo sapiens
ctcatccaacaagagc

SEQ ID NO: 56863 - DNA, 16 bp, Homo sapiens
cccttctccagcagga

SEQ ID NO: 56864 - DNA, 20 bp, Homo sapiens
gtgggcaggtggtgaacagg

SEQ ID NO: 56865 - DNA, 23 bp, Homo sapiens
atgatcatgcctgtggctgaggc

SEQ ID NO: 56866 - DNA, 16 bp, Homo sapiens
gatcacgaactcgcct

SEQ ID NO: 56867 - DNA, 18 bp, Homo sapiens
ctggatgcaccagggagc

SEQ ID NO: 56868 - DNA, 21 bp, Homo sapiens
aagatggctgcattcggggct

SEQ ID NO: 56869 - DNA, 17 bp, Homo sapiens
aaagccgcatccgcagg

SEQ ID NO: 56870 - DNA, 24 bp, Homo sapiens
cccaggatccagggcaagttctcg

SEQ ID NO: 56871 - DNA, 21 bp, Homo sapiens
aatcaccactgtgtgggctcc

SEQ ID NO: 56872 - DNA, 16 bp, Homo sapiens
agaggagaatgtgctc

SEQ ID NO: 56873 - DNA, 24 bp, Homo sapiens
gcaaaccgagtgagcaggcaccga

SEQ ID NO: 56874 - DNA, 23 bp, Homo sapiens
aagcacgccccacgcgatgccgt

SEQ ID NO: 56875 - DNA, 23 bp, Homo sapiens
ctgagtccccctgcgtggggtgg

SEQ ID NO: 56876 - DNA, 19 bp, Homo sapiens
acacacctgtcgagggcgt

SEQ ID NO: 56877 - DNA, 21 bp, Homo sapiens
cataggccctcttggtgtctc

SEQ ID NO: 56878 - DNA, 20 bp, Homo sapiens
ggtatagagagtgaaaccca

SEQ ID NO: 56879 - DNA, 24 bp, Homo sapiens
tcggctgcctgaacaacgcccggt

SEQ ID NO: 56880 - DNA, 19 bp, Homo sapiens
ctggtcattccagagcaag

SEQ ID NO: 56881 - DNA, 24 bp, Homo sapiens
tctgcttgcacacagcccggcagt

SEQ ID NO: 56882 - DNA, 24 bp, Homo sapiens
agcagctgtgggctgagtcaacgg

SEQ ID NO: 56883 - DNA, 18 bp, Homo sapiens
gtaatctcagtgagcatg

SEQ ID NO: 56884 - DNA, 24 bp, Homo sapiens
gggaaggcgtcctggagcaggggg

SEQ ID NO: 56885 - DNA, 24 bp, Homo sapiens
ccacacagcccctacttgtcctgg

SEQ ID NO: 56886 - DNA, 24 bp, Homo sapiens
tcgctcttaccctgccattgccca

SEQ ID NO: 56887 - DNA, 21 bp, Homo sapiens
ctccaggaaggacacaaggtc

SEQ ID NO: 56888 - DNA, 24 bp, Homo sapiens
aaccagctgattcagaagaagctg

SEQ ID NO: 56889 - DNA, 23 bp, Homo sapiens
tcaaggacaagagggacagcaga

SEQ ID NO: 56890 - DNA, 24 bp, Homo sapiens
gcctgcagctcggccgcttgaagg

SEQ ID NO: 56891 - DNA, 18 bp, Homo sapiens
tcttcagcagagaaacca

SEQ ID NO: 56892 - DNA, 21 bp, Homo sapiens
gacagccccactggtccctca

SEQ ID NO: 56893 - DNA, 16 bp, Homo sapiens
ccccagcatgtctcgg

SEQ ID NO: 56894 - DNA, 20 bp, Homo sapiens
tttgcttggagcatcgggat

SEQ ID NO: 56895 - DNA, 22 bp, Homo sapiens
ggtgttcacggcctccaggttc

SEQ ID NO: 56896 - DNA, 22 bp, Homo sapiens
ctcccagggctgcccccgagat

SEQ ID NO: 56897 - DNA, 16 bp, Homo sapiens
ccccagacactgaggc

SEQ ID NO: 56898 - DNA, 23 bp, Homo sapiens
tggacatcgcccgccaggcccga

SEQ ID NO: 56899 - DNA, 24 bp, Homo sapiens
aggtcacactgtcacttagtgata

SEQ ID NO: 56900 - DNA, 17 bp, Homo sapiens
cggcacgccatgaacct

SEQ ID NO: 56901 - DNA, 20 bp, Homo sapiens
ttctcctggagactgtcact

SEQ ID NO: 56902 - DNA, 20 bp, Homo sapiens
ctggattcccgtgatagctc

SEQ ID NO: 56903 - DNA, 24 bp, Homo sapiens
tctgttggtctgtacttctgaagc

SEQ ID NO: 56904 - DNA, 17 bp, Homo sapiens
aggggcttgagagtttc

SEQ ID NO: 56905 - DNA, 20 bp, Homo sapiens
gaagttgtgagctatgaaaa

SEQ ID NO: 56906 - DNA, 17 bp, Homo sapiens
ctttctaagctcagagc

SEQ ID NO: 56907 - DNA, 18 bp, Homo sapiens
cgccctgatccttgggag

SEQ ID NO: 56908 - DNA, 23 bp, Homo sapiens
ttcagaagggaaattttgatatt

SEQ ID NO: 56909 - DNA, 16 bp, Homo sapiens
agccgctccatcaggg

SEQ ID NO: 56910 - DNA, 16 bp, Homo sapiens
gagacgctctacagag

SEQ ID NO: 56911 - DNA, 19 bp, Homo sapiens
gaccgtaggagcgctgtgc

SEQ ID NO: 56912 - DNA, 17 bp, Homo sapiens
caagagaagctgctatt

SEQ ID NO: 56913 - DNA, 23 bp, Homo sapiens
tgagagacactgatttttaaata

SEQ ID NO: 56914 - DNA, 16 bp, Homo sapiens
actcagtgtgaggggg

SEQ ID NO: 56915 - DNA, 23 bp, Homo sapiens
ttaaaaagaagatggaattctct

SEQ ID NO: 56916 - DNA, 24 bp, Homo sapiens
ggaacccgattctctgcccttcga

SEQ ID NO: 56917 - DNA, 24 bp, Homo sapiens
tctcctgacaccaagtccctttgg

SEQ ID NO: 56918 - DNA, 22 bp, Homo sapiens
tatcaggatccaagaggaatct

SEQ ID NO: 56919 - DNA, 19 bp, Homo sapiens
gagaccagtggagtgtaaa

SEQ ID NO: 56920 - DNA, 17 bp, Homo sapiens
gttctaactccactttt

SEQ ID NO: 56921 - DNA, 16 bp, Homo sapiens
cagatgtcccctcagc

SEQ ID NO: 56922 - DNA, 16 bp, Homo sapiens
taagcaggggcatgta

SEQ ID NO: 56923 - DNA, 16 bp, Homo sapiens
ccggccacctggtcat

SEQ ID NO: 56924 - DNA, 19 bp, Homo sapiens
tcacactccttttttgtat

SEQ ID NO: 56925 - DNA, 17 bp, Homo sapiens
tgggattacaggcatgg

SEQ ID NO: 56926 - DNA, 16 bp, Homo sapiens
cccccgtctggagcct

SEQ ID NO: 56927 - DNA, 16 bp, Homo sapiens
ctctttgttacagcag

SEQ ID NO: 56928 - DNA, 18 bp, Homo sapiens
caggtgaagatgaggata

SEQ ID NO: 56929 - DNA, 16 bp, Homo sapiens
cagcactagccaggaa

SEQ ID NO: 56930 - DNA, 16 bp, Homo sapiens
gacgcctggactgggt

SEQ ID NO: 56931 - DNA, 22 bp, Homo sapiens
acttcatcgtagaggggtcccc

SEQ ID NO: 56932 - DNA, 21 bp, Homo sapiens
gaggaggtgtcttattcccga

SEQ ID NO: 56933 - DNA, 24 bp, Homo sapiens
catacaagtgcccagggaaggcca

SEQ ID NO: 56934 - DNA, 16 bp, Homo sapiens
aggcagagccgtatta

SEQ ID NO: 56935 - DNA, 16 bp, Homo sapiens
gagacacgatcaaggc

SEQ ID NO: 56936 - DNA, 22 bp, Homo sapiens
cagtggggtcagaggatggaaa

SEQ ID NO: 56937 - DNA, 17 bp, Homo sapiens
tggtcctaactcacctc

SEQ ID NO: 56938 - DNA, 17 bp, Homo sapiens
gactgaagccctgccgt

SEQ ID NO: 56939 - DNA, 24 bp, Homo sapiens
ctgggggctgaagtccctcaggga

SEQ ID NO: 56940 - DNA, 16 bp, Homo sapiens
tcagagctccacggta

SEQ ID NO: 56941 - DNA, 18 bp, Homo sapiens
cacacgcaaaacaaacaa

SEQ ID NO: 56942 - DNA, 16 bp, Homo sapiens
gaagaggaccgagtca

SEQ ID NO: 56943 - DNA, 23 bp, Homo sapiens
gggcaatgatcaacctgatgcta

SEQ ID NO: 56944 - DNA, 24 bp, Homo sapiens
gagggaggtttgggggagactggt

SEQ ID NO: 56945 - DNA, 16 bp, Homo sapiens
agggccacccccactt

SEQ ID NO: 56946 - DNA, 16 bp, Homo sapiens
gaagacagaggcaggg

SEQ ID NO: 56947 - DNA, 16 bp, Homo sapiens
tattcgttcctgactc

SEQ ID NO: 56948 - DNA, 16 bp, Homo sapiens
ggtggggggcttgcat

SEQ ID NO: 56949 - DNA, 17 bp, Homo sapiens
gaagttgagtgctgccc

SEQ ID NO: 56950 - DNA, 21 bp, Homo sapiens
gtggagacccgagggtgatag

SEQ ID NO: 56951 - DNA, 22 bp, Homo sapiens
ttacagaaaaatatccccactt

SEQ ID NO: 56952 - DNA, 18 bp, Homo sapiens
agcggagactcaggcgtc

SEQ ID NO: 56953 - DNA, 24 bp, Homo sapiens
aaacaggaataaagggctcagtga

SEQ ID NO: 56954 - DNA, 24 bp, Homo sapiens
gtgctgttcgctcttggggggctt

SEQ ID NO: 56955 - DNA, 24 bp, Homo sapiens
tatgcagcaaccacagggttccct

SEQ ID NO: 56956 - DNA, 22 bp, Homo sapiens
gtctgggattcactgaggggta

SEQ ID NO: 56957 - DNA, 23 bp, Homo sapiens
gtctctcctcaccctcagcaaga

SEQ ID NO: 56958 - DNA, 23 bp, Homo sapiens
agggacttggtcagggctacact

SEQ ID NO: 56959 - DNA, 16 bp, Homo sapiens
tggagaggagcagaag

SEQ ID NO: 56960 - DNA, 24 bp, Homo sapiens
ggtgggcagaaagggtgggcacag

SEQ ID NO: 56961 - DNA, 24 bp, Homo sapiens
tgatcacatgccttggcctcccaa

SEQ ID NO: 56962 - DNA, 22 bp, Homo sapiens
accagccttctggagaacctga

SEQ ID NO: 56963 - DNA, 19 bp, Homo sapiens
cagaactaagtcgttaagc

SEQ ID NO: 56964 - DNA, 21 bp, Homo sapiens
atttaaagcttatctcagatt

SEQ ID NO: 56965 - DNA, 20 bp, Homo sapiens
gaggttccattctcagggga

SEQ ID NO: 56966 - DNA, 24 bp, Homo sapiens
taagcagtcatataccagttccca

SEQ ID NO: 56967 - DNA, 18 bp, Homo sapiens
tctgtgggcagctggtct

SEQ ID NO: 56968 - DNA, 21 bp, Homo sapiens
ctgagtttcaatctcatcttt

SEQ ID NO: 56969 - DNA, 16 bp, Homo sapiens
agtggactggctgaca

SEQ ID NO: 56970 - DNA, 21 bp, Homo sapiens
gcctcagtaactcatcataaa

SEQ ID NO: 56971 - DNA, 16 bp, Homo sapiens
tggtctacagccttct

SEQ ID NO: 56972 - DNA, 24 bp, Homo sapiens
ccctacacatcctctgaggaatac

SEQ ID NO: 56973 - DNA, 23 bp, Homo sapiens
cctggggactccagggttccact

SEQ ID NO: 56974 - DNA, 17 bp, Homo sapiens
agctgggtccctttgtc

SEQ ID NO: 56975 - DNA, 20 bp, Homo sapiens
agggaatgggctagggcact

SEQ ID NO: 56976 - DNA, 20 bp, Homo sapiens
accctgtatcttgtagaagg

SEQ ID NO: 56977 - DNA, 20 bp, Homo sapiens
atgggggcctgccacagagg

SEQ ID NO: 56978 - DNA, 16 bp, Homo sapiens
gacatccacatagtgg

SEQ ID NO: 56979 - DNA, 18 bp, Homo sapiens
tcaggattaaaggttgtg

SEQ ID NO: 56980 - DNA, 20 bp, Homo sapiens
gggatagtaaattcagggaa

SEQ ID NO: 56981 - DNA, 24 bp, Homo sapiens
ggaattcttttgtatcctctgact

SEQ ID NO: 56982 - DNA, 18 bp, Homo sapiens
gacccacctgatgcagaa

SEQ ID NO: 56983 - DNA, 21 bp, Homo sapiens
tgagaagcgattgtatattta

SEQ ID NO: 56984 - DNA, 17 bp, Homo sapiens
ccacggagtgtggggtc

SEQ ID NO: 56985 - DNA, 16 bp, Homo sapiens
cagagcagtgttcacc

SEQ ID NO: 56986 - DNA, 20 bp, Homo sapiens
atccagtctccattaggatt

SEQ ID NO: 56987 - DNA, 16 bp, Homo sapiens
catgtacagccaccaa

SEQ ID NO: 56988 - DNA, 24 bp, Homo sapiens
acagaacttccggtttcagaaaca

SEQ ID NO: 56989 - DNA, 22 bp, Homo sapiens
gtccacagcagcctcctgacca

SEQ ID NO: 56990 - DNA, 24 bp, Homo sapiens
tccagggagcaccccctccccaac

SEQ ID NO: 56991 - DNA, 21 bp, Homo sapiens
ggaagggtgagtggtgcccta

SEQ ID NO: 56992 - DNA, 22 bp, Homo sapiens
atgttggtttggtccgagccaa

SEQ ID NO: 56993 - DNA, 19 bp, Homo sapiens
acattaatggatggatgca

SEQ ID NO: 56994 - DNA, 16 bp, Homo sapiens
gcagacacgttggcaa

SEQ ID NO: 56995 - DNA, 21 bp, Homo sapiens
gtgagtgaatggttgagtgga

SEQ ID NO: 56996 - DNA, 22 bp, Homo sapiens
tcatccatttatcttttcatcc

SEQ ID NO: 56997 - DNA, 16 bp, Homo sapiens
ggtgtccccaacatcg

SEQ ID NO: 56998 - DNA, 16 bp, Homo sapiens
ctctgcagggactcag

SEQ ID NO: 56999 - DNA, 18 bp, Homo sapiens
cctaactaaggtggctgc

SEQ ID NO: 57000 - DNA, 24 bp, Homo sapiens
gagtgctgcctggctgggcttggg

SEQ ID NO: 57001 - DNA, 17 bp, Homo sapiens
cacatagctcatgttga

SEQ ID NO: 57002 - DNA, 21 bp, Homo sapiens
ttttttgtccaagtgaaaacg

SEQ ID NO: 57003 - DNA, 17 bp, Homo sapiens
acccaaacacctgactt

SEQ ID NO: 57004 - DNA, 21 bp, Homo sapiens
agaactggtgctgtctccagc

SEQ ID NO: 57005 - DNA, 19 bp, Homo sapiens
gtggacaatggggtggcgc

SEQ ID NO: 57006 - DNA, 23 bp, Homo sapiens
ctggggggcaactgggaggggat

SEQ ID NO: 57007 - DNA, 22 bp, Homo sapiens
gggaccaacggggcgcctgcgg

SEQ ID NO: 57008 - DNA, 17 bp, Homo sapiens
tcagtggcaggtcttga

SEQ ID NO: 57009 - DNA, 17 bp, Homo sapiens
gggagaagatgaggagg

SEQ ID NO: 57010 - DNA, 23 bp, Homo sapiens
gacggagcagccgtcgtgctgga

SEQ ID NO: 57011 - DNA, 16 bp, Homo sapiens
aatttgggcagtgatg

SEQ ID NO: 57012 - DNA, 16 bp, Homo sapiens
cagtttggcatggtga

SEQ ID NO: 57013 - DNA, 21 bp, Homo sapiens
ttttttttcttcaatacctct

SEQ ID NO: 57014 - DNA, 17 bp, Homo sapiens
gtcatccaggctctggt

SEQ ID NO: 57015 - DNA, 16 bp, Homo sapiens
tcctcccgggcatgtt

SEQ ID NO: 57016 - DNA, 19 bp, Homo sapiens
cctggcgagtatatagtta

SEQ ID NO: 57017 - DNA, 16 bp, Homo sapiens
ccccactgaggtgaac

SEQ ID NO: 57018 - DNA, 21 bp, Homo sapiens
cagtcaagaaaccacaacccc

SEQ ID NO: 57019 - DNA, 18 bp, Homo sapiens
aagtgtcttccccaagcc

SEQ ID NO: 57020 - DNA, 22 bp, Homo sapiens
ctcaccagtctctcccagttga

SEQ ID NO: 57021 - DNA, 20 bp, Homo sapiens
ctggaacccctaagacatcc

SEQ ID NO: 57022 - DNA, 19 bp, Homo sapiens
cacagaacccccgacgttc

SEQ ID NO: 57023 - DNA, 23 bp, Homo sapiens
ttgagaactctcctccaaccctt

SEQ ID NO: 57024 - DNA, 24 bp, Homo sapiens
ccgcagtgggcgtggttacaccgc

SEQ ID NO: 57025 - DNA, 16 bp, Homo sapiens
atcagctgcactgcca

SEQ ID NO: 57026 - DNA, 23 bp, Homo sapiens
ctatccctgggtgggcggagctc

SEQ ID NO: 57027 - DNA, 16 bp, Homo sapiens
atcctgtccagcgggg

SEQ ID NO: 57028 - DNA, 19 bp, Homo sapiens
gtgtggtttccatggtggg

SEQ ID NO: 57029 - DNA, 24 bp, Homo sapiens
ggggtcccggggatgggaggtcct

SEQ ID NO: 57030 - DNA, 23 bp, Homo sapiens
cgcggtgccctcagagttctggc

SEQ ID NO: 57031 - DNA, 24 bp, Homo sapiens
aactggaccttccgcggctatcgc

SEQ ID NO: 57032 - DNA, 24 bp, Homo sapiens
cattccacagatgcagagccccgc

SEQ ID NO: 57033 - DNA, 16 bp, Homo sapiens
gaggcgttgctgcccg

SEQ ID NO: 57034 - DNA, 24 bp, Homo sapiens
ctggggaaggccagaataagggac

SEQ ID NO: 57035 - DNA, 23 bp, Homo sapiens
cccctctgaagaccgtccagagt

SEQ ID NO: 57036 - DNA, 16 bp, Homo sapiens
cctcacctggactgag

SEQ ID NO: 57037 - DNA, 20 bp, Homo sapiens
gatctccaatctgtccttga

SEQ ID NO: 57038 - DNA, 22 bp, Homo sapiens
ttagcggacacggacacgggca

SEQ ID NO: 57039 - DNA, 22 bp, Homo sapiens
ttaccttgtccacaaccttaaa

SEQ ID NO: 57040 - DNA, 16 bp, Homo sapiens
acctgctcccccagga

SEQ ID NO: 57041 - DNA, 16 bp, Homo sapiens
cgcgaaaccgtgagct

SEQ ID NO: 57042 - DNA, 24 bp, Homo sapiens
cgacaaaaaatgaaagagagagag

SEQ ID NO: 57043 - DNA, 16 bp, Homo sapiens
aagtgtcatcccgcga

SEQ ID NO: 57044 - DNA, 18 bp, Homo sapiens
tagtttagggtcaagaag

SEQ ID NO: 57045 - DNA, 24 bp, Homo sapiens
gagggcgtggccgccccaccccgg

SEQ ID NO: 57046 - DNA, 21 bp, Homo sapiens
cgttgaggcgatagaaggagc

SEQ ID NO: 57047 - DNA, 24 bp, Homo sapiens
tgcctctccagcctctggctccgc

SEQ ID NO: 57048 - DNA, 24 bp, Homo sapiens
caggtcacgcgctggccatgatcg

SEQ ID NO: 57049 - DNA, 20 bp, Homo sapiens
ctcccctctctggtctggcc

SEQ ID NO: 57050 - DNA, 23 bp, Homo sapiens
cggcggagcctttgaatggggct

SEQ ID NO: 57051 - DNA, 23 bp, Homo sapiens
tcagcagcaatccgccggtcaac

SEQ ID NO: 57052 - DNA, 19 bp, Homo sapiens
gtcaagccagggctgcgag

SEQ ID NO: 57053 - DNA, 24 bp, Homo sapiens
ctggccaacgcatccgcactgcgc

SEQ ID NO: 57054 - DNA, 20 bp, Homo sapiens
gacatgcgtggagggggcga

SEQ ID NO: 57055 - DNA, 23 bp, Homo sapiens
taacctctgagtctcgctcctcc

SEQ ID NO: 57056 - DNA, 24 bp, Homo sapiens
tctccccttccttgtcccaggaca

SEQ ID NO: 57057 - DNA, 21 bp, Homo sapiens
acccgagactgggcggagcct

SEQ ID NO: 57058 - DNA, 24 bp, Homo sapiens
catgtcaagtttaaggcgtctccc

SEQ ID NO: 57059 - DNA, 20 bp, Homo sapiens
gcagggacccagcgaaccct

SEQ ID NO: 57060 - DNA, 24 bp, Homo sapiens
tctgcgtccaccccgcctgcaccc

SEQ ID NO: 57061 - DNA, 24 bp, Homo sapiens
acaaccaggccaagttcacgtgca

SEQ ID NO: 57062 - DNA, 16 bp, Homo sapiens
ccccgggtccagggtt

SEQ ID NO: 57063 - DNA, 22 bp, Homo sapiens
gtggagaaatctgggagcacct

SEQ ID NO: 57064 - DNA, 18 bp, Homo sapiens
gccccgcccccgggcctc

SEQ ID NO: 57065 - DNA, 24 bp, Homo sapiens
aggactcgcgcaccgtgaccgagt

SEQ ID NO: 57066 - DNA, 23 bp, Homo sapiens
cgctgagctgtccagccttgcac

SEQ ID NO: 57067 - DNA, 23 bp, Homo sapiens
ggttgggggttggtggaagcggc

SEQ ID NO: 57068 - DNA, 22 bp, Homo sapiens
accagcaccagctctcgggaga

SEQ ID NO: 57069 - DNA, 19 bp, Homo sapiens
tcagaaaaaggctttgttt

SEQ ID NO: 57070 - DNA, 21 bp, Homo sapiens
actcctgcggcagccgcgact

SEQ ID NO: 57071 - DNA, 20 bp, Homo sapiens
attctcatagcatttgtgtc

SEQ ID NO: 57072 - DNA, 16 bp, Homo sapiens
ttggctatcgggggca

SEQ ID NO: 57073 - DNA, 23 bp, Homo sapiens
tcaagaaatttaatctttttcca

SEQ ID NO: 57074 - DNA, 21 bp, Homo sapiens
aaactgtggattgagggtccc

SEQ ID NO: 57075 - DNA, 19 bp, Homo sapiens
cttcccccacattcctggc

SEQ ID NO: 57076 - DNA, 16 bp, Homo sapiens
cagcacagagaaaaag

SEQ ID NO: 57077 - DNA, 24 bp, Homo sapiens
catgagggagggctctgggttgcc

SEQ ID NO: 57078 - DNA, 18 bp, Homo sapiens
aacgtaaaatgtgagccc

SEQ ID NO: 57079 - DNA, 16 bp, Homo sapiens
gagcttctggccctct

SEQ ID NO: 57080 - DNA, 18 bp, Homo sapiens
ctcacatgtgaggccttc

SEQ ID NO: 57081 - DNA, 17 bp, Homo sapiens
ggggagaggaaggaaga

SEQ ID NO: 57082 - DNA, 17 bp, Homo sapiens
gtcacatctccatgtcc

SEQ ID NO: 57083 - DNA, 21 bp, Homo sapiens
ctgggccagggcaggggctca

SEQ ID NO: 57084 - DNA, 16 bp, Homo sapiens
ggataggggtgctgca

SEQ ID NO: 57085 - DNA, 24 bp, Homo sapiens
tccttggtgaaggcttcactgaag

SEQ ID NO: 57086 - DNA, 17 bp, Homo sapiens
gaggtagagatgtctcc

SEQ ID NO: 57087 - DNA, 16 bp, Homo sapiens
aggaatgtcaggttgg

SEQ ID NO: 57088 - DNA, 24 bp, Homo sapiens
ggaaggggtgggtccagcagcctg

SEQ ID NO: 57089 - DNA, 23 bp, Homo sapiens
catcccagtccccagcagggaca

SEQ ID NO: 57090 - DNA, 23 bp, Homo sapiens
tgctacgatggtggctgggctgg

SEQ ID NO: 57091 - DNA, 24 bp, Homo sapiens
tcctcaaggagaaagccccccagg

SEQ ID NO: 57092 - DNA, 17 bp, Homo sapiens
gagaacaagaacgtgac

SEQ ID NO: 57093 - DNA, 18 bp, Homo sapiens
agccccctccatgctcag

SEQ ID NO: 57094 - DNA, 24 bp, Homo sapiens
ttccttctctgtccctgcagttcc

SEQ ID NO: 57095 - DNA, 20 bp, Homo sapiens
ctcctccatgggcagcagct

SEQ ID NO: 57096 - DNA, 20 bp, Homo sapiens
ctccagtcctgttctgtctg

SEQ ID NO: 57097 - DNA, 23 bp, Homo sapiens
gactggacttgctgacacaggag

SEQ ID NO: 57098 - DNA, 17 bp, Homo sapiens
aaccatctgtgtgtgcc

SEQ ID NO: 57099 - DNA, 23 bp, Homo sapiens
agataataatggcactaggggga

SEQ ID NO: 57100 - DNA, 21 bp, Homo sapiens
ctggatttctcacagaccagc

SEQ ID NO: 57101 - DNA, 21 bp, Homo sapiens
gagcgcagctcagctgcgagg

SEQ ID NO: 57102 - DNA, 22 bp, Homo sapiens
tttggcatccagtaggcataat

SEQ ID NO: 57103 - DNA, 18 bp, Homo sapiens
caggcggtggcccgcagt

SEQ ID NO: 57104 - DNA, 23 bp, Homo sapiens
gacaggggggcagctggcaccag

SEQ ID NO: 57105 - DNA, 21 bp, Homo sapiens
caggcctgtccctgtctccag

SEQ ID NO: 57106 - DNA, 24 bp, Homo sapiens
tgggtccctgcagacacgctgttg

SEQ ID NO: 57107 - DNA, 16 bp, Homo sapiens
aaacgcgggcatgggg

SEQ ID NO: 57108 - DNA, 24 bp, Homo sapiens
ctcacggtcatcaccagcacactg

SEQ ID NO: 57109 - DNA, 16 bp, Homo sapiens
tgcgtggcccgagggg

SEQ ID NO: 57110 - DNA, 23 bp, Homo sapiens
gctgtggacaccggctggccatt

SEQ ID NO: 57111 - DNA, 17 bp, Homo sapiens
ctgtcatcgagtggcca

SEQ ID NO: 57112 - DNA, 22 bp, Homo sapiens
ctcccagaccccactgtccccc

SEQ ID NO: 57113 - DNA, 19 bp, Homo sapiens
agagtggatgggctactcc

SEQ ID NO: 57114 - DNA, 24 bp, Homo sapiens
actgcagtgtggctaagggattac

SEQ ID NO: 57115 - DNA, 23 bp, Homo sapiens
ggattatggaaattcaggcactc

SEQ ID NO: 57116 - DNA, 24 bp, Homo sapiens
gcccgcacgtgcccctcatccagg

SEQ ID NO: 57117 - DNA, 23 bp, Homo sapiens
aactagggcgctgaggatgggga

SEQ ID NO: 57118 - DNA, 16 bp, Homo sapiens
cccatcaaggcctcat

SEQ ID NO: 57119 - DNA, 24 bp, Homo sapiens
caacctgcctttgaacccccatgt

SEQ ID NO: 57120 - DNA, 18 bp, Homo sapiens
cccggagctcagataata

SEQ ID NO: 57121 - DNA, 16 bp, Homo sapiens
cagtgcctgctcccca

SEQ ID NO: 57122 - DNA, 22 bp, Homo sapiens
cctgactccccaaatttcagat

SEQ ID NO: 57123 - DNA, 23 bp, Homo sapiens
ttacacagaacattcacggtgaa

SEQ ID NO: 57124 - DNA, 24 bp, Homo sapiens
gatcagcatggggacttagaccag

SEQ ID NO: 57125 - DNA, 16 bp, Homo sapiens
cagcaactgcctatta

SEQ ID NO: 57126 - DNA, 24 bp, Homo sapiens
ctccaattctcactgttcaccccc

SEQ ID NO: 57127 - DNA, 23 bp, Homo sapiens
ttacaggcatgagccaccacctc

SEQ ID NO: 57128 - DNA, 17 bp, Homo sapiens
gagggctcccagcagaa

SEQ ID NO: 57129 - DNA, 18 bp, Homo sapiens
ttgggtcccagatgttca

SEQ ID NO: 57130 - DNA, 18 bp, Homo sapiens
ccctctagccctcttgct

SEQ ID NO: 57131 - DNA, 22 bp, Homo sapiens
gggttcccatggggaaaattag

SEQ ID NO: 57132 - DNA, 16 bp, Homo sapiens
tgaggacttccaggcc

SEQ ID NO: 57133 - DNA, 17 bp, Homo sapiens
ccacagtgaagagtttc

SEQ ID NO: 57134 - DNA, 22 bp, Homo sapiens
ggggatgcagctctgccccagg

SEQ ID NO: 57135 - DNA, 20 bp, Homo sapiens
ctgggtcccacactggcctc

SEQ ID NO: 57136 - DNA, 23 bp, Homo sapiens
caactgtgtgtctggggacgcga

SEQ ID NO: 57137 - DNA, 23 bp, Homo sapiens
atcccagggatgacatcttttct

SEQ ID NO: 57138 - DNA, 19 bp, Homo sapiens
ctgctgaccccagaggcag

SEQ ID NO: 57139 - DNA, 20 bp, Homo sapiens
ctccagaggcttcatgctgc

SEQ ID NO: 57140 - DNA, 16 bp, Homo sapiens
cagtgctggaagctta

SEQ ID NO: 57141 - DNA, 20 bp, Homo sapiens
aatggtgatgtcaggtgctg

SEQ ID NO: 57142 - DNA, 17 bp, Homo sapiens
caagcccccagcctctc

SEQ ID NO: 57143 - DNA, 24 bp, Homo sapiens
cccagctacccaggtgaccatggt

SEQ ID NO: 57144 - DNA, 16 bp, Homo sapiens
caggacccatgagtct

SEQ ID NO: 57145 - DNA, 16 bp, Homo sapiens
agaagggtctggggta

SEQ ID NO: 57146 - DNA, 16 bp, Homo sapiens
ggggcccgagctcgtg

SEQ ID NO: 57147 - DNA, 16 bp, Homo sapiens
cccagagtctgggaga

SEQ ID NO: 57148 - DNA, 16 bp, Homo sapiens
aggcctgtgacctcag

SEQ ID NO: 57149 - DNA, 21 bp, Homo sapiens
gtaggggagggcttgaagccc

SEQ ID NO: 57150 - DNA, 24 bp, Homo sapiens
gaccctcagccaccagcggaagct

SEQ ID NO: 57151 - DNA, 23 bp, Homo sapiens
tggagaggatcactctgggagac

SEQ ID NO: 57152 - DNA, 24 bp, Homo sapiens
tcccgaggtaccgcctggaagggg

SEQ ID NO: 57153 - DNA, 24 bp, Homo sapiens
ggcactcatactccgcgtcatcgc

SEQ ID NO: 57154 - DNA, 24 bp, Homo sapiens
gcagtgcggtgcaatgggccaaag

SEQ ID NO: 57155 - DNA, 24 bp, Homo sapiens
ctgcagggggagccggaagtcagg

SEQ ID NO: 57156 - DNA, 24 bp, Homo sapiens
tgaaaacctgacggtggtggaggg

SEQ ID NO: 57157 - DNA, 21 bp, Homo sapiens
ttacctctagcagggtcccct

SEQ ID NO: 57158 - DNA, 17 bp, Homo sapiens
ctggcgcagttggcgat

SEQ ID NO: 57159 - DNA, 16 bp, Homo sapiens
caggagcagcccatct

SEQ ID NO: 57160 - DNA, 20 bp, Homo sapiens
acttaccttccctagacaaa

SEQ ID NO: 57161 - DNA, 16 bp, Homo sapiens
caacgcagctccactg

SEQ ID NO: 57162 - DNA, 16 bp, Homo sapiens
ctgaaggtgagtggga

SEQ ID NO: 57163 - DNA, 16 bp, Homo sapiens
gggaacggaggcagga

SEQ ID NO: 57164 - DNA, 23 bp, Homo sapiens
gtagggggacctgtgatggccct

SEQ ID NO: 57165 - DNA, 16 bp, Homo sapiens
aaagggcagagggttt

SEQ ID NO: 57166 - DNA, 16 bp, Homo sapiens
gagaaagccagacaga

SEQ ID NO: 57167 - DNA, 23 bp, Homo sapiens
ttggcgctgggtacaaggctggg

SEQ ID NO: 57168 - DNA, 17 bp, Homo sapiens
gagagtaacggaaagag

SEQ ID NO: 57169 - DNA, 23 bp, Homo sapiens
gagagaagccctgagcgtcgtcc

SEQ ID NO: 57170 - DNA, 21 bp, Homo sapiens
ttttttttctccaaatctctg

SEQ ID NO: 57171 - DNA, 16 bp, Homo sapiens
ctcaaaccacggttta

SEQ ID NO: 57172 - DNA, 24 bp, Homo sapiens
ggttttcttgtcagatggtgctgg

SEQ ID NO: 57173 - DNA, 17 bp, Homo sapiens
aggtactcacagatcta

SEQ ID NO: 57174 - DNA, 16 bp, Homo sapiens
gagtgccggaccgctg

SEQ ID NO: 57175 - DNA, 16 bp, Homo sapiens
cccacactctgaagat

SEQ ID NO: 57176 - DNA, 20 bp, Homo sapiens
agcgagggtctggcggctaa

SEQ ID NO: 57177 - DNA, 16 bp, Homo sapiens
gagtctcccactcttt

SEQ ID NO: 57178 - DNA, 16 bp, Homo sapiens
ggctcggggactggct

SEQ ID NO: 57179 - DNA, 24 bp, Homo sapiens
agtgtcgcagtgagaaagtgctgg

SEQ ID NO: 57180 - DNA, 18 bp, Homo sapiens
tgtcatccagagatgaaa

SEQ ID NO: 57181 - DNA, 24 bp, Homo sapiens
ttcactggggccacatgctcaacc

SEQ ID NO: 57182 - DNA, 24 bp, Homo sapiens
atgacgttgggctggatgaattcc

SEQ ID NO: 57183 - DNA, 21 bp, Homo sapiens
agcggaaacctgggtgctgct

SEQ ID NO: 57184 - DNA, 16 bp, Homo sapiens
tggggttgatgatctg

SEQ ID NO: 57185 - DNA, 16 bp, Homo sapiens
caggcagcagcagcag

SEQ ID NO: 57186 - DNA, 16 bp, Homo sapiens
ggcgtggggggcacgg

SEQ ID NO: 57187 - DNA, 21 bp, Homo sapiens
ggcggagtttatagataagtt

SEQ ID NO: 57188 - DNA, 16 bp, Homo sapiens
gtggaggcacagatag

SEQ ID NO: 57189 - DNA, 23 bp, Homo sapiens
catctaccgcgtcatggaccggc

SEQ ID NO: 57190 - DNA, 16 bp, Homo sapiens
ggtgttaagcagtgtc

SEQ ID NO: 57191 - DNA, 23 bp, Homo sapiens
tgagaggcggcctcccccacttc

SEQ ID NO: 57192 - DNA, 24 bp, Homo sapiens
taattccagccccccgcccctagt

SEQ ID NO: 57193 - DNA, 22 bp, Homo sapiens
tggtcccaactgccccacgtct

SEQ ID NO: 57194 - DNA, 19 bp, Homo sapiens
atctgtcctccttgggagc

SEQ ID NO: 57195 - DNA, 22 bp, Homo sapiens
tgaagctctacaagagcatgac

SEQ ID NO: 57196 - DNA, 16 bp, Homo sapiens
tccagagtcccaagag

SEQ ID NO: 57197 - DNA, 21 bp, Homo sapiens
gcaggaaccccagcatggcct

SEQ ID NO: 57198 - DNA, 23 bp, Homo sapiens
gtccagggcggcggcactcccca

SEQ ID NO: 57199 - DNA, 24 bp, Homo sapiens
tcatggaggtgttggaagctgggc

SEQ ID NO: 57200 - DNA, 23 bp, Homo sapiens
ccaaaccacggacagacgtacct

SEQ ID NO: 57201 - DNA, 21 bp, Homo sapiens
caattgtgggaccccggtccc

SEQ ID NO: 57202 - DNA, 22 bp, Homo sapiens
gctcctggaagaacactcagaa

SEQ ID NO: 57203 - DNA, 20 bp, Homo sapiens
tatggtgaggagggcacgca

SEQ ID NO: 57204 - DNA, 22 bp, Homo sapiens
ttgtctctttcttgcttggaaa

SEQ ID NO: 57205 - DNA, 24 bp, Homo sapiens
gtttggccagtaccgggaggcagg

SEQ ID NO: 57206 - DNA, 18 bp, Homo sapiens
gccatgaatagttccagg

SEQ ID NO: 57207 - DNA, 19 bp, Homo sapiens
tcctcttaaaacaagcctg

SEQ ID NO: 57208 - DNA, 22 bp, Homo sapiens
cagccgtagtggacaggcatct

SEQ ID NO: 57209 - DNA, 18 bp, Homo sapiens
gaactgtccccctgtact

SEQ ID NO: 57210 - DNA, 16 bp, Homo sapiens
gatctgcgtggccagt

SEQ ID NO: 57211 - DNA, 17 bp, Homo sapiens
ctgatgtatcgggacta

SEQ ID NO: 57212 - DNA, 16 bp, Homo sapiens
ctggacaggggtgtga

SEQ ID NO: 57213 - DNA, 18 bp, Homo sapiens
cttgggcaaggggcgcca

SEQ ID NO: 57214 - DNA, 16 bp, Homo sapiens
ggctctagtggtgtca

SEQ ID NO: 57215 - DNA, 19 bp, Homo sapiens
tcgtcactatctcctctcc

SEQ ID NO: 57216 - DNA, 24 bp, Homo sapiens
ctggggggcatcaggagctgaggt

SEQ ID NO: 57217 - DNA, 16 bp, Homo sapiens
aagtaacagatgacga

SEQ ID NO: 57218 - DNA, 24 bp, Homo sapiens
gagccacgcttgagccgtgggtca

SEQ ID NO: 57219 - DNA, 20 bp, Homo sapiens
actcaagtgtggcagcgaag

SEQ ID NO: 57220 - DNA, 18 bp, Homo sapiens
ctgctcaccaccctctca

SEQ ID NO: 57221 - DNA, 24 bp, Homo sapiens
gatactgctcagaggtgggcgtgg

SEQ ID NO: 57222 - DNA, 16 bp, Homo sapiens
aatgccaacagggtcg

SEQ ID NO: 57223 - DNA, 16 bp, Homo sapiens
cagcggggtggggagc

SEQ ID NO: 57224 - DNA, 22 bp, Homo sapiens
gacgcccatgccggcttcaact

SEQ ID NO: 57225 - DNA, 19 bp, Homo sapiens
agaaccaggaaggagggta

SEQ ID NO: 57226 - DNA, 21 bp, Homo sapiens
gaacaatggctacgccatctc

SEQ ID NO: 57227 - DNA, 17 bp, Homo sapiens
ctcaggacctcaactcc

SEQ ID NO: 57228 - DNA, 22 bp, Homo sapiens
gccatacccggggcctcgtgct

SEQ ID NO: 57229 - DNA, 19 bp, Homo sapiens
cttggtcagccacaggagt

SEQ ID NO: 57230 - DNA, 16 bp, Homo sapiens
ctttgtggcgttgtat

SEQ ID NO: 57231 - DNA, 22 bp, Homo sapiens
ctctccctgctcgtccccttgg

SEQ ID NO: 57232 - DNA, 19 bp, Homo sapiens
taggtcatggcctcgatga

SEQ ID NO: 57233 - DNA, 24 bp, Homo sapiens
ctgccttctctgtgtccccacagc

SEQ ID NO: 57234 - DNA, 16 bp, Homo sapiens
ggaagatgctacggtg

SEQ ID NO: 57235 - DNA, 19 bp, Homo sapiens
gatggtaatgatgtgtttg

SEQ ID NO: 57236 - DNA, 23 bp, Homo sapiens
ggcaagggggagatgcaacatca

SEQ ID NO: 57237 - DNA, 17 bp, Homo sapiens
gaaccagcccttcctca

SEQ ID NO: 57238 - DNA, 17 bp, Homo sapiens
tggtgcccgatcctgca

SEQ ID NO: 57239 - DNA, 23 bp, Homo sapiens
aaaacatggccttatcacctgat

SEQ ID NO: 57240 - DNA, 17 bp, Homo sapiens
tcccagtaattgacctc

SEQ ID NO: 57241 - DNA, 24 bp, Homo sapiens
ccactcctccttccctagttcatc

SEQ ID NO: 57242 - DNA, 23 bp, Homo sapiens
ctgctcctcatcccaccagcctt

SEQ ID NO: 57243 - DNA, 23 bp, Homo sapiens
ctgacctggggccccttgcccct

SEQ ID NO: 57244 - DNA, 24 bp, Homo sapiens
caccctcccgggcggggcaccctc

SEQ ID NO: 57245 - DNA, 16 bp, Homo sapiens
taccgctcggtggatg

SEQ ID NO: 57246 - DNA, 16 bp, Homo sapiens
tgttccacaaatcctt

SEQ ID NO: 57247 - DNA, 17 bp, Homo sapiens
cactatctgctgagcca

SEQ ID NO: 57248 - DNA, 24 bp, Homo sapiens
atggccccagcagcctggctccac

SEQ ID NO: 57249 - DNA, 22 bp, Homo sapiens
gaagcagtcccgcaggaaggtg

SEQ ID NO: 57250 - DNA, 23 bp, Homo sapiens
tgggatttgagggttttcattac

SEQ ID NO: 57251 - DNA, 16 bp, Homo sapiens
ggttggggttgggttt

SEQ ID NO: 57252 - DNA, 21 bp, Homo sapiens
cacaaaggcttggagtggtta

SEQ ID NO: 57253 - DNA, 24 bp, Homo sapiens
caggtggcgggccagagactcctg

SEQ ID NO: 57254 - DNA, 23 bp, Homo sapiens
catgggaggccggctagcctgcc

SEQ ID NO: 57255 - DNA, 17 bp, Homo sapiens
caggtctcacttatcga

SEQ ID NO: 57256 - DNA, 24 bp, Homo sapiens
caggccgagcggaagcccaaaccc

SEQ ID NO: 57257 - DNA, 16 bp, Homo sapiens
ccttagagtggggcta

SEQ ID NO: 57258 - DNA, 23 bp, Homo sapiens
gagatgcccgcccagctccgcaa

SEQ ID NO: 57259 - DNA, 20 bp, Homo sapiens
tgagtattttagagggagct

SEQ ID NO: 57260 - DNA, 23 bp, Homo sapiens
acggggagcactacccactggat

SEQ ID NO: 57261 - DNA, 17 bp, Homo sapiens
acatgcgctgtggggtg

SEQ ID NO: 57262 - DNA, 19 bp, Homo sapiens
ttttatttagggagctcca

SEQ ID NO: 57263 - DNA, 22 bp, Homo sapiens
aactctacctaggccccttagt

SEQ ID NO: 57264 - DNA, 21 bp, Homo sapiens
ccctctcctcccacctagtgc

SEQ ID NO: 57265 - DNA, 19 bp, Homo sapiens
tctagtttcctgaagagga

SEQ ID NO: 57266 - DNA, 24 bp, Homo sapiens
tgagatcaggcagtgggtgtctgc

SEQ ID NO: 57267 - DNA, 21 bp, Homo sapiens
tgagggaggaggggctggggt

SEQ ID NO: 57268 - DNA, 20 bp, Homo sapiens
aaaatcatgggcaacctgaa

SEQ ID NO: 57269 - DNA, 24 bp, Homo sapiens
ctcctccctcagacccaggagtcc

SEQ ID NO: 57270 - DNA, 23 bp, Homo sapiens
gtccaccgtggaggaggagagga

SEQ ID NO: 57271 - DNA, 23 bp, Homo sapiens
gagtccaagaccccagcccctcc

SEQ ID NO: 57272 - DNA, 19 bp, Homo sapiens
gaggcactagactccttga

SEQ ID NO: 57273 - DNA, 17 bp, Homo sapiens
gctgaggtttaggcaag

SEQ ID NO: 57274 - DNA, 17 bp, Homo sapiens
agagcccctgccagaga

SEQ ID NO: 57275 - DNA, 19 bp, Homo sapiens
gtgagccgagggttcagag

SEQ ID NO: 57276 - DNA, 18 bp, Homo sapiens
gggaaaactaaatttccc

SEQ ID NO: 57277 - DNA, 17 bp, Homo sapiens
caagtgtgagccccctt

SEQ ID NO: 57278 - DNA, 19 bp, Homo sapiens
ccatgaaaagatcttcaca

SEQ ID NO: 57279 - DNA, 22 bp, Homo sapiens
atttctgagactggtcgtcttc

SEQ ID NO: 57280 - DNA, 16 bp, Homo sapiens
ccactgacctctgatc

SEQ ID NO: 57281 - DNA, 19 bp, Homo sapiens
aagttatgtacgccccaca

SEQ ID NO: 57282 - DNA, 19 bp, Homo sapiens
gattttatcctcctaccct

SEQ ID NO: 57283 - DNA, 17 bp, Homo sapiens
atcagacagtctcctgg

SEQ ID NO: 57284 - DNA, 19 bp, Homo sapiens
cctgttctctacttagaca

SEQ ID NO: 57285 - DNA, 23 bp, Homo sapiens
cggtccctggtgccaaaaaggtt

SEQ ID NO: 57286 - DNA, 16 bp, Homo sapiens
ctgttgatccgtgggt

SEQ ID NO: 57287 - DNA, 23 bp, Homo sapiens
atactgaagccccctaaaagtct

SEQ ID NO: 57288 - DNA, 16 bp, Homo sapiens
caccccaggctgtgtc

SEQ ID NO: 57289 - DNA, 24 bp, Homo sapiens
acttgacacacacgtaactatatg

SEQ ID NO: 57290 - DNA, 19 bp, Homo sapiens
tcttggtgactatctctgt

SEQ ID NO: 57291 - DNA, 23 bp, Homo sapiens
tggaagtctgtccgcccacaccc

SEQ ID NO: 57292 - DNA, 21 bp, Homo sapiens
tctagataagaccctggggta

SEQ ID NO: 57293 - DNA, 19 bp, Homo sapiens
attcaggacgaaggtgaca

SEQ ID NO: 57294 - DNA, 24 bp, Homo sapiens
gagtttactctgataatataagat

SEQ ID NO: 57295 - DNA, 20 bp, Homo sapiens
acattgaggatggagactcc

SEQ ID NO: 57296 - DNA, 24 bp, Homo sapiens
ggtcagaaacccaggtcctgaggt

SEQ ID NO: 57297 - DNA, 20 bp, Homo sapiens
ctcctccctggctgccagtc

SEQ ID NO: 57298 - DNA, 21 bp, Homo sapiens
ctcttcccttaagtttaagaa

SEQ ID NO: 57299 - DNA, 22 bp, Homo sapiens
tcctctctctcccagtgaatac

SEQ ID NO: 57300 - DNA, 21 bp, Homo sapiens
gaagcgcccgaagcggatgga

SEQ ID NO: 57301 - DNA, 20 bp, Homo sapiens
ggagaaggatctgggctggg

SEQ ID NO: 57302 - DNA, 17 bp, Homo sapiens
taaggcgggagatgaca

SEQ ID NO: 57303 - DNA, 24 bp, Homo sapiens
gggctgggctgcagcgtcagtgga

SEQ ID NO: 57304 - DNA, 22 bp, Homo sapiens
gcctgtaatgtggtccgcgtgg

SEQ ID NO: 57305 - DNA, 16 bp, Homo sapiens
ctgcggctgctctatg

SEQ ID NO: 57306 - DNA, 24 bp, Homo sapiens
gagggtacagaaaggacctgggag

SEQ ID NO: 57307 - DNA, 16 bp, Homo sapiens
gttctgatcgacccag

SEQ ID NO: 57308 - DNA, 20 bp, Homo sapiens
tctgggccccagcttcccat

SEQ ID NO: 57309 - DNA, 16 bp, Homo sapiens
ttcgagcctgtgagct

SEQ ID NO: 57310 - DNA, 24 bp, Homo sapiens
gtttggtccccggactgaccagca

SEQ ID NO: 57311 - DNA, 22 bp, Homo sapiens
gactacttggcctccagtgggt

SEQ ID NO: 57312 - DNA, 18 bp, Homo sapiens
cccgaggcgctgtttcca

SEQ ID NO: 57313 - DNA, 23 bp, Homo sapiens
ggaaagagtgggctggggtttct

SEQ ID NO: 57314 - DNA, 24 bp, Homo sapiens
ctgtcacccagcaggtacgtgaag

SEQ ID NO: 57315 - DNA, 18 bp, Homo sapiens
cagaccactcacctttaa

SEQ ID NO: 57316 - DNA, 22 bp, Homo sapiens
gagccagcgcggcgggtctgga

SEQ ID NO: 57317 - DNA, 24 bp, Homo sapiens
gctttccgcaagatgcaggcgtgg

SEQ ID NO: 57318 - DNA, 16 bp, Homo sapiens
ctgaccccgcagtggg

SEQ ID NO: 57319 - DNA, 22 bp, Homo sapiens
ttccgtccttgctgccgcctag

SEQ ID NO: 57320 - DNA, 16 bp, Homo sapiens
cttcccggggtcagtg

SEQ ID NO: 57321 - DNA, 22 bp, Homo sapiens
acctgccgcaggaggatggggg

SEQ ID NO: 57322 - DNA, 16 bp, Homo sapiens
ccctctgccccaggcg

SEQ ID NO: 57323 - DNA, 23 bp, Homo sapiens
gaccctcagtacagcctccgcca

SEQ ID NO: 57324 - DNA, 24 bp, Homo sapiens
aaccaaatagggaaaagaaaggga

SEQ ID NO: 57325 - DNA, 16 bp, Homo sapiens
agaaggttgagggtga

SEQ ID NO: 57326 - DNA, 23 bp, Homo sapiens
tggcagaagggggtggttctgac

SEQ ID NO: 57327 - DNA, 22 bp, Homo sapiens
cgacggggcccccgggcccggg

SEQ ID NO: 57328 - DNA, 18 bp, Homo sapiens
ccggaggcccagctagcc

SEQ ID NO: 57329 - DNA, 16 bp, Homo sapiens
aaatgcctcgaactcc

SEQ ID NO: 57330 - DNA, 22 bp, Homo sapiens
gctgccctggcggccgccatca

SEQ ID NO: 57331 - DNA, 16 bp, Homo sapiens
cacgggctgggctggg

SEQ ID NO: 57332 - DNA, 24 bp, Homo sapiens
ggctgcagcaccagcctaggaatt

SEQ ID NO: 57333 - DNA, 24 bp, Homo sapiens
agcgccagacgcacgttggggatg

SEQ ID NO: 57334 - DNA, 24 bp, Homo sapiens
ggcccccgtgtcaccgtcctggtg

SEQ ID NO: 57335 - DNA, 21 bp, Homo sapiens
acgtaggtctccgggcgcgag

SEQ ID NO: 57336 - DNA, 21 bp, Homo sapiens
tagactccttcctgcagcaag

SEQ ID NO: 57337 - DNA, 24 bp, Homo sapiens
cagcaggccaggtgcctcagcccg

SEQ ID NO: 57338 - DNA, 23 bp, Homo sapiens
tcccctacccgcccctggccctg

SEQ ID NO: 57339 - DNA, 23 bp, Homo sapiens
gtggcaaccggggcggccaccag

SEQ ID NO: 57340 - DNA, 24 bp, Homo sapiens
ctggaccggccagccgcagcctcg

SEQ ID NO: 57341 - DNA, 16 bp, Homo sapiens
gcggtccactctcgca

SEQ ID NO: 57342 - DNA, 24 bp, Homo sapiens
gtggccctagtacctgatggggcg

SEQ ID NO: 57343 - DNA, 24 bp, Homo sapiens
gagcaccacagcatctccgtccag

SEQ ID NO: 57344 - DNA, 20 bp, Homo sapiens
cgcgcaggaagcgcacgtct

SEQ ID NO: 57345 - DNA, 24 bp, Homo sapiens
agaggctggtgcccaccggccggg

SEQ ID NO: 57346 - DNA, 24 bp, Homo sapiens
caggtgcctggccctgaacgtcag

SEQ ID NO: 57347 - DNA, 16 bp, Homo sapiens
gaaggtcaagtccagc

SEQ ID NO: 57348 - DNA, 24 bp, Homo sapiens
ccgcgccccgctgcgacgccctgg

SEQ ID NO: 57349 - DNA, 24 bp, Homo sapiens
tccctcgcgctcagccttccagcg

SEQ ID NO: 57350 - DNA, 24 bp, Homo sapiens
gacctcttcaacctctcggcgccc

SEQ ID NO: 57351 - DNA, 19 bp, Homo sapiens
ccttcccagctcactaggc

SEQ ID NO: 57352 - DNA, 21 bp, Homo sapiens
cttcgcggctgggcggtgcag

SEQ ID NO: 57353 - DNA, 24 bp, Homo sapiens
caccacggttccgaagcagcgcgt

SEQ ID NO: 57354 - DNA, 22 bp, Homo sapiens
ggccacggcccacgcgcgctgg

SEQ ID NO: 57355 - DNA, 24 bp, Homo sapiens
gcagcgcgcgcaggcagcaggggg

SEQ ID NO: 57356 - DNA, 24 bp, Homo sapiens
gcgctgctccgcgcgctgggcatc

SEQ ID NO: 57357 - DNA, 16 bp, Homo sapiens
gcacgcccgcagcctc

SEQ ID NO: 57358 - DNA, 22 bp, Homo sapiens
gttcggctgcaacaaggagacc

SEQ ID NO: 57359 - DNA, 23 bp, Homo sapiens
gtcgtagtcccatgggatgatgt

SEQ ID NO: 57360 - DNA, 23 bp, Homo sapiens
cctacctctacgaggagcgctgg

SEQ ID NO: 57361 - DNA, 16 bp, Homo sapiens
gcagctgctcgcagtt

SEQ ID NO: 57362 - DNA, 24 bp, Homo sapiens
cccgctatgtggtgggcgtgctgg

SEQ ID NO: 57363 - DNA, 24 bp, Homo sapiens
gaaaaagtcgccctcgaccgcctt

SEQ ID NO: 57364 - DNA, 20 bp, Homo sapiens
gggggccgcccgccacgggg

SEQ ID NO: 57365 - DNA, 20 bp, Homo sapiens
agaagggccacaggtccacg

SEQ ID NO: 57366 - DNA, 20 bp, Homo sapiens
ctacttggaggacgtgggca

SEQ ID NO: 57367 - DNA, 24 bp, Homo sapiens
tcgggaaactccacatcctgccgg

SEQ ID NO: 57368 - DNA, 24 bp, Homo sapiens
tggatgagcgcggcttcgtatggg

SEQ ID NO: 57369 - DNA, 16 bp, Homo sapiens
ccacgaagccggcaaa

SEQ ID NO: 57370 - DNA, 24 bp, Homo sapiens
agtacagcgaaagcaaccacttgc

SEQ ID NO: 57371 - DNA, 22 bp, Homo sapiens
ctgggggttctcgatgaccccg

SEQ ID NO: 57372 - DNA, 23 bp, Homo sapiens
catgaccaaggacacgtggctgg

SEQ ID NO: 57373 - DNA, 16 bp, Homo sapiens
ggttatcagggcttca

SEQ ID NO: 57374 - DNA, 21 bp, Homo sapiens
cagccgctggtgcccctgccc

SEQ ID NO: 57375 - DNA, 22 bp, Homo sapiens
ctccacccctcaccgctcacac

SEQ ID NO: 57376 - DNA, 21 bp, Homo sapiens
ctggagctcaagttcgggccc

SEQ ID NO: 57377 - DNA, 22 bp, Homo sapiens
ccttagaatttctttcttggtc

SEQ ID NO: 57378 - DNA, 20 bp, Homo sapiens
cactgctgagtctgacggga

SEQ ID NO: 57379 - DNA, 23 bp, Homo sapiens
aaggtcgccgacataagcgccag

SEQ ID NO: 57380 - DNA, 17 bp, Homo sapiens
caagcgaactaggccaa

SEQ ID NO: 57381 - DNA, 16 bp, Homo sapiens
agaggtgacttcccta

SEQ ID NO: 57382 - DNA, 22 bp, Homo sapiens
gacacaaaagccgcgctggcgc

SEQ ID NO: 57383 - DNA, 21 bp, Homo sapiens
ttttcaaatcccggtcgaaaa

SEQ ID NO: 57384 - DNA, 24 bp, Homo sapiens
agctggagatgctgcggccggcag

SEQ ID NO: 57385 - DNA, 19 bp, Homo sapiens
cttcaggtagtcaaatttg

SEQ ID NO: 57386 - DNA, 24 bp, Homo sapiens
gggtcccagcggagaatcttggcc

SEQ ID NO: 57387 - DNA, 21 bp, Homo sapiens
ggaaaacaagcctccgcgtcg

SEQ ID NO: 57388 - DNA, 22 bp, Homo sapiens
cccagaaccctgaatattttcg

SEQ ID NO: 57389 - DNA, 17 bp, Homo sapiens
tcaaggtcagacggcta

SEQ ID NO: 57390 - DNA, 21 bp, Homo sapiens
ggcagcccgagccgaccaaat

SEQ ID NO: 57391 - DNA, 20 bp, Homo sapiens
tacaaatatccgaggccagg

SEQ ID NO: 57392 - DNA, 22 bp, Homo sapiens
ataatttgcctcaattttgttt

SEQ ID NO: 57393 - DNA, 17 bp, Homo sapiens
cttacctgggtatgtca

SEQ ID NO: 57394 - DNA, 24 bp, Homo sapiens
gataaagggaagtacttattttaa

SEQ ID NO: 57395 - DNA, 19 bp, Homo sapiens
tcagcatttaatctcctga

SEQ ID NO: 57396 - DNA, 22 bp, Homo sapiens
aaaaagagtgttacttccccgt

SEQ ID NO: 57397 - DNA, 21 bp, Homo sapiens
acagagtgatttaaatcacca

SEQ ID NO: 57398 - DNA, 18 bp, Homo sapiens
gatcgcagaccgtgtata

SEQ ID NO: 57399 - DNA, 21 bp, Homo sapiens
ctgtaggctctggtatataca

SEQ ID NO: 57400 - DNA, 21 bp, Homo sapiens
caaatattgtgcaatgtaacc

SEQ ID NO: 57401 - DNA, 18 bp, Homo sapiens
tgtgtttactggaatgat

SEQ ID NO: 57402 - DNA, 22 bp, Homo sapiens
aaattagccaatgttacttttc

SEQ ID NO: 57403 - DNA, 19 bp, Homo sapiens
atggacagagcataacctc

SEQ ID NO: 57404 - DNA, 27 bp, Homo sapiens
attaacaattctgatataattaaaatc

SEQ ID NO: 57405 - DNA, 17 bp, Homo sapiens
tggttgtggaagaggtt

SEQ ID NO: 57406 - DNA, 18 bp, Homo sapiens
aagaagggagaaaaccac

SEQ ID NO: 57407 - DNA, 24 bp, Homo sapiens
tttattacatatagttaaatatag

SEQ ID NO: 57408 - DNA, 17 bp, Homo sapiens
tgtcagcttggaaaaac

SEQ ID NO: 57409 - DNA, 19 bp, Homo sapiens
actggttttatgcagaaat

SEQ ID NO: 57410 - DNA, 18 bp, Homo sapiens
acgagattagaaaccaac

SEQ ID NO: 57411 - DNA, 21 bp, Homo sapiens
cctttagaaatgtcagcaatt

SEQ ID NO: 57412 - DNA, 19 bp, Homo sapiens
tgtgtcagaaaagaaagct

SEQ ID NO: 57413 - DNA, 17 bp, Homo sapiens
ccattgcaggaaactat

SEQ ID NO: 57414 - DNA, 19 bp, Homo sapiens
gataggggtgatttttcct

SEQ ID NO: 57415 - DNA, 18 bp, Homo sapiens
agtcatttaagaaatgct

SEQ ID NO: 57416 - DNA, 19 bp, Homo sapiens
cagctaaaacgctgacagt

SEQ ID NO: 57417 - DNA, 18 bp, Homo sapiens
agaaactgccaagtaaat

SEQ ID NO: 57418 - DNA, 17 bp, Homo sapiens
accaaccttaaactgct

SEQ ID NO: 57419 - DNA, 24 bp, Homo sapiens
tgagattctacataaatgtgattt

SEQ ID NO: 57420 - DNA, 16 bp, Homo sapiens
gcaaaactttatggca

SEQ ID NO: 57421 - DNA, 19 bp, Homo sapiens
aaatacatttgacctggtg

SEQ ID NO: 57422 - DNA, 23 bp, Homo sapiens
atttataattttaaaacctgtat

SEQ ID NO: 57423 - DNA, 20 bp, Homo sapiens
aagttttcttacctgctcaa

SEQ ID NO: 57424 - DNA, 19 bp, Homo sapiens
aacttcaaaattaacacct

SEQ ID NO: 57425 - DNA, 24 bp, Homo sapiens
tagaaacatctgtagatttctaac

SEQ ID NO: 57426 - DNA, 19 bp, Homo sapiens
gtgccagttaagctaaaac

SEQ ID NO: 57427 - DNA, 19 bp, Homo sapiens
ccagatgatttcaccgatt

SEQ ID NO: 57428 - DNA, 17 bp, Homo sapiens
tgaccttcctagagcac

SEQ ID NO: 57429 - DNA, 18 bp, Homo sapiens
ggttgcattagatgttat

SEQ ID NO: 57430 - DNA, 18 bp, Homo sapiens
tgtgtcgcctccaaacat

SEQ ID NO: 57431 - DNA, 20 bp, Homo sapiens
aagtggttgtcataaaatgt

SEQ ID NO: 57432 - DNA, 16 bp, Homo sapiens
ctccttccctttccgt

SEQ ID NO: 57433 - DNA, 24 bp, Homo sapiens
aaaaatttgaatcattttgttttc

SEQ ID NO: 57434 - DNA, 17 bp, Homo sapiens
ctcccaagcagatgtcc

SEQ ID NO: 57435 - DNA, 18 bp, Homo sapiens
tggagtgtttatcggtgc

SEQ ID NO: 57436 - DNA, 19 bp, Homo sapiens
ctgtgtaagttatgggtta

SEQ ID NO: 57437 - DNA, 18 bp, Homo sapiens
tccttacagttagcggaa

SEQ ID NO: 57438 - DNA, 19 bp, Homo sapiens
ccatgaaaccatgaacaca

SEQ ID NO: 57439 - DNA, 16 bp, Homo sapiens
gtcaatgacctgggac

SEQ ID NO: 57440 - DNA, 19 bp, Homo sapiens
aaacattgtcaatcagagc

SEQ ID NO: 57441 - DNA, 19 bp, Homo sapiens
acattccaggatagttaac

SEQ ID NO: 57442 - DNA, 24 bp, Homo sapiens
atattgtaaatattttttgcttag

SEQ ID NO: 57443 - DNA, 19 bp, Homo sapiens
tcccaatggagtctaaaaa

SEQ ID NO: 57444 - DNA, 19 bp, Homo sapiens
aatctggaattttgtatca

SEQ ID NO: 57445 - DNA, 17 bp, Homo sapiens
gctggctctcaaaatgt

SEQ ID NO: 57446 - DNA, 24 bp, Homo sapiens
aataggacactgatgaaattcaag

SEQ ID NO: 57447 - DNA, 16 bp, Homo sapiens
gtctgctttctcctca

SEQ ID NO: 57448 - DNA, 20 bp, Homo sapiens
cactaagaaacccagttata

SEQ ID NO: 57449 - DNA, 17 bp, Homo sapiens
cgatgcagcagggcttt

SEQ ID NO: 57450 - DNA, 24 bp, Homo sapiens
cttagagaatgaggacaggtatac

SEQ ID NO: 57451 - DNA, 16 bp, Homo sapiens
gtgaaagagtggtcgc

SEQ ID NO: 57452 - DNA, 18 bp, Homo sapiens
cagggtgtttgctgtatt

SEQ ID NO: 57453 - DNA, 16 bp, Homo sapiens
aatgcattggcaacgt

SEQ ID NO: 57454 - DNA, 23 bp, Homo sapiens
agagtaactgtgcttggaataga

SEQ ID NO: 57455 - DNA, 18 bp, Homo sapiens
aaagctacaggatctgtg

SEQ ID NO: 57456 - DNA, 20 bp, Homo sapiens
ccttaccctcagtattaaga

SEQ ID NO: 57457 - DNA, 24 bp, Homo sapiens
ctatcatgtaatagatctggtatg

SEQ ID NO: 57458 - DNA, 19 bp, Homo sapiens
atccttgtacccatttctt

SEQ ID NO: 57459 - DNA, 20 bp, Homo sapiens
cccactaagaaaagtgatcc

SEQ ID NO: 57460 - DNA, 18 bp, Homo sapiens
tttttcagactttaacca

SEQ ID NO: 57461 - DNA, 17 bp, Homo sapiens
agcccttaatgctgtct

SEQ ID NO: 57462 - DNA, 20 bp, Homo sapiens
tggttcagtacctgctacat

SEQ ID NO: 57463 - DNA, 25 bp, Homo sapiens
ttgcctgaaaataataaagattaaa

SEQ ID NO: 57464 - DNA, 22 bp, Homo sapiens
tcacaggtaacgttactaagat

SEQ ID NO: 57465 - DNA, 17 bp, Homo sapiens
tttcctagctctccaaa

SEQ ID NO: 57466 - DNA, 22 bp, Homo sapiens
tttactaacttgggggaagggg

SEQ ID NO: 57467 - DNA, 19 bp, Homo sapiens
ggacgacattaacactgaa

SEQ ID NO: 57468 - DNA, 27 bp, Homo sapiens
tatctatctatttctaatatctttaat

SEQ ID NO: 57469 - DNA, 23 bp, Homo sapiens
gtgcttcttgcttcaaaatataa

SEQ ID NO: 57470 - DNA, 16 bp, Homo sapiens
tccgcaactgtgtcat

SEQ ID NO: 57471 - DNA, 23 bp, Homo sapiens
agatgtgatattaggttttccta

SEQ ID NO: 57472 - DNA, 17 bp, Homo sapiens
gaggtatacgtgtgtgc

SEQ ID NO: 57473 - DNA, 18 bp, Homo sapiens
agttgcctgatctttttg

SEQ ID NO: 57474 - DNA, 17 bp, Homo sapiens
atcatggtcttcttgga

SEQ ID NO: 57475 - DNA, 18 bp, Homo sapiens
tcataggaaggagttcct

SEQ ID NO: 57476 - DNA, 16 bp, Homo sapiens
gtgactccacagggtg

SEQ ID NO: 57477 - DNA, 22 bp, Homo sapiens
gaggggcccaggcctgttctgc

SEQ ID NO: 57478 - DNA, 16 bp, Homo sapiens
cagccagggcccagaa

SEQ ID NO: 57479 - DNA, 18 bp, Homo sapiens
aagatgaaaagagggagc

SEQ ID NO: 57480 - DNA, 16 bp, Homo sapiens
ggaagggcatcttgct

SEQ ID NO: 57481 - DNA, 22 bp, Homo sapiens
atgttgtctgccattctggcct

SEQ ID NO: 57482 - DNA, 20 bp, Homo sapiens
caactgcccagaagcccaga

SEQ ID NO: 57483 - DNA, 21 bp, Homo sapiens
gtgaagaggatggactatcac

SEQ ID NO: 57484 - DNA, 22 bp, Homo sapiens
aggctttatagagcaggtcgag

SEQ ID NO: 57485 - DNA, 16 bp, Homo sapiens
ctgccgtgtgacagtg

SEQ ID NO: 57486 - DNA, 17 bp, Homo sapiens
acatgggctttactgaa

SEQ ID NO: 57487 - DNA, 21 bp, Homo sapiens
gtcttggactgttgaggcaga

SEQ ID NO: 57488 - DNA, 19 bp, Homo sapiens
aacacagatgacccgctca

SEQ ID NO: 57489 - DNA, 21 bp, Homo sapiens
cctgtagataccatactccca

SEQ ID NO: 57490 - DNA, 16 bp, Homo sapiens
gattctctcctcctcc

SEQ ID NO: 57491 - DNA, 17 bp, Homo sapiens
ttaaactcctcttcagt

SEQ ID NO: 57492 - DNA, 16 bp, Homo sapiens
caaaggcgggtgaacg

SEQ ID NO: 57493 - DNA, 19 bp, Homo sapiens
tgtccagggtggacttgaa

SEQ ID NO: 57494 - DNA, 19 bp, Homo sapiens
aatttatttccccctctgc

SEQ ID NO: 57495 - DNA, 24 bp, Homo sapiens
ctcatttgtaagatgaggacggca

SEQ ID NO: 57496 - DNA, 18 bp, Homo sapiens
ctgcccctggtccagcta

SEQ ID NO: 57497 - DNA, 22 bp, Homo sapiens
taaaagacgcggcatgggctga

SEQ ID NO: 57498 - DNA, 16 bp, Homo sapiens
gggaggaatcagcatg

SEQ ID NO: 57499 - DNA, 23 bp, Homo sapiens
ctggaacaaaattgaacaggccc

SEQ ID NO: 57500 - DNA, 19 bp, Homo sapiens
ggcagaaagcagggcgggt

SEQ ID NO: 57501 - DNA, 24 bp, Homo sapiens
gtgtccggcttccaggcaccagtg

SEQ ID NO: 57502 - DNA, 18 bp, Homo sapiens
cagggatggccccaggcc

SEQ ID NO: 57503 - DNA, 24 bp, Homo sapiens
acggctaccacaccctggaagacc

SEQ ID NO: 57504 - DNA, 19 bp, Homo sapiens
ctcgagttcctgggacccg

SEQ ID NO: 57505 - DNA, 16 bp, Homo sapiens
ctgcttctctacaggc

SEQ ID NO: 57506 - DNA, 17 bp, Homo sapiens
ggggatggttcctcccc

SEQ ID NO: 57507 - DNA, 19 bp, Homo sapiens
aaaagaggtgagggcctgg

SEQ ID NO: 57508 - DNA, 24 bp, Homo sapiens
tgccgcagcctgttataaagggcc

SEQ ID NO: 57509 - DNA, 24 bp, Homo sapiens
gtgaagagcggcattcaccgtact

SEQ ID NO: 57510 - DNA, 24 bp, Homo sapiens
ctctgtcttgagtatgtccacagc

SEQ ID NO: 57511 - DNA, 16 bp, Homo sapiens
gggccctcccgctagg

SEQ ID NO: 57512 - DNA, 22 bp, Homo sapiens
agtgaggagggaccccatggcc

SEQ ID NO: 57513 - DNA, 16 bp, Homo sapiens
tgttgaagcaggcagc

SEQ ID NO: 57514 - DNA, 20 bp, Homo sapiens
cccacctccccggcgtggac

SEQ ID NO: 57515 - DNA, 16 bp, Homo sapiens
acagctaccacttaga

SEQ ID NO: 57516 - DNA, 22 bp, Homo sapiens
caccacgcctggcccaggggga

SEQ ID NO: 57517 - DNA, 19 bp, Homo sapiens
agatgagaccatcccagga

SEQ ID NO: 57518 - DNA, 22 bp, Homo sapiens
tcagaactcaggagacaccatg

SEQ ID NO: 57519 - DNA, 19 bp, Homo sapiens
ggagctgtgtaagaagtac

SEQ ID NO: 57520 - DNA, 24 bp, Homo sapiens
tgggagacaagctcacccagggcc

SEQ ID NO: 57521 - DNA, 24 bp, Homo sapiens
gtctctccatggtgctggtgacag

SEQ ID NO: 57522 - DNA, 24 bp, Homo sapiens
ggcctggacatgtccaggcaagag

SEQ ID NO: 57523 - DNA, 21 bp, Homo sapiens
tgctggcctcccatggggggt

SEQ ID NO: 57524 - DNA, 16 bp, Homo sapiens
tctgctgctggtactt

SEQ ID NO: 57525 - DNA, 16 bp, Homo sapiens
ggccatgtggttagga

SEQ ID NO: 57526 - DNA, 24 bp, Homo sapiens
gtctccagttgtttcatgaagccc

SEQ ID NO: 57527 - DNA, 24 bp, Homo sapiens
gagggggagcgagacttcggggtc

SEQ ID NO: 57528 - DNA, 24 bp, Homo sapiens
gctgtggggcacaggggagatcag

SEQ ID NO: 57529 - DNA, 22 bp, Homo sapiens
cacagaggggacctcaccccag

SEQ ID NO: 57530 - DNA, 22 bp, Homo sapiens
gtgagacgggcggccctgggca

SEQ ID NO: 57531 - DNA, 23 bp, Homo sapiens
cagtcccagagctgccctttagg

SEQ ID NO: 57532 - DNA, 22 bp, Homo sapiens
agcacaggatggaccgggcctt

SEQ ID NO: 57533 - DNA, 24 bp, Homo sapiens
cagtgggtcagtgggggaggaggg

SEQ ID NO: 57534 - DNA, 22 bp, Homo sapiens
ggcccactagggccaccacctc

SEQ ID NO: 57535 - DNA, 16 bp, Homo sapiens
tccaaagtggagccaa

SEQ ID NO: 57536 - DNA, 24 bp, Homo sapiens
ccagactgggggcaagaacaaggt

SEQ ID NO: 57537 - DNA, 23 bp, Homo sapiens
tgtagagatgaaggccaaagagg

SEQ ID NO: 57538 - DNA, 20 bp, Homo sapiens
cagagctgagcctcccagcc

SEQ ID NO: 57539 - DNA, 23 bp, Homo sapiens
cctttcttcccttcccaggggct

SEQ ID NO: 57540 - DNA, 21 bp, Homo sapiens
actcagcctggttccagggga

SEQ ID NO: 57541 - DNA, 21 bp, Homo sapiens
ttggggatgtcatttgctcct

SEQ ID NO: 57542 - DNA, 16 bp, Homo sapiens
acctccacatacacca

SEQ ID NO: 57543 - DNA, 16 bp, Homo sapiens
atccagtggatgccca

SEQ ID NO: 57544 - DNA, 16 bp, Homo sapiens
tgatagcctcccggca

SEQ ID NO: 57545 - DNA, 16 bp, Homo sapiens
acttcctggccaagtt

SEQ ID NO: 57546 - DNA, 18 bp, Homo sapiens
gacagctgtggtttcaga

SEQ ID NO: 57547 - DNA, 23 bp, Homo sapiens
ccctcccagctaacacagcagag

SEQ ID NO: 57548 - DNA, 19 bp, Homo sapiens
agtcatagggatcaatgct

SEQ ID NO: 57549 - DNA, 23 bp, Homo sapiens
atcctgccccgggttggtccacc

SEQ ID NO: 57550 - DNA, 20 bp, Homo sapiens
ggcatgtagtagtcaaactt

SEQ ID NO: 57551 - DNA, 16 bp, Homo sapiens
aaggaggctggcgctc

SEQ ID NO: 57552 - DNA, 21 bp, Homo sapiens
atgccaatgacgttcagcagc

SEQ ID NO: 57553 - DNA, 18 bp, Homo sapiens
ccccatctgtccagtggg

SEQ ID NO: 57554 - DNA, 17 bp, Homo sapiens
gaggcctccatgtcctc

SEQ ID NO: 57555 - DNA, 24 bp, Homo sapiens
tgtccacctagacggatccatcaa

SEQ ID NO: 57556 - DNA, 24 bp, Homo sapiens
tcccacagggagacaggaaggaac

SEQ ID NO: 57557 - DNA, 23 bp, Homo sapiens
ttgttctctctctccctttctct

SEQ ID NO: 57558 - DNA, 22 bp, Homo sapiens
tggggaccccactcaaatccca

SEQ ID NO: 57559 - DNA, 25 bp, Homo sapiens
gttatcatgattaatgttaacatta

SEQ ID NO: 57560 - DNA, 19 bp, Homo sapiens
gtataagatggtttcaggc

SEQ ID NO: 57561 - DNA, 18 bp, Homo sapiens
cagagtttaccgaagtat

SEQ ID NO: 57562 - DNA, 18 bp, Homo sapiens
caagcaagccacggccta

SEQ ID NO: 57563 - DNA, 22 bp, Homo sapiens
cggagggagcagcgccggggcg

SEQ ID NO: 57564 - DNA, 23 bp, Homo sapiens
cgttcgttcccagggtttggacg

SEQ ID NO: 57565 - DNA, 24 bp, Homo sapiens
ccgctggccccagggaaagccgag

SEQ ID NO: 57566 - DNA, 19 bp, Homo sapiens
gacccccgtccccggagcc

SEQ ID NO: 57567 - DNA, 20 bp, Homo sapiens
cggggcgggaggcggggccc

SEQ ID NO: 57568 - DNA, 16 bp, Homo sapiens
gccatagggattctcg

SEQ ID NO: 57569 - DNA, 16 bp, Homo sapiens
aagggaagtctacggt

SEQ ID NO: 57570 - DNA, 19 bp, Homo sapiens
catcgcttaccaggagtgc

SEQ ID NO: 57571 - DNA, 16 bp, Homo sapiens
ctgctgcagacattcc

SEQ ID NO: 57572 - DNA, 24 bp, Homo sapiens
acccgaatagcctgcccctcagcc

SEQ ID NO: 57573 - DNA, 24 bp, Homo sapiens
ggaagcacaccccgtcctggctga

SEQ ID NO: 57574 - DNA, 22 bp, Homo sapiens
caagatagtcctgaatggtgtg

SEQ ID NO: 57575 - DNA, 20 bp, Homo sapiens
tttttatgacagacgctgcc

SEQ ID NO: 57576 - DNA, 24 bp, Homo sapiens
acaggagtacatgaccaaggtcct

SEQ ID NO: 57577 - DNA, 20 bp, Homo sapiens
agagtgggacttgcctgtgg

SEQ ID NO: 57578 - DNA, 24 bp, Homo sapiens
cagcgtcttccctgtacccgtagg

SEQ ID NO: 57579 - DNA, 24 bp, Homo sapiens
gcagtggcctctgcatctgcaaag

SEQ ID NO: 57580 - DNA, 21 bp, Homo sapiens
cagagatgccgtctcggaggt

SEQ ID NO: 57581 - DNA, 24 bp, Homo sapiens
cttgtgtggcctcgcctcttcctg

SEQ ID NO: 57582 - DNA, 21 bp, Homo sapiens
caggatgacaaggcccgatcc

SEQ ID NO: 57583 - DNA, 24 bp, Homo sapiens
cagaaggtgaatggcatcctggag

SEQ ID NO: 57584 - DNA, 16 bp, Homo sapiens
gaggcctgggaactag

SEQ ID NO: 57585 - DNA, 21 bp, Homo sapiens
ctggcctggcgagaacacctc

SEQ ID NO: 57586 - DNA, 20 bp, Homo sapiens
gtccccatgggcccacccca

SEQ ID NO: 57587 - DNA, 16 bp, Homo sapiens
gcaaggagagcttttc

SEQ ID NO: 57588 - DNA, 20 bp, Homo sapiens
gaaattatacagcagctaaa

SEQ ID NO: 57589 - DNA, 16 bp, Homo sapiens
ggagaccccataggtg

SEQ ID NO: 57590 - DNA, 20 bp, Homo sapiens
taaataatctttgggatgtc

SEQ ID NO: 57591 - DNA, 21 bp, Homo sapiens
tgataaaccagtatctggggt

SEQ ID NO: 57592 - DNA, 24 bp, Homo sapiens
cccaccggtaggaggtgttccgaa

SEQ ID NO: 57593 - DNA, 19 bp, Homo sapiens
ctgcctttgatacgtgaga

SEQ ID NO: 57594 - DNA, 16 bp, Homo sapiens
gccaagctggttctct

SEQ ID NO: 57595 - DNA, 20 bp, Homo sapiens
gtcagcttgctacacggaca

SEQ ID NO: 57596 - DNA, 17 bp, Homo sapiens
gtctagaaagaccacca

SEQ ID NO: 57597 - DNA, 24 bp, Homo sapiens
actcgcaactcacacaggtcatca

SEQ ID NO: 57598 - DNA, 23 bp, Homo sapiens
gtggccggaccagtggcagggtg

SEQ ID NO: 57599 - DNA, 20 bp, Homo sapiens
gtgggagagagcaccgtggg

SEQ ID NO: 57600 - DNA, 16 bp, Homo sapiens
gtcttctagctccctc

SEQ ID NO: 57601 - DNA, 20 bp, Homo sapiens
cttcacctcaggatggatgc

SEQ ID NO: 57602 - DNA, 18 bp, Homo sapiens
gaccgccgaggctcctgc

SEQ ID NO: 57603 - DNA, 24 bp, Homo sapiens
gtcggacactgagccggagcggga

SEQ ID NO: 57604 - DNA, 24 bp, Homo sapiens
gggtgttggagacagctcctcctc

SEQ ID NO: 57605 - DNA, 24 bp, Homo sapiens
aaaccctagcccagcgggagcgca

SEQ ID NO: 57606 - DNA, 24 bp, Homo sapiens
tgctgggctcccgggagcagctgt

SEQ ID NO: 57607 - DNA, 18 bp, Homo sapiens
aagccagtccccaccccc

SEQ ID NO: 57608 - DNA, 16 bp, Homo sapiens
cagagccccaggctgc

SEQ ID NO: 57609 - DNA, 17 bp, Homo sapiens
gctgcttgtaccttcta

SEQ ID NO: 57610 - DNA, 22 bp, Homo sapiens
caggggaggacctggtgggggt

SEQ ID NO: 57611 - DNA, 18 bp, Homo sapiens
accactgagctccaccct

SEQ ID NO: 57612 - DNA, 16 bp, Homo sapiens
gcactctgcccttcct

SEQ ID NO: 57613 - DNA, 20 bp, Homo sapiens
cagggcccaggtacatggcc

SEQ ID NO: 57614 - DNA, 24 bp, Homo sapiens
cgctcctgtcatttctacaacaac

SEQ ID NO: 57615 - DNA, 19 bp, Homo sapiens
cctctcttgggcacctgag

SEQ ID NO: 57616 - DNA, 23 bp, Homo sapiens
atgtccaggatggggctggccag

SEQ ID NO: 57617 - DNA, 21 bp, Homo sapiens
ggtgggggacgcccagccctg

SEQ ID NO: 57618 - DNA, 24 bp, Homo sapiens
ggacagtggtcgtggcctcactga

SEQ ID NO: 57619 - DNA, 18 bp, Homo sapiens
ggtctgggacttagtgga

SEQ ID NO: 57620 - DNA, 17 bp, Homo sapiens
gaaatatatccgggcct

SEQ ID NO: 57621 - DNA, 16 bp, Homo sapiens
ctggagcaggagctgg

SEQ ID NO: 57622 - DNA, 19 bp, Homo sapiens
gcttaaactttttcgtact

SEQ ID NO: 57623 - DNA, 23 bp, Homo sapiens
ccccatcccttggtcagaaactc

SEQ ID NO: 57624 - DNA, 24 bp, Homo sapiens
atgtcggcttgctgcttcaggttc

SEQ ID NO: 57625 - DNA, 16 bp, Homo sapiens
cctacgtgcaggatga

SEQ ID NO: 57626 - DNA, 24 bp, Homo sapiens
cgtcagctacaggactgagccccc

SEQ ID NO: 57627 - DNA, 23 bp, Homo sapiens
ctcggggcaccgtcccctgcatg

SEQ ID NO: 57628 - DNA, 18 bp, Homo sapiens
gcaaaggctcggacagct

SEQ ID NO: 57629 - DNA, 24 bp, Homo sapiens
cccttactacctgtcccggaacct

SEQ ID NO: 57630 - DNA, 16 bp, Homo sapiens
agtgacagaggtgagt

SEQ ID NO: 57631 - DNA, 22 bp, Homo sapiens
acaattacttgttggatgccaa

SEQ ID NO: 57632 - DNA, 24 bp, Homo sapiens
tagggtggggcggtgttgccaggt

SEQ ID NO: 57633 - DNA, 21 bp, Homo sapiens
cttcgtcaaagatcacgactg

SEQ ID NO: 57634 - DNA, 17 bp, Homo sapiens
ctcatctgcgcttgtga

SEQ ID NO: 57635 - DNA, 16 bp, Homo sapiens
gaagcaataggaggtg

SEQ ID NO: 57636 - DNA, 17 bp, Homo sapiens
ggcctctgtgagctcca

SEQ ID NO: 57637 - DNA, 16 bp, Homo sapiens
agggcttcaggagttt

SEQ ID NO: 57638 - DNA, 24 bp, Homo sapiens
agcacacaacattgacctgaaggg

SEQ ID NO: 57639 - DNA, 20 bp, Homo sapiens
agggcgggagggggtggcag

SEQ ID NO: 57640 - DNA, 16 bp, Homo sapiens
tcaggtcaaaggatgc

SEQ ID NO: 57641 - DNA, 24 bp, Homo sapiens
ggccaaggctttgggaacttggct

SEQ ID NO: 57642 - DNA, 18 bp, Homo sapiens
ttggtctgctcctccagc

SEQ ID NO: 57643 - DNA, 23 bp, Homo sapiens
ttctggaacccccgatcctgtcc

SEQ ID NO: 57644 - DNA, 16 bp, Homo sapiens
aacgcacctgggctgg

SEQ ID NO: 57645 - DNA, 24 bp, Homo sapiens
ctaggagaagatgtgtgaagaatc

SEQ ID NO: 57646 - DNA, 22 bp, Homo sapiens
tgctgaactccgggtggggctc

SEQ ID NO: 57647 - DNA, 24 bp, Homo sapiens
caggactggacgtcatagaccagg

SEQ ID NO: 57648 - DNA, 16 bp, Homo sapiens
caggaccaagcagcct

SEQ ID NO: 57649 - DNA, 24 bp, Homo sapiens
cacccggagttcagcgcggactcc

SEQ ID NO: 57650 - DNA, 23 bp, Homo sapiens
gattctgtgtggcctcttccttc

SEQ ID NO: 57651 - DNA, 16 bp, Homo sapiens
ctcttcagctttgcaa

SEQ ID NO: 57652 - DNA, 23 bp, Homo sapiens
ctcttcctttccatgttggtgtc

SEQ ID NO: 57653 - DNA, 16 bp, Homo sapiens
cctcctcgcaaggagg

SEQ ID NO: 57654 - DNA, 23 bp, Homo sapiens
gcggggttgttggcacgagcgtg

SEQ ID NO: 57655 - DNA, 22 bp, Homo sapiens
aggcagctcaacagcatcgatg

SEQ ID NO: 57656 - DNA, 19 bp, Homo sapiens
gaacatggagctggaagac

SEQ ID NO: 57657 - DNA, 21 bp, Homo sapiens
gggctggctccccgcctctca

SEQ ID NO: 57658 - DNA, 22 bp, Homo sapiens
ttgcagctgggtggggcctcct

SEQ ID NO: 57659 - DNA, 23 bp, Homo sapiens
atgtgacagcccaggactgcacc

SEQ ID NO: 57660 - DNA, 23 bp, Homo sapiens
acagtgatcctgctgcgcctgga

SEQ ID NO: 57661 - DNA, 16 bp, Homo sapiens
cctcccaggtctcaaa

SEQ ID NO: 57662 - DNA, 17 bp, Homo sapiens
accaagccagggaggtg

SEQ ID NO: 57663 - DNA, 20 bp, Homo sapiens
caaagctgcagcctgatttc

SEQ ID NO: 57664 - DNA, 17 bp, Homo sapiens
acgtgatctgggcttca

SEQ ID NO: 57665 - DNA, 24 bp, Homo sapiens
ggcagctacatctttgaccagtgt

SEQ ID NO: 57666 - DNA, 23 bp, Homo sapiens
gcactcacgtcctgccaggtgct

SEQ ID NO: 57667 - DNA, 24 bp, Homo sapiens
ttcccaaagctgcagtctggtccc

SEQ ID NO: 57668 - DNA, 22 bp, Homo sapiens
atggaggcctgctgcaccccct

SEQ ID NO: 57669 - DNA, 24 bp, Homo sapiens
acatctttgagctgtttgctgaag

SEQ ID NO: 57670 - DNA, 21 bp, Homo sapiens
tctgtgggcctgttcctgctg

SEQ ID NO: 57671 - DNA, 17 bp, Homo sapiens
ctggaccagatcatcca

SEQ ID NO: 57672 - DNA, 23 bp, Homo sapiens
cccgccctgaatggatgctgcgc

SEQ ID NO: 57673 - DNA, 22 bp, Homo sapiens
ggccccacctggataatgtccg

SEQ ID NO: 57674 - DNA, 21 bp, Homo sapiens
gcagtcgggctgagcgggctc

SEQ ID NO: 57675 - DNA, 24 bp, Homo sapiens
ttaactaatacagcaggagaaggc

SEQ ID NO: 57676 - DNA, 17 bp, Homo sapiens
gtgggtgtcagcgccct

SEQ ID NO: 57677 - DNA, 18 bp, Homo sapiens
tcagaaacaggtggtgta

SEQ ID NO: 57678 - DNA, 20 bp, Homo sapiens
actgcagaagctggcggaca

SEQ ID NO: 57679 - DNA, 23 bp, Homo sapiens
aaccagggctgccctcggagggg

SEQ ID NO: 57680 - DNA, 24 bp, Homo sapiens
gatggcaggggccggtgaaccgat

SEQ ID NO: 57681 - DNA, 17 bp, Homo sapiens
ctgcctcctggaggtgg

SEQ ID NO: 57682 - DNA, 24 bp, Homo sapiens
cggctgatgctgcagaaagtcggg

SEQ ID NO: 57683 - DNA, 18 bp, Homo sapiens
ccaccttataggactgta

SEQ ID NO: 57684 - DNA, 24 bp, Homo sapiens
cagattgtgttcagtgtggacccc

SEQ ID NO: 57685 - DNA, 23 bp, Homo sapiens
ctgggggcagccccttacctttt

SEQ ID NO: 57686 - DNA, 24 bp, Homo sapiens
cttgttccccggcagggctggggg

SEQ ID NO: 57687 - DNA, 21 bp, Homo sapiens
tgcagtggtgctccaggcatc

SEQ ID NO: 57688 - DNA, 23 bp, Homo sapiens
gcaggtggggctgggggtcttct

SEQ ID NO: 57689 - DNA, 17 bp, Homo sapiens
ctgcacccgggcgggcg

SEQ ID NO: 57690 - DNA, 21 bp, Homo sapiens
ctccacactcctggtcctgtc

SEQ ID NO: 57691 - DNA, 20 bp, Homo sapiens
caggcccatgggggcaggag

SEQ ID NO: 57692 - DNA, 24 bp, Homo sapiens
gaggacggctcagcggtctgatgc

SEQ ID NO: 57693 - DNA, 23 bp, Homo sapiens
tcttcagagggacagtgaggaga

SEQ ID NO: 57694 - DNA, 16 bp, Homo sapiens
cgggactgaagcacca

SEQ ID NO: 57695 - DNA, 22 bp, Homo sapiens
ggtggctgcccgcggctcgctt

SEQ ID NO: 57696 - DNA, 21 bp, Homo sapiens
gccagcgtgccgctggtaagg

SEQ ID NO: 57697 - DNA, 19 bp, Homo sapiens
gtggtcaggcccccagtcc

SEQ ID NO: 57698 - DNA, 17 bp, Homo sapiens
ctggcaggggtggcccg

SEQ ID NO: 57699 - DNA, 20 bp, Homo sapiens
cagggaaggtgctgagctac

SEQ ID NO: 57700 - DNA, 16 bp, Homo sapiens
atggggacccccacca

SEQ ID NO: 57701 - DNA, 24 bp, Homo sapiens
gtccgccagggcgtccgctccctc

SEQ ID NO: 57702 - DNA, 24 bp, Homo sapiens
agggagcagacagtggggaagtgc

SEQ ID NO: 57703 - DNA, 18 bp, Homo sapiens
tctggagatgcagatgta

SEQ ID NO: 57704 - DNA, 23 bp, Homo sapiens
gcttgtcgatgatgtgtgggttc

SEQ ID NO: 57705 - DNA, 24 bp, Homo sapiens
ctctgacatcagcggggtggaagt

SEQ ID NO: 57706 - DNA, 16 bp, Homo sapiens
aactgggctccatcgg

SEQ ID NO: 57707 - DNA, 24 bp, Homo sapiens
cctcgagggctaaaggggtgctgg

SEQ ID NO: 57708 - DNA, 24 bp, Homo sapiens
cagtgctcccccacctcccacccc

SEQ ID NO: 57709 - DNA, 22 bp, Homo sapiens
ctcagccctttcccagtctgcc

SEQ ID NO: 57710 - DNA, 22 bp, Homo sapiens
agcactcctcggaaaacctaga

SEQ ID NO: 57711 - DNA, 22 bp, Homo sapiens
ggggtcgtccccagaggccccg

SEQ ID NO: 57712 - DNA, 21 bp, Homo sapiens
caggatgggcacagctggggc

SEQ ID NO: 57713 - DNA, 22 bp, Homo sapiens
tgagggcctgtccctgggccct

SEQ ID NO: 57714 - DNA, 16 bp, Homo sapiens
aggggcaggatgtctg

SEQ ID NO: 57715 - DNA, 24 bp, Homo sapiens
tcctgagcagtggcctctccggct

SEQ ID NO: 57716 - DNA, 16 bp, Homo sapiens
cccatagggcaccacg

SEQ ID NO: 57717 - DNA, 18 bp, Homo sapiens
ctgggtgagtgccctgaa

SEQ ID NO: 57718 - DNA, 21 bp, Homo sapiens
ggggagacgcacccgccagaa

SEQ ID NO: 57719 - DNA, 23 bp, Homo sapiens
caagagctggtagggaaccctgc

SEQ ID NO: 57720 - DNA, 24 bp, Homo sapiens
gagctgtgaccactgcctgcttca

SEQ ID NO: 57721 - DNA, 22 bp, Homo sapiens
cacttccaggcaacatcgcccg

SEQ ID NO: 57722 - DNA, 18 bp, Homo sapiens
aagaggcagggacacggc

SEQ ID NO: 57723 - DNA, 24 bp, Homo sapiens
cctgtcatggagaagagcctggag

SEQ ID NO: 57724 - DNA, 21 bp, Homo sapiens
ggctccacaaacagcggcttc

SEQ ID NO: 57725 - DNA, 22 bp, Homo sapiens
gggtgggtgagggcagggctgg

SEQ ID NO: 57726 - DNA, 23 bp, Homo sapiens
cagcaggcccagagccccggcca

SEQ ID NO: 57727 - DNA, 24 bp, Homo sapiens
tcatcggatcggcggcgtgaccag

SEQ ID NO: 57728 - DNA, 21 bp, Homo sapiens
ccatggtcagggccagtggtc

SEQ ID NO: 57729 - DNA, 23 bp, Homo sapiens
ttggccaggaagatggaggcgct

SEQ ID NO: 57730 - DNA, 19 bp, Homo sapiens
tcagggccaggaaggaaac

SEQ ID NO: 57731 - DNA, 19 bp, Homo sapiens
cagcctgggatccgtgcca

SEQ ID NO: 57732 - DNA, 24 bp, Homo sapiens
ccgccaggaaggtggcgccggtgg

SEQ ID NO: 57733 - DNA, 23 bp, Homo sapiens
aggacgatccttcatcttggagc

SEQ ID NO: 57734 - DNA, 20 bp, Homo sapiens
gaacaggcaaccaggtcagg

SEQ ID NO: 57735 - DNA, 17 bp, Homo sapiens
gctccaggctcagcctc

SEQ ID NO: 57736 - DNA, 16 bp, Homo sapiens
gaccgggcagccccca

SEQ ID NO: 57737 - DNA, 23 bp, Homo sapiens
caagggttgccgcccctgggtcc

SEQ ID NO: 57738 - DNA, 22 bp, Homo sapiens
caggcccagagcaggacacgct

SEQ ID NO: 57739 - DNA, 23 bp, Homo sapiens
ccacggccattcgtgtctgagaa

SEQ ID NO: 57740 - DNA, 23 bp, Homo sapiens
acccacagatggagcttcctccc

SEQ ID NO: 57741 - DNA, 24 bp, Homo sapiens
atcttgaggacaacccgggggtcc

SEQ ID NO: 57742 - DNA, 19 bp, Homo sapiens
ggctgggtgtgggcaccag

SEQ ID NO: 57743 - DNA, 24 bp, Homo sapiens
ctgtaactcacctggcccccagcc

SEQ ID NO: 57744 - DNA, 21 bp, Homo sapiens
ctaggccagcgaggggctgga

SEQ ID NO: 57745 - DNA, 23 bp, Homo sapiens
ccttggccacggggcgggggctc

SEQ ID NO: 57746 - DNA, 24 bp, Homo sapiens
gtcacgggcctcccgtacccccca

SEQ ID NO: 57747 - DNA, 21 bp, Homo sapiens
cggtaccactcctgcccagag

SEQ ID NO: 57748 - DNA, 23 bp, Homo sapiens
agatgaagggccagggtggggct

SEQ ID NO: 57749 - DNA, 16 bp, Homo sapiens
tcctggcggtgccgga

SEQ ID NO: 57750 - DNA, 21 bp, Homo sapiens
taaggcggtctggtgactgag

SEQ ID NO: 57751 - DNA, 16 bp, Homo sapiens
cgcctgccaccggact

SEQ ID NO: 57752 - DNA, 24 bp, Homo sapiens
cgagccgcctcgccccacagttcc

SEQ ID NO: 57753 - DNA, 18 bp, Homo sapiens
gcctcatgtggggaagga

SEQ ID NO: 57754 - DNA, 23 bp, Homo sapiens
tgtgaaccaggccatcgggcgag

SEQ ID NO: 57755 - DNA, 24 bp, Homo sapiens
gaagaccctcatctgctgcagggg

SEQ ID NO: 57756 - DNA, 23 bp, Homo sapiens
accccactgggcccctggactct

SEQ ID NO: 57757 - DNA, 23 bp, Homo sapiens
gacgtggggacgcacccaggagg

SEQ ID NO: 57758 - DNA, 18 bp, Homo sapiens
gctactcggggtcagcgt

SEQ ID NO: 57759 - DNA, 20 bp, Homo sapiens
caacacggaagaactgggcc

SEQ ID NO: 57760 - DNA, 23 bp, Homo sapiens
actgaacccttgaagcggctgtg

SEQ ID NO: 57761 - DNA, 24 bp, Homo sapiens
ctcctctggggacaacaccctcat

SEQ ID NO: 57762 - DNA, 24 bp, Homo sapiens
ctttgccgacgcaagagcccaact

SEQ ID NO: 57763 - DNA, 22 bp, Homo sapiens
tgtagcccggggggccggcgct

SEQ ID NO: 57764 - DNA, 22 bp, Homo sapiens
caactttggccatgtcatccga

SEQ ID NO: 57765 - DNA, 23 bp, Homo sapiens
gagaagaaggggccaggcgactt

SEQ ID NO: 57766 - DNA, 22 bp, Homo sapiens
tcctgcccagggaggggatgag

SEQ ID NO: 57767 - DNA, 21 bp, Homo sapiens
tgaggacctctgcttcaggct

SEQ ID NO: 57768 - DNA, 24 bp, Homo sapiens
cacccacccccatggttctgcaga

SEQ ID NO: 57769 - DNA, 18 bp, Homo sapiens
ccgcccgctccgccaccc

SEQ ID NO: 57770 - DNA, 22 bp, Homo sapiens
gtggagaagatgctgtcagcga

SEQ ID NO: 57771 - DNA, 16 bp, Homo sapiens
cgcacaaagccaggtg

SEQ ID NO: 57772 - DNA, 20 bp, Homo sapiens
taagagtctggacctgcatg

SEQ ID NO: 57773 - DNA, 22 bp, Homo sapiens
ggagggttgcagcccgtggggg

SEQ ID NO: 57774 - DNA, 24 bp, Homo sapiens
ccccaggcaaggatgccccccgag

SEQ ID NO: 57775 - DNA, 20 bp, Homo sapiens
cctgctcatactccacacac

SEQ ID NO: 57776 - DNA, 23 bp, Homo sapiens
ccacaggcaggaccccaagtgct

SEQ ID NO: 57777 - DNA, 22 bp, Homo sapiens
cgctgtgctccagggcggccag

SEQ ID NO: 57778 - DNA, 24 bp, Homo sapiens
cagctggggccccccgtgggcttc

SEQ ID NO: 57779 - DNA, 23 bp, Homo sapiens
gtctgtgtccatcccaaggccct

SEQ ID NO: 57780 - DNA, 20 bp, Homo sapiens
ctgccggggaccccgagagt

SEQ ID NO: 57781 - DNA, 18 bp, Homo sapiens
ggggaggtgcctgaggcc

SEQ ID NO: 57782 - DNA, 21 bp, Homo sapiens
gcagaggcccagggggctgct

SEQ ID NO: 57783 - DNA, 16 bp, Homo sapiens
atcccccgcccgcttg

SEQ ID NO: 57784 - DNA, 24 bp, Homo sapiens
ttggacaggaccaagttgtggcac

SEQ ID NO: 57785 - DNA, 23 bp, Homo sapiens
ttcttctgccggcctcttctcag

SEQ ID NO: 57786 - DNA, 22 bp, Homo sapiens
catcttggctcagggctccttg

SEQ ID NO: 57787 - DNA, 22 bp, Homo sapiens
ggtgcagggacagctcacgcac

SEQ ID NO: 57788 - DNA, 23 bp, Homo sapiens
ccagagtgtgtggttggggtctg

SEQ ID NO: 57789 - DNA, 24 bp, Homo sapiens
agccgtggctgggggcacccacgg

SEQ ID NO: 57790 - DNA, 24 bp, Homo sapiens
ccaccctgtccctcctgtctgaga

SEQ ID NO: 57791 - DNA, 23 bp, Homo sapiens
atcacagctgccctggacatcag

SEQ ID NO: 57792 - DNA, 24 bp, Homo sapiens
gaagaagatccggctggtcagcca

SEQ ID NO: 57793 - DNA, 22 bp, Homo sapiens
agagcttggccctgtccgtctg

SEQ ID NO: 57794 - DNA, 24 bp, Homo sapiens
cagcagccccacctcggcagtcac

SEQ ID NO: 57795 - DNA, 20 bp, Homo sapiens
cctgggtgaaggtggcaaag

SEQ ID NO: 57796 - DNA, 19 bp, Homo sapiens
cagccccagggaccagatg

SEQ ID NO: 57797 - DNA, 24 bp, Homo sapiens
agggggccgagacaggcggccagg

SEQ ID NO: 57798 - DNA, 23 bp, Homo sapiens
ggaggagcccgtggctggtgcac

SEQ ID NO: 57799 - DNA, 24 bp, Homo sapiens
gtgggtggcctctgcaagccaggg

SEQ ID NO: 57800 - DNA, 23 bp, Homo sapiens
tgaagcaggagttgagccaagcc

SEQ ID NO: 57801 - DNA, 22 bp, Homo sapiens
agaccaccttggacccagatgg

SEQ ID NO: 57802 - DNA, 20 bp, Homo sapiens
ggttccgatgacttcgccgc

SEQ ID NO: 57803 - DNA, 22 bp, Homo sapiens
cctgtagaggaaggggcgtctg

SEQ ID NO: 57804 - DNA, 18 bp, Homo sapiens
aagcacaacctgctccaa

SEQ ID NO: 57805 - DNA, 21 bp, Homo sapiens
gctggatacagacctcctcaa

SEQ ID NO: 57806 - DNA, 16 bp, Homo sapiens
gcgtgtggggtggggg

SEQ ID NO: 57807 - DNA, 21 bp, Homo sapiens
cggctgtgcccgctgccttcg

SEQ ID NO: 57808 - DNA, 21 bp, Homo sapiens
agaaaaaggggcagatgggga

SEQ ID NO: 57809 - DNA, 17 bp, Homo sapiens
aggagtctgagggtccc

SEQ ID NO: 57810 - DNA, 24 bp, Homo sapiens
cccaccataagcagcagtttgagg

SEQ ID NO: 57811 - DNA, 18 bp, Homo sapiens
cagggcccgaggatgccc

SEQ ID NO: 57812 - DNA, 17 bp, Homo sapiens
ctgagcacagcattccc

SEQ ID NO: 57813 - DNA, 23 bp, Homo sapiens
gctgctggtgctggtggtggagg

SEQ ID NO: 57814 - DNA, 21 bp, Homo sapiens
cagccgtggacacggtcagct

SEQ ID NO: 57815 - DNA, 17 bp, Homo sapiens
ccctggtctgaggtggg

SEQ ID NO: 57816 - DNA, 24 bp, Homo sapiens
ctgggcgacaggtggggcctgccc

SEQ ID NO: 57817 - DNA, 16 bp, Homo sapiens
cagggaactttccaga

SEQ ID NO: 57818 - DNA, 17 bp, Homo sapiens
ccaccaagtcgtaggct

SEQ ID NO: 57819 - DNA, 23 bp, Homo sapiens
tcaggaagaacggcgccggatcc

SEQ ID NO: 57820 - DNA, 24 bp, Homo sapiens
catgagatggctccccacaggggc

SEQ ID NO: 57821 - DNA, 24 bp, Homo sapiens
ccccaagagcacctgaaccagggc

SEQ ID NO: 57822 - DNA, 23 bp, Homo sapiens
ctggagagctgctcaggacaact

SEQ ID NO: 57823 - DNA, 24 bp, Homo sapiens
cactccagacccccactgtggttg

SEQ ID NO: 57824 - DNA, 23 bp, Homo sapiens
ctcccggttctgcaccccgcagt

SEQ ID NO: 57825 - DNA, 20 bp, Homo sapiens
catcagccaggtaggcgctc

SEQ ID NO: 57826 - DNA, 24 bp, Homo sapiens
cgggcagggcggtgggactctcag

SEQ ID NO: 57827 - DNA, 24 bp, Homo sapiens
ttgcttataggctgtcagcgctgc

SEQ ID NO: 57828 - DNA, 23 bp, Homo sapiens
tcccacaccaggagaccctggca

SEQ ID NO: 57829 - DNA, 22 bp, Homo sapiens
gtcctctggctttgcagtggtc

SEQ ID NO: 57830 - DNA, 23 bp, Homo sapiens
ggaagcagggccagcacgccgtg

SEQ ID NO: 57831 - DNA, 16 bp, Homo sapiens
caccggctgttcccca

SEQ ID NO: 57832 - DNA, 22 bp, Homo sapiens
ccgcgggctgtagccaactctt

SEQ ID NO: 57833 - DNA, 16 bp, Homo sapiens
cctgcggggagcttca

SEQ ID NO: 57834 - DNA, 23 bp, Homo sapiens
gacaaggtgctggctgtgttggc

SEQ ID NO: 57835 - DNA, 18 bp, Homo sapiens
gtcaggtctgtgcacgtc

SEQ ID NO: 57836 - DNA, 24 bp, Homo sapiens
acagcaagtggccctggcgtgggg

SEQ ID NO: 57837 - DNA, 24 bp, Homo sapiens
caggaggcacggcaagcctctcct

SEQ ID NO: 57838 - DNA, 22 bp, Homo sapiens
ctgtgccgggtctgattgaagc

SEQ ID NO: 57839 - DNA, 18 bp, Homo sapiens
gcgctgccaggagcagcc

SEQ ID NO: 57840 - DNA, 24 bp, Homo sapiens
caccacaagcagcgcttctcacag

SEQ ID NO: 57841 - DNA, 24 bp, Homo sapiens
gacttgagtctgaggggggcctgg

SEQ ID NO: 57842 - DNA, 24 bp, Homo sapiens
gcatggagccaccgggaccccagg

SEQ ID NO: 57843 - DNA, 20 bp, Homo sapiens
gatcttgctctgggtcttcc

SEQ ID NO: 57844 - DNA, 23 bp, Homo sapiens
tccccaaccaggtagggcacctg

SEQ ID NO: 57845 - DNA, 23 bp, Homo sapiens
ctgggacctgcatcctcaccgcc

SEQ ID NO: 57846 - DNA, 24 bp, Homo sapiens
cagccctgggagtgagcagcaaag

SEQ ID NO: 57847 - DNA, 19 bp, Homo sapiens
catgaggctcaccccactc

SEQ ID NO: 57848 - DNA, 23 bp, Homo sapiens
ctcacggtccgagaagaccggga

SEQ ID NO: 57849 - DNA, 18 bp, Homo sapiens
acagcctgctgagagggg

SEQ ID NO: 57850 - DNA, 24 bp, Homo sapiens
gaggccagcagggactgtgggggc

SEQ ID NO: 57851 - DNA, 24 bp, Homo sapiens
ggaagtcacaggcagggcactgga

SEQ ID NO: 57852 - DNA, 24 bp, Homo sapiens
ctccccacgggcctgcagcatctg

SEQ ID NO: 57853 - DNA, 18 bp, Homo sapiens
aactgtagtggccaggca

SEQ ID NO: 57854 - DNA, 24 bp, Homo sapiens
gggcagcaggccacgggagctccg

SEQ ID NO: 57855 - DNA, 24 bp, Homo sapiens
caccaggacaagggcctgcccttt

SEQ ID NO: 57856 - DNA, 24 bp, Homo sapiens
gggcagaggacgtggtgcccttcc

SEQ ID NO: 57857 - DNA, 20 bp, Homo sapiens
acatcctagaggcctgtgag

SEQ ID NO: 57858 - DNA, 23 bp, Homo sapiens
tggcaacggcaccttcaggttgg

SEQ ID NO: 57859 - DNA, 20 bp, Homo sapiens
gggctctggccagaagacct

SEQ ID NO: 57860 - DNA, 17 bp, Homo sapiens
tgggctgagggggaaag

SEQ ID NO: 57861 - DNA, 24 bp, Homo sapiens
agctggacaggcaggtgatcaagc

SEQ ID NO: 57862 - DNA, 22 bp, Homo sapiens
gtgtgcagtgggccggttgtct

SEQ ID NO: 57863 - DNA, 17 bp, Homo sapiens
agccggctggcatgggc

SEQ ID NO: 57864 - DNA, 24 bp, Homo sapiens
tccaggaagcagagcgtcatgcag

SEQ ID NO: 57865 - DNA, 24 bp, Homo sapiens
ggcccagatccggtcccaccgcag

SEQ ID NO: 57866 - DNA, 22 bp, Homo sapiens
cgacaacaaaacaaacctaaaa

SEQ ID NO: 57867 - DNA, 16 bp, Homo sapiens
gtgcacccggacggca

SEQ ID NO: 57868 - DNA, 24 bp, Homo sapiens
caaatgaattggaggaaaagaaaa

SEQ ID NO: 57869 - DNA, 16 bp, Homo sapiens
cgttggcctggacgat

SEQ ID NO: 57870 - DNA, 19 bp, Homo sapiens
gacaggcagccgcgtctcg

SEQ ID NO: 57871 - DNA, 17 bp, Homo sapiens
tgttcttccttttcagt

SEQ ID NO: 57872 - DNA, 21 bp, Homo sapiens
gtttctcagcatgtcgaagga

SEQ ID NO: 57873 - DNA, 21 bp, Homo sapiens
ggattattcttcagctcattg

SEQ ID NO: 57874 - DNA, 21 bp, Homo sapiens
gtgaacctggaggaagccaga

SEQ ID NO: 57875 - DNA, 21 bp, Homo sapiens
aggctgccttttccctgcagc

SEQ ID NO: 57876 - DNA, 21 bp, Homo sapiens
gctgcccagatggacttgctg

SEQ ID NO: 57877 - DNA, 16 bp, Homo sapiens
cttgcagtgagccaag

SEQ ID NO: 57878 - DNA, 22 bp, Homo sapiens
gtgagactccgtctcaaaaaaa

SEQ ID NO: 57879 - DNA, 18 bp, Homo sapiens
agagccgattatctcatc

SEQ ID NO: 57880 - DNA, 21 bp, Homo sapiens
taaaggagttgaaaagaatga

SEQ ID NO: 57881 - DNA, 23 bp, Homo sapiens
catctgcatcaacgacctcatca

SEQ ID NO: 57882 - DNA, 17 bp, Homo sapiens
taaaggggaaggacgct

SEQ ID NO: 57883 - DNA, 18 bp, Homo sapiens
ctgctcaattgtttgttt

SEQ ID NO: 57884 - DNA, 21 bp, Homo sapiens
cagcacagtcacgactctggc

SEQ ID NO: 57885 - DNA, 18 bp, Homo sapiens
agactgtaactttttcca

SEQ ID NO: 57886 - DNA, 22 bp, Homo sapiens
gttgtttattgtattctgtgat

SEQ ID NO: 57887 - DNA, 17 bp, Homo sapiens
tggttagagacacgaaa

SEQ ID NO: 57888 - DNA, 18 bp, Homo sapiens
ccaatctctctgcatcta

SEQ ID NO: 57889 - DNA, 20 bp, Homo sapiens
atcggcggagttctggttaa

SEQ ID NO: 57890 - DNA, 17 bp, Homo sapiens
gataatctgctcctgcc

SEQ ID NO: 57891 - DNA, 21 bp, Homo sapiens
ggatatcaacttacgagtgaa

SEQ ID NO: 57892 - DNA, 19 bp, Homo sapiens
atctaaaaatgctggggga

SEQ ID NO: 57893 - DNA, 16 bp, Homo sapiens
acttgcctgggcccct

SEQ ID NO: 57894 - DNA, 21 bp, Homo sapiens
ttctcccatgagtgttgagtt

SEQ ID NO: 57895 - DNA, 17 bp, Homo sapiens
tgaaaaagaggagagga

SEQ ID NO: 57896 - DNA, 19 bp, Homo sapiens
aatatcgttgggccacttc

SEQ ID NO: 57897 - DNA, 18 bp, Homo sapiens
ctgtcgtggaagcagtga

SEQ ID NO: 57898 - DNA, 23 bp, Homo sapiens
cagctgtgcaaagggtaggctga

SEQ ID NO: 57899 - DNA, 17 bp, Homo sapiens
ttccactgagatcccag

SEQ ID NO: 57900 - DNA, 18 bp, Homo sapiens
aataagccagattctgca

SEQ ID NO: 57901 - DNA, 16 bp, Homo sapiens
gggagggaatgtgtgg

SEQ ID NO: 57902 - DNA, 23 bp, Homo sapiens
ctgatactcgggaatggacctca

SEQ ID NO: 57903 - DNA, 20 bp, Homo sapiens
gacgtgtgtctgcgtctgtc

SEQ ID NO: 57904 - DNA, 18 bp, Homo sapiens
ggatcctctgtcccagct

SEQ ID NO: 57905 - DNA, 22 bp, Homo sapiens
gtaatacaataagcattgtaat

SEQ ID NO: 57906 - DNA, 16 bp, Homo sapiens
cacagggctcagccac

SEQ ID NO: 57907 - DNA, 17 bp, Homo sapiens
ttaatagtgatcgcggc

SEQ ID NO: 57908 - DNA, 17 bp, Homo sapiens
ctactaacttgagtccc

SEQ ID NO: 57909 - DNA, 16 bp, Homo sapiens
cctaaccggtctttcc

SEQ ID NO: 57910 - DNA, 24 bp, Homo sapiens
aagagttgcagagtttagaaaaca

SEQ ID NO: 57911 - DNA, 16 bp, Homo sapiens
cagatgcatgcaaacc

SEQ ID NO: 57912 - DNA, 22 bp, Homo sapiens
tttgccctcggtctgccgggcc

SEQ ID NO: 57913 - DNA, 16 bp, Homo sapiens
acattcctgaaggcca

SEQ ID NO: 57914 - DNA, 24 bp, Homo sapiens
ctttcccacgatttaactcttcta

SEQ ID NO: 57915 - DNA, 20 bp, Homo sapiens
gttggggaaagtaattttgt

SEQ ID NO: 57916 - DNA, 22 bp, Homo sapiens
caaacgtattcctctacaactc

SEQ ID NO: 57917 - DNA, 21 bp, Homo sapiens
tctcatcagaacatttcaact

SEQ ID NO: 57918 - DNA, 20 bp, Homo sapiens
gaacaggactcctctgagca

SEQ ID NO: 57919 - DNA, 19 bp, Homo sapiens
cgtgtctgaagtagaaata

SEQ ID NO: 57920 - DNA, 24 bp, Homo sapiens
atcgttgtgggggtcacttcggca

SEQ ID NO: 57921 - DNA, 16 bp, Homo sapiens
ggactccgagggagaa

SEQ ID NO: 57922 - DNA, 20 bp, Homo sapiens
ttttggcgatagatctctaa

SEQ ID NO: 57923 - DNA, 21 bp, Homo sapiens
gaccatctcatttctttcttt

SEQ ID NO: 57924 - DNA, 17 bp, Homo sapiens
acaagatggggttattt

SEQ ID NO: 57925 - DNA, 23 bp, Homo sapiens
caaaatggcattataaggaaaag

SEQ ID NO: 57926 - DNA, 20 bp, Homo sapiens
agagctggccggattttatt

SEQ ID NO: 57927 - DNA, 22 bp, Homo sapiens
cgtttagatgtatggaatatgt

SEQ ID NO: 57928 - DNA, 17 bp, Homo sapiens
ggatccctgatttcctg

SEQ ID NO: 57929 - DNA, 19 bp, Homo sapiens
caaaatgaatatttgcaca

SEQ ID NO: 57930 - DNA, 18 bp, Homo sapiens
gctgtgacatgaaacaag

SEQ ID NO: 57931 - DNA, 17 bp, Homo sapiens
aatcaaaaccaaccaaa

SEQ ID NO: 57932 - DNA, 23 bp, Homo sapiens
agtcaagcaattttagaagatac

SEQ ID NO: 57933 - DNA, 17 bp, Homo sapiens
acgtcacagcgcgctct

SEQ ID NO: 57934 - DNA, 24 bp, Homo sapiens
caggtgcacttagaactacctccc

SEQ ID NO: 57935 - DNA, 22 bp, Homo sapiens
gcaagtaaagaggagttaaggc

SEQ ID NO: 57936 - DNA, 16 bp, Homo sapiens
ctcattgcctgtgagt

SEQ ID NO: 57937 - DNA, 21 bp, Homo sapiens
tctctaaggacttcgtatctt

SEQ ID NO: 57938 - DNA, 19 bp, Homo sapiens
taatgagatcctgtctcta

SEQ ID NO: 57939 - DNA, 22 bp, Homo sapiens
tctggagtttgcactatgttgg

SEQ ID NO: 57940 - DNA, 21 bp, Homo sapiens
gaactaaactaaactttctgc

SEQ ID NO: 57941 - DNA, 16 bp, Homo sapiens
tgtgccttttggaact

SEQ ID NO: 57942 - DNA, 18 bp, Homo sapiens
cagcacacgaactcctga

SEQ ID NO: 57943 - DNA, 16 bp, Homo sapiens
cagccccggcaggctc

SEQ ID NO: 57944 - DNA, 22 bp, Homo sapiens
ctcgcaaaaatacccacagata

SEQ ID NO: 57945 - DNA, 16 bp, Homo sapiens
tgaagctcagcgtctt

SEQ ID NO: 57946 - DNA, 19 bp, Homo sapiens
gcaaagaacagcttctccc

SEQ ID NO: 57947 - DNA, 16 bp, Homo sapiens
agcaagggtgcactgc

SEQ ID NO: 57948 - DNA, 22 bp, Homo sapiens
gtcctcattctccaggtggccc

SEQ ID NO: 57949 - DNA, 23 bp, Homo sapiens
atctttctcagggagggaaggtg

SEQ ID NO: 57950 - DNA, 21 bp, Homo sapiens
ggtacctgcagccactgctca

SEQ ID NO: 57951 - DNA, 20 bp, Homo sapiens
cattgctaccagggagtcca

SEQ ID NO: 57952 - DNA, 18 bp, Homo sapiens
caagttctggactgtctt

SEQ ID NO: 57953 - DNA, 19 bp, Homo sapiens
taccacctgctggaggaca

SEQ ID NO: 57954 - DNA, 20 bp, Homo sapiens
tgaaggatgaagacaggccc

SEQ ID NO: 57955 - DNA, 16 bp, Homo sapiens
ccacgaggtccggtct

SEQ ID NO: 57956 - DNA, 23 bp, Homo sapiens
cttctggtacaggtcttcgggaa

SEQ ID NO: 57957 - DNA, 20 bp, Homo sapiens
cacgggaaaggcacccaaca

SEQ ID NO: 57958 - DNA, 21 bp, Homo sapiens
tccgtccacgggtctctgaga

SEQ ID NO: 57959 - DNA, 17 bp, Homo sapiens
tttggagagtgttgctg

SEQ ID NO: 57960 - DNA, 19 bp, Homo sapiens
cacacagtcggccagcaca

SEQ ID NO: 57961 - DNA, 24 bp, Homo sapiens
caccattgagtcagtcaagtttgc

SEQ ID NO: 57962 - DNA, 20 bp, Homo sapiens
agtcggagcccacatagagg

SEQ ID NO: 57963 - DNA, 18 bp, Homo sapiens
gcattatcacctccatct

SEQ ID NO: 57964 - DNA, 24 bp, Homo sapiens
ccttctctttcgggggaggtctca

SEQ ID NO: 57965 - DNA, 16 bp, Homo sapiens
cagtgcctctgggagt

SEQ ID NO: 57966 - DNA, 23 bp, Homo sapiens
ggtctggaatgttctcggcagac

SEQ ID NO: 57967 - DNA, 18 bp, Homo sapiens
gcatgttggcagagatga

SEQ ID NO: 57968 - DNA, 17 bp, Homo sapiens
agacactcgtggcaact

SEQ ID NO: 57969 - DNA, 17 bp, Homo sapiens
cagatcctagagccgaa

SEQ ID NO: 57970 - DNA, 19 bp, Homo sapiens
actgtccccagcaggctca

SEQ ID NO: 57971 - DNA, 20 bp, Homo sapiens
ttagcggtgcacttgcagga

SEQ ID NO: 57972 - DNA, 20 bp, Homo sapiens
caagagcctttgggtcatct

SEQ ID NO: 57973 - DNA, 19 bp, Homo sapiens
gtgtcatacaagaagtgtt

SEQ ID NO: 57974 - DNA, 20 bp, Homo sapiens
atctcaagagaaggttcagg

SEQ ID NO: 57975 - DNA, 19 bp, Homo sapiens
tgtcctggaatgtaagtcc

SEQ ID NO: 57976 - DNA, 24 bp, Homo sapiens
ctgatccttaacttccttcagagt

SEQ ID NO: 57977 - DNA, 19 bp, Homo sapiens
ttgtttgtttttttggaga

SEQ ID NO: 57978 - DNA, 18 bp, Homo sapiens
gttcatggaagatagact

SEQ ID NO: 57979 - DNA, 21 bp, Homo sapiens
ggctccaagcgatcctcctgc

SEQ ID NO: 57980 - DNA, 18 bp, Homo sapiens
ggatccttatcggctaat

SEQ ID NO: 57981 - DNA, 22 bp, Homo sapiens
gccactatgcctggccaataaa

SEQ ID NO: 57982 - DNA, 20 bp, Homo sapiens
ccctctcctgctttttctca

SEQ ID NO: 57983 - DNA, 23 bp, Homo sapiens
gtaccagtccattatccatgtgg

SEQ ID NO: 57984 - DNA, 22 bp, Homo sapiens
tgacttgctgaacttcgtggcc

SEQ ID NO: 57985 - DNA, 16 bp, Homo sapiens
ataacggtgccaggcc

SEQ ID NO: 57986 - DNA, 16 bp, Homo sapiens
accgggaagtccagtc

SEQ ID NO: 57987 - DNA, 24 bp, Homo sapiens
aggaaagcgaaggagaagtgggca

SEQ ID NO: 57988 - DNA, 17 bp, Homo sapiens
ccacccagcctcccacg

SEQ ID NO: 57989 - DNA, 23 bp, Homo sapiens
cttcacttctggtcccgctcctg

SEQ ID NO: 57990 - DNA, 16 bp, Homo sapiens
ctgggcccccatggtg

SEQ ID NO: 57991 - DNA, 16 bp, Homo sapiens
ccatctgccgctgact

SEQ ID NO: 57992 - DNA, 16 bp, Homo sapiens
aggccctgtctcagaa

SEQ ID NO: 57993 - DNA, 23 bp, Homo sapiens
ggcatgtgggaggcccaggcata

SEQ ID NO: 57994 - DNA, 21 bp, Homo sapiens
atcctggagatggaccacttc

SEQ ID NO: 57995 - DNA, 23 bp, Homo sapiens
cccctaacaccccgcaggggatg

SEQ ID NO: 57996 - DNA, 20 bp, Homo sapiens
ctgccactgaccacgcttcc

SEQ ID NO: 57997 - DNA, 24 bp, Homo sapiens
tggtggcctgaccccagtgagaac

SEQ ID NO: 57998 - DNA, 23 bp, Homo sapiens
tttgcaggacccaccatcgcatc

SEQ ID NO: 57999 - DNA, 24 bp, Homo sapiens
gctcgtgcaccaccagggcgaagt

SEQ ID NO: 58000 - DNA, 21 bp, Homo sapiens
agacgtcacccgaatccacgt

SEQ ID NO: 58001 - DNA, 16 bp, Homo sapiens
caagttggcaaagtca

SEQ ID NO: 58002 - DNA, 23 bp, Homo sapiens
acctgtttgagctgcctgtaggt

SEQ ID NO: 58003 - DNA, 19 bp, Homo sapiens
atggtgacgcttgggaaca

SEQ ID NO: 58004 - DNA, 17 bp, Homo sapiens
gaggggtgaggtatgag

SEQ ID NO: 58005 - DNA, 24 bp, Homo sapiens
gggtacctgtttgaactgcttgta

SEQ ID NO: 58006 - DNA, 24 bp, Homo sapiens
gaggacttccatgtgtggccagag

SEQ ID NO: 58007 - DNA, 24 bp, Homo sapiens
ttcccggcaagcagggacgagagc

SEQ ID NO: 58008 - DNA, 20 bp, Homo sapiens
tctttctccccaccagggcc

SEQ ID NO: 58009 - DNA, 24 bp, Homo sapiens
ctgctcagggaccggcaaggggcc

SEQ ID NO: 58010 - DNA, 21 bp, Homo sapiens
tcctccgggagaagggcttcg

SEQ ID NO: 58011 - DNA, 23 bp, Homo sapiens
ctatcagcccagctgcagggtct

SEQ ID NO: 58012 - DNA, 23 bp, Homo sapiens
gagctgggcctgtcagccccgct

SEQ ID NO: 58013 - DNA, 23 bp, Homo sapiens
ctgggcagacagaacccaggact

SEQ ID NO: 58014 - DNA, 21 bp, Homo sapiens
tatcctgatccccccgacctg

SEQ ID NO: 58015 - DNA, 24 bp, Homo sapiens
gcctcatccaccacgggcgcctgg

SEQ ID NO: 58016 - DNA, 21 bp, Homo sapiens
ggagagcggtccctgtggcct

SEQ ID NO: 58017 - DNA, 24 bp, Homo sapiens
caggtgatggtcgggagcacggtc

SEQ ID NO: 58018 - DNA, 17 bp, Homo sapiens
caggagagcggtccccg

SEQ ID NO: 58019 - DNA, 20 bp, Homo sapiens
ggagaagaagccctggtaag

SEQ ID NO: 58020 - DNA, 19 bp, Homo sapiens
ggcagggccagcacaggcc

SEQ ID NO: 58021 - DNA, 23 bp, Homo sapiens
aggaccaagttcctgagcgacag

SEQ ID NO: 58022 - DNA, 23 bp, Homo sapiens
cacaggccacgggggagtgctct

SEQ ID NO: 58023 - DNA, 23 bp, Homo sapiens
ccactcagcaggggcgggggccc

SEQ ID NO: 58024 - DNA, 24 bp, Homo sapiens
gcgggtctccggccgagcggtctt

SEQ ID NO: 58025 - DNA, 19 bp, Homo sapiens
ggtctctgctgcaccagtg

SEQ ID NO: 58026 - DNA, 23 bp, Homo sapiens
gaaagcccttctgcagcatccac

SEQ ID NO: 58027 - DNA, 24 bp, Homo sapiens
agcgtgagggcacgtgggcaggag

SEQ ID NO: 58028 - DNA, 23 bp, Homo sapiens
ctgcaggagggccagcgctgcgt

SEQ ID NO: 58029 - DNA, 24 bp, Homo sapiens
tcccctcccagttctggctgccgg

SEQ ID NO: 58030 - DNA, 23 bp, Homo sapiens
tctctgcaggtggcagtgctggc

SEQ ID NO: 58031 - DNA, 24 bp, Homo sapiens
gtggcaggatggagaggagcaggg

SEQ ID NO: 58032 - DNA, 18 bp, Homo sapiens
acaattcatgcatacgtg

SEQ ID NO: 58033 - DNA, 21 bp, Homo sapiens
cactgagtcgggcagaatgac

SEQ ID NO: 58034 - DNA, 23 bp, Homo sapiens
caacccctcttgacggatccttc

SEQ ID NO: 58035 - DNA, 24 bp, Homo sapiens
cttcacggccaccgccaccgtgct

SEQ ID NO: 58036 - DNA, 24 bp, Homo sapiens
gcagacaacacctgaggctcgtgg

SEQ ID NO: 58037 - DNA, 20 bp, Homo sapiens
gcaacgatgaggaggcgttc

SEQ ID NO: 58038 - DNA, 21 bp, Homo sapiens
aggtcggtggctgactgaggg

SEQ ID NO: 58039 - DNA, 24 bp, Homo sapiens
gagcggctcccacgctgacgggct

SEQ ID NO: 58040 - DNA, 24 bp, Homo sapiens
atctctgccttccccatacccccg

SEQ ID NO: 58041 - DNA, 20 bp, Homo sapiens
taccgcctagacacggggtc

SEQ ID NO: 58042 - DNA, 24 bp, Homo sapiens
cgcgatcagcatgcgggcaaaggt

SEQ ID NO: 58043 - DNA, 21 bp, Homo sapiens
tggaactggaaagtctgcaga

SEQ ID NO: 58044 - DNA, 16 bp, Homo sapiens
ggtgctggacaggacg

SEQ ID NO: 58045 - DNA, 23 bp, Homo sapiens
cttctcaccatgcgtgcggggct

SEQ ID NO: 58046 - DNA, 16 bp, Homo sapiens
gaaccagacggagcag

SEQ ID NO: 58047 - DNA, 24 bp, Homo sapiens
gggtcagccaggctccccagtgtg

SEQ ID NO: 58048 - DNA, 24 bp, Homo sapiens
aagccgcgccctctgcagatcatt

SEQ ID NO: 58049 - DNA, 24 bp, Homo sapiens
ggctctggactcgacctaccgtcc

SEQ ID NO: 58050 - DNA, 20 bp, Homo sapiens
ccactcccataatagaatat

SEQ ID NO: 58051 - DNA, 17 bp, Homo sapiens
tcgtaggttgtctgctc

SEQ ID NO: 58052 - DNA, 23 bp, Homo sapiens
aacaggccaccacccacaggcag

SEQ ID NO: 58053 - DNA, 16 bp, Homo sapiens
gggatccaccccaatg

SEQ ID NO: 58054 - DNA, 16 bp, Homo sapiens
tggtcccttatgtgtc

SEQ ID NO: 58055 - DNA, 16 bp, Homo sapiens
cgggcattgccaggaa

SEQ ID NO: 58056 - DNA, 17 bp, Homo sapiens
cagaaataccgcgggag

SEQ ID NO: 58057 - DNA, 20 bp, Homo sapiens
tgttatccgtccaccaggga

SEQ ID NO: 58058 - DNA, 24 bp, Homo sapiens
gctcagaagccggggccactccgc

SEQ ID NO: 58059 - DNA, 22 bp, Homo sapiens
ctgagtgtgttttcaatgatta

SEQ ID NO: 58060 - DNA, 16 bp, Homo sapiens
gacacttctccttcag

SEQ ID NO: 58061 - DNA, 21 bp, Homo sapiens
aactggagaagaagtttttct

SEQ ID NO: 58062 - DNA, 18 bp, Homo sapiens
caccagcatgtccagctt

SEQ ID NO: 58063 - DNA, 20 bp, Homo sapiens
gaggaaattgttctagagaa

SEQ ID NO: 58064 - DNA, 17 bp, Homo sapiens
aaccccctggctcacta

SEQ ID NO: 58065 - DNA, 19 bp, Homo sapiens
ggttctgaagggtgaatag

SEQ ID NO: 58066 - DNA, 18 bp, Homo sapiens
ctgaggtgtcaggggtca

SEQ ID NO: 58067 - DNA, 18 bp, Homo sapiens
cagggataaatgcaatca

SEQ ID NO: 58068 - DNA, 24 bp, Homo sapiens
aggtgaggcacctggggcctggag

SEQ ID NO: 58069 - DNA, 21 bp, Homo sapiens
ggatctcatcagcggtggtgt

SEQ ID NO: 58070 - DNA, 19 bp, Homo sapiens
gtggcctggcggctgaaga

SEQ ID NO: 58071 - DNA, 22 bp, Homo sapiens
agagagcagagcccgtgagctg

SEQ ID NO: 58072 - DNA, 16 bp, Homo sapiens
ggctgagattgtgagg

SEQ ID NO: 58073 - DNA, 16 bp, Homo sapiens
cctcctagggaatgcc

SEQ ID NO: 58074 - DNA, 24 bp, Homo sapiens
ctgggccaggcggaaggtgcaggc

SEQ ID NO: 58075 - DNA, 18 bp, Homo sapiens
gagaattggggatttcgt

SEQ ID NO: 58076 - DNA, 24 bp, Homo sapiens
ctccgagaaggtgggtgggcgtgg

SEQ ID NO: 58077 - DNA, 18 bp, Homo sapiens
aacctggcattggtgggc

SEQ ID NO: 58078 - DNA, 23 bp, Homo sapiens
ctggctgcggcagtgaggggcta

SEQ ID NO: 58079 - DNA, 24 bp, Homo sapiens
ccacctgcaggagggaaagcggtg

SEQ ID NO: 58080 - DNA, 16 bp, Homo sapiens
cttggggggtcactgg

SEQ ID NO: 58081 - DNA, 24 bp, Homo sapiens
tcccctgccctatgaccccgcccc

SEQ ID NO: 58082 - DNA, 21 bp, Homo sapiens
ccctgggccctaagggaaccg

SEQ ID NO: 58083 - DNA, 16 bp, Homo sapiens
acgatgatgcagcgat

SEQ ID NO: 58084 - DNA, 23 bp, Homo sapiens
cccctgcacttgaaggcagaagc

SEQ ID NO: 58085 - DNA, 23 bp, Homo sapiens
gaagcccggggacacgattatcg

SEQ ID NO: 58086 - DNA, 20 bp, Homo sapiens
gcggccaggcgggccagcac

SEQ ID NO: 58087 - DNA, 23 bp, Homo sapiens
tgaaggaccgcatcagcctgcgg

SEQ ID NO: 58088 - DNA, 22 bp, Homo sapiens
gcaggctcggcatgggtagggg

SEQ ID NO: 58089 - DNA, 24 bp, Homo sapiens
cctctgtgattcatctctgcctcc

SEQ ID NO: 58090 - DNA, 24 bp, Homo sapiens
gcacccaccggtgttcccggatgt

SEQ ID NO: 58091 - DNA, 16 bp, Homo sapiens
aggtaatgggggggtg

SEQ ID NO: 58092 - DNA, 22 bp, Homo sapiens
ctcagcatcctcaatcatccgc

SEQ ID NO: 58093 - DNA, 17 bp, Homo sapiens
gaggtggcaatttttca

SEQ ID NO: 58094 - DNA, 18 bp, Homo sapiens
cagctctcacaggtcccc

SEQ ID NO: 58095 - DNA, 19 bp, Homo sapiens
cttggggacaaggcgggga

SEQ ID NO: 58096 - DNA, 24 bp, Homo sapiens
aaaagtcccaagccatgttactgg

SEQ ID NO: 58097 - DNA, 23 bp, Homo sapiens
ccaagagcgcagagccctggtag

SEQ ID NO: 58098 - DNA, 21 bp, Homo sapiens
gtcgcggggttctccgcggca

SEQ ID NO: 58099 - DNA, 16 bp, Homo sapiens
gcagtttccaggctca

SEQ ID NO: 58100 - DNA, 19 bp, Homo sapiens
taagctgatatgttcttgg

SEQ ID NO: 58101 - DNA, 17 bp, Homo sapiens
gacacccctatggtcag

SEQ ID NO: 58102 - DNA, 17 bp, Homo sapiens
aagggatccatcccagg

SEQ ID NO: 58103 - DNA, 24 bp, Homo sapiens
ggactcctctgtttcagggcaaaa

SEQ ID NO: 58104 - DNA, 16 bp, Homo sapiens
ggaagcccctctccaa

SEQ ID NO: 58105 - DNA, 16 bp, Homo sapiens
caatgtctgccagggc

SEQ ID NO: 58106 - DNA, 24 bp, Homo sapiens
ggccgaacttcttcccaatcttgt

SEQ ID NO: 58107 - DNA, 18 bp, Homo sapiens
gccagttctttttttttt

SEQ ID NO: 58108 - DNA, 19 bp, Homo sapiens
ctggcaagatttttggaga

SEQ ID NO: 58109 - DNA, 24 bp, Homo sapiens
ctcagagcctcatctacacggcat

SEQ ID NO: 58110 - DNA, 17 bp, Homo sapiens
caggtgcacctggcagc

SEQ ID NO: 58111 - DNA, 22 bp, Homo sapiens
gttacacctcatgtcctcctgg

SEQ ID NO: 58112 - DNA, 16 bp, Homo sapiens
tccccagaggataagg

SEQ ID NO: 58113 - DNA, 24 bp, Homo sapiens
tatggatcagccctcttgtgatca

SEQ ID NO: 58114 - DNA, 23 bp, Homo sapiens
agaagtggggcccacaggctgcc

SEQ ID NO: 58115 - DNA, 22 bp, Homo sapiens
actcggaggcaggccggcccag

SEQ ID NO: 58116 - DNA, 17 bp, Homo sapiens
ctctctccttgctttgc

SEQ ID NO: 58117 - DNA, 22 bp, Homo sapiens
acaggggctccttggcttcctt

SEQ ID NO: 58118 - DNA, 23 bp, Homo sapiens
cctcccagagggggccgggtcag

SEQ ID NO: 58119 - DNA, 21 bp, Homo sapiens
cgagtgtggccctgagcggtg

SEQ ID NO: 58120 - DNA, 24 bp, Homo sapiens
cagggctggtgcctgtgtttttgt

SEQ ID NO: 58121 - DNA, 21 bp, Homo sapiens
actaccctaggaagtgaaaac

SEQ ID NO: 58122 - DNA, 16 bp, Homo sapiens
tgaaggagttcgacaa

SEQ ID NO: 58123 - DNA, 20 bp, Homo sapiens
gttagaagcagtagctcagg

SEQ ID NO: 58124 - DNA, 16 bp, Homo sapiens
acaggtggccctggtg

SEQ ID NO: 58125 - DNA, 22 bp, Homo sapiens
caggctgggcgctgccacccgg

SEQ ID NO: 58126 - DNA, 23 bp, Homo sapiens
tcgaagaaaacttctgaacgctg

SEQ ID NO: 58127 - DNA, 17 bp, Homo sapiens
aggctttctccttgtcg

SEQ ID NO: 58128 - DNA, 24 bp, Homo sapiens
agtgaaggcttttatctctttcca

SEQ ID NO: 58129 - DNA, 22 bp, Homo sapiens
gacacccagaacggcccgcagg

SEQ ID NO: 58130 - DNA, 24 bp, Homo sapiens
tgggcacccctgtgggccactcac

SEQ ID NO: 58131 - DNA, 21 bp, Homo sapiens
cacgggcaccgccatccagtg

SEQ ID NO: 58132 - DNA, 23 bp, Homo sapiens
ctgggcacccccgtgggccactc

SEQ ID NO: 58133 - DNA, 16 bp, Homo sapiens
tacgatgtgctgctgc

SEQ ID NO: 58134 - DNA, 16 bp, Homo sapiens
gccaggcgctcctgcg

SEQ ID NO: 58135 - DNA, 23 bp, Homo sapiens
tggtctcctgggctggagggcgg

SEQ ID NO: 58136 - DNA, 16 bp, Homo sapiens
ctgaccttgaagcgca

SEQ ID NO: 58137 - DNA, 23 bp, Homo sapiens
ggctccgactcgagccctggcac

SEQ ID NO: 58138 - DNA, 24 bp, Homo sapiens
cctgcagcaggagcactagcagca

SEQ ID NO: 58139 - DNA, 20 bp, Homo sapiens
ttgagctagaatgattatca

SEQ ID NO: 58140 - DNA, 22 bp, Homo sapiens
gcattggggagcacggtcaccg

SEQ ID NO: 58141 - DNA, 24 bp, Homo sapiens
ggatatctgtcattcagcatcatg

SEQ ID NO: 58142 - DNA, 24 bp, Homo sapiens
gtccctggagccagcgcccccaga

SEQ ID NO: 58143 - DNA, 17 bp, Homo sapiens
ctgattgccataagcag

SEQ ID NO: 58144 - DNA, 22 bp, Homo sapiens
cagagcaccacatgtctggggg

SEQ ID NO: 58145 - DNA, 16 bp, Homo sapiens
cctgggctcccaggct

SEQ ID NO: 58146 - DNA, 24 bp, Homo sapiens
cgggtaatccttaaacatctccac

SEQ ID NO: 58147 - DNA, 16 bp, Homo sapiens
ctatgcccatgagtgc

SEQ ID NO: 58148 - DNA, 19 bp, Homo sapiens
cagcggagacgtgaggctg

SEQ ID NO: 58149 - DNA, 22 bp, Homo sapiens
aagaaaaagaaaaaagaaaagg

SEQ ID NO: 58150 - DNA, 21 bp, Homo sapiens
cagcctccacctcccacaacc

SEQ ID NO: 58151 - DNA, 21 bp, Homo sapiens
ccaagtgccattgccagtcat

SEQ ID NO: 58152 - DNA, 17 bp, Homo sapiens
gcgctctcttgggctgg

SEQ ID NO: 58153 - DNA, 21 bp, Homo sapiens
ggaattcgacttcttcgacta

SEQ ID NO: 58154 - DNA, 22 bp, Homo sapiens
tggccccgctcggtgggtccct

SEQ ID NO: 58155 - DNA, 21 bp, Homo sapiens
agcaagccagccaggcagcct

SEQ ID NO: 58156 - DNA, 17 bp, Homo sapiens
acactctgctgccacat

SEQ ID NO: 58157 - DNA, 17 bp, Homo sapiens
gacccgtccctgcccca

SEQ ID NO: 58158 - DNA, 18 bp, Homo sapiens
actccccagttcttctga

SEQ ID NO: 58159 - DNA, 22 bp, Homo sapiens
attgccctgaacgtggatgact

SEQ ID NO: 58160 - DNA, 21 bp, Homo sapiens
ctgaatgcaccaagactgagc

SEQ ID NO: 58161 - DNA, 16 bp, Homo sapiens
ccaggtcgtcgaggta

SEQ ID NO: 58162 - DNA, 18 bp, Homo sapiens
ggcgggcgggccagaggg

SEQ ID NO: 58163 - DNA, 16 bp, Homo sapiens
cagtgcattctgggaa

SEQ ID NO: 58164 - DNA, 23 bp, Homo sapiens
gtcactgagaggtgtgggcctga

SEQ ID NO: 58165 - DNA, 16 bp, Homo sapiens
cacggttagatctggg

SEQ ID NO: 58166 - DNA, 23 bp, Homo sapiens
ggacggcagagatgcctgcgatt

SEQ ID NO: 58167 - DNA, 20 bp, Homo sapiens
atgataccaataacagacta

SEQ ID NO: 58168 - DNA, 21 bp, Homo sapiens
aacattctggacgaagtgcca

SEQ ID NO: 58169 - DNA, 19 bp, Homo sapiens
gacagccaactcttcgcca

SEQ ID NO: 58170 - DNA, 16 bp, Homo sapiens
tgcacccggggtgaca

SEQ ID NO: 58171 - DNA, 23 bp, Homo sapiens
gtcacccccgacagagtatgaga

SEQ ID NO: 58172 - DNA, 16 bp, Homo sapiens
tgacctgacccactgc

SEQ ID NO: 58173 - DNA, 24 bp, Homo sapiens
ttcaggacccgagcaggaaatggc

SEQ ID NO: 58174 - DNA, 19 bp, Homo sapiens
gaacatttcctcaagccca

SEQ ID NO: 58175 - DNA, 24 bp, Homo sapiens
ctgcacggtccagcgaggaggact

SEQ ID NO: 58176 - DNA, 24 bp, Homo sapiens
gagagaggggtctcatgggaatgc

SEQ ID NO: 58177 - DNA, 19 bp, Homo sapiens
ctcatcctgctgctcctgc

SEQ ID NO: 58178 - DNA, 18 bp, Homo sapiens
ctcgctcaccctggggtg

SEQ ID NO: 58179 - DNA, 16 bp, Homo sapiens
ggcgtgagaaaggcgg

SEQ ID NO: 58180 - DNA, 19 bp, Homo sapiens
cacccaccttctttttctt

SEQ ID NO: 58181 - DNA, 16 bp, Homo sapiens
gagagtcctgcgcagc

SEQ ID NO: 58182 - DNA, 16 bp, Homo sapiens
catgagcagctccagc

SEQ ID NO: 58183 - DNA, 16 bp, Homo sapiens
caggagagtgtgcagc

SEQ ID NO: 58184 - DNA, 21 bp, Homo sapiens
aagacaattattttctttgga

SEQ ID NO: 58185 - DNA, 16 bp, Homo sapiens
tttggtttggatgcaa

SEQ ID NO: 58186 - DNA, 18 bp, Homo sapiens
gaataacatttaccacct

SEQ ID NO: 58187 - DNA, 19 bp, Homo sapiens
ttcagattcccaactttca

SEQ ID NO: 58188 - DNA, 21 bp, Homo sapiens
ggagtggggctgtgggtgtca

SEQ ID NO: 58189 - DNA, 21 bp, Homo sapiens
gtggtttatctgttacctttt

SEQ ID NO: 58190 - DNA, 16 bp, Homo sapiens
tgggttcaggactagt

SEQ ID NO: 58191 - DNA, 17 bp, Homo sapiens
ggactccccaccattat

SEQ ID NO: 58192 - DNA, 23 bp, Homo sapiens
aacgtggaaacaaacaatatctg

SEQ ID NO: 58193 - DNA, 16 bp, Homo sapiens
ggcaattgtgagcttc

SEQ ID NO: 58194 - DNA, 17 bp, Homo sapiens
cggtgccacaacgtctg

SEQ ID NO: 58195 - DNA, 23 bp, Homo sapiens
cagagtctcagttgctcaggtga

SEQ ID NO: 58196 - DNA, 17 bp, Homo sapiens
gcccctccggctttctc

SEQ ID NO: 58197 - DNA, 20 bp, Homo sapiens
cactgttttgtgaatatgat

SEQ ID NO: 58198 - DNA, 23 bp, Homo sapiens
acattggcgttcctcctggagac

SEQ ID NO: 58199 - DNA, 23 bp, Homo sapiens
gagaagtacctgggggccttcta

SEQ ID NO: 58200 - DNA, 16 bp, Homo sapiens
caaagtgctggcatga

SEQ ID NO: 58201 - DNA, 19 bp, Homo sapiens
gaacgtgttcccggctgag

SEQ ID NO: 58202 - DNA, 24 bp, Homo sapiens
agaggtttgaatgaggtacaggtg

SEQ ID NO: 58203 - DNA, 17 bp, Homo sapiens
gattctgtcgctgtctt

SEQ ID NO: 58204 - DNA, 24 bp, Homo sapiens
cacgtgccggcgagcttgggcact

SEQ ID NO: 58205 - DNA, 18 bp, Homo sapiens
cagtgaagcagaagttga

SEQ ID NO: 58206 - DNA, 22 bp, Homo sapiens
cacagcgcaagtaatccatctc

SEQ ID NO: 58207 - DNA, 20 bp, Homo sapiens
gtcccaggtgcgggtgtggt

SEQ ID NO: 58208 - DNA, 22 bp, Homo sapiens
gaggtcaccaggaggcagctct

SEQ ID NO: 58209 - DNA, 19 bp, Homo sapiens
caaaacaagctcgtcggca

SEQ ID NO: 58210 - DNA, 16 bp, Homo sapiens
gaagagactgcccccc

SEQ ID NO: 58211 - DNA, 16 bp, Homo sapiens
ctctctgtcccacctg

SEQ ID NO: 58212 - DNA, 20 bp, Homo sapiens
ctggagcggggccggcaaga

SEQ ID NO: 58213 - DNA, 23 bp, Homo sapiens
agatgctcgtggccctccaaggg

SEQ ID NO: 58214 - DNA, 22 bp, Homo sapiens
gtgccatgacccaggagccatt

SEQ ID NO: 58215 - DNA, 20 bp, Homo sapiens
cacgtcttgtggctgaagca

SEQ ID NO: 58216 - DNA, 18 bp, Homo sapiens
agataaagaactggtgac

SEQ ID NO: 58217 - DNA, 23 bp, Homo sapiens
cgtctggggcatagctggcgggg

SEQ ID NO: 58218 - DNA, 24 bp, Homo sapiens
aaaaatatttcttggaaacaactt

SEQ ID NO: 58219 - DNA, 16 bp, Homo sapiens
ctcctctctgaatggc

SEQ ID NO: 58220 - DNA, 23 bp, Homo sapiens
acacagcattaccccaggattgg

SEQ ID NO: 58221 - DNA, 17 bp, Homo sapiens
gctgtcatcctggctgc

SEQ ID NO: 58222 - DNA, 18 bp, Homo sapiens
gttatcaggcacaaaccc

SEQ ID NO: 58223 - DNA, 23 bp, Homo sapiens
tagacgcagctgtgaccttcggc

SEQ ID NO: 58224 - DNA, 24 bp, Homo sapiens
ccagtgaggagccatcacatgccc

SEQ ID NO: 58225 - DNA, 23 bp, Homo sapiens
ggggccaccccagaggtgctgca

SEQ ID NO: 58226 - DNA, 22 bp, Homo sapiens
tggcagcaagctgggcgggggg

SEQ ID NO: 58227 - DNA, 18 bp, Homo sapiens
tctatgacctgtccaagg

SEQ ID NO: 58228 - DNA, 21 bp, Homo sapiens
ctcgccccgggccacctggct

SEQ ID NO: 58229 - DNA, 22 bp, Homo sapiens
tgataccactgcagaccctgcc

SEQ ID NO: 58230 - DNA, 24 bp, Homo sapiens
agcagctgaagctgtttcagggct

SEQ ID NO: 58231 - DNA, 16 bp, Homo sapiens
cgcccttgccctgtgc

SEQ ID NO: 58232 - DNA, 21 bp, Homo sapiens
caggttgtagttctcaccagg

SEQ ID NO: 58233 - DNA, 16 bp, Homo sapiens
gatccctccccccgac

SEQ ID NO: 58234 - DNA, 21 bp, Homo sapiens
gtcagagagctggaggcgtgg

SEQ ID NO: 58235 - DNA, 21 bp, Homo sapiens
gtggggtttttgctgtgcgga

SEQ ID NO: 58236 - DNA, 19 bp, Homo sapiens
gggggccaattctgtgcac

SEQ ID NO: 58237 - DNA, 16 bp, Homo sapiens
gagccctcggcagtct

SEQ ID NO: 58238 - DNA, 24 bp, Homo sapiens
agggctccggggaggggtcagcag

SEQ ID NO: 58239 - DNA, 21 bp, Homo sapiens
ctggcagccccaggtatgtgc

SEQ ID NO: 58240 - DNA, 24 bp, Homo sapiens
aagaagtgagccttgtactttcca

SEQ ID NO: 58241 - DNA, 22 bp, Homo sapiens
gccacctctcaggttcctgggt

SEQ ID NO: 58242 - DNA, 16 bp, Homo sapiens
gggtagaagaagagag

SEQ ID NO: 58243 - DNA, 24 bp, Homo sapiens
cctggacgtgcaccgcttcttgcc

SEQ ID NO: 58244 - DNA, 16 bp, Homo sapiens
ccttggatggctttga

SEQ ID NO: 58245 - DNA, 24 bp, Homo sapiens
cactcagtgcaggaggcactgagg

SEQ ID NO: 58246 - DNA, 23 bp, Homo sapiens
agctggccagctccctggacctg

SEQ ID NO: 58247 - DNA, 24 bp, Homo sapiens
ggaaggccaggacaggggccaagg

SEQ ID NO: 58248 - DNA, 22 bp, Homo sapiens
ccccaaccttgatggcgaactg

SEQ ID NO: 58249 - DNA, 22 bp, Homo sapiens
agcagcagggggctgaggtcaa

SEQ ID NO: 58250 - DNA, 21 bp, Homo sapiens
caggtcatatcgctcccggtc

SEQ ID NO: 58251 - DNA, 23 bp, Homo sapiens
cagccagggctgccagggtaggc

SEQ ID NO: 58252 - DNA, 21 bp, Homo sapiens
ggtgtggaaagggaacgacct

SEQ ID NO: 58253 - DNA, 24 bp, Homo sapiens
gggcaggaggctggtcagtcactc

SEQ ID NO: 58254 - DNA, 23 bp, Homo sapiens
gcctcctgtgtcccagacctgag

SEQ ID NO: 58255 - DNA, 24 bp, Homo sapiens
tccaaggagagggcctgcggactg

SEQ ID NO: 58256 - DNA, 21 bp, Homo sapiens
gtggggccactggtcaccctc

SEQ ID NO: 58257 - DNA, 21 bp, Homo sapiens
gctctcggacaccgccctcgt

SEQ ID NO: 58258 - DNA, 16 bp, Homo sapiens
gggaggtgccgggctc

SEQ ID NO: 58259 - DNA, 23 bp, Homo sapiens
cagccgcctcgggacatacgcat

SEQ ID NO: 58260 - DNA, 17 bp, Homo sapiens
cactgtgtctcctgact

SEQ ID NO: 58261 - DNA, 24 bp, Homo sapiens
gatgacagccataggggacctggg

SEQ ID NO: 58262 - DNA, 16 bp, Homo sapiens
cctcacccactatgtt

SEQ ID NO: 58263 - DNA, 22 bp, Homo sapiens
gcgggccatttggggactccct

SEQ ID NO: 58264 - DNA, 24 bp, Homo sapiens
ctggcccgtgacagggccggagca

SEQ ID NO: 58265 - DNA, 16 bp, Homo sapiens
cagcacacccactacc

SEQ ID NO: 58266 - DNA, 20 bp, Homo sapiens
agatgaccagcgtctcttca

SEQ ID NO: 58267 - DNA, 20 bp, Homo sapiens
aagtgatcttggcccaaccc

SEQ ID NO: 58268 - DNA, 21 bp, Homo sapiens
acagctgcatccagctccatc

SEQ ID NO: 58269 - DNA, 16 bp, Homo sapiens
atggccgacgcccagc

SEQ ID NO: 58270 - DNA, 17 bp, Homo sapiens
cccactgaactgagggt

SEQ ID NO: 58271 - DNA, 16 bp, Homo sapiens
gcccccctggctgccc

SEQ ID NO: 58272 - DNA, 22 bp, Homo sapiens
gggtaggggtcacgggcagcca

SEQ ID NO: 58273 - DNA, 18 bp, Homo sapiens
gcgacggtggctgtgacc

SEQ ID NO: 58274 - DNA, 24 bp, Homo sapiens
tagtacaggaagaaggggcgatcc

SEQ ID NO: 58275 - DNA, 22 bp, Homo sapiens
cggcagctgcccgcctcagggc

SEQ ID NO: 58276 - DNA, 24 bp, Homo sapiens
agccatgtagcgggcctctagtcc

SEQ ID NO: 58277 - DNA, 17 bp, Homo sapiens
agtcccccagcccttga

SEQ ID NO: 58278 - DNA, 24 bp, Homo sapiens
acagtgggatggggaccaggccct

SEQ ID NO: 58279 - DNA, 23 bp, Homo sapiens
tttctaggcatcccgtactccca

SEQ ID NO: 58280 - DNA, 21 bp, Homo sapiens
gaagcaggtcaggttctggca

SEQ ID NO: 58281 - DNA, 16 bp, Homo sapiens
tggggcctgagggggc

SEQ ID NO: 58282 - DNA, 22 bp, Homo sapiens
tggggctgcgggagcatcaagg

SEQ ID NO: 58283 - DNA, 18 bp, Homo sapiens
gaccgtggccgaagtcct

SEQ ID NO: 58284 - DNA, 24 bp, Homo sapiens
ctgagggcccgggtggttcctacc

SEQ ID NO: 58285 - DNA, 19 bp, Homo sapiens
tgtaccctggcgtcctggt

SEQ ID NO: 58286 - DNA, 24 bp, Homo sapiens
ccctgatgggggggcaggaaggcc

SEQ ID NO: 58287 - DNA, 22 bp, Homo sapiens
cagggactctgtgacttgtccc

SEQ ID NO: 58288 - DNA, 23 bp, Homo sapiens
attcctgtgaggtagcctcgggc

SEQ ID NO: 58289 - DNA, 16 bp, Homo sapiens
gggaaaaacgtctgtc

SEQ ID NO: 58290 - DNA, 19 bp, Homo sapiens
ccgggagctgggcaccagg

SEQ ID NO: 58291 - DNA, 24 bp, Homo sapiens
aagagggggccgcgcctcttcccc

SEQ ID NO: 58292 - DNA, 22 bp, Homo sapiens
cggtcaggagggcggccctgcg

SEQ ID NO: 58293 - DNA, 16 bp, Homo sapiens
cggttcacagacttct

SEQ ID NO: 58294 - DNA, 23 bp, Homo sapiens
aatgtggccttccctagagagag

SEQ ID NO: 58295 - DNA, 16 bp, Homo sapiens
ctgctatgggcacccc

SEQ ID NO: 58296 - DNA, 23 bp, Homo sapiens
agggatggagggtcggggcgggg

SEQ ID NO: 58297 - DNA, 23 bp, Homo sapiens
tggccgttgcccgtccgcccaac

SEQ ID NO: 58298 - DNA, 24 bp, Homo sapiens
acagagacacaggcacgtagaagt

SEQ ID NO: 58299 - DNA, 16 bp, Homo sapiens
tcccatgtccatgggg

SEQ ID NO: 58300 - DNA, 20 bp, Homo sapiens
caggttgggagtggtagagc

SEQ ID NO: 58301 - DNA, 22 bp, Homo sapiens
ggtctgcggtatcggaaagagc

SEQ ID NO: 58302 - DNA, 24 bp, Homo sapiens
gtcgtcggcaaagatcagcacgat

SEQ ID NO: 58303 - DNA, 24 bp, Homo sapiens
aggcggccgtcagggtcggggagt

SEQ ID NO: 58304 - DNA, 24 bp, Homo sapiens
gggccaggaggagggaccgcggtg

SEQ ID NO: 58305 - DNA, 22 bp, Homo sapiens
aacagacttagaaactactgaa

SEQ ID NO: 58306 - DNA, 16 bp, Homo sapiens
gatttgggcagagcga

SEQ ID NO: 58307 - DNA, 25 bp, Homo sapiens
tagatttatttcttgtaaactctta

SEQ ID NO: 58308 - DNA, 18 bp, Homo sapiens
gtctttctttctctttgt

SEQ ID NO: 58309 - DNA, 21 bp, Homo sapiens
taaaaaccatgcgggaatcag

SEQ ID NO: 58310 - DNA, 20 bp, Homo sapiens
tggggaatgatttcccaaat

SEQ ID NO: 58311 - DNA, 21 bp, Homo sapiens
atgactgatactaaggactcc

SEQ ID NO: 58312 - DNA, 20 bp, Homo sapiens
aaaccttgttgtgtacaccc

SEQ ID NO: 58313 - DNA, 17 bp, Homo sapiens
aaggaagaaatacccct

SEQ ID NO: 58314 - DNA, 19 bp, Homo sapiens
acaatgtgtaatacacaca

SEQ ID NO: 58315 - DNA, 24 bp, Homo sapiens
aaattgtatatttatgcatgtttt

SEQ ID NO: 58316 - DNA, 18 bp, Homo sapiens
aaaagcaggatgagacag

SEQ ID NO: 58317 - DNA, 18 bp, Homo sapiens
gcagagaataaatggtca

SEQ ID NO: 58318 - DNA, 16 bp, Homo sapiens
ttggctttccaggggt

SEQ ID NO: 58319 - DNA, 18 bp, Homo sapiens
ggaggtgatggagcaact

SEQ ID NO: 58320 - DNA, 22 bp, Homo sapiens
caaattgccattctgatactgc

SEQ ID NO: 58321 - DNA, 16 bp, Homo sapiens
aaggtgaggaagatct

SEQ ID NO: 58322 - DNA, 16 bp, Homo sapiens
agtggcctgatcccag

SEQ ID NO: 58323 - DNA, 19 bp, Homo sapiens
tgtaatcatggccctttaa

SEQ ID NO: 58324 - DNA, 16 bp, Homo sapiens
gaactagggaaggagt

SEQ ID NO: 58325 - DNA, 21 bp, Homo sapiens
tgagggttttctttgttattt

SEQ ID NO: 58326 - DNA, 17 bp, Homo sapiens
ggggaggactgagaaga

SEQ ID NO: 58327 - DNA, 25 bp, Homo sapiens
cagaatacacctttttagaattttc

SEQ ID NO: 58328 - DNA, 16 bp, Homo sapiens
atgctgctccgagtgg

SEQ ID NO: 58329 - DNA, 21 bp, Homo sapiens
tggctccctgataccaagatg

SEQ ID NO: 58330 - DNA, 16 bp, Homo sapiens
aatggcacaacggtgt

SEQ ID NO: 58331 - DNA, 18 bp, Homo sapiens
gactctacctttcttcag

SEQ ID NO: 58332 - DNA, 23 bp, Homo sapiens
gtatgtttattatgaaaagtaat

SEQ ID NO: 58333 - DNA, 16 bp, Homo sapiens
tgactgccaaccactc

SEQ ID NO: 58334 - DNA, 19 bp, Homo sapiens
gtcaaaatttatgagtcct

SEQ ID NO: 58335 - DNA, 24 bp, Homo sapiens
tctgtagagaggtagaaggagagg

SEQ ID NO: 58336 - DNA, 22 bp, Homo sapiens
ctatggattatatcaacagtga

SEQ ID NO: 58337 - DNA, 22 bp, Homo sapiens
tttctatctcctctacttctat

SEQ ID NO: 58338 - DNA, 20 bp, Homo sapiens
accacaataaacagctggag

SEQ ID NO: 58339 - DNA, 22 bp, Homo sapiens
cttaagaattgatgcttgttgc

SEQ ID NO: 58340 - DNA, 16 bp, Homo sapiens
caagctactgcgtcaa

SEQ ID NO: 58341 - DNA, 24 bp, Homo sapiens
taagagggaaaaatgaatgtttgt

SEQ ID NO: 58342 - DNA, 19 bp, Homo sapiens
cgtcccctcctgaaatgat

SEQ ID NO: 58343 - DNA, 21 bp, Homo sapiens
gcctgtgtaactgtgactcca

SEQ ID NO: 58344 - DNA, 17 bp, Homo sapiens
tgcaagcagaatatgac

SEQ ID NO: 58345 - DNA, 16 bp, Homo sapiens
caggcggcctttgtgt

SEQ ID NO: 58346 - DNA, 25 bp, Homo sapiens
tttttcttctttttctttttctttc

SEQ ID NO: 58347 - DNA, 17 bp, Homo sapiens
tctggggagaggtgggc

SEQ ID NO: 58348 - DNA, 21 bp, Homo sapiens
atgcatctatctaccatggta

SEQ ID NO: 58349 - DNA, 22 bp, Homo sapiens
tatgttcgtgctgctgctttag

SEQ ID NO: 58350 - DNA, 18 bp, Homo sapiens
aaagagagagagaatctg

SEQ ID NO: 58351 - DNA, 17 bp, Homo sapiens
agtgaggaaagagggga

SEQ ID NO: 58352 - DNA, 23 bp, Homo sapiens
tagacataaaatgactctaagtg

SEQ ID NO: 58353 - DNA, 16 bp, Homo sapiens
tttgaaccaggactcc

SEQ ID NO: 58354 - DNA, 20 bp, Homo sapiens
tctgcataccaatgacaaag

SEQ ID NO: 58355 - DNA, 24 bp, Homo sapiens
accaaaacctttgattttattttc

SEQ ID NO: 58356 - DNA, 22 bp, Homo sapiens
ctgctaggattctctctagctc

SEQ ID NO: 58357 - DNA, 18 bp, Homo sapiens
aaatacactcctgagtcc

SEQ ID NO: 58358 - DNA, 16 bp, Homo sapiens
cgaggctggctcaggg

SEQ ID NO: 58359 - DNA, 20 bp, Homo sapiens
tctttagaagcaggaaaaaa

SEQ ID NO: 58360 - DNA, 20 bp, Homo sapiens
aacaaatgttcatcatctct

SEQ ID NO: 58361 - DNA, 21 bp, Homo sapiens
ctcattccatgccagggcatt

SEQ ID NO: 58362 - DNA, 20 bp, Homo sapiens
tggaaaacagcaatggatct

SEQ ID NO: 58363 - DNA, 20 bp, Homo sapiens
gatcaaatgaatatgatgct

SEQ ID NO: 58364 - DNA, 19 bp, Homo sapiens
aagacgtcacataagtttt

SEQ ID NO: 58365 - DNA, 19 bp, Homo sapiens
agcaatttcattgtcagga

SEQ ID NO: 58366 - DNA, 19 bp, Homo sapiens
tctcttcttgccatgattt

SEQ ID NO: 58367 - DNA, 19 bp, Homo sapiens
aggagagatgctatcattt

SEQ ID NO: 58368 - DNA, 17 bp, Homo sapiens
actgcctcaaatggtta

SEQ ID NO: 58369 - DNA, 18 bp, Homo sapiens
cgatgatactcattcacg

SEQ ID NO: 58370 - DNA, 24 bp, Homo sapiens
attagtaggaatcagacaagtttg

SEQ ID NO: 58371 - DNA, 22 bp, Homo sapiens
gtatctgtgactaatcacattt

SEQ ID NO: 58372 - DNA, 21 bp, Homo sapiens
tagctttccttggttagttat

SEQ ID NO: 58373 - DNA, 18 bp, Homo sapiens
gcattctaggccatgtgt

SEQ ID NO: 58374 - DNA, 16 bp, Homo sapiens
atgttcaatgcgtgaa

SEQ ID NO: 58375 - DNA, 28 bp, Homo sapiens
ttaaaatacttgataatatttaagatat

SEQ ID NO: 58376 - DNA, 19 bp, Homo sapiens
tttcaaagtctcatcaaga

SEQ ID NO: 58377 - DNA, 16 bp, Homo sapiens
gcagtcccgttactct

SEQ ID NO: 58378 - DNA, 20 bp, Homo sapiens
atgtccataaaacaaaacaa

SEQ ID NO: 58379 - DNA, 16 bp, Homo sapiens
tttttttgcggctgag

SEQ ID NO: 58380 - DNA, 17 bp, Homo sapiens
cgagcgaatgtgttggt

SEQ ID NO: 58381 - DNA, 17 bp, Homo sapiens
tggctattgctttccat

SEQ ID NO: 58382 - DNA, 17 bp, Homo sapiens
ctggccagaagttgatc

SEQ ID NO: 58383 - DNA, 24 bp, Homo sapiens
tgggaaagtggcaactggacatca

SEQ ID NO: 58384 - DNA, 16 bp, Homo sapiens
cgaatgggctacctgc

SEQ ID NO: 58385 - DNA, 19 bp, Homo sapiens
gaaatagaagagactgttt

SEQ ID NO: 58386 - DNA, 17 bp, Homo sapiens
tttgccaaggtactaaa

SEQ ID NO: 58387 - DNA, 16 bp, Homo sapiens
tcaaacaagagtgtgt

SEQ ID NO: 58388 - DNA, 20 bp, Homo sapiens
ctgtcctaaatctgatctca

SEQ ID NO: 58389 - DNA, 18 bp, Homo sapiens
ccctctaagacagtctgc

SEQ ID NO: 58390 - DNA, 18 bp, Homo sapiens
acaaaacaagtgtcatgg

SEQ ID NO: 58391 - DNA, 21 bp, Homo sapiens
cttttggttcgaaatttgttt

SEQ ID NO: 58392 - DNA, 16 bp, Homo sapiens
tcagagccccatttgt

SEQ ID NO: 58393 - DNA, 17 bp, Homo sapiens
aatgcactatcccatgg

SEQ ID NO: 58394 - DNA, 22 bp, Homo sapiens
cactttagctggggaacatctg

SEQ ID NO: 58395 - DNA, 23 bp, Homo sapiens
ctaaagcactttaattatgacat

SEQ ID NO: 58396 - DNA, 20 bp, Homo sapiens
caaaactgaaatttatccca

SEQ ID NO: 58397 - DNA, 22 bp, Homo sapiens
gaatttgattcgaagaaataca

SEQ ID NO: 58398 - DNA, 17 bp, Homo sapiens
ccggagtgcaatattcc

SEQ ID NO: 58399 - DNA, 18 bp, Homo sapiens
tgctttctgtttctcaaa

SEQ ID NO: 58400 - DNA, 21 bp, Homo sapiens
ccagaaaaaaagcagctttgg

SEQ ID NO: 58401 - DNA, 19 bp, Homo sapiens
caccggaaaaatctggagg

SEQ ID NO: 58402 - DNA, 18 bp, Homo sapiens
gtgacaggaatgatcgat

SEQ ID NO: 58403 - DNA, 16 bp, Homo sapiens
aagcatcaggccaaat

SEQ ID NO: 58404 - DNA, 18 bp, Homo sapiens
gtacgaactaacagcaac

SEQ ID NO: 58405 - DNA, 17 bp, Homo sapiens
gagactggaaccccagt

SEQ ID NO: 58406 - DNA, 21 bp, Homo sapiens
aatgatgagaaaaaaatgaca

SEQ ID NO: 58407 - DNA, 18 bp, Homo sapiens
tctttgcaggctaataat

SEQ ID NO: 58408 - DNA, 22 bp, Homo sapiens
ggacactctttgcagatgttac

SEQ ID NO: 58409 - DNA, 24 bp, Homo sapiens
tatacacctcctttgccatcttgc

SEQ ID NO: 58410 - DNA, 16 bp, Homo sapiens
aggacgggcagccaca

SEQ ID NO: 58411 - DNA, 18 bp, Homo sapiens
tgcaaccattgttctttc

SEQ ID NO: 58412 - DNA, 20 bp, Homo sapiens
ggccgcttcgatctctggct

SEQ ID NO: 58413 - DNA, 24 bp, Homo sapiens
ttccagaagctgcttacttacaga

SEQ ID NO: 58414 - DNA, 20 bp, Homo sapiens
gggtgaagttgcatcctttg

SEQ ID NO: 58415 - DNA, 16 bp, Homo sapiens
atgagaaaacgaagct

SEQ ID NO: 58416 - DNA, 16 bp, Homo sapiens
gaccagcgcaggctgg

SEQ ID NO: 58417 - DNA, 20 bp, Homo sapiens
aaatatgttacctagaaggt

SEQ ID NO: 58418 - DNA, 19 bp, Homo sapiens
actgttgcaattttcttct

SEQ ID NO: 58419 - DNA, 24 bp, Homo sapiens
cttggctcaatgttactgccccca

SEQ ID NO: 58420 - DNA, 18 bp, Homo sapiens
actggaattgagttggat

SEQ ID NO: 58421 - DNA, 21 bp, Homo sapiens
tagaatcatgcagaaggaggc

SEQ ID NO: 58422 - DNA, 18 bp, Homo sapiens
ttagcacaaattagaagt

SEQ ID NO: 58423 - DNA, 19 bp, Homo sapiens
tttgacaaggaatggcaca

SEQ ID NO: 58424 - DNA, 18 bp, Homo sapiens
aactggcatcatttccct

SEQ ID NO: 58425 - DNA, 24 bp, Homo sapiens
tcttacatgaggaatctgctgtca

SEQ ID NO: 58426 - DNA, 19 bp, Homo sapiens
tttctgctttgattcttca

SEQ ID NO: 58427 - DNA, 19 bp, Homo sapiens
agccaacattaataaaaga

SEQ ID NO: 58428 - DNA, 20 bp, Homo sapiens
tttttccttttcaaggcttt

SEQ ID NO: 58429 - DNA, 21 bp, Homo sapiens
caaatgtgctttacacaggga

SEQ ID NO: 58430 - DNA, 19 bp, Homo sapiens
ttaataaaacagtggtcaa

SEQ ID NO: 58431 - DNA, 22 bp, Homo sapiens
tatttttcaagtcataaatgca

SEQ ID NO: 58432 - DNA, 16 bp, Homo sapiens
ttggtcaacgtccctc

SEQ ID NO: 58433 - DNA, 22 bp, Homo sapiens
tccagggccctgttgtaatgct

SEQ ID NO: 58434 - DNA, 23 bp, Homo sapiens
ccatggatatcctgcagattatt

SEQ ID NO: 58435 - DNA, 22 bp, Homo sapiens
gtgacagagcccgggaaataaa

SEQ ID NO: 58436 - DNA, 17 bp, Homo sapiens
cagctgcatgtgatgcc

SEQ ID NO: 58437 - DNA, 20 bp, Homo sapiens
ttcagacacatatccacgca

SEQ ID NO: 58438 - DNA, 19 bp, Homo sapiens
ggttttactctttgagtca

SEQ ID NO: 58439 - DNA, 20 bp, Homo sapiens
gtcataaatagtggtcaaac

SEQ ID NO: 58440 - DNA, 17 bp, Homo sapiens
gggtatgagagagtcct

SEQ ID NO: 58441 - DNA, 22 bp, Homo sapiens
ttgaggttgtgctggtccaagg

SEQ ID NO: 58442 - DNA, 20 bp, Homo sapiens
gtcgaggcataaaaataaaa

SEQ ID NO: 58443 - DNA, 20 bp, Homo sapiens
aaactctaggccaaggatac

SEQ ID NO: 58444 - DNA, 17 bp, Homo sapiens
tgtcagattctcagctt

SEQ ID NO: 58445 - DNA, 22 bp, Homo sapiens
cagctgtttctcccctctctaa

SEQ ID NO: 58446 - DNA, 23 bp, Homo sapiens
ttatttctgatggaataacaaat

SEQ ID NO: 58447 - DNA, 23 bp, Homo sapiens
gacatagtatcaagatcttcaaa

SEQ ID NO: 58448 - DNA, 16 bp, Homo sapiens
ttttgtggtggttgta

SEQ ID NO: 58449 - DNA, 17 bp, Homo sapiens
catggcagtcctataag

SEQ ID NO: 58450 - DNA, 19 bp, Homo sapiens
ccccacgttaacagaattt

SEQ ID NO: 58451 - DNA, 18 bp, Homo sapiens
aaaaagaaagctgactgt

SEQ ID NO: 58452 - DNA, 16 bp, Homo sapiens
tgctgggaccatccca

SEQ ID NO: 58453 - DNA, 20 bp, Homo sapiens
ttgaaacaatctagtgatgt

SEQ ID NO: 58454 - DNA, 22 bp, Homo sapiens
actactcattgtaaatgctaaa

SEQ ID NO: 58455 - DNA, 16 bp, Homo sapiens
aggtcacctgtcattt

SEQ ID NO: 58456 - DNA, 22 bp, Homo sapiens
cgaatggttcaaaagcaaaaat

SEQ ID NO: 58457 - DNA, 18 bp, Homo sapiens
ggtagagctctgtcattt

SEQ ID NO: 58458 - DNA, 21 bp, Homo sapiens
tctgcttgtaagataaacatt

SEQ ID NO: 58459 - DNA, 17 bp, Homo sapiens
gaccgcggagcccttgc

SEQ ID NO: 58460 - DNA, 20 bp, Homo sapiens
ggtccagccgccgcgcctgt

SEQ ID NO: 58461 - DNA, 16 bp, Homo sapiens
cactttcggggagccc

SEQ ID NO: 58462 - DNA, 23 bp, Homo sapiens
cacaagtgcacggattgcggcca

SEQ ID NO: 58463 - DNA, 16 bp, Homo sapiens
gcgccggctcctccgc

SEQ ID NO: 58464 - DNA, 24 bp, Homo sapiens
ccctttgagctgttccctcatggc

SEQ ID NO: 58465 - DNA, 16 bp, Homo sapiens
agagagccatctcgcc

SEQ ID NO: 58466 - DNA, 18 bp, Homo sapiens
aaaagacacaggtattgt

SEQ ID NO: 58467 - DNA, 17 bp, Homo sapiens
ctccttgcctttctttt

SEQ ID NO: 58468 - DNA, 22 bp, Homo sapiens
tatacaggttagtcacaataaa

SEQ ID NO: 58469 - DNA, 23 bp, Homo sapiens
atatcagtgtaaaattgtaattc

SEQ ID NO: 58470 - DNA, 19 bp, Homo sapiens
gatatagtagggcactttg

SEQ ID NO: 58471 - DNA, 20 bp, Homo sapiens
gacagaaatttcagaacagc

SEQ ID NO: 58472 - DNA, 23 bp, Homo sapiens
tctcaacttatcaaccaagttat

SEQ ID NO: 58473 - DNA, 16 bp, Homo sapiens
gcagctgcatgaagcc

SEQ ID NO: 58474 - DNA, 24 bp, Homo sapiens
aaagattactataattcaactctt

SEQ ID NO: 58475 - DNA, 24 bp, Homo sapiens
atatagaatgagagaacatcattt

SEQ ID NO: 58476 - DNA, 25 bp, Homo sapiens
caataaagttaagtgataaaagctg

SEQ ID NO: 58477 - DNA, 18 bp, Homo sapiens
cagtcttggagactcaaa

SEQ ID NO: 58478 - DNA, 18 bp, Homo sapiens
ggaccaaagtccctgtgg

SEQ ID NO: 58479 - DNA, 20 bp, Homo sapiens
actatatacggtaagtgaat

SEQ ID NO: 58480 - DNA, 21 bp, Homo sapiens
ttgaaaatgtttagatgggaa

SEQ ID NO: 58481 - DNA, 18 bp, Homo sapiens
tctcaccgtataacctca

SEQ ID NO: 58482 - DNA, 22 bp, Homo sapiens
attaccatgaacattacatgaa

SEQ ID NO: 58483 - DNA, 16 bp, Homo sapiens
gaacgtgagccacgtc

SEQ ID NO: 58484 - DNA, 19 bp, Homo sapiens
tttactgtaacaaaggaca

SEQ ID NO: 58485 - DNA, 19 bp, Homo sapiens
tcttccaatttgcttttga

SEQ ID NO: 58486 - DNA, 17 bp, Homo sapiens
caggtcttccagagtgc

SEQ ID NO: 58487 - DNA, 17 bp, Homo sapiens
tgcaccctaaagagaat

SEQ ID NO: 58488 - DNA, 22 bp, Homo sapiens
tggtaagctggcgagcaaggtc

SEQ ID NO: 58489 - DNA, 17 bp, Homo sapiens
aatttgaggggggacac

SEQ ID NO: 58490 - DNA, 20 bp, Homo sapiens
tcttggagaaaataccatgt

SEQ ID NO: 58491 - DNA, 17 bp, Homo sapiens
agcccgtgggcgatctc

SEQ ID NO: 58492 - DNA, 23 bp, Homo sapiens
tctctagctttaactttgtggga

SEQ ID NO: 58493 - DNA, 16 bp, Homo sapiens
agaggccacggatgag

SEQ ID NO: 58494 - DNA, 21 bp, Homo sapiens
tgagtctctcaaagggccctg

SEQ ID NO: 58495 - DNA, 16 bp, Homo sapiens
ctccgctgactggcag

SEQ ID NO: 58496 - DNA, 17 bp, Homo sapiens
gagagagtcaatgagga

SEQ ID NO: 58497 - DNA, 20 bp, Homo sapiens
atgtcactcggcttctacga

SEQ ID NO: 58498 - DNA, 19 bp, Homo sapiens
gcagcttgaggtccagctc

SEQ ID NO: 58499 - DNA, 19 bp, Homo sapiens
gcctaaaaccttgtcatat

SEQ ID NO: 58500 - DNA, 19 bp, Homo sapiens
catctatttttctctgcca

SEQ ID NO: 58501 - DNA, 21 bp, Homo sapiens
tgttcaactgtactctttctt

SEQ ID NO: 58502 - DNA, 16 bp, Homo sapiens
cctcagcctgctttcg

SEQ ID NO: 58503 - DNA, 22 bp, Homo sapiens
gtatcaaaatttatgccaaagt

SEQ ID NO: 58504 - DNA, 23 bp, Homo sapiens
gtagtttatgagtccttattttt

SEQ ID NO: 58505 - DNA, 16 bp, Homo sapiens
cagagcagcctttgga

SEQ ID NO: 58506 - DNA, 19 bp, Homo sapiens
accaagaaaatatgagagc

SEQ ID NO: 58507 - DNA, 21 bp, Homo sapiens
agggaattgaaaactaaagaa

SEQ ID NO: 58508 - DNA, 19 bp, Homo sapiens
accactgatccttctatca

SEQ ID NO: 58509 - DNA, 19 bp, Homo sapiens
gagaagaatgccacaagcc

SEQ ID NO: 58510 - DNA, 23 bp, Homo sapiens
tcctggtagagtttctctagtcc

SEQ ID NO: 58511 - DNA, 17 bp, Homo sapiens
tagaaattgacctggga

SEQ ID NO: 58512 - DNA, 19 bp, Homo sapiens
gagtactcatgattacagg

SEQ ID NO: 58513 - DNA, 19 bp, Homo sapiens
agatagacccatatagcct

SEQ ID NO: 58514 - DNA, 24 bp, Homo sapiens
gtgtaatggcttagattatttata

SEQ ID NO: 58515 - DNA, 16 bp, Homo sapiens
caggcacctattggag

SEQ ID NO: 58516 - DNA, 22 bp, Homo sapiens
attcaacttaatttcaaacaaa

SEQ ID NO: 58517 - DNA, 19 bp, Homo sapiens
gcgtctgcacctttctctg

SEQ ID NO: 58518 - DNA, 24 bp, Homo sapiens
gtgcttaacatgtgcaaggcacga

SEQ ID NO: 58519 - DNA, 17 bp, Homo sapiens
gtacgctgctgttcttt

SEQ ID NO: 58520 - DNA, 16 bp, Homo sapiens
ctggaaagtcgcctcc

SEQ ID NO: 58521 - DNA, 20 bp, Homo sapiens
attgtactttttcaatggaa

SEQ ID NO: 58522 - DNA, 21 bp, Homo sapiens
gctgtagccacaccagaagtt

SEQ ID NO: 58523 - DNA, 17 bp, Homo sapiens
tcaaaagtaagtagcca

SEQ ID NO: 58524 - DNA, 22 bp, Homo sapiens
actggcttccaaatgggacctg

SEQ ID NO: 58525 - DNA, 18 bp, Homo sapiens
tcatctccataccaagca

SEQ ID NO: 58526 - DNA, 16 bp, Homo sapiens
ttcaagtggagtgaac

SEQ ID NO: 58527 - DNA, 23 bp, Homo sapiens
gaaattggatgatttacgtagac

SEQ ID NO: 58528 - DNA, 16 bp, Homo sapiens
ctggaaggttccgatg

SEQ ID NO: 58529 - DNA, 22 bp, Homo sapiens
tgaggaaaatttggccatttta

SEQ ID NO: 58530 - DNA, 17 bp, Homo sapiens
tgaagctcacacagatg

SEQ ID NO: 58531 - DNA, 23 bp, Homo sapiens
ctacctaatgttgagagactttt

SEQ ID NO: 58532 - DNA, 19 bp, Homo sapiens
ttgtttggtaattctgcac

SEQ ID NO: 58533 - DNA, 16 bp, Homo sapiens
acaggactgcatcatc

SEQ ID NO: 58534 - DNA, 25 bp, Homo sapiens
aatgtcttttgaactaataattatt

SEQ ID NO: 58535 - DNA, 19 bp, Homo sapiens
tccaggttgtgataaacat

SEQ ID NO: 58536 - DNA, 19 bp, Homo sapiens
gccaagaaaagggatttga

SEQ ID NO: 58537 - DNA, 23 bp, Homo sapiens
attagttttgatttcccatttaa

SEQ ID NO: 58538 - DNA, 21 bp, Homo sapiens
caggatcagtgctgtagtgcc

SEQ ID NO: 58539 - DNA, 22 bp, Homo sapiens
tacataggaccttggtaagagt

SEQ ID NO: 58540 - DNA, 19 bp, Homo sapiens
gcattttaaagcagggctc

SEQ ID NO: 58541 - DNA, 21 bp, Homo sapiens
acacagatcaagaaaattatt

SEQ ID NO: 58542 - DNA, 16 bp, Homo sapiens
gactggtgaggcctgt

SEQ ID NO: 58543 - DNA, 21 bp, Homo sapiens
gtttccttctccctctgcctc

SEQ ID NO: 58544 - DNA, 17 bp, Homo sapiens
ggctcctagaagactcc

SEQ ID NO: 58545 - DNA, 20 bp, Homo sapiens
caactattttgttttgtccc

SEQ ID NO: 58546 - DNA, 16 bp, Homo sapiens
ctggcttacagaagct

SEQ ID NO: 58547 - DNA, 24 bp, Homo sapiens
aattgttcaattggatccacaaga

SEQ ID NO: 58548 - DNA, 18 bp, Homo sapiens
gctttggaagaaactcat

SEQ ID NO: 58549 - DNA, 23 bp, Homo sapiens
tcatcagctcttttactcccttg

SEQ ID NO: 58550 - DNA, 26 bp, Homo sapiens
ccattctgatatttaataattgcatc

SEQ ID NO: 58551 - DNA, 17 bp, Homo sapiens
ttggcagttgtttcagc

SEQ ID NO: 58552 - DNA, 21 bp, Homo sapiens
ggtatattacaatttagttcc

SEQ ID NO: 58553 - DNA, 22 bp, Homo sapiens
gggggaactgttgcagtaatct

SEQ ID NO: 58554 - DNA, 21 bp, Homo sapiens
ctgcacaatattatagttgtt

SEQ ID NO: 58555 - DNA, 24 bp, Homo sapiens
ttcctcgtttttaaaatagaagtc

SEQ ID NO: 58556 - DNA, 20 bp, Homo sapiens
acagagaatatcaatgcctc

SEQ ID NO: 58557 - DNA, 20 bp, Homo sapiens
gtcttgaaccctcccaagct

SEQ ID NO: 58558 - DNA, 16 bp, Homo sapiens
ctgaaacttctccggg

SEQ ID NO: 58559 - DNA, 20 bp, Homo sapiens
tccagtttcaccaccccatt

SEQ ID NO: 58560 - DNA, 16 bp, Homo sapiens
cagttggccaaagacc

SEQ ID NO: 58561 - DNA, 18 bp, Homo sapiens
gaatgcttctccaagagg

SEQ ID NO: 58562 - DNA, 19 bp, Homo sapiens
aagacactccaactagaga

SEQ ID NO: 58563 - DNA, 18 bp, Homo sapiens
atctgcagaataatcccg

SEQ ID NO: 58564 - DNA, 27 bp, Homo sapiens
gttaaaagcaatctaatatatgtattc

SEQ ID NO: 58565 - DNA, 17 bp, Homo sapiens
tgtctgccactggcgga

SEQ ID NO: 58566 - DNA, 22 bp, Homo sapiens
gggtccctatacagtagatgca

SEQ ID NO: 58567 - DNA, 21 bp, Homo sapiens
agctttaacgtgattttctgt

SEQ ID NO: 58568 - DNA, 16 bp, Homo sapiens
agctgagcaggtctta

SEQ ID NO: 58569 - DNA, 24 bp, Homo sapiens
tataattttatcaaatgtaaccag

SEQ ID NO: 58570 - DNA, 16 bp, Homo sapiens
ccggaggcaacagttg

SEQ ID NO: 58571 - DNA, 20 bp, Homo sapiens
ttctgtgattttcttttgga

SEQ ID NO: 58572 - DNA, 20 bp, Homo sapiens
tccttttattctagttgaaa

SEQ ID NO: 58573 - DNA, 16 bp, Homo sapiens
ggctctggcctgtcct

SEQ ID NO: 58574 - DNA, 21 bp, Homo sapiens
aagttacatttaaaatgtctc

SEQ ID NO: 58575 - DNA, 20 bp, Homo sapiens
tgtgttgaatcctttaacat

SEQ ID NO: 58576 - DNA, 21 bp, Homo sapiens
tagccataacacaatgaataa

SEQ ID NO: 58577 - DNA, 20 bp, Homo sapiens
acttcatcccactgattctg

SEQ ID NO: 58578 - DNA, 19 bp, Homo sapiens
aaaaggtaacattatggac

SEQ ID NO: 58579 - DNA, 18 bp, Homo sapiens
tgaaaaacaagaccagca

SEQ ID NO: 58580 - DNA, 23 bp, Homo sapiens
cattatttttataaatgtgaggg

SEQ ID NO: 58581 - DNA, 16 bp, Homo sapiens
caggatttggaacaga

SEQ ID NO: 58582 - DNA, 16 bp, Homo sapiens
cttgctttgtgtgtcc

SEQ ID NO: 58583 - DNA, 17 bp, Homo sapiens
aggaatacacaacgctg

SEQ ID NO: 58584 - DNA, 17 bp, Homo sapiens
ctagcctcttgattgct

SEQ ID NO: 58585 - DNA, 24 bp, Homo sapiens
cttttttatttctaaaagtgtttt

SEQ ID NO: 58586 - DNA, 16 bp, Homo sapiens
tggggacgcctctgtt

SEQ ID NO: 58587 - DNA, 22 bp, Homo sapiens
atccttgattatacttaggctg

SEQ ID NO: 58588 - DNA, 16 bp, Homo sapiens
tggtgggtgaccttga

SEQ ID NO: 58589 - DNA, 19 bp, Homo sapiens
ttgcctaagaactggtggg

SEQ ID NO: 58590 - DNA, 16 bp, Homo sapiens
ggacagaacttaccga

SEQ ID NO: 58591 - DNA, 23 bp, Homo sapiens
tcattttaaagaaaaacttctgc

SEQ ID NO: 58592 - DNA, 17 bp, Homo sapiens
tccaaactagaaatgcc

SEQ ID NO: 58593 - DNA, 18 bp, Homo sapiens
tctcgttgatatcctcaa

SEQ ID NO: 58594 - DNA, 21 bp, Homo sapiens
tcctactcagactgttactct

SEQ ID NO: 58595 - DNA, 19 bp, Homo sapiens
agcagagaaagccagtcgg

SEQ ID NO: 58596 - DNA, 21 bp, Homo sapiens
gcttgtgtttctaatttttct

SEQ ID NO: 58597 - DNA, 16 bp, Homo sapiens
cctccaacatcaagga

SEQ ID NO: 58598 - DNA, 21 bp, Homo sapiens
ggctcaaattgttactcttca

SEQ ID NO: 58599 - DNA, 17 bp, Homo sapiens
ccacaggttgtgtcacc

SEQ ID NO: 58600 - DNA, 16 bp, Homo sapiens
gcctgacctagctcct

SEQ ID NO: 58601 - DNA, 26 bp, Homo sapiens
tttatctctatctttagaattgaaac

SEQ ID NO: 58602 - DNA, 21 bp, Homo sapiens
gttagaagatctgagctctga

SEQ ID NO: 58603 - DNA, 17 bp, Homo sapiens
tgcacttttgaacaaat

SEQ ID NO: 58604 - DNA, 24 bp, Homo sapiens
aattatcttcaaagtgttaatcga

SEQ ID NO: 58605 - DNA, 16 bp, Homo sapiens
tggtcagtccaggagc

SEQ ID NO: 58606 - DNA, 29 bp, Homo sapiens
taatttagaagtaaaatataatagaaatc

SEQ ID NO: 58607 - DNA, 16 bp, Homo sapiens
ttaccgccttccactc

SEQ ID NO: 58608 - DNA, 24 bp, Homo sapiens
taggatatgctgatcaaaaagaca

SEQ ID NO: 58609 - DNA, 16 bp, Homo sapiens
aaagggcagcatttgt

SEQ ID NO: 58610 - DNA, 20 bp, Homo sapiens
acaagttatttcactgatta

SEQ ID NO: 58611 - DNA, 17 bp, Homo sapiens
ttccccaggaaactgaa

SEQ ID NO: 58612 - DNA, 18 bp, Homo sapiens
cccattatgaggtaatgg

SEQ ID NO: 58613 - DNA, 26 bp, Homo sapiens
ccaagggtatatttaaatttagtaat

SEQ ID NO: 58614 - DNA, 19 bp, Homo sapiens
ttttccttgtacaaatgct

SEQ ID NO: 58615 - DNA, 16 bp, Homo sapiens
gtgcccttatgtacca

SEQ ID NO: 58616 - DNA, 21 bp, Homo sapiens
gttgtttagcttgaactgcta

SEQ ID NO: 58617 - DNA, 22 bp, Homo sapiens
cattgcagtggtccctgtgcct

SEQ ID NO: 58618 - DNA, 19 bp, Homo sapiens
tggaaatttataaccaacc

SEQ ID NO: 58619 - DNA, 22 bp, Homo sapiens
actttaacaagtaatattttgt

SEQ ID NO: 58620 - DNA, 17 bp, Homo sapiens
tgaagaccttgaagagc

SEQ ID NO: 58621 - DNA, 24 bp, Homo sapiens
tattgccatttttcttaaaaaaga

SEQ ID NO: 58622 - DNA, 21 bp, Homo sapiens
acctgagaaacaaggagaaat

SEQ ID NO: 58623 - DNA, 18 bp, Homo sapiens
tggtccttcttggtttgg

SEQ ID NO: 58624 - DNA, 23 bp, Homo sapiens
ttatgccttgagaattatttacc

SEQ ID NO: 58625 - DNA, 19 bp, Homo sapiens
cacagcagcagatgattta

SEQ ID NO: 58626 - DNA, 24 bp, Homo sapiens
agattctgtaatatttcatgataa

SEQ ID NO: 58627 - DNA, 21 bp, Homo sapiens
aggtcttttatttgagcttca

SEQ ID NO: 58628 - DNA, 21 bp, Homo sapiens
tcccaacatgtaatatatgta

SEQ ID NO: 58629 - DNA, 18 bp, Homo sapiens
aaaataagctcaagcaga

SEQ ID NO: 58630 - DNA, 22 bp, Homo sapiens
aaacaaaacaacaatccacata

SEQ ID NO: 58631 - DNA, 23 bp, Homo sapiens
taaatgaaactggaggacccgtg

SEQ ID NO: 58632 - DNA, 23 bp, Homo sapiens
aaaatacatacaaatacttgcaa

SEQ ID NO: 58633 - DNA, 18 bp, Homo sapiens
ttgtctgtttcagttact

SEQ ID NO: 58634 - DNA, 16 bp, Homo sapiens
tccactggagatttgt

SEQ ID NO: 58635 - DNA, 16 bp, Homo sapiens
agcaaagacaaggtag

SEQ ID NO: 58636 - DNA, 21 bp, Homo sapiens
ttatgggagcacttacaagca

SEQ ID NO: 58637 - DNA, 16 bp, Homo sapiens
ttgaggtaccactggg

SEQ ID NO: 58638 - DNA, 16 bp, Homo sapiens
ggcaactcttccacca

SEQ ID NO: 58639 - DNA, 18 bp, Homo sapiens
tggaaaagagcagcaact

SEQ ID NO: 58640 - DNA, 21 bp, Homo sapiens
acactttagcaaggaactatg

SEQ ID NO: 58641 - DNA, 23 bp, Homo sapiens
aaatgaatttgttttatggttgg

SEQ ID NO: 58642 - DNA, 23 bp, Homo sapiens
ttcatatacttctttatgcaagc

SEQ ID NO: 58643 - DNA, 18 bp, Homo sapiens
ttctttctccaggctaga

SEQ ID NO: 58644 - DNA, 17 bp, Homo sapiens
ttgctcaagcttttctt

SEQ ID NO: 58645 - DNA, 17 bp, Homo sapiens
tcccagtttgcattaac

SEQ ID NO: 58646 - DNA, 17 bp, Homo sapiens
tgttatctgcttcctcc

SEQ ID NO: 58647 - DNA, 25 bp, Homo sapiens
cttaaattatgtatggttaacatct

SEQ ID NO: 58648 - DNA, 24 bp, Homo sapiens
ctgacaagatattcttttgttctt

SEQ ID NO: 58649 - DNA, 18 bp, Homo sapiens
ggcaggaggtctgcaaac

SEQ ID NO: 58650 - DNA, 20 bp, Homo sapiens
aggttctttaatgttagtgc

SEQ ID NO: 58651 - DNA, 17 bp, Homo sapiens
cctcaaaaacagatgcc

SEQ ID NO: 58652 - DNA, 20 bp, Homo sapiens
gaaagcttaaaaagtctgct

SEQ ID NO: 58653 - DNA, 21 bp, Homo sapiens
tggcattgggcagcggcaaac

SEQ ID NO: 58654 - DNA, 17 bp, Homo sapiens
tttctgtctgacagctg

SEQ ID NO: 58655 - DNA, 17 bp, Homo sapiens
atggggcttcatttttg

SEQ ID NO: 58656 - DNA, 16 bp, Homo sapiens
ctgtagaatactggca

SEQ ID NO: 58657 - DNA, 16 bp, Homo sapiens
ttgccagtacaactgc

SEQ ID NO: 58658 - DNA, 20 bp, Homo sapiens
ttgcattcaatgttctgaca

SEQ ID NO: 58659 - DNA, 22 bp, Homo sapiens
gtatcctttggatatgggcatg

SEQ ID NO: 58660 - DNA, 18 bp, Homo sapiens
tcctgagaattgggaaca

SEQ ID NO: 58661 - DNA, 19 bp, Homo sapiens
caacagtcaaaagtaattt

SEQ ID NO: 58662 - DNA, 24 bp, Homo sapiens
tataaagatatttaatcagtggct

SEQ ID NO: 58663 - DNA, 24 bp, Homo sapiens
agagtccagatgtgctgaagataa

SEQ ID NO: 58664 - DNA, 17 bp, Homo sapiens
tgcttttacctgcaggc

SEQ ID NO: 58665 - DNA, 22 bp, Homo sapiens
accatttgtatttagcatgttc

SEQ ID NO: 58666 - DNA, 23 bp, Homo sapiens
atatacgctatatctctataatc

SEQ ID NO: 58667 - DNA, 19 bp, Homo sapiens
gttcagcttctgttagcca

SEQ ID NO: 58668 - DNA, 19 bp, Homo sapiens
actaaactctgcaaatgca

SEQ ID NO: 58669 - DNA, 18 bp, Homo sapiens
acagatctgtcaaatcgc

SEQ ID NO: 58670 - DNA, 24 bp, Homo sapiens
cagctcatttgtctgaattgttca

SEQ ID NO: 58671 - DNA, 19 bp, Homo sapiens
tccaatgggaaaaagttaa

SEQ ID NO: 58672 - DNA, 21 bp, Homo sapiens
gagagtgatacttctttttcc

SEQ ID NO: 58673 - DNA, 16 bp, Homo sapiens
aagtgcaacgcctgtg

SEQ ID NO: 58674 - DNA, 22 bp, Homo sapiens
gaaaacaaatcatttctgcaag

SEQ ID NO: 58675 - DNA, 18 bp, Homo sapiens
agatagtctacaacaaag

SEQ ID NO: 58676 - DNA, 22 bp, Homo sapiens
gtccttgtacattttgttaact

SEQ ID NO: 58677 - DNA, 20 bp, Homo sapiens
tctttctatagacagctaat

SEQ ID NO: 58678 - DNA, 16 bp, Homo sapiens
tcaccctttccacagg

SEQ ID NO: 58679 - DNA, 16 bp, Homo sapiens
tgcaacaccatttgct

SEQ ID NO: 58680 - DNA, 19 bp, Homo sapiens
gaataatgtcaatccgacc

SEQ ID NO: 58681 - DNA, 17 bp, Homo sapiens
tgaacatgtcaaagtca

SEQ ID NO: 58682 - DNA, 20 bp, Homo sapiens
aggactttgaagatctcttt

SEQ ID NO: 58683 - DNA, 22 bp, Homo sapiens
taagaattccatgtgaaagtca

SEQ ID NO: 58684 - DNA, 17 bp, Homo sapiens
tcacaagccctattaga

SEQ ID NO: 58685 - DNA, 23 bp, Homo sapiens
actatgaatgatcagtatgatca

SEQ ID NO: 58686 - DNA, 21 bp, Homo sapiens
tgactgaagacatgcctttgg

SEQ ID NO: 58687 - DNA, 21 bp, Homo sapiens
ttaccttcagagactcctctt

SEQ ID NO: 58688 - DNA, 25 bp, Homo sapiens
aaaaattgttcttttgtatatctat

SEQ ID NO: 58689 - DNA, 19 bp, Homo sapiens
gcattgagaagttgttcca

SEQ ID NO: 58690 - DNA, 24 bp, Homo sapiens
agaatgagacctatataaacttaa

SEQ ID NO: 58691 - DNA, 19 bp, Homo sapiens
agaaggcacataagaaatt

SEQ ID NO: 58692 - DNA, 18 bp, Homo sapiens
ccatcgtgaggttttgaa

SEQ ID NO: 58693 - DNA, 17 bp, Homo sapiens
acggacagtgtgctggt

SEQ ID NO: 58694 - DNA, 19 bp, Homo sapiens
tacagaagcccaaagtgag

SEQ ID NO: 58695 - DNA, 17 bp, Homo sapiens
gcgctggcgggaaattg

SEQ ID NO: 58696 - DNA, 22 bp, Homo sapiens
aaactgtacccagattttttgt

SEQ ID NO: 58697 - DNA, 16 bp, Homo sapiens
gtctgaggatggggcc

SEQ ID NO: 58698 - DNA, 20 bp, Homo sapiens
caaacacatacgtgggtttg

SEQ ID NO: 58699 - DNA, 16 bp, Homo sapiens
tcgggaattgcagaag

SEQ ID NO: 58700 - DNA, 21 bp, Homo sapiens
tcttcgaaactgagcaaattt

SEQ ID NO: 58701 - DNA, 23 bp, Homo sapiens
ttgcaagtcggttgatgtggtta

SEQ ID NO: 58702 - DNA, 18 bp, Homo sapiens
ccactgccattgcggccc

SEQ ID NO: 58703 - DNA, 19 bp, Homo sapiens
gatgacaataaagggacaa

SEQ ID NO: 58704 - DNA, 19 bp, Homo sapiens
ttcagctcctctttcttct

SEQ ID NO: 58705 - DNA, 21 bp, Homo sapiens
atacatttactgaaaacaaca

SEQ ID NO: 58706 - DNA, 19 bp, Homo sapiens
gcttggatgacattgaaaa

SEQ ID NO: 58707 - DNA, 22 bp, Homo sapiens
aacgttaatagaaacaagaaca

SEQ ID NO: 58708 - DNA, 22 bp, Homo sapiens
aaatttctcatcagtggtatca

SEQ ID NO: 58709 - DNA, 22 bp, Homo sapiens
aaaatctggtattgacattcta

SEQ ID NO: 58710 - DNA, 19 bp, Homo sapiens
ttttaataatgtctgcacc

SEQ ID NO: 58711 - DNA, 20 bp, Homo sapiens
tgggctcaggtaggctggct

SEQ ID NO: 58712 - DNA, 20 bp, Homo sapiens
agggacgcaaattattttga

SEQ ID NO: 58713 - DNA, 17 bp, Homo sapiens
cctgcctcttgtactga

SEQ ID NO: 58714 - DNA, 19 bp, Homo sapiens
tgtctttgtatattttgca

SEQ ID NO: 58715 - DNA, 22 bp, Homo sapiens
tcaaaaatgttaaataaagcat

SEQ ID NO: 58716 - DNA, 17 bp, Homo sapiens
agagaaagcgagaggaa

SEQ ID NO: 58717 - DNA, 23 bp, Homo sapiens
taagtctgaagcagattttatta

SEQ ID NO: 58718 - DNA, 22 bp, Homo sapiens
gtactgtaaaagaattgttgca

SEQ ID NO: 58719 - DNA, 24 bp, Homo sapiens
ggcaaggtatattataattttagc

SEQ ID NO: 58720 - DNA, 20 bp, Homo sapiens
acagctttttaaaaaccaaa

SEQ ID NO: 58721 - DNA, 17 bp, Homo sapiens
acagctgctgttttatc

SEQ ID NO: 58722 - DNA, 19 bp, Homo sapiens
ttggatttttgtgtgtgtt

SEQ ID NO: 58723 - DNA, 16 bp, Homo sapiens
tctcctctttgcaaca

SEQ ID NO: 58724 - DNA, 20 bp, Homo sapiens
ccaaatgtaaaagaaaggct

SEQ ID NO: 58725 - DNA, 19 bp, Homo sapiens
agcatttgtaataaaaggc

SEQ ID NO: 58726 - DNA, 16 bp, Homo sapiens
tcagcagggggtgaat

SEQ ID NO: 58727 - DNA, 21 bp, Homo sapiens
aatgtgtaatatgtgctctga

SEQ ID NO: 58728 - DNA, 18 bp, Homo sapiens
tgaaggaattggagcagt

SEQ ID NO: 58729 - DNA, 18 bp, Homo sapiens
tttatttccactcctagt

SEQ ID NO: 58730 - DNA, 26 bp, Homo sapiens
tatgtttctaataaaaagtaattttg

SEQ ID NO: 58731 - DNA, 17 bp, Homo sapiens
tcctctttcagattcac

SEQ ID NO: 58732 - DNA, 20 bp, Homo sapiens
gcatgtgattagtttagcaa

SEQ ID NO: 58733 - DNA, 23 bp, Homo sapiens
tgtatatctgagttaaactgctc

SEQ ID NO: 58734 - DNA, 18 bp, Homo sapiens
ctcaggtacttttccagt

SEQ ID NO: 58735 - DNA, 17 bp, Homo sapiens
ggcgtttatctcccatt

SEQ ID NO: 58736 - DNA, 17 bp, Homo sapiens
ccatcgatttgcagcca

SEQ ID NO: 58737 - DNA, 20 bp, Homo sapiens
tttccttttgaaaaccttgc

SEQ ID NO: 58738 - DNA, 16 bp, Homo sapiens
aacttgatggcaaacc

SEQ ID NO: 58739 - DNA, 23 bp, Homo sapiens
caaccttcgcaagagaccattta

SEQ ID NO: 58740 - DNA, 17 bp, Homo sapiens
ggcagaactgaatgaca

SEQ ID NO: 58741 - DNA, 19 bp, Homo sapiens
attctgtgtgaaatggctg

SEQ ID NO: 58742 - DNA, 24 bp, Homo sapiens
tttctatcttgaccttcattaatt

SEQ ID NO: 58743 - DNA, 23 bp, Homo sapiens
ctctactaatttcctgcagtggt

SEQ ID NO: 58744 - DNA, 19 bp, Homo sapiens
ctctctttctcactcttct

SEQ ID NO: 58745 - DNA, 20 bp, Homo sapiens
agagtccacctttgggcgta

SEQ ID NO: 58746 - DNA, 21 bp, Homo sapiens
atcattcatttccattcaaag

SEQ ID NO: 58747 - DNA, 21 bp, Homo sapiens
gaatcagagaaaaagaaaccc

SEQ ID NO: 58748 - DNA, 22 bp, Homo sapiens
aggaagaaaggattgttttact

SEQ ID NO: 58749 - DNA, 17 bp, Homo sapiens
ttgaccagaatgtggac

SEQ ID NO: 58750 - DNA, 17 bp, Homo sapiens
actggtgtacaatttgg

SEQ ID NO: 58751 - DNA, 18 bp, Homo sapiens
gtctaaccaataatgcca

SEQ ID NO: 58752 - DNA, 16 bp, Homo sapiens
tttgctggggtttctt

SEQ ID NO: 58753 - DNA, 21 bp, Homo sapiens
caatgaaactttattgttgtc

SEQ ID NO: 58754 - DNA, 19 bp, Homo sapiens
tccactttgtgatgtggtc

SEQ ID NO: 58755 - DNA, 25 bp, Homo sapiens
atttttctttatatttacgcaatat

SEQ ID NO: 58756 - DNA, 16 bp, Homo sapiens
cgagcagaagagtggt

SEQ ID NO: 58757 - DNA, 18 bp, Homo sapiens
tgaattaagagccagcat

SEQ ID NO: 58758 - DNA, 17 bp, Homo sapiens
ggagacgttggtggaag

SEQ ID NO: 58759 - DNA, 19 bp, Homo sapiens
ctggtcacttatgtatctt

SEQ ID NO: 58760 - DNA, 17 bp, Homo sapiens
cacctgaagagtatcac

SEQ ID NO: 58761 - DNA, 18 bp, Homo sapiens
ttctcttaccaacaaaag

SEQ ID NO: 58762 - DNA, 16 bp, Homo sapiens
tgaaggtcaatgctct

SEQ ID NO: 58763 - DNA, 17 bp, Homo sapiens
attcagaagactgagtt

SEQ ID NO: 58764 - DNA, 20 bp, Homo sapiens
catagtaaccatacagaaag

SEQ ID NO: 58765 - DNA, 16 bp, Homo sapiens
aggcctctcctacctc

SEQ ID NO: 58766 - DNA, 21 bp, Homo sapiens
tatatggtatggttttcatga

SEQ ID NO: 58767 - DNA, 22 bp, Homo sapiens
ttatcatggtcctgaaaagcac

SEQ ID NO: 58768 - DNA, 16 bp, Homo sapiens
atcagcagttgaagga

SEQ ID NO: 58769 - DNA, 22 bp, Homo sapiens
ttataatgctattattgctaca

SEQ ID NO: 58770 - DNA, 20 bp, Homo sapiens
atgcgaaaggaaatgaatgt

SEQ ID NO: 58771 - DNA, 22 bp, Homo sapiens
atgttcaaaataaccttcagtg

SEQ ID NO: 58772 - DNA, 19 bp, Homo sapiens
tcttttcaggtaacagaaa

SEQ ID NO: 58773 - DNA, 20 bp, Homo sapiens
ccaaattactaggcattcct

SEQ ID NO: 58774 - DNA, 21 bp, Homo sapiens
gttccaaataagtggttataa

SEQ ID NO: 58775 - DNA, 17 bp, Homo sapiens
ccagccattctgtcaag

SEQ ID NO: 58776 - DNA, 21 bp, Homo sapiens
tattattttaaaacgtgtaag

SEQ ID NO: 58777 - DNA, 16 bp, Homo sapiens
ccaactgttgctttct

SEQ ID NO: 58778 - DNA, 24 bp, Homo sapiens
tatatatacgtatatgtgtgtata

SEQ ID NO: 58779 - DNA, 19 bp, Homo sapiens
acttgatgaaagagtaaca

SEQ ID NO: 58780 - DNA, 19 bp, Homo sapiens
ttagaattgctaagactct

SEQ ID NO: 58781 - DNA, 21 bp, Homo sapiens
gtggaaatggtgataaagact

SEQ ID NO: 58782 - DNA, 19 bp, Homo sapiens
aaggaaagtggaaagaagt

SEQ ID NO: 58783 - DNA, 22 bp, Homo sapiens
tgttttgttttatgtttaaact

SEQ ID NO: 58784 - DNA, 20 bp, Homo sapiens
tgcaatttcaaagctgttac

SEQ ID NO: 58785 - DNA, 21 bp, Homo sapiens
ggggatctctatttatttctg

SEQ ID NO: 58786 - DNA, 19 bp, Homo sapiens
tttctgtacaatctgacgt

SEQ ID NO: 58787 - DNA, 16 bp, Homo sapiens
gctgcaaaatgctact

SEQ ID NO: 58788 - DNA, 21 bp, Homo sapiens
actcagacttttatacaagtt

SEQ ID NO: 58789 - DNA, 19 bp, Homo sapiens
taggccacaatacatgtgc

SEQ ID NO: 58790 - DNA, 18 bp, Homo sapiens
tggaaacaaagagtgtgg

SEQ ID NO: 58791 - DNA, 22 bp, Homo sapiens
attatggttatctgaaaacaat

SEQ ID NO: 58792 - DNA, 18 bp, Homo sapiens
tgagcagcgtctacaaga

SEQ ID NO: 58793 - DNA, 19 bp, Homo sapiens
agtcaaggggtacctgcgt

SEQ ID NO: 58794 - DNA, 21 bp, Homo sapiens
gtccttacagaaaaaattaca

SEQ ID NO: 58795 - DNA, 20 bp, Homo sapiens
tactacttcctgttccacac

SEQ ID NO: 58796 - DNA, 20 bp, Homo sapiens
aaaataggaccagttattgt

SEQ ID NO: 58797 - DNA, 21 bp, Homo sapiens
cttcatctaaaatcatcttac

SEQ ID NO: 58798 - DNA, 20 bp, Homo sapiens
actgctttattttgttttta

SEQ ID NO: 58799 - DNA, 21 bp, Homo sapiens
ataatcgaaacttcatggaga

SEQ ID NO: 58800 - DNA, 20 bp, Homo sapiens
ccaaagagtcctgtctcaga

SEQ ID NO: 58801 - DNA, 24 bp, Homo sapiens
tttagacatcaaattatagttttc

SEQ ID NO: 58802 - DNA, 21 bp, Homo sapiens
caagtcatgagatcagtttag

SEQ ID NO: 58803 - DNA, 19 bp, Homo sapiens
gtccaatatagactggagt

SEQ ID NO: 58804 - DNA, 20 bp, Homo sapiens
tagagcatgctgactaataa

SEQ ID NO: 58805 - DNA, 18 bp, Homo sapiens
atacctgtgcaacatcaa

SEQ ID NO: 58806 - DNA, 17 bp, Homo sapiens
gaggtggttgaggagag

SEQ ID NO: 58807 - DNA, 20 bp, Homo sapiens
tgattatgtttcttcatttc

SEQ ID NO: 58808 - DNA, 16 bp, Homo sapiens
caggtgtgaaccacca

SEQ ID NO: 58809 - DNA, 17 bp, Homo sapiens
aatgatctagaccccct

SEQ ID NO: 58810 - DNA, 17 bp, Homo sapiens
cagacaaggtggacgca

SEQ ID NO: 58811 - DNA, 22 bp, Homo sapiens
agtgaatcaaaacaaccccatg

SEQ ID NO: 58812 - DNA, 21 bp, Homo sapiens
aatccttacacttaatccagg

SEQ ID NO: 58813 - DNA, 22 bp, Homo sapiens
aacattttgttgaagtaataaa

SEQ ID NO: 58814 - DNA, 17 bp, Homo sapiens
tgtaaggaggcaaaagt

SEQ ID NO: 58815 - DNA, 16 bp, Homo sapiens
ggcatttgagctgcgt

SEQ ID NO: 58816 - DNA, 20 bp, Homo sapiens
gcaggattacagaaaagcta

SEQ ID NO: 58817 - DNA, 16 bp, Homo sapiens
tgtgagggactcctgg

SEQ ID NO: 58818 - DNA, 20 bp, Homo sapiens
gcgaaatctgtcttacaaaa

SEQ ID NO: 58819 - DNA, 24 bp, Homo sapiens
agactggatgctctgttcaagcaa

SEQ ID NO: 58820 - DNA, 22 bp, Homo sapiens
tttctccttcacattttttttc

SEQ ID NO: 58821 - DNA, 22 bp, Homo sapiens
ttaaatgtttactcttgatagc

SEQ ID NO: 58822 - DNA, 23 bp, Homo sapiens
atattgtgattgattttcatgca

SEQ ID NO: 58823 - DNA, 17 bp, Homo sapiens
ctcttccacaatcacct

SEQ ID NO: 58824 - DNA, 21 bp, Homo sapiens
agattgcaatgactgagatga

SEQ ID NO: 58825 - DNA, 21 bp, Homo sapiens
tcattcagctctgttgataga

SEQ ID NO: 58826 - DNA, 18 bp, Homo sapiens
caaaccaaatctcttgaa

SEQ ID NO: 58827 - DNA, 24 bp, Homo sapiens
actataggatcagggatctctgca

SEQ ID NO: 58828 - DNA, 17 bp, Homo sapiens
ctggtggaagcagatta

SEQ ID NO: 58829 - DNA, 23 bp, Homo sapiens
aaaaaaattagcaaaatcatctc

SEQ ID NO: 58830 - DNA, 21 bp, Homo sapiens
cacatgctataatacacatgt

SEQ ID NO: 58831 - DNA, 19 bp, Homo sapiens
aggaacttgagacatttaa

SEQ ID NO: 58832 - DNA, 23 bp, Homo sapiens
tgaaacctgaaagctgagctaat

SEQ ID NO: 58833 - DNA, 19 bp, Homo sapiens
tcagattcgcatattggca

SEQ ID NO: 58834 - DNA, 21 bp, Homo sapiens
tgctatacattaatgcaaatt

SEQ ID NO: 58835 - DNA, 20 bp, Homo sapiens
gtaattattgcaaatgtgtt

SEQ ID NO: 58836 - DNA, 17 bp, Homo sapiens
gttccctccaacgagaa

SEQ ID NO: 58837 - DNA, 17 bp, Homo sapiens
tactgagcatttgctga

SEQ ID NO: 58838 - DNA, 16 bp, Homo sapiens
tgttagggtctgtgcc

SEQ ID NO: 58839 - DNA, 20 bp, Homo sapiens
tggtgtttttaatcccaatt

SEQ ID NO: 58840 - DNA, 21 bp, Homo sapiens
tgtcgcatcaaattttcaagt

SEQ ID NO: 58841 - DNA, 21 bp, Homo sapiens
agaaggttattagggggaaca

SEQ ID NO: 58842 - DNA, 17 bp, Homo sapiens
ctgaaaacattcctggc

SEQ ID NO: 58843 - DNA, 18 bp, Homo sapiens
actctcttgggttgtttt

SEQ ID NO: 58844 - DNA, 22 bp, Homo sapiens
ttattgtcatacttggagaaag

SEQ ID NO: 58845 - DNA, 25 bp, Homo sapiens
ttaatactgcatataaattatcatc

SEQ ID NO: 58846 - DNA, 25 bp, Homo sapiens
ccataatatttaatctgtgatatat

SEQ ID NO: 58847 - DNA, 18 bp, Homo sapiens
agatttcctcagctccgc

SEQ ID NO: 58848 - DNA, 25 bp, Homo sapiens
aaagtgttatattttcagaagtttt

SEQ ID NO: 58849 - DNA, 18 bp, Homo sapiens
tttagccacttgtttgct

SEQ ID NO: 58850 - DNA, 18 bp, Homo sapiens
tgaaactgtctagctgca

SEQ ID NO: 58851 - DNA, 17 bp, Homo sapiens
actaggctgaatgggaa

SEQ ID NO: 58852 - DNA, 21 bp, Homo sapiens
gtgcctgaatgaggaattcaa

SEQ ID NO: 58853 - DNA, 16 bp, Homo sapiens
ctgtagcacaagaggc

SEQ ID NO: 58854 - DNA, 16 bp, Homo sapiens
gcctcacatatgacca

SEQ ID NO: 58855 - DNA, 16 bp, Homo sapiens
agcgaaagtgaaactc

SEQ ID NO: 58856 - DNA, 20 bp, Homo sapiens
tgacttccaaagtcttgcat

SEQ ID NO: 58857 - DNA, 19 bp, Homo sapiens
ttcatgctattaagagagc

SEQ ID NO: 58858 - DNA, 18 bp, Homo sapiens
gagtttcaagttcctttt

SEQ ID NO: 58859 - DNA, 22 bp, Homo sapiens
ggatgttgtgagaaagaaatta

SEQ ID NO: 58860 - DNA, 23 bp, Homo sapiens
ctatttacagactcagtaaggag

SEQ ID NO: 58861 - DNA, 16 bp, Homo sapiens
tggaagagactggagt

SEQ ID NO: 58862 - DNA, 23 bp, Homo sapiens
taaacttgaagctaaattaaaat

SEQ ID NO: 58863 - DNA, 22 bp, Homo sapiens
agtatcttgagagagattttga

SEQ ID NO: 58864 - DNA, 19 bp, Homo sapiens
aagagcagactgtatacaa

SEQ ID NO: 58865 - DNA, 19 bp, Homo sapiens
agcctccagaaagatctat

SEQ ID NO: 58866 - DNA, 22 bp, Homo sapiens
tgttttacttagtttttctttt

SEQ ID NO: 58867 - DNA, 19 bp, Homo sapiens
gtttgttttgtggaaggtc

SEQ ID NO: 58868 - DNA, 24 bp, Homo sapiens
gtaattcatctggagttttatatt

SEQ ID NO: 58869 - DNA, 26 bp, Homo sapiens
atttacatactgatgaaataatataa

SEQ ID NO: 58870 - DNA, 19 bp, Homo sapiens
ccattcgtgcatctctgat

SEQ ID NO: 58871 - DNA, 20 bp, Homo sapiens
tcttatgcatataagctttt

SEQ ID NO: 58872 - DNA, 22 bp, Homo sapiens
ccttcaaggcctcctttctggc

SEQ ID NO: 58873 - DNA, 27 bp, Homo sapiens
taccatgaaaatatttagatatgctag

SEQ ID NO: 58874 - DNA, 21 bp, Homo sapiens
acagaactcaaagaacttaac

SEQ ID NO: 58875 - DNA, 21 bp, Homo sapiens
taaagcaaaaacataggaaca

SEQ ID NO: 58876 - DNA, 16 bp, Homo sapiens
ggtgggcagaagataa

SEQ ID NO: 58877 - DNA, 22 bp, Homo sapiens
ttaggaaatcttagttaagtac

SEQ ID NO: 58878 - DNA, 19 bp, Homo sapiens
ttcttagcttttagtcagt

SEQ ID NO: 58879 - DNA, 19 bp, Homo sapiens
ggcacatgtgatcccactg

SEQ ID NO: 58880 - DNA, 20 bp, Homo sapiens
tctagctatgtttcatatct

SEQ ID NO: 58881 - DNA, 23 bp, Homo sapiens
caaactctggctctgcttcattc

SEQ ID NO: 58882 - DNA, 25 bp, Homo sapiens
tctcagattttaaaagacaaaaatc

SEQ ID NO: 58883 - DNA, 18 bp, Homo sapiens
tgtctgaatatcactgac

SEQ ID NO: 58884 - DNA, 19 bp, Homo sapiens
cacccccaacccagctgtg

SEQ ID NO: 58885 - DNA, 16 bp, Homo sapiens
tgcccttggggattca

SEQ ID NO: 58886 - DNA, 19 bp, Homo sapiens
actggggagaggagagcaa

SEQ ID NO: 58887 - DNA, 17 bp, Homo sapiens
tcacatacaaaccctga

SEQ ID NO: 58888 - DNA, 23 bp, Homo sapiens
attcatacaaaattattcatatt

SEQ ID NO: 58889 - DNA, 21 bp, Homo sapiens
acaatgatgaattgtgttaaa

SEQ ID NO: 58890 - DNA, 22 bp, Homo sapiens
agctgcttttttagaatttctg

SEQ ID NO: 58891 - DNA, 20 bp, Homo sapiens
agagacatcctttaaacatg

SEQ ID NO: 58892 - DNA, 16 bp, Homo sapiens
tcagccatccatttct

SEQ ID NO: 58893 - DNA, 20 bp, Homo sapiens
tcctttgtaaaagactcatg

SEQ ID NO: 58894 - DNA, 17 bp, Homo sapiens
cccagctggttgagcat

SEQ ID NO: 58895 - DNA, 21 bp, Homo sapiens
aggtcaaatgcttatgtacct

SEQ ID NO: 58896 - DNA, 19 bp, Homo sapiens
aattagccggaaatatcaa

SEQ ID NO: 58897 - DNA, 19 bp, Homo sapiens
tgagggtagaaagtaaaat

SEQ ID NO: 58898 - DNA, 18 bp, Homo sapiens
caacaaagtggcctatac

SEQ ID NO: 58899 - DNA, 20 bp, Homo sapiens
tgctcctctagcttttgaca

SEQ ID NO: 58900 - DNA, 21 bp, Homo sapiens
atcaattagggtaaatgtatt

SEQ ID NO: 58901 - DNA, 19 bp, Homo sapiens
ttcttcaaattctgattga

SEQ ID NO: 58902 - DNA, 26 bp, Homo sapiens
gaatcatatagatttcaagtacagtt

SEQ ID NO: 58903 - DNA, 16 bp, Homo sapiens
cacagtggtgctgaga

SEQ ID NO: 58904 - DNA, 20 bp, Homo sapiens
taaattaccactagaagttt

SEQ ID NO: 58905 - DNA, 24 bp, Homo sapiens
gagtatatgcataaataatactgt

SEQ ID NO: 58906 - DNA, 22 bp, Homo sapiens
ctccatacctcaacttagtgtc

SEQ ID NO: 58907 - DNA, 20 bp, Homo sapiens
tgtcagaatgacttaaattc

SEQ ID NO: 58908 - DNA, 17 bp, Homo sapiens
caggagaccatgagtgc

SEQ ID NO: 58909 - DNA, 20 bp, Homo sapiens
gataagcgtgctttattgtt

SEQ ID NO: 58910 - DNA, 21 bp, Homo sapiens
ttaagtgattctcattctttt

SEQ ID NO: 58911 - DNA, 17 bp, Homo sapiens
catgatttcatagtcgg

SEQ ID NO: 58912 - DNA, 23 bp, Homo sapiens
aatataattgagtttgctgacaa

SEQ ID NO: 58913 - DNA, 17 bp, Homo sapiens
acccatgtcctgatggc

SEQ ID NO: 58914 - DNA, 27 bp, Homo sapiens
gaatgtatcttcataatcatattaaat

SEQ ID NO: 58915 - DNA, 21 bp, Homo sapiens
gacagcttatctgttacacca

SEQ ID NO: 58916 - DNA, 23 bp, Homo sapiens
aaatcattttaagcaagtctttt

SEQ ID NO: 58917 - DNA, 22 bp, Homo sapiens
ggttccatttacagaaattatt

SEQ ID NO: 58918 - DNA, 19 bp, Homo sapiens
ctgaaagagaaaggacaag

SEQ ID NO: 58919 - DNA, 17 bp, Homo sapiens
aaatgtcaagttagcca

SEQ ID NO: 58920 - DNA, 16 bp, Homo sapiens
agtcaaccggctatca

SEQ ID NO: 58921 - DNA, 18 bp, Homo sapiens
cctgcacatcagaaaaga

SEQ ID NO: 58922 - DNA, 23 bp, Homo sapiens
aaatgtaatgtatgcaaagtaaa

SEQ ID NO: 58923 - DNA, 18 bp, Homo sapiens
catccaggaacatgggtc

SEQ ID NO: 58924 - DNA, 20 bp, Homo sapiens
tcagatatttgtgaagggta

SEQ ID NO: 58925 - DNA, 17 bp, Homo sapiens
caatttgaggttgaaga

SEQ ID NO: 58926 - DNA, 17 bp, Homo sapiens
aaatgtatggctggtga

SEQ ID NO: 58927 - DNA, 19 bp, Homo sapiens
agagccaacagcaattaaa

SEQ ID NO: 58928 - DNA, 22 bp, Homo sapiens
attgcgcttagctaaatcctta

SEQ ID NO: 58929 - DNA, 17 bp, Homo sapiens
gcagatgacaactactg

SEQ ID NO: 58930 - DNA, 19 bp, Homo sapiens
ttggaaattgccaagaaat

SEQ ID NO: 58931 - DNA, 17 bp, Homo sapiens
aactggctggagtatca

SEQ ID NO: 58932 - DNA, 22 bp, Homo sapiens
accttacaaatttttaactgac

SEQ ID NO: 58933 - DNA, 18 bp, Homo sapiens
aagcctcagaacaactga

SEQ ID NO: 58934 - DNA, 19 bp, Homo sapiens
tttcaaccagttttcagca

SEQ ID NO: 58935 - DNA, 19 bp, Homo sapiens
gggttcaggggatatattt

SEQ ID NO: 58936 - DNA, 18 bp, Homo sapiens
agcgatgatgttgttctg

SEQ ID NO: 58937 - DNA, 22 bp, Homo sapiens
tcatgtggtgaatacttttata

SEQ ID NO: 58938 - DNA, 17 bp, Homo sapiens
gatccaccggctgttca

SEQ ID NO: 58939 - DNA, 26 bp, Homo sapiens
atctgaaatcatatttacacatttat

SEQ ID NO: 58940 - DNA, 24 bp, Homo sapiens
atttccttagcattaaaaaaagaa

SEQ ID NO: 58941 - DNA, 19 bp, Homo sapiens
tcagaaaactgcaagatgc

SEQ ID NO: 58942 - DNA, 22 bp, Homo sapiens
tatttaacaagtgcttgtctga

SEQ ID NO: 58943 - DNA, 18 bp, Homo sapiens
tgaattactcatctttgc

SEQ ID NO: 58944 - DNA, 24 bp, Homo sapiens
aatccctaagaagattatctaaat

SEQ ID NO: 58945 - DNA, 16 bp, Homo sapiens
aaggcttgaaagggca

SEQ ID NO: 58946 - DNA, 21 bp, Homo sapiens
gcctgagctgatctgctggca

SEQ ID NO: 58947 - DNA, 18 bp, Homo sapiens
tgatggcaaaagtgttga

SEQ ID NO: 58948 - DNA, 19 bp, Homo sapiens
tgcttgctatctaaaatat

SEQ ID NO: 58949 - DNA, 18 bp, Homo sapiens
agagtcctgaatttgcaa

SEQ ID NO: 58950 - DNA, 21 bp, Homo sapiens
tctatcaactagtagaatcac

SEQ ID NO: 58951 - DNA, 21 bp, Homo sapiens
cttaggttggatgttgatata

SEQ ID NO: 58952 - DNA, 23 bp, Homo sapiens
aatgagtacagatataaaaatta

SEQ ID NO: 58953 - DNA, 26 bp, Homo sapiens
tttttttaatatagaagaaagagata

SEQ ID NO: 58954 - DNA, 16 bp, Homo sapiens
tgccttccttccgaaa

SEQ ID NO: 58955 - DNA, 16 bp, Homo sapiens
tgtcaggcaggagtct

SEQ ID NO: 58956 - DNA, 23 bp, Homo sapiens
agtaatccagctgtgaagttcag

SEQ ID NO: 58957 - DNA, 24 bp, Homo sapiens
aatgtacttcataatttttctcac

SEQ ID NO: 58958 - DNA, 16 bp, Homo sapiens
tccaccaccacctccc

SEQ ID NO: 58959 - DNA, 20 bp, Homo sapiens
ggaaatattgctgaagtgaa

SEQ ID NO: 58960 - DNA, 16 bp, Homo sapiens
aacagtaactacggtg

SEQ ID NO: 58961 - DNA, 20 bp, Homo sapiens
ttcatttgcagataaaagct

SEQ ID NO: 58962 - DNA, 18 bp, Homo sapiens
tcacagatttcacaggct

SEQ ID NO: 58963 - DNA, 23 bp, Homo sapiens
cagtaatctgcctcttcttttgg

SEQ ID NO: 58964 - DNA, 17 bp, Homo sapiens
ctccaagcagtctttac

SEQ ID NO: 58965 - DNA, 20 bp, Homo sapiens
ggatctgttcccttgtggtc

SEQ ID NO: 58966 - DNA, 21 bp, Homo sapiens
ttttgatctgaaggtcaatct

SEQ ID NO: 58967 - DNA, 16 bp, Homo sapiens
agtggtggtgacagcc

SEQ ID NO: 58968 - DNA, 16 bp, Homo sapiens
acaggcaaaagaatca

SEQ ID NO: 58969 - DNA, 18 bp, Homo sapiens
ggataactttgcccggtg

SEQ ID NO: 58970 - DNA, 21 bp, Homo sapiens
ctggttgcttcttttgtaggg

SEQ ID NO: 58971 - DNA, 19 bp, Homo sapiens
acaagatcttctttcaaca

SEQ ID NO: 58972 - DNA, 23 bp, Homo sapiens
ctctgagatagtctgtagcatga

SEQ ID NO: 58973 - DNA, 18 bp, Homo sapiens
ggttttaaaagcggatct

SEQ ID NO: 58974 - DNA, 21 bp, Homo sapiens
ggactaaattatcccaacacc

SEQ ID NO: 58975 - DNA, 21 bp, Homo sapiens
tgaactatagtggtgtatgga

SEQ ID NO: 58976 - DNA, 20 bp, Homo sapiens
tcactgacttattcttcagt

SEQ ID NO: 58977 - DNA, 16 bp, Homo sapiens
gcgggcacgattgaaa

SEQ ID NO: 58978 - DNA, 20 bp, Homo sapiens
ggattgctttttcttttcta

SEQ ID NO: 58979 - DNA, 23 bp, Homo sapiens
ttaattcagaaaagtagcaatat

SEQ ID NO: 58980 - DNA, 20 bp, Homo sapiens
agtgaacaagattcacacaa

SEQ ID NO: 58981 - DNA, 26 bp, Homo sapiens
catttaatattcaatagcatagaaga

SEQ ID NO: 58982 - DNA, 16 bp, Homo sapiens
taatgtcttgcagtgc

SEQ ID NO: 58983 - DNA, 16 bp, Homo sapiens
accattgaaagctaga

SEQ ID NO: 58984 - DNA, 17 bp, Homo sapiens
cacggggggatattaaa

SEQ ID NO: 58985 - DNA, 20 bp, Homo sapiens
cattttgatctttaaagcca

SEQ ID NO: 58986 - DNA, 16 bp, Homo sapiens
atggcaacgtcttact

SEQ ID NO: 58987 - DNA, 21 bp, Homo sapiens
ctgaaagccatgcactaaaaa

SEQ ID NO: 58988 - DNA, 18 bp, Homo sapiens
cgatgggcaaacatctgt

SEQ ID NO: 58989 - DNA, 20 bp, Homo sapiens
cataaatctttacttttcca

SEQ ID NO: 58990 - DNA, 17 bp, Homo sapiens
taccaattgtttgctga

SEQ ID NO: 58991 - DNA, 18 bp, Homo sapiens
tgacacacctgttcttca

SEQ ID NO: 58992 - DNA, 18 bp, Homo sapiens
cgtacataggagactgag

SEQ ID NO: 58993 - DNA, 22 bp, Homo sapiens
gaacccagcggtcttctgtcca

SEQ ID NO: 58994 - DNA, 18 bp, Homo sapiens
cagtcacaccacttattt

SEQ ID NO: 58995 - DNA, 24 bp, Homo sapiens
aatcacagcacttcagctgattat

SEQ ID NO: 58996 - DNA, 17 bp, Homo sapiens
acatggtggtggtagtt

SEQ ID NO: 58997 - DNA, 25 bp, Homo sapiens
tatataaattgcattctaaattttt

SEQ ID NO: 58998 - DNA, 19 bp, Homo sapiens
tctttcaggtgcttcaaga

SEQ ID NO: 58999 - DNA, 24 bp, Homo sapiens
atatttagtttactaagcaaaata

SEQ ID NO: 59000 - DNA, 20 bp, Homo sapiens
gcaaatcatttcaacacaca

SEQ ID NO: 59001 - DNA, 17 bp, Homo sapiens
gcgtgatctccactaga

SEQ ID NO: 59002 - DNA, 20 bp, Homo sapiens
taggttaataaaaaatggga

SEQ ID NO: 59003 - DNA, 20 bp, Homo sapiens
acttgttcttgttctagatc

SEQ ID NO: 59004 - DNA, 19 bp, Homo sapiens
cattgcaacaaagattgca

SEQ ID NO: 59005 - DNA, 17 bp, Homo sapiens
ctgatcttgaagaccta

SEQ ID NO: 59006 - DNA, 23 bp, Homo sapiens
ggctgactttaagttttaattct

SEQ ID NO: 59007 - DNA, 18 bp, Homo sapiens
ttgaatgactggctaaca

SEQ ID NO: 59008 - DNA, 17 bp, Homo sapiens
acacagagtttgctttc

SEQ ID NO: 59009 - DNA, 25 bp, Homo sapiens
cttctttcaaattttcagtttacat

SEQ ID NO: 59010 - DNA, 21 bp, Homo sapiens
tgttgttgtacttggcgtttt

SEQ ID NO: 59011 - DNA, 22 bp, Homo sapiens
ctattgttttacattgtgatgt

SEQ ID NO: 59012 - DNA, 21 bp, Homo sapiens
tgttctttcttctgtttttgt

SEQ ID NO: 59013 - DNA, 17 bp, Homo sapiens
tccttctcaatgtccaa

SEQ ID NO: 59014 - DNA, 23 bp, Homo sapiens
ttctggagatccattaaaactct

SEQ ID NO: 59015 - DNA, 22 bp, Homo sapiens
tgaaaaccaaaatgttatttct

SEQ ID NO: 59016 - DNA, 18 bp, Homo sapiens
ttcaagatgggaatgcct

SEQ ID NO: 59017 - DNA, 21 bp, Homo sapiens
gtgccttgggaacaaactgag

SEQ ID NO: 59018 - DNA, 21 bp, Homo sapiens
tggaacaggaaaattatcaga

SEQ ID NO: 59019 - DNA, 20 bp, Homo sapiens
gcttccaaaacttgttagtc

SEQ ID NO: 59020 - DNA, 18 bp, Homo sapiens
gatggatttgacagccca

SEQ ID NO: 59021 - DNA, 22 bp, Homo sapiens
tttttccatgctagctaccctg

SEQ ID NO: 59022 - DNA, 18 bp, Homo sapiens
caccgatttacctagagt

SEQ ID NO: 59023 - DNA, 19 bp, Homo sapiens
acttcagtttcttcatctt

SEQ ID NO: 59024 - DNA, 18 bp, Homo sapiens
taaatctaaatgggccac

SEQ ID NO: 59025 - DNA, 16 bp, Homo sapiens
accaacccggccctga

SEQ ID NO: 59026 - DNA, 25 bp, Homo sapiens
cttaattcatattaaaagtggtttt

SEQ ID NO: 59027 - DNA, 20 bp, Homo sapiens
gttgctctccaaaagaaaac

SEQ ID NO: 59028 - DNA, 22 bp, Homo sapiens
ggagagatttctaatgatgtgg

SEQ ID NO: 59029 - DNA, 20 bp, Homo sapiens
tttccaaaatacaaggatgt

SEQ ID NO: 59030 - DNA, 20 bp, Homo sapiens
tcaaacagctttagaagaag

SEQ ID NO: 59031 - DNA, 19 bp, Homo sapiens
aacaagtcatatgttttgt

SEQ ID NO: 59032 - DNA, 19 bp, Homo sapiens
tgaagacaagtcatttggc

SEQ ID NO: 59033 - DNA, 20 bp, Homo sapiens
aaactggtctttcaccactt

SEQ ID NO: 59034 - DNA, 20 bp, Homo sapiens
tctgcaaagacattaattgt

SEQ ID NO: 59035 - DNA, 17 bp, Homo sapiens
agcagaaagaagccacg

SEQ ID NO: 59036 - DNA, 18 bp, Homo sapiens
ggacagtcctagcatttt

SEQ ID NO: 59037 - DNA, 23 bp, Homo sapiens
acttcactctccatcaatgaact

SEQ ID NO: 59038 - DNA, 21 bp, Homo sapiens
ggaagttaaaatgaaaactcc

SEQ ID NO: 59039 - DNA, 22 bp, Homo sapiens
aagactcaataacaaagcagaa

SEQ ID NO: 59040 - DNA, 16 bp, Homo sapiens
atgtcaccacctctga

SEQ ID NO: 59041 - DNA, 21 bp, Homo sapiens
tcttcacgaggagataaaagg

SEQ ID NO: 59042 - DNA, 20 bp, Homo sapiens
cagggatatgagagaacttc

SEQ ID NO: 59043 - DNA, 22 bp, Homo sapiens
tggaagcagttctctggtttgt

SEQ ID NO: 59044 - DNA, 17 bp, Homo sapiens
cctcctctctatccact

SEQ ID NO: 59045 - DNA, 22 bp, Homo sapiens
aaatgggctccgtgtagggtca

SEQ ID NO: 59046 - DNA, 22 bp, Homo sapiens
tccatttaatgttctgttttct

SEQ ID NO: 59047 - DNA, 16 bp, Homo sapiens
atcgaggcttagggga

SEQ ID NO: 59048 - DNA, 22 bp, Homo sapiens
agtataccaatttcgaatatca

SEQ ID NO: 59049 - DNA, 20 bp, Homo sapiens
aggtttagtctgtctctttt

SEQ ID NO: 59050 - DNA, 23 bp, Homo sapiens
taaagtgactaaagaagaacatt

SEQ ID NO: 59051 - DNA, 21 bp, Homo sapiens
cacgtgtatatacatataagt

SEQ ID NO: 59052 - DNA, 16 bp, Homo sapiens
gcctcaacaagtgagc

SEQ ID NO: 59053 - DNA, 20 bp, Homo sapiens
aaacagaaaacatcttgaat

SEQ ID NO: 59054 - DNA, 19 bp, Homo sapiens
ttgataccacctatccaga

SEQ ID NO: 59055 - DNA, 24 bp, Homo sapiens
catttgatgatgtaactgaaaatg

SEQ ID NO: 59056 - DNA, 23 bp, Homo sapiens
tccttttagagtctcaaatatag

SEQ ID NO: 59057 - DNA, 17 bp, Homo sapiens
cctggatggcttcaatg

SEQ ID NO: 59058 - DNA, 20 bp, Homo sapiens
tggacaattcactgttcatt

SEQ ID NO: 59059 - DNA, 18 bp, Homo sapiens
tgtacattaagatggact

SEQ ID NO: 59060 - DNA, 21 bp, Homo sapiens
tggaaagacattttaggcctc

SEQ ID NO: 59061 - DNA, 26 bp, Homo sapiens
ctagaattaaataagacaattcataa

SEQ ID NO: 59062 - DNA, 20 bp, Homo sapiens
gccagatatcaattaggcat

SEQ ID NO: 59063 - DNA, 21 bp, Homo sapiens
acagtattggaaaacttaaga

SEQ ID NO: 59064 - DNA, 16 bp, Homo sapiens
tgtggtttgccagcag

SEQ ID NO: 59065 - DNA, 22 bp, Homo sapiens
tcagatgaaaacattaaactct

SEQ ID NO: 59066 - DNA, 19 bp, Homo sapiens
ttgtctttgtgtatgtgtg

SEQ ID NO: 59067 - DNA, 18 bp, Homo sapiens
ggatcgagtagtttctct

SEQ ID NO: 59068 - DNA, 22 bp, Homo sapiens
gggcattggttgtcaatgaaaa

SEQ ID NO: 59069 - DNA, 21 bp, Homo sapiens
tgttccagtcgttgtgtggct

SEQ ID NO: 59070 - DNA, 23 bp, Homo sapiens
aatagaaatattttaaagggtaa

SEQ ID NO: 59071 - DNA, 20 bp, Homo sapiens
attagttcattccaatggaa

SEQ ID NO: 59072 - DNA, 18 bp, Homo sapiens
caacttcaccaccagctg

SEQ ID NO: 59073 - DNA, 18 bp, Homo sapiens
ggacatgatctggaacca

SEQ ID NO: 59074 - DNA, 16 bp, Homo sapiens
agattctcctgagctg

SEQ ID NO: 59075 - DNA, 22 bp, Homo sapiens
acttttacaagttatttaatgt

SEQ ID NO: 59076 - DNA, 16 bp, Homo sapiens
tccacatgtaggtcaa

SEQ ID NO: 59077 - DNA, 17 bp, Homo sapiens
aagccaggccatcagac

SEQ ID NO: 59078 - DNA, 22 bp, Homo sapiens
atatttaagtttgcatggttct

SEQ ID NO: 59079 - DNA, 16 bp, Homo sapiens
ttgtcggacccagctc

SEQ ID NO: 59080 - DNA, 22 bp, Homo sapiens
agaatctattatgtctcattac

SEQ ID NO: 59081 - DNA, 19 bp, Homo sapiens
agccatgatatttttcatt

SEQ ID NO: 59082 - DNA, 19 bp, Homo sapiens
tgatccttaacatttcaga

SEQ ID NO: 59083 - DNA, 22 bp, Homo sapiens
gtagatggaaatcataaactga

SEQ ID NO: 59084 - DNA, 19 bp, Homo sapiens
gggtttgttattgttagaa

SEQ ID NO: 59085 - DNA, 19 bp, Homo sapiens
tacccctttctttaacagg

SEQ ID NO: 59086 - DNA, 21 bp, Homo sapiens
gattaatgttacccaaaagga

SEQ ID NO: 59087 - DNA, 20 bp, Homo sapiens
ttaccttcacgtttttatta

SEQ ID NO: 59088 - DNA, 19 bp, Homo sapiens
attccaaatcaaaccaaga

SEQ ID NO: 59089 - DNA, 26 bp, Homo sapiens
taatttttagattattttcaaaaagc

SEQ ID NO: 59090 - DNA, 18 bp, Homo sapiens
ttcactaaatcaacctgt

SEQ ID NO: 59091 - DNA, 19 bp, Homo sapiens
tattagccacaatcaggca

SEQ ID NO: 59092 - DNA, 18 bp, Homo sapiens
ccctgaacaatgtcaaca

SEQ ID NO: 59093 - DNA, 20 bp, Homo sapiens
gatttacaagagaatttgaa

SEQ ID NO: 59094 - DNA, 18 bp, Homo sapiens
cagtgaacactcttttgt

SEQ ID NO: 59095 - DNA, 19 bp, Homo sapiens
tgaagcatgctgtgtcaca

SEQ ID NO: 59096 - DNA, 24 bp, Homo sapiens
tcaagcttaatagtgaaattataa

SEQ ID NO: 59097 - DNA, 24 bp, Homo sapiens
gttctgcaaaacccgcagtgcctt

SEQ ID NO: 59098 - DNA, 20 bp, Homo sapiens
gcgcaaagtatttagattca

SEQ ID NO: 59099 - DNA, 24 bp, Homo sapiens
caaatgaaaatcatacgaggttgc

SEQ ID NO: 59100 - DNA, 16 bp, Homo sapiens
tgacctacaggatggg

SEQ ID NO: 59101 - DNA, 20 bp, Homo sapiens
gtcattctactagatgtcat

SEQ ID NO: 59102 - DNA, 19 bp, Homo sapiens
tgctttgttaaattgagtg

SEQ ID NO: 59103 - DNA, 26 bp, Homo sapiens
aagtttaaagttaactttcttaaaaa

SEQ ID NO: 59104 - DNA, 20 bp, Homo sapiens
tccttaaatatagctttagt

SEQ ID NO: 59105 - DNA, 18 bp, Homo sapiens
gtctaggaggcgcctccc

SEQ ID NO: 59106 - DNA, 20 bp, Homo sapiens
gaactttccttttttcatcc

SEQ ID NO: 59107 - DNA, 23 bp, Homo sapiens
agagtgaacataatatttccaga

SEQ ID NO: 59108 - DNA, 22 bp, Homo sapiens
tttagatgaaagagaagatgtt

SEQ ID NO: 59109 - DNA, 19 bp, Homo sapiens
aacggatttttaagataca

SEQ ID NO: 59110 - DNA, 25 bp, Homo sapiens
actttggttgtaaaatatgaattat

SEQ ID NO: 59111 - DNA, 25 bp, Homo sapiens
agatcttaaaagtaaagtaacaaac

SEQ ID NO: 59112 - DNA, 23 bp, Homo sapiens
ttatcaatgaatgtaatactaaa

SEQ ID NO: 59113 - DNA, 21 bp, Homo sapiens
gtgaatgttttcttttgaaca

SEQ ID NO: 59114 - DNA, 19 bp, Homo sapiens
tagaaaggcatatggaaca

SEQ ID NO: 59115 - DNA, 18 bp, Homo sapiens
agctttcctatgaaggtg

SEQ ID NO: 59116 - DNA, 18 bp, Homo sapiens
gtcacctttagggaagcc

SEQ ID NO: 59117 - DNA, 18 bp, Homo sapiens
aggtttaccataccccat

SEQ ID NO: 59118 - DNA, 18 bp, Homo sapiens
atggctgttgcatttatc

SEQ ID NO: 59119 - DNA, 16 bp, Homo sapiens
gaggctggtcagagat

SEQ ID NO: 59120 - DNA, 26 bp, Homo sapiens
tatatattcctgaataaatacatata

SEQ ID NO: 59121 - DNA, 16 bp, Homo sapiens
gctgccttgatataca

SEQ ID NO: 59122 - DNA, 22 bp, Homo sapiens
caaactactgtgataatttaaa

SEQ ID NO: 59123 - DNA, 16 bp, Homo sapiens
ttaagcctactggagc

SEQ ID NO: 59124 - DNA, 20 bp, Homo sapiens
aacgttatgccacagtaaaa

SEQ ID NO: 59125 - DNA, 19 bp, Homo sapiens
acgaataggaaaaactgaa

SEQ ID NO: 59126 - DNA, 23 bp, Homo sapiens
cttcttcccaccaaagcattttg

SEQ ID NO: 59127 - DNA, 22 bp, Homo sapiens
acaaggcaattttaaaatccat

SEQ ID NO: 59128 - DNA, 18 bp, Homo sapiens
cagcagccaacttattgg

SEQ ID NO: 59129 - DNA, 20 bp, Homo sapiens
gcaacaaaccccagctacca

SEQ ID NO: 59130 - DNA, 19 bp, Homo sapiens
tagaatgctttcaggaaga

SEQ ID NO: 59131 - DNA, 24 bp, Homo sapiens
agcttctaattgtatttgtaatga

SEQ ID NO: 59132 - DNA, 17 bp, Homo sapiens
aggggagctgttggaat

SEQ ID NO: 59133 - DNA, 22 bp, Homo sapiens
agctggcaagggagatggggtg

SEQ ID NO: 59134 - DNA, 16 bp, Homo sapiens
ttcacgccactgagca

SEQ ID NO: 59135 - DNA, 17 bp, Homo sapiens
ctcttggaagagttgag

SEQ ID NO: 59136 - DNA, 20 bp, Homo sapiens
catgattctgaagatgaaga

SEQ ID NO: 59137 - DNA, 20 bp, Homo sapiens
tttctgacagcttgcttcat

SEQ ID NO: 59138 - DNA, 19 bp, Homo sapiens
tgtgttgcagatgaaggaa

SEQ ID NO: 59139 - DNA, 23 bp, Homo sapiens
gatgaactggacaggtttgtaca

SEQ ID NO: 59140 - DNA, 20 bp, Homo sapiens
ccgcacatgggagatgggga

SEQ ID NO: 59141 - DNA, 20 bp, Homo sapiens
tatggctctcggtcatcttc

SEQ ID NO: 59142 - DNA, 23 bp, Homo sapiens
cacgtgcatggccacgaggagag

SEQ ID NO: 59143 - DNA, 18 bp, Homo sapiens
tgtgtggggtgatgagaa

SEQ ID NO: 59144 - DNA, 16 bp, Homo sapiens
tccccatggccctcaa

SEQ ID NO: 59145 - DNA, 17 bp, Homo sapiens
gcgtttgctatgaccaa

SEQ ID NO: 59146 - DNA, 23 bp, Homo sapiens
ataggtccaccacagtgtccctg

SEQ ID NO: 59147 - DNA, 24 bp, Homo sapiens
catcctagtttccaccccagctct

SEQ ID NO: 59148 - DNA, 22 bp, Homo sapiens
agataaaagacatacatgaaga

SEQ ID NO: 59149 - DNA, 23 bp, Homo sapiens
tagagaagaaaatgctacggctt

SEQ ID NO: 59150 - DNA, 23 bp, Homo sapiens
cactgtgttggggcaggggtaga

SEQ ID NO: 59151 - DNA, 24 bp, Homo sapiens
tgaagaggcacaaggtccacatct

SEQ ID NO: 59152 - DNA, 16 bp, Homo sapiens
aagacggtgaagacgg

SEQ ID NO: 59153 - DNA, 19 bp, Homo sapiens
ctgttgtttgaggccgtct

SEQ ID NO: 59154 - DNA, 18 bp, Homo sapiens
cggatgatgaggtacacc

SEQ ID NO: 59155 - DNA, 24 bp, Homo sapiens
atgccatggtgcggctggtcaagt

SEQ ID NO: 59156 - DNA, 23 bp, Homo sapiens
gccgaagcccgagcccttgcggg

SEQ ID NO: 59157 - DNA, 19 bp, Homo sapiens
cccgccccaccgagaaaac

SEQ ID NO: 59158 - DNA, 21 bp, Homo sapiens
tgctcactcagcagcttgttg

SEQ ID NO: 59159 - DNA, 21 bp, Homo sapiens
gcatcatcctcaatgtggccg

SEQ ID NO: 59160 - DNA, 16 bp, Homo sapiens
cagcccagccccggtg

SEQ ID NO: 59161 - DNA, 17 bp, Homo sapiens
ctccaatccaccttccc

SEQ ID NO: 59162 - DNA, 16 bp, Homo sapiens
gggatgggaggttgcc

SEQ ID NO: 59163 - DNA, 24 bp, Homo sapiens
aatacaagcagaatgagatcaaca

SEQ ID NO: 59164 - DNA, 21 bp, Homo sapiens
agcaggcagaggcctgtgcac

SEQ ID NO: 59165 - DNA, 24 bp, Homo sapiens
aagacatactgcgccgcagccctg

SEQ ID NO: 59166 - DNA, 23 bp, Homo sapiens
tcaaaaggaaggccccgggagga

SEQ ID NO: 59167 - DNA, 23 bp, Homo sapiens
gtgacggaggcgccgctgccagg

SEQ ID NO: 59168 - DNA, 20 bp, Homo sapiens
agtaccttgtagaaagcgcc

SEQ ID NO: 59169 - DNA, 16 bp, Homo sapiens
gaggcggcggcggcgg

SEQ ID NO: 59170 - DNA, 24 bp, Homo sapiens
gcctcccgccgacaccaagaagaa

SEQ ID NO: 59171 - DNA, 24 bp, Homo sapiens
ctctcgggggcgggctcccggcgc

SEQ ID NO: 59172 - DNA, 19 bp, Homo sapiens
gagcgtgccctggcaccca

SEQ ID NO: 59173 - DNA, 23 bp, Homo sapiens
ggaagtgcggggctccaatggcg

SEQ ID NO: 59174 - DNA, 23 bp, Homo sapiens
tatagatgtgcttaatgaataaa

SEQ ID NO: 59175 - DNA, 20 bp, Homo sapiens
tgttttcaaatgcaactgtt

SEQ ID NO: 59176 - DNA, 23 bp, Homo sapiens
tattcataaacacataaaacgtt

SEQ ID NO: 59177 - DNA, 25 bp, Homo sapiens
aatagaattagcataaaatattaaa

SEQ ID NO: 59178 - DNA, 18 bp, Homo sapiens
tctttaagctcacaagtt

SEQ ID NO: 59179 - DNA, 19 bp, Homo sapiens
tgaagatccattcctgaaa

SEQ ID NO: 59180 - DNA, 18 bp, Homo sapiens
tgttcatgaagattcaat

SEQ ID NO: 59181 - DNA, 19 bp, Homo sapiens
gttatgtcccactcagcaa

SEQ ID NO: 59182 - DNA, 18 bp, Homo sapiens
acctacaggaggtgggaa

SEQ ID NO: 59183 - DNA, 19 bp, Homo sapiens
aggggtcagccttaaccaa

SEQ ID NO: 59184 - DNA, 20 bp, Homo sapiens
tgactttatggcagggaaaa

SEQ ID NO: 59185 - DNA, 23 bp, Homo sapiens
aaagcatgttaaataattgtatg

SEQ ID NO: 59186 - DNA, 22 bp, Homo sapiens
acagtgttaaagacaaagtatt

SEQ ID NO: 59187 - DNA, 18 bp, Homo sapiens
ttcatgatgtcagattcc

SEQ ID NO: 59188 - DNA, 16 bp, Homo sapiens
ttagtcaaaagcacgt

SEQ ID NO: 59189 - DNA, 18 bp, Homo sapiens
acagcaaggctctttttc

SEQ ID NO: 59190 - DNA, 19 bp, Homo sapiens
tgtggtttttaaagacacc

SEQ ID NO: 59191 - DNA, 24 bp, Homo sapiens
aaaaatttaaataggcattttcct

SEQ ID NO: 59192 - DNA, 24 bp, Homo sapiens
aaaatctgtagatttcaaaattat

SEQ ID NO: 59193 - DNA, 17 bp, Homo sapiens
agaaatccacacgggaa

SEQ ID NO: 59194 - DNA, 19 bp, Homo sapiens
taggtgtattccagagcaa

SEQ ID NO: 59195 - DNA, 18 bp, Homo sapiens
actgaacacatagtgaaa

SEQ ID NO: 59196 - DNA, 18 bp, Homo sapiens
gataaagggtgaggtagg

SEQ ID NO: 59197 - DNA, 24 bp, Homo sapiens
aatttaattaaaatgttttcacta

SEQ ID NO: 59198 - DNA, 19 bp, Homo sapiens
acgttcaattgtgacaatt

SEQ ID NO: 59199 - DNA, 28 bp, Homo sapiens
tttcacatagattatttattttaaaata

SEQ ID NO: 59200 - DNA, 19 bp, Homo sapiens
tccagcttgatcttatgga

SEQ ID NO: 59201 - DNA, 20 bp, Homo sapiens
aaaaattgtgattagaagtg

SEQ ID NO: 59202 - DNA, 17 bp, Homo sapiens
ccaagttctcagcattt

SEQ ID NO: 59203 - DNA, 19 bp, Homo sapiens
gcatgtgatgcaacttaca

SEQ ID NO: 59204 - DNA, 26 bp, Homo sapiens
aatttctagtagtttaaaaaatttta

SEQ ID NO: 59205 - DNA, 17 bp, Homo sapiens
caaacctgccacaaaag

SEQ ID NO: 59206 - DNA, 22 bp, Homo sapiens
ccattgctcttgcaaaccaaac

SEQ ID NO: 59207 - DNA, 16 bp, Homo sapiens
aaggagctaagcttct

SEQ ID NO: 59208 - DNA, 16 bp, Homo sapiens
tacagaaaaggcacca

SEQ ID NO: 59209 - DNA, 18 bp, Homo sapiens
ccatgattcttgtatgtg

SEQ ID NO: 59210 - DNA, 25 bp, Homo sapiens
aaactaaaaataaacaactcaaaaa

SEQ ID NO: 59211 - DNA, 22 bp, Homo sapiens
tggtaattattcatcttaattt

SEQ ID NO: 59212 - DNA, 26 bp, Homo sapiens
tgatggactaaatgatttaaattaac

SEQ ID NO: 59213 - DNA, 23 bp, Homo sapiens
cataaggattttaaaaaggcagt

SEQ ID NO: 59214 - DNA, 17 bp, Homo sapiens
gcagactccgaaagtgc

SEQ ID NO: 59215 - DNA, 17 bp, Homo sapiens
gtcattttggtgagcat

SEQ ID NO: 59216 - DNA, 18 bp, Homo sapiens
gtgacatacctccagctg

SEQ ID NO: 59217 - DNA, 22 bp, Homo sapiens
attgccttgataataatgttgt

SEQ ID NO: 59218 - DNA, 20 bp, Homo sapiens
tcaagttgtggaatgataca

SEQ ID NO: 59219 - DNA, 21 bp, Homo sapiens
aagcgagcacatatgctgatt

SEQ ID NO: 59220 - DNA, 19 bp, Homo sapiens
tagaacctaaggaattgtt

SEQ ID NO: 59221 - DNA, 19 bp, Homo sapiens
atgagaaatgaagaagcta

SEQ ID NO: 59222 - DNA, 20 bp, Homo sapiens
actgttcatgaaatctcgag

SEQ ID NO: 59223 - DNA, 19 bp, Homo sapiens
ttaataatttatggacccc

SEQ ID NO: 59224 - DNA, 18 bp, Homo sapiens
agcttgctgaatattagc

SEQ ID NO: 59225 - DNA, 24 bp, Homo sapiens
ctggcctaaatacagttgtcgtaa

SEQ ID NO: 59226 - DNA, 20 bp, Homo sapiens
tgaaatgtgcaggtatcttc

SEQ ID NO: 59227 - DNA, 16 bp, Homo sapiens
tcaaggcagcttgcct

SEQ ID NO: 59228 - DNA, 20 bp, Homo sapiens
cagctgaaatacttgtttgg

SEQ ID NO: 59229 - DNA, 18 bp, Homo sapiens
agctattggtactcatgg

SEQ ID NO: 59230 - DNA, 18 bp, Homo sapiens
ttttttcactgcatcctg

SEQ ID NO: 59231 - DNA, 18 bp, Homo sapiens
actgctattgatctagat

SEQ ID NO: 59232 - DNA, 16 bp, Homo sapiens
aagttccttggaactt

SEQ ID NO: 59233 - DNA, 22 bp, Homo sapiens
tttactgcatagtttttttttc

SEQ ID NO: 59234 - DNA, 18 bp, Homo sapiens
aactgtttacctaaactt

SEQ ID NO: 59235 - DNA, 19 bp, Homo sapiens
gtttccccttttattagga

SEQ ID NO: 59236 - DNA, 20 bp, Homo sapiens
tcaaagactatgtttcaatt

SEQ ID NO: 59237 - DNA, 19 bp, Homo sapiens
ttgctgaagatgtaataca

SEQ ID NO: 59238 - DNA, 19 bp, Homo sapiens
agtctctactttggttttg

SEQ ID NO: 59239 - DNA, 18 bp, Homo sapiens
cacaactcctgacttgtc

SEQ ID NO: 59240 - DNA, 24 bp, Homo sapiens
atctatctatatgaatgtaatagt

SEQ ID NO: 59241 - DNA, 19 bp, Homo sapiens
taacatacctcttcttgtg

SEQ ID NO: 59242 - DNA, 20 bp, Homo sapiens
tgtttttaaaaccaaacttg

SEQ ID NO: 59243 - DNA, 18 bp, Homo sapiens
ggtcctcaacatatcaca

SEQ ID NO: 59244 - DNA, 21 bp, Homo sapiens
ggaaagctgattcaggagatt

SEQ ID NO: 59245 - DNA, 17 bp, Homo sapiens
gcaggcatgcttgataa

SEQ ID NO: 59246 - DNA, 19 bp, Homo sapiens
tgagaaaaatgttccacaa

SEQ ID NO: 59247 - DNA, 18 bp, Homo sapiens
ttattggaaggaagggaa

SEQ ID NO: 59248 - DNA, 22 bp, Homo sapiens
aaaccaaaactgtttataataa

SEQ ID NO: 59249 - DNA, 18 bp, Homo sapiens
gggtgctgttttccttta

SEQ ID NO: 59250 - DNA, 22 bp, Homo sapiens
aataaagtcttaaattggtcct

SEQ ID NO: 59251 - DNA, 19 bp, Homo sapiens
ttcaaagtgacaagtaatt

SEQ ID NO: 59252 - DNA, 16 bp, Homo sapiens
atgccaccaaattccc

SEQ ID NO: 59253 - DNA, 21 bp, Homo sapiens
tctaaccagagaaaacatcca

SEQ ID NO: 59254 - DNA, 19 bp, Homo sapiens
ccagaagaaaaaaaacatt

SEQ ID NO: 59255 - DNA, 20 bp, Homo sapiens
tctcataagctggcaattac

SEQ ID NO: 59256 - DNA, 22 bp, Homo sapiens
acttgaaccatattttagaaac

SEQ ID NO: 59257 - DNA, 17 bp, Homo sapiens
ctgccaagccttgagtt

SEQ ID NO: 59258 - DNA, 17 bp, Homo sapiens
aaaagtcctgcagtgaa

SEQ ID NO: 59259 - DNA, 20 bp, Homo sapiens
gttaacaaggggaataaaca

SEQ ID NO: 59260 - DNA, 20 bp, Homo sapiens
gttaatgacatcccttgcat

SEQ ID NO: 59261 - DNA, 16 bp, Homo sapiens
caaacactcctccctc

SEQ ID NO: 59262 - DNA, 22 bp, Homo sapiens
gtagcaggggaatcccagaaac

SEQ ID NO: 59263 - DNA, 19 bp, Homo sapiens
tcaactacttttgttttca

SEQ ID NO: 59264 - DNA, 18 bp, Homo sapiens
agtggcattagcgatgct

SEQ ID NO: 59265 - DNA, 18 bp, Homo sapiens
tgttcaccagatcctgtg

SEQ ID NO: 59266 - DNA, 23 bp, Homo sapiens
agaagttaaagttctttctgttc

SEQ ID NO: 59267 - DNA, 23 bp, Homo sapiens
tcattacttttataggatcattg

SEQ ID NO: 59268 - DNA, 19 bp, Homo sapiens
tgagtcctaactgctgaaa

SEQ ID NO: 59269 - DNA, 20 bp, Homo sapiens
tgtgggaacaaaggacagca

SEQ ID NO: 59270 - DNA, 21 bp, Homo sapiens
gccaaacaacgtattttctct

SEQ ID NO: 59271 - DNA, 21 bp, Homo sapiens
tctttttaaggagatcattca

SEQ ID NO: 59272 - DNA, 19 bp, Homo sapiens
tcgcaactgctcatcaatt

SEQ ID NO: 59273 - DNA, 20 bp, Homo sapiens
tttagaactgaaattgaaat

SEQ ID NO: 59274 - DNA, 21 bp, Homo sapiens
gtcacatagcttttttcctta

SEQ ID NO: 59275 - DNA, 26 bp, Homo sapiens
tattaagtaaaatgtcaaattatttt

SEQ ID NO: 59276 - DNA, 16 bp, Homo sapiens
tgccccctatttctgt

SEQ ID NO: 59277 - DNA, 21 bp, Homo sapiens
agaccagttgcgtttggagag

SEQ ID NO: 59278 - DNA, 20 bp, Homo sapiens
cagataaagttactgagtaa

SEQ ID NO: 59279 - DNA, 19 bp, Homo sapiens
agaccaccaccaaatcgta

SEQ ID NO: 59280 - DNA, 20 bp, Homo sapiens
gcaaattgttataatggggt

SEQ ID NO: 59281 - DNA, 21 bp, Homo sapiens
ggaatgggtcgaggtagtaga

SEQ ID NO: 59282 - DNA, 21 bp, Homo sapiens
ctctatgtctcctgtaacaca

SEQ ID NO: 59283 - DNA, 19 bp, Homo sapiens
cagattctgtttcagaagc

SEQ ID NO: 59284 - DNA, 19 bp, Homo sapiens
ggcttataaattgggaaga

SEQ ID NO: 59285 - DNA, 21 bp, Homo sapiens
aagctctccctctcttcctct

SEQ ID NO: 59286 - DNA, 24 bp, Homo sapiens
aaccctcttttttttttttttaaa

SEQ ID NO: 59287 - DNA, 16 bp, Homo sapiens
cctccttgtcctcttc

SEQ ID NO: 59288 - DNA, 20 bp, Homo sapiens
ggaactaattctgaagcatc

SEQ ID NO: 59289 - DNA, 23 bp, Homo sapiens
tgttacaattcactttgatttct

SEQ ID NO: 59290 - DNA, 19 bp, Homo sapiens
gattggtcattagctccaa

SEQ ID NO: 59291 - DNA, 18 bp, Homo sapiens
cttggtaacagttcattg

SEQ ID NO: 59292 - DNA, 17 bp, Homo sapiens
cgtggagggggaggaag

SEQ ID NO: 59293 - DNA, 16 bp, Homo sapiens
cacaagtggaaggctg

SEQ ID NO: 59294 - DNA, 17 bp, Homo sapiens
cgattatctgttcggga

SEQ ID NO: 59295 - DNA, 20 bp, Homo sapiens
tcactggggtattgattaca

SEQ ID NO: 59296 - DNA, 16 bp, Homo sapiens
gttttacctgaaggga

SEQ ID NO: 59297 - DNA, 17 bp, Homo sapiens
agaacttccagtaagca

SEQ ID NO: 59298 - DNA, 27 bp, Homo sapiens
aataaagtaaaataaactcataaatct

SEQ ID NO: 59299 - DNA, 17 bp, Homo sapiens
aaacgacgatcactccc

SEQ ID NO: 59300 - DNA, 22 bp, Homo sapiens
atgttgaaggtaaaatatttca

SEQ ID NO: 59301 - DNA, 18 bp, Homo sapiens
aacaacagatggatccct

SEQ ID NO: 59302 - DNA, 22 bp, Homo sapiens
aaaccaaataaagaatcctacc

SEQ ID NO: 59303 - DNA, 21 bp, Homo sapiens
tgtaatgttttagtgtggaca

SEQ ID NO: 59304 - DNA, 23 bp, Homo sapiens
ccatttctctttttaacatgtgg

SEQ ID NO: 59305 - DNA, 16 bp, Homo sapiens
tctggttacgatcttt

SEQ ID NO: 59306 - DNA, 24 bp, Homo sapiens
ggccaattacagattacagtagga

SEQ ID NO: 59307 - DNA, 16 bp, Homo sapiens
agggtactccattcac

SEQ ID NO: 59308 - DNA, 18 bp, Homo sapiens
agttgactgcaataatga

SEQ ID NO: 59309 - DNA, 26 bp, Homo sapiens
acaaagttttctaatatggaataaga

SEQ ID NO: 59310 - DNA, 20 bp, Homo sapiens
gaaggtagtcggctgcgcac

SEQ ID NO: 59311 - DNA, 18 bp, Homo sapiens
tgttcatttcatgccctg

SEQ ID NO: 59312 - DNA, 17 bp, Homo sapiens
cagcaaccactcgtgaa

SEQ ID NO: 59313 - DNA, 18 bp, Homo sapiens
gcctaaagcgacagtctc

SEQ ID NO: 59314 - DNA, 22 bp, Homo sapiens
gagggccaggagcacggccgtg

SEQ ID NO: 59315 - DNA, 19 bp, Homo sapiens
cccagggtcagagcaacaa

SEQ ID NO: 59316 - DNA, 22 bp, Homo sapiens
cctggccggggccaggcactgg

SEQ ID NO: 59317 - DNA, 24 bp, Homo sapiens
cagccccagtccctacgcggcagc

SEQ ID NO: 59318 - DNA, 17 bp, Homo sapiens
gcgaccccggaggcctc

SEQ ID NO: 59319 - DNA, 21 bp, Homo sapiens
cctggcgggggaacacgctga

SEQ ID NO: 59320 - DNA, 24 bp, Homo sapiens
gggggaacagcagccgcaggagcc

SEQ ID NO: 59321 - DNA, 23 bp, Homo sapiens
gagcccacaaagtctaccccttg

SEQ ID NO: 59322 - DNA, 24 bp, Homo sapiens
cggctcaccaaggcggccgagtgc

SEQ ID NO: 59323 - DNA, 21 bp, Homo sapiens
ccgccggggagcccacgcagg

SEQ ID NO: 59324 - DNA, 16 bp, Homo sapiens
agcgggccagccttcc

SEQ ID NO: 59325 - DNA, 24 bp, Homo sapiens
aaccgggtattcctgcagcggctc

SEQ ID NO: 59326 - DNA, 23 bp, Homo sapiens
cagggagggcgatgaggagccac

SEQ ID NO: 59327 - DNA, 22 bp, Homo sapiens
gagacggggctgctggccctgc

SEQ ID NO: 59328 - DNA, 22 bp, Homo sapiens
ctgcggaacgacagggccagtt

SEQ ID NO: 59329 - DNA, 24 bp, Homo sapiens
gtgtatgtggcccgcctggacgga

SEQ ID NO: 59330 - DNA, 20 bp, Homo sapiens
gacccggtagtaggtctgct

SEQ ID NO: 59331 - DNA, 23 bp, Homo sapiens
cttttggctggcagctgctgcag

SEQ ID NO: 59332 - DNA, 24 bp, Homo sapiens
gcaaaggccaccacgtcctccgtc

SEQ ID NO: 59333 - DNA, 24 bp, Homo sapiens
aacagtgccatccgttacctggag

SEQ ID NO: 59334 - DNA, 24 bp, Homo sapiens
cagccacgtccaggagtggcttgg

SEQ ID NO: 59335 - DNA, 21 bp, Homo sapiens
cacgcctaccgcctctacttc

SEQ ID NO: 59336 - DNA, 16 bp, Homo sapiens
ctgtgccggctccacg

SEQ ID NO: 59337 - DNA, 24 bp, Homo sapiens
cttcgcaaccctgaccagtctctg

SEQ ID NO: 59338 - DNA, 23 bp, Homo sapiens
tgggcgagaaggcccgcagcacg

SEQ ID NO: 59339 - DNA, 24 bp, Homo sapiens
cccacctctactccaacctgacca

SEQ ID NO: 59340 - DNA, 24 bp, Homo sapiens
gagtgcatgtagcgcagctccccc

SEQ ID NO: 59341 - DNA, 22 bp, Homo sapiens
ttcgggcggcccgctcccgtgg

SEQ ID NO: 59342 - DNA, 16 bp, Homo sapiens
cctcatggcccccata

SEQ ID NO: 59343 - DNA, 24 bp, Homo sapiens
gtggtgttcctcacggccaacgtg

SEQ ID NO: 59344 - DNA, 16 bp, Homo sapiens
ctgcccccgggcctcc

SEQ ID NO: 59345 - DNA, 23 bp, Homo sapiens
gtggcagaggaggcgcggcggaa

SEQ ID NO: 59346 - DNA, 16 bp, Homo sapiens
gcccacacctttggca

SEQ ID NO: 59347 - DNA, 24 bp, Homo sapiens
aactcggaggagatcgccttctat

SEQ ID NO: 59348 - DNA, 24 bp, Homo sapiens
ttgagtttgagacctggccccacc

SEQ ID NO: 59349 - DNA, 21 bp, Homo sapiens
ttgatctgcgaggccaggtcc

SEQ ID NO: 59350 - DNA, 18 bp, Homo sapiens
cacagcgtgtgtgagtgg

SEQ ID NO: 59351 - DNA, 20 bp, Homo sapiens
acacatacttcatgaggaac

SEQ ID NO: 59352 - DNA, 23 bp, Homo sapiens
ctgtgcatggccaggaagcctct

SEQ ID NO: 59353 - DNA, 24 bp, Homo sapiens
ctgactctgagtagccagtggcag

SEQ ID NO: 59354 - DNA, 24 bp, Homo sapiens
ctgctacagcgctcctaccaggac

SEQ ID NO: 59355 - DNA, 20 bp, Homo sapiens
cagcggtatgggggacaggc

SEQ ID NO: 59356 - DNA, 23 bp, Homo sapiens
ctgtggtatgttatgctggagca

SEQ ID NO: 59357 - DNA, 24 bp, Homo sapiens
ggccccggcagcagaagtgggcgg

SEQ ID NO: 59358 - DNA, 24 bp, Homo sapiens
cctgctcatggtggctgtccccat

SEQ ID NO: 59359 - DNA, 19 bp, Homo sapiens
ctctcctgcacatagagag

SEQ ID NO: 59360 - DNA, 16 bp, Homo sapiens
ctcaccagctcctcct

SEQ ID NO: 59361 - DNA, 20 bp, Homo sapiens
agaagagcctcgcctttctc

SEQ ID NO: 59362 - DNA, 18 bp, Homo sapiens
tcaatggcatctgcagcc

SEQ ID NO: 59363 - DNA, 18 bp, Homo sapiens
ctccccgccccgccaccc

SEQ ID NO: 59364 - DNA, 21 bp, Homo sapiens
ggcaaggatggcaagggtggg

SEQ ID NO: 59365 - DNA, 16 bp, Homo sapiens
ggaaaagaaggaggag

SEQ ID NO: 59366 - DNA, 24 bp, Homo sapiens
agctccgtcacctgagggagggtg

SEQ ID NO: 59367 - DNA, 24 bp, Homo sapiens
ctattgcccgcaacctcctgacag

SEQ ID NO: 59368 - DNA, 21 bp, Homo sapiens
gctgaacatcttcaaatacct

SEQ ID NO: 59369 - DNA, 24 bp, Homo sapiens
gaggtacccctggcccagccccac

SEQ ID NO: 59370 - DNA, 19 bp, Homo sapiens
tatggtcccagaccccgcc

SEQ ID NO: 59371 - DNA, 24 bp, Homo sapiens
caactggcaggggctgagccaggg

SEQ ID NO: 59372 - DNA, 21 bp, Homo sapiens
tcatagggaggggacagcctt

SEQ ID NO: 59373 - DNA, 24 bp, Homo sapiens
ccgggtgcacgagatgttccaggt

SEQ ID NO: 59374 - DNA, 20 bp, Homo sapiens
ataggaggagctggggcagc

SEQ ID NO: 59375 - DNA, 16 bp, Homo sapiens
gagctagaggacgctc

SEQ ID NO: 59376 - DNA, 23 bp, Homo sapiens
tcccgtcctgggtggactgggat

SEQ ID NO: 59377 - DNA, 17 bp, Homo sapiens
cctgaagatccgaggta

SEQ ID NO: 59378 - DNA, 21 bp, Homo sapiens
gggaccctggaccacaggctg

SEQ ID NO: 59379 - DNA, 24 bp, Homo sapiens
tctcctgagggcgtgacgatgggg

SEQ ID NO: 59380 - DNA, 24 bp, Homo sapiens
ggaatgagggcgtgcagccagggg

SEQ ID NO: 59381 - DNA, 16 bp, Homo sapiens
tggcgccctccccgct

SEQ ID NO: 59382 - DNA, 24 bp, Homo sapiens
ctccctctccaccccagccccgct

SEQ ID NO: 59383 - DNA, 21 bp, Homo sapiens
ctagggacaatggctgttgcc

SEQ ID NO: 59384 - DNA, 23 bp, Homo sapiens
atcatctgcgagaacatccccat

SEQ ID NO: 59385 - DNA, 22 bp, Homo sapiens
gatgaacagtcagagacacgtt

SEQ ID NO: 59386 - DNA, 19 bp, Homo sapiens
ctgtggacgctggacccca

SEQ ID NO: 59387 - DNA, 20 bp, Homo sapiens
ctcttgccgcagccattggg

SEQ ID NO: 59388 - DNA, 24 bp, Homo sapiens
gaatggcctgcgtgctggcctcgg

SEQ ID NO: 59389 - DNA, 23 bp, Homo sapiens
ggggcttgtagagcacaccaccg

SEQ ID NO: 59390 - DNA, 24 bp, Homo sapiens
gtacgggaaggggcctgcgctctc

SEQ ID NO: 59391 - DNA, 24 bp, Homo sapiens
gaggagaggcgcacgggcttcctt

SEQ ID NO: 59392 - DNA, 24 bp, Homo sapiens
ggaaggcatgcatctgctcatcac

SEQ ID NO: 59393 - DNA, 24 bp, Homo sapiens
tcaccacttcctgggcctctgcag

SEQ ID NO: 59394 - DNA, 23 bp, Homo sapiens
ggatcctgggtgggctctggccc

SEQ ID NO: 59395 - DNA, 23 bp, Homo sapiens
acagcccgtctctggctctgggg

SEQ ID NO: 59396 - DNA, 24 bp, Homo sapiens
gcatgttctacatcccgcagaggt

SEQ ID NO: 59397 - DNA, 16 bp, Homo sapiens
gatccactgccctgtt

SEQ ID NO: 59398 - DNA, 23 bp, Homo sapiens
tccgggtagatcacctggtcacg

SEQ ID NO: 59399 - DNA, 16 bp, Homo sapiens
cgtgtggatgcgtgtg

SEQ ID NO: 59400 - DNA, 23 bp, Homo sapiens
gtccaggatggcttccaggtcct

SEQ ID NO: 59401 - DNA, 23 bp, Homo sapiens
gtatcttgggggaggcagagccg

SEQ ID NO: 59402 - DNA, 17 bp, Homo sapiens
gccccaggcctcctacc

SEQ ID NO: 59403 - DNA, 24 bp, Homo sapiens
acatgtctgtgggctccctgcgtg

SEQ ID NO: 59404 - DNA, 20 bp, Homo sapiens
gttgaggtaatcttcactcc

SEQ ID NO: 59405 - DNA, 24 bp, Homo sapiens
tgcaaaggaagggctactcggagc

SEQ ID NO: 59406 - DNA, 24 bp, Homo sapiens
gttggtcctccctggtagcagcct

SEQ ID NO: 59407 - DNA, 17 bp, Homo sapiens
agcgggagggaggtagg

SEQ ID NO: 59408 - DNA, 18 bp, Homo sapiens
cccactcctccatgatta

SEQ ID NO: 59409 - DNA, 24 bp, Homo sapiens
ctctgcttctcgccacccgacagg

SEQ ID NO: 59410 - DNA, 19 bp, Homo sapiens
cctgtcgtcacagctagct

SEQ ID NO: 59411 - DNA, 23 bp, Homo sapiens
cagggagcctgccggcccggagt

SEQ ID NO: 59412 - DNA, 24 bp, Homo sapiens
cgggtctgggtgctggtggaactg

SEQ ID NO: 59413 - DNA, 23 bp, Homo sapiens
agcccggctcaggctccactgag

SEQ ID NO: 59414 - DNA, 24 bp, Homo sapiens
gctatgtgtgactggaaggacgtc

SEQ ID NO: 59415 - DNA, 21 bp, Homo sapiens
gggggtccgggccgagaggag

SEQ ID NO: 59416 - DNA, 21 bp, Homo sapiens
gttctaccacaggtgagcact

SEQ ID NO: 59417 - DNA, 24 bp, Homo sapiens
cttgccttccacgtcgatgctcac

SEQ ID NO: 59418 - DNA, 24 bp, Homo sapiens
gaagtagcagctgtggggaggcct

SEQ ID NO: 59419 - DNA, 16 bp, Homo sapiens
ggtgggtgatggagag

SEQ ID NO: 59420 - DNA, 21 bp, Homo sapiens
gccctggagggtgcacagact

SEQ ID NO: 59421 - DNA, 22 bp, Homo sapiens
ctcctcccctcaggcagccact

SEQ ID NO: 59422 - DNA, 21 bp, Homo sapiens
atgaatgcaccagcgccgtga

SEQ ID NO: 59423 - DNA, 18 bp, Homo sapiens
gcacgggggctgctgatg

SEQ ID NO: 59424 - DNA, 19 bp, Homo sapiens
gggcattgccctgctctcc

SEQ ID NO: 59425 - DNA, 16 bp, Homo sapiens
ctgtagcaagtgtgtg

SEQ ID NO: 59426 - DNA, 24 bp, Homo sapiens
ctgtctccctgcctggggtcggtg

SEQ ID NO: 59427 - DNA, 22 bp, Homo sapiens
cctccgtcaggctcaggcgggc

SEQ ID NO: 59428 - DNA, 24 bp, Homo sapiens
cccggcagcagcaggcggctgtca

SEQ ID NO: 59429 - DNA, 24 bp, Homo sapiens
cagagctcctggaggcgccgctgc

SEQ ID NO: 59430 - DNA, 24 bp, Homo sapiens
ccctctcctggccaggaaatacca

SEQ ID NO: 59431 - DNA, 24 bp, Homo sapiens
ggccttgcgggctaggtgccggca

SEQ ID NO: 59432 - DNA, 23 bp, Homo sapiens
gagaagctggactcagctgcccg

SEQ ID NO: 59433 - DNA, 16 bp, Homo sapiens
gggcaggggccgggga

SEQ ID NO: 59434 - DNA, 16 bp, Homo sapiens
cgggcattcccaagat

SEQ ID NO: 59435 - DNA, 24 bp, Homo sapiens
ggggcggggtgcgtgcatgggtgg

SEQ ID NO: 59436 - DNA, 21 bp, Homo sapiens
aggccgtggccccagcgcatg

SEQ ID NO: 59437 - DNA, 23 bp, Homo sapiens
caccctccacatctactttcccg

SEQ ID NO: 59438 - DNA, 23 bp, Homo sapiens
tccagggtgcctccacctgacac

SEQ ID NO: 59439 - DNA, 25 bp, Homo sapiens
ttttttgttaataaagtagaataac

SEQ ID NO: 59440 - DNA, 19 bp, Homo sapiens
ggtctgaatccagggaaag

SEQ ID NO: 59441 - DNA, 23 bp, Homo sapiens
tggaaaaccaagatctttaaagg

SEQ ID NO: 59442 - DNA, 21 bp, Homo sapiens
gtgggttttccctttcagttt

SEQ ID NO: 59443 - DNA, 19 bp, Homo sapiens
tcatgtttagcatggaaac

SEQ ID NO: 59444 - DNA, 17 bp, Homo sapiens
tcaccttgcttggacac

SEQ ID NO: 59445 - DNA, 22 bp, Homo sapiens
gccatcattttcttgatctctg

SEQ ID NO: 59446 - DNA, 21 bp, Homo sapiens
aaaaggtagacagaagagagc

SEQ ID NO: 59447 - DNA, 23 bp, Homo sapiens
ctgccacaccatcatgaactgca

SEQ ID NO: 59448 - DNA, 21 bp, Homo sapiens
ggcatatgctggtccctttcc

SEQ ID NO: 59449 - DNA, 16 bp, Homo sapiens
cttcacagaggagcgc

SEQ ID NO: 59450 - DNA, 22 bp, Homo sapiens
ttgtgagcacatgctacttctg

SEQ ID NO: 59451 - DNA, 19 bp, Homo sapiens
gcagctcagctaatcatcc

SEQ ID NO: 59452 - DNA, 20 bp, Homo sapiens
taccttaggacaggtccttg

SEQ ID NO: 59453 - DNA, 22 bp, Homo sapiens
aattccctttcctctgcactcc

SEQ ID NO: 59454 - DNA, 16 bp, Homo sapiens
cagcttggccaggcgc

SEQ ID NO: 59455 - DNA, 23 bp, Homo sapiens
ttccttgaaagatggacaagaat

SEQ ID NO: 59456 - DNA, 19 bp, Homo sapiens
cctgcagttcttatgcagg

SEQ ID NO: 59457 - DNA, 24 bp, Homo sapiens
tgcaaccaattaccctgtttggac

SEQ ID NO: 59458 - DNA, 21 bp, Homo sapiens
attctctgtgcctgctgtagc

SEQ ID NO: 59459 - DNA, 24 bp, Homo sapiens
ctggcttacagcaatctattgtcc

SEQ ID NO: 59460 - DNA, 18 bp, Homo sapiens
gtcacaagctcctgcctc

SEQ ID NO: 59461 - DNA, 23 bp, Homo sapiens
aaagcaattaaggagcacctcac

SEQ ID NO: 59462 - DNA, 21 bp, Homo sapiens
actttgttcatgcactgaccc

SEQ ID NO: 59463 - DNA, 20 bp, Homo sapiens
gtagctggggcagctggtgc

SEQ ID NO: 59464 - DNA, 18 bp, Homo sapiens
tatctgcaaatcacccct

SEQ ID NO: 59465 - DNA, 22 bp, Homo sapiens
tatctgcagtccatagaagagc

SEQ ID NO: 59466 - DNA, 24 bp, Homo sapiens
cccacccttgtgccagttcctctc

SEQ ID NO: 59467 - DNA, 24 bp, Homo sapiens
caaatccattgagccttatttgaa

SEQ ID NO: 59468 - DNA, 22 bp, Homo sapiens
caagccacactcctggcaatca

SEQ ID NO: 59469 - DNA, 23 bp, Homo sapiens
tcttcttcttcttcttcttcctc

SEQ ID NO: 59470 - DNA, 20 bp, Homo sapiens
ctaatgaccagtttctcacg

SEQ ID NO: 59471 - DNA, 17 bp, Homo sapiens
gtgtccaagaaatgggg

SEQ ID NO: 59472 - DNA, 24 bp, Homo sapiens
ccttcctgagattcatccttcttc

SEQ ID NO: 59473 - DNA, 22 bp, Homo sapiens
tgcatatattcatgacaaagga

SEQ ID NO: 59474 - DNA, 22 bp, Homo sapiens
gtgataaaggatcttgttcccg

SEQ ID NO: 59475 - DNA, 24 bp, Homo sapiens
aggaaacagtcccatctatttact

SEQ ID NO: 59476 - DNA, 21 bp, Homo sapiens
aggattgacaccaacctcaat

SEQ ID NO: 59477 - DNA, 24 bp, Homo sapiens
atcctgccctgaaaaactaatagc

SEQ ID NO: 59478 - DNA, 19 bp, Homo sapiens
gcatctgtggctcttgtgc

SEQ ID NO: 59479 - DNA, 19 bp, Homo sapiens
gagatgcagaaactcacgg

SEQ ID NO: 59480 - DNA, 17 bp, Homo sapiens
gggcaggactgattccg

SEQ ID NO: 59481 - DNA, 24 bp, Homo sapiens
gaagagggtagatttttgagacct

SEQ ID NO: 59482 - DNA, 19 bp, Homo sapiens
ggaatgttgcatgtcagtg

SEQ ID NO: 59483 - DNA, 24 bp, Homo sapiens
gtgttgcctccattgatgttcatt

SEQ ID NO: 59484 - DNA, 19 bp, Homo sapiens
ttccgaagatcatgcagag

SEQ ID NO: 59485 - DNA, 22 bp, Homo sapiens
cccaagaaaaggaattaggttg

SEQ ID NO: 59486 - DNA, 21 bp, Homo sapiens
catggtattggatgctttaat

SEQ ID NO: 59487 - DNA, 19 bp, Homo sapiens
gtctctatcagctttggcc

SEQ ID NO: 59488 - DNA, 18 bp, Homo sapiens
agtgtagggaggttgaac

SEQ ID NO: 59489 - DNA, 22 bp, Homo sapiens
cccaacaggaatgaaatgctca

SEQ ID NO: 59490 - DNA, 20 bp, Homo sapiens
agaagaccaaatggataagc

SEQ ID NO: 59491 - DNA, 22 bp, Homo sapiens
gtcaacttcattcttaatcttg

SEQ ID NO: 59492 - DNA, 24 bp, Homo sapiens
tgcagtacttaaaatgtaagaatc

SEQ ID NO: 59493 - DNA, 24 bp, Homo sapiens
gcagacttatgaagttgaccttaa

SEQ ID NO: 59494 - DNA, 22 bp, Homo sapiens
cggcccaagctcattcttgttt

SEQ ID NO: 59495 - DNA, 23 bp, Homo sapiens
tatcaagaaatttgccatctatc

SEQ ID NO: 59496 - DNA, 21 bp, Homo sapiens
caaggatgtgaaaagcatgtc

SEQ ID NO: 59497 - DNA, 21 bp, Homo sapiens
ttaaaaaatttcaggcctccc

SEQ ID NO: 59498 - DNA, 20 bp, Homo sapiens
tggctttcacagagatactc

SEQ ID NO: 59499 - DNA, 20 bp, Homo sapiens
tctgttgtgccagcaaaatg

SEQ ID NO: 59500 - DNA, 17 bp, Homo sapiens
cagccttgtctgggtcc

SEQ ID NO: 59501 - DNA, 22 bp, Homo sapiens
aatgcctgccttttctaagaag

SEQ ID NO: 59502 - DNA, 19 bp, Homo sapiens
gcagctgtctgggctcctc

SEQ ID NO: 59503 - DNA, 24 bp, Homo sapiens
ctcgaagccaaaccaaagcactgc

SEQ ID NO: 59504 - DNA, 16 bp, Homo sapiens
ggtggtcgccctctcc

SEQ ID NO: 59505 - DNA, 22 bp, Homo sapiens
ccctatgcttcctcagtctctc

SEQ ID NO: 59506 - DNA, 16 bp, Homo sapiens
cggcggagagcgacct

SEQ ID NO: 59507 - DNA, 20 bp, Homo sapiens
cttttccctctctgaggctc

SEQ ID NO: 59508 - DNA, 17 bp, Homo sapiens
gtacgcggctagtgggt

SEQ ID NO: 59509 - DNA, 18 bp, Homo sapiens
accggcgcctcaaggaga

SEQ ID NO: 59510 - DNA, 21 bp, Homo sapiens
gggagaatcacttgaggccag

SEQ ID NO: 59511 - DNA, 23 bp, Homo sapiens
gcaagtcctggataatttctttc

SEQ ID NO: 59512 - DNA, 22 bp, Homo sapiens
ccccatctcaaaaaaatacaac

SEQ ID NO: 59513 - DNA, 17 bp, Homo sapiens
aggtcccaggtgtcctc

SEQ ID NO: 59514 - DNA, 21 bp, Homo sapiens
caggattctcagggaatgggg

SEQ ID NO: 59515 - DNA, 17 bp, Homo sapiens
ttctctgctccccctcc

SEQ ID NO: 59516 - DNA, 23 bp, Homo sapiens
gtgcatcagtggagatgtgagac

SEQ ID NO: 59517 - DNA, 24 bp, Homo sapiens
tacagcattccaggctaagcctag

SEQ ID NO: 59518 - DNA, 24 bp, Homo sapiens
gctttttccgactgcacggagagg

SEQ ID NO: 59519 - DNA, 21 bp, Homo sapiens
gaaggtctccaggtcaagaac

SEQ ID NO: 59520 - DNA, 17 bp, Homo sapiens
gtgccagccctcacctc

SEQ ID NO: 59521 - DNA, 23 bp, Homo sapiens
cacccagacattcgttagttaac

SEQ ID NO: 59522 - DNA, 22 bp, Homo sapiens
acaaaagtactgggacatgaag

SEQ ID NO: 59523 - DNA, 24 bp, Homo sapiens
acggttgggagaggcctaggagac

SEQ ID NO: 59524 - DNA, 21 bp, Homo sapiens
ccaaaatgctgggattatagg

SEQ ID NO: 59525 - DNA, 24 bp, Homo sapiens
tttccaccgccatgaaaaaggcac

SEQ ID NO: 59526 - DNA, 22 bp, Homo sapiens
atagcgccattgcactccagcc

SEQ ID NO: 59527 - DNA, 16 bp, Homo sapiens
cgtaccaccaggtgct

SEQ ID NO: 59528 - DNA, 24 bp, Homo sapiens
ctttttttcctgtttacacagtaa

SEQ ID NO: 59529 - DNA, 18 bp, Homo sapiens
ctctcacatcaagctgac

SEQ ID NO: 59530 - DNA, 24 bp, Homo sapiens
caacaaagacaacaaaggtagtgc

SEQ ID NO: 59531 - DNA, 24 bp, Homo sapiens
cttttgaggctatatccacaggcc

SEQ ID NO: 59532 - DNA, 16 bp, Homo sapiens
gtcagccagcgagcac

SEQ ID NO: 59533 - DNA, 16 bp, Homo sapiens
acctccggcaccttgg

SEQ ID NO: 59534 - DNA, 22 bp, Homo sapiens
gccagcccatatacttgatatg

SEQ ID NO: 59535 - DNA, 18 bp, Homo sapiens
ttcagcgcaaggccctgc

SEQ ID NO: 59536 - DNA, 19 bp, Homo sapiens
aggaagggtcaaggggttc

SEQ ID NO: 59537 - DNA, 16 bp, Homo sapiens
ggtctgctggcaggac

SEQ ID NO: 59538 - DNA, 18 bp, Homo sapiens
cgctgctcacttacctcc

SEQ ID NO: 59539 - DNA, 20 bp, Homo sapiens
caagagagaatggagggaat

SEQ ID NO: 59540 - DNA, 18 bp, Homo sapiens
gcccaacgctgtagttcc

SEQ ID NO: 59541 - DNA, 16 bp, Homo sapiens
gtgcagaggcccaact

SEQ ID NO: 59542 - DNA, 16 bp, Homo sapiens
cacggacgggaactcc

SEQ ID NO: 59543 - DNA, 24 bp, Homo sapiens
aggagagctctgccacctgtgttc

SEQ ID NO: 59544 - DNA, 18 bp, Homo sapiens
gggtcaggcctcagctgc

SEQ ID NO: 59545 - DNA, 16 bp, Homo sapiens
agaccctgggagtggt

SEQ ID NO: 59546 - DNA, 24 bp, Homo sapiens
ctccacgcccagtatccaggtacc

SEQ ID NO: 59547 - DNA, 19 bp, Homo sapiens
gttcccagctcccaacact

SEQ ID NO: 59548 - DNA, 19 bp, Homo sapiens
ccaggctgttccagaacac

SEQ ID NO: 59549 - DNA, 18 bp, Homo sapiens
cccactctctaggttggc

SEQ ID NO: 59550 - DNA, 23 bp, Homo sapiens
ctggcctttctggggaagttgac

SEQ ID NO: 59551 - DNA, 20 bp, Homo sapiens
cagaagccccattccagttc

SEQ ID NO: 59552 - DNA, 21 bp, Homo sapiens
acaggtggcactgtccagtgt

SEQ ID NO: 59553 - DNA, 22 bp, Homo sapiens
gtcctgacgtggaggagtgtgg

SEQ ID NO: 59554 - DNA, 19 bp, Homo sapiens
ccaagagggctttaggggc

SEQ ID NO: 59555 - DNA, 17 bp, Homo sapiens
ctgtgcctctcaggtgg

SEQ ID NO: 59556 - DNA, 24 bp, Homo sapiens
tcttactcaggttagaggaagaac

SEQ ID NO: 59557 - DNA, 23 bp, Homo sapiens
agtaagcctactggggaaggggc

SEQ ID NO: 59558 - DNA, 19 bp, Homo sapiens
gctaggtttggtgctcacc

SEQ ID NO: 59559 - DNA, 17 bp, Homo sapiens
actgtgcagccagtgcc

SEQ ID NO: 59560 - DNA, 22 bp, Homo sapiens
gaggctaagagctgttcctgct

SEQ ID NO: 59561 - DNA, 19 bp, Homo sapiens
ccggccaggagatttcaac

SEQ ID NO: 59562 - DNA, 22 bp, Homo sapiens
agagtcactccttaggacttct

SEQ ID NO: 59563 - DNA, 24 bp, Homo sapiens
agctctgcttcacagcagtgttcc

SEQ ID NO: 59564 - DNA, 17 bp, Homo sapiens
acaggctctccacaggg

SEQ ID NO: 59565 - DNA, 24 bp, Homo sapiens
gtttcccagcagctctggtaggat

SEQ ID NO: 59566 - DNA, 17 bp, Homo sapiens
ctccatggctgcttggt

SEQ ID NO: 59567 - DNA, 16 bp, Homo sapiens
gtgctgtgccgtgtcc

SEQ ID NO: 59568 - DNA, 22 bp, Homo sapiens
gctgggctagacccctaaaaga

SEQ ID NO: 59569 - DNA, 19 bp, Homo sapiens
cccaggctaactctttggc

SEQ ID NO: 59570 - DNA, 19 bp, Homo sapiens
gaagcacccttgttacccc

SEQ ID NO: 59571 - DNA, 22 bp, Homo sapiens
ttggccaggtgatctcacagcc

SEQ ID NO: 59572 - DNA, 18 bp, Homo sapiens
ggatcagcaccaatggct

SEQ ID NO: 59573 - DNA, 16 bp, Homo sapiens
gcagctcctgcctggc

SEQ ID NO: 59574 - DNA, 17 bp, Homo sapiens
gttgcctggcacagagg

SEQ ID NO: 59575 - DNA, 19 bp, Homo sapiens
cactccaatcaggtggtag

SEQ ID NO: 59576 - DNA, 20 bp, Homo sapiens
acgcacaaagtgggggtggg

SEQ ID NO: 59577 - DNA, 17 bp, Homo sapiens
gatggcaggagggtagg

SEQ ID NO: 59578 - DNA, 24 bp, Homo sapiens
caatggccccagctgtgtagcgcc

SEQ ID NO: 59579 - DNA, 17 bp, Homo sapiens
tggcctgggctactatt

SEQ ID NO: 59580 - DNA, 16 bp, Homo sapiens
atgtggccccctagct

SEQ ID NO: 59581 - DNA, 21 bp, Homo sapiens
agagggactgacgggtgatct

SEQ ID NO: 59582 - DNA, 24 bp, Homo sapiens
ataagacacccaagactcctgggt

SEQ ID NO: 59583 - DNA, 18 bp, Homo sapiens
gacctggccagtgcttcc

SEQ ID NO: 59584 - DNA, 22 bp, Homo sapiens
agccgccggccacgagaatagt

SEQ ID NO: 59585 - DNA, 22 bp, Homo sapiens
tcacccttgaccttgtctcttt

SEQ ID NO: 59586 - DNA, 23 bp, Homo sapiens
gtgggtaggatcagaggtcaaag

SEQ ID NO: 59587 - DNA, 22 bp, Homo sapiens
agaccccagatgagagcctcta

SEQ ID NO: 59588 - DNA, 24 bp, Homo sapiens
ccctaccctagggtggctctcacc

SEQ ID NO: 59589 - DNA, 23 bp, Homo sapiens
gatcaactactataccggatgga

SEQ ID NO: 59590 - DNA, 23 bp, Homo sapiens
cacttctatagccacaggcaggc

SEQ ID NO: 59591 - DNA, 21 bp, Homo sapiens
cctttcccccagtgtgggtct

SEQ ID NO: 59592 - DNA, 23 bp, Homo sapiens
ccttctctacacccaccccaaag

SEQ ID NO: 59593 - DNA, 21 bp, Homo sapiens
ttgggtctgggggctgtgggc

SEQ ID NO: 59594 - DNA, 19 bp, Homo sapiens
ccctggagtcacctgcatc

SEQ ID NO: 59595 - DNA, 17 bp, Homo sapiens
gggcatatgctggtcag

SEQ ID NO: 59596 - DNA, 18 bp, Homo sapiens
tctgctgcagcatgacct

SEQ ID NO: 59597 - DNA, 18 bp, Homo sapiens
caccctaactcctcatct

SEQ ID NO: 59598 - DNA, 16 bp, Homo sapiens
cctgcccctacctggc

SEQ ID NO: 59599 - DNA, 16 bp, Homo sapiens
aagacgggtaggcagg

SEQ ID NO: 59600 - DNA, 20 bp, Homo sapiens
ctgctctcaggagatgtact

SEQ ID NO: 59601 - DNA, 16 bp, Homo sapiens
agccttccgagggagc

SEQ ID NO: 59602 - DNA, 24 bp, Homo sapiens
catcttctgcctgtcaatgcaacc

SEQ ID NO: 59603 - DNA, 17 bp, Homo sapiens
gtattgcaggcctctgt

SEQ ID NO: 59604 - DNA, 16 bp, Homo sapiens
actgtccctgctcctc

SEQ ID NO: 59605 - DNA, 23 bp, Homo sapiens
gtgcagggatgattgctgagtgt

SEQ ID NO: 59606 - DNA, 23 bp, Homo sapiens
ttctcttggtcgtaccagcttag

SEQ ID NO: 59607 - DNA, 24 bp, Homo sapiens
aagccctaagtgggagcatactgc

SEQ ID NO: 59608 - DNA, 23 bp, Homo sapiens
tgaatagatggtatgaggagaca

SEQ ID NO: 59609 - DNA, 23 bp, Homo sapiens
cacaattacataactctggtctg

SEQ ID NO: 59610 - DNA, 17 bp, Homo sapiens
ggggccccaggacactc

SEQ ID NO: 59611 - DNA, 17 bp, Homo sapiens
gccagtagtaccaccct

SEQ ID NO: 59612 - DNA, 16 bp, Homo sapiens
ccaagccttctgcctg

SEQ ID NO: 59613 - DNA, 17 bp, Homo sapiens
tggtcacaggaagcagg

SEQ ID NO: 59614 - DNA, 23 bp, Homo sapiens
gatacgtatcacaatcccttccc

SEQ ID NO: 59615 - DNA, 23 bp, Homo sapiens
ctttggctgggtctttttgtttc

SEQ ID NO: 59616 - DNA, 24 bp, Homo sapiens
ttgggccacaacctagttccttac

SEQ ID NO: 59617 - DNA, 22 bp, Homo sapiens
tgagagggagatagctatcacc

SEQ ID NO: 59618 - DNA, 16 bp, Homo sapiens
ctcccttcctggctgg

SEQ ID NO: 59619 - DNA, 19 bp, Homo sapiens
cgtgagcatcttgagagtg

SEQ ID NO: 59620 - DNA, 17 bp, Homo sapiens
ggcttcctcatgatggc

SEQ ID NO: 59621 - DNA, 17 bp, Homo sapiens
tcccgcctgagtcgtct

SEQ ID NO: 59622 - DNA, 16 bp, Homo sapiens
gccaggctgccttccc

SEQ ID NO: 59623 - DNA, 24 bp, Homo sapiens
gtcggaagctgcgggagctgaaac

SEQ ID NO: 59624 - DNA, 16 bp, Homo sapiens
cccgacggcgagaccc

SEQ ID NO: 59625 - DNA, 16 bp, Homo sapiens
cccctctcccagagcg

SEQ ID NO: 59626 - DNA, 20 bp, Homo sapiens
gaccgcaagtccagcgtacc

SEQ ID NO: 59627 - DNA, 23 bp, Homo sapiens
ctagttcaggcggaaggagcagt

SEQ ID NO: 59628 - DNA, 24 bp, Homo sapiens
agcaaaccagctaggcagagctga

SEQ ID NO: 59629 - DNA, 21 bp, Homo sapiens
agttcagatctccggagggcc

SEQ ID NO: 59630 - DNA, 22 bp, Homo sapiens
gacacccccaaccccgaccccc

SEQ ID NO: 59631 - DNA, 18 bp, Homo sapiens
gtcctttccctgcccagg

SEQ ID NO: 59632 - DNA, 18 bp, Homo sapiens
cgtcacttccgtccagac

SEQ ID NO: 59633 - DNA, 16 bp, Homo sapiens
ggacgggaaaaggggt

SEQ ID NO: 59634 - DNA, 16 bp, Homo sapiens
ggctcggaggcaatga

SEQ ID NO: 59635 - DNA, 22 bp, Homo sapiens
aggacactgatactgtcattgt

SEQ ID NO: 59636 - DNA, 29 bp, Homo sapiens
tcaaaaaaaaaaataaataaataatctcc

SEQ ID NO: 59637 - DNA, 18 bp, Homo sapiens
gccgagatcgcgccattg

SEQ ID NO: 59638 - DNA, 24 bp, Homo sapiens
cttatcttgcagacacgttggtcg

SEQ ID NO: 59639 - DNA, 18 bp, Homo sapiens
tcccaaaggaacagcact

SEQ ID NO: 59640 - DNA, 18 bp, Homo sapiens
ctcccaaagagctgagat

SEQ ID NO: 59641 - DNA, 18 bp, Homo sapiens
aggacggtttgaacctat

SEQ ID NO: 59642 - DNA, 21 bp, Homo sapiens
tgacttaataaaacgttatgc

SEQ ID NO: 59643 - DNA, 20 bp, Homo sapiens
acctctagattctctggctc

SEQ ID NO: 59644 - DNA, 22 bp, Homo sapiens
cggtctggttttattttagtgc

SEQ ID NO: 59645 - DNA, 21 bp, Homo sapiens
gagtaaaagtgagggaagtat

SEQ ID NO: 59646 - DNA, 21 bp, Homo sapiens
gcggttctggaataagaatat

SEQ ID NO: 59647 - DNA, 21 bp, Homo sapiens
cttatgtcatctccctctacc

SEQ ID NO: 59648 - DNA, 19 bp, Homo sapiens
ggtggcagatggacatcgc

SEQ ID NO: 59649 - DNA, 24 bp, Homo sapiens
gtctcaaaaaaaaaaaaagaaaaa

SEQ ID NO: 59650 - DNA, 23 bp, Homo sapiens
cacatatgtgtgtgtaaaaacac

SEQ ID NO: 59651 - DNA, 22 bp, Homo sapiens
atagactctctactatggtgtc

SEQ ID NO: 59652 - DNA, 19 bp, Homo sapiens
gctgagtttcaaaggaggc

SEQ ID NO: 59653 - DNA, 21 bp, Homo sapiens
tctttacagttggtctcttcc

SEQ ID NO: 59654 - DNA, 22 bp, Homo sapiens
tgttaaagggatgaatgaacaa

SEQ ID NO: 59655 - DNA, 23 bp, Homo sapiens
gggagtaacagggccgacatgcc

SEQ ID NO: 59656 - DNA, 20 bp, Homo sapiens
aaacaaaaatcttctccatt

SEQ ID NO: 59657 - DNA, 16 bp, Homo sapiens
ccccagacacagggac

SEQ ID NO: 59658 - DNA, 24 bp, Homo sapiens
aggggtcccagttttatgtatcat

SEQ ID NO: 59659 - DNA, 22 bp, Homo sapiens
cattccaggtatgatacatgag

SEQ ID NO: 59660 - DNA, 21 bp, Homo sapiens
gttttctcctcaggggtctct

SEQ ID NO: 59661 - DNA, 24 bp, Homo sapiens
agtctccccactcccttcacagag

SEQ ID NO: 59662 - DNA, 20 bp, Homo sapiens
atttggaacttgtgaagtcc

SEQ ID NO: 59663 - DNA, 22 bp, Homo sapiens
cttgggaaaaaaaaaaaagaac

SEQ ID NO: 59664 - DNA, 23 bp, Homo sapiens
ctaagtttgcacttgtcttccct

SEQ ID NO: 59665 - DNA, 20 bp, Homo sapiens
gagctgagatcgcaccactg

SEQ ID NO: 59666 - DNA, 23 bp, Homo sapiens
aggtggggcataagggtagaagc

SEQ ID NO: 59667 - DNA, 23 bp, Homo sapiens
cacagtaagaaccaggacaacca

SEQ ID NO: 59668 - DNA, 24 bp, Homo sapiens
tattcctttaggtagaattacttt

SEQ ID NO: 59669 - DNA, 20 bp, Homo sapiens
tgtgtaggaagatgatgctg

SEQ ID NO: 59670 - DNA, 20 bp, Homo sapiens
tttttttttgctttgtccac

SEQ ID NO: 59671 - DNA, 20 bp, Homo sapiens
acttttcccaggctggagat

SEQ ID NO: 59672 - DNA, 18 bp, Homo sapiens
accagtctggagtggttg

SEQ ID NO: 59673 - DNA, 21 bp, Homo sapiens
gtactctactgctccaaggag

SEQ ID NO: 59674 - DNA, 22 bp, Homo sapiens
gcagccatgtgaagaaaggagg

SEQ ID NO: 59675 - DNA, 20 bp, Homo sapiens
gccacctcatctttagaaac

SEQ ID NO: 59676 - DNA, 24 bp, Homo sapiens
tcacccatctttctgtttgtcatt

SEQ ID NO: 59677 - DNA, 20 bp, Homo sapiens
taactgcttctaggccgaga

SEQ ID NO: 59678 - DNA, 18 bp, Homo sapiens
tgtcgcaggacgctaagc

SEQ ID NO: 59679 - DNA, 16 bp, Homo sapiens
tgctgctgctgttggt

SEQ ID NO: 59680 - DNA, 20 bp, Homo sapiens
aactccccgaagatcacttc

SEQ ID NO: 59681 - DNA, 18 bp, Homo sapiens
gagaagaaggaggcaggc

SEQ ID NO: 59682 - DNA, 17 bp, Homo sapiens
agccatgccggacttac

SEQ ID NO: 59683 - DNA, 16 bp, Homo sapiens
aagatggcggacgtgc

SEQ ID NO: 59684 - DNA, 22 bp, Homo sapiens
ggggaggggttaagaaagaggt

SEQ ID NO: 59685 - DNA, 21 bp, Homo sapiens
ggagattgtggtgaagggaga

SEQ ID NO: 59686 - DNA, 23 bp, Homo sapiens
tctagagagaaactttcttttcc

SEQ ID NO: 59687 - DNA, 22 bp, Homo sapiens
aagaccaactatgttgtttggg

SEQ ID NO: 59688 - DNA, 18 bp, Homo sapiens
ggccttcctttccagtcc

SEQ ID NO: 59689 - DNA, 23 bp, Homo sapiens
cagtctattcattattagatttt

SEQ ID NO: 59690 - DNA, 22 bp, Homo sapiens
gagaaaggtgcacgttattaag

SEQ ID NO: 59691 - DNA, 24 bp, Homo sapiens
caaagttgtttatataaatgaatc

SEQ ID NO: 59692 - DNA, 27 bp, Homo sapiens
ctgataaatagatagataagtaaaatg

SEQ ID NO: 59693 - DNA, 18 bp, Homo sapiens
tgccttaattatttcagg

SEQ ID NO: 59694 - DNA, 16 bp, Homo sapiens
agcccgggcaacaagg

SEQ ID NO: 59695 - DNA, 23 bp, Homo sapiens
acacattggattccattttattt

SEQ ID NO: 59696 - DNA, 20 bp, Homo sapiens
agatcacttgagcctaggag

SEQ ID NO: 59697 - DNA, 23 bp, Homo sapiens
ggttcttttagcctagtcatttt

SEQ ID NO: 59698 - DNA, 20 bp, Homo sapiens
ctcacacgcttcaccattga

SEQ ID NO: 59699 - DNA, 26 bp, Homo sapiens
ttggaataaaattcagacattacatg

SEQ ID NO: 59700 - DNA, 27 bp, Homo sapiens
cattatttcataggggaaaaaagaaac

SEQ ID NO: 59701 - DNA, 27 bp, Homo sapiens
catttcatatctcatttaaaattttgg

SEQ ID NO: 59702 - DNA, 24 bp, Homo sapiens
catggacaaaaatgaaggtaggtt

SEQ ID NO: 59703 - DNA, 24 bp, Homo sapiens
acctgatcgaaaagatctacttgg

SEQ ID NO: 59704 - DNA, 24 bp, Homo sapiens
ataacatgtttttgcagagctgct

SEQ ID NO: 59705 - DNA, 23 bp, Homo sapiens
caagacataccttgagtagatcg

SEQ ID NO: 59706 - DNA, 24 bp, Homo sapiens
tatataaaaaacctaaagcatttc

SEQ ID NO: 59707 - DNA, 27 bp, Homo sapiens
agtaaataaatgtgtagttttggaatg

SEQ ID NO: 59708 - DNA, 21 bp, Homo sapiens
tccttacgtgaatctttttat

SEQ ID NO: 59709 - DNA, 20 bp, Homo sapiens
ttctttgcttctgctaaaac

SEQ ID NO: 59710 - DNA, 21 bp, Homo sapiens
cgctcccttagaaataggtct

SEQ ID NO: 59711 - DNA, 29 bp, Homo sapiens
aaagaatcccaatttcaataacaatataa

SEQ ID NO: 59712 - DNA, 19 bp, Homo sapiens
ttcagaagcccattccaaa

SEQ ID NO: 59713 - DNA, 20 bp, Homo sapiens
cagaaaaaaagctcctcagg

SEQ ID NO: 59714 - DNA, 21 bp, Homo sapiens
tcaaacgagctgcagatgaag

SEQ ID NO: 59715 - DNA, 22 bp, Homo sapiens
agctaaaactatagcttgagct

SEQ ID NO: 59716 - DNA, 19 bp, Homo sapiens
aaggcgcacacactcttca

SEQ ID NO: 59717 - DNA, 24 bp, Homo sapiens
ccaaaagtagtcttgaagttggcc

SEQ ID NO: 59718 - DNA, 19 bp, Homo sapiens
tcagtctgtacaatccctt

SEQ ID NO: 59719 - DNA, 21 bp, Homo sapiens
aaggaaaagttacatgtagcg

SEQ ID NO: 59720 - DNA, 26 bp, Homo sapiens
cttttacatatatctaaactacctac

SEQ ID NO: 59721 - DNA, 19 bp, Homo sapiens
accagtggttatttccagg

SEQ ID NO: 59722 - DNA, 20 bp, Homo sapiens
tgaatccaagaggtaaatgt

SEQ ID NO: 59723 - DNA, 21 bp, Homo sapiens
ggctgcccgtttggagggtca

SEQ ID NO: 59724 - DNA, 18 bp, Homo sapiens
caatgacttccaatcccc

SEQ ID NO: 59725 - DNA, 22 bp, Homo sapiens
ttttttccactgacatagcttc

SEQ ID NO: 59726 - DNA, 23 bp, Homo sapiens
agtcagtcttacagataagaaaa

SEQ ID NO: 59727 - DNA, 21 bp, Homo sapiens
gatcagtcttgatagtagatc

SEQ ID NO: 59728 - DNA, 30 bp, Homo sapiens
aaatttataaatgtaacaaaatatatttat

SEQ ID NO: 59729 - DNA, 19 bp, Homo sapiens
ctacctcagcatccacaaa

SEQ ID NO: 59730 - DNA, 22 bp, Homo sapiens
aaattgcttttaggtctttgtc

SEQ ID NO: 59731 - DNA, 24 bp, Homo sapiens
cctgtgctttgtaagatagttgtt

SEQ ID NO: 59732 - DNA, 23 bp, Homo sapiens
tcaaagccaaaattatggctaag

SEQ ID NO: 59733 - DNA, 22 bp, Homo sapiens
cgcactctctctctctctctct

SEQ ID NO: 59734 - DNA, 22 bp, Homo sapiens
gcccttaaacagaggagttttg

SEQ ID NO: 59735 - DNA, 19 bp, Homo sapiens
gaaacttccacctaaaagc

SEQ ID NO: 59736 - DNA, 22 bp, Homo sapiens
cagcagagagagagtatggagg

SEQ ID NO: 59737 - DNA, 19 bp, Homo sapiens
ggtaaaaatggccatctgg

SEQ ID NO: 59738 - DNA, 22 bp, Homo sapiens
agaattgcaaaaatgttcttgg

SEQ ID NO: 59739 - DNA, 24 bp, Homo sapiens
gtataataatgataccttatgaca

SEQ ID NO: 59740 - DNA, 16 bp, Homo sapiens
gggcaggtcgctgttc

SEQ ID NO: 59741 - DNA, 23 bp, Homo sapiens
cttagtcttaaattatcaactaa

SEQ ID NO: 59742 - DNA, 21 bp, Homo sapiens
tgcaatataagtggcaacttc

SEQ ID NO: 59743 - DNA, 29 bp, Homo sapiens
aaaatccatttatattttagaatttttcc

SEQ ID NO: 59744 - DNA, 22 bp, Homo sapiens
aaggtttagaatccactgattt

SEQ ID NO: 59745 - DNA, 19 bp, Homo sapiens
agaagaagggcgtgcacct

SEQ ID NO: 59746 - DNA, 22 bp, Homo sapiens
taagtaacttttaatgttgggg

SEQ ID NO: 59747 - DNA, 18 bp, Homo sapiens
gataggctgtttggtgcg

SEQ ID NO: 59748 - DNA, 20 bp, Homo sapiens
gtgggaggatcacttgggcc

SEQ ID NO: 59749 - DNA, 18 bp, Homo sapiens
agcaacttgccttctttt

SEQ ID NO: 59750 - DNA, 24 bp, Homo sapiens
actgcactccagcacattaaataa

SEQ ID NO: 59751 - DNA, 18 bp, Homo sapiens
acatcaggccacactgcc

SEQ ID NO: 59752 - DNA, 22 bp, Homo sapiens
ttttacaggatcccactttgcg

SEQ ID NO: 59753 - DNA, 24 bp, Homo sapiens
ttaagaaaaattgcagtgggtaag

SEQ ID NO: 59754 - DNA, 22 bp, Homo sapiens
acgatcaggaaagattcaaagg

SEQ ID NO: 59755 - DNA, 23 bp, Homo sapiens
acaagtacgtaatttaattttac

SEQ ID NO: 59756 - DNA, 20 bp, Homo sapiens
ccgttacagatttcagtgtc

SEQ ID NO: 59757 - DNA, 24 bp, Homo sapiens
accatcacattcaatgtagattat

SEQ ID NO: 59758 - DNA, 21 bp, Homo sapiens
acttcaacatgtgctactcac

SEQ ID NO: 59759 - DNA, 20 bp, Homo sapiens
aaatcttaacaataagcctc

SEQ ID NO: 59760 - DNA, 21 bp, Homo sapiens
cagcacaagtgatcaataaag

SEQ ID NO: 59761 - DNA, 20 bp, Homo sapiens
gggaacctaccatggtatga

SEQ ID NO: 59762 - DNA, 17 bp, Homo sapiens
tgagtcttccgggcaga

SEQ ID NO: 59763 - DNA, 24 bp, Homo sapiens
acatgttcagtggagtaaccaact

SEQ ID NO: 59764 - DNA, 21 bp, Homo sapiens
agaaaacaaaaagcaaagttc

SEQ ID NO: 59765 - DNA, 30 bp, Homo sapiens
tttctttggaataattaaagtgtttattat

SEQ ID NO: 59766 - DNA, 22 bp, Homo sapiens
gtttgttcaaagcattatacgc

SEQ ID NO: 59767 - DNA, 19 bp, Homo sapiens
tttaaaggagggtgcatct

SEQ ID NO: 59768 - DNA, 19 bp, Homo sapiens
aacagtatcgacagtcttc

SEQ ID NO: 59769 - DNA, 24 bp, Homo sapiens
aaacagtgttgagaagatagttgt

SEQ ID NO: 59770 - DNA, 28 bp, Homo sapiens
ttaaagttaagtttaaaatcatatgcac

SEQ ID NO: 59771 - DNA, 23 bp, Homo sapiens
cacataatttaaaaaatatccct

SEQ ID NO: 59772 - DNA, 20 bp, Homo sapiens
caaacatgtgatacagctgc

SEQ ID NO: 59773 - DNA, 22 bp, Homo sapiens
tgacacagagttgtgatttttt

SEQ ID NO: 59774 - DNA, 22 bp, Homo sapiens
aatatttaataatcagtgtggc

SEQ ID NO: 59775 - DNA, 21 bp, Homo sapiens
tgatttattagtgcccaagcc

SEQ ID NO: 59776 - DNA, 17 bp, Homo sapiens
agaggtggtagctgcag

SEQ ID NO: 59777 - DNA, 26 bp, Homo sapiens
cactggcttaaaatattttttagatc

SEQ ID NO: 59778 - DNA, 29 bp, Homo sapiens
acaggatagtttaataaattacttacttc

SEQ ID NO: 59779 - DNA, 22 bp, Homo sapiens
agagaaagtaagtataatttct

SEQ ID NO: 59780 - DNA, 21 bp, Homo sapiens
aatactgattcagtaactact

SEQ ID NO: 59781 - DNA, 21 bp, Homo sapiens
ggatctcgaacacccattatc

SEQ ID NO: 59782 - DNA, 20 bp, Homo sapiens
ttcatactatgtgtaaggcc

SEQ ID NO: 59783 - DNA, 20 bp, Homo sapiens
tgcaaaagaccttctacagg

SEQ ID NO: 59784 - DNA, 21 bp, Homo sapiens
ttgcagtgagccaagattgca

SEQ ID NO: 59785 - DNA, 22 bp, Homo sapiens
ttcttctttgtattagagtttc

SEQ ID NO: 59786 - DNA, 24 bp, Homo sapiens
tgtctcaaaaaaaaaaaatatttc

SEQ ID NO: 59787 - DNA, 23 bp, Homo sapiens
gctggtctactactctataaggt

SEQ ID NO: 59788 - DNA, 22 bp, Homo sapiens
tgactttttctcatctctgttt

SEQ ID NO: 59789 - DNA, 24 bp, Homo sapiens
tgaaaagatatatatatagagact

SEQ ID NO: 59790 - DNA, 22 bp, Homo sapiens
caaggttgtcaacgagaaaatg

SEQ ID NO: 59791 - DNA, 17 bp, Homo sapiens
gcaacgtcatcaacggc

SEQ ID NO: 59792 - DNA, 24 bp, Homo sapiens
agggggcactgcaattagtgttac

SEQ ID NO: 59793 - DNA, 18 bp, Homo sapiens
gacagagcccaggagttc

SEQ ID NO: 59794 - DNA, 23 bp, Homo sapiens
ctgcacaaaaacggctacaacgc

SEQ ID NO: 59795 - DNA, 24 bp, Homo sapiens
atttgcttcatggaaggattgata

SEQ ID NO: 59796 - DNA, 22 bp, Homo sapiens
tggtgatccatcaggcaaaagc

SEQ ID NO: 59797 - DNA, 25 bp, Homo sapiens
ttatagtagctaaagctcaagtttg

SEQ ID NO: 59798 - DNA, 23 bp, Homo sapiens
aacatttctatactggatacagt

SEQ ID NO: 59799 - DNA, 21 bp, Homo sapiens
acccacttttctacttgtagg

SEQ ID NO: 59800 - DNA, 18 bp, Homo sapiens
catacacatcatatgcgc

SEQ ID NO: 59801 - DNA, 16 bp, Homo sapiens
aggttggccatggctt

SEQ ID NO: 59802 - DNA, 22 bp, Homo sapiens
agcttttaaaaatatgtcacag

SEQ ID NO: 59803 - DNA, 23 bp, Homo sapiens
tcagatggaaggctttaactata

SEQ ID NO: 59804 - DNA, 21 bp, Homo sapiens
ggctggcgtgtataaaccctg

SEQ ID NO: 59805 - DNA, 23 bp, Homo sapiens
aatactgttacatcccatttctg

SEQ ID NO: 59806 - DNA, 21 bp, Homo sapiens
tataatacggcttcagttggt

SEQ ID NO: 59807 - DNA, 20 bp, Homo sapiens
ccaaaaccgtaagaacactg

SEQ ID NO: 59808 - DNA, 18 bp, Homo sapiens
acttctctccaccctctc

SEQ ID NO: 59809 - DNA, 24 bp, Homo sapiens
gacagaaaaattacaataaaacac

SEQ ID NO: 59810 - DNA, 20 bp, Homo sapiens
tcgtctggatccaaatgttc

SEQ ID NO: 59811 - DNA, 23 bp, Homo sapiens
aatgttgaaagaagggaattagg

SEQ ID NO: 59812 - DNA, 20 bp, Homo sapiens
aacgtcatttggatagacca

SEQ ID NO: 59813 - DNA, 28 bp, Homo sapiens
actaaagtaattatacaataaaaaattg

SEQ ID NO: 59814 - DNA, 21 bp, Homo sapiens
tctcaagtgcgatttatgctt

SEQ ID NO: 59815 - DNA, 24 bp, Homo sapiens
ttccagttttctagaaaacagcat

SEQ ID NO: 59816 - DNA, 22 bp, Homo sapiens
aaattcataaagcttgagtctc

SEQ ID NO: 59817 - DNA, 24 bp, Homo sapiens
tttacatgcattattctaaaaatt

SEQ ID NO: 59818 - DNA, 21 bp, Homo sapiens
agcacaaagcatcaaataagg

SEQ ID NO: 59819 - DNA, 22 bp, Homo sapiens
tttttcaggtacatggtaaagc

SEQ ID NO: 59820 - DNA, 21 bp, Homo sapiens
agttgtaagccaaaaagtttg

SEQ ID NO: 59821 - DNA, 16 bp, Homo sapiens
ggacatgctgggtcca

SEQ ID NO: 59822 - DNA, 22 bp, Homo sapiens
tatactgatcaaattgctctgc

SEQ ID NO: 59823 - DNA, 20 bp, Homo sapiens
aaggaaactgctatcgaact

SEQ ID NO: 59824 - DNA, 20 bp, Homo sapiens
tccgtttttaagaaatggga

SEQ ID NO: 59825 - DNA, 18 bp, Homo sapiens
cagggtatgacaaggcag

SEQ ID NO: 59826 - DNA, 22 bp, Homo sapiens
tttatgtaaatcactttggacc

SEQ ID NO: 59827 - DNA, 20 bp, Homo sapiens
caccttttgctttaggaaac

SEQ ID NO: 59828 - DNA, 19 bp, Homo sapiens
gctctgctgtgagatagcc

SEQ ID NO: 59829 - DNA, 21 bp, Homo sapiens
acaaaaaatgtcatttaagag

SEQ ID NO: 59830 - DNA, 21 bp, Homo sapiens
ctgtcttagcaatctttgctg

SEQ ID NO: 59831 - DNA, 18 bp, Homo sapiens
gttggtgacagctctcaa

SEQ ID NO: 59832 - DNA, 24 bp, Homo sapiens
tgagattttactaaaaccatattc

SEQ ID NO: 59833 - DNA, 16 bp, Homo sapiens
tggtgggaatccaggc

SEQ ID NO: 59834 - DNA, 22 bp, Homo sapiens
gtctcttaaaaatggtttagct

SEQ ID NO: 59835 - DNA, 19 bp, Homo sapiens
aaaatgtgttacactcagc

SEQ ID NO: 59836 - DNA, 22 bp, Homo sapiens
ttgccttagtaatgtctctctc

SEQ ID NO: 59837 - DNA, 19 bp, Homo sapiens
tcctttctgtattggcctg

SEQ ID NO: 59838 - DNA, 28 bp, Homo sapiens
atgtttattgaattgtatatttactgtc

SEQ ID NO: 59839 - DNA, 16 bp, Homo sapiens
tcccccagcagcctgg

SEQ ID NO: 59840 - DNA, 20 bp, Homo sapiens
tctggtaacttaataaatgc

SEQ ID NO: 59841 - DNA, 18 bp, Homo sapiens
catgttgctgtcactgtc

SEQ ID NO: 59842 - DNA, 24 bp, Homo sapiens
tacccaatgtggaatcactagaag

SEQ ID NO: 59843 - DNA, 18 bp, Homo sapiens
aggcaaggtgaaccctac

SEQ ID NO: 59844 - DNA, 24 bp, Homo sapiens
gtcaaaaaacattaaaaatcagat

SEQ ID NO: 59845 - DNA, 23 bp, Homo sapiens
ctttattctcctgattatttgca

SEQ ID NO: 59846 - DNA, 16 bp, Homo sapiens
ttgctgcctccgacag

SEQ ID NO: 59847 - DNA, 16 bp, Homo sapiens
atggttgggccttgct

SEQ ID NO: 59848 - DNA, 23 bp, Homo sapiens
caaccatggtcattgcttcacac

SEQ ID NO: 59849 - DNA, 23 bp, Homo sapiens
gaaaatgaaccaggaagcagtat

SEQ ID NO: 59850 - DNA, 18 bp, Homo sapiens
ctggaacagtgcgccttg

SEQ ID NO: 59851 - DNA, 23 bp, Homo sapiens
gcaaatgatattcgatttttggg

SEQ ID NO: 59852 - DNA, 24 bp, Homo sapiens
agacatggtccatagctaagaatg

SEQ ID NO: 59853 - DNA, 16 bp, Homo sapiens
ttgagctcagtggagc

SEQ ID NO: 59854 - DNA, 24 bp, Homo sapiens
ctagctatgtgattacctggcatg

SEQ ID NO: 59855 - DNA, 17 bp, Homo sapiens
ggcttgccttttgtcac

SEQ ID NO: 59856 - DNA, 20 bp, Homo sapiens
ccagacctgaccgaggacca

SEQ ID NO: 59857 - DNA, 24 bp, Homo sapiens
tcacttgctaatggtagaaaaatg

SEQ ID NO: 59858 - DNA, 20 bp, Homo sapiens
tgcaggcagtagtgttcatg

SEQ ID NO: 59859 - DNA, 24 bp, Homo sapiens
ttaagtaaacatttttttctgaag

SEQ ID NO: 59860 - DNA, 22 bp, Homo sapiens
agcttcaaatttattcggagca

SEQ ID NO: 59861 - DNA, 18 bp, Homo sapiens
tgctgcaaaagtggctgc

SEQ ID NO: 59862 - DNA, 22 bp, Homo sapiens
acttaaaacacatgtttgatgg

SEQ ID NO: 59863 - DNA, 17 bp, Homo sapiens
gaggcactgctgttggt

SEQ ID NO: 59864 - DNA, 22 bp, Homo sapiens
gacaggaacactcagaaaatgt

SEQ ID NO: 59865 - DNA, 21 bp, Homo sapiens
tcaacaagtaaaatatgcaat

SEQ ID NO: 59866 - DNA, 20 bp, Homo sapiens
tcacgtgatcactaacctgt

SEQ ID NO: 59867 - DNA, 22 bp, Homo sapiens
ttaggaattacttattcttacc

SEQ ID NO: 59868 - DNA, 23 bp, Homo sapiens
attctagtatttaaacctgtacc

SEQ ID NO: 59869 - DNA, 24 bp, Homo sapiens
tctgaaaggtatttttaaaaattt

SEQ ID NO: 59870 - DNA, 19 bp, Homo sapiens
tggcatggcagcttttatt

SEQ ID NO: 59871 - DNA, 21 bp, Homo sapiens
actttgctcatcataagattt

SEQ ID NO: 59872 - DNA, 23 bp, Homo sapiens
tgaaaattactgattggttgaac

SEQ ID NO: 59873 - DNA, 19 bp, Homo sapiens
agagtttgcacagatcatc

SEQ ID NO: 59874 - DNA, 20 bp, Homo sapiens
ttggccttttaagctagtca

SEQ ID NO: 59875 - DNA, 22 bp, Homo sapiens
ttcatgaagtactgttaccagg

SEQ ID NO: 59876 - DNA, 22 bp, Homo sapiens
tgaatcaaattagtcaaactcc

SEQ ID NO: 59877 - DNA, 20 bp, Homo sapiens
caacagagctcaaatgatac

SEQ ID NO: 59878 - DNA, 22 bp, Homo sapiens
agtatgagtacgtccaatcttg

SEQ ID NO: 59879 - DNA, 23 bp, Homo sapiens
gaagtttaattcagaagtttgtt

SEQ ID NO: 59880 - DNA, 20 bp, Homo sapiens
tgtaacttctgtagtcctgg

SEQ ID NO: 59881 - DNA, 19 bp, Homo sapiens
acatgtaactgagctgggt

SEQ ID NO: 59882 - DNA, 21 bp, Homo sapiens
tgtgcattgctgtgggaaaag

SEQ ID NO: 59883 - DNA, 23 bp, Homo sapiens
atcatgttaataaaagccaggtc

SEQ ID NO: 59884 - DNA, 21 bp, Homo sapiens
ttccttcaagaaataagaacc

SEQ ID NO: 59885 - DNA, 22 bp, Homo sapiens
gagcaattgaaatgttaggagg

SEQ ID NO: 59886 - DNA, 20 bp, Homo sapiens
caaaaagtgaatgcttgttt

SEQ ID NO: 59887 - DNA, 18 bp, Homo sapiens
cagactggatcaggaact

SEQ ID NO: 59888 - DNA, 20 bp, Homo sapiens
aaagctcacatactgacctg

SEQ ID NO: 59889 - DNA, 17 bp, Homo sapiens
acattttttctgcaggt

SEQ ID NO: 59890 - DNA, 18 bp, Homo sapiens
cttgctgccaagttcacc

SEQ ID NO: 59891 - DNA, 21 bp, Homo sapiens
tgggtcaactgtattcaaact

SEQ ID NO: 59892 - DNA, 23 bp, Homo sapiens
acattcatatttgtctgagttcc

SEQ ID NO: 59893 - DNA, 22 bp, Homo sapiens
cactttttaaagtatctgtggt

SEQ ID NO: 59894 - DNA, 18 bp, Homo sapiens
tttaccttcagctacctg

SEQ ID NO: 59895 - DNA, 19 bp, Homo sapiens
atgcaataatgaaggcagc

SEQ ID NO: 59896 - DNA, 22 bp, Homo sapiens
gctaccaccctcccctgaaatt

SEQ ID NO: 59897 - DNA, 18 bp, Homo sapiens
catcttgaagcgagcggc

SEQ ID NO: 59898 - DNA, 20 bp, Homo sapiens
gccagagcatatcgtcatcc

SEQ ID NO: 59899 - DNA, 25 bp, Homo sapiens
atgcttaagtaaaattgtaaatttg

SEQ ID NO: 59900 - DNA, 19 bp, Homo sapiens
cacctcctacctcatctgc

SEQ ID NO: 59901 - DNA, 22 bp, Homo sapiens
ttgttattgttttatgtatagc

SEQ ID NO: 59902 - DNA, 17 bp, Homo sapiens
tcctggtttacttcagc

SEQ ID NO: 59903 - DNA, 23 bp, Homo sapiens
tcctgtctataatctttctctat

SEQ ID NO: 59904 - DNA, 17 bp, Homo sapiens
gacagaacgcatgccag

SEQ ID NO: 59905 - DNA, 20 bp, Homo sapiens
acctcttattactcacgaag

SEQ ID NO: 59906 - DNA, 23 bp, Homo sapiens
tgccaaatgataagtattatggc

SEQ ID NO: 59907 - DNA, 30 bp, Homo sapiens; identical to SEQ ID NO: 3810

SEQ ID NO: 59908 - DNA, 18 bp, Homo sapiens
ggcaagccaaaattcctt

SEQ ID NO: 59909 - DNA, 19 bp, Homo sapiens
acaaatgccacttactggc

SEQ ID NO: 59910 - DNA, 20 bp, Homo sapiens
tgcgattacttttgatcctg

SEQ ID NO: 59911 - DNA, 20 bp, Homo sapiens
tcgtagatctcacggtctgg

SEQ ID NO: 59912 - DNA, 24 bp, Homo sapiens
gaatccaaatagtatttttttgtc

SEQ ID NO: 59913 - DNA, 21 bp, Homo sapiens
tcatattctatccggaaggaa

SEQ ID NO: 59914 - DNA, 18 bp, Homo sapiens
tgccctcgttttggcctc

SEQ ID NO: 59915 - DNA, 16 bp, Homo sapiens
cagagtctggcgcggc

SEQ ID NO: 59916 - DNA, 16 bp, Homo sapiens
tcgtgcgggctccagc

SEQ ID NO: 59917 - DNA, 16 bp, Homo sapiens
cggcaggcaggagggc

SEQ ID NO: 59918 - DNA, 24 bp, Homo sapiens
aattctacccaagctccctcagca

SEQ ID NO: 59919 - DNA, 16 bp, Homo sapiens
ctcaccattcgagccg

SEQ ID NO: 59920 - DNA, 17 bp, Homo sapiens
tgggcggaacggtttct

SEQ ID NO: 59921 - DNA, 18 bp, Homo sapiens
ggagccgaagctaaggct

SEQ ID NO: 59922 - DNA, 24 bp, Homo sapiens
attcacgattggtcctgccccacc

SEQ ID NO: 59923 - DNA, 20 bp, Homo sapiens
ccgaagtgctcggtacatgg

SEQ ID NO: 59924 - DNA, 18 bp, Homo sapiens
agcatgaaccagcctggg

SEQ ID NO: 59925 - DNA, 23 bp, Homo sapiens
ttttggtggtacttcaaaatagg

SEQ ID NO: 59926 - DNA, 16 bp, Homo sapiens
aagccgctactgcccc

SEQ ID NO: 59927 - DNA, 24 bp, Homo sapiens
aaggagccattgcctctctctcct

SEQ ID NO: 59928 - DNA, 19 bp, Homo sapiens
ggctacgtcacttcccttg

SEQ ID NO: 59929 - DNA, 19 bp, Homo sapiens
agtgtgcgaccgagctcag

SEQ ID NO: 59930 - DNA, 16 bp, Homo sapiens
cactgctcctagagcc

SEQ ID NO: 59931 - DNA, 24 bp, Homo sapiens
atcctcgtaatgaccagctccagg

SEQ ID NO: 59932 - DNA, 17 bp, Homo sapiens
gggctggagggaagctg

SEQ ID NO: 59933 - DNA, 24 bp, Homo sapiens
tagccgtaattgacattcccacaa

SEQ ID NO: 59934 - DNA, 22 bp, Homo sapiens
tacagagaaacccaccaaaaag

SEQ ID NO: 59935 - DNA, 22 bp, Homo sapiens
catattggcagtcagcgaagag

SEQ ID NO: 59936 - DNA, 18 bp, Homo sapiens
acggatccagaaacaagc

SEQ ID NO: 59937 - DNA, 24 bp, Homo sapiens
caacgttaggtgggacagtacagc

SEQ ID NO: 59938 - DNA, 18 bp, Homo sapiens
gggacacgtgaatatggc

SEQ ID NO: 59939 - DNA, 24 bp, Homo sapiens
ggctccttctttgctataggatta

SEQ ID NO: 59940 - DNA, 18 bp, Homo sapiens
caaagaaacccacagctg

SEQ ID NO: 59941 - DNA, 23 bp, Homo sapiens
gttgggttccacaagctggtggg

SEQ ID NO: 59942 - DNA, 16 bp, Homo sapiens
aggagcgcagcccagc

SEQ ID NO: 59943 - DNA, 24 bp, Homo sapiens
aaggagggttggactgagagaatg

SEQ ID NO: 59944 - DNA, 17 bp, Homo sapiens
tgtgaggcccaaggacc

SEQ ID NO: 59945 - DNA, 24 bp, Homo sapiens
agggactcgaacagagatctctgc

SEQ ID NO: 59946 - DNA, 17 bp, Homo sapiens
aatcaacaccgctttgc

SEQ ID NO: 59947 - DNA, 17 bp, Homo sapiens
gaggtggtggggcagct

SEQ ID NO: 59948 - DNA, 23 bp, Homo sapiens
tccaacattttttgtctctgatt

SEQ ID NO: 59949 - DNA, 17 bp, Homo sapiens
aggagaggaggaacccc

SEQ ID NO: 59950 - DNA, 21 bp, Homo sapiens
ctggtttcctcatctgtagaa

SEQ ID NO: 59951 - DNA, 22 bp, Homo sapiens
caagtggaccatattctatcgg

SEQ ID NO: 59952 - DNA, 19 bp, Homo sapiens
tcccattcattttgtatgc

SEQ ID NO: 59953 - DNA, 21 bp, Homo sapiens
gccatcattttggagaggatt

SEQ ID NO: 59954 - DNA, 23 bp, Homo sapiens
ttaattttcactattttgatcat

SEQ ID NO: 59955 - DNA, 22 bp, Homo sapiens
tttagataccggataatgactc

SEQ ID NO: 59956 - DNA, 22 bp, Homo sapiens
ttcggtatttgccatctttaag

SEQ ID NO: 59957 - DNA, 23 bp, Homo sapiens
ggggctggaagaaaatatatttt

SEQ ID NO: 59958 - DNA, 24 bp, Homo sapiens
aaatgttttacctgggtgcagtat

SEQ ID NO: 59959 - DNA, 21 bp, Homo sapiens
agtacacggggcctagacgag

SEQ ID NO: 59960 - DNA, 24 bp, Homo sapiens
aggctgatgttgccagcactgagt

SEQ ID NO: 59961 - DNA, 18 bp, Homo sapiens
atggacccacccaagaac

SEQ ID NO: 59962 - DNA, 23 bp, Homo sapiens
ttggggcatattaaagggagggc

SEQ ID NO: 59963 - DNA, 21 bp, Homo sapiens
ggatatatgccataccccagc

SEQ ID NO: 59964 - DNA, 24 bp, Homo sapiens
tggatattttttgaaaagaaaaac

SEQ ID NO: 59965 - DNA, 16 bp, Homo sapiens
tcctctgtcccatgcc

SEQ ID NO: 59966 - DNA, 23 bp, Homo sapiens
catacacaggcccagggcagttc

SEQ ID NO: 59967 - DNA, 24 bp, Homo sapiens
aaattgtatgtctgtgtgcctgtg

SEQ ID NO: 59968 - DNA, 24 bp, Homo sapiens
aaactccagaacttcctggttgct

SEQ ID NO: 59969 - DNA, 25 bp, Homo sapiens
ttttctacattttaagagttctatg

SEQ ID NO: 59970 - DNA, 17 bp, Homo sapiens
gcactccaaaggacctg

SEQ ID NO: 59971 - DNA, 21 bp, Homo sapiens
tttgagaaccactgttgtcgg

SEQ ID NO: 59972 - DNA, 19 bp, Homo sapiens
ctgccagttaagtggatgc

SEQ ID NO: 59973 - DNA, 19 bp, Homo sapiens
ctcccggcttagagtatag

SEQ ID NO: 59974 - DNA, 22 bp, Homo sapiens
cctagtttggttttcctctcct

SEQ ID NO: 59975 - DNA, 19 bp, Homo sapiens
atacctggaggatgatggc

SEQ ID NO: 59976 - DNA, 20 bp, Homo sapiens
ttgttgccactttctcaact

SEQ ID NO: 59977 - DNA, 19 bp, Homo sapiens
gaaggcctctgggggcatc

SEQ ID NO: 59978 - DNA, 17 bp, Homo sapiens
ctctcctcctgaaccgc

SEQ ID NO: 59979 - DNA, 17 bp, Homo sapiens
tagtagctcgccctgtg

SEQ ID NO: 59980 - DNA, 17 bp, Homo sapiens
ggatggcccgagacatc

SEQ ID NO: 59981 - DNA, 23 bp, Homo sapiens
gcctgaaaaggaacttagtgaaa

SEQ ID NO: 59982 - DNA, 17 bp, Homo sapiens
actgcctcttgacctgt

SEQ ID NO: 59983 - DNA, 17 bp, Homo sapiens
cagccacaccccattct

SEQ ID NO: 59984 - DNA, 22 bp, Homo sapiens
tcatcttcctagggataaaatt

SEQ ID NO: 59985 - DNA, 22 bp, Homo sapiens
gggtgaggcagtctttactcac

SEQ ID NO: 59986 - DNA, 21 bp, Homo sapiens
agggaaggaactatttaaact

SEQ ID NO: 59987 - DNA, 16 bp, Homo sapiens
tcttccagggcctgga

SEQ ID NO: 59988 - DNA, 19 bp, Homo sapiens
ttgttaaggctgtttctct

SEQ ID NO: 59989 - DNA, 21 bp, Homo sapiens
ataaaacaaagctgaatcatc

SEQ ID NO: 59990 - DNA, 20 bp, Homo sapiens
ggaccttctgcacgtggctc

SEQ ID NO: 59991 - DNA, 24 bp, Homo sapiens
tgctctgaagggggaaatgtgagc

SEQ ID NO: 59992 - DNA, 16 bp, Homo sapiens
tcagtggcccgcttct

SEQ ID NO: 59993 - DNA, 20 bp, Homo sapiens
gatgacaggaagagcacagt

SEQ ID NO: 59994 - DNA, 23 bp, Homo sapiens
tgcctccttgtgagcactggaag

SEQ ID NO: 59995 - DNA, 23 bp, Homo sapiens
caaatactgacagccacaggcaa

SEQ ID NO: 59996 - DNA, 21 bp, Homo sapiens
gatttctaatgtgcagccagg

SEQ ID NO: 59997 - DNA, 18 bp, Homo sapiens
ttcctccgagagacccgc

SEQ ID NO: 59998 - DNA, 22 bp, Homo sapiens
ccctgtccaagcctaaagttga

SEQ ID NO: 59999 - DNA, 17 bp, Homo sapiens
gagcctgcaatccctgc

SEQ ID NO: 60000 - DNA, 23 bp, Homo sapiens
ctcttgctccttccatccttgct

SEQ ID NO: 60001 - DNA, 21 bp, Homo sapiens
ttacatccctctctgctctgc

SEQ ID NO: 60002 - DNA, 24 bp, Homo sapiens
ctggttctcactcaccgggcgagg

SEQ ID NO: 60003 - DNA, 20 bp, Homo sapiens
actttgtatcctgttcctcc

SEQ ID NO: 60004 - DNA, 21 bp, Homo sapiens
ccatgagctccagcaggatga

SEQ ID NO: 60005 - DNA, 18 bp, Homo sapiens
cctgctgcccatgtttac

SEQ ID NO: 60006 - DNA, 20 bp, Homo sapiens
tgttctggtggttgaatttg

SEQ ID NO: 60007 - DNA, 19 bp, Homo sapiens
tcctcatggaagccctgat

SEQ ID NO: 60008 - DNA, 20 bp, Homo sapiens
gtctcctactggagaaaagg

SEQ ID NO: 60009 - DNA, 24 bp, Homo sapiens
cctcctccccaccctccccttctc

SEQ ID NO: 60010 - DNA, 21 bp, Homo sapiens
atctgttagaaacctctccag

SEQ ID NO: 60011 - DNA, 16 bp, Homo sapiens
cttggcttgcggactc

SEQ ID NO: 60012 - DNA, 23 bp, Homo sapiens
ctctctgtggctttacctgatga

SEQ ID NO: 60013 - DNA, 17 bp, Homo sapiens
cccaacgacccaagccc

SEQ ID NO: 60014 - DNA, 22 bp, Homo sapiens
acacttcaggcagcgtctgggc

SEQ ID NO: 60015 - DNA, 24 bp, Homo sapiens
tttgcacaggggtctgggccatgg

SEQ ID NO: 60016 - DNA, 21 bp, Homo sapiens
gagaactgcagcctacagagt

SEQ ID NO: 60017 - DNA, 24 bp, Homo sapiens
gacccccagctgcctcattattgt

SEQ ID NO: 60018 - DNA, 24 bp, Homo sapiens
acttcttaccttcacagccacttg

SEQ ID NO: 60019 - DNA, 23 bp, Homo sapiens
agtgtgtatgttacccccgcctc

SEQ ID NO: 60020 - DNA, 24 bp, Homo sapiens
gccttcatacacctccccaaaggc

SEQ ID NO: 60021 - DNA, 20 bp, Homo sapiens
ccgcggaaaaacatcaccct

SEQ ID NO: 60022 - DNA, 19 bp, Homo sapiens
ctaggagggctaggggtgc

SEQ ID NO: 60023 - DNA, 20 bp, Homo sapiens
cgactacaaccccaactact

SEQ ID NO: 60024 - DNA, 20 bp, Homo sapiens
gcggtgctgtgataacattc

SEQ ID NO: 60025 - DNA, 17 bp, Homo sapiens
ctgcagagccctgagta

SEQ ID NO: 60026 - DNA, 17 bp, Homo sapiens
ctcaccgaatgagggtg

SEQ ID NO: 60027 - DNA, 16 bp, Homo sapiens
ctgaccacccacctgc

SEQ ID NO: 60028 - DNA, 16 bp, Homo sapiens
gtcttgccagcaaagc

SEQ ID NO: 60029 - DNA, 24 bp, Homo sapiens
gaggcttcctgtaggaagtggcct

SEQ ID NO: 60030 - DNA, 20 bp, Homo sapiens
gcttgctcagcttgtactca

SEQ ID NO: 60031 - DNA, 21 bp, Homo sapiens
agtatttctaagtatgatgga

SEQ ID NO: 60032 - DNA, 20 bp, Homo sapiens
ctggtgcttccggcggtaca

SEQ ID NO: 60033 - DNA, 17 bp, Homo sapiens
ggctgccctaatcacca

SEQ ID NO: 60034 - DNA, 19 bp, Homo sapiens
ctcgctgatcctctctgtg

SEQ ID NO: 60035 - DNA, 24 bp, Homo sapiens
acaccttggcacctgtggcacagc

SEQ ID NO: 60036 - DNA, 20 bp, Homo sapiens
tgtcaataccccagtgggac

SEQ ID NO: 60037 - DNA, 23 bp, Homo sapiens
ccttgggagtccctggggctctg

SEQ ID NO: 60038 - DNA, 24 bp, Homo sapiens
gtctcagtgggggaggttatttct

SEQ ID NO: 60039 - DNA, 17 bp, Homo sapiens
acgagggcagaggtcac

SEQ ID NO: 60040 - DNA, 21 bp, Homo sapiens
ccctgaaaagaaaagtgtgac

SEQ ID NO: 60041 - DNA, 19 bp, Homo sapiens
ctgaggatggcgtctcctg

SEQ ID NO: 60042 - DNA, 16 bp, Homo sapiens
gtggcaggtaggggag

SEQ ID NO: 60043 - DNA, 17 bp, Homo sapiens
acatggaccctgaaagc

SEQ ID NO: 60044 - DNA, 24 bp, Homo sapiens
gttctggaacccagaaaccatttg

SEQ ID NO: 60045 - DNA, 22 bp, Homo sapiens
acggggaagtgaatattaagca

SEQ ID NO: 60046 - DNA, 16 bp, Homo sapiens
ccctgcccccttacca

SEQ ID NO: 60047 - DNA, 16 bp, Homo sapiens
ggcaggctcggcccaa

SEQ ID NO: 60048 - DNA, 22 bp, Homo sapiens
gtggtcacagaagcagatgacc

SEQ ID NO: 60049 - DNA, 22 bp, Homo sapiens
ctaggaacagggaccaccagag

SEQ ID NO: 60050 - DNA, 24 bp, Homo sapiens
cagtgactgcagtttagataatgc

SEQ ID NO: 60051 - DNA, 21 bp, Homo sapiens
ctatatgcacaggaagactct

SEQ ID NO: 60052 - DNA, 16 bp, Homo sapiens
tcctgtacaccccagc

SEQ ID NO: 60053 - DNA, 24 bp, Homo sapiens
taggaagcttgcctgccagggacc

SEQ ID NO: 60054 - DNA, 20 bp, Homo sapiens
cagcctcaaacaatgacccc

SEQ ID NO: 60055 - DNA, 18 bp, Homo sapiens
gaggttttagcttggtgg

SEQ ID NO: 60056 - DNA, 18 bp, Homo sapiens
gattttggcacccacccc

SEQ ID NO: 60057 - DNA, 23 bp, Homo sapiens
cagagaagctaccttttaaagct

SEQ ID NO: 60058 - DNA, 20 bp, Homo sapiens
ccagtgaccccctaactttg

SEQ ID NO: 60059 - DNA, 19 bp, Homo sapiens
ccatcttccccatccattt

SEQ ID NO: 60060 - DNA, 18 bp, Homo sapiens
acatgcagcctctgtgcc

SEQ ID NO: 60061 - DNA, 17 bp, Homo sapiens
ctcctcaggtggaggag

SEQ ID NO: 60062 - DNA, 21 bp, Homo sapiens
cagtcacatcacagtccacac

SEQ ID NO: 60063 - DNA, 18 bp, Homo sapiens
caggccatgaagaagtgg

SEQ ID NO: 60064 - DNA, 20 bp, Homo sapiens
gtgaggagcctaggactaag

SEQ ID NO: 60065 - DNA, 23 bp, Homo sapiens
ataacacttccttgctctgggcc

SEQ ID NO: 60066 - DNA, 24 bp, Homo sapiens
catctttacctatatatcctccgc

SEQ ID NO: 60067 - DNA, 17 bp, Homo sapiens
atcctcacgcaggttcc

SEQ ID NO: 60068 - DNA, 23 bp, Homo sapiens
gaaaccccctcttgtctcccacc

SEQ ID NO: 60069 - DNA, 17 bp, Homo sapiens
ccaaggcgtcctgcatc

SEQ ID NO: 60070 - DNA, 21 bp, Homo sapiens
ccctcctgcaaagattttccg

SEQ ID NO: 60071 - DNA, 16 bp, Homo sapiens
ctgaagcccccaggcc

SEQ ID NO: 60072 - DNA, 20 bp, Homo sapiens
tcggttctagggctaaacgg

SEQ ID NO: 60073 - DNA, 24 bp, Homo sapiens
ccaatattcagagctcctagcatc

SEQ ID NO: 60074 - DNA, 16 bp, Homo sapiens
gcagggcctacggggc

SEQ ID NO: 60075 - DNA, 24 bp, Homo sapiens
tggcatcggggcccagctgaaggc

SEQ ID NO: 60076 - DNA, 17 bp, Homo sapiens
cctggtcagatgaagga

SEQ ID NO: 60077 - DNA, 23 bp, Homo sapiens
ctttacctgcggctccggaattg

SEQ ID NO: 60078 - DNA, 19 bp, Homo sapiens
atttaccagagcttagggg

SEQ ID NO: 60079 - DNA, 24 bp, Homo sapiens
tctctctgggtggaacgtgtctgt

SEQ ID NO: 60080 - DNA, 18 bp, Homo sapiens
agaccactgagaggtcac

SEQ ID NO: 60081 - DNA, 19 bp, Homo sapiens
ggcaccggcactccatcct

SEQ ID NO: 60082 - DNA, 16 bp, Homo sapiens
agggggtggagccacc

SEQ ID NO: 60083 - DNA, 24 bp, Homo sapiens
tacctggccctgctcatctttaca

SEQ ID NO: 60084 - DNA, 24 bp, Homo sapiens
acaatgtgatagaagaagaaatcc

SEQ ID NO: 60085 - DNA, 22 bp, Homo sapiens
gggctgtcatgaggctctgaca

SEQ ID NO: 60086 - DNA, 21 bp, Homo sapiens
gtgctttttgtttctacagac

SEQ ID NO: 60087 - DNA, 24 bp, Homo sapiens
agcacacaccataccttaaatacg

SEQ ID NO: 60088 - DNA, 24 bp, Homo sapiens
ttttaagcatagaagttctgtctg

SEQ ID NO: 60089 - DNA, 22 bp, Homo sapiens
ctcatgcacgcttctgttcaca

SEQ ID NO: 60090 - DNA, 23 bp, Homo sapiens
tggtatatttttctgcctcctca

SEQ ID NO: 60091 - DNA, 24 bp, Homo sapiens
cagactttctggattaactggttt

SEQ ID NO: 60092 - DNA, 16 bp, Homo sapiens
ggagaggacgcctgcc

SEQ ID NO: 60093 - DNA, 23 bp, Homo sapiens
gctgctgtttaattactctttgc

SEQ ID NO: 60094 - DNA, 24 bp, Homo sapiens
gtgtctgtgctgggcatcttcaac

SEQ ID NO: 60095 - DNA, 18 bp, Homo sapiens
gttggtgcctccaagagg

SEQ ID NO: 60096 - DNA, 16 bp, Homo sapiens
cggagctgctggcggg

SEQ ID NO: 60097 - DNA, 24 bp, Homo sapiens
ctgctctgggcacttacactgggg

SEQ ID NO: 60098 - DNA, 20 bp, Homo sapiens
agggggacagtcttcatacc

SEQ ID NO: 60099 - DNA, 24 bp, Homo sapiens
gtacagcatgtcatccttctccag

SEQ ID NO: 60100 - DNA, 20 bp, Homo sapiens
gaaccctcagaccacgatgg

SEQ ID NO: 60101 - DNA, 24 bp, Homo sapiens
catcatggtgttcttcccgccttt

SEQ ID NO: 60102 - DNA, 22 bp, Homo sapiens
cttgatcgtcctttcctgaagt

SEQ ID NO: 60103 - DNA, 24 bp, Homo sapiens
tccccatctccaacctttataccc

SEQ ID NO: 60104 - DNA, 23 bp, Homo sapiens
cgtggaggtggggagcgagggcc

SEQ ID NO: 60105 - DNA, 17 bp, Homo sapiens
gcaccccaggaacatgc

SEQ ID NO: 60106 - DNA, 16 bp, Homo sapiens
catggccccacccagg

SEQ ID NO: 60107 - DNA, 17 bp, Homo sapiens
tcccctccccctcttcc

SEQ ID NO: 60108 - DNA, 18 bp, Homo sapiens
ctgcctctcctcttgtgc

SEQ ID NO: 60109 - DNA, 17 bp, Homo sapiens
gatgcctttcagggggc

SEQ ID NO: 60110 - DNA, 20 bp, Homo sapiens
gagcagatatctcagaggcc

SEQ ID NO: 60111 - DNA, 17 bp, Homo sapiens
gcgttgttgcactgtgc

SEQ ID NO: 60112 - DNA, 22 bp, Homo sapiens
gattggtgtttcttgccctgac

SEQ ID NO: 60113 - DNA, 24 bp, Homo sapiens
atgtggtgaacagccaatgaactg

SEQ ID NO: 60114 - DNA, 21 bp, Homo sapiens
ggaaaattcaccaagacagac

SEQ ID NO: 60115 - DNA, 23 bp, Homo sapiens
atactccttctaaagactgtttc

SEQ ID NO: 60116 - DNA, 18 bp, Homo sapiens
acccaaatcaagaaacct

SEQ ID NO: 60117 - DNA, 24 bp, Homo sapiens
gcaccaatctttcttctgcctttt

SEQ ID NO: 60118 - DNA, 16 bp, Homo sapiens
cccgtggggtcttctc

SEQ ID NO: 60119 - DNA, 22 bp, Homo sapiens
ttacctgtagggtcaaagatgg

SEQ ID NO: 60120 - DNA, 16 bp, Homo sapiens
tctctcccacctccct

SEQ ID NO: 60121 - DNA, 24 bp, Homo sapiens
ctccttgtttgggtttctctcaaa

SEQ ID NO: 60122 - DNA, 16 bp, Homo sapiens
cccccaacccccatgg

SEQ ID NO: 60123 - DNA, 19 bp, Homo sapiens
tatctccatcagcctggac

SEQ ID NO: 60124 - DNA, 21 bp, Homo sapiens
ggtgagagatgatttcacact

SEQ ID NO: 60125 - DNA, 21 bp, Homo sapiens
caggttctggctgcagatggt

SEQ ID NO: 60126 - DNA, 17 bp, Homo sapiens
ggacaatgaggccatgg

SEQ ID NO: 60127 - DNA, 20 bp, Homo sapiens
gctgaatcctaagacaagac

SEQ ID NO: 60128 - DNA, 24 bp, Homo sapiens
tgaactcactggtgaggtagcagt

SEQ ID NO: 60129 - DNA, 20 bp, Homo sapiens
cgagcctttttcaaactcac

SEQ ID NO: 60130 - DNA, 17 bp, Homo sapiens
ggatccttgtccccacc

SEQ ID NO: 60131 - DNA, 24 bp, Homo sapiens
gatggtgttgcctctcctcgatgt

SEQ ID NO: 60132 - DNA, 16 bp, Homo sapiens
ggtgtgtgggcacatc

SEQ ID NO: 60133 - DNA, 16 bp, Homo sapiens
ggcaggatggtctggc

SEQ ID NO: 60134 - DNA, 21 bp, Homo sapiens
ggaaggcatgatttctttttc

SEQ ID NO: 60135 - DNA, 19 bp, Homo sapiens
cattcgtggagtcttgagg

SEQ ID NO: 60136 - DNA, 24 bp, Homo sapiens
gatgcatagagcctacctgtcaga

SEQ ID NO: 60137 - DNA, 20 bp, Homo sapiens
cagcaatcataccttgtcct

SEQ ID NO: 60138 - DNA, 22 bp, Homo sapiens
tcaagccttcataggcggcgac

SEQ ID NO: 60139 - DNA, 22 bp, Homo sapiens
actcagctgagtctcttataag

SEQ ID NO: 60140 - DNA, 22 bp, Homo sapiens
cactagcaccaaggacacgttt

SEQ ID NO: 60141 - DNA, 19 bp, Homo sapiens
tgaaagcctcttggtgaga

SEQ ID NO: 60142 - DNA, 16 bp, Homo sapiens
accgatcaagagctct

SEQ ID NO: 60143 - DNA, 18 bp, Homo sapiens
gtggccctcttgttctct

SEQ ID NO: 60144 - DNA, 23 bp, Homo sapiens
tattgctcagtaccactgatgtc

SEQ ID NO: 60145 - DNA, 16 bp, Homo sapiens
tgggttccggaagtga

SEQ ID NO: 60146 - DNA, 17 bp, Homo sapiens
tcctgataatggcgtgc

SEQ ID NO: 60147 - DNA, 24 bp, Homo sapiens
gagaaacaaggagacttgcctcac

SEQ ID NO: 60148 - DNA, 24 bp, Homo sapiens
aaagatatccctaggctagataag

SEQ ID NO: 60149 - DNA, 23 bp, Homo sapiens
ggtcactgtagcactttcagaag

SEQ ID NO: 60150 - DNA, 16 bp, Homo sapiens
ttgttgacaggtgggc

SEQ ID NO: 60151 - DNA, 18 bp, Homo sapiens
ctaaaggatgcccggttc

SEQ ID NO: 60152 - DNA, 23 bp, Homo sapiens
taggcaagctttggtcagacacc

SEQ ID NO: 60153 - DNA, 24 bp, Homo sapiens
tgaagatggcttctgtggctggac

SEQ ID NO: 60154 - DNA, 24 bp, Homo sapiens
ccctgagtctcccatctgtctatg

SEQ ID NO: 60155 - DNA, 16 bp, Homo sapiens
tgcctctctgctctct

SEQ ID NO: 60156 - DNA, 21 bp, Homo sapiens
agtagtaccttggtggtcctg

SEQ ID NO: 60157 - DNA, 22 bp, Homo sapiens
catgcctggctaattcgacttg

SEQ ID NO: 60158 - DNA, 19 bp, Homo sapiens
ggtgacagtgtgccttggg

SEQ ID NO: 60159 - DNA, 18 bp, Homo sapiens
agtcatccagcattctgg

SEQ ID NO: 60160 - DNA, 17 bp, Homo sapiens
caggcagtttccctatg

SEQ ID NO: 60161 - DNA, 17 bp, Homo sapiens
atgagagccagatgtgc

SEQ ID NO: 60162 - DNA, 23 bp, Homo sapiens
tgtggctttgccatgagaggagt

SEQ ID NO: 60163 - DNA, 23 bp, Homo sapiens
ttggaatgggacagtcctccagc

SEQ ID NO: 60164 - DNA, 17 bp, Homo sapiens
cctgggataatggggac

SEQ ID NO: 60165 - DNA, 18 bp, Homo sapiens
tgctctccaggaacatcc

SEQ ID NO: 60166 - DNA, 17 bp, Homo sapiens
ccccatctactcacggc

SEQ ID NO: 60167 - DNA, 16 bp, Homo sapiens
ccatcaggccagctgc

SEQ ID NO: 60168 - DNA, 17 bp, Homo sapiens
gaagtcacaggcctgcc

SEQ ID NO: 60169 - DNA, 18 bp, Homo sapiens
ccttggagtgtgaatggc

SEQ ID NO: 60170 - DNA, 22 bp, Homo sapiens
ctctgcagggccatcttggagc

SEQ ID NO: 60171 - DNA, 20 bp, Homo sapiens
cagcccactctagacttttc

SEQ ID NO: 60172 - DNA, 17 bp, Homo sapiens
aacccatttcgagtggc

SEQ ID NO: 60173 - DNA, 24 bp, Homo sapiens
ggttgcaggttattgacacatcta

SEQ ID NO: 60174 - DNA, 19 bp, Homo sapiens
ctcctctgttttccaatgc

SEQ ID NO: 60175 - DNA, 21 bp, Homo sapiens
ccttcactgcagttcttcagg

SEQ ID NO: 60176 - DNA, 17 bp, Homo sapiens
ggacatgaccctgtcca

SEQ ID NO: 60177 - DNA, 22 bp, Homo sapiens
ctggagatgtattccagggcca

SEQ ID NO: 60178 - DNA, 16 bp, Homo sapiens
gccacttcgagtccca

SEQ ID NO: 60179 - DNA, 17 bp, Homo sapiens
cctgatgcccactccag

SEQ ID NO: 60180 - DNA, 24 bp, Homo sapiens
tcaacctggacctaccgattaaag

SEQ ID NO: 60181 - DNA, 19 bp, Homo sapiens
gcagccctctggaaggtac

SEQ ID NO: 60182 - DNA, 24 bp, Homo sapiens
ctctggaaatgtgtaaccaaaagc

SEQ ID NO: 60183 - DNA, 16 bp, Homo sapiens
gtggatgaggagcagc

SEQ ID NO: 60184 - DNA, 24 bp, Homo sapiens
gagaagtacttacccatgcttccc

SEQ ID NO: 60185 - DNA, 21 bp, Homo sapiens
ctctttccaggctcctttctc

SEQ ID NO: 60186 - DNA, 17 bp, Homo sapiens
cagctgggcaatgtacc

SEQ ID NO: 60187 - DNA, 18 bp, Homo sapiens
cttgccacagagctactg

SEQ ID NO: 60188 - DNA, 17 bp, Homo sapiens
tgtgcagtgctcactgc

SEQ ID NO: 60189 - DNA, 20 bp, Homo sapiens
gcagagaaggagataatggc

SEQ ID NO: 60190 - DNA, 20 bp, Homo sapiens
tcagctgaggtgttgagaag

SEQ ID NO: 60191 - DNA, 19 bp, Homo sapiens
gggcagagcgttctaagga

SEQ ID NO: 60192 - DNA, 23 bp, Homo sapiens
tcacagatattaaaagcaggttt

SEQ ID NO: 60193 - DNA, 16 bp, Homo sapiens
cctggcgccgcatccc

SEQ ID NO: 60194 - DNA, 24 bp, Homo sapiens
atttcaaacagaaataggtattcc

SEQ ID NO: 60195 - DNA, 19 bp, Homo sapiens
tttgacttcccctgtgagc

SEQ ID NO: 60196 - DNA, 22 bp, Homo sapiens
ctctcccttacctctgggcatc

SEQ ID NO: 60197 - DNA, 22 bp, Homo sapiens
cacgtttgggaaatggtttttt

SEQ ID NO: 60198 - DNA, 18 bp, Homo sapiens
gcctcctcggaggggatg

SEQ ID NO: 60199 - DNA, 18 bp, Homo sapiens
caaaggatgtggggagat

SEQ ID NO: 60200 - DNA, 22 bp, Homo sapiens
atgcagtggaggggaatactcc

SEQ ID NO: 60201 - DNA, 20 bp, Homo sapiens
gtcccttttcaccaatacag

SEQ ID NO: 60202 - DNA, 24 bp, Homo sapiens
gggagacagagggctcagaaagac

SEQ ID NO: 60203 - DNA, 23 bp, Homo sapiens
tctcctgattattttacatggaa

SEQ ID NO: 60204 - DNA, 23 bp, Homo sapiens
cactatgaatcccaaactgaaac

SEQ ID NO: 60205 - DNA, 17 bp, Homo sapiens
tgtccaggtcatagctc

SEQ ID NO: 60206 - DNA, 24 bp, Homo sapiens
ctcaagtaaatattaaacatatac

SEQ ID NO: 60207 - DNA, 23 bp, Homo sapiens
actgatattgagtgacagctaaa

SEQ ID NO: 60208 - DNA, 23 bp, Homo sapiens
aggagtctttcattatccaggtg

SEQ ID NO: 60209 - DNA, 24 bp, Homo sapiens
gctcaattttttccccctcatctt

SEQ ID NO: 60210 - DNA, 23 bp, Homo sapiens
gcatgtttgttggtgattccaag

SEQ ID NO: 60211 - DNA, 17 bp, Homo sapiens
agccccgccttctcttc

SEQ ID NO: 60212 - DNA, 17 bp, Homo sapiens
cgatgaagcagagctga

SEQ ID NO: 60213 - DNA, 23 bp, Homo sapiens
cctgatgcccgagaagaaggcgt

SEQ ID NO: 60214 - DNA, 24 bp, Homo sapiens
tttaatggttgcatatcaatgtga

SEQ ID NO: 60215 - DNA, 16 bp, Homo sapiens
gctgttcagttggtgg

SEQ ID NO: 60216 - DNA, 20 bp, Homo sapiens
ctcaccagtcccgaagatct

SEQ ID NO: 60217 - DNA, 22 bp, Homo sapiens
atcttggagggttgcgtcgggc

SEQ ID NO: 60218 - DNA, 17 bp, Homo sapiens
ccttccctctctgccca

SEQ ID NO: 60219 - DNA, 16 bp, Homo sapiens
cgtgcgcaagctccgg

SEQ ID NO: 60220 - DNA, 17 bp, Homo sapiens
ccttcgccttggcgaat

SEQ ID NO: 60221 - DNA, 16 bp, Homo sapiens
ggttcaccagccccgg

SEQ ID NO: 60222 - DNA, 22 bp, Homo sapiens
ccacagccgcctccccgggggg

SEQ ID NO: 60223 - DNA, 17 bp, Homo sapiens
tagctctggactgcgcc

SEQ ID NO: 60224 - DNA, 17 bp, Homo sapiens
ccaactgcttggcacgc

SEQ ID NO: 60225 - DNA, 16 bp, Homo sapiens
tactgctgccaccatc

SEQ ID NO: 60226 - DNA, 24 bp, Homo sapiens
cctggacagcgtccgggcctctgc

SEQ ID NO: 60227 - DNA, 17 bp, Homo sapiens
agagtctggcagttgac

SEQ ID NO: 60228 - DNA, 18 bp, Homo sapiens
gcaacctgagcagcgggg

SEQ ID NO: 60229 - DNA, 16 bp, Homo sapiens
tccccagctgcggggc

SEQ ID NO: 60230 - DNA, 18 bp, Homo sapiens
gccagccttcagctccga

SEQ ID NO: 60231 - DNA, 17 bp, Homo sapiens
gctgctgctttccacgg

SEQ ID NO: 60232 - DNA, 20 bp, Homo sapiens
gagcgagggcaccacgaagt

SEQ ID NO: 60233 - DNA, 17 bp, Homo sapiens
cagtgtaaacggcctcc

SEQ ID NO: 60234 - DNA, 16 bp, Homo sapiens
gctcccggggctgcag

SEQ ID NO: 60235 - DNA, 20 bp, Homo sapiens
taccaaggactgttcagagc

SEQ ID NO: 60236 - DNA, 16 bp, Homo sapiens
cggagcccacagctgc

SEQ ID NO: 60237 - DNA, 16 bp, Homo sapiens
agacttgcgcgcacgc

SEQ ID NO: 60238 - DNA, 17 bp, Homo sapiens
gaccccctcgtcgctgt

SEQ ID NO: 60239 - DNA, 18 bp, Homo sapiens
ctgagctgcggcaaaagt

SEQ ID NO: 60240 - DNA, 17 bp, Homo sapiens
gctcctcgtgtcccact

SEQ ID NO: 60241 - DNA, 18 bp, Homo sapiens
tgccccccagcccagccc

SEQ ID NO: 60242 - DNA, 17 bp, Homo sapiens
cgcccctcttctcggcg

SEQ ID NO: 60243 - DNA, 17 bp, Homo sapiens
gcggcctcttggtcccc

SEQ ID NO: 60244 - DNA, 24 bp, Homo sapiens
tcgggcttctgcttgccgcggcga

SEQ ID NO: 60245 - DNA, 22 bp, Homo sapiens
gtttcctaccgcgcggagggcc

SEQ ID NO: 60246 - DNA, 21 bp, Homo sapiens
agttttcacagacacattcta

SEQ ID NO: 60247 - DNA, 25 bp, Homo sapiens
agctgaaaaataaaacattcagaac

SEQ ID NO: 60248 - DNA, 19 bp, Homo sapiens
actgaagtacactggcatt

SEQ ID NO: 60249 - DNA, 22 bp, Homo sapiens
ttattacaatataacttagctg

SEQ ID NO: 60250 - DNA, 21 bp, Homo sapiens
aagcttacaggtaattaggat

SEQ ID NO: 60251 - DNA, 29 bp, Homo sapiens
taaagtagattttttttttaattttctag

SEQ ID NO: 60252 - DNA, 21 bp, Homo sapiens
gccaataaaactctttccaac

SEQ ID NO: 60253 - DNA, 22 bp, Homo sapiens
tgtgaataataatcgtcaatgc

SEQ ID NO: 60254 - DNA, 23 bp, Homo sapiens
ccagggtcaaagattatttgaaa

SEQ ID NO: 60255 - DNA, 21 bp, Homo sapiens
ccattcatttctgccttcatc

SEQ ID NO: 60256 - DNA, 20 bp, Homo sapiens
caaagtaagtgtgggaacac

SEQ ID NO: 60257 - DNA, 16 bp, Homo sapiens
ttgttctggagggccc

SEQ ID NO: 60258 - DNA, 23 bp, Homo sapiens
attttttttttcccgtaatcatg

SEQ ID NO: 60259 - DNA, 16 bp, Homo sapiens
cgttgcactgcttggc

SEQ ID NO: 60260 - DNA, 24 bp, Homo sapiens
tttctttttcagtggctgccaaat

SEQ ID NO: 60261 - DNA, 20 bp, Homo sapiens
ttcagtgtccttgtctgttc

SEQ ID NO: 60262 - DNA, 21 bp, Homo sapiens
gagaagagcaaaacctgaagg

SEQ ID NO: 60263 - DNA, 24 bp, Homo sapiens
agcatgaaaacaagtagtataggc

SEQ ID NO: 60264 - DNA, 17 bp, Homo sapiens
gagcgggctctttaagg

SEQ ID NO: 60265 - DNA, 23 bp, Homo sapiens
tgaattctaaaccatgaaatcat

SEQ ID NO: 60266 - DNA, 16 bp, Homo sapiens
ctggggtcagaagaac

SEQ ID NO: 60267 - DNA, 17 bp, Homo sapiens
agggggactggaatgag

SEQ ID NO: 60268 - DNA, 24 bp, Homo sapiens
tttttctcttgctttgtgttttag

SEQ ID NO: 60269 - DNA, 23 bp, Homo sapiens
agctactgcataaattttttttc

SEQ ID NO: 60270 - DNA, 21 bp, Homo sapiens
aactgtgcaagaatatgatgc

SEQ ID NO: 60271 - DNA, 20 bp, Homo sapiens
aggaaaatagtatggaagac

SEQ ID NO: 60272 - DNA, 22 bp, Homo sapiens
aaaaaagcatttagacttgctt

SEQ ID NO: 60273 - DNA, 19 bp, Homo sapiens
agctggatcatcattgaac

SEQ ID NO: 60274 - DNA, 21 bp, Homo sapiens
cccagaatctctgtgctattc

SEQ ID NO: 60275 - DNA, 17 bp, Homo sapiens
ccttctgaagtgcactg

SEQ ID NO: 60276 - DNA, 23 bp, Homo sapiens
ttattatgatagttgcaaaatgg

SEQ ID NO: 60277 - DNA, 27 bp, Homo sapiens
ttaaaaaatcataccaaaatactcgtg

SEQ ID NO: 60278 - DNA, 24 bp, Homo sapiens
agaccctgagctgtctgcttaaag

SEQ ID NO: 60279 - DNA, 23 bp, Homo sapiens
tggctgtccttatactcaaaaca

SEQ ID NO: 60280 - DNA, 24 bp, Homo sapiens
ttttttaatacagattttaaattc

SEQ ID NO: 60281 - DNA, 19 bp, Homo sapiens
tacccagatccgaaactgt

SEQ ID NO: 60282 - DNA, 22 bp, Homo sapiens
actggatccaaaatttatcacg

SEQ ID NO: 60283 - DNA, 25 bp, Homo sapiens
tttgaaccagatcaatagtgataac

SEQ ID NO: 60284 - DNA, 20 bp, Homo sapiens
tggaaaggaacagtgatgca

SEQ ID NO: 60285 - DNA, 18 bp, Homo sapiens
agccacatcagctatgtc

SEQ ID NO: 60286 - DNA, 29 bp, Homo sapiens
tgattctcaattaatgttattttcaaatg

SEQ ID NO: 60287 - DNA, 23 bp, Homo sapiens
tgatagactacattcctgaacac

SEQ ID NO: 60288 - DNA, 25 bp, Homo sapiens
ttttttccccagtatgagaataatg

SEQ ID NO: 60289 - DNA, 20 bp, Homo sapiens
ttggttgatctgtaagtgga

SEQ ID NO: 60290 - DNA, 20 bp, Homo sapiens
aaactcagaatgatgtggac

SEQ ID NO: 60291 - DNA, 18 bp, Homo sapiens
acaagcaagatgcatgtg

SEQ ID NO: 60292 - DNA, 20 bp, Homo sapiens
tgaaacaaggattcaccttt

SEQ ID NO: 60293 - DNA, 22 bp, Homo sapiens
attagattgttatcactaaaac

SEQ ID NO: 60294 - DNA, 17 bp, Homo sapiens
tgaccaggatccagatc

SEQ ID NO: 60295 - DNA, 22 bp, Homo sapiens
ttgtatgtaattatatgtggcc

SEQ ID NO: 60296 - DNA, 18 bp, Homo sapiens
ccagcttttagaccctgc

SEQ ID NO: 60297 - DNA, 22 bp, Homo sapiens
ccttttcaatacaggttaaagg

SEQ ID NO: 60298 - DNA, 19 bp, Homo sapiens
ccagcacaacaattccagc

SEQ ID NO: 60299 - DNA, 18 bp, Homo sapiens
tggggaacaactggatct

SEQ ID NO: 60300 - DNA, 21 bp, Homo sapiens
cccagccactattactttttc

SEQ ID NO: 60301 - DNA, 23 bp, Homo sapiens
aagcacctgaattctcaatgcag

SEQ ID NO: 60302 - DNA, 16 bp, Homo sapiens
acctgtctcagcctcc

SEQ ID NO: 60303 - DNA, 24 bp, Homo sapiens
tggttgtggtgatagcagttgttg

SEQ ID NO: 60304 - DNA, 22 bp, Homo sapiens
ctcatactttgccattctcttc

SEQ ID NO: 60305 - DNA, 23 bp, Homo sapiens
aatgtttatggatagatgttaaa

SEQ ID NO: 60306 - DNA, 20 bp, Homo sapiens
gagattcaacagggcctttc

SEQ ID NO: 60307 - DNA, 22 bp, Homo sapiens
gcatatatgtctgtttagataa

SEQ ID NO: 60308 - DNA, 20 bp, Homo sapiens
agggactccagtataactga

SEQ ID NO: 60309 - DNA, 20 bp, Homo sapiens
ctcaggttatttccagaaag

SEQ ID NO: 60310 - DNA, 23 bp, Homo sapiens
tcacgcaagaatatttaggtaag

SEQ ID NO: 60311 - DNA, 21 bp, Homo sapiens
attgagttccctatgcatctc

SEQ ID NO: 60312 - DNA, 25 bp, Homo sapiens
ataaatgtgggaaaaaattatcttg

SEQ ID NO: 60313 - DNA, 21 bp, Homo sapiens
tttgtaatttgtgtccatttg

SEQ ID NO: 60314 - DNA, 24 bp, Homo sapiens
actattttcagaatgaacaaaaga

SEQ ID NO: 60315 - DNA, 22 bp, Homo sapiens
atgatgttaaactaacaaactc

SEQ ID NO: 60316 - DNA, 23 bp, Homo sapiens
tcagataaaggagatgggtgaga

SEQ ID NO: 60317 - DNA, 16 bp, Homo sapiens
ccagtttcaagctgct

SEQ ID NO: 60318 - DNA, 16 bp, Homo sapiens
ccctctccgactgcct

SEQ ID NO: 60319 - DNA, 24 bp, Homo sapiens
agcaggccatataaatgttttcga

SEQ ID NO: 60320 - DNA, 23 bp, Homo sapiens
atcagaaggaaacttgaaaacaa

SEQ ID NO: 60321 - DNA, 22 bp, Homo sapiens
taacaggcagcagtaaggaggc

SEQ ID NO: 60322 - DNA, 18 bp, Homo sapiens
tttccggcaggcactgag

SEQ ID NO: 60323 - DNA, 24 bp, Homo sapiens
cagtttgcttagaaagaaaaaggg

SEQ ID NO: 60324 - DNA, 17 bp, Homo sapiens
gcaaggcttgaagcccc

SEQ ID NO: 60325 - DNA, 23 bp, Homo sapiens
ggaggaggaaggctagttttttt

SEQ ID NO: 60326 - DNA, 20 bp, Homo sapiens
ctaggtcgcgcggaaacccg

SEQ ID NO: 60327 - DNA, 18 bp, Homo sapiens
tccgggcacattacgagc

SEQ ID NO: 60328 - DNA, 16 bp, Homo sapiens
gacgcggcccagcttc

SEQ ID NO: 60329 - DNA, 24 bp, Homo sapiens
cctacccttgcatacaccccaccc

SEQ ID NO: 60330 - DNA, 18 bp, Homo sapiens
agcttccagggctgcgtt

SEQ ID NO: 60331 - DNA, 19 bp, Homo sapiens
tctactaaggatgcgcgtc

SEQ ID NO: 60332 - DNA, 16 bp, Homo sapiens
tgtttcccgcctcccc

SEQ ID NO: 60333 - DNA, 19 bp, Homo sapiens
taaagtcaccagcgtgcgc

SEQ ID NO: 60334 - DNA, 19 bp, Homo sapiens
accgccatgtcgaaacctc

SEQ ID NO: 60335 - DNA, 18 bp, Homo sapiens
ctcccacccaccgaaacg

SEQ ID NO: 60336 - DNA, 17 bp, Homo sapiens
acgaagccgacctcggc

SEQ ID NO: 60337 - DNA, 17 bp, Homo sapiens
gctcgggggacgtggga

SEQ ID NO: 60338 - DNA, 23 bp, Homo sapiens
agaagtcgccccggtcgaaaagg

SEQ ID NO: 60339 - DNA, 20 bp, Homo sapiens
attttcttcaaccaggaggt

SEQ ID NO: 60340 - DNA, 19 bp, Homo sapiens
cccctgggtcttgaacacc

SEQ ID NO: 60341 - DNA, 24 bp, Homo sapiens
gagacgctgcagttggagagcgcg

SEQ ID NO: 60342 - DNA, 17 bp, Homo sapiens
ccctccccagcacgcgc

SEQ ID NO: 60343 - DNA, 16 bp, Homo sapiens
gaccaccacagtgcgc

SEQ ID NO: 60344 - DNA, 17 bp, Homo sapiens
gagaggctgctcaccgc

SEQ ID NO: 60345 - DNA, 24 bp, Homo sapiens
ggcgaggacgcgctgctggccgcc

SEQ ID NO: 60346 - DNA, 16 bp, Homo sapiens
ggacggcggaatccgc

SEQ ID NO: 60347 - DNA, 21 bp, Homo sapiens
tggctgtatttacccaattcc

SEQ ID NO: 60348 - DNA, 17 bp, Homo sapiens
gacccctcccaaatctc

SEQ ID NO: 60349 - DNA, 23 bp, Homo sapiens
ttgatttgacaggctcatatgcg

SEQ ID NO: 60350 - DNA, 20 bp, Homo sapiens
cccacaatacatgggaattc

SEQ ID NO: 60351 - DNA, 24 bp, Homo sapiens
ggaattttgaattaatgctgaaat

SEQ ID NO: 60352 - DNA, 23 bp, Homo sapiens
actctgcagattctttgctcctt

SEQ ID NO: 60353 - DNA, 21 bp, Homo sapiens
agccatgtggaactataagtc

SEQ ID NO: 60354 - DNA, 22 bp, Homo sapiens
actgacgaaccagaagaagatc

SEQ ID NO: 60355 - DNA, 18 bp, Homo sapiens
agcagcatgaagtccagc

SEQ ID NO: 60356 - DNA, 20 bp, Homo sapiens
caatcattctccttggatgc

SEQ ID NO: 60357 - DNA, 25 bp, Homo sapiens
tgtactttttttttttttaaggagc

SEQ ID NO: 60358 - DNA, 24 bp, Homo sapiens
ttttctactcttaaaaaaataagt

SEQ ID NO: 60359 - DNA, 27 bp, Homo sapiens
tgaattttgaatcttttgtaaaagatc

SEQ ID NO: 60360 - DNA, 23 bp, Homo sapiens
ccattctactatcacaatctact

SEQ ID NO: 60361 - DNA, 17 bp, Homo sapiens
agagctggaaataaggc

SEQ ID NO: 60362 - DNA, 20 bp, Homo sapiens
ccagccaaactgcaactttt

SEQ ID NO: 60363 - DNA, 20 bp, Homo sapiens
tgtcttcaaactgagagaga

SEQ ID NO: 60364 - DNA, 20 bp, Homo sapiens
tctcaaaaaaaagagaaaac

SEQ ID NO: 60365 - DNA, 21 bp, Homo sapiens
gcggacattttaacacccaca

SEQ ID NO: 60366 - DNA, 24 bp, Homo sapiens
tttcctttttgcttataaaatttt

SEQ ID NO: 60367 - DNA, 19 bp, Homo sapiens
tcctctgtatggaatccac

SEQ ID NO: 60368 - DNA, 17 bp, Homo sapiens
cttaggcttctcctggc

SEQ ID NO: 60369 - DNA, 18 bp, Homo sapiens
aggagagcctcaagattg

SEQ ID NO: 60370 - DNA, 21 bp, Homo sapiens
gatatgtcagcttccattggt

SEQ ID NO: 60371 - DNA, 19 bp, Homo sapiens
ttccccatgtctccagcag

SEQ ID NO: 60372 - DNA, 20 bp, Homo sapiens
acaggttggagttgggtatg

SEQ ID NO: 60373 - DNA, 18 bp, Homo sapiens
tttcctaggcctggaatc

SEQ ID NO: 60374 - DNA, 24 bp, Homo sapiens
gaattccctgataatgatcagttc

SEQ ID NO: 60375 - DNA, 24 bp, Homo sapiens
attagatacaaaaaaaagagtttt

SEQ ID NO: 60376 - DNA, 19 bp, Homo sapiens
ttacccggaggagagactg

SEQ ID NO: 60377 - DNA, 23 bp, Homo sapiens
ttctaatgtccaattaaatatac

SEQ ID NO: 60378 - DNA, 22 bp, Homo sapiens
tgatcagaattcctcctctttg

SEQ ID NO: 60379 - DNA, 19 bp, Homo sapiens
tcagtgtcttgcacattgt

SEQ ID NO: 60380 - DNA, 18 bp, Homo sapiens
ccggttgaggtcctgata

SEQ ID NO: 60381 - DNA, 24 bp, Homo sapiens
agttatcaatgttataattttcat

SEQ ID NO: 60382 - DNA, 18 bp, Homo sapiens
catttctggcaatacagc

SEQ ID NO: 60383 - DNA, 24 bp, Homo sapiens
tttaaactatttctttcaaaatag

SEQ ID NO: 60384 - DNA, 29 bp, Homo sapiens
tattatatattacatatttacattatata

SEQ ID NO: 60385 - DNA, 21 bp, Homo sapiens
gctgacttttccacaaaagac

SEQ ID NO: 60386 - DNA, 23 bp, Homo sapiens
aggttttgagataaatatgacag

SEQ ID NO: 60387 - DNA, 19 bp, Homo sapiens
agagcagatgaatagtgct

SEQ ID NO: 60388 - DNA, 19 bp, Homo sapiens
ttgattaccgcagacagtg

SEQ ID NO: 60389 - DNA, 20 bp, Homo sapiens
ttgggaaggaacaccaagga

SEQ ID NO: 60390 - DNA, 21 bp, Homo sapiens
gctgaagtcaaaagtagtcag

SEQ ID NO: 60391 - DNA, 20 bp, Homo sapiens
aaatctttagaactggatcc

SEQ ID NO: 60392 - DNA, 19 bp, Homo sapiens
acctgaaaaaggttaaggg

SEQ ID NO: 60393 - DNA, 20 bp, Homo sapiens
ggttgcagtttcatcactgt

SEQ ID NO: 60394 - DNA, 26 bp, Homo sapiens
tcaatgaaaacattttttaaccattc

SEQ ID NO: 60395 - DNA, 22 bp, Homo sapiens
tccaactttggacagtttgaac

SEQ ID NO: 60396 - DNA, 24 bp, Homo sapiens
ccaagtataataatatttcaaaat

SEQ ID NO: 60397 - DNA, 23 bp, Homo sapiens
ttggatattgcagcagtcagagc

SEQ ID NO: 60398 - DNA, 19 bp, Homo sapiens
actgagagccagtggtatc

SEQ ID NO: 60399 - DNA, 21 bp, Homo sapiens
ggaactttttgtggaaatttc

SEQ ID NO: 60400 - DNA, 23 bp, Homo sapiens
cttaatccactggttaacaagtc

SEQ ID NO: 60401 - DNA, 21 bp, Homo sapiens
tttttcatggcgtagtaaggt

SEQ ID NO: 60402 - DNA, 28 bp, Homo sapiens
acgaaagtataaactaataacatacctc

SEQ ID NO: 60403 - DNA, 23 bp, Homo sapiens
tactagggttctgttgaagatac

SEQ ID NO: 60404 - DNA, 23 bp, Homo sapiens
ctgcatattacaataagtggtat

SEQ ID NO: 60405 - DNA, 17 bp, Homo sapiens
acccctcaaggacaaag

SEQ ID NO: 60406 - DNA, 22 bp, Homo sapiens
aattaccactctattactatgt

SEQ ID NO: 60407 - DNA, 24 bp, Homo sapiens
atggataagaacagaatagaggag

SEQ ID NO: 60408 - DNA, 20 bp, Homo sapiens
tcttctacaaaagcttccac

SEQ ID NO: 60409 - DNA, 23 bp, Homo sapiens
ccactgcgcccagcagattcaag

SEQ ID NO: 60410 - DNA, 20 bp, Homo sapiens
cggttaagatctgggaatcg

SEQ ID NO: 60411 - DNA, 20 bp, Homo sapiens
acgtgcttagttgataaatt

SEQ ID NO: 60412 - DNA, 21 bp, Homo sapiens
taccctgatagagtcggtaac

SEQ ID NO: 60413 - DNA, 20 bp, Homo sapiens
tttcagattgaatttagtgg

SEQ ID NO: 60414 - DNA, 21 bp, Homo sapiens
acaaaatcacttgttaccttc

SEQ ID NO: 60415 - DNA, 22 bp, Homo sapiens
agaagatttacttcgtcgattc

SEQ ID NO: 60416 - DNA, 17 bp, Homo sapiens
ggacagcacattgccaa

SEQ ID NO: 60417 - DNA, 24 bp, Homo sapiens
aaagacaagcagcaaacttacaag

SEQ ID NO: 60418 - DNA, 27 bp, Homo sapiens
actccttctcaaaaaaaaaaaaaaaag

SEQ ID NO: 60419 - DNA, 21 bp, Homo sapiens
ttatacaggctctggaaaaac

SEQ ID NO: 60420 - DNA, 21 bp, Homo sapiens
tgccaacaataatttctggtg

SEQ ID NO: 60421 - DNA, 22 bp, Homo sapiens
gtaaatagtaactttggagacc

SEQ ID NO: 60422 - DNA, 22 bp, Homo sapiens
catttcctgaaacttggagaag

SEQ ID NO: 60423 - DNA, 25 bp, Homo sapiens
atctcagtcaaaattttatgatttg

SEQ ID NO: 60424 - DNA, 23 bp, Homo sapiens
taactactgcttaaattaaaaag

SEQ ID NO: 60425 - DNA, 24 bp, Homo sapiens
tgttttactactttcttttaggaa

SEQ ID NO: 60426 - DNA, 24 bp, Homo sapiens
gctacaattagatactaaaaagaa

SEQ ID NO: 60427 - DNA, 22 bp, Homo sapiens
ttactgatcttcgttctgactt

SEQ ID NO: 60428 - DNA, 21 bp, Homo sapiens
aaaatccttttcccatctgtc

SEQ ID NO: 60429 - DNA, 23 bp, Homo sapiens
aaggttttacaaggaattcatgg

SEQ ID NO: 60430 - DNA, 22 bp, Homo sapiens
gttgtgactgaataacttatgg

SEQ ID NO: 60431 - DNA, 23 bp, Homo sapiens
gcatcttcttttccaagtcattc

SEQ ID NO: 60432 - DNA, 21 bp, Homo sapiens
gggaggaaatatttgctttat

SEQ ID NO: 60433 - DNA, 19 bp, Homo sapiens
caacctccaatgacccatt

SEQ ID NO: 60434 - DNA, 19 bp, Homo sapiens
tgtttgcaggtggaaaacc

SEQ ID NO: 60435 - DNA, 25 bp, Homo sapiens
agggaacttataaaataattctggc

SEQ ID NO: 60436 - DNA, 21 bp, Homo sapiens
tctcagtgaattaagagaaat

SEQ ID NO: 60437 - DNA, 18 bp, Homo sapiens
tgggcgatttctgtttga

SEQ ID NO: 60438 - DNA, 19 bp, Homo sapiens
gtgcagccagagatcttgg

SEQ ID NO: 60439 - DNA, 17 bp, Homo sapiens
ccagggtccaagccttg

SEQ ID NO: 60440 - DNA, 23 bp, Homo sapiens
tgaatcttttctggttagataat

SEQ ID NO: 60441 - DNA, 21 bp, Homo sapiens
ttcttccttacaggttacacg

SEQ ID NO: 60442 - DNA, 30 bp, Homo sapiens
ttttcactatttaaataattttagaattac

SEQ ID NO: 60443 - DNA, 20 bp, Homo sapiens
tttaacaccattcttctgga

SEQ ID NO: 60444 - DNA, 24 bp, Homo sapiens
actttttcttttcttcttgattat

SEQ ID NO: 60445 - DNA, 21 bp, Homo sapiens
ttagggaattaataaagggtt

SEQ ID NO: 60446 - DNA, 20 bp, Homo sapiens
gtgcacagtttggatattac

SEQ ID NO: 60447 - DNA, 21 bp, Homo sapiens
tgactcttacctgatgactac

SEQ ID NO: 60448 - DNA, 22 bp, Homo sapiens
aaactttagtactgtagatatc

SEQ ID NO: 60449 - DNA, 23 bp, Homo sapiens
acagacggactatttaacaaatg

SEQ ID NO: 60450 - DNA, 23 bp, Homo sapiens
tttggtatactcttcatttaaag

SEQ ID NO: 60451 - DNA, 20 bp, Homo sapiens
tccacttgtatttccatttt

SEQ ID NO: 60452 - DNA, 21 bp, Homo sapiens
attgacaatttctttaacaat

SEQ ID NO: 60453 - DNA, 24 bp, Homo sapiens
atatgtttcacgtagtacacattg

SEQ ID NO: 60454 - DNA, 17 bp, Homo sapiens
accaaaagccaggtgac

SEQ ID NO: 60455 - DNA, 19 bp, Homo sapiens
cgatttgcagcaaattgac

SEQ ID NO: 60456 - DNA, 19 bp, Homo sapiens
tcagaatgtaatggcttgc

SEQ ID NO: 60457 - DNA, 19 bp, Homo sapiens
gaagcccaggatgccattg

SEQ ID NO: 60458 - DNA, 21 bp, Homo sapiens
tgtgtcctactgtaacatacc

SEQ ID NO: 60459 - DNA, 23 bp, Homo sapiens
ggctaacttttgttaattttttt

SEQ ID NO: 60460 - DNA, 18 bp, Homo sapiens
cgtgagcaaagctgacaa

SEQ ID NO: 60461 - DNA, 21 bp, Homo sapiens
tggggggattaaatgtatttt

SEQ ID NO: 60462 - DNA, 20 bp, Homo sapiens
ttcttccttgtcctttctcc

SEQ ID NO: 60463 - DNA, 24 bp, Homo sapiens
tgtacattttctgtttttattttt

SEQ ID NO: 60464 - DNA, 24 bp, Homo sapiens
aggaataaatgcaatttcatcttg

SEQ ID NO: 60465 - DNA, 19 bp, Homo sapiens
gctcagctagatgctgttg

SEQ ID NO: 60466 - DNA, 23 bp, Homo sapiens
caggttttttaccagtaatgatg

SEQ ID NO: 60467 - DNA, 24 bp, Homo sapiens
gttccatatgtacgaccagccatt

SEQ ID NO: 60468 - DNA, 29 bp, Homo sapiens
atatttctactccaagattaaaaaaaaaa

SEQ ID NO: 60469 - DNA, 18 bp, Homo sapiens
ggcatgcttgtgttgaag

SEQ ID NO: 60470 - DNA, 21 bp, Homo sapiens
ttccctttctaatgttaagaa

SEQ ID NO: 60471 - DNA, 20 bp, Homo sapiens
aagataaacagatgttccac

SEQ ID NO: 60472 - DNA, 17 bp, Homo sapiens
cccatattggggcctac

SEQ ID NO: 60473 - DNA, 23 bp, Homo sapiens
gggcaggctgtggttctgccttt

SEQ ID NO: 60474 - DNA, 17 bp, Homo sapiens
ccaatttgggccatgag

SEQ ID NO: 60475 - DNA, 23 bp, Homo sapiens
tcatcagtgtacagtttaggact

SEQ ID NO: 60476 - DNA, 17 bp, Homo sapiens
gcccctactcgggctaa

SEQ ID NO: 60477 - DNA, 23 bp, Homo sapiens
cttgctttctgatataatttgtt

SEQ ID NO: 60478 - DNA, 20 bp, Homo sapiens
gcagtttccaacatttcagc

SEQ ID NO: 60479 - DNA, 24 bp, Homo sapiens
ttcgacaaactggggtgatagtac

SEQ ID NO: 60480 - DNA, 20 bp, Homo sapiens
ggacagagacatacatttct

SEQ ID NO: 60481 - DNA, 20 bp, Homo sapiens
agtgtccattgtggactgca

SEQ ID NO: 60482 - DNA, 20 bp, Homo sapiens
gacaaacattctcagatgtt

SEQ ID NO: 60483 - DNA, 23 bp, Homo sapiens
tgaaaggagtctccacgttcatg

SEQ ID NO: 60484 - DNA, 21 bp, Homo sapiens
catcaatcactcttttaagac

SEQ ID NO: 60485 - DNA, 22 bp, Homo sapiens
ttagtgctttttattgactttg

SEQ ID NO: 60486 - DNA, 18 bp, Homo sapiens
acccaaatccatcgtagg

SEQ ID NO: 60487 - DNA, 26 bp, Homo sapiens
cttcccaatgtattgtcttaattttg

SEQ ID NO: 60488 - DNA, 19 bp, Homo sapiens
tgcaaacatgcaaaaagca

SEQ ID NO: 60489 - DNA, 22 bp, Homo sapiens
ttcatgtaattatgtgcttcag

SEQ ID NO: 60490 - DNA, 25 bp, Homo sapiens
tgacatgtagattattaacagttgg

SEQ ID NO: 60491 - DNA, 24 bp, Homo sapiens
agatgaattgggaagaggaacttc

SEQ ID NO: 60492 - DNA, 19 bp, Homo sapiens
acatacctttcttcacctg

SEQ ID NO: 60493 - DNA, 19 bp, Homo sapiens
ttgcaacaaagattggtgc

SEQ ID NO: 60494 - DNA, 24 bp, Homo sapiens
aattactgatgatttcaagggtag

SEQ ID NO: 60495 - DNA, 19 bp, Homo sapiens
ccttggccaatcagatacc

SEQ ID NO: 60496 - DNA, 22 bp, Homo sapiens
ggggtaaatgggttctataaca

SEQ ID NO: 60497 - DNA, 24 bp, Homo sapiens
tgaagagaccttaactatgcttta

SEQ ID NO: 60498 - DNA, 22 bp, Homo sapiens
aatcccaaaactttgatcacag

SEQ ID NO: 60499 - DNA, 24 bp, Homo sapiens
ttattttaatgatatatttggcta

SEQ ID NO: 60500 - DNA, 19 bp, Homo sapiens
tctgtttagcacactctat

SEQ ID NO: 60501 - DNA, 22 bp, Homo sapiens
caaggtgagaaggataaattcc

SEQ ID NO: 60502 - DNA, 21 bp, Homo sapiens
tccatgatatcatatccttgc

SEQ ID NO: 60503 - DNA, 22 bp, Homo sapiens
tcacgcttccccaaatttctta

SEQ ID NO: 60504 - DNA, 19 bp, Homo sapiens
tgaaaacaaactgacaaac

SEQ ID NO: 60505 - DNA, 20 bp, Homo sapiens
gcttgctaatttccctaagc

SEQ ID NO: 60506 - DNA, 22 bp, Homo sapiens
acaacaacaaaaaaccttcatc

SEQ ID NO: 60507 - DNA, 21 bp, Homo sapiens
aggagtttcagtatattggag

SEQ ID NO: 60508 - DNA, 22 bp, Homo sapiens
agattctttgccatcaaaaaaa

SEQ ID NO: 60509 - DNA, 21 bp, Homo sapiens
gctatctggaaagagaggttt

SEQ ID NO: 60510 - DNA, 23 bp, Homo sapiens
ggacaggaactcctgaataattt

SEQ ID NO: 60511 - DNA, 28 bp, Homo sapiens
tctaaaaatatgaaaaataaaaaaaaaa

SEQ ID NO: 60512 - DNA, 20 bp, Homo sapiens
actttattgtgatgttttct

SEQ ID NO: 60513 - DNA, 20 bp, Homo sapiens
tgtcactgtctaacatgact

SEQ ID NO: 60514 - DNA, 25 bp, Homo sapiens
ttattcgtgaaatgatttcatttac

SEQ ID NO: 60515 - DNA, 20 bp, Homo sapiens
catgtgtttcagcaaggtga

SEQ ID NO: 60516 - DNA, 22 bp, Homo sapiens
agcttatcaatattaccttcat

SEQ ID NO: 60517 - DNA, 22 bp, Homo sapiens
ccctttactgaaatgtcagaag

SEQ ID NO: 60518 - DNA, 21 bp, Homo sapiens
gcactgacagttaacactatg

SEQ ID NO: 60519 - DNA, 22 bp, Homo sapiens
agtaatagcaaagaataatagc

SEQ ID NO: 60520 - DNA, 26 bp, Homo sapiens
ctttgaaaatgtcctcaaagtaaaat

SEQ ID NO: 60521 - DNA, 22 bp, Homo sapiens
ggcgaggcgcctgttgattggc

SEQ ID NO: 60522 - DNA, 18 bp, Homo sapiens
ggccttgttggcatcact

SEQ ID NO: 60523 - DNA, 22 bp, Homo sapiens
cagatttcccgccagcaggagc

SEQ ID NO: 60524 - DNA, 19 bp, Homo sapiens
aaggagaggccccgggggc

SEQ ID NO: 60525 - DNA, 19 bp, Homo sapiens
cagaacggttgggccttgc

SEQ ID NO: 60526 - DNA, 16 bp, Homo sapiens
gcgccaagggcctggg

SEQ ID NO: 60527 - DNA, 19 bp, Homo sapiens
ttccccaagtctccggcgc

SEQ ID NO: 60528 - DNA, 17 bp, Homo sapiens
ggcgctaccgatctccg

SEQ ID NO: 60529 - DNA, 23 bp, Homo sapiens
aggcggccgtgccgccgctgccc

SEQ ID NO: 60530 - DNA, 16 bp, Homo sapiens
agcgccccgccgctat

SEQ ID NO: 60531 - DNA, 24 bp, Homo sapiens
ctggagcgaggctgggcctgggcc

SEQ ID NO: 60532 - DNA, 24 bp, Homo sapiens
ccgagcccagggccaggccgtgca

SEQ ID NO: 60533 - DNA, 19 bp, Homo sapiens
caacggagggctgcggaga

SEQ ID NO: 60534 - DNA, 20 bp, Homo sapiens
aatgctccagactcgacccc

SEQ ID NO: 60535 - DNA, 24 bp, Homo sapiens
atgacttgaatatctgactttaaa

SEQ ID NO: 60536 - DNA, 16 bp, Homo sapiens
gacaaggccaccaggg

SEQ ID NO: 60537 - DNA, 23 bp, Homo sapiens
gccagaagacttggaattgttta

SEQ ID NO: 60538 - DNA, 20 bp, Homo sapiens
tgaacacggactgatttccc

SEQ ID NO: 60539 - DNA, 24 bp, Homo sapiens
ctaagttatgtatttccttttggc

SEQ ID NO: 60540 - DNA, 20 bp, Homo sapiens
tggctttaaaagccttttgc

SEQ ID NO: 60541 - DNA, 18 bp, Homo sapiens
gatggagggttacccctg

SEQ ID NO: 60542 - DNA, 21 bp, Homo sapiens
cattcatccgcgagaaaggga

SEQ ID NO: 60543 - DNA, 26 bp, Homo sapiens
tactggggtaaaatacacttaatttc

SEQ ID NO: 60544 - DNA, 18 bp, Homo sapiens
aacaaggggctgggttag

SEQ ID NO: 60545 - DNA, 23 bp, Homo sapiens
accatgttacatccctttcccat

SEQ ID NO: 60546 - DNA, 19 bp, Homo sapiens
cttctgggcttcctttgat

SEQ ID NO: 60547 - DNA, 24 bp, Homo sapiens
cacctggcatatatatattttaag

SEQ ID NO: 60548 - DNA, 16 bp, Homo sapiens
tctgcacgttgcattg

SEQ ID NO: 60549 - DNA, 21 bp, Homo sapiens
cttgaactgctgggattacag

SEQ ID NO: 60550 - DNA, 19 bp, Homo sapiens
tctggctctgagggctcat

SEQ ID NO: 60551 - DNA, 24 bp, Homo sapiens
acatttctttctaggttcaaaatc

SEQ ID NO: 60552 - DNA, 23 bp, Homo sapiens
ccctaacataaataacaactgaa

SEQ ID NO: 60553 - DNA, 21 bp, Homo sapiens
cctgaaatactgagagcaatg

SEQ ID NO: 60554 - DNA, 28 bp, Homo sapiens
catatacacacacatatataaaacaagg

SEQ ID NO: 60555 - DNA, 19 bp, Homo sapiens
ggcttgaattggcagtttg

SEQ ID NO: 60556 - DNA, 17 bp, Homo sapiens
agtccagggaactacag

SEQ ID NO: 60557 - DNA, 16 bp, Homo sapiens
gttgtgcctacctgcc

SEQ ID NO: 60558 - DNA, 25 bp, Homo sapiens
tcatgtaattcatcgaatactgtac

SEQ ID NO: 60559 - DNA, 18 bp, Homo sapiens
gctgtacttcctcttcac

SEQ ID NO: 60560 - DNA, 24 bp, Homo sapiens
aagtcaaaaaatcataagttgaac

SEQ ID NO: 60561 - DNA, 21 bp, Homo sapiens
tctcagaatctgatatgaccc

SEQ ID NO: 60562 - DNA, 24 bp, Homo sapiens
ttttaaatactctttccttgcctg

SEQ ID NO: 60563 - DNA, 19 bp, Homo sapiens
ccttcctccttagtgtctg

SEQ ID NO: 60564 - DNA, 24 bp, Homo sapiens
aagataatgaaattgagagtgaag

SEQ ID NO: 60565 - DNA, 17 bp, Homo sapiens
gctgttcaggccttcac

SEQ ID NO: 60566 - DNA, 22 bp, Homo sapiens
gaagtagccgccaaataaaaaa

SEQ ID NO: 60567 - DNA, 22 bp, Homo sapiens
agcttttccttttaagagagcc

SEQ ID NO: 60568 - DNA, 24 bp, Homo sapiens
gtggctctgatgtggaatttaagc

SEQ ID NO: 60569 - DNA, 22 bp, Homo sapiens
ttggtttctgatgaaatgctag

SEQ ID NO: 60570 - DNA, 21 bp, Homo sapiens
tggagtgggggatagtgagag

SEQ ID NO: 60571 - DNA, 18 bp, Homo sapiens
taacgtgggcttgggatt

SEQ ID NO: 60572 - DNA, 23 bp, Homo sapiens
cggaagagaatggtgactggaaa

SEQ ID NO: 60573 - DNA, 22 bp, Homo sapiens
cctccttaagccattctaaagt

SEQ ID NO: 60574 - DNA, 21 bp, Homo sapiens
cctcagccaccaaacaagcaa

SEQ ID NO: 60575 - DNA, 21 bp, Homo sapiens
tgtagatgcatcaaaatcggg

SEQ ID NO: 60576 - DNA, 24 bp, Homo sapiens
tttctctgcccctcaaaattctga

SEQ ID NO: 60577 - DNA, 21 bp, Homo sapiens
accacttcctcatcccaggag

SEQ ID NO: 60578 - DNA, 21 bp, Homo sapiens
gtcgccctactgtttggtatc

SEQ ID NO: 60579 - DNA, 23 bp, Homo sapiens
gctcataaaatttccccaccttg

SEQ ID NO: 60580 - DNA, 20 bp, Homo sapiens
cacaggaggaggcctgatca

SEQ ID NO: 60581 - DNA, 19 bp, Homo sapiens
tttcatgaataccagcccc

SEQ ID NO: 60582 - DNA, 22 bp, Homo sapiens
aggatttcctcaattcttgtac

SEQ ID NO: 60583 - DNA, 18 bp, Homo sapiens
gggaatctgaataacggc

SEQ ID NO: 60584 - DNA, 24 bp, Homo sapiens
ttgatcttgtcatctgttacaagg

SEQ ID NO: 60585 - DNA, 20 bp, Homo sapiens
gcctccatcatttctggagt

SEQ ID NO: 60586 - DNA, 20 bp, Homo sapiens
attggagtcagtgaactggg

SEQ ID NO: 60587 - DNA, 16 bp, Homo sapiens
tccctcctcaccactc

SEQ ID NO: 60588 - DNA, 23 bp, Homo sapiens
tggctttcctgaaattgcatttg

SEQ ID NO: 60589 - DNA, 18 bp, Homo sapiens
ctcagagggatcaccttc

SEQ ID NO: 60590 - DNA, 21 bp, Homo sapiens
tagcacgagtggaacagactg

SEQ ID NO: 60591 - DNA, 19 bp, Homo sapiens
gtatggccagaagaatctt

SEQ ID NO: 60592 - DNA, 24 bp, Homo sapiens
tggcacatatatccaagtatgata

SEQ ID NO: 60593 - DNA, 22 bp, Homo sapiens
gaaaactgacctatgaaaaact

SEQ ID NO: 60594 - DNA, 23 bp, Homo sapiens
gggtacacagacttacagtgtgc

SEQ ID NO: 60595 - DNA, 18 bp, Homo sapiens
gtactgggggatagtgtg

SEQ ID NO: 60596 - DNA, 21 bp, Homo sapiens
gcctcaaagaaaaagaggaag

SEQ ID NO: 60597 - DNA, 23 bp, Homo sapiens
gaacaggacaatgaactctttag

SEQ ID NO: 60598 - DNA, 21 bp, Homo sapiens
ttgttgatacttcactgggaa

SEQ ID NO: 60599 - DNA, 19 bp, Homo sapiens
aaagttttggatgcatccc

SEQ ID NO: 60600 - DNA, 18 bp, Homo sapiens
taggactctagtggcaca

SEQ ID NO: 60601 - DNA, 17 bp, Homo sapiens
accccaatgccatcact

SEQ ID NO: 60602 - DNA, 22 bp, Homo sapiens
atctctcaaaggaaactaaaac

SEQ ID NO: 60603 - DNA, 18 bp, Homo sapiens
cctggtgtcaacccaatg

SEQ ID NO: 60604 - DNA, 23 bp, Homo sapiens
gtctgatacccggctcccagttt

SEQ ID NO: 60605 - DNA, 24 bp, Homo sapiens
ataaggcattttttgaggtagaag

SEQ ID NO: 60606 - DNA, 24 bp, Homo sapiens
aggaagaatattttagggaaaagc

SEQ ID NO: 60607 - DNA, 23 bp, Homo sapiens
gtcagaatccaagggaatatatt

SEQ ID NO: 60608 - DNA, 22 bp, Homo sapiens
ggtatgacttcagagtctgatt

SEQ ID NO: 60609 - DNA, 21 bp, Homo sapiens
ccattcgttgataggctttgg

SEQ ID NO: 60610 - DNA, 20 bp, Homo sapiens
ctctctgctctaggtggttg

SEQ ID NO: 60611 - DNA, 22 bp, Homo sapiens
ccttcagtagaaccatttgttc

SEQ ID NO: 60612 - DNA, 22 bp, Homo sapiens
atcaatggctaattttgaagaa

SEQ ID NO: 60613 - DNA, 18 bp, Homo sapiens
gccgcttaccaaaaggag

SEQ ID NO: 60614 - DNA, 24 bp, Homo sapiens
tacaagatctggtgctatcttcac

SEQ ID NO: 60615 - DNA, 21 bp, Homo sapiens
ggcatctagacgatcattaat

SEQ ID NO: 60616 - DNA, 23 bp, Homo sapiens
aaacaacttggagatttttctga

SEQ ID NO: 60617 - DNA, 22 bp, Homo sapiens
gcttctttagaagctctacaac

SEQ ID NO: 60618 - DNA, 23 bp, Homo sapiens
gagagggttgatacttgccatac

SEQ ID NO: 60619 - DNA, 22 bp, Homo sapiens
ttctgactcttcaggggagacc

SEQ ID NO: 60620 - DNA, 24 bp, Homo sapiens
cccactctgtaaccattatgctat

SEQ ID NO: 60621 - DNA, 21 bp, Homo sapiens
tcttcttgctgtatgtagttt

SEQ ID NO: 60622 - DNA, 21 bp, Homo sapiens
ttgtgcctgacaaaatctccg

SEQ ID NO: 60623 - DNA, 24 bp, Homo sapiens
tccatgatccctataattttacac

SEQ ID NO: 60624 - DNA, 24 bp, Homo sapiens
agaggctactcagtaaaattcata

SEQ ID NO: 60625 - DNA, 17 bp, Homo sapiens
agagagatgacctgctt

SEQ ID NO: 60626 - DNA, 23 bp, Homo sapiens
agcagggctataatgtatgaaga

SEQ ID NO: 60627 - DNA, 20 bp, Homo sapiens
gtatcccatcggttcaattc

SEQ ID NO: 60628 - DNA, 24 bp, Homo sapiens
tttctgctctggaaggattcaaag

SEQ ID NO: 60629 - DNA, 18 bp, Homo sapiens
agcctgctttgggagtaa

SEQ ID NO: 60630 - DNA, 24 bp, Homo sapiens
tgatggttttaagtctaaaatcct

SEQ ID NO: 60631 - DNA, 17 bp, Homo sapiens
caggaggctctgttcat

SEQ ID NO: 60632 - DNA, 24 bp, Homo sapiens
aaggtcgttttcctgatttgactg

SEQ ID NO: 60633 - DNA, 18 bp, Homo sapiens
accaatcccccaatagac

SEQ ID NO: 60634 - DNA, 23 bp, Homo sapiens
ggctcgaaagactggacttatta

SEQ ID NO: 60635 - DNA, 18 bp, Homo sapiens
cttctggcaaattgcgag

SEQ ID NO: 60636 - DNA, 24 bp, Homo sapiens
ctcttgctgacataagagaaaatg

SEQ ID NO: 60637 - DNA, 22 bp, Homo sapiens
ttcttttcaatagttttggtcc

SEQ ID NO: 60638 - DNA, 21 bp, Homo sapiens
aattggctgtaggaccatagt

SEQ ID NO: 60639 - DNA, 18 bp, Homo sapiens
atgcagtccttcaatgat

SEQ ID NO: 60640 - DNA, 20 bp, Homo sapiens
tcctgagaatttcaccactc

SEQ ID NO: 60641 - DNA, 17 bp, Homo sapiens
ctctacagcagactgcc

SEQ ID NO: 60642 - DNA, 21 bp, Homo sapiens
agaagggctgtaaacgatact

SEQ ID NO: 60643 - DNA, 21 bp, Homo sapiens
tggcaaacagcactacttatc

SEQ ID NO: 60644 - DNA, 18 bp, Homo sapiens
ctgaagaacggagggatg

SEQ ID NO: 60645 - DNA, 24 bp, Homo sapiens
gcatgtcaaaatatgtaccatata

SEQ ID NO: 60646 - DNA, 22 bp, Homo sapiens
taaaaattacaaggactggcag

SEQ ID NO: 60647 - DNA, 23 bp, Homo sapiens
agtttcaagtaacttaaattgct

SEQ ID NO: 60648 - DNA, 17 bp, Homo sapiens
atagttagccaggcaca

SEQ ID NO: 60649 - DNA, 20 bp, Homo sapiens
gagatcgttggactgtaatt

SEQ ID NO: 60650 - DNA, 17 bp, Homo sapiens
aaggggggggtatcttc

SEQ ID NO: 60651 - DNA, 23 bp, Homo sapiens
agacctataaaacacttaggctg

SEQ ID NO: 60652 - DNA, 24 bp, Homo sapiens
aggaataaaatcatctccaaaaaa

SEQ ID NO: 60653 - DNA, 20 bp, Homo sapiens
aacagatgttttactgtgcc

SEQ ID NO: 60654 - DNA, 17 bp, Homo sapiens
tttgccattttcctgct

SEQ ID NO: 60655 - DNA, 20 bp, Homo sapiens
gtgtcgcccagtaattctgt

SEQ ID NO: 60656 - DNA, 19 bp, Homo sapiens
agttacctgtctcataagc

SEQ ID NO: 60657 - DNA, 19 bp, Homo sapiens
ccatccttgcattacgaag

SEQ ID NO: 60658 - DNA, 23 bp, Homo sapiens
tgatcacctaagtatgttattcc

SEQ ID NO: 60659 - DNA, 20 bp, Homo sapiens
taggctgtgaggaagaggag

SEQ ID NO: 60660 - DNA, 21 bp, Homo sapiens
ctttgcttcctattaagtcac

SEQ ID NO: 60661 - DNA, 20 bp, Homo sapiens
accaaatatggggggcaagt

SEQ ID NO: 60662 - DNA, 17 bp, Homo sapiens
gctaataagccagcctg

SEQ ID NO: 60663 - DNA, 22 bp, Homo sapiens
caaatggatttcagaacagaac

SEQ ID NO: 60664 - DNA, 17 bp, Homo sapiens
tggtgtgagcctgcaca

SEQ ID NO: 60665 - DNA, 23 bp, Homo sapiens
ctagctcttacgtaagggttcat

SEQ ID NO: 60666 - DNA, 22 bp, Homo sapiens
agtgggaaacaaaaaactcacc

SEQ ID NO: 60667 - DNA, 21 bp, Homo sapiens
accttttcctccctcattcac

SEQ ID NO: 60668 - DNA, 22 bp, Homo sapiens
ggctcatatacaagaagcaaat

SEQ ID NO: 60669 - DNA, 18 bp, Homo sapiens
tccctgctgaagtgtgca

SEQ ID NO: 60670 - DNA, 22 bp, Homo sapiens
atgcagttcttaaaaagtgatg

SEQ ID NO: 60671 - DNA, 21 bp, Homo sapiens
ttggtgcctcagacagaataa

SEQ ID NO: 60672 - DNA, 19 bp, Homo sapiens
gccaataattgcatagtct

SEQ ID NO: 60673 - DNA, 20 bp, Homo sapiens
ccacaagcaccagagaatgt

SEQ ID NO: 60674 - DNA, 27 bp, Homo sapiens
catgatagctatataacctagaagatg

SEQ ID NO: 60675 - DNA, 29 bp, Homo sapiens
atttgtacaaatgtttttaagatagatag

SEQ ID NO: 60676 - DNA, 25 bp, Homo sapiens
attcatttgtgattttttttttttt

SEQ ID NO: 60677 - DNA, 25 bp, Homo sapiens
tgctctaaaaacattcatattgttt

SEQ ID NO: 60678 - DNA, 23 bp, Homo sapiens
ctgccagcatactcatgcatgca

SEQ ID NO: 60679 - DNA, 23 bp, Homo sapiens
caatatcaccttttatctccaac

SEQ ID NO: 60680 - DNA, 17 bp, Homo sapiens
cccatcaaatgttgcag

SEQ ID NO: 60681 - DNA, 18 bp, Homo sapiens
agaatgcttttagacgtg

SEQ ID NO: 60682 - DNA, 22 bp, Homo sapiens
agttgaaaataatgtacgacat

SEQ ID NO: 60683 - DNA, 22 bp, Homo sapiens
ctagcatttttgttttaattcc

SEQ ID NO: 60684 - DNA, 16 bp, Homo sapiens
aggcgcacagcaacat

SEQ ID NO: 60685 - DNA, 19 bp, Homo sapiens
acaggaagaggtactgcaa

SEQ ID NO: 60686 - DNA, 16 bp, Homo sapiens
agtgccctctcaaaaa

SEQ ID NO: 60687 - DNA, 19 bp, Homo sapiens
aagaacttgctgagactat

SEQ ID NO: 60688 - DNA, 24 bp, Homo sapiens
tcttcacattcattttctaccatg

SEQ ID NO: 60689 - DNA, 23 bp, Homo sapiens
tagtagaagattattctcaaaat

SEQ ID NO: 60690 - DNA, 23 bp, Homo sapiens
cttttaggacaagctcccttaat

SEQ ID NO: 60691 - DNA, 23 bp, Homo sapiens
tgtttttttccacaaattcggtt

SEQ ID NO: 60692 - DNA, 24 bp, Homo sapiens
tatgtcccttttgaataacttcct

SEQ ID NO: 60693 - DNA, 22 bp, Homo sapiens
atttttctttcttaaggcatgc

SEQ ID NO: 60694 - DNA, 24 bp, Homo sapiens
agttagttaccgaaataatcgtag

SEQ ID NO: 60695 - DNA, 23 bp, Homo sapiens
ctattacgttcctctataaattc

SEQ ID NO: 60696 - DNA, 21 bp, Homo sapiens
tccccttttactgtttctttg

SEQ ID NO: 60697 - DNA, 20 bp, Homo sapiens
cagcaaggcttgctaatctc

SEQ ID NO: 60698 - DNA, 30 bp, Homo sapiens
acttcccttaaaattaaaaaaaaaaaaaaa

SEQ ID NO: 60699 - DNA, 23 bp, Homo sapiens
atttgagaagatgaatcagtcac

SEQ ID NO: 60700 - DNA, 17 bp, Homo sapiens
tggacagcttcagcatc

SEQ ID NO: 60701 - DNA, 21 bp, Homo sapiens
ataactaactgaccttaagtt

SEQ ID NO: 60702 - DNA, 20 bp, Homo sapiens
agaagtcaactcaaagcttc

SEQ ID NO: 60703 - DNA, 23 bp, Homo sapiens
cactatgaaaaaacaaaaaaact

SEQ ID NO: 60704 - DNA, 30 bp, Homo sapiens
atggaaaaatggtcatttttaaaaaataaa

SEQ ID NO: 60705 - DNA, 18 bp, Homo sapiens
aaggtcaactgtagatgc

SEQ ID NO: 60706 - DNA, 27 bp, Homo sapiens
ataaccattatgtagaaggtagataag

SEQ ID NO: 60707 - DNA, 17 bp, Homo sapiens
ccccctgcttacacacc

SEQ ID NO: 60708 - DNA, 19 bp, Homo sapiens
ctctcctggggaaggtttg

SEQ ID NO: 60709 - DNA, 22 bp, Homo sapiens
cagagatggaagagaacgagcc

SEQ ID NO: 60710 - DNA, 24 bp, Homo sapiens
aaaggagctcctctgggtgcgaga

SEQ ID NO: 60711 - DNA, 16 bp, Homo sapiens
cagccaacctcctgcg

SEQ ID NO: 60712 - DNA, 16 bp, Homo sapiens
agggctggcattaggg

SEQ ID NO: 60713 - DNA, 24 bp, Homo sapiens
ctatgtcaccttcgccgttagctt

SEQ ID NO: 60714 - DNA, 23 bp, Homo sapiens
ctcatattccgccgggtagggct

SEQ ID NO: 60715 - DNA, 18 bp, Homo sapiens
aactcatcttggcccagc

SEQ ID NO: 60716 - DNA, 23 bp, Homo sapiens
gctcctcttcctctgtggggtag

SEQ ID NO: 60717 - DNA, 19 bp, Homo sapiens
ctctgtctcctagttctgc

SEQ ID NO: 60718 - DNA, 16 bp, Homo sapiens
tcctgccaccaggtag

SEQ ID NO: 60719 - DNA, 17 bp, Homo sapiens
tgggtcctcaagcatcc

SEQ ID NO: 60720 - DNA, 24 bp, Homo sapiens
gatccatggtacttcttatgctgc

SEQ ID NO: 60721 - DNA, 18 bp, Homo sapiens
ccttgcagagtctggggc

SEQ ID NO: 60722 - DNA, 23 bp, Homo sapiens
aaagccaatgacggtggcacact

SEQ ID NO: 60723 - DNA, 17 bp, Homo sapiens
tcgtcgctatgccttcg

SEQ ID NO: 60724 - DNA, 17 bp, Homo sapiens
agcttggcacatgagct

SEQ ID NO: 60725 - DNA, 21 bp, Homo sapiens
gtagtctctccgctttccttc

SEQ ID NO: 60726 - DNA, 18 bp, Homo sapiens
ctcagacaggatgccccc

SEQ ID NO: 60727 - DNA, 17 bp, Homo sapiens
ccagacagtgctgctcc

SEQ ID NO: 60728 - DNA, 21 bp, Homo sapiens
ggcttacccgttaggatatgg

SEQ ID NO: 60729 - DNA, 18 bp, Homo sapiens
ccaagtgttacttggggc

SEQ ID NO: 60730 - DNA, 24 bp, Homo sapiens
aggatgcttcggcccaaagacatc

SEQ ID NO: 60731 - DNA, 16 bp, Homo sapiens
ctcccaggactgtggt

SEQ ID NO: 60732 - DNA, 24 bp, Homo sapiens
gaaacagaaggcggcgatgacccg

SEQ ID NO: 60733 - DNA, 17 bp, Homo sapiens
tccagctaccctgcaga

SEQ ID NO: 60734 - DNA, 17 bp, Homo sapiens
gttgggctatgtgcacc

SEQ ID NO: 60735 - DNA, 19 bp, Homo sapiens
gaacaccaggcagttatgg

SEQ ID NO: 60736 - DNA, 18 bp, Homo sapiens
cccgcctggttgcacatc

SEQ ID NO: 60737 - DNA, 22 bp, Homo sapiens
cttcagccagaacacattctgt

SEQ ID NO: 60738 - DNA, 16 bp, Homo sapiens
cctcggccctgcctgg

SEQ ID NO: 60739 - DNA, 24 bp, Homo sapiens
tcacctttcagcaggtccgggtgc

SEQ ID NO: 60740 - DNA, 16 bp, Homo sapiens
gggcgccggcggagga

SEQ ID NO: 60741 - DNA, 18 bp, Homo sapiens
gcgaacaggtgcctccgt

SEQ ID NO: 60742 - DNA, 17 bp, Homo sapiens
cgactgcggagcgacgg

SEQ ID NO: 60743 - DNA, 19 bp, Homo sapiens
gatagacagggcgccaggc

SEQ ID NO: 60744 - DNA, 19 bp, Homo sapiens
tatcctccaccggactgtc

SEQ ID NO: 60745 - DNA, 16 bp, Homo sapiens
tgcctcccgggctcct

SEQ ID NO: 60746 - DNA, 21 bp, Homo sapiens
ctatcctctggtgtcaaccct

SEQ ID NO: 60747 - DNA, 20 bp, Homo sapiens
gtcctttgagttgcttcctc

SEQ ID NO: 60748 - DNA, 22 bp, Homo sapiens
tttttttttttgattcaaagac

SEQ ID NO: 60749 - DNA, 16 bp, Homo sapiens
ggcagggcaaagtctg

SEQ ID NO: 60750 - DNA, 19 bp, Homo sapiens
cagtacaatgactgggctc

SEQ ID NO: 60751 - DNA, 16 bp, Homo sapiens
gcgcttctgcacacag

SEQ ID NO: 60752 - DNA, 24 bp, Homo sapiens
atctggtataatattcagctgtca

SEQ ID NO: 60753 - DNA, 17 bp, Homo sapiens
agtgacgtgactcagac

SEQ ID NO: 60754 - DNA, 19 bp, Homo sapiens
ccagctcgaaggagccttc

SEQ ID NO: 60755 - DNA, 24 bp, Homo sapiens
tccaaaggacaaccttattaagct

SEQ ID NO: 60756 - DNA, 24 bp, Homo sapiens
caaatcttcatagatgatatactg

SEQ ID NO: 60757 - DNA, 24 bp, Homo sapiens
ttgccaaagctgtttgatggatgc

SEQ ID NO: 60758 - DNA, 20 bp, Homo sapiens
gcgactgtattgatggtctg

SEQ ID NO: 60759 - DNA, 24 bp, Homo sapiens
agtgtttttgaatacagtattttg

SEQ ID NO: 60760 - DNA, 16 bp, Homo sapiens
gcccccacctgcagtg

SEQ ID NO: 60761 - DNA, 21 bp, Homo sapiens
ccaaatgtttcaggtaaggga

SEQ ID NO: 60762 - DNA, 20 bp, Homo sapiens
tgaaggttccccacaaatag

SEQ ID NO: 60763 - DNA, 24 bp, Homo sapiens
cctcatgtatatgcaaattttcca

SEQ ID NO: 60764 - DNA, 16 bp, Homo sapiens
agcaggctcaacagag

SEQ ID NO: 60765 - DNA, 21 bp, Homo sapiens
agtgcttgaaataagcacaat

SEQ ID NO: 60766 - DNA, 22 bp, Homo sapiens
agcatgtctacgaagaaaagta

SEQ ID NO: 60767 - DNA, 21 bp, Homo sapiens
gaagttcttcctgatggtgat

SEQ ID NO: 60768 - DNA, 24 bp, Homo sapiens
agagatatagtgctcacttgatac

SEQ ID NO: 60769 - DNA, 23 bp, Homo sapiens
aaagaaaaataccagctgttctc

SEQ ID NO: 60770 - DNA, 23 bp, Homo sapiens
cttaaaaactgccatgaagaaga

SEQ ID NO: 60771 - DNA, 24 bp, Homo sapiens
tttcatacttttcttcctgttcac

SEQ ID NO: 60772 - DNA, 23 bp, Homo sapiens
aaccagttgtattacattttgtt

SEQ ID NO: 60773 - DNA, 21 bp, Homo sapiens
ggatgctggattctaaaattt

SEQ ID NO: 60774 - DNA, 24 bp, Homo sapiens
agccagaagcttttccaaaatgca

SEQ ID NO: 60775 - DNA, 22 bp, Homo sapiens
gtaactcatgttgttgttcctg

SEQ ID NO: 60776 - DNA, 22 bp, Homo sapiens
acaggcattaataaccatgaaa

SEQ ID NO: 60777 - DNA, 20 bp, Homo sapiens
ggccaaagaaatactttggc

SEQ ID NO: 60778 - DNA, 23 bp, Homo sapiens
tctcaaatccaacacttacattc

SEQ ID NO: 60779 - DNA, 19 bp, Homo sapiens
tgcctttgaagattcagat

SEQ ID NO: 60780 - DNA, 20 bp, Homo sapiens
tcaaggtactttgaactgca

SEQ ID NO: 60781 - DNA, 28 bp, Homo sapiens
aattcttaaggctaaaaaatatactgag

SEQ ID NO: 60782 - DNA, 24 bp, Homo sapiens
attacaagatgcaaagtatacagc

SEQ ID NO: 60783 - DNA, 18 bp, Homo sapiens
gcagtgggctgtcttcag

SEQ ID NO: 60784 - DNA, 24 bp, Homo sapiens
aaaggtagttctccaaaaggatca

SEQ ID NO: 60785 - DNA, 24 bp, Homo sapiens
tggtatctccttttatattaacag

SEQ ID NO: 60786 - DNA, 21 bp, Homo sapiens
tcctcacctgtactgtcaaac

SEQ ID NO: 60787 - DNA, 21 bp, Homo sapiens
agcttatatcaagtaacagtc

SEQ ID NO: 60788 - DNA, 21 bp, Homo sapiens
ctcactgagcattttctgttg

SEQ ID NO: 60789 - DNA, 22 bp, Homo sapiens
gggtgtagattcaatggaaata

SEQ ID NO: 60790 - DNA, 16 bp, Homo sapiens
acgctgcccagtgttc

SEQ ID NO: 60791 - DNA, 19 bp, Homo sapiens
agaatgaatcatcctcagc

SEQ ID NO: 60792 - DNA, 22 bp, Homo sapiens
caggaagtgctcaataattgtt

SEQ ID NO: 60793 - DNA, 23 bp, Homo sapiens
tttggtctgcggcctgtcgatta

SEQ ID NO: 60794 - DNA, 21 bp, Homo sapiens
tgttcctttcataaccaattt

SEQ ID NO: 60795 - DNA, 20 bp, Homo sapiens
agtcgagtcacacatttgac

SEQ ID NO: 60796 - DNA, 17 bp, Homo sapiens
actgagcagtggctagc

SEQ ID NO: 60797 - DNA, 22 bp, Homo sapiens
atgagttctgagtaatttattt

SEQ ID NO: 60798 - DNA, 23 bp, Homo sapiens
agcgatttcatactttcatcatc

SEQ ID NO: 60799 - DNA, 21 bp, Homo sapiens
catcatttctcctttgagttc

SEQ ID NO: 60800 - DNA, 23 bp, Homo sapiens
tcaagctgttactttcctatgga

SEQ ID NO: 60801 - DNA, 23 bp, Homo sapiens
aattttagttgtgaaagtgaaga

SEQ ID NO: 60802 - DNA, 20 bp, Homo sapiens
accgggtatcaaaatgactc

SEQ ID NO: 60803 - DNA, 19 bp, Homo sapiens
tcacacaccttgattcaag

SEQ ID NO: 60804 - DNA, 17 bp, Homo sapiens
gcacctgaaggtagtgg

SEQ ID NO: 60805 - DNA, 17 bp, Homo sapiens
acagcatttctggaggc

SEQ ID NO: 60806 - DNA, 23 bp, Homo sapiens
tgctctttcttatcacttctttc

SEQ ID NO: 60807 - DNA, 17 bp, Homo sapiens
gctgcatcgtgaagtgg

SEQ ID NO: 60808 - DNA, 20 bp, Homo sapiens
tgcctgacgtttacatttat

SEQ ID NO: 60809 - DNA, 19 bp, Homo sapiens
tgctggagcaataattcca

SEQ ID NO: 60810 - DNA, 18 bp, Homo sapiens
ctttcactctgtcagcaa

SEQ ID NO: 60811 - DNA, 17 bp, Homo sapiens
aagaccatgctggatgg

SEQ ID NO: 60812 - DNA, 25 bp, Homo sapiens
cttgatgaaaacataagttcttcag

SEQ ID NO: 60813 - DNA, 17 bp, Homo sapiens
tctagggcgacatacct

SEQ ID NO: 60814 - DNA, 23 bp, Homo sapiens
tagacaactacataactataaac

SEQ ID NO: 60815 - DNA, 21 bp, Homo sapiens
aggcagcatttaaaaaagctc

SEQ ID NO: 60816 - DNA, 19 bp, Homo sapiens
acaactaccaatggtgtcc

SEQ ID NO: 60817 - DNA, 22 bp, Homo sapiens
aactcatgaacagtagccttaa

SEQ ID NO: 60818 - DNA, 24 bp, Homo sapiens
ttgtaaaaggtattcaacagaagg

SEQ ID NO: 60819 - DNA, 19 bp, Homo sapiens
tctggcttctctggttcag

SEQ ID NO: 60820 - DNA, 18 bp, Homo sapiens
gttgcccaatatggctgt

SEQ ID NO: 60821 - DNA, 21 bp, Homo sapiens
agtaatcctatgccatttttc

SEQ ID NO: 60822 - DNA, 23 bp, Homo sapiens
ggtacaccaccttctacattaag

SEQ ID NO: 60823 - DNA, 23 bp, Homo sapiens
gatggtatttcagagtaagcatc

SEQ ID NO: 60824 - DNA, 21 bp, Homo sapiens
ggtacatcagggaggaaaaac

SEQ ID NO: 60825 - DNA, 24 bp, Homo sapiens
ctcctctatgatttcttttcacag

SEQ ID NO: 60826 - DNA, 21 bp, Homo sapiens
aaatataccattgcctgaatg

SEQ ID NO: 60827 - DNA, 20 bp, Homo sapiens
cactcgcctgtaacttgaac

SEQ ID NO: 60828 - DNA, 21 bp, Homo sapiens
atgtagaaccagcattctgag

SEQ ID NO: 60829 - DNA, 23 bp, Homo sapiens
actaatgaattcatcggacatgt

SEQ ID NO: 60830 - DNA, 24 bp, Homo sapiens
gccattagaaaataatggaaaacg

SEQ ID NO: 60831 - DNA, 18 bp, Homo sapiens
tgcatgaaggtggtgaag

SEQ ID NO: 60832 - DNA, 20 bp, Homo sapiens
atgaagtagtgactcctgag

SEQ ID NO: 60833 - DNA, 23 bp, Homo sapiens
cttaacaaaatctccactggtgc

SEQ ID NO: 60834 - DNA, 23 bp, Homo sapiens
tttggaagtttaactgaagtctc

SEQ ID NO: 60835 - DNA, 20 bp, Homo sapiens
agtctattgtgatggccacg

SEQ ID NO: 60836 - DNA, 21 bp, Homo sapiens
tggtgaaatagacttactagc

SEQ ID NO: 60837 - DNA, 20 bp, Homo sapiens
taatttttgcagaccttctc

SEQ ID NO: 60838 - DNA, 18 bp, Homo sapiens
gcaaaagctggtatcctt

SEQ ID NO: 60839 - DNA, 22 bp, Homo sapiens
tggagactctatttgctcagcc

SEQ ID NO: 60840 - DNA, 21 bp, Homo sapiens
ccaaaaatggaatttagaggc

SEQ ID NO: 60841 - DNA, 17 bp, Homo sapiens
aggagccacttgctagt

SEQ ID NO: 60842 - DNA, 21 bp, Homo sapiens
ggctaaaaaggcttctgcaag

SEQ ID NO: 60843 - DNA, 21 bp, Homo sapiens
ataacagatggttggctacag

SEQ ID NO: 60844 - DNA, 23 bp, Homo sapiens
gcaagtgctcagcaagactcata

SEQ ID NO: 60845 - DNA, 22 bp, Homo sapiens
tcaccatcttctttttctgcct

SEQ ID NO: 60846 - DNA, 24 bp, Homo sapiens
agtcagatatgttgtgagtaaagc

SEQ ID NO: 60847 - DNA, 23 bp, Homo sapiens
ttctttttttgcttttttccaga

SEQ ID NO: 60848 - DNA, 21 bp, Homo sapiens
tgcaggaaacaagaagaattc

SEQ ID NO: 60849 - DNA, 22 bp, Homo sapiens
caggaggacttggggaaacaaa

SEQ ID NO: 60850 - DNA, 24 bp, Homo sapiens
tttctttttctttttttctgtcag

SEQ ID NO: 60851 - DNA, 20 bp, Homo sapiens
tgcaggctgggtttgcactg

SEQ ID NO: 60852 - DNA, 21 bp, Homo sapiens
tgtaaacaaaattcttcggga

SEQ ID NO: 60853 - DNA, 23 bp, Homo sapiens
agggctaaaccacattttaattg

SEQ ID NO: 60854 - DNA, 18 bp, Homo sapiens
acactctaggagctgaga

SEQ ID NO: 60855 - DNA, 26 bp, Homo sapiens
ttcctaggtttatcttctttcaaatc

SEQ ID NO: 60856 - DNA, 21 bp, Homo sapiens
aatttgctacatgacaatgag

SEQ ID NO: 60857 - DNA, 21 bp, Homo sapiens
acctacagattttaaaatctg

SEQ ID NO: 60858 - DNA, 23 bp, Homo sapiens
cctggatacaagacttgaagata

SEQ ID NO: 60859 - DNA, 27 bp, Homo sapiens
tatactttatgaatatgaattcatcag

SEQ ID NO: 60860 - DNA, 20 bp, Homo sapiens
gtaattgtgtaagtgactgc

SEQ ID NO: 60861 - DNA, 18 bp, Homo sapiens
cttacctgacagctcatt

SEQ ID NO: 60862 - DNA, 22 bp, Homo sapiens
tttttggaattaaattctgctg

SEQ ID NO: 60863 - DNA, 18 bp, Homo sapiens
tcatgctgtccagttgtc

SEQ ID NO: 60864 - DNA, 22 bp, Homo sapiens
attacaattgaccattgtatgt

SEQ ID NO: 60865 - DNA, 21 bp, Homo sapiens
acacactggacatccagttcc

SEQ ID NO: 60866 - DNA, 17 bp, Homo sapiens
ttaggaggatgtgagca

SEQ ID NO: 60867 - DNA, 21 bp, Homo sapiens
acaataggttactttgcagac

SEQ ID NO: 60868 - DNA, 21 bp, Homo sapiens
tgactcaaatcttgattgttt

SEQ ID NO: 60869 - DNA, 24 bp, Homo sapiens
aacaagattacatgattgttatct

SEQ ID NO: 60870 - DNA, 16 bp, Homo sapiens
atggtagtgttgggcc

SEQ ID NO: 60871 - DNA, 19 bp, Homo sapiens
tacctacagaagatgtgct

SEQ ID NO: 60872 - DNA, 17 bp, Homo sapiens
gggagtaacagcctttc

SEQ ID NO: 60873 - DNA, 16 bp, Homo sapiens
gcgctgctcgcgttgg

SEQ ID NO: 60874 - DNA, 24 bp, Homo sapiens
tatatcccccggcaggtgctaacc

SEQ ID NO: 60875 - DNA, 17 bp, Homo sapiens
ccggatggtcgcggtgc

SEQ ID NO: 60876 - DNA, 21 bp, Homo sapiens
aagatttgaaaagattctgcc

SEQ ID NO: 60877 - DNA, 24 bp, Homo sapiens
ggcagccgaggaaccggcagccga

SEQ ID NO: 60878 - DNA, 20 bp, Homo sapiens
ccccaagaagctccgtcttt

SEQ ID NO: 60879 - DNA, 16 bp, Homo sapiens
ccgctctgcgaggagc

SEQ ID NO: 60880 - DNA, 16 bp, Homo sapiens
ggcgcgactgtgggcc

SEQ ID NO: 60881 - DNA, 16 bp, Homo sapiens
ttggccggtttcgagt

SEQ ID NO: 60882 - DNA, 18 bp, Homo sapiens
tcgttcccggagcggatc

SEQ ID NO: 60883 - DNA, 16 bp, Homo sapiens
gcccctccccgcgcgc

SEQ ID NO: 60884 - DNA, 16 bp, Homo sapiens
gtcccagttctccgcc

SEQ ID NO: 60885 - DNA, 18 bp, Homo sapiens
ttccatcctctaccgagc

SEQ ID NO: 60886 - DNA, 16 bp, Homo sapiens
ccgtcttcttcagggc

SEQ ID NO: 60887 - DNA, 16 bp, Homo sapiens
ctccgccccgcgtccg

SEQ ID NO: 60888 - DNA, 16 bp, Homo sapiens
cccagttcctccgggc

SEQ ID NO: 60889 - DNA, 17 bp, Homo sapiens
gggaatgccccggaggg

SEQ ID NO: 60890 - DNA, 16 bp, Homo sapiens
gcgcgagttcaccgag

SEQ ID NO: 60891 - DNA, 17 bp, Homo sapiens
cgtcgaagagtacggcc

SEQ ID NO: 60892 - DNA, 16 bp, Homo sapiens
gagccatacgggcagc

SEQ ID NO: 60893 - DNA, 23 bp, Homo sapiens
gagtccggcccggaagagtccgg

SEQ ID NO: 60894 - DNA, 16 bp, Homo sapiens
tgtggatgcggcggcc

SEQ ID NO: 60895 - DNA, 23 bp, Homo sapiens
ggccgcggcccgtgctgcgctcg

SEQ ID NO: 60896 - DNA, 20 bp, Homo sapiens
gcttcagaccgtgctatcgt

SEQ ID NO: 60897 - DNA, 18 bp, Homo sapiens
aatcgcagtccgcgcgtc

SEQ ID NO: 60898 - DNA, 19 bp, Homo sapiens
ctcaaggggcctcagttcc

SEQ ID NO: 60899 - DNA, 24 bp, Homo sapiens
cagccctacccaacgctgccgcct

SEQ ID NO: 60900 - DNA, 24 bp, Homo sapiens
agaaaaaaaaaaaaaaaaaaaaga

SEQ ID NO: 60901 - DNA, 16 bp, Homo sapiens
tcgtgtgtccctgcat

SEQ ID NO: 60902 - DNA, 23 bp, Homo sapiens
ggacggtcttgatctcctgacct

SEQ ID NO: 60903 - DNA, 24 bp, Homo sapiens
attacaggtgtgggccaccgtgcc

SEQ ID NO: 60904 - DNA, 26 bp, Homo sapiens
cacaacaaccttatctttttaaaaag

SEQ ID NO: 60905 - DNA, 23 bp, Homo sapiens
ccgataggtcacctttggctctt

SEQ ID NO: 60906 - DNA, 19 bp, Homo sapiens
caaaaattgagaactgggc

SEQ ID NO: 60907 - DNA, 22 bp, Homo sapiens
actgaattatttgtgccatctc

SEQ ID NO: 60908 - DNA, 23 bp, Homo sapiens
cacttccattttatttatggtag

SEQ ID NO: 60909 - DNA, 23 bp, Homo sapiens
ccggacaacctggaggcatcgct

SEQ ID NO: 60910 - DNA, 23 bp, Homo sapiens
tgcactcactttttttctttaac

SEQ ID NO: 60911 - DNA, 21 bp, Homo sapiens
tcttcgtagagcgacctgacg

SEQ ID NO: 60912 - DNA, 24 bp, Homo sapiens
caaagcctcttgttcgttccttgt

SEQ ID NO: 60913 - DNA, 18 bp, Homo sapiens
aatgcgctcctgtgtcag

SEQ ID NO: 60914 - DNA, 24 bp, Homo sapiens
tttgcccttccagtgtatactctg

SEQ ID NO: 60915 - DNA, 21 bp, Homo sapiens
gagatgaaacagtgtaagttt

SEQ ID NO: 60916 - DNA, 22 bp, Homo sapiens
gcctgagaattacaggagactg

SEQ ID NO: 60917 - DNA, 18 bp, Homo sapiens
ctaaggaaggaaccagtc

SEQ ID NO: 60918 - DNA, 20 bp, Homo sapiens
atgtgcagaaagacctggag

SEQ ID NO: 60919 - DNA, 24 bp, Homo sapiens
tgaagtcagttaactttcttttaa

SEQ ID NO: 60920 - DNA, 16 bp, Homo sapiens
cagaatgtggatgacg

SEQ ID NO: 60921 - DNA, 24 bp, Homo sapiens
cgttcgcgggtagctacgatgagg

SEQ ID NO: 60922 - DNA, 23 bp, Homo sapiens
gcttctcaggctcctcctctccc

SEQ ID NO: 60923 - DNA, 19 bp, Homo sapiens
tccaccaccaaataacgct

SEQ ID NO: 60924 - DNA, 16 bp, Homo sapiens
cttgtgtgcctctgct

SEQ ID NO: 60925 - DNA, 24 bp, Homo sapiens
tcgacttccatcttgcttcttttg

SEQ ID NO: 60926 - DNA, 19 bp, Homo sapiens
ttcgtttttaggagctcgg

SEQ ID NO: 60927 - DNA, 19 bp, Homo sapiens
cgttagaaaggccgcaagg

SEQ ID NO: 60928 - DNA, 20 bp, Homo sapiens
tacctagaaggatatgcgct

SEQ ID NO: 60929 - DNA, 16 bp, Homo sapiens
ccagatcacctcagca

SEQ ID NO: 60930 - DNA, 23 bp, Homo sapiens
caaatttctcaactctgtgggtt

SEQ ID NO: 60931 - DNA, 22 bp, Homo sapiens
tggctggatatttcgtattccc

SEQ ID NO: 60932 - DNA, 16 bp, Homo sapiens
tccagccccacccttc

SEQ ID NO: 60933 - DNA, 19 bp, Homo sapiens
gatctctaacgcgcaagcg

SEQ ID NO: 60934 - DNA, 23 bp, Homo sapiens
gaagtgccttcagccaatcacct

SEQ ID NO: 60935 - DNA, 17 bp, Homo sapiens
cgaagagacccagcaac

SEQ ID NO: 60936 - DNA, 18 bp, Homo sapiens
cacgaacgacattttggc

SEQ ID NO: 60937 - DNA, 23 bp, Homo sapiens
ccaatcaatagctgccgctgaag

SEQ ID NO: 60938 - DNA, 18 bp, Homo sapiens
gataacttcccccgccgc

SEQ ID NO: 60939 - DNA, 20 bp, Homo sapiens
acgtgagcacgaggcactga

SEQ ID NO: 60940 - DNA, 17 bp, Homo sapiens
gctcgactccctccgta

SEQ ID NO: 60941 - DNA, 23 bp, Homo sapiens
gacgtttccttggctcttctggc

SEQ ID NO: 60942 - DNA, 19 bp, Homo sapiens
caaagaggcgtgtccgcgc

SEQ ID NO: 60943 - DNA, 18 bp, Homo sapiens
cagtggtgaaccgcatcg

SEQ ID NO: 60944 - DNA, 16 bp, Homo sapiens
gaacccggcggcctcc

SEQ ID NO: 60945 - DNA, 23 bp, Homo sapiens
caaagagatgattgagaactggt

SEQ ID NO: 60946 - DNA, 22 bp, Homo sapiens
acaatcacttgaatacttgtgg

SEQ ID NO: 60947 - DNA, 24 bp, Homo sapiens
taagacaaaggaaaaacacgttaa

SEQ ID NO: 60948 - DNA, 16 bp, Homo sapiens
tcccggtgccattgtc

SEQ ID NO: 60949 - DNA, 24 bp, Homo sapiens
tgcttggctcatattaaaatatgt

SEQ ID NO: 60950 - DNA, 21 bp, Homo sapiens
aaggtcctgactcttccatga

SEQ ID NO: 60951 - DNA, 21 bp, Homo sapiens
tgccagtttagatgcaaaatc

SEQ ID NO: 60952 - DNA, 21 bp, Homo sapiens
tgttggtgttgaatttttcag

SEQ ID NO: 60953 - DNA, 22 bp, Homo sapiens
ctgaagttgattcagatccaag

SEQ ID NO: 60954 - DNA, 20 bp, Homo sapiens
aaaacaaaaaccaagaaaag

SEQ ID NO: 60955 - DNA, 21 bp, Homo sapiens
agaaatactggctaaatcctc

SEQ ID NO: 60956 - DNA, 24 bp, Homo sapiens
tcctggattaaatcaagaaaatgg

SEQ ID NO: 60957 - DNA, 25 bp, Homo sapiens
aggaggatattttacacatttcttg

SEQ ID NO: 60958 - DNA, 22 bp, Homo sapiens
actcatctttttggtatctaac

SEQ ID NO: 60959 - DNA, 27 bp, Homo sapiens
taccaaaccttatttatctatgttgag

SEQ ID NO: 60960 - DNA, 18 bp, Homo sapiens
aaactgcagtcctttgag

SEQ ID NO: 60961 - DNA, 23 bp, Homo sapiens
gtctttgaaagttaaagttcatt

SEQ ID NO: 60962 - DNA, 17 bp, Homo sapiens
tgagccacatggcttat

SEQ ID NO: 60963 - DNA, 22 bp, Homo sapiens
catcgttgccacatattaatac

SEQ ID NO: 60964 - DNA, 20 bp, Homo sapiens
aaagaagtcagcactatacc

SEQ ID NO: 60965 - DNA, 17 bp, Homo sapiens
ggtgacagtgggtgacc

SEQ ID NO: 60966 - DNA, 19 bp, Homo sapiens
acaggattactctgagacc

SEQ ID NO: 60967 - DNA, 21 bp, Homo sapiens
cttccttaggctttggccagc

SEQ ID NO: 60968 - DNA, 24 bp, Homo sapiens
tcaatttatcaataaggagaaaag

SEQ ID NO: 60969 - DNA, 19 bp, Homo sapiens
ggaaagtgtgcatacaggt

SEQ ID NO: 60970 - DNA, 21 bp, Homo sapiens
tcagttttccatctgagtaac

SEQ ID NO: 60971 - DNA, 22 bp, Homo sapiens
ataaacaggaaaatgataaata

SEQ ID NO: 60972 - DNA, 17 bp, Homo sapiens
taccgtgatctgggtcc

SEQ ID NO: 60973 - DNA, 22 bp, Homo sapiens
tgatatgattttctcttttccc

SEQ ID NO: 60974 - DNA, 24 bp, Homo sapiens
agaagcaattttattttttattcc

SEQ ID NO: 60975 - DNA, 23 bp, Homo sapiens
ttatattttctcattagagcaag

SEQ ID NO: 60976 - DNA, 19 bp, Homo sapiens
gacctccattaactagtgc

SEQ ID NO: 60977 - DNA, 18 bp, Homo sapiens
gctggcaatcaagggacc

SEQ ID NO: 60978 - DNA, 23 bp, Homo sapiens
tcgtggctatgttgtaaaaaagg

SEQ ID NO: 60979 - DNA, 21 bp, Homo sapiens
tcagtgcttagaactgtgctg

SEQ ID NO: 60980 - DNA, 22 bp, Homo sapiens
tacctgccaacaacttccaaaa

SEQ ID NO: 60981 - DNA, 24 bp, Homo sapiens
cttttgccaggacatcttgggttt

SEQ ID NO: 60982 - DNA, 20 bp, Homo sapiens
acacattactttgatgacaa

SEQ ID NO: 60983 - DNA, 22 bp, Homo sapiens
aatcttctgttcaggtggagga

SEQ ID NO: 60984 - DNA, 22 bp, Homo sapiens
actatctgtaagctagttttac

SEQ ID NO: 60985 - DNA, 22 bp, Homo sapiens
aaatccaagtgaagaatatggg

SEQ ID NO: 60986 - DNA, 17 bp, Homo sapiens
ctggggagatgagagaa

SEQ ID NO: 60987 - DNA, 23 bp, Homo sapiens
tttaactgagaaactaatgcctg

SEQ ID NO: 60988 - DNA, 22 bp, Homo sapiens
ttctttatatgtacctttgttt

SEQ ID NO: 60989 - DNA, 25 bp, Homo sapiens
atccccttttttcttttcataaaac

SEQ ID NO: 60990 - DNA, 23 bp, Homo sapiens
aaagggggctctgacatctagtg

SEQ ID NO: 60991 - DNA, 18 bp, Homo sapiens
catggctgagactgaaac

SEQ ID NO: 60992 - DNA, 23 bp, Homo sapiens
tcttttccaggtattcagtacac

SEQ ID NO: 60993 - DNA, 20 bp, Homo sapiens
aacatcagctactgtctctc

SEQ ID NO: 60994 - DNA, 24 bp, Homo sapiens
cttggtttatgggggatggttttg

SEQ ID NO: 60995 - DNA, 21 bp, Homo sapiens
cgactaacagcatttccaaag

SEQ ID NO: 60996 - DNA, 22 bp, Homo sapiens
tggtggagataaggttatgatg

SEQ ID NO: 60997 - DNA, 22 bp, Homo sapiens
tggaatgataaaccaagataat

SEQ ID NO: 60998 - DNA, 23 bp, Homo sapiens
ctgtttgtttatcagcaaggaga

SEQ ID NO: 60999 - DNA, 23 bp, Homo sapiens
gactaaagcaaactcttaacaca

SEQ ID NO: 61000 - DNA, 23 bp, Homo sapiens
gcctcaaccgtggacaatattcg

SEQ ID NO: 61001 - DNA, 23 bp, Homo sapiens
cacatccaatttctatcagttct

SEQ ID NO: 61002 - DNA, 22 bp, Homo sapiens
gaggacctcaaatggaccaagt

SEQ ID NO: 61003 - DNA, 20 bp, Homo sapiens
cactgagtagtttgcattgg

SEQ ID NO: 61004 - DNA, 22 bp, Homo sapiens
ggaaccttgtgtttttaaattc

SEQ ID NO: 61005 - DNA, 22 bp, Homo sapiens
tcccatgtggttctttttaact

SEQ ID NO: 61006 - DNA, 22 bp, Homo sapiens
aagcttcagaatctcttttcta

SEQ ID NO: 61007 - DNA, 23 bp, Homo sapiens
tggatcagaaatttttccatggt

SEQ ID NO: 61008 - DNA, 20 bp, Homo sapiens
agccttcaaaatgaatggtt

SEQ ID NO: 61009 - DNA, 20 bp, Homo sapiens
gcttcccaataaaaccaaac

SEQ ID NO: 61010 - DNA, 23 bp, Homo sapiens
tcttactcttcatcaaccgtaag

SEQ ID NO: 61011 - DNA, 23 bp, Homo sapiens
acaggtaaaggtgcacctttctt

SEQ ID NO: 61012 - DNA, 18 bp, Homo sapiens
tgggcaaataggctgcat

SEQ ID NO: 61013 - DNA, 22 bp, Homo sapiens
ttcctgaggtgatttcatgact

SEQ ID NO: 61014 - DNA, 20 bp, Homo sapiens
ccttgtgagtcttggttgag

SEQ ID NO: 61015 - DNA, 20 bp, Homo sapiens
tttgaactggttgctttctt

SEQ ID NO: 61016 - DNA, 21 bp, Homo sapiens
tgtactattagcatgctcatc

SEQ ID NO: 61017 - DNA, 21 bp, Homo sapiens
agaaaagccatagaaacagtg

SEQ ID NO: 61018 - DNA, 18 bp, Homo sapiens
acctgtaagaagggacag

SEQ ID NO: 61019 - DNA, 20 bp, Homo sapiens
acattctggggactgatttc

SEQ ID NO: 61020 - DNA, 24 bp, Homo sapiens
acactcagactcgatcctgaggtt

SEQ ID NO: 61021 - DNA, 18 bp, Homo sapiens
aggatgctctcctcgtgc

SEQ ID NO: 61022 - DNA, 23 bp, Homo sapiens
cacatacaccatatgtgggcttt

SEQ ID NO: 61023 - DNA, 19 bp, Homo sapiens
acatcctggaggaattgga

SEQ ID NO: 61024 - DNA, 24 bp, Homo sapiens
tctcttattttcctgacagtttag

SEQ ID NO: 61025 - DNA, 18 bp, Homo sapiens
ggcacatttcaaaggccc

SEQ ID NO: 61026 - DNA, 22 bp, Homo sapiens
acaaagcatgaagttcacttcc

SEQ ID NO: 61027 - DNA, 21 bp, Homo sapiens
ggtaatacttgcaaagaaagt

SEQ ID NO: 61028 - DNA, 18 bp, Homo sapiens
agagcaagctcctgggct

SEQ ID NO: 61029 - DNA, 18 bp, Homo sapiens
gaacaacagcacaatacc

SEQ ID NO: 61030 - DNA, 17 bp, Homo sapiens
ggggccagcaagtcctg

SEQ ID NO: 61031 - DNA, 20 bp, Homo sapiens
acctcatactagcttctttc

SEQ ID NO: 61032 - DNA, 23 bp, Homo sapiens
accttatcactacttccagaagt

SEQ ID NO: 61033 - DNA, 24 bp, Homo sapiens
acttcttattctgagtctctccac

SEQ ID NO: 61034 - DNA, 18 bp, Homo sapiens
tgcagaaatgcatcaagc

SEQ ID NO: 61035 - DNA, 24 bp, Homo sapiens
ttttttaatacagactttgctacc

SEQ ID NO: 61036 - DNA, 23 bp, Homo sapiens
atctgtcttatcctctgtgacaa

SEQ ID NO: 61037 - DNA, 22 bp, Homo sapiens
ccacaacaagtctgacctcgtc

SEQ ID NO: 61038 - DNA, 20 bp, Homo sapiens
ctgggagttcaagcatctcc

SEQ ID NO: 61039 - DNA, 24 bp, Homo sapiens
ccagatggttcgtacagattcccg

SEQ ID NO: 61040 - DNA, 23 bp, Homo sapiens
ctgaagtcccctttgttgtatcc

SEQ ID NO: 61041 - DNA, 16 bp, Homo sapiens
tgtccagtcagcccca

SEQ ID NO: 61042 - DNA, 19 bp, Homo sapiens
tttcccaaaaggccatacc

SEQ ID NO: 61043 - DNA, 17 bp, Homo sapiens
ggctaggcagcaagatg

SEQ ID NO: 61044 - DNA, 23 bp, Homo sapiens
gattcatgaaaagccaaagttag

SEQ ID NO: 61045 - DNA, 22 bp, Homo sapiens
ccaaaaatcagagcttggaggg

SEQ ID NO: 61046 - DNA, 17 bp, Homo sapiens
ggaccattccagcacca

SEQ ID NO: 61047 - DNA, 24 bp, Homo sapiens
gagaggacctacttccagcaaccc

SEQ ID NO: 61048 - DNA, 21 bp, Homo sapiens
tccacatcagaatcttcccga

SEQ ID NO: 61049 - DNA, 23 bp, Homo sapiens
acaggggttcattcacagctctg

SEQ ID NO: 61050 - DNA, 16 bp, Homo sapiens
gatccttctccggggg

SEQ ID NO: 61051 - DNA, 21 bp, Homo sapiens
aacccacaaaatttggctaag

SEQ ID NO: 61052 - DNA, 23 bp, Homo sapiens
tttacgtaccctcatgtccctgc

SEQ ID NO: 61053 - DNA, 20 bp, Homo sapiens
attgcagaaagagacatcgg

SEQ ID NO: 61054 - DNA, 23 bp, Homo sapiens
ctccatttccaaaaccttggcag

SEQ ID NO: 61055 - DNA, 23 bp, Homo sapiens
tcccgaaaggaaatgactgcagc

SEQ ID NO: 61056 - DNA, 18 bp, Homo sapiens
aagaggagcttgcccagc

SEQ ID NO: 61057 - DNA, 21 bp, Homo sapiens
ttgagtctccaggaagaaatt

SEQ ID NO: 61058 - DNA, 20 bp, Homo sapiens
agtggttatgcaacatctcc

SEQ ID NO: 61059 - DNA, 23 bp, Homo sapiens
ttcaccaggaggctcaattcagg

SEQ ID NO: 61060 - DNA, 17 bp, Homo sapiens
tggtttgatgctgtgcc

SEQ ID NO: 61061 - DNA, 24 bp, Homo sapiens
tggtgctttggtcaatgaagtggg

SEQ ID NO: 61062 - DNA, 20 bp, Homo sapiens
agctctgcttgttcacacac

SEQ ID NO: 61063 - DNA, 24 bp, Homo sapiens
tggttttattttttgttttgcagt

SEQ ID NO: 61064 - DNA, 18 bp, Homo sapiens
tacctcatgctgctctcc

SEQ ID NO: 61065 - DNA, 19 bp, Homo sapiens
aatcctcagtgggccttgg

SEQ ID NO: 61066 - DNA, 21 bp, Homo sapiens
tgggaaatggtcgaacttgga

SEQ ID NO: 61067 - DNA, 27 bp, Homo sapiens
aaatcataaatgagtatctggtagaac

SEQ ID NO: 61068 - DNA, 22 bp, Homo sapiens
agattccacagccaggcagaac

SEQ ID NO: 61069 - DNA, 23 bp, Homo sapiens
tcagaagtgaaaaggatctaaac

SEQ ID NO: 61070 - DNA, 19 bp, Homo sapiens
tcccaactggttgtatctc

SEQ ID NO: 61071 - DNA, 27 bp, Homo sapiens
tttaacatactacaaataagatattag

SEQ ID NO: 61072 - DNA, 19 bp, Homo sapiens
tttcagtgaagaactgttc

SEQ ID NO: 61073 - DNA, 21 bp, Homo sapiens
acctccatatgcaaatcatac

SEQ ID NO: 61074 - DNA, 21 bp, Homo sapiens
tgttctcaggttatcggtaag

SEQ ID NO: 61075 - DNA, 23 bp, Homo sapiens
ttgtggattgttcaggcacttcc

SEQ ID NO: 61076 - DNA, 18 bp, Homo sapiens
ctctgtccagccactctc

SEQ ID NO: 61077 - DNA, 23 bp, Homo sapiens
ctcacctgccattctgatagtgg

SEQ ID NO: 61078 - DNA, 20 bp, Homo sapiens
cagccttcttcttcagaaac

SEQ ID NO: 61079 - DNA, 19 bp, Homo sapiens
agcttgctccttcatgttc

SEQ ID NO: 61080 - DNA, 20 bp, Homo sapiens
agaagtataagaatggctgt

SEQ ID NO: 61081 - DNA, 19 bp, Homo sapiens
tgccttagatagtccagag

SEQ ID NO: 61082 - DNA, 16 bp, Homo sapiens
tacagccatgagccac

SEQ ID NO: 61083 - DNA, 24 bp, Homo sapiens
acttgctgaatacattgttgagtt

SEQ ID NO: 61084 - DNA, 18 bp, Homo sapiens
gctggttttgaactcctg

SEQ ID NO: 61085 - DNA, 18 bp, Homo sapiens
ccagtgcccagcccaatc

SEQ ID NO: 61086 - DNA, 18 bp, Homo sapiens
aatgaagataggcagtcc

SEQ ID NO: 61087 - DNA, 16 bp, Homo sapiens
cctgggaaagcactgg

SEQ ID NO: 61088 - DNA, 18 bp, Homo sapiens
tgcatgtaccgaaatgct

SEQ ID NO: 61089 - DNA, 24 bp, Homo sapiens
tcttgttcccttgtcctttttcct

SEQ ID NO: 61090 - DNA, 24 bp, Homo sapiens
cacccttatcatctttatcattcc

SEQ ID NO: 61091 - DNA, 23 bp, Homo sapiens
gattgacaactatgtgccccctt

SEQ ID NO: 61092 - DNA, 21 bp, Homo sapiens
tgctgaatattgctgggaatg

SEQ ID NO: 61093 - DNA, 24 bp, Homo sapiens
cctgctctcatccccactaatatt

SEQ ID NO: 61094 - DNA, 21 bp, Homo sapiens
ctttactgaggctttcaaaac

SEQ ID NO: 61095 - DNA, 22 bp, Homo sapiens
aacgcctaaagtatcacatttc

SEQ ID NO: 61096 - DNA, 16 bp, Homo sapiens
agggtcgactcctcag

SEQ ID NO: 61097 - DNA, 22 bp, Homo sapiens
tgagaatgtttaaattcgtacc

SEQ ID NO: 61098 - DNA, 24 bp, Homo sapiens
cctaaagattgtatgaggtcctgt

SEQ ID NO: 61099 - DNA, 21 bp, Homo sapiens
ttgggacgaagaaaaggaatg

SEQ ID NO: 61100 - DNA, 21 bp, Homo sapiens
tgaaccttgttgggtacaaag

SEQ ID NO: 61101 - DNA, 21 bp, Homo sapiens
ccatccggaagcagtacatat

SEQ ID NO: 61102 - DNA, 24 bp, Homo sapiens
atgttctacatcagcagatggaag

SEQ ID NO: 61103 - DNA, 21 bp, Homo sapiens
ttccaggagtttggaatggag

SEQ ID NO: 61104 - DNA, 22 bp, Homo sapiens
cacttcaaaagccctagataac

SEQ ID NO: 61105 - DNA, 21 bp, Homo sapiens
tgtttaggaggcagaatgtgt

SEQ ID NO: 61106 - DNA, 21 bp, Homo sapiens
ccaggacaccagtgtatgttg

SEQ ID NO: 61107 - DNA, 22 bp, Homo sapiens
aaagactttgtatagatcaggc

SEQ ID NO: 61108 - DNA, 17 bp, Homo sapiens
gagtgaagtgcctggct

SEQ ID NO: 61109 - DNA, 23 bp, Homo sapiens
ggaatacagagaaagaagaacac

SEQ ID NO: 61110 - DNA, 21 bp, Homo sapiens
tgtctataaagccttgcgctc

SEQ ID NO: 61111 - DNA, 20 bp, Homo sapiens
agtgctaccaacacttatgt

SEQ ID NO: 61112 - DNA, 21 bp, Homo sapiens
tatcctgcagcttgctaacct

SEQ ID NO: 61113 - DNA, 21 bp, Homo sapiens
tataatcaatccactgtgtat

SEQ ID NO: 61114 - DNA, 23 bp, Homo sapiens
gaaggaatgtggcctggttcctc

SEQ ID NO: 61115 - DNA, 16 bp, Homo sapiens
ccggctccacaagcag

SEQ ID NO: 61116 - DNA, 22 bp, Homo sapiens
gtaatactgggaaaaggggaag

SEQ ID NO: 61117 - DNA, 16 bp, Homo sapiens
gccaacctagtggagc

SEQ ID NO: 61118 - DNA, 22 bp, Homo sapiens
gagtgggctgcagagtcagggc

SEQ ID NO: 61119 - DNA, 17 bp, Homo sapiens
cagctcctggcctgagg

SEQ ID NO: 61120 - DNA, 24 bp, Homo sapiens
agcgtttccgccggtcaggcttcc

SEQ ID NO: 61121 - DNA, 17 bp, Homo sapiens
cctggcctctcctgagg

SEQ ID NO: 61122 - DNA, 18 bp, Homo sapiens
gcacggagatgttctgct

SEQ ID NO: 61123 - DNA, 17 bp, Homo sapiens
cttgagcaggtgctggc

SEQ ID NO: 61124 - DNA, 19 bp, Homo sapiens
gacccacaactacgatgag

SEQ ID NO: 61125 - DNA, 18 bp, Homo sapiens
ccccaaggtctgctcaag

SEQ ID NO: 61126 - DNA, 23 bp, Homo sapiens
ctggcaagattggctccagtgct

SEQ ID NO: 61127 - DNA, 21 bp, Homo sapiens
gcagggcattccagttaagac

SEQ ID NO: 61128 - DNA, 19 bp, Homo sapiens
gggtgatttctccagttgc

SEQ ID NO: 61129 - DNA, 23 bp, Homo sapiens
tggagataaaggtgcagatgaac

SEQ ID NO: 61130 - DNA, 19 bp, Homo sapiens
agattgcaaactatgaggc

SEQ ID NO: 61131 - DNA, 22 bp, Homo sapiens
gagagaagaagactgagagcac

SEQ ID NO: 61132 - DNA, 22 bp, Homo sapiens
tcagaggtgcaatgctgggttt

SEQ ID NO: 61133 - DNA, 19 bp, Homo sapiens
agaggccagatcaggcaac

SEQ ID NO: 61134 - DNA, 24 bp, Homo sapiens
ctcgctgctcatccttgcctctag

SEQ ID NO: 61135 - DNA, 24 bp, Homo sapiens
ttctctacctcctccttgaggcac

SEQ ID NO: 61136 - DNA, 19 bp, Homo sapiens
gtgccagaagactttctgg

SEQ ID NO: 61137 - DNA, 23 bp, Homo sapiens
tcaaggcccctgccaccacccaa

SEQ ID NO: 61138 - DNA, 17 bp, Homo sapiens
agagaagacggggatgg

SEQ ID NO: 61139 - DNA, 24 bp, Homo sapiens
cacaccaaagttccaatcaagaac

SEQ ID NO: 61140 - DNA, 16 bp, Homo sapiens
aaggcagccaggggtc

SEQ ID NO: 61141 - DNA, 19 bp, Homo sapiens
caggattaaaggagaaaac

SEQ ID NO: 61142 - DNA, 24 bp, Homo sapiens
attttcttgtgacctctcttccca

SEQ ID NO: 61143 - DNA, 19 bp, Homo sapiens
actcaagggctcgccaggc

SEQ ID NO: 61144 - DNA, 21 bp, Homo sapiens
cccaggagggaggagggaagt

SEQ ID NO: 61145 - DNA, 23 bp, Homo sapiens
cacgacctccttctccactgggc

SEQ ID NO: 61146 - DNA, 16 bp, Homo sapiens
ctgagtcccctggcgc

SEQ ID NO: 61147 - DNA, 17 bp, Homo sapiens
ggaacccttcccaccct

SEQ ID NO: 61148 - DNA, 17 bp, Homo sapiens
cgtgatctgggtcctgt

SEQ ID NO: 61149 - DNA, 24 bp, Homo sapiens
acactttgtggtcacttggccact

SEQ ID NO: 61150 - DNA, 24 bp, Homo sapiens
caaggtgctttttggagaggatga

SEQ ID NO: 61151 - DNA, 24 bp, Homo sapiens
tgagccagtccaaggcccacctgt

SEQ ID NO: 61152 - DNA, 16 bp, Homo sapiens
tatccgctcagccaac

SEQ ID NO: 61153 - DNA, 18 bp, Homo sapiens
cctgtgctgatgacagga

SEQ ID NO: 61154 - DNA, 18 bp, Homo sapiens
atgagagtacagacacgg

SEQ ID NO: 61155 - DNA, 24 bp, Homo sapiens
gtcaacacgcagcaggctgtcatc

SEQ ID NO: 61156 - DNA, 16 bp, Homo sapiens
ggggctgggagtccgg

SEQ ID NO: 61157 - DNA, 18 bp, Homo sapiens
tggagggccgcgtcgggt

SEQ ID NO: 61158 - DNA, 18 bp, Homo sapiens
ctgagaagctcaaagagt

SEQ ID NO: 61159 - DNA, 21 bp, Homo sapiens
aagcactgccgatctcagagg

SEQ ID NO: 61160 - DNA, 16 bp, Homo sapiens
cggttctgctgatggg

SEQ ID NO: 61161 - DNA, 18 bp, Homo sapiens
gtgtgggcactgccacag

SEQ ID NO: 61162 - DNA, 21 bp, Homo sapiens
ttgcttcacatcttctcgggc

SEQ ID NO: 61163 - DNA, 19 bp, Homo sapiens
ttgagaggtccttctggga

SEQ ID NO: 61164 - DNA, 23 bp, Homo sapiens
aggtcgggatgtatttaagccat

SEQ ID NO: 61165 - DNA, 21 bp, Homo sapiens
gctgcagcactgacagttgcc

SEQ ID NO: 61166 - DNA, 23 bp, Homo sapiens
ttagcatggctagttcaagttgc

SEQ ID NO: 61167 - DNA, 23 bp, Homo sapiens
ctgttcccttccccttatacctg

SEQ ID NO: 61168 - DNA, 17 bp, Homo sapiens
cagccccatcatgccag

SEQ ID NO: 61169 - DNA, 24 bp, Homo sapiens
tactcagatgatgaggatgactat

SEQ ID NO: 61170 - DNA, 24 bp, Homo sapiens
aacattatctgctgcagggcattc

SEQ ID NO: 61171 - DNA, 19 bp, Homo sapiens
aagaagacctggcggcagg

SEQ ID NO: 61172 - DNA, 23 bp, Homo sapiens
tagaacctggtagccttagaaag

SEQ ID NO: 61173 - DNA, 21 bp, Homo sapiens
taggctcagcctgggccgagc

SEQ ID NO: 61174 - DNA, 24 bp, Homo sapiens
tgcacgtcatcctcctcgtcatcc

SEQ ID NO: 61175 - DNA, 17 bp, Homo sapiens
ggttccgctgactcagt

SEQ ID NO: 61176 - DNA, 16 bp, Homo sapiens
gaactcggctgcggcc

SEQ ID NO: 61177 - DNA, 20 bp, Homo sapiens
aggcagaggaacctagcaac

SEQ ID NO: 61178 - DNA, 17 bp, Homo sapiens
ctcccattgtccagcgg

SEQ ID NO: 61179 - DNA, 24 bp, Homo sapiens
caaggatgaacaccaaggaaccac

SEQ ID NO: 61180 - DNA, 20 bp, Homo sapiens
tcccaacaaacccaagctag

SEQ ID NO: 61181 - DNA, 24 bp, Homo sapiens
aagtagagaatcctgcaagggtgc

SEQ ID NO: 61182 - DNA, 24 bp, Homo sapiens
ctgtctcagatggtgcagaggagg

SEQ ID NO: 61183 - DNA, 22 bp, Homo sapiens
attgtctagaaaggccggcagc

SEQ ID NO: 61184 - DNA, 17 bp, Homo sapiens
gagactgtgagcttttc

SEQ ID NO: 61185 - DNA, 24 bp, Homo sapiens
tgaggctgctgcctggaggcttca

SEQ ID NO: 61186 - DNA, 18 bp, Homo sapiens
actcccattgcaccagct

SEQ ID NO: 61187 - DNA, 19 bp, Homo sapiens
cttgtgcgcatgaaccagc

SEQ ID NO: 61188 - DNA, 23 bp, Homo sapiens
ctctgagggcaaccacacaggta

SEQ ID NO: 61189 - DNA, 24 bp, Homo sapiens
aaggactgctctccctctaccttc

SEQ ID NO: 61190 - DNA, 20 bp, Homo sapiens
aagtcagccagcaacaagtc

SEQ ID NO: 61191 - DNA, 24 bp, Homo sapiens
aaaaagactttccctgtttaggcc

SEQ ID NO: 61192 - DNA, 17 bp, Homo sapiens
ccagagctgattcagac

SEQ ID NO: 61193 - DNA, 19 bp, Homo sapiens
acaagaggtcccaaacccc

SEQ ID NO: 61194 - DNA, 18 bp, Homo sapiens
gcccgggtctaccctttc

SEQ ID NO: 61195 - DNA, 20 bp, Homo sapiens
tgtttgcttccagcaccagc

SEQ ID NO: 61196 - DNA, 21 bp, Homo sapiens
agtgaatgggtagagccaagg

SEQ ID NO: 61197 - DNA, 23 bp, Homo sapiens
ctgtgactcttgagacttgtggg

SEQ ID NO: 61198 - DNA, 19 bp, Homo sapiens
ggggagggagaatagcttc

SEQ ID NO: 61199 - DNA, 22 bp, Homo sapiens
cctttcccacaatgggggcaaa

SEQ ID NO: 61200 - DNA, 20 bp, Homo sapiens
aagtatgaggccaggctgca

SEQ ID NO: 61201 - DNA, 24 bp, Homo sapiens
atgttcacgaatcagagacaaatg

SEQ ID NO: 61202 - DNA, 16 bp, Homo sapiens
agccctaccacgacat

SEQ ID NO: 61203 - DNA, 22 bp, Homo sapiens
gctgggcagaggccaggaagaa

SEQ ID NO: 61204 - DNA, 23 bp, Homo sapiens
gatatctgcctcaacctgatggc

SEQ ID NO: 61205 - DNA, 24 bp, Homo sapiens
ctgacggttcaccttcagcacatg

SEQ ID NO: 61206 - DNA, 16 bp, Homo sapiens
ggggtggggcctatac

SEQ ID NO: 61207 - DNA, 24 bp, Homo sapiens
ctgccatcaggttgaagcggatgt

SEQ ID NO: 61208 - DNA, 16 bp, Homo sapiens
agcgtatcggcctcgc

SEQ ID NO: 61209 - DNA, 24 bp, Homo sapiens
tgatctaagcctgatcttgccaga

SEQ ID NO: 61210 - DNA, 22 bp, Homo sapiens
tgtcttggtctccactagggcc

SEQ ID NO: 61211 - DNA, 20 bp, Homo sapiens
ctctctgtccctcccaaagt

SEQ ID NO: 61212 - DNA, 16 bp, Homo sapiens
ccttcccactcctggc

SEQ ID NO: 61213 - DNA, 19 bp, Homo sapiens
ggcccttaccctgcagtgg

SEQ ID NO: 61214 - DNA, 22 bp, Homo sapiens
ggtttcaccctacaccatattg

SEQ ID NO: 61215 - DNA, 19 bp, Homo sapiens
cactcctcgtcctcccccc

SEQ ID NO: 61216 - DNA, 17 bp, Homo sapiens
gggaatcaggagctggt

SEQ ID NO: 61217 - DNA, 23 bp, Homo sapiens
ccggctctttgagctggatgggc

SEQ ID NO: 61218 - DNA, 19 bp, Homo sapiens
gtgtcggtaccgacaaccc

SEQ ID NO: 61219 - DNA, 17 bp, Homo sapiens
ttagtgcagtgcggacc

SEQ ID NO: 61220 - DNA, 19 bp, Homo sapiens
cctaggaggtaggcagaga

SEQ ID NO: 61221 - DNA, 20 bp, Homo sapiens
ggccctgactctgtttttcc

SEQ ID NO: 61222 - DNA, 24 bp, Homo sapiens
tggtcaatggggtagaccttcagc

SEQ ID NO: 61223 - DNA, 17 bp, Homo sapiens
gtgggagctgtgggagc

SEQ ID NO: 61224 - DNA, 20 bp, Homo sapiens
ctgacaaagtggaacgcctc

SEQ ID NO: 61225 - DNA, 24 bp, Homo sapiens
gtagagcaaaggatatgcgattgg

SEQ ID NO: 61226 - DNA, 16 bp, Homo sapiens
gtggctcgggcctggg

SEQ ID NO: 61227 - DNA, 20 bp, Homo sapiens
ccatagtcctacctgaggag

SEQ ID NO: 61228 - DNA, 24 bp, Homo sapiens
ctactcccaccccacatcagctcc

SEQ ID NO: 61229 - DNA, 19 bp, Homo sapiens
gtctgtgttccttccgatt

SEQ ID NO: 61230 - DNA, 16 bp, Homo sapiens
aactccggggcattgc

SEQ ID NO: 61231 - DNA, 19 bp, Homo sapiens
ccctgagtcgcatgaagga

SEQ ID NO: 61232 - DNA, 24 bp, Homo sapiens
caatcatttgaaaaagaaacagcc

SEQ ID NO: 61233 - DNA, 18 bp, Homo sapiens
actcatgccttgctgagc

SEQ ID NO: 61234 - DNA, 16 bp, Homo sapiens
tcagggtcagatctgc

SEQ ID NO: 61235 - DNA, 24 bp, Homo sapiens
gcttgcagtgaggggtgctgtgta

SEQ ID NO: 61236 - DNA, 21 bp, Homo sapiens
ggctgaaacccttggtgaagt

SEQ ID NO: 61237 - DNA, 19 bp, Homo sapiens
agatatgactgacctgctc

SEQ ID NO: 61238 - DNA, 22 bp, Homo sapiens
ctgctgcagttcaggagcacgc

SEQ ID NO: 61239 - DNA, 23 bp, Homo sapiens
ggtaggtgcttgttaaatgaata

SEQ ID NO: 61240 - DNA, 26 bp, Homo sapiens
cctttaatgaattaagagttcagttc

SEQ ID NO: 61241 - DNA, 19 bp, Homo sapiens
ccttggtggatgatacgtc

SEQ ID NO: 61242 - DNA, 23 bp, Homo sapiens
ctatctcctcctcctgtcttcct

SEQ ID NO: 61243 - DNA, 23 bp, Homo sapiens
ccctgtatatggatttatcttcc

SEQ ID NO: 61244 - DNA, 16 bp, Homo sapiens
ccctccaaacaaagca

SEQ ID NO: 61245 - DNA, 21 bp, Homo sapiens
tgattgtcttctcccctttgg

SEQ ID NO: 61246 - DNA, 19 bp, Homo sapiens
tcatcatcaatcacggacg

SEQ ID NO: 61247 - DNA, 23 bp, Homo sapiens
cacagcaaggacacctgagtgat

SEQ ID NO: 61248 - DNA, 21 bp, Homo sapiens
gcgctcttcgatccatttgaa

SEQ ID NO: 61249 - DNA, 23 bp, Homo sapiens
tgagggcacaaggccacttcaga

SEQ ID NO: 61250 - DNA, 21 bp, Homo sapiens
ctacgaccttcagagcaaatg

SEQ ID NO: 61251 - DNA, 24 bp, Homo sapiens
ctcagagagcaaggctgctgcttt

SEQ ID NO: 61252 - DNA, 19 bp, Homo sapiens
ttccctactgctttccttt

SEQ ID NO: 61253 - DNA, 24 bp, Homo sapiens
cttccctaaggggccctgttctct

SEQ ID NO: 61254 - DNA, 24 bp, Homo sapiens
cttttctccctgccggaccggggc

SEQ ID NO: 61255 - DNA, 21 bp, Homo sapiens
gtacagccactcacccctgac

SEQ ID NO: 61256 - DNA, 18 bp, Homo sapiens
ttgtcgccccacccaggc

SEQ ID NO: 61257 - DNA, 24 bp, Homo sapiens
cccccttgacacctgcgatgagga

SEQ ID NO: 61258 - DNA, 16 bp, Homo sapiens
caggggctggggaggc

SEQ ID NO: 61259 - DNA, 16 bp, Homo sapiens
ggggtgggccgccaca

SEQ ID NO: 61260 - DNA, 24 bp, Homo sapiens
gcgggaagatgaataagggctggc

SEQ ID NO: 61261 - DNA, 16 bp, Homo sapiens
agcagggtgaagaggc

SEQ ID NO: 61262 - DNA, 16 bp, Homo sapiens
cagcggtggggaggga

SEQ ID NO: 61263 - DNA, 24 bp, Homo sapiens
ggtcaggcaggcgcgtcccgggcc

SEQ ID NO: 61264 - DNA, 18 bp, Homo sapiens
actgggcccgttgtctgt

SEQ ID NO: 61265 - DNA, 16 bp, Homo sapiens
gggtcgctctccagct

SEQ ID NO: 61266 - DNA, 19 bp, Homo sapiens
cccgattcggactgcatgg

SEQ ID NO: 61267 - DNA, 20 bp, Homo sapiens
gggcggccgcgagccggcga

SEQ ID NO: 61268 - DNA, 24 bp, Homo sapiens
ttttgagttcgtaataggttttgg

SEQ ID NO: 61269 - DNA, 17 bp, Homo sapiens
gcccagctaccttccct

SEQ ID NO: 61270 - DNA, 16 bp, Homo sapiens
ccggtgcgcctctgcc

SEQ ID NO: 61271 - DNA, 23 bp, Homo sapiens
gtggaaggacgggaagcgggagc

SEQ ID NO: 61272 - DNA, 16 bp, Homo sapiens
cccagagctcccgcga

SEQ ID NO: 61273 - DNA, 21 bp, Homo sapiens
gggaggagtttcatgaagagc

SEQ ID NO: 61274 - DNA, 18 bp, Homo sapiens
ccaactgcgaggggcagt

SEQ ID NO: 61275 - DNA, 20 bp, Homo sapiens
gtattttcaaggtgtcccat

SEQ ID NO: 61276 - DNA, 23 bp, Homo sapiens
ttttcagctctcttctgtagctt

SEQ ID NO: 61277 - DNA, 23 bp, Homo sapiens
agagtcaatttcctggtttcctt

SEQ ID NO: 61278 - DNA, 22 bp, Homo sapiens
gcttctgacctaagtaaaagct

SEQ ID NO: 61279 - DNA, 21 bp, Homo sapiens
ataagaacctgtaaactgagg

SEQ ID NO: 61280 - DNA, 21 bp, Homo sapiens
catctctgaagtcaaatggga

SEQ ID NO: 61281 - DNA, 22 bp, Homo sapiens
atgaacaagaaccaaagatttc

SEQ ID NO: 61282 - DNA, 24 bp, Homo sapiens
ctattttctctctctgtgaaaagg

SEQ ID NO: 61283 - DNA, 22 bp, Homo sapiens
tgaaacaagtgaactgaacatt

SEQ ID NO: 61284 - DNA, 18 bp, Homo sapiens
atctgaactctaagcgcc

SEQ ID NO: 61285 - DNA, 24 bp, Homo sapiens
cgttctagcacagagctgtgtttg

SEQ ID NO: 61286 - DNA, 23 bp, Homo sapiens
cgggattatttccagaataaaac

SEQ ID NO: 61287 - DNA, 23 bp, Homo sapiens
agtgacacagccagtgccagaac

SEQ ID NO: 61288 - DNA, 20 bp, Homo sapiens
ctcttcctttatcctccccc

SEQ ID NO: 61289 - DNA, 20 bp, Homo sapiens
aaaggaaaaaagatggaggc

SEQ ID NO: 61290 - DNA, 22 bp, Homo sapiens
gaagctgattaaagccagtgag

SEQ ID NO: 61291 - DNA, 18 bp, Homo sapiens
gatgctcggcggaactgc

SEQ ID NO: 61292 - DNA, 24 bp, Homo sapiens
tcaattatgtggagtaccattctg

SEQ ID NO: 61293 - DNA, 17 bp, Homo sapiens
gctggcgtagcaagatg

SEQ ID NO: 61294 - DNA, 24 bp, Homo sapiens
gcaatttaggatacccccaaagtg

SEQ ID NO: 61295 - DNA, 17 bp, Homo sapiens
agcttctgctgctgctc

SEQ ID NO: 61296 - DNA, 22 bp, Homo sapiens
tatgcattttggttttcccaca

SEQ ID NO: 61297 - DNA, 19 bp, Homo sapiens
cactgacgtttatggctgg

SEQ ID NO: 61298 - DNA, 24 bp, Homo sapiens
cgataagctcctccagtatgacat

SEQ ID NO: 61299 - DNA, 22 bp, Homo sapiens
actcacgtaccttaaggacttc

SEQ ID NO: 61300 - DNA, 16 bp, Homo sapiens
gcaggagcgcagggag

SEQ ID NO: 61301 - DNA, 24 bp, Homo sapiens
attcagataaacaaaacacctagc

SEQ ID NO: 61302 - DNA, 17 bp, Homo sapiens
gagtgcccgtgagtcag

SEQ ID NO: 61303 - DNA, 21 bp, Homo sapiens
ggagttggagttttcaaatat

SEQ ID NO: 61304 - DNA, 17 bp, Homo sapiens
caggtgccgatggaagt

SEQ ID NO: 61305 - DNA, 21 bp, Homo sapiens
tctgtgataaagtttccggtg

SEQ ID NO: 61306 - DNA, 24 bp, Homo sapiens
tattgcattatatttcaaagactg

SEQ ID NO: 61307 - DNA, 20 bp, Homo sapiens
gccagtccatcttcaaattg

SEQ ID NO: 61308 - DNA, 21 bp, Homo sapiens
acttattgaaaacagtatgtc

SEQ ID NO: 61309 - DNA, 22 bp, Homo sapiens
ctcactggattggtgccaccta

SEQ ID NO: 61310 - DNA, 21 bp, Homo sapiens
cattgaattacttcttatggc

SEQ ID NO: 61311 - DNA, 18 bp, Homo sapiens
tggtggggttttcgaggt

SEQ ID NO: 61312 - DNA, 24 bp, Homo sapiens
tggtacataacaaaggcttaataa

SEQ ID NO: 61313 - DNA, 23 bp, Homo sapiens
atttgctaaagtggtagaaaggt

SEQ ID NO: 61314 - DNA, 24 bp, Homo sapiens
cctgaaggaagagccgtctgaaac

SEQ ID NO: 61315 - DNA, 16 bp, Homo sapiens
atgatcgccaggctgg

SEQ ID NO: 61316 - DNA, 19 bp, Homo sapiens
ttcaggtgcagacccacct

SEQ ID NO: 61317 - DNA, 22 bp, Homo sapiens
gagttaagcgtaagcatagcca

SEQ ID NO: 61318 - DNA, 20 bp, Homo sapiens
ggcagcaggtaaagcagtac

SEQ ID NO: 61319 - DNA, 26 bp, Homo sapiens
caagttatttagcataagaaaacagg

SEQ ID NO: 61320 - DNA, 21 bp, Homo sapiens
ctgagcttgccatgtccaaac

SEQ ID NO: 61321 - DNA, 22 bp, Homo sapiens
gccacaaggacaaactagagtc

SEQ ID NO: 61322 - DNA, 19 bp, Homo sapiens
cacccaacagccccatggc

SEQ ID NO: 61323 - DNA, 17 bp, Homo sapiens
acaggctggaatgccac

SEQ ID NO: 61324 - DNA, 21 bp, Homo sapiens
gattcaccatcgtggctgtgg

SEQ ID NO: 61325 - DNA, 24 bp, Homo sapiens
tttccacctccccttctcctctct

SEQ ID NO: 61326 - DNA, 18 bp, Homo sapiens
gggtgtagagcacatgac

SEQ ID NO: 61327 - DNA, 18 bp, Homo sapiens
gcggaacttctaaacagc

SEQ ID NO: 61328 - DNA, 17 bp, Homo sapiens
gccacttgcttcttctt

SEQ ID NO: 61329 - DNA, 23 bp, Homo sapiens
atgcatattccattctttcttcc

SEQ ID NO: 61330 - DNA, 19 bp, Homo sapiens
tctgccctgttttgctctt

SEQ ID NO: 61331 - DNA, 24 bp, Homo sapiens
tttggtcagattccactttgtttg

SEQ ID NO: 61332 - DNA, 21 bp, Homo sapiens
cattcagtacctgcatacagg

SEQ ID NO: 61333 - DNA, 24 bp, Homo sapiens
tgtgtgaacaggtcattaaaaagt

SEQ ID NO: 61334 - DNA, 19 bp, Homo sapiens
ggtgtgatccaccacaaat

SEQ ID NO: 61335 - DNA, 24 bp, Homo sapiens
tgcagggattttataagtttgaag

SEQ ID NO: 61336 - DNA, 21 bp, Homo sapiens
cctagctttctctataaaaaa

SEQ ID NO: 61337 - DNA, 20 bp, Homo sapiens
catgaacacacattcacgag

SEQ ID NO: 61338 - DNA, 22 bp, Homo sapiens
ggctaatgatgtcatcgattac

SEQ ID NO: 61339 - DNA, 21 bp, Homo sapiens
tggaaagaggacagttacttc

SEQ ID NO: 61340 - DNA, 18 bp, Homo sapiens
gcaaagcaggatccatca

SEQ ID NO: 61341 - DNA, 22 bp, Homo sapiens
agaccatgagtctctttttagg

SEQ ID NO: 61342 - DNA, 18 bp, Homo sapiens
ccctggaaacacctcaag

SEQ ID NO: 61343 - DNA, 20 bp, Homo sapiens
accctttttcctacagatgg

SEQ ID NO: 61344 - DNA, 22 bp, Homo sapiens
acatttaatcagtgaaccagtt

SEQ ID NO: 61345 - DNA, 19 bp, Homo sapiens
gaggaaatcttgggcttga

SEQ ID NO: 61346 - DNA, 21 bp, Homo sapiens
tttctgatgttaaagtcactt

SEQ ID NO: 61347 - DNA, 24 bp, Homo sapiens
tggtttccataaagatcaatcaag

SEQ ID NO: 61348 - DNA, 24 bp, Homo sapiens
ttttaaaaatgattttttgtatca

SEQ ID NO: 61349 - DNA, 17 bp, Homo sapiens
gggaaggttggctggac

SEQ ID NO: 61350 - DNA, 24 bp, Homo sapiens
aggttttatctgaaaaaacatggg

SEQ ID NO: 61351 - DNA, 18 bp, Homo sapiens
atctgcagtaagaggcac

SEQ ID NO: 61352 - DNA, 21 bp, Homo sapiens
tctctagttgcctgtctcggg

SEQ ID NO: 61353 - DNA, 23 bp, Homo sapiens
tccatgagttggatatagtttgc

SEQ ID NO: 61354 - DNA, 22 bp, Homo sapiens
accaggcctcaccatcagcaac

SEQ ID NO: 61355 - DNA, 20 bp, Homo sapiens
tctccgtcttaaaatattgc

SEQ ID NO: 61356 - DNA, 24 bp, Homo sapiens
aaaagatatcatttttaaaaaaac

SEQ ID NO: 61357 - DNA, 21 bp, Homo sapiens
aggttgtgattgtcctttttc

SEQ ID NO: 61358 - DNA, 23 bp, Homo sapiens
cttctgtatgtttgggaaatgag

SEQ ID NO: 61359 - DNA, 24 bp, Homo sapiens
acatttttgatatatggggaacat

SEQ ID NO: 61360 - DNA, 20 bp, Homo sapiens
taatgacttcattcacgtgc

SEQ ID NO: 61361 - DNA, 24 bp, Homo sapiens
tccataagagagaattttaacagc

SEQ ID NO: 61362 - DNA, 18 bp, Homo sapiens
gcactggccaaagagagg

SEQ ID NO: 61363 - DNA, 23 bp, Homo sapiens
gcggtcatttatgttaaatcttc

SEQ ID NO: 61364 - DNA, 21 bp, Homo sapiens
aaaagtaggttcaggtttccg

SEQ ID NO: 61365 - DNA, 16 bp, Homo sapiens
gcgattgtactcacgg

SEQ ID NO: 61366 - DNA, 22 bp, Homo sapiens
agatgtgctaaatgcatacatg

SEQ ID NO: 61367 - DNA, 24 bp, Homo sapiens
ttttacaactgcattttttacaac

SEQ ID NO: 61368 - DNA, 21 bp, Homo sapiens
tgaagttgaacgaagaagaag

SEQ ID NO: 61369 - DNA, 22 bp, Homo sapiens
agaagaatttaggaatagaacc

SEQ ID NO: 61370 - DNA, 22 bp, Homo sapiens
attcccaagtcaaatgatccgt

SEQ ID NO: 61371 - DNA, 19 bp, Homo sapiens
ggttcccttgttccagcgc

SEQ ID NO: 61372 - DNA, 24 bp, Homo sapiens
caagcaccacctgttcccccaaaa

SEQ ID NO: 61373 - DNA, 18 bp, Homo sapiens
agttcttttgcgcgttgc

SEQ ID NO: 61374 - DNA, 24 bp, Homo sapiens
agaaatggagtgctttgaatattg

SEQ ID NO: 61375 - DNA, 19 bp, Homo sapiens
tctgagcaacaaatgccgg

SEQ ID NO: 61376 - DNA, 24 bp, Homo sapiens
ttcctccattttcatcgcagagac

SEQ ID NO: 61377 - DNA, 22 bp, Homo sapiens
tttctactgtcttgaagtcggt

SEQ ID NO: 61378 - DNA, 23 bp, Homo sapiens
ggactatatccgaaagttgcaac

SEQ ID NO: 61379 - DNA, 21 bp, Homo sapiens
ggattgactgtgttaggatca

SEQ ID NO: 61380 - DNA, 18 bp, Homo sapiens
aaactggagcacgccaac

SEQ ID NO: 61381 - DNA, 20 bp, Homo sapiens
atactgactttggggttaca

SEQ ID NO: 61382 - DNA, 20 bp, Homo sapiens
agcctgcatttcaagttcct

SEQ ID NO: 61383 - DNA, 22 bp, Homo sapiens
ccctctggtattgtacattttg

SEQ ID NO: 61384 - DNA, 18 bp, Homo sapiens
accaaatctggagagcag

SEQ ID NO: 61385 - DNA, 23 bp, Homo sapiens
agtatcatatagagtggtttcac

SEQ ID NO: 61386 - DNA, 18 bp, Homo sapiens
gctgaaggaggtcttggc

SEQ ID NO: 61387 - DNA, 23 bp, Homo sapiens
cagtgttttatctttactcttat

SEQ ID NO: 61388 - DNA, 17 bp, Homo sapiens
tgaaggtgatggtgcca

SEQ ID NO: 61389 - DNA, 24 bp, Homo sapiens
ctttcccttattccatccacgggt

SEQ ID NO: 61390 - DNA, 18 bp, Homo sapiens
ccatttttgtggggacac

SEQ ID NO: 61391 - DNA, 23 bp, Homo sapiens
gaacccgttcttgagaactgcag

SEQ ID NO: 61392 - DNA, 22 bp, Homo sapiens
aaaggagtggatcagtgacacc

SEQ ID NO: 61393 - DNA, 24 bp, Homo sapiens
aacaactctcgatctcacggatgg

SEQ ID NO: 61394 - DNA, 24 bp, Homo sapiens
cttccatgctcatactgctcctcc

SEQ ID NO: 61395 - DNA, 24 bp, Homo sapiens
gactgaggccaaccaagcctatag

SEQ ID NO: 61396 - DNA, 22 bp, Homo sapiens
agcagtttgtgcgaatgcagtg

SEQ ID NO: 61397 - DNA, 19 bp, Homo sapiens
cgacaccctttctcccgtc

SEQ ID NO: 61398 - DNA, 22 bp, Homo sapiens
ggaaaattatcaagaaaacccc

SEQ ID NO: 61399 - DNA, 17 bp, Homo sapiens
ccaaaacaagcagccgg

SEQ ID NO: 61400 - DNA, 24 bp, Homo sapiens
cacaaaattctaaaaataaaatat

SEQ ID NO: 61401 - DNA, 24 bp, Homo sapiens
atggagattcaaacaccacgtctt

SEQ ID NO: 61402 - DNA, 16 bp, Homo sapiens
ggcccgtaggcagagg

SEQ ID NO: 61403 - DNA, 18 bp, Homo sapiens
cagggagtgaactgctcc

SEQ ID NO: 61404 - DNA, 23 bp, Homo sapiens
gctgctactccaaaatgaatagg

SEQ ID NO: 61405 - DNA, 20 bp, Homo sapiens
catcccttgccctggagaga

SEQ ID NO: 61406 - DNA, 23 bp, Homo sapiens
ccctcttcttacctgatacattc

SEQ ID NO: 61407 - DNA, 20 bp, Homo sapiens
ttggcactcacctggcacac

SEQ ID NO: 61408 - DNA, 18 bp, Homo sapiens
gtgcagcttttctccaac

SEQ ID NO: 61409 - DNA, 17 bp, Homo sapiens
ttatccttggggggctc

SEQ ID NO: 61410 - DNA, 21 bp, Homo sapiens
gcatgattaccaatcaatcac

SEQ ID NO: 61411 - DNA, 24 bp, Homo sapiens
aagatctcaaatcaaggccggagt

SEQ ID NO: 61412 - DNA, 22 bp, Homo sapiens
gaaacccacggaaattatacct

SEQ ID NO: 61413 - DNA, 19 bp, Homo sapiens
aacagagagggctctgtac

SEQ ID NO: 61414 - DNA, 17 bp, Homo sapiens
gggctgctgtttatctc

SEQ ID NO: 61415 - DNA, 24 bp, Homo sapiens
ttcgatgattcaaacccagctttg

SEQ ID NO: 61416 - DNA, 21 bp, Homo sapiens
gccttagaaacggtgttgcaa

SEQ ID NO: 61417 - DNA, 24 bp, Homo sapiens
tcccattttcttccacttcttctt

SEQ ID NO: 61418 - DNA, 22 bp, Homo sapiens
catcaaggttcaaagaatcaat

SEQ ID NO: 61419 - DNA, 24 bp, Homo sapiens
caggctatgatatttgccatagag

SEQ ID NO: 61420 - DNA, 16 bp, Homo sapiens
gttgctcccaccacag

SEQ ID NO: 61421 - DNA, 22 bp, Homo sapiens
gctgggatacaggatatttgac

SEQ ID NO: 61422 - DNA, 23 bp, Homo sapiens
ttgagtacctggggaatgtagaa

SEQ ID NO: 61423 - DNA, 23 bp, Homo sapiens
ttttgttgctcaaaacaaaattg

SEQ ID NO: 61424 - DNA, 16 bp, Homo sapiens
cacccccaagcctgct

SEQ ID NO: 61425 - DNA, 22 bp, Homo sapiens
cacattccctctacgattgctg

SEQ ID NO: 61426 - DNA, 24 bp, Homo sapiens
atcaactaaatcataggtcttttg

SEQ ID NO: 61427 - DNA, 21 bp, Homo sapiens
ggcaaatctgctggggctctt

SEQ ID NO: 61428 - DNA, 24 bp, Homo sapiens
tccttaccctttctttcatcctgt

SEQ ID NO: 61429 - DNA, 22 bp, Homo sapiens
ggggatggttcggaggaaagac

SEQ ID NO: 61430 - DNA, 19 bp, Homo sapiens
aagccacctccacaacagc

SEQ ID NO: 61431 - DNA, 21 bp, Homo sapiens
cccagttccagcggaaatact

SEQ ID NO: 61432 - DNA, 24 bp, Homo sapiens
ctcactcactcattcaccatgttc

SEQ ID NO: 61433 - DNA, 19 bp, Homo sapiens
ggaatttctcaatccccgg

SEQ ID NO: 61434 - DNA, 23 bp, Homo sapiens
tcctcagcaacaagaatcaattc

SEQ ID NO: 61435 - DNA, 20 bp, Homo sapiens
agtactgggagatgagttca

SEQ ID NO: 61436 - DNA, 18 bp, Homo sapiens
ccatggcagacatcatcg

SEQ ID NO: 61437 - DNA, 23 bp, Homo sapiens
cacgatgactttggccgtggaat

SEQ ID NO: 61438 - DNA, 20 bp, Homo sapiens
agctgatgacgactatgggc

SEQ ID NO: 61439 - DNA, 17 bp, Homo sapiens
tgcgccggacaatctcc

SEQ ID NO: 61440 - DNA, 24 bp, Homo sapiens
atatctgcatcgacttcagtgaac

SEQ ID NO: 61441 - DNA, 22 bp, Homo sapiens
ggcatggcgatcagggaggagc

SEQ ID NO: 61442 - DNA, 24 bp, Homo sapiens
tccagcatgtggtagaggtgattc

SEQ ID NO: 61443 - DNA, 22 bp, Homo sapiens
gatctgcccagccttcagagcg

SEQ ID NO: 61444 - DNA, 19 bp, Homo sapiens
ccagatcttgagcccctca

SEQ ID NO: 61445 - DNA, 24 bp, Homo sapiens
ttggcaaaaccattgtggacagac

SEQ ID NO: 61446 - DNA, 16 bp, Homo sapiens
ccagcgaggcctgggc

SEQ ID NO: 61447 - DNA, 24 bp, Homo sapiens
taaaggtccttttgcaccttcttg

SEQ ID NO: 61448 - DNA, 24 bp, Homo sapiens
gttggcggcaccattggattcgct

SEQ ID NO: 61449 - DNA, 19 bp, Homo sapiens
ctgttgctaaacctgtcgc

SEQ ID NO: 61450 - DNA, 21 bp, Homo sapiens
ctgaagaaggtccatcccagg

SEQ ID NO: 61451 - DNA, 22 bp, Homo sapiens
atgtaaggggtctcgacactgc

SEQ ID NO: 61452 - DNA, 23 bp, Homo sapiens
ggaagaaacatttaactgccacc

SEQ ID NO: 61453 - DNA, 20 bp, Homo sapiens
caatggagtagactgctaag

SEQ ID NO: 61454 - DNA, 20 bp, Homo sapiens
agaggtcacgaagaaagtgg

SEQ ID NO: 61455 - DNA, 18 bp, Homo sapiens
agccattggtgaagagcc

SEQ ID NO: 61456 - DNA, 19 bp, Homo sapiens
gtacaggggatgagaacat

SEQ ID NO: 61457 - DNA, 21 bp, Homo sapiens
gctatataagtgaaggacgca

SEQ ID NO: 61458 - DNA, 24 bp, Homo sapiens
ttacggatatcctacaatgtgtac

SEQ ID NO: 61459 - DNA, 19 bp, Homo sapiens
accactatttttcttgcct

SEQ ID NO: 61460 - DNA, 19 bp, Homo sapiens
acctgcttacctgggagag

SEQ ID NO: 61461 - DNA, 24 bp, Homo sapiens
aaaaaaggtactttgaatccaaag

SEQ ID NO: 61462 - DNA, 22 bp, Homo sapiens
aagaaagttgaggcgtggcagg

SEQ ID NO: 61463 - DNA, 18 bp, Homo sapiens
cgtaggtgcttcaggacc

SEQ ID NO: 61464 - DNA, 22 bp, Homo sapiens
aaaagctgtctcttcctcaagt

SEQ ID NO: 61465 - DNA, 17 bp, Homo sapiens
accacactcatcaaagg

SEQ ID NO: 61466 - DNA, 17 bp, Homo sapiens
taccgttgttgtgcagg

SEQ ID NO: 61467 - DNA, 18 bp, Homo sapiens
cgatggagccatcctctg

SEQ ID NO: 61468 - DNA, 24 bp, Homo sapiens
gcttgtactcattctttgctcctc

SEQ ID NO: 61469 - DNA, 21 bp, Homo sapiens
cgttgatgaagagtctttctc

SEQ ID NO: 61470 - DNA, 24 bp, Homo sapiens
caaacaatatgggggagcaggtga

SEQ ID NO: 61471 - DNA, 18 bp, Homo sapiens
ttttctgatggacagcac

SEQ ID NO: 61472 - DNA, 23 bp, Homo sapiens
catcatcaactggcacctctccc

SEQ ID NO: 61473 - DNA, 18 bp, Homo sapiens
ggaaaccaaaggccctcc

SEQ ID NO: 61474 - DNA, 21 bp, Homo sapiens
aacgtctatgccaagaaggga

SEQ ID NO: 61475 - DNA, 20 bp, Homo sapiens
cccaagattgcaaaggccag

SEQ ID NO: 61476 - DNA, 22 bp, Homo sapiens
gtgggttctccagggaggtagg

SEQ ID NO: 61477 - DNA, 16 bp, Homo sapiens
gcacaaaggtgagtgg

SEQ ID NO: 61478 - DNA, 24 bp, Homo sapiens
acagatatcagaaccaaggacctc

SEQ ID NO: 61479 - DNA, 18 bp, Homo sapiens
gatccctttcctggtccc

SEQ ID NO: 61480 - DNA, 18 bp, Homo sapiens
gattcttgtgcccaaact

SEQ ID NO: 61481 - DNA, 19 bp, Homo sapiens
actccccatcaggacactc

SEQ ID NO: 61482 - DNA, 22 bp, Homo sapiens
cccctgaccctacaactacagc

SEQ ID NO: 61483 - DNA, 16 bp, Homo sapiens
aagtggaccaagccct

SEQ ID NO: 61484 - DNA, 24 bp, Homo sapiens
ttctccaactgcagccgagactgc

SEQ ID NO: 61485 - DNA, 20 bp, Homo sapiens
aaactgtgcaaagcaccatc

SEQ ID NO: 61486 - DNA, 21 bp, Homo sapiens
tgctttgagtgtgtggagtgt

SEQ ID NO: 61487 - DNA, 16 bp, Homo sapiens
ttccacctccatgccc

SEQ ID NO: 61488 - DNA, 18 bp, Homo sapiens
cttgttacaggcactggc

SEQ ID NO: 61489 - DNA, 23 bp, Homo sapiens
tcagaatgatttcatcaaaatgg

SEQ ID NO: 61490 - DNA, 17 bp, Homo sapiens
cgatctccttggcaatg

SEQ ID NO: 61491 - DNA, 24 bp, Homo sapiens
tattcccaccaccacatgtacact

SEQ ID NO: 61492 - DNA, 16 bp, Homo sapiens
aaaatgcccagcacgg

SEQ ID NO: 61493 - DNA, 23 bp, Homo sapiens
cttcactgggacattttacagat

SEQ ID NO: 61494 - DNA, 20 bp, Homo sapiens
ccttgacaatgggtgtgttg

SEQ ID NO: 61495 - DNA, 24 bp, Homo sapiens
tgagaaccacacctcctgcattgc

SEQ ID NO: 61496 - DNA, 16 bp, Homo sapiens
ggagctggagaagcag

SEQ ID NO: 61497 - DNA, 21 bp, Homo sapiens
ctttgggatcgcactcaccct

SEQ ID NO: 61498 - DNA, 20 bp, Homo sapiens
gatgccaaaggccggctggc

SEQ ID NO: 61499 - DNA, 23 bp, Homo sapiens
gtgtttatcaagttccgcaacac

SEQ ID NO: 61500 - DNA, 18 bp, Homo sapiens
ccaggaggacacggttgg

SEQ ID NO: 61501 - DNA, 19 bp, Homo sapiens
tcctcctcttctccctgct

SEQ ID NO: 61502 - DNA, 16 bp, Homo sapiens
aactgcaggttgagcc

SEQ ID NO: 61503 - DNA, 16 bp, Homo sapiens
ggactggacgtgccgc

SEQ ID NO: 61504 - DNA, 20 bp, Homo sapiens
ggtgtagagccagatcacac

SEQ ID NO: 61505 - DNA, 24 bp, Homo sapiens
gcatctcatgcatcctggtgaaaa

SEQ ID NO: 61506 - DNA, 19 bp, Homo sapiens
cacgtgatgaagatgatct

SEQ ID NO: 61507 - DNA, 16 bp, Homo sapiens
cttccaccgcaagtgg

SEQ ID NO: 61508 - DNA, 16 bp, Homo sapiens
cagcaggcaggtgtag

SEQ ID NO: 61509 - DNA, 22 bp, Homo sapiens
gcaccttcatgcagattgtcat

SEQ ID NO: 61510 - DNA, 19 bp, Homo sapiens
ggcttcattgaagttctcc

SEQ ID NO: 61511 - DNA, 19 bp, Homo sapiens
ccaggagctggaggatgag

SEQ ID NO: 61512 - DNA, 18 bp, Homo sapiens
gctggaatgaaggagatc

SEQ ID NO: 61513 - DNA, 19 bp, Homo sapiens
cctgggcttcctgatcggc

SEQ ID NO: 61514 - DNA, 16 bp, Homo sapiens
tgccaggatggcaatc

SEQ ID NO: 61515 - DNA, 16 bp, Homo sapiens
ggaagctgccggagaa

SEQ ID NO: 61516 - DNA, 23 bp, Homo sapiens
gggatggcttgaagagaatgatg

SEQ ID NO: 61517 - DNA, 24 bp, Homo sapiens
atgctcatcttcttcatcgtctgg

SEQ ID NO: 61518 - DNA, 18 bp, Homo sapiens
cagccaccttgaaagcgt

SEQ ID NO: 61519 - DNA, 17 bp, Homo sapiens
gccgtagaggtgattgc

SEQ ID NO: 61520 - DNA, 16 bp, Homo sapiens
gagcctccaaggctgc

SEQ ID NO: 61521 - DNA, 23 bp, Homo sapiens
tgcatcttcttcaacaagatcta

SEQ ID NO: 61522 - DNA, 17 bp, Homo sapiens
tgggaatgggtcttcgc

SEQ ID NO: 61523 - DNA, 16 bp, Homo sapiens
ttgcagcaccgcagct

SEQ ID NO: 61524 - DNA, 17 bp, Homo sapiens
gctgctcttgctgggtt

SEQ ID NO: 61525 - DNA, 16 bp, Homo sapiens
gtctcccgcaagcggt

SEQ ID NO: 61526 - DNA, 24 bp, Homo sapiens
gatgaccttctgcttgcatctggg

SEQ ID NO: 61527 - DNA, 19 bp, Homo sapiens
cctccatcagcagcaagag

SEQ ID NO: 61528 - DNA, 18 bp, Homo sapiens
ttctgaggctcatcaaag

SEQ ID NO: 61529 - DNA, 18 bp, Homo sapiens
agccgctggccctaaccc

SEQ ID NO: 61530 - DNA, 16 bp, Homo sapiens
gcttttctgggcctcc

SEQ ID NO: 61531 - DNA, 18 bp, Homo sapiens
aacgatctcagcagcagc

SEQ ID NO: 61532 - DNA, 22 bp, Homo sapiens
cggtcagatctaagtccgtttc

SEQ ID NO: 61533 - DNA, 22 bp, Homo sapiens
tcaccttctcactgagctttga

SEQ ID NO: 61534 - DNA, 16 bp, Homo sapiens
ctctggccgctggtct

SEQ ID NO: 61535 - DNA, 19 bp, Homo sapiens
caccagaactccctggagg

SEQ ID NO: 61536 - DNA, 18 bp, Homo sapiens
gatgacaaagctctgtga

SEQ ID NO: 61537 - DNA, 18 bp, Homo sapiens
ttactcccgctgcagtgc

SEQ ID NO: 61538 - DNA, 24 bp, Homo sapiens
tagcccagtcttctccttccattt

SEQ ID NO: 61539 - DNA, 24 bp, Homo sapiens
ctgcaaggacctgtgggtggagac

SEQ ID NO: 61540 - DNA, 21 bp, Homo sapiens
aaaggagtctggggcgattcc

SEQ ID NO: 61541 - DNA, 21 bp, Homo sapiens
cccagcacttgtagtgtccag

SEQ ID NO: 61542 - DNA, 17 bp, Homo sapiens
gtgactaaattcggggc

SEQ ID NO: 61543 - DNA, 22 bp, Homo sapiens
ttacagaaaacgtagtgaattc

SEQ ID NO: 61544 - DNA, 20 bp, Homo sapiens
cacccgtccagcatggtgac

SEQ ID NO: 61545 - DNA, 24 bp, Homo sapiens
cgccctccaggagagggggtgctg

SEQ ID NO: 61546 - DNA, 18 bp, Homo sapiens
gacacatcctgcccactc

SEQ ID NO: 61547 - DNA, 20 bp, Homo sapiens
gggctgctaagggtttggtc

SEQ ID NO: 61548 - DNA, 16 bp, Homo sapiens
ctggctggacacatgg

SEQ ID NO: 61549 - DNA, 24 bp, Homo sapiens
gtccatctgttccctagcccatgg

SEQ ID NO: 61550 - DNA, 17 bp, Homo sapiens
cggagtgcttcgaggag

SEQ ID NO: 61551 - DNA, 17 bp, Homo sapiens
gaggaggggtggatggg

SEQ ID NO: 61552 - DNA, 20 bp, Homo sapiens
gaaggaagggatccagactc

SEQ ID NO: 61553 - DNA, 18 bp, Homo sapiens
gaggtggcccacaggtgc

SEQ ID NO: 61554 - DNA, 24 bp, Homo sapiens
ggaaggaactggccctctgaaaac

SEQ ID NO: 61555 - DNA, 24 bp, Homo sapiens
gacttctcctgcatgcactttgac

SEQ ID NO: 61556 - DNA, 17 bp, Homo sapiens
ttgacctgcctctggtc

SEQ ID NO: 61557 - DNA, 24 bp, Homo sapiens
tcttggacttgttggacatcttcc

SEQ ID NO: 61558 - DNA, 23 bp, Homo sapiens
tagccatctggtgatgggactat

SEQ ID NO: 61559 - DNA, 24 bp, Homo sapiens
ccctcttacgggaagcccttctgg

SEQ ID NO: 61560 - DNA, 17 bp, Homo sapiens
ttatggcgccgaaacgc

SEQ ID NO: 61561 - DNA, 24 bp, Homo sapiens
gatattgtggctggggcctcttgc

SEQ ID NO: 61562 - DNA, 16 bp, Homo sapiens
ctcccagtcggccgcc

SEQ ID NO: 61563 - DNA, 19 bp, Homo sapiens
tggccggggcggggcgcac

SEQ ID NO: 61564 - DNA, 16 bp, Homo sapiens
cagggaggggggtcga

SEQ ID NO: 61565 - DNA, 24 bp, Homo sapiens
gttgcagacagggtccccgttggc

SEQ ID NO: 61566 - DNA, 24 bp, Homo sapiens
ctttgattcccatgtgagatttag

SEQ ID NO: 61567 - DNA, 21 bp, Homo sapiens
atttgcacaacaggtgccggc

SEQ ID NO: 61568 - DNA, 21 bp, Homo sapiens
taagcctcataaatcacttcg

SEQ ID NO: 61569 - DNA, 17 bp, Homo sapiens
tctcctgccggagtttc

SEQ ID NO: 61570 - DNA, 20 bp, Homo sapiens
gcattatttgcagagtggag

SEQ ID NO: 61571 - DNA, 21 bp, Homo sapiens
ggagtcacctatactgtgtat

SEQ ID NO: 61572 - DNA, 22 bp, Homo sapiens
gctgaggagactctaaaaactc

SEQ ID NO: 61573 - DNA, 19 bp, Homo sapiens
atcaagcccaagcgaagac

SEQ ID NO: 61574 - DNA, 23 bp, Homo sapiens
ccaactgacatcccagtgctttt

SEQ ID NO: 61575 - DNA, 18 bp, Homo sapiens
ccactacctgtgcaatgc

SEQ ID NO: 61576 - DNA, 23 bp, Homo sapiens
catttgaaggagtttttttcccc

SEQ ID NO: 61577 - DNA, 17 bp, Homo sapiens
gtgtgtcaactgtgggg

SEQ ID NO: 61578 - DNA, 24 bp, Homo sapiens
ccacctgtgcccgctcctaccagt

SEQ ID NO: 61579 - DNA, 18 bp, Homo sapiens
gagaacttgccggttaag

SEQ ID NO: 61580 - DNA, 23 bp, Homo sapiens
cccattcatcttgtggtagaggc

SEQ ID NO: 61581 - DNA, 16 bp, Homo sapiens
tgtgcctgagaggcac

SEQ ID NO: 61582 - DNA, 24 bp, Homo sapiens
cgccagagaggggtggctgtggcc

SEQ ID NO: 61583 - DNA, 18 bp, Homo sapiens
ctcaaacatctgctgggg

SEQ ID NO: 61584 - DNA, 17 bp, Homo sapiens
cttcctggggggaccgg

SEQ ID NO: 61585 - DNA, 24 bp, Homo sapiens
ccaacactgccacctctcccaagt

SEQ ID NO: 61586 - DNA, 19 bp, Homo sapiens
acctacccctcctatgtgc

SEQ ID NO: 61587 - DNA, 17 bp, Homo sapiens
aagtccccagcacctgc

SEQ ID NO: 61588 - DNA, 19 bp, Homo sapiens
cctgcgcccaggcctagct

SEQ ID NO: 61589 - DNA, 23 bp, Homo sapiens
tgcttaggggtgaagctggaggc

SEQ ID NO: 61590 - DNA, 17 bp, Homo sapiens
aggacggcgtcaagtac

SEQ ID NO: 61591 - DNA, 20 bp, Homo sapiens
gctgtagtcgtgggcagccg

SEQ ID NO: 61592 - DNA, 16 bp, Homo sapiens
gggctgcgtctccagc

SEQ ID NO: 61593 - DNA, 23 bp, Homo sapiens
gcaggctgggtgcccatagtagc

SEQ ID NO: 61594 - DNA, 23 bp, Homo sapiens
tggctcccaccttttcggcttcc

SEQ ID NO: 61595 - DNA, 16 bp, Homo sapiens
gtcagtgacacctggt

SEQ ID NO: 61596 - DNA, 16 bp, Homo sapiens
ggaggcagcgggagct

SEQ ID NO: 61597 - DNA, 17 bp, Homo sapiens
ccccgcggaagatgagg

SEQ ID NO: 61598 - DNA, 24 bp, Homo sapiens
cactgcacccctcagctgctggag

SEQ ID NO: 61599 - DNA, 18 bp, Homo sapiens
ttctttgggtggcgtggg

SEQ ID NO: 61600 - DNA, 16 bp, Homo sapiens
gcccaccaccacaacc

SEQ ID NO: 61601 - DNA, 19 bp, Homo sapiens
gagggaggccactgagctc

SEQ ID NO: 61602 - DNA, 16 bp, Homo sapiens
cacttgttgcacagcc

SEQ ID NO: 61603 - DNA, 22 bp, Homo sapiens
gggtacacagagagtgggcctc

SEQ ID NO: 61604 - DNA, 20 bp, Homo sapiens
ctgatcctctctctctttgc

SEQ ID NO: 61605 - DNA, 17 bp, Homo sapiens
gctcacggtccaggggt

SEQ ID NO: 61606 - DNA, 24 bp, Homo sapiens
gggagtcgtgatctcaatgtctgt

SEQ ID NO: 61607 - DNA, 24 bp, Homo sapiens
gcccccgtccagccagggcaaacc

SEQ ID NO: 61608 - DNA, 20 bp, Homo sapiens
ccggtggggtattatgtttc

SEQ ID NO: 61609 - DNA, 16 bp, Homo sapiens
ctgctcccacctctcc

SEQ ID NO: 61610 - DNA, 16 bp, Homo sapiens
gactcgcagggcaacc

SEQ ID NO: 61611 - DNA, 17 bp, Homo sapiens
gaagcaagcagacgggc

SEQ ID NO: 61612 - DNA, 22 bp, Homo sapiens
gcacaactacatggaacccgcg

SEQ ID NO: 61613 - DNA, 18 bp, Homo sapiens
ctcatcaccacgggccca

SEQ ID NO: 61614 - DNA, 16 bp, Homo sapiens
cggccgtgctgaatgc

SEQ ID NO: 61615 - DNA, 20 bp, Homo sapiens
tgagcggggttggcatagta

SEQ ID NO: 61616 - DNA, 22 bp, Homo sapiens
cacccagaccctgagccgccgc

SEQ ID NO: 61617 - DNA, 19 bp, Homo sapiens
tcgtctggaggcagcagct

SEQ ID NO: 61618 - DNA, 24 bp, Homo sapiens
tgtcaggcgctggcggcacgcctc

SEQ ID NO: 61619 - DNA, 19 bp, Homo sapiens
tgtgagtcggggtgctgcg

SEQ ID NO: 61620 - DNA, 16 bp, Homo sapiens
gggctggggctccgtg

SEQ ID NO: 61621 - DNA, 16 bp, Homo sapiens
gcgccacctccatggc

SEQ ID NO: 61622 - DNA, 17 bp, Homo sapiens
tggaggtgccttcacgt

SEQ ID NO: 61623 - DNA, 16 bp, Homo sapiens
cggagcgagtccccgc

SEQ ID NO: 61624 - DNA, 17 bp, Homo sapiens
tttgggggttcacaagc

SEQ ID NO: 61625 - DNA, 16 bp, Homo sapiens
cgggtctctcgggggc

SEQ ID NO: 61626 - DNA, 23 bp, Homo sapiens
gttccccccaccaacaggaaagc

SEQ ID NO: 61627 - DNA, 16 bp, Homo sapiens
ggcccggggcttctcc

SEQ ID NO: 61628 - DNA, 16 bp, Homo sapiens
gctcagggaatcgcgc

SEQ ID NO: 61629 - DNA, 16 bp, Homo sapiens
cccctcccggggacct

SEQ ID NO: 61630 - DNA, 17 bp, Homo sapiens
ctgaacctcgccctcgc

SEQ ID NO: 61631 - DNA, 17 bp, Homo sapiens
gccttccaccgttcatt

SEQ ID NO: 61632 - DNA, 17 bp, Homo sapiens
gtggcagtgggtgcctc

SEQ ID NO: 61633 - DNA, 17 bp, Homo sapiens
gcttttgctccccgcgc

SEQ ID NO: 61634 - DNA, 16 bp, Homo sapiens
ggctgggcaggcgacc

SEQ ID NO: 61635 - DNA, 16 bp, Homo sapiens
tgggaggggtggtggc

SEQ ID NO: 61636 - DNA, 24 bp, Homo sapiens
tgacattttttgtttgctctagaa

SEQ ID NO: 61637 - DNA, 20 bp, Homo sapiens
cggccgctccctttataagc

SEQ ID NO: 61638 - DNA, 24 bp, Homo sapiens
ctgaaagtcagcgagaaaaacagc

SEQ ID NO: 61639 - DNA, 18 bp, Homo sapiens
gcccgagagagtgactct

SEQ ID NO: 61640 - DNA, 22 bp, Homo sapiens
ttagggttagacaaaaaatggc

SEQ ID NO: 61641 - DNA, 17 bp, Homo sapiens
acgtccttcctcatggc

SEQ ID NO: 61642 - DNA, 21 bp, Homo sapiens
tgccaaagccgccttagtgaa

SEQ ID NO: 61643 - DNA, 22 bp, Homo sapiens
ccctcaatgaaaaagccatggc

SEQ ID NO: 61644 - DNA, 16 bp, Homo sapiens
attcgcttgggggtcc

SEQ ID NO: 61645 - DNA, 23 bp, Homo sapiens
cccactcgcccgcccgggccctg

SEQ ID NO: 61646 - DNA, 20 bp, Homo sapiens
tgcggctgggggccctggac

SEQ ID NO: 61647 - DNA, 22 bp, Homo sapiens
attccagatcagaacatactgc

SEQ ID NO: 61648 - DNA, 16 bp, Homo sapiens
gcggccgcggcagcgg

SEQ ID NO: 61649 - DNA, 21 bp, Homo sapiens
gcgaagataggacgctggcga

SEQ ID NO: 61650 - DNA, 18 bp, Homo sapiens
ctccgggggcggcggggc

SEQ ID NO: 61651 - DNA, 19 bp, Homo sapiens
gggagcccagccttgtcca

SEQ ID NO: 61652 - DNA, 18 bp, Homo sapiens
cccccagctgcggggcga

SEQ ID NO: 61653 - DNA, 16 bp, Homo sapiens
gccgccgccgccgctg

SEQ ID NO: 61654 - DNA, 17 bp, Homo sapiens
caaagaggccaagagca

SEQ ID NO: 61655 - DNA, 18 bp, Homo sapiens
cgggttcgcctcccgggc

SEQ ID NO: 61656 - DNA, 18 bp, Homo sapiens
ccgcggccaagaacggct

SEQ ID NO: 61657 - DNA, 16 bp, Homo sapiens
cgccgcctccattcgc

SEQ ID NO: 61658 - DNA, 16 bp, Homo sapiens
gtggttccagaaccgc

SEQ ID NO: 61659 - DNA, 18 bp, Homo sapiens
ccccagtgctgtccgggt

SEQ ID NO: 61660 - DNA, 22 bp, Homo sapiens
tgcttttctttcccattttctt

SEQ ID NO: 61661 - DNA, 22 bp, Homo sapiens
tcagactttttgcccgaggagc

SEQ ID NO: 61662 - DNA, 17 bp, Homo sapiens
gaggagggtgttaaaac

SEQ ID NO: 61663 - DNA, 17 bp, Homo sapiens
ctgcttgcgaaacttgg

SEQ ID NO: 61664 - DNA, 16 bp, Homo sapiens
acagaggcgcgagtcc

SEQ ID NO: 61665 - DNA, 23 bp, Homo sapiens
caaatccagtatttctgatcggc

SEQ ID NO: 61666 - DNA, 18 bp, Homo sapiens
cgcggagactcactaccc

SEQ ID NO: 61667 - DNA, 21 bp, Homo sapiens
cttcgaatttcaccagccgcc

SEQ ID NO: 61668 - DNA, 24 bp, Homo sapiens
gaagcgcaagcagcggcgcatccg

SEQ ID NO: 61669 - DNA, 17 bp, Homo sapiens
gtttccaggcgcgcgta

SEQ ID NO: 61670 - DNA, 24 bp, Homo sapiens
tcctctgtcatactctagttcctt

SEQ ID NO: 61671 - DNA, 22 bp, Homo sapiens
agctcctcccgagtgtagatgt

SEQ ID NO: 61672 - DNA, 16 bp, Homo sapiens
attctagctccacggc

SEQ ID NO: 61673 - DNA, 24 bp, Homo sapiens
tctttgagctgggcactggtgaaa

SEQ ID NO: 61674 - DNA, 21 bp, Homo sapiens
tctctcggcaactctctcgcg

SEQ ID NO: 61675 - DNA, 23 bp, Homo sapiens
cgtggtccgtgaagagtttgtaa

SEQ ID NO: 61676 - DNA, 16 bp, Homo sapiens
ccaccagagcagtccg

SEQ ID NO: 61677 - DNA, 24 bp, Homo sapiens
tctttcatttgtgtaagcaaattt

SEQ ID NO: 61678 - DNA, 17 bp, Homo sapiens
tttggggccacgtccgg

SEQ ID NO: 61679 - DNA, 24 bp, Homo sapiens
atgcaatcaaggcttcctatatac

SEQ ID NO: 61680 - DNA, 21 bp, Homo sapiens
ctatgctgacttcagttcctg

SEQ ID NO: 61681 - DNA, 20 bp, Homo sapiens
ccttacctgcggcgtacgga

SEQ ID NO: 61682 - DNA, 21 bp, Homo sapiens
caattcctctgcctacgagtc

SEQ ID NO: 61683 - DNA, 17 bp, Homo sapiens
gtgagggaagggcagcc

SEQ ID NO: 61684 - DNA, 20 bp, Homo sapiens
ttccacttggctgagccatc

SEQ ID NO: 61685 - DNA, 16 bp, Homo sapiens
aagccactggcctggc

SEQ ID NO: 61686 - DNA, 16 bp, Homo sapiens
gcacatctccccactc

SEQ ID NO: 61687 - DNA, 17 bp, Homo sapiens
catcccagccatacagg

SEQ ID NO: 61688 - DNA, 23 bp, Homo sapiens
ggctttttcataaaactaggctc

SEQ ID NO: 61689 - DNA, 23 bp, Homo sapiens
aaaaaataaagcaccttcctaat

SEQ ID NO: 61690 - DNA, 16 bp, Homo sapiens
tggggtagtggagctc

SEQ ID NO: 61691 - DNA, 22 bp, Homo sapiens
aaaagaaaatcagtcacctatt

SEQ ID NO: 61692 - DNA, 22 bp, Homo sapiens
gcacgtccttggaccaacactg

SEQ ID NO: 61693 - DNA, 22 bp, Homo sapiens
acacaacacaaatttccacgaa

SEQ ID NO: 61694 - DNA, 22 bp, Homo sapiens
gctgtgagaatgggcttcgcgg

SEQ ID NO: 61695 - DNA, 21 bp, Homo sapiens
aagaccagtctaggcagcatg

SEQ ID NO: 61696 - DNA, 22 bp, Homo sapiens
cataatcatggctcactgaagc

SEQ ID NO: 61697 - DNA, 22 bp, Homo sapiens
tcacacctataatcccagtacc

SEQ ID NO: 61698 - DNA, 24 bp, Homo sapiens
tcctgagtagctgggactataggc

SEQ ID NO: 61699 - DNA, 20 bp, Homo sapiens
agagaagtcaaacagccagt

SEQ ID NO: 61700 - DNA, 18 bp, Homo sapiens
gacggggttttgccatgc

SEQ ID NO: 61701 - DNA, 21 bp, Homo sapiens
cagttgccaaatagccaaggc

SEQ ID NO: 61702 - DNA, 22 bp, Homo sapiens
atgatctgcctgcctcagcttc

SEQ ID NO: 61703 - DNA, 17 bp, Homo sapiens
acgccggatgggaagtc

SEQ ID NO: 61704 - DNA, 23 bp, Homo sapiens
ttttaacctgggacatgtttgac

SEQ ID NO: 61705 - DNA, 22 bp, Homo sapiens
cacccaaacaaggaactcagag

SEQ ID NO: 61706 - DNA, 19 bp, Homo sapiens
agagaactaggctccaggg

SEQ ID NO: 61707 - DNA, 22 bp, Homo sapiens
actgtgtatgcagagtactggt

SEQ ID NO: 61708 - DNA, 20 bp, Homo sapiens
ctagtttcccagagctatgg

SEQ ID NO: 61709 - DNA, 19 bp, Homo sapiens
tggtcattctggataacgt

SEQ ID NO: 61710 - DNA, 17 bp, Homo sapiens
ctggcagaggattaggc

SEQ ID NO: 61711 - DNA, 21 bp, Homo sapiens
gcatccaggctaacggatttt

SEQ ID NO: 61712 - DNA, 21 bp, Homo sapiens
gaaaaggatgaattcagctgc

SEQ ID NO: 61713 - DNA, 23 bp, Homo sapiens
ctgttgcttctctcagttgtcgg

SEQ ID NO: 61714 - DNA, 22 bp, Homo sapiens
ctctcttcttcagacatggggt

SEQ ID NO: 61715 - DNA, 18 bp, Homo sapiens
tccttttgcagggctgag

SEQ ID NO: 61716 - DNA, 19 bp, Homo sapiens
caagaccgtcacaaaaagg

SEQ ID NO: 61717 - DNA, 23 bp, Homo sapiens
tccaaatgaaaatgaaaaggttg

SEQ ID NO: 61718 - DNA, 23 bp, Homo sapiens
tgtctgagtgtggttgtaatagc

SEQ ID NO: 61719 - DNA, 23 bp, Homo sapiens
agagtgaagtgagctggcagtac

SEQ ID NO: 61720 - DNA, 17 bp, Homo sapiens
gccaactcacctggcac

SEQ ID NO: 61721 - DNA, 23 bp, Homo sapiens
atgaagaaaacaacagcggcctt

SEQ ID NO: 61722 - DNA, 22 bp, Homo sapiens
aaaccttagtacatttaacagg

SEQ ID NO: 61723 - DNA, 18 bp, Homo sapiens
cagggttgtacacttgct

SEQ ID NO: 61724 - DNA, 22 bp, Homo sapiens
tgttcgcttacatttttcaaac

SEQ ID NO: 61725 - DNA, 19 bp, Homo sapiens
aggcaggcacatttacatc

SEQ ID NO: 61726 - DNA, 20 bp, Homo sapiens
ggtacaaaggctacatctgg

SEQ ID NO: 61727 - DNA, 22 bp, Homo sapiens
gggcaattcttctggatatatg

SEQ ID NO: 61728 - DNA, 22 bp, Homo sapiens
gacaaggtataatggcagaatc

SEQ ID NO: 61729 - DNA, 24 bp, Homo sapiens
gccagtgggatagtttttctggat

SEQ ID NO: 61730 - DNA, 18 bp, Homo sapiens
aggtaccaccccctcact

SEQ ID NO: 61731 - DNA, 21 bp, Homo sapiens
ttcttttttaaaccacagacc

SEQ ID NO: 61732 - DNA, 17 bp, Homo sapiens
tcacagatatagggccc

SEQ ID NO: 61733 - DNA, 23 bp, Homo sapiens
gtcatcgtggaggatgatgattc

SEQ ID NO: 61734 - DNA, 24 bp, Homo sapiens
acaagtaccttttaaagcataaac

SEQ ID NO: 61735 - DNA, 21 bp, Homo sapiens
actcctgtaaccttacacaac

SEQ ID NO: 61736 - DNA, 18 bp, Homo sapiens
gcaccttatgattttgcc

SEQ ID NO: 61737 - DNA, 18 bp, Homo sapiens
gggaccttcactgtaggg

SEQ ID NO: 61738 - DNA, 24 bp, Homo sapiens
ggtcctaaatccccaaatcagaat

SEQ ID NO: 61739 - DNA, 21 bp, Homo sapiens
gttccagaccatcccatttaa

SEQ ID NO: 61740 - DNA, 21 bp, Homo sapiens
gcttccatttctagatccagc

SEQ ID NO: 61741 - DNA, 23 bp, Homo sapiens
ttatcttgatcaaactggtttgc

SEQ ID NO: 61742 - DNA, 22 bp, Homo sapiens
ttgttaaaaacagcacaggtga

SEQ ID NO: 61743 - DNA, 22 bp, Homo sapiens
cccaaactttataagatcctgg

SEQ ID NO: 61744 - DNA, 20 bp, Homo sapiens
acgttttgagggtacctacc

SEQ ID NO: 61745 - DNA, 23 bp, Homo sapiens
tcttttttatagcaacatcagag

SEQ ID NO: 61746 - DNA, 18 bp, Homo sapiens
cagaccgagctcaaatgc

SEQ ID NO: 61747 - DNA, 21 bp, Homo sapiens
agtcaggggaaacgattgtgg

SEQ ID NO: 61748 - DNA, 17 bp, Homo sapiens
tgtgttcatcccagagg

SEQ ID NO: 61749 - DNA, 24 bp, Homo sapiens
ttcaatggacttaccctggagaag

SEQ ID NO: 61750 - DNA, 17 bp, Homo sapiens
tgcctttgcctttctac

SEQ ID NO: 61751 - DNA, 21 bp, Homo sapiens
ttgtcaacatccctaccatcc

SEQ ID NO: 61752 - DNA, 18 bp, Homo sapiens
gggaccgtcaaagtgtac

SEQ ID NO: 61753 - DNA, 23 bp, Homo sapiens
tcatccagagtccatagtttatc

SEQ ID NO: 61754 - DNA, 20 bp, Homo sapiens
ctttgacctccctggtagcc

SEQ ID NO: 61755 - DNA, 22 bp, Homo sapiens
ggttttcttccccttttgctgt

SEQ ID NO: 61756 - DNA, 20 bp, Homo sapiens
gacattttagaaagcggaat

SEQ ID NO: 61757 - DNA, 24 bp, Homo sapiens
aaagtcccatccatcaaattggtg

SEQ ID NO: 61758 - DNA, 18 bp, Homo sapiens
cagggaagagtttccatt

SEQ ID NO: 61759 - DNA, 16 bp, Homo sapiens
gaatgtgctgcccgcc

SEQ ID NO: 61760 - DNA, 17 bp, Homo sapiens
gacagcttccaactggc

SEQ ID NO: 61761 - DNA, 22 bp, Homo sapiens
tttctgtccatggtacattccg

SEQ ID NO: 61762 - DNA, 19 bp, Homo sapiens
aggatatcctgggaggtgg

SEQ ID NO: 61763 - DNA, 21 bp, Homo sapiens
cgggatccatatgtggtaatc

SEQ ID NO: 61764 - DNA, 18 bp, Homo sapiens
tccacatcagtggtgatc

SEQ ID NO: 61765 - DNA, 20 bp, Homo sapiens
aatcaaacccaccttcagcc

SEQ ID NO: 61766 - DNA, 22 bp, Homo sapiens
cctctgatgcacactaaaaaaa

SEQ ID NO: 61767 - DNA, 24 bp, Homo sapiens
ttttgttgtagaggtgcgggccta

SEQ ID NO: 61768 - DNA, 19 bp, Homo sapiens
ttctagactgactttgggt

SEQ ID NO: 61769 - DNA, 23 bp, Homo sapiens
actctgattgaaaatctcactga

SEQ ID NO: 61770 - DNA, 21 bp, Homo sapiens
ccactttgcaatgttatcatt

SEQ ID NO: 61771 - DNA, 19 bp, Homo sapiens
tcagctttaatttgcttcg

SEQ ID NO: 61772 - DNA, 22 bp, Homo sapiens
agagatgatatggacaagaaaa

SEQ ID NO: 61773 - DNA, 22 bp, Homo sapiens
ttcacagcatcttcattttgag

SEQ ID NO: 61774 - DNA, 22 bp, Homo sapiens
aagagtacaattgtttaaacaa

SEQ ID NO: 61775 - DNA, 23 bp, Homo sapiens
gctagcattatctttatactccc

SEQ ID NO: 61776 - DNA, 21 bp, Homo sapiens
ttttttaaaaggtatcgaagc

SEQ ID NO: 61777 - DNA, 16 bp, Homo sapiens
ccatgaccggggagaa

SEQ ID NO: 61778 - DNA, 24 bp, Homo sapiens
cagtggccattatactattgtagc

SEQ ID NO: 61779 - DNA, 21 bp, Homo sapiens
cagaggtattcccgatatgtg

SEQ ID NO: 61780 - DNA, 19 bp, Homo sapiens
ccagaatggatgaaggaac

SEQ ID NO: 61781 - DNA, 23 bp, Homo sapiens
gagtgttacttgtacaactggtt

SEQ ID NO: 61782 - DNA, 21 bp, Homo sapiens
ccttcagctgtgcacctcacc

SEQ ID NO: 61783 - DNA, 23 bp, Homo sapiens
agttgtgaactcatattccactt

SEQ ID NO: 61784 - DNA, 22 bp, Homo sapiens
acatctgttttccatacttctt

SEQ ID NO: 61785 - DNA, 23 bp, Homo sapiens
tctgacttctttctgcctcttgc

SEQ ID NO: 61786 - DNA, 22 bp, Homo sapiens
tgtatttgacatcatttgtgtc

SEQ ID NO: 61787 - DNA, 19 bp, Homo sapiens
ctcaactgggggacagacg

SEQ ID NO: 61788 - DNA, 19 bp, Homo sapiens
atacacaccctgaagctat

SEQ ID NO: 61789 - DNA, 21 bp, Homo sapiens
tgagtggatgatatgcaaaga

SEQ ID NO: 61790 - DNA, 22 bp, Homo sapiens
ccaaaatagtccaggaagtttc

SEQ ID NO: 61791 - DNA, 21 bp, Homo sapiens
taaatcagtgtgtattgcccc

SEQ ID NO: 61792 - DNA, 16 bp, Homo sapiens
cggtactcctgtctcg

SEQ ID NO: 61793 - DNA, 24 bp, Homo sapiens
cttagagtgttcccgtggctccac

SEQ ID NO: 61794 - DNA, 23 bp, Homo sapiens
agattcttagccaggcatcgcac

SEQ ID NO: 61795 - DNA, 24 bp, Homo sapiens
taggccctttttctctctagatgt

SEQ ID NO: 61796 - DNA, 16 bp, Homo sapiens
ggaactcactgggagc

SEQ ID NO: 61797 - DNA, 22 bp, Homo sapiens
ctcaaacatcatcacggagatc

SEQ ID NO: 61798 - DNA, 24 bp, Homo sapiens
ctatctgggattcaaagttccgcc

SEQ ID NO: 61799 - DNA, 20 bp, Homo sapiens
ccaaagtggaggagaccatc

SEQ ID NO: 61800 - DNA, 24 bp, Homo sapiens
tgactttaagagcattcataactg

SEQ ID NO: 61801 - DNA, 16 bp, Homo sapiens
gctgaagctggtggct

SEQ ID NO: 61802 - DNA, 20 bp, Homo sapiens
agccaccgtgagttcagaac

SEQ ID NO: 61803 - DNA, 20 bp, Homo sapiens
caggcagccctcacacttcc

SEQ ID NO: 61804 - DNA, 21 bp, Homo sapiens
tttccaaatgacaaccaggac

SEQ ID NO: 61805 - DNA, 17 bp, Homo sapiens
ccttgctgcccctgtgc

SEQ ID NO: 61806 - DNA, 19 bp, Homo sapiens
gcttgttctcattggcttc

SEQ ID NO: 61807 - DNA, 21 bp, Homo sapiens
tctcttgtcacgtagccctgc

SEQ ID NO: 61808 - DNA, 20 bp, Homo sapiens
tcactccacatgtaattgct

SEQ ID NO: 61809 - DNA, 23 bp, Homo sapiens
gttggtgattgtgatcatctcac

SEQ ID NO: 61810 - DNA, 17 bp, Homo sapiens
gcaccagagcttcactg

SEQ ID NO: 61811 - DNA, 22 bp, Homo sapiens
cgaatttcatacctcggtttct

SEQ ID NO: 61812 - DNA, 17 bp, Homo sapiens
gcacagagaaggagctc

SEQ ID NO: 61813 - DNA, 22 bp, Homo sapiens
tcgggtccacataaatatattc

SEQ ID NO: 61814 - DNA, 22 bp, Homo sapiens
ccagtcactgtgctgcttcagt

SEQ ID NO: 61815 - DNA, 18 bp, Homo sapiens
accaagcactagtccatc

SEQ ID NO: 61816 - DNA, 23 bp, Homo sapiens
cagttacctgtcctggtcattta

SEQ ID NO: 61817 - DNA, 24 bp, Homo sapiens
caaggcctataaattgtaaagttg

SEQ ID NO: 61818 - DNA, 23 bp, Homo sapiens
aatcagcccagatggacatgaat

SEQ ID NO: 61819 - DNA, 20 bp, Homo sapiens
caaatttccattgcctagtt

SEQ ID NO: 61820 - DNA, 22 bp, Homo sapiens
ctcaagatgggagtttccaaga

SEQ ID NO: 61821 - DNA, 23 bp, Homo sapiens
ttgacacgatgacttggaggagt

SEQ ID NO: 61822 - DNA, 20 bp, Homo sapiens
gttgggaccggcttaatcca

SEQ ID NO: 61823 - DNA, 16 bp, Homo sapiens
cccgcagagagctggc

SEQ ID NO: 61824 - DNA, 22 bp, Homo sapiens
tcaaaaaatccccaggaaggag

SEQ ID NO: 61825 - DNA, 23 bp, Homo sapiens
tgggtgttaatgattctgcctgc

SEQ ID NO: 61826 - DNA, 23 bp, Homo sapiens
tactagctgcatgattttgagaa

SEQ ID NO: 61827 - DNA, 23 bp, Homo sapiens
ggtggttgaaggaacagcctatg

SEQ ID NO: 61828 - DNA, 21 bp, Homo sapiens
aaatacacataaaacctggag

SEQ ID NO: 61829 - DNA, 20 bp, Homo sapiens
agttcagacatgagagcttg

SEQ ID NO: 61830 - DNA, 24 bp, Homo sapiens
tttagacttctggtaaatagaatg

SEQ ID NO: 61831 - DNA, 16 bp, Homo sapiens
ggtgcaggctcccagc

SEQ ID NO: 61832 - DNA, 24 bp, Homo sapiens
tttctgagaacaggaagttggtag

SEQ ID NO: 61833 - DNA, 20 bp, Homo sapiens
ttttcacaaccacatgtgtc

SEQ ID NO: 61834 - DNA, 19 bp, Homo sapiens
gccagatccagtgaaaaac

SEQ ID NO: 61835 - DNA, 22 bp, Homo sapiens
aagggacttctattccctgcca

SEQ ID NO: 61836 - DNA, 24 bp, Homo sapiens
gggccacatttgaacattgtaaac

SEQ ID NO: 61837 - DNA, 20 bp, Homo sapiens
gctcaaaaaccaatgagctt

SEQ ID NO: 61838 - DNA, 21 bp, Homo sapiens
tagccattcatggctctttat

SEQ ID NO: 61839 - DNA, 24 bp, Homo sapiens
ttggtatcttatttttttctgtgc

SEQ ID NO: 61840 - DNA, 17 bp, Homo sapiens
ccagctctttctttggc

SEQ ID NO: 61841 - DNA, 23 bp, Homo sapiens
tcttcattttcatacccatctcc

SEQ ID NO: 61842 - DNA, 19 bp, Homo sapiens
caacatctctctttgcacc

SEQ ID NO: 61843 - DNA, 22 bp, Homo sapiens
acagagtattgcttctatggag

SEQ ID NO: 61844 - DNA, 23 bp, Homo sapiens
tctgcagacatgatatctatcag

SEQ ID NO: 61845 - DNA, 24 bp, Homo sapiens
ttcctgagccaccacccagagaag

SEQ ID NO: 61846 - DNA, 16 bp, Homo sapiens
ctggacagggtggttt

SEQ ID NO: 61847 - DNA, 17 bp, Homo sapiens
gaaagcacacggaggtg

SEQ ID NO: 61848 - DNA, 26 bp, Homo sapiens
tttcaaaagataaaataacatagctg

SEQ ID NO: 61849 - DNA, 20 bp, Homo sapiens
aaggtatggattggttttgc

SEQ ID NO: 61850 - DNA, 21 bp, Homo sapiens
tggggacatactgtgtagtat

SEQ ID NO: 61851 - DNA, 22 bp, Homo sapiens
ctggcacataatcatcatctac

SEQ ID NO: 61852 - DNA, 20 bp, Homo sapiens
gacgatcatagagtgatctc

SEQ ID NO: 61853 - DNA, 24 bp, Homo sapiens
tctctttctgtttttacagctatg

SEQ ID NO: 61854 - DNA, 18 bp, Homo sapiens
cccaacacccagagtgag

SEQ ID NO: 61855 - DNA, 18 bp, Homo sapiens
tggacatgaagcaggctg

SEQ ID NO: 61856 - DNA, 20 bp, Homo sapiens
atccctatacacttccctct

SEQ ID NO: 61857 - DNA, 24 bp, Homo sapiens
ctaaatattccgacatccagagat

SEQ ID NO: 61858 - DNA, 17 bp, Homo sapiens
gaactggttgtgcagac

SEQ ID NO: 61859 - DNA, 16 bp, Homo sapiens
ccaactccaccagccc

SEQ ID NO: 61860 - DNA, 24 bp, Homo sapiens
gcggttccaagttccattcacttc

SEQ ID NO: 61861 - DNA, 16 bp, Homo sapiens
gcagtggtctgcctgc

SEQ ID NO: 61862 - DNA, 22 bp, Homo sapiens
attagccagtgagagttatcgg

SEQ ID NO: 61863 - DNA, 23 bp, Homo sapiens
agcaagtgaagagtagctctagc

SEQ ID NO: 61864 - DNA, 19 bp, Homo sapiens
acattgcttcccaggctgg

SEQ ID NO: 61865 - DNA, 24 bp, Homo sapiens
tcccagggttttcgaggaagaagg

SEQ ID NO: 61866 - DNA, 22 bp, Homo sapiens
gagtcatgctcaggcccaagcc

SEQ ID NO: 61867 - DNA, 21 bp, Homo sapiens
ttctttgtttgtaacttgtcc

SEQ ID NO: 61868 - DNA, 24 bp, Homo sapiens
ttatcatctgaaaggaggtttttg

SEQ ID NO: 61869 - DNA, 24 bp, Homo sapiens
gatattcatctgtgagatctaaac

SEQ ID NO: 61870 - DNA, 18 bp, Homo sapiens
cctcgggcaacttgatag

SEQ ID NO: 61871 - DNA, 21 bp, Homo sapiens
tctttgggcatgcctctgcaa

SEQ ID NO: 61872 - DNA, 20 bp, Homo sapiens
tctaaaaaggtctgtgttcc

SEQ ID NO: 61873 - DNA, 23 bp, Homo sapiens
taatttcttttctgcagactcag

SEQ ID NO: 61874 - DNA, 21 bp, Homo sapiens
ggcctttccaacatctatctc

SEQ ID NO: 61875 - DNA, 24 bp, Homo sapiens
ggccttactttattggatttgttg

SEQ ID NO: 61876 - DNA, 18 bp, Homo sapiens
tccctgacctgcgtaggg

SEQ ID NO: 61877 - DNA, 16 bp, Homo sapiens
cgttgcgagcagccag

SEQ ID NO: 61878 - DNA, 20 bp, Homo sapiens
ccagccctttatatccaggc

SEQ ID NO: 61879 - DNA, 18 bp, Homo sapiens
atgcatgatgtctctggc

SEQ ID NO: 61880 - DNA, 24 bp, Homo sapiens
tcttgcaggggtgatgctattcag

SEQ ID NO: 61881 - DNA, 21 bp, Homo sapiens
ggatgagcctgaccagtgagg

SEQ ID NO: 61882 - DNA, 19 bp, Homo sapiens
gcagtgtgtccaccgtgat

SEQ ID NO: 61883 - DNA, 24 bp, Homo sapiens
gttttaaaaaacaggcaccgaatc

SEQ ID NO: 61884 - DNA, 20 bp, Homo sapiens
gaagatctgtgactttggcc

SEQ ID NO: 61885 - DNA, 16 bp, Homo sapiens
tgggcaatctgctgcc

SEQ ID NO: 61886 - DNA, 17 bp, Homo sapiens
caggagccatccacttc

SEQ ID NO: 61887 - DNA, 22 bp, Homo sapiens
tcaaatgggacaagataattag

SEQ ID NO: 61888 - DNA, 18 bp, Homo sapiens
agcagaatgccataagac

SEQ ID NO: 61889 - DNA, 24 bp, Homo sapiens
tttctatttccactgctgtggatc

SEQ ID NO: 61890 - DNA, 19 bp, Homo sapiens
gtggtgtttcagaacagcc

SEQ ID NO: 61891 - DNA, 22 bp, Homo sapiens
gcagacctttctgcccgtgaag

SEQ ID NO: 61892 - DNA, 21 bp, Homo sapiens
ccaggttatcttaacactgtc

SEQ ID NO: 61893 - DNA, 24 bp, Homo sapiens
ctacaccacactgagtgatgtctg

SEQ ID NO: 61894 - DNA, 21 bp, Homo sapiens
ctatctcagacacaataaggc

SEQ ID NO: 61895 - DNA, 16 bp, Homo sapiens
gggtaaggggtgccac

SEQ ID NO: 61896 - DNA, 25 bp, Homo sapiens
tgacactgaattttcttgaaaaaac

SEQ ID NO: 61897 - DNA, 16 bp, Homo sapiens
ttggccatccggtacc

SEQ ID NO: 61898 - DNA, 18 bp, Homo sapiens
gttctatcatgccaagtg

SEQ ID NO: 61899 - DNA, 16 bp, Homo sapiens
tgtgaacacaggcccc

SEQ ID NO: 61900 - DNA, 22 bp, Homo sapiens
gttttattgtttggcttttagg

SEQ ID NO: 61901 - DNA, 19 bp, Homo sapiens
gacagaactcaagagtggg

SEQ ID NO: 61902 - DNA, 23 bp, Homo sapiens
ttctacaataagatcaagagtgg

SEQ ID NO: 61903 - DNA, 21 bp, Homo sapiens
aaggagggtctcttctccggc

SEQ ID NO: 61904 - DNA, 23 bp, Homo sapiens
gaagtgtgagctccttccccatc

SEQ ID NO: 61905 - DNA, 23 bp, Homo sapiens
cacacctttttatattgtccagg

SEQ ID NO: 61906 - DNA, 17 bp, Homo sapiens
gggccctgagacttccc

SEQ ID NO: 61907 - DNA, 20 bp, Homo sapiens
acagctcactggtataactt

SEQ ID NO: 61908 - DNA, 23 bp, Homo sapiens
tggtgaaatgctggaacagtgag

SEQ ID NO: 61909 - DNA, 18 bp, Homo sapiens
ccactggatcacacagtc

SEQ ID NO: 61910 - DNA, 22 bp, Homo sapiens
tgagattgtggagaatctgctg

SEQ ID NO: 61911 - DNA, 23 bp, Homo sapiens
caggtgaattttttcataactct

SEQ ID NO: 61912 - DNA, 23 bp, Homo sapiens
gttgacatgactctccttcaact

SEQ ID NO: 61913 - DNA, 16 bp, Homo sapiens
tccacacgcatgcgtg

SEQ ID NO: 61914 - DNA, 18 bp, Homo sapiens
gtaagttctgagtgtctc

SEQ ID NO: 61915 - DNA, 18 bp, Homo sapiens
cccagtccttcagcttgt

SEQ ID NO: 61916 - DNA, 24 bp, Homo sapiens
gattaaatatgttcaatgaatgtt

SEQ ID NO: 61917 - DNA, 22 bp, Homo sapiens
gtcaatgtcaggcagaggaatg

SEQ ID NO: 61918 - DNA, 24 bp, Homo sapiens
tgaagagtgaccatcctgctgtgg

SEQ ID NO: 61919 - DNA, 20 bp, Homo sapiens
gcccccacagctacctgtgt

SEQ ID NO: 61920 - DNA, 24 bp, Homo sapiens
acctacaaaaacgaggaagacaag

SEQ ID NO: 61921 - DNA, 24 bp, Homo sapiens
ttatcgggaaaatgggtcctctcc

SEQ ID NO: 61922 - DNA, 17 bp, Homo sapiens
cgctgacagtggctaca

SEQ ID NO: 61923 - DNA, 22 bp, Homo sapiens
ctcctgaggattctgcaacttg

SEQ ID NO: 61924 - DNA, 22 bp, Homo sapiens
gacctgggcaagaggaacagac

SEQ ID NO: 61925 - DNA, 21 bp, Homo sapiens
acccgtctcaatggcactctc

SEQ ID NO: 61926 - DNA, 23 bp, Homo sapiens
agaatcttgccatactgtgcagc

SEQ ID NO: 61927 - DNA, 22 bp, Homo sapiens
catcatgtcgatgtcttcaatg

SEQ ID NO: 61928 - DNA, 23 bp, Homo sapiens
ggggccacagtctaggtctagtt

SEQ ID NO: 61929 - DNA, 17 bp, Homo sapiens
cgccagttacaggaagc

SEQ ID NO: 61930 - DNA, 20 bp, Homo sapiens
ctcgcagacctctgaagaga

SEQ ID NO: 61931 - DNA, 24 bp, Homo sapiens
attgcaataaagtggttttctgaa

SEQ ID NO: 61932 - DNA, 24 bp, Homo sapiens
cttcatcaagagagaggacgagac

SEQ ID NO: 61933 - DNA, 18 bp, Homo sapiens
cttggctgggaacttctc

SEQ ID NO: 61934 - DNA, 20 bp, Homo sapiens
tcagacctggtggaagacag

SEQ ID NO: 61935 - DNA, 18 bp, Homo sapiens
agagaaaatcccaggcgc

SEQ ID NO: 61936 - DNA, 16 bp, Homo sapiens
gctgggaggaggggct

SEQ ID NO: 61937 - DNA, 16 bp, Homo sapiens
cggtcggggtgccagc

SEQ ID NO: 61938 - DNA, 24 bp, Homo sapiens
gccgcgctcgctgcacttgggcga

SEQ ID NO: 61939 - DNA, 16 bp, Homo sapiens
atgcaccctggcgggt

SEQ ID NO: 61940 - DNA, 16 bp, Homo sapiens
gatgagaggcgctcgc

SEQ ID NO: 61941 - DNA, 16 bp, Homo sapiens
ccacctggagtctccc

SEQ ID NO: 61942 - DNA, 17 bp, Homo sapiens
gttgagaagagcctgcc

SEQ ID NO: 61943 - DNA, 24 bp, Homo sapiens
ttttagacagaactctcttttcag

SEQ ID NO: 61944 - DNA, 20 bp, Homo sapiens
ctgattttcctggatggatg

SEQ ID NO: 61945 - DNA, 21 bp, Homo sapiens
gagtacacagaagatggaact

SEQ ID NO: 61946 - DNA, 18 bp, Homo sapiens
acaaagcccggatcagtg

SEQ ID NO: 61947 - DNA, 21 bp, Homo sapiens
actcaacacgattctgttttt

SEQ ID NO: 61948 - DNA, 18 bp, Homo sapiens
gtgatccattcattctgc

SEQ ID NO: 61949 - DNA, 23 bp, Homo sapiens
gggaaccgtctccaccatccatc

SEQ ID NO: 61950 - DNA, 21 bp, Homo sapiens
atggaattgcttaagccgtgt

SEQ ID NO: 61951 - DNA, 22 bp, Homo sapiens
gcgacgagattaggctgttatg

SEQ ID NO: 61952 - DNA, 16 bp, Homo sapiens
tgaaagcacagcactg

SEQ ID NO: 61953 - DNA, 23 bp, Homo sapiens
atgaaacgaatgagaataagcag

SEQ ID NO: 61954 - DNA, 24 bp, Homo sapiens
gccagaaatattttatctatggct

SEQ ID NO: 61955 - DNA, 19 bp, Homo sapiens
ccggcaaatacacgtgcac

SEQ ID NO: 61956 - DNA, 18 bp, Homo sapiens
agatgggagagaacagtg

SEQ ID NO: 61957 - DNA, 23 bp, Homo sapiens
agatggataaattttgcttttgt

SEQ ID NO: 61958 - DNA, 16 bp, Homo sapiens
agcggaccagcgtgtc

SEQ ID NO: 61959 - DNA, 24 bp, Homo sapiens
gtcatgaaaggcaacatattagat

SEQ ID NO: 61960 - DNA, 16 bp, Homo sapiens
aggcttcccctggcac

SEQ ID NO: 61961 - DNA, 23 bp, Homo sapiens
actactgattttggatatgcttc

SEQ ID NO: 61962 - DNA, 22 bp, Homo sapiens
gcgcgtttcacacttttgatca

SEQ ID NO: 61963 - DNA, 24 bp, Homo sapiens
ctccttgtatgggaaagaagacaa

SEQ ID NO: 61964 - DNA, 23 bp, Homo sapiens
tttttccgacagcactgacttgc

SEQ ID NO: 61965 - DNA, 24 bp, Homo sapiens
gaccaattattccctcaaggggtg

SEQ ID NO: 61966 - DNA, 22 bp, Homo sapiens
caactcccagaggcagataaga

SEQ ID NO: 61967 - DNA, 20 bp, Homo sapiens
ccccaaggcgggcatcatga

SEQ ID NO: 61968 - DNA, 21 bp, Homo sapiens
tgactacactaaggtggatca

SEQ ID NO: 61969 - DNA, 23 bp, Homo sapiens
tctgcattgttctgtggaccagg

SEQ ID NO: 61970 - DNA, 21 bp, Homo sapiens
ttcaaaagcagatgacatttt

SEQ ID NO: 61971 - DNA, 23 bp, Homo sapiens
tgcaagtagtacagataggttag

SEQ ID NO: 61972 - DNA, 20 bp, Homo sapiens
cacgtcactgtgaattcttc

SEQ ID NO: 61973 - DNA, 20 bp, Homo sapiens
agctgtacacatttgaggag

SEQ ID NO: 61974 - DNA, 21 bp, Homo sapiens
cctgactgttttctcttttcc

SEQ ID NO: 61975 - DNA, 21 bp, Homo sapiens
tgaggggccacatttcttttc

SEQ ID NO: 61976 - DNA, 21 bp, Homo sapiens
aaaacttatcatctcccacag

SEQ ID NO: 61977 - DNA, 22 bp, Homo sapiens
aaagcaagctatcttcttaggg

SEQ ID NO: 61978 - DNA, 17 bp, Homo sapiens
cacctctgacagacgca

SEQ ID NO: 61979 - DNA, 24 bp, Homo sapiens
gatgtgtctagttctgtgtactca

SEQ ID NO: 61980 - DNA, 23 bp, Homo sapiens
gccagctattatatttctcctgt

SEQ ID NO: 61981 - DNA, 21 bp, Homo sapiens
aagtagtgtataatgaaagtt

SEQ ID NO: 61982 - DNA, 19 bp, Homo sapiens
tctcgctgaactgatagtc

SEQ ID NO: 61983 - DNA, 23 bp, Homo sapiens
tttatctaggaaagattctgaat

SEQ ID NO: 61984 - DNA, 20 bp, Homo sapiens
tgttgtgacatttgctgatc

SEQ ID NO: 61985 - DNA, 21 bp, Homo sapiens
accagcagactaaactacagg

SEQ ID NO: 61986 - DNA, 23 bp, Homo sapiens
cactactgccagtaatttaaaca

SEQ ID NO: 61987 - DNA, 18 bp, Homo sapiens
acgtcaggcaacgttgac

SEQ ID NO: 61988 - DNA, 20 bp, Homo sapiens
aagaatctgttcaacattcc

SEQ ID NO: 61989 - DNA, 24 bp, Homo sapiens
gttcatgtgttatgccaataatac

SEQ ID NO: 61990 - DNA, 19 bp, Homo sapiens
ttgtgctttcattgcaaga

SEQ ID NO: 61991 - DNA, 24 bp, Homo sapiens
catggggaagatattaatgaatcc

SEQ ID NO: 61992 - DNA, 20 bp, Homo sapiens
gttaaaattctcttattgcc

SEQ ID NO: 61993 - DNA, 22 bp, Homo sapiens
atgcttcatattcaacaatcaa

SEQ ID NO: 61994 - DNA, 23 bp, Homo sapiens
ttccaagatgaggttctgttttt

SEQ ID NO: 61995 - DNA, 18 bp, Homo sapiens
tcagtgaaggttctgttc

SEQ ID NO: 61996 - DNA, 23 bp, Homo sapiens
cattctaattagataaaggattc

SEQ ID NO: 61997 - DNA, 22 bp, Homo sapiens
gcaaggtccatttcttacctga

SEQ ID NO: 61998 - DNA, 23 bp, Homo sapiens
aaacgatggagaaaatgtagatt

SEQ ID NO: 61999 - DNA, 23 bp, Homo sapiens
acgggttacagaaataagatctg

SEQ ID NO: 62000 - DNA, 24 bp, Homo sapiens
ctgaacaccagcagtggatctata

SEQ ID NO: 62001 - DNA, 16 bp, Homo sapiens
taggaggcagccccag

SEQ ID NO: 62002 - DNA, 23 bp, Homo sapiens
tctgagaatgaaagtaatatcag

SEQ ID NO: 62003 - DNA, 19 bp, Homo sapiens
tgttaatgtggattttgct

SEQ ID NO: 62004 - DNA, 20 bp, Homo sapiens
actaggaatgtgtaagtgcc

SEQ ID NO: 62005 - DNA, 23 bp, Homo sapiens
ctcaaacaggcatagatttccag

SEQ ID NO: 62006 - DNA, 24 bp, Homo sapiens
ccttcatgttacttactattcaca

SEQ ID NO: 62007 - DNA, 21 bp, Homo sapiens
acaggtgattgactagttgtc

SEQ ID NO: 62008 - DNA, 18 bp, Homo sapiens
gctgttacaaacacgagc

SEQ ID NO: 62009 - DNA, 19 bp, Homo sapiens
taaaaggcaccgaaggagg

SEQ ID NO: 62010 - DNA, 21 bp, Homo sapiens
gtctctgtgaaggtcaagatt

SEQ ID NO: 62011 - DNA, 22 bp, Homo sapiens
tgctgccatagcatttaatgtt

SEQ ID NO: 62012 - DNA, 21 bp, Homo sapiens
gtcgtaagtcaggatttctgg

SEQ ID NO: 62013 - DNA, 24 bp, Homo sapiens
tggttcagattctgccctttgaac

SEQ ID NO: 62014 - DNA, 20 bp, Homo sapiens
attgtgggctctgggaatcc

SEQ ID NO: 62015 - DNA, 22 bp, Homo sapiens
tagggattagagagggagtgaa

SEQ ID NO: 62016 - DNA, 23 bp, Homo sapiens
gcattataagcagtgccaaaaat

SEQ ID NO: 62017 - DNA, 23 bp, Homo sapiens
gccatttctgttttcctgtagca

SEQ ID NO: 62018 - DNA, 24 bp, Homo sapiens
cttttttaaaaaaaatcagaaaac

SEQ ID NO: 62019 - DNA, 18 bp, Homo sapiens
gctccaatgtgtggcagc

SEQ ID NO: 62020 - DNA, 20 bp, Homo sapiens
cccttctaaaaagccacatg

SEQ ID NO: 62021 - DNA, 22 bp, Homo sapiens
gtcaccaaagtgcttattctta

SEQ ID NO: 62022 - DNA, 16 bp, Homo sapiens
ccaaacggtggcccag

SEQ ID NO: 62023 - DNA, 22 bp, Homo sapiens
tttgttttaaaagtatgccaca

SEQ ID NO: 62024 - DNA, 17 bp, Homo sapiens
tcaaccgtgccattgtg

SEQ ID NO: 62025 - DNA, 24 bp, Homo sapiens
cctagagtaagccagggcttttgt

SEQ ID NO: 62026 - DNA, 23 bp, Homo sapiens
cctttgttgttacctttaaatgc

SEQ ID NO: 62027 - DNA, 21 bp, Homo sapiens
tgcagacactaaactcatctg

SEQ ID NO: 62028 - DNA, 19 bp, Homo sapiens
tggtagacagagcctaaac

SEQ ID NO: 62029 - DNA, 24 bp, Homo sapiens
ctatagattctagtgcattcaagc

SEQ ID NO: 62030 - DNA, 22 bp, Homo sapiens
ggtgtgatgcatgtattaccag

SEQ ID NO: 62031 - DNA, 22 bp, Homo sapiens
gggcaagacttctgcctatttt

SEQ ID NO: 62032 - DNA, 22 bp, Homo sapiens
agcatatacttaacaagctagt

SEQ ID NO: 62033 - DNA, 20 bp, Homo sapiens
tggggatggatttgctctac

SEQ ID NO: 62034 - DNA, 23 bp, Homo sapiens
aatgtaaccaaggtgaagctctg

SEQ ID NO: 62035 - DNA, 21 bp, Homo sapiens
caataatgcacatcatgccag

SEQ ID NO: 62036 - DNA, 20 bp, Homo sapiens
tgggaggtggggtcagtttg

SEQ ID NO: 62037 - DNA, 20 bp, Homo sapiens
actctggagagagaacaaat

SEQ ID NO: 62038 - DNA, 23 bp, Homo sapiens
tttgtgattccacatttctcttc

SEQ ID NO: 62039 - DNA, 21 bp, Homo sapiens
ggagaaagggaaaaatagatc

SEQ ID NO: 62040 - DNA, 21 bp, Homo sapiens
gctgattggtttcgtaatcgt

SEQ ID NO: 62041 - DNA, 19 bp, Homo sapiens
tgtttccatttatctcctc

SEQ ID NO: 62042 - DNA, 19 bp, Homo sapiens
tatttacaggtaaccattt

SEQ ID NO: 62043 - DNA, 18 bp, Homo sapiens
tctgggaaactcccattt

SEQ ID NO: 62044 - DNA, 27 bp, Homo sapiens
tgagacaataattattaaaaggtgatc

SEQ ID NO: 62045 - DNA, 18 bp, Homo sapiens
tgtacccaaaaaggtgac

SEQ ID NO: 62046 - DNA, 23 bp, Homo sapiens
tgaagtacagtggaaggttgttg

SEQ ID NO: 62047 - DNA, 20 bp, Homo sapiens
ctcattgtttcaggtggaac

SEQ ID NO: 62048 - DNA, 24 bp, Homo sapiens
ccaacacaacttccttatgatcac

SEQ ID NO: 62049 - DNA, 20 bp, Homo sapiens
cattttcctacgatgttctc

SEQ ID NO: 62050 - DNA, 22 bp, Homo sapiens
ccccttttgataggtttgccat

SEQ ID NO: 62051 - DNA, 23 bp, Homo sapiens
ccgcatctgacttaattaagcca

SEQ ID NO: 62052 - DNA, 24 bp, Homo sapiens
gtttttaattcctttattgatttt

SEQ ID NO: 62053 - DNA, 24 bp, Homo sapiens
gcatgcagtaccatacaggaactt

SEQ ID NO: 62054 - DNA, 24 bp, Homo sapiens
caccatcaccacttaccttgttgt

SEQ ID NO: 62055 - DNA, 23 bp, Homo sapiens
gctaaaattggaaacatgcattt

SEQ ID NO: 62056 - DNA, 23 bp, Homo sapiens
tcgggaaggttgttgaggcaact

SEQ ID NO: 62057 - DNA, 22 bp, Homo sapiens
ggtaactcaggactttgagttc

SEQ ID NO: 62058 - DNA, 19 bp, Homo sapiens
gctgtaaagatgctcaagc

SEQ ID NO: 62059 - DNA, 18 bp, Homo sapiens
ctttacctccaatggtgc

SEQ ID NO: 62060 - DNA, 22 bp, Homo sapiens
ttgccagttgtgctttttgcta

SEQ ID NO: 62061 - DNA, 24 bp, Homo sapiens
ttgccaaaatcatattaaaatgtc

SEQ ID NO: 62062 - DNA, 21 bp, Homo sapiens
acgggaagccctcatgtctga

SEQ ID NO: 62063 - DNA, 19 bp, Homo sapiens
gagagaacaacagtctggg

SEQ ID NO: 62064 - DNA, 20 bp, Homo sapiens
atctacttggagcctgcacc

SEQ ID NO: 62065 - DNA, 16 bp, Homo sapiens
tgaccagggtgggccc

SEQ ID NO: 62066 - DNA, 19 bp, Homo sapiens
tgggattgtattgggacta

SEQ ID NO: 62067 - DNA, 21 bp, Homo sapiens
aatgaatcacgttttcttctc

SEQ ID NO: 62068 - DNA, 23 bp, Homo sapiens
ccatgaccacccttgggtatttt

SEQ ID NO: 62069 - DNA, 22 bp, Homo sapiens
ctcctttgaatgcagaagattc

SEQ ID NO: 62070 - DNA, 21 bp, Homo sapiens
tctaaccttttcttatgtgct

SEQ ID NO: 62071 - DNA, 19 bp, Homo sapiens
gaactgcctgtcaacagct

SEQ ID NO: 62072 - DNA, 23 bp, Homo sapiens
ggtgatcttttgaattttttgag

SEQ ID NO: 62073 - DNA, 19 bp, Homo sapiens
acctcagagtacctcagtt

SEQ ID NO: 62074 - DNA, 18 bp, Homo sapiens
agatcatgcagaagctgc

SEQ ID NO: 62075 - DNA, 24 bp, Homo sapiens
cacaatttaactttctaaactgtt

SEQ ID NO: 62076 - DNA, 18 bp, Homo sapiens
agtactatcgctgctggg

SEQ ID NO: 62077 - DNA, 22 bp, Homo sapiens
tcaaactctttattcaaacttt

SEQ ID NO: 62078 - DNA, 17 bp, Homo sapiens
gtcggccttggttggga

SEQ ID NO: 62079 - DNA, 22 bp, Homo sapiens
gtagcaaaggggatgaggaggt

SEQ ID NO: 62080 - DNA, 21 bp, Homo sapiens
gtaaagttactcttggttgct

SEQ ID NO: 62081 - DNA, 22 bp, Homo sapiens
cagtcatgacttgtttcatctc

SEQ ID NO: 62082 - DNA, 20 bp, Homo sapiens
catcattgctactgggaatg

SEQ ID NO: 62083 - DNA, 21 bp, Homo sapiens
tgaaacctggagtttcttatg

SEQ ID NO: 62084 - DNA, 17 bp, Homo sapiens
cttgcaaccctaactgc

SEQ ID NO: 62085 - DNA, 24 bp, Homo sapiens
ttcagcatctacctttcctggaca

SEQ ID NO: 62086 - DNA, 17 bp, Homo sapiens
agtctagggccaactcg

SEQ ID NO: 62087 - DNA, 22 bp, Homo sapiens
ttcattaccagcctttggtatg

SEQ ID NO: 62088 - DNA, 17 bp, Homo sapiens
ttggaggcgaggaaagc

SEQ ID NO: 62089 - DNA, 21 bp, Homo sapiens
tgctaagaaaaatcctctctt

SEQ ID NO: 62090 - DNA, 28 bp, Homo sapiens
aaaaaaaaaaaaaaaaaatcaaaaaaac

SEQ ID NO: 62091 - DNA, 22 bp, Homo sapiens
tcccgccatcatggaggatgac

SEQ ID NO: 62092 - DNA, 24 bp, Homo sapiens
acacttcaaaatgacattctgcat

SEQ ID NO: 62093 - DNA, 16 bp, Homo sapiens
tggcaaagggcatggc

SEQ ID NO: 62094 - DNA, 16 bp, Homo sapiens
tttctggctgccaagt

SEQ ID NO: 62095 - DNA, 23 bp, Homo sapiens
tgaatactttaaaacaaaagtat

SEQ ID NO: 62096 - DNA, 20 bp, Homo sapiens
cttgatgtctctggctagac

SEQ ID NO: 62097 - DNA, 21 bp, Homo sapiens
agttttcactctttacaagtt

SEQ ID NO: 62098 - DNA, 18 bp, Homo sapiens
tgcaggactgtcaagcag

SEQ ID NO: 62099 - DNA, 20 bp, Homo sapiens
gtgtattcacagagacttgg

SEQ ID NO: 62100 - DNA, 24 bp, Homo sapiens
agacaggatttacattatgaaaat

SEQ ID NO: 62101 - DNA, 24 bp, Homo sapiens
ggatcacaaagatttgtgattttg

SEQ ID NO: 62102 - DNA, 24 bp, Homo sapiens
catgcaaattttgctgaagtatac

SEQ ID NO: 62103 - DNA, 17 bp, Homo sapiens
aggtgccatccacttca

SEQ ID NO: 62104 - DNA, 24 bp, Homo sapiens
ggtttttgtgagatggtactcaag

SEQ ID NO: 62105 - DNA, 19 bp, Homo sapiens
agaaaaatcccataggacc

SEQ ID NO: 62106 - DNA, 22 bp, Homo sapiens
cttctgttcaattttgttgagc

SEQ ID NO: 62107 - DNA, 24 bp, Homo sapiens
aagaagatgctctgagtctaatga

SEQ ID NO: 62108 - DNA, 22 bp, Homo sapiens
ctattacaggctcgactacctg

SEQ ID NO: 62109 - DNA, 21 bp, Homo sapiens
cacagtttgcaaagcagtgtt

SEQ ID NO: 62110 - DNA, 24 bp, Homo sapiens
tacacgtttgaaagtgacgtctgg

SEQ ID NO: 62111 - DNA, 22 bp, Homo sapiens
ccttgatcatcttgtagaactt

SEQ ID NO: 62112 - DNA, 24 bp, Homo sapiens
taggtaaaatgatccttgccaaag

SEQ ID NO: 62113 - DNA, 20 bp, Homo sapiens
tggctcttacatttcagcag

SEQ ID NO: 62114 - DNA, 24 bp, Homo sapiens
tcattggtgtcctgcttccttgtg

SEQ ID NO: 62115 - DNA, 22 bp, Homo sapiens
acatctgggtttctgtctctaa

SEQ ID NO: 62116 - DNA, 21 bp, Homo sapiens
cctatcctggaatgccggtcg

SEQ ID NO: 62117 - DNA, 22 bp, Homo sapiens
tgaccagtgtgtcataaagaat

SEQ ID NO: 62118 - DNA, 17 bp, Homo sapiens
cctgaacacgcacctgc

SEQ ID NO: 62119 - DNA, 24 bp, Homo sapiens
caagtcttcattatgtcatacctg

SEQ ID NO: 62120 - DNA, 23 bp, Homo sapiens
acatgcagtgttttatgttatct

SEQ ID NO: 62121 - DNA, 23 bp, Homo sapiens
tctcaattagctgaacaatttgc

SEQ ID NO: 62122 - DNA, 22 bp, Homo sapiens
tattactgaagttgctggatgc

SEQ ID NO: 62123 - DNA, 18 bp, Homo sapiens
attctatgcctggccagg

SEQ ID NO: 62124 - DNA, 24 bp, Homo sapiens
gggatagtaaatggcccttgtctt

SEQ ID NO: 62125 - DNA, 17 bp, Homo sapiens
gggaggttagtcctcac

SEQ ID NO: 62126 - DNA, 23 bp, Homo sapiens
ccctaaaaagaccaacattcaag

SEQ ID NO: 62127 - DNA, 22 bp, Homo sapiens
tccattgctttacttcccctac

SEQ ID NO: 62128 - DNA, 17 bp, Homo sapiens
ttggggctgcagtttgc

SEQ ID NO: 62129 - DNA, 23 bp, Homo sapiens
tcttggaaaccacttctctctta

SEQ ID NO: 62130 - DNA, 16 bp, Homo sapiens
gaggaagcggtgctgc

SEQ ID NO: 62131 - DNA, 24 bp, Homo sapiens
aagtatgccttttgttgctatgtt

SEQ ID NO: 62132 - DNA, 23 bp, Homo sapiens
gaggggtgacccaaacactgatt

SEQ ID NO: 62133 - DNA, 23 bp, Homo sapiens
ctccagatttactccaacttagc

SEQ ID NO: 62134 - DNA, 23 bp, Homo sapiens
atgcaagttgaaagaaaagaaaa

SEQ ID NO: 62135 - DNA, 24 bp, Homo sapiens
cattctgtgcggatcaattctgtc

SEQ ID NO: 62136 - DNA, 20 bp, Homo sapiens
ctaaagtgtgctcagaaaga

SEQ ID NO: 62137 - DNA, 16 bp, Homo sapiens
atgtcccccactgcag

SEQ ID NO: 62138 - DNA, 24 bp, Homo sapiens
ggcacggactcaccgccttggcca

SEQ ID NO: 62139 - DNA, 18 bp, Homo sapiens
cccccctcccccgccagc

SEQ ID NO: 62140 - DNA, 16 bp, Homo sapiens
gtcccgctcctaccgc

SEQ ID NO: 62141 - DNA, 24 bp, Homo sapiens
agggactggcgggactgcgcggcg

SEQ ID NO: 62142 - DNA, 18 bp, Homo sapiens
cgatcccgggacagaggg

SEQ ID NO: 62143 - DNA, 16 bp, Homo sapiens
ctcggcgcctggcgct

SEQ ID NO: 62144 - DNA, 19 bp, Homo sapiens
ctgtttgcaacactgttgg

SEQ ID NO: 62145 - DNA, 22 bp, Homo sapiens
ccagctgagctctctggatgca

SEQ ID NO: 62146 - DNA, 19 bp, Homo sapiens
tgaaactttagcagatgcc

SEQ ID NO: 62147 - DNA, 22 bp, Homo sapiens
caaggggaaattactatccccc

SEQ ID NO: 62148 - DNA, 19 bp, Homo sapiens
gatccttaccccctaagcc

SEQ ID NO: 62149 - DNA, 18 bp, Homo sapiens
tctgtgtctccagtggcc

SEQ ID NO: 62150 - DNA, 24 bp, Homo sapiens
ggatacctatgagaaatttttccc

SEQ ID NO: 62151 - DNA, 17 bp, Homo sapiens
gggaacaagagggcatc

SEQ ID NO: 62152 - DNA, 24 bp, Homo sapiens
catgatccactactggatactgag

SEQ ID NO: 62153 - DNA, 16 bp, Homo sapiens
caggacaggatggagg

SEQ ID NO: 62154 - DNA, 17 bp, Homo sapiens
aaatgcagctcgcaagc

SEQ ID NO: 62155 - DNA, 22 bp, Homo sapiens
gctctttcactgtcacaagatt

SEQ ID NO: 62156 - DNA, 17 bp, Homo sapiens
cctggtaggaaacagct

SEQ ID NO: 62157 - DNA, 22 bp, Homo sapiens
tttcttttccagatttctgctc

SEQ ID NO: 62158 - DNA, 16 bp, Homo sapiens
cctgcacggagtggga

SEQ ID NO: 62159 - DNA, 22 bp, Homo sapiens
tggtaggcgctggaggggcagg

SEQ ID NO: 62160 - DNA, 16 bp, Homo sapiens
ggagcagggggaggag

SEQ ID NO: 62161 - DNA, 24 bp, Homo sapiens
aatacagcatgtgttaccaagctg

SEQ ID NO: 62162 - DNA, 18 bp, Homo sapiens
ggctccagggagagaccc

SEQ ID NO: 62163 - DNA, 19 bp, Homo sapiens
tcctctgctgaggtcagcc

SEQ ID NO: 62164 - DNA, 23 bp, Homo sapiens
agcccttcacggtgtcgtagaaa

SEQ ID NO: 62165 - DNA, 17 bp, Homo sapiens
ccccagcgggtggattt

SEQ ID NO: 62166 - DNA, 17 bp, Homo sapiens
gcgggggcctgctccgt

SEQ ID NO: 62167 - DNA, 24 bp, Homo sapiens
gcttgtaaggagtggttggtgttt

SEQ ID NO: 62168 - DNA, 24 bp, Homo sapiens
gattcttttgtactagaaacagac

SEQ ID NO: 62169 - DNA, 20 bp, Homo sapiens
gacaactggaggtggcattt

SEQ ID NO: 62170 - DNA, 21 bp, Homo sapiens
tcatcaccattcttttggctg

SEQ ID NO: 62171 - DNA, 22 bp, Homo sapiens
ggatgccatccactacatgacg

SEQ ID NO: 62172 - DNA, 24 bp, Homo sapiens
aagttttcttgttacatataatgc

SEQ ID NO: 62173 - DNA, 17 bp, Homo sapiens
gctaaacggcatgccat

SEQ ID NO: 62174 - DNA, 23 bp, Homo sapiens
gttgacattttcataaaataggt

SEQ ID NO: 62175 - DNA, 17 bp, Homo sapiens
ccaaacttgaggctctg

SEQ ID NO: 62176 - DNA, 24 bp, Homo sapiens
ttagtgtagattagctgcgaatat

SEQ ID NO: 62177 - DNA, 19 bp, Homo sapiens
tgtgcaatagcgagtggcc

SEQ ID NO: 62178 - DNA, 23 bp, Homo sapiens
ctttcacagctagaaaattatgg

SEQ ID NO: 62179 - DNA, 22 bp, Homo sapiens
ataagccccagcactacgtgtc

SEQ ID NO: 62180 - DNA, 20 bp, Homo sapiens
gtgcatttggtggacagagc

SEQ ID NO: 62181 - DNA, 16 bp, Homo sapiens
aatctctggctgactc

SEQ ID NO: 62182 - DNA, 24 bp, Homo sapiens
ctgctgtgtggctgatcggactgg

SEQ ID NO: 62183 - DNA, 20 bp, Homo sapiens
tctggtcctgtcacatccac

SEQ ID NO: 62184 - DNA, 21 bp, Homo sapiens
ctggtatcatatcgcagagac

SEQ ID NO: 62185 - DNA, 23 bp, Homo sapiens
gtcactgacactgttgctgatct

SEQ ID NO: 62186 - DNA, 16 bp, Homo sapiens
acaccacggcactccc

SEQ ID NO: 62187 - DNA, 20 bp, Homo sapiens
ttcacatgagcagataccac

SEQ ID NO: 62188 - DNA, 22 bp, Homo sapiens
gcaacaacagtgttctttgctc

SEQ ID NO: 62189 - DNA, 26 bp, Homo sapiens
ttttttttcctttcttttagtctctg

SEQ ID NO: 62190 - DNA, 29 bp, Homo sapiens
actctaaatgaaatttattcatttttata

SEQ ID NO: 62191 - DNA, 18 bp, Homo sapiens
gccttggatctcctgatg

SEQ ID NO: 62192 - DNA, 20 bp, Homo sapiens
tgtgtctaaaccgttattct

SEQ ID NO: 62193 - DNA, 22 bp, Homo sapiens
gggtccatccatcgcataagag

SEQ ID NO: 62194 - DNA, 16 bp, Homo sapiens
caggtgaggaaccacg

SEQ ID NO: 62195 - DNA, 18 bp, Homo sapiens
gtaggtgcgcccgtagcc

SEQ ID NO: 62196 - DNA, 17 bp, Homo sapiens
gtgagtagggggttgtg

SEQ ID NO: 62197 - DNA, 18 bp, Homo sapiens
gccctggtgatcatggcc

SEQ ID NO: 62198 - DNA, 23 bp, Homo sapiens
ctgccgtgtccattctgtgatct

SEQ ID NO: 62199 - DNA, 16 bp, Homo sapiens
gtcctgccctacctgt

SEQ ID NO: 62200 - DNA, 23 bp, Homo sapiens
ctgctctctattgtttccagagg

SEQ ID NO: 62201 - DNA, 23 bp, Homo sapiens
agagcaatgagtaggcatcacat

SEQ ID NO: 62202 - DNA, 18 bp, Homo sapiens
caccagcactggcgacgg

SEQ ID NO: 62203 - DNA, 24 bp, Homo sapiens
gttaggacctgagagctgaggaag

SEQ ID NO: 62204 - DNA, 22 bp, Homo sapiens
cctagagtttgttcagttccac

SEQ ID NO: 62205 - DNA, 19 bp, Homo sapiens
caaccagcaccatatatgc

SEQ ID NO: 62206 - DNA, 23 bp, Homo sapiens
taactgtcttgctgtgcagtttt

SEQ ID NO: 62207 - DNA, 17 bp, Homo sapiens
cctttcgccttgactgt

SEQ ID NO: 62208 - DNA, 24 bp, Homo sapiens
aaaatgtcttgaaaaaaataatgc

SEQ ID NO: 62209 - DNA, 20 bp, Homo sapiens
gagacaccacatctctagac

SEQ ID NO: 62210 - DNA, 19 bp, Homo sapiens
tatgtgtggttttttgcag

SEQ ID NO: 62211 - DNA, 23 bp, Homo sapiens
ctcagacagtgctggtggtaaat

SEQ ID NO: 62212 - DNA, 19 bp, Homo sapiens
gtggagagggaggcattct

SEQ ID NO: 62213 - DNA, 16 bp, Homo sapiens
gaaggtgagggcgagc

SEQ ID NO: 62214 - DNA, 16 bp, Homo sapiens
gcgaaggacctggcgt

SEQ ID NO: 62215 - DNA, 23 bp, Homo sapiens
aaatatcgcagactaacagacgc

SEQ ID NO: 62216 - DNA, 24 bp, Homo sapiens
agaaaagatttgatgagagggtga

SEQ ID NO: 62217 - DNA, 16 bp, Homo sapiens
gccagctgctctggag

SEQ ID NO: 62218 - DNA, 22 bp, Homo sapiens
catgttgaaactcacacacttc

SEQ ID NO: 62219 - DNA, 16 bp, Homo sapiens
ttcgtgacgtccacgc

SEQ ID NO: 62220 - DNA, 24 bp, Homo sapiens
tgccgtatgtgatggtgttctgtc

SEQ ID NO: 62221 - DNA, 23 bp, Homo sapiens
ccccttgtagttggtgggaatgc

SEQ ID NO: 62222 - DNA, 19 bp, Homo sapiens
ctgcagctgcaccacctac

SEQ ID NO: 62223 - DNA, 18 bp, Homo sapiens
gtcgtcccagccttcttt

SEQ ID NO: 62224 - DNA, 20 bp, Homo sapiens
cagccatgatcttcgctggc

SEQ ID NO: 62225 - DNA, 22 bp, Homo sapiens
agtactttcttgaaggaaacat

SEQ ID NO: 62226 - DNA, 22 bp, Homo sapiens
ccaccgtgcattataacatggg

SEQ ID NO: 62227 - DNA, 19 bp, Homo sapiens
tgagccaccacgcctggcc

SEQ ID NO: 62228 - DNA, 17 bp, Homo sapiens
ggcggttggcaccatgt

SEQ ID NO: 62229 - DNA, 17 bp, Homo sapiens
ggggaaggtgggctggt

SEQ ID NO: 62230 - DNA, 23 bp, Homo sapiens
gactcttcgatgctcagggcaca

SEQ ID NO: 62231 - DNA, 23 bp, Homo sapiens
cacaggtcctgaggcacgtgaat

SEQ ID NO: 62232 - DNA, 18 bp, Homo sapiens
ccttctcaaatagtctgg

SEQ ID NO: 62233 - DNA, 18 bp, Homo sapiens
gggaggccgcctgtgcct

SEQ ID NO: 62234 - DNA, 16 bp, Homo sapiens
ctccagcctgggctga

SEQ ID NO: 62235 - DNA, 22 bp, Homo sapiens
ttggacctggttgtctttggtc

SEQ ID NO: 62236 - DNA, 21 bp, Homo sapiens
aggttgaggtgttgaagactg

SEQ ID NO: 62237 - DNA, 19 bp, Homo sapiens
tggtttaattggagggact

SEQ ID NO: 62238 - DNA, 21 bp, Homo sapiens
gtgttagctcaggagacttac

SEQ ID NO: 62239 - DNA, 17 bp, Homo sapiens
tgcttccatcagcaaat

SEQ ID NO: 62240 - DNA, 24 bp, Homo sapiens
gtgtgtcattctaaatccatttgg

SEQ ID NO: 62241 - DNA, 18 bp, Homo sapiens
actccagagcgagtccag

SEQ ID NO: 62242 - DNA, 24 bp, Homo sapiens
gcttttttttgttttaggagataa

SEQ ID NO: 62243 - DNA, 21 bp, Homo sapiens
catccccctagatctagtttt

SEQ ID NO: 62244 - DNA, 23 bp, Homo sapiens
aatcttgacaaattgagatttgc

SEQ ID NO: 62245 - DNA, 20 bp, Homo sapiens
catgaaaagcccagactcca

SEQ ID NO: 62246 - DNA, 18 bp, Homo sapiens
ggaacacggcagcatgat

SEQ ID NO: 62247 - DNA, 24 bp, Homo sapiens
ctgaatttcctaatttttctgttt

SEQ ID NO: 62248 - DNA, 21 bp, Homo sapiens
aggtgctttaggtctccatag

SEQ ID NO: 62249 - DNA, 23 bp, Homo sapiens
gtctaaaagttaagcagttcttg

SEQ ID NO: 62250 - DNA, 18 bp, Homo sapiens
ggcccaacagtgtgcaca

SEQ ID NO: 62251 - DNA, 24 bp, Homo sapiens
atattttgtgccacagtcaatgca

SEQ ID NO: 62252 - DNA, 24 bp, Homo sapiens
cagacagcaagcacggaactaagt

SEQ ID NO: 62253 - DNA, 20 bp, Homo sapiens
gttgtgggaaaatcagcaag

SEQ ID NO: 62254 - DNA, 24 bp, Homo sapiens
ctgctagtccatggagtcactggt

SEQ ID NO: 62255 - DNA, 23 bp, Homo sapiens
aggttctgcagctccagggtctc

SEQ ID NO: 62256 - DNA, 23 bp, Homo sapiens
cacagctataaagccacaaccag

SEQ ID NO: 62257 - DNA, 16 bp, Homo sapiens
gtgactccttccgtgc

SEQ ID NO: 62258 - DNA, 16 bp, Homo sapiens
ccatgtgactgggtcc

SEQ ID NO: 62259 - DNA, 16 bp, Homo sapiens
gcaggtgggcgtggtg

SEQ ID NO: 62260 - DNA, 18 bp, Homo sapiens
ggtctggaacacggacct

SEQ ID NO: 62261 - DNA, 22 bp, Homo sapiens
cgaaagaaaatgcagagaaaat

SEQ ID NO: 62262 - DNA, 17 bp, Homo sapiens
ctgcagaccatctacgg

SEQ ID NO: 62263 - DNA, 19 bp, Homo sapiens
gggatcaaagttaccaggg

SEQ ID NO: 62264 - DNA, 20 bp, Homo sapiens
gggcttggagtaatcgtact

SEQ ID NO: 62265 - DNA, 20 bp, Homo sapiens
ctgggctgaagtggaaatgg

SEQ ID NO: 62266 - DNA, 17 bp, Homo sapiens
aggacagggtgtgcttc

SEQ ID NO: 62267 - DNA, 24 bp, Homo sapiens
aatgtctgctgtgttttttctgta

SEQ ID NO: 62268 - DNA, 17 bp, Homo sapiens
gtgctgggctgtggtga

SEQ ID NO: 62269 - DNA, 17 bp, Homo sapiens
ggtgcggattgatgagt

SEQ ID NO: 62270 - DNA, 22 bp, Homo sapiens
ttaaatctggcctgctcttccc

SEQ ID NO: 62271 - DNA, 24 bp, Homo sapiens
agaagccctttgaggagcactgga

SEQ ID NO: 62272 - DNA, 17 bp, Homo sapiens
gactgctgtcggagtgc

SEQ ID NO: 62273 - DNA, 18 bp, Homo sapiens
acgggtctatattccaga

SEQ ID NO: 62274 - DNA, 22 bp, Homo sapiens
tttttgtaaagcactgagaatc

SEQ ID NO: 62275 - DNA, 17 bp, Homo sapiens
taggagcgaatggctgg

SEQ ID NO: 62276 - DNA, 22 bp, Homo sapiens
tcaaaaggaacacaagagatgg

SEQ ID NO: 62277 - DNA, 23 bp, Homo sapiens
gacacatgcatgagctattatac

SEQ ID NO: 62278 - DNA, 21 bp, Homo sapiens
gactcttcttttcaaggtcac

SEQ ID NO: 62279 - DNA, 23 bp, Homo sapiens
tcccttcaatgtactccttcttc

SEQ ID NO: 62280 - DNA, 16 bp, Homo sapiens
ccaccgtcccgccagc

SEQ ID NO: 62281 - DNA, 16 bp, Homo sapiens
atcctggactgatggc

SEQ ID NO: 62282 - DNA, 17 bp, Homo sapiens
ggcctcggccaaacact

SEQ ID NO: 62283 - DNA, 16 bp, Homo sapiens
ctgactgccctggagg

SEQ ID NO: 62284 - DNA, 24 bp, Homo sapiens
tgggtgtgggccgcccctccctcc

SEQ ID NO: 62285 - DNA, 18 bp, Homo sapiens
acggagtctgattttggc

SEQ ID NO: 62286 - DNA, 16 bp, Homo sapiens
ggcctggctgtgggcg

SEQ ID NO: 62287 - DNA, 16 bp, Homo sapiens
ccggccacccacacgt

SEQ ID NO: 62288 - DNA, 16 bp, Homo sapiens
ccgggttggctgcggc

SEQ ID NO: 62289 - DNA, 19 bp, Homo sapiens
gggtgtctgtcccttcact

SEQ ID NO: 62290 - DNA, 16 bp, Homo sapiens
gtgccactcctggggt

SEQ ID NO: 62291 - DNA, 16 bp, Homo sapiens
cccccagggtcaggcc

SEQ ID NO: 62292 - DNA, 16 bp, Homo sapiens
cgtgcagtggctgtgc

SEQ ID NO: 62293 - DNA, 20 bp, Homo sapiens
cacagggcgttcaaggatga

SEQ ID NO: 62294 - DNA, 24 bp, Homo sapiens
ctcagcctctgttttcccccaggg

SEQ ID NO: 62295 - DNA, 22 bp, Homo sapiens
acacttgcctgtcctgagtgac

SEQ ID NO: 62296 - DNA, 24 bp, Homo sapiens
tgtgggcagctttccggtgtctcc

SEQ ID NO: 62297 - DNA, 22 bp, Homo sapiens
cttgagcaggaatgcttggtgg

SEQ ID NO: 62298 - DNA, 16 bp, Homo sapiens
ggtgcttgggtcggga

SEQ ID NO: 62299 - DNA, 16 bp, Homo sapiens
gcccttggcccccagc

SEQ ID NO: 62300 - DNA, 18 bp, Homo sapiens
ccctctgctactccatcc

SEQ ID NO: 62301 - DNA, 20 bp, Homo sapiens
gggttaaaccacttcctgat

SEQ ID NO: 62302 - DNA, 24 bp, Homo sapiens
ccatttcatcagcaagtttggaag

SEQ ID NO: 62303 - DNA, 20 bp, Homo sapiens
gtctcctgacacactaacac

SEQ ID NO: 62304 - DNA, 17 bp, Homo sapiens
tttcctctgacgctgtc

SEQ ID NO: 62305 - DNA, 20 bp, Homo sapiens
atacctgcgttcttggcttt

SEQ ID NO: 62306 - DNA, 16 bp, Homo sapiens
acacaggcaccggtgg

SEQ ID NO: 62307 - DNA, 23 bp, Homo sapiens
gcaggaaaaatgtggggttcttc

SEQ ID NO: 62308 - DNA, 19 bp, Homo sapiens
gcatccgtgtgtgtgcacc

SEQ ID NO: 62309 - DNA, 24 bp, Homo sapiens
aacatctacaagatcctcctgctg

SEQ ID NO: 62310 - DNA, 24 bp, Homo sapiens
gcaccactgaaaacgtaagacatt

SEQ ID NO: 62311 - DNA, 22 bp, Homo sapiens
ccgtttctcactctttcttggc

SEQ ID NO: 62312 - DNA, 19 bp, Homo sapiens
ggtcagaggtgagcagagc

SEQ ID NO: 62313 - DNA, 22 bp, Homo sapiens
ccatctgaatggatgataaagc

SEQ ID NO: 62314 - DNA, 17 bp, Homo sapiens
ggcggctcacctgtacg

SEQ ID NO: 62315 - DNA, 19 bp, Homo sapiens
gccggatttcactgggaag

SEQ ID NO: 62316 - DNA, 16 bp, Homo sapiens
gctgaagtgtcacagc

SEQ ID NO: 62317 - DNA, 24 bp, Homo sapiens
cgtacatgtgcactcttacgtgca

SEQ ID NO: 62318 - DNA, 20 bp, Homo sapiens
cttcaaccgcggcttcaagg

SEQ ID NO: 62319 - DNA, 24 bp, Homo sapiens
cacacacacacacatacttgcgca

SEQ ID NO: 62320 - DNA, 18 bp, Homo sapiens
ctgtgtctgacattcccc

SEQ ID NO: 62321 - DNA, 19 bp, Homo sapiens
ctgcaaatccagaaacagg

SEQ ID NO: 62322 - DNA, 20 bp, Homo sapiens
gaaggcaggaggctctttgg

SEQ ID NO: 62323 - DNA, 24 bp, Homo sapiens
tttgcgacgcatgttcctcccagc

SEQ ID NO: 62324 - DNA, 16 bp, Homo sapiens
gagcacccagccccct

SEQ ID NO: 62325 - DNA, 16 bp, Homo sapiens
gcagagcgactactcc

SEQ ID NO: 62326 - DNA, 22 bp, Homo sapiens
ggggcaccctgtggcctctgac

SEQ ID NO: 62327 - DNA, 24 bp, Homo sapiens
tttgttcagatgccggcccacggc

SEQ ID NO: 62328 - DNA, 17 bp, Homo sapiens
aggtggacgcaacggcc

SEQ ID NO: 62329 - DNA, 19 bp, Homo sapiens
gaagacagtggtgaacttc

SEQ ID NO: 62330 - DNA, 18 bp, Homo sapiens
ggtgcgctcacctggagt

SEQ ID NO: 62331 - DNA, 18 bp, Homo sapiens
cccctctgccttaggacc

SEQ ID NO: 62332 - DNA, 17 bp, Homo sapiens
gcaccaggggaataggc

SEQ ID NO: 62333 - DNA, 23 bp, Homo sapiens
ccaaagcatttaacaagggtgtc

SEQ ID NO: 62334 - DNA, 23 bp, Homo sapiens
gcctcgtcttctacagggaagtt

SEQ ID NO: 62335 - DNA, 16 bp, Homo sapiens
tgccaggcccagcacc

SEQ ID NO: 62336 - DNA, 17 bp, Homo sapiens
tcagggacacctcggac

SEQ ID NO: 62337 - DNA, 23 bp, Homo sapiens
cctcacccacgcgaaaaccttcc

SEQ ID NO: 62338 - DNA, 18 bp, Homo sapiens
cggatccagcaccggcag

SEQ ID NO: 62339 - DNA, 24 bp, Homo sapiens
ttttcccttattttaggctgctcc

SEQ ID NO: 62340 - DNA, 20 bp, Homo sapiens
gacacggggggctcaactgc

SEQ ID NO: 62341 - DNA, 21 bp, Homo sapiens
acattcagtccctcgtagaca

SEQ ID NO: 62342 - DNA, 17 bp, Homo sapiens
gcctcacctgaggaagg

SEQ ID NO: 62343 - DNA, 19 bp, Homo sapiens
tttcatttaaccgctttgg

SEQ ID NO: 62344 - DNA, 23 bp, Homo sapiens
caagaaatcatccaccaaacgca

SEQ ID NO: 62345 - DNA, 18 bp, Homo sapiens
gtttgcggggattcggcg

SEQ ID NO: 62346 - DNA, 24 bp, Homo sapiens
cataccaagaaggggctgcaacct

SEQ ID NO: 62347 - DNA, 16 bp, Homo sapiens
atcctctccacgctgc

SEQ ID NO: 62348 - DNA, 24 bp, Homo sapiens
gcaccaggaatattaacactgaat

SEQ ID NO: 62349 - DNA, 20 bp, Homo sapiens
gtctctcacctgtgtcttcc

SEQ ID NO: 62350 - DNA, 18 bp, Homo sapiens
ggaagaggaggcctcacc

SEQ ID NO: 62351 - DNA, 23 bp, Homo sapiens
gtgtatgaggttctgtgtctgtg

SEQ ID NO: 62352 - DNA, 20 bp, Homo sapiens
cgtagcacaggctgcagagc

SEQ ID NO: 62353 - DNA, 20 bp, Homo sapiens
catctggtatgtttctgagg

SEQ ID NO: 62354 - DNA, 18 bp, Homo sapiens
cttcatgtgccaccacgc

SEQ ID NO: 62355 - DNA, 17 bp, Homo sapiens
aggagactctggtggcc

SEQ ID NO: 62356 - DNA, 16 bp, Homo sapiens
ttcgcagagctcctcc

SEQ ID NO: 62357 - DNA, 22 bp, Homo sapiens
gtgagcagaagccctgccagcc

SEQ ID NO: 62358 - DNA, 16 bp, Homo sapiens
acgtggtcctgcctgt

SEQ ID NO: 62359 - DNA, 20 bp, Homo sapiens
ctcacttgcccctgatgcgc

SEQ ID NO: 62360 - DNA, 17 bp, Homo sapiens
tgcattccagcccagcc

SEQ ID NO: 62361 - DNA, 18 bp, Homo sapiens
actgctggcctcattcag

SEQ ID NO: 62362 - DNA, 17 bp, Homo sapiens
gtcgtcatcgagcaggt

SEQ ID NO: 62363 - DNA, 23 bp, Homo sapiens
gctcatcatgcccccatcacagc

SEQ ID NO: 62364 - DNA, 17 bp, Homo sapiens
gccgtacatgcgacagt

SEQ ID NO: 62365 - DNA, 19 bp, Homo sapiens
tcatgagcccagtgattgc

SEQ ID NO: 62366 - DNA, 17 bp, Homo sapiens
aggccacatttgtggct

SEQ ID NO: 62367 - DNA, 19 bp, Homo sapiens
gcagggcagtgcccagacc

SEQ ID NO: 62368 - DNA, 16 bp, Homo sapiens
gccgcaggtccacacg

SEQ ID NO: 62369 - DNA, 18 bp, Homo sapiens
aggtgagccacgaactgt

SEQ ID NO: 62370 - DNA, 19 bp, Homo sapiens
cccccgtttcccaaacaga

SEQ ID NO: 62371 - DNA, 16 bp, Homo sapiens
cacgtgccacacacgc

SEQ ID NO: 62372 - DNA, 17 bp, Homo sapiens
tgcgtgcgtcggtatgc

SEQ ID NO: 62373 - DNA, 24 bp, Homo sapiens
gaaacgcatcacagacacgactgc

SEQ ID NO: 62374 - DNA, 16 bp, Homo sapiens
ccccaggacaggctca

SEQ ID NO: 62375 - DNA, 18 bp, Homo sapiens
cgactatcacacgtgaac

SEQ ID NO: 62376 - DNA, 20 bp, Homo sapiens
cgtggccactgtcagtctcc

SEQ ID NO: 62377 - DNA, 16 bp, Homo sapiens
gccttctggaccacgg

SEQ ID NO: 62378 - DNA, 22 bp, Homo sapiens
gagagagagtgggggacaccgc

SEQ ID NO: 62379 - DNA, 17 bp, Homo sapiens
cgatgacctccgtgagc

SEQ ID NO: 62380 - DNA, 24 bp, Homo sapiens
gaggctcagagaggggacacagcc

SEQ ID NO: 62381 - DNA, 19 bp, Homo sapiens
cgcctgagctgtactttgt

SEQ ID NO: 62382 - DNA, 18 bp, Homo sapiens
cctcaacagtgacagggt

SEQ ID NO: 62383 - DNA, 18 bp, Homo sapiens
ggacgatatccacagggc

SEQ ID NO: 62384 - DNA, 17 bp, Homo sapiens
cacccaacatgaggtgc

SEQ ID NO: 62385 - DNA, 23 bp, Homo sapiens
gttcagcgtgctcaactacgagc

SEQ ID NO: 62386 - DNA, 16 bp, Homo sapiens
ccggcacccaccttga

SEQ ID NO: 62387 - DNA, 17 bp, Homo sapiens
atgctgtccccgccagg

SEQ ID NO: 62388 - DNA, 16 bp, Homo sapiens
cagcacgaaggtgcgc

SEQ ID NO: 62389 - DNA, 17 bp, Homo sapiens
gcttctcccctgggtcc

SEQ ID NO: 62390 - DNA, 19 bp, Homo sapiens
cccaggaggccggggcgcc

SEQ ID NO: 62391 - DNA, 24 bp, Homo sapiens
aggaagctgggaggggttctaggt

SEQ ID NO: 62392 - DNA, 24 bp, Homo sapiens
caccctcgaggtgagacgctcggc

SEQ ID NO: 62393 - DNA, 24 bp, Homo sapiens
ctacgtcgtgggagccagaacgtt

SEQ ID NO: 62394 - DNA, 23 bp, Homo sapiens
gccgtgccatggccctggctgtg

SEQ ID NO: 62395 - DNA, 24 bp, Homo sapiens
ctgctgacgtccagactccgcttc

SEQ ID NO: 62396 - DNA, 24 bp, Homo sapiens
gataccaaatgtggggctcaaacg

SEQ ID NO: 62397 - DNA, 17 bp, Homo sapiens
cgggagctgtcggaagc

SEQ ID NO: 62398 - DNA, 19 bp, Homo sapiens
cctcttttctctgcggaac

SEQ ID NO: 62399 - DNA, 22 bp, Homo sapiens
ttgtctggctgagcaagcctcc

SEQ ID NO: 62400 - DNA, 16 bp, Homo sapiens
gcagcccgtcaggctt

SEQ ID NO: 62401 - DNA, 22 bp, Homo sapiens
ccctcactgagtcggtgggggc

SEQ ID NO: 62402 - DNA, 18 bp, Homo sapiens
ttcccgatgctgcctgac

SEQ ID NO: 62403 - DNA, 17 bp, Homo sapiens
gcatgggtggacgtggc

SEQ ID NO: 62404 - DNA, 24 bp, Homo sapiens
gttgcaaagcattggaatcaggta

SEQ ID NO: 62405 - DNA, 17 bp, Homo sapiens
aggcctgtgacggggcc

SEQ ID NO: 62406 - DNA, 19 bp, Homo sapiens
gaccacgtttcaaaagaac

SEQ ID NO: 62407 - DNA, 18 bp, Homo sapiens
agtggagacaggcgcatg

SEQ ID NO: 62408 - DNA, 24 bp, Homo sapiens
agttcctgcactggctgatgagtg

SEQ ID NO: 62409 - DNA, 21 bp, Homo sapiens
ctggcgtggggatacagtacc

SEQ ID NO: 62410 - DNA, 22 bp, Homo sapiens
tttaaggggttggctgtgttcc

SEQ ID NO: 62411 - DNA, 23 bp, Homo sapiens
cttccggtagaaaaagagcctgt

SEQ ID NO: 62412 - DNA, 16 bp, Homo sapiens
gtccggggtgaggtca

SEQ ID NO: 62413 - DNA, 17 bp, Homo sapiens
tcgacgacgtacacact

SEQ ID NO: 62414 - DNA, 16 bp, Homo sapiens
tctggggtgaggtcgc

SEQ ID NO: 62415 - DNA, 24 bp, Homo sapiens
ctcctcacgcagacggtgctctgc

SEQ ID NO: 62416 - DNA, 17 bp, Homo sapiens
cttggctgcgcaggagc

SEQ ID NO: 62417 - DNA, 24 bp, Homo sapiens
gacgtcctgagcgaaaagccacgt

SEQ ID NO: 62418 - DNA, 24 bp, Homo sapiens
tctccctggggaagcatgccaagc

SEQ ID NO: 62419 - DNA, 19 bp, Homo sapiens
cctgcccccttttctgagc

SEQ ID NO: 62420 - DNA, 24 bp, Homo sapiens
cccaggcctctggggctccaggca

SEQ ID NO: 62421 - DNA, 17 bp, Homo sapiens
ccacctcctcacctggg

SEQ ID NO: 62422 - DNA, 18 bp, Homo sapiens
cccctggcaggtgtacgg

SEQ ID NO: 62423 - DNA, 18 bp, Homo sapiens
ctcctgcagcgagagctt

SEQ ID NO: 62424 - DNA, 17 bp, Homo sapiens
cccgaggaggaggacac

SEQ ID NO: 62425 - DNA, 21 bp, Homo sapiens
gttcctgaggaagcggcgttc

SEQ ID NO: 62426 - DNA, 16 bp, Homo sapiens
cggtcaccccagcagc

SEQ ID NO: 62427 - DNA, 16 bp, Homo sapiens
gcccgcacgaagccgt

SEQ ID NO: 62428 - DNA, 16 bp, Homo sapiens
gcttgggaaccacgcg

SEQ ID NO: 62429 - DNA, 17 bp, Homo sapiens
cgacgggggtctgtgtc

SEQ ID NO: 62430 - DNA, 16 bp, Homo sapiens
gcaggttgccccgcct

SEQ ID NO: 62431 - DNA, 16 bp, Homo sapiens
cacagacaccggctgc

SEQ ID NO: 62432 - DNA, 17 bp, Homo sapiens
ggaggctcgtggagacc

SEQ ID NO: 62433 - DNA, 16 bp, Homo sapiens
gagcaccccgtagggg

SEQ ID NO: 62434 - DNA, 16 bp, Homo sapiens
aggagcagctgcggcc

SEQ ID NO: 62435 - DNA, 20 bp, Homo sapiens
catttgccagtagcgctggg

SEQ ID NO: 62436 - DNA, 16 bp, Homo sapiens
gacacgccttgtcccc

SEQ ID NO: 62437 - DNA, 24 bp, Homo sapiens
gcctggaacccagaaagatggtct

SEQ ID NO: 62438 - DNA, 17 bp, Homo sapiens
acccatccgtgggccgc

SEQ ID NO: 62439 - DNA, 18 bp, Homo sapiens
ctgagtaggaaggagggc

SEQ ID NO: 62440 - DNA, 18 bp, Homo sapiens
cagacccgccgaagaagc

SEQ ID NO: 62441 - DNA, 19 bp, Homo sapiens
gcttggtctcggcgtacac

SEQ ID NO: 62442 - DNA, 16 bp, Homo sapiens
cccgggcaggacgcgt

SEQ ID NO: 62443 - DNA, 24 bp, Homo sapiens
cgatgtggatggggggcccgcgtg

SEQ ID NO: 62444 - DNA, 16 bp, Homo sapiens
gaggcccaggcgtggc

SEQ ID NO: 62445 - DNA, 19 bp, Homo sapiens
caccctccaaagaggtggc

SEQ ID NO: 62446 - DNA, 17 bp, Homo sapiens
gccccgggtgcgaggag

SEQ ID NO: 62447 - DNA, 18 bp, Homo sapiens
acggtcactcggtccacg

SEQ ID NO: 62448 - DNA, 18 bp, Homo sapiens
tgggatgcgaacgggcct

SEQ ID NO: 62449 - DNA, 17 bp, Homo sapiens
gctccggctcaggggca

SEQ ID NO: 62450 - DNA, 21 bp, Homo sapiens
accagctcggcgctgccactc

SEQ ID NO: 62451 - DNA, 24 bp, Homo sapiens
acttcggctggcactgcccccgcg

SEQ ID NO: 62452 - DNA, 18 bp, Homo sapiens
ctctttgtgctggtggct

SEQ ID NO: 62453 - DNA, 18 bp, Homo sapiens
gacgctatggttccaggc

SEQ ID NO: 62454 - DNA, 16 bp, Homo sapiens
gggggctgctgctgcg

SEQ ID NO: 62455 - DNA, 16 bp, Homo sapiens
cgggggccgggcctga

SEQ ID NO: 62456 - DNA, 16 bp, Homo sapiens
accagcgtgcgcagct

SEQ ID NO: 62457 - DNA, 24 bp, Homo sapiens
gcacacctggtaggcgcagctggg

SEQ ID NO: 62458 - DNA, 16 bp, Homo sapiens
gccttcggcttcgcgc

SEQ ID NO: 62459 - DNA, 16 bp, Homo sapiens
gcacgtcgtcgcccac

SEQ ID NO: 62460 - DNA, 18 bp, Homo sapiens
cctgaaggagctggtggc

SEQ ID NO: 62461 - DNA, 18 bp, Homo sapiens
tcaccgtgttgggcaggt

SEQ ID NO: 62462 - DNA, 20 bp, Homo sapiens
accagcgacatgcggagagc

SEQ ID NO: 62463 - DNA, 16 bp, Homo sapiens
cgggccccgtccagca

SEQ ID NO: 62464 - DNA, 16 bp, Homo sapiens
ccaggtgggcctcccc

SEQ ID NO: 62465 - DNA, 18 bp, Homo sapiens
cacagcctctgcagcact

SEQ ID NO: 62466 - DNA, 16 bp, Homo sapiens
agtgcctggtgtgcgt

SEQ ID NO: 62467 - DNA, 17 bp, Homo sapiens
cctgagtcgcctgcgct

SEQ ID NO: 62468 - DNA, 16 bp, Homo sapiens
cccagggctggcggct

SEQ ID NO: 62469 - DNA, 19 bp, Homo sapiens
ccggacgccgaccccgggg

SEQ ID NO: 62470 - DNA, 16 bp, Homo sapiens
ctgctgcgcagccact

SEQ ID NO: 62471 - DNA, 24 bp, Homo sapiens
gggcggccgtgcgtcccagggcac

SEQ ID NO: 62472 - DNA, 16 bp, Homo sapiens
gggaagccctggcccc

SEQ ID NO: 62473 - DNA, 23 bp, Homo sapiens
ccgccgggtccccgcgctgcacc

SEQ ID NO: 62474 - DNA, 23 bp, Homo sapiens
ctttccgcggccccgccctctcc

SEQ ID NO: 62475 - DNA, 24 bp, Homo sapiens
gtggccagcggcagcacctcgcgg

SEQ ID NO: 62476 - DNA, 16 bp, Homo sapiens
gggtccccggcccagc

SEQ ID NO: 62477 - DNA, 17 bp, Homo sapiens
atttgtgcaggcgaggc

SEQ ID NO: 62478 - DNA, 17 bp, Homo sapiens
ggctcaaaaccgcttgc

SEQ ID NO: 62479 - DNA, 16 bp, Homo sapiens
gcccgcagacgcctgg

SEQ ID NO: 62480 - DNA, 19 bp, Homo sapiens
ggctgcacctgtggaggag

SEQ ID NO: 62481 - DNA, 24 bp, Homo sapiens
cctgccgccgggctgccatccttg

SEQ ID NO: 62482 - DNA, 16 bp, Homo sapiens
gggcgctgcggccgct

SEQ ID NO: 62483 - DNA, 17 bp, Homo sapiens
cctccagctcagcccct

SEQ ID NO: 62484 - DNA, 18 bp, Homo sapiens
tcccagacagaacctact

SEQ ID NO: 62485 - DNA, 18 bp, Homo sapiens
gaaatccacctcctcctc

SEQ ID NO: 62486 - DNA, 16 bp, Homo sapiens
ctccgcccgccttacc

SEQ ID NO: 62487 - DNA, 22 bp, Homo sapiens
cggctgcagcggccgcagcggc

SEQ ID NO: 62488 - DNA, 22 bp, Homo sapiens
tcccaccttccccttcttcagc

SEQ ID NO: 62489 - DNA, 24 bp, Homo sapiens
cttcccgccccagctgccgccgca

SEQ ID NO: 62490 - DNA, 20 bp, Homo sapiens
ggtctcttctttcttctgtc

SEQ ID NO: 62491 - DNA, 21 bp, Homo sapiens
agaggattctttgaagagtgg

SEQ ID NO: 62492 - DNA, 18 bp, Homo sapiens
tccttccttttgttggac

SEQ ID NO: 62493 - DNA, 17 bp, Homo sapiens
ttcacatacgtcaggcc

SEQ ID NO: 62494 - DNA, 21 bp, Homo sapiens
ctgaggagaaaaaagaatccc

SEQ ID NO: 62495 - DNA, 24 bp, Homo sapiens
gatataggctacagaaattgacag

SEQ ID NO: 62496 - DNA, 23 bp, Homo sapiens
aagaaaaaagacacaattctaat

SEQ ID NO: 62497 - DNA, 23 bp, Homo sapiens
ttaaaaagaaagtaaagaaagtc

SEQ ID NO: 62498 - DNA, 17 bp, Homo sapiens
cctatagggggccactc

SEQ ID NO: 62499 - DNA, 22 bp, Homo sapiens
tctttttttaaaaaaatcacat

SEQ ID NO: 62500 - DNA, 22 bp, Homo sapiens
gggcagaatcgcagcagaattc

SEQ ID NO: 62501 - DNA, 23 bp, Homo sapiens
tctttaaaaaattctatgctggt

SEQ ID NO: 62502 - DNA, 21 bp, Homo sapiens
ggcagaactgcaaatctctcc

SEQ ID NO: 62503 - DNA, 20 bp, Homo sapiens
tctgttttcttcttatttgc

SEQ ID NO: 62504 - DNA, 21 bp, Homo sapiens
tcttcagaagaaactgcattc

SEQ ID NO: 62505 - DNA, 24 bp, Homo sapiens
gtttcaaagtctctggaaaaattg

SEQ ID NO: 62506 - DNA, 23 bp, Homo sapiens
ggtaactggatactcatctatag

SEQ ID NO: 62507 - DNA, 24 bp, Homo sapiens
tagagtccagacagaatctctgca

SEQ ID NO: 62508 - DNA, 18 bp, Homo sapiens
cattgccatgaatgacct

SEQ ID NO: 62509 - DNA, 22 bp, Homo sapiens
tcagtcttctacacgcaaagaa

SEQ ID NO: 62510 - DNA, 21 bp, Homo sapiens
aaaactaaactaaaacacaaa

SEQ ID NO: 62511 - DNA, 18 bp, Homo sapiens
aaagtgttgtgtcctggc

SEQ ID NO: 62512 - DNA, 18 bp, Homo sapiens
gaatgctacaatgtgctt

SEQ ID NO: 62513 - DNA, 20 bp, Homo sapiens
tttggaagcagttttctgta

SEQ ID NO: 62514 - DNA, 22 bp, Homo sapiens
tagctttttgccagatttgcat

SEQ ID NO: 62515 - DNA, 25 bp, Homo sapiens
tcatttctatgtattgtaattctag

SEQ ID NO: 62516 - DNA, 22 bp, Homo sapiens
actttatacatcttttggttgc

SEQ ID NO: 62517 - DNA, 27 bp, Homo sapiens
cttccccaaagaatctatacttatatc

SEQ ID NO: 62518 - DNA, 22 bp, Homo sapiens
ggatcatcaaatacaagtcatg

SEQ ID NO: 62519 - DNA, 22 bp, Homo sapiens
aggctagacaagaaaaatataa

SEQ ID NO: 62520 - DNA, 20 bp, Homo sapiens
gtccaaaagcatctatacgc

SEQ ID NO: 62521 - DNA, 26 bp, Homo sapiens
tcaaatcagcttttatataaggtcag

SEQ ID NO: 62522 - DNA, 20 bp, Homo sapiens
agatgcagttttgtgtgtgg

SEQ ID NO: 62523 - DNA, 23 bp, Homo sapiens
agtttcttgtgttcatttttagt

SEQ ID NO: 62524 - DNA, 18 bp, Homo sapiens
tctcgggctgcaatctaa

SEQ ID NO: 62525 - DNA, 22 bp, Homo sapiens
actttttattgacatagtacac

SEQ ID NO: 62526 - DNA, 23 bp, Homo sapiens
aaacagtctgtgagtaggtatac

SEQ ID NO: 62527 - DNA, 24 bp, Homo sapiens
taatttttaataaagtgaaccaac

SEQ ID NO: 62528 - DNA, 20 bp, Homo sapiens
acaagttaaagccaaagctg

SEQ ID NO: 62529 - DNA, 30 bp, Homo sapiens
ttattgatattttcttttttcattttttag

SEQ ID NO: 62530 - DNA, 19 bp, Homo sapiens
ccaccttacaaaacacgtt

SEQ ID NO: 62531 - DNA, 22 bp, Homo sapiens
tcacaactttatgacagcaagt

SEQ ID NO: 62532 - DNA, 23 bp, Homo sapiens
aataattatgaaacactttcagt

SEQ ID NO: 62533 - DNA, 21 bp, Homo sapiens
gtggcaaaaggatataaggtc

SEQ ID NO: 62534 - DNA, 20 bp, Homo sapiens
tagcaaattatccacccttg

SEQ ID NO: 62535 - DNA, 17 bp, Homo sapiens
ctgttgtctccaatggc

SEQ ID NO: 62536 - DNA, 24 bp, Homo sapiens
attttaaccatttcagaattgacg

SEQ ID NO: 62537 - DNA, 26 bp, Homo sapiens
aaaaaggatatcttctccaataagtg

SEQ ID NO: 62538 - DNA, 24 bp, Homo sapiens
tcattttttatcctttgatagcaa

SEQ ID NO: 62539 - DNA, 16 bp, Homo sapiens
cctgccaacaaagccc

SEQ ID NO: 62540 - DNA, 20 bp, Homo sapiens
aaactgcagcattaaaggcc

SEQ ID NO: 62541 - DNA, 16 bp, Homo sapiens
tgcctctcagctcatc

SEQ ID NO: 62542 - DNA, 22 bp, Homo sapiens
tgactgccctttatacaaaatc

SEQ ID NO: 62543 - DNA, 18 bp, Homo sapiens
cagcatcatccagcttga

SEQ ID NO: 62544 - DNA, 18 bp, Homo sapiens
gtgagccactgcgcctgg

SEQ ID NO: 62545 - DNA, 23 bp, Homo sapiens
tttccttattttcagagatgcac

SEQ ID NO: 62546 - DNA, 21 bp, Homo sapiens
tggaaatttagcatattagga

SEQ ID NO: 62547 - DNA, 22 bp, Homo sapiens
ctgcaaagtacttaccacaatg

SEQ ID NO: 62548 - DNA, 20 bp, Homo sapiens
tgtgaatcccctaatcaagc

SEQ ID NO: 62549 - DNA, 21 bp, Homo sapiens
accatacatgatagatcatat

SEQ ID NO: 62550 - DNA, 21 bp, Homo sapiens
cttctaccagctatcttctgt

SEQ ID NO: 62551 - DNA, 24 bp, Homo sapiens
attgtgagaaaaatgtttttcttg

SEQ ID NO: 62552 - DNA, 20 bp, Homo sapiens
gggcaacatttttattggca

SEQ ID NO: 62553 - DNA, 20 bp, Homo sapiens
agcagacaggtttctaacac

SEQ ID NO: 62554 - DNA, 19 bp, Homo sapiens
gggtttctagctctgaacg

SEQ ID NO: 62555 - DNA, 24 bp, Homo sapiens
tctttactttttccatgtttatgc

SEQ ID NO: 62556 - DNA, 18 bp, Homo sapiens
ttgctcggacaaggccga

SEQ ID NO: 62557 - DNA, 24 bp, Homo sapiens
ttctgtaacattatatttgtattt

SEQ ID NO: 62558 - DNA, 23 bp, Homo sapiens
tcggtattatattccagtgatgt

SEQ ID NO: 62559 - DNA, 18 bp, Homo sapiens
tagtttccaggactctgc

SEQ ID NO: 62560 - DNA, 23 bp, Homo sapiens
aaaaactatttttagcaacttta

SEQ ID NO: 62561 - DNA, 18 bp, Homo sapiens
agctgctgcttccttcgg

SEQ ID NO: 62562 - DNA, 24 bp, Homo sapiens
tgttgttttacttttttttttaaa

SEQ ID NO: 62563 - DNA, 24 bp, Homo sapiens
acagagccacatctgttaggtaag

SEQ ID NO: 62564 - DNA, 18 bp, Homo sapiens
aattctgtcatcctgcac

SEQ ID NO: 62565 - DNA, 22 bp, Homo sapiens
ctctttcttcaacttgggaaag

SEQ ID NO: 62566 - DNA, 22 bp, Homo sapiens
cataaaactctgtaactgcctg

SEQ ID NO: 62567 - DNA, 21 bp, Homo sapiens
tctggccaagacctaaatacc

SEQ ID NO: 62568 - DNA, 20 bp, Homo sapiens
caacttgaggacatacaggg

SEQ ID NO: 62569 - DNA, 21 bp, Homo sapiens
tccttttttctttcagtgtgc

SEQ ID NO: 62570 - DNA, 22 bp, Homo sapiens
aactacctagtcatcattaaat

SEQ ID NO: 62571 - DNA, 22 bp, Homo sapiens
ttttgaatacagccatgctttc

SEQ ID NO: 62572 - DNA, 18 bp, Homo sapiens
ttctgatgagcacaacaa

SEQ ID NO: 62573 - DNA, 21 bp, Homo sapiens
aagttaacaatgccagaaata

SEQ ID NO: 62574 - DNA, 21 bp, Homo sapiens
tggtaaccattaagttttact

SEQ ID NO: 62575 - DNA, 22 bp, Homo sapiens
ttccaagttgaattctttgagg

SEQ ID NO: 62576 - DNA, 23 bp, Homo sapiens
tggttctgtttattacatttttt

SEQ ID NO: 62577 - DNA, 23 bp, Homo sapiens
tccccctttttttaattttggag

SEQ ID NO: 62578 - DNA, 21 bp, Homo sapiens
tattctgttttctaggttctc

SEQ ID NO: 62579 - DNA, 22 bp, Homo sapiens
aggcaagcttctctaagtatag

SEQ ID NO: 62580 - DNA, 19 bp, Homo sapiens
tttgctctttggctgccat

SEQ ID NO: 62581 - DNA, 19 bp, Homo sapiens
cagcaacaataccaaacag

SEQ ID NO: 62582 - DNA, 22 bp, Homo sapiens
tccattttacttgatagctgtt

SEQ ID NO: 62583 - DNA, 21 bp, Homo sapiens
tgctccttttgtttgattttc

SEQ ID NO: 62584 - DNA, 19 bp, Homo sapiens
ctgacctgattctgtagga

SEQ ID NO: 62585 - DNA, 23 bp, Homo sapiens
tgtttctagttcctgaattagtt

SEQ ID NO: 62586 - DNA, 22 bp, Homo sapiens
tgccttactcagaagtttttcc

SEQ ID NO: 62587 - DNA, 24 bp, Homo sapiens
gattcttttacaggaattttaaac

SEQ ID NO: 62588 - DNA, 24 bp, Homo sapiens
ttatcaattaatactgcagtcagc

SEQ ID NO: 62589 - DNA, 23 bp, Homo sapiens
tggaacaacattaaggaatctgg

SEQ ID NO: 62590 - DNA, 23 bp, Homo sapiens
ttcctttggttttcatatcagtc

SEQ ID NO: 62591 - DNA, 22 bp, Homo sapiens
ttcatctgtcaaacattaaatg

SEQ ID NO: 62592 - DNA, 17 bp, Homo sapiens
ccgtctcccaaatgaag

SEQ ID NO: 62593 - DNA, 22 bp, Homo sapiens
acatttagaatcggggtatatg

SEQ ID NO: 62594 - DNA, 19 bp, Homo sapiens
acaccccaaaaagaattcc

SEQ ID NO: 62595 - DNA, 24 bp, Homo sapiens
ataaaacttgttttctggtctttc

SEQ ID NO: 62596 - DNA, 19 bp, Homo sapiens
aaacaatggtaaccttggt

SEQ ID NO: 62597 - DNA, 20 bp, Homo sapiens
agaccacactaaaacttcat

SEQ ID NO: 62598 - DNA, 20 bp, Homo sapiens
ccagtctattgctcagttct

SEQ ID NO: 62599 - DNA, 21 bp, Homo sapiens
ccagccactccttaaattaag

SEQ ID NO: 62600 - DNA, 19 bp, Homo sapiens
gggcatttatttccctgtg

SEQ ID NO: 62601 - DNA, 22 bp, Homo sapiens
cttcccacatgactatctcagt

SEQ ID NO: 62602 - DNA, 23 bp, Homo sapiens
cgtagatgattttctatctgacc

SEQ ID NO: 62603 - DNA, 23 bp, Homo sapiens
gtgtcacattcctgggcattaga

SEQ ID NO: 62604 - DNA, 19 bp, Homo sapiens
acttttttgtgataaatgc

SEQ ID NO: 62605 - DNA, 23 bp, Homo sapiens
tgctattactcttttctcacagg

SEQ ID NO: 62606 - DNA, 23 bp, Homo sapiens
tttaatatatagtgtcctcaagc

SEQ ID NO: 62607 - DNA, 22 bp, Homo sapiens
tctccattcagaatctagtgtg

SEQ ID NO: 62608 - DNA, 19 bp, Homo sapiens
ctcgcatgctatttgtaag

SEQ ID NO: 62609 - DNA, 17 bp, Homo sapiens
aggggactctgtagcat

SEQ ID NO: 62610 - DNA, 18 bp, Homo sapiens
caagaagaactcttgggt

SEQ ID NO: 62611 - DNA, 22 bp, Homo sapiens
tttatttcaactaactagttaa

SEQ ID NO: 62612 - DNA, 20 bp, Homo sapiens
tgtgggaattaacagcaggt

SEQ ID NO: 62613 - DNA, 24 bp, Homo sapiens
acttttaaaagtcactaattaaac

SEQ ID NO: 62614 - DNA, 18 bp, Homo sapiens
tggactgaggagttcagg

SEQ ID NO: 62615 - DNA, 17 bp, Homo sapiens
ttttcagtgttctaccc

SEQ ID NO: 62616 - DNA, 18 bp, Homo sapiens
tcagggtctggtacttac

SEQ ID NO: 62617 - DNA, 24 bp, Homo sapiens
atcacctaaagtcagaatttcaag

SEQ ID NO: 62618 - DNA, 20 bp, Homo sapiens
agaatccacaaataaatggc

SEQ ID NO: 62619 - DNA, 23 bp, Homo sapiens
ccggaccgttattttagaaattc

SEQ ID NO: 62620 - DNA, 22 bp, Homo sapiens
gggtccaatcacatttctaatt

SEQ ID NO: 62621 - DNA, 21 bp, Homo sapiens
atactcaatgaacaagctgcc

SEQ ID NO: 62622 - DNA, 23 bp, Homo sapiens
tcagttttatccccaactctaaa

SEQ ID NO: 62623 - DNA, 20 bp, Homo sapiens
acaaatccataagtgcttag

SEQ ID NO: 62624 - DNA, 23 bp, Homo sapiens
cttgaatttcatccttcctcttt

SEQ ID NO: 62625 - DNA, 22 bp, Homo sapiens
gtgctttcctcttttatcacac

SEQ ID NO: 62626 - DNA, 22 bp, Homo sapiens
tttttagtatttttcgtatttc

SEQ ID NO: 62627 - DNA, 25 bp, Homo sapiens
ttcgaatatgtatttgcatgttttg

SEQ ID NO: 62628 - DNA, 20 bp, Homo sapiens
aaaagtaagcttgacattac

SEQ ID NO: 62629 - DNA, 22 bp, Homo sapiens
acctttctgacttccctttaat

SEQ ID NO: 62630 - DNA, 25 bp, Homo sapiens
atcctatcctcagatttctatttac

SEQ ID NO: 62631 - DNA, 22 bp, Homo sapiens
cgaatgcatttgcaagaaatac

SEQ ID NO: 62632 - DNA, 19 bp, Homo sapiens
ttacaacatatttccaagg

SEQ ID NO: 62633 - DNA, 18 bp, Homo sapiens
acaagatacagcagagtt

SEQ ID NO: 62634 - DNA, 19 bp, Homo sapiens
actggacttatcttgagtg

SEQ ID NO: 62635 - DNA, 27 bp, Homo sapiens
ataatgcattgtaagaaaaaaatttat

SEQ ID NO: 62636 - DNA, 27 bp, Homo sapiens
caatttggggaaagctttaaaatatat

SEQ ID NO: 62637 - DNA, 16 bp, Homo sapiens
tgtggctacgatgagc

SEQ ID NO: 62638 - DNA, 29 bp, Homo sapiens
tatttgttttagtttatgatagaaataaa

SEQ ID NO: 62639 - DNA, 23 bp, Homo sapiens
atcccctccaaaaaaaaaaaaag

SEQ ID NO: 62640 - DNA, 18 bp, Homo sapiens
aaaggagagtgaaagcgg

SEQ ID NO: 62641 - DNA, 22 bp, Homo sapiens
ttacagctgtttactttcaagg

SEQ ID NO: 62642 - DNA, 18 bp, Homo sapiens
ctgcagtcaaggactagc

SEQ ID NO: 62643 - DNA, 20 bp, Homo sapiens
agtgatggcatttcggattt

SEQ ID NO: 62644 - DNA, 23 bp, Homo sapiens
tgtttctgatagcaaaaagtcag

SEQ ID NO: 62645 - DNA, 20 bp, Homo sapiens
tctagcacaaaagctgtgag

SEQ ID NO: 62646 - DNA, 19 bp, Homo sapiens
tgggtcatgagctgtaatc

SEQ ID NO: 62647 - DNA, 20 bp, Homo sapiens
ctgaatcagctccgggagca

SEQ ID NO: 62648 - DNA, 27 bp, Homo sapiens
aaaaaaaaagtaaaaaaaaaaaaaaag

SEQ ID NO: 62649 - DNA, 23 bp, Homo sapiens
acacaaggagtgataatgttcac

SEQ ID NO: 62650 - DNA, 24 bp, Homo sapiens
tccatctctcttaactgttaggaa

SEQ ID NO: 62651 - DNA, 16 bp, Homo sapiens
gccagggagaaaatgc

SEQ ID NO: 62652 - DNA, 23 bp, Homo sapiens
aagtgattgcttgttgtagagct

SEQ ID NO: 62653 - DNA, 23 bp, Homo sapiens
tatctaaagcactgataaagagg

SEQ ID NO: 62654 - DNA, 16 bp, Homo sapiens
gctgctgcttccgtag

SEQ ID NO: 62655 - DNA, 30 bp, Homo sapiens
atttgagtaactgtaatattttataataaa

SEQ ID NO: 62656 - DNA, 22 bp, Homo sapiens
catcacctagcaactgttgact

SEQ ID NO: 62657 - DNA, 23 bp, Homo sapiens
aatttaattttcaaatcaagcta

SEQ ID NO: 62658 - DNA, 21 bp, Homo sapiens
ctttcttcttgtacagttggt

SEQ ID NO: 62659 - DNA, 27 bp, Homo sapiens
tctggacatatgttcttaaaatctatg

SEQ ID NO: 62660 - DNA, 20 bp, Homo sapiens
cctgttctcccagcaacaca

SEQ ID NO: 62661 - DNA, 26 bp, Homo sapiens
ttttcatgctatcttagagttttttt

SEQ ID NO: 62662 - DNA, 21 bp, Homo sapiens
catcgacttattttttggcat

SEQ ID NO: 62663 - DNA, 18 bp, Homo sapiens
tcttttttgcagaccaac

SEQ ID NO: 62664 - DNA, 26 bp, Homo sapiens
ttgaaatttgggtaacttttaattat

SEQ ID NO: 62665 - DNA, 18 bp, Homo sapiens
ccctgtgattgatgtgtt

SEQ ID NO: 62666 - DNA, 21 bp, Homo sapiens
tccacatttcgtggtaaatat

SEQ ID NO: 62667 - DNA, 20 bp, Homo sapiens
cattactctctctgagtcct

SEQ ID NO: 62668 - DNA, 24 bp, Homo sapiens
aagacagaggaccgctttcctttt

SEQ ID NO: 62669 - DNA, 21 bp, Homo sapiens
atggtaatcaatgcaacttgt

SEQ ID NO: 62670 - DNA, 23 bp, Homo sapiens
tccacttatgagataaattgtgg

SEQ ID NO: 62671 - DNA, 19 bp, Homo sapiens
ccacaatcccaattgtcgc

SEQ ID NO: 62672 - DNA, 24 bp, Homo sapiens
aattcctttctaattttcaggagg

SEQ ID NO: 62673 - DNA, 22 bp, Homo sapiens
tgggcttgacttattttcaaga

SEQ ID NO: 62674 - DNA, 21 bp, Homo sapiens
tgggtggaaagagctcctaca

SEQ ID NO: 62675 - DNA, 19 bp, Homo sapiens
tgagtgctttaagagcatc

SEQ ID NO: 62676 - DNA, 17 bp, Homo sapiens
tcctgcagaagaagcga

SEQ ID NO: 62677 - DNA, 16 bp, Homo sapiens
gtgtgagccaccgtgc

SEQ ID NO: 62678 - DNA, 17 bp, Homo sapiens
attgtctgcagcaccca

SEQ ID NO: 62679 - DNA, 19 bp, Homo sapiens
aatttgagctattattggc

SEQ ID NO: 62680 - DNA, 23 bp, Homo sapiens
gttgcttttctgattatttctgc

SEQ ID NO: 62681 - DNA, 24 bp, Homo sapiens
gttcataaaataatgttcggcttc

SEQ ID NO: 62682 - DNA, 16 bp, Homo sapiens
tgagtgctcgtccctc

SEQ ID NO: 62683 - DNA, 19 bp, Homo sapiens
cttgcttgtaggatgggtg

SEQ ID NO: 62684 - DNA, 18 bp, Homo sapiens
accggatacttacatctc

SEQ ID NO: 62685 - DNA, 21 bp, Homo sapiens
tatggaagaactgactgacac

SEQ ID NO: 62686 - DNA, 20 bp, Homo sapiens
ggcacaattatgactgtcat

SEQ ID NO: 62687 - DNA, 20 bp, Homo sapiens
ggatgaactaggaagaggga

SEQ ID NO: 62688 - DNA, 23 bp, Homo sapiens
taggttaatttaatcactccata

SEQ ID NO: 62689 - DNA, 23 bp, Homo sapiens
tacacttgagtatttcatcagag

SEQ ID NO: 62690 - DNA, 18 bp, Homo sapiens
agggttaaggatttcacc

SEQ ID NO: 62691 - DNA, 24 bp, Homo sapiens
aaacagtatataataattggtcgt

SEQ ID NO: 62692 - DNA, 19 bp, Homo sapiens
cccacctggtgtgagtaat

SEQ ID NO: 62693 - DNA, 21 bp, Homo sapiens
tcaaaagaaagtggaagacag

SEQ ID NO: 62694 - DNA, 19 bp, Homo sapiens
atacctggatccagtttgc

SEQ ID NO: 62695 - DNA, 23 bp, Homo sapiens
attctgtcttattgctttaggtg

SEQ ID NO: 62696 - DNA, 22 bp, Homo sapiens
tcatgttccaacaaactttgag

SEQ ID NO: 62697 - DNA, 22 bp, Homo sapiens
gccagtttgtgaactagaaaaa

SEQ ID NO: 62698 - DNA, 22 bp, Homo sapiens
acaaatgttatttatagctcac

SEQ ID NO: 62699 - DNA, 21 bp, Homo sapiens
ttggtcagtgaggatgaaagc

SEQ ID NO: 62700 - DNA, 18 bp, Homo sapiens
cagggacttgttctgctg

SEQ ID NO: 62701 - DNA, 19 bp, Homo sapiens
tctaacaggcaagtaggaa

SEQ ID NO: 62702 - DNA, 20 bp, Homo sapiens
aatccataactccttgctgc

SEQ ID NO: 62703 - DNA, 23 bp, Homo sapiens
aacttacatgtcctttttaatcc

SEQ ID NO: 62704 - DNA, 20 bp, Homo sapiens
gacttgtgagctgctttctt

SEQ ID NO: 62705 - DNA, 22 bp, Homo sapiens
ctcctttctttatttcacaggc

SEQ ID NO: 62706 - DNA, 23 bp, Homo sapiens
ttacaaatgaaaaaatgcagcat

SEQ ID NO: 62707 - DNA, 19 bp, Homo sapiens
taactagaggaattgcagc

SEQ ID NO: 62708 - DNA, 21 bp, Homo sapiens
cctgatgttcatttttaggac

SEQ ID NO: 62709 - DNA, 24 bp, Homo sapiens
gcagatgttcctggagaaattttg

SEQ ID NO: 62710 - DNA, 22 bp, Homo sapiens
gagctgttttcacttcatcata

SEQ ID NO: 62711 - DNA, 23 bp, Homo sapiens
cgtccataactttgcaaaatact

SEQ ID NO: 62712 - DNA, 22 bp, Homo sapiens
gacactgacacagcttcctaac

SEQ ID NO: 62713 - DNA, 19 bp, Homo sapiens
tcttccatgttgaactcct

SEQ ID NO: 62714 - DNA, 19 bp, Homo sapiens
tgatgagacgtattgtctc

SEQ ID NO: 62715 - DNA, 21 bp, Homo sapiens
aattctccattttttgttcac

SEQ ID NO: 62716 - DNA, 18 bp, Homo sapiens
ttccccagaaagagactc

SEQ ID NO: 62717 - DNA, 21 bp, Homo sapiens
tcacatgtcacacaaagatag

SEQ ID NO: 62718 - DNA, 20 bp, Homo sapiens
agacctgcagaagtggacag

SEQ ID NO: 62719 - DNA, 21 bp, Homo sapiens
actgtcttcagaaaaacctct

SEQ ID NO: 62720 - DNA, 20 bp, Homo sapiens
tactggccttctctgaattg

SEQ ID NO: 62721 - DNA, 21 bp, Homo sapiens
ggggctgggacagaattttat

SEQ ID NO: 62722 - DNA, 18 bp, Homo sapiens
cgctgttctgtcccgtga

SEQ ID NO: 62723 - DNA, 21 bp, Homo sapiens
atagtgagcactcgatagatg

SEQ ID NO: 62724 - DNA, 20 bp, Homo sapiens
agactagagcctgttatgcg

SEQ ID NO: 62725 - DNA, 24 bp, Homo sapiens
ctattaactgggctgcagcacaat

SEQ ID NO: 62726 - DNA, 24 bp, Homo sapiens
atcttgtgggaggtgggaagacta

SEQ ID NO: 62727 - DNA, 24 bp, Homo sapiens
tcggctgcctaggcagcaatggct

SEQ ID NO: 62728 - DNA, 16 bp, Homo sapiens
ctaggcttccggcggc

SEQ ID NO: 62729 - DNA, 24 bp, Homo sapiens
ggagcgcagcacccattgcgcctg

SEQ ID NO: 62730 - DNA, 16 bp, Homo sapiens
tcgagccaacctcggt

SEQ ID NO: 62731 - DNA, 20 bp, Homo sapiens
ctctcacgcatgcgcattgt

SEQ ID NO: 62732 - DNA, 20 bp, Homo sapiens
agaaggcaactgagtgcttc

SEQ ID NO: 62733 - DNA, 16 bp, Homo sapiens
aagggggcggggtgtg

SEQ ID NO: 62734 - DNA, 16 bp, Homo sapiens
caaaggggcgaccgga

SEQ ID NO: 62735 - DNA, 24 bp, Homo sapiens
gggctcaggcccgggagctgcgga

SEQ ID NO: 62736 - DNA, 17 bp, Homo sapiens
cggacgcagctcctgct

SEQ ID NO: 62737 - DNA, 21 bp, Homo sapiens
tgttggtgaggaaggtgaagc

SEQ ID NO: 62738 - DNA, 18 bp, Homo sapiens
cctgccagacgctcgccc

SEQ ID NO: 62739 - DNA, 18 bp, Homo sapiens
cctccctgggctcgggtc

SEQ ID NO: 62740 - DNA, 16 bp, Homo sapiens
gcaaagccgaggaagc

SEQ ID NO: 62741 - DNA, 17 bp, Homo sapiens
gggtcctggagcaccgg

SEQ ID NO: 62742 - DNA, 19 bp, Homo sapiens
gacatggagagaagagagc

SEQ ID NO: 62743 - DNA, 17 bp, Homo sapiens
ggcgctcgtacttctgg

SEQ ID NO: 62744 - DNA, 18 bp, Homo sapiens
acctgcaaagccaggggc

SEQ ID NO: 62745 - DNA, 24 bp, Homo sapiens
caggcattgacgtctcctcccggc

SEQ ID NO: 62746 - DNA, 19 bp, Homo sapiens
ccaggaaaggtggaggacg

SEQ ID NO: 62747 - DNA, 19 bp, Homo sapiens
ggtgctcggcccgactctg

SEQ ID NO: 62748 - DNA, 16 bp, Homo sapiens
cccacccacctaacgc

SEQ ID NO: 62749 - DNA, 20 bp, Homo sapiens
gcactccccattcaggcctc

SEQ ID NO: 62750 - DNA, 24 bp, Homo sapiens
tagaggaagcaagagggtccaaac

SEQ ID NO: 62751 - DNA, 17 bp, Homo sapiens
gatgggggtcgcgacgc

SEQ ID NO: 62752 - DNA, 20 bp, Homo sapiens
ctttgtaactccacatgccg

SEQ ID NO: 62753 - DNA, 20 bp, Homo sapiens
ctgcaagtggtgccccattc

SEQ ID NO: 62754 - DNA, 21 bp, Homo sapiens
acttgattctcccatcaaagt

SEQ ID NO: 62755 - DNA, 24 bp, Homo sapiens
tttagtcgcttccccatcttcctc

SEQ ID NO: 62756 - DNA, 19 bp, Homo sapiens
ttcctctacttggtgggtc

SEQ ID NO: 62757 - DNA, 22 bp, Homo sapiens
tgcctgggaaaatacctgatag

SEQ ID NO: 62758 - DNA, 23 bp, Homo sapiens
aaagatttcctacagccgaaaaa

SEQ ID NO: 62759 - DNA, 18 bp, Homo sapiens
cagtccccagcaagcaag

SEQ ID NO: 62760 - DNA, 24 bp, Homo sapiens
attgtttctctgtgctgcaaaaat

SEQ ID NO: 62761 - DNA, 16 bp, Homo sapiens
caaccgcacagcctgc

SEQ ID NO: 62762 - DNA, 21 bp, Homo sapiens
ctccggcatcttgtgctaatc

SEQ ID NO: 62763 - DNA, 22 bp, Homo sapiens
gattacacagctgcttctctct

SEQ ID NO: 62764 - DNA, 23 bp, Homo sapiens
cgtgtcaactgccatcaacttcc

SEQ ID NO: 62765 - DNA, 16 bp, Homo sapiens
ccaatcggcgggctcc

SEQ ID NO: 62766 - DNA, 17 bp, Homo sapiens
ggctagggctaggcagg

SEQ ID NO: 62767 - DNA, 24 bp, Homo sapiens
attctgtctccagtgacaccctgg

SEQ ID NO: 62768 - DNA, 18 bp, Homo sapiens
ggtcgggaagcggagaga

SEQ ID NO: 62769 - DNA, 16 bp, Homo sapiens
atggtggctccagcac

SEQ ID NO: 62770 - DNA, 16 bp, Homo sapiens
cattcccgtcgggagc

SEQ ID NO: 62771 - DNA, 20 bp, Homo sapiens
gccatcggtttaagacagtg

SEQ ID NO: 62772 - DNA, 22 bp, Homo sapiens
atgtggctgtattggtgcagcc

SEQ ID NO: 62773 - DNA, 16 bp, Homo sapiens
acgacgcccctgcctc

SEQ ID NO: 62774 - DNA, 19 bp, Homo sapiens
ctcggaaatggggtaggtg

SEQ ID NO: 62775 - DNA, 20 bp, Homo sapiens
ctgtcaaaaaccctggatcc

SEQ ID NO: 62776 - DNA, 20 bp, Homo sapiens
aaggtggttttccctcgcac

SEQ ID NO: 62777 - DNA, 21 bp, Homo sapiens
tcaaaaacagcttttctcagc

SEQ ID NO: 62778 - DNA, 17 bp, Homo sapiens
catgccaaacgaggagg

SEQ ID NO: 62779 - DNA, 22 bp, Homo sapiens
agatactgttattccactctgt

SEQ ID NO: 62780 - DNA, 24 bp, Homo sapiens
gcactggagatggatttcctgtac

SEQ ID NO: 62781 - DNA, 18 bp, Homo sapiens
tcatatgaagctgcagcc

SEQ ID NO: 62782 - DNA, 21 bp, Homo sapiens
aacacaattcttcttaaacgt

SEQ ID NO: 62783 - DNA, 21 bp, Homo sapiens
cttctagctcttgtcgaagat

SEQ ID NO: 62784 - DNA, 20 bp, Homo sapiens
aacaagcagccactaaattt

SEQ ID NO: 62785 - DNA, 21 bp, Homo sapiens
cacagtcttgataccttcata

SEQ ID NO: 62786 - DNA, 16 bp, Homo sapiens
agccaaggatggctgc

SEQ ID NO: 62787 - DNA, 21 bp, Homo sapiens
acctcaagtttacaagaggga

SEQ ID NO: 62788 - DNA, 19 bp, Homo sapiens
ggcactgaagatggagaac

SEQ ID NO: 62789 - DNA, 23 bp, Homo sapiens
aacttttgcaagaaagagtttac

SEQ ID NO: 62790 - DNA, 19 bp, Homo sapiens
caaaactggaaactgaggc

SEQ ID NO: 62791 - DNA, 25 bp, Homo sapiens
ttccttgtagttgtttaagtacttc

SEQ ID NO: 62792 - DNA, 22 bp, Homo sapiens
gtaatatatataaggtgcgtgc

SEQ ID NO: 62793 - DNA, 22 bp, Homo sapiens
tctacctttaagacgctctaat

SEQ ID NO: 62794 - DNA, 24 bp, Homo sapiens
ttaaatgtcaagaaatacagaatc

SEQ ID NO: 62795 - DNA, 23 bp, Homo sapiens
acacacctaaagatgacaatttg

SEQ ID NO: 62796 - DNA, 23 bp, Homo sapiens
ttgtgttctttttaacaggaagt

SEQ ID NO: 62797 - DNA, 21 bp, Homo sapiens
ggctaacataccaagaaaact

SEQ ID NO: 62798 - DNA, 22 bp, Homo sapiens
tatggcttcttctggacagatt

SEQ ID NO: 62799 - DNA, 22 bp, Homo sapiens
actgctatctaagttaagctct

SEQ ID NO: 62800 - DNA, 24 bp, Homo sapiens
gtcctaaataatttttgttttcag

SEQ ID NO: 62801 - DNA, 19 bp, Homo sapiens
cccggcttccataagaacg

SEQ ID NO: 62802 - DNA, 24 bp, Homo sapiens
ttcactttaaaataatataacatt

SEQ ID NO: 62803 - DNA, 24 bp, Homo sapiens
tcttggaaatgaacccataggaac

SEQ ID NO: 62804 - DNA, 28 bp, Homo sapiens
aaaaacttgtttctattttatttagagc

SEQ ID NO: 62805 - DNA, 22 bp, Homo sapiens
acctctctttctcaagttcttc

SEQ ID NO: 62806 - DNA, 19 bp, Homo sapiens
cggtcaaaaatgtccctcc

SEQ ID NO: 62807 - DNA, 23 bp, Homo sapiens
acaaaataacaataaactggagt

SEQ ID NO: 62808 - DNA, 18 bp, Homo sapiens
gagagtgcagtcctgttc

SEQ ID NO: 62809 - DNA, 21 bp, Homo sapiens
tgcaaaatgctctaagtgtta

SEQ ID NO: 62810 - DNA, 20 bp, Homo sapiens
gaagcagagaaagtactgga

SEQ ID NO: 62811 - DNA, 26 bp, Homo sapiens
tatatttttagatttaatgtaagtgc

SEQ ID NO: 62812 - DNA, 22 bp, Homo sapiens
aagatcagcaagaagcaatgac

SEQ ID NO: 62813 - DNA, 24 bp, Homo sapiens
tgaaatcaatgtaaattttttgag

SEQ ID NO: 62814 - DNA, 20 bp, Homo sapiens
tgagattctgaagttgagcg

SEQ ID NO: 62815 - DNA, 21 bp, Homo sapiens
tgcaataacaactgatgtaag

SEQ ID NO: 62816 - DNA, 17 bp, Homo sapiens
aagttgtactgccaagt

SEQ ID NO: 62817 - DNA, 29 bp, Homo sapiens
aaacgtacctttttttaaaaaaaaaaaaa

SEQ ID NO: 62818 - DNA, 24 bp, Homo sapiens
cagttatcctgaattttaatggat

SEQ ID NO: 62819 - DNA, 18 bp, Homo sapiens
agactggtattacgctca

SEQ ID NO: 62820 - DNA, 17 bp, Homo sapiens
tcaggcctaaagttggg

SEQ ID NO: 62821 - DNA, 26 bp, Homo sapiens
agtcttcctttaactgaaaatgtaag

SEQ ID NO: 62822 - DNA, 21 bp, Homo sapiens
ccaattgccttctggtcatat

SEQ ID NO: 62823 - DNA, 23 bp, Homo sapiens
attttctcatgcaccatgactga

SEQ ID NO: 62824 - DNA, 18 bp, Homo sapiens
tcctggcaggtacctagt

SEQ ID NO: 62825 - DNA, 22 bp, Homo sapiens
tgcttttttgcttttactgatt

SEQ ID NO: 62826 - DNA, 20 bp, Homo sapiens
gctcttcgctgttttatcac

SEQ ID NO: 62827 - DNA, 22 bp, Homo sapiens
ggttttagttttccttacaaac

SEQ ID NO: 62828 - DNA, 25 bp, Homo sapiens
acacagccttatgtctttaataaaa

SEQ ID NO: 62829 - DNA, 21 bp, Homo sapiens
aaatcagagttgcgatggaag

SEQ ID NO: 62830 - DNA, 16 bp, Homo sapiens
tgctcagcagccatga

SEQ ID NO: 62831 - DNA, 23 bp, Homo sapiens
tgttattaaagggtgaatatatt

SEQ ID NO: 62832 - DNA, 19 bp, Homo sapiens
tgggactgtaaaagctgtc

SEQ ID NO: 62833 - DNA, 21 bp, Homo sapiens
ccctgagcttttaagtggtag

SEQ ID NO: 62834 - DNA, 24 bp, Homo sapiens
ataactacctatttttatacccac

SEQ ID NO: 62835 - DNA, 25 bp, Homo sapiens
aaaacataactaattaggtttcttg

SEQ ID NO: 62836 - DNA, 24 bp, Homo sapiens
ttctctgaaagaacatctatattt

SEQ ID NO: 62837 - DNA, 21 bp, Homo sapiens
acatacttcgtatacgacagc

SEQ ID NO: 62838 - DNA, 23 bp, Homo sapiens
aatcaaaatagtccaaatctttg

SEQ ID NO: 62839 - DNA, 20 bp, Homo sapiens
tgagccggtttcatgcttgt

SEQ ID NO: 62840 - DNA, 24 bp, Homo sapiens
cagttccatgcctttatcagtctg

SEQ ID NO: 62841 - DNA, 20 bp, Homo sapiens
accagaagttgccatgttga

SEQ ID NO: 62842 - DNA, 19 bp, Homo sapiens
aagccttgggctaagaaag

SEQ ID NO: 62843 - DNA, 29 bp, Homo sapiens
gcttcatacttttctgatatttaaataat

SEQ ID NO: 62844 - DNA, 21 bp, Homo sapiens
agaggtcatctcagaacaagc

SEQ ID NO: 62845 - DNA, 23 bp, Homo sapiens
tcaggactaagaaaataggtaag

SEQ ID NO: 62846 - DNA, 22 bp, Homo sapiens
aatgaaggtcaaggagtgggag

SEQ ID NO: 62847 - DNA, 23 bp, Homo sapiens
tgctgatataataaagagaaatg

SEQ ID NO: 62848 - DNA, 18 bp, Homo sapiens
ttcatggtccattcgtgt

SEQ ID NO: 62849 - DNA, 20 bp, Homo sapiens
tggtcatacttttatgatgt

SEQ ID NO: 62850 - DNA, 19 bp, Homo sapiens
cccagatgacttgtcagcc

SEQ ID NO: 62851 - DNA, 25 bp, Homo sapiens
gagtaccttaacatgatgttatctg

SEQ ID NO: 62852 - DNA, 21 bp, Homo sapiens
tcttagcaaagtagtcatggc

SEQ ID NO: 62853 - DNA, 24 bp, Homo sapiens
atgtgcttaatttttagggttcaa

SEQ ID NO: 62854 - DNA, 17 bp, Homo sapiens
cttggcctcccaaaatg

SEQ ID NO: 62855 - DNA, 17 bp, Homo sapiens
ttttgccacgttgccca

SEQ ID NO: 62856 - DNA, 21 bp, Homo sapiens
agcattgacaacaatgaatac

SEQ ID NO: 62857 - DNA, 19 bp, Homo sapiens
tttttggcggggggggttg

SEQ ID NO: 62858 - DNA, 17 bp, Homo sapiens
gctgtcttgggagctag

SEQ ID NO: 62859 - DNA, 23 bp, Homo sapiens
catcacttaattggtttttggct

SEQ ID NO: 62860 - DNA, 20 bp, Homo sapiens
gccatgtaaaagctggatga

SEQ ID NO: 62861 - DNA, 18 bp, Homo sapiens
cccacaggtggaaatggt

SEQ ID NO: 62862 - DNA, 17 bp, Homo sapiens
cccgagcctctttactg

SEQ ID NO: 62863 - DNA, 20 bp, Homo sapiens
gatatgtcgcgaactttgct

SEQ ID NO: 62864 - DNA, 16 bp, Homo sapiens
cgcctgcctctcttgt

SEQ ID NO: 62865 - DNA, 20 bp, Homo sapiens
agtctggatgtcttcctctc

SEQ ID NO: 62866 - DNA, 20 bp, Homo sapiens
actcccaacaggtttcacag

SEQ ID NO: 62867 - DNA, 24 bp, Homo sapiens
tgtattgttgggaaattcccgggg

SEQ ID NO: 62868 - DNA, 24 bp, Homo sapiens
actatagagaacatacttggattt

SEQ ID NO: 62869 - DNA, 24 bp, Homo sapiens
ccacaacatcattcactcacagcc

SEQ ID NO: 62870 - DNA, 24 bp, Homo sapiens
actaaacatgttttctgtttaaaa

SEQ ID NO: 62871 - DNA, 21 bp, Homo sapiens
tcttttggaacagatacgcgc

SEQ ID NO: 62872 - DNA, 18 bp, Homo sapiens
gcacaaatggctgatatg

SEQ ID NO: 62873 - DNA, 19 bp, Homo sapiens
tggaccaggacaaaaatcc

SEQ ID NO: 62874 - DNA, 16 bp, Homo sapiens
acaggagctggcactg

SEQ ID NO: 62875 - DNA, 22 bp, Homo sapiens
tcctttcagcaaatatttgttg

SEQ ID NO: 62876 - DNA, 22 bp, Homo sapiens
tgtctatgctcttcatcaaatg

SEQ ID NO: 62877 - DNA, 23 bp, Homo sapiens
tccctgcatatttttaaagtaca

SEQ ID NO: 62878 - DNA, 21 bp, Homo sapiens
tccaccagtaattgtctatgt

SEQ ID NO: 62879 - DNA, 21 bp, Homo sapiens
gttgattttatttttcagtgc

SEQ ID NO: 62880 - DNA, 27 bp, Homo sapiens
atcctaattcatcaatgattaaaaatc

SEQ ID NO: 62881 - DNA, 23 bp, Homo sapiens
tgtgtgtgttctaatgaaacttt

SEQ ID NO: 62882 - DNA, 22 bp, Homo sapiens
acaattttttgctacacagagg

SEQ ID NO: 62883 - DNA, 18 bp, Homo sapiens
tctgcaatggcctgtagt

SEQ ID NO: 62884 - DNA, 23 bp, Homo sapiens
agcttataattctaaaggcaaat

SEQ ID NO: 62885 - DNA, 20 bp, Homo sapiens
agtgtaatactgtagtggtc

SEQ ID NO: 62886 - DNA, 19 bp, Homo sapiens
aagttaccaacttggtacc

SEQ ID NO: 62887 - DNA, 19 bp, Homo sapiens
ccttgttggctacatctcc

SEQ ID NO: 62888 - DNA, 20 bp, Homo sapiens
gccctttttaaattaggggg

SEQ ID NO: 62889 - DNA, 21 bp, Homo sapiens
tgtatgaaagtaaattaactc

SEQ ID NO: 62890 - DNA, 18 bp, Homo sapiens
gggcttactaatgaccac

SEQ ID NO: 62891 - DNA, 22 bp, Homo sapiens
gcacaggtttttatcagtcatt

SEQ ID NO: 62892 - DNA, 22 bp, Homo sapiens
ggctttgacaaacttgactttt

SEQ ID NO: 62893 - DNA, 18 bp, Homo sapiens
gcagcctttcatagagca

SEQ ID NO: 62894 - DNA, 22 bp, Homo sapiens
ttttatgagtgaagtatcagtt

SEQ ID NO: 62895 - DNA, 25 bp, Homo sapiens
caggtgaaattctaaatagtacctg

SEQ ID NO: 62896 - DNA, 22 bp, Homo sapiens
agtagccaaaaataaagcttgg

SEQ ID NO: 62897 - DNA, 19 bp, Homo sapiens
ggtgacagagtgagaccct

SEQ ID NO: 62898 - DNA, 22 bp, Homo sapiens
ttaatttacaggctacgctatg

SEQ ID NO: 62899 - DNA, 18 bp, Homo sapiens
tgaaccctggaggcagag

SEQ ID NO: 62900 - DNA, 23 bp, Homo sapiens
aactaaaatctgaaagtgaagac

SEQ ID NO: 62901 - DNA, 17 bp, Homo sapiens
gcgtgagtcaccacggc

SEQ ID NO: 62902 - DNA, 20 bp, Homo sapiens
atcaatgctttcacacttcc

SEQ ID NO: 62903 - DNA, 25 bp, Homo sapiens
gcattaaaaacaaaaaagcaactag

SEQ ID NO: 62904 - DNA, 23 bp, Homo sapiens
acatgaaattcatattatagtac

SEQ ID NO: 62905 - DNA, 19 bp, Homo sapiens
ttaatttgcaggttattgc

SEQ ID NO: 62906 - DNA, 24 bp, Homo sapiens
caggtaagaaattaggaaatctca

SEQ ID NO: 62907 - DNA, 22 bp, Homo sapiens
aatagtaaaaagacgttgcgag

SEQ ID NO: 62908 - DNA, 20 bp, Homo sapiens
aaggcagcaaaaaaagctaa

SEQ ID NO: 62909 - DNA, 20 bp, Homo sapiens
ccataaggcactcaatacgc

SEQ ID NO: 62910 - DNA, 24 bp, Homo sapiens
ttcttaatttaccagtgagggacg

SEQ ID NO: 62911 - DNA, 18 bp, Homo sapiens
aagtgcaccatctacagc

SEQ ID NO: 62912 - DNA, 21 bp, Homo sapiens
acatagaagttaatgagagac

SEQ ID NO: 62913 - DNA, 19 bp, Homo sapiens
aatggctaaagtgtttgtc

SEQ ID NO: 62914 - DNA, 22 bp, Homo sapiens
gtttcttactaggaatcaaccc

SEQ ID NO: 62915 - DNA, 18 bp, Homo sapiens
gtggtcctcatttgtagc

SEQ ID NO: 62916 - DNA, 21 bp, Homo sapiens
attgcactgagaataaagctg

SEQ ID NO: 62917 - DNA, 20 bp, Homo sapiens
ttttgagagtatgaattctg

SEQ ID NO: 62918 - DNA, 19 bp, Homo sapiens
gcactcttacttaccggag

SEQ ID NO: 62919 - DNA, 22 bp, Homo sapiens
cagtaataaatatattttggct

SEQ ID NO: 62920 - DNA, 19 bp, Homo sapiens
cggaatgtgtccagcttga

SEQ ID NO: 62921 - DNA, 22 bp, Homo sapiens
gttgttctctcttaggatttgc

SEQ ID NO: 62922 - DNA, 23 bp, Homo sapiens
gaacaaaaggagatgtggaatac

SEQ ID NO: 62923 - DNA, 23 bp, Homo sapiens
tgcattactgactattgtcaaac

SEQ ID NO: 62924 - DNA, 22 bp, Homo sapiens
tgccttttgtcttctatccttt

SEQ ID NO: 62925 - DNA, 19 bp, Homo sapiens
cataatgcttcctggtctt

SEQ ID NO: 62926 - DNA, 23 bp, Homo sapiens
tctcttgattttatttcaggcaa

SEQ ID NO: 62927 - DNA, 21 bp, Homo sapiens
cccatagcaatcattttgtgc

SEQ ID NO: 62928 - DNA, 22 bp, Homo sapiens
acaacacttaaaatctcatagt

SEQ ID NO: 62929 - DNA, 16 bp, Homo sapiens
ttgtacttcgcaggcc

SEQ ID NO: 62930 - DNA, 24 bp, Homo sapiens
ctctcagcaagaaatcctaaagac

SEQ ID NO: 62931 - DNA, 21 bp, Homo sapiens
ggctttttgtttcctaacatg

SEQ ID NO: 62932 - DNA, 22 bp, Homo sapiens
tgctcaagaacctcattcattc

SEQ ID NO: 62933 - DNA, 23 bp, Homo sapiens
tgggacttaaattgtctatattg

SEQ ID NO: 62934 - DNA, 22 bp, Homo sapiens
aggaatctcatggcaaataggc

SEQ ID NO: 62935 - DNA, 23 bp, Homo sapiens
acataatcaccatagagactttg

SEQ ID NO: 62936 - DNA, 21 bp, Homo sapiens
ggctcaagcttgccatctctt

SEQ ID NO: 62937 - DNA, 24 bp, Homo sapiens
acagtcatgttgccagtattaaaa

SEQ ID NO: 62938 - DNA, 20 bp, Homo sapiens
gctcagcacttatcagaaac

SEQ ID NO: 62939 - DNA, 19 bp, Homo sapiens
cctcttgatgaagaggagc

SEQ ID NO: 62940 - DNA, 21 bp, Homo sapiens
cgtagtaagcagagacacaag

SEQ ID NO: 62941 - DNA, 20 bp, Homo sapiens
ccaattccgcgttctctctc

SEQ ID NO: 62942 - DNA, 24 bp, Homo sapiens
gacatgatgataataggtcagaca

SEQ ID NO: 62943 - DNA, 19 bp, Homo sapiens
tgcaaacctcgctttgaag

SEQ ID NO: 62944 - DNA, 24 bp, Homo sapiens
tatttgaatactacagtgttaccc

SEQ ID NO: 62945 - DNA, 20 bp, Homo sapiens
gaggtatgaatggctgacac

SEQ ID NO: 62946 - DNA, 24 bp, Homo sapiens
cgttctgaaaaagatagaagtttg

SEQ ID NO: 62947 - DNA, 22 bp, Homo sapiens
gcatttctctcatctgtcacac

SEQ ID NO: 62948 - DNA, 24 bp, Homo sapiens
ccagcaacagaaaatccaggaact

SEQ ID NO: 62949 - DNA, 24 bp, Homo sapiens
tccgacttagtgaaattgtaagtg

SEQ ID NO: 62950 - DNA, 23 bp, Homo sapiens
ttgccaaagtcatggaagaagtg

SEQ ID NO: 62951 - DNA, 23 bp, Homo sapiens
tcatttgaagatctcttgtattc

SEQ ID NO: 62952 - DNA, 23 bp, Homo sapiens
gtctaccactgaattacattgtg

SEQ ID NO: 62953 - DNA, 21 bp, Homo sapiens
gggtttcatttgacctctttt

SEQ ID NO: 62954 - DNA, 19 bp, Homo sapiens
gctgcccatacacattcaa

SEQ ID NO: 62955 - DNA, 20 bp, Homo sapiens
gggtattgaccataactgca

SEQ ID NO: 62956 - DNA, 21 bp, Homo sapiens
catgttctatgccttatgcca

SEQ ID NO: 62957 - DNA, 24 bp, Homo sapiens
tctagttctccatcattatcatcc

SEQ ID NO: 62958 - DNA, 20 bp, Homo sapiens
gtgtcagtagtagtgatggt

SEQ ID NO: 62959 - DNA, 18 bp, Homo sapiens
agagttcaactgctcatc

SEQ ID NO: 62960 - DNA, 21 bp, Homo sapiens
ctgaagatgatgaaagtaagt

SEQ ID NO: 62961 - DNA, 23 bp, Homo sapiens
atttcatcttctattatgtgttt

SEQ ID NO: 62962 - DNA, 24 bp, Homo sapiens
gcccataaaatacatagtgcaaat

SEQ ID NO: 62963 - DNA, 22 bp, Homo sapiens
tgctctcagtataaacaggata

SEQ ID NO: 62964 - DNA, 21 bp, Homo sapiens
agtcttaaatattcagatgag

SEQ ID NO: 62965 - DNA, 17 bp, Homo sapiens
acattcctgctgtccaa

SEQ ID NO: 62966 - DNA, 23 bp, Homo sapiens
agaatgaaagatgggcaagaccc

SEQ ID NO: 62967 - DNA, 21 bp, Homo sapiens
ttccatgattagaacccactc

SEQ ID NO: 62968 - DNA, 24 bp, Homo sapiens
aagacaatcaaggaatcaaagtac

SEQ ID NO: 62969 - DNA, 24 bp, Homo sapiens
tggtaggcttatcatcttcatagt

SEQ ID NO: 62970 - DNA, 23 bp, Homo sapiens
acctcaagttccaaccacatttt

SEQ ID NO: 62971 - DNA, 20 bp, Homo sapiens
tgttggtctctcttcttctt

SEQ ID NO: 62972 - DNA, 19 bp, Homo sapiens
gagccaatggttcagaaac

SEQ ID NO: 62973 - DNA, 17 bp, Homo sapiens
tcaataggctgatccac

SEQ ID NO: 62974 - DNA, 20 bp, Homo sapiens
gccagtctttgtgtcaagaa

SEQ ID NO: 62975 - DNA, 23 bp, Homo sapiens
actctttgagaatgaaaatgact

SEQ ID NO: 62976 - DNA, 22 bp, Homo sapiens
acgttactctgaagaagaacag

SEQ ID NO: 62977 - DNA, 18 bp, Homo sapiens
tggacgtattctcactgc

SEQ ID NO: 62978 - DNA, 24 bp, Homo sapiens
ataatgaagagaaacgtcatgtgg

SEQ ID NO: 62979 - DNA, 19 bp, Homo sapiens
ccacttctactctgtgcag

SEQ ID NO: 62980 - DNA, 24 bp, Homo sapiens
attccttcatcacagaaacagtca

SEQ ID NO: 62981 - DNA, 21 bp, Homo sapiens
agtctgtattgtttcttggtt

SEQ ID NO: 62982 - DNA, 23 bp, Homo sapiens
gcagtaaaaccgaacatatgtct

SEQ ID NO: 62983 - DNA, 24 bp, Homo sapiens
acaaagatgataatgaactacatc

SEQ ID NO: 62984 - DNA, 20 bp, Homo sapiens
agaggcagaatcagctccat

SEQ ID NO: 62985 - DNA, 19 bp, Homo sapiens
gcagaatctgcttcctgtg

SEQ ID NO: 62986 - DNA, 19 bp, Homo sapiens
tgccacttgcaaagtttct

SEQ ID NO: 62987 - DNA, 20 bp, Homo sapiens
tcacaggatcttcagctgac

SEQ ID NO: 62988 - DNA, 24 bp, Homo sapiens
actccaatatgtttttcaagatgt

SEQ ID NO: 62989 - DNA, 16 bp, Homo sapiens
accctgcagtctgctg

SEQ ID NO: 62990 - DNA, 22 bp, Homo sapiens
aaataggatgtaatcagacgac

SEQ ID NO: 62991 - DNA, 19 bp, Homo sapiens
tcgctcctgaagaaaattc

SEQ ID NO: 62992 - DNA, 24 bp, Homo sapiens
ataaaagaaaagattggaactagg

SEQ ID NO: 62993 - DNA, 20 bp, Homo sapiens
tcctgaacatagtgttcagg

SEQ ID NO: 62994 - DNA, 21 bp, Homo sapiens
gtgtcacagcaccctagaacc

SEQ ID NO: 62995 - DNA, 22 bp, Homo sapiens
aacgactctcaaaactatcaag

SEQ ID NO: 62996 - DNA, 24 bp, Homo sapiens
gaatcagccaggcacaaagctgtt

SEQ ID NO: 62997 - DNA, 22 bp, Homo sapiens
gggcttataatgccacttacca

SEQ ID NO: 62998 - DNA, 22 bp, Homo sapiens
gctcagacacccaaaagtccac

SEQ ID NO: 62999 - DNA, 20 bp, Homo sapiens
ggtgttttacttctgcttgg

SEQ ID NO: 63000 - DNA, 24 bp, Homo sapiens
gcagatgtacttctgtcagttcac

SEQ ID NO: 63001 - DNA, 24 bp, Homo sapiens
agcagtaggtgctttatttttagg

SEQ ID NO: 63002 - DNA, 24 bp, Homo sapiens
ttcagagtgaaccatgcagtggaa

SEQ ID NO: 63003 - DNA, 16 bp, Homo sapiens
accctctgaactgcag

SEQ ID NO: 63004 - DNA, 22 bp, Homo sapiens
tagccctggacaaaccatgcca

SEQ ID NO: 63005 - DNA, 20 bp, Homo sapiens
aaatccatctggagtacttt

SEQ ID NO: 63006 - DNA, 24 bp, Homo sapiens
agctcaaaccaagcgagaagtacc

SEQ ID NO: 63007 - DNA, 22 bp, Homo sapiens
cacatctttctgtataaatggc

SEQ ID NO: 63008 - DNA, 22 bp, Homo sapiens
acctaagcaagctgcagtaaat

SEQ ID NO: 63009 - DNA, 22 bp, Homo sapiens
ctgattctgtttcattcccatt

SEQ ID NO: 63010 - DNA, 21 bp, Homo sapiens
tactttattacattttgccac

SEQ ID NO: 63011 - DNA, 22 bp, Homo sapiens
cagaatcaatagttttttctgc

SEQ ID NO: 63012 - DNA, 19 bp, Homo sapiens
ctctgagcctcgatgagcc

SEQ ID NO: 63013 - DNA, 24 bp, Homo sapiens
aataatacattcttctagtatttc

SEQ ID NO: 63014 - DNA, 22 bp, Homo sapiens
gcctccagttcaggaaaatgac

SEQ ID NO: 63015 - DNA, 16 bp, Homo sapiens
cagtctgggctggctt

SEQ ID NO: 63016 - DNA, 24 bp, Homo sapiens
tcaaatgaaaaccaagagaaagag

SEQ ID NO: 63017 - DNA, 23 bp, Homo sapiens
tgatggtagaagtttgtacacag

SEQ ID NO: 63018 - DNA, 24 bp, Homo sapiens
attcagatgatgatgatattgaaa

SEQ ID NO: 63019 - DNA, 18 bp, Homo sapiens
cgtggcatatcatccccc

SEQ ID NO: 63020 - DNA, 24 bp, Homo sapiens
aagtcatcacgtaaagcaaaaaag

SEQ ID NO: 63021 - DNA, 23 bp, Homo sapiens
agatcacttagagatgtagctgt

SEQ ID NO: 63022 - DNA, 23 bp, Homo sapiens
ggcaaggaaaccaagtcagctgc

SEQ ID NO: 63023 - DNA, 17 bp, Homo sapiens
cctcctctaactccttc

SEQ ID NO: 63024 - DNA, 21 bp, Homo sapiens
aagcatgttagttttacaccg

SEQ ID NO: 63025 - DNA, 20 bp, Homo sapiens
tcatctgtacttctgccttc

SEQ ID NO: 63026 - DNA, 23 bp, Homo sapiens
acacctataaacttttccacagc

SEQ ID NO: 63027 - DNA, 20 bp, Homo sapiens
ccttcctctgctttattgtc

SEQ ID NO: 63028 - DNA, 18 bp, Homo sapiens
tgagttagctgctggaga

SEQ ID NO: 63029 - DNA, 24 bp, Homo sapiens
ggaaaggcttgtgacttttccctt

SEQ ID NO: 63030 - DNA, 21 bp, Homo sapiens
gataccattcctacagaaggc

SEQ ID NO: 63031 - DNA, 16 bp, Homo sapiens
aagaagacgcagatgc

SEQ ID NO: 63032 - DNA, 22 bp, Homo sapiens
catctgtaaccatacctgaatt

SEQ ID NO: 63033 - DNA, 23 bp, Homo sapiens
ggtataggttttactggtgaagt

SEQ ID NO: 63034 - DNA, 21 bp, Homo sapiens
tgcattaattctgctatgccc

SEQ ID NO: 63035 - DNA, 23 bp, Homo sapiens
tttaaattattttttgagtctgc

SEQ ID NO: 63036 - DNA, 22 bp, Homo sapiens
ataatggaccaggtccagcaag

SEQ ID NO: 63037 - DNA, 24 bp, Homo sapiens
ggaattatttttcaaattctgttt

SEQ ID NO: 63038 - DNA, 22 bp, Homo sapiens
agatggtaagaaaaagaaacca

SEQ ID NO: 63039 - DNA, 19 bp, Homo sapiens
aagcaaaacttcctctgac

SEQ ID NO: 63040 - DNA, 22 bp, Homo sapiens
taggacacgtgtaagaaaaaat

SEQ ID NO: 63041 - DNA, 24 bp, Homo sapiens
caaagaatcatttcgtgaaaaaca

SEQ ID NO: 63042 - DNA, 24 bp, Homo sapiens
cagacaacaaagattcaaagaaac

SEQ ID NO: 63043 - DNA, 19 bp, Homo sapiens
gccttttccctggaaaggt

SEQ ID NO: 63044 - DNA, 23 bp, Homo sapiens
gctcccaaataatgaagatagag

SEQ ID NO: 63045 - DNA, 18 bp, Homo sapiens
tgtgtggctggtaacttt

SEQ ID NO: 63046 - DNA, 20 bp, Homo sapiens
acgcctattgaaggaactcc

SEQ ID NO: 63047 - DNA, 20 bp, Homo sapiens
cgatttattggctgctttgc

SEQ ID NO: 63048 - DNA, 21 bp, Homo sapiens
ttgatgatgatgatgttgacc

SEQ ID NO: 63049 - DNA, 18 bp, Homo sapiens
tttggatgactggggaaa

SEQ ID NO: 63050 - DNA, 24 bp, Homo sapiens
aaagaaaataaggaatcagaggct

SEQ ID NO: 63051 - DNA, 23 bp, Homo sapiens
ggagtattttcaatagcaaaatt

SEQ ID NO: 63052 - DNA, 18 bp, Homo sapiens
taagacacaagctattgc

SEQ ID NO: 63053 - DNA, 20 bp, Homo sapiens
gttttcttggtcaatgtcac

SEQ ID NO: 63054 - DNA, 20 bp, Homo sapiens
agaaacaatccacttttccc

SEQ ID NO: 63055 - DNA, 18 bp, Homo sapiens
ttctccctgtgagtcagg

SEQ ID NO: 63056 - DNA, 23 bp, Homo sapiens
cagcaactgatgaaaagttacag

SEQ ID NO: 63057 - DNA, 20 bp, Homo sapiens
actggggtatcttcaacatg

SEQ ID NO: 63058 - DNA, 20 bp, Homo sapiens
tcctctctgagttctctcag

SEQ ID NO: 63059 - DNA, 19 bp, Homo sapiens
acaggtcatcttcagagtc

SEQ ID NO: 63060 - DNA, 18 bp, Homo sapiens
gagactgagccccctgac

SEQ ID NO: 63061 - DNA, 20 bp, Homo sapiens
atcacccttgagtcttgaag

SEQ ID NO: 63062 - DNA, 21 bp, Homo sapiens
tgctcctaaatcatttcatgt

SEQ ID NO: 63063 - DNA, 19 bp, Homo sapiens
caagtgtcagatcttcacc

SEQ ID NO: 63064 - DNA, 22 bp, Homo sapiens
tcagttctcttagtattgactc

SEQ ID NO: 63065 - DNA, 22 bp, Homo sapiens
caaaattttctgaatcagggga

SEQ ID NO: 63066 - DNA, 23 bp, Homo sapiens
ccgcaatgccaaaaaagaaaaag

SEQ ID NO: 63067 - DNA, 20 bp, Homo sapiens
gcagcagcttgatgtaaact

SEQ ID NO: 63068 - DNA, 23 bp, Homo sapiens
atatgggtggcatattaggtgaa

SEQ ID NO: 63069 - DNA, 19 bp, Homo sapiens
tcagggaaaggatggaatc

SEQ ID NO: 63070 - DNA, 22 bp, Homo sapiens
accagattcagaacatggtcta

SEQ ID NO: 63071 - DNA, 22 bp, Homo sapiens
acttgtaaagggtttttcttct

SEQ ID NO: 63072 - DNA, 24 bp, Homo sapiens
caggaaggtgcaaattccatagta

SEQ ID NO: 63073 - DNA, 24 bp, Homo sapiens
ctttttagtttccaatgtactttt

SEQ ID NO: 63074 - DNA, 20 bp, Homo sapiens
cttcgtctgattcagattcc

SEQ ID NO: 63075 - DNA, 29 bp, Homo sapiens
acttttccagtaatcaaacttttataaac

SEQ ID NO: 63076 - DNA, 22 bp, Homo sapiens
gatcaccatttcatcttacacc

SEQ ID NO: 63077 - DNA, 18 bp, Homo sapiens
tgcttgaaggggctgttt

SEQ ID NO: 63078 - DNA, 24 bp, Homo sapiens
ccacgaattctaaaaccaggggag

SEQ ID NO: 63079 - DNA, 20 bp, Homo sapiens
tgaggagctatttcgaactc

SEQ ID NO: 63080 - DNA, 24 bp, Homo sapiens
agtaaaggaatcaaaggaggaaaa

SEQ ID NO: 63081 - DNA, 16 bp, Homo sapiens
tttggaggctggagtc

SEQ ID NO: 63082 - DNA, 24 bp, Homo sapiens
taattcagaaatttcaggccaaat

SEQ ID NO: 63083 - DNA, 22 bp, Homo sapiens
atttcacagatggcttggctcc

SEQ ID NO: 63084 - DNA, 23 bp, Homo sapiens
tcgaggcaggacaatgattcata

SEQ ID NO: 63085 - DNA, 20 bp, Homo sapiens
ggtgctttacttgacccacc

SEQ ID NO: 63086 - DNA, 22 bp, Homo sapiens
tgtttctaaaaaaggcccaccc

SEQ ID NO: 63087 - DNA, 21 bp, Homo sapiens
aggtctacttaatggttgctg

SEQ ID NO: 63088 - DNA, 20 bp, Homo sapiens
cagccaccacttctcctaga

SEQ ID NO: 63089 - DNA, 23 bp, Homo sapiens
aatttgttaggaggacttattcc

SEQ ID NO: 63090 - DNA, 23 bp, Homo sapiens
ttgccaggcagacatcccaaata

SEQ ID NO: 63091 - DNA, 22 bp, Homo sapiens
ctgaggacttagttgaagcagt

SEQ ID NO: 63092 - DNA, 18 bp, Homo sapiens
cgaccccttcaagacctg

SEQ ID NO: 63093 - DNA, 20 bp, Homo sapiens
gtttggtaaggttctgttgg

SEQ ID NO: 63094 - DNA, 20 bp, Homo sapiens
actcaatttcccctggtaga

SEQ ID NO: 63095 - DNA, 18 bp, Homo sapiens
ctttggaggcagactcac

SEQ ID NO: 63096 - DNA, 20 bp, Homo sapiens
acatcatcccctagtactgc

SEQ ID NO: 63097 - DNA, 24 bp, Homo sapiens
agacattctagaaagttctacctt

SEQ ID NO: 63098 - DNA, 21 bp, Homo sapiens
acatctccaggtagacagatg

SEQ ID NO: 63099 - DNA, 20 bp, Homo sapiens
ggcgtactaatacaggtctt

SEQ ID NO: 63100 - DNA, 23 bp, Homo sapiens
gaatgccagtagtattccaagaa

SEQ ID NO: 63101 - DNA, 21 bp, Homo sapiens
gcagattcctccaattttctt

SEQ ID NO: 63102 - DNA, 23 bp, Homo sapiens
atggtaatggagccaataaaaag

SEQ ID NO: 63103 - DNA, 18 bp, Homo sapiens
ctgggacctagtgggaga

SEQ ID NO: 63104 - DNA, 24 bp, Homo sapiens
agtgaatctgatagatcagaaaga

SEQ ID NO: 63105 - DNA, 22 bp, Homo sapiens
gaacagacgaatgtgtggatag

SEQ ID NO: 63106 - DNA, 23 bp, Homo sapiens
gaagctccaagcccaaccttaag

SEQ ID NO: 63107 - DNA, 23 bp, Homo sapiens
ccatcattatactctatagtggg

SEQ ID NO: 63108 - DNA, 24 bp, Homo sapiens
ctttctccatcatctagaccagct

SEQ ID NO: 63109 - DNA, 21 bp, Homo sapiens
aagtctagaaggactttcaga

SEQ ID NO: 63110 - DNA, 24 bp, Homo sapiens
agtccttcccttcctgatatgtct

SEQ ID NO: 63111 - DNA, 20 bp, Homo sapiens
ggaagggatgatgaatgttt

SEQ ID NO: 63112 - DNA, 23 bp, Homo sapiens
gaaaactcccacctaatctcagt

SEQ ID NO: 63113 - DNA, 21 bp, Homo sapiens
ggattctgatgaagcagaaag

SEQ ID NO: 63114 - DNA, 18 bp, Homo sapiens
ttgcacggtctcattctg

SEQ ID NO: 63115 - DNA, 23 bp, Homo sapiens
actttgtttggttcctgaaatag

SEQ ID NO: 63116 - DNA, 20 bp, Homo sapiens
cctggaaacgtgagcacagc

SEQ ID NO: 63117 - DNA, 24 bp, Homo sapiens
gggagaaaattcattttcttttat

SEQ ID NO: 63118 - DNA, 23 bp, Homo sapiens
ctggaagttcatcttcaattctt

SEQ ID NO: 63119 - DNA, 17 bp, Homo sapiens
gcaccatttgtagcacc

SEQ ID NO: 63120 - DNA, 22 bp, Homo sapiens
ggatgaaaaacatgtgaactct

SEQ ID NO: 63121 - DNA, 19 bp, Homo sapiens
acccaaacatcctctgttt

SEQ ID NO: 63122 - DNA, 21 bp, Homo sapiens
atccgcaaaaggaacatggag

SEQ ID NO: 63123 - DNA, 21 bp, Homo sapiens
gggagtattacctgtgggaga

SEQ ID NO: 63124 - DNA, 21 bp, Homo sapiens
acttctcagaccgtttcctca

SEQ ID NO: 63125 - DNA, 24 bp, Homo sapiens
gattatcttttgaatctttaatgt

SEQ ID NO: 63126 - DNA, 20 bp, Homo sapiens
aaatggcacctgctgtttct

SEQ ID NO: 63127 - DNA, 16 bp, Homo sapiens
ccaaacccacggtacg

SEQ ID NO: 63128 - DNA, 21 bp, Homo sapiens
acaatcctagatctggaagat

SEQ ID NO: 63129 - DNA, 23 bp, Homo sapiens
tggttttatctcagttccttttt

SEQ ID NO: 63130 - DNA, 23 bp, Homo sapiens
tcagaaaaggcaaatccaaacat

SEQ ID NO: 63131 - DNA, 21 bp, Homo sapiens
tggggtacgttccactataga

SEQ ID NO: 63132 - DNA, 24 bp, Homo sapiens
aatgtgggtaatggcagtgttccc

SEQ ID NO: 63133 - DNA, 18 bp, Homo sapiens
cagcaacagtcccactag

SEQ ID NO: 63134 - DNA, 21 bp, Homo sapiens
attcaggtggatgcccctgac

SEQ ID NO: 63135 - DNA, 16 bp, Homo sapiens
gtgctatctgcgctgc

SEQ ID NO: 63136 - DNA, 24 bp, Homo sapiens
tgtccctgtatcagagactaatga

SEQ ID NO: 63137 - DNA, 23 bp, Homo sapiens
agttttggaatctcgcttctttg

SEQ ID NO: 63138 - DNA, 23 bp, Homo sapiens
cagctcaagcaaacacagttcac

SEQ ID NO: 63139 - DNA, 18 bp, Homo sapiens
gtaagacccagaatggcg

SEQ ID NO: 63140 - DNA, 19 bp, Homo sapiens
cccaagccctaggaaaagc

SEQ ID NO: 63141 - DNA, 23 bp, Homo sapiens
atagcagttgtaattaacataga

SEQ ID NO: 63142 - DNA, 21 bp, Homo sapiens
ccaactccagtgaataacaac

SEQ ID NO: 63143 - DNA, 23 bp, Homo sapiens
caaacctatttacaaaatttttc

SEQ ID NO: 63144 - DNA, 22 bp, Homo sapiens
cagtggaacccaaagtcctaag

SEQ ID NO: 63145 - DNA, 24 bp, Homo sapiens
agtgaagacaaagtatactatcaa

SEQ ID NO: 63146 - DNA, 24 bp, Homo sapiens
caggatcttttggcagtcctgtgg

SEQ ID NO: 63147 - DNA, 24 bp, Homo sapiens
gtgataatttgcttatctttgtcc

SEQ ID NO: 63148 - DNA, 19 bp, Homo sapiens
ggtctcacgtcccgtgcac

SEQ ID NO: 63149 - DNA, 23 bp, Homo sapiens
ttaccgtctttcccgccccattg

SEQ ID NO: 63150 - DNA, 24 bp, Homo sapiens
caggtccctggtgagattagaaac

SEQ ID NO: 63151 - DNA, 23 bp, Homo sapiens
cttcccattttattctccgaaag

SEQ ID NO: 63152 - DNA, 23 bp, Homo sapiens
gggcgtgcggagttttggaatag

SEQ ID NO: 63153 - DNA, 17 bp, Homo sapiens
gcctacacctgtggagc

SEQ ID NO: 63154 - DNA, 21 bp, Homo sapiens
ccttacaattttggttggacc

SEQ ID NO: 63155 - DNA, 26 bp, Homo sapiens
atctccagtacaaatatattttagac

SEQ ID NO: 63156 - DNA, 24 bp, Homo sapiens
ggttttataatgtcagattttatc

SEQ ID NO: 63157 - DNA, 17 bp, Homo sapiens
gcaccattaccttggga

SEQ ID NO: 63158 - DNA, 22 bp, Homo sapiens
ttatggtaaacttctgtggttc

SEQ ID NO: 63159 - DNA, 24 bp, Homo sapiens
agtgccaagttttctataataagc

SEQ ID NO: 63160 - DNA, 22 bp, Homo sapiens
agaccatcattgaatgtctaaa

SEQ ID NO: 63161 - DNA, 20 bp, Homo sapiens
ttactactgggtgctaaaac

SEQ ID NO: 63162 - DNA, 19 bp, Homo sapiens
atacatttgtacacgatcc

SEQ ID NO: 63163 - DNA, 24 bp, Homo sapiens
ttcttctatattttggatagcatg

SEQ ID NO: 63164 - DNA, 19 bp, Homo sapiens
agttctccattgacatcac

SEQ ID NO: 63165 - DNA, 21 bp, Homo sapiens
tttgggtaagattgcttatgc

SEQ ID NO: 63166 - DNA, 24 bp, Homo sapiens
ccagagttttaaattctgtctttt

SEQ ID NO: 63167 - DNA, 22 bp, Homo sapiens
acataagttttttctgtgtttt

SEQ ID NO: 63168 - DNA, 22 bp, Homo sapiens
actgaaaatgaacagaaattca

SEQ ID NO: 63169 - DNA, 21 bp, Homo sapiens
cagattcgtctgcaatttcgt

SEQ ID NO: 63170 - DNA, 20 bp, Homo sapiens
tgctcccctaaacttatagt

SEQ ID NO: 63171 - DNA, 20 bp, Homo sapiens
tggtgtgtactcagaaaagc

SEQ ID NO: 63172 - DNA, 20 bp, Homo sapiens
tgctataaacccaaaactgc

SEQ ID NO: 63173 - DNA, 21 bp, Homo sapiens
gctcagactgaccttttcacc

SEQ ID NO: 63174 - DNA, 24 bp, Homo sapiens
catgatgaagccatttctaacggg

SEQ ID NO: 63175 - DNA, 20 bp, Homo sapiens
ccttggaaaccccaagagaa

SEQ ID NO: 63176 - DNA, 26 bp, Homo sapiens
agaagtacagtatgaattgattaagc

SEQ ID NO: 63177 - DNA, 22 bp, Homo sapiens
ccttcacttaaaggccaattag

SEQ ID NO: 63178 - DNA, 22 bp, Homo sapiens
ttgattttcattttctgtaggc

SEQ ID NO: 63179 - DNA, 21 bp, Homo sapiens
ttaagggttacaaaccttgtt

SEQ ID NO: 63180 - DNA, 20 bp, Homo sapiens
tgaccgagaaatgatcagtt

SEQ ID NO: 63181 - DNA, 23 bp, Homo sapiens
tgttaaaaagaagcatccaaatt

SEQ ID NO: 63182 - DNA, 21 bp, Homo sapiens
tctgtcatcaagaagattcta

SEQ ID NO: 63183 - DNA, 18 bp, Homo sapiens
tgctgctggatgagaggt

SEQ ID NO: 63184 - DNA, 21 bp, Homo sapiens
tgagattttttcagcaacaag

SEQ ID NO: 63185 - DNA, 19 bp, Homo sapiens
aggctttaatgtatctttg

SEQ ID NO: 63186 - DNA, 24 bp, Homo sapiens
tttcacttaccattatgtcatagg

SEQ ID NO: 63187 - DNA, 21 bp, Homo sapiens
tttagttccatttgatattct

SEQ ID NO: 63188 - DNA, 21 bp, Homo sapiens
tgacagcataatatcccactg

SEQ ID NO: 63189 - DNA, 23 bp, Homo sapiens
gcttccttacttgtaatctgatc

SEQ ID NO: 63190 - DNA, 21 bp, Homo sapiens
tgatttttgtttcatatcttc

SEQ ID NO: 63191 - DNA, 20 bp, Homo sapiens
tggatcaagttcattctcat

SEQ ID NO: 63192 - DNA, 20 bp, Homo sapiens
tcagacacaaggtcagaaag

SEQ ID NO: 63193 - DNA, 26 bp, Homo sapiens
tcatgctgtataccataaagatatac

SEQ ID NO: 63194 - DNA, 20 bp, Homo sapiens
ggaaaaagcttgtgagattc

SEQ ID NO: 63195 - DNA, 22 bp, Homo sapiens
aatgaacgttaaatagcttgat

SEQ ID NO: 63196 - DNA, 23 bp, Homo sapiens
caaaggaaattgtcaaatcctat

SEQ ID NO: 63197 - DNA, 22 bp, Homo sapiens
aatatataattgctaagagagt

SEQ ID NO: 63198 - DNA, 24 bp, Homo sapiens
cattattttagagagattatgttc

SEQ ID NO: 63199 - DNA, 21 bp, Homo sapiens
ttgttagccttaaatgagatc

SEQ ID NO: 63200 - DNA, 17 bp, Homo sapiens
catttgcttctttcggc

SEQ ID NO: 63201 - DNA, 22 bp, Homo sapiens
acttgtcttcatctatcagcca

SEQ ID NO: 63202 - DNA, 22 bp, Homo sapiens
aagcagaacaaaattctaccac

SEQ ID NO: 63203 - DNA, 20 bp, Homo sapiens
ttcagaatcgtctaaaagaa

SEQ ID NO: 63204 - DNA, 19 bp, Homo sapiens
aatgtggatggcaaaatgg

SEQ ID NO: 63205 - DNA, 18 bp, Homo sapiens
aagccttggatagccgaa

SEQ ID NO: 63206 - DNA, 21 bp, Homo sapiens
ttcaatatccttcattttaac

SEQ ID NO: 63207 - DNA, 20 bp, Homo sapiens
catttagttgctcatcagtc

SEQ ID NO: 63208 - DNA, 22 bp, Homo sapiens
agatcttgttacttctatgtat

SEQ ID NO: 63209 - DNA, 21 bp, Homo sapiens
tcacgatgacagtctaccaat

SEQ ID NO: 63210 - DNA, 19 bp, Homo sapiens
tgatacctcaaagtgatca

SEQ ID NO: 63211 - DNA, 23 bp, Homo sapiens
agttctgatttttcctgattgag

SEQ ID NO: 63212 - DNA, 24 bp, Homo sapiens
tggtgttacacaggtttttcaagg

SEQ ID NO: 63213 - DNA, 23 bp, Homo sapiens
aaaatgtataacatcatagtagg

SEQ ID NO: 63214 - DNA, 20 bp, Homo sapiens
cagtaagggagaaagaaagg

SEQ ID NO: 63215 - DNA, 19 bp, Homo sapiens
agattggcttttcactcag

SEQ ID NO: 63216 - DNA, 22 bp, Homo sapiens
aaataaagaatctaggcttctc

SEQ ID NO: 63217 - DNA, 24 bp, Homo sapiens
tccactatttctaaaattttgaca

SEQ ID NO: 63218 - DNA, 21 bp, Homo sapiens
cgatctgcttgcagctgtaga

SEQ ID NO: 63219 - DNA, 23 bp, Homo sapiens
gttatcattgggagaaactgggc

SEQ ID NO: 63220 - DNA, 21 bp, Homo sapiens
tctagctgtgttgccaaagac

SEQ ID NO: 63221 - DNA, 24 bp, Homo sapiens
ataactcgtgaatctgcagctatc

SEQ ID NO: 63222 - DNA, 26 bp, Homo sapiens
tctcacaagtttgtgaaaatttttaa

SEQ ID NO: 63223 - DNA, 24 bp, Homo sapiens
agattttttttttaaaaggtcgtc

SEQ ID NO: 63224 - DNA, 17 bp, Homo sapiens
acttgccatcagttggt

SEQ ID NO: 63225 - DNA, 24 bp, Homo sapiens
cgagctagagattcattaattcag

SEQ ID NO: 63226 - DNA, 24 bp, Homo sapiens
tccaaccaaaaattaaaacaattc

SEQ ID NO: 63227 - DNA, 22 bp, Homo sapiens
cgtggaccattcagtgaaagac

SEQ ID NO: 63228 - DNA, 20 bp, Homo sapiens
tctgccttgtagcagatttt

SEQ ID NO: 63229 - DNA, 19 bp, Homo sapiens
gcaaaaactgccaaccaac

SEQ ID NO: 63230 - DNA, 22 bp, Homo sapiens
ctctttttctgcaaagtcattc

SEQ ID NO: 63231 - DNA, 19 bp, Homo sapiens
ggaatatatccctgctgag

SEQ ID NO: 63232 - DNA, 17 bp, Homo sapiens
tcccagtccagttttct

SEQ ID NO: 63233 - DNA, 24 bp, Homo sapiens
tcagtgtacatatattccttttgc

SEQ ID NO: 63234 - DNA, 22 bp, Homo sapiens
catacttcacatttttcagctc

SEQ ID NO: 63235 - DNA, 23 bp, Homo sapiens
gctcattctttacatatgcattt

SEQ ID NO: 63236 - DNA, 18 bp, Homo sapiens
gctcctggtccagttcaa

SEQ ID NO: 63237 - DNA, 27 bp, Homo sapiens
gatagatgagataagagataagaaaac

SEQ ID NO: 63238 - DNA, 26 bp, Homo sapiens
aatacttctaaaagtattatatctta

SEQ ID NO: 63239 - DNA, 20 bp, Homo sapiens
aagtaagaagcagaatgagc

SEQ ID NO: 63240 - DNA, 22 bp, Homo sapiens
agaataagacaaagttgatgtt

SEQ ID NO: 63241 - DNA, 20 bp, Homo sapiens
aggatcttcagacaggattc

SEQ ID NO: 63242 - DNA, 19 bp, Homo sapiens
agaaccaaagagtcagaag

SEQ ID NO: 63243 - DNA, 22 bp, Homo sapiens
ccttgcttaactcacgttccta

SEQ ID NO: 63244 - DNA, 22 bp, Homo sapiens
gccttatgtttttttctcttgt

SEQ ID NO: 63245 - DNA, 25 bp, Homo sapiens
ttcattttggagacttattacttcc

SEQ ID NO: 63246 - DNA, 23 bp, Homo sapiens
ggagtagttaatttctaatacac

SEQ ID NO: 63247 - DNA, 17 bp, Homo sapiens
tgctccatctcctggtc

SEQ ID NO: 63248 - DNA, 23 bp, Homo sapiens
acacctttgcatttgtatgaatt

SEQ ID NO: 63249 - DNA, 22 bp, Homo sapiens
aaaatcatactttgtctttggt

SEQ ID NO: 63250 - DNA, 22 bp, Homo sapiens
tgtagaaaccttaaaaatggaa

SEQ ID NO: 63251 - DNA, 22 bp, Homo sapiens
gacttatgagtgcaaggtaggc

SEQ ID NO: 63252 - DNA, 19 bp, Homo sapiens
aggaccctgcgtaaacttg

SEQ ID NO: 63253 - DNA, 21 bp, Homo sapiens
actaagctcacttagcctcta

SEQ ID NO: 63254 - DNA, 20 bp, Homo sapiens
cccaaatggagatgctgacc

SEQ ID NO: 63255 - DNA, 19 bp, Homo sapiens
tgttcatctttgtcagcct

SEQ ID NO: 63256 - DNA, 24 bp, Homo sapiens
gaactttaagaaattttatatttt

SEQ ID NO: 63257 - DNA, 21 bp, Homo sapiens
gttgggaaaatatcccaacag

SEQ ID NO: 63258 - DNA, 24 bp, Homo sapiens
gtcagtctagaatttatttttgtt

SEQ ID NO: 63259 - DNA, 22 bp, Homo sapiens
tgtccctggtctgattaatttc

SEQ ID NO: 63260 - DNA, 24 bp, Homo sapiens
gattttttttttacctataggctg

SEQ ID NO: 63261 - DNA, 27 bp, Homo sapiens
aagcatgaaataagagatttctattac

SEQ ID NO: 63262 - DNA, 22 bp, Homo sapiens
cacagtgatgaattaacctcac

SEQ ID NO: 63263 - DNA, 22 bp, Homo sapiens
atcaatataacataccatttca

SEQ ID NO: 63264 - DNA, 24 bp, Homo sapiens
actggctacatagtaaatcaaaag

SEQ ID NO: 63265 - DNA, 24 bp, Homo sapiens
tcttttaattccatttttccatga

SEQ ID NO: 63266 - DNA, 17 bp, Homo sapiens
ttctgctcagatgaagc

SEQ ID NO: 63267 - DNA, 27 bp, Homo sapiens
ttctgaaaaaaattatttggtcatacc

SEQ ID NO: 63268 - DNA, 18 bp, Homo sapiens
ttcgtaactggacaactg

SEQ ID NO: 63269 - DNA, 23 bp, Homo sapiens
gtttttgcctactcaaattttca

SEQ ID NO: 63270 - DNA, 23 bp, Homo sapiens
tttcaatttcctctttaagcctg

SEQ ID NO: 63271 - DNA, 24 bp, Homo sapiens
tcttattttagcaaggaactagct

SEQ ID NO: 63272 - DNA, 23 bp, Homo sapiens
agtatcctgataatataaagtag

SEQ ID NO: 63273 - DNA, 20 bp, Homo sapiens
aaagaaaggaagagcagttg

SEQ ID NO: 63274 - DNA, 21 bp, Homo sapiens
ccaggtttttaaattccccat

SEQ ID NO: 63275 - DNA, 22 bp, Homo sapiens
gccaggattttgaaagtgattt

SEQ ID NO: 63276 - DNA, 20 bp, Homo sapiens
tcacacagtgagtaagttgt

SEQ ID NO: 63277 - DNA, 21 bp, Homo sapiens
ttagctgagtaatgaactggg

SEQ ID NO: 63278 - DNA, 25 bp, Homo sapiens
atatatttataaagcaagaataatc

SEQ ID NO: 63279 - DNA, 20 bp, Homo sapiens
agcctctgtctgaaaaactc

SEQ ID NO: 63280 - DNA, 23 bp, Homo sapiens
actgtattttatgtttttttctc

SEQ ID NO: 63281 - DNA, 18 bp, Homo sapiens
atctggagcaagtcgcag

SEQ ID NO: 63282 - DNA, 21 bp, Homo sapiens
gctggagccacagcagtttac

SEQ ID NO: 63283 - DNA, 21 bp, Homo sapiens
tcccagcatttcatcacgccg

SEQ ID NO: 63284 - DNA, 21 bp, Homo sapiens
cagtcatgttgccccgtttgt

SEQ ID NO: 63285 - DNA, 21 bp, Homo sapiens
ccttttacaatgtgctgctac

SEQ ID NO: 63286 - DNA, 24 bp, Homo sapiens
gtcatcagtgatttgcagtctaaa

SEQ ID NO: 63287 - DNA, 20 bp, Homo sapiens
ggcataccagctcagagtcc

SEQ ID NO: 63288 - DNA, 19 bp, Homo sapiens
aaaaaaggaaaagcggcgt

SEQ ID NO: 63289 - DNA, 24 bp, Homo sapiens
ggaaacaagcttatctttaaacaa

SEQ ID NO: 63290 - DNA, 23 bp, Homo sapiens
agacatattgatatcatgattcc

SEQ ID NO: 63291 - DNA, 20 bp, Homo sapiens
tgtctctattgacattctgc

SEQ ID NO: 63292 - DNA, 21 bp, Homo sapiens
acttctgtggtattcttccta

SEQ ID NO: 63293 - DNA, 21 bp, Homo sapiens
gcattattgtacccaagagtg

SEQ ID NO: 63294 - DNA, 23 bp, Homo sapiens
actttatttttaattgtgttttc

SEQ ID NO: 63295 - DNA, 20 bp, Homo sapiens
acttacctggaacctctcca

SEQ ID NO: 63296 - DNA, 23 bp, Homo sapiens
cagaattaagaaacaaactgcag

SEQ ID NO: 63297 - DNA, 18 bp, Homo sapiens
cttcaaattcaagccacc

SEQ ID NO: 63298 - DNA, 23 bp, Homo sapiens
catagaagaacaagaaacactct

SEQ ID NO: 63299 - DNA, 21 bp, Homo sapiens
aattcaggatggggaattcta

SEQ ID NO: 63300 - DNA, 24 bp, Homo sapiens
ccaaagtatgcctgacagatgtta

SEQ ID NO: 63301 - DNA, 27 bp, Homo sapiens
atttgaattgctgataattaatttcac

SEQ ID NO: 63302 - DNA, 16 bp, Homo sapiens
tagctgcttgttgtgc

SEQ ID NO: 63303 - DNA, 23 bp, Homo sapiens
tggtttataagtttagatttaaa

SEQ ID NO: 63304 - DNA, 21 bp, Homo sapiens
gtgctgtttctcttgtttctc

SEQ ID NO: 63305 - DNA, 22 bp, Homo sapiens
aatgcagtaagtttattaaagg

SEQ ID NO: 63306 - DNA, 21 bp, Homo sapiens
cgcaatgtcaaagtctctatg

SEQ ID NO: 63307 - DNA, 21 bp, Homo sapiens
agatgttgaaagaaaaattgc

SEQ ID NO: 63308 - DNA, 19 bp, Homo sapiens
ggaacttcgttgtccatgt

SEQ ID NO: 63309 - DNA, 19 bp, Homo sapiens
ccaacaagtcaaccaggag

SEQ ID NO: 63310 - DNA, 21 bp, Homo sapiens
gtaagagaacaaagagaagtg

SEQ ID NO: 63311 - DNA, 24 bp, Homo sapiens
ctgtataagcttacgattcaattc

SEQ ID NO: 63312 - DNA, 24 bp, Homo sapiens
tatttttgttgcagtgggtggggc

SEQ ID NO: 63313 - DNA, 22 bp, Homo sapiens
tcagattttagctcatttgttg

SEQ ID NO: 63314 - DNA, 28 bp, Homo sapiens
ataaaaatgggaagaatgatacaaatag

SEQ ID NO: 63315 - DNA, 17 bp, Homo sapiens
tgctcctccagttgctg

SEQ ID NO: 63316 - DNA, 21 bp, Homo sapiens
tgtttttgtgtagtttctagt

SEQ ID NO: 63317 - DNA, 24 bp, Homo sapiens
aaaacatgtatggatattcttacc

SEQ ID NO: 63318 - DNA, 25 bp, Homo sapiens
aggaacagattcaacatctaaaaag

SEQ ID NO: 63319 - DNA, 22 bp, Homo sapiens
cagaacgagactgtctcaaaaa

SEQ ID NO: 63320 - DNA, 21 bp, Homo sapiens
tcagtctttgtacagagagat

SEQ ID NO: 63321 - DNA, 20 bp, Homo sapiens
gcttacctgctctttagcat

SEQ ID NO: 63322 - DNA, 19 bp, Homo sapiens
tagggtcattgaaaggagc

SEQ ID NO: 63323 - DNA, 24 bp, Homo sapiens
attttttttgttgattaattcttc

SEQ ID NO: 63324 - DNA, 19 bp, Homo sapiens
agactgtgaagtctgaccc

SEQ ID NO: 63325 - DNA, 29 bp, Homo sapiens
atatttgataagtaaatatataaatgaaa

SEQ ID NO: 63326 - DNA, 22 bp, Homo sapiens
ttttttatatttttaggatgct

SEQ ID NO: 63327 - DNA, 21 bp, Homo sapiens
aatttcatgtgaaataagtgt

SEQ ID NO: 63328 - DNA, 22 bp, Homo sapiens
aagttccagcaagaaaaagaag

SEQ ID NO: 63329 - DNA, 25 bp, Homo sapiens
tgttctaacaagaatttctaatgtc

SEQ ID NO: 63330 - DNA, 22 bp, Homo sapiens
ctataggtgagaaagggacttg

SEQ ID NO: 63331 - DNA, 24 bp, Homo sapiens
tgaatataattctcaatgtctttc

SEQ ID NO: 63332 - DNA, 23 bp, Homo sapiens
actggaacccaatgttcataact

SEQ ID NO: 63333 - DNA, 30 bp, Homo sapiens
acaatcaaataaataattttaagttttaaa

SEQ ID NO: 63334 - DNA, 24 bp, Homo sapiens
ccttaagtacaaccagtgtaaatt

SEQ ID NO: 63335 - DNA, 21 bp, Homo sapiens
tcagtttctttttgctacaaa

SEQ ID NO: 63336 - DNA, 21 bp, Homo sapiens
aaggttaaaaatattcatggc

SEQ ID NO: 63337 - DNA, 24 bp, Homo sapiens
tcatttatcttttctttgtgtttc

SEQ ID NO: 63338 - DNA, 22 bp, Homo sapiens
aagacgactataagaaggtaat

SEQ ID NO: 63339 - DNA, 21 bp, Homo sapiens
cataagcaaaacagacctacc

SEQ ID NO: 63340 - DNA, 27 bp, Homo sapiens
gtgcttaaagaattttcttttttgtag

SEQ ID NO: 63341 - DNA, 23 bp, Homo sapiens
tctattcaatggatcttctattg

SEQ ID NO: 63342 - DNA, 21 bp, Homo sapiens
caactaagtgaatgcgagaaa

SEQ ID NO: 63343 - DNA, 21 bp, Homo sapiens
ccaaagtgcagggattacagg

SEQ ID NO: 63344 - DNA, 18 bp, Homo sapiens
agccacctttcttgtatc

SEQ ID NO: 63345 - DNA, 19 bp, Homo sapiens
cacactggcttattctccc

SEQ ID NO: 63346 - DNA, 25 bp, Homo sapiens
aatgttgttttctttcttcttcaac

SEQ ID NO: 63347 - DNA, 23 bp, Homo sapiens
cacttgctgtcaccagttgcctg

SEQ ID NO: 63348 - DNA, 20 bp, Homo sapiens
aagcataccttttcatttgc

SEQ ID NO: 63349 - DNA, 21 bp, Homo sapiens
actaatttaatgtttaccttt

SEQ ID NO: 63350 - DNA, 22 bp, Homo sapiens
acaggtatttaatattcttcac

SEQ ID NO: 63351 - DNA, 22 bp, Homo sapiens
aaagaaatgaggaactaaaaga

SEQ ID NO: 63352 - DNA, 22 bp, Homo sapiens
actgttcaccttctagtaactc

SEQ ID NO: 63353 - DNA, 20 bp, Homo sapiens
ggtcaaatgcaggttttgca

SEQ ID NO: 63354 - DNA, 21 bp, Homo sapiens
tctcttccaacttctgatgtt

SEQ ID NO: 63355 - DNA, 25 bp, Homo sapiens
ggagagactctgttataatatactg

SEQ ID NO: 63356 - DNA, 19 bp, Homo sapiens
tcataacctttctgtcgcc

SEQ ID NO: 63357 - DNA, 21 bp, Homo sapiens
atctatgacttttccacttca

SEQ ID NO: 63358 - DNA, 18 bp, Homo sapiens
cttttcctcagcatcccg

SEQ ID NO: 63359 - DNA, 20 bp, Homo sapiens
tcttttttacagtgaacatc

SEQ ID NO: 63360 - DNA, 18 bp, Homo sapiens
atccagatccttgttcac

SEQ ID NO: 63361 - DNA, 18 bp, Homo sapiens
aatttggcattagggcga

SEQ ID NO: 63362 - DNA, 23 bp, Homo sapiens
ttaactgcaataagaaaatcccc

SEQ ID NO: 63363 - DNA, 20 bp, Homo sapiens
aacttcgagaaccacaattt

SEQ ID NO: 63364 - DNA, 19 bp, Homo sapiens
taaaaaagaaaaaaagaaa

SEQ ID NO: 63365 - DNA, 23 bp, Homo sapiens
ttatgaggacaacagaacttgtg

SEQ ID NO: 63366 - DNA, 16 bp, Homo sapiens
gagatcgtgccattgc

SEQ ID NO: 63367 - DNA, 20 bp, Homo sapiens
tcttccattttcatactgtg

SEQ ID NO: 63368 - DNA, 24 bp, Homo sapiens
aaatattgaggaagttatttatat

SEQ ID NO: 63369 - DNA, 19 bp, Homo sapiens
catggtactcaccttgtcc

SEQ ID NO: 63370 - DNA, 30 bp, Homo sapiens
tttaatattactattacacataattatttt

SEQ ID NO: 63371 - DNA, 21 bp, Homo sapiens
atgatgagaggtcataagggg

SEQ ID NO: 63372 - DNA, 24 bp, Homo sapiens
tccagagcaataatgaaatttcac

SEQ ID NO: 63373 - DNA, 27 bp, Homo sapiens
gaattcttagaaaatctcaaagacatg

SEQ ID NO: 63374 - DNA, 22 bp, Homo sapiens
tgacctgtggcgaagtacctat

SEQ ID NO: 63375 - DNA, 22 bp, Homo sapiens
accgtatttctatgtattcaat

SEQ ID NO: 63376 - DNA, 21 bp, Homo sapiens
gagaaagagtttccacaccag

SEQ ID NO: 63377 - DNA, 24 bp, Homo sapiens
ctcggtagttataattccgccttt

SEQ ID NO: 63378 - DNA, 24 bp, Homo sapiens
ttgttcctaggcttacttgatatg

SEQ ID NO: 63379 - DNA, 16 bp, Homo sapiens
gcactgcatcgtcctc

SEQ ID NO: 63380 - DNA, 23 bp, Homo sapiens
aaatattcttcttcctgtgtcag

SEQ ID NO: 63381 - DNA, 24 bp, Homo sapiens
tgtttgtttctctctttcagttac

SEQ ID NO: 63382 - DNA, 23 bp, Homo sapiens
atgtatcagcttctgataaaagg

SEQ ID NO: 63383 - DNA, 18 bp, Homo sapiens
aagagcttcccaccattc

SEQ ID NO: 63384 - DNA, 22 bp, Homo sapiens
ggagacacagccttggatatgc

SEQ ID NO: 63385 - DNA, 20 bp, Homo sapiens
ttggttagcttcaggagagt

SEQ ID NO: 63386 - DNA, 22 bp, Homo sapiens
gaatgatgagtgaggctaatac

SEQ ID NO: 63387 - DNA, 24 bp, Homo sapiens
tctcccagagggcagtgctttacc

SEQ ID NO: 63388 - DNA, 22 bp, Homo sapiens
ttggctcatccaaggcaatgat

SEQ ID NO: 63389 - DNA, 24 bp, Homo sapiens
ctgaaaagatcatgtcaggactgc

SEQ ID NO: 63390 - DNA, 21 bp, Homo sapiens
tacttactcaaccagagcatg

SEQ ID NO: 63391 - DNA, 24 bp, Homo sapiens
tctcacataggggcttttttccag

SEQ ID NO: 63392 - DNA, 18 bp, Homo sapiens
aactatcacaacctgtcc

SEQ ID NO: 63393 - DNA, 22 bp, Homo sapiens
cgttctgcctcaactgtggcat

SEQ ID NO: 63394 - DNA, 16 bp, Homo sapiens
aagtggggaacacagc

SEQ ID NO: 63395 - DNA, 23 bp, Homo sapiens
gagaaaacattgaatctcttgca

SEQ ID NO: 63396 - DNA, 21 bp, Homo sapiens
tgctgtgagcgactttttatt

SEQ ID NO: 63397 - DNA, 23 bp, Homo sapiens
cccctccacttcctgcagggtag

SEQ ID NO: 63398 - DNA, 21 bp, Homo sapiens
cgtcctaaaagctccacaaaa

SEQ ID NO: 63399 - DNA, 21 bp, Homo sapiens
ggtttgcggtgacttttcaaa

SEQ ID NO: 63400 - DNA, 18 bp, Homo sapiens
tctgagcactgatcgatg

SEQ ID NO: 63401 - DNA, 22 bp, Homo sapiens
tctgaatatattgttgcaggat

SEQ ID NO: 63402 - DNA, 22 bp, Homo sapiens
tggcatttaaatcttggatatt

SEQ ID NO: 63403 - DNA, 23 bp, Homo sapiens
tggtaatcactcatgatgaagat

SEQ ID NO: 63404 - DNA, 23 bp, Homo sapiens
agttgatatgagaaataagtttc

SEQ ID NO: 63405 - DNA, 25 bp, Homo sapiens
tacaggattaaaaagaacatcgatc

SEQ ID NO: 63406 - DNA, 21 bp, Homo sapiens
cctctcaacatccaaaatcct

SEQ ID NO: 63407 - DNA, 19 bp, Homo sapiens
ccctgggattcaatgttca

SEQ ID NO: 63408 - DNA, 18 bp, Homo sapiens
gcatggacagcagtcatt

SEQ ID NO: 63409 - DNA, 21 bp, Homo sapiens
tcatgtgtaggctagttagaa

SEQ ID NO: 63410 - DNA, 19 bp, Homo sapiens
ctcaactgccagagtcctg

SEQ ID NO: 63411 - DNA, 24 bp, Homo sapiens
aaaagtcccaaagtaggagaagat

SEQ ID NO: 63412 - DNA, 23 bp, Homo sapiens
gaaccatgttacaatgtatttgt

SEQ ID NO: 63413 - DNA, 24 bp, Homo sapiens
tgactgactttttgtttcttattt

SEQ ID NO: 63414 - DNA, 22 bp, Homo sapiens
ggctttgaactaaataaccttg

SEQ ID NO: 63415 - DNA, 21 bp, Homo sapiens
tgggatcctaaaagtctagag

SEQ ID NO: 63416 - DNA, 20 bp, Homo sapiens
aaacccatgcatcaatattc

SEQ ID NO: 63417 - DNA, 21 bp, Homo sapiens
gtgtttacaagggttgtaacc

SEQ ID NO: 63418 - DNA, 24 bp, Homo sapiens
gctgtatatcttaaatatggggaa

SEQ ID NO: 63419 - DNA, 17 bp, Homo sapiens
tgggccttcttagaacg

SEQ ID NO: 63420 - DNA, 22 bp, Homo sapiens
agaataacttaatcttgctgtc

SEQ ID NO: 63421 - DNA, 20 bp, Homo sapiens
ccttcgcaattttatccccc

SEQ ID NO: 63422 - DNA, 24 bp, Homo sapiens
ccagtttaatgttaaaaatgaaac

SEQ ID NO: 63423 - DNA, 23 bp, Homo sapiens
ccttgttttcgaacatcttctac

SEQ ID NO: 63424 - DNA, 21 bp, Homo sapiens
ggccctctaataagaagagag

SEQ ID NO: 63425 - DNA, 21 bp, Homo sapiens
aacactgattttctagaaagg

SEQ ID NO: 63426 - DNA, 21 bp, Homo sapiens
agcaactgagaatttcttgga

SEQ ID NO: 63427 - DNA, 21 bp, Homo sapiens
gtaagttactgagcaattggc

SEQ ID NO: 63428 - DNA, 18 bp, Homo sapiens
ggaggagcttgtggctgc

SEQ ID NO: 63429 - DNA, 20 bp, Homo sapiens
agccttcatcaaatcacctg

SEQ ID NO: 63430 - DNA, 22 bp, Homo sapiens
acagcaaacaacaacaaaaatg

SEQ ID NO: 63431 - DNA, 17 bp, Homo sapiens
gttgcctcgcttcacag

SEQ ID NO: 63432 - DNA, 22 bp, Homo sapiens
acaaagtttggattatttttat

SEQ ID NO: 63433 - DNA, 20 bp, Homo sapiens
ctgccatgtcagccaaaatc

SEQ ID NO: 63434 - DNA, 22 bp, Homo sapiens
tgctgagtttgtttttcattct

SEQ ID NO: 63435 - DNA, 20 bp, Homo sapiens
acagacataggcctgtatac

SEQ ID NO: 63436 - DNA, 22 bp, Homo sapiens
ttcgcagatgatccctgctctt

SEQ ID NO: 63437 - DNA, 24 bp, Homo sapiens
accaaactaaatcctaaggaatac

SEQ ID NO: 63438 - DNA, 18 bp, Homo sapiens
tctgctgttacccggttg

SEQ ID NO: 63439 - DNA, 23 bp, Homo sapiens
agtggaaattaaacaaaaacatc

SEQ ID NO: 63440 - DNA, 18 bp, Homo sapiens
gccagcattcctcaactt

SEQ ID NO: 63441 - DNA, 21 bp, Homo sapiens
aaactcgagagctaagtttgg

SEQ ID NO: 63442 - DNA, 19 bp, Homo sapiens
tgttcagcttatccacttc

SEQ ID NO: 63443 - DNA, 24 bp, Homo sapiens
tcctaggatgccatcttctttaca

SEQ ID NO: 63444 - DNA, 22 bp, Homo sapiens
tgaacaactttaatatatcccc

SEQ ID NO: 63445 - DNA, 20 bp, Homo sapiens
aggtggaagatggtatcttg

SEQ ID NO: 63446 - DNA, 23 bp, Homo sapiens
aaggtaagtaatggtactttcag

SEQ ID NO: 63447 - DNA, 24 bp, Homo sapiens
gaatccagtataaagccctaaaac

SEQ ID NO: 63448 - DNA, 22 bp, Homo sapiens
acagcacaatactgaaaagaca

SEQ ID NO: 63449 - DNA, 17 bp, Homo sapiens
ctgatcacgatggccaa

SEQ ID NO: 63450 - DNA, 23 bp, Homo sapiens
ttgttaatgaaaataatgtgtct

SEQ ID NO: 63451 - DNA, 18 bp, Homo sapiens
atgcctgggatgcagtat

SEQ ID NO: 63452 - DNA, 24 bp, Homo sapiens
agcaaatttttatatgagtaaagc

SEQ ID NO: 63453 - DNA, 20 bp, Homo sapiens
gctgcttgtatatcaggtcc

SEQ ID NO: 63454 - DNA, 23 bp, Homo sapiens
tgtaggaattgaaagatgttggc

SEQ ID NO: 63455 - DNA, 18 bp, Homo sapiens
tgaggcatcgtctgaggc

SEQ ID NO: 63456 - DNA, 22 bp, Homo sapiens
ctgcagaagaacgttccgatcc

SEQ ID NO: 63457 - DNA, 24 bp, Homo sapiens
aacttacgtcaaagttattgagtg

SEQ ID NO: 63458 - DNA, 21 bp, Homo sapiens
agcctataaggccaacaggga

SEQ ID NO: 63459 - DNA, 22 bp, Homo sapiens
ccagaaatctgttatcttttgg

SEQ ID NO: 63460 - DNA, 20 bp, Homo sapiens
catttccaatgcagcccagg

SEQ ID NO: 63461 - DNA, 24 bp, Homo sapiens
tcttttgacttagattaaagatct

SEQ ID NO: 63462 - DNA, 20 bp, Homo sapiens
ggagaactggcatatgcact

SEQ ID NO: 63463 - DNA, 16 bp, Homo sapiens
tgaagctcaaggggtc

SEQ ID NO: 63464 - DNA, 24 bp, Homo sapiens
aagtataactttctttcagatgtt

SEQ ID NO: 63465 - DNA, 19 bp, Homo sapiens
ggcagccccactaatgatg

SEQ ID NO: 63466 - DNA, 24 bp, Homo sapiens
ttttctcaccttgaataaagaagg

SEQ ID NO: 63467 - DNA, 17 bp, Homo sapiens
actctgccacaattcgc

SEQ ID NO: 63468 - DNA, 21 bp, Homo sapiens
gaaacaaatcattgtggaccc

SEQ ID NO: 63469 - DNA, 20 bp, Homo sapiens
tgtcaaactcacattgccca

SEQ ID NO: 63470 - DNA, 16 bp, Homo sapiens
ggagcgtctggaaagc

SEQ ID NO: 63471 - DNA, 24 bp, Homo sapiens
tctcagatccaacatgttatagaa

SEQ ID NO: 63472 - DNA, 17 bp, Homo sapiens
tgatgaccgtcgtgagc

SEQ ID NO: 63473 - DNA, 20 bp, Homo sapiens
acctactcccaaaaatcaag

SEQ ID NO: 63474 - DNA, 19 bp, Homo sapiens
aggacctgctttcggagta

SEQ ID NO: 63475 - DNA, 20 bp, Homo sapiens
cccctctgctccccagtatt

SEQ ID NO: 63476 - DNA, 18 bp, Homo sapiens
gcaagtccctggtcttct

SEQ ID NO: 63477 - DNA, 19 bp, Homo sapiens
catgagcacaaatggctat

SEQ ID NO: 63478 - DNA, 20 bp, Homo sapiens
aaactacaaaattgagaact

SEQ ID NO: 63479 - DNA, 24 bp, Homo sapiens
tgctcatctcttttccttttatcc

SEQ ID NO: 63480 - DNA, 23 bp, Homo sapiens
tcttgtgaaaatccatcctttct

SEQ ID NO: 63481 - DNA, 22 bp, Homo sapiens
tctgcaatagataaaatgacca

SEQ ID NO: 63482 - DNA, 22 bp, Homo sapiens
aatttgattagccattaagaag

SEQ ID NO: 63483 - DNA, 24 bp, Homo sapiens
gattatgtaactgcatggcttaca

SEQ ID NO: 63484 - DNA, 18 bp, Homo sapiens
ccaaaagtggaacattgg

SEQ ID NO: 63485 - DNA, 26 bp, Homo sapiens
agcttcattagatttaagtgtacaag

SEQ ID NO: 63486 - DNA, 19 bp, Homo sapiens
cggaaaacttgggcatact

SEQ ID NO: 63487 - DNA, 25 bp, Homo sapiens
ggtagaaataaaatcaaatttttac

SEQ ID NO: 63488 - DNA, 20 bp, Homo sapiens
cctacaagtcaatgaaactg

SEQ ID NO: 63489 - DNA, 21 bp, Homo sapiens
cagattctttcctggaaacca

SEQ ID NO: 63490 - DNA, 22 bp, Homo sapiens
gcgagcccttacaaattttaac

SEQ ID NO: 63491 - DNA, 24 bp, Homo sapiens
atggaaatgagaaagaagttaagg

SEQ ID NO: 63492 - DNA, 24 bp, Homo sapiens
agttttccttagatgttaagtgat

SEQ ID NO: 63493 - DNA, 21 bp, Homo sapiens
aggccaagttggcaacctata

SEQ ID NO: 63494 - DNA, 24 bp, Homo sapiens
ctaagtaaataatcaggctgtgag

SEQ ID NO: 63495 - DNA, 24 bp, Homo sapiens
aactggcttgcagacattcgaaca

SEQ ID NO: 63496 - DNA, 23 bp, Homo sapiens
tgttccagaatggtcagaggtag

SEQ ID NO: 63497 - DNA, 18 bp, Homo sapiens
ggttatgctgtcaccagt

SEQ ID NO: 63498 - DNA, 24 bp, Homo sapiens
atctttaaagattattttttatgt

SEQ ID NO: 63499 - DNA, 23 bp, Homo sapiens
atcctaaaaacaaaacaaaactt

SEQ ID NO: 63500 - DNA, 22 bp, Homo sapiens
aatgaagaaggtgtaaagcttg

SEQ ID NO: 63501 - DNA, 20 bp, Homo sapiens
atattccaaactatgtgggt

SEQ ID NO: 63502 - DNA, 18 bp, Homo sapiens
agccagtgcagcattaat

SEQ ID NO: 63503 - DNA, 22 bp, Homo sapiens
cttactgttttacactcttccc

SEQ ID NO: 63504 - DNA, 26 bp, Homo sapiens
ttttcccattgttctttaaaaagatc

SEQ ID NO: 63505 - DNA, 24 bp, Homo sapiens
ggtgtgatgtctcctagtgaaatg

SEQ ID NO: 63506 - DNA, 23 bp, Homo sapiens
tcatcaatggaagtaatgtcatc

SEQ ID NO: 63507 - DNA, 23 bp, Homo sapiens
aagtttaatatcttttgcaggtt

SEQ ID NO: 63508 - DNA, 21 bp, Homo sapiens
tgaacatcttcacatacttct

SEQ ID NO: 63509 - DNA, 20 bp, Homo sapiens
gtaaactggcccaagagaac

SEQ ID NO: 63510 - DNA, 22 bp, Homo sapiens
agaataatttacctgccaagac

SEQ ID NO: 63511 - DNA, 20 bp, Homo sapiens
tcacagatgctgtcgatgac

SEQ ID NO: 63512 - DNA, 20 bp, Homo sapiens
cctgtagctgatagcttttt

SEQ ID NO: 63513 - DNA, 22 bp, Homo sapiens
cacatcttccaaaatgtgattc

SEQ ID NO: 63514 - DNA, 20 bp, Homo sapiens
cactggtctctccaatgaag

SEQ ID NO: 63515 - DNA, 16 bp, Homo sapiens
gtccaggccatccaca

SEQ ID NO: 63516 - DNA, 24 bp, Homo sapiens
caaacaataaatgatagatgccag

SEQ ID NO: 63517 - DNA, 20 bp, Homo sapiens
tccatctctgaggtgactac

SEQ ID NO: 63518 - DNA, 24 bp, Homo sapiens
cctcattcaactttttgcttgttc

SEQ ID NO: 63519 - DNA, 18 bp, Homo sapiens
ggagagcagcttagtggc

SEQ ID NO: 63520 - DNA, 23 bp, Homo sapiens
cattgctctccaagagaaggatg

SEQ ID NO: 63521 - DNA, 17 bp, Homo sapiens
tgcctcactgaggctgc

SEQ ID NO: 63522 - DNA, 17 bp, Homo sapiens
cagcccgggtcattcac

SEQ ID NO: 63523 - DNA, 21 bp, Homo sapiens
tgagaccaaatctgagttccc

SEQ ID NO: 63524 - DNA, 24 bp, Homo sapiens
tctacacagagaaggttctggaag

SEQ ID NO: 63525 - DNA, 24 bp, Homo sapiens
tgagtcgtaaaatactgcatttaa

SEQ ID NO: 63526 - DNA, 16 bp, Homo sapiens
gggcttccacggctgc

SEQ ID NO: 63527 - DNA, 20 bp, Homo sapiens
catcataagcctcacctctt

SEQ ID NO: 63528 - DNA, 24 bp, Homo sapiens
catcatataccaggcgggaagcat

SEQ ID NO: 63529 - DNA, 21 bp, Homo sapiens
gaatgatgctgcctgctgacc

SEQ ID NO: 63530 - DNA, 20 bp, Homo sapiens
tgaaatgcagttactcaccc

SEQ ID NO: 63531 - DNA, 20 bp, Homo sapiens
actgagcaagtagaagcagc

SEQ ID NO: 63532 - DNA, 21 bp, Homo sapiens
ttctagaatgacgcattgctc

SEQ ID NO: 63533 - DNA, 24 bp, Homo sapiens
cccatggatgagaatgagtttatc

SEQ ID NO: 63534 - DNA, 24 bp, Homo sapiens
ttaaatatatctcattctaacagc

SEQ ID NO: 63535 - DNA, 20 bp, Homo sapiens
gcagtgctgatgataagggt

SEQ ID NO: 63536 - DNA, 23 bp, Homo sapiens
gtcatccaactcctcaggggtct

SEQ ID NO: 63537 - DNA, 22 bp, Homo sapiens
gactttattcaccatactgttc

SEQ ID NO: 63538 - DNA, 18 bp, Homo sapiens
ctgtctggacgctcgtcc

SEQ ID NO: 63539 - DNA, 16 bp, Homo sapiens
gccaagaggctcaggg

SEQ ID NO: 63540 - DNA, 16 bp, Homo sapiens
ccccacggagcgcttc

SEQ ID NO: 63541 - DNA, 24 bp, Homo sapiens
gacctgtgatctttgtctgggtgg

SEQ ID NO: 63542 - DNA, 22 bp, Homo sapiens
aatactgagggtgttttcctgg

SEQ ID NO: 63543 - DNA, 22 bp, Homo sapiens
attttgatgtcagaagcaggac

SEQ ID NO: 63544 - DNA, 22 bp, Homo sapiens
tgccacaacttagtttaacttc

SEQ ID NO: 63545 - DNA, 17 bp, Homo sapiens
ctcctggggaagctgag

SEQ ID NO: 63546 - DNA, 24 bp, Homo sapiens
tcaggcgaaatgaaacctattaaa

SEQ ID NO: 63547 - DNA, 21 bp, Homo sapiens
cacttcagcatccagcttgct

SEQ ID NO: 63548 - DNA, 24 bp, Homo sapiens
aatattcttggctaatgcactctg

SEQ ID NO: 63549 - DNA, 19 bp, Homo sapiens
catgcacatctgcttggcc

SEQ ID NO: 63550 - DNA, 21 bp, Homo sapiens
tctgatcacaggcgatcatgg

SEQ ID NO: 63551 - DNA, 21 bp, Homo sapiens
cctgtgcagcctggtggggcc

SEQ ID NO: 63552 - DNA, 20 bp, Homo sapiens
cagcttccaggaagaaaaga

SEQ ID NO: 63553 - DNA, 16 bp, Homo sapiens
ctgggctgtctgagcc

SEQ ID NO: 63554 - DNA, 21 bp, Homo sapiens
acagtggcaatgacatcattg

SEQ ID NO: 63555 - DNA, 22 bp, Homo sapiens
ggattattgtatgtgaagcccc

SEQ ID NO: 63556 - DNA, 24 bp, Homo sapiens
gatgacatccgatgtatttttgag

SEQ ID NO: 63557 - DNA, 24 bp, Homo sapiens
cttccccacaggtcacctgcgcag

SEQ ID NO: 63558 - DNA, 24 bp, Homo sapiens
ctgcaatggtgcggccaagcttgt

SEQ ID NO: 63559 - DNA, 23 bp, Homo sapiens
tctttttctactccaactgtgag

SEQ ID NO: 63560 - DNA, 17 bp, Homo sapiens
cccaggaggagcttgga

SEQ ID NO: 63561 - DNA, 24 bp, Homo sapiens
ctcttctcagaggtaaaggaccac

SEQ ID NO: 63562 - DNA, 23 bp, Homo sapiens
ttagagatgagtggcaaaagtgc

SEQ ID NO: 63563 - DNA, 20 bp, Homo sapiens
aggcaggatccaggatggac

SEQ ID NO: 63564 - DNA, 21 bp, Homo sapiens
cacatccgctctagagaatcc

SEQ ID NO: 63565 - DNA, 22 bp, Homo sapiens
gtaggccagcaggtcctgcttg

SEQ ID NO: 63566 - DNA, 24 bp, Homo sapiens
tgattttgctccagcaagaggaga

SEQ ID NO: 63567 - DNA, 21 bp, Homo sapiens
gccttgaccttgctgcagatg

SEQ ID NO: 63568 - DNA, 17 bp, Homo sapiens
gtcgggggtgcttgggc

SEQ ID NO: 63569 - DNA, 19 bp, Homo sapiens
tgttcagctaatgcttacc

SEQ ID NO: 63570 - DNA, 23 bp, Homo sapiens
tctcttcagtgccccgactcggc

SEQ ID NO: 63571 - DNA, 24 bp, Homo sapiens
ttatgcggataggaggtgactttc

SEQ ID NO: 63572 - DNA, 18 bp, Homo sapiens
ccaccagctgaacatctg

SEQ ID NO: 63573 - DNA, 17 bp, Homo sapiens
gagactgggacaggact

SEQ ID NO: 63574 - DNA, 21 bp, Homo sapiens
gggagcttgttgtctctgggg

SEQ ID NO: 63575 - DNA, 20 bp, Homo sapiens
ttgcagtgccccgcaggtgt

SEQ ID NO: 63576 - DNA, 23 bp, Homo sapiens
ctgacccttgtcagaaatgaaag

SEQ ID NO: 63577 - DNA, 24 bp, Homo sapiens
ggaagatttttaaaaattcctacc

SEQ ID NO: 63578 - DNA, 22 bp, Homo sapiens
aaagtgtgctgtgcagaaactc

SEQ ID NO: 63579 - DNA, 24 bp, Homo sapiens
atctgttccctgtagaactgtgac

SEQ ID NO: 63580 - DNA, 16 bp, Homo sapiens
ccatctcggctcactg

SEQ ID NO: 63581 - DNA, 16 bp, Homo sapiens
ccctttgctggccact

SEQ ID NO: 63582 - DNA, 16 bp, Homo sapiens
catggcgctgtccacc

SEQ ID NO: 63583 - DNA, 19 bp, Homo sapiens
ctgcccaatcctctgcgac

SEQ ID NO: 63584 - DNA, 24 bp, Homo sapiens
ggcgacgtaggatgccttcactgt

SEQ ID NO: 63585 - DNA, 20 bp, Homo sapiens
cttcaagcacagcccacctg

SEQ ID NO: 63586 - DNA, 18 bp, Homo sapiens
acagcaggaaggttgagg

SEQ ID NO: 63587 - DNA, 18 bp, Homo sapiens
gtctgcctcgtaggtgga

SEQ ID NO: 63588 - DNA, 20 bp, Homo sapiens
tctcatcctgtttctctctc

SEQ ID NO: 63589 - DNA, 21 bp, Homo sapiens
gatgaatgctgtggtgcagac

SEQ ID NO: 63590 - DNA, 16 bp, Homo sapiens
ctgagggcctgcaccg

SEQ ID NO: 63591 - DNA, 24 bp, Homo sapiens
ccaaaagtcacagggtatggcttc

SEQ ID NO: 63592 - DNA, 16 bp, Homo sapiens
aggggtgggggcggcc

SEQ ID NO: 63593 - DNA, 24 bp, Homo sapiens
agagaaaaagccattggtgaagag

SEQ ID NO: 63594 - DNA, 24 bp, Homo sapiens
ctagtatcagtgttgtatttagca

SEQ ID NO: 63595 - DNA, 24 bp, Homo sapiens
atctcagaagaagcacgtgaaccc

SEQ ID NO: 63596 - DNA, 20 bp, Homo sapiens
ttcttggaaaattcaccacc

SEQ ID NO: 63597 - DNA, 18 bp, Homo sapiens
gacacatcgccaacctgg

SEQ ID NO: 63598 - DNA, 24 bp, Homo sapiens
taaatgggtgtgatgtgtattttt

SEQ ID NO: 63599 - DNA, 19 bp, Homo sapiens
ccacatgggggagatggac

SEQ ID NO: 63600 - DNA, 23 bp, Homo sapiens
gtgaagactctgtctttcaaaac

SEQ ID NO: 63601 - DNA, 20 bp, Homo sapiens
tgtgtctcacactcaggtga

SEQ ID NO: 63602 - DNA, 21 bp, Homo sapiens
tacggtcagttctgagaaatg

SEQ ID NO: 63603 - DNA, 22 bp, Homo sapiens
agaatgcttctgaagagctgcc

SEQ ID NO: 63604 - DNA, 24 bp, Homo sapiens
catggggacagttccaggggtggt

SEQ ID NO: 63605 - DNA, 21 bp, Homo sapiens
aggtttttcagggaaggtagt

SEQ ID NO: 63606 - DNA, 17 bp, Homo sapiens
agagcagtcccaatcat

SEQ ID NO: 63607 - DNA, 18 bp, Homo sapiens
ctacgacgctgcacgtag

SEQ ID NO: 63608 - DNA, 16 bp, Homo sapiens
ccctggggtcatgtgc

SEQ ID NO: 63609 - DNA, 23 bp, Homo sapiens
ggcgtttacaaccttgaccaaat

SEQ ID NO: 63610 - DNA, 24 bp, Homo sapiens
ccaactagtaaaaactggaccttc

SEQ ID NO: 63611 - DNA, 22 bp, Homo sapiens
ctgagctgacagccaggctttc

SEQ ID NO: 63612 - DNA, 24 bp, Homo sapiens
ttctcaaaattgtattcttttagc

SEQ ID NO: 63613 - DNA, 22 bp, Homo sapiens
catctgcttgactcgggaaggc

SEQ ID NO: 63614 - DNA, 21 bp, Homo sapiens
gatgttcatcctaagtagctt

SEQ ID NO: 63615 - DNA, 23 bp, Homo sapiens
tcagtttagccctttcagtgact

SEQ ID NO: 63616 - DNA, 19 bp, Homo sapiens
tttgattttgttatcgatg

SEQ ID NO: 63617 - DNA, 18 bp, Homo sapiens
accatgttagccaggctg

SEQ ID NO: 63618 - DNA, 20 bp, Homo sapiens
ttaactgctgttaatgaagc

SEQ ID NO: 63619 - DNA, 20 bp, Homo sapiens
cttggcctcccagagtgctg

SEQ ID NO: 63620 - DNA, 21 bp, Homo sapiens
gtttgacttcaggatatggtt

SEQ ID NO: 63621 - DNA, 22 bp, Homo sapiens
tctaattaataacttaccattt

SEQ ID NO: 63622 - DNA, 23 bp, Homo sapiens
tgttgttattttgacatgaattc

SEQ ID NO: 63623 - DNA, 22 bp, Homo sapiens
gattttctatcagaacagcttc

SEQ ID NO: 63624 - DNA, 20 bp, Homo sapiens
acttctcaggaagttttgtg

SEQ ID NO: 63625 - DNA, 16 bp, Homo sapiens
caccgtgctccagggg

SEQ ID NO: 63626 - DNA, 22 bp, Homo sapiens
tacaaggtcttgctgtgttgtc

SEQ ID NO: 63627 - DNA, 22 bp, Homo sapiens
ggatatcttcatagtggaccag

SEQ ID NO: 63628 - DNA, 19 bp, Homo sapiens
ctgccttggcctctattag

SEQ ID NO: 63629 - DNA, 20 bp, Homo sapiens
gcagaaatggaaatcattgg

SEQ ID NO: 63630 - DNA, 20 bp, Homo sapiens
actcacgctatgagcctctg

SEQ ID NO: 63631 - DNA, 24 bp, Homo sapiens
agaaaaataatcttgtaaaatgtc

SEQ ID NO: 63632 - DNA, 18 bp, Homo sapiens
cgtccgtggcatgctggt

SEQ ID NO: 63633 - DNA, 22 bp, Homo sapiens
gggactttattttgtttttgta

SEQ ID NO: 63634 - DNA, 21 bp, Homo sapiens
atcccaggttaaactgaccaa

SEQ ID NO: 63635 - DNA, 18 bp, Homo sapiens
gggtgacagaacgagact

SEQ ID NO: 63636 - DNA, 22 bp, Homo sapiens
tgaactaagaaaagagataagg

SEQ ID NO: 63637 - DNA, 16 bp, Homo sapiens
gggaggtggaggctgc

SEQ ID NO: 63638 - DNA, 18 bp, Homo sapiens
caggaagtttagggcaaa

SEQ ID NO: 63639 - DNA, 24 bp, Homo sapiens
gcaacagagcaagactctgtctca

SEQ ID NO: 63640 - DNA, 19 bp, Homo sapiens
tgagttctttagctaaacg

SEQ ID NO: 63641 - DNA, 24 bp, Homo sapiens
aagagaaaaagtaaaaaattaaaa

SEQ ID NO: 63642 - DNA, 18 bp, Homo sapiens
tcaggttgatgtagctgt

SEQ ID NO: 63643 - DNA, 20 bp, Homo sapiens
tctccaggacaaatctttgc

SEQ ID NO: 63644 - DNA, 24 bp, Homo sapiens
agaagaaattctttccagttctga

SEQ ID NO: 63645 - DNA, 20 bp, Homo sapiens
gtgcttcatgatgtaactgc

SEQ ID NO: 63646 - DNA, 19 bp, Homo sapiens
tgcctcagccaactaatct

SEQ ID NO: 63647 - DNA, 22 bp, Homo sapiens
aggggcacaactttcttattaa

SEQ ID NO: 63648 - DNA, 20 bp, Homo sapiens
tctttttcagatgtggactg

SEQ ID NO: 63649 - DNA, 24 bp, Homo sapiens
gagtatttactaacttttgacaaa

SEQ ID NO: 63650 - DNA, 19 bp, Homo sapiens
gggacaggggctcgcagga

SEQ ID NO: 63651 - DNA, 23 bp, Homo sapiens
ttgtgtttggggttgcgagatta

SEQ ID NO: 63652 - DNA, 19 bp, Homo sapiens
ggggttcagcatcccagac

SEQ ID NO: 63653 - DNA, 23 bp, Homo sapiens
cggtatcttcctggtttgaatgg

SEQ ID NO: 63654 - DNA, 17 bp, Homo sapiens
gacagagcggaggtgga

SEQ ID NO: 63655 - DNA, 24 bp, Homo sapiens
tttctcctgagagtccacatgttc

SEQ ID NO: 63656 - DNA, 18 bp, Homo sapiens
gacaaaggcgtcctgaga

SEQ ID NO: 63657 - DNA, 17 bp, Homo sapiens
tgctgcagtgactgccc

SEQ ID NO: 63658 - DNA, 24 bp, Homo sapiens
ccaagaaggagccctctaggacag

SEQ ID NO: 63659 - DNA, 17 bp, Homo sapiens
tgccccgagtccttctc

SEQ ID NO: 63660 - DNA, 23 bp, Homo sapiens
gaggccttttctcttcgtcacac

SEQ ID NO: 63661 - DNA, 24 bp, Homo sapiens
tgactggaactcactgcctctttc

SEQ ID NO: 63662 - DNA, 23 bp, Homo sapiens
atccccttcattaaggactggag

SEQ ID NO: 63663 - DNA, 24 bp, Homo sapiens
gaagtgctagaagacagcataccc

SEQ ID NO: 63664 - DNA, 24 bp, Homo sapiens
cttaataaaaatgcatgcagcgga

SEQ ID NO: 63665 - DNA, 24 bp, Homo sapiens
tctttgggctgtgaggcttgttct

SEQ ID NO: 63666 - DNA, 21 bp, Homo sapiens
tctcaccatttcaggatagtc

SEQ ID NO: 63667 - DNA, 21 bp, Homo sapiens
atggacacgtcttttttttct

SEQ ID NO: 63668 - DNA, 22 bp, Homo sapiens
tctgtgtaattagcatgtggat

SEQ ID NO: 63669 - DNA, 19 bp, Homo sapiens
accatgggcttttccaaat

SEQ ID NO: 63670 - DNA, 17 bp, Homo sapiens
agccaccacacctggcc

SEQ ID NO: 63671 - DNA, 19 bp, Homo sapiens
ctgctggatgttgaaggta

SEQ ID NO: 63672 - DNA, 21 bp, Homo sapiens
agtccctgtctcaaaaaagaa

SEQ ID NO: 63673 - DNA, 23 bp, Homo sapiens
gacctctttgataggaatgtttg

SEQ ID NO: 63674 - DNA, 23 bp, Homo sapiens
atgtcaaaaaaaagtttacttgg

SEQ ID NO: 63675 - DNA, 23 bp, Homo sapiens
caatgttactccagataaaaggc

SEQ ID NO: 63676 - DNA, 23 bp, Homo sapiens
gctgtttgtacactgtatttttc

SEQ ID NO: 63677 - DNA, 24 bp, Homo sapiens
agtgaatttaaacataataaatat

SEQ ID NO: 63678 - DNA, 24 bp, Homo sapiens
tgttgacatcactatcaaacattc

SEQ ID NO: 63679 - DNA, 16 bp, Homo sapiens
cctaggcgacagagtg

SEQ ID NO: 63680 - DNA, 24 bp, Homo sapiens
aaagcttttcctcttgtagcaaaa

SEQ ID NO: 63681 - DNA, 22 bp, Homo sapiens
agaccccgtctcaaaaaaaaac

SEQ ID NO: 63682 - DNA, 20 bp, Homo sapiens
actcgtgaatgaggtctacc

SEQ ID NO: 63683 - DNA, 22 bp, Homo sapiens
ctcattccagtcatagcagagc

SEQ ID NO: 63684 - DNA, 18 bp, Homo sapiens
ggctgggaacatttgtca

SEQ ID NO: 63685 - DNA, 19 bp, Homo sapiens
ctgaaatgccaatggaact

SEQ ID NO: 63686 - DNA, 20 bp, Homo sapiens
atccccttctaagaacatgc

SEQ ID NO: 63687 - DNA, 22 bp, Homo sapiens
actggtgtcgattatacatgtg

SEQ ID NO: 63688 - DNA, 21 bp, Homo sapiens
cactgcactccaggctgtgac

SEQ ID NO: 63689 - DNA, 16 bp, Homo sapiens
cggccttgtgacccag

SEQ ID NO: 63690 - DNA, 24 bp, Homo sapiens
acaaaataagataatgttaaagcc

SEQ ID NO: 63691 - DNA, 19 bp, Homo sapiens
tttcacaatgcacgcatgg

SEQ ID NO: 63692 - DNA, 26 bp, Homo sapiens
ctgcctattatcagaaaaaagttatc

SEQ ID NO: 63693 - DNA, 21 bp, Homo sapiens
ccctttcactctggaatcctg

SEQ ID NO: 63694 - DNA, 20 bp, Homo sapiens
tttaaatacctttgctgggt

SEQ ID NO: 63695 - DNA, 18 bp, Homo sapiens
acctggtgttttgttttc

SEQ ID NO: 63696 - DNA, 21 bp, Homo sapiens
tgtctgttgaactccttccaa

SEQ ID NO: 63697 - DNA, 18 bp, Homo sapiens
catcaagatttggagcac

SEQ ID NO: 63698 - DNA, 24 bp, Homo sapiens
ggcaacaaagcaagactccgtctc

SEQ ID NO: 63699 - DNA, 21 bp, Homo sapiens
aaagcctcattccttttgttc

SEQ ID NO: 63700 - DNA, 26 bp, Homo sapiens
ctatctttaaaaaaaaagctctcagg

SEQ ID NO: 63701 - DNA, 22 bp, Homo sapiens
agtccactctgtctttattagg

SEQ ID NO: 63702 - DNA, 24 bp, Homo sapiens
ccagcaatctacttactaaaaaag

SEQ ID NO: 63703 - DNA, 21 bp, Homo sapiens
tttaattttttttgcgcttgt

SEQ ID NO: 63704 - DNA, 20 bp, Homo sapiens
acacggagtcactagggggc

SEQ ID NO: 63705 - DNA, 17 bp, Homo sapiens
agcctgggcaatagagg

SEQ ID NO: 63706 - DNA, 16 bp, Homo sapiens
cggctctgtgtttggg

SEQ ID NO: 63707 - DNA, 23 bp, Homo sapiens
gactccctctcaaaaaaaaaaaa

SEQ ID NO: 63708 - DNA, 19 bp, Homo sapiens
cagcttggacaaggaaaac

SEQ ID NO: 63709 - DNA, 24 bp, Homo sapiens
tactggaagggacaatggaaaccc

SEQ ID NO: 63710 - DNA, 21 bp, Homo sapiens
caggtcttacatgcatactgt

SEQ ID NO: 63711 - DNA, 23 bp, Homo sapiens
ccggccatcactacctgcttctg

SEQ ID NO: 63712 - DNA, 24 bp, Homo sapiens
tcctataatattaaagtaatgtag

SEQ ID NO: 63713 - DNA, 22 bp, Homo sapiens
ttccacctgtgcataccacagg

SEQ ID NO: 63714 - DNA, 19 bp, Homo sapiens
cgatgatgtgagaaccttg

SEQ ID NO: 63715 - DNA, 23 bp, Homo sapiens
acggatgcctgctgaaatgatac

SEQ ID NO: 63716 - DNA, 23 bp, Homo sapiens
ttctgtagaatataggaagacac

SEQ ID NO: 63717 - DNA, 24 bp, Homo sapiens
tgttaaatctttaatgagaaatgc

SEQ ID NO: 63718 - DNA, 16 bp, Homo sapiens
acagtcagcgtgcagc

SEQ ID NO: 63719 - DNA, 24 bp, Homo sapiens
gagaatcaactgaagaataaacat

SEQ ID NO: 63720 - DNA, 23 bp, Homo sapiens
cgactgatgtttgatcacaatgg

SEQ ID NO: 63721 - DNA, 24 bp, Homo sapiens
tcttgaaaaccaggattaatttac

SEQ ID NO: 63722 - DNA, 22 bp, Homo sapiens
ggtattctctcacagcgatgtc

SEQ ID NO: 63723 - DNA, 23 bp, Homo sapiens
acaggtagtgtggaaaataactg

SEQ ID NO: 63724 - DNA, 22 bp, Homo sapiens
gggggttttctggataattttc

SEQ ID NO: 63725 - DNA, 22 bp, Homo sapiens
gatcttgattatctcagaggga

SEQ ID NO: 63726 - DNA, 20 bp, Homo sapiens
tgcgtggcaggtagaaatgg

SEQ ID NO: 63727 - DNA, 19 bp, Homo sapiens
tcactgtcttttagatgcc

SEQ ID NO: 63728 - DNA, 21 bp, Homo sapiens
tcagtgagagacccatgatgt

SEQ ID NO: 63729 - DNA, 21 bp, Homo sapiens
ggcagcgagacaaaacagaat

SEQ ID NO: 63730 - DNA, 24 bp, Homo sapiens
acacatctaagattcaagagtttg

SEQ ID NO: 63731 - DNA, 24 bp, Homo sapiens
aaactgaaaataataatgattcca

SEQ ID NO: 63732 - DNA, 22 bp, Homo sapiens
agcacttgagatatcttagtcc

SEQ ID NO: 63733 - DNA, 26 bp, Homo sapiens
agtggataaaaatattgtatcacctc

SEQ ID NO: 63734 - DNA, 22 bp, Homo sapiens
tgcaaaaacagttttttaaagc

SEQ ID NO: 63735 - DNA, 18 bp, Homo sapiens
ttcaacctgagttaggtc

SEQ ID NO: 63736 - DNA, 22 bp, Homo sapiens
tcctattataaaataattgggt

SEQ ID NO: 63737 - DNA, 19 bp, Homo sapiens
acaatggatgtggggtaga

SEQ ID NO: 63738 - DNA, 21 bp, Homo sapiens
acatgatatctagtaactggc

SEQ ID NO: 63739 - DNA, 20 bp, Homo sapiens
aaactttctagatctaaagc

SEQ ID NO: 63740 - DNA, 19 bp, Homo sapiens
attctgagacatgtgaccc

SEQ ID NO: 63741 - DNA, 30 bp, Homo sapiens
gcatatgttataaataatgtcaatataaaa

SEQ ID NO: 63742 - DNA, 20 bp, Homo sapiens
cttaagccttcgaagttttc

SEQ ID NO: 63743 - DNA, 22 bp, Homo sapiens
acaaaatgacactagtatgttt

SEQ ID NO: 63744 - DNA, 20 bp, Homo sapiens
ccactccatagtccttaagc

SEQ ID NO: 63745 - DNA, 18 bp, Homo sapiens
aggtgctaacttcaactt

SEQ ID NO: 63746 - DNA, 18 bp, Homo sapiens
tgggcaggtggtactgag

SEQ ID NO: 63747 - DNA, 18 bp, Homo sapiens
agaacctgctaaggccat

SEQ ID NO: 63748 - DNA, 23 bp, Homo sapiens
cttaaaactctcccaaacttacc

SEQ ID NO: 63749 - DNA, 23 bp, Homo sapiens
ccacagttaaaatcaggatgaaa

SEQ ID NO: 63750 - DNA, 20 bp, Homo sapiens
tttaccgcagtgcttagact

SEQ ID NO: 63751 - DNA, 22 bp, Homo sapiens
aataaatgaatagattagaccc

SEQ ID NO: 63752 - DNA, 20 bp, Homo sapiens
gatcaataggtttgatggcc

SEQ ID NO: 63753 - DNA, 16 bp, Homo sapiens
gttgcatccatggagc

SEQ ID NO: 63754 - DNA, 16 bp, Homo sapiens
agggggctgcctcgcc

SEQ ID NO: 63755 - DNA, 16 bp, Homo sapiens
gaggcggagcgcctgt

SEQ ID NO: 63756 - DNA, 19 bp, Homo sapiens
cgtgggtctcaaagagggc

SEQ ID NO: 63757 - DNA, 16 bp, Homo sapiens
tttttgccgccccgcc

SEQ ID NO: 63758 - DNA, 22 bp, Homo sapiens
gctcacctcgagctctcagctc

SEQ ID NO: 63759 - DNA, 23 bp, Homo sapiens
ggccgccgccgcccagaccggac

SEQ ID NO: 63760 - DNA, 17 bp, Homo sapiens
ctcgccgggcagagcgc

SEQ ID NO: 63761 - DNA, 18 bp, Homo sapiens
cgccaacgccacaaccac

SEQ ID NO: 63762 - DNA, 16 bp, Homo sapiens
gggggcggcgcgggag

SEQ ID NO: 63763 - DNA, 21 bp, Homo sapiens
ggagagccggagcgagctctt

SEQ ID NO: 63764 - DNA, 16 bp, Homo sapiens
cgggcgccgagccggt

SEQ ID NO: 63765 - DNA, 20 bp, Homo sapiens
cctggcgctgctggctgcgc

SEQ ID NO: 63766 - DNA, 18 bp, Homo sapiens
tcctcccgcggtcccggt

SEQ ID NO: 63767 - DNA, 16 bp, Homo sapiens
tcgtgccttggcaaac

SEQ ID NO: 63768 - DNA, 24 bp, Homo sapiens
tgacctgggcaggaatgggtgagt

SEQ ID NO: 63769 - DNA, 17 bp, Homo sapiens
acatcctctggaggctg

SEQ ID NO: 63770 - DNA, 21 bp, Homo sapiens
tggaccttgagggattgtttt

SEQ ID NO: 63771 - DNA, 22 bp, Homo sapiens
aaagatcataattcctctgcac

SEQ ID NO: 63772 - DNA, 23 bp, Homo sapiens
gtgatatctgtctttttcttcca

SEQ ID NO: 63773 - DNA, 22 bp, Homo sapiens
tccacttagattttctccaatt

SEQ ID NO: 63774 - DNA, 24 bp, Homo sapiens
gcacttttgaagatcattttctca

SEQ ID NO: 63775 - DNA, 20 bp, Homo sapiens
ttgtcattgccatagcaaaa

SEQ ID NO: 63776 - DNA, 23 bp, Homo sapiens
ccttgggaatttggaaattacct

SEQ ID NO: 63777 - DNA, 22 bp, Homo sapiens
attagctggtaaaatggctttc

SEQ ID NO: 63778 - DNA, 22 bp, Homo sapiens
catgactgcaatcgtctaccta

SEQ ID NO: 63779 - DNA, 19 bp, Homo sapiens
ttttccaaaggaattcgct

SEQ ID NO: 63780 - DNA, 19 bp, Homo sapiens
gtcctagggctccctggac

SEQ ID NO: 63781 - DNA, 22 bp, Homo sapiens
agttagataagactgctaaggc

SEQ ID NO: 63782 - DNA, 20 bp, Homo sapiens
tcacgcatttatgttttctc

SEQ ID NO: 63783 - DNA, 20 bp, Homo sapiens
tcaccctgtaaatttctcat

SEQ ID NO: 63784 - DNA, 23 bp, Homo sapiens
cattgccctcaacacagtggagc

SEQ ID NO: 63785 - DNA, 16 bp, Homo sapiens
gagccatcggaactgc

SEQ ID NO: 63786 - DNA, 24 bp, Homo sapiens
ggaaatatgtactacgaaaattcc

SEQ ID NO: 63787 - DNA, 21 bp, Homo sapiens
actcagtgcacgtgtactggg

SEQ ID NO: 63788 - DNA, 23 bp, Homo sapiens
accggactgaaggagctgcccat

SEQ ID NO: 63789 - DNA, 16 bp, Homo sapiens
cccgggaagttcactg

SEQ ID NO: 63790 - DNA, 18 bp, Homo sapiens
cgccactggatgctctcc

SEQ ID NO: 63791 - DNA, 22 bp, Homo sapiens
agcagaacataaatgcgaagag

SEQ ID NO: 63792 - DNA, 20 bp, Homo sapiens
aggtggttctggaagtccat

SEQ ID NO: 63793 - DNA, 21 bp, Homo sapiens
aaagagtgctcaccgcagttc

SEQ ID NO: 63794 - DNA, 19 bp, Homo sapiens
tagagctgtcccccatagg

SEQ ID NO: 63795 - DNA, 23 bp, Homo sapiens
ttcagcaacaaccctgccctgtg

SEQ ID NO: 63796 - DNA, 23 bp, Homo sapiens
tttttgtttctgattaatgtgac

SEQ ID NO: 63797 - DNA, 22 bp, Homo sapiens
gtgactttctcagcaacatgtc

SEQ ID NO: 63798 - DNA, 21 bp, Homo sapiens
tctctatgtccgtggtaaata

SEQ ID NO: 63799 - DNA, 24 bp, Homo sapiens
ctcaagtgattctacaaaccagcc

SEQ ID NO: 63800 - DNA, 19 bp, Homo sapiens
tctggcagttctcctctcc

SEQ ID NO: 63801 - DNA, 16 bp, Homo sapiens
gtgcttaactcaggcc

SEQ ID NO: 63802 - DNA, 19 bp, Homo sapiens
gcaagtgaaggaagagagg

SEQ ID NO: 63803 - DNA, 22 bp, Homo sapiens
cactgagatatgcatctattac

SEQ ID NO: 63804 - DNA, 22 bp, Homo sapiens
tcacatctgaccctgtaataaa

SEQ ID NO: 63805 - DNA, 16 bp, Homo sapiens
ctgctggggtgcagga

SEQ ID NO: 63806 - DNA, 18 bp, Homo sapiens
gagcactgctgggcacag

SEQ ID NO: 63807 - DNA, 19 bp, Homo sapiens
tcgttggaagcaaatgtgt

SEQ ID NO: 63808 - DNA, 19 bp, Homo sapiens
ctgtgcagcctgcagcaca

SEQ ID NO: 63809 - DNA, 19 bp, Homo sapiens
tccctgggaaatgatccta

SEQ ID NO: 63810 - DNA, 18 bp, Homo sapiens
gcctgctccagggaggct

SEQ ID NO: 63811 - DNA, 22 bp, Homo sapiens
tttcagtgaccaaaatcatctg

SEQ ID NO: 63812 - DNA, 17 bp, Homo sapiens
gctcccccacaggaagt

SEQ ID NO: 63813 - DNA, 18 bp, Homo sapiens
cagtgactgctgccacaa

SEQ ID NO: 63814 - DNA, 24 bp, Homo sapiens
caggatactaaagatactttgtca

SEQ ID NO: 63815 - DNA, 19 bp, Homo sapiens
gcttcgtctcggaatttgc

SEQ ID NO: 63816 - DNA, 20 bp, Homo sapiens
ggaacactaggctgcaaaga

SEQ ID NO: 63817 - DNA, 17 bp, Homo sapiens
catctggtacgtggtgg

SEQ ID NO: 63818 - DNA, 16 bp, Homo sapiens
cttcctccgtgtgtgg

SEQ ID NO: 63819 - DNA, 18 bp, Homo sapiens
tcacggggacacttcttc

SEQ ID NO: 63820 - DNA, 22 bp, Homo sapiens
ctctctcctccataggtctgcc

SEQ ID NO: 63821 - DNA, 16 bp, Homo sapiens
cagcaggagacagagc

SEQ ID NO: 63822 - DNA, 22 bp, Homo sapiens
cccccactcatgctctacaacc

SEQ ID NO: 63823 - DNA, 16 bp, Homo sapiens
cctcctccaagcaagg

SEQ ID NO: 63824 - DNA, 16 bp, Homo sapiens
tttggtgccacctgcg

SEQ ID NO: 63825 - DNA, 24 bp, Homo sapiens
tctctatttgcaacctttcattct

SEQ ID NO: 63826 - DNA, 17 bp, Homo sapiens
atctcatagctgtcggc

SEQ ID NO: 63827 - DNA, 24 bp, Homo sapiens
ctttccatcacccctcaagaggac

SEQ ID NO: 63828 - DNA, 17 bp, Homo sapiens
cttcctacctttgcggc

SEQ ID NO: 63829 - DNA, 24 bp, Homo sapiens
accgtcatcaccttcctttcatgc

SEQ ID NO: 63830 - DNA, 19 bp, Homo sapiens
tggaggtggcatgagagcc

SEQ ID NO: 63831 - DNA, 17 bp, Homo sapiens
gtccgagcctgtggggc

SEQ ID NO: 63832 - DNA, 24 bp, Homo sapiens
tatcttctgttttaaagaaacgat

SEQ ID NO: 63833 - DNA, 24 bp, Homo sapiens
aagtgtaagaagtgcgaagggcct

SEQ ID NO: 63834 - DNA, 24 bp, Homo sapiens
taaattcaccaatacctattccgt

SEQ ID NO: 63835 - DNA, 21 bp, Homo sapiens
gtgaatgaaggatgatgtggc

SEQ ID NO: 63836 - DNA, 19 bp, Homo sapiens
ggtgcagtttttgaagtgt

SEQ ID NO: 63837 - DNA, 24 bp, Homo sapiens
ttccctctgcctgtggatccctag

SEQ ID NO: 63838 - DNA, 16 bp, Homo sapiens
acctgtgactcacccc

SEQ ID NO: 63839 - DNA, 20 bp, Homo sapiens
atctctgcagtgtgtaacgg

SEQ ID NO: 63840 - DNA, 23 bp, Homo sapiens
ggtgattattgatcaccaatctc

SEQ ID NO: 63841 - DNA, 21 bp, Homo sapiens
atgctacgaatattaaacact

SEQ ID NO: 63842 - DNA, 22 bp, Homo sapiens
cagttcctgtggatccagagga

SEQ ID NO: 63843 - DNA, 22 bp, Homo sapiens
catcctgccggtggcatttagg

SEQ ID NO: 63844 - DNA, 22 bp, Homo sapiens
tattcatgtgataattcagctc

SEQ ID NO: 63845 - DNA, 22 bp, Homo sapiens
tctgcctttttaactggtagag

SEQ ID NO: 63846 - DNA, 20 bp, Homo sapiens
attccaagggaacaggaaat

SEQ ID NO: 63847 - DNA, 21 bp, Homo sapiens
tgactccttcacacatactcc

SEQ ID NO: 63848 - DNA, 26 bp, Homo sapiens
gcacttttgaaaaatatcaaaacatc

SEQ ID NO: 63849 - DNA, 24 bp, Homo sapiens
aaccgtaaaggaaatcacaggttt

SEQ ID NO: 63850 - DNA, 18 bp, Homo sapiens
tttcaggccaagcctgaa

SEQ ID NO: 63851 - DNA, 22 bp, Homo sapiens
agaaagcaaatccaattttccc

SEQ ID NO: 63852 - DNA, 16 bp, Homo sapiens
ttgcttggtcctgccg

SEQ ID NO: 63853 - DNA, 24 bp, Homo sapiens
agagtaatgtctcatacaaaaaag

SEQ ID NO: 63854 - DNA, 23 bp, Homo sapiens
tcctgttaagcctaatttccaac

SEQ ID NO: 63855 - DNA, 24 bp, Homo sapiens
ctgccttacagggtttttgctgat

SEQ ID NO: 63856 - DNA, 21 bp, Homo sapiens
tttgggaatgccggcgagaga

SEQ ID NO: 63857 - DNA, 24 bp, Homo sapiens
cctttgagaacctagaaatcatac

SEQ ID NO: 63858 - DNA, 19 bp, Homo sapiens
gcaagagaaaactgaccac

SEQ ID NO: 63859 - DNA, 16 bp, Homo sapiens
tgtgtgcctcccacag

SEQ ID NO: 63860 - DNA, 19 bp, Homo sapiens
acttatctccttgagggag

SEQ ID NO: 63861 - DNA, 19 bp, Homo sapiens
aaaggtggtctggagaaac

SEQ ID NO: 63862 - DNA, 27 bp, Homo sapiens
tttttccagtttattgtatttgcatag

SEQ ID NO: 63863 - DNA, 24 bp, Homo sapiens
accacatgatttttcttctctcca

SEQ ID NO: 63864 - DNA, 19 bp, Homo sapiens
tgttttcacctctgttgct

SEQ ID NO: 63865 - DNA, 24 bp, Homo sapiens
gaacataacatccttgggattacg

SEQ ID NO: 63866 - DNA, 20 bp, Homo sapiens
ataaaggacccattagaacc

SEQ ID NO: 63867 - DNA, 23 bp, Homo sapiens
gaaacaaaaatttgtgctatgca

SEQ ID NO: 63868 - DNA, 20 bp, Homo sapiens
ttgcttcttaaggaactgaa

SEQ ID NO: 63869 - DNA, 24 bp, Homo sapiens
cggtcagaaaaccaaaattataag

SEQ ID NO: 63870 - DNA, 16 bp, Homo sapiens
agacctggcctgtggc

SEQ ID NO: 63871 - DNA, 18 bp, Homo sapiens
tcctccttcaggggtagc

SEQ ID NO: 63872 - DNA, 17 bp, Homo sapiens
ggcaagagacgcagtcc

SEQ ID NO: 63873 - DNA, 16 bp, Homo sapiens
ggaaggtgccgtctcc

SEQ ID NO: 63874 - DNA, 21 bp, Homo sapiens
tcctacccctccagaaggttg

SEQ ID NO: 63875 - DNA, 19 bp, Homo sapiens
cactctgtctccgcagagg

SEQ ID NO: 63876 - DNA, 23 bp, Homo sapiens
cctgtaaagctataacaacaacc

SEQ ID NO: 63877 - DNA, 17 bp, Homo sapiens
gctgctggggcccggag

SEQ ID NO: 63878 - DNA, 18 bp, Homo sapiens
aacctccaaaagccaagg

SEQ ID NO: 63879 - DNA, 20 bp, Homo sapiens
agggaatgcgtggacaagtg

SEQ ID NO: 63880 - DNA, 24 bp, Homo sapiens
tcagttaacaaaatcagctgatta

SEQ ID NO: 63881 - DNA, 16 bp, Homo sapiens
tgaggcaggcactctg

SEQ ID NO: 63882 - DNA, 24 bp, Homo sapiens
tacctcaagttatttggaattttg

SEQ ID NO: 63883 - DNA, 21 bp, Homo sapiens
catgaaatggacgtggatagc

SEQ ID NO: 63884 - DNA, 23 bp, Homo sapiens
gggctgacgggtttcctcttcct

SEQ ID NO: 63885 - DNA, 16 bp, Homo sapiens
tgcccacacaggatgc

SEQ ID NO: 63886 - DNA, 19 bp, Homo sapiens
gagtgcatacagtgccacc

SEQ ID NO: 63887 - DNA, 16 bp, Homo sapiens
ggacagcgctgtcagc

SEQ ID NO: 63888 - DNA, 21 bp, Homo sapiens
tcacagaataactggttttct

SEQ ID NO: 63889 - DNA, 16 bp, Homo sapiens
gggcaggtcttgacgc

SEQ ID NO: 63890 - DNA, 24 bp, Homo sapiens
tcacacacactaaatattttaagt

SEQ ID NO: 63891 - DNA, 18 bp, Homo sapiens
gtggcacacatggccggc

SEQ ID NO: 63892 - DNA, 24 bp, Homo sapiens
acatgcatgaacatttttctccac

SEQ ID NO: 63893 - DNA, 23 bp, Homo sapiens
ggaaatgttctgttctccttcac

SEQ ID NO: 63894 - DNA, 18 bp, Homo sapiens
attgacggcccccactgc

SEQ ID NO: 63895 - DNA, 18 bp, Homo sapiens
cctcggcaatttgttgcc

SEQ ID NO: 63896 - DNA, 19 bp, Homo sapiens
ccctggtctggaagtacgc

SEQ ID NO: 63897 - DNA, 23 bp, Homo sapiens
aagcaagttgctactggcatggc

SEQ ID NO: 63898 - DNA, 19 bp, Homo sapiens
agtcagacagtgaagattt

SEQ ID NO: 63899 - DNA, 21 bp, Homo sapiens
tttggcattttcaatacactt

SEQ ID NO: 63900 - DNA, 19 bp, Homo sapiens
tgaagcaaagggagaaatt

SEQ ID NO: 63901 - DNA, 24 bp, Homo sapiens
agaggggatttagtcaagatttaa

SEQ ID NO: 63902 - DNA, 21 bp, Homo sapiens
atcacacatactaaagaaaat

SEQ ID NO: 63903 - DNA, 22 bp, Homo sapiens
tctattttttcccaggtcctaa

SEQ ID NO: 63904 - DNA, 21 bp, Homo sapiens
cacccagacccccaaattaag

SEQ ID NO: 63905 - DNA, 20 bp, Homo sapiens
ctgccatcattactttgatt

SEQ ID NO: 63906 - DNA, 23 bp, Homo sapiens
aactgttaggatcagattatagt

SEQ ID NO: 63907 - DNA, 22 bp, Homo sapiens
aagagaagggatccatcctaag

SEQ ID NO: 63908 - DNA, 23 bp, Homo sapiens
tgaaatgtacttgtccatctttc

SEQ ID NO: 63909 - DNA, 16 bp, Homo sapiens
atggaggtggctgcat

SEQ ID NO: 63910 - DNA, 24 bp, Homo sapiens
tgcctttttaaactatcatcctgt

SEQ ID NO: 63911 - DNA, 19 bp, Homo sapiens
gtgaaggcatgaggctcag

SEQ ID NO: 63912 - DNA, 20 bp, Homo sapiens
ccagctgctcaggagtcatg

SEQ ID NO: 63913 - DNA, 16 bp, Homo sapiens
ttgggaacctggcggc

SEQ ID NO: 63914 - DNA, 24 bp, Homo sapiens
tttcagctgggttggggtggatgc

SEQ ID NO: 63915 - DNA, 20 bp, Homo sapiens
ctactagttggggtgagagg

SEQ ID NO: 63916 - DNA, 16 bp, Homo sapiens
gcctcctcctgccact

SEQ ID NO: 63917 - DNA, 17 bp, Homo sapiens
ccttcaagacctggccc

SEQ ID NO: 63918 - DNA, 22 bp, Homo sapiens
tccagacacatagtgattttaa

SEQ ID NO: 63919 - DNA, 19 bp, Homo sapiens
ggtcattcttgacgaggtc

SEQ ID NO: 63920 - DNA, 24 bp, Homo sapiens
attaaaaatctccaaaatatatgc

SEQ ID NO: 63921 - DNA, 20 bp, Homo sapiens
acttgatcaggacagaggac

SEQ ID NO: 63922 - DNA, 24 bp, Homo sapiens
ctctttcacttcctacagatgcac

SEQ ID NO: 63923 - DNA, 18 bp, Homo sapiens
cagctgggcagtctctgc

SEQ ID NO: 63924 - DNA, 17 bp, Homo sapiens
cccaccatcccagtggc

SEQ ID NO: 63925 - DNA, 24 bp, Homo sapiens
agtgtctcactttccaagatcatt

SEQ ID NO: 63926 - DNA, 16 bp, Homo sapiens
ccttcgcatgaagagg

SEQ ID NO: 63927 - DNA, 19 bp, Homo sapiens
ccaaggccatggaatctgt

SEQ ID NO: 63928 - DNA, 19 bp, Homo sapiens
aggactggcactcacctcc

SEQ ID NO: 63929 - DNA, 18 bp, Homo sapiens
ctaagatcccgtccatcg

SEQ ID NO: 63930 - DNA, 16 bp, Homo sapiens
cgttctcggggctggc

SEQ ID NO: 63931 - DNA, 16 bp, Homo sapiens
ggccctggggatcggc

SEQ ID NO: 63932 - DNA, 21 bp, Homo sapiens
acattcagagattctttctgc

SEQ ID NO: 63933 - DNA, 17 bp, Homo sapiens
gaggctgctgcaggaga

SEQ ID NO: 63934 - DNA, 23 bp, Homo sapiens
gagcttctccactgggtgtaaga

SEQ ID NO: 63935 - DNA, 17 bp, Homo sapiens
gtgtcctggcacccaag

SEQ ID NO: 63936 - DNA, 24 bp, Homo sapiens
cagcactttgatctttttgaattc

SEQ ID NO: 63937 - DNA, 23 bp, Homo sapiens
tctggcactgctttccagcatgg

SEQ ID NO: 63938 - DNA, 16 bp, Homo sapiens
gcccagaggcctgtgc

SEQ ID NO: 63939 - DNA, 24 bp, Homo sapiens
cttgtcccccccagcttgtggagc

SEQ ID NO: 63940 - DNA, 21 bp, Homo sapiens
aatatacagcttgcaaggact

SEQ ID NO: 63941 - DNA, 23 bp, Homo sapiens
ggatcttgaaggaaactgaattc

SEQ ID NO: 63942 - DNA, 19 bp, Homo sapiens
gaaaaacactggagtttcc

SEQ ID NO: 63943 - DNA, 21 bp, Homo sapiens
agcaatatcagccttaggtgc

SEQ ID NO: 63944 - DNA, 23 bp, Homo sapiens
gatgttgcttctcttaattcctt

SEQ ID NO: 63945 - DNA, 19 bp, Homo sapiens
catcgctggtaacatccac

SEQ ID NO: 63946 - DNA, 18 bp, Homo sapiens
gacccccacacagcaaag

SEQ ID NO: 63947 - DNA, 24 bp, Homo sapiens
attgccagttaacgtcttccttct

SEQ ID NO: 63948 - DNA, 17 bp, Homo sapiens
ctagagcagagcagctg

SEQ ID NO: 63949 - DNA, 20 bp, Homo sapiens
attcccgtcgctatcaagga

SEQ ID NO: 63950 - DNA, 23 bp, Homo sapiens
cccactagagctagaaagggaaa

SEQ ID NO: 63951 - DNA, 17 bp, Homo sapiens
gctggccatcacgtagg

SEQ ID NO: 63952 - DNA, 24 bp, Homo sapiens
cttttgcaggcacagcttttcctc

SEQ ID NO: 63953 - DNA, 16 bp, Homo sapiens
cacggtggaggtgagg

SEQ ID NO: 63954 - DNA, 24 bp, Homo sapiens
atgcgtcttcacctggaaggggtc

SEQ ID NO: 63955 - DNA, 23 bp, Homo sapiens
gccaatattgtctttgtgttccc

SEQ ID NO: 63956 - DNA, 17 bp, Homo sapiens
tgcctctccctccctcc

SEQ ID NO: 63957 - DNA, 20 bp, Homo sapiens
cttccctgattacctttgcg

SEQ ID NO: 63958 - DNA, 16 bp, Homo sapiens
cctgctgggcatctgc

SEQ ID NO: 63959 - DNA, 24 bp, Homo sapiens
tcttgctatcccaggagcgcagac

SEQ ID NO: 63960 - DNA, 18 bp, Homo sapiens
ctgcctcctggactatgt

SEQ ID NO: 63961 - DNA, 17 bp, Homo sapiens
aggaatgtgtgtgtgct

SEQ ID NO: 63962 - DNA, 18 bp, Homo sapiens
actggtgtgtgcagatcg

SEQ ID NO: 63963 - DNA, 18 bp, Homo sapiens
ccaagtagttcatgccct

SEQ ID NO: 63964 - DNA, 24 bp, Homo sapiens
tttggatcagtagtcactaacgtt

SEQ ID NO: 63965 - DNA, 24 bp, Homo sapiens
gcggtgttttcaccagtacgttcc

SEQ ID NO: 63966 - DNA, 20 bp, Homo sapiens
gcctggcatgaacatgaccc

SEQ ID NO: 63967 - DNA, 20 bp, Homo sapiens
attctttctcttccgcaccc

SEQ ID NO: 63968 - DNA, 23 bp, Homo sapiens
tcacagcagggtcttctctgttt

SEQ ID NO: 63969 - DNA, 19 bp, Homo sapiens
aggaaaatgctggctgacc

SEQ ID NO: 63970 - DNA, 16 bp, Homo sapiens
acctggcagccaggaa

SEQ ID NO: 63971 - DNA, 18 bp, Homo sapiens
atcctcccctgcatgtgt

SEQ ID NO: 63972 - DNA, 24 bp, Homo sapiens
cacagattttgggctggccaaact

SEQ ID NO: 63973 - DNA, 16 bp, Homo sapiens
tggctggacccagctg

SEQ ID NO: 63974 - DNA, 23 bp, Homo sapiens
catccacttgataggcaccttgg

SEQ ID NO: 63975 - DNA, 17 bp, Homo sapiens
gggcctgggggacgggt

SEQ ID NO: 63976 - DNA, 18 bp, Homo sapiens
tagctccagacatcactc

SEQ ID NO: 63977 - DNA, 19 bp, Homo sapiens
aggtccagagtgagttaac

SEQ ID NO: 63978 - DNA, 20 bp, Homo sapiens
aacaataaaagccagcttgg

SEQ ID NO: 63979 - DNA, 19 bp, Homo sapiens
atctctcaccatcccaagg

SEQ ID NO: 63980 - DNA, 24 bp, Homo sapiens
acattatcattagtcattatctcg

SEQ ID NO: 63981 - DNA, 21 bp, Homo sapiens
acagaatctatacccaccaga

SEQ ID NO: 63982 - DNA, 23 bp, Homo sapiens
aggcttccagcattgaagcaaat

SEQ ID NO: 63983 - DNA, 17 bp, Homo sapiens
gatctcgctggcaggga

SEQ ID NO: 63984 - DNA, 24 bp, Homo sapiens
gaaacagtaaccagtaatgatgac

SEQ ID NO: 63985 - DNA, 21 bp, Homo sapiens
tgatcatgtagacatcgatgg

SEQ ID NO: 63986 - DNA, 24 bp, Homo sapiens
actgccttcttttcttgcttcatc

SEQ ID NO: 63987 - DNA, 22 bp, Homo sapiens
cagccaccaaggctcagctagg

SEQ ID NO: 63988 - DNA, 24 bp, Homo sapiens
tggatccaagccatatgacggaat

SEQ ID NO: 63989 - DNA, 22 bp, Homo sapiens
gtaatgtgatgacatttctcca

SEQ ID NO: 63990 - DNA, 20 bp, Homo sapiens
ctccctcagccacccatatg

SEQ ID NO: 63991 - DNA, 21 bp, Homo sapiens
ttaaaagaatgcttgaagggg

SEQ ID NO: 63992 - DNA, 18 bp, Homo sapiens
ttgggcgactatctgcgt

SEQ ID NO: 63993 - DNA, 22 bp, Homo sapiens
acaaagacttggttctttcatc

SEQ ID NO: 63994 - DNA, 23 bp, Homo sapiens
aatgacaaggtagcgctgggggt

SEQ ID NO: 63995 - DNA, 23 bp, Homo sapiens
agcaatgccatctttatcatttc

SEQ ID NO: 63996 - DNA, 19 bp, Homo sapiens
agatgctcattagagggac

SEQ ID NO: 63997 - DNA, 23 bp, Homo sapiens
cttccccaggctggatgatagac

SEQ ID NO: 63998 - DNA, 24 bp, Homo sapiens
ggtttaataatgcgatctgggaca

SEQ ID NO: 63999 - DNA, 23 bp, Homo sapiens
aattctccaaaatggcccgagac

SEQ ID NO: 64000 - DNA, 17 bp, Homo sapiens
ttagttcacgatgtggc

SEQ ID NO: 64001 - DNA, 24 bp, Homo sapiens
aggcagctataatttagagaacca

SEQ ID NO: 64002 - DNA, 18 bp, Homo sapiens
cttcatccatcagggcac

SEQ ID NO: 64003 - DNA, 17 bp, Homo sapiens
caatagacccctgctcc

SEQ ID NO: 64004 - DNA, 16 bp, Homo sapiens
gctgaagaagccctgc

SEQ ID NO: 64005 - DNA, 24 bp, Homo sapiens
ggccattctaatagcctcaaaatc

SEQ ID NO: 64006 - DNA, 23 bp, Homo sapiens
agagagagagagacagagatttc

SEQ ID NO: 64007 - DNA, 18 bp, Homo sapiens
tccaacttctaccgtgcc

SEQ ID NO: 64008 - DNA, 21 bp, Homo sapiens
tcactagatggttattttccc

SEQ ID NO: 64009 - DNA, 21 bp, Homo sapiens
atgccgacgagtacctcatcc

SEQ ID NO: 64010 - DNA, 24 bp, Homo sapiens
atttattttgattttgattttacc

SEQ ID NO: 64011 - DNA, 23 bp, Homo sapiens
aatcaaaactaaacctagttgct

SEQ ID NO: 64012 - DNA, 19 bp, Homo sapiens
ggtgttcatacatacccca

SEQ ID NO: 64013 - DNA, 21 bp, Homo sapiens
acaatataccctccatgaggc

SEQ ID NO: 64014 - DNA, 21 bp, Homo sapiens
aggttaaggcattttccatgt

SEQ ID NO: 64015 - DNA, 20 bp, Homo sapiens
gcattccatgggcaacttct

SEQ ID NO: 64016 - DNA, 17 bp, Homo sapiens
gggaaaaacccacacag

SEQ ID NO: 64017 - DNA, 23 bp, Homo sapiens
cgtggcttgcattgatagaaatg

SEQ ID NO: 64018 - DNA, 17 bp, Homo sapiens
tagcaccagcacccacc

SEQ ID NO: 64019 - DNA, 17 bp, Homo sapiens
cgcctgtggggtctgag

SEQ ID NO: 64020 - DNA, 19 bp, Homo sapiens
atctcaaggagatctcggg

SEQ ID NO: 64021 - DNA, 19 bp, Homo sapiens
tttccagacaagccactca

SEQ ID NO: 64022 - DNA, 23 bp, Homo sapiens
gaccggagtaaccttccctcatt

SEQ ID NO: 64023 - DNA, 17 bp, Homo sapiens
ggacactggagactggc

SEQ ID NO: 64024 - DNA, 24 bp, Homo sapiens
agacagcttcttgcagcgatacag

SEQ ID NO: 64025 - DNA, 22 bp, Homo sapiens
cttcactgtgtctgcaaatctg

SEQ ID NO: 64026 - DNA, 19 bp, Homo sapiens
gacaccttcctcccagtgc

SEQ ID NO: 64027 - DNA, 22 bp, Homo sapiens
cagacacaacaaagagcttgtg

SEQ ID NO: 64028 - DNA, 17 bp, Homo sapiens
acccactcagcagcagc

SEQ ID NO: 64029 - DNA, 24 bp, Homo sapiens
gatttgcttcataagctagaaatt

SEQ ID NO: 64030 - DNA, 21 bp, Homo sapiens
catctccagagggggaaacag

SEQ ID NO: 64031 - DNA, 18 bp, Homo sapiens
tttgggaacggactggtt

SEQ ID NO: 64032 - DNA, 16 bp, Homo sapiens
ctcccgaggctcctgc

SEQ ID NO: 64033 - DNA, 17 bp, Homo sapiens
ggcgcggggttcagagg

SEQ ID NO: 64034 - DNA, 24 bp, Homo sapiens
acagggttcagaacccagggatcc

SEQ ID NO: 64035 - DNA, 20 bp, Homo sapiens
tgttgagatactcggggttg

SEQ ID NO: 64036 - DNA, 24 bp, Homo sapiens
gatttctttccactttcagaatac

SEQ ID NO: 64037 - DNA, 17 bp, Homo sapiens
ttctgggcccagtgggc

SEQ ID NO: 64038 - DNA, 23 bp, Homo sapiens
atcctgtctatcacaatcagcct

SEQ ID NO: 64039 - DNA, 24 bp, Homo sapiens
cttggcttccttgggaaagaagtc

SEQ ID NO: 64040 - DNA, 18 bp, Homo sapiens
ggacccccacagcactgc

SEQ ID NO: 64041 - DNA, 24 bp, Homo sapiens
gcgacccttaggtattctgcattt

SEQ ID NO: 64042 - DNA, 21 bp, Homo sapiens
gtcaacagcacattcgacagc

SEQ ID NO: 64043 - DNA, 23 bp, Homo sapiens
ttttagggctcatactatcctcc

SEQ ID NO: 64044 - DNA, 24 bp, Homo sapiens
attagcctggacaaccctgactac

SEQ ID NO: 64045 - DNA, 18 bp, Homo sapiens
gctgttgggatggaggac

SEQ ID NO: 64046 - DNA, 24 bp, Homo sapiens
gcatctttaagggctccacagctg

SEQ ID NO: 64047 - DNA, 20 bp, Homo sapiens
gctagtcggtgtaaacgttg

SEQ ID NO: 64048 - DNA, 24 bp, Homo sapiens
agtgaatttattggagcatgacca

SEQ ID NO: 64049 - DNA, 24 bp, Homo sapiens
ctagagtttttgttttccttctat

SEQ ID NO: 64050 - DNA, 16 bp, Homo sapiens
cattgctcctctgcac

SEQ ID NO: 64051 - DNA, 22 bp, Homo sapiens
tggtataggtctttcagttttc

SEQ ID NO: 64052 - DNA, 23 bp, Homo sapiens
gtgaagttgggaagctgatactt

SEQ ID NO: 64053 - DNA, 22 bp, Homo sapiens
cctgttttggcagataaacctc

SEQ ID NO: 64054 - DNA, 24 bp, Homo sapiens
ttagtggcaccaaggaaaatgtga

SEQ ID NO: 64055 - DNA, 18 bp, Homo sapiens
tcctgtttaccttggtgc

SEQ ID NO: 64056 - DNA, 18 bp, Homo sapiens
gtactcagcaaccttctg

SEQ ID NO: 64057 - DNA, 22 bp, Homo sapiens
aagtccgagatgaatgtgaata

SEQ ID NO: 64058 - DNA, 20 bp, Homo sapiens
ctttgctgctgcagtcctga

SEQ ID NO: 64059 - DNA, 23 bp, Homo sapiens
cccatccagaatgtcattctaca

SEQ ID NO: 64060 - DNA, 17 bp, Homo sapiens
tgtcgacaactagagcc

SEQ ID NO: 64061 - DNA, 22 bp, Homo sapiens
tttaaatgaggaagaccttcag

SEQ ID NO: 64062 - DNA, 16 bp, Homo sapiens
atgtcgctggcaggtc

SEQ ID NO: 64063 - DNA, 23 bp, Homo sapiens
ccagattgtttcccatgtcagga

SEQ ID NO: 64064 - DNA, 17 bp, Homo sapiens
ctgtggggagaatatgc

SEQ ID NO: 64065 - DNA, 23 bp, Homo sapiens
gtttggaaagataacatcaacat

SEQ ID NO: 64066 - DNA, 19 bp, Homo sapiens
aaaggactttggctcccag

SEQ ID NO: 64067 - DNA, 19 bp, Homo sapiens
gcagcgtcaacagagggac

SEQ ID NO: 64068 - DNA, 23 bp, Homo sapiens
tgggaaataagaagaatttatgg

SEQ ID NO: 64069 - DNA, 22 bp, Homo sapiens
ctgctgacatacagtcggaggt

SEQ ID NO: 64070 - DNA, 21 bp, Homo sapiens
ccatctttcgtttcctttagc

SEQ ID NO: 64071 - DNA, 22 bp, Homo sapiens
agtgtcctgactgtgtggtgag

SEQ ID NO: 64072 - DNA, 20 bp, Homo sapiens
aagaatctctgaactcaggt

SEQ ID NO: 64073 - DNA, 22 bp, Homo sapiens
tcatcaacttctttgtaggcaa

SEQ ID NO: 64074 - DNA, 19 bp, Homo sapiens
cctttggaccgtcaagaag

SEQ ID NO: 64075 - DNA, 21 bp, Homo sapiens
ttcgatatcagtgagaaggct

SEQ ID NO: 64076 - DNA, 22 bp, Homo sapiens
tccagagtttatggaacagaac

SEQ ID NO: 64077 - DNA, 23 bp, Homo sapiens
gtcctacattgatgttttacctg

SEQ ID NO: 64078 - DNA, 21 bp, Homo sapiens
ctcttttttctcttttctgtg

SEQ ID NO: 64079 - DNA, 24 bp, Homo sapiens
ccatgcctttgaaagcaacaattt

SEQ ID NO: 64080 - DNA, 16 bp, Homo sapiens
gctgacatacgcagcc

SEQ ID NO: 64081 - DNA, 23 bp, Homo sapiens
gctcagacttttcacacaagaat

SEQ ID NO: 64082 - DNA, 19 bp, Homo sapiens
caccccgaaaagaatgtca

SEQ ID NO: 64083 - DNA, 23 bp, Homo sapiens
tacatggaaatgcctctggagtg

SEQ ID NO: 64084 - DNA, 19 bp, Homo sapiens
tgcacacatggcagatcga

SEQ ID NO: 64085 - DNA, 24 bp, Homo sapiens
ggaagtgtttaatatacttcaggc

SEQ ID NO: 64086 - DNA, 21 bp, Homo sapiens
acatctcacattgtttttgtt

SEQ ID NO: 64087 - DNA, 23 bp, Homo sapiens
agacaaataggagccagcctgaa

SEQ ID NO: 64088 - DNA, 22 bp, Homo sapiens
aactgatgtgacttaccctatt

SEQ ID NO: 64089 - DNA, 19 bp, Homo sapiens
ctgccgaaccaatggatcg

SEQ ID NO: 64090 - DNA, 23 bp, Homo sapiens
cctggatattctttttgagactg

SEQ ID NO: 64091 - DNA, 20 bp, Homo sapiens
tcttcaacaagatcgtcaac

SEQ ID NO: 64092 - DNA, 23 bp, Homo sapiens
tggaaaaaatctgcaactatttt

SEQ ID NO: 64093 - DNA, 20 bp, Homo sapiens
cccaatcatgagcactgctt

SEQ ID NO: 64094 - DNA, 24 bp, Homo sapiens
ccctagaaatatttatgcctatct

SEQ ID NO: 64095 - DNA, 22 bp, Homo sapiens
tgcaaagctgtggtaaactctg

SEQ ID NO: 64096 - DNA, 20 bp, Homo sapiens
tcctccaggctctgaaaata

SEQ ID NO: 64097 - DNA, 23 bp, Homo sapiens
aggtggatatagatgttaagagg

SEQ ID NO: 64098 - DNA, 23 bp, Homo sapiens
ggattcacattaactctatgacc

SEQ ID NO: 64099 - DNA, 17 bp, Homo sapiens
gcgaccctctgatgtcc

SEQ ID NO: 64100 - DNA, 17 bp, Homo sapiens
gcgccgtgatgaatatc

SEQ ID NO: 64101 - DNA, 23 bp, Homo sapiens
caaattaattgcacaataccaga

SEQ ID NO: 64102 - DNA, 19 bp, Homo sapiens
ttcatgggtcaattcagcg

SEQ ID NO: 64103 - DNA, 24 bp, Homo sapiens
gttccagtttctactatgatttgg

SEQ ID NO: 64104 - DNA, 23 bp, Homo sapiens
agacctcaccatagctaatcttg

SEQ ID NO: 64105 - DNA, 23 bp, Homo sapiens
accacacatttaacagaaagtag

SEQ ID NO: 64106 - DNA, 19 bp, Homo sapiens
tggtcctgatcgagaaacc

SEQ ID NO: 64107 - DNA, 21 bp, Homo sapiens
tgaggggaactgttgggtctt

SEQ ID NO: 64108 - DNA, 19 bp, Homo sapiens
caatcacttctggagacac

SEQ ID NO: 64109 - DNA, 23 bp, Homo sapiens
ccattatcatctacattttccac

SEQ ID NO: 64110 - DNA, 20 bp, Homo sapiens
cagcttaccttcttcccagt

SEQ ID NO: 64111 - DNA, 23 bp, Homo sapiens
cttttttgctgtttaggttgtgg

SEQ ID NO: 64112 - DNA, 21 bp, Homo sapiens
agtgacactggttgtaaatat

SEQ ID NO: 64113 - DNA, 19 bp, Homo sapiens
cctggactcccatccagtg

SEQ ID NO: 64114 - DNA, 19 bp, Homo sapiens
agaacttaatggaggaggg

SEQ ID NO: 64115 - DNA, 19 bp, Homo sapiens
tggctacacactggttatc

SEQ ID NO: 64116 - DNA, 16 bp, Homo sapiens
gcagcccaagccattc

SEQ ID NO: 64117 - DNA, 24 bp, Homo sapiens
cacacatagttgctaagtctagaa

SEQ ID NO: 64118 - DNA, 20 bp, Homo sapiens
accagccacactgaacaaag

SEQ ID NO: 64119 - DNA, 24 bp, Homo sapiens
ttactttataattaattaacaaac

SEQ ID NO: 64120 - DNA, 22 bp, Homo sapiens
acagatctgttgagtccatgtc

SEQ ID NO: 64121 - DNA, 21 bp, Homo sapiens
ttcacagatcacgaagatccc

SEQ ID NO: 64122 - DNA, 21 bp, Homo sapiens
aaaaacaccaaacaaaaacat

SEQ ID NO: 64123 - DNA, 18 bp, Homo sapiens
atgcctctctgccccacc

SEQ ID NO: 64124 - DNA, 24 bp, Homo sapiens
agtgggatttgtatctaaaaaaac

SEQ ID NO: 64125 - DNA, 15 bp, Homo sapiens
ggaatgcctgagcgg

SEQ ID NO: 64126 - DNA, 22 bp, Homo sapiens
tgctttagctgatgactcacag

SEQ ID NO: 64127 - DNA, 24 bp, Homo sapiens
ctttagtgaaaattaaatttttac

SEQ ID NO: 64128 - DNA, 17 bp, Homo sapiens
tccaaagtcccagccac

SEQ ID NO: 64129 - DNA, 18 bp, Homo sapiens
tacattttgtttgttcgt

SEQ ID NO: 64130 - DNA, 18 bp, Homo sapiens
aggtgcagctctcatttc

SEQ ID NO: 64131 - DNA, 21 bp, Homo sapiens
tttaaaagttctatgttgtcc

SEQ ID NO: 64132 - DNA, 20 bp, Homo sapiens
ccccagcaaagcattttaag

SEQ ID NO: 64133 - DNA, 20 bp, Homo sapiens
acaaggctgaccatatgtgg

SEQ ID NO: 64134 - DNA, 20 bp, Homo sapiens
agatgagcttcttgagcaat

SEQ ID NO: 64135 - DNA, 23 bp, Homo sapiens
aaagaaaactagagttctccttg

SEQ ID NO: 64136 - DNA, 18 bp, Homo sapiens
cagaacagacccacaagg

SEQ ID NO: 64137 - DNA, 22 bp, Homo sapiens
atataatttttggccttaatgc

SEQ ID NO: 64138 - DNA, 22 bp, Homo sapiens
ccgtggccatttgaaataatta

SEQ ID NO: 64139 - DNA, 24 bp, Homo sapiens
ccatttagagttaatgtcacttcc

SEQ ID NO: 64140 - DNA, 22 bp, Homo sapiens
acatgataggatagaatcttcc

SEQ ID NO: 64141 - DNA, 24 bp, Homo sapiens
atttgtcatgtattaaactttggg

SEQ ID NO: 64142 - DNA, 23 bp, Homo sapiens
gggagataaaaacaaaacaaagt

SEQ ID NO: 64143 - DNA, 24 bp, Homo sapiens
gccatgaataagcatttcaatatg

SEQ ID NO: 64144 - DNA, 18 bp, Homo sapiens
ccataggaccgtatttcg

SEQ ID NO: 64145 - DNA, 20 bp, Homo sapiens
ttctcctatgtggtaaggaa

SEQ ID NO: 64146 - DNA, 18 bp, Homo sapiens
tgtgtctagaattcccac

SEQ ID NO: 64147 - DNA, 28 bp, Homo sapiens
cttaatctatttaaattataagatgaac

SEQ ID NO: 64148 - DNA, 24 bp, Homo sapiens
caaattgacagatgcaacaaaaaa

SEQ ID NO: 64149 - DNA, 19 bp, Homo sapiens
acaagtatttcgccgaaat

SEQ ID NO: 64150 - DNA, 19 bp, Homo sapiens
acacacacacaaaacaatc

SEQ ID NO: 64151 - DNA, 25 bp, Homo sapiens
ttaactggaaattacctaaacagtg

SEQ ID NO: 64152 - DNA, 20 bp, Homo sapiens
gaaggaggaagttttgtcag

SEQ ID NO: 64153 - DNA, 23 bp, Homo sapiens
tggggtataacattcaagaatac

SEQ ID NO: 64154 - DNA, 22 bp, Homo sapiens
tacactagaaaaggcttccact

SEQ ID NO: 64155 - DNA, 23 bp, Homo sapiens
tcggttggctaagtcaattttca

SEQ ID NO: 64156 - DNA, 21 bp, Homo sapiens
ttgatttgtggatataattct

SEQ ID NO: 64157 - DNA, 23 bp, Homo sapiens
ttggttggatgaatttcatagac

SEQ ID NO: 64158 - DNA, 20 bp, Homo sapiens
ttttgttcagtgtgtcaaac

SEQ ID NO: 64159 - DNA, 23 bp, Homo sapiens
tcatccttgtattcattgttttc

SEQ ID NO: 64160 - DNA, 20 bp, Homo sapiens
ttcaactgagtttgctgtta

SEQ ID NO: 64161 - DNA, 17 bp, Homo sapiens
acagcatcaaagccaga

SEQ ID NO: 64162 - DNA, 21 bp, Homo sapiens
tcagttaccgtgaagatccca

SEQ ID NO: 64163 - DNA, 22 bp, Homo sapiens
actcagaacctgaatatagttt

SEQ ID NO: 64164 - DNA, 21 bp, Homo sapiens
aatgttgagaggttctttcca

SEQ ID NO: 64165 - DNA, 24 bp, Homo sapiens
tgcattttaaaaatattttcaagt

SEQ ID NO: 64166 - DNA, 20 bp, Homo sapiens
ggtttttcccaacacctgtt

SEQ ID NO: 64167 - DNA, 21 bp, Homo sapiens
acttccatttgatgttgactg

SEQ ID NO: 64168 - DNA, 18 bp, Homo sapiens
gttccttcctgcttcatg

SEQ ID NO: 64169 - DNA, 23 bp, Homo sapiens
aatccctctcttacagtacttgg

SEQ ID NO: 64170 - DNA, 22 bp, Homo sapiens
tggttagaggcaaagatgcaga

SEQ ID NO: 64171 - DNA, 22 bp, Homo sapiens
ctttgccagtggtgggagcaca

SEQ ID NO: 64172 - DNA, 22 bp, Homo sapiens
gcaaggaaattaactagcaaac

SEQ ID NO: 64173 - DNA, 22 bp, Homo sapiens
cccgagaatggtcataaatgtg

SEQ ID NO: 64174 - DNA, 19 bp, Homo sapiens
gcgatgttgacatgcctag

SEQ ID NO: 64175 - DNA, 23 bp, Homo sapiens
gtgtagtctaacattaggaagtt

SEQ ID NO: 64176 - DNA, 18 bp, Homo sapiens
ggggagttgcagattcag

SEQ ID NO: 64177 - DNA, 22 bp, Homo sapiens
caattgattggggtggtaaatt

SEQ ID NO: 64178 - DNA, 23 bp, Homo sapiens
atgagatcaaagtatttggaaag

SEQ ID NO: 64179 - DNA, 22 bp, Homo sapiens
agtggataattgtgtctttctc

SEQ ID NO: 64180 - DNA, 19 bp, Homo sapiens
ccattgagatcatcactgg

SEQ ID NO: 64181 - DNA, 20 bp, Homo sapiens
gttgtaccactccttccctg

SEQ ID NO: 64182 - DNA, 22 bp, Homo sapiens
gctgatgatttaagacagtgtt

SEQ ID NO: 64183 - DNA, 21 bp, Homo sapiens
ttcatgttagatgggatcctt

SEQ ID NO: 64184 - DNA, 20 bp, Homo sapiens
atacaatggccaagtacaac

SEQ ID NO: 64185 - DNA, 21 bp, Homo sapiens
ttaagccttttgaaaagccag

SEQ ID NO: 64186 - DNA, 23 bp, Homo sapiens
tcttttagttttatgccaaaaag

SEQ ID NO: 64187 - DNA, 24 bp, Homo sapiens
cagggtcaatatcatttccctgaa

SEQ ID NO: 64188 - DNA, 23 bp, Homo sapiens
tcccaattcccatgaaaattagt

SEQ ID NO: 64189 - DNA, 23 bp, Homo sapiens
gtaagtgtatattctcacagctc

SEQ ID NO: 64190 - DNA, 23 bp, Homo sapiens
gcagtatatttatattcctttgc

SEQ ID NO: 64191 - DNA, 21 bp, Homo sapiens
gctgttcaatttcagcaggtc

SEQ ID NO: 64192 - DNA, 24 bp, Homo sapiens
acaacctttttttttttttttcct

SEQ ID NO: 64193 - DNA, 20 bp, Homo sapiens
acactggcttccttatttac

SEQ ID NO: 64194 - DNA, 22 bp, Homo sapiens
aaggtgaagtgttaaaagttgg

SEQ ID NO: 64195 - DNA, 21 bp, Homo sapiens
aaaacccacacataaatgagc

SEQ ID NO: 64196 - DNA, 23 bp, Homo sapiens
ccgttttatgcacggtccccaat

SEQ ID NO: 64197 - DNA, 21 bp, Homo sapiens
ggcaaaaagctcactatttct

SEQ ID NO: 64198 - DNA, 24 bp, Homo sapiens
ggtgggattcctgcattcctctca

SEQ ID NO: 64199 - DNA, 19 bp, Homo sapiens
cagtgtgggtagaaagaac

SEQ ID NO: 64200 - DNA, 23 bp, Homo sapiens
agcataattgaggaatctcttat

SEQ ID NO: 64201 - DNA, 20 bp, Homo sapiens
tgtgaaattctgatctggtt

SEQ ID NO: 64202 - DNA, 21 bp, Homo sapiens
accagttggtatttgggaccc

SEQ ID NO: 64203 - DNA, 20 bp, Homo sapiens
cacaggaaaaacccaagtag

SEQ ID NO: 64204 - DNA, 25 bp, Homo sapiens
gctaaatgctgacttttctttattt

SEQ ID NO: 64205 - DNA, 22 bp, Homo sapiens
acttctaaaaatgaacagtaac

SEQ ID NO: 64206 - DNA, 23 bp, Homo sapiens
cgtccttggaaaagtaatagttc

SEQ ID NO: 64207 - DNA, 19 bp, Homo sapiens
gacagcacacaagaatcga

SEQ ID NO: 64208 - DNA, 19 bp, Homo sapiens
tcaacagcactgttattac

SEQ ID NO: 64209 - DNA, 17 bp, Homo sapiens
ccccaggagactttgac

SEQ ID NO: 64210 - DNA, 22 bp, Homo sapiens
gcgaactaattcactgcccaga

SEQ ID NO: 64211 - DNA, 23 bp, Homo sapiens
agtcattacagtttaagattgtc

SEQ ID NO: 64212 - DNA, 16 bp, Homo sapiens
cgggcacttacaagcc

SEQ ID NO: 64213 - DNA, 22 bp, Homo sapiens
cccatgagttctgggcactggg

SEQ ID NO: 64214 - DNA, 19 bp, Homo sapiens
ggaaaagtagctcggtagt

SEQ ID NO: 64215 - DNA, 25 bp, Homo sapiens
gctctttctttctctctgttttaag

SEQ ID NO: 64216 - DNA, 19 bp, Homo sapiens
acccactgaggtatatgta

SEQ ID NO: 64217 - DNA, 21 bp, Homo sapiens
gtacacactcctcatttggat

SEQ ID NO: 64218 - DNA, 23 bp, Homo sapiens
gaggtaaatacttcctttaggtt

SEQ ID NO: 64219 - DNA, 24 bp, Homo sapiens
atggtttcaaatgaatctgtagac

SEQ ID NO: 64220 - DNA, 23 bp, Homo sapiens
gggttcttttaaaattaagagcc

SEQ ID NO: 64221 - DNA, 24 bp, Homo sapiens
ctgagatgaattaggaaactgatc

SEQ ID NO: 64222 - DNA, 24 bp, Homo sapiens
aatgaaatgcttgtatatataact

SEQ ID NO: 64223 - DNA, 17 bp, Homo sapiens
tgggggacatgtctgtc

SEQ ID NO: 64224 - DNA, 20 bp, Homo sapiens
tccattataaaagctcttcc

SEQ ID NO: 64225 - DNA, 22 bp, Homo sapiens
ggtcaatgtggacagtattttg

SEQ ID NO: 64226 - DNA, 23 bp, Homo sapiens
ttaataattttccttcatcttac

SEQ ID NO: 64227 - DNA, 22 bp, Homo sapiens
ctactgggcccaatcactacat

SEQ ID NO: 64228 - DNA, 21 bp, Homo sapiens
tgccgacaagtgcagtatcct

SEQ ID NO: 64229 - DNA, 22 bp, Homo sapiens
ttaacaaaaagctgagtggaaa

SEQ ID NO: 64230 - DNA, 20 bp, Homo sapiens
tccagtccattactgcaaaa

SEQ ID NO: 64231 - DNA, 22 bp, Homo sapiens
tctaagttcctaatctgcaaag

SEQ ID NO: 64232 - DNA, 17 bp, Homo sapiens
tggtccaggcagtgcag

SEQ ID NO: 64233 - DNA, 23 bp, Homo sapiens
tctatagaacagaaatcaagtac

SEQ ID NO: 64234 - DNA, 18 bp, Homo sapiens
acacaaccaaaatgccct

SEQ ID NO: 64235 - DNA, 23 bp, Homo sapiens
tgttaaaagtattttttaaatgt

SEQ ID NO: 64236 - DNA, 20 bp, Homo sapiens
tcaaggatttcacagcacag

SEQ ID NO: 64237 - DNA, 20 bp, Homo sapiens
tgaagctcataaagggtttg

SEQ ID NO: 64238 - DNA, 23 bp, Homo sapiens
agctatttattaggttgcaaacc

SEQ ID NO: 64239 - DNA, 21 bp, Homo sapiens
agttctttcttttgcacaggg

SEQ ID NO: 64240 - DNA, 20 bp, Homo sapiens
tcagtggtagctgatttttc

SEQ ID NO: 64241 - DNA, 21 bp, Homo sapiens
tgatggcaagaaaattcactg

SEQ ID NO: 64242 - DNA, 20 bp, Homo sapiens
tcggtcagaaattgggaaac

SEQ ID NO: 64243 - DNA, 17 bp, Homo sapiens
ccctcaggacaagatgc

SEQ ID NO: 64244 - DNA, 18 bp, Homo sapiens
ttcccaggagcgagagga

SEQ ID NO: 64245 - DNA, 24 bp, Homo sapiens
aaatttgacaaaagtattcactgt

SEQ ID NO: 64246 - DNA, 21 bp, Homo sapiens
tttcgaagatctccatgtttc

SEQ ID NO: 64247 - DNA, 22 bp, Homo sapiens
tctcaggaatcactgacatagg

SEQ ID NO: 64248 - DNA, 19 bp, Homo sapiens
ttgccagttagtaagcttg

SEQ ID NO: 64249 - DNA, 24 bp, Homo sapiens
tgaaagattttagtcatcccaatg

SEQ ID NO: 64250 - DNA, 23 bp, Homo sapiens
gctactagctttttaaagactca

SEQ ID NO: 64251 - DNA, 19 bp, Homo sapiens
cgctggtggtcctaccata

SEQ ID NO: 64252 - DNA, 21 bp, Homo sapiens
ggatagaagactttgaggtgc

SEQ ID NO: 64253 - DNA, 20 bp, Homo sapiens
accaaagccaataagatctt

SEQ ID NO: 64254 - DNA, 21 bp, Homo sapiens
gagccattaagaccaaactaa

SEQ ID NO: 64255 - DNA, 19 bp, Homo sapiens
caagtctctgtggacaaac

SEQ ID NO: 64256 - DNA, 20 bp, Homo sapiens
aaggtcaaaattagaacagt

SEQ ID NO: 64257 - DNA, 23 bp, Homo sapiens
attcctccttgtcacttaatttg

SEQ ID NO: 64258 - DNA, 24 bp, Homo sapiens
tttgactgcagaatccaactgtaa

SEQ ID NO: 64259 - DNA, 24 bp, Homo sapiens
ggacttttgcataagaagagaaaa

SEQ ID NO: 64260 - DNA, 19 bp, Homo sapiens
cttgcaagcaaaaagtttg

SEQ ID NO: 64261 - DNA, 16 bp, Homo sapiens
gtcccacccacatccc

SEQ ID NO: 64262 - DNA, 23 bp, Homo sapiens
accttgactgtgaatttttcatc

SEQ ID NO: 64263 - DNA, 22 bp, Homo sapiens
atagaggccagatgaaatactt

SEQ ID NO: 64264 - DNA, 24 bp, Homo sapiens
cctgttttgttgtgtacactatag

SEQ ID NO: 64265 - DNA, 24 bp, Homo sapiens
ttgtttaatctgtagatattcagc

SEQ ID NO: 64266 - DNA, 24 bp, Homo sapiens
gtggtaaacttttgagtttgcaga

SEQ ID NO: 64267 - DNA, 22 bp, Homo sapiens
ttttgtcctttctgtaggctgg

SEQ ID NO: 64268 - DNA, 22 bp, Homo sapiens
agtaaaagaggagaaactcaga

SEQ ID NO: 64269 - DNA, 22 bp, Homo sapiens
gccagagacatgtatgataaag

SEQ ID NO: 64270 - DNA, 24 bp, Homo sapiens
tggtggtgttgaatttttttaaaa

SEQ ID NO: 64271 - DNA, 21 bp, Homo sapiens
gccagtgaagtggatggcttt

SEQ ID NO: 64272 - DNA, 20 bp, Homo sapiens
acaatgtgtacgtatcagac

SEQ ID NO: 64273 - DNA, 18 bp, Homo sapiens
gcacgccaaaggaccact

SEQ ID NO: 64274 - DNA, 24 bp, Homo sapiens
attgcctttaagaaaattgttgcc

SEQ ID NO: 64275 - DNA, 27 bp, Homo sapiens
gtaaacagttatatcaaaggtgtttac

SEQ ID NO: 64276 - DNA, 23 bp, Homo sapiens
tttagttaccaagacctactgat

SEQ ID NO: 64277 - DNA, 19 bp, Homo sapiens
aggggtctgggcagtattc

SEQ ID NO: 64278 - DNA, 22 bp, Homo sapiens
tctgtcctgtttcttgttttac

SEQ ID NO: 64279 - DNA, 24 bp, Homo sapiens
taagagaccctttgaaggcaggca

SEQ ID NO: 64280 - DNA, 21 bp, Homo sapiens
gaggagccccaccttatcctg

SEQ ID NO: 64281 - DNA, 20 bp, Homo sapiens
agggtgccagcattttagca

SEQ ID NO: 64282 - DNA, 24 bp, Homo sapiens
caagggagaagactcctacaaccc

SEQ ID NO: 64283 - DNA, 16 bp, Homo sapiens
gctgatatccgggaca

SEQ ID NO: 64284 - DNA, 23 bp, Homo sapiens
cttacgttctttacttttacaga

SEQ ID NO: 64285 - DNA, 22 bp, Homo sapiens
gcgacacattttacgttcacat

SEQ ID NO: 64286 - DNA, 24 bp, Homo sapiens
ttctttttggaacagatatgaagt

SEQ ID NO: 64287 - DNA, 17 bp, Homo sapiens
ccacctcatcatcagcg

SEQ ID NO: 64288 - DNA, 22 bp, Homo sapiens
cgcccatccttttctgaactgg

SEQ ID NO: 64289 - DNA, 21 bp, Homo sapiens
aagtgtggactgttgctttga

SEQ ID NO: 64290 - DNA, 21 bp, Homo sapiens
agcactatgtccatgtgaacg

SEQ ID NO: 64291 - DNA, 20 bp, Homo sapiens
caaagaatatcgatggcctt

SEQ ID NO: 64292 - DNA, 21 bp, Homo sapiens
gttgtcatcagaagataacgc

SEQ ID NO: 64293 - DNA, 24 bp, Homo sapiens
gaaattccttagaatccagtaatt

SEQ ID NO: 64294 - DNA, 23 bp, Homo sapiens
agccaagagatttaaggtaagga

SEQ ID NO: 64295 - DNA, 22 bp, Homo sapiens
tgtcacaaatggaacagataat

SEQ ID NO: 64296 - DNA, 21 bp, Homo sapiens
ttgctgatacaaaactcaggt

SEQ ID NO: 64297 - DNA, 23 bp, Homo sapiens
cgctttttttgtttttgtttttg

SEQ ID NO: 64298 - DNA, 23 bp, Homo sapiens
ttatgtatgctaaattggatggc

SEQ ID NO: 64299 - DNA, 22 bp, Homo sapiens
tggtaagcttaggtacctattt

SEQ ID NO: 64300 - DNA, 27 bp, Homo sapiens
aaatctgatagcaaatttgattatctg

SEQ ID NO: 64301 - DNA, 20 bp, Homo sapiens
tggaagggacgtttacttac

SEQ ID NO: 64302 - DNA, 19 bp, Homo sapiens
ccaaccacggatatgcatc

SEQ ID NO: 64303 - DNA, 24 bp, Homo sapiens
cctccaggaataaaaattggtagg

SEQ ID NO: 64304 - DNA, 24 bp, Homo sapiens
ctcttcatcaaaggttgatcatag

SEQ ID NO: 64305 - DNA, 22 bp, Homo sapiens
agttctgatggatgatgacctt

SEQ ID NO: 64306 - DNA, 23 bp, Homo sapiens
ctttcagacttctaaaagtccac

SEQ ID NO: 64307 - DNA, 25 bp, Homo sapiens
ttcctttttttttctctcatgaaac

SEQ ID NO: 64308 - DNA, 25 bp, Homo sapiens
gtgtgggattgttaaaatattcttg

SEQ ID NO: 64309 - DNA, 23 bp, Homo sapiens
ttggacaatattgaaatatgtgt

SEQ ID NO: 64310 - DNA, 22 bp, Homo sapiens
tgatcatatccacacttttctg

SEQ ID NO: 64311 - DNA, 24 bp, Homo sapiens
accagcattctagtttatgaattc

SEQ ID NO: 64312 - DNA, 22 bp, Homo sapiens
ctggaatctggaagaatttgtc

SEQ ID NO: 64313 - DNA, 21 bp, Homo sapiens
aagcctatctcatggattctg

SEQ ID NO: 64314 - DNA, 22 bp, Homo sapiens
tgattcaagatttatgtgctca

SEQ ID NO: 64315 - DNA, 21 bp, Homo sapiens
acccctccaatatgtgtttgt

SEQ ID NO: 64316 - DNA, 23 bp, Homo sapiens
ttttaggaacaaagcaggtatga

SEQ ID NO: 64317 - DNA, 22 bp, Homo sapiens
aatagcagactcatatggtttg

SEQ ID NO: 64318 - DNA, 24 bp, Homo sapiens
aaatatctttattacctctgatac

SEQ ID NO: 64319 - DNA, 22 bp, Homo sapiens
aataaaatttacaggtctatac

SEQ ID NO: 64320 - DNA, 21 bp, Homo sapiens
tccatcatcaagtgtaaaggt

SEQ ID NO: 64321 - DNA, 21 bp, Homo sapiens
tgacactatctacctggagat

SEQ ID NO: 64322 - DNA, 21 bp, Homo sapiens
ctggttgataaaacatcgtgg

SEQ ID NO: 64323 - DNA, 22 bp, Homo sapiens
atcttacagaggaaggaataag

SEQ ID NO: 64324 - DNA, 20 bp, Homo sapiens
ttcagatgtaaacagtgttc

SEQ ID NO: 64325 - DNA, 22 bp, Homo sapiens
ataagtaggtgaaataaccttg

SEQ ID NO: 64326 - DNA, 24 bp, Homo sapiens
agcagtaaaaagttataacaaaca

SEQ ID NO: 64327 - DNA, 18 bp, Homo sapiens
ttctgccacagaagaagg

SEQ ID NO: 64328 - DNA, 20 bp, Homo sapiens
gggatgcagtattcttctgt

SEQ ID NO: 64329 - DNA, 20 bp, Homo sapiens
tggatctcaaactagaacac

SEQ ID NO: 64330 - DNA, 21 bp, Homo sapiens
aaatgcctaatgcaggtgacg

SEQ ID NO: 64331 - DNA, 17 bp, Homo sapiens
agacctggaacttttgg

SEQ ID NO: 64332 - DNA, 19 bp, Homo sapiens
acctacgtaacaaacctcc

SEQ ID NO: 64333 - DNA, 20 bp, Homo sapiens
actcagtgaaatttgcaaac

SEQ ID NO: 64334 - DNA, 26 bp, Homo sapiens
ataaacaaaacaaaacaaaacaaaac

SEQ ID NO: 64335 - DNA, 21 bp, Homo sapiens
ttgtctacattttatttgcac

SEQ ID NO: 64336 - DNA, 21 bp, Homo sapiens
gaaatggtgctgaaaggtcca

SEQ ID NO: 64337 - DNA, 21 bp, Homo sapiens
tttctgtcaattcctttagtc

SEQ ID NO: 64338 - DNA, 20 bp, Homo sapiens
aaacttgttcgagagtttgc

SEQ ID NO: 64339 - DNA, 23 bp, Homo sapiens
ttttaatcaatgtataggattgt

SEQ ID NO: 64340 - DNA, 20 bp, Homo sapiens
cccgctttcaaatgaatgtc

SEQ ID NO: 64341 - DNA, 25 bp, Homo sapiens
attcaattttgttaaatttaaatac

SEQ ID NO: 64342 - DNA, 23 bp, Homo sapiens
actaaaaatcaaaaaggacgaaa

SEQ ID NO: 64343 - DNA, 27 bp, Homo sapiens
aaatgtattaaacaataattaattagg

SEQ ID NO: 64344 - DNA, 19 bp, Homo sapiens
cccagatgtcaagctacaa

SEQ ID NO: 64345 - DNA, 28 bp, Homo sapiens
cagtgacttaaatatcttaccttctatc

SEQ ID NO: 64346 - DNA, 19 bp, Homo sapiens
gcaagaagttccacatgag

SEQ ID NO: 64347 - DNA, 23 bp, Homo sapiens
cacaaaatgaactgctacttttc

SEQ ID NO: 64348 - DNA, 19 bp, Homo sapiens
tggaaatcttcacgcttac

SEQ ID NO: 64349 - DNA, 26 bp, Homo sapiens
aatcatataatgatgtattttgtagc

SEQ ID NO: 64350 - DNA, 22 bp, Homo sapiens
aagaaaaagtaactgactcatc

SEQ ID NO: 64351 - DNA, 17 bp, Homo sapiens
tccaaatcgccctcatg

SEQ ID NO: 64352 - DNA, 20 bp, Homo sapiens
ttgccctaaatgtcatttgc

SEQ ID NO: 64353 - DNA, 20 bp, Homo sapiens
aaaaaatttaccattcttgc

SEQ ID NO: 64354 - DNA, 19 bp, Homo sapiens
catccgagcaaaattgagg

SEQ ID NO: 64355 - DNA, 23 bp, Homo sapiens
attcctaagacacaaaattatac

SEQ ID NO: 64356 - DNA, 21 bp, Homo sapiens
atcagtatttggagaggacac

SEQ ID NO: 64357 - DNA, 24 bp, Homo sapiens
tttattatggaaaatactcacagc

SEQ ID NO: 64358 - DNA, 19 bp, Homo sapiens
tgattcttgttattctgat

SEQ ID NO: 64359 - DNA, 23 bp, Homo sapiens
ctgaaatagtcttctgggcttat

SEQ ID NO: 64360 - DNA, 23 bp, Homo sapiens
agagcttaaattaattagatttt

SEQ ID NO: 64361 - DNA, 20 bp, Homo sapiens
ttttgtttcaaaatggcaca

SEQ ID NO: 64362 - DNA, 20 bp, Homo sapiens
gccttgggtatacatcaggg

SEQ ID NO: 64363 - DNA, 21 bp, Homo sapiens
cacggtagaagaagaaagtta

SEQ ID NO: 64364 - DNA, 21 bp, Homo sapiens
gccttttcctttttataggct

SEQ ID NO: 64365 - DNA, 22 bp, Homo sapiens
agaaagaaatggattagctggt

SEQ ID NO: 64366 - DNA, 18 bp, Homo sapiens
acgctccattgttttcag

SEQ ID NO: 64367 - DNA, 20 bp, Homo sapiens
ctgtgcccatctcaaaaatg

SEQ ID NO: 64368 - DNA, 24 bp, Homo sapiens
gccttctaaatcatgaatgtggca

SEQ ID NO: 64369 - DNA, 25 bp, Homo sapiens
tctacctcgtataatgatactgatc

SEQ ID NO: 64370 - DNA, 22 bp, Homo sapiens
ggccacagataaagattttagt

SEQ ID NO: 64371 - DNA, 18 bp, Homo sapiens
tctgcaaatttgacagcc

SEQ ID NO: 64372 - DNA, 21 bp, Homo sapiens
caaagagaagacattacaaag

SEQ ID NO: 64373 - DNA, 26 bp, Homo sapiens
taaatttactatattgactttgtttt

SEQ ID NO: 64374 - DNA, 23 bp, Homo sapiens
aaactgtcaatgttaaagattat

SEQ ID NO: 64375 - DNA, 29 bp, Homo sapiens
tatacatacaaaattttatatacaatttc

SEQ ID NO: 64376 - DNA, 20 bp, Homo sapiens
acatctgaatgctgattggc

SEQ ID NO: 64377 - DNA, 16 bp, Homo sapiens
acccccggaaaatctg

SEQ ID NO: 64378 - DNA, 22 bp, Homo sapiens
gatgtggatcaactgaaaaagt

SEQ ID NO: 64379 - DNA, 23 bp, Homo sapiens
gatttgtttcatttggctcatct

SEQ ID NO: 64380 - DNA, 20 bp, Homo sapiens
cttcatggaggtaccagtta

SEQ ID NO: 64381 - DNA, 18 bp, Homo sapiens
cagaagccccaggaacaa

SEQ ID NO: 64382 - DNA, 23 bp, Homo sapiens
gccttcataccaaacttcaatca

SEQ ID NO: 64383 - DNA, 23 bp, Homo sapiens
ttctaaatactaaaagcttactt

SEQ ID NO: 64384 - DNA, 23 bp, Homo sapiens
cccactttctaaataacaaatga

SEQ ID NO: 64385 - DNA, 17 bp, Homo sapiens
ttccccgaccgtaactg

SEQ ID NO: 64386 - DNA, 18 bp, Homo sapiens
tggccccatattggttat

SEQ ID NO: 64387 - DNA, 20 bp, Homo sapiens
ttgtctgattctctgaattc

SEQ ID NO: 64388 - DNA, 18 bp, Homo sapiens
accacactcgtatagcat

SEQ ID NO: 64389 - DNA, 19 bp, Homo sapiens
tgtggcaagatctctgaag

SEQ ID NO: 64390 - DNA, 22 bp, Homo sapiens
acaacttaaaaatcaaagaaat

SEQ ID NO: 64391 - DNA, 19 bp, Homo sapiens
ttaagtcacatccatcggc

SEQ ID NO: 64392 - DNA, 24 bp, Homo sapiens
catatataaaaaatttacatgagc

SEQ ID NO: 64393 - DNA, 18 bp, Homo sapiens
caccaggacaccatttcc

SEQ ID NO: 64394 - DNA, 22 bp, Homo sapiens
ttcctactatacatcaccttca

SEQ ID NO: 64395 - DNA, 24 bp, Homo sapiens
gcacaagcattttttcaaaaggat

SEQ ID NO: 64396 - DNA, 22 bp, Homo sapiens
aatgtctattgtcagattttgt

SEQ ID NO: 64397 - DNA, 20 bp, Homo sapiens
tcagaggcataagtttaatt

SEQ ID NO: 64398 - DNA, 24 bp, Homo sapiens
gaacaaggtcttgtattaagactc

SEQ ID NO: 64399 - DNA, 24 bp, Homo sapiens
ttcatatgtagttctttaacaatc

SEQ ID NO: 64400 - DNA, 19 bp, Homo sapiens
cggagcatcatttcttcta

SEQ ID NO: 64401 - DNA, 24 bp, Homo sapiens
aggctcgtcaaaaatagttaaaat

SEQ ID NO: 64402 - DNA, 19 bp, Homo sapiens
gatgttcagccaatgcagt

SEQ ID NO: 64403 - DNA, 22 bp, Homo sapiens
cagaatgctgaaacataagctc

SEQ ID NO: 64404 - DNA, 18 bp, Homo sapiens
cttacgtgtttgggcatc

SEQ ID NO: 64405 - DNA, 24 bp, Homo sapiens
ccagtattaaaaaatatgtacctt

SEQ ID NO: 64406 - DNA, 17 bp, Homo sapiens
tacctcgcacttcaagc

SEQ ID NO: 64407 - DNA, 23 bp, Homo sapiens
gctgacaagtcaggtcaaaatac

SEQ ID NO: 64408 - DNA, 17 bp, Homo sapiens
atcaccagctctggctt

SEQ ID NO: 64409 - DNA, 21 bp, Homo sapiens
acggtgacatatgagtagatg

SEQ ID NO: 64410 - DNA, 22 bp, Homo sapiens
tgtatctgttttctactttgcc

SEQ ID NO: 64411 - DNA, 24 bp, Homo sapiens
cagtagtgaagttaaaatacttgc

SEQ ID NO: 64412 - DNA, 22 bp, Homo sapiens
ggcaaaattgataatctttcca

SEQ ID NO: 64413 - DNA, 22 bp, Homo sapiens
tcaaacgtcaaagatgcaaagc

SEQ ID NO: 64414 - DNA, 24 bp, Homo sapiens
gaatttacatgctaattaaatgaa

SEQ ID NO: 64415 - DNA, 17 bp, Homo sapiens
tcgctttcacaggctga

SEQ ID NO: 64416 - DNA, 19 bp, Homo sapiens
acattacttcttatctcct

SEQ ID NO: 64417 - DNA, 19 bp, Homo sapiens
ctgctctttagtggaaact

SEQ ID NO: 64418 - DNA, 21 bp, Homo sapiens
taattagtgctaactagtttc

SEQ ID NO: 64419 - DNA, 23 bp, Homo sapiens
tgttttccagattattgctcagt

SEQ ID NO: 64420 - DNA, 28 bp, Homo sapiens
ataagttctagacaatatgaattatacc

SEQ ID NO: 64421 - DNA, 23 bp, Homo sapiens
agtaagcatattcttattttatc

SEQ ID NO: 64422 - DNA, 18 bp, Homo sapiens
ttggaagggcttcatagt

SEQ ID NO: 64423 - DNA, 23 bp, Homo sapiens
tgttttaatcctcttagaagact

SEQ ID NO: 64424 - DNA, 22 bp, Homo sapiens
ggtccacaatagttacaactga

SEQ ID NO: 64425 - DNA, 20 bp, Homo sapiens
ttaagcccccatatctaagc

SEQ ID NO: 64426 - DNA, 20 bp, Homo sapiens
atgcatcagtgttgtttggc

SEQ ID NO: 64427 - DNA, 20 bp, Homo sapiens
tgaatcaacttaagggtggt

SEQ ID NO: 64428 - DNA, 20 bp, Homo sapiens
gtacagatggaaccgtgttc

SEQ ID NO: 64429 - DNA, 22 bp, Homo sapiens
taaatgtattcactgtcttctc

SEQ ID NO: 64430 - DNA, 23 bp, Homo sapiens
ccagttttaatacctaccagttc

SEQ ID NO: 64431 - DNA, 20 bp, Homo sapiens
gttacatggatttgctgcta

SEQ ID NO: 64432 - DNA, 21 bp, Homo sapiens
gacattgacaattgtaccacc

SEQ ID NO: 64433 - DNA, 20 bp, Homo sapiens
gtgtgcattgccttatttca

SEQ ID NO: 64434 - DNA, 24 bp, Homo sapiens
tttctacagaatcaatgtctttgg

SEQ ID NO: 64435 - DNA, 21 bp, Homo sapiens
gattatgtttttccagtgtat

SEQ ID NO: 64436 - DNA, 21 bp, Homo sapiens
tgtatacaaataagttctttc

SEQ ID NO: 64437 - DNA, 26 bp, Homo sapiens
ggactgaatatacatacacatgtatc

SEQ ID NO: 64438 - DNA, 21 bp, Homo sapiens
gtaagtgtgtacttttactac

SEQ ID NO: 64439 - DNA, 25 bp, Homo sapiens
aaattaaactgaatatcatcttacc

SEQ ID NO: 64440 - DNA, 24 bp, Homo sapiens
cagttgtttccaattttttttcac

SEQ ID NO: 64441 - DNA, 24 bp, Homo sapiens
cctaggtgtcataacttactttaa

SEQ ID NO: 64442 - DNA, 20 bp, Homo sapiens
gcacatcttttattctgcac

SEQ ID NO: 64443 - DNA, 25 bp, Homo sapiens
cctctcagttttctttcagatattg

SEQ ID NO: 64444 - DNA, 27 bp, Homo sapiens
gtcaaatataaattaaatttctcaccc

SEQ ID NO: 64445 - DNA, 23 bp, Homo sapiens
actctgcaaataggacatttcaa

SEQ ID NO: 64446 - DNA, 22 bp, Homo sapiens
actctgacctaaacaatgactt

SEQ ID NO: 64447 - DNA, 22 bp, Homo sapiens
atgtcctgaatggatgaatgtg

SEQ ID NO: 64448 - DNA, 22 bp, Homo sapiens
agtttattccagtttacccttt

SEQ ID NO: 64449 - DNA, 23 bp, Homo sapiens
agttttctttatgacttcattag

SEQ ID NO: 64450 - DNA, 24 bp, Homo sapiens
catcgtaactatacacaatggatc

SEQ ID NO: 64451 - DNA, 21 bp, Homo sapiens
tgaatgcttcagtgaacttta

SEQ ID NO: 64452 - DNA, 24 bp, Homo sapiens
atcaggaaattcaaatcacttacc

SEQ ID NO: 64453 - DNA, 23 bp, Homo sapiens
tgtgcctgttttgaaatttacta

SEQ ID NO: 64454 - DNA, 23 bp, Homo sapiens
tcagtatattcacaaacattacc

SEQ ID NO: 64455 - DNA, 24 bp, Homo sapiens
atgacctccccttcttagaattca

SEQ ID NO: 64456 - DNA, 23 bp, Homo sapiens
tgtaaaacttggtgatagtgtat

SEQ ID NO: 64457 - DNA, 24 bp, Homo sapiens
tctttcctgtcagaagatattagg

SEQ ID NO: 64458 - DNA, 21 bp, Homo sapiens
attttctggctgttcattgtc

SEQ ID NO: 64459 - DNA, 20 bp, Homo sapiens
tgccaagtttccctctattg

SEQ ID NO: 64460 - DNA, 22 bp, Homo sapiens
ggttgccttttaatttttgaat

SEQ ID NO: 64461 - DNA, 21 bp, Homo sapiens
aagaaacgtggaacaagtaac

SEQ ID NO: 64462 - DNA, 21 bp, Homo sapiens
aatttacactatttttctcac

SEQ ID NO: 64463 - DNA, 24 bp, Homo sapiens
agttgacatattacaattatcagc

SEQ ID NO: 64464 - DNA, 17 bp, Homo sapiens
acatggagtggccacca

SEQ ID NO: 64465 - DNA, 22 bp, Homo sapiens
aaatttgagataatgagagaac

SEQ ID NO: 64466 - DNA, 19 bp, Homo sapiens
ttgtgtgtttctgagagca

SEQ ID NO: 64467 - DNA, 24 bp, Homo sapiens
gttgtgaaaattaaataaaacaag

SEQ ID NO: 64468 - DNA, 23 bp, Homo sapiens
gtcatttatcaatcaggactgtt

SEQ ID NO: 64469 - DNA, 23 bp, Homo sapiens
tgcctttttaactgctttatttt

SEQ ID NO: 64470 - DNA, 25 bp, Homo sapiens
tgaatttaaaattactgttaaatac

SEQ ID NO: 64471 - DNA, 21 bp, Homo sapiens
ttgatatcaaagtcacgtaga

SEQ ID NO: 64472 - DNA, 21 bp, Homo sapiens
aatccatcatacttgacagaa

SEQ ID NO: 64473 - DNA, 27 bp, Homo sapiens
gaaaattatatatatattgcttttacc

SEQ ID NO: 64474 - DNA, 21 bp, Homo sapiens
ccccagggattaaaaatgttg

SEQ ID NO: 64475 - DNA, 22 bp, Homo sapiens
ctaacattcagatagaaagtac

SEQ ID NO: 64476 - DNA, 20 bp, Homo sapiens
tgaaggagatcagtggaaac

SEQ ID NO: 64477 - DNA, 24 bp, Homo sapiens
cacttggaacttttttattgctac

SEQ ID NO: 64478 - DNA, 19 bp, Homo sapiens
agttgacagatgttgccaa

SEQ ID NO: 64479 - DNA, 17 bp, Homo sapiens
tgttaaggctccaggtc

SEQ ID NO: 64480 - DNA, 22 bp, Homo sapiens
ggctatctgtgggttgtatttt

SEQ ID NO: 64481 - DNA, 19 bp, Homo sapiens
actccaattgctacagcgg

SEQ ID NO: 64482 - DNA, 22 bp, Homo sapiens
tcatttggtaatacctgaaaac

SEQ ID NO: 64483 - DNA, 21 bp, Homo sapiens
cgtacataagcatcagtggct

SEQ ID NO: 64484 - DNA, 20 bp, Homo sapiens
agctgaaatgcacagagacc

SEQ ID NO: 64485 - DNA, 24 bp, Homo sapiens
aatttttctaaagtcatttataat

SEQ ID NO: 64486 - DNA, 20 bp, Homo sapiens
aacagctcctgaaagacaag

SEQ ID NO: 64487 - DNA, 22 bp, Homo sapiens
tttttcaatgccaaattgatat

SEQ ID NO: 64488 - DNA, 19 bp, Homo sapiens
accagaaactgtatgcagc

SEQ ID NO: 64489 - DNA, 28 bp, Homo sapiens
aaatctctaaatttcggtaaataataaa

SEQ ID NO: 64490 - DNA, 23 bp, Homo sapiens
tgtgtcacataataggttgaatt

SEQ ID NO: 64491 - DNA, 19 bp, Homo sapiens
atggatcttaacatacctt

SEQ ID NO: 64492 - DNA, 22 bp, Homo sapiens
ctgaagatgggacttactgttt

SEQ ID NO: 64493 - DNA, 19 bp, Homo sapiens
tgaatattgccttttttgg

SEQ ID NO: 64494 - DNA, 20 bp, Homo sapiens
tctgtttttttataggctgg

SEQ ID NO: 64495 - DNA, 19 bp, Homo sapiens
accctaatgtcaggactgc

SEQ ID NO: 64496 - DNA, 24 bp, Homo sapiens
atactgtgcaaaggtttgctataa

SEQ ID NO: 64497 - DNA, 18 bp, Homo sapiens
tcatgtcgctaagtagga

SEQ ID NO: 64498 - DNA, 21 bp, Homo sapiens
aggtctttttgttggaattca

SEQ ID NO: 64499 - DNA, 20 bp, Homo sapiens
aaagcatgaggaagatgctt

SEQ ID NO: 64500 - DNA, 22 bp, Homo sapiens
tttaatgaagtggctaaatgaa

SEQ ID NO: 64501 - DNA, 29 bp, Homo sapiens
aaacagaattgatttaagttaaaaaaaaa

SEQ ID NO: 64502 - DNA, 20 bp, Homo sapiens
tccccctagaggaagaaatc

SEQ ID NO: 64503 - DNA, 22 bp, Homo sapiens
tgagtcagccttaatgaatagt

SEQ ID NO: 64504 - DNA, 19 bp, Homo sapiens
aggaagtgatggatctggc

SEQ ID NO: 64505 - DNA, 21 bp, Homo sapiens
tatttctcaaatttatgcatc

SEQ ID NO: 64506 - DNA, 24 bp, Homo sapiens
agattttctgaaatatcctttagt

SEQ ID NO: 64507 - DNA, 23 bp, Homo sapiens
gaacagccttaatactattgatc

SEQ ID NO: 64508 - DNA, 21 bp, Homo sapiens
ggcctcagttcagtctcaatg

SEQ ID NO: 64509 - DNA, 19 bp, Homo sapiens
gcttcacagtttgtccttg

SEQ ID NO: 64510 - DNA, 21 bp, Homo sapiens
tgtactcccccagtagttgaa

SEQ ID NO: 64511 - DNA, 21 bp, Homo sapiens
tttttttttagggtttctatc

SEQ ID NO: 64512 - DNA, 20 bp, Homo sapiens
gggtcccatgtttcatcttc

SEQ ID NO: 64513 - DNA, 22 bp, Homo sapiens
ggaggatgataattgggtctac

SEQ ID NO: 64514 - DNA, 20 bp, Homo sapiens
cgttccactttatttccaag

SEQ ID NO: 64515 - DNA, 20 bp, Homo sapiens
ttatcctttgaagattcaac

SEQ ID NO: 64516 - DNA, 22 bp, Homo sapiens
gctctttccatattctctttca

SEQ ID NO: 64517 - DNA, 20 bp, Homo sapiens
tgaagttttaattcacgttg

SEQ ID NO: 64518 - DNA, 18 bp, Homo sapiens
tgctgttccaaaatttgg

SEQ ID NO: 64519 - DNA, 24 bp, Homo sapiens
ctaaacatgatggagaagatgtac

SEQ ID NO: 64520 - DNA, 22 bp, Homo sapiens
tgcttcctctttatttagtacc

SEQ ID NO: 64521 - DNA, 20 bp, Homo sapiens
tggagtagaagacaacaaat

SEQ ID NO: 64522 - DNA, 23 bp, Homo sapiens
tttactatctgtctctttacggg

SEQ ID NO: 64523 - DNA, 20 bp, Homo sapiens
ttacagaacatgaactccaa

SEQ ID NO: 64524 - DNA, 23 bp, Homo sapiens
acaataacagaactgagttactg

SEQ ID NO: 64525 - DNA, 24 bp, Homo sapiens
tagtgatattgcttataaatctac

SEQ ID NO: 64526 - DNA, 24 bp, Homo sapiens
ataggacgtatcgttttcattatc

SEQ ID NO: 64527 - DNA, 24 bp, Homo sapiens
attatatatccattagggaagagg

SEQ ID NO: 64528 - DNA, 24 bp, Homo sapiens
aattgtaaacataccttaagcatc

SEQ ID NO: 64529 - DNA, 21 bp, Homo sapiens
tgttctgcagaaaagaggata

SEQ ID NO: 64530 - DNA, 30 bp, Homo sapiens
ttagaattagttaatattttacttaattaa

SEQ ID NO: 64531 - DNA, 22 bp, Homo sapiens
ttttaaagcatttatctcccaa

SEQ ID NO: 64532 - DNA, 27 bp, Homo sapiens
attggaaaatgtgaaatctaatgttac

SEQ ID NO: 64533 - DNA, 22 bp, Homo sapiens
agatttagaaatggagatgctt

SEQ ID NO: 64534 - DNA, 24 bp, Homo sapiens
ataggacgtatcgttttcattatc

SEQ ID NO: 64535 - DNA, 19 bp, Homo sapiens
tccattagggaagaggaag

SEQ ID NO: 64536 - DNA, 27 bp, Homo sapiens
taatgtttttataattgtaaacatacc

SEQ ID NO: 64537 - DNA, 21 bp, Homo sapiens
gcagaaaagaggatatgaagt

SEQ ID NO: 64538 - DNA, 28 bp, Homo sapiens
tttagaattagttaatattttacttaat

SEQ ID NO: 64539 - DNA, 20 bp, Homo sapiens
aagcatttatctcccaatga

SEQ ID NO: 64540 - DNA, 27 bp, Homo sapiens
attggaaaatgtgaaatctaatgttac

SEQ ID NO: 64541 - DNA, 24 bp, Homo sapiens
atgaagatttagaaatggagatgc

SEQ ID NO: 64542 - DNA, 19 bp, Homo sapiens
tgccactattgaggttttc

SEQ ID NO: 64543 - DNA, 18 bp, Homo sapiens
tggcttgcacatctgcca

SEQ ID NO: 64544 - DNA, 18 bp, Homo sapiens
agtaggaagacccagatt

SEQ ID NO: 64545 - DNA, 22 bp, Homo sapiens
ccttttgtgtttggtgaaaaag

SEQ ID NO: 64546 - DNA, 21 bp, Homo sapiens
acccttatcatcatcttcttc

SEQ ID NO: 64547 - DNA, 20 bp, Homo sapiens
actttcagtctttagaaaac

SEQ ID NO: 64548 - DNA, 22 bp, Homo sapiens
cctaagttaaagtcagtggtag

SEQ ID NO: 64549 - DNA, 23 bp, Homo sapiens
tgcttaaaaatggaaagaaatct

SEQ ID NO: 64550 - DNA, 21 bp, Homo sapiens
atccaataattaactatatgc

SEQ ID NO: 64551 - DNA, 21 bp, Homo sapiens
atgaagctaatgaaggggaag

SEQ ID NO: 64552 - DNA, 18 bp, Homo sapiens
cttgctcttcattgggtg

SEQ ID NO: 64553 - DNA, 23 bp, Homo sapiens
gaaaacattaacccatggtagct

SEQ ID NO: 64554 - DNA, 23 bp, Homo sapiens
gattaaatgagattatactcacg

SEQ ID NO: 64555 - DNA, 19 bp, Homo sapiens
tccctctatgtggtgtttt

SEQ ID NO: 64556 - DNA, 19 bp, Homo sapiens
gcagacaggttatttgcct

SEQ ID NO: 64557 - DNA, 18 bp, Homo sapiens
agactttttgtggccagc

SEQ ID NO: 64558 - DNA, 21 bp, Homo sapiens
ttgtagtcacacagaaaatac

SEQ ID NO: 64559 - DNA, 21 bp, Homo sapiens
ttggccattccagttttaaac

SEQ ID NO: 64560 - DNA, 21 bp, Homo sapiens
tctttcttctaatactgaatg

SEQ ID NO: 64561 - DNA, 24 bp, Homo sapiens
gtgcatttatgtatgaagtttgaa

SEQ ID NO: 64562 - DNA, 19 bp, Homo sapiens
ggttttgcttaagtacaac

SEQ ID NO: 64563 - DNA, 19 bp, Homo sapiens
tttgtaccttgggtttctt

SEQ ID NO: 64564 - DNA, 26 bp, Homo sapiens
tgcatttgtattttgagagtttaatg

SEQ ID NO: 64565 - DNA, 21 bp, Homo sapiens
cttcaagagttcagtggaaag

SEQ ID NO: 64566 - DNA, 21 bp, Homo sapiens
ctgagcatctgttctttgttc

SEQ ID NO: 64567 - DNA, 20 bp, Homo sapiens
actggaagcacaaactcttt

SEQ ID NO: 64568 - DNA, 22 bp, Homo sapiens
tttaggaagatagcatactagt

SEQ ID NO: 64569 - DNA, 22 bp, Homo sapiens
tcttccatcagagaaataaggg

SEQ ID NO: 64570 - DNA, 21 bp, Homo sapiens
gaaatgaaagcatcaaaggtt

SEQ ID NO: 64571 - DNA, 23 bp, Homo sapiens
aaaaaaagagggtgatattgtgg

SEQ ID NO: 64572 - DNA, 23 bp, Homo sapiens
ttttttcatttcaaggatatgga

SEQ ID NO: 64573 - DNA, 23 bp, Homo sapiens
tgtgttattgtgaactagatttt

SEQ ID NO: 64574 - DNA, 22 bp, Homo sapiens
ggcaagattggccttgttatct

SEQ ID NO: 64575 - DNA, 20 bp, Homo sapiens
tcttccactaaagggtcatt

SEQ ID NO: 64576 - DNA, 20 bp, Homo sapiens
tgggatgttggacattctat

SEQ ID NO: 64577 - DNA, 22 bp, Homo sapiens
tgcttatcaagttagtaagtga

SEQ ID NO: 64578 - DNA, 24 bp, Homo sapiens
actcacaatttaatatctgttaga

SEQ ID NO: 64579 - DNA, 21 bp, Homo sapiens
tatttctttattctttctcac

SEQ ID NO: 64580 - DNA, 21 bp, Homo sapiens
acgtaacaaacttgcatatgc

SEQ ID NO: 64581 - DNA, 24 bp, Homo sapiens
ggtgccagaatatttgtttttctt

SEQ ID NO: 64582 - DNA, 23 bp, Homo sapiens
tgaccacatgattagaaatgaca

SEQ ID NO: 64583 - DNA, 20 bp, Homo sapiens
cagcacagtcagaaaatgtt

SEQ ID NO: 64584 - DNA, 19 bp, Homo sapiens
acaatccggtatttacctc

SEQ ID NO: 64585 - DNA, 22 bp, Homo sapiens
ttcgtgacataaagtattattt

SEQ ID NO: 64586 - DNA, 20 bp, Homo sapiens
atcagcctcaagttgctgga

SEQ ID NO: 64587 - DNA, 20 bp, Homo sapiens
tgagatgattgttttcttta

SEQ ID NO: 64588 - DNA, 28 bp, Homo sapiens
ataggtttaactttaaatattaactcag

SEQ ID NO: 64589 - DNA, 21 bp, Homo sapiens
tttgtttgtttttacagaggt

SEQ ID NO: 64590 - DNA, 21 bp, Homo sapiens
tcctggaggaagtaatgtttg

SEQ ID NO: 64591 - DNA, 23 bp, Homo sapiens
actgttcaggtaacatgggcctg

SEQ ID NO: 64592 - DNA, 22 bp, Homo sapiens
gatttttggtgttaatatgatg

SEQ ID NO: 64593 - DNA, 18 bp, Homo sapiens
tccctaaaatcatgcccc

SEQ ID NO: 64594 - DNA, 24 bp, Homo sapiens
atttggttatttattctcctttgg

SEQ ID NO: 64595 - DNA, 20 bp, Homo sapiens
gacatcagacttggcaaagc

SEQ ID NO: 64596 - DNA, 21 bp, Homo sapiens
tttcctttatgtgtttttctt

SEQ ID NO: 64597 - DNA, 19 bp, Homo sapiens
ttctttaccactccccaat

SEQ ID NO: 64598 - DNA, 18 bp, Homo sapiens
gtatttctgagtgggggc

SEQ ID NO: 64599 - DNA, 24 bp, Homo sapiens
ctttagcatttttaaaaaaatagt

SEQ ID NO: 64600 - DNA, 19 bp, Homo sapiens
aagacagcactgccaatgg

SEQ ID NO: 64601 - DNA, 19 bp, Homo sapiens
gcaacgattggaacctgaa

SEQ ID NO: 64602 - DNA, 23 bp, Homo sapiens
tctttgcaaaaaaattttacagt

SEQ ID NO: 64603 - DNA, 23 bp, Homo sapiens
ctgaggatttctcagatttaagc

SEQ ID NO: 64604 - DNA, 23 bp, Homo sapiens
taccagtctctttgtaagaaagc

SEQ ID NO: 64605 - DNA, 23 bp, Homo sapiens
ccctgtttttcgcctaacttcta

SEQ ID NO: 64606 - DNA, 23 bp, Homo sapiens
atatcagttttacatcattcagg

SEQ ID NO: 64607 - DNA, 22 bp, Homo sapiens
accattaaatccttaccttgtt

SEQ ID NO: 64608 - DNA, 19 bp, Homo sapiens
ccgggaagacattgtacgt

SEQ ID NO: 64609 - DNA, 21 bp, Homo sapiens
aacataaaatacataagttgt

SEQ ID NO: 64610 - DNA, 21 bp, Homo sapiens
tggttttgatcgaccaaacct

SEQ ID NO: 64611 - DNA, 22 bp, Homo sapiens
ccaaaactaggtggaatttgaa

SEQ ID NO: 64612 - DNA, 19 bp, Homo sapiens
gatctgcagccatttcttg

SEQ ID NO: 64613 - DNA, 20 bp, Homo sapiens
accttcaaattcccagtggg

SEQ ID NO: 64614 - DNA, 22 bp, Homo sapiens
atcattatttttgataggcttt

SEQ ID NO: 64615 - DNA, 23 bp, Homo sapiens
ctaagttcacctgtaacttgttg

SEQ ID NO: 64616 - DNA, 24 bp, Homo sapiens
aagaattaaataagataaaaccaa

SEQ ID NO: 64617 - DNA, 21 bp, Homo sapiens
tccttgtgctaaaactcatgc

SEQ ID NO: 64618 - DNA, 24 bp, Homo sapiens
tttgctcttttgttcttctttttc

SEQ ID NO: 64619 - DNA, 22 bp, Homo sapiens
cggagagcaatgatgattgatc

SEQ ID NO: 64620 - DNA, 23 bp, Homo sapiens
tactgtccttctagaaaaatgac

SEQ ID NO: 64621 - DNA, 23 bp, Homo sapiens
caataaagatctggtaaataaac

SEQ ID NO: 64622 - DNA, 19 bp, Homo sapiens
tgtggaacataccatgcgg

SEQ ID NO: 64623 - DNA, 21 bp, Homo sapiens
gcaagtttgttctcccacatt

SEQ ID NO: 64624 - DNA, 17 bp, Homo sapiens
tgcccattccaaaagct

SEQ ID NO: 64625 - DNA, 23 bp, Homo sapiens
tcacattgaattccactttgtgc

SEQ ID NO: 64626 - DNA, 19 bp, Homo sapiens
atgattccatgtccttagg

SEQ ID NO: 64627 - DNA, 20 bp, Homo sapiens
taaatgtaaggttttcattc

SEQ ID NO: 64628 - DNA, 19 bp, Homo sapiens
agaggacgtgacaagaact

SEQ ID NO: 64629 - DNA, 20 bp, Homo sapiens
ctcagtgtgtcatagctacc

SEQ ID NO: 64630 - DNA, 21 bp, Homo sapiens
aaatctgcaagagtaaaaaca

SEQ ID NO: 64631 - DNA, 20 bp, Homo sapiens
caagtcattcattacggtgc

SEQ ID NO: 64632 - DNA, 19 bp, Homo sapiens
tgggatactggaaatagcc

SEQ ID NO: 64633 - DNA, 18 bp, Homo sapiens
ctggtcgtgatggacttc

SEQ ID NO: 64634 - DNA, 18 bp, Homo sapiens
tggatttggggaggtttt

SEQ ID NO: 64635 - DNA, 23 bp, Homo sapiens
acttctcattacgtatctcagta

SEQ ID NO: 64636 - DNA, 26 bp, Homo sapiens
gatgctagaaatgtttttttatcttg

SEQ ID NO: 64637 - DNA, 21 bp, Homo sapiens
gaatgaagatatttttccatc

SEQ ID NO: 64638 - DNA, 30 bp, Homo sapiens
taaacagtaaaaaataagtaaaaaaaaaag

SEQ ID NO: 64639 - DNA, 23 bp, Homo sapiens
gagcatcatccataaatccatac

SEQ ID NO: 64640 - DNA, 21 bp, Homo sapiens
gtttttaatcgacaggcacct

SEQ ID NO: 64641 - DNA, 23 bp, Homo sapiens
taacagcaacaaaatattttttc

SEQ ID NO: 64642 - DNA, 20 bp, Homo sapiens
aagatgatggcaaagatgga

SEQ ID NO: 64643 - DNA, 20 bp, Homo sapiens
acttcagtttactcagacac

SEQ ID NO: 64644 - DNA, 22 bp, Homo sapiens
gctgaatttttaaggctaactt

SEQ ID NO: 64645 - DNA, 16 bp, Homo sapiens
ttcccaaggaggcttt

SEQ ID NO: 64646 - DNA, 22 bp, Homo sapiens
ccaagtgaatcaattaatggtg

SEQ ID NO: 64647 - DNA, 21 bp, Homo sapiens
agaatgtccatctataataag

SEQ ID NO: 64648 - DNA, 23 bp, Homo sapiens
acgtttctgttcttttatttaat

SEQ ID NO: 64649 - DNA, 21 bp, Homo sapiens
atcattcaacaaaaattcagt

SEQ ID NO: 64650 - DNA, 23 bp, Homo sapiens
tgaggacaaacaagtacaaaaag

SEQ ID NO: 64651 - DNA, 19 bp, Homo sapiens
ttgtttgctttctcatatc

SEQ ID NO: 64652 - DNA, 21 bp, Homo sapiens
tcatccatggaatagcaatga

SEQ ID NO: 64653 - DNA, 21 bp, Homo sapiens
ttattcatagcttctgaagca

SEQ ID NO: 64654 - DNA, 19 bp, Homo sapiens
gtccacagcagacaaaagc

SEQ ID NO: 64655 - DNA, 23 bp, Homo sapiens
aattgttatgctaaatcttttga

SEQ ID NO: 64656 - DNA, 21 bp, Homo sapiens
cttacagatcctcggagaaat

SEQ ID NO: 64657 - DNA, 30 bp, Homo sapiens
aaatgttattatttttatttagattggatc

SEQ ID NO: 64658 - DNA, 24 bp, Homo sapiens
acctctgaagaaaagtgtaataga

SEQ ID NO: 64659 - DNA, 20 bp, Homo sapiens
ctgggactttggtccacaag

SEQ ID NO: 64660 - DNA, 17 bp, Homo sapiens
tgagttcctagtcaccc

SEQ ID NO: 64661 - DNA, 20 bp, Homo sapiens
ttggaattgggcttccaatt

SEQ ID NO: 64662 - DNA, 21 bp, Homo sapiens
ggcaagacgctgagaattctg

SEQ ID NO: 64663 - DNA, 24 bp, Homo sapiens
agaatgagcacgatgggtataaca

SEQ ID NO: 64664 - DNA, 19 bp, Homo sapiens
tccaccaactctctgtttg

SEQ ID NO: 64665 - DNA, 24 bp, Homo sapiens
tccaaagaatcaatagacaagtct

SEQ ID NO: 64666 - DNA, 23 bp, Homo sapiens
tgttataccgagaaacttctacc

SEQ ID NO: 64667 - DNA, 24 bp, Homo sapiens
actgattttattcctaatttcaga

SEQ ID NO: 64668 - DNA, 18 bp, Homo sapiens
acaggcagactcctacac

SEQ ID NO: 64669 - DNA, 23 bp, Homo sapiens
gcacagtttatttggcactggca

SEQ ID NO: 64670 - DNA, 23 bp, Homo sapiens
ccaatttctaccctattaaaagc

SEQ ID NO: 64671 - DNA, 19 bp, Homo sapiens
tcactgagggattcttggt

SEQ ID NO: 64672 - DNA, 21 bp, Homo sapiens
tcttcattagcttgaaggatg

SEQ ID NO: 64673 - DNA, 22 bp, Homo sapiens
gcgcccttacgaaaaaggtaaa

SEQ ID NO: 64674 - DNA, 23 bp, Homo sapiens
agaagttacaagaaaaaaactga

SEQ ID NO: 64675 - DNA, 22 bp, Homo sapiens
cccactccacattaaaagatcc

SEQ ID NO: 64676 - DNA, 21 bp, Homo sapiens
acttgtgagaggcctataaac

SEQ ID NO: 64677 - DNA, 20 bp, Homo sapiens
agaatctcagagcctcatcc

SEQ ID NO: 64678 - DNA, 18 bp, Homo sapiens
ccttcccccaaactgact

SEQ ID NO: 64679 - DNA, 16 bp, Homo sapiens
tggtgcccgaagatac

SEQ ID NO: 64680 - DNA, 22 bp, Homo sapiens
cagttttaagaatcaccagttc

SEQ ID NO: 64681 - DNA, 26 bp, Homo sapiens
tcagaacaatttctttaaaacaaacc

SEQ ID NO: 64682 - DNA, 26 bp, Homo sapiens
atcatgattcatgaattagatacttg

SEQ ID NO: 64683 - DNA, 29 bp, Homo sapiens
gaaaggaattaaaatataaaattttaaac

SEQ ID NO: 64684 - DNA, 27 bp, Homo sapiens
attttttagttcgaaaactgtatcttc

SEQ ID NO: 64685 - DNA, 17 bp, Homo sapiens
tggccgaattttatgct

SEQ ID NO: 64686 - DNA, 24 bp, Homo sapiens
ccagttgaattaagtacagagaag

SEQ ID NO: 64687 - DNA, 20 bp, Homo sapiens
acttctccaagttagactgc

SEQ ID NO: 64688 - DNA, 20 bp, Homo sapiens
ggaggttattttcaggtgat

SEQ ID NO: 64689 - DNA, 22 bp, Homo sapiens
acctttttttagaaatgttact

SEQ ID NO: 64690 - DNA, 25 bp, Homo sapiens
tttgagatttttgtttcttattttc

SEQ ID NO: 64691 - DNA, 26 bp, Homo sapiens
ctttctctttagaaaaaaaagtactc

SEQ ID NO: 64692 - DNA, 23 bp, Homo sapiens
tggacctttatatgtttaaatgc

SEQ ID NO: 64693 - DNA, 25 bp, Homo sapiens
agcttatgttttaaatttaacttcc

SEQ ID NO: 64694 - DNA, 21 bp, Homo sapiens
taagatttcttctgggagtaa

SEQ ID NO: 64695 - DNA, 22 bp, Homo sapiens
ctgtaagctttttctggtgact

SEQ ID NO: 64696 - DNA, 20 bp, Homo sapiens
actggtatcatgaagaataa

SEQ ID NO: 64697 - DNA, 22 bp, Homo sapiens
acctttttacaaaagccttacc

SEQ ID NO: 64698 - DNA, 23 bp, Homo sapiens
ggggatgaaatagaaagtcaatg

SEQ ID NO: 64699 - DNA, 24 bp, Homo sapiens
ctggcaaaatacagaattttaagc

SEQ ID NO: 64700 - DNA, 19 bp, Homo sapiens
agtatcatggtacagtcac

SEQ ID NO: 64701 - DNA, 23 bp, Homo sapiens
agaatgaatataaactgaaatat

SEQ ID NO: 64702 - DNA, 21 bp, Homo sapiens
tttcggcacaagagcaggaga

SEQ ID NO: 64703 - DNA, 22 bp, Homo sapiens
accaatttgccatataacacaa

SEQ ID NO: 64704 - DNA, 23 bp, Homo sapiens
attgttcttaagctaagagtctg

SEQ ID NO: 64705 - DNA, 18 bp, Homo sapiens
gttgccagaatagctggg

SEQ ID NO: 64706 - DNA, 23 bp, Homo sapiens
tgtggtatctgaagctctaaaaa

SEQ ID NO: 64707 - DNA, 24 bp, Homo sapiens
aaatagaacacatgcaaaagatag

SEQ ID NO: 64708 - DNA, 25 bp, Homo sapiens
gtttctttgttttttgttcagattg

SEQ ID NO: 64709 - DNA, 22 bp, Homo sapiens
agtggaagctatggtcatatta

SEQ ID NO: 64710 - DNA, 23 bp, Homo sapiens
catgccaataaaatggatgttcc

SEQ ID NO: 64711 - DNA, 17 bp, Homo sapiens
gagataagcatcgcagc

SEQ ID NO: 64712 - DNA, 21 bp, Homo sapiens
caccatcaatcctttttacgt

SEQ ID NO: 64713 - DNA, 22 bp, Homo sapiens
ttgttggaaaaactatacattt

SEQ ID NO: 64714 - DNA, 21 bp, Homo sapiens
gcagaaatgtttgatgacttc

SEQ ID NO: 64715 - DNA, 20 bp, Homo sapiens
tgctggagtgatactgtttc

SEQ ID NO: 64716 - DNA, 23 bp, Homo sapiens
aatgcttattctctaagagctcc

SEQ ID NO: 64717 - DNA, 21 bp, Homo sapiens
aacacagaccaactacggttg

SEQ ID NO: 64718 - DNA, 22 bp, Homo sapiens
tggaaatgcaaataaagtgagc

SEQ ID NO: 64719 - DNA, 20 bp, Homo sapiens
ctgccatgttggcccctctg

SEQ ID NO: 64720 - DNA, 23 bp, Homo sapiens
catgtttttacaacagattgact

SEQ ID NO: 64721 - DNA, 23 bp, Homo sapiens
tacttgaaaagaggtctgtctac

SEQ ID NO: 64722 - DNA, 22 bp, Homo sapiens
ttttgagctccccataaaaagg

SEQ ID NO: 64723 - DNA, 24 bp, Homo sapiens
tgtgcatattttattttttgctac

SEQ ID NO: 64724 - DNA, 21 bp, Homo sapiens
ttttcttaatggctaattatc

SEQ ID NO: 64725 - DNA, 22 bp, Homo sapiens
ttaccaaaggcatcttcttttc

SEQ ID NO: 64726 - DNA, 23 bp, Homo sapiens
tgatcatttgtgctacattaaaa

SEQ ID NO: 64727 - DNA, 25 bp, Homo sapiens
aaagctgataaaacacaagtttaag

SEQ ID NO: 64728 - DNA, 22 bp, Homo sapiens
gaacagaagacgagtctggtag

SEQ ID NO: 64729 - DNA, 23 bp, Homo sapiens
aaactgagatttattgtagggtt

SEQ ID NO: 64730 - DNA, 24 bp, Homo sapiens
ccatcacatactctttattccaag

SEQ ID NO: 64731 - DNA, 19 bp, Homo sapiens
ggcagaatcctgctctcag

SEQ ID NO: 64732 - DNA, 23 bp, Homo sapiens
cttaagtaaaggtttagttcatt

SEQ ID NO: 64733 - DNA, 16 bp, Homo sapiens
aatcaagggggcagcc

SEQ ID NO: 64734 - DNA, 24 bp, Homo sapiens
tgttttggacattttatttccatg

SEQ ID NO: 64735 - DNA, 21 bp, Homo sapiens
agggtttcggataacatcagc

SEQ ID NO: 64736 - DNA, 24 bp, Homo sapiens
ttgctgatctttctctagaagagc

SEQ ID NO: 64737 - DNA, 23 bp, Homo sapiens
acttcatcaagtcattaagggtg

SEQ ID NO: 64738 - DNA, 19 bp, Homo sapiens
gcacttatcccaagcggtg

SEQ ID NO: 64739 - DNA, 23 bp, Homo sapiens
aggttttcataatagcataaagg

SEQ ID NO: 64740 - DNA, 21 bp, Homo sapiens
actccagaggttcagaagatt

SEQ ID NO: 64741 - DNA, 22 bp, Homo sapiens
ataatgggaagaaagattgttt

SEQ ID NO: 64742 - DNA, 22 bp, Homo sapiens
ggaactaacattctgattaggc

SEQ ID NO: 64743 - DNA, 20 bp, Homo sapiens
gaggaaacttttctttggca

SEQ ID NO: 64744 - DNA, 21 bp, Homo sapiens
tcaggaccatgtttaaggatc

SEQ ID NO: 64745 - DNA, 21 bp, Homo sapiens
ttctagctcataggttttcta

SEQ ID NO: 64746 - DNA, 20 bp, Homo sapiens
cttcagaaccgggaaaacat

SEQ ID NO: 64747 - DNA, 21 bp, Homo sapiens
tcgtttacagatatgagtaaa

SEQ ID NO: 64748 - DNA, 21 bp, Homo sapiens
acctcagtattgatgcctact

SEQ ID NO: 64749 - DNA, 21 bp, Homo sapiens
cttatccacatggcaattgag

SEQ ID NO: 64750 - DNA, 24 bp, Homo sapiens
ctagtactaggatatgcaaattga

SEQ ID NO: 64751 - DNA, 19 bp, Homo sapiens
gtgatgtcaacaaaaggag

SEQ ID NO: 64752 - DNA, 22 bp, Homo sapiens
agcacatagagaaagtaatcat

SEQ ID NO: 64753 - DNA, 19 bp, Homo sapiens
aagcaaggaagaagtaggc

SEQ ID NO: 64754 - DNA, 24 bp, Homo sapiens
tccagaaataaattatatagatac

SEQ ID NO: 64755 - DNA, 18 bp, Homo sapiens
cttgctggtatcacttcc

SEQ ID NO: 64756 - DNA, 22 bp, Homo sapiens
gtgtgtattcaggaacttatgt

SEQ ID NO: 64757 - DNA, 17 bp, Homo sapiens
ttctggtaattgccagc

SEQ ID NO: 64758 - DNA, 22 bp, Homo sapiens
agatttgatttctttttctttc

SEQ ID NO: 64759 - DNA, 23 bp, Homo sapiens
actactccttactcttcagaaat

SEQ ID NO: 64760 - DNA, 18 bp, Homo sapiens
tggtttgccaaaggaagt

SEQ ID NO: 64761 - DNA, 19 bp, Homo sapiens
tgccagttcttcaataaac

SEQ ID NO: 64762 - DNA, 24 bp, Homo sapiens
aaaaggggaggtctttttagttaa

SEQ ID NO: 64763 - DNA, 22 bp, Homo sapiens
tcaaagttttgtgcattttatt

SEQ ID NO: 64764 - DNA, 22 bp, Homo sapiens
cccttatctaaatatcatttaa

SEQ ID NO: 64765 - DNA, 25 bp, Homo sapiens
aatcgcttctatacactatatattc

SEQ ID NO: 64766 - DNA, 18 bp, Homo sapiens
tttgccaaagtgtgacta

SEQ ID NO: 64767 - DNA, 22 bp, Homo sapiens
ccatggcttctttttaaaatcc

SEQ ID NO: 64768 - DNA, 27 bp, Homo sapiens
aaagggatacatgaaaataaaaatgtc

SEQ ID NO: 64769 - DNA, 24 bp, Homo sapiens
caaaagaagagtctcttgctgatg

SEQ ID NO: 64770 - DNA, 20 bp, Homo sapiens
aaacacttgtgttaggtgaa

SEQ ID NO: 64771 - DNA, 20 bp, Homo sapiens
accactgagcaaatgtttga

SEQ ID NO: 64772 - DNA, 21 bp, Homo sapiens
cttaatttctatgaacagaac

SEQ ID NO: 64773 - DNA, 22 bp, Homo sapiens
tggaaatctctaagatgacagt

SEQ ID NO: 64774 - DNA, 23 bp, Homo sapiens
aaggtgaatcaaactttacctaa

SEQ ID NO: 64775 - DNA, 21 bp, Homo sapiens
agaggatcagttgaatgaaat

SEQ ID NO: 64776 - DNA, 17 bp, Homo sapiens
ggcaggaaatggaggtt

SEQ ID NO: 64777 - DNA, 19 bp, Homo sapiens
gctctgtaactcaggaatg

SEQ ID NO: 64778 - DNA, 23 bp, Homo sapiens
attggaggatcagatctaatagc

SEQ ID NO: 64779 - DNA, 22 bp, Homo sapiens
tttggttttaagaagaatttgc

SEQ ID NO: 64780 - DNA, 24 bp, Homo sapiens
actgtactacttttattattcaat

SEQ ID NO: 64781 - DNA, 19 bp, Homo sapiens
ctgggcctcacttcctact

SEQ ID NO: 64782 - DNA, 22 bp, Homo sapiens
accatctttgctttttaatctt

SEQ ID NO: 64783 - DNA, 21 bp, Homo sapiens
attctttcgagcatgatgagc

SEQ ID NO: 64784 - DNA, 22 bp, Homo sapiens
agttactgctctcacttttatt

SEQ ID NO: 64785 - DNA, 19 bp, Homo sapiens
cctgctccaggatatgtga

SEQ ID NO: 64786 - DNA, 21 bp, Homo sapiens
caagaaattcaaaaaggtagg

SEQ ID NO: 64787 - DNA, 22 bp, Homo sapiens
atccttcctagaggaatttttt

SEQ ID NO: 64788 - DNA, 21 bp, Homo sapiens
aaactctacttccagaaatcc

SEQ ID NO: 64789 - DNA, 26 bp, Homo sapiens
ataaactgcttttatctttgtttagc

SEQ ID NO: 64790 - DNA, 21 bp, Homo sapiens
ggatgatagtgagatgcttcc

SEQ ID NO: 64791 - DNA, 24 bp, Homo sapiens
ctcttgtgatacagttgaaatacc

SEQ ID NO: 64792 - DNA, 24 bp, Homo sapiens
tcttctctttcttacctatccatc

SEQ ID NO: 64793 - DNA, 23 bp, Homo sapiens
tgaccataatcatcatttatgcc

SEQ ID NO: 64794 - DNA, 20 bp, Homo sapiens
ttttttcaggtatttgaact

SEQ ID NO: 64795 - DNA, 20 bp, Homo sapiens
gtcaataacagcttttttgg

SEQ ID NO: 64796 - DNA, 22 bp, Homo sapiens
gctacaatttgattccaaatac

SEQ ID NO: 64797 - DNA, 23 bp, Homo sapiens
tcagctaaagaaatatctgtgag

SEQ ID NO: 64798 - DNA, 22 bp, Homo sapiens
ccatgatcaatccatttcaagg

SEQ ID NO: 64799 - DNA, 21 bp, Homo sapiens
gcaagaaaatgaaattgggaa

SEQ ID NO: 64800 - DNA, 20 bp, Homo sapiens
tcctaagaatgtaaaatcac

SEQ ID NO: 64801 - DNA, 23 bp, Homo sapiens
agaagtgatagaaacataccatt

SEQ ID NO: 64802 - DNA, 25 bp, Homo sapiens
aaatctgtataaaaattaataaaac

SEQ ID NO: 64803 - DNA, 24 bp, Homo sapiens
tgaatatctcttaagtttttagaa

SEQ ID NO: 64804 - DNA, 23 bp, Homo sapiens
gtcttccttgagttcacgtttct

SEQ ID NO: 64805 - DNA, 21 bp, Homo sapiens
ccatttaccttatcaaccaac

SEQ ID NO: 64806 - DNA, 20 bp, Homo sapiens
aaaaggccaaggatggatat

SEQ ID NO: 64807 - DNA, 22 bp, Homo sapiens
ggatgctcatactgtcaataca

SEQ ID NO: 64808 - DNA, 22 bp, Homo sapiens
accagagttagaaattgatgtg

SEQ ID NO: 64809 - DNA, 22 bp, Homo sapiens
tgtactatacctctcatttaaa

SEQ ID NO: 64810 - DNA, 19 bp, Homo sapiens
ggaaatggatgatgtggcc

SEQ ID NO: 64811 - DNA, 22 bp, Homo sapiens
cactgaaagtgtcatttgtttc

SEQ ID NO: 64812 - DNA, 23 bp, Homo sapiens
gtgaaaaattctgccagtaaatc

SEQ ID NO: 64813 - DNA, 22 bp, Homo sapiens
ttcctcctgtttttgaactttc

SEQ ID NO: 64814 - DNA, 20 bp, Homo sapiens
cctgtggacacaaactcaga

SEQ ID NO: 64815 - DNA, 23 bp, Homo sapiens
actgttccaatacttcatcttct

SEQ ID NO: 64816 - DNA, 18 bp, Homo sapiens
acaacctgctacaccctc

SEQ ID NO: 64817 - DNA, 22 bp, Homo sapiens
tcttagcttttctgcagcatga

SEQ ID NO: 64818 - DNA, 19 bp, Homo sapiens
tcaagaaatgtcttcatgc

SEQ ID NO: 64819 - DNA, 24 bp, Homo sapiens
tctgtatctgtaaataagttattg

SEQ ID NO: 64820 - DNA, 24 bp, Homo sapiens
tgttcattttcttgttttgttttc

SEQ ID NO: 64821 - DNA, 24 bp, Homo sapiens
gctccttatttttccacaatgagg

SEQ ID NO: 64822 - DNA, 20 bp, Homo sapiens
tgtgaactaaatggagggag

SEQ ID NO: 64823 - DNA, 23 bp, Homo sapiens
acgtttctattcttgctgatttg

SEQ ID NO: 64824 - DNA, 21 bp, Homo sapiens
tctgcactgttttcaaaggtc

SEQ ID NO: 64825 - DNA, 20 bp, Homo sapiens
cagggacatttctgagaggg

SEQ ID NO: 64826 - DNA, 16 bp, Homo sapiens
gcttctcagcagcagc

SEQ ID NO: 64827 - DNA, 20 bp, Homo sapiens
aacagactaaagacaatacc

SEQ ID NO: 64828 - DNA, 23 bp, Homo sapiens
agatgagaatcccaaactatcag

SEQ ID NO: 64829 - DNA, 20 bp, Homo sapiens
ttcagagacatgagagaagt

SEQ ID NO: 64830 - DNA, 17 bp, Homo sapiens
gtcctgcaaaacaagct

SEQ ID NO: 64831 - DNA, 22 bp, Homo sapiens
tctgatggagttggtctgctgc

SEQ ID NO: 64832 - DNA, 23 bp, Homo sapiens
aatcaaagtctccaaaatggaac

SEQ ID NO: 64833 - DNA, 21 bp, Homo sapiens
tggcaatttagttggtgaaag

SEQ ID NO: 64834 - DNA, 22 bp, Homo sapiens
acttgattatttaccttgcatt

SEQ ID NO: 64835 - DNA, 28 bp, Homo sapiens
gataccatactattattattagagcttg

SEQ ID NO: 64836 - DNA, 22 bp, Homo sapiens
aaggttatattacgttagaact

SEQ ID NO: 64837 - DNA, 20 bp, Homo sapiens
gcattctgaatttttgttcc

SEQ ID NO: 64838 - DNA, 19 bp, Homo sapiens
tgctttcttgggatggtaa

SEQ ID NO: 64839 - DNA, 18 bp, Homo sapiens
acacagaatcagagcaag

SEQ ID NO: 64840 - DNA, 23 bp, Homo sapiens
cattttccctggtatcccattct

SEQ ID NO: 64841 - DNA, 18 bp, Homo sapiens
cacaaggcgtgtcagttg

SEQ ID NO: 64842 - DNA, 24 bp, Homo sapiens
ggcattacttcctgaatatactat

SEQ ID NO: 64843 - DNA, 25 bp, Homo sapiens
ttctttctacttgtgtgatttacag

SEQ ID NO: 64844 - DNA, 21 bp, Homo sapiens
gaagctttaccatgtatctgc

SEQ ID NO: 64845 - DNA, 22 bp, Homo sapiens
tagtctaacaattttaagtgac

SEQ ID NO: 64846 - DNA, 21 bp, Homo sapiens
ggggcgcttggcattagtttt

SEQ ID NO: 64847 - DNA, 19 bp, Homo sapiens
ccactcattggagaaaacc

SEQ ID NO: 64848 - DNA, 23 bp, Homo sapiens
ggagttgttgtctttaatcctgt

SEQ ID NO: 64849 - DNA, 16 bp, Homo sapiens
tcctcagggccatccc

SEQ ID NO: 64850 - DNA, 23 bp, Homo sapiens
agtataaatggatgaattttaaa

SEQ ID NO: 64851 - DNA, 18 bp, Homo sapiens
gacctattcctgaagcag

SEQ ID NO: 64852 - DNA, 22 bp, Homo sapiens
gtaacgtatatttagcttatcg

SEQ ID NO: 64853 - DNA, 21 bp, Homo sapiens
aaaagttgctagttttaatat

SEQ ID NO: 64854 - DNA, 21 bp, Homo sapiens
tcaattacctgtactgggatg

SEQ ID NO: 64855 - DNA, 24 bp, Homo sapiens
tataccataaaattatttgggagg

SEQ ID NO: 64856 - DNA, 20 bp, Homo sapiens
tcaccgccaatccaatttct

SEQ ID NO: 64857 - DNA, 16 bp, Homo sapiens
acagtgccccagcgag

SEQ ID NO: 64858 - DNA, 21 bp, Homo sapiens
cagtcaataatggatatgctc

SEQ ID NO: 64859 - DNA, 22 bp, Homo sapiens
ctgggcaacaagagcaagactc

SEQ ID NO: 64860 - DNA, 24 bp, Homo sapiens
tgttgatacaggaataacaaactc

SEQ ID NO: 64861 - DNA, 24 bp, Homo sapiens
attgttaggtgaaaagcaacaaaa

SEQ ID NO: 64862 - DNA, 22 bp, Homo sapiens
ggttgataacagaagagaatga

SEQ ID NO: 64863 - DNA, 24 bp, Homo sapiens
tactaataaagaataattctatac

SEQ ID NO: 64864 - DNA, 26 bp, Homo sapiens
ccttccatttttagcataagaaattg

SEQ ID NO: 64865 - DNA, 21 bp, Homo sapiens
agtcaggaattaaggtctgtg

SEQ ID NO: 64866 - DNA, 24 bp, Homo sapiens
cccaaatcaaattcttatgtgttc

SEQ ID NO: 64867 - DNA, 23 bp, Homo sapiens
ggagccaaaaagaaattatgttc

SEQ ID NO: 64868 - DNA, 21 bp, Homo sapiens
aagctgaaatgacctactcaa

SEQ ID NO: 64869 - DNA, 22 bp, Homo sapiens
acctccaaagacaactgcggaa

SEQ ID NO: 64870 - DNA, 24 bp, Homo sapiens
atcttcaaagggaaaacatttata

SEQ ID NO: 64871 - DNA, 24 bp, Homo sapiens
ttattctacttcacacttttacac

SEQ ID NO: 64872 - DNA, 23 bp, Homo sapiens
cttgatgaaccatctattggaag

SEQ ID NO: 64873 - DNA, 23 bp, Homo sapiens
aagagttaataatgtatcctagt

SEQ ID NO: 64874 - DNA, 24 bp, Homo sapiens
gcaaacatagtagtatataattag

SEQ ID NO: 64875 - DNA, 20 bp, Homo sapiens
acctgtttggcattcaaaaa

SEQ ID NO: 64876 - DNA, 20 bp, Homo sapiens
tatggaaattatgccttttg

SEQ ID NO: 64877 - DNA, 17 bp, Homo sapiens
tgccgtcctgacagatc

SEQ ID NO: 64878 - DNA, 22 bp, Homo sapiens
tgctttttgtcattttgtccca

SEQ ID NO: 64879 - DNA, 19 bp, Homo sapiens
agcctccacaaattgaaag

SEQ ID NO: 64880 - DNA, 22 bp, Homo sapiens
ccttccattaataataccgaac

SEQ ID NO: 64881 - DNA, 20 bp, Homo sapiens
cgtccaattgtaaagccaga

SEQ ID NO: 64882 - DNA, 24 bp, Homo sapiens
acaagcattaaagagggaattaac

SEQ ID NO: 64883 - DNA, 27 bp, Homo sapiens
aatgctagcatgtgaatatatatattc

SEQ ID NO: 64884 - DNA, 27 bp, Homo sapiens
atatttaaaatacataatatacctttc

SEQ ID NO: 64885 - DNA, 18 bp, Homo sapiens
tgtaaacagcctctttgt

SEQ ID NO: 64886 - DNA, 23 bp, Homo sapiens
ggaattcagtaaaatattctggc

SEQ ID NO: 64887 - DNA, 22 bp, Homo sapiens
attttatagattgtggcttctt

SEQ ID NO: 64888 - DNA, 21 bp, Homo sapiens
ggtatcagtgaaagttaccat

SEQ ID NO: 64889 - DNA, 22 bp, Homo sapiens
gggatggagtgggtatatataa

SEQ ID NO: 64890 - DNA, 20 bp, Homo sapiens
ttgcaacttggaggatttac

SEQ ID NO: 64891 - DNA, 22 bp, Homo sapiens
aaatctgtgtatagtgggtaag

SEQ ID NO: 64892 - DNA, 19 bp, Homo sapiens
ctttggttgcatgctcttc

SEQ ID NO: 64893 - DNA, 24 bp, Homo sapiens
aagacattcaacctactttaatgg

SEQ ID NO: 64894 - DNA, 23 bp, Homo sapiens
catctctgcaactctgatactat

SEQ ID NO: 64895 - DNA, 22 bp, Homo sapiens
tcttctgtccaattgtttacag

SEQ ID NO: 64896 - DNA, 26 bp, Homo sapiens
aataaaagttacaataacagtatatg

SEQ ID NO: 64897 - DNA, 23 bp, Homo sapiens
gttttcccagagacatctaaaca

SEQ ID NO: 64898 - DNA, 20 bp, Homo sapiens
agcttaatgatgaggaactg

SEQ ID NO: 64899 - DNA, 20 bp, Homo sapiens
tctcatcaccgtgatgtaca

SEQ ID NO: 64900 - DNA, 19 bp, Homo sapiens
gggggatggtattactttt

SEQ ID NO: 64901 - DNA, 24 bp, Homo sapiens
actgtgctaagcaggaactaaatt

SEQ ID NO: 64902 - DNA, 21 bp, Homo sapiens
attctaagtatggtacctttg

SEQ ID NO: 64903 - DNA, 19 bp, Homo sapiens
ttggctgaaacaaagctgt

SEQ ID NO: 64904 - DNA, 24 bp, Homo sapiens
attatttgctaacttttcagagtc

SEQ ID NO: 64905 - DNA, 21 bp, Homo sapiens
acttccaaacactccaaaagt

SEQ ID NO: 64906 - DNA, 23 bp, Homo sapiens
ttcttttgaaaactttttctctg

SEQ ID NO: 64907 - DNA, 24 bp, Homo sapiens
aaagccattctgcattttttcctc

SEQ ID NO: 64908 - DNA, 17 bp, Homo sapiens
aagcagtaattgttgtc

SEQ ID NO: 64909 - DNA, 23 bp, Homo sapiens
gtcaatacagggatttcatctgt

SEQ ID NO: 64910 - DNA, 21 bp, Homo sapiens
actgctaacttttctgtaacc

SEQ ID NO: 64911 - DNA, 23 bp, Homo sapiens
aacattaaaaaagtctacacagc

SEQ ID NO: 64912 - DNA, 19 bp, Homo sapiens
aggaaaaactgtgccattc

SEQ ID NO: 64913 - DNA, 24 bp, Homo sapiens
tctcacatacaaaccaagagaata

SEQ ID NO: 64914 - DNA, 23 bp, Homo sapiens
aaaatttatctcaggagaaccat

SEQ ID NO: 64915 - DNA, 21 bp, Homo sapiens
ttagtaacataccaggttggt

SEQ ID NO: 64916 - DNA, 23 bp, Homo sapiens
catgtatgtgtgtgttcgtgtac

SEQ ID NO: 64917 - DNA, 21 bp, Homo sapiens
gctgatcgactgatcattttc

SEQ ID NO: 64918 - DNA, 21 bp, Homo sapiens
acatttgaataacaaaggtgt

SEQ ID NO: 64919 - DNA, 21 bp, Homo sapiens
gccagtcaaaagtctgtatgg

SEQ ID NO: 64920 - DNA, 16 bp, Homo sapiens
gggcccggcaggaggt

SEQ ID NO: 64921 - DNA, 20 bp, Homo sapiens
gtactcgccgcttctgcgac

SEQ ID NO: 64922 - DNA, 17 bp, Homo sapiens
gttacgcggttgcacgt

SEQ ID NO: 64923 - DNA, 16 bp, Homo sapiens
gaatcacccgcaggcc

SEQ ID NO: 64924 - DNA, 16 bp, Homo sapiens
gtcccggagcccatgc

SEQ ID NO: 64925 - DNA, 18 bp, Homo sapiens
ccttctgcccttacctcc

SEQ ID NO: 64926 - DNA, 20 bp, Homo sapiens
aagcgcccaagtcgcactcc

SEQ ID NO: 64927 - DNA, 16 bp, Homo sapiens
tggccacggaagagct

SEQ ID NO: 64928 - DNA, 23 bp, Homo sapiens
ttttttattctgcattttggagc

SEQ ID NO: 64929 - DNA, 17 bp, Homo sapiens
gcaggaccgacgcttct

SEQ ID NO: 64930 - DNA, 17 bp, Homo sapiens
agtcactgccctagcct

SEQ ID NO: 64931 - DNA, 16 bp, Homo sapiens
cggctgtgtcttggct

SEQ ID NO: 64932 - DNA, 17 bp, Homo sapiens
cagtcagcgggccacct

SEQ ID NO: 64933 - DNA, 16 bp, Homo sapiens
gctgggggctggggca

SEQ ID NO: 64934 - DNA, 23 bp, Homo sapiens
gctcaggtgcaggtattttctcc

SEQ ID NO: 64935 - DNA, 16 bp, Homo sapiens
ccgcatcttccacggc

SEQ ID NO: 64936 - DNA, 22 bp, Homo sapiens
tagcaggggcttcctacggtgg

SEQ ID NO: 64937 - DNA, 16 bp, Homo sapiens
cgacatccgccagttc

SEQ ID NO: 64938 - DNA, 17 bp, Homo sapiens
gagcctcccaggcctca

SEQ ID NO: 64939 - DNA, 19 bp, Homo sapiens
gctcagaggaagcctgatg

SEQ ID NO: 64940 - DNA, 16 bp, Homo sapiens
cccaggcctcaccgat

SEQ ID NO: 64941 - DNA, 24 bp, Homo sapiens
aggcagctcatcggggttgcaggt

SEQ ID NO: 64942 - DNA, 19 bp, Homo sapiens
tggcctcagggacaggaac

SEQ ID NO: 64943 - DNA, 16 bp, Homo sapiens
gaggacgcacagggcc

SEQ ID NO: 64944 - DNA, 17 bp, Homo sapiens
tgtggacaggcacatca

SEQ ID NO: 64945 - DNA, 17 bp, Homo sapiens
tcaaggacctgctcggc

SEQ ID NO: 64946 - DNA, 17 bp, Homo sapiens
ccatgcagcccagggaa

SEQ ID NO: 64947 - DNA, 17 bp, Homo sapiens
tagccttccccagctgc

SEQ ID NO: 64948 - DNA, 16 bp, Homo sapiens
ctggcctgccctggct

SEQ ID NO: 64949 - DNA, 17 bp, Homo sapiens
ggcctgggaccatccac

SEQ ID NO: 64950 - DNA, 20 bp, Homo sapiens
cccttcctcttcctcaaagt

SEQ ID NO: 64951 - DNA, 16 bp, Homo sapiens
aggccctggcccgtct

SEQ ID NO: 64952 - DNA, 16 bp, Homo sapiens
ctgctccaggcagggc

SEQ ID NO: 64953 - DNA, 18 bp, Homo sapiens
ctgaggagaaggaccaga

SEQ ID NO: 64954 - DNA, 20 bp, Homo sapiens
cagagctgatcactgcggga

SEQ ID NO: 64955 - DNA, 20 bp, Homo sapiens
gtgcttgtggagttcagtga

SEQ ID NO: 64956 - DNA, 20 bp, Homo sapiens
gtgaaaggcctggaaggttc

SEQ ID NO: 64957 - DNA, 17 bp, Homo sapiens
gacgctgcctgcctgca

SEQ ID NO: 64958 - DNA, 23 bp, Homo sapiens
cggccatagaggaagtcacatat

SEQ ID NO: 64959 - DNA, 16 bp, Homo sapiens
cagctgcagtgggacc

SEQ ID NO: 64960 - DNA, 17 bp, Homo sapiens
gaaggtggaaggccagc

SEQ ID NO: 64961 - DNA, 24 bp, Homo sapiens
tttgacatggtcaagctggtggac

SEQ ID NO: 64962 - DNA, 17 bp, Homo sapiens
agcatgtcagatgcagg

SEQ ID NO: 64963 - DNA, 16 bp, Homo sapiens
tgcttggcccagcagc

SEQ ID NO: 64964 - DNA, 18 bp, Homo sapiens
ctgtcctgggctcgtggt

SEQ ID NO: 64965 - DNA, 19 bp, Homo sapiens
gagaatcagggctgttggc

SEQ ID NO: 64966 - DNA, 17 bp, Homo sapiens
ctcccagcccatggagt

SEQ ID NO: 64967 - DNA, 16 bp, Homo sapiens
gctccaggccctggcc

SEQ ID NO: 64968 - DNA, 19 bp, Homo sapiens
cttgccctgggtcctcagg

SEQ ID NO: 64969 - DNA, 16 bp, Homo sapiens
gagctgctggcgacca

SEQ ID NO: 64970 - DNA, 16 bp, Homo sapiens
ggaaaaagggacatgt

SEQ ID NO: 64971 - DNA, 16 bp, Homo sapiens
ctgctctgcccccagc

SEQ ID NO: 64972 - DNA, 16 bp, Homo sapiens
gtgcttacctgtgggc

SEQ ID NO: 64973 - DNA, 18 bp, Homo sapiens
gaggaacctggggtaagc

SEQ ID NO: 64974 - DNA, 24 bp, Homo sapiens
tcagacggcaatgggtataggtgg

SEQ ID NO: 64975 - DNA, 16 bp, Homo sapiens
ccatgagcgggcactc

SEQ ID NO: 64976 - DNA, 18 bp, Homo sapiens
ggtagcacagcaaagtct

SEQ ID NO: 64977 - DNA, 17 bp, Homo sapiens
gaggctgagcagcttag

SEQ ID NO: 64978 - DNA, 17 bp, Homo sapiens
cctccacacccctgtgg

SEQ ID NO: 64979 - DNA, 16 bp, Homo sapiens
cctcggagcaggaagg

SEQ ID NO: 64980 - DNA, 24 bp, Homo sapiens
tccaaagcctgtacggtaagctgt

SEQ ID NO: 64981 - DNA, 20 bp, Homo sapiens
cttcctggctgtgaagaggc

SEQ ID NO: 64982 - DNA, 19 bp, Homo sapiens
ggggctgcttggtggctaa

SEQ ID NO: 64983 - DNA, 16 bp, Homo sapiens
tgcagggcgaagacct

SEQ ID NO: 64984 - DNA, 19 bp, Homo sapiens
ctctccccacccacggccc

SEQ ID NO: 64985 - DNA, 21 bp, Homo sapiens
ccccccccacactgccagtgc

SEQ ID NO: 64986 - DNA, 24 bp, Homo sapiens
gtgcaggctgggaacacgcgctgt

SEQ ID NO: 64987 - DNA, 17 bp, Homo sapiens
gtgacgggcagcctgcc

SEQ ID NO: 64988 - DNA, 17 bp, Homo sapiens
catgtctgcgcagctct

SEQ ID NO: 64989 - DNA, 16 bp, Homo sapiens
gcatctggggctgccc

SEQ ID NO: 64990 - DNA, 17 bp, Homo sapiens
ggaccactgggggctcg

SEQ ID NO: 64991 - DNA, 17 bp, Homo sapiens
tggtggtggccacggtg

SEQ ID NO: 64992 - DNA, 19 bp, Homo sapiens
ggaagaggtggcagtgggc

SEQ ID NO: 64993 - DNA, 19 bp, Homo sapiens
ggcatgtgcagccgggaac

SEQ ID NO: 64994 - DNA, 24 bp, Homo sapiens
acgtagctctcgaagcttgggggc

SEQ ID NO: 64995 - DNA, 18 bp, Homo sapiens
catctgcctgtcttcccc

SEQ ID NO: 64996 - DNA, 23 bp, Homo sapiens
ggtccagccccatcccaaaggcc

SEQ ID NO: 64997 - DNA, 18 bp, Homo sapiens
catggacagagctggtgt

SEQ ID NO: 64998 - DNA, 24 bp, Homo sapiens
tgaaggctcgctgtacccgccgcc

SEQ ID NO: 64999 - DNA, 24 bp, Homo sapiens
cagagcggatcgctgcgctcctcc

SEQ ID NO: 65000 - DNA, 24 bp, Homo sapiens
ctgtggttttgggggcacgacctt

SEQ ID NO: 65001 - DNA, 22 bp, Homo sapiens
caaacgttttcaaaacctcgat

SEQ ID NO: 65002 - DNA, 16 bp, Homo sapiens
ggtgggtccacgggga

SEQ ID NO: 65003 - DNA, 16 bp, Homo sapiens
tccccactgcccacgc

SEQ ID NO: 65004 - DNA, 24 bp, Homo sapiens
ctgggacccaggctgcgtgcaggc

SEQ ID NO: 65005 - DNA, 17 bp, Homo sapiens
cactccccacgccgacc

SEQ ID NO: 65006 - DNA, 24 bp, Homo sapiens
ggttgcagtaaatgataatggaat

SEQ ID NO: 65007 - DNA, 16 bp, Homo sapiens
ctccccaccgcccacg

SEQ ID NO: 65008 - DNA, 24 bp, Homo sapiens
gcgtgtgcagtggggagtgaggag

SEQ ID NO: 65009 - DNA, 17 bp, Homo sapiens
cagttcccaccaacctg

SEQ ID NO: 65010 - DNA, 16 bp, Homo sapiens
aaggggtcggcgtggg

SEQ ID NO: 65011 - DNA, 17 bp, Homo sapiens
cactgccagtgacgtgg

SEQ ID NO: 65012 - DNA, 16 bp, Homo sapiens
agggccctgcagggtc

SEQ ID NO: 65013 - DNA, 17 bp, Homo sapiens
cttcgggagcgcatggg

SEQ ID NO: 65014 - DNA, 18 bp, Homo sapiens
acacggaaaggtgcaggt

SEQ ID NO: 65015 - DNA, 16 bp, Homo sapiens
ccagggccgggatggg

SEQ ID NO: 65016 - DNA, 21 bp, Homo sapiens
tcttcagccacagccaggtgc

SEQ ID NO: 65017 - DNA, 16 bp, Homo sapiens
cttccggccctgctac

SEQ ID NO: 65018 - DNA, 18 bp, Homo sapiens
caggaagcagtgcacgcc

SEQ ID NO: 65019 - DNA, 18 bp, Homo sapiens
acagctgcctccagttgc

SEQ ID NO: 65020 - DNA, 16 bp, Homo sapiens
gtgaggccgcccagcc

SEQ ID NO: 65021 - DNA, 24 bp, Homo sapiens
cccaggtacacgtgctgatgctga

SEQ ID NO: 65022 - DNA, 19 bp, Homo sapiens
ttgcagacgcgcaggtagc

SEQ ID NO: 65023 - DNA, 16 bp, Homo sapiens
ggcacctgggctgtgc

SEQ ID NO: 65024 - DNA, 17 bp, Homo sapiens
gcctcatcaatgcaggc

SEQ ID NO: 65025 - DNA, 19 bp, Homo sapiens
cgggaatctgtcctgcaga

SEQ ID NO: 65026 - DNA, 16 bp, Homo sapiens
ccagtgcctcaggtgt

SEQ ID NO: 65027 - DNA, 16 bp, Homo sapiens
gtgtctggcctgccac

SEQ ID NO: 65028 - DNA, 18 bp, Homo sapiens
aggcagcaagatcagagg

SEQ ID NO: 65029 - DNA, 17 bp, Homo sapiens
ggggaagggccagggct

SEQ ID NO: 65030 - DNA, 20 bp, Homo sapiens
cccatgaggcccccaccttc

SEQ ID NO: 65031 - DNA, 18 bp, Homo sapiens
acctggttctcctctccc

SEQ ID NO: 65032 - DNA, 19 bp, Homo sapiens
tatgcaggccgccttgaga

SEQ ID NO: 65033 - DNA, 22 bp, Homo sapiens
gcctttgacctgctgccaagac

SEQ ID NO: 65034 - DNA, 16 bp, Homo sapiens
ctacagccggcgcagc

SEQ ID NO: 65035 - DNA, 20 bp, Homo sapiens
ggtggttaggggacaagcag

SEQ ID NO: 65036 - DNA, 16 bp, Homo sapiens
acgctgctggtgctgc

SEQ ID NO: 65037 - DNA, 23 bp, Homo sapiens
gctgtgtacgtgtgcccagggcc

SEQ ID NO: 65038 - DNA, 16 bp, Homo sapiens
gctgaggccaggctgc

SEQ ID NO: 65039 - DNA, 23 bp, Homo sapiens
agacgaccaacgtgaggcagggg

SEQ ID NO: 65040 - DNA, 17 bp, Homo sapiens
ctgggcaggagcgtgca

SEQ ID NO: 65041 - DNA, 23 bp, Homo sapiens
agggacttgccggcacctgtagg

SEQ ID NO: 65042 - DNA, 17 bp, Homo sapiens
acgccggctgaggtgtt

SEQ ID NO: 65043 - DNA, 21 bp, Homo sapiens
ggagtcagcagcagggttctg

SEQ ID NO: 65044 - DNA, 19 bp, Homo sapiens
cagagccttcactgagggg

SEQ ID NO: 65045 - DNA, 18 bp, Homo sapiens
agacaggatccgcatgac

SEQ ID NO: 65046 - DNA, 16 bp, Homo sapiens
ctctactccctggggc

SEQ ID NO: 65047 - DNA, 16 bp, Homo sapiens
cagggcctggaacacc

SEQ ID NO: 65048 - DNA, 19 bp, Homo sapiens
gagccactggttccttcac

SEQ ID NO: 65049 - DNA, 22 bp, Homo sapiens
catgacttgagtcaccccaacc

SEQ ID NO: 65050 - DNA, 17 bp, Homo sapiens
attctaccctctcctgc

SEQ ID NO: 65051 - DNA, 16 bp, Homo sapiens
caactgccctgagggc

SEQ ID NO: 65052 - DNA, 17 bp, Homo sapiens
ccctttgggggaaggag

SEQ ID NO: 65053 - DNA, 19 bp, Homo sapiens
ctcaggtacaggttgtggt

SEQ ID NO: 65054 - DNA, 20 bp, Homo sapiens
ctgtcactcttttctgcttt

SEQ ID NO: 65055 - DNA, 16 bp, Homo sapiens
cccagtgtccccggcc

SEQ ID NO: 65056 - DNA, 18 bp, Homo sapiens
ccttcaggggagctaggg

SEQ ID NO: 65057 - DNA, 17 bp, Homo sapiens
ggtgccacagtcacaac

SEQ ID NO: 65058 - DNA, 24 bp, Homo sapiens
cttggaacataagtgtcccccaaa

SEQ ID NO: 65059 - DNA, 16 bp, Homo sapiens
accccccaggcatgga

SEQ ID NO: 65060 - DNA, 20 bp, Homo sapiens
agggcagatgtctcacctgg

SEQ ID NO: 65061 - DNA, 24 bp, Homo sapiens
caggacaggcattccctttccctc

SEQ ID NO: 65062 - DNA, 22 bp, Homo sapiens
gttcaggaaacaagactccttg

SEQ ID NO: 65063 - DNA, 16 bp, Homo sapiens
ccgggcactccgtagc

SEQ ID NO: 65064 - DNA, 18 bp, Homo sapiens
ttcttccgccacttctgc

SEQ ID NO: 65065 - DNA, 16 bp, Homo sapiens
cccgccatgacagggg

SEQ ID NO: 65066 - DNA, 24 bp, Homo sapiens
gggcgggaaatacgggagggctga

SEQ ID NO: 65067 - DNA, 16 bp, Homo sapiens
tcaagctagggctggg

SEQ ID NO: 65068 - DNA, 20 bp, Homo sapiens
ttacctgcttgcggaggagc

SEQ ID NO: 65069 - DNA, 23 bp, Homo sapiens
gtacaggcacagccacctcagcc

SEQ ID NO: 65070 - DNA, 20 bp, Homo sapiens
gttgagccgtacgtaattgc

SEQ ID NO: 65071 - DNA, 16 bp, Homo sapiens
catcggagggggctgg

SEQ ID NO: 65072 - DNA, 18 bp, Homo sapiens
ctgtgccctcagccttcc

SEQ ID NO: 65073 - DNA, 16 bp, Homo sapiens
ggagccctgggagagc

SEQ ID NO: 65074 - DNA, 23 bp, Homo sapiens
gtacctggggttcgatgggctgc

SEQ ID NO: 65075 - DNA, 16 bp, Homo sapiens
atccgtgtggggagcc

SEQ ID NO: 65076 - DNA, 22 bp, Homo sapiens
ggtcttcctcaactgctacagc

SEQ ID NO: 65077 - DNA, 16 bp, Homo sapiens
cggctgtccttggtcc

SEQ ID NO: 65078 - DNA, 16 bp, Homo sapiens
ctggacctgtgcgggg

SEQ ID NO: 65079 - DNA, 24 bp, Homo sapiens
cccccaaagcctgcaggcctgatc

SEQ ID NO: 65080 - DNA, 23 bp, Homo sapiens
cgcctccactgctgctgggctgg

SEQ ID NO: 65081 - DNA, 23 bp, Homo sapiens
tgggctccctagatcctggctgg

SEQ ID NO: 65082 - DNA, 16 bp, Homo sapiens
ccctgggagccagcac

SEQ ID NO: 65083 - DNA, 16 bp, Homo sapiens
ccagccaaggccaggc

SEQ ID NO: 65084 - DNA, 24 bp, Homo sapiens
gttgtgattcctctgagcctagat

SEQ ID NO: 65085 - DNA, 16 bp, Homo sapiens
cagggcctgtcccctc

SEQ ID NO: 65086 - DNA, 22 bp, Homo sapiens
ctcactgtgacatcgctgtaac

SEQ ID NO: 65087 - DNA, 17 bp, Homo sapiens
agaccgtggcctctagg

SEQ ID NO: 65088 - DNA, 17 bp, Homo sapiens
cctgcagatgctggagc

SEQ ID NO: 65089 - DNA, 24 bp, Homo sapiens
tagctcaggggcctgagttcctcc

SEQ ID NO: 65090 - DNA, 21 bp, Homo sapiens
ctcatcactgactttttctgc

SEQ ID NO: 65091 - DNA, 24 bp, Homo sapiens
taattagcctgctctacaattgag

SEQ ID NO: 65092 - DNA, 23 bp, Homo sapiens
atgccttagatgaggctcttcct

SEQ ID NO: 65093 - DNA, 21 bp, Homo sapiens
tcttcagggagcttctcgggg

SEQ ID NO: 65094 - DNA, 24 bp, Homo sapiens
tagaaagggagtcaagggcgaagg

SEQ ID NO: 65095 - DNA, 16 bp, Homo sapiens
ggtgccggactacggg

SEQ ID NO: 65096 - DNA, 24 bp, Homo sapiens
ggttggcacaggggcccgtgcctg

SEQ ID NO: 65097 - DNA, 17 bp, Homo sapiens
tctgaatcgggctgcga

SEQ ID NO: 65098 - DNA, 24 bp, Homo sapiens
cggaagcagctgtggacctagcgt

SEQ ID NO: 65099 - DNA, 18 bp, Homo sapiens
ttttctggcctgtgcccc

SEQ ID NO: 65100 - DNA, 16 bp, Homo sapiens
ggccttgagccgctgc

SEQ ID NO: 65101 - DNA, 16 bp, Homo sapiens
gcctcgctccaggtgc

SEQ ID NO: 65102 - DNA, 16 bp, Homo sapiens
ctgtggactcttggtc

SEQ ID NO: 65103 - DNA, 16 bp, Homo sapiens
ccaggccgccgtgggg

SEQ ID NO: 65104 - DNA, 24 bp, Homo sapiens
agcgctcccagccacccctcccgc

SEQ ID NO: 65105 - DNA, 16 bp, Homo sapiens
cggcgggctccgcagc

SEQ ID NO: 65106 - DNA, 20 bp, Homo sapiens
ccccctcccaagttctgtgc

SEQ ID NO: 65107 - DNA, 19 bp, Homo sapiens
gctcgcccacgcagcgctc

SEQ ID NO: 65108 - DNA, 18 bp, Homo sapiens
gccaaacagggaagtggg

SEQ ID NO: 65109 - DNA, 16 bp, Homo sapiens
gggggcgagaagacac

SEQ ID NO: 65110 - DNA, 19 bp, Homo sapiens
ccgcggggagcgactcgga

SEQ ID NO: 65111 - DNA, 19 bp, Homo sapiens
gttccctttacaggacgac

SEQ ID NO: 65112 - DNA, 22 bp, Homo sapiens
gagtgcggtattcccggtagag

SEQ ID NO: 65113 - DNA, 19 bp, Homo sapiens
cgagccaggtgcgggctgc

SEQ ID NO: 65114 - DNA, 24 bp, Homo sapiens
tggggcctgggcccctgccgaccc

SEQ ID NO: 65115 - DNA, 24 bp, Homo sapiens
gcgggacgtgcgggagcggctgca

SEQ ID NO: 65116 - DNA, 24 bp, Homo sapiens
accgcgggtctcctccggcgccgc

SEQ ID NO: 65117 - DNA, 19 bp, Homo sapiens
acgatcgcaagcgcggagg

SEQ ID NO: 65118 - DNA, 24 bp, Homo sapiens
cgcgccctcagcccctcggcccct

SEQ ID NO: 65119 - DNA, 17 bp, Homo sapiens
cgccgcgcatccgcatt

SEQ ID NO: 65120 - DNA, 16 bp, Homo sapiens
ggaacgcgcgctccca

SEQ ID NO: 65121 - DNA, 19 bp, Homo sapiens
tcccattggctgcttgtcc

SEQ ID NO: 65122 - DNA, 21 bp, Homo sapiens
tctgcagacatccccgattga

SEQ ID NO: 65123 - DNA, 24 bp, Homo sapiens
gcaggacatttttaaaagctctat

SEQ ID NO: 65124 - DNA, 17 bp, Homo sapiens
ggatgtgccacacatct

SEQ ID NO: 65125 - DNA, 19 bp, Homo sapiens
cagttgtggccctgtagga

SEQ ID NO: 65126 - DNA, 20 bp, Homo sapiens
gccattgcgagaactttatc

SEQ ID NO: 65127 - DNA, 24 bp, Homo sapiens
tttctcagagcctctctggttctt

SEQ ID NO: 65128 - DNA, 20 bp, Homo sapiens
cacaatgccaggcgcgaagg

SEQ ID NO: 65129 - DNA, 24 bp, Homo sapiens
taaatgagcatccattttgtttca

SEQ ID NO: 65130 - DNA, 23 bp, Homo sapiens
caggcatcttttgcacctggtgc

SEQ ID NO: 65131 - DNA, 18 bp, Homo sapiens
cccatacgcaacgagatt

SEQ ID NO: 65132 - DNA, 17 bp, Homo sapiens
ctctggcgctcctcggc

SEQ ID NO: 65133 - DNA, 24 bp, Homo sapiens
caggaataaaataatcttgagact

SEQ ID NO: 65134 - DNA, 24 bp, Homo sapiens
caaacccacaaatggtttccgatc

SEQ ID NO: 65135 - DNA, 24 bp, Homo sapiens
taaccatgcccgcatagatgccgc

SEQ ID NO: 65136 - DNA, 19 bp, Homo sapiens
caccgattggcgcgtgagc

SEQ ID NO: 65137 - DNA, 16 bp, Homo sapiens
gatgtcgcacggtacc

SEQ ID NO: 65138 - DNA, 24 bp, Homo sapiens
tttctgtgctggaaaatgaatgct

SEQ ID NO: 65139 - DNA, 17 bp, Homo sapiens
ctggacgtgcgcgatgc

SEQ ID NO: 65140 - DNA, 18 bp, Homo sapiens
agtcctcacctgagggac

SEQ ID NO: 65141 - DNA, 16 bp, Homo sapiens
acgacgctgcccggga

SEQ ID NO: 65142 - DNA, 22 bp, Homo sapiens
gtgccccccgcagccgcgcgca

SEQ ID NO: 65143 - DNA, 16 bp, Homo sapiens
ctgctgctccacggcg

SEQ ID NO: 65144 - DNA, 17 bp, Homo sapiens
cagacggccccaggcat

SEQ ID NO: 65145 - DNA, 21 bp, Homo sapiens
gctctgaccattctgttctct

SEQ ID NO: 65146 - DNA, 17 bp, Homo sapiens
cgtgtccaggaagccct

SEQ ID NO: 65147 - DNA, 18 bp, Homo sapiens
cggtgagggggctctaca

SEQ ID NO: 65148 - DNA, 18 bp, Homo sapiens
gtcggcgcagttgggctc

SEQ ID NO: 65149 - DNA, 24 bp, Homo sapiens
aaattggaaactggaagcaaatgt

SEQ ID NO: 65150 - DNA, 20 bp, Homo sapiens
tgcccatcatcatgacctgc

SEQ ID NO: 65151 - DNA, 18 bp, Homo sapiens
ttgggaagccaaggaaga

SEQ ID NO: 65152 - DNA, 24 bp, Homo sapiens
atttctttaagactccctttttat

SEQ ID NO: 65153 - DNA, 19 bp, Homo sapiens
cttcctggggagttttcag

SEQ ID NO: 65154 - DNA, 24 bp, Homo sapiens
ccatctaatacaaatatgttcccc

SEQ ID NO: 65155 - DNA, 24 bp, Homo sapiens
ggacgaagtttgcaggggaattgg

SEQ ID NO: 65156 - DNA, 17 bp, Homo sapiens
gtggctcctcattcctc

SEQ ID NO: 65157 - DNA, 20 bp, Homo sapiens
atccaggtgggtagagggtc

SEQ ID NO: 65158 - DNA, 24 bp, Homo sapiens
gaggtctgtgattacaaacccctt

SEQ ID NO: 65159 - DNA, 16 bp, Homo sapiens
cgctgctggaggcggg

SEQ ID NO: 65160 - DNA, 18 bp, Homo sapiens
cgaagcgctacctgattc

SEQ ID NO: 65161 - DNA, 18 bp, Homo sapiens
atggagccttcggctgac

SEQ ID NO: 65162 - DNA, 23 bp, Homo sapiens
atcccctgctcccgctgcagacc

SEQ ID NO: 65163 - DNA, 17 bp, Homo sapiens
gggggagagcaggcagc

SEQ ID NO: 65164 - DNA, 24 bp, Homo sapiens
ctattcggtgcgttgggcagcgcc

SEQ ID NO: 65165 - DNA, 18 bp, Homo sapiens
gaggggctggctggtcac

SEQ ID NO: 65166 - DNA, 22 bp, Homo sapiens
ccgggccgcggccgtggccagc

SEQ ID NO: 65167 - DNA, 22 bp, Homo sapiens
cctccagaggatttgagggaca

SEQ ID NO: 65168 - DNA, 18 bp, Homo sapiens
atgctgctccccgccgcc

SEQ ID NO: 65169 - DNA, 18 bp, Homo sapiens
gccgcttcctagaagacc

SEQ ID NO: 65170 - DNA, 23 bp, Homo sapiens
gttgtaacccgaatggggaagcc

SEQ ID NO: 65171 - DNA, 16 bp, Homo sapiens
gccgctgtggccctcg

SEQ ID NO: 65172 - DNA, 24 bp, Homo sapiens
gctagagacgaattatctgtttac

SEQ ID NO: 65173 - DNA, 20 bp, Homo sapiens
gtgagggttttcgtggttca

SEQ ID NO: 65174 - DNA, 20 bp, Homo sapiens
gacttttcgagggcctttcc

SEQ ID NO: 65175 - DNA, 17 bp, Homo sapiens
catggtgcgcaggttct

SEQ ID NO: 65176 - DNA, 21 bp, Homo sapiens
tggctcctcagtagcatcagc

SEQ ID NO: 65177 - DNA, 21 bp, Homo sapiens
cgctgctcacctctggtgcca

SEQ ID NO: 65178 - DNA, 20 bp, Homo sapiens
tgagccgcgggatgtgaacc

SEQ ID NO: 65179 - DNA, 16 bp, Homo sapiens
gggcagggggcggtgc

SEQ ID NO: 65180 - DNA, 18 bp, Homo sapiens
cggagggtcaccaagaac

SEQ ID NO: 65181 - DNA, 20 bp, Homo sapiens
cagattgtcccaagatgtgt

SEQ ID NO: 65182 - DNA, 24 bp, Homo sapiens
cgtcttggcattgaaagccctaga

SEQ ID NO: 65183 - DNA, 24 bp, Homo sapiens
cttactccacaaatgcgtggccac

SEQ ID NO: 65184 - DNA, 21 bp, Homo sapiens
agataactcacgagatcattg

SEQ ID NO: 65185 - DNA, 16 bp, Homo sapiens
cacccacacggcctgc

SEQ ID NO: 65186 - DNA, 23 bp, Homo sapiens
tctgtctggaaagtgttttaatt

SEQ ID NO: 65187 - DNA, 24 bp, Homo sapiens
taaggagctctcgggccagttttt

SEQ ID NO: 65188 - DNA, 18 bp, Homo sapiens
agggcttctttcagggac

SEQ ID NO: 65189 - DNA, 22 bp, Homo sapiens
tacaaggtctggtcaagaaagc

SEQ ID NO: 65190 - DNA, 20 bp, Homo sapiens
aatcaccttgcaaactagag

SEQ ID NO: 65191 - DNA, 17 bp, Homo sapiens
tgggatgtcatcaccct

SEQ ID NO: 65192 - DNA, 22 bp, Homo sapiens
caacctccttgaccatttatct

SEQ ID NO: 65193 - DNA, 19 bp, Homo sapiens
cagctgatcaggcaccttc

SEQ ID NO: 65194 - DNA, 22 bp, Homo sapiens
ccagaccctcggacaggtaacc

SEQ ID NO: 65195 - DNA, 17 bp, Homo sapiens
gcccaggacctgcagac

SEQ ID NO: 65196 - DNA, 22 bp, Homo sapiens
ctggaccacagggagacttacc

SEQ ID NO: 65197 - DNA, 16 bp, Homo sapiens
tgaaggccgtgctggg

SEQ ID NO: 65198 - DNA, 21 bp, Homo sapiens
cccagagcaggaagttgagga

SEQ ID NO: 65199 - DNA, 22 bp, Homo sapiens
aaatcctagaagtatgtctgtc

SEQ ID NO: 65200 - DNA, 17 bp, Homo sapiens
tgtgccctgtcctgcta

SEQ ID NO: 65201 - DNA, 17 bp, Homo sapiens
caggggccagtgcttac

SEQ ID NO: 65202 - DNA, 18 bp, Homo sapiens
gacattgccaggaggtgg

SEQ ID NO: 65203 - DNA, 19 bp, Homo sapiens
aaacgaagacccttcttcc

SEQ ID NO: 65204 - DNA, 17 bp, Homo sapiens
cgagacagggccctggc

SEQ ID NO: 65205 - DNA, 17 bp, Homo sapiens
gcgttctcctgtcccca

SEQ ID NO: 65206 - DNA, 23 bp, Homo sapiens
agcccgcctctgcagggcacgcc

SEQ ID NO: 65207 - DNA, 19 bp, Homo sapiens
cagatggcatatgtcatgg

SEQ ID NO: 65208 - DNA, 22 bp, Homo sapiens
taacagatcaaatgaccttggg

SEQ ID NO: 65209 - DNA, 24 bp, Homo sapiens
gaggagcttgcagagaggggctct

SEQ ID NO: 65210 - DNA, 17 bp, Homo sapiens
gtctctggccacctcgg

SEQ ID NO: 65211 - DNA, 16 bp, Homo sapiens
atggtgggtagcaggc

SEQ ID NO: 65212 - DNA, 24 bp, Homo sapiens
ctggagatcaccatgcctgcaggt

SEQ ID NO: 65213 - DNA, 16 bp, Homo sapiens
gctgtggctcttggcc

SEQ ID NO: 65214 - DNA, 17 bp, Homo sapiens
caagcccacaacagagc

SEQ ID NO: 65215 - DNA, 19 bp, Homo sapiens
ggaggatgggctgagatgg

SEQ ID NO: 65216 - DNA, 18 bp, Homo sapiens
ccaaacacatgcagtggg

SEQ ID NO: 65217 - DNA, 21 bp, Homo sapiens
cctctgttccaggtcctgcgg

SEQ ID NO: 65218 - DNA, 17 bp, Homo sapiens
gggccgtagtagaaggc

SEQ ID NO: 65219 - DNA, 20 bp, Homo sapiens
gttaaagttgctttaaaaac

SEQ ID NO: 65220 - DNA, 24 bp, Homo sapiens
ggctgccgacatcagtaattgctc

SEQ ID NO: 65221 - DNA, 18 bp, Homo sapiens
tccttgcaggttgcactt

SEQ ID NO: 65222 - DNA, 22 bp, Homo sapiens
ggaaccagctctcaaagggacc

SEQ ID NO: 65223 - DNA, 21 bp, Homo sapiens
ctcagagaagcagttgaagac

SEQ ID NO: 65224 - DNA, 21 bp, Homo sapiens
caccatggtgctcacctgttt

SEQ ID NO: 65225 - DNA, 18 bp, Homo sapiens
gatatccctcggggacac

SEQ ID NO: 65226 - DNA, 20 bp, Homo sapiens
ctcaaagggcagatgaggat

SEQ ID NO: 65227 - DNA, 19 bp, Homo sapiens
tggttcctcatgggcttga

SEQ ID NO: 65228 - DNA, 23 bp, Homo sapiens
tcagtgtttgctcacccatgagt

SEQ ID NO: 65229 - DNA, 20 bp, Homo sapiens
agtattgggttccgtgaacc

SEQ ID NO: 65230 - DNA, 24 bp, Homo sapiens
atatgcttcagtgtctggagccag

SEQ ID NO: 65231 - DNA, 18 bp, Homo sapiens
ctgctgcaagaccctcaa

SEQ ID NO: 65232 - DNA, 21 bp, Homo sapiens
ggggcttaaagggatcttaga

SEQ ID NO: 65233 - DNA, 16 bp, Homo sapiens
tggcagctgcggtttg

SEQ ID NO: 65234 - DNA, 21 bp, Homo sapiens
gcctgatgaggaggtcataat

SEQ ID NO: 65235 - DNA, 19 bp, Homo sapiens
tgtattttcctgaccccgt

SEQ ID NO: 65236 - DNA, 18 bp, Homo sapiens
agtcaaccctaactcacc

SEQ ID NO: 65237 - DNA, 21 bp, Homo sapiens
aagaaagtgttctgaccatgt

SEQ ID NO: 65238 - DNA, 22 bp, Homo sapiens
aaggaaagtaggtcttgagtgc

SEQ ID NO: 65239 - DNA, 17 bp, Homo sapiens
gcaagcaagcaggtttg

SEQ ID NO: 65240 - DNA, 23 bp, Homo sapiens
tggcttaacctttgttggggcac

SEQ ID NO: 65241 - DNA, 21 bp, Homo sapiens
cctggaaatcatagccactat

SEQ ID NO: 65242 - DNA, 24 bp, Homo sapiens
ttattgaaaataaagtgctcttgt

SEQ ID NO: 65243 - DNA, 20 bp, Homo sapiens
gtgttctgatctgactttgc

SEQ ID NO: 65244 - DNA, 24 bp, Homo sapiens
tgggatgaatgagtaatatatgtg

SEQ ID NO: 65245 - DNA, 22 bp, Homo sapiens
aaaaagtgtttctacttttccc

SEQ ID NO: 65246 - DNA, 24 bp, Homo sapiens
tctacaaagcactgcgtaaacacc

SEQ ID NO: 65247 - DNA, 22 bp, Homo sapiens
ttcacacaaggactgaaatctg

SEQ ID NO: 65248 - DNA, 21 bp, Homo sapiens
ccgggttgttgatgagatgtt

SEQ ID NO: 65249 - DNA, 24 bp, Homo sapiens
aagctcagaggaacaggagggaat

SEQ ID NO: 65250 - DNA, 24 bp, Homo sapiens
atatttcacattctcatggtcttc

SEQ ID NO: 65251 - DNA, 22 bp, Homo sapiens
cacaacattttctgattcatgc

SEQ ID NO: 65252 - DNA, 18 bp, Homo sapiens
cccagtaactcctttggc

SEQ ID NO: 65253 - DNA, 22 bp, Homo sapiens
aagaaacagtgtaacgtttacc

SEQ ID NO: 65254 - DNA, 17 bp, Homo sapiens
gcagtggttcgttcttc

SEQ ID NO: 65255 - DNA, 24 bp, Homo sapiens
gctttataaaagattcatcgctgg

SEQ ID NO: 65256 - DNA, 26 bp, Homo sapiens
tgatttcaaaaataaaatgtaaatac

SEQ ID NO: 65257 - DNA, 24 bp, Homo sapiens
gcatctttttgaaaagctaatctc

SEQ ID NO: 65258 - DNA, 24 bp, Homo sapiens
tacatccccccctttcattctctg

SEQ ID NO: 65259 - DNA, 18 bp, Homo sapiens
gctgtagtctgcctctgg

SEQ ID NO: 65260 - DNA, 19 bp, Homo sapiens
tcccttcatcaaaacccag

SEQ ID NO: 65261 - DNA, 23 bp, Homo sapiens
agtgagccatttctgtttaaaat

SEQ ID NO: 65262 - DNA, 21 bp, Homo sapiens
agacaatttctctcactggag

SEQ ID NO: 65263 - DNA, 24 bp, Homo sapiens
agaagtctcacaaattggattagt

SEQ ID NO: 65264 - DNA, 17 bp, Homo sapiens
ctgggaaggtgccgaag

SEQ ID NO: 65265 - DNA, 24 bp, Homo sapiens
acttggtaaatattcactgattct

SEQ ID NO: 65266 - DNA, 21 bp, Homo sapiens
ttctttgaggctgtaaacgag

SEQ ID NO: 65267 - DNA, 22 bp, Homo sapiens
aagagtataaagggtactgaga

SEQ ID NO: 65268 - DNA, 17 bp, Homo sapiens
tggaggctctcctcatc

SEQ ID NO: 65269 - DNA, 20 bp, Homo sapiens
tccaacacaccacagccttc

SEQ ID NO: 65270 - DNA, 16 bp, Homo sapiens
gagtggcgtccctgtc

SEQ ID NO: 65271 - DNA, 20 bp, Homo sapiens
acttacagcaaaatggcctc

SEQ ID NO: 65272 - DNA, 18 bp, Homo sapiens
tgcatggctcttagattt

SEQ ID NO: 65273 - DNA, 19 bp, Homo sapiens
tcacgtccatgacagatga

SEQ ID NO: 65274 - DNA, 21 bp, Homo sapiens
gaggcaaaacaggtgatctgt

SEQ ID NO: 65275 - DNA, 20 bp, Homo sapiens
ataagtgggacacaaactcg

SEQ ID NO: 65276 - DNA, 23 bp, Homo sapiens
aaagaattggataaaagagaagt

SEQ ID NO: 65277 - DNA, 23 bp, Homo sapiens
tcatcttaatggatttaacactc

SEQ ID NO: 65278 - DNA, 21 bp, Homo sapiens
ttccactaaaataatctttct

SEQ ID NO: 65279 - DNA, 22 bp, Homo sapiens
acctgcaactgattttgtttta

SEQ ID NO: 65280 - DNA, 23 bp, Homo sapiens
tgaattgtaaaattttcctctca

SEQ ID NO: 65281 - DNA, 21 bp, Homo sapiens
ggaaatatcactcacaccaag

SEQ ID NO: 65282 - DNA, 23 bp, Homo sapiens
gatgtttagtttaacacctaccg

SEQ ID NO: 65283 - DNA, 21 bp, Homo sapiens
ttccttttcactctgacagag

SEQ ID NO: 65284 - DNA, 21 bp, Homo sapiens
tcagacgctaatgataaaacc

SEQ ID NO: 65285 - DNA, 20 bp, Homo sapiens
catggccataagtctgccca

SEQ ID NO: 65286 - DNA, 22 bp, Homo sapiens
aaagaagttgctcttttcactc

SEQ ID NO: 65287 - DNA, 24 bp, Homo sapiens
tctcttctggaggactgaaatatt

SEQ ID NO: 65288 - DNA, 23 bp, Homo sapiens
tttctgtttatgttttttagggt

SEQ ID NO: 65289 - DNA, 27 bp, Homo sapiens
atttcaaaagtgataaattttaaatac

SEQ ID NO: 65290 - DNA, 24 bp, Homo sapiens
tgtacaaataaattgtaggcattg

SEQ ID NO: 65291 - DNA, 24 bp, Homo sapiens
atctataggtgcatacccaagacc

SEQ ID NO: 65292 - DNA, 20 bp, Homo sapiens
aattgggtactttgacaaac

SEQ ID NO: 65293 - DNA, 26 bp, Homo sapiens
gctgaaagtatatgagataatacacc

SEQ ID NO: 65294 - DNA, 22 bp, Homo sapiens
tggacaatcaaaacttaactcc

SEQ ID NO: 65295 - DNA, 22 bp, Homo sapiens
acagtgaagggtatgtttgaaa

SEQ ID NO: 65296 - DNA, 23 bp, Homo sapiens
tgaaagccaaaaaattctaatat

SEQ ID NO: 65297 - DNA, 22 bp, Homo sapiens
ccccaaaatttttttaagcagc

SEQ ID NO: 65298 - DNA, 24 bp, Homo sapiens
tgtttttatattaatgattttttc

SEQ ID NO: 65299 - DNA, 21 bp, Homo sapiens
tctcttacctgtatccaggag

SEQ ID NO: 65300 - DNA, 23 bp, Homo sapiens
agggatacttgttctgtgaactt

SEQ ID NO: 65301 - DNA, 22 bp, Homo sapiens
ttaattagacaacataagcacc

SEQ ID NO: 65302 - DNA, 20 bp, Homo sapiens
cagcagaaagagaatgtgca

SEQ ID NO: 65303 - DNA, 22 bp, Homo sapiens
gcaaaagcttgttggaatcctt

SEQ ID NO: 65304 - DNA, 23 bp, Homo sapiens
tgaatacatttgataagttgttc

SEQ ID NO: 65305 - DNA, 20 bp, Homo sapiens
tttttctttcacaggattct

SEQ ID NO: 65306 - DNA, 23 bp, Homo sapiens
gtaagcctctgtgaaacaatgca

SEQ ID NO: 65307 - DNA, 23 bp, Homo sapiens
ccctcaatctataatgtcagttc

SEQ ID NO: 65308 - DNA, 23 bp, Homo sapiens
ttcttaccatatgctaaaataaa

SEQ ID NO: 65309 - DNA, 23 bp, Homo sapiens
ctctaatccttttgtgcttactt

SEQ ID NO: 65310 - DNA, 20 bp, Homo sapiens
gtggggaatctttcaatgac

SEQ ID NO: 65311 - DNA, 22 bp, Homo sapiens
tgtatgaagccttgaaagagat

SEQ ID NO: 65312 - DNA, 23 bp, Homo sapiens
ccagctcttgagtaatttgtctt

SEQ ID NO: 65313 - DNA, 20 bp, Homo sapiens
ccagcaagacacctgtcttc

SEQ ID NO: 65314 - DNA, 24 bp, Homo sapiens
attctgggtggcattctgtcttgg

SEQ ID NO: 65315 - DNA, 22 bp, Homo sapiens
gtgattatcagttttggatgca

SEQ ID NO: 65316 - DNA, 20 bp, Homo sapiens
attctggtccactacttacc

SEQ ID NO: 65317 - DNA, 17 bp, Homo sapiens
ggacatcaccttttcgc

SEQ ID NO: 65318 - DNA, 16 bp, Homo sapiens
ctggaactgagccacg

SEQ ID NO: 65319 - DNA, 20 bp, Homo sapiens
tgttccctttcttacagatt

SEQ ID NO: 65320 - DNA, 20 bp, Homo sapiens
tcccatacagaaagcttctg

SEQ ID NO: 65321 - DNA, 19 bp, Homo sapiens
acccatcaatgggtcgtga

SEQ ID NO: 65322 - DNA, 21 bp, Homo sapiens
ctggggataaaaggtcactgg

SEQ ID NO: 65323 - DNA, 23 bp, Homo sapiens
attcgaaggtggaagtcattgag

SEQ ID NO: 65324 - DNA, 20 bp, Homo sapiens
ctcggggatgccgagaaccc

SEQ ID NO: 65325 - DNA, 16 bp, Homo sapiens
cggcctgtttgaggac

SEQ ID NO: 65326 - DNA, 17 bp, Homo sapiens
ctgcccttgtcagtggc

SEQ ID NO: 65327 - DNA, 16 bp, Homo sapiens
gcctgtccctgggcct

SEQ ID NO: 65328 - DNA, 18 bp, Homo sapiens
attccacgtcctgcagct

SEQ ID NO: 65329 - DNA, 16 bp, Homo sapiens
ctgccagcccatcacc

SEQ ID NO: 65330 - DNA, 18 bp, Homo sapiens
gaaaggcacgtgggggtc

SEQ ID NO: 65331 - DNA, 18 bp, Homo sapiens
tctcacaaccctcggaac

SEQ ID NO: 65332 - DNA, 19 bp, Homo sapiens
agagtccccctcgggggtt

SEQ ID NO: 65333 - DNA, 23 bp, Homo sapiens
gaaatttctactgaagggcattc

SEQ ID NO: 65334 - DNA, 21 bp, Homo sapiens
agtcacggaggcagaagccgt

SEQ ID NO: 65335 - DNA, 17 bp, Homo sapiens
cccccccagagaaggct

SEQ ID NO: 65336 - DNA, 16 bp, Homo sapiens
tggcagtggacgctgg

SEQ ID NO: 65337 - DNA, 17 bp, Homo sapiens
gcagccccacctggact

SEQ ID NO: 65338 - DNA, 21 bp, Homo sapiens
ggccctattgctagggccaga

SEQ ID NO: 65339 - DNA, 20 bp, Homo sapiens
accctctgcaggtggtccat

SEQ ID NO: 65340 - DNA, 16 bp, Homo sapiens
ggggtggccacaagcc

SEQ ID NO: 65341 - DNA, 16 bp, Homo sapiens
gtgggagctgcgggga

SEQ ID NO: 65342 - DNA, 22 bp, Homo sapiens
tgccgtccgggaggcagggacc

SEQ ID NO: 65343 - DNA, 24 bp, Homo sapiens
tcttttgtgggtggaaggccccca

SEQ ID NO: 65344 - DNA, 22 bp, Homo sapiens
gatgcctggattcgggatggac

SEQ ID NO: 65345 - DNA, 16 bp, Homo sapiens
accccgtcttcgccca

SEQ ID NO: 65346 - DNA, 24 bp, Homo sapiens
tagtctgtaccttatctctgcatc

SEQ ID NO: 65347 - DNA, 16 bp, Homo sapiens
gcactacgaggcccag

SEQ ID NO: 65348 - DNA, 16 bp, Homo sapiens
ccgctggacctccagg

SEQ ID NO: 65349 - DNA, 23 bp, Homo sapiens
gattcctccgactcggagtatag

SEQ ID NO: 65350 - DNA, 24 bp, Homo sapiens
cagagtcacttacagtggagtggg

SEQ ID NO: 65351 - DNA, 16 bp, Homo sapiens
cccccagcgtggtccg

SEQ ID NO: 65352 - DNA, 24 bp, Homo sapiens
gtgggcagggcctcccgcgccctg

SEQ ID NO: 65353 - DNA, 24 bp, Homo sapiens
tggaatccccttaaataggtgtct

SEQ ID NO: 65354 - DNA, 22 bp, Homo sapiens
cactgtcgtctgggaactatac

SEQ ID NO: 65355 - DNA, 24 bp, Homo sapiens
taccgtgctttgagctttgagtgt

SEQ ID NO: 65356 - DNA, 24 bp, Homo sapiens
gtgtggccgggcggcatggcgaag

SEQ ID NO: 65357 - DNA, 22 bp, Homo sapiens
gaggttaatacggcacagtgcg

SEQ ID NO: 65358 - DNA, 17 bp, Homo sapiens
ggttcaagccgttggct

SEQ ID NO: 65359 - DNA, 20 bp, Homo sapiens
ccgtgcttttgtctttcttt

SEQ ID NO: 65360 - DNA, 24 bp, Homo sapiens
actctgagatgtttactgaagaac

SEQ ID NO: 65361 - DNA, 20 bp, Homo sapiens
tctttgctgtgctggcgatc

SEQ ID NO: 65362 - DNA, 19 bp, Homo sapiens
ggcacaggaaacacagcat

SEQ ID NO: 65363 - DNA, 16 bp, Homo sapiens
gcgcgatccaccctgt

SEQ ID NO: 65364 - DNA, 24 bp, Homo sapiens
actactgacctcaggatatggtcc

SEQ ID NO: 65365 - DNA, 23 bp, Homo sapiens
ttttcagtggggtgggttttgtt

SEQ ID NO: 65366 - DNA, 17 bp, Homo sapiens
aggatggtgaggatcgc

SEQ ID NO: 65367 - DNA, 21 bp, Homo sapiens
tctgagttcgacttcattgtc

SEQ ID NO: 65368 - DNA, 24 bp, Homo sapiens
cttggccaggctggtcttgaactc

SEQ ID NO: 65369 - DNA, 16 bp, Homo sapiens
acccgtcctggatggc

SEQ ID NO: 65370 - DNA, 17 bp, Homo sapiens
ttctgacggccatcggc

SEQ ID NO: 65371 - DNA, 23 bp, Homo sapiens
ctccttgcacacgcctgcttacc

SEQ ID NO: 65372 - DNA, 20 bp, Homo sapiens
gagcatttaccaggtgaagt

SEQ ID NO: 65373 - DNA, 17 bp, Homo sapiens
ccagcagagtggacacg

SEQ ID NO: 65374 - DNA, 21 bp, Homo sapiens
agcaactaaaacagtaagatg

SEQ ID NO: 65375 - DNA, 19 bp, Homo sapiens
acagccctgcggttcttgt

SEQ ID NO: 65376 - DNA, 22 bp, Homo sapiens
agaggtcatcttagtttaagtc

SEQ ID NO: 65377 - DNA, 20 bp, Homo sapiens
tcaccgttcacgttgctttg

SEQ ID NO: 65378 - DNA, 16 bp, Homo sapiens
ctagggggcccctgtg

SEQ ID NO: 65379 - DNA, 17 bp, Homo sapiens
caagctcagtgccgtgc

SEQ ID NO: 65380 - DNA, 20 bp, Homo sapiens
gttcccacttggagacaaac

SEQ ID NO: 65381 - DNA, 16 bp, Homo sapiens
gtgatggtcctggcgc

SEQ ID NO: 65382 - DNA, 24 bp, Homo sapiens
ttttgcttcaaatgtctcccatac

SEQ ID NO: 65383 - DNA, 16 bp, Homo sapiens
tcccttgtgggcagcc

SEQ ID NO: 65384 - DNA, 18 bp, Homo sapiens
gatcaggatgaccacggg

SEQ ID NO: 65385 - DNA, 23 bp, Homo sapiens
gttaaagcaagtcagtccattca

SEQ ID NO: 65386 - DNA, 17 bp, Homo sapiens
aacagctcgaccgtcat

SEQ ID NO: 65387 - DNA, 16 bp, Homo sapiens
gacggccgggatcatt

SEQ ID NO: 65388 - DNA, 24 bp, Homo sapiens
cctcgagtagaataaacatattac

SEQ ID NO: 65389 - DNA, 20 bp, Homo sapiens
gttcatcagcgtggtgttgg

SEQ ID NO: 65390 - DNA, 22 bp, Homo sapiens
cataaacaaaacttcccggctg

SEQ ID NO: 65391 - DNA, 17 bp, Homo sapiens
acggctaccccttcctc

SEQ ID NO: 65392 - DNA, 23 bp, Homo sapiens
cacaaagccccttataatacact

SEQ ID NO: 65393 - DNA, 24 bp, Homo sapiens
gcaattgaaaaagtaaggaccatc

SEQ ID NO: 65394 - DNA, 24 bp, Homo sapiens
gacagcgcacacgaggaatgtgca

SEQ ID NO: 65395 - DNA, 22 bp, Homo sapiens
gtatgcccagttccctttctac

SEQ ID NO: 65396 - DNA, 20 bp, Homo sapiens
atgtactgctcccagaagag

SEQ ID NO: 65397 - DNA, 23 bp, Homo sapiens
ttctaccctgggctgctcctaac

SEQ ID NO: 65398 - DNA, 20 bp, Homo sapiens
tcgtatagttgctgcagatg

SEQ ID NO: 65399 - DNA, 23 bp, Homo sapiens
gagcagtcagtaagctttcatgc

SEQ ID NO: 65400 - DNA, 19 bp, Homo sapiens
ccgcaagccgttgaggtag

SEQ ID NO: 65401 - DNA, 22 bp, Homo sapiens
aagatcgtaaaggcctggaggc

SEQ ID NO: 65402 - DNA, 16 bp, Homo sapiens
aagccgactacatgcc

SEQ ID NO: 65403 - DNA, 24 bp, Homo sapiens
aatagattgttctgtttacacttc

SEQ ID NO: 65404 - DNA, 18 bp, Homo sapiens
tcgcgtatgctgcctccc

SEQ ID NO: 65405 - DNA, 21 bp, Homo sapiens
tgagtttggagaaccagggaa

SEQ ID NO: 65406 - DNA, 21 bp, Homo sapiens
gatggcatcattaatcccagc

SEQ ID NO: 65407 - DNA, 24 bp, Homo sapiens
gctacttacttctcagccttgttt

SEQ ID NO: 65408 - DNA, 24 bp, Homo sapiens
cattctcaaaggcctctgttcttc

SEQ ID NO: 65409 - DNA, 18 bp, Homo sapiens
ggatgttggcctgggagg

SEQ ID NO: 65410 - DNA, 16 bp, Homo sapiens
gtgcgaagctcagctt

SEQ ID NO: 65411 - DNA, 20 bp, Homo sapiens
caggtagatgtagaaagcgc

SEQ ID NO: 65412 - DNA, 20 bp, Homo sapiens
gtgttctgatgggattttcg

SEQ ID NO: 65413 - DNA, 19 bp, Homo sapiens
gataagcccatcgacatca

SEQ ID NO: 65414 - DNA, 24 bp, Homo sapiens
acccaatattctttctaccagctc

SEQ ID NO: 65415 - DNA, 23 bp, Homo sapiens
tacaagaatggatcagacgatgg

SEQ ID NO: 65416 - DNA, 18 bp, Homo sapiens
gctgtcaagcagcctcca

SEQ ID NO: 65417 - DNA, 24 bp, Homo sapiens
ccatttctaggacttcaggatgca

SEQ ID NO: 65418 - DNA, 18 bp, Homo sapiens
gcagctggagtacctggc

SEQ ID NO: 65419 - DNA, 17 bp, Homo sapiens
gaccagggtccttctgg

SEQ ID NO: 65420 - DNA, 24 bp, Homo sapiens
accaggagtttgtaggcaaggact

SEQ ID NO: 65421 - DNA, 19 bp, Homo sapiens
ggtgtgtttctgatggacg

SEQ ID NO: 65422 - DNA, 24 bp, Homo sapiens
gattttcccggtttcccagtcact

SEQ ID NO: 65423 - DNA, 23 bp, Homo sapiens
ttcatgtaagaatcttgagcaac

SEQ ID NO: 65424 - DNA, 22 bp, Homo sapiens
gtatgtcatgttggaagaaaac

SEQ ID NO: 65425 - DNA, 23 bp, Homo sapiens
tctaacgctctcataatcatgac

SEQ ID NO: 65426 - DNA, 19 bp, Homo sapiens
ctacccgaatatccagcac

SEQ ID NO: 65427 - DNA, 18 bp, Homo sapiens
aaggacgagagcctccca

SEQ ID NO: 65428 - DNA, 19 bp, Homo sapiens
tgctgcacaattcaaatac

SEQ ID NO: 65429 - DNA, 23 bp, Homo sapiens
agccacattttgggaagctgttt

SEQ ID NO: 65430 - DNA, 16 bp, Homo sapiens
agagacgggctggacc

SEQ ID NO: 65431 - DNA, 24 bp, Homo sapiens
ctcctgtgtaggtcgtaaagtaag

SEQ ID NO: 65432 - DNA, 19 bp, Homo sapiens
agtggtgatcttccttttt

SEQ ID NO: 65433 - DNA, 24 bp, Homo sapiens
acatgttgtagaaagaaaagtatt

SEQ ID NO: 65434 - DNA, 20 bp, Homo sapiens
ctttgtccaggaagagtcag

SEQ ID NO: 65435 - DNA, 20 bp, Homo sapiens
tcccgaggtacaatgtccgt

SEQ ID NO: 65436 - DNA, 24 bp, Homo sapiens
aacccctacaagataaatcagttt

SEQ ID NO: 65437 - DNA, 20 bp, Homo sapiens
ctgacccccagcaagcccag

SEQ ID NO: 65438 - DNA, 18 bp, Homo sapiens
cctcttgaaaccaaaagc

SEQ ID NO: 65439 - DNA, 23 bp, Homo sapiens
tggaggactgaaatgtatcatac

SEQ ID NO: 65440 - DNA, 18 bp, Homo sapiens
cctcgagcccccctgtac

SEQ ID NO: 65441 - DNA, 24 bp, Homo sapiens
aaaagtagaagcaatctgatgaac

SEQ ID NO: 65442 - DNA, 18 bp, Homo sapiens
gcaccagctccacaaggg

SEQ ID NO: 65443 - DNA, 24 bp, Homo sapiens
cttaagttgtggcagattaccttg

SEQ ID NO: 65444 - DNA, 17 bp, Homo sapiens
agatctctgtgcagccc

SEQ ID NO: 65445 - DNA, 16 bp, Homo sapiens
gagagtgtccacttcg

SEQ ID NO: 65446 - DNA, 16 bp, Homo sapiens
cgcacggagtacgacc

SEQ ID NO: 65447 - DNA, 17 bp, Homo sapiens
gaactgggagagcaggt

SEQ ID NO: 65448 - DNA, 17 bp, Homo sapiens
ctccctacagcagccac

SEQ ID NO: 65449 - DNA, 20 bp, Homo sapiens
gtgtcctgtgtcacggtgac

SEQ ID NO: 65450 - DNA, 17 bp, Homo sapiens
caggttgaacctcaggc

SEQ ID NO: 65451 - DNA, 22 bp, Homo sapiens
tacacgtgcgtgtgggggtcgt

SEQ ID NO: 65452 - DNA, 24 bp, Homo sapiens
cctgtttcagcataacattgcaac

SEQ ID NO: 65453 - DNA, 19 bp, Homo sapiens
ctgcgtttcatgggcaaag

SEQ ID NO: 65454 - DNA, 21 bp, Homo sapiens
gtgtaaaatgggtattctccg

SEQ ID NO: 65455 - DNA, 22 bp, Homo sapiens
ttgtcgtgtgtgtcggtgtagg

SEQ ID NO: 65456 - DNA, 16 bp, Homo sapiens
aaccaggcgatgtttc

SEQ ID NO: 65457 - DNA, 20 bp, Homo sapiens
ggagactggatattttctgc

SEQ ID NO: 65458 - DNA, 21 bp, Homo sapiens
tctcccctacgttctccacac

SEQ ID NO: 65459 - DNA, 21 bp, Homo sapiens
catggttctgctcatttttcc

SEQ ID NO: 65460 - DNA, 24 bp, Homo sapiens
tccacaggctgaaagagttctctc

SEQ ID NO: 65461 - DNA, 21 bp, Homo sapiens
ggtgacctctgaatttttttt

SEQ ID NO: 65462 - DNA, 24 bp, Homo sapiens
agtctgaaaatgtaccttgtaaaa

SEQ ID NO: 65463 - DNA, 24 bp, Homo sapiens
gaaagaaaaatattgtttaaaagc

SEQ ID NO: 65464 - DNA, 21 bp, Homo sapiens
atccatgctgagaattgcagg

SEQ ID NO: 65465 - DNA, 22 bp, Homo sapiens
tgtagcaaaagaaactcttaac

SEQ ID NO: 65466 - DNA, 17 bp, Homo sapiens
ggcgttctccctccagg

SEQ ID NO: 65467 - DNA, 22 bp, Homo sapiens
ttaaacagagcctcaaacacag

SEQ ID NO: 65468 - DNA, 18 bp, Homo sapiens
cctcacgtccatcagcaa

SEQ ID NO: 65469 - DNA, 21 bp, Homo sapiens
cttagcagagaccgcagacat

SEQ ID NO: 65470 - DNA, 23 bp, Homo sapiens
gtttttttattcccaggacagga

SEQ ID NO: 65471 - DNA, 24 bp, Homo sapiens
acagccttcatcaccagaagctca

SEQ ID NO: 65472 - DNA, 20 bp, Homo sapiens
acgtatctgctcacacagtc

SEQ ID NO: 65473 - DNA, 19 bp, Homo sapiens
gccatgaagaaggctgtga

SEQ ID NO: 65474 - DNA, 20 bp, Homo sapiens
tctgtttccctaatgccagc

SEQ ID NO: 65475 - DNA, 19 bp, Homo sapiens
cttcaggcactccccggtc

SEQ ID NO: 65476 - DNA, 20 bp, Homo sapiens
cttcagtgaaacaggacaga

SEQ ID NO: 65477 - DNA, 22 bp, Homo sapiens
tgacacatcatctgacatggga

SEQ ID NO: 65478 - DNA, 18 bp, Homo sapiens
gccatttctcgctcttgg

SEQ ID NO: 65479 - DNA, 24 bp, Homo sapiens
caaatacttaggaacagaggaagc

SEQ ID NO: 65480 - DNA, 23 bp, Homo sapiens
agaatcatctgaattgcatctcg

SEQ ID NO: 65481 - DNA, 24 bp, Homo sapiens
ttgcattacctcaaaagggattct

SEQ ID NO: 65482 - DNA, 16 bp, Homo sapiens
tacggaagccctgctt

SEQ ID NO: 65483 - DNA, 21 bp, Homo sapiens
aaacatcatccacaccaacac

SEQ ID NO: 65484 - DNA, 20 bp, Homo sapiens
cccctgaaaccagtagcatc

SEQ ID NO: 65485 - DNA, 16 bp, Homo sapiens
gtcagtggctgcagga

SEQ ID NO: 65486 - DNA, 20 bp, Homo sapiens
ggacacacagcacacaggag

SEQ ID NO: 65487 - DNA, 16 bp, Homo sapiens
ggactgctccaagtcc

SEQ ID NO: 65488 - DNA, 24 bp, Homo sapiens
tgtcaacggacagcagataaatgg

SEQ ID NO: 65489 - DNA, 16 bp, Homo sapiens
ttttgttctgtgcccc

SEQ ID NO: 65490 - DNA, 20 bp, Homo sapiens
ccgatcaatgagcacaggcc

SEQ ID NO: 65491 - DNA, 22 bp, Homo sapiens
cttttgatttggggtgatgggt

SEQ ID NO: 65492 - DNA, 17 bp, Homo sapiens
cccacggcaccctggga

SEQ ID NO: 65493 - DNA, 19 bp, Homo sapiens
cctgtcattttatgtgacg

SEQ ID NO: 65494 - DNA, 17 bp, Homo sapiens
gacgtcagtgtcatccg

SEQ ID NO: 65495 - DNA, 22 bp, Homo sapiens
ctctgtcctggatgcacatcga

SEQ ID NO: 65496 - DNA, 21 bp, Homo sapiens
actcaaaaggtgctttccttc

SEQ ID NO: 65497 - DNA, 22 bp, Homo sapiens
taaagactaaaacaaccaaacc

SEQ ID NO: 65498 - DNA, 23 bp, Homo sapiens
catttgggcatttcgcattctgt

SEQ ID NO: 65499 - DNA, 24 bp, Homo sapiens
ttaccatgagtaagtagccgctgg

SEQ ID NO: 65500 - DNA, 16 bp, Homo sapiens
ggctgcgctgtgtcac

SEQ ID NO: 65501 - DNA, 18 bp, Homo sapiens
cgtccagggtcgtggtgg

SEQ ID NO: 65502 - DNA, 21 bp, Homo sapiens
ttctctccctgccctggaatc

SEQ ID NO: 65503 - DNA, 20 bp, Homo sapiens
gcagaggacatatgtggagg

SEQ ID NO: 65504 - DNA, 22 bp, Homo sapiens
gaaaaaagttttcatcccatca

SEQ ID NO: 65505 - DNA, 21 bp, Homo sapiens
aggggtacgagtatgtctcac

SEQ ID NO: 65506 - DNA, 22 bp, Homo sapiens
agaaatgttttaaataatggtg

SEQ ID NO: 65507 - DNA, 19 bp, Homo sapiens
cctgcagaccatgttccag

SEQ ID NO: 65508 - DNA, 21 bp, Homo sapiens
gattcgaaggtgggtttacct

SEQ ID NO: 65509 - DNA, 19 bp, Homo sapiens
aactgcttcctgggaatac

SEQ ID NO: 65510 - DNA, 19 bp, Homo sapiens
gctttgtcctcgttccagt

SEQ ID NO: 65511 - DNA, 18 bp, Homo sapiens
aggaaaagaattgcagcc

SEQ ID NO: 65512 - DNA, 21 bp, Homo sapiens
gcttgggagtcattaactgga

SEQ ID NO: 65513 - DNA, 19 bp, Homo sapiens
agtcaagaacagcactgga

SEQ ID NO: 65514 - DNA, 18 bp, Homo sapiens
cctggctagcgaggataa

SEQ ID NO: 65515 - DNA, 21 bp, Homo sapiens
tggtggatgtcatggcttatc

SEQ ID NO: 65516 - DNA, 23 bp, Homo sapiens
tcaggagggaagtggcttttgag

SEQ ID NO: 65517 - DNA, 20 bp, Homo sapiens
cccataattatgtggctgtc

SEQ ID NO: 65518 - DNA, 24 bp, Homo sapiens
ggagctggcttacctgacgagttt

SEQ ID NO: 65519 - DNA, 17 bp, Homo sapiens
acacaagcccttaatgc

SEQ ID NO: 65520 - DNA, 21 bp, Homo sapiens
tgccagtgcatatactttctg

SEQ ID NO: 65521 - DNA, 18 bp, Homo sapiens
ttgctgtaagatttgcca

SEQ ID NO: 65522 - DNA, 16 bp, Homo sapiens
cgccacagcccccaac

SEQ ID NO: 65523 - DNA, 23 bp, Homo sapiens
acttagttccatagacaaagacg

SEQ ID NO: 65524 - DNA, 19 bp, Homo sapiens
tgaggttggtcatggttac

SEQ ID NO: 65525 - DNA, 24 bp, Homo sapiens
gaacgatgaatggacacaaaaaag

SEQ ID NO: 65526 - DNA, 24 bp, Homo sapiens
ggaattcctggaagagttaaagaa

SEQ ID NO: 65527 - DNA, 23 bp, Homo sapiens
ctggtactcactttggttgaatt

SEQ ID NO: 65528 - DNA, 20 bp, Homo sapiens
ttcttttgcagaggtaaacc

SEQ ID NO: 65529 - DNA, 20 bp, Homo sapiens
gattgaggcaggggcggtcc

SEQ ID NO: 65530 - DNA, 16 bp, Homo sapiens
cgcagccgtgttactt

SEQ ID NO: 65531 - DNA, 24 bp, Homo sapiens
tcctcccagctgtccacttgatag

SEQ ID NO: 65532 - DNA, 21 bp, Homo sapiens
tttgatgccagagtcccagaa

SEQ ID NO: 65533 - DNA, 22 bp, Homo sapiens
agtttgtccaccgcaaaggagg

SEQ ID NO: 65534 - DNA, 24 bp, Homo sapiens
ctctcccccgactattcactcaaa

SEQ ID NO: 65535 - DNA, 24 bp, Homo sapiens
ttacccttgtttgattattacacc

SEQ ID NO: 65536 - DNA, 20 bp, Homo sapiens
gaaatggaacaaacaatgat

SEQ ID NO: 65537 - DNA, 16 bp, Homo sapiens
taacgcatggcctctt

SEQ ID NO: 65538 - DNA, 24 bp, Homo sapiens
gtcacagacatcagaaagcatgat

SEQ ID NO: 65539 - DNA, 24 bp, Homo sapiens
ttacatggatcaggtatattttct

SEQ ID NO: 65540 - DNA, 22 bp, Homo sapiens
ttcgccccttcccagaagcagt

SEQ ID NO: 65541 - DNA, 22 bp, Homo sapiens
cagtggaaattggaacatttgt

SEQ ID NO: 65542 - DNA, 23 bp, Homo sapiens
ctgtcaaagttaaaaagaagagg

SEQ ID NO: 65543 - DNA, 24 bp, Homo sapiens
tcgaatttgcactaattttcttat

SEQ ID NO: 65544 - DNA, 22 bp, Homo sapiens
ctgagaaatttttgccaacaag

SEQ ID NO: 65545 - DNA, 22 bp, Homo sapiens
gacagatgcttaaaagtgatcg

SEQ ID NO: 65546 - DNA, 24 bp, Homo sapiens
ctgtgataagctctcctgatttgt

SEQ ID NO: 65547 - DNA, 21 bp, Homo sapiens
tctattcattaaagcaagctt

SEQ ID NO: 65548 - DNA, 20 bp, Homo sapiens
ggccagccgtgtccatgtat

SEQ ID NO: 65549 - DNA, 24 bp, Homo sapiens
agctatttgaactaatactccagg

SEQ ID NO: 65550 - DNA, 18 bp, Homo sapiens
gtgctaatgtcctgacca

SEQ ID NO: 65551 - DNA, 16 bp, Homo sapiens
cagcagccttctccca

SEQ ID NO: 65552 - DNA, 20 bp, Homo sapiens
cagaagattggagaagaggc

SEQ ID NO: 65553 - DNA, 20 bp, Homo sapiens
ggccttacctgttgtacatg

SEQ ID NO: 65554 - DNA, 21 bp, Homo sapiens
aacctgtacatatttgtcagt

SEQ ID NO: 65555 - DNA, 16 bp, Homo sapiens
gagcgcttctgtggtc

SEQ ID NO: 65556 - DNA, 17 bp, Homo sapiens
atggcaggtagtcagat

SEQ ID NO: 65557 - DNA, 20 bp, Homo sapiens
gttgaggattaaacatagcc

SEQ ID NO: 65558 - DNA, 18 bp, Homo sapiens
gttactgctcacacatca

SEQ ID NO: 65559 - DNA, 21 bp, Homo sapiens
tcacgacttactcgtcctcca

SEQ ID NO: 65560 - DNA, 18 bp, Homo sapiens
cgtggaggagctgtgggt

SEQ ID NO: 65561 - DNA, 24 bp, Homo sapiens
acaataaacaatcccccgggtgcg

SEQ ID NO: 65562 - DNA, 19 bp, Homo sapiens
gcctcctcatatttggggc

SEQ ID NO: 65563 - DNA, 24 bp, Homo sapiens
gtgtgcgctggcgaatatctctat

SEQ ID NO: 65564 - DNA, 23 bp, Homo sapiens
cagagactcttatttaaactggg

SEQ ID NO: 65565 - DNA, 19 bp, Homo sapiens
ggcgggcgctcttaccttc

SEQ ID NO: 65566 - DNA, 24 bp, Homo sapiens
ttctgcttcgtccccaggggaagg

SEQ ID NO: 65567 - DNA, 22 bp, Homo sapiens
cttttaatcccaccgcgaaggc

SEQ ID NO: 65568 - DNA, 16 bp, Homo sapiens
aagcgggcgtgggcgc

SEQ ID NO: 65569 - DNA, 24 bp, Homo sapiens
cgcagtttttttgaatgtaacaac

SEQ ID NO: 65570 - DNA, 16 bp, Homo sapiens
gtgtgccgcggccacc

SEQ ID NO: 65571 - DNA, 19 bp, Homo sapiens
cacagcggcgctttccggc

SEQ ID NO: 65572 - DNA, 16 bp, Homo sapiens
acgccgccttcgctct

SEQ ID NO: 65573 - DNA, 17 bp, Homo sapiens
gggctgcgccgtgctgc

SEQ ID NO: 65574 - DNA, 21 bp, Homo sapiens
ggggcgatcccaaagagttag

SEQ ID NO: 65575 - DNA, 17 bp, Homo sapiens
agcggctgtatcggtgc

SEQ ID NO: 65576 - DNA, 24 bp, Homo sapiens
tgaaatgcaccttggaaatctgct

SEQ ID NO: 65577 - DNA, 16 bp, Homo sapiens
cggcggcaacatggcc

SEQ ID NO: 65578 - DNA, 23 bp, Homo sapiens
cagatagtcccggtccggcgcgg

SEQ ID NO: 65579 - DNA, 18 bp, Homo sapiens
cagcggcagcagcgcgcc

SEQ ID NO: 65580 - DNA, 16 bp, Homo sapiens
ccgtcccggggcaccg

SEQ ID NO: 65581 - DNA, 20 bp, Homo sapiens
gcccgagcagcctgcggcca

SEQ ID NO: 65582 - DNA, 18 bp, Homo sapiens
ggcgttaccagccgaggc

SEQ ID NO: 65583 - DNA, 21 bp, Homo sapiens
ctccgagcaggggttgacggc

SEQ ID NO: 65584 - DNA, 16 bp, Homo sapiens
ctcggggctcgctcct

SEQ ID NO: 65585 - DNA, 24 bp, Homo sapiens
gccagggaaaaaaaaggaattgat

SEQ ID NO: 65586 - DNA, 16 bp, Homo sapiens
cgccgcccgaggagca

SEQ ID NO: 65587 - DNA, 19 bp, Homo sapiens
ggagacgagggaagactgg

SEQ ID NO: 65588 - DNA, 19 bp, Homo sapiens
gctgcactcaccatagccg

SEQ ID NO: 65589 - DNA, 23 bp, Homo sapiens
gaagaaaacggaggagaagaaaa

SEQ ID NO: 65590 - DNA, 20 bp, Homo sapiens
gacgctgggcttggatttca

SEQ ID NO: 65591 - DNA, 21 bp, Homo sapiens
gggtttttacactttccgttc

SEQ ID NO: 65592 - DNA, 21 bp, Homo sapiens
gctcctccgtcttctcccagt

SEQ ID NO: 65593 - DNA, 19 bp, Homo sapiens
caggcttgtaattgtgagt

SEQ ID NO: 65594 - DNA, 19 bp, Homo sapiens
tctttgtctcccctgtcgt

SEQ ID NO: 65595 - DNA, 17 bp, Homo sapiens
ctatggcgcggcagacc

SEQ ID NO: 65596 - DNA, 23 bp, Homo sapiens
ctcctccgtctttacaaaaggaa

SEQ ID NO: 65597 - DNA, 20 bp, Homo sapiens
gctttccttgagtttattgt

SEQ ID NO: 65598 - DNA, 18 bp, Homo sapiens
gctttcggcggagtgcag

SEQ ID NO: 65599 - DNA, 17 bp, Homo sapiens
gggagcgcctgtttacc

SEQ ID NO: 65600 - DNA, 24 bp, Homo sapiens
actacaatgagactcatcatgaac

SEQ ID NO: 65601 - DNA, 22 bp, Homo sapiens
caaaggacctccgtcccatttc

SEQ ID NO: 65602 - DNA, 16 bp, Homo sapiens
ggccctcacccgtctc

SEQ ID NO: 65603 - DNA, 23 bp, Homo sapiens
ctttgaaacgtgcattcacacct

SEQ ID NO: 65604 - DNA, 19 bp, Homo sapiens
cctaaagacagaactgggc

SEQ ID NO: 65605 - DNA, 21 bp, Homo sapiens
ccatcattccttagctgtgtt

SEQ ID NO: 65606 - DNA, 19 bp, Homo sapiens
cgtaataagagcgagagcc

SEQ ID NO: 65607 - DNA, 18 bp, Homo sapiens
ctgtccggggtcggggga

SEQ ID NO: 65608 - DNA, 16 bp, Homo sapiens
accactgtgggctcac

SEQ ID NO: 65609 - DNA, 24 bp, Homo sapiens
tggcttccacacccaagtctttgc

SEQ ID NO: 65610 - DNA, 21 bp, Homo sapiens
caggcccattcagcagtcggt

SEQ ID NO: 65611 - DNA, 17 bp, Homo sapiens
ccgtcctcatcacactg

SEQ ID NO: 65612 - DNA, 17 bp, Homo sapiens
ggcagcagcagcagcag

SEQ ID NO: 65613 - DNA, 24 bp, Homo sapiens
tcatacccaggaagctttttgaac

SEQ ID NO: 65614 - DNA, 16 bp, Homo sapiens
ggtgagaccaagaccc

SEQ ID NO: 65615 - DNA, 22 bp, Homo sapiens
cttctcccatagtcgtctccca

SEQ ID NO: 65616 - DNA, 18 bp, Homo sapiens
atgacgggtgctcagatt

SEQ ID NO: 65617 - DNA, 24 bp, Homo sapiens
gtttctctggggtagaaagctcgc

SEQ ID NO: 65618 - DNA, 18 bp, Homo sapiens
acagtccaatcaccagct

SEQ ID NO: 65619 - DNA, 20 bp, Homo sapiens
tactgccccgggcgctgctg

SEQ ID NO: 65620 - DNA, 18 bp, Homo sapiens
gctagcggagttcagtgt

SEQ ID NO: 65621 - DNA, 20 bp, Homo sapiens
gtgccctaccatggaatctg

SEQ ID NO: 65622 - DNA, 22 bp, Homo sapiens
ccctagttgtgatttaggtttc

SEQ ID NO: 65623 - DNA, 24 bp, Homo sapiens
aacttgaagaagaaaaagcagaag

SEQ ID NO: 65624 - DNA, 21 bp, Homo sapiens
agtgagctgagtgttgcagcc

SEQ ID NO: 65625 - DNA, 22 bp, Homo sapiens
gtgtttgaattggagatcttag

SEQ ID NO: 65626 - DNA, 21 bp, Homo sapiens
cagtccttatgctggaattgg

SEQ ID NO: 65627 - DNA, 16 bp, Homo sapiens
gacagctgcaggccgc

SEQ ID NO: 65628 - DNA, 23 bp, Homo sapiens
ctacctttcttctgctgcttcag

SEQ ID NO: 65629 - DNA, 20 bp, Homo sapiens
caggaaaggcttttgtgttt

SEQ ID NO: 65630 - DNA, 22 bp, Homo sapiens
ccatctttctccaacctgccat

SEQ ID NO: 65631 - DNA, 24 bp, Homo sapiens
tcttttggaacagaagaaatatct

SEQ ID NO: 65632 - DNA, 24 bp, Homo sapiens
tccttttctgagcctcatacctgc

SEQ ID NO: 65633 - DNA, 20 bp, Homo sapiens
tcccaaaaacggattttgga

SEQ ID NO: 65634 - DNA, 24 bp, Homo sapiens
accagccagaatataggaagttcc

SEQ ID NO: 65635 - DNA, 21 bp, Homo sapiens
cggaaagagctagaaaaaaac

SEQ ID NO: 65636 - DNA, 20 bp, Homo sapiens
ttgcctggagtttgacatcc

SEQ ID NO: 65637 - DNA, 22 bp, Homo sapiens
aagtactaattccagtcttttt

SEQ ID NO: 65638 - DNA, 19 bp, Homo sapiens
tggccaggtgagattccag

SEQ ID NO: 65639 - DNA, 23 bp, Homo sapiens
ccttctcagtccttcttacattg

SEQ ID NO: 65640 - DNA, 19 bp, Homo sapiens
ctggagaacatggcttctg

SEQ ID NO: 65641 - DNA, 22 bp, Homo sapiens
gcttactttccataaagttgta

SEQ ID NO: 65642 - DNA, 24 bp, Homo sapiens
gaaagtgcttgtatagctggacca

SEQ ID NO: 65643 - DNA, 23 bp, Homo sapiens
gcagctgttggttcttggggagg

SEQ ID NO: 65644 - DNA, 22 bp, Homo sapiens
tcatcaagccattctctatgcc

SEQ ID NO: 65645 - DNA, 21 bp, Homo sapiens
ggttagctctcaaacagtgag

SEQ ID NO: 65646 - DNA, 18 bp, Homo sapiens
ggtctggctcccgagccc

SEQ ID NO: 65647 - DNA, 23 bp, Homo sapiens
cctgtttaatgacgtctatgtgc

SEQ ID NO: 65648 - DNA, 24 bp, Homo sapiens
tctgcagttgttccaaatagagct

SEQ ID NO: 65649 - DNA, 18 bp, Homo sapiens
ggactggtttattttgcc

SEQ ID NO: 65650 - DNA, 24 bp, Homo sapiens
aactccatctgctgctggaccgac

SEQ ID NO: 65651 - DNA, 17 bp, Homo sapiens
tgctcagtcaggtttcc

SEQ ID NO: 65652 - DNA, 17 bp, Homo sapiens
cagcagaaccacttcct

SEQ ID NO: 65653 - DNA, 16 bp, Homo sapiens
attgcggagctgcgga

SEQ ID NO: 65654 - DNA, 24 bp, Homo sapiens
tttctttaacctgtctgaaggaag

SEQ ID NO: 65655 - DNA, 19 bp, Homo sapiens
tcctcaaacttcatgtcca

SEQ ID NO: 65656 - DNA, 24 bp, Homo sapiens
tgcctcatttcttcttaccttttg

SEQ ID NO: 65657 - DNA, 24 bp, Homo sapiens
ttgagctaaggcattcccagtcct

SEQ ID NO: 65658 - DNA, 23 bp, Homo sapiens
ttgttgttggccttcttcagttc

SEQ ID NO: 65659 - DNA, 23 bp, Homo sapiens
cttactttttaaaactaagacat

SEQ ID NO: 65660 - DNA, 21 bp, Homo sapiens
gaggaattctacaaccagagc

SEQ ID NO: 65661 - DNA, 22 bp, Homo sapiens
tttcagagagaaaagcattcag

SEQ ID NO: 65662 - DNA, 20 bp, Homo sapiens
cagcgtgacactatggtaac

SEQ ID NO: 65663 - DNA, 16 bp, Homo sapiens
gcctccctccccactg

SEQ ID NO: 65664 - DNA, 19 bp, Homo sapiens
cagatgtggaaggttagtc

SEQ ID NO: 65665 - DNA, 19 bp, Homo sapiens
acctgtaattcctggctct

SEQ ID NO: 65666 - DNA, 22 bp, Homo sapiens
gctaaaatgatgacatttctgg

SEQ ID NO: 65667 - DNA, 21 bp, Homo sapiens
gtctgatctggctgtggagct

SEQ ID NO: 65668 - DNA, 24 bp, Homo sapiens
gcttatgactattcagatgaaatg

SEQ ID NO: 65669 - DNA, 19 bp, Homo sapiens
gcttgttctttctgcagac

SEQ ID NO: 65670 - DNA, 21 bp, Homo sapiens
aagacagtagtgagctctaag

SEQ ID NO: 65671 - DNA, 21 bp, Homo sapiens
aggaacataatgctgccatgg

SEQ ID NO: 65672 - DNA, 23 bp, Homo sapiens
ttcatgtcttaatctcaagcgac

SEQ ID NO: 65673 - DNA, 17 bp, Homo sapiens
ccctccggaacaggcgg

SEQ ID NO: 65674 - DNA, 21 bp, Homo sapiens
tcggctgctgtgctttataag

SEQ ID NO: 65675 - DNA, 19 bp, Homo sapiens
gaccagttgcttttactgc

SEQ ID NO: 65676 - DNA, 24 bp, Homo sapiens
cacctgtcccctccccagtcctca

SEQ ID NO: 65677 - DNA, 19 bp, Homo sapiens
caccctccctctgctttac

SEQ ID NO: 65678 - DNA, 20 bp, Homo sapiens
tttgatcaccttgcggagga

SEQ ID NO: 65679 - DNA, 23 bp, Homo sapiens
tgtgtttgttaagctaacaacac

SEQ ID NO: 65680 - DNA, 21 bp, Homo sapiens
atagagtaactggttgtgcag

SEQ ID NO: 65681 - DNA, 19 bp, Homo sapiens
ttgctgggagtcaagtggt

SEQ ID NO: 65682 - DNA, 18 bp, Homo sapiens
gcaagtctgtcgactgga

SEQ ID NO: 65683 - DNA, 22 bp, Homo sapiens
gatagcctggccggagcaatag

SEQ ID NO: 65684 - DNA, 20 bp, Homo sapiens
tggtaagatcggtaactttg

SEQ ID NO: 65685 - DNA, 19 bp, Homo sapiens
caaggacagaaagggcaac

SEQ ID NO: 65686 - DNA, 21 bp, Homo sapiens
tttgaccacaaggaagtgatc

SEQ ID NO: 65687 - DNA, 21 bp, Homo sapiens
aactttacctccaaagtgggt

SEQ ID NO: 65688 - DNA, 22 bp, Homo sapiens
aggcttctcctctaactctctg

SEQ ID NO: 65689 - DNA, 24 bp, Homo sapiens
cagcctagaaggacatctgacaaa

SEQ ID NO: 65690 - DNA, 18 bp, Homo sapiens
ctacctccccaatggaag

SEQ ID NO: 65691 - DNA, 24 bp, Homo sapiens
tgtgaagaatgattcttgttcctc

SEQ ID NO: 65692 - DNA, 19 bp, Homo sapiens
caggaagactgaggagctg

SEQ ID NO: 65693 - DNA, 19 bp, Homo sapiens
agaagagagtgccccagtc

SEQ ID NO: 65694 - DNA, 21 bp, Homo sapiens
cccccgtatgatcatcttttt

SEQ ID NO: 65695 - DNA, 21 bp, Homo sapiens
ctgctgtatcagtctgtccag

SEQ ID NO: 65696 - DNA, 19 bp, Homo sapiens
ccagtccttgtaaaattcc

SEQ ID NO: 65697 - DNA, 23 bp, Homo sapiens
cctctgtgtttccttttgctttc

SEQ ID NO: 65698 - DNA, 20 bp, Homo sapiens
tgatgaaagccctgcgggag

SEQ ID NO: 65699 - DNA, 20 bp, Homo sapiens
tgtctttggcaatgccacct

SEQ ID NO: 65700 - DNA, 17 bp, Homo sapiens
gcttgggcctgacacac

SEQ ID NO: 65701 - DNA, 22 bp, Homo sapiens
cactctcgtcggaggtggaatt

SEQ ID NO: 65702 - DNA, 24 bp, Homo sapiens
ggcagcctccagttctcagggcgc

SEQ ID NO: 65703 - DNA, 19 bp, Homo sapiens
tctggcattccctgtctcc

SEQ ID NO: 65704 - DNA, 20 bp, Homo sapiens
gctttgactctcccttttac

SEQ ID NO: 65705 - DNA, 24 bp, Homo sapiens
aggtctatgggagtaaaggcttgc

SEQ ID NO: 65706 - DNA, 24 bp, Homo sapiens
agctgcaatatctagagaactttc

SEQ ID NO: 65707 - DNA, 16 bp, Homo sapiens
gggttcacgctggcgc

SEQ ID NO: 65708 - DNA, 23 bp, Homo sapiens
ctagtctttcccaggtggaatac

SEQ ID NO: 65709 - DNA, 23 bp, Homo sapiens
gctgagaacctgggagactgtct

SEQ ID NO: 65710 - DNA, 21 bp, Homo sapiens
tttctcctctctctgagtgac

SEQ ID NO: 65711 - DNA, 18 bp, Homo sapiens
ctctgctgtggtgatctc

SEQ ID NO: 65712 - DNA, 18 bp, Homo sapiens
gcctcccaaagttctggc

SEQ ID NO: 65713 - DNA, 23 bp, Homo sapiens
ttgaaaaagataaagaagaaggt

SEQ ID NO: 65714 - DNA, 24 bp, Homo sapiens
cctggcataggtcccagactaaac

SEQ ID NO: 65715 - DNA, 21 bp, Homo sapiens
cactctaagtgatcttccagg

SEQ ID NO: 65716 - DNA, 24 bp, Homo sapiens
agcctgtgagcaatggcacaaaat

SEQ ID NO: 65717 - DNA, 21 bp, Homo sapiens
tgacttcagttgtctttgttt

SEQ ID NO: 65718 - DNA, 20 bp, Homo sapiens
tcaactcatagcaatcccac

SEQ ID NO: 65719 - DNA, 25 bp, Homo sapiens
acagacatattctatacagtgtaag

SEQ ID NO: 65720 - DNA, 22 bp, Homo sapiens
ttcagaggccagatcacctaaa

SEQ ID NO: 65721 - DNA, 18 bp, Homo sapiens
agtatccccaggacagag

SEQ ID NO: 65722 - DNA, 24 bp, Homo sapiens
ctgtttttgatattattaggttgg

SEQ ID NO: 65723 - DNA, 19 bp, Homo sapiens
tgtctacacagacaacacc

SEQ ID NO: 65724 - DNA, 23 bp, Homo sapiens
gcctcagtattttggatatccca

SEQ ID NO: 65725 - DNA, 27 bp, Homo sapiens
tttttcgtcttgtgatataaatgatac

SEQ ID NO: 65726 - DNA, 18 bp, Homo sapiens
aacccaattagaagaggc

SEQ ID NO: 65727 - DNA, 18 bp, Homo sapiens
actcggctgacctttaaa

SEQ ID NO: 65728 - DNA, 22 bp, Homo sapiens
cctctgtcattcagaagatggt

SEQ ID NO: 65729 - DNA, 17 bp, Homo sapiens
gagcgaaactccacctc

SEQ ID NO: 65730 - DNA, 16 bp, Homo sapiens
ggccacagtcacaccc

SEQ ID NO: 65731 - DNA, 24 bp, Homo sapiens
tttcaattattctgattcaaaccc

SEQ ID NO: 65732 - DNA, 18 bp, Homo sapiens
ctctcctcctccagcccc

SEQ ID NO: 65733 - DNA, 22 bp, Homo sapiens
ttaggcttctcaaagtgaggct

SEQ ID NO: 65734 - DNA, 22 bp, Homo sapiens
atatatgttctgcccttgtctc

SEQ ID NO: 65735 - DNA, 19 bp, Homo sapiens
gctggatcgcaccttcctg

SEQ ID NO: 65736 - DNA, 24 bp, Homo sapiens
atagtaatagttataggctgaaaa

SEQ ID NO: 65737 - DNA, 19 bp, Homo sapiens
tcatccgaatgacagagtg

SEQ ID NO: 65738 - DNA, 21 bp, Homo sapiens
caaaaaagagagagactgatc

SEQ ID NO: 65739 - DNA, 20 bp, Homo sapiens
aagtctttggtacaactggt

SEQ ID NO: 65740 - DNA, 24 bp, Homo sapiens
cacattctgaaagccccagggatt

SEQ ID NO: 65741 - DNA, 19 bp, Homo sapiens
ccactcctccaacttctcc

SEQ ID NO: 65742 - DNA, 24 bp, Homo sapiens
gtggtcccttagatctaaaagaga

SEQ ID NO: 65743 - DNA, 22 bp, Homo sapiens
actgctgatgtactttattaac

SEQ ID NO: 65744 - DNA, 23 bp, Homo sapiens
atccaacctaagacatacatacc

SEQ ID NO: 65745 - DNA, 18 bp, Homo sapiens
gctgaacactggccatgg

SEQ ID NO: 65746 - DNA, 20 bp, Homo sapiens
tcaggtgggacatttccagg

SEQ ID NO: 65747 - DNA, 21 bp, Homo sapiens
acttgtttcttgatacgcttt

SEQ ID NO: 65748 - DNA, 22 bp, Homo sapiens
ttcaagatgaatctaagaggca

SEQ ID NO: 65749 - DNA, 18 bp, Homo sapiens
tctgagttccccatcgac

SEQ ID NO: 65750 - DNA, 23 bp, Homo sapiens
aaagtgactcctgaaatgagcag

SEQ ID NO: 65751 - DNA, 19 bp, Homo sapiens
tctaccccttactccacgt

SEQ ID NO: 65752 - DNA, 19 bp, Homo sapiens
ggtcagcttcaccagaaag

SEQ ID NO: 65753 - DNA, 21 bp, Homo sapiens
gaataacctaaaaccacacac

SEQ ID NO: 65754 - DNA, 21 bp, Homo sapiens
ttatcaaatggtctagaggac

SEQ ID NO: 65755 - DNA, 21 bp, Homo sapiens
taacaacatcagccgagacgt

SEQ ID NO: 65756 - DNA, 22 bp, Homo sapiens
actttgtccccaaggatgtcag

SEQ ID NO: 65757 - DNA, 24 bp, Homo sapiens
ttagaagaaaatggagggacatgc

SEQ ID NO: 65758 - DNA, 19 bp, Homo sapiens
ccgctttcctcatcgttca

SEQ ID NO: 65759 - DNA, 23 bp, Homo sapiens
aactaagtcttactccagaaaag

SEQ ID NO: 65760 - DNA, 16 bp, Homo sapiens
ggatcccacagaagcc

SEQ ID NO: 65761 - DNA, 22 bp, Homo sapiens
aaaacagataagtaccaaagac

SEQ ID NO: 65762 - DNA, 21 bp, Homo sapiens
tgcattttacaggtggaagag

SEQ ID NO: 65763 - DNA, 17 bp, Homo sapiens
ctggtggtgacatcggc

SEQ ID NO: 65764 - DNA, 22 bp, Homo sapiens
gagttgacactctgaagtattt

SEQ ID NO: 65765 - DNA, 20 bp, Homo sapiens
tagccatcttcatatgaggc

SEQ ID NO: 65766 - DNA, 16 bp, Homo sapiens
tgggctggcatggtcc

SEQ ID NO: 65767 - DNA, 21 bp, Homo sapiens
aacatcatgagtttctaatct

SEQ ID NO: 65768 - DNA, 16 bp, Homo sapiens
ctggaccctcgaaggt

SEQ ID NO: 65769 - DNA, 20 bp, Homo sapiens
gctgtatgagtgcttccaag

SEQ ID NO: 65770 - DNA, 18 bp, Homo sapiens
agccaatgatggagcatg

SEQ ID NO: 65771 - DNA, 19 bp, Homo sapiens
acctcaacagggattacct

SEQ ID NO: 65772 - DNA, 19 bp, Homo sapiens
tccatcatttggatgttcc

SEQ ID NO: 65773 - DNA, 22 bp, Homo sapiens
tgacactagtttctataccttc

SEQ ID NO: 65774 - DNA, 21 bp, Homo sapiens
aaggttccatctgtgttataa

SEQ ID NO: 65775 - DNA, 21 bp, Homo sapiens
ctaattccggatgaattcgca

SEQ ID NO: 65776 - DNA, 23 bp, Homo sapiens
ggcaaatctattaagacagaaaa

SEQ ID NO: 65777 - DNA, 21 bp, Homo sapiens
cagtatgaaagaaaacctgga

SEQ ID NO: 65778 - DNA, 24 bp, Homo sapiens
gcgaggaagaaaactgaatttctt

SEQ ID NO: 65779 - DNA, 23 bp, Homo sapiens
actctttcatcgcctttatggaa

SEQ ID NO: 65780 - DNA, 21 bp, Homo sapiens
aatgcagcctatctaaacagt

SEQ ID NO: 65781 - DNA, 17 bp, Homo sapiens
tctaggccacgtggcgg

SEQ ID NO: 65782 - DNA, 22 bp, Homo sapiens
tgaccacttcttcaaaagtctc

SEQ ID NO: 65783 - DNA, 24 bp, Homo sapiens
cttgtttatagctgttttgcactc

SEQ ID NO: 65784 - DNA, 24 bp, Homo sapiens
aggagacgaagttgcaagggtaca

SEQ ID NO: 65785 - DNA, 17 bp, Homo sapiens
ctttggagtgaggtggg

SEQ ID NO: 65786 - DNA, 19 bp, Homo sapiens
tggacgagatagacttccg

SEQ ID NO: 65787 - DNA, 17 bp, Homo sapiens
ctgtcatcatggtgcct

SEQ ID NO: 65788 - DNA, 20 bp, Homo sapiens
tctgtctggtgaaaaccact

SEQ ID NO: 65789 - DNA, 21 bp, Homo sapiens
tgctaccaatgattccacagt

SEQ ID NO: 65790 - DNA, 24 bp, Homo sapiens
cagcatatgagcaattaatcaata

SEQ ID NO: 65791 - DNA, 20 bp, Homo sapiens
ctcctgcagatggacactga

SEQ ID NO: 65792 - DNA, 24 bp, Homo sapiens
tgaggagatctgtacctggtttct

SEQ ID NO: 65793 - DNA, 18 bp, Homo sapiens
acaatgccgatcctggtg

SEQ ID NO: 65794 - DNA, 22 bp, Homo sapiens
aatcaagaagatgctgtttccc

SEQ ID NO: 65795 - DNA, 22 bp, Homo sapiens
ggaaatgagtacgtgagtcaac

SEQ ID NO: 65796 - DNA, 22 bp, Homo sapiens
aagacgcctgttgtgaggacaa

SEQ ID NO: 65797 - DNA, 21 bp, Homo sapiens
acctcttttgccttctttact

SEQ ID NO: 65798 - DNA, 23 bp, Homo sapiens
agaaaagccaaatgcctagaagg

SEQ ID NO: 65799 - DNA, 19 bp, Homo sapiens
tcctctcgttactgggtca

SEQ ID NO: 65800 - DNA, 24 bp, Homo sapiens
tttaagttgcctaaaatttcagaa

SEQ ID NO: 65801 - DNA, 19 bp, Homo sapiens
agcacctcttggacaggat

SEQ ID NO: 65802 - DNA, 24 bp, Homo sapiens
catcctaccttgagacattttagt

SEQ ID NO: 65803 - DNA, 24 bp, Homo sapiens
gctgtctttatttgtgttaacttc

SEQ ID NO: 65804 - DNA, 23 bp, Homo sapiens
cttccaagatggctgcagtctta

SEQ ID NO: 65805 - DNA, 22 bp, Homo sapiens
gcatgacccttgctttacatta

SEQ ID NO: 65806 - DNA, 20 bp, Homo sapiens
cggctttgcccacatattcg

SEQ ID NO: 65807 - DNA, 17 bp, Homo sapiens
ccaccttgcaagagcca

SEQ ID NO: 65808 - DNA, 24 bp, Homo sapiens
taaactgggaacaatgtcatcagt

SEQ ID NO: 65809 - DNA, 19 bp, Homo sapiens
cttgtaaacaccttggtgg

SEQ ID NO: 65810 - DNA, 20 bp, Homo sapiens
cagtggccgtgcacagaagc

SEQ ID NO: 65811 - DNA, 22 bp, Homo sapiens
ggatgttaaggggaataagtat

SEQ ID NO: 65812 - DNA, 23 bp, Homo sapiens
atttcagccattaccttgtcatg

SEQ ID NO: 65813 - DNA, 23 bp, Homo sapiens
agcatataaagaaacattttctg

SEQ ID NO: 65814 - DNA, 23 bp, Homo sapiens
ggctgagagctggtttccaggta

SEQ ID NO: 65815 - DNA, 24 bp, Homo sapiens
taagcttggaatatcttattatta

SEQ ID NO: 65816 - DNA, 20 bp, Homo sapiens
cgtgacagctgtctttaaag

SEQ ID NO: 65817 - DNA, 24 bp, Homo sapiens
gatactctctttgggtgtttaaaa

SEQ ID NO: 65818 - DNA, 16 bp, Homo sapiens
tcggggagcttcttgc

SEQ ID NO: 65819 - DNA, 22 bp, Homo sapiens
ggattctagtggctctaaagtc

SEQ ID NO: 65820 - DNA, 16 bp, Homo sapiens
gcacacgtcctggagc

SEQ ID NO: 65821 - DNA, 24 bp, Homo sapiens
attttgctaaccagaattgaggtt

SEQ ID NO: 65822 - DNA, 24 bp, Homo sapiens
tagtgactgttcatcttccttttt

SEQ ID NO: 65823 - DNA, 17 bp, Homo sapiens
tgggggagtccagcatg

SEQ ID NO: 65824 - DNA, 22 bp, Homo sapiens
cacgtgcattagtttgtcttgc

SEQ ID NO: 65825 - DNA, 17 bp, Homo sapiens
gcaccggacgtcgcctt

SEQ ID NO: 65826 - DNA, 16 bp, Homo sapiens
ccagtgtccgtcgcgt

SEQ ID NO: 65827 - DNA, 19 bp, Homo sapiens
cggcagaactcacctttgc

SEQ ID NO: 65828 - DNA, 24 bp, Homo sapiens
cagactgagcgccgcacccgccat

SEQ ID NO: 65829 - DNA, 16 bp, Homo sapiens
cgcccgctccgctgct

SEQ ID NO: 65830 - DNA, 23 bp, Homo sapiens
gccccagcgcgcacgggcgatgg

SEQ ID NO: 65831 - DNA, 19 bp, Homo sapiens
gggtggccggcgaccgcac

SEQ ID NO: 65832 - DNA, 24 bp, Homo sapiens
gctgttgctgctgctgctgccgct

SEQ ID NO: 65833 - DNA, 20 bp, Homo sapiens
gagaagtagaggcccaatgc

SEQ ID NO: 65834 - DNA, 24 bp, Homo sapiens
taattgagtgttcatgttctcagg

SEQ ID NO: 65835 - DNA, 17 bp, Homo sapiens
agcaagggcgtgccggc

SEQ ID NO: 65836 - DNA, 29 bp, Homo sapiens
ttttaaattaatgattttttttttttttg

SEQ ID NO: 65837 - DNA, 16 bp, Homo sapiens
gagatgctggcccagg

SEQ ID NO: 65838 - DNA, 19 bp, Homo sapiens
tccctacttcccacagtgg

SEQ ID NO: 65839 - DNA, 21 bp, Homo sapiens
gtgtcctcctggatgcagatc

SEQ ID NO: 65840 - DNA, 23 bp, Homo sapiens
gagaagctgtatgtggaccaggc

SEQ ID NO: 65841 - DNA, 17 bp, Homo sapiens
gacactgagcttctccc

SEQ ID NO: 65842 - DNA, 16 bp, Homo sapiens
aggtgcccagcttccg

SEQ ID NO: 65843 - DNA, 23 bp, Homo sapiens
taagggcggcttgaggaaggggt

SEQ ID NO: 65844 - DNA, 23 bp, Homo sapiens
ctgcatgagaacaactggatctg

SEQ ID NO: 65845 - DNA, 16 bp, Homo sapiens
accagcggtggggggg

SEQ ID NO: 65846 - DNA, 20 bp, Homo sapiens
ggagcctggaccatagctcc

SEQ ID NO: 65847 - DNA, 17 bp, Homo sapiens
tgaggtagacggtgagc

SEQ ID NO: 65848 - DNA, 24 bp, Homo sapiens
cagtctgagccttgtggaccttgg

SEQ ID NO: 65849 - DNA, 16 bp, Homo sapiens
acagcctggccactgg

SEQ ID NO: 65850 - DNA, 22 bp, Homo sapiens
cctcctccccattcccgactgc

SEQ ID NO: 65851 - DNA, 17 bp, Homo sapiens
gcttgagggagctgcag

SEQ ID NO: 65852 - DNA, 24 bp, Homo sapiens
ttctctctgcagaccgcggctttc

SEQ ID NO: 65853 - DNA, 16 bp, Homo sapiens
tgggggtcggttctcc

SEQ ID NO: 65854 - DNA, 24 bp, Homo sapiens
acatcccttcgtgagggcgagtgc

SEQ ID NO: 65855 - DNA, 18 bp, Homo sapiens
gccacgctgatgttgggg

SEQ ID NO: 65856 - DNA, 23 bp, Homo sapiens
ttcttcaacacctcctttccagc

SEQ ID NO: 65857 - DNA, 18 bp, Homo sapiens
gtagcaggcactgtgggg

SEQ ID NO: 65858 - DNA, 17 bp, Homo sapiens
ccctccttccgcattcg

SEQ ID NO: 65859 - DNA, 24 bp, Homo sapiens
atggcatgaaggtgaagaataaac

SEQ ID NO: 65860 - DNA, 20 bp, Homo sapiens
cctgtgcagttcttgtgccc

SEQ ID NO: 65861 - DNA, 16 bp, Homo sapiens
agtacctggcccctgg

SEQ ID NO: 65862 - DNA, 16 bp, Homo sapiens
ccctcccctgtggagc

SEQ ID NO: 65863 - DNA, 17 bp, Homo sapiens
tcgcggtccagggccca

SEQ ID NO: 65864 - DNA, 18 bp, Homo sapiens
ctctgaccgcagagcccc

SEQ ID NO: 65865 - DNA, 16 bp, Homo sapiens
gcgcgccggcgtgcac

SEQ ID NO: 65866 - DNA, 16 bp, Homo sapiens
cggggcccctgtctgc

SEQ ID NO: 65867 - DNA, 16 bp, Homo sapiens
gtgggcgccgagtcgt

SEQ ID NO: 65868 - DNA, 16 bp, Homo sapiens
tggaggtgagcacgcg

SEQ ID NO: 65869 - DNA, 18 bp, Homo sapiens
gacaagcacctccttccg

SEQ ID NO: 65870 - DNA, 16 bp, Homo sapiens
gtggccgtgtgcaccg

SEQ ID NO: 65871 - DNA, 23 bp, Homo sapiens
actaaaccgaccgagaaacgaac

SEQ ID NO: 65872 - DNA, 17 bp, Homo sapiens
cggtgaccgtgtacgac

SEQ ID NO: 65873 - DNA, 20 bp, Homo sapiens
gcgaaggacaaatgaaagcg

SEQ ID NO: 65874 - DNA, 16 bp, Homo sapiens
cgtggtggagttcaag

SEQ ID NO: 65875 - DNA, 18 bp, Homo sapiens
atcgaagacacgcagcgt

SEQ ID NO: 65876 - DNA, 23 bp, Homo sapiens
gacaacacacatctggtccacct

SEQ ID NO: 65877 - DNA, 17 bp, Homo sapiens
gggagcagcgtgcttgt

SEQ ID NO: 65878 - DNA, 16 bp, Homo sapiens
gggggtctgaggggcc

SEQ ID NO: 65879 - DNA, 16 bp, Homo sapiens
cgaggtctcgttgggc

SEQ ID NO: 65880 - DNA, 16 bp, Homo sapiens
aggacaccgtggtggc

SEQ ID NO: 65881 - DNA, 17 bp, Homo sapiens
caccagcccctcttact

SEQ ID NO: 65882 - DNA, 18 bp, Homo sapiens
ctggtgaggcggtacaca

SEQ ID NO: 65883 - DNA, 16 bp, Homo sapiens
tagggtgctgcttgcc

SEQ ID NO: 65884 - DNA, 16 bp, Homo sapiens
gggtggaacactggcc

SEQ ID NO: 65885 - DNA, 17 bp, Homo sapiens
gagggtggaggggaagt

SEQ ID NO: 65886 - DNA, 21 bp, Homo sapiens
gaccgtacatgactatagtaa

SEQ ID NO: 65887 - DNA, 17 bp, Homo sapiens
ccggttgagaaccagcc

SEQ ID NO: 65888 - DNA, 20 bp, Homo sapiens
ccaggcctgttgcatggcac

SEQ ID NO: 65889 - DNA, 21 bp, Homo sapiens
aagtctgagtcattgaccagc

SEQ ID NO: 65890 - DNA, 23 bp, Homo sapiens
gctgtgtctgggaagaggtgtgc

SEQ ID NO: 65891 - DNA, 16 bp, Homo sapiens
accggcagcaccgaca

SEQ ID NO: 65892 - DNA, 20 bp, Homo sapiens
attgttgtgcccctacctgc

SEQ ID NO: 65893 - DNA, 18 bp, Homo sapiens
caaatcggcgagccctcc

SEQ ID NO: 65894 - DNA, 16 bp, Homo sapiens
atgcagctggcggtgc

SEQ ID NO: 65895 - DNA, 16 bp, Homo sapiens
ccccatgtcccttggc

SEQ ID NO: 65896 - DNA, 20 bp, Homo sapiens
cttgctccacttcaacgtgt

SEQ ID NO: 65897 - DNA, 24 bp, Homo sapiens
ctcaggactccacccagtctactc

SEQ ID NO: 65898 - DNA, 18 bp, Homo sapiens
tctccgtgagcaggaggg

SEQ ID NO: 65899 - DNA, 19 bp, Homo sapiens
gcagttttccacacagact

SEQ ID NO: 65900 - DNA, 19 bp, Homo sapiens
tcgggggggctgctgtctc

SEQ ID NO: 65901 - DNA, 16 bp, Homo sapiens
tgcagttggcaccaga

SEQ ID NO: 65902 - DNA, 24 bp, Homo sapiens
gaatctctaccctcaggccattac

SEQ ID NO: 65903 - DNA, 21 bp, Homo sapiens
ttggtgtcattcacaaacagg

SEQ ID NO: 65904 - DNA, 16 bp, Homo sapiens
ctagatcgggaaagtc

SEQ ID NO: 65905 - DNA, 16 bp, Homo sapiens
gtcggtggccaccacc

SEQ ID NO: 65906 - DNA, 22 bp, Homo sapiens
gtccagtacaagctgcattcct

SEQ ID NO: 65907 - DNA, 17 bp, Homo sapiens
actcacatgacccctcc

SEQ ID NO: 65908 - DNA, 18 bp, Homo sapiens
acacctcggggatcctgt

SEQ ID NO: 65909 - DNA, 17 bp, Homo sapiens
tcaaagggcaggaggcc

SEQ ID NO: 65910 - DNA, 23 bp, Homo sapiens
tgtgccgaacttcactacatggt

SEQ ID NO: 65911 - DNA, 21 bp, Homo sapiens
gtgaagctggtccatgccttc

SEQ ID NO: 65912 - DNA, 16 bp, Homo sapiens
agctgcttgtaacagt

SEQ ID NO: 65913 - DNA, 18 bp, Homo sapiens
ggcactgtctttgctgcc

SEQ ID NO: 65914 - DNA, 16 bp, Homo sapiens
ctcctcacactccagc

SEQ ID NO: 65915 - DNA, 17 bp, Homo sapiens
ctggtgctgttccctgt

SEQ ID NO: 65916 - DNA, 20 bp, Homo sapiens
tacctttgccatctccttgc

SEQ ID NO: 65917 - DNA, 20 bp, Homo sapiens
ccccctgtgaccctgcttgt

SEQ ID NO: 65918 - DNA, 18 bp, Homo sapiens
ggaccccgtttccaccgg

SEQ ID NO: 65919 - DNA, 20 bp, Homo sapiens
cctgtgcagtcagcaagaga

SEQ ID NO: 65920 - DNA, 18 bp, Homo sapiens
atgaggtgccagaagcag

SEQ ID NO: 65921 - DNA, 24 bp, Homo sapiens
ccaacaggcaggtgtgagtggagg

SEQ ID NO: 65922 - DNA, 18 bp, Homo sapiens
gcttccgctggcaaggct

SEQ ID NO: 65923 - DNA, 16 bp, Homo sapiens
acatcgcagtggccgt

SEQ ID NO: 65924 - DNA, 23 bp, Homo sapiens
ctccctagaggggcaggatctgc

SEQ ID NO: 65925 - DNA, 20 bp, Homo sapiens
tgattaaaccctgcttacgg

SEQ ID NO: 65926 - DNA, 19 bp, Homo sapiens
gtgacagcctgctgtgtgt

SEQ ID NO: 65927 - DNA, 20 bp, Homo sapiens
gctgaagtgcctgtgggatc

SEQ ID NO: 65928 - DNA, 21 bp, Homo sapiens
cagcaccaagacctgccccga

SEQ ID NO: 65929 - DNA, 17 bp, Homo sapiens
ctgaaatgcacaggagg

SEQ ID NO: 65930 - DNA, 22 bp, Homo sapiens
caacatttgccctcaggactgc

SEQ ID NO: 65931 - DNA, 22 bp, Homo sapiens
gggctccccaggctcgtgtccc

SEQ ID NO: 65932 - DNA, 18 bp, Homo sapiens
gcctcactgggcctatgc

SEQ ID NO: 65933 - DNA, 19 bp, Homo sapiens
ttctcctcctcagggaagc

SEQ ID NO: 65934 - DNA, 20 bp, Homo sapiens
cctggaaatatgggcgcctg

SEQ ID NO: 65935 - DNA, 20 bp, Homo sapiens
ctgggaggtggtggtggtcc

SEQ ID NO: 65936 - DNA, 24 bp, Homo sapiens
tctgccctcagggggcagcattgt

SEQ ID NO: 65937 - DNA, 19 bp, Homo sapiens
ctcccagcaatttcctccc

SEQ ID NO: 65938 - DNA, 22 bp, Homo sapiens
ctatggcacctgcaactgcttc

SEQ ID NO: 65939 - DNA, 17 bp, Homo sapiens
gtggagtaacagaggcc

SEQ ID NO: 65940 - DNA, 19 bp, Homo sapiens
cagctcgtcgcacagtgga

SEQ ID NO: 65941 - DNA, 21 bp, Homo sapiens
ttcccacacctccatggccac

SEQ ID NO: 65942 - DNA, 17 bp, Homo sapiens
agacagcagcaccgaga

SEQ ID NO: 65943 - DNA, 16 bp, Homo sapiens
cagagcatacgcagcc

SEQ ID NO: 65944 - DNA, 17 bp, Homo sapiens
tcagctgaggagatggg

SEQ ID NO: 65945 - DNA, 24 bp, Homo sapiens
tcacaccacccccacccacagatc

SEQ ID NO: 65946 - DNA, 16 bp, Homo sapiens
gggcaccggaagagga

SEQ ID NO: 65947 - DNA, 24 bp, Homo sapiens
ctgtcctcttctccttcatcgtct

SEQ ID NO: 65948 - DNA, 17 bp, Homo sapiens
accaggatcttgaaggc

SEQ ID NO: 65949 - DNA, 24 bp, Homo sapiens
ctaccacaagtttgcccacaagcc

SEQ ID NO: 65950 - DNA, 17 bp, Homo sapiens
cctccctccctggaagg

SEQ ID NO: 65951 - DNA, 20 bp, Homo sapiens
ccttcccggtcagctactcc

SEQ ID NO: 65952 - DNA, 18 bp, Homo sapiens
acacaggcctcgtctgcc

SEQ ID NO: 65953 - DNA, 19 bp, Homo sapiens
caggtctccgtggatgcct

SEQ ID NO: 65954 - DNA, 19 bp, Homo sapiens
ttcttccgagggaattccc

SEQ ID NO: 65955 - DNA, 21 bp, Homo sapiens
agatgacagccggttctctgc

SEQ ID NO: 65956 - DNA, 19 bp, Homo sapiens
cgttgccttgaccactttt

SEQ ID NO: 65957 - DNA, 21 bp, Homo sapiens
gccttcttcctcccctgtcat

SEQ ID NO: 65958 - DNA, 24 bp, Homo sapiens
tggcaggtacctttcagcatcttc

SEQ ID NO: 65959 - DNA, 24 bp, Homo sapiens
tttccaacataggaggatccaaag

SEQ ID NO: 65960 - DNA, 16 bp, Homo sapiens
gggcctcacccgcccc

SEQ ID NO: 65961 - DNA, 24 bp, Homo sapiens
actctaggagaaggcgaatttgga

SEQ ID NO: 65962 - DNA, 17 bp, Homo sapiens
tgcagccgctctagaac

SEQ ID NO: 65963 - DNA, 17 bp, Homo sapiens
gggtacaccacggtggc

SEQ ID NO: 65964 - DNA, 16 bp, Homo sapiens
actcggggaggcgttc

SEQ ID NO: 65965 - DNA, 22 bp, Homo sapiens
cctcaagcagcatcgtctttgc

SEQ ID NO: 65966 - DNA, 23 bp, Homo sapiens
atttgatgacatgtgggtggttg

SEQ ID NO: 65967 - DNA, 23 bp, Homo sapiens
gtccatcctgacctggtatggtc

SEQ ID NO: 65968 - DNA, 17 bp, Homo sapiens
ctgcccacctcaccctg

SEQ ID NO: 65969 - DNA, 21 bp, Homo sapiens
tgtgctgcatttcagagaacg

SEQ ID NO: 65970 - DNA, 16 bp, Homo sapiens
gcagtagggaaaggga

SEQ ID NO: 65971 - DNA, 24 bp, Homo sapiens
gagttcaacgtcctgaagcaggtc

SEQ ID NO: 65972 - DNA, 17 bp, Homo sapiens
caggctggggcctgagc

SEQ ID NO: 65973 - DNA, 19 bp, Homo sapiens
ccgtatttggcgtactcca

SEQ ID NO: 65974 - DNA, 19 bp, Homo sapiens
ctgtgtccacccccttact

SEQ ID NO: 65975 - DNA, 24 bp, Homo sapiens
ccactgcccaggtagccaggcccc

SEQ ID NO: 65976 - DNA, 17 bp, Homo sapiens
ctggctcctggaagacc

SEQ ID NO: 65977 - DNA, 18 bp, Homo sapiens
tggtgagggcccgctcat

SEQ ID NO: 65978 - DNA, 16 bp, Homo sapiens
caggcccgctcctcct

SEQ ID NO: 65979 - DNA, 22 bp, Homo sapiens
cttcatctcggccagatactgc

SEQ ID NO: 65980 - DNA, 24 bp, Homo sapiens
gcttcctccgcgagagccgcaaag

SEQ ID NO: 65981 - DNA, 17 bp, Homo sapiens
gtgggtcagggtgtggc

SEQ ID NO: 65982 - DNA, 16 bp, Homo sapiens
ggaccacccggatgag

SEQ ID NO: 65983 - DNA, 16 bp, Homo sapiens
gtgggctagagtgtgg

SEQ ID NO: 65984 - DNA, 24 bp, Homo sapiens
cctggcagatctcacaggggatgc

SEQ ID NO: 65985 - DNA, 19 bp, Homo sapiens
tgccaagtcccgatgaacg

SEQ ID NO: 65986 - DNA, 23 bp, Homo sapiens
ccatgccacacccccggcccagg

SEQ ID NO: 65987 - DNA, 21 bp, Homo sapiens
atctcgggacaagccgaaatc

SEQ ID NO: 65988 - DNA, 17 bp, Homo sapiens
ggtcacaccaggctgag

SEQ ID NO: 65989 - DNA, 16 bp, Homo sapiens
cccgggactgggcacc

SEQ ID NO: 65990 - DNA, 24 bp, Homo sapiens
ctcgtgctatttttcctcacagct

SEQ ID NO: 65991 - DNA, 23 bp, Homo sapiens
atctttcctaggcttcccaaggg

SEQ ID NO: 65992 - DNA, 24 bp, Homo sapiens
tgaggggcggaagatgaagatttc

SEQ ID NO: 65993 - DNA, 22 bp, Homo sapiens
gaaagatttggggtgagggcta

SEQ ID NO: 65994 - DNA, 17 bp, Homo sapiens
gtgaagaggagccaggt

SEQ ID NO: 65995 - DNA, 22 bp, Homo sapiens
tgccatccatttaactggaatc

SEQ ID NO: 65996 - DNA, 18 bp, Homo sapiens
ttctgtgcccaggagtgt

SEQ ID NO: 65997 - DNA, 18 bp, Homo sapiens
cacccacacttacacatc

SEQ ID NO: 65998 - DNA, 19 bp, Homo sapiens
ctggccttctcctttaccc

SEQ ID NO: 65999 - DNA, 17 bp, Homo sapiens
gtcgtggccccactaca

SEQ ID NO: 66000 - DNA, 24 bp, Homo sapiens
tattccatcttctctttagggtcg

SEQ ID NO: 66001 - DNA, 24 bp, Homo sapiens
agagggctagcactgcagacaggt

SEQ ID NO: 66002 - DNA, 24 bp, Homo sapiens
tgatcatatctacaccacgcaaag

SEQ ID NO: 66003 - DNA, 17 bp, Homo sapiens
caggacaccaaaagacc

SEQ ID NO: 66004 - DNA, 20 bp, Homo sapiens
gctgacatctgtgagcatct

SEQ ID NO: 66005 - DNA, 18 bp, Homo sapiens
agccgctcaggaggaatc

SEQ ID NO: 66006 - DNA, 17 bp, Homo sapiens
gggtggatatctgggcc

SEQ ID NO: 66007 - DNA, 20 bp, Homo sapiens
acatctcctcgctgcagttg

SEQ ID NO: 66008 - DNA, 22 bp, Homo sapiens
ctttcactctctgcagatggtc

SEQ ID NO: 66009 - DNA, 24 bp, Homo sapiens
ggagggaatgcacacagatgtccc

SEQ ID NO: 66010 - DNA, 20 bp, Homo sapiens
aaacccctatcctgggattc

SEQ ID NO: 66011 - DNA, 16 bp, Homo sapiens
cccactccccaccccc

SEQ ID NO: 66012 - DNA, 20 bp, Homo sapiens
ccggatggagaggccagaca

SEQ ID NO: 66013 - DNA, 24 bp, Homo sapiens
gcttccagcattgcagcatcaggc

SEQ ID NO: 66014 - DNA, 22 bp, Homo sapiens
gaaatagctttggagttggaga

SEQ ID NO: 66015 - DNA, 20 bp, Homo sapiens
atcttctccaggtctttgct

SEQ ID NO: 66016 - DNA, 19 bp, Homo sapiens
ctgtggtgggctgtccttc

SEQ ID NO: 66017 - DNA, 21 bp, Homo sapiens
tctccccaagccactttcagc

SEQ ID NO: 66018 - DNA, 22 bp, Homo sapiens
gtctgctcttcccaccaggtac

SEQ ID NO: 66019 - DNA, 16 bp, Homo sapiens
ccccacactgggaact

SEQ ID NO: 66020 - DNA, 17 bp, Homo sapiens
cggtgtttgcggacatc

SEQ ID NO: 66021 - DNA, 19 bp, Homo sapiens
aatctgctgtctgcatgca

SEQ ID NO: 66022 - DNA, 16 bp, Homo sapiens
tcagatggagtggacg

SEQ ID NO: 66023 - DNA, 22 bp, Homo sapiens
gaggtcaggagattggtgcgag

SEQ ID NO: 66024 - DNA, 18 bp, Homo sapiens
attacagtccaccagcgg

SEQ ID NO: 66025 - DNA, 24 bp, Homo sapiens
gttgtatactgagttgtatctagt

SEQ ID NO: 66026 - DNA, 23 bp, Homo sapiens
ggaaattctaccatagagtttgt

SEQ ID NO: 66027 - DNA, 21 bp, Homo sapiens
tccaggactacttggaccttg

SEQ ID NO: 66028 - DNA, 21 bp, Homo sapiens
tcacagagaggaaggatagtg

SEQ ID NO: 66029 - DNA, 20 bp, Homo sapiens
ggcctctcagaggaggagac

SEQ ID NO: 66030 - DNA, 23 bp, Homo sapiens
ttacaaataaaaaggttcagagc

SEQ ID NO: 66031 - DNA, 24 bp, Homo sapiens
ccctcccttccacatggattgaaa

SEQ ID NO: 66032 - DNA, 22 bp, Homo sapiens
aaaaacatagttgcaataatgc

SEQ ID NO: 66033 - DNA, 17 bp, Homo sapiens
ccaggccagttcgggtc

SEQ ID NO: 66034 - DNA, 24 bp, Homo sapiens
ccattaatataattggcacagaaa

SEQ ID NO: 66035 - DNA, 20 bp, Homo sapiens
tttggatatcttggaaaccc

SEQ ID NO: 66036 - DNA, 24 bp, Homo sapiens
ttgccaaggccttactgtctgcac

SEQ ID NO: 66037 - DNA, 20 bp, Homo sapiens
aacgtgtccattaattttgc

SEQ ID NO: 66038 - DNA, 20 bp, Homo sapiens
tttttaggcatgtcagaccc

SEQ ID NO: 66039 - DNA, 18 bp, Homo sapiens
cagcatgtttcttcccct

SEQ ID NO: 66040 - DNA, 24 bp, Homo sapiens
gagagctgatggcactaacactgg

SEQ ID NO: 66041 - DNA, 17 bp, Homo sapiens
gggaactgaacacggct

SEQ ID NO: 66042 - DNA, 23 bp, Homo sapiens
actggatgctttcaccctcagcg

SEQ ID NO: 66043 - DNA, 17 bp, Homo sapiens
gccggaggaggggtcca

SEQ ID NO: 66044 - DNA, 16 bp, Homo sapiens
cccgccggcccctccc

SEQ ID NO: 66045 - DNA, 16 bp, Homo sapiens
gagcgggcgtccaggg

SEQ ID NO: 66046 - DNA, 24 bp, Homo sapiens
agggccagccgccggcaagggggc

SEQ ID NO: 66047 - DNA, 16 bp, Homo sapiens
cgccgcgttccatcgc

SEQ ID NO: 66048 - DNA, 16 bp, Homo sapiens
gaagcgcccgaagagt

SEQ ID NO: 66049 - DNA, 21 bp, Homo sapiens
gcagctgtggggctggcttgt

SEQ ID NO: 66050 - DNA, 16 bp, Homo sapiens
gcacccgaccacgggc

SEQ ID NO: 66051 - DNA, 16 bp, Homo sapiens
gcaccagcagctcggc

SEQ ID NO: 66052 - DNA, 20 bp, Homo sapiens
gggcgggcgtccgcgggcct

SEQ ID NO: 66053 - DNA, 17 bp, Homo sapiens
ccgggctccgcgaactc

SEQ ID NO: 66054 - DNA, 18 bp, Homo sapiens
cgccgactcttgccagga

SEQ ID NO: 66055 - DNA, 16 bp, Homo sapiens
gcggggcggggcaggc

SEQ ID NO: 66056 - DNA, 20 bp, Homo sapiens
cccttctccttcgccaagcc

SEQ ID NO: 66057 - DNA, 19 bp, Homo sapiens
agtgcgcgcgcgccgtgca

SEQ ID NO: 66058 - DNA, 20 bp, Homo sapiens
ccgagcctaagccttcctgc

SEQ ID NO: 66059 - DNA, 20 bp, Homo sapiens
gcacccgcgccgccccctcc

SEQ ID NO: 66060 - DNA, 16 bp, Homo sapiens
cccgacccggtcgccc

SEQ ID NO: 66061 - DNA, 22 bp, Homo sapiens
gcagagattggaatccgcctgc

SEQ ID NO: 66062 - DNA, 16 bp, Homo sapiens
cgagccgccggggcga

SEQ ID NO: 66063 - DNA, 16 bp, Homo sapiens
ccaagggcgggcagga

SEQ ID NO: 66064 - DNA, 16 bp, Homo sapiens
caactcacccggaccc

SEQ ID NO: 66065 - DNA, 24 bp, Homo sapiens
cggcgaagatcgcacggcccgatc

SEQ ID NO: 66066 - DNA, 16 bp, Homo sapiens
cctcgcccgagcccct

SEQ ID NO: 66067 - DNA, 17 bp, Homo sapiens
cgggccccacttcgccc

SEQ ID NO: 66068 - DNA, 22 bp, Homo sapiens
gagctgccggggccgggccggg

SEQ ID NO: 66069 - DNA, 20 bp, Homo sapiens
gaggatgcgttccctggggt

SEQ ID NO: 66070 - DNA, 16 bp, Homo sapiens
tgccgtgggtctctgg

SEQ ID NO: 66071 - DNA, 19 bp, Homo sapiens
ctggccgcagcggggaggc

SEQ ID NO: 66072 - DNA, 16 bp, Homo sapiens
aactcggcctgcaacc

SEQ ID NO: 66073 - DNA, 16 bp, Homo sapiens
gtggccggagccaggg

SEQ ID NO: 66074 - DNA, 21 bp, Homo sapiens
gcctttcccatttaaggattc

SEQ ID NO: 66075 - DNA, 16 bp, Homo sapiens
ctgggccgggaccgcc

SEQ ID NO: 66076 - DNA, 21 bp, Homo sapiens
gtccggagccaaatcacaaat

SEQ ID NO: 66077 - DNA, 20 bp, Homo sapiens
gcccctcttttgtctcccac

SEQ ID NO: 66078 - DNA, 16 bp, Homo sapiens
cctctcactcgacccc

SEQ ID NO: 66079 - DNA, 24 bp, Homo sapiens
gggcgaaagtcgctccggggacgc

SEQ ID NO: 66080 - DNA, 16 bp, Homo sapiens
ccgggagctcgggggc

SEQ ID NO: 66081 - DNA, 21 bp, Homo sapiens
tgtatagctgaggcattgttc

SEQ ID NO: 66082 - DNA, 23 bp, Homo sapiens
agtcgtaagaaagcagtgggagt

SEQ ID NO: 66083 - DNA, 20 bp, Homo sapiens
tttaccttgaacacgagaaa

SEQ ID NO: 66084 - DNA, 27 bp, Homo sapiens
aaatctcactgaatgatagtcatttaa

SEQ ID NO: 66085 - DNA, 20 bp, Homo sapiens
tgaaagaacagaagcaagaa

SEQ ID NO: 66086 - DNA, 21 bp, Homo sapiens
acaggaaacattacaattgaa

SEQ ID NO: 66087 - DNA, 19 bp, Homo sapiens
tctttcctaaaagctgccc

SEQ ID NO: 66088 - DNA, 24 bp, Homo sapiens
tattgggagcctatttgttcatca

SEQ ID NO: 66089 - DNA, 21 bp, Homo sapiens
tgccatgaagcatactatcca

SEQ ID NO: 66090 - DNA, 22 bp, Homo sapiens
ttatatttctaaagaaacatgc

SEQ ID NO: 66091 - DNA, 21 bp, Homo sapiens
tggtgctaaggttactccatt

SEQ ID NO: 66092 - DNA, 21 bp, Homo sapiens
ttttctcattgaaaattgtca

SEQ ID NO: 66093 - DNA, 17 bp, Homo sapiens
tcatctggacagtgccc

SEQ ID NO: 66094 - DNA, 22 bp, Homo sapiens
attccatatttgaatgcaggac

SEQ ID NO: 66095 - DNA, 24 bp, Homo sapiens
gcaactctattctcctaactctta

SEQ ID NO: 66096 - DNA, 19 bp, Homo sapiens
actccgaccagaaaaagtc

SEQ ID NO: 66097 - DNA, 23 bp, Homo sapiens
tatgaatgaaaaaaaaaccgcag

SEQ ID NO: 66098 - DNA, 21 bp, Homo sapiens
tttaaagtgctattgctcagg

SEQ ID NO: 66099 - DNA, 24 bp, Homo sapiens
taatggaataatgttctaatatac

SEQ ID NO: 66100 - DNA, 21 bp, Homo sapiens
ggcaaagcaatgtccattagt

SEQ ID NO: 66101 - DNA, 22 bp, Homo sapiens
ccaataaatcacgtgtgaatgc

SEQ ID NO: 66102 - DNA, 23 bp, Homo sapiens
ccttcatatttcatacaccctga

SEQ ID NO: 66103 - DNA, 24 bp, Homo sapiens
tgttcacattcagactcaaatttc

SEQ ID NO: 66104 - DNA, 19 bp, Homo sapiens
tctttgtctcatgggtccc

SEQ ID NO: 66105 - DNA, 22 bp, Homo sapiens
ttgtttttttctgttttagaac

SEQ ID NO: 66106 - DNA, 16 bp, Homo sapiens
gatgtgtacaccaggc

SEQ ID NO: 66107 - DNA, 20 bp, Homo sapiens
agggagaaaccacattagct

SEQ ID NO: 66108 - DNA, 23 bp, Homo sapiens
tgaatacaggacagaatctagac

SEQ ID NO: 66109 - DNA, 16 bp, Homo sapiens
gtccggcgtagctggg

SEQ ID NO: 66110 - DNA, 22 bp, Homo sapiens
tttacatataaaatttgcaggc

SEQ ID NO: 66111 - DNA, 16 bp, Homo sapiens
acagggggcagtgtgg

SEQ ID NO: 66112 - DNA, 24 bp, Homo sapiens
tgaatactaaaaagacatatcagt

SEQ ID NO: 66113 - DNA, 25 bp, Homo sapiens
actgtaaaaccagagaagatatttg

SEQ ID NO: 66114 - DNA, 21 bp, Homo sapiens
tttaggattctccaaaagccc

SEQ ID NO: 66115 - DNA, 19 bp, Homo sapiens
caattgaaatgaaaaaata

SEQ ID NO: 66116 - DNA, 25 bp, Homo sapiens
aatttatgtaaccagtatttgcaac

SEQ ID NO: 66117 - DNA, 17 bp, Homo sapiens
aaccagccatcgaatgc

SEQ ID NO: 66118 - DNA, 24 bp, Homo sapiens
cgagaaaagtcggagcatgcttct

SEQ ID NO: 66119 - DNA, 18 bp, Homo sapiens
aacaaaagcagctggaga

SEQ ID NO: 66120 - DNA, 25 bp, Homo sapiens
attgaacacgtcagattattttttc

SEQ ID NO: 66121 - DNA, 18 bp, Homo sapiens
caaacagcggttgacatc

SEQ ID NO: 66122 - DNA, 19 bp, Homo sapiens
ttttttgatggcagcattc

SEQ ID NO: 66123 - DNA, 21 bp, Homo sapiens
agttacataaaggagatatac

SEQ ID NO: 66124 - DNA, 20 bp, Homo sapiens
ttgctatgatcatcttctcc

SEQ ID NO: 66125 - DNA, 24 bp, Homo sapiens
tgtatttaacaggatatattatcc

SEQ ID NO: 66126 - DNA, 22 bp, Homo sapiens
ctggaataaatgcttcatcctg

SEQ ID NO: 66127 - DNA, 21 bp, Homo sapiens
gagggaaggataatggtatag

SEQ ID NO: 66128 - DNA, 20 bp, Homo sapiens
ccactaccagaactttgtga

SEQ ID NO: 66129 - DNA, 26 bp, Homo sapiens
catttttaatgtagattgttttctgc

SEQ ID NO: 66130 - DNA, 24 bp, Homo sapiens
cacattctaaatcaacacaccatt

SEQ ID NO: 66131 - DNA, 22 bp, Homo sapiens
cagacgtcgttacaatcgtgat

SEQ ID NO: 66132 - DNA, 20 bp, Homo sapiens
gtgtccattattgttccctg

SEQ ID NO: 66133 - DNA, 18 bp, Homo sapiens
accttattgaccagtcac

SEQ ID NO: 66134 - DNA, 21 bp, Homo sapiens
ttaactaatttcaccttgcaa

SEQ ID NO: 66135 - DNA, 21 bp, Homo sapiens
caatagttcgctgaaccttta

SEQ ID NO: 66136 - DNA, 23 bp, Homo sapiens
ccatctcaaaaaaaaaaaagtac

SEQ ID NO: 66137 - DNA, 22 bp, Homo sapiens
ccatccatacttctccatatcg

SEQ ID NO: 66138 - DNA, 24 bp, Homo sapiens
ccatgctttttgatgagatggact

SEQ ID NO: 66139 - DNA, 20 bp, Homo sapiens
gctggcttcttcagtggtaa

SEQ ID NO: 66140 - DNA, 22 bp, Homo sapiens
gctcaaaccttttacttttttc

SEQ ID NO: 66141 - DNA, 18 bp, Homo sapiens
agtatgttttcatggcgc

SEQ ID NO: 66142 - DNA, 21 bp, Homo sapiens
ggtccggcaagttggtaaagg

SEQ ID NO: 66143 - DNA, 18 bp, Homo sapiens
cacctgtacctcactagc

SEQ ID NO: 66144 - DNA, 21 bp, Homo sapiens
aaaagtggcggtgaaagtatt

SEQ ID NO: 66145 - DNA, 21 bp, Homo sapiens
ggtttcctttagccaaatgta

SEQ ID NO: 66146 - DNA, 19 bp, Homo sapiens
caaactgtgctaatgcgcc

SEQ ID NO: 66147 - DNA, 24 bp, Homo sapiens
tttagtaacacattcacgacttgg

SEQ ID NO: 66148 - DNA, 24 bp, Homo sapiens
ccattttcatggtaatcagtaatc

SEQ ID NO: 66149 - DNA, 25 bp, Homo sapiens
gatacctaagtttttctcagtatcc

SEQ ID NO: 66150 - DNA, 16 bp, Homo sapiens
gcagggctctggtgtc

SEQ ID NO: 66151 - DNA, 24 bp, Homo sapiens
tgataactaaccttttaaactcat

SEQ ID NO: 66152 - DNA, 19 bp, Homo sapiens
gccataaatttctgtgtgc

SEQ ID NO: 66153 - DNA, 24 bp, Homo sapiens
aggtacaggttcctggactcagct

SEQ ID NO: 66154 - DNA, 22 bp, Homo sapiens
cccatttttcttgatgaggatg

SEQ ID NO: 66155 - DNA, 24 bp, Homo sapiens
ctatgacttcctgaaatgtgctac

SEQ ID NO: 66156 - DNA, 23 bp, Homo sapiens
agaaccactcacctgttgaattt

SEQ ID NO: 66157 - DNA, 19 bp, Homo sapiens
cctgtggtctgtgccacct

SEQ ID NO: 66158 - DNA, 23 bp, Homo sapiens
atcttgaatacaaatagggaaat

SEQ ID NO: 66159 - DNA, 21 bp, Homo sapiens
tgctcatcgagacctaaagag

SEQ ID NO: 66160 - DNA, 22 bp, Homo sapiens
cccaactatacatttatgtaac

SEQ ID NO: 66161 - DNA, 18 bp, Homo sapiens
gggccttgctgttaaatt

SEQ ID NO: 66162 - DNA, 21 bp, Homo sapiens
gcacatcaacttcatttgtgt

SEQ ID NO: 66163 - DNA, 24 bp, Homo sapiens
aaagaaaaatctgaaaaatgctaa

SEQ ID NO: 66164 - DNA, 17 bp, Homo sapiens
gtccagcacttcgggag

SEQ ID NO: 66165 - DNA, 24 bp, Homo sapiens
gcttttataaaataggacaaaaat

SEQ ID NO: 66166 - DNA, 22 bp, Homo sapiens
gattaggccgaagctgtagatg

SEQ ID NO: 66167 - DNA, 24 bp, Homo sapiens
cttggaccttggctttcttttgtt

SEQ ID NO: 66168 - DNA, 23 bp, Homo sapiens
acataatcagaaactactcaaac

SEQ ID NO: 66169 - DNA, 16 bp, Homo sapiens
gggcaccaaacgctac

SEQ ID NO: 66170 - DNA, 23 bp, Homo sapiens
aaactaaaaagttatataactgg

SEQ ID NO: 66171 - DNA, 20 bp, Homo sapiens
cttccagccctacatcatgg

SEQ ID NO: 66172 - DNA, 22 bp, Homo sapiens
gcctgtatcaaaataactcctt

SEQ ID NO: 66173 - DNA, 18 bp, Homo sapiens
tgtatcacaggaggtggg

SEQ ID NO: 66174 - DNA, 23 bp, Homo sapiens
acatctactattaagagtgaatc

SEQ ID NO: 66175 - DNA, 21 bp, Homo sapiens
cctcacgcatatcttcgtatg

SEQ ID NO: 66176 - DNA, 23 bp, Homo sapiens
ttagttccatagtttagcaaaag

SEQ ID NO: 66177 - DNA, 18 bp, Homo sapiens
cttcatcactgttccacc

SEQ ID NO: 66178 - DNA, 24 bp, Homo sapiens
ccatttttgtgcccatgttttctc

SEQ ID NO: 66179 - DNA, 22 bp, Homo sapiens
agcagagaatatatttggtggc

SEQ ID NO: 66180 - DNA, 20 bp, Homo sapiens
aacatggtaccgagtgatcc

SEQ ID NO: 66181 - DNA, 24 bp, Homo sapiens
gcattctgacattagcttcaaaac

SEQ ID NO: 66182 - DNA, 24 bp, Homo sapiens
caaacgtttgcggccaattgtgtc

SEQ ID NO: 66183 - DNA, 21 bp, Homo sapiens
gcaagcgtcttcttaattctc

SEQ ID NO: 66184 - DNA, 22 bp, Homo sapiens
tcccctgaagaagtgattcgta

SEQ ID NO: 66185 - DNA, 18 bp, Homo sapiens
agtttctcctccgatggt

SEQ ID NO: 66186 - DNA, 20 bp, Homo sapiens
acttttcagtgtctacgagc

SEQ ID NO: 66187 - DNA, 21 bp, Homo sapiens
ttaacatccttattccactct

SEQ ID NO: 66188 - DNA, 22 bp, Homo sapiens
ccagcctccagactcacagcat

SEQ ID NO: 66189 - DNA, 20 bp, Homo sapiens
ggtttaatattagcagcctg

SEQ ID NO: 66190 - DNA, 22 bp, Homo sapiens
aggtgaaaaggaccaggtgacc

SEQ ID NO: 66191 - DNA, 24 bp, Homo sapiens
tgcgaacgattgtgatccgacagc

SEQ ID NO: 66192 - DNA, 19 bp, Homo sapiens
gctgagatgggtgcgttga

SEQ ID NO: 66193 - DNA, 18 bp, Homo sapiens
ctaggggtagaggcaagg

SEQ ID NO: 66194 - DNA, 16 bp, Homo sapiens
gaaacccagccggagg

SEQ ID NO: 66195 - DNA, 24 bp, Homo sapiens
ctctacactgagcagcgtggtcac

SEQ ID NO: 66196 - DNA, 19 bp, Homo sapiens
cacttgctgcggcttttgc

SEQ ID NO: 66197 - DNA, 21 bp, Homo sapiens
actcgagtcagtgacactgct

SEQ ID NO: 66198 - DNA, 18 bp, Homo sapiens
agtgtagctgcctggggc

SEQ ID NO: 66199 - DNA, 18 bp, Homo sapiens
cccacaacagcctaccct

SEQ ID NO: 66200 - DNA, 18 bp, Homo sapiens
gagcggtagctctgggtg

SEQ ID NO: 66201 - DNA, 20 bp, Homo sapiens
gctcgttatcctcgcctcgc

SEQ ID NO: 66202 - DNA, 16 bp, Homo sapiens
ggaccgcgccgggcga

SEQ ID NO: 66203 - DNA, 17 bp, Homo sapiens
ggaaccggcccgagcaa

SEQ ID NO: 66204 - DNA, 16 bp, Homo sapiens
cgggagcccgggcgcc

SEQ ID NO: 66205 - DNA, 17 bp, Homo sapiens
ggggactctgcgctcgc

SEQ ID NO: 66206 - DNA, 17 bp, Homo sapiens
cagcgcataaagagtcc

SEQ ID NO: 66207 - DNA, 16 bp, Homo sapiens
ctgccctcccctcgcc

SEQ ID NO: 66208 - DNA, 20 bp, Homo sapiens
gcagcttccgagaggagaga

SEQ ID NO: 66209 - DNA, 17 bp, Homo sapiens
ccctcggtcttccgagg

SEQ ID NO: 66210 - DNA, 24 bp, Homo sapiens
tccctcgcctgagcccggcctcgc

SEQ ID NO: 66211 - DNA, 24 bp, Homo sapiens
ggcaggccggcgggcggtgatgtg

SEQ ID NO: 66212 - DNA, 16 bp, Homo sapiens
cggctgctcacaggcg

SEQ ID NO: 66213 - DNA, 17 bp, Homo sapiens
cgactgcgctcagttct

SEQ ID NO: 66214 - DNA, 16 bp, Homo sapiens
gaaacgccgccgctgc

SEQ ID NO: 66215 - DNA, 24 bp, Homo sapiens
gtttgagagttgagccgctgtgag

SEQ ID NO: 66216 - DNA, 17 bp, Homo sapiens
tccctttcaggagaagc

SEQ ID NO: 66217 - DNA, 24 bp, Homo sapiens
cggccgcggcccggagcccctctc

SEQ ID NO: 66218 - DNA, 16 bp, Homo sapiens
gggaggtgccgccgcc

SEQ ID NO: 66219 - DNA, 21 bp, Homo sapiens
ggccggcctgcggcggcggca

SEQ ID NO: 66220 - DNA, 16 bp, Homo sapiens
tggagctgcagccgcc

SEQ ID NO: 66221 - DNA, 23 bp, Homo sapiens
ttctaaccgtgcagcctcttcct

SEQ ID NO: 66222 - DNA, 18 bp, Homo sapiens
ccaactctccggcgttcc

SEQ ID NO: 66223 - DNA, 23 bp, Homo sapiens
cgggcgggagccggctgaggcgc

SEQ ID NO: 66224 - DNA, 17 bp, Homo sapiens
cgggtccctggatgtgc

SEQ ID NO: 66225 - DNA, 23 bp, Homo sapiens
gggagaagcggcggcggcggcgg

SEQ ID NO: 66226 - DNA, 16 bp, Homo sapiens
ccggagcccgggccac

SEQ ID NO: 66227 - DNA, 19 bp, Homo sapiens
accatttccagggctggga

SEQ ID NO: 66228 - DNA, 16 bp, Homo sapiens
gcggcagcggaatggg

SEQ ID NO: 66229 - DNA, 22 bp, Homo sapiens
ccaacacggcggcggcggcggc

SEQ ID NO: 66230 - DNA, 17 bp, Homo sapiens
ggctgctggatggttgc

SEQ ID NO: 66231 - DNA, 18 bp, Homo sapiens
cgccgcaccccccgtggc

SEQ ID NO: 66232 - DNA, 17 bp, Homo sapiens
gatgcccctcgctctgc

SEQ ID NO: 66233 - DNA, 22 bp, Homo sapiens
ttcggaggattattcgtcttct

SEQ ID NO: 66234 - DNA, 16 bp, Homo sapiens
gctggtggcggggctt

SEQ ID NO: 66235 - DNA, 23 bp, Homo sapiens
tgaggagaagcaggcccagtcgc

SEQ ID NO: 66236 - DNA, 21 bp, Homo sapiens
ctttgatgatggctgtcatgt

SEQ ID NO: 66237 - DNA, 17 bp, Homo sapiens
cggtccagagccaagcg

SEQ ID NO: 66238 - DNA, 22 bp, Homo sapiens
tcaagtctaagtcgaatccatc

SEQ ID NO: 66239 - DNA, 24 bp, Homo sapiens
gagccatttccatcctgcagaaga

SEQ ID NO: 66240 - DNA, 24 bp, Homo sapiens
actcccacgttctaagagagtgac

SEQ ID NO: 66241 - DNA, 24 bp, Homo sapiens
tcctttttcttcagccacaggctc

SEQ ID NO: 66242 - DNA, 20 bp, Homo sapiens
cctgaccagggttaaatgtt

SEQ ID NO: 66243 - DNA, 21 bp, Homo sapiens
aggagatatcaagaggatgga

SEQ ID NO: 66244 - DNA, 20 bp, Homo sapiens
acataaatacattgaccacc

SEQ ID NO: 66245 - DNA, 23 bp, Homo sapiens
catcaatattgttcctgtatacg

SEQ ID NO: 66246 - DNA, 22 bp, Homo sapiens
ttttcataactagctaatgttt

SEQ ID NO: 66247 - DNA, 27 bp, Homo sapiens
tgaaaacacaacatgaatataaacatc

SEQ ID NO: 66248 - DNA, 20 bp, Homo sapiens
tttccttaactaaagtactc

SEQ ID NO: 66249 - DNA, 30 bp, Homo sapiens
ctacaataatagtttacatcacaaagtatc

SEQ ID NO: 66250 - DNA, 18 bp, Homo sapiens
agaaagacttgaaggcgt

SEQ ID NO: 66251 - DNA, 21 bp, Homo sapiens
tgtatccccctgaagtccatt

SEQ ID NO: 66252 - DNA, 20 bp, Homo sapiens
tgctttgaatccaaaaacct

SEQ ID NO: 66253 - DNA, 23 bp, Homo sapiens
attatttattttcacttaaatgg

SEQ ID NO: 66254 - DNA, 24 bp, Homo sapiens
tttagaagatatttgcaagcatac

SEQ ID NO: 66255 - DNA, 26 bp, Homo sapiens
tttggtttttcttgatagtattaatg

SEQ ID NO: 66256 - DNA, 20 bp, Homo sapiens
tctttaactctacctcactc

SEQ ID NO: 66257 - DNA, 22 bp, Homo sapiens
tgtttgttttgttttaaggttt

SEQ ID NO: 66258 - DNA, 18 bp, Homo sapiens
tgctcttggacttcttga

SEQ ID NO: 66259 - DNA, 24 bp, Homo sapiens
aatagaattcttgttattacatga

SEQ ID NO: 66260 - DNA, 21 bp, Homo sapiens
acaacatagtacagtacattc

SEQ ID NO: 66261 - DNA, 22 bp, Homo sapiens
agattcaggcaatgtttgttag

SEQ ID NO: 66262 - DNA, 24 bp, Homo sapiens
tcgataatctggatgactcattat

SEQ ID NO: 66263 - DNA, 23 bp, Homo sapiens
ataactttatatcacttttaaac

SEQ ID NO: 66264 - DNA, 24 bp, Homo sapiens
acaacagtaaaattaaaatttttg

SEQ ID NO: 66265 - DNA, 21 bp, Homo sapiens
gggttatggtcttcaaaagga

SEQ ID NO: 66266 - DNA, 21 bp, Homo sapiens
ttttctctggaatccagtgtt

SEQ ID NO: 66267 - DNA, 22 bp, Homo sapiens
cttcacttagccattggtcaag

SEQ ID NO: 66268 - DNA, 24 bp, Homo sapiens
acatttctaaagttacctacttgt

SEQ ID NO: 66269 - DNA, 20 bp, Homo sapiens
acaccagttcgtccctttcc

SEQ ID NO: 66270 - DNA, 19 bp, Homo sapiens
ctttttaccacagttgcac

SEQ ID NO: 66271 - DNA, 16 bp, Homo sapiens
tagggcctcttgtgcc

SEQ ID NO: 66272 - DNA, 20 bp, Homo sapiens
tcaaacccttttgtgaagat

SEQ ID NO: 66273 - DNA, 22 bp, Homo sapiens
agaggaaaggaaaaacatcaaa

SEQ ID NO: 66274 - DNA, 21 bp, Homo sapiens
ttgcagcaattcactgtaaag

SEQ ID NO: 66275 - DNA, 22 bp, Homo sapiens
actgaaggaaaaaaagaaaccc

SEQ ID NO: 66276 - DNA, 22 bp, Homo sapiens
tattacatcggggcaaattttt

SEQ ID NO: 66277 - DNA, 23 bp, Homo sapiens
caaaacatcatattatacattgt

SEQ ID NO: 66278 - DNA, 21 bp, Homo sapiens
gaccagagacaaaaaggtaag

SEQ ID NO: 66279 - DNA, 17 bp, Homo sapiens
gcgcctctgactgggaa

SEQ ID NO: 66280 - DNA, 24 bp, Homo sapiens
catttaaggtcaaatttctaatgt

SEQ ID NO: 66281 - DNA, 17 bp, Homo sapiens
cagtgccactggtctat

SEQ ID NO: 66282 - DNA, 26 bp, Homo sapiens
ttaccatagcaatttagtgaaataac

SEQ ID NO: 66283 - DNA, 16 bp, Homo sapiens
ctgcaagttccgccac

SEQ ID NO: 66284 - DNA, 20 bp, Homo sapiens
ttctgtccaccagggagtaa

SEQ ID NO: 66285 - DNA, 24 bp, Homo sapiens
tgtaaacttctagatatggttaag

SEQ ID NO: 66286 - DNA, 23 bp, Homo sapiens
ctacctgttaaagaatcatctgg

SEQ ID NO: 66287 - DNA, 21 bp, Homo sapiens
cagaaatatagtctcctgcat

SEQ ID NO: 66288 - DNA, 17 bp, Homo sapiens
tccaatgttcagtggcg

SEQ ID NO: 66289 - DNA, 18 bp, Homo sapiens
acctttagctggcagacc

SEQ ID NO: 66290 - DNA, 22 bp, Homo sapiens
gatcaagattgcagatacagaa

SEQ ID NO: 66291 - DNA, 20 bp, Homo sapiens
agtacatgaacttgtcttcc

SEQ ID NO: 66292 - DNA, 23 bp, Homo sapiens
taaaatcgtttttgacagtttga

SEQ ID NO: 66293 - DNA, 21 bp, Homo sapiens
tgttctgtttgtggaagaact

SEQ ID NO: 66294 - DNA, 22 bp, Homo sapiens
accatgcagatcctcagtttgt

SEQ ID NO: 66295 - DNA, 22 bp, Homo sapiens
ccttattttggatatttctccc

SEQ ID NO: 66296 - DNA, 16 bp, Homo sapiens
ggacccacacgacggg

SEQ ID NO: 66297 - DNA, 24 bp, Homo sapiens
gcagatctaatagaaaacaaatta

SEQ ID NO: 66298 - DNA, 22 bp, Homo sapiens
tacctgtgtgtggtgatatcaa

SEQ ID NO: 66299 - DNA, 23 bp, Homo sapiens
caaacaggattatttacccttat

SEQ ID NO: 66300 - DNA, 22 bp, Homo sapiens
acccaaaagtgaaacattttgt

SEQ ID NO: 66301 - DNA, 24 bp, Homo sapiens
cagaatatcaaatgatagtttatt

SEQ ID NO: 66302 - DNA, 20 bp, Homo sapiens
agacttccattttctacttt

SEQ ID NO: 66303 - DNA, 27 bp, Homo sapiens
ttttcttttttaaaaaaataaaacatc

SEQ ID NO: 66304 - DNA, 19 bp, Homo sapiens
cttgtcattatctgcacgc

SEQ ID NO: 66305 - DNA, 25 bp, Homo sapiens
tttttttttttttttaggacaaaat

SEQ ID NO: 66306 - DNA, 21 bp, Homo sapiens
gttggctttgtctttatttgc

SEQ ID NO: 66307 - DNA, 20 bp, Homo sapiens
ccaggaccagaggaaacctc

SEQ ID NO: 66308 - DNA, 17 bp, Homo sapiens
caacccccacaaaatgt

SEQ ID NO: 66309 - DNA, 19 bp, Homo sapiens
tttgcagtatagagcgtgc

SEQ ID NO: 66310 - DNA, 20 bp, Homo sapiens
caagcaagttcttcatcagc

SEQ ID NO: 66311 - DNA, 19 bp, Homo sapiens
atgatcttgacaaagcaaa

SEQ ID NO: 66312 - DNA, 20 bp, Homo sapiens
actttcatgttactgctacg

SEQ ID NO: 66313 - DNA, 21 bp, Homo sapiens
cggctcctctactgtttttgt

SEQ ID NO: 66314 - DNA, 24 bp, Homo sapiens
acagtgcttaaaaattaatatgtt

SEQ ID NO: 66315 - DNA, 22 bp, Homo sapiens
caggttcattgtcactaacatc

SEQ ID NO: 66316 - DNA, 24 bp, Homo sapiens
ttcactaaatagtttaagatgagt

SEQ ID NO: 66317 - DNA, 22 bp, Homo sapiens
cttcatcaaaaggttcattctc

SEQ ID NO: 66318 - DNA, 19 bp, Homo sapiens
ctaggtgaagctgtacttc

SEQ ID NO: 66319 - DNA, 22 bp, Homo sapiens
tggtgttttatccctcttgata

SEQ ID NO: 66320 - DNA, 21 bp, Homo sapiens
cagttcaacttctgtaacacc

SEQ ID NO: 66321 - DNA, 20 bp, Homo sapiens
acacaatgtcctattgccat

SEQ ID NO: 66322 - DNA, 20 bp, Homo sapiens
acaccactgactctgatcca

SEQ ID NO: 66323 - DNA, 22 bp, Homo sapiens
agggtaaaacaagattggtcag

SEQ ID NO: 66324 - DNA, 16 bp, Homo sapiens
taggccgcagctccgc

SEQ ID NO: 66325 - DNA, 24 bp, Homo sapiens
cgccgtgcgcaggcgcggagctag

SEQ ID NO: 66326 - DNA, 16 bp, Homo sapiens
ggccgggggggcagtc

SEQ ID NO: 66327 - DNA, 16 bp, Homo sapiens
tccgcccgctggcccg

SEQ ID NO: 66328 - DNA, 16 bp, Homo sapiens
taaaggcggcggcact

SEQ ID NO: 66329 - DNA, 17 bp, Homo sapiens
gcctgccctacgcaccc

SEQ ID NO: 66330 - DNA, 18 bp, Homo sapiens
ggcccagagcataccagt

SEQ ID NO: 66331 - DNA, 17 bp, Homo sapiens
gcccccggcccctggcc

SEQ ID NO: 66332 - DNA, 18 bp, Homo sapiens
cccacaaattacttcgcc

SEQ ID NO: 66333 - DNA, 18 bp, Homo sapiens
gccatctacggagagtgc

SEQ ID NO: 66334 - DNA, 18 bp, Homo sapiens
cagcaagaagccctcctt

SEQ ID NO: 66335 - DNA, 21 bp, Homo sapiens
ggttaccgctatcgtcaagta

SEQ ID NO: 66336 - DNA, 18 bp, Homo sapiens
ctgggccacccaacctgc

SEQ ID NO: 66337 - DNA, 20 bp, Homo sapiens
attctggagagatgtggcct

SEQ ID NO: 66338 - DNA, 19 bp, Homo sapiens
gggatgttagcagaagggc

SEQ ID NO: 66339 - DNA, 24 bp, Homo sapiens
gggtcctttaggtttacaaagtag

SEQ ID NO: 66340 - DNA, 24 bp, Homo sapiens
tactcactcatggactctgttgtc

SEQ ID NO: 66341 - DNA, 24 bp, Homo sapiens
acactaacacccctgtgttttgtt

SEQ ID NO: 66342 - DNA, 17 bp, Homo sapiens
cctgctcaggaagacct

SEQ ID NO: 66343 - DNA, 22 bp, Homo sapiens
catgtacaggaatgtggggagc

SEQ ID NO: 66344 - DNA, 18 bp, Homo sapiens
gaaatgcagaggttccac

SEQ ID NO: 66345 - DNA, 20 bp, Homo sapiens
gcttcggcctgagtgatctc

SEQ ID NO: 66346 - DNA, 23 bp, Homo sapiens
cactaggtccatctgttcctgta

SEQ ID NO: 66347 - DNA, 24 bp, Homo sapiens
aggctcacatcctgggatactcct

SEQ ID NO: 66348 - DNA, 17 bp, Homo sapiens
ggcagactccccagttt

SEQ ID NO: 66349 - DNA, 21 bp, Homo sapiens
ggggagaactttagactttca

SEQ ID NO: 66350 - DNA, 19 bp, Homo sapiens
tcctacctgactggaacac

SEQ ID NO: 66351 - DNA, 23 bp, Homo sapiens
cttgctttttatgtctttcaggt

SEQ ID NO: 66352 - DNA, 23 bp, Homo sapiens
agctgctagtactcaaagtcaac

SEQ ID NO: 66353 - DNA, 22 bp, Homo sapiens
acctttcgtctgaagagagaaa

SEQ ID NO: 66354 - DNA, 22 bp, Homo sapiens
gtagaattggggcatagtactc

SEQ ID NO: 66355 - DNA, 22 bp, Homo sapiens
gcagggcttggcacgatacgtg

SEQ ID NO: 66356 - DNA, 16 bp, Homo sapiens
aggacacatggtcccc

SEQ ID NO: 66357 - DNA, 21 bp, Homo sapiens
tcttccttcacaggggctacc

SEQ ID NO: 66358 - DNA, 18 bp, Homo sapiens
ggtcctctgtcagcagca

SEQ ID NO: 66359 - DNA, 17 bp, Homo sapiens
cagcccagattccaggc

SEQ ID NO: 66360 - DNA, 19 bp, Homo sapiens
aacctgtgcctcacctgga

SEQ ID NO: 66361 - DNA, 24 bp, Homo sapiens
tctcccacagagaacaccttctgc

SEQ ID NO: 66362 - DNA, 18 bp, Homo sapiens
ctcaagcctccttgtcct

SEQ ID NO: 66363 - DNA, 24 bp, Homo sapiens
ataacagtgagtcaagaattcagc

SEQ ID NO: 66364 - DNA, 21 bp, Homo sapiens
agaggaaacagaaatcaggac

SEQ ID NO: 66365 - DNA, 22 bp, Homo sapiens
gacaccctttggggtagttacc

SEQ ID NO: 66366 - DNA, 19 bp, Homo sapiens
tagctcttcagtgcagaca

SEQ ID NO: 66367 - DNA, 16 bp, Homo sapiens
tcctgagcacagatcc

SEQ ID NO: 66368 - DNA, 20 bp, Homo sapiens
tactcacataggcactgtcc

SEQ ID NO: 66369 - DNA, 19 bp, Homo sapiens
cctgggtagctgaccttct

SEQ ID NO: 66370 - DNA, 16 bp, Homo sapiens
tggagggactcccacc

SEQ ID NO: 66371 - DNA, 17 bp, Homo sapiens
cctcagatcgttggtgt

SEQ ID NO: 66372 - DNA, 18 bp, Homo sapiens
gatgtgaaaaaccagggt

SEQ ID NO: 66373 - DNA, 20 bp, Homo sapiens
cgggcagggcatcctggagc

SEQ ID NO: 66374 - DNA, 18 bp, Homo sapiens
gtcagttatcagccaggg

SEQ ID NO: 66375 - DNA, 20 bp, Homo sapiens
tgacagtccctgaccacgaa

SEQ ID NO: 66376 - DNA, 23 bp, Homo sapiens
ttttcctcactcaagacatactt

SEQ ID NO: 66377 - DNA, 17 bp, Homo sapiens
taggcccagcccatcag

SEQ ID NO: 66378 - DNA, 21 bp, Homo sapiens
tgttttcccaggatgaaagcc

SEQ ID NO: 66379 - DNA, 20 bp, Homo sapiens
acagtgctggcggcccctgg

SEQ ID NO: 66380 - DNA, 18 bp, Homo sapiens
acaagttccaagtgatgc

SEQ ID NO: 66381 - DNA, 24 bp, Homo sapiens
atatttgagatcgatccacacctg

SEQ ID NO: 66382 - DNA, 19 bp, Homo sapiens
gcctttgtcaactctctcc

SEQ ID NO: 66383 - DNA, 24 bp, Homo sapiens
gagatcctgctctccagcatttgt

SEQ ID NO: 66384 - DNA, 17 bp, Homo sapiens
tcaggtcatcccaggca

SEQ ID NO: 66385 - DNA, 24 bp, Homo sapiens
ctgtaagagcagtggctgaaaggg

SEQ ID NO: 66386 - DNA, 22 bp, Homo sapiens
gagagtcgccggggctgtgtgc

SEQ ID NO: 66387 - DNA, 24 bp, Homo sapiens
ggctctttggttcttttcaagcag

SEQ ID NO: 66388 - DNA, 22 bp, Homo sapiens
gaaaaggaaggaggaaggctgg

SEQ ID NO: 66389 - DNA, 22 bp, Homo sapiens
agtggtgtcagtgccaagtgtg

SEQ ID NO: 66390 - DNA, 23 bp, Homo sapiens
aactattgaatgggttgtttttg

SEQ ID NO: 66391 - DNA, 20 bp, Homo sapiens
gacagccggagcatctgcat

SEQ ID NO: 66392 - DNA, 23 bp, Homo sapiens
aagctcccttaattccgccctgc

SEQ ID NO: 66393 - DNA, 16 bp, Homo sapiens
agggtctcccggatct

SEQ ID NO: 66394 - DNA, 23 bp, Homo sapiens
cgtagagtgggctcaggactggc

SEQ ID NO: 66395 - DNA, 21 bp, Homo sapiens
cattctgccgctgagggttga

SEQ ID NO: 66396 - DNA, 20 bp, Homo sapiens
ggtttcaagagcggggtgag

SEQ ID NO: 66397 - DNA, 24 bp, Homo sapiens
aaaaagtcgtcctcttgttccagc

SEQ ID NO: 66398 - DNA, 22 bp, Homo sapiens
cgttgcagacacagagcagatc

SEQ ID NO: 66399 - DNA, 23 bp, Homo sapiens
agggctatgtgcattgttctctc

SEQ ID NO: 66400 - DNA, 23 bp, Homo sapiens
aacctgtccttccaccaatcaac

SEQ ID NO: 66401 - DNA, 18 bp, Homo sapiens
atctgtgtgccccagacc

SEQ ID NO: 66402 - DNA, 22 bp, Homo sapiens
ggcatatacagaatgatggctg

SEQ ID NO: 66403 - DNA, 16 bp, Homo sapiens
cgcgtgcgaatcagct

SEQ ID NO: 66404 - DNA, 20 bp, Homo sapiens
ctcaggagcccagctggaga

SEQ ID NO: 66405 - DNA, 22 bp, Homo sapiens
cttaggcagagaggaatgaggg

SEQ ID NO: 66406 - DNA, 19 bp, Homo sapiens
ttttcctgtgcttgcttca

SEQ ID NO: 66407 - DNA, 17 bp, Homo sapiens
ggaggctgagctgggtg

SEQ ID NO: 66408 - DNA, 24 bp, Homo sapiens
ccacggccatcattccccatgagc

SEQ ID NO: 66409 - DNA, 18 bp, Homo sapiens
cttggaggccctggagga

SEQ ID NO: 66410 - DNA, 23 bp, Homo sapiens
ttcaaccaggagtccggagccct

SEQ ID NO: 66411 - DNA, 22 bp, Homo sapiens
ttttatatgtaaagtgccgtcc

SEQ ID NO: 66412 - DNA, 19 bp, Homo sapiens
agccaggagggcatgttac

SEQ ID NO: 66413 - DNA, 16 bp, Homo sapiens
aggcgccttccactcc

SEQ ID NO: 66414 - DNA, 18 bp, Homo sapiens
gcctgctgtgcttggaac

SEQ ID NO: 66415 - DNA, 24 bp, Homo sapiens
aaaaagggccttctcacttgtaac

SEQ ID NO: 66416 - DNA, 23 bp, Homo sapiens
ttcccatctccaggggcaggctc

SEQ ID NO: 66417 - DNA, 17 bp, Homo sapiens
aagggagaagaggaggg

SEQ ID NO: 66418 - DNA, 24 bp, Homo sapiens
ggtgacatggccatcacgtttgtc

SEQ ID NO: 66419 - DNA, 18 bp, Homo sapiens
cctgaatccatgaggcat

SEQ ID NO: 66420 - DNA, 24 bp, Homo sapiens
catccttacgcggctcatggaccc

SEQ ID NO: 66421 - DNA, 22 bp, Homo sapiens
ggcagagctccgaggataggtt

SEQ ID NO: 66422 - DNA, 16 bp, Homo sapiens
ttttcctgggacagtc

SEQ ID NO: 66423 - DNA, 18 bp, Homo sapiens
ggggactgaggggcaatg

SEQ ID NO: 66424 - DNA, 24 bp, Homo sapiens
ccagttatgtttgacatcctcagc

SEQ ID NO: 66425 - DNA, 22 bp, Homo sapiens
aggcctcaaacacttccctgtg

SEQ ID NO: 66426 - DNA, 18 bp, Homo sapiens
acttcctctggagaagtc

SEQ ID NO: 66427 - DNA, 24 bp, Homo sapiens
tcagaagagaggtataacgcttgg

SEQ ID NO: 66428 - DNA, 16 bp, Homo sapiens
acgcacacacatggtc

SEQ ID NO: 66429 - DNA, 20 bp, Homo sapiens
aataaaagcctgccttgtgc

SEQ ID NO: 66430 - DNA, 19 bp, Homo sapiens
atacatgcaagcacacacg

SEQ ID NO: 66431 - DNA, 24 bp, Homo sapiens
gttggaggatttagaagatttgac

SEQ ID NO: 66432 - DNA, 22 bp, Homo sapiens
cttcttttcaggccagctgtac

SEQ ID NO: 66433 - DNA, 16 bp, Homo sapiens
cctcccgcggcctgtc

SEQ ID NO: 66434 - DNA, 17 bp, Homo sapiens
ggctagtgtagcggact

SEQ ID NO: 66435 - DNA, 20 bp, Homo sapiens
gaaagaccacggtgtattct

SEQ ID NO: 66436 - DNA, 20 bp, Homo sapiens
aactgttacactggaagtca

SEQ ID NO: 66437 - DNA, 21 bp, Homo sapiens
ctccacagttcaaacttccca

SEQ ID NO: 66438 - DNA, 18 bp, Homo sapiens
tgcgcagtcttcctcaca

SEQ ID NO: 66439 - DNA, 20 bp, Homo sapiens
ctgacgtggtgttcgacagt

SEQ ID NO: 66440 - DNA, 16 bp, Homo sapiens
ggctgcatgagctgca

SEQ ID NO: 66441 - DNA, 16 bp, Homo sapiens
cttgtgctgggcgggg

SEQ ID NO: 66442 - DNA, 17 bp, Homo sapiens
ggtgcgtgagatccggc

SEQ ID NO: 66443 - DNA, 16 bp, Homo sapiens
ggagccggggtcatcc

SEQ ID NO: 66444 - DNA, 17 bp, Homo sapiens
tccctcctgatcccatc

SEQ ID NO: 66445 - DNA, 20 bp, Homo sapiens
gtcaggagagcacacacttg

SEQ ID NO: 66446 - DNA, 18 bp, Homo sapiens
ccaggcaaggcttgatcc

SEQ ID NO: 66447 - DNA, 17 bp, Homo sapiens
tccgcagcttgtgctgc

SEQ ID NO: 66448 - DNA, 16 bp, Homo sapiens
agcttcccgtgtgtgt

SEQ ID NO: 66449 - DNA, 17 bp, Homo sapiens
gacaagaggggccgggc

SEQ ID NO: 66450 - DNA, 16 bp, Homo sapiens
gaccctctgggacccc

SEQ ID NO: 66451 - DNA, 16 bp, Homo sapiens
ggacctccgccttccc

SEQ ID NO: 66452 - DNA, 18 bp, Homo sapiens
gagcagcactcactgacc

SEQ ID NO: 66453 - DNA, 24 bp, Homo sapiens
ccagaccccggccctcgcctccct

SEQ ID NO: 66454 - DNA, 17 bp, Homo sapiens
tgaggcagctctccacc

SEQ ID NO: 66455 - DNA, 17 bp, Homo sapiens
tgggtcacatgggtccc

SEQ ID NO: 66456 - DNA, 16 bp, Homo sapiens
acctcgcccgaagcta

SEQ ID NO: 66457 - DNA, 19 bp, Homo sapiens
gccctgtgtcaagggagag

SEQ ID NO: 66458 - DNA, 17 bp, Homo sapiens
tgctggtggggaacaag

SEQ ID NO: 66459 - DNA, 16 bp, Homo sapiens
gcgggtccctggctag

SEQ ID NO: 66460 - DNA, 19 bp, Homo sapiens
ctttccacctctcagggag

SEQ ID NO: 66461 - DNA, 22 bp, Homo sapiens
gaggtctcgatgtaggggatgc

SEQ ID NO: 66462 - DNA, 17 bp, Homo sapiens
tcctctctgcgcatgtc

SEQ ID NO: 66463 - DNA, 16 bp, Homo sapiens
gcgtgcagccaggtca

SEQ ID NO: 66464 - DNA, 16 bp, Homo sapiens
tggcccgggagcccac

SEQ ID NO: 66465 - DNA, 24 bp, Homo sapiens
gtccttcacccgtttgatctgctc

SEQ ID NO: 66466 - DNA, 22 bp, Homo sapiens
tttgccatcaacaacaccaagt

SEQ ID NO: 66467 - DNA, 16 bp, Homo sapiens
cggcatccaggacatg

SEQ ID NO: 66468 - DNA, 18 bp, Homo sapiens
aggagtacagcgccatgc

SEQ ID NO: 66469 - DNA, 16 bp, Homo sapiens
gcctggccccacctgt

SEQ ID NO: 66470 - DNA, 19 bp, Homo sapiens
ggtggtcattgatggggag

SEQ ID NO: 66471 - DNA, 24 bp, Homo sapiens
tactggtggatgtcctcaaaagac

SEQ ID NO: 66472 - DNA, 16 bp, Homo sapiens
ccacggaaggtcctga

SEQ ID NO: 66473 - DNA, 17 bp, Homo sapiens
gtgcgcatgtactggtc

SEQ ID NO: 66474 - DNA, 24 bp, Homo sapiens
aggagaggagggggcatgaggggc

SEQ ID NO: 66475 - DNA, 18 bp, Homo sapiens
gtccaacaggcacgtctc

SEQ ID NO: 66476 - DNA, 17 bp, Homo sapiens
gccctgtctcctgcttc

SEQ ID NO: 66477 - DNA, 18 bp, Homo sapiens
cgaccccactatagaggt

SEQ ID NO: 66478 - DNA, 23 bp, Homo sapiens
gactcccctcctctagaggaagc

SEQ ID NO: 66479 - DNA, 17 bp, Homo sapiens
gtgtgggcaagagtgcg

SEQ ID NO: 66480 - DNA, 18 bp, Homo sapiens
gctgcagccagccctatc

SEQ ID NO: 66481 - DNA, 16 bp, Homo sapiens
ccccgggccgcaggcc

SEQ ID NO: 66482 - DNA, 17 bp, Homo sapiens
ggcgccaggctcacctc

SEQ ID NO: 66483 - DNA, 16 bp, Homo sapiens
gcctggctgagcaggg

SEQ ID NO: 66484 - DNA, 18 bp, Homo sapiens
agctggatggtcagcgca

SEQ ID NO: 66485 - DNA, 21 bp, Homo sapiens
gctgtgggtttgcccttcaga

SEQ ID NO: 66486 - DNA, 18 bp, Homo sapiens
aagaggctgcggtgagcc

SEQ ID NO: 66487 - DNA, 18 bp, Homo sapiens
cttccaacgtccgctgcc

SEQ ID NO: 66488 - DNA, 16 bp, Homo sapiens
gccgtgtccctctcca

SEQ ID NO: 66489 - DNA, 16 bp, Homo sapiens
gggcggtcagcaaagc

SEQ ID NO: 66490 - DNA, 16 bp, Homo sapiens
ccgcagatttcttcgc

SEQ ID NO: 66491 - DNA, 16 bp, Homo sapiens
gctgtactcacttggc

SEQ ID NO: 66492 - DNA, 16 bp, Homo sapiens
gccccctctcgggtct

SEQ ID NO: 66493 - DNA, 24 bp, Homo sapiens
ccacgccaggggcggcgcttggag

SEQ ID NO: 66494 - DNA, 16 bp, Homo sapiens
gacctcggcgcgggcg

SEQ ID NO: 66495 - DNA, 24 bp, Homo sapiens
ttctcaggcgctgatctcttgcgc

SEQ ID NO: 66496 - DNA, 17 bp, Homo sapiens
gggcgcagccgcgccct

SEQ ID NO: 66497 - DNA, 16 bp, Homo sapiens
gccggcaccgcggccg

SEQ ID NO: 66498 - DNA, 16 bp, Homo sapiens
agcgaggcccccgagg

SEQ ID NO: 66499 - DNA, 16 bp, Homo sapiens
cagcgcggccaggagc

SEQ ID NO: 66500 - DNA, 20 bp, Homo sapiens
gggccggggcggggccgtgc

SEQ ID NO: 66501 - DNA, 16 bp, Homo sapiens
ccggccccggccccgg

SEQ ID NO: 66502 - DNA, 24 bp, Homo sapiens
tgatcgccgcgccgttggcgctgg

SEQ ID NO: 66503 - DNA, 16 bp, Homo sapiens
ccccggctccagtcgc

SEQ ID NO: 66504 - DNA, 18 bp, Homo sapiens
ggtcagcgagaggctcct

SEQ ID NO: 66505 - DNA, 18 bp, Homo sapiens
ctccggtcgcggtcgcgg

SEQ ID NO: 66506 - DNA, 23 bp, Homo sapiens
gcgctctcttgaggcgccgcgtc

SEQ ID NO: 66507 - DNA, 17 bp, Homo sapiens
ccagtcccggtcctggc

SEQ ID NO: 66508 - DNA, 16 bp, Homo sapiens
ggggccggggccgcga

SEQ ID NO: 66509 - DNA, 16 bp, Homo sapiens
aggcgccggagcagct

SEQ ID NO: 66510 - DNA, 19 bp, Homo sapiens
ggccggggccaggaccgcg

SEQ ID NO: 66511 - DNA, 24 bp, Homo sapiens
cccgtcgcggtcgcggtggctgtc

SEQ ID NO: 66512 - DNA, 16 bp, Homo sapiens
ccggggccggggctgg

SEQ ID NO: 66513 - DNA, 20 bp, Homo sapiens
gttctaccgcgagacggtgc

SEQ ID NO: 66514 - DNA, 17 bp, Homo sapiens
ccgggacactaggcagc

SEQ ID NO: 66515 - DNA, 16 bp, Homo sapiens
cggggccctggacgcc

SEQ ID NO: 66516 - DNA, 16 bp, Homo sapiens
gctcgaggggcgggct

SEQ ID NO: 66517 - DNA, 16 bp, Homo sapiens
ggccgagctgaacgcc

SEQ ID NO: 66518 - DNA, 24 bp, Homo sapiens
ccagcagcaggcggcagcgcccca

SEQ ID NO: 66519 - DNA, 16 bp, Homo sapiens
cgcagcctcttcgggc

SEQ ID NO: 66520 - DNA, 17 bp, Homo sapiens
cttcggtccactgcagg

SEQ ID NO: 66521 - DNA, 24 bp, Homo sapiens
cacatccacgatggagcgtcttgt

SEQ ID NO: 66522 - DNA, 23 bp, Homo sapiens
gtaatcccagcggttctggtcct

SEQ ID NO: 66523 - DNA, 16 bp, Homo sapiens
ctgcccgcgtttgcgc

SEQ ID NO: 66524 - DNA, 20 bp, Homo sapiens
ctcagctcctcgtggtccac

SEQ ID NO: 66525 - DNA, 16 bp, Homo sapiens
cccggcctccgccctc

SEQ ID NO: 66526 - DNA, 24 bp, Homo sapiens
ctagtactgggaaggtcccacggg

SEQ ID NO: 66527 - DNA, 16 bp, Homo sapiens
gacagccaggtagccg

SEQ ID NO: 66528 - DNA, 22 bp, Homo sapiens
ggtagtttccagaagcaccggt

SEQ ID NO: 66529 - DNA, 21 bp, Homo sapiens
ggtcagatgaattagtccgcc

SEQ ID NO: 66530 - DNA, 18 bp, Homo sapiens
ttagtgaggaggagtgga

SEQ ID NO: 66531 - DNA, 22 bp, Homo sapiens
tcaacaggtgaaaagcccttca

SEQ ID NO: 66532 - DNA, 18 bp, Homo sapiens
ggacactgaacggtcccc

SEQ ID NO: 66533 - DNA, 19 bp, Homo sapiens
ggccttgatagttgaactt

SEQ ID NO: 66534 - DNA, 23 bp, Homo sapiens
atgtttctctgatgcatgttgtg

SEQ ID NO: 66535 - DNA, 19 bp, Homo sapiens
ctcagggacagaatgatgg

SEQ ID NO: 66536 - DNA, 23 bp, Homo sapiens
ctgacaacttggccaccgacagc

SEQ ID NO: 66537 - DNA, 16 bp, Homo sapiens
gacccacaccaggact

SEQ ID NO: 66538 - DNA, 24 bp, Homo sapiens
tattccttctctcaactgagtcta

SEQ ID NO: 66539 - DNA, 19 bp, Homo sapiens
ttaggtgtgaaaccattcc

SEQ ID NO: 66540 - DNA, 24 bp, Homo sapiens
cacaatttcattccacaatagttt

SEQ ID NO: 66541 - DNA, 16 bp, Homo sapiens
gggcctcactgtgccc

SEQ ID NO: 66542 - DNA, 24 bp, Homo sapiens
aagtttacgcacttgttttacctg

SEQ ID NO: 66543 - DNA, 16 bp, Homo sapiens
gacattgcaggcatgg

SEQ ID NO: 66544 - DNA, 24 bp, Homo sapiens
gggagaactttcgctgacaagttt

SEQ ID NO: 66545 - DNA, 20 bp, Homo sapiens
agacaccaaaggagacatac

SEQ ID NO: 66546 - DNA, 20 bp, Homo sapiens
ctccagagattatgggggga

SEQ ID NO: 66547 - DNA, 19 bp, Homo sapiens
agtgtgacttcaaggactg

SEQ ID NO: 66548 - DNA, 24 bp, Homo sapiens
tcatattcaacaacaaagagaatc

SEQ ID NO: 66549 - DNA, 20 bp, Homo sapiens
gagatccccttttccagtat

SEQ ID NO: 66550 - DNA, 24 bp, Homo sapiens
gccagcaatgagaagtgaacctac

SEQ ID NO: 66551 - DNA, 18 bp, Homo sapiens
ccttaggcattttgggat

SEQ ID NO: 66552 - DNA, 23 bp, Homo sapiens
ctgaacgagaaaaccttcgttca

SEQ ID NO: 66553 - DNA, 22 bp, Homo sapiens
gctcccattcatttgtaacttg

SEQ ID NO: 66554 - DNA, 24 bp, Homo sapiens
acttacagatgcacagcaggaagc

SEQ ID NO: 66555 - DNA, 19 bp, Homo sapiens
cacctggatcagacctttc

SEQ ID NO: 66556 - DNA, 23 bp, Homo sapiens
cagtgagaaacgccccttcatgt

SEQ ID NO: 66557 - DNA, 19 bp, Homo sapiens
ttagcagtgtgagagcctg

SEQ ID NO: 66558 - DNA, 16 bp, Homo sapiens
cgtgtgcctggagtag

SEQ ID NO: 66559 - DNA, 21 bp, Homo sapiens
ggcacacttaccagtgtgctt

SEQ ID NO: 66560 - DNA, 17 bp, Homo sapiens
gaatgttcacatgtggc

SEQ ID NO: 66561 - DNA, 23 bp, Homo sapiens
ctcttattgcagcctgggtaagc

SEQ ID NO: 66562 - DNA, 16 bp, Homo sapiens
ggtctgcacctgccac

SEQ ID NO: 66563 - DNA, 21 bp, Homo sapiens
gtacaagagtcggggctactc

SEQ ID NO: 66564 - DNA, 24 bp, Homo sapiens
cgcacggtgtcttcagaggcattc

SEQ ID NO: 66565 - DNA, 23 bp, Homo sapiens
gtgtccctgatgttaaaggagcc

SEQ ID NO: 66566 - DNA, 17 bp, Homo sapiens
cgagagcgataaccaca

SEQ ID NO: 66567 - DNA, 23 bp, Homo sapiens
catcagtaaggaactaaagggcc

SEQ ID NO: 66568 - DNA, 19 bp, Homo sapiens
actgtgagccacactgagc

SEQ ID NO: 66569 - DNA, 19 bp, Homo sapiens
tgtgtgctcacctgaatgc

SEQ ID NO: 66570 - DNA, 22 bp, Homo sapiens
tgttctgtgagctttaaaaacc

SEQ ID NO: 66571 - DNA, 22 bp, Homo sapiens
gctccgcagaggatgggcgttg

SEQ ID NO: 66572 - DNA, 18 bp, Homo sapiens
ccgcagaaccctgcatct

SEQ ID NO: 66573 - DNA, 23 bp, Homo sapiens
agctccagctcagtgaaatggac

SEQ ID NO: 66574 - DNA, 20 bp, Homo sapiens
tcttcccatccaccaaatgc

SEQ ID NO: 66575 - DNA, 18 bp, Homo sapiens
catgctccattccccact

SEQ ID NO: 66576 - DNA, 17 bp, Homo sapiens
cccaggtgccagtcagc

SEQ ID NO: 66577 - DNA, 20 bp, Homo sapiens
gatgtctctgtgtattgagg

SEQ ID NO: 66578 - DNA, 23 bp, Homo sapiens
gtccactcacttgctctgccctt

SEQ ID NO: 66579 - DNA, 16 bp, Homo sapiens
cattggccccagtggg

SEQ ID NO: 66580 - DNA, 22 bp, Homo sapiens
aggagccaccttaaaggggtaa

SEQ ID NO: 66581 - DNA, 22 bp, Homo sapiens
aactaggggaaggaggaaagcg

SEQ ID NO: 66582 - DNA, 19 bp, Homo sapiens
ataccaaatgacatcccag

SEQ ID NO: 66583 - DNA, 20 bp, Homo sapiens
tcttcataagttctaagcac

SEQ ID NO: 66584 - DNA, 23 bp, Homo sapiens
cagttgtgtattattttgtggtt

SEQ ID NO: 66585 - DNA, 22 bp, Homo sapiens
gtggaaaggcaatggaatagag

SEQ ID NO: 66586 - DNA, 18 bp, Homo sapiens
tggaaaatgtggaggctt

SEQ ID NO: 66587 - DNA, 19 bp, Homo sapiens
ccaggtcatgcattcaagc

SEQ ID NO: 66588 - DNA, 19 bp, Homo sapiens
gtgcagagatcagtgggat

SEQ ID NO: 66589 - DNA, 16 bp, Homo sapiens
acgccctacagcaggt

SEQ ID NO: 66590 - DNA, 17 bp, Homo sapiens
gtggagtcgaggcgtct

SEQ ID NO: 66591 - DNA, 16 bp, Homo sapiens
atggctgccacacccc

SEQ ID NO: 66592 - DNA, 17 bp, Homo sapiens
tggggcgttcccaagtc

SEQ ID NO: 66593 - DNA, 17 bp, Homo sapiens
actcgctcagctgtctt

SEQ ID NO: 66594 - DNA, 24 bp, Homo sapiens
ggacccagacgcagagcccagcgc

SEQ ID NO: 66595 - DNA, 18 bp, Homo sapiens
ggatctcgtgtctccccc

SEQ ID NO: 66596 - DNA, 24 bp, Homo sapiens
cctggctgccggtgcagctgtcgg

SEQ ID NO: 66597 - DNA, 16 bp, Homo sapiens
ttctggacggcctcgc

SEQ ID NO: 66598 - DNA, 22 bp, Homo sapiens
ctttaaatacagtgccattggg

SEQ ID NO: 66599 - DNA, 17 bp, Homo sapiens
ccatgcggcgcagttcc

SEQ ID NO: 66600 - DNA, 19 bp, Homo sapiens
gctgtgggttaggaattcc

SEQ ID NO: 66601 - DNA, 18 bp, Homo sapiens
ctcccgcaggttacagca

SEQ ID NO: 66602 - DNA, 17 bp, Homo sapiens
gactccacttggttccg

SEQ ID NO: 66603 - DNA, 17 bp, Homo sapiens
gttcagacccactgccc

SEQ ID NO: 66604 - DNA, 20 bp, Homo sapiens
gaatgagtggttggggaact

SEQ ID NO: 66605 - DNA, 21 bp, Homo sapiens
gattctcctccgctgggggtc

SEQ ID NO: 66606 - DNA, 18 bp, Homo sapiens
cgtcccgtcgaaggtgac

SEQ ID NO: 66607 - DNA, 24 bp, Homo sapiens
aaggccgaatttctgaaaggacac

SEQ ID NO: 66608 - DNA, 18 bp, Homo sapiens
gagcagggctctgaggat

SEQ ID NO: 66609 - DNA, 18 bp, Homo sapiens
agagagagggagggagag

SEQ ID NO: 66610 - DNA, 17 bp, Homo sapiens
gacgtctcgagagtggg

SEQ ID NO: 66611 - DNA, 23 bp, Homo sapiens
tagaagctacgaagaagttttct

SEQ ID NO: 66612 - DNA, 16 bp, Homo sapiens
gcctcgagagccagcc

SEQ ID NO: 66613 - DNA, 19 bp, Homo sapiens
cggcccttgggaagcagct

SEQ ID NO: 66614 - DNA, 22 bp, Homo sapiens
ctccgcccagccaggcgtcatc

SEQ ID NO: 66615 - DNA, 20 bp, Homo sapiens
tgtcctagagcggagagtcc

SEQ ID NO: 66616 - DNA, 21 bp, Homo sapiens
cttttccggccagttcactgg

SEQ ID NO: 66617 - DNA, 24 bp, Homo sapiens
ctacttaccctgattgcgaatagc

SEQ ID NO: 66618 - DNA, 20 bp, Homo sapiens
gagctggggcggcgcggagc

SEQ ID NO: 66619 - DNA, 22 bp, Homo sapiens
ttaggaaacatcctggcctggc

SEQ ID NO: 66620 - DNA, 16 bp, Homo sapiens
ccaccggctccgccgc

SEQ ID NO: 66621 - DNA, 19 bp, Homo sapiens
cgacaggctccggctgtgc

SEQ ID NO: 66622 - DNA, 17 bp, Homo sapiens
gtgctggactttgcgcc

SEQ ID NO: 66623 - DNA, 20 bp, Homo sapiens
ctcaggcactgctcctcgtg

SEQ ID NO: 66624 - DNA, 16 bp, Homo sapiens
ctccctgggtggcggc

SEQ ID NO: 66625 - DNA, 17 bp, Homo sapiens
gcggcggcggcgggggt

SEQ ID NO: 66626 - DNA, 17 bp, Homo sapiens
gagccgcagcaaatggg

SEQ ID NO: 66627 - DNA, 16 bp, Homo sapiens
cgtaagccgaagcgcc

SEQ ID NO: 66628 - DNA, 16 bp, Homo sapiens
cgccgaggccagcgct

SEQ ID NO: 66629 - DNA, 19 bp, Homo sapiens
cgctcacaggcagggcaca

SEQ ID NO: 66630 - DNA, 23 bp, Homo sapiens
ctgggtgcctacagcagccagag

SEQ ID NO: 66631 - DNA, 24 bp, Homo sapiens
cgttcaggtcccgcacgtcggagc

SEQ ID NO: 66632 - DNA, 22 bp, Homo sapiens
gacccggcttccacgtgtgtcc

SEQ ID NO: 66633 - DNA, 18 bp, Homo sapiens
ctccggccctggagacgt

SEQ ID NO: 66634 - DNA, 16 bp, Homo sapiens
cgggccccgccgtctc

SEQ ID NO: 66635 - DNA, 16 bp, Homo sapiens
ccgggtcccggactcc

SEQ ID NO: 66636 - DNA, 16 bp, Homo sapiens
ctccctcccacctact

SEQ ID NO: 66637 - DNA, 24 bp, Homo sapiens
gagcgtgtgctgagacgccggctc

SEQ ID NO: 66638 - DNA, 16 bp, Homo sapiens
cccacacccgggggct

SEQ ID NO: 66639 - DNA, 16 bp, Homo sapiens
ccggcgtcacacgcac

SEQ ID NO: 66640 - DNA, 19 bp, Homo sapiens
ccggacgctagaacgttct

SEQ ID NO: 66641 - DNA, 19 bp, Homo sapiens
tcagctcctccgtggctgc

SEQ ID NO: 66642 - DNA, 24 bp, Homo sapiens
gacgaactctccccaagatagaga

SEQ ID NO: 66643 - DNA, 16 bp, Homo sapiens
cggtttccggtgcagg

SEQ ID NO: 66644 - DNA, 23 bp, Homo sapiens
tttatttcctgagttgcaggatc

SEQ ID NO: 66645 - DNA, 16 bp, Homo sapiens
ccttgacagagcaagc

SEQ ID NO: 66646 - DNA, 17 bp, Homo sapiens
cctggccagcagtgtaa

SEQ ID NO: 66647 - DNA, 19 bp, Homo sapiens
gggctgtcacctctgtaga

SEQ ID NO: 66648 - DNA, 23 bp, Homo sapiens
cagcacctagtaagcattgagta

SEQ ID NO: 66649 - DNA, 19 bp, Homo sapiens
agttctctcctgccatgga

SEQ ID NO: 66650 - DNA, 22 bp, Homo sapiens
ttgtggtttgttcatttcagat

SEQ ID NO: 66651 - DNA, 23 bp, Homo sapiens
ccaacattcccctctttctgctc

SEQ ID NO: 66652 - DNA, 20 bp, Homo sapiens
gtgtgacatcattcagacgc

SEQ ID NO: 66653 - DNA, 22 bp, Homo sapiens
tcaggaagctgcccgatttaaa

SEQ ID NO: 66654 - DNA, 22 bp, Homo sapiens
tgattgaaatccctttgcctcc

SEQ ID NO: 66655 - DNA, 20 bp, Homo sapiens
agaagtgacaccaagactcc

SEQ ID NO: 66656 - DNA, 22 bp, Homo sapiens
cccgcctgctctatgagagcag

SEQ ID NO: 66657 - DNA, 24 bp, Homo sapiens
gcaaaaagactaaaaacaagaaag

SEQ ID NO: 66658 - DNA, 24 bp, Homo sapiens
ttaggtatgggactaggagtcttt

SEQ ID NO: 66659 - DNA, 17 bp, Homo sapiens
aggcggtcatagaggtt

SEQ ID NO: 66660 - DNA, 19 bp, Homo sapiens
actcccaggagtaggagtc

SEQ ID NO: 66661 - DNA, 16 bp, Homo sapiens
acccagtacctgtggc

SEQ ID NO: 66662 - DNA, 25 bp, Homo sapiens
ttctcaacctctttttctttttttc

SEQ ID NO: 66663 - DNA, 20 bp, Homo sapiens
aggatacaattctagactca

SEQ ID NO: 66664 - DNA, 19 bp, Homo sapiens
cagcacatgacagaaaagc

SEQ ID NO: 66665 - DNA, 17 bp, Homo sapiens
gcctgggcaacgagagt

SEQ ID NO: 66666 - DNA, 24 bp, Homo sapiens
atgactgggatatttactactggg

SEQ ID NO: 66667 - DNA, 20 bp, Homo sapiens
cctggtataggctaacatcg

SEQ ID NO: 66668 - DNA, 19 bp, Homo sapiens
tttagcaaagtctctcagc

SEQ ID NO: 66669 - DNA, 24 bp, Homo sapiens
atctgtggttcttggccagtgttt

SEQ ID NO: 66670 - DNA, 21 bp, Homo sapiens
cgtggcttttcaaagaggtac

SEQ ID NO: 66671 - DNA, 23 bp, Homo sapiens
tatggcataattttttctgccca

SEQ ID NO: 66672 - DNA, 22 bp, Homo sapiens
atcataagtagttaccatccac

SEQ ID NO: 66673 - DNA, 24 bp, Homo sapiens
ttgaaaatgaagtcatggccctgc

SEQ ID NO: 66674 - DNA, 16 bp, Homo sapiens
tggtctggggtagggc

SEQ ID NO: 66675 - DNA, 22 bp, Homo sapiens
gcgtgccccagatcttgagtac

SEQ ID NO: 66676 - DNA, 20 bp, Homo sapiens
gtctttcctcaagcggcagc

SEQ ID NO: 66677 - DNA, 23 bp, Homo sapiens
ggaacctagggtttgggtagagg

SEQ ID NO: 66678 - DNA, 22 bp, Homo sapiens
aactcacggcacagtcgcaagt

SEQ ID NO: 66679 - DNA, 18 bp, Homo sapiens
gctcagagttgggggact

SEQ ID NO: 66680 - DNA, 17 bp, Homo sapiens
aaggagctgctggtggc

SEQ ID NO: 66681 - DNA, 22 bp, Homo sapiens
cccagtagttcagaggcctttg

SEQ ID NO: 66682 - DNA, 16 bp, Homo sapiens
cagcatcaccaccgcc

SEQ ID NO: 66683 - DNA, 24 bp, Homo sapiens
gtggacactttctgcttcttcatc

SEQ ID NO: 66684 - DNA, 16 bp, Homo sapiens
tgtcgctggcacagcc

SEQ ID NO: 66685 - DNA, 20 bp, Homo sapiens
ctcgagttgatcttggtggc

SEQ ID NO: 66686 - DNA, 18 bp, Homo sapiens
ggacaagggcctgggcac

SEQ ID NO: 66687 - DNA, 17 bp, Homo sapiens
gtgagcactggaccctc

SEQ ID NO: 66688 - DNA, 24 bp, Homo sapiens
aggccggcggcggggcccacggcg

SEQ ID NO: 66689 - DNA, 19 bp, Homo sapiens
ctgccaccttcagggcctc

SEQ ID NO: 66690 - DNA, 16 bp, Homo sapiens
agaggccgaggcggcc

SEQ ID NO: 66691 - DNA, 20 bp, Homo sapiens
gtcctgacactgcaccctgg

SEQ ID NO: 66692 - DNA, 23 bp, Homo sapiens
caaccttgctctcaccttgctct

SEQ ID NO: 66693 - DNA, 19 bp, Homo sapiens
ctcctctggcttggactcc

SEQ ID NO: 66694 - DNA, 21 bp, Homo sapiens
cctgggtgggatgggatggcc

SEQ ID NO: 66695 - DNA, 24 bp, Homo sapiens
ttcctcgccccacggctcctcggc

SEQ ID NO: 66696 - DNA, 24 bp, Homo sapiens
gtcagacttttctggcccaggggc

SEQ ID NO: 66697 - DNA, 17 bp, Homo sapiens
ctccaggaccctgctct

SEQ ID NO: 66698 - DNA, 16 bp, Homo sapiens
gggctgggccaccttt

SEQ ID NO: 66699 - DNA, 18 bp, Homo sapiens
aaggggatgggcagatgc

SEQ ID NO: 66700 - DNA, 20 bp, Homo sapiens
cacctgctgcgattctacga

SEQ ID NO: 66701 - DNA, 19 bp, Homo sapiens
gtcaccacctgtagtgccc

SEQ ID NO: 66702 - DNA, 18 bp, Homo sapiens
gtccagggcacccagagc

SEQ ID NO: 66703 - DNA, 19 bp, Homo sapiens
tagggactgcacaagaaag

SEQ ID NO: 66704 - DNA, 24 bp, Homo sapiens
gtggggggcctggcctgtgccctc

SEQ ID NO: 66705 - DNA, 21 bp, Homo sapiens
ccctcctcccatttgcagatg

SEQ ID NO: 66706 - DNA, 22 bp, Homo sapiens
taagaatgttcccaacctatgc

SEQ ID NO: 66707 - DNA, 20 bp, Homo sapiens
cctggagggcggaaccttgg

SEQ ID NO: 66708 - DNA, 16 bp, Homo sapiens
cgtgggcccaggacct

SEQ ID NO: 66709 - DNA, 16 bp, Homo sapiens
gccagcttgctggagg

SEQ ID NO: 66710 - DNA, 22 bp, Homo sapiens
ccttcctcctgccatccctaat

SEQ ID NO: 66711 - DNA, 22 bp, Homo sapiens
gaggagatctacaaggagttct

SEQ ID NO: 66712 - DNA, 18 bp, Homo sapiens
caggtgggaggctggaca

SEQ ID NO: 66713 - DNA, 18 bp, Homo sapiens
ttcagaccctacagagac

SEQ ID NO: 66714 - DNA, 22 bp, Homo sapiens
ccccggccgctcctcgcccgcc

SEQ ID NO: 66715 - DNA, 16 bp, Homo sapiens
cagcccctgggggctc

SEQ ID NO: 66716 - DNA, 24 bp, Homo sapiens
acatcattggctacttcaaagaac

SEQ ID NO: 66717 - DNA, 19 bp, Homo sapiens
ttcttcctctgggctgacc

SEQ ID NO: 66718 - DNA, 22 bp, Homo sapiens
cttaatcagggtccctacctcc

SEQ ID NO: 66719 - DNA, 19 bp, Homo sapiens
caatgtgcgggaagccctg

SEQ ID NO: 66720 - DNA, 23 bp, Homo sapiens
gggatggggcgtgggagccaggc

SEQ ID NO: 66721 - DNA, 24 bp, Homo sapiens
acctactatcgggatgaacacatc

SEQ ID NO: 66722 - DNA, 18 bp, Homo sapiens
ggaagaaaggacaggctg

SEQ ID NO: 66723 - DNA, 16 bp, Homo sapiens
cctccctgaggatcct

SEQ ID NO: 66724 - DNA, 24 bp, Homo sapiens
gtggccgtgtccgcccaggcctgc

SEQ ID NO: 66725 - DNA, 17 bp, Homo sapiens
cttcctgtggccccttc

SEQ ID NO: 66726 - DNA, 22 bp, Homo sapiens
ccaggtacatgtaggggtagat

SEQ ID NO: 66727 - DNA, 18 bp, Homo sapiens
ccaggtagaagggctggc

SEQ ID NO: 66728 - DNA, 16 bp, Homo sapiens
gccagacccactcacc

SEQ ID NO: 66729 - DNA, 22 bp, Homo sapiens
cagttgacacaaagtgagactg

SEQ ID NO: 66730 - DNA, 18 bp, Homo sapiens
ttcctaggtaccccatgg

SEQ ID NO: 66731 - DNA, 16 bp, Homo sapiens
agatgagggcccctgc

SEQ ID NO: 66732 - DNA, 17 bp, Homo sapiens
gctgcgcctggtgaggc

SEQ ID NO: 66733 - DNA, 16 bp, Homo sapiens
gcccccaccttgtggt

SEQ ID NO: 66734 - DNA, 18 bp, Homo sapiens
agaagctgctctggctgc

SEQ ID NO: 66735 - DNA, 21 bp, Homo sapiens
gctcctctagatctgccaggt

SEQ ID NO: 66736 - DNA, 22 bp, Homo sapiens
gataggctaaggacccgttctc

SEQ ID NO: 66737 - DNA, 17 bp, Homo sapiens
ctgccacccagcccccc

SEQ ID NO: 66738 - DNA, 23 bp, Homo sapiens
ccagaattttggcccttccacat

SEQ ID NO: 66739 - DNA, 24 bp, Homo sapiens
cctttccagatgtcccaggtcata

SEQ ID NO: 66740 - DNA, 18 bp, Homo sapiens
actcgctggagcttctgc

SEQ ID NO: 66741 - DNA, 24 bp, Homo sapiens
gccaggaattactaacccattttt

SEQ ID NO: 66742 - DNA, 16 bp, Homo sapiens
gatggaggtggcgttc

SEQ ID NO: 66743 - DNA, 18 bp, Homo sapiens
tgcccagggtcccacagc

SEQ ID NO: 66744 - DNA, 16 bp, Homo sapiens
catccccccctaagag

SEQ ID NO: 66745 - DNA, 17 bp, Homo sapiens
ccctcacctgctgcagc

SEQ ID NO: 66746 - DNA, 22 bp, Homo sapiens
gaagagccccttttcctggctg

SEQ ID NO: 66747 - DNA, 24 bp, Homo sapiens
atggaagggttgatggcacacacc

SEQ ID NO: 66748 - DNA, 24 bp, Homo sapiens
ctccattttcttgggccacacccc

SEQ ID NO: 66749 - DNA, 20 bp, Homo sapiens
ctttcaggtacagccagctc

SEQ ID NO: 66750 - DNA, 16 bp, Homo sapiens
ctgtgcctgcttcagg

SEQ ID NO: 66751 - DNA, 16 bp, Homo sapiens
acgaggaccgcagggg

SEQ ID NO: 66752 - DNA, 21 bp, Homo sapiens
ctatgtgggtggtgatgggaa

SEQ ID NO: 66753 - DNA, 23 bp, Homo sapiens
atcatgcctgggtagtgtttggg

SEQ ID NO: 66754 - DNA, 23 bp, Homo sapiens
gtggcttgggctactacagtatg

SEQ ID NO: 66755 - DNA, 16 bp, Homo sapiens
cctgccaggccctggg

SEQ ID NO: 66756 - DNA, 19 bp, Homo sapiens
ggcattgactgtctggccc

SEQ ID NO: 66757 - DNA, 19 bp, Homo sapiens
ttcattacctcccccttcc

SEQ ID NO: 66758 - DNA, 22 bp, Homo sapiens
gacctcagctgtctgctcccca

SEQ ID NO: 66759 - DNA, 18 bp, Homo sapiens
gtgtggcccatcactacc

SEQ ID NO: 66760 - DNA, 19 bp, Homo sapiens
gaggtggacatcccggaga

SEQ ID NO: 66761 - DNA, 20 bp, Homo sapiens
ggatagtgggcaggagaatc

SEQ ID NO: 66762 - DNA, 21 bp, Homo sapiens
cggagctgtccaatttggtgc

SEQ ID NO: 66763 - DNA, 24 bp, Homo sapiens
catcacaggttggagcccagtagg

SEQ ID NO: 66764 - DNA, 24 bp, Homo sapiens
catatcatttcccctctctgggct

SEQ ID NO: 66765 - DNA, 19 bp, Homo sapiens
gccgctcctacttcaagga

SEQ ID NO: 66766 - DNA, 22 bp, Homo sapiens
ccgaacctcacaaggcttacag

SEQ ID NO: 66767 - DNA, 16 bp, Homo sapiens
gtgtctccagccgtga

SEQ ID NO: 66768 - DNA, 23 bp, Homo sapiens
gaagaagtgggtcatggataaga

SEQ ID NO: 66769 - DNA, 18 bp, Homo sapiens
tatgcccgcttcaccgcc

SEQ ID NO: 66770 - DNA, 20 bp, Homo sapiens
gactggatgtgggcccgatc

SEQ ID NO: 66771 - DNA, 16 bp, Homo sapiens
gacccgcctggcggcc

SEQ ID NO: 66772 - DNA, 21 bp, Homo sapiens
cggagaccttcttcaccagct

SEQ ID NO: 66773 - DNA, 24 bp, Homo sapiens
tttctggctgtcaaccgcgtcatc

SEQ ID NO: 66774 - DNA, 17 bp, Homo sapiens
gacggcgcctcggatct

SEQ ID NO: 66775 - DNA, 16 bp, Homo sapiens
gagccggacctggtgc

SEQ ID NO: 66776 - DNA, 17 bp, Homo sapiens
cgggaaagtaggtgagg

SEQ ID NO: 66777 - DNA, 19 bp, Homo sapiens
gctgttcccgctgcgctcc

SEQ ID NO: 66778 - DNA, 18 bp, Homo sapiens
gagctcgggaacgttggt

SEQ ID NO: 66779 - DNA, 18 bp, Homo sapiens
ggcttgccttgcaggccg

SEQ ID NO: 66780 - DNA, 23 bp, Homo sapiens
ccagcaccaaggaaaggagcacc

SEQ ID NO: 66781 - DNA, 19 bp, Homo sapiens
accttagcggaccctggga

SEQ ID NO: 66782 - DNA, 17 bp, Homo sapiens
ccacgtcgtcgatggag

SEQ ID NO: 66783 - DNA, 16 bp, Homo sapiens
cagaggctgaagaggg

SEQ ID NO: 66784 - DNA, 21 bp, Homo sapiens
agtcttgcgatgatatccgcc

SEQ ID NO: 66785 - DNA, 21 bp, Homo sapiens
tcagtcccttttggcttctgc

SEQ ID NO: 66786 - DNA, 24 bp, Homo sapiens
tcttgaaagtccgggagctctcct

SEQ ID NO: 66787 - DNA, 24 bp, Homo sapiens
gtgctaggagttgccgaagcaagt

SEQ ID NO: 66788 - DNA, 16 bp, Homo sapiens
gcaccacgccgcagag

SEQ ID NO: 66789 - DNA, 19 bp, Homo sapiens
cagcggggaaggaggatgg

SEQ ID NO: 66790 - DNA, 16 bp, Homo sapiens
tgccctctgggcatgc

SEQ ID NO: 66791 - DNA, 23 bp, Homo sapiens
caaaaacgtgtgatacaggaagg

SEQ ID NO: 66792 - DNA, 20 bp, Homo sapiens
accccctacttaaattcagc

SEQ ID NO: 66793 - DNA, 16 bp, Homo sapiens
ggtagtggaacgtggc

SEQ ID NO: 66794 - DNA, 24 bp, Homo sapiens
ggatgaagccaggtgtaaggtcag

SEQ ID NO: 66795 - DNA, 16 bp, Homo sapiens
gggcttgccacgagcc

SEQ ID NO: 66796 - DNA, 17 bp, Homo sapiens
ccggggactggacttct

SEQ ID NO: 66797 - DNA, 18 bp, Homo sapiens
gtgcacacgatggtctcc

SEQ ID NO: 66798 - DNA, 16 bp, Homo sapiens
catgtggcccacaggc

SEQ ID NO: 66799 - DNA, 23 bp, Homo sapiens
cagacaggtacaggacagacacc

SEQ ID NO: 66800 - DNA, 21 bp, Homo sapiens
ggcaccgtgctggacgacagc

SEQ ID NO: 66801 - DNA, 16 bp, Homo sapiens
gaggaggagccctggg

SEQ ID NO: 66802 - DNA, 16 bp, Homo sapiens
ttcaagctgcctgtgt

SEQ ID NO: 66803 - DNA, 21 bp, Homo sapiens
gacagagcaagactccatctc

SEQ ID NO: 66804 - DNA, 22 bp, Homo sapiens
cagttcctctgtgacatcaagg

SEQ ID NO: 66805 - DNA, 16 bp, Homo sapiens
ccaccagcgggtacag

SEQ ID NO: 66806 - DNA, 21 bp, Homo sapiens
tcccagttgtcactctctggg

SEQ ID NO: 66807 - DNA, 18 bp, Homo sapiens
cagcagtgccgctggccc

SEQ ID NO: 66808 - DNA, 17 bp, Homo sapiens
cttgtggacccggtgac

SEQ ID NO: 66809 - DNA, 16 bp, Homo sapiens
cagggcgtccaggtca

SEQ ID NO: 66810 - DNA, 24 bp, Homo sapiens
ccttgccttcccgcagcatgtggt

SEQ ID NO: 66811 - DNA, 24 bp, Homo sapiens
gtgagaccaggcgcggtggcccct

SEQ ID NO: 66812 - DNA, 17 bp, Homo sapiens
aaggaccccctggaggg

SEQ ID NO: 66813 - DNA, 16 bp, Homo sapiens
ccctgggtggacaggc

SEQ ID NO: 66814 - DNA, 23 bp, Homo sapiens
acagctccctgggccatgctgac

SEQ ID NO: 66815 - DNA, 20 bp, Homo sapiens
tcctgcacaggttttcttgt

SEQ ID NO: 66816 - DNA, 23 bp, Homo sapiens
atcttccacatggagatgctgaa

SEQ ID NO: 66817 - DNA, 24 bp, Homo sapiens
cgatgtttgatgctttttgagtga

SEQ ID NO: 66818 - DNA, 18 bp, Homo sapiens
gcactgcctttgccttct

SEQ ID NO: 66819 - DNA, 18 bp, Homo sapiens
cccagatgtgggtcaggt

SEQ ID NO: 66820 - DNA, 17 bp, Homo sapiens
gcagcctccttcacatg

SEQ ID NO: 66821 - DNA, 18 bp, Homo sapiens
tgtgatatgccccatgcc

SEQ ID NO: 66822 - DNA, 19 bp, Homo sapiens
ctccaggcagtaccttcat

SEQ ID NO: 66823 - DNA, 23 bp, Homo sapiens
atgggccatgacagacgaagaga

SEQ ID NO: 66824 - DNA, 18 bp, Homo sapiens
gggagaagctgtagacct

SEQ ID NO: 66825 - DNA, 16 bp, Homo sapiens
ttgtaccgcgaggggc

SEQ ID NO: 66826 - DNA, 17 bp, Homo sapiens
gctggatccattcaggg

SEQ ID NO: 66827 - DNA, 19 bp, Homo sapiens
ctcaagaacctgcagatga

SEQ ID NO: 66828 - DNA, 20 bp, Homo sapiens
gtagtactcctcgaccacca

SEQ ID NO: 66829 - DNA, 18 bp, Homo sapiens
gtgtggagccagggggcc

SEQ ID NO: 66830 - DNA, 17 bp, Homo sapiens
gtgctcaccgtcgtact

SEQ ID NO: 66831 - DNA, 17 bp, Homo sapiens
ccaggaacagcctgggt

SEQ ID NO: 66832 - DNA, 20 bp, Homo sapiens
ccagcagtgacaggagaaag

SEQ ID NO: 66833 - DNA, 24 bp, Homo sapiens
tgctcaactactgccagtgcaagc

SEQ ID NO: 66834 - DNA, 20 bp, Homo sapiens
tagaggcatttagtcaggcc

SEQ ID NO: 66835 - DNA, 23 bp, Homo sapiens
actgctcttccatcctcaacaag

SEQ ID NO: 66836 - DNA, 16 bp, Homo sapiens
gtgggccttgccccgc

SEQ ID NO: 66837 - DNA, 20 bp, Homo sapiens
tcagggagggctctctctcc

SEQ ID NO: 66838 - DNA, 16 bp, Homo sapiens
gggtccagctccagca

SEQ ID NO: 66839 - DNA, 16 bp, Homo sapiens
gatcccccctcatgcc

SEQ ID NO: 66840 - DNA, 24 bp, Homo sapiens
ttcgtccttctgccggatccgtgc

SEQ ID NO: 66841 - DNA, 24 bp, Homo sapiens
gacaacgtcaaggcctacttcaag

SEQ ID NO: 66842 - DNA, 24 bp, Homo sapiens
gtaaggcagggccaagtgctcctg

SEQ ID NO: 66843 - DNA, 24 bp, Homo sapiens
gcccaggctgactttgccaaagtg

SEQ ID NO: 66844 - DNA, 16 bp, Homo sapiens
catgacgcagcacggg

SEQ ID NO: 66845 - DNA, 18 bp, Homo sapiens
agagctgcaggccctgga

SEQ ID NO: 66846 - DNA, 24 bp, Homo sapiens
tcccagtggagcagctcagcagac

SEQ ID NO: 66847 - DNA, 19 bp, Homo sapiens
ggggatcttctcccattga

SEQ ID NO: 66848 - DNA, 23 bp, Homo sapiens
agttctttaagaagaaatagaag

SEQ ID NO: 66849 - DNA, 23 bp, Homo sapiens
aatgctattgtatgtctgtgaac

SEQ ID NO: 66850 - DNA, 22 bp, Homo sapiens
acaacatttgtatctcatttca

SEQ ID NO: 66851 - DNA, 23 bp, Homo sapiens
aaaatcttaaactgtaaactctt

SEQ ID NO: 66852 - DNA, 20 bp, Homo sapiens
ttgttttgcccataagaact

SEQ ID NO: 66853 - DNA, 20 bp, Homo sapiens
tgtttctcagtgccattaaa

SEQ ID NO: 66854 - DNA, 23 bp, Homo sapiens
ttttgcagttataaaggaaatag

SEQ ID NO: 66855 - DNA, 21 bp, Homo sapiens
aggatcatcatcatcatcctg

SEQ ID NO: 66856 - DNA, 22 bp, Homo sapiens
gattttgaatcaagtgaggtaa

SEQ ID NO: 66857 - DNA, 21 bp, Homo sapiens
tgtaacaaacctgcacatgta

SEQ ID NO: 66858 - DNA, 17 bp, Homo sapiens
aggtggtccagcacatc

SEQ ID NO: 66859 - DNA, 19 bp, Homo sapiens
aagttcagcaactagctgg

SEQ ID NO: 66860 - DNA, 19 bp, Homo sapiens
cagaaaggcacacttgatg

SEQ ID NO: 66861 - DNA, 23 bp, Homo sapiens
tttaacaatattacttatttacc

SEQ ID NO: 66862 - DNA, 24 bp, Homo sapiens
gtagattttaagggaattgtgtgt

SEQ ID NO: 66863 - DNA, 22 bp, Homo sapiens
tgactctgggacatgattttgc

SEQ ID NO: 66864 - DNA, 20 bp, Homo sapiens
tcctaccacttcaaagacag

SEQ ID NO: 66865 - DNA, 22 bp, Homo sapiens
tcctctacatactttactagtt

SEQ ID NO: 66866 - DNA, 18 bp, Homo sapiens
ctttgtttccttgccagg

SEQ ID NO: 66867 - DNA, 23 bp, Homo sapiens
tgtgtaactttggaattctggat

SEQ ID NO: 66868 - DNA, 21 bp, Homo sapiens
aatcgtgtaattcatttcttc

SEQ ID NO: 66869 - DNA, 20 bp, Homo sapiens
actgcacctacctttgatct

SEQ ID NO: 66870 - DNA, 18 bp, Homo sapiens
tggttatggctttctgtc

SEQ ID NO: 66871 - DNA, 22 bp, Homo sapiens
tctgattcatctacctcaatca

SEQ ID NO: 66872 - DNA, 21 bp, Homo sapiens
tcccgaaatgtcactactaag

SEQ ID NO: 66873 - DNA, 21 bp, Homo sapiens
gctccttccagctttaatgtt

SEQ ID NO: 66874 - DNA, 22 bp, Homo sapiens
ataacataatgcacatttcatc

SEQ ID NO: 66875 - DNA, 23 bp, Homo sapiens
gagagttgacaattcataatgca

SEQ ID NO: 66876 - DNA, 22 bp, Homo sapiens
tgcagataggactcagaaaatc

SEQ ID NO: 66877 - DNA, 26 bp, Homo sapiens
ctttttttcttacctctgaataattc

SEQ ID NO: 66878 - DNA, 24 bp, Homo sapiens
atctccctttagatttttaaaaat

SEQ ID NO: 66879 - DNA, 23 bp, Homo sapiens
gcatctagaaatatgtctattat

SEQ ID NO: 66880 - DNA, 21 bp, Homo sapiens
aaataatttatcctgtgatcc

SEQ ID NO: 66881 - DNA, 19 bp, Homo sapiens
ctggtctggagacttctac

SEQ ID NO: 66882 - DNA, 18 bp, Homo sapiens
aagggctaccaatggtga

SEQ ID NO: 66883 - DNA, 21 bp, Homo sapiens
tgaaataaaccttagctgctg

SEQ ID NO: 66884 - DNA, 21 bp, Homo sapiens
ttgcagtctatactcaccatc

SEQ ID NO: 66885 - DNA, 22 bp, Homo sapiens
tgtctggctttttacagacaaa

SEQ ID NO: 66886 - DNA, 18 bp, Homo sapiens
tgagttcctgctacgggt

SEQ ID NO: 66887 - DNA, 24 bp, Homo sapiens
tgccttaaagactgtctttatata

SEQ ID NO: 66888 - DNA, 22 bp, Homo sapiens
gccgaggaagaggtcgaagagg

SEQ ID NO: 66889 - DNA, 24 bp, Homo sapiens
acttataattcaactctgacaaga

SEQ ID NO: 66890 - DNA, 21 bp, Homo sapiens
gcagaacagatggctaatgac

SEQ ID NO: 66891 - DNA, 20 bp, Homo sapiens
aatgtgcacaggactgaact

SEQ ID NO: 66892 - DNA, 17 bp, Homo sapiens
agaggagtctgcttctg

SEQ ID NO: 66893 - DNA, 22 bp, Homo sapiens
gatgctgaattctgccctcttc

SEQ ID NO: 66894 - DNA, 20 bp, Homo sapiens
tgtactttctccttcttctc

SEQ ID NO: 66895 - DNA, 21 bp, Homo sapiens
ttgctgctgagatgctatcat

SEQ ID NO: 66896 - DNA, 21 bp, Homo sapiens
tgattagttcatgtcaatgcc

SEQ ID NO: 66897 - DNA, 23 bp, Homo sapiens
ataaggtcatcagcactaaaggc

SEQ ID NO: 66898 - DNA, 17 bp, Homo sapiens
gtgctgagattacaggc

SEQ ID NO: 66899 - DNA, 22 bp, Homo sapiens
atgaagaagatgatgaagtccg

SEQ ID NO: 66900 - DNA, 21 bp, Homo sapiens
aaaagcagccatcctaagcca

SEQ ID NO: 66901 - DNA, 22 bp, Homo sapiens
gtttgtgatttactctgttatg

SEQ ID NO: 66902 - DNA, 24 bp, Homo sapiens
gactattctaactaaacctactgg

SEQ ID NO: 66903 - DNA, 22 bp, Homo sapiens
aagcatttcttaattgtagccc

SEQ ID NO: 66904 - DNA, 21 bp, Homo sapiens
gcagaataattacctcacgga

SEQ ID NO: 66905 - DNA, 22 bp, Homo sapiens
taattggaaaaatatgatttac

SEQ ID NO: 66906 - DNA, 21 bp, Homo sapiens
gtttctctgaaacgacgtacc

SEQ ID NO: 66907 - DNA, 18 bp, Homo sapiens
tgccctcgaagacaaaat

SEQ ID NO: 66908 - DNA, 22 bp, Homo sapiens
tcatttcaattttatagatgag

SEQ ID NO: 66909 - DNA, 24 bp, Homo sapiens
ccattgaggaattagtgaaatacc

SEQ ID NO: 66910 - DNA, 22 bp, Homo sapiens
gaaaaaaatctcagagctactc

SEQ ID NO: 66911 - DNA, 18 bp, Homo sapiens
agggatgggtgaagcagt

SEQ ID NO: 66912 - DNA, 24 bp, Homo sapiens
ctcaaattagttacttacctcctc

SEQ ID NO: 66913 - DNA, 22 bp, Homo sapiens
aactatttctgcatccagtgat

SEQ ID NO: 66914 - DNA, 19 bp, Homo sapiens
tcgctgtgttttttccaac

SEQ ID NO: 66915 - DNA, 23 bp, Homo sapiens
ttttctctggtaacatatttggt

SEQ ID NO: 66916 - DNA, 23 bp, Homo sapiens
cctccttgtccacaaattcttgt

SEQ ID NO: 66917 - DNA, 20 bp, Homo sapiens
gctttttctggttcctgata

SEQ ID NO: 66918 - DNA, 17 bp, Homo sapiens
actttcaaaccgcagag

SEQ ID NO: 66919 - DNA, 19 bp, Homo sapiens
ttgtcaccctacttacttc

SEQ ID NO: 66920 - DNA, 23 bp, Homo sapiens
atcaactttgggaaacttatcac

SEQ ID NO: 66921 - DNA, 21 bp, Homo sapiens
atcaactaaacatatcctaaa

SEQ ID NO: 66922 - DNA, 22 bp, Homo sapiens
ttttaacattatgatagaagct

SEQ ID NO: 66923 - DNA, 23 bp, Homo sapiens
ctgtaagaaattaccttctctgc

SEQ ID NO: 66924 - DNA, 16 bp, Homo sapiens
aagtttggccttacct

SEQ ID NO: 66925 - DNA, 18 bp, Homo sapiens
gttgttccttctgaaggc

SEQ ID NO: 66926 - DNA, 22 bp, Homo sapiens
ccgtggctattaacaaaaatgg

SEQ ID NO: 66927 - DNA, 23 bp, Homo sapiens
gaagacaagagaattattcccac

SEQ ID NO: 66928 - DNA, 19 bp, Homo sapiens
tggatcgggtagctaatcc

SEQ ID NO: 66929 - DNA, 23 bp, Homo sapiens
aacatcttccattattatgttac

SEQ ID NO: 66930 - DNA, 19 bp, Homo sapiens
aggtggactatagtggagg

SEQ ID NO: 66931 - DNA, 22 bp, Homo sapiens
ttttttacctcataaaaataac

SEQ ID NO: 66932 - DNA, 21 bp, Homo sapiens
gtgtgtgttttaaaaattggc

SEQ ID NO: 66933 - DNA, 23 bp, Homo sapiens
tgcctgaaaaaatggataatgtc

SEQ ID NO: 66934 - DNA, 24 bp, Homo sapiens
aaattaattcataaatttcaaagt

SEQ ID NO: 66935 - DNA, 21 bp, Homo sapiens
gcgaagaacactgaaaggttc

SEQ ID NO: 66936 - DNA, 16 bp, Homo sapiens
accagccagagaagcc

SEQ ID NO: 66937 - DNA, 24 bp, Homo sapiens
tgcctccgatggtgattgctcttc

SEQ ID NO: 66938 - DNA, 23 bp, Homo sapiens
ttttaaaaattttgagattgaag

SEQ ID NO: 66939 - DNA, 22 bp, Homo sapiens
tgtaaactgtacattactatgc

SEQ ID NO: 66940 - DNA, 22 bp, Homo sapiens
gtggtaataagctgctattcag

SEQ ID NO: 66941 - DNA, 18 bp, Homo sapiens
actcgcagtcgtacaaga

SEQ ID NO: 66942 - DNA, 22 bp, Homo sapiens
aaaggtgtcataaatgacctag

SEQ ID NO: 66943 - DNA, 22 bp, Homo sapiens
ccgttcagcattttcaagcatt

SEQ ID NO: 66944 - DNA, 18 bp, Homo sapiens
aacccaagccatacaaag

SEQ ID NO: 66945 - DNA, 20 bp, Homo sapiens
ccttacaggcttcatgagaa

SEQ ID NO: 66946 - DNA, 23 bp, Homo sapiens
tttttcatggaggatattgttct

SEQ ID NO: 66947 - DNA, 24 bp, Homo sapiens
ttaaattacttaattgaaggtgaa

SEQ ID NO: 66948 - DNA, 20 bp, Homo sapiens
tgcgtattaaagggaggaag

SEQ ID NO: 66949 - DNA, 22 bp, Homo sapiens
agaattaccttctccaaacaga

SEQ ID NO: 66950 - DNA, 16 bp, Homo sapiens
actgtgactcggtgtt

SEQ ID NO: 66951 - DNA, 24 bp, Homo sapiens
tctgggttaaaaatgtctggatga

SEQ ID NO: 66952 - DNA, 21 bp, Homo sapiens
aaagaagcatttttagaaact

SEQ ID NO: 66953 - DNA, 22 bp, Homo sapiens
tgtgtgaagaggaattttatgc

SEQ ID NO: 66954 - DNA, 24 bp, Homo sapiens
tttcctgtgatgataacattaagg

SEQ ID NO: 66955 - DNA, 20 bp, Homo sapiens
ggagaagctgtaaagaagtg

SEQ ID NO: 66956 - DNA, 23 bp, Homo sapiens
tgatcaattttcaaaaataaagc

SEQ ID NO: 66957 - DNA, 23 bp, Homo sapiens
tgaacaacagctgttttatatct

SEQ ID NO: 66958 - DNA, 22 bp, Homo sapiens
ccttaacataggccttaaacct

SEQ ID NO: 66959 - DNA, 20 bp, Homo sapiens
ttgatcttgttatctggggc

SEQ ID NO: 66960 - DNA, 22 bp, Homo sapiens
tggctcaaaatatataacactc

SEQ ID NO: 66961 - DNA, 21 bp, Homo sapiens
tgatacaggagtaaacatgga

SEQ ID NO: 66962 - DNA, 19 bp, Homo sapiens
tgagcttccaggttgtgag

SEQ ID NO: 66963 - DNA, 21 bp, Homo sapiens
agatctgtatagacttcaata

SEQ ID NO: 66964 - DNA, 18 bp, Homo sapiens
actcatgttcatggcccc

SEQ ID NO: 66965 - DNA, 21 bp, Homo sapiens
tgtgcacactttctggtacat

SEQ ID NO: 66966 - DNA, 22 bp, Homo sapiens
tgttctggaatgaagttagtac

SEQ ID NO: 66967 - DNA, 22 bp, Homo sapiens
tcttggtttaacttatttgtga

SEQ ID NO: 66968 - DNA, 21 bp, Homo sapiens
ctatgttttgtctgatcttgc

SEQ ID NO: 66969 - DNA, 22 bp, Homo sapiens
atcgaatgtttgtcaataaaaa

SEQ ID NO: 66970 - DNA, 19 bp, Homo sapiens
taggtaagctcagaaacag

SEQ ID NO: 66971 - DNA, 23 bp, Homo sapiens
agaaaacaatttaaaaataatgt

SEQ ID NO: 66972 - DNA, 24 bp, Homo sapiens
ttcagagaaaagttttacctgttc

SEQ ID NO: 66973 - DNA, 23 bp, Homo sapiens
agtgaaatactttgagaaggaca

SEQ ID NO: 66974 - DNA, 19 bp, Homo sapiens
ttggtctcaacattgttac

SEQ ID NO: 66975 - DNA, 22 bp, Homo sapiens
acctgcaacatacccacttata

SEQ ID NO: 66976 - DNA, 22 bp, Homo sapiens
tgcgctatatggtttaggtaag

SEQ ID NO: 66977 - DNA, 20 bp, Homo sapiens
taccaaaaccatccatcatt

SEQ ID NO: 66978 - DNA, 22 bp, Homo sapiens
tcaatgtctgtggagaagatag

SEQ ID NO: 66979 - DNA, 21 bp, Homo sapiens
aacagatacaaacttatctcc

SEQ ID NO: 66980 - DNA, 19 bp, Homo sapiens
gcactttgtgccttggaca

SEQ ID NO: 66981 - DNA, 28 bp, Homo sapiens
ataaacagtaaaataaaactgtcttacc

SEQ ID NO: 66982 - DNA, 23 bp, Homo sapiens
tcatgcagatacctacttttaca

SEQ ID NO: 66983 - DNA, 20 bp, Homo sapiens
ttttgaagcaaaaccggact

SEQ ID NO: 66984 - DNA, 22 bp, Homo sapiens
cctcatctatgtttttgtaagt

SEQ ID NO: 66985 - DNA, 22 bp, Homo sapiens
tgatttacaaatccagcacaac

SEQ ID NO: 66986 - DNA, 22 bp, Homo sapiens
acaaaaatgtagcaaatacttt

SEQ ID NO: 66987 - DNA, 17 bp, Homo sapiens
acgatcccacaggggta

SEQ ID NO: 66988 - DNA, 25 bp, Homo sapiens
cagtataaaagcttgtatgaatgtg

SEQ ID NO: 66989 - DNA, 18 bp, Homo sapiens
caagatggcaacctcaac

SEQ ID NO: 66990 - DNA, 18 bp, Homo sapiens
aaaagggaaggcatgctt

SEQ ID NO: 66991 - DNA, 20 bp, Homo sapiens
acagcttttgtcccgtatgg

SEQ ID NO: 66992 - DNA, 22 bp, Homo sapiens
ttccaacaaactctaagaaaac

SEQ ID NO: 66993 - DNA, 22 bp, Homo sapiens
aatgtagattatgcagtttgcc

SEQ ID NO: 66994 - DNA, 22 bp, Homo sapiens
acactggaattgaaatgttgag

SEQ ID NO: 66995 - DNA, 21 bp, Homo sapiens
tgaaatgaattgtcgcctatg

SEQ ID NO: 66996 - DNA, 20 bp, Homo sapiens
tcagtgatcagtcagtcaac

SEQ ID NO: 66997 - DNA, 23 bp, Homo sapiens
aaaattcaaagaatgatatttac

SEQ ID NO: 66998 - DNA, 24 bp, Homo sapiens
acatacctgcctcgagttattaag

SEQ ID NO: 66999 - DNA, 23 bp, Homo sapiens
gtgtgtttacgtgtcttatacag

SEQ ID NO: 67000 - DNA, 21 bp, Homo sapiens
tttgttaggtggtgatctttt

SEQ ID NO: 67001 - DNA, 21 bp, Homo sapiens
acttacttactaaaaccaaag

SEQ ID NO: 67002 - DNA, 22 bp, Homo sapiens
aattttacctgtaaaacatact

SEQ ID NO: 67003 - DNA, 20 bp, Homo sapiens
ggccgatcacccatacaata

SEQ ID NO: 67004 - DNA, 24 bp, Homo sapiens
tgccatatataatagtgtcttttg

SEQ ID NO: 67005 - DNA, 20 bp, Homo sapiens
cttgagggcttattttcatg

SEQ ID NO: 67006 - DNA, 21 bp, Homo sapiens
agaaccagattaattaccaga

SEQ ID NO: 67007 - DNA, 20 bp, Homo sapiens
agacttgcccaggaaaatga

SEQ ID NO: 67008 - DNA, 23 bp, Homo sapiens
gctttgagctttcagtatattga

SEQ ID NO: 67009 - DNA, 18 bp, Homo sapiens
atggagaaagatgcagtc

SEQ ID NO: 67010 - DNA, 25 bp, Homo sapiens
aaaacaaatctctaactttagaagg

SEQ ID NO: 67011 - DNA, 24 bp, Homo sapiens
tcttaatatagtgatgatgaaaac

SEQ ID NO: 67012 - DNA, 21 bp, Homo sapiens
acaaatacaaaccacactcac

SEQ ID NO: 67013 - DNA, 20 bp, Homo sapiens
ctcaatttgtttgaatatcc

SEQ ID NO: 67014 - DNA, 17 bp, Homo sapiens
tcatttcctctgactgc

SEQ ID NO: 67015 - DNA, 24 bp, Homo sapiens
tgaactctaaggctaaaaaaaatg

SEQ ID NO: 67016 - DNA, 29 bp, Homo sapiens
gcaactaatattttaaatgtgttttcatc

SEQ ID NO: 67017 - DNA, 19 bp, Homo sapiens
atgagtactgcagatgcac

SEQ ID NO: 67018 - DNA, 24 bp, Homo sapiens
cctttttgatgactaatatttctg

SEQ ID NO: 67019 - DNA, 19 bp, Homo sapiens
cagtacccaggggttcttg

SEQ ID NO: 67020 - DNA, 22 bp, Homo sapiens
agttttcttttactgtgatcac

SEQ ID NO: 67021 - DNA, 24 bp, Homo sapiens
tgtaattttgtttttagaatttct

SEQ ID NO: 67022 - DNA, 19 bp, Homo sapiens
ttccagaagtcaggtgctt

SEQ ID NO: 67023 - DNA, 20 bp, Homo sapiens
aattattgtgcctttgacca

SEQ ID NO: 67024 - DNA, 24 bp, Homo sapiens
agcagatcattaagtactagactc

SEQ ID NO: 67025 - DNA, 24 bp, Homo sapiens
actataaatactgcagtataaaat

SEQ ID NO: 67026 - DNA, 22 bp, Homo sapiens
agtaatttactacctttcgttc

SEQ ID NO: 67027 - DNA, 29 bp, Homo sapiens
ctatatatgcatatatacatatacatata

SEQ ID NO: 67028 - DNA, 20 bp, Homo sapiens
aaaaaggaaataataatggg

SEQ ID NO: 67029 - DNA, 20 bp, Homo sapiens
tgaaattgtgaaccatgagt

SEQ ID NO: 67030 - DNA, 24 bp, Homo sapiens
tctagatgtttaattgtttcagga

SEQ ID NO: 67031 - DNA, 23 bp, Homo sapiens
gtcaactagaacatgatagagct

SEQ ID NO: 67032 - DNA, 17 bp, Homo sapiens
aaacagcatcccaattc

SEQ ID NO: 67033 - DNA, 19 bp, Homo sapiens
taagtgtgattagtaaccc

SEQ ID NO: 67034 - DNA, 27 bp, Homo sapiens
atatcacaacagaaataaatatgaaag

SEQ ID NO: 67035 - DNA, 19 bp, Homo sapiens
tttaagcgcctgattcgag

SEQ ID NO: 67036 - DNA, 24 bp, Homo sapiens
tgcaaggcataatgatatatagga

SEQ ID NO: 67037 - DNA, 25 bp, Homo sapiens
agattccaaacaaggaaaatatttg

SEQ ID NO: 67038 - DNA, 24 bp, Homo sapiens
attctcagacattctgtttctttc

SEQ ID NO: 67039 - DNA, 21 bp, Homo sapiens
agctgatgtagtaatctaagc

SEQ ID NO: 67040 - DNA, 16 bp, Homo sapiens
tctgcctggaggcttg

SEQ ID NO: 67041 - DNA, 23 bp, Homo sapiens
acagcttttgaaattattataat

SEQ ID NO: 67042 - DNA, 20 bp, Homo sapiens
cacttacttctgtttgcaca

SEQ ID NO: 67043 - DNA, 27 bp, Homo sapiens
tcttgaagatttttacagaaatatatt

SEQ ID NO: 67044 - DNA, 19 bp, Homo sapiens
aaaaaaaaaactcacgcga

SEQ ID NO: 67045 - DNA, 21 bp, Homo sapiens
tgtatcagcctcaacacaagc

SEQ ID NO: 67046 - DNA, 24 bp, Homo sapiens
cactcaacttttatcttattctat

SEQ ID NO: 67047 - DNA, 23 bp, Homo sapiens
gtcaaatacttcatcaaatgtgc

SEQ ID NO: 67048 - DNA, 18 bp, Homo sapiens
ttggggccataatttgcc

SEQ ID NO: 67049 - DNA, 20 bp, Homo sapiens
attagatgaatctttcactg

SEQ ID NO: 67050 - DNA, 23 bp, Homo sapiens
atttcccaaatggaattatttaa

SEQ ID NO: 67051 - DNA, 20 bp, Homo sapiens
tttctcacagaaagaatgtc

SEQ ID NO: 67052 - DNA, 24 bp, Homo sapiens
tttttctttatttgtttattttga

SEQ ID NO: 67053 - DNA, 22 bp, Homo sapiens
cacaaacaacaaccttcaaaac

SEQ ID NO: 67054 - DNA, 22 bp, Homo sapiens
aaattatatcatggatacagtg

SEQ ID NO: 67055 - DNA, 24 bp, Homo sapiens
ttgggggatatagacagatacaga

SEQ ID NO: 67056 - DNA, 23 bp, Homo sapiens
tgtagcaacatactactcaaaga

SEQ ID NO: 67057 - DNA, 20 bp, Homo sapiens
gggtcagttcgataaccata

SEQ ID NO: 67058 - DNA, 20 bp, Homo sapiens
agcaacagtggttaggtatg

SEQ ID NO: 67059 - DNA, 22 bp, Homo sapiens
tgaagtacacagagaacaattc

SEQ ID NO: 67060 - DNA, 28 bp, Homo sapiens
tgatggagtacttttactatgttaaaaa

SEQ ID NO: 67061 - DNA, 19 bp, Homo sapiens
tagccactaaaactctatg

SEQ ID NO: 67062 - DNA, 24 bp, Homo sapiens
tgggattatggaatatttaagtta

SEQ ID NO: 67063 - DNA, 28 bp, Homo sapiens
gaaaaaaagtccaaaaatttggaattta

SEQ ID NO: 67064 - DNA, 24 bp, Homo sapiens
tcatgactaataattttttttttt

SEQ ID NO: 67065 - DNA, 22 bp, Homo sapiens
acaaaacaaaagaaaaagagat

SEQ ID NO: 67066 - DNA, 24 bp, Homo sapiens
ccttcacaagatgttcatagagtt

SEQ ID NO: 67067 - DNA, 30 bp, Homo sapiens; identical to SEQ ID NO: 20373

SEQ ID NO: 67068 - DNA, 19 bp, Homo sapiens
gctgttctcagactgacgg

SEQ ID NO: 67069 - DNA, 21 bp, Homo sapiens
tggacttggttgtctctttag

SEQ ID NO: 67070 - DNA, 29 bp, Homo sapiens
tttttttaatgaatagttttgaaattaag

SEQ ID NO: 67071 - DNA, 21 bp, Homo sapiens
tgacagccaaagtcttgagga

SEQ ID NO: 67072 - DNA, 21 bp, Homo sapiens
tctttcagcataccacttcat

SEQ ID NO: 67073 - DNA, 21 bp, Homo sapiens
ccaaatataaagcaaagtggg

SEQ ID NO: 67074 - DNA, 21 bp, Homo sapiens
cccagttgagcttgtttgttt

SEQ ID NO: 67075 - DNA, 24 bp, Homo sapiens
atttgcagttgaaataattcaata

SEQ ID NO: 67076 - DNA, 21 bp, Homo sapiens
tcttagcagctcttactatct

SEQ ID NO: 67077 - DNA, 23 bp, Homo sapiens
aacatttcctttatacctttttc

SEQ ID NO: 67078 - DNA, 21 bp, Homo sapiens
ttaggagatgaaattcttccc

SEQ ID NO: 67079 - DNA, 24 bp, Homo sapiens
tcctaaagaacactaattttatac

SEQ ID NO: 67080 - DNA, 21 bp, Homo sapiens
aatgattctttaaaagaagtc

SEQ ID NO: 67081 - DNA, 23 bp, Homo sapiens
aaacattctcatggctaagtaac

SEQ ID NO: 67082 - DNA, 18 bp, Homo sapiens
aaggagccaaaacccaag

SEQ ID NO: 67083 - DNA, 23 bp, Homo sapiens
cattttgttgattcataagcacc

SEQ ID NO: 67084 - DNA, 23 bp, Homo sapiens
cattagtactgaatggaaggttg

SEQ ID NO: 67085 - DNA, 24 bp, Homo sapiens
tcctctacttcctatatgacttat

SEQ ID NO: 67086 - DNA, 22 bp, Homo sapiens
gctgaataattttgtgggagct

SEQ ID NO: 67087 - DNA, 20 bp, Homo sapiens
tcaatcaaattttctttgac

SEQ ID NO: 67088 - DNA, 22 bp, Homo sapiens
aattttttggattacaggtgct

SEQ ID NO: 67089 - DNA, 22 bp, Homo sapiens
ggaaatttctaaatgtgacatg

SEQ ID NO: 67090 - DNA, 19 bp, Homo sapiens
tgatctgctagtgaatgag

SEQ ID NO: 67091 - DNA, 21 bp, Homo sapiens
ggctttttgtgagaacacagg

SEQ ID NO: 67092 - DNA, 22 bp, Homo sapiens
caggatttcgtaatattgccgt

SEQ ID NO: 67093 - DNA, 26 bp, Homo sapiens
agggtaattccaaatatttctgatag

SEQ ID NO: 67094 - DNA, 19 bp, Homo sapiens
agaatcacttgaacctggg

SEQ ID NO: 67095 - DNA, 20 bp, Homo sapiens
agggacactgtaatcactag

SEQ ID NO: 67096 - DNA, 19 bp, Homo sapiens
ccaacctgggcaacaacag

SEQ ID NO: 67097 - DNA, 18 bp, Homo sapiens
acttctgaaggtgatctt

SEQ ID NO: 67098 - DNA, 22 bp, Homo sapiens
tttattttacaggtttttaatg

SEQ ID NO: 67099 - DNA, 23 bp, Homo sapiens
agattaaaatgacactgaatgag

SEQ ID NO: 67100 - DNA, 19 bp, Homo sapiens
acacaaagagaatctagtg

SEQ ID NO: 67101 - DNA, 19 bp, Homo sapiens
tggttgagatgaaaggatt

SEQ ID NO: 67102 - DNA, 19 bp, Homo sapiens
tgggaagtaataaaagatc

SEQ ID NO: 67103 - DNA, 21 bp, Homo sapiens
tcatggcaatcacatatccct

SEQ ID NO: 67104 - DNA, 18 bp, Homo sapiens
tgggttgcaatctgtagc

SEQ ID NO: 67105 - DNA, 22 bp, Homo sapiens
agccagtttatttttagagtac

SEQ ID NO: 67106 - DNA, 21 bp, Homo sapiens
agtatcatcagtaatggagac

SEQ ID NO: 67107 - DNA, 24 bp, Homo sapiens
agagtaccatgtctatatatttcc

SEQ ID NO: 67108 - DNA, 22 bp, Homo sapiens
gtaaggcatcgtaacacatatg

SEQ ID NO: 67109 - DNA, 22 bp, Homo sapiens
tttttttttttttttaggctac

SEQ ID NO: 67110 - DNA, 26 bp, Homo sapiens
ttttaataaatctgacttttgtgagc

SEQ ID NO: 67111 - DNA, 20 bp, Homo sapiens
tttacctaactgtgagctgt

SEQ ID NO: 67112 - DNA, 20 bp, Homo sapiens
tgctcagaacttataccacg

SEQ ID NO: 67113 - DNA, 22 bp, Homo sapiens
cagcgacatggggaacgtacac

SEQ ID NO: 67114 - DNA, 22 bp, Homo sapiens
tctgtcaacctcaactaaacta

SEQ ID NO: 67115 - DNA, 20 bp, Homo sapiens
agacaagaggtcaaacctag

SEQ ID NO: 67116 - DNA, 21 bp, Homo sapiens
catgctgaacttaccatgaag

SEQ ID NO: 67117 - DNA, 20 bp, Homo sapiens
tggtgtattacctttcgtgg

SEQ ID NO: 67118 - DNA, 20 bp, Homo sapiens
gatatgtgagtgtgtgtgtg

SEQ ID NO: 67119 - DNA, 21 bp, Homo sapiens
ggcttacttggagccataatt

SEQ ID NO: 67120 - DNA, 24 bp, Homo sapiens
agaaaagcatctgaaatagaattt

SEQ ID NO: 67121 - DNA, 24 bp, Homo sapiens
gaagttatttactgggtcagcctg

SEQ ID NO: 67122 - DNA, 22 bp, Homo sapiens
tcaagaatcttcccaaatgtaa

SEQ ID NO: 67123 - DNA, 20 bp, Homo sapiens
ttcccatttttaccgttcct

SEQ ID NO: 67124 - DNA, 19 bp, Homo sapiens
aaatgtatgtgccaggcac

SEQ ID NO: 67125 - DNA, 22 bp, Homo sapiens
gagccatttcattattgattcc

SEQ ID NO: 67126 - DNA, 23 bp, Homo sapiens
gcttttcacaattgtcctttgtt

SEQ ID NO: 67127 - DNA, 16 bp, Homo sapiens
tggaggcacttctgtg

SEQ ID NO: 67128 - DNA, 21 bp, Homo sapiens
gaccaccagtatagttccagg

SEQ ID NO: 67129 - DNA, 22 bp, Homo sapiens
gagagcctgataaaacaaacaa

SEQ ID NO: 67130 - DNA, 23 bp, Homo sapiens
aatagaagcttttctttaaagga

SEQ ID NO: 67131 - DNA, 20 bp, Homo sapiens
agatctgggaaattctgcat

SEQ ID NO: 67132 - DNA, 22 bp, Homo sapiens
ggtgacttagaaaatagcacag

SEQ ID NO: 67133 - DNA, 20 bp, Homo sapiens
tcaggcataaagacacagat

SEQ ID NO: 67134 - DNA, 25 bp, Homo sapiens
gatattaagaaatttagtatagatg

SEQ ID NO: 67135 - DNA, 22 bp, Homo sapiens
cattgcagctttacagtttttc

SEQ ID NO: 67136 - DNA, 24 bp, Homo sapiens
agtcaagatttatagctaaacatg

SEQ ID NO: 67137 - DNA, 22 bp, Homo sapiens
agcttaaaatgataaagagcat

SEQ ID NO: 67138 - DNA, 23 bp, Homo sapiens
ggtcttctaagtgaagctttttg

SEQ ID NO: 67139 - DNA, 18 bp, Homo sapiens
aagatgcagctactaccc

SEQ ID NO: 67140 - DNA, 22 bp, Homo sapiens
tcttgtgagtctcactatgaaa

SEQ ID NO: 67141 - DNA, 16 bp, Homo sapiens
aacctcttccctggct

SEQ ID NO: 67142 - DNA, 22 bp, Homo sapiens
ctttatctttttggtggtgttc

SEQ ID NO: 67143 - DNA, 29 bp, Homo sapiens
ataatctattaattatataagtagtcttt

SEQ ID NO: 67144 - DNA, 23 bp, Homo sapiens
atcttgtcaaaagttgtctgaag

SEQ ID NO: 67145 - DNA, 22 bp, Homo sapiens
cctttgtaatatattgctaata

SEQ ID NO: 67146 - DNA, 17 bp, Homo sapiens
ccaatactggactggtg

SEQ ID NO: 67147 - DNA, 19 bp, Homo sapiens
actttcttgaagtgaacac

SEQ ID NO: 67148 - DNA, 21 bp, Homo sapiens
agaagctgttctgataatccc

SEQ ID NO: 67149 - DNA, 24 bp, Homo sapiens
agtagaagaactatttcttcagac

SEQ ID NO: 67150 - DNA, 23 bp, Homo sapiens
tgaatcatatataagcttagttc

SEQ ID NO: 67151 - DNA, 22 bp, Homo sapiens
gaatgtggtatagaaaagcacc

SEQ ID NO: 67152 - DNA, 17 bp, Homo sapiens
cttgctgtttttcctgc

SEQ ID NO: 67153 - DNA, 19 bp, Homo sapiens
gaatcactggatcgctgtc

SEQ ID NO: 67154 - DNA, 22 bp, Homo sapiens
gctaagttgtccaatttagagc

SEQ ID NO: 67155 - DNA, 18 bp, Homo sapiens
caccggacaagagtttct

SEQ ID NO: 67156 - DNA, 24 bp, Homo sapiens
atccaggatatgccacctttaact

SEQ ID NO: 67157 - DNA, 20 bp, Homo sapiens
cctcttcagctattacaccc

SEQ ID NO: 67158 - DNA, 22 bp, Homo sapiens
tcttacaaaagatagagtatac

SEQ ID NO: 67159 - DNA, 27 bp, Homo sapiens
ccgaaactttattagtataaattctcc

SEQ ID NO: 67160 - DNA, 24 bp, Homo sapiens
atttgtggtttactttaagattac

SEQ ID NO: 67161 - DNA, 24 bp, Homo sapiens
tgtcttccaaacaaatgtaataat

SEQ ID NO: 67162 - DNA, 22 bp, Homo sapiens
gggtgtccttggctgctactgt

SEQ ID NO: 67163 - DNA, 23 bp, Homo sapiens
ataatttcttctcacattacata

SEQ ID NO: 67164 - DNA, 18 bp, Homo sapiens
ccagaaagccaaggtagg

SEQ ID NO: 67165 - DNA, 21 bp, Homo sapiens
tgatactttctcctgcacatt

SEQ ID NO: 67166 - DNA, 22 bp, Homo sapiens
attttttctcttaagtgcactt

SEQ ID NO: 67167 - DNA, 21 bp, Homo sapiens
gctgcatcatatttctcaagg

SEQ ID NO: 67168 - DNA, 24 bp, Homo sapiens
aaagtacactgtaaaaagcaatac

SEQ ID NO: 67169 - DNA, 27 bp, Homo sapiens
aaaaaacaaaacaagaagaagaaaatc

SEQ ID NO: 67170 - DNA, 23 bp, Homo sapiens
acaatagtctctaatgcaatgtg

SEQ ID NO: 67171 - DNA, 17 bp, Homo sapiens
tgacaatcccactgcac

SEQ ID NO: 67172 - DNA, 24 bp, Homo sapiens
aatgaggaattcagaattggttcc

SEQ ID NO: 67173 - DNA, 24 bp, Homo sapiens
cttgagcaactgtaccaaggtaag

SEQ ID NO: 67174 - DNA, 22 bp, Homo sapiens
aagccagatgcaatcttatttg

SEQ ID NO: 67175 - DNA, 21 bp, Homo sapiens
aagcagcatatatattggccc

SEQ ID NO: 67176 - DNA, 22 bp, Homo sapiens
ctaaacttttacaaatatctgc

SEQ ID NO: 67177 - DNA, 22 bp, Homo sapiens
gatagagaaaacactgtctgcc

SEQ ID NO: 67178 - DNA, 23 bp, Homo sapiens
tcaacaaaaaaattatgcctatt

SEQ ID NO: 67179 - DNA, 22 bp, Homo sapiens
tgtcttaattgcagaagagtcc

SEQ ID NO: 67180 - DNA, 23 bp, Homo sapiens
acatttgtaaaaatgttaagagc

SEQ ID NO: 67181 - DNA, 21 bp, Homo sapiens
aacatcaaagctaatgaatga

SEQ ID NO: 67182 - DNA, 17 bp, Homo sapiens
ccacggtcaaatggctt

SEQ ID NO: 67183 - DNA, 21 bp, Homo sapiens
ctcccaaattgctgagattac

SEQ ID NO: 67184 - DNA, 17 bp, Homo sapiens
tgactgatcctccacct

SEQ ID NO: 67185 - DNA, 21 bp, Homo sapiens
ttttgactacagcatgctcct

SEQ ID NO: 67186 - DNA, 17 bp, Homo sapiens
aggttcgtttgcatcac

SEQ ID NO: 67187 - DNA, 21 bp, Homo sapiens
ccttgaaggcatccttcatca

SEQ ID NO: 67188 - DNA, 20 bp, Homo sapiens
aaagaagtaaaagaaatccc

SEQ ID NO: 67189 - DNA, 23 bp, Homo sapiens
tactaatggaaatctaatggagg

SEQ ID NO: 67190 - DNA, 21 bp, Homo sapiens
ctaagagaaaatgaaataagc

SEQ ID NO: 67191 - DNA, 23 bp, Homo sapiens
ccctgatagtagtgttagtgatg

SEQ ID NO: 67192 - DNA, 29 bp, Homo sapiens
ataaattcaagtaaaaataaaaaaaaaat

SEQ ID NO: 67193 - DNA, 22 bp, Homo sapiens
gctttgacagatattcttcagc

SEQ ID NO: 67194 - DNA, 21 bp, Homo sapiens
ttcactataattttgcttttc

SEQ ID NO: 67195 - DNA, 22 bp, Homo sapiens
tctgagcagtagttacacacaa

SEQ ID NO: 67196 - DNA, 23 bp, Homo sapiens
gttaatatgactatatatggctg

SEQ ID NO: 67197 - DNA, 25 bp, Homo sapiens
cgtgctagaatcaattaacattaac

SEQ ID NO: 67198 - DNA, 22 bp, Homo sapiens
taggtgccattaatcctttagc

SEQ ID NO: 67199 - DNA, 22 bp, Homo sapiens
tcatttaacgtaactcaccata

SEQ ID NO: 67200 - DNA, 20 bp, Homo sapiens
acatgctcaagttcttgtgt

SEQ ID NO: 67201 - DNA, 21 bp, Homo sapiens
gtgattcttacatgtcaactc

SEQ ID NO: 67202 - DNA, 20 bp, Homo sapiens
tagggcagctgatattcgga

SEQ ID NO: 67203 - DNA, 22 bp, Homo sapiens
tccaactagtctcaggttcatt

SEQ ID NO: 67204 - DNA, 24 bp, Homo sapiens
acctaccaaatccctccacctgca

SEQ ID NO: 67205 - DNA, 21 bp, Homo sapiens
ttctccaggaagctcctttaa

SEQ ID NO: 67206 - DNA, 21 bp, Homo sapiens
ctgcttcagcctcccaaagtg

SEQ ID NO: 67207 - DNA, 24 bp, Homo sapiens
aaggttttaatttcttacgatagt

SEQ ID NO: 67208 - DNA, 28 bp, Homo sapiens
tatgtttatatactttttaaagtaaatg

SEQ ID NO: 67209 - DNA, 19 bp, Homo sapiens
aagcttaacagaacacatc

SEQ ID NO: 67210 - DNA, 21 bp, Homo sapiens
tagtatctaatgcttttaaag

SEQ ID NO: 67211 - DNA, 22 bp, Homo sapiens
tcacgacgatacaaagaacaca

SEQ ID NO: 67212 - DNA, 22 bp, Homo sapiens
atgttcttgaacttctgaaacc

SEQ ID NO: 67213 - DNA, 20 bp, Homo sapiens
acctaggtttttcactacat

SEQ ID NO: 67214 - DNA, 24 bp, Homo sapiens
ttcactttaaagttataaaataac

SEQ ID NO: 67215 - DNA, 23 bp, Homo sapiens
atgctccaattactgtaagaaac

SEQ ID NO: 67216 - DNA, 19 bp, Homo sapiens
ttaccacagcaatgtgtgt

SEQ ID NO: 67217 - DNA, 23 bp, Homo sapiens
cgtatccacagatagcaaaagaa

SEQ ID NO: 67218 - DNA, 24 bp, Homo sapiens
ttttaaaccatgtccttcatgtag

SEQ ID NO: 67219 - DNA, 22 bp, Homo sapiens
agatgtattagctatgtaggaa

SEQ ID NO: 67220 - DNA, 20 bp, Homo sapiens
acaagggatgctcaaggaca

SEQ ID NO: 67221 - DNA, 21 bp, Homo sapiens
gcaatgtagttcttcaagcga

SEQ ID NO: 67222 - DNA, 23 bp, Homo sapiens
cagagaatatatatttcctctcc

SEQ ID NO: 67223 - DNA, 22 bp, Homo sapiens
ttccacataatgacaaataagt

SEQ ID NO: 67224 - DNA, 19 bp, Homo sapiens
gcaaaaactcacctcaagc

SEQ ID NO: 67225 - DNA, 22 bp, Homo sapiens
ctttcagtgagttttctgagtg

SEQ ID NO: 67226 - DNA, 25 bp, Homo sapiens
agagaaaaattactcattaacaaac

SEQ ID NO: 67227 - DNA, 19 bp, Homo sapiens
tcaggcatctaacaaagga

SEQ ID NO: 67228 - DNA, 21 bp, Homo sapiens
ggcccattttgaataaggatc

SEQ ID NO: 67229 - DNA, 22 bp, Homo sapiens
attgccttaaaactttgcttga

SEQ ID NO: 67230 - DNA, 25 bp, Homo sapiens
cagcaagaaattgtgtaaatacttc

SEQ ID NO: 67231 - DNA, 22 bp, Homo sapiens
aaattttaaagcagtctttgtt

SEQ ID NO: 67232 - DNA, 23 bp, Homo sapiens
tttgacccattacctattgattg

SEQ ID NO: 67233 - DNA, 20 bp, Homo sapiens
accacagttcttttcccgta

SEQ ID NO: 67234 - DNA, 23 bp, Homo sapiens
tgtgagctgttactatgtaagac

SEQ ID NO: 67235 - DNA, 23 bp, Homo sapiens
gggaaaagactttcctgtaaatg

SEQ ID NO: 67236 - DNA, 19 bp, Homo sapiens
aggcacaccgtatatactc

SEQ ID NO: 67237 - DNA, 16 bp, Homo sapiens
tgttggctgcagagtc

SEQ ID NO: 67238 - DNA, 22 bp, Homo sapiens
aaactcaggttttgttagtctt

SEQ ID NO: 67239 - DNA, 19 bp, Homo sapiens
gctgaagcttcaaaggaag

SEQ ID NO: 67240 - DNA, 20 bp, Homo sapiens
ttttgttctggaatatgctt

SEQ ID NO: 67241 - DNA, 20 bp, Homo sapiens
aaaattaccatttctctcat

SEQ ID NO: 67242 - DNA, 19 bp, Homo sapiens
tgtttgtttgtttgcttgc

SEQ ID NO: 67243 - DNA, 20 bp, Homo sapiens
ggtgaagtaatttatgggat

SEQ ID NO: 67244 - DNA, 20 bp, Homo sapiens
tccaggttactgaaagcact

SEQ ID NO: 67245 - DNA, 20 bp, Homo sapiens
agttgttttagagcagcttt

SEQ ID NO: 67246 - DNA, 20 bp, Homo sapiens
aagctcaggaaggaatgaga

SEQ ID NO: 67247 - DNA, 20 bp, Homo sapiens
ttcatccaaagtttcagggt

SEQ ID NO: 67248 - DNA, 22 bp, Homo sapiens
agtaggaggtttctgaaatgtg

SEQ ID NO: 67249 - DNA, 20 bp, Homo sapiens
gggctacaggataaaaccac

SEQ ID NO: 67250 - DNA, 24 bp, Homo sapiens
ggattttataattgattgttaaac

SEQ ID NO: 67251 - DNA, 23 bp, Homo sapiens
ggttctaatccattctctttcac

SEQ ID NO: 67252 - DNA, 19 bp, Homo sapiens
cccatagtgctgagaaccc

SEQ ID NO: 67253 - DNA, 20 bp, Homo sapiens
cagtgacctaaggaagcttc

SEQ ID NO: 67254 - DNA, 20 bp, Homo sapiens
ctgacgttgatagctgtggt

SEQ ID NO: 67255 - DNA, 22 bp, Homo sapiens
cctagtcttaaataagtgccac

SEQ ID NO: 67256 - DNA, 21 bp, Homo sapiens
gccctgtgtaaatctgtgaaa

SEQ ID NO: 67257 - DNA, 21 bp, Homo sapiens
taccatttgaatagtttttgt

SEQ ID NO: 67258 - DNA, 21 bp, Homo sapiens
gaaactttctctaaaacctgc

SEQ ID NO: 67259 - DNA, 21 bp, Homo sapiens
ttcccatctcatagatgagga

SEQ ID NO: 67260 - DNA, 25 bp, Homo sapiens
tccaaaaccagataatctaaatgag

SEQ ID NO: 67261 - DNA, 27 bp, Homo sapiens
ctaggtcctactctaaataatattaac

SEQ ID NO: 67262 - DNA, 28 bp, Homo sapiens
taataaaataaaaggaaaagaagataag

SEQ ID NO: 67263 - DNA, 16 bp, Homo sapiens
tttggttcgtgcaggt

SEQ ID NO: 67264 - DNA, 22 bp, Homo sapiens
acaaatttcacatatgtcatgt

SEQ ID NO: 67265 - DNA, 19 bp, Homo sapiens
gaagactttatggcatctc

SEQ ID NO: 67266 - DNA, 16 bp, Homo sapiens
tgttgctggtgagggg

SEQ ID NO: 67267 - DNA, 23 bp, Homo sapiens
gatactgaatacaacttatcttc

SEQ ID NO: 67268 - DNA, 18 bp, Homo sapiens
aagaagctgtcctgcttc

SEQ ID NO: 67269 - DNA, 23 bp, Homo sapiens
aatcaaaaccttataacaagatc

SEQ ID NO: 67270 - DNA, 23 bp, Homo sapiens
ccatttataaaattaaagaatgt

SEQ ID NO: 67271 - DNA, 17 bp, Homo sapiens
agcaatggacttcacct

SEQ ID NO: 67272 - DNA, 23 bp, Homo sapiens
tggtattaaaacagtttttaaga

SEQ ID NO: 67273 - DNA, 28 bp, Homo sapiens
aagaatatttacaagaatctttggaaag

SEQ ID NO: 67274 - DNA, 24 bp, Homo sapiens
aacctgtattttaaatttttctat

SEQ ID NO: 67275 - DNA, 19 bp, Homo sapiens
tctctctttgctgtgccat

SEQ ID NO: 67276 - DNA, 24 bp, Homo sapiens
attagaagtcattttgatgaggtg

SEQ ID NO: 67277 - DNA, 18 bp, Homo sapiens
agccatacctgttttccc

SEQ ID NO: 67278 - DNA, 21 bp, Homo sapiens
agtcttctaacagactgcttt

SEQ ID NO: 67279 - DNA, 23 bp, Homo sapiens
taaatagccttaaaacttaaagg

SEQ ID NO: 67280 - DNA, 18 bp, Homo sapiens
gggtaccagagacagtgg

SEQ ID NO: 67281 - DNA, 23 bp, Homo sapiens
gctagataatgattaccacaagc

SEQ ID NO: 67282 - DNA, 26 bp, Homo sapiens
tctatgatatgcttaaaagtgaaaac

SEQ ID NO: 67283 - DNA, 27 bp, Homo sapiens
atctctggtaaattactaatgaataag

SEQ ID NO: 67284 - DNA, 22 bp, Homo sapiens
tggactttgagtcatctatttt

SEQ ID NO: 67285 - DNA, 20 bp, Homo sapiens
tgctctgactggcactagaa

SEQ ID NO: 67286 - DNA, 22 bp, Homo sapiens
atatgccttttgagctgtcttg

SEQ ID NO: 67287 - DNA, 23 bp, Homo sapiens
gaagttagagctagttctctaag

SEQ ID NO: 67288 - DNA, 19 bp, Homo sapiens
gcccttgcagattgatcac

SEQ ID NO: 67289 - DNA, 23 bp, Homo sapiens
gatgtctataaattgaaatagac

SEQ ID NO: 67290 - DNA, 17 bp, Homo sapiens
acgttacatgagccagc

SEQ ID NO: 67291 - DNA, 16 bp, Homo sapiens
ctcaattcaaaggtgg

SEQ ID NO: 67292 - DNA, 22 bp, Homo sapiens
gatggaaaatgaggtggattag

SEQ ID NO: 67293 - DNA, 24 bp, Homo sapiens
tcagtagaaaaatggtttttgaat

SEQ ID NO: 67294 - DNA, 25 bp, Homo sapiens
atgctttttaacttggttttatgac

SEQ ID NO: 67295 - DNA, 22 bp, Homo sapiens
actggtctatgaacaaaacttt

SEQ ID NO: 67296 - DNA, 23 bp, Homo sapiens
tgttctattattaaactcatcat

SEQ ID NO: 67297 - DNA, 19 bp, Homo sapiens
gggatttggatcctgctcc

SEQ ID NO: 67298 - DNA, 24 bp, Homo sapiens
tttgtttacttttcctctttaaga

SEQ ID NO: 67299 - DNA, 22 bp, Homo sapiens
tttgcctatatcagcaattgtc

SEQ ID NO: 67300 - DNA, 21 bp, Homo sapiens
ccatttaaacttgtaaatgaa

SEQ ID NO: 67301 - DNA, 26 bp, Homo sapiens
gaagaattttctgataggaatcctag

SEQ ID NO: 67302 - DNA, 22 bp, Homo sapiens
caaacccaaatctaaattctgt

SEQ ID NO: 67303 - DNA, 21 bp, Homo sapiens
aattctgtgcttcttataaac

SEQ ID NO: 67304 - DNA, 30 bp, Homo sapiens; identical to SEQ ID NO: 20610

SEQ ID NO: 67305 - DNA, 22 bp, Homo sapiens
aagccactttttatatctttca

SEQ ID NO: 67306 - DNA, 23 bp, Homo sapiens
aacaagtttttactaaatctgtt

SEQ ID NO: 67307 - DNA, 21 bp, Homo sapiens
tggttgatatagtgaatcaaa

SEQ ID NO: 67308 - DNA, 18 bp, Homo sapiens
tgagcaagcagctgaaac

SEQ ID NO: 67309 - DNA, 22 bp, Homo sapiens
ggaagaacaggatagaaagact

SEQ ID NO: 67310 - DNA, 21 bp, Homo sapiens
tcacctgtttgttagtttatt

SEQ ID NO: 67311 - DNA, 16 bp, Homo sapiens
gcggacagagtgagtc

SEQ ID NO: 67312 - DNA, 22 bp, Homo sapiens
cctttgttcttcgagacgttat

SEQ ID NO: 67313 - DNA, 19 bp, Homo sapiens
ccatgatacaagaaggcct

SEQ ID NO: 67314 - DNA, 22 bp, Homo sapiens
tttggcttataagccattaaaa

SEQ ID NO: 67315 - DNA, 19 bp, Homo sapiens
ggctgtctggcaaacctga

SEQ ID NO: 67316 - DNA, 24 bp, Homo sapiens
gaacaaaaggacttctgaatgaat

SEQ ID NO: 67317 - DNA, 26 bp, Homo sapiens
ggtataagtgtaccaacaataacatg

SEQ ID NO: 67318 - DNA, 24 bp, Homo sapiens
tttttttttctccctatattaggc

SEQ ID NO: 67319 - DNA, 23 bp, Homo sapiens
accattttgaagatgagtcagaa

SEQ ID NO: 67320 - DNA, 24 bp, Homo sapiens
tttgttgtgacttattaagtcagg

SEQ ID NO: 67321 - DNA, 22 bp, Homo sapiens
accaaataaacataaaacactc

SEQ ID NO: 67322 - DNA, 22 bp, Homo sapiens
gatgctctagaaaaccatcttc

SEQ ID NO: 67323 - DNA, 22 bp, Homo sapiens
tcattaagaatatttttccaat

SEQ ID NO: 67324 - DNA, 19 bp, Homo sapiens
tggaggttcagaaacaggt

SEQ ID NO: 67325 - DNA, 22 bp, Homo sapiens
agttattgaattatttgaaaac

SEQ ID NO: 67326 - DNA, 24 bp, Homo sapiens
ggttttcattatccttgttatcta

SEQ ID NO: 67327 - DNA, 25 bp, Homo sapiens
attagaacatttaatctgatctagg

SEQ ID NO: 67328 - DNA, 22 bp, Homo sapiens
tccttaaaaacaacatggtcag

SEQ ID NO: 67329 - DNA, 27 bp, Homo sapiens
ttggcttactttaaaattatttctctc

SEQ ID NO: 67330 - DNA, 19 bp, Homo sapiens
cctccaagagtgaaaaggg

SEQ ID NO: 67331 - DNA, 24 bp, Homo sapiens
ttggacttgttgaaatacttagtg

SEQ ID NO: 67332 - DNA, 21 bp, Homo sapiens
cagatttttgaaaagtactac

SEQ ID NO: 67333 - DNA, 22 bp, Homo sapiens
gcttttagatccttttcctgac

SEQ ID NO: 67334 - DNA, 26 bp, Homo sapiens
tggcctacgtatatatttttaatcac

SEQ ID NO: 67335 - DNA, 24 bp, Homo sapiens
tcagcaaaaaatcaaatacagtag

SEQ ID NO: 67336 - DNA, 23 bp, Homo sapiens
gagaaaatggttaatttcctaaa

SEQ ID NO: 67337 - DNA, 26 bp, Homo sapiens
cagtggaagaaatcatttatttcttc

SEQ ID NO: 67338 - DNA, 22 bp, Homo sapiens
cgaagatcctttagtccttcaa

SEQ ID NO: 67339 - DNA, 22 bp, Homo sapiens
aatggcacttaactaatttttt

SEQ ID NO: 67340 - DNA, 21 bp, Homo sapiens
accctgagaagctctcataat

SEQ ID NO: 67341 - DNA, 25 bp, Homo sapiens
tgttaaaagcaagttacattttctc

SEQ ID NO: 67342 - DNA, 22 bp, Homo sapiens
ctttgcaaaatattctttcaaa

SEQ ID NO: 67343 - DNA, 19 bp, Homo sapiens
tgcacttccattgacaaga

SEQ ID NO: 67344 - DNA, 22 bp, Homo sapiens
gggtctgaactaaatgatgaga

SEQ ID NO: 67345 - DNA, 18 bp, Homo sapiens
aaagatcagatggtggac

SEQ ID NO: 67346 - DNA, 21 bp, Homo sapiens
aactagtttcaccataatccc

SEQ ID NO: 67347 - DNA, 23 bp, Homo sapiens
gctactcatgacttaaaaccttt

SEQ ID NO: 67348 - DNA, 22 bp, Homo sapiens
aacttctttttcaccagtgtgg

SEQ ID NO: 67349 - DNA, 23 bp, Homo sapiens
tatgcaattataaacaaaagtgt

SEQ ID NO: 67350 - DNA, 17 bp, Homo sapiens
tgtgatccgcagttgac

SEQ ID NO: 67351 - DNA, 20 bp, Homo sapiens
tctagataatccgcaagatg

SEQ ID NO: 67352 - DNA, 19 bp, Homo sapiens
actgaatactacaggcaac

SEQ ID NO: 67353 - DNA, 22 bp, Homo sapiens
tatccaagatggcaataaacca

SEQ ID NO: 67354 - DNA, 21 bp, Homo sapiens
ccaagcagcttccaacagcct

SEQ ID NO: 67355 - DNA, 18 bp, Homo sapiens
gtgagccaccgcactcgg

SEQ ID NO: 67356 - DNA, 21 bp, Homo sapiens
tggtataagatgcatctttac

SEQ ID NO: 67357 - DNA, 30 bp, Homo sapiens; identical to SEQ ID NO: 20663

SEQ ID NO: 67358 - DNA, 19 bp, Homo sapiens
aggtcagcattatgaaggt

SEQ ID NO: 67359 - DNA, 22 bp, Homo sapiens
agaatttctatatgtagaggct

SEQ ID NO: 67360 - DNA, 24 bp, Homo sapiens
attgagattacatataaggtatca

SEQ ID NO: 67361 - DNA, 24 bp, Homo sapiens
atttctctaccatagctatacaac

SEQ ID NO: 67362 - DNA, 21 bp, Homo sapiens
gctttagttactgagaatatc

SEQ ID NO: 67363 - DNA, 24 bp, Homo sapiens
tttgaagataaagaacttcagtgg

SEQ ID NO: 67364 - DNA, 24 bp, Homo sapiens
atgtgaattaataaaaatataaga

SEQ ID NO: 67365 - DNA, 21 bp, Homo sapiens
ttttcaaacaggtaacagctg

SEQ ID NO: 67366 - DNA, 22 bp, Homo sapiens
ttttgtaaatgtaaagtttcct

SEQ ID NO: 67367 - DNA, 25 bp, Homo sapiens
cattggatctgttgtcatcttataa

SEQ ID NO: 67368 - DNA, 24 bp, Homo sapiens
cagtggaggttaacattcatcaag

SEQ ID NO: 67369 - DNA, 21 bp, Homo sapiens
ttacttaagagaccttttttc

SEQ ID NO: 67370 - DNA, 20 bp, Homo sapiens
tgtcaaagttcgatcagcag

SEQ ID NO: 67371 - DNA, 21 bp, Homo sapiens
agtcatgacccacagcaaaca

SEQ ID NO: 67372 - DNA, 21 bp, Homo sapiens
aagactggacatagtttctgg

SEQ ID NO: 67373 - DNA, 24 bp, Homo sapiens
tgaaatatggcttaaattacttat

SEQ ID NO: 67374 - DNA, 22 bp, Homo sapiens
acagccttttagaacatcaaga

SEQ ID NO: 67375 - DNA, 20 bp, Homo sapiens
tctttgtcaaatctgggtac

SEQ ID NO: 67376 - DNA, 23 bp, Homo sapiens
aggtaaacattgcctccagattt

SEQ ID NO: 67377 - DNA, 24 bp, Homo sapiens
aatgtcatgattttcacttagagg

SEQ ID NO: 67378 - DNA, 23 bp, Homo sapiens
tactcattttgtgtaggaaaggt

SEQ ID NO: 67379 - DNA, 19 bp, Homo sapiens
tcacattttgtgcctccac

SEQ ID NO: 67380 - DNA, 24 bp, Homo sapiens
cctttctttctagtttttagaagt

SEQ ID NO: 67381 - DNA, 20 bp, Homo sapiens
acaaggaattatatcagact

SEQ ID NO: 67382 - DNA, 22 bp, Homo sapiens
aggcctggatgatataaatctg

SEQ ID NO: 67383 - DNA, 24 bp, Homo sapiens
gggtgatattatgtgaagatgatg

SEQ ID NO: 67384 - DNA, 20 bp, Homo sapiens
tgacttgtgcttttttggac

SEQ ID NO: 67385 - DNA, 25 bp, Homo sapiens
taaagttatgactaaatacggatgc

SEQ ID NO: 67386 - DNA, 20 bp, Homo sapiens
acagtctgacaaaagtcagt

SEQ ID NO: 67387 - DNA, 22 bp, Homo sapiens
cagtatgttgagtttatggcag

SEQ ID NO: 67388 - DNA, 23 bp, Homo sapiens
cagatttctccatgattcatttg

SEQ ID NO: 67389 - DNA, 23 bp, Homo sapiens
ggggcatgaaaattttaagtaaa

SEQ ID NO: 67390 - DNA, 18 bp, Homo sapiens
cgtttgcgagaagtgtcg

SEQ ID NO: 67391 - DNA, 24 bp, Homo sapiens
ggtggatttgtttgtatattctag

SEQ ID NO: 67392 - DNA, 28 bp, Homo sapiens
tacagtattaatgttaaaaatttaatag

SEQ ID NO: 67393 - DNA, 23 bp, Homo sapiens
tgattcatgatattttactccaa

SEQ ID NO: 67394 - DNA, 21 bp, Homo sapiens
tgcttttagtgggattccatc

SEQ ID NO: 67395 - DNA, 19 bp, Homo sapiens
ggatttttcaccagctgtc

SEQ ID NO: 67396 - DNA, 22 bp, Homo sapiens
tttatctccattccatagatga

SEQ ID NO: 67397 - DNA, 24 bp, Homo sapiens
acccctgcaaacttggattcaggt

SEQ ID NO: 67398 - DNA, 20 bp, Homo sapiens
cggaaaaagtgctctgactc

SEQ ID NO: 67399 - DNA, 22 bp, Homo sapiens
ttccttcagaaccaattttgtg

SEQ ID NO: 67400 - DNA, 20 bp, Homo sapiens
cttctcatgtagtccacaac

SEQ ID NO: 67401 - DNA, 23 bp, Homo sapiens
gggagacagacacataaacaaga

SEQ ID NO: 67402 - DNA, 21 bp, Homo sapiens
aacaagttacactctagatcc

SEQ ID NO: 67403 - DNA, 23 bp, Homo sapiens
gaggggagatatttttgtttgtc

SEQ ID NO: 67404 - DNA, 22 bp, Homo sapiens
aaatataacactttgcaacacc

SEQ ID NO: 67405 - DNA, 19 bp, Homo sapiens
agaacaatgcttgctgttg

SEQ ID NO: 67406 - DNA, 20 bp, Homo sapiens
aaccaaactgctatcctgaa

SEQ ID NO: 67407 - DNA, 21 bp, Homo sapiens
cagccagaaagcatcattaaa

SEQ ID NO: 67408 - DNA, 21 bp, Homo sapiens
tgtggtttttgggaatttgta

SEQ ID NO: 67409 - DNA, 16 bp, Homo sapiens
gtgagcagcacaagac

SEQ ID NO: 67410 - DNA, 23 bp, Homo sapiens
acatgcttttattttgatattga

SEQ ID NO: 67411 - DNA, 20 bp, Homo sapiens
accttttctcttgatcatcc

SEQ ID NO: 67412 - DNA, 22 bp, Homo sapiens
tctttagaccttcttcaggaac

SEQ ID NO: 67413 - DNA, 19 bp, Homo sapiens
cccttattgagacaatgcc

SEQ ID NO: 67414 - DNA, 21 bp, Homo sapiens
agaagttgccaaggtagctca

SEQ ID NO: 67415 - DNA, 23 bp, Homo sapiens
aaaacaaaatttctatctaaaat

SEQ ID NO: 67416 - DNA, 26 bp, Homo sapiens
aaatctatgcagataagaaaagtatg

SEQ ID NO: 67417 - DNA, 22 bp, Homo sapiens
ccttcttcaaatgcaagacttc

SEQ ID NO: 67418 - DNA, 27 bp, Homo sapiens
atggtattatgttttaaagtataagtg

SEQ ID NO: 67419 - DNA, 21 bp, Homo sapiens
ttccagtttcttctttacttt

SEQ ID NO: 67420 - DNA, 21 bp, Homo sapiens
ttttctgtcaaagtctatagt

SEQ ID NO: 67421 - DNA, 25 bp, Homo sapiens
cccaaagtatgagataaatactgtc

SEQ ID NO: 67422 - DNA, 20 bp, Homo sapiens
aggtgttcttgtgacaaaca

SEQ ID NO: 67423 - DNA, 24 bp, Homo sapiens
gtccagtaagtaaattcagtttaa

SEQ ID NO: 67424 - DNA, 22 bp, Homo sapiens
acaactatttctagcttgagtg

SEQ ID NO: 67425 - DNA, 20 bp, Homo sapiens
agtctgtctactctaaggct

SEQ ID NO: 67426 - DNA, 25 bp, Homo sapiens
tctgtagatttctaagagaagatcc

SEQ ID NO: 67427 - DNA, 24 bp, Homo sapiens
actgtatttcagaatcattacatt

SEQ ID NO: 67428 - DNA, 21 bp, Homo sapiens
ggttgtaacatcttccctcca

SEQ ID NO: 67429 - DNA, 30 bp, Homo sapiens; identical to SEQ ID NO: 20735

SEQ ID NO: 67430 - DNA, 22 bp, Homo sapiens
actccttcataaacagaattac

SEQ ID NO: 67431 - DNA, 21 bp, Homo sapiens
tttttgttgtttccatgtttt

SEQ ID NO: 67432 - DNA, 25 bp, Homo sapiens
atatgttcgtagtctataagaaaag

SEQ ID NO: 67433 - DNA, 22 bp, Homo sapiens
gagccagatagtttgtatggct

SEQ ID NO: 67434 - DNA, 18 bp, Homo sapiens
attgctgtttcgaggtca

SEQ ID NO: 67435 - DNA, 17 bp, Homo sapiens
ctaaacaacggtatagt

SEQ ID NO: 67436 - DNA, 21 bp, Homo sapiens
tggctttaccaaatctgggaa

SEQ ID NO: 67437 - DNA, 23 bp, Homo sapiens
aaacccaaagctattttcacaat

SEQ ID NO: 67438 - DNA, 20 bp, Homo sapiens
tggctgtgtaaatatccacc

SEQ ID NO: 67439 - DNA, 20 bp, Homo sapiens
tggggcaaagccctagtaac

SEQ ID NO: 67440 - DNA, 20 bp, Homo sapiens
ccctgaatgtttagcctaat

SEQ ID NO: 67441 - DNA, 24 bp, Homo sapiens
ccaggcaggaatcattcaggtaca

SEQ ID NO: 67442 - DNA, 19 bp, Homo sapiens
ccaaattctgcaaggccta

SEQ ID NO: 67443 - DNA, 20 bp, Homo sapiens
acccagctgatattttggga

SEQ ID NO: 67444 - DNA, 21 bp, Homo sapiens
aggacaccagtctttattttc

SEQ ID NO: 67445 - DNA, 21 bp, Homo sapiens
ttgtatctttgctgttttttt

SEQ ID NO: 67446 - DNA, 17 bp, Homo sapiens
gcaatggtcccactgca

SEQ ID NO: 67447 - DNA, 23 bp, Homo sapiens
aacaaaataactcctgtttaggc

SEQ ID NO: 67448 - DNA, 24 bp, Homo sapiens
gtttagaatgaggagagaggcaaa

SEQ ID NO: 67449 - DNA, 23 bp, Homo sapiens
ttccgtctatttaaaaggattgg

SEQ ID NO: 67450 - DNA, 19 bp, Homo sapiens
agcagcatggaggaatatg

SEQ ID NO: 67451 - DNA, 24 bp, Homo sapiens
tggtatgtatatatatatagtgtg

SEQ ID NO: 67452 - DNA, 22 bp, Homo sapiens
actggttccttctacttctttg

SEQ ID NO: 67453 - DNA, 21 bp, Homo sapiens
accaaaaattctagaaatgca

SEQ ID NO: 67454 - DNA, 20 bp, Homo sapiens
tgtagagaattctctgtctc

SEQ ID NO: 67455 - DNA, 20 bp, Homo sapiens
tgtcctttggtgaagctatt

SEQ ID NO: 67456 - DNA, 23 bp, Homo sapiens
tgttaaaatacagtaactttgtc

SEQ ID NO: 67457 - DNA, 21 bp, Homo sapiens
ttctttgacttatctcacagc

SEQ ID NO: 67458 - DNA, 22 bp, Homo sapiens
caatgcaaatccttacattaaa

SEQ ID NO: 67459 - DNA, 22 bp, Homo sapiens
atgctctacaatctctaagaga

SEQ ID NO: 67460 - DNA, 19 bp, Homo sapiens
agggcagagaattacaagg

SEQ ID NO: 67461 - DNA, 20 bp, Homo sapiens
ctcttccacttcttttactc

SEQ ID NO: 67462 - DNA, 24 bp, Homo sapiens
ccactgctattttgtattcactgt

SEQ ID NO: 67463 - DNA, 20 bp, Homo sapiens
caacctgctaagtgtgggat

SEQ ID NO: 67464 - DNA, 24 bp, Homo sapiens
tgagaactctttaacaacaaattt

SEQ ID NO: 67465 - DNA, 20 bp, Homo sapiens
tacgaattacataccttgag

SEQ ID NO: 67466 - DNA, 23 bp, Homo sapiens
tcagagtgtcttttcttttttgc

SEQ ID NO: 67467 - DNA, 22 bp, Homo sapiens
agtttttattttttaaagtcac

SEQ ID NO: 67468 - DNA, 24 bp, Homo sapiens
cagccttgagtctgtgtattcgct

SEQ ID NO: 67469 - DNA, 18 bp, Homo sapiens
ttcagccttctaaagtgc

SEQ ID NO: 67470 - DNA, 27 bp, Homo sapiens
tgatccatatgtaggattatttacaag

SEQ ID NO: 67471 - DNA, 19 bp, Homo sapiens
gtccttgagaagctgggag

SEQ ID NO: 67472 - DNA, 20 bp, Homo sapiens
tatatcgtaagttccagaac

SEQ ID NO: 67473 - DNA, 20 bp, Homo sapiens
gatctccaaaatgactgtgc

SEQ ID NO: 67474 - DNA, 22 bp, Homo sapiens
cttacatgaactctatgtcgtg

SEQ ID NO: 67475 - DNA, 20 bp, Homo sapiens
tgtttggtgagaatgtcctt

SEQ ID NO: 67476 - DNA, 17 bp, Homo sapiens
ttaagtggcagaaacac

SEQ ID NO: 67477 - DNA, 21 bp, Homo sapiens
aattgtatttacctgagtgtt

SEQ ID NO: 67478 - DNA, 22 bp, Homo sapiens
tcaggagcctatcatggctcta

SEQ ID NO: 67479 - DNA, 20 bp, Homo sapiens
cctcaggctttctgtttttt

SEQ ID NO: 67480 - DNA, 21 bp, Homo sapiens
ggacaactcacaaagagaatg

SEQ ID NO: 67481 - DNA, 24 bp, Homo sapiens
ctcttaaacaattatttttactat

SEQ ID NO: 67482 - DNA, 18 bp, Homo sapiens
tggccagaactttcaaga

SEQ ID NO: 67483 - DNA, 23 bp, Homo sapiens
aactgaattgtactgtttaattt

SEQ ID NO: 67484 - DNA, 24 bp, Homo sapiens
aagatagtccctgacaagtagtta

SEQ ID NO: 67485 - DNA, 17 bp, Homo sapiens
gcccagaatacttgtgc

SEQ ID NO: 67486 - DNA, 21 bp, Homo sapiens
tcatggtagtagtatcagtag

SEQ ID NO: 67487 - DNA, 18 bp, Homo sapiens
acagctggcatccaactt

SEQ ID NO: 67488 - DNA, 21 bp, Homo sapiens
tccctgaaagggcaatatttc

SEQ ID NO: 67489 - DNA, 24 bp, Homo sapiens
tacatttgtgtttttttaaataac

SEQ ID NO: 67490 - DNA, 16 bp, Homo sapiens
ggcagctggaagaagc

SEQ ID NO: 67491 - DNA, 21 bp, Homo sapiens
aaattactaatttcaaggctc

SEQ ID NO: 67492 - DNA, 22 bp, Homo sapiens
cctgagtattctcaagcaaatg

SEQ ID NO: 67493 - DNA, 21 bp, Homo sapiens
aagtttctaaacttcatttac

SEQ ID NO: 67494 - DNA, 20 bp, Homo sapiens
tatggcaaaagcagatgagg

SEQ ID NO: 67495 - DNA, 19 bp, Homo sapiens
gtttctgctaaccagttgc

SEQ ID NO: 67496 - DNA, 22 bp, Homo sapiens
atttttaacctgcttttttccc

SEQ ID NO: 67497 - DNA, 23 bp, Homo sapiens
gctccaaaaatcttaccttttct

SEQ ID NO: 67498 - DNA, 19 bp, Homo sapiens
ttttaagattttgcctttc

SEQ ID NO: 67499 - DNA, 23 bp, Homo sapiens
ttggaaatatattgatcttgatg

SEQ ID NO: 67500 - DNA, 18 bp, Homo sapiens
gtctgagggtttgtggca

SEQ ID NO: 67501 - DNA, 19 bp, Homo sapiens
acagagctacaacagtaat

SEQ ID NO: 67502 - DNA, 24 bp, Homo sapiens
tgcggtcatcatgcagacctatct

SEQ ID NO: 67503 - DNA, 20 bp, Homo sapiens
tctccatcataatttccagc

SEQ ID NO: 67504 - DNA, 22 bp, Homo sapiens
agttcatataatttagctagct

SEQ ID NO: 67505 - DNA, 19 bp, Homo sapiens
tgaaaaccgggctaatgag

SEQ ID NO: 67506 - DNA, 22 bp, Homo sapiens
atttgagtgattctttagatgt

SEQ ID NO: 67507 - DNA, 19 bp, Homo sapiens
ggagagcttgcttgttttc

SEQ ID NO: 67508 - DNA, 22 bp, Homo sapiens
ttcttgaaggcagtagaagttg

SEQ ID NO: 67509 - DNA, 23 bp, Homo sapiens
acctgtttgtctgaattttatgt

SEQ ID NO: 67510 - DNA, 22 bp, Homo sapiens
tggaaaaatgaaggcatttctc

SEQ ID NO: 67511 - DNA, 18 bp, Homo sapiens
tcactcagttaactggtg

SEQ ID NO: 67512 - DNA, 23 bp, Homo sapiens
tgaaaactacatgaaatcatcgg

SEQ ID NO: 67513 - DNA, 22 bp, Homo sapiens
gacctttagagctcaaaactat

SEQ ID NO: 67514 - DNA, 19 bp, Homo sapiens
agtaggtctccttagggaa

SEQ ID NO: 67515 - DNA, 22 bp, Homo sapiens
acaaaaaacaaaaaccgaaaag

SEQ ID NO: 67516 - DNA, 17 bp, Homo sapiens
cagctctcgctgaacct

SEQ ID NO: 67517 - DNA, 22 bp, Homo sapiens
taatccttagaagtttgctttt

SEQ ID NO: 67518 - DNA, 23 bp, Homo sapiens
tgctttacataagaagcgtttac

SEQ ID NO: 67519 - DNA, 20 bp, Homo sapiens
catgtgtgattttgtagttc

SEQ ID NO: 67520 - DNA, 20 bp, Homo sapiens
gtcggaatacccacatatca

SEQ ID NO: 67521 - DNA, 20 bp, Homo sapiens
ttctatgcaagatacacagt

SEQ ID NO: 67522 - DNA, 20 bp, Homo sapiens
tcatcatgccattgacttca

SEQ ID NO: 67523 - DNA, 23 bp, Homo sapiens
ccctgcgtgcactgaaagaggat

SEQ ID NO: 67524 - DNA, 21 bp, Homo sapiens
tcaaggggcttatgtctaagt

SEQ ID NO: 67525 - DNA, 24 bp, Homo sapiens
actgcttattaagtggagaagaac

SEQ ID NO: 67526 - DNA, 17 bp, Homo sapiens
gagcactggaccaagtg

SEQ ID NO: 67527 - DNA, 22 bp, Homo sapiens
ggcttgaaaattctggagtttc

SEQ ID NO: 67528 - DNA, 22 bp, Homo sapiens
gaggcaaaaatttatatgttgg

SEQ ID NO: 67529 - DNA, 23 bp, Homo sapiens
gttagtgaagttttgttaaccac

SEQ ID NO: 67530 - DNA, 17 bp, Homo sapiens
ctaggcctcccatcatc

SEQ ID NO: 67531 - DNA, 20 bp, Homo sapiens
tgcttagatgtgagaatatt

SEQ ID NO: 67532 - DNA, 29 bp, Homo sapiens
aatagaataaaaataattattgtggtttg

SEQ ID NO: 67533 - DNA, 21 bp, Homo sapiens
agagagacggaatgaagattc

SEQ ID NO: 67534 - DNA, 25 bp, Homo sapiens
ttttgtatttccatttcttagaggg

SEQ ID NO: 67535 - DNA, 20 bp, Homo sapiens
tagaatggggaccaagatga

SEQ ID NO: 67536 - DNA, 21 bp, Homo sapiens
aggaattagagagagaaaatg

SEQ ID NO: 67537 - DNA, 24 bp, Homo sapiens
gggtgatccattgaaattctagag

SEQ ID NO: 67538 - DNA, 19 bp, Homo sapiens
acacatgcaggcatacacg

SEQ ID NO: 67539 - DNA, 19 bp, Homo sapiens
atctctgtttgcatttgct

SEQ ID NO: 67540 - DNA, 24 bp, Homo sapiens
acattttaatgttaagcaaaatga

SEQ ID NO: 67541 - DNA, 19 bp, Homo sapiens
agagctttgtttaggcaca

SEQ ID NO: 67542 - DNA, 18 bp, Homo sapiens
agttcttttcttacagct

SEQ ID NO: 67543 - DNA, 24 bp, Homo sapiens
actgaatatcacacttctaaaagg

SEQ ID NO: 67544 - DNA, 21 bp, Homo sapiens
gtttattatactggccttagc

SEQ ID NO: 67545 - DNA, 19 bp, Homo sapiens
accgattttagatggcatc

SEQ ID NO: 67546 - DNA, 24 bp, Homo sapiens
ggtagccagaagaagcagaataac

SEQ ID NO: 67547 - DNA, 19 bp, Homo sapiens
gcagcctctgttcgatcct

SEQ ID NO: 67548 - DNA, 22 bp, Homo sapiens
actgttttgtttgtatctgagg

SEQ ID NO: 67549 - DNA, 18 bp, Homo sapiens
cctcaacacttctgacca

SEQ ID NO: 67550 - DNA, 18 bp, Homo sapiens
tctgtttttctctttgtt

SEQ ID NO: 67551 - DNA, 16 bp, Homo sapiens
ttccactgagtggcat

SEQ ID NO: 67552 - DNA, 27 bp, Homo sapiens
cttatgtaatgttttttgttttttatt

SEQ ID NO: 67553 - DNA, 19 bp, Homo sapiens
acagagagtaacacagcaa

SEQ ID NO: 67554 - DNA, 21 bp, Homo sapiens
tcagaagtaggagacctcaga

SEQ ID NO: 67555 - DNA, 22 bp, Homo sapiens
cttttggattacgtttgtgatt

SEQ ID NO: 67556 - DNA, 20 bp, Homo sapiens
attagcaaacttagatgcca

SEQ ID NO: 67557 - DNA, 23 bp, Homo sapiens
aagagatattaagtgaaaaagta

SEQ ID NO: 67558 - DNA, 17 bp, Homo sapiens
attggctggtctgctgg

SEQ ID NO: 67559 - DNA, 18 bp, Homo sapiens
tcagagcctgaaccacag

SEQ ID NO: 67560 - DNA, 22 bp, Homo sapiens
agagttaattgcaaattacctt

SEQ ID NO: 67561 - DNA, 19 bp, Homo sapiens
tgcttgaccttcaatgctg

SEQ ID NO: 67562 - DNA, 20 bp, Homo sapiens
actatttcaaatggttcaat

SEQ ID NO: 67563 - DNA, 20 bp, Homo sapiens
aaggcataaatattccagca

SEQ ID NO: 67564 - DNA, 25 bp, Homo sapiens
atactgagaaattataggttgaaac

SEQ ID NO: 67565 - DNA, 20 bp, Homo sapiens
tgttgttgtccctactatgg

SEQ ID NO: 67566 - DNA, 20 bp, Homo sapiens
atttccatattctcctgtgt

SEQ ID NO: 67567 - DNA, 22 bp, Homo sapiens
tcttaaccactatcacatcgtc

SEQ ID NO: 67568 - DNA, 23 bp, Homo sapiens
ttttggtaaatttacacctcctg

SEQ ID NO: 67569 - DNA, 21 bp, Homo sapiens
aatgtatttttctttaagtgc

SEQ ID NO: 67570 - DNA, 20 bp, Homo sapiens
ggctcaccttaacaagctgt

SEQ ID NO: 67571 - DNA, 23 bp, Homo sapiens
tatacttttattaggtggaccac

SEQ ID NO: 67572 - DNA, 28 bp, Homo sapiens
aagcagaaagaaaatatgaactaaaaat

SEQ ID NO: 67573 - DNA, 21 bp, Homo sapiens
agcagaatttcgcttagcagg

SEQ ID NO: 67574 - DNA, 25 bp, Homo sapiens
ctactctacaaatcttcctcatttg

SEQ ID NO: 67575 - DNA, 19 bp, Homo sapiens
tccgatggcaaggagagga

SEQ ID NO: 67576 - DNA, 20 bp, Homo sapiens
agcatcttgtctcaggtcat

SEQ ID NO: 67577 - DNA, 23 bp, Homo sapiens
aggtatttaattatttgggagac

SEQ ID NO: 67578 - DNA, 19 bp, Homo sapiens
tccgtgtttctctgcagta

SEQ ID NO: 67579 - DNA, 22 bp, Homo sapiens
ctttgctattctcagatgactc

SEQ ID NO: 67580 - DNA, 20 bp, Homo sapiens
tggtgaactaacagaagtac

SEQ ID NO: 67581 - DNA, 20 bp, Homo sapiens
taattattctgaagggccgt

SEQ ID NO: 67582 - DNA, 16 bp, Homo sapiens
tatgggcatgagccac

SEQ ID NO: 67583 - DNA, 24 bp, Homo sapiens
aggtcttccagatgtgtaatacat

SEQ ID NO: 67584 - DNA, 24 bp, Homo sapiens
aactatctgtacttataaggtaac

SEQ ID NO: 67585 - DNA, 17 bp, Homo sapiens
tcaagaacaccacttcg

SEQ ID NO: 67586 - DNA, 24 bp, Homo sapiens
gtcttctatggacagagaaatatt

SEQ ID NO: 67587 - DNA, 20 bp, Homo sapiens
atgagcaccatcttcattgt

SEQ ID NO: 67588 - DNA, 22 bp, Homo sapiens
agctgaatgatcatcaaatgct

SEQ ID NO: 67589 - DNA, 21 bp, Homo sapiens
gtgtcactcaccatcattttc

SEQ ID NO: 67590 - DNA, 17 bp, Homo sapiens
tccaggtggttcccctc

SEQ ID NO: 67591 - DNA, 20 bp, Homo sapiens
tgtcagctttaataagccat

SEQ ID NO: 67592 - DNA, 23 bp, Homo sapiens
ccattggtgaatttcttgttaac

SEQ ID NO: 67593 - DNA, 22 bp, Homo sapiens
agtatctttgacaattacctga

SEQ ID NO: 67594 - DNA, 20 bp, Homo sapiens
tttcagtgcctttcagtgcc

SEQ ID NO: 67595 - DNA, 24 bp, Homo sapiens
cttcatatttctcttcaaaagact

SEQ ID NO: 67596 - DNA, 24 bp, Homo sapiens
gcttcttgtaggtaatgtatcctg

SEQ ID NO: 67597 - DNA, 18 bp, Homo sapiens
tccatgcagaagtaacgg

SEQ ID NO: 67598 - DNA, 23 bp, Homo sapiens
aaatgtgtatattagtttaattg

SEQ ID NO: 67599 - DNA, 19 bp, Homo sapiens
aagaagtagctacactgcg

SEQ ID NO: 67600 - DNA, 20 bp, Homo sapiens
aggaggtgcaaaaaaagtct

SEQ ID NO: 67601 - DNA, 19 bp, Homo sapiens
cctgccaaacaacaaagtg

SEQ ID NO: 67602 - DNA, 23 bp, Homo sapiens
tgccaaaattttcaaccagtttt

SEQ ID NO: 67603 - DNA, 16 bp, Homo sapiens
tcatccccctgcaact

SEQ ID NO: 67604 - DNA, 22 bp, Homo sapiens
tttggtttgagaagcgattggc

SEQ ID NO: 67605 - DNA, 21 bp, Homo sapiens
aatcaggatgaacaagaaaca

SEQ ID NO: 67606 - DNA, 19 bp, Homo sapiens
tcaccaagtccaagtatgt

SEQ ID NO: 67607 - DNA, 26 bp, Homo sapiens
acatcatttaagtaggctaaaaatcc

SEQ ID NO: 67608 - DNA, 22 bp, Homo sapiens
acttacctagatctatatgtac

SEQ ID NO: 67609 - DNA, 27 bp, Homo sapiens
tggtcttaattgaaattatggctatat

SEQ ID NO: 67610 - DNA, 19 bp, Homo sapiens
acaacattccatgatgacc

SEQ ID NO: 67611 - DNA, 23 bp, Homo sapiens
ttcttttttctccagttggttac

SEQ ID NO: 67612 - DNA, 19 bp, Homo sapiens
acccaatatttactgcttc

SEQ ID NO: 67613 - DNA, 19 bp, Homo sapiens
aaatgagcagtcagcagaa

SEQ ID NO: 67614 - DNA, 18 bp, Homo sapiens
ccctgttcaaaagcaaca

SEQ ID NO: 67615 - DNA, 24 bp, Homo sapiens
gcagaagtaaactactgtacatac

SEQ ID NO: 67616 - DNA, 22 bp, Homo sapiens
tgcccatgccatccacaatatc

SEQ ID NO: 67617 - DNA, 24 bp, Homo sapiens
cctttgtaaagttcacattctaac

SEQ ID NO: 67618 - DNA, 23 bp, Homo sapiens
aaattatttccctcctttacttc

SEQ ID NO: 67619 - DNA, 20 bp, Homo sapiens
ttctttactttaggtgttgc

SEQ ID NO: 67620 - DNA, 18 bp, Homo sapiens
tgggattacaggtgcaaa

SEQ ID NO: 67621 - DNA, 24 bp, Homo sapiens
tgagacagttccttttagactcac

SEQ ID NO: 67622 - DNA, 17 bp, Homo sapiens
ggctggactcaaactcc

SEQ ID NO: 67623 - DNA, 18 bp, Homo sapiens
ccatggttttctcacagc

SEQ ID NO: 67624 - DNA, 23 bp, Homo sapiens
agtattatgctattttgagatac

SEQ ID NO: 67625 - DNA, 24 bp, Homo sapiens
agtcttccttataaaatactttac

SEQ ID NO: 67626 - DNA, 22 bp, Homo sapiens
tgagagtatacagataaagata

SEQ ID NO: 67627 - DNA, 19 bp, Homo sapiens
tcacatcagtgacttcctg

SEQ ID NO: 67628 - DNA, 22 bp, Homo sapiens
gtgtttgactctagatgctgtg

SEQ ID NO: 67629 - DNA, 16 bp, Homo sapiens
cctcctttctgctgcc

SEQ ID NO: 67630 - DNA, 24 bp, Homo sapiens
aggaaactctgttaaccattgtag

SEQ ID NO: 67631 - DNA, 23 bp, Homo sapiens
tcctcaaggaaacatgaagtgtg

SEQ ID NO: 67632 - DNA, 20 bp, Homo sapiens
ctctgctgtaaatacaaagc

SEQ ID NO: 67633 - DNA, 24 bp, Homo sapiens
actggcttatttgtatgatactgg

SEQ ID NO: 67634 - DNA, 20 bp, Homo sapiens
tttcgtttgcattcttggtc

SEQ ID NO: 67635 - DNA, 21 bp, Homo sapiens
ttttaatacatatgttctctc

SEQ ID NO: 67636 - DNA, 21 bp, Homo sapiens
ggccttgggaataagaaaatc

SEQ ID NO: 67637 - DNA, 22 bp, Homo sapiens
ggaccatgaatcctttgaaagc

SEQ ID NO: 67638 - DNA, 23 bp, Homo sapiens
tcaatatcactaaggacaaaaac

SEQ ID NO: 67639 - DNA, 22 bp, Homo sapiens
gcttcaccctactctgaatgca

SEQ ID NO: 67640 - DNA, 23 bp, Homo sapiens
ccactcctttcagtttctcttgt

SEQ ID NO: 67641 - DNA, 24 bp, Homo sapiens
gtattttaagaaggtcctgttgtc

SEQ ID NO: 67642 - DNA, 21 bp, Homo sapiens
tgctgtatgagcaaattcact

SEQ ID NO: 67643 - DNA, 23 bp, Homo sapiens
tgttcacctcactgaaacctttg

SEQ ID NO: 67644 - DNA, 19 bp, Homo sapiens
tcacacccaagctttccat

SEQ ID NO: 67645 - DNA, 22 bp, Homo sapiens
agctgaacgtgtcttaatgaga

SEQ ID NO: 67646 - DNA, 23 bp, Homo sapiens
gcaggttaaaaataaaggctaaa

SEQ ID NO: 67647 - DNA, 20 bp, Homo sapiens
gtgctcagtgttggtggaca

SEQ ID NO: 67648 - DNA, 21 bp, Homo sapiens
aaaaaacccacaatagttcac

SEQ ID NO: 67649 - DNA, 19 bp, Homo sapiens
cgacttttcccaggatgga

SEQ ID NO: 67650 - DNA, 16 bp, Homo sapiens
tcagcctccagagaac

SEQ ID NO: 67651 - DNA, 18 bp, Homo sapiens
gcaccgcctctcgacttc

SEQ ID NO: 67652 - DNA, 22 bp, Homo sapiens
tggaggctacgctaagcacctc

SEQ ID NO: 67653 - DNA, 24 bp, Homo sapiens
tctttcgtcgtcgtgggtgggaat

SEQ ID NO: 67654 - DNA, 23 bp, Homo sapiens
cttctcctcaagagatctcccac

SEQ ID NO: 67655 - DNA, 23 bp, Homo sapiens
ctcaggaacgagatggcggttct

SEQ ID NO: 67656 - DNA, 17 bp, Homo sapiens
gtaaacatctggacccc

SEQ ID NO: 67657 - DNA, 19 bp, Homo sapiens
tggagttcgaagcaacaga

SEQ ID NO: 67658 - DNA, 24 bp, Homo sapiens
gtgaaatagatgctatcttcattt

SEQ ID NO: 67659 - DNA, 20 bp, Homo sapiens
gcactccacaccattctggg

SEQ ID NO: 67660 - DNA, 23 bp, Homo sapiens
tacctatggtcatttagaaagtt

SEQ ID NO: 67661 - DNA, 16 bp, Homo sapiens
agcagcagcgatggag

SEQ ID NO: 67662 - DNA, 22 bp, Homo sapiens
ctaatgactctttcctcagctc

SEQ ID NO: 67663 - DNA, 19 bp, Homo sapiens
gtaggaagtcctgctaaag

SEQ ID NO: 67664 - DNA, 21 bp, Homo sapiens
agcatttcttcaggaccgacc

SEQ ID NO: 67665 - DNA, 20 bp, Homo sapiens
ccaaaggtgtaaactaggtc

SEQ ID NO: 67666 - DNA, 16 bp, Homo sapiens
cagccttggagccagc

SEQ ID NO: 67667 - DNA, 24 bp, Homo sapiens
gatattttacttcctttgtactca

SEQ ID NO: 67668 - DNA, 16 bp, Homo sapiens
cagccggaagcagacc

SEQ ID NO: 67669 - DNA, 24 bp, Homo sapiens
tttgggttactgtgtggcatatgt

SEQ ID NO: 67670 - DNA, 17 bp, Homo sapiens
tgaagagtgagggctgc

SEQ ID NO: 67671 - DNA, 19 bp, Homo sapiens
tggtcctttttgtagctgg

SEQ ID NO: 67672 - DNA, 20 bp, Homo sapiens
caagctcacagcaaacaaac

SEQ ID NO: 67673 - DNA, 22 bp, Homo sapiens
tgtcagtgttttgctcctgggt

SEQ ID NO: 67674 - DNA, 21 bp, Homo sapiens
agttttcaacaaatttagggc

SEQ ID NO: 67675 - DNA, 16 bp, Homo sapiens
ttccctggctgcagcc

SEQ ID NO: 67676 - DNA, 19 bp, Homo sapiens
ttgaataggcaggcagata

SEQ ID NO: 67677 - DNA, 18 bp, Homo sapiens
tcgtgccgagccaagatc

SEQ ID NO: 67678 - DNA, 24 bp, Homo sapiens
gtattgataaatgctatgacatgg

SEQ ID NO: 67679 - DNA, 20 bp, Homo sapiens
ctcaggctggagtgcaatgg

SEQ ID NO: 67680 - DNA, 22 bp, Homo sapiens
gatgttgggagttcaagaccag

SEQ ID NO: 67681 - DNA, 18 bp, Homo sapiens
cttactgcaacctccgcc

SEQ ID NO: 67682 - DNA, 16 bp, Homo sapiens
caacttgtccaaggcc

SEQ ID NO: 67683 - DNA, 22 bp, Homo sapiens
gcaaacagtgacagtggagtgg

SEQ ID NO: 67684 - DNA, 16 bp, Homo sapiens
gtgccaaaagccctgc

SEQ ID NO: 67685 - DNA, 24 bp, Homo sapiens
ttttttgcagccaagttatctgta

SEQ ID NO: 67686 - DNA, 20 bp, Homo sapiens
gctttgcagatgcccacatc

SEQ ID NO: 67687 - DNA, 22 bp, Homo sapiens
tttttctttttctttaggggcc

SEQ ID NO: 67688 - DNA, 24 bp, Homo sapiens
gcaaagaggcatacatcaattctt

SEQ ID NO: 67689 - DNA, 21 bp, Homo sapiens
ccttgcagaaagctgccaagg

SEQ ID NO: 67690 - DNA, 22 bp, Homo sapiens
tggacttatctgttatttcttc

SEQ ID NO: 67691 - DNA, 24 bp, Homo sapiens
gggctttgctatttcaactatcac

SEQ ID NO: 67692 - DNA, 24 bp, Homo sapiens
cttttcctcaaagattaaattctg

SEQ ID NO: 67693 - DNA, 19 bp, Homo sapiens
ctcccgttagacactcgca

SEQ ID NO: 67694 - DNA, 21 bp, Homo sapiens
gtctgtgtcttttggctccga

SEQ ID NO: 67695 - DNA, 24 bp, Homo sapiens
tcctgcaggccgagggcttggggt

SEQ ID NO: 67696 - DNA, 18 bp, Homo sapiens
gggcgctttgttttgttc

SEQ ID NO: 67697 - DNA, 16 bp, Homo sapiens
gtgcttctccaagtcc

SEQ ID NO: 67698 - DNA, 19 bp, Homo sapiens
ggagaaagatgtcaaacgt

SEQ ID NO: 67699 - DNA, 19 bp, Homo sapiens
gtttgtgattctgaaaatc

SEQ ID NO: 67700 - DNA, 17 bp, Homo sapiens
caggcaggcggagcacc

SEQ ID NO: 67701 - DNA, 23 bp, Homo sapiens
tctgtagtagaactcgggcaagc

SEQ ID NO: 67702 - DNA, 18 bp, Homo sapiens
accacgaagagttaaccc

SEQ ID NO: 67703 - DNA, 18 bp, Homo sapiens
catcctggctctcctgcg

SEQ ID NO: 67704 - DNA, 23 bp, Homo sapiens
cagcgcaagtggaatttcgattt

SEQ ID NO: 67705 - DNA, 19 bp, Homo sapiens
gcgtgtcctcagagttagc

SEQ ID NO: 67706 - DNA, 19 bp, Homo sapiens
agaggtggagaagggcagc

SEQ ID NO: 67707 - DNA, 16 bp, Homo sapiens
attgctccgctaaccc

SEQ ID NO: 67708 - DNA, 23 bp, Homo sapiens
caaaggtgcctgcaaggtgccgg

SEQ ID NO: 67709 - DNA, 24 bp, Homo sapiens
ggggccccaaacacattctatggt

SEQ ID NO: 67710 - DNA, 22 bp, Homo sapiens
cgcctttaattggggctccggc

SEQ ID NO: 67711 - DNA, 19 bp, Homo sapiens
gaatacgccgaaaagcaag

SEQ ID NO: 67712 - DNA, 22 bp, Homo sapiens
tgatccgtcggacagccagacg

SEQ ID NO: 67713 - DNA, 24 bp, Homo sapiens
cagacaagcagtgggccaggtagc

SEQ ID NO: 67714 - DNA, 22 bp, Homo sapiens
tcattttgtgcccttaaaagcc

SEQ ID NO: 67715 - DNA, 20 bp, Homo sapiens
tttggggaaccgtctgaaac

SEQ ID NO: 67716 - DNA, 24 bp, Homo sapiens
gtagtgggtttttcatcccctgac

SEQ ID NO: 67717 - DNA, 23 bp, Homo sapiens
gagctgtttacgtttgacgtctt

SEQ ID NO: 67718 - DNA, 23 bp, Homo sapiens
taaagattgtgtgttctttttaa

SEQ ID NO: 67719 - DNA, 19 bp, Homo sapiens
tcgtgaggtctgaaggccc

SEQ ID NO: 67720 - DNA, 24 bp, Homo sapiens
agccaacagaacagaagaaaatgt

SEQ ID NO: 67721 - DNA, 23 bp, Homo sapiens
agtataaacaaaacaaaacccca

SEQ ID NO: 67722 - DNA, 22 bp, Homo sapiens
gcagacgcccaagaagcctggc

SEQ ID NO: 67723 - DNA, 20 bp, Homo sapiens
ggaatgtcattaaggcagca

SEQ ID NO: 67724 - DNA, 20 bp, Homo sapiens
gcgaatctctgcctttcgag

SEQ ID NO: 67725 - DNA, 22 bp, Homo sapiens
ccatagcctcagagataaaggc

SEQ ID NO: 67726 - DNA, 19 bp, Homo sapiens
tcttcatggttttctgacc

SEQ ID NO: 67727 - DNA, 23 bp, Homo sapiens
cagcttttcttccttccatggca

SEQ ID NO: 67728 - DNA, 20 bp, Homo sapiens
aagaaaaaagaagaaagctc

SEQ ID NO: 67729 - DNA, 18 bp, Homo sapiens
cataccattgcactccag

SEQ ID NO: 67730 - DNA, 17 bp, Homo sapiens
acctgagatggaggagt

SEQ ID NO: 67731 - DNA, 22 bp, Homo sapiens
taaaaactacagcccatctacc

SEQ ID NO: 67732 - DNA, 16 bp, Homo sapiens
ccctgccccgtggagc

SEQ ID NO: 67733 - DNA, 24 bp, Homo sapiens
tgcatactgctctatttctttccc

SEQ ID NO: 67734 - DNA, 17 bp, Homo sapiens
ctcctgtcccccacagc

SEQ ID NO: 67735 - DNA, 24 bp, Homo sapiens
cagtaccagcagcagctgtgctcc

SEQ ID NO: 67736 - DNA, 24 bp, Homo sapiens
ttctgctgaacccaggatggcaac

SEQ ID NO: 67737 - DNA, 16 bp, Homo sapiens
ctggggggaaaggctc

SEQ ID NO: 67738 - DNA, 24 bp, Homo sapiens
aaaatctttgagtaagtgaccaac

SEQ ID NO: 67739 - DNA, 16 bp, Homo sapiens
aggcagcccaatcagg

SEQ ID NO: 67740 - DNA, 18 bp, Homo sapiens
tctcaccttaggcctctc

SEQ ID NO: 67741 - DNA, 20 bp, Homo sapiens
gttcccatccccatgggcag

SEQ ID NO: 67742 - DNA, 20 bp, Homo sapiens
ccactaagcagtaaccattc

SEQ ID NO: 67743 - DNA, 22 bp, Homo sapiens
agaaaatctttttctcccatgt

SEQ ID NO: 67744 - DNA, 16 bp, Homo sapiens
cagcatcccaaagtgc

SEQ ID NO: 67745 - DNA, 23 bp, Homo sapiens
tggagtgttggctgtatctttgc

SEQ ID NO: 67746 - DNA, 22 bp, Homo sapiens
ttgcaatccagcctgggcaaca

SEQ ID NO: 67747 - DNA, 16 bp, Homo sapiens
cgagctcccgaagttc

SEQ ID NO: 67748 - DNA, 22 bp, Homo sapiens
ggatgtggtttatgaacaagcg

SEQ ID NO: 67749 - DNA, 16 bp, Homo sapiens
taacccatggggtccc

SEQ ID NO: 67750 - DNA, 23 bp, Homo sapiens
gtcccatactttcgacgaaacat

SEQ ID NO: 67751 - DNA, 19 bp, Homo sapiens
gcccgtagcaattgagaag

SEQ ID NO: 67752 - DNA, 19 bp, Homo sapiens
catatgtggactgcagaag

SEQ ID NO: 67753 - DNA, 20 bp, Homo sapiens
cacccgtggtcagtagaaag

SEQ ID NO: 67754 - DNA, 21 bp, Homo sapiens
gggaataggaagaatggatgg

SEQ ID NO: 67755 - DNA, 18 bp, Homo sapiens
acagtcaagctggctgac

SEQ ID NO: 67756 - DNA, 22 bp, Homo sapiens
ctgaacacatgaagcacatgac

SEQ ID NO: 67757 - DNA, 18 bp, Homo sapiens
gccaattgcatcgttcac

SEQ ID NO: 67758 - DNA, 23 bp, Homo sapiens
aaccagaacccattttggtacca

SEQ ID NO: 67759 - DNA, 18 bp, Homo sapiens
gtacctcccctttgaaac

SEQ ID NO: 67760 - DNA, 24 bp, Homo sapiens
ctgtagattctggccaggccaaag

SEQ ID NO: 67761 - DNA, 21 bp, Homo sapiens
gacctttgtagtagaaccttc

SEQ ID NO: 67762 - DNA, 22 bp, Homo sapiens
atgttctctggcttcagatctc

SEQ ID NO: 67763 - DNA, 16 bp, Homo sapiens
tgccagccgaaacgat

SEQ ID NO: 67764 - DNA, 23 bp, Homo sapiens
tcttagaaactggcgcatcagat

SEQ ID NO: 67765 - DNA, 19 bp, Homo sapiens
ggtgtttgagcatgtagac

SEQ ID NO: 67766 - DNA, 17 bp, Homo sapiens
ctgaaatcccagaaggt

SEQ ID NO: 67767 - DNA, 21 bp, Homo sapiens
tttactctggtcaggctgatg

SEQ ID NO: 67768 - DNA, 21 bp, Homo sapiens
ccaaccccactcaccttgatc

SEQ ID NO: 67769 - DNA, 24 bp, Homo sapiens
gaccctgaggaaataatgagaggc

SEQ ID NO: 67770 - DNA, 22 bp, Homo sapiens
gatatgtccttaggtcctggtc

SEQ ID NO: 67771 - DNA, 23 bp, Homo sapiens
ggggagtaaagggaaaagacagc

SEQ ID NO: 67772 - DNA, 23 bp, Homo sapiens
tcagttcgggatgtggcacagac

SEQ ID NO: 67773 - DNA, 17 bp, Homo sapiens
gaggcttttgagcatcc

SEQ ID NO: 67774 - DNA, 19 bp, Homo sapiens
cctttaacccaacatggcc

SEQ ID NO: 67775 - DNA, 19 bp, Homo sapiens
ggaggaggaggtggaggag

SEQ ID NO: 67776 - DNA, 23 bp, Homo sapiens
atcatcacaccccacctataggc

SEQ ID NO: 67777 - DNA, 17 bp, Homo sapiens
gtgatccccacagtggc

SEQ ID NO: 67778 - DNA, 17 bp, Homo sapiens
tcaccggacaacattgg

SEQ ID NO: 67779 - DNA, 21 bp, Homo sapiens
ctacctctcgatatgagccag

SEQ ID NO: 67780 - DNA, 21 bp, Homo sapiens
cgaactgtgctgatgggaagg

SEQ ID NO: 67781 - DNA, 23 bp, Homo sapiens
taagcgacttttggtgataggag

SEQ ID NO: 67782 - DNA, 24 bp, Homo sapiens
tcacactcttgagggccacaaagt

SEQ ID NO: 67783 - DNA, 19 bp, Homo sapiens
gcgctttttttttgggagt

SEQ ID NO: 67784 - DNA, 24 bp, Homo sapiens
cataggcaccgacaccaatttcag

SEQ ID NO: 67785 - DNA, 24 bp, Homo sapiens
cccacagctgggccattagccagc

SEQ ID NO: 67786 - DNA, 24 bp, Homo sapiens
tggttttctttggtttcctccccg

SEQ ID NO: 67787 - DNA, 18 bp, Homo sapiens
actacggcatgtcgtacc

SEQ ID NO: 67788 - DNA, 20 bp, Homo sapiens
gtggtctggtcactggaagc

SEQ ID NO: 67789 - DNA, 23 bp, Homo sapiens
ctgtgcctgtttattcctgcagg

SEQ ID NO: 67790 - DNA, 24 bp, Homo sapiens
acggacgcagaggcacccggggcc

SEQ ID NO: 67791 - DNA, 16 bp, Homo sapiens
ctgcctcggctcagcc

SEQ ID NO: 67792 - DNA, 21 bp, Homo sapiens
actccagggtctccaggaggt

SEQ ID NO: 67793 - DNA, 24 bp, Homo sapiens
gtgtactgcagctgcgcgggagac

SEQ ID NO: 67794 - DNA, 24 bp, Homo sapiens
aatattccgatctgttccatgaag

SEQ ID NO: 67795 - DNA, 18 bp, Homo sapiens
gctccctttcaggtctgc

SEQ ID NO: 67796 - DNA, 16 bp, Homo sapiens
aggaggccaaggaggc

SEQ ID NO: 67797 - DNA, 18 bp, Homo sapiens
ctgtgaagaagcagcagg

SEQ ID NO: 67798 - DNA, 17 bp, Homo sapiens
gatggtgagggcgaagt

SEQ ID NO: 67799 - DNA, 16 bp, Homo sapiens
ctgcacacagcagggg

SEQ ID NO: 67800 - DNA, 23 bp, Homo sapiens
ccttcaccccgcggcacttcagg

SEQ ID NO: 67801 - DNA, 16 bp, Homo sapiens
ttcaccctgcaggacc

SEQ ID NO: 67802 - DNA, 20 bp, Homo sapiens
gcatggactggtctgcaggg

SEQ ID NO: 67803 - DNA, 18 bp, Homo sapiens
ctacgactcctctgccat

SEQ ID NO: 67804 - DNA, 17 bp, Homo sapiens
cacacaccccggctccc

SEQ ID NO: 67805 - DNA, 16 bp, Homo sapiens
tctgcctaggatgggg

SEQ ID NO: 67806 - DNA, 16 bp, Homo sapiens
gcatgcacgactcacc

SEQ ID NO: 67807 - DNA, 20 bp, Homo sapiens
tgagatcctgcccatggcac

SEQ ID NO: 67808 - DNA, 23 bp, Homo sapiens
gtagaacttccaccagcgtcatc

SEQ ID NO: 67809 - DNA, 17 bp, Homo sapiens
gtgcagctgcactcagg

SEQ ID NO: 67810 - DNA, 16 bp, Homo sapiens
cactgaggcaggaccg

SEQ ID NO: 67811 - DNA, 21 bp, Homo sapiens
tgtgtaaagactcttccttct

SEQ ID NO: 67812 - DNA, 22 bp, Homo sapiens
cctgttgccaatccatgtgagt

SEQ ID NO: 67813 - DNA, 17 bp, Homo sapiens
cgctcctacgtgcttcc

SEQ ID NO: 67814 - DNA, 16 bp, Homo sapiens
agccctcaagacaccg

SEQ ID NO: 67815 - DNA, 16 bp, Homo sapiens
ttcgcctggtggatgt

SEQ ID NO: 67816 - DNA, 19 bp, Homo sapiens
cagccgcacctctgagaag

SEQ ID NO: 67817 - DNA, 18 bp, Homo sapiens
ggtgctgtccctggacac

SEQ ID NO: 67818 - DNA, 21 bp, Homo sapiens
aagttacagctgcggcagatg

SEQ ID NO: 67819 - DNA, 17 bp, Homo sapiens
tggtccagacagagcag

SEQ ID NO: 67820 - DNA, 17 bp, Homo sapiens
cctcctcggagaactcg

SEQ ID NO: 67821 - DNA, 21 bp, Homo sapiens
taaagggactaaggaagggag

SEQ ID NO: 67822 - DNA, 23 bp, Homo sapiens
attcacctggtttgtgatgttgg

SEQ ID NO: 67823 - DNA, 20 bp, Homo sapiens
ccctggagttcatcaaatac

SEQ ID NO: 67824 - DNA, 23 bp, Homo sapiens
ggtgtccttatcttgcacacata

SEQ ID NO: 67825 - DNA, 20 bp, Homo sapiens
tgagctctcagagatgtttc

SEQ ID NO: 67826 - DNA, 24 bp, Homo sapiens
ccttgcacacagtaacattctcgc

SEQ ID NO: 67827 - DNA, 20 bp, Homo sapiens
agagcttcttcaccatcact

SEQ ID NO: 67828 - DNA, 21 bp, Homo sapiens
ggcactctcaccttgcacacg

SEQ ID NO: 67829 - DNA, 22 bp, Homo sapiens
catccttatacttccaggaatg

SEQ ID NO: 67830 - DNA, 17 bp, Homo sapiens
gaaccggggaggacagg

SEQ ID NO: 67831 - DNA, 17 bp, Homo sapiens
gccagtcccccaggtgg

SEQ ID NO: 67832 - DNA, 24 bp, Homo sapiens
ctttcttctgaatcttctgagtga

SEQ ID NO: 67833 - DNA, 23 bp, Homo sapiens
gtcttttgaggccactgccatgt

SEQ ID NO: 67834 - DNA, 23 bp, Homo sapiens
gacataatcctgagagaaggtga

SEQ ID NO: 67835 - DNA, 16 bp, Homo sapiens
cccaggaggccgaggg

SEQ ID NO: 67836 - DNA, 16 bp, Homo sapiens
ggcactggggacctcc

SEQ ID NO: 67837 - DNA, 16 bp, Homo sapiens
gacgggctgaggcgca

SEQ ID NO: 67838 - DNA, 22 bp, Homo sapiens
cagaggagttaggtcactggca

SEQ ID NO: 67839 - DNA, 17 bp, Homo sapiens
tgtggtgtgtgtgcctc

SEQ ID NO: 67840 - DNA, 16 bp, Homo sapiens
gggctccgaccgcccc

SEQ ID NO: 67841 - DNA, 18 bp, Homo sapiens
aatctgaccagccatggg

SEQ ID NO: 67842 - DNA, 15 bp, Homo sapiens
tgctccctggagcac

SEQ ID NO: 67843 - DNA, 24 bp, Homo sapiens
tttagctcatctaaaggctgcaga

SEQ ID NO: 67844 - DNA, 23 bp, Homo sapiens
tcctcatgattgtttcaggtaag

SEQ ID NO: 67845 - DNA, 19 bp, Homo sapiens
gctcacaaagtcccaactg

SEQ ID NO: 67846 - DNA, 23 bp, Homo sapiens
ggaaaacaactggaacattttgc

SEQ ID NO: 67847 - DNA, 20 bp, Homo sapiens
cccttcttgcgataccatgg

SEQ ID NO: 67848 - DNA, 21 bp, Homo sapiens
aaagagatggggaggaggagg

SEQ ID NO: 67849 - DNA, 18 bp, Homo sapiens
cagccctgggctctgggc

SEQ ID NO: 67850 - DNA, 18 bp, Homo sapiens
agactcccagaaagcagg

SEQ ID NO: 67851 - DNA, 19 bp, Homo sapiens
ggctgcctgtggcaaaaac

SEQ ID NO: 67852 - DNA, 16 bp, Homo sapiens
ccctctaccaggccgc

SEQ ID NO: 67853 - DNA, 18 bp, Homo sapiens
ttggattcctccgcctct

SEQ ID NO: 67854 - DNA, 16 bp, Homo sapiens
ctctggtcaaacgggg

SEQ ID NO: 67855 - DNA, 24 bp, Homo sapiens
cattttcctgctcatcctctgctc

SEQ ID NO: 67856 - DNA, 19 bp, Homo sapiens
ccctccccgtgttcatgag

SEQ ID NO: 67857 - DNA, 24 bp, Homo sapiens
atttcttctctggatggatccatc

SEQ ID NO: 67858 - DNA, 19 bp, Homo sapiens
cggggccctgagcactcag

SEQ ID NO: 67859 - DNA, 19 bp, Homo sapiens
tccattcaaaggagacctt

SEQ ID NO: 67860 - DNA, 17 bp, Homo sapiens
ggtgccacactgcagct

SEQ ID NO: 67861 - DNA, 22 bp, Homo sapiens
ggggaaataaaggaaagttgag

SEQ ID NO: 67862 - DNA, 22 bp, Homo sapiens
tgattccgccatagttagatgg

SEQ ID NO: 67863 - DNA, 21 bp, Homo sapiens
tctgaatgaactttcaaattc

SEQ ID NO: 67864 - DNA, 22 bp, Homo sapiens
aagaaattgtcagagaatggaa

SEQ ID NO: 67865 - DNA, 23 bp, Homo sapiens
tgtggaagatgccatcgcttacg

SEQ ID NO: 67866 - DNA, 23 bp, Homo sapiens
atggtgagtcctgcacttctaac

SEQ ID NO: 67867 - DNA, 21 bp, Homo sapiens
tcagtcatctacgccaacttc

SEQ ID NO: 67868 - DNA, 24 bp, Homo sapiens
tcagggggtcattttagcatccct

SEQ ID NO: 67869 - DNA, 17 bp, Homo sapiens
acggactctcaacttgc

SEQ ID NO: 67870 - DNA, 22 bp, Homo sapiens
cacctgctggtgatgtactcca

SEQ ID NO: 67871 - DNA, 22 bp, Homo sapiens
cagctcttttccctcttggatt

SEQ ID NO: 67872 - DNA, 24 bp, Homo sapiens
tctttgtacagaggatgatgcggt

SEQ ID NO: 67873 - DNA, 24 bp, Homo sapiens
tttgctcttcattagcttctgggt

SEQ ID NO: 67874 - DNA, 23 bp, Homo sapiens
tttctctgggatcctttggattg

SEQ ID NO: 67875 - DNA, 19 bp, Homo sapiens
ccatcctctctgcttcatg

SEQ ID NO: 67876 - DNA, 18 bp, Homo sapiens
ctggccatgtctctggtt

SEQ ID NO: 67877 - DNA, 20 bp, Homo sapiens
cagtaccacaacatctatgc

SEQ ID NO: 67878 - DNA, 16 bp, Homo sapiens
gacagcccagggagga

SEQ ID NO: 67879 - DNA, 21 bp, Homo sapiens
gcaccttctctttcaggatcc

SEQ ID NO: 67880 - DNA, 16 bp, Homo sapiens
ggtgcagggcagggtc

SEQ ID NO: 67881 - DNA, 19 bp, Homo sapiens
cccatttcagttggagcgt

SEQ ID NO: 67882 - DNA, 24 bp, Homo sapiens
gtagaagtgcatcacctggttgtc

SEQ ID NO: 67883 - DNA, 20 bp, Homo sapiens
cagtgagaaggggaggcgac

SEQ ID NO: 67884 - DNA, 23 bp, Homo sapiens
cccacgaccatgctcttcaggat

SEQ ID NO: 67885 - DNA, 22 bp, Homo sapiens
ctatggaaaactcgccacacag

SEQ ID NO: 67886 - DNA, 17 bp, Homo sapiens
atcacgggtggtcaggc

SEQ ID NO: 67887 - DNA, 23 bp, Homo sapiens
atggaccctgtcttagaccttag

SEQ ID NO: 67888 - DNA, 19 bp, Homo sapiens
ggccgacagcatggggatc

SEQ ID NO: 67889 - DNA, 24 bp, Homo sapiens
ttagtaacactccttcccagagag

SEQ ID NO: 67890 - DNA, 16 bp, Homo sapiens
ttcagaacctggccgt

SEQ ID NO: 67891 - DNA, 24 bp, Homo sapiens
ctcatcgtagctggccggggcact

SEQ ID NO: 67892 - DNA, 16 bp, Homo sapiens
ctggagctggcaggat

SEQ ID NO: 67893 - DNA, 21 bp, Homo sapiens
ggatcacgtcgaagctgatcc

SEQ ID NO: 67894 - DNA, 16 bp, Homo sapiens
aggtctgttgctggtt

SEQ ID NO: 67895 - DNA, 21 bp, Homo sapiens
ctggagaatggtgttgacggc

SEQ ID NO: 67896 - DNA, 17 bp, Homo sapiens
gggcctcctgtgccctc

SEQ ID NO: 67897 - DNA, 18 bp, Homo sapiens
acagttcaggctgttact

SEQ ID NO: 67898 - DNA, 18 bp, Homo sapiens
tctcctgcagcctcagct

SEQ ID NO: 67899 - DNA, 23 bp, Homo sapiens
aaaggaggctgatgacaactgtc

SEQ ID NO: 67900 - DNA, 23 bp, Homo sapiens
gcactattgccttgagaagatgt

SEQ ID NO: 67901 - DNA, 16 bp, Homo sapiens
gccacaaccacctgct

SEQ ID NO: 67902 - DNA, 17 bp, Homo sapiens
cgcccacttacctgtgg

SEQ ID NO: 67903 - DNA, 21 bp, Homo sapiens
gggaacctaccagaggacatc

SEQ ID NO: 67904 - DNA, 23 bp, Homo sapiens
ggcttggtcatcgaactccatga

SEQ ID NO: 67905 - DNA, 16 bp, Homo sapiens
cgatgtgccccggtgc

SEQ ID NO: 67906 - DNA, 16 bp, Homo sapiens
taggggacagccagag

SEQ ID NO: 67907 - DNA, 23 bp, Homo sapiens
gtgagcacagtactgtcgttgtg

SEQ ID NO: 67908 - DNA, 17 bp, Homo sapiens
gccgaatgtggagatgt

SEQ ID NO: 67909 - DNA, 22 bp, Homo sapiens
atgatccgtcactacctcaacc

SEQ ID NO: 67910 - DNA, 17 bp, Homo sapiens
accagggcacaggtcag

SEQ ID NO: 67911 - DNA, 17 bp, Homo sapiens
caagatcaactatgggg

SEQ ID NO: 67912 - DNA, 16 bp, Homo sapiens
cctggggaccactggc

SEQ ID NO: 67913 - DNA, 19 bp, Homo sapiens
aggctggccagtgaaattc

SEQ ID NO: 67914 - DNA, 18 bp, Homo sapiens
ctgcgacaggcaggtgtc

SEQ ID NO: 67915 - DNA, 16 bp, Homo sapiens
ttgacccaggaggagc

SEQ ID NO: 67916 - DNA, 24 bp, Homo sapiens
ctccatggcgctgccagtccagga

SEQ ID NO: 67917 - DNA, 17 bp, Homo sapiens
tgagccccatcttcttt

SEQ ID NO: 67918 - DNA, 24 bp, Homo sapiens
ggaattcctccaagacaggaattt

SEQ ID NO: 67919 - DNA, 21 bp, Homo sapiens
agaccatctgcagagccatcc

SEQ ID NO: 67920 - DNA, 16 bp, Homo sapiens
cgatgagtgtgggccc

SEQ ID NO: 67921 - DNA, 16 bp, Homo sapiens
gagctcctgccacccc

SEQ ID NO: 67922 - DNA, 18 bp, Homo sapiens
tggacccagcctcaaaga

SEQ ID NO: 67923 - DNA, 16 bp, Homo sapiens
cttggcgccctgtact

SEQ ID NO: 67924 - DNA, 24 bp, Homo sapiens
tcaccttgtaggcgagcaggaatc

SEQ ID NO: 67925 - DNA, 24 bp, Homo sapiens
acttcctcctgcgcagggggaggc

SEQ ID NO: 67926 - DNA, 24 bp, Homo sapiens
tctgcccgaacttcgaaggtgtgt

SEQ ID NO: 67927 - DNA, 20 bp, Homo sapiens
cgtgattgaattggcagtgc

SEQ ID NO: 67928 - DNA, 17 bp, Homo sapiens
gccgtgctctgctgagt

SEQ ID NO: 67929 - DNA, 24 bp, Homo sapiens
tctcccagggtgcccaggccctcc

SEQ ID NO: 67930 - DNA, 24 bp, Homo sapiens
cctggggcagactccaccactgcc

SEQ ID NO: 67931 - DNA, 21 bp, Homo sapiens
ctcttcgggatcttcatcccc

SEQ ID NO: 67932 - DNA, 23 bp, Homo sapiens
caaaggcccttgaggacaagacc

SEQ ID NO: 67933 - DNA, 24 bp, Homo sapiens
ttgtttccttctccagggagtatc

SEQ ID NO: 67934 - DNA, 24 bp, Homo sapiens
ccccaaaccctgccccagccaatg

SEQ ID NO: 67935 - DNA, 17 bp, Homo sapiens
caccagccgcccatcat

SEQ ID NO: 67936 - DNA, 16 bp, Homo sapiens
gccctgcgctgtgagg

SEQ ID NO: 67937 - DNA, 16 bp, Homo sapiens
cacctggagatgcgct

SEQ ID NO: 67938 - DNA, 24 bp, Homo sapiens
tgcgtggtggtacaggtagatatg

SEQ ID NO: 67939 - DNA, 23 bp, Homo sapiens
tgtgtgtgtggtcaataaacagc

SEQ ID NO: 67940 - DNA, 16 bp, Homo sapiens
tgtgggaggcaggcac

SEQ ID NO: 67941 - DNA, 23 bp, Homo sapiens
tgtctgcccgattcttccaggtt

SEQ ID NO: 67942 - DNA, 17 bp, Homo sapiens
tgaactgggccagagag

SEQ ID NO: 67943 - DNA, 20 bp, Homo sapiens
acatcccgggcagaagtcac

SEQ ID NO: 67944 - DNA, 17 bp, Homo sapiens
aaggtgcctcaccagct

SEQ ID NO: 67945 - DNA, 16 bp, Homo sapiens
gtctgccaaaagtggc

SEQ ID NO: 67946 - DNA, 19 bp, Homo sapiens
ggcccggaacagtaacgga

SEQ ID NO: 67947 - DNA, 16 bp, Homo sapiens
cactgcccaaaggcca

SEQ ID NO: 67948 - DNA, 17 bp, Homo sapiens
ctgtcagcgccagacat

SEQ ID NO: 67949 - DNA, 24 bp, Homo sapiens
cacctgtgggaacgagtccactgt

SEQ ID NO: 67950 - DNA, 20 bp, Homo sapiens
tctctatgagtattcagtgc

SEQ ID NO: 67951 - DNA, 23 bp, Homo sapiens
ctttcctccataccaccctgctg

SEQ ID NO: 67952 - DNA, 19 bp, Homo sapiens
gatcatcgtcgtattctcg

SEQ ID NO: 67953 - DNA, 18 bp, Homo sapiens
agtctcatatacgccctc

SEQ ID NO: 67954 - DNA, 21 bp, Homo sapiens
gaatagcgtgtgctttgtgtg

SEQ ID NO: 67955 - DNA, 24 bp, Homo sapiens
tgatgtgttcctggtacatgtcct

SEQ ID NO: 67956 - DNA, 18 bp, Homo sapiens
ggactgtggcgtggtggg

SEQ ID NO: 67957 - DNA, 21 bp, Homo sapiens
cgaggaaggacccgatttacc

SEQ ID NO: 67958 - DNA, 16 bp, Homo sapiens
cgctcacacacgttgt

SEQ ID NO: 67959 - DNA, 17 bp, Homo sapiens
gcatcccccgtgtgttc

SEQ ID NO: 67960 - DNA, 17 bp, Homo sapiens
gagatggaggctggagg

SEQ ID NO: 67961 - DNA, 16 bp, Homo sapiens
cggcctgttcaggctg

SEQ ID NO: 67962 - DNA, 16 bp, Homo sapiens
cagaggcagcaccagc

SEQ ID NO: 67963 - DNA, 20 bp, Homo sapiens
cagtgtgtcctgtgatgtgc

SEQ ID NO: 67964 - DNA, 23 bp, Homo sapiens
tttagcgactcgctggttcacgt

SEQ ID NO: 67965 - DNA, 23 bp, Homo sapiens
tagggaggcctaaggccctgtgc

SEQ ID NO: 67966 - DNA, 24 bp, Homo sapiens
gcaagtcactgccaacgagcgccc

SEQ ID NO: 67967 - DNA, 16 bp, Homo sapiens
tgaggtctgggatggg

SEQ ID NO: 67968 - DNA, 18 bp, Homo sapiens
tagcttgcagctcccagc

SEQ ID NO: 67969 - DNA, 17 bp, Homo sapiens
tcttgcgaagaactgcc

SEQ ID NO: 67970 - DNA, 17 bp, Homo sapiens
ggcccactctaaccctc

SEQ ID NO: 67971 - DNA, 17 bp, Homo sapiens
gagggtgtgctcaggcc

SEQ ID NO: 67972 - DNA, 19 bp, Homo sapiens
ccatcagcagagccactgc

SEQ ID NO: 67973 - DNA, 16 bp, Homo sapiens
gtggcagctgcaggcc

SEQ ID NO: 67974 - DNA, 17 bp, Homo sapiens
cggaaggtccaggatgc

SEQ ID NO: 67975 - DNA, 18 bp, Homo sapiens
tgtgctcaccatccatcc

SEQ ID NO: 67976 - DNA, 17 bp, Homo sapiens
ggaccatcccggatggc

SEQ ID NO: 67977 - DNA, 20 bp, Homo sapiens
tagggaggctgcttgtgaga

SEQ ID NO: 67978 - DNA, 24 bp, Homo sapiens
tcttcctgcgggcgaggcgctgcc

SEQ ID NO: 67979 - DNA, 24 bp, Homo sapiens
ctgtgatactgtctgtctctgagg

SEQ ID NO: 67980 - DNA, 20 bp, Homo sapiens
agccagacaagccattcctc

SEQ ID NO: 67981 - DNA, 16 bp, Homo sapiens
atcttggggcagcctc

SEQ ID NO: 67982 - DNA, 21 bp, Homo sapiens
gaatgcccgccatgactttct

SEQ ID NO: 67983 - DNA, 24 bp, Homo sapiens
aggaagcgagttctttgggagagc

SEQ ID NO: 67984 - DNA, 19 bp, Homo sapiens
tccctgggctgtgcagacc

SEQ ID NO: 67985 - DNA, 16 bp, Homo sapiens
tggaggacttcggcct

SEQ ID NO: 67986 - DNA, 20 bp, Homo sapiens
ctggttcccagggcgggagg

SEQ ID NO: 67987 - DNA, 17 bp, Homo sapiens
ttccaggtcacgatggc

SEQ ID NO: 67988 - DNA, 23 bp, Homo sapiens
ggtcctgggactcctcctggctc

SEQ ID NO: 67989 - DNA, 16 bp, Homo sapiens
caggcatgagccaccc

SEQ ID NO: 67990 - DNA, 17 bp, Homo sapiens
ctgctgggtgaggcagc

SEQ ID NO: 67991 - DNA, 18 bp, Homo sapiens
gtcttctgaggcctcggc

SEQ ID NO: 67992 - DNA, 18 bp, Homo sapiens
gctcttcaccctggaggg

SEQ ID NO: 67993 - DNA, 24 bp, Homo sapiens
ggcacattttcagaaaaagtccat

SEQ ID NO: 67994 - DNA, 18 bp, Homo sapiens
ggctgcacaaaaaactgc

SEQ ID NO: 67995 - DNA, 17 bp, Homo sapiens
cgcaagaagcctggagt

SEQ ID NO: 67996 - DNA, 16 bp, Homo sapiens
tgatgggtgttggcct

SEQ ID NO: 67997 - DNA, 19 bp, Homo sapiens
cccaccgtcacctgtctcc

SEQ ID NO: 67998 - DNA, 18 bp, Homo sapiens
taagggcggggtcagtgg

SEQ ID NO: 67999 - DNA, 22 bp, Homo sapiens
gtagacatcattcttctccagc

SEQ ID NO: 68000 - DNA, 23 bp, Homo sapiens
tacattgagcggctgggaagcgc

SEQ ID NO: 68001 - DNA, 23 bp, Homo sapiens
tggcactgggttctttacctgtg

SEQ ID NO: 68002 - DNA, 18 bp, Homo sapiens
cacctgctgttctctgtg

SEQ ID NO: 68003 - DNA, 20 bp, Homo sapiens
cagtttttagccccacagcc

SEQ ID NO: 68004 - DNA, 24 bp, Homo sapiens
taaataagacacagtggttagccc

SEQ ID NO: 68005 - DNA, 20 bp, Homo sapiens
gggatggtgatgatcttctg

SEQ ID NO: 68006 - DNA, 22 bp, Homo sapiens
cttggtgtcctctgttgtgcaa

SEQ ID NO: 68007 - DNA, 23 bp, Homo sapiens
agactttgatattcgagcagtga

SEQ ID NO: 68008 - DNA, 21 bp, Homo sapiens
ttaggtgctcacctattactt

SEQ ID NO: 68009 - DNA, 16 bp, Homo sapiens
cccacggtgaggaagc

SEQ ID NO: 68010 - DNA, 23 bp, Homo sapiens
aaaaaacataatccaactcagac

SEQ ID NO: 68011 - DNA, 17 bp, Homo sapiens
ctgagctgtgtgcctgt

SEQ ID NO: 68012 - DNA, 22 bp, Homo sapiens
gagtagagaacgcaactggcac

SEQ ID NO: 68013 - DNA, 23 bp, Homo sapiens
ctgttacacgtccttatttccat

SEQ ID NO: 68014 - DNA, 21 bp, Homo sapiens
tgagccatttccggagaaagt

SEQ ID NO: 68015 - DNA, 20 bp, Homo sapiens
tgtttgtgcatacatatgca

SEQ ID NO: 68016 - DNA, 18 bp, Homo sapiens
ctcccctgtcacggagag

SEQ ID NO: 68017 - DNA, 24 bp, Homo sapiens
tgtaaggaaccccttacctctccg

SEQ ID NO: 68018 - DNA, 23 bp, Homo sapiens
ggagaccagatggtcaaggatgc

SEQ ID NO: 68019 - DNA, 22 bp, Homo sapiens
cacctctccgtgacggagggag

SEQ ID NO: 68020 - DNA, 23 bp, Homo sapiens
gaagattacggggagcagaagtc

SEQ ID NO: 68021 - DNA, 16 bp, Homo sapiens
ggggagccctcacctc

SEQ ID NO: 68022 - DNA, 19 bp, Homo sapiens
gactctgagctattcgagc

SEQ ID NO: 68023 - DNA, 17 bp, Homo sapiens
gtagcggcaactcagcc

SEQ ID NO: 68024 - DNA, 19 bp, Homo sapiens
ccccttgatttctgcagtg

SEQ ID NO: 68025 - DNA, 18 bp, Homo sapiens
ctttgctgtgctgatgga

SEQ ID NO: 68026 - DNA, 17 bp, Homo sapiens
tcaggctagagaagggc

SEQ ID NO: 68027 - DNA, 22 bp, Homo sapiens
gacatggaacggttctcagaga

SEQ ID NO: 68028 - DNA, 24 bp, Homo sapiens
gtgtgtgtgtatgttttaaagtat

SEQ ID NO: 68029 - DNA, 24 bp, Homo sapiens
tgactactggctggacgtgctgta

SEQ ID NO: 68030 - DNA, 24 bp, Homo sapiens
ggtcttgggatttcattaggactg

SEQ ID NO: 68031 - DNA, 17 bp, Homo sapiens
cttcctcaagggcagca

SEQ ID NO: 68032 - DNA, 19 bp, Homo sapiens
cggggtccccttcttgctt

SEQ ID NO: 68033 - DNA, 16 bp, Homo sapiens
ttgaggtcaaacgccg

SEQ ID NO: 68034 - DNA, 22 bp, Homo sapiens
gtaggcctttaccttgctgtac

SEQ ID NO: 68035 - DNA, 24 bp, Homo sapiens
gccttttttttttttttcaggtat

SEQ ID NO: 68036 - DNA, 24 bp, Homo sapiens
acagagccatacacctcttccagc

SEQ ID NO: 68037 - DNA, 17 bp, Homo sapiens
gatgaggcacagctggt

SEQ ID NO: 68038 - DNA, 24 bp, Homo sapiens
gatcttaatcagctgcagttcccc

SEQ ID NO: 68039 - DNA, 20 bp, Homo sapiens
gagagacgtttgctgcctcg

SEQ ID NO: 68040 - DNA, 24 bp, Homo sapiens
gccagagaaccgtcttcattgaac

SEQ ID NO: 68041 - DNA, 17 bp, Homo sapiens
acagagctggtgcaaac

SEQ ID NO: 68042 - DNA, 24 bp, Homo sapiens
ttttgaggttgatgggccctacct

SEQ ID NO: 68043 - DNA, 18 bp, Homo sapiens
tggctcctgatccaacct

SEQ ID NO: 68044 - DNA, 17 bp, Homo sapiens
gctggctgagccgtcct

SEQ ID NO: 68045 - DNA, 24 bp, Homo sapiens
tctaaagcacaaaagctatgagag

SEQ ID NO: 68046 - DNA, 20 bp, Homo sapiens
gaagctgccccctcttcact

SEQ ID NO: 68047 - DNA, 24 bp, Homo sapiens
ccttggaggctggaagaatcatgg

SEQ ID NO: 68048 - DNA, 20 bp, Homo sapiens
tcaatccatccactcctgga

SEQ ID NO: 68049 - DNA, 18 bp, Homo sapiens
gagcgggtgacgtaggtg

SEQ ID NO: 68050 - DNA, 23 bp, Homo sapiens
catcagaacttccttccttcctg

SEQ ID NO: 68051 - DNA, 21 bp, Homo sapiens
tacccaggcgccatgttgaac

SEQ ID NO: 68052 - DNA, 23 bp, Homo sapiens
tagaaaagcaatgtgagcagtgc

SEQ ID NO: 68053 - DNA, 22 bp, Homo sapiens
cttcccagaaaattttgtcttc

SEQ ID NO: 68054 - DNA, 22 bp, Homo sapiens
ccagtgacatcagggcactgac

SEQ ID NO: 68055 - DNA, 22 bp, Homo sapiens
tctctgaaggaggcccttagag

SEQ ID NO: 68056 - DNA, 24 bp, Homo sapiens
cagactcaccttgaccatgatgtt

SEQ ID NO: 68057 - DNA, 16 bp, Homo sapiens
ggaggccacacactgg

SEQ ID NO: 68058 - DNA, 24 bp, Homo sapiens
ggcttcttcacattggtcgtcttg

SEQ ID NO: 68059 - DNA, 18 bp, Homo sapiens
gcaggaaggaaggaggga

SEQ ID NO: 68060 - DNA, 23 bp, Homo sapiens
caccatataccatctgtgtccag

SEQ ID NO: 68061 - DNA, 16 bp, Homo sapiens
aggcacgggagctgat

SEQ ID NO: 68062 - DNA, 17 bp, Homo sapiens
tgtggcctccagccttc

SEQ ID NO: 68063 - DNA, 18 bp, Homo sapiens
ggtactccatggagatgg

SEQ ID NO: 68064 - DNA, 20 bp, Homo sapiens
tccctccttccttcctgccc

SEQ ID NO: 68065 - DNA, 16 bp, Homo sapiens
taccccctggaggagc

SEQ ID NO: 68066 - DNA, 21 bp, Homo sapiens
cccttctgcactcacccaatc

SEQ ID NO: 68067 - DNA, 23 bp, Homo sapiens
ttggctgcttcccttgtccctgt

SEQ ID NO: 68068 - DNA, 18 bp, Homo sapiens
gaagcagacgatgccagc

SEQ ID NO: 68069 - DNA, 20 bp, Homo sapiens
caccccagcccaaagccttc

SEQ ID NO: 68070 - DNA, 19 bp, Homo sapiens
gctgtatgactcgctgcag

SEQ ID NO: 68071 - DNA, 23 bp, Homo sapiens
ctccatgcacagcagcctacacc

SEQ ID NO: 68072 - DNA, 16 bp, Homo sapiens
ggccgtggaggtgggc

SEQ ID NO: 68073 - DNA, 23 bp, Homo sapiens
cccataagcctctcccgggcccg

SEQ ID NO: 68074 - DNA, 21 bp, Homo sapiens
tggaagaatctgtgaggtgct

SEQ ID NO: 68075 - DNA, 22 bp, Homo sapiens
gagttcaggatgcacttgtggg

SEQ ID NO: 68076 - DNA, 23 bp, Homo sapiens
atagatttgaaaattttcaaaat

SEQ ID NO: 68077 - DNA, 18 bp, Homo sapiens
cttcacctcagccgcgtc

SEQ ID NO: 68078 - DNA, 24 bp, Homo sapiens
tattgacagttggccagtctagga

SEQ ID NO: 68079 - DNA, 22 bp, Homo sapiens
ttccgggacaggcgttacgagt

SEQ ID NO: 68080 - DNA, 21 bp, Homo sapiens
taccatccgagtgcaagtgcc

SEQ ID NO: 68081 - DNA, 17 bp, Homo sapiens
gtctcaccaccatctgc

SEQ ID NO: 68082 - DNA, 21 bp, Homo sapiens
tcatgagccgactgaaactgc

SEQ ID NO: 68083 - DNA, 18 bp, Homo sapiens
gtgcttagattactgccg

SEQ ID NO: 68084 - DNA, 18 bp, Homo sapiens
tgtggagccctttgaact

SEQ ID NO: 68085 - DNA, 16 bp, Homo sapiens
ccctgtgccctggctc

SEQ ID NO: 68086 - DNA, 22 bp, Homo sapiens
gtagaaggagttttcccgctgg

SEQ ID NO: 68087 - DNA, 22 bp, Homo sapiens
gaaactagcagtgtatctgagc

SEQ ID NO: 68088 - DNA, 24 bp, Homo sapiens
gatgtggatcttcttgtaggcttt

SEQ ID NO: 68089 - DNA, 24 bp, Homo sapiens
agtgagagcacagcttacagtgac

SEQ ID NO: 68090 - DNA, 16 bp, Homo sapiens
ctcgggcctttcatga

SEQ ID NO: 68091 - DNA, 18 bp, Homo sapiens
agctgggatggaccaacg

SEQ ID NO: 68092 - DNA, 20 bp, Homo sapiens
taccatcggatccagcacca

SEQ ID NO: 68093 - DNA, 24 bp, Homo sapiens
acatctttacagccgtgaccatgc

SEQ ID NO: 68094 - DNA, 22 bp, Homo sapiens
tgtgtctgtgcctccttttgaa

SEQ ID NO: 68095 - DNA, 21 bp, Homo sapiens
ctgttcctcgcgggacagttc

SEQ ID NO: 68096 - DNA, 16 bp, Homo sapiens
aacgggtgggtgagtg

SEQ ID NO: 68097 - DNA, 19 bp, Homo sapiens
cttctctgactccagctgg

SEQ ID NO: 68098 - DNA, 24 bp, Homo sapiens
gaagatggcctggcagtggagggg

SEQ ID NO: 68099 - DNA, 24 bp, Homo sapiens
gggaaggaggcaatgggggcaagt

SEQ ID NO: 68100 - DNA, 16 bp, Homo sapiens
aagccacctgtgctgc

SEQ ID NO: 68101 - DNA, 17 bp, Homo sapiens
aaggcggccgacactca

SEQ ID NO: 68102 - DNA, 16 bp, Homo sapiens
gctctctctgcccagc

SEQ ID NO: 68103 - DNA, 19 bp, Homo sapiens
ccgacactcactgaactcg

SEQ ID NO: 68104 - DNA, 20 bp, Homo sapiens
gtaccccaacatcatcctga

SEQ ID NO: 68105 - DNA, 23 bp, Homo sapiens
aggcttattgaagtcacaggcag

SEQ ID NO: 68106 - DNA, 17 bp, Homo sapiens
tgaaggacgttcccagc

SEQ ID NO: 68107 - DNA, 22 bp, Homo sapiens
aggggtgagaaagcacttaggg

SEQ ID NO: 68108 - DNA, 18 bp, Homo sapiens
tgagtttcgctttctctg

SEQ ID NO: 68109 - DNA, 23 bp, Homo sapiens
agtctcacctgcaggcggttggt

SEQ ID NO: 68110 - DNA, 20 bp, Homo sapiens
ctcctgaatgtctaaaaggg

SEQ ID NO: 68111 - DNA, 17 bp, Homo sapiens
gagtggacactcgatgc

SEQ ID NO: 68112 - DNA, 22 bp, Homo sapiens
tcttaacttttttcttctggct

SEQ ID NO: 68113 - DNA, 21 bp, Homo sapiens
caagtcaccaactttgaagag

SEQ ID NO: 68114 - DNA, 21 bp, Homo sapiens
ccctgtcccaccagagaccct

SEQ ID NO: 68115 - DNA, 17 bp, Homo sapiens
agcgggttgagaagacc

SEQ ID NO: 68116 - DNA, 23 bp, Homo sapiens
acaataaacgtgctgctgaaaga

SEQ ID NO: 68117 - DNA, 17 bp, Homo sapiens
tctgaccccgtcgtctc

SEQ ID NO: 68118 - DNA, 24 bp, Homo sapiens
ttcctgcctccctgatggttacct

SEQ ID NO: 68119 - DNA, 17 bp, Homo sapiens
aacctgccacgtgcagc

SEQ ID NO: 68120 - DNA, 24 bp, Homo sapiens
ctcctcttcctcaagggcgtggcg

SEQ ID NO: 68121 - DNA, 19 bp, Homo sapiens
tctttagggcagtgcactg

SEQ ID NO: 68122 - DNA, 17 bp, Homo sapiens
gcagcgatatcccttgc

SEQ ID NO: 68123 - DNA, 24 bp, Homo sapiens
gagaagccacacccggtgaggggc

SEQ ID NO: 68124 - DNA, 18 bp, Homo sapiens
acgtgctggactctgaga

SEQ ID NO: 68125 - DNA, 22 bp, Homo sapiens
ccctgcagcttctgggtcctac

SEQ ID NO: 68126 - DNA, 18 bp, Homo sapiens
tcatcttccccaacaagc

SEQ ID NO: 68127 - DNA, 23 bp, Homo sapiens
gaagaagcacaccatcctaaacc

SEQ ID NO: 68128 - DNA, 16 bp, Homo sapiens
gaagggctctggcact

SEQ ID NO: 68129 - DNA, 16 bp, Homo sapiens
tggcccccgacgtagg

SEQ ID NO: 68130 - DNA, 17 bp, Homo sapiens
caagtcagggcctttgg

SEQ ID NO: 68131 - DNA, 23 bp, Homo sapiens
gcttattgaactcctgctcttgc

SEQ ID NO: 68132 - DNA, 19 bp, Homo sapiens
accacgaggttttctctcc

SEQ ID NO: 68133 - DNA, 23 bp, Homo sapiens
catcagcaaggcctcacacagag

SEQ ID NO: 68134 - DNA, 22 bp, Homo sapiens
gctctgtgcaccattattccca

SEQ ID NO: 68135 - DNA, 20 bp, Homo sapiens
caccagaattctactgccgc

SEQ ID NO: 68136 - DNA, 19 bp, Homo sapiens
agatgctgtcgccacttac

SEQ ID NO: 68137 - DNA, 18 bp, Homo sapiens
agtgcatttggaatgggg

SEQ ID NO: 68138 - DNA, 18 bp, Homo sapiens
ttttgatggccctgctct

SEQ ID NO: 68139 - DNA, 24 bp, Homo sapiens
agataatgctcacctcgtcgggct

SEQ ID NO: 68140 - DNA, 16 bp, Homo sapiens
ggctggtcaggccagg

SEQ ID NO: 68141 - DNA, 24 bp, Homo sapiens
cgtacttcatgtacaggtagtaag

SEQ ID NO: 68142 - DNA, 16 bp, Homo sapiens
ctgtgtctccgggaca

SEQ ID NO: 68143 - DNA, 19 bp, Homo sapiens
ggacaaaacacgtgtgtcc

SEQ ID NO: 68144 - DNA, 23 bp, Homo sapiens
agctagacccggaggacatgtgc

SEQ ID NO: 68145 - DNA, 24 bp, Homo sapiens
gcatacatgcgtgcacacggcagc

SEQ ID NO: 68146 - DNA, 20 bp, Homo sapiens
ggcagtcataatctcaaggc

SEQ ID NO: 68147 - DNA, 18 bp, Homo sapiens
gccatctggatgcgtgca

SEQ ID NO: 68148 - DNA, 24 bp, Homo sapiens
atcctggcttctgttctcattctc

SEQ ID NO: 68149 - DNA, 17 bp, Homo sapiens
gctgctccgtggccatc

SEQ ID NO: 68150 - DNA, 19 bp, Homo sapiens
tgtgtggtgcccagttttg

SEQ ID NO: 68151 - DNA, 16 bp, Homo sapiens
gcttggccttggcggc

SEQ ID NO: 68152 - DNA, 16 bp, Homo sapiens
tacaccatgtggggcc

SEQ ID NO: 68153 - DNA, 18 bp, Homo sapiens
catccacatggactgcct

SEQ ID NO: 68154 - DNA, 24 bp, Homo sapiens
ccatactcttgggtgacctgaaac

SEQ ID NO: 68155 - DNA, 18 bp, Homo sapiens
catgcagcaggagatagg

SEQ ID NO: 68156 - DNA, 18 bp, Homo sapiens
agcacagtctgcaagagg

SEQ ID NO: 68157 - DNA, 24 bp, Homo sapiens
ttgcttgtctgtcctctttccaac

SEQ ID NO: 68158 - DNA, 17 bp, Homo sapiens
gtggcccctacctgagg

SEQ ID NO: 68159 - DNA, 18 bp, Homo sapiens
cctccctgggtctgaggg

SEQ ID NO: 68160 - DNA, 19 bp, Homo sapiens
tggctgtccttctggaagc

SEQ ID NO: 68161 - DNA, 20 bp, Homo sapiens
catgtcgacttaggaggtgg

SEQ ID NO: 68162 - DNA, 17 bp, Homo sapiens
gcctccacaaatggcct

SEQ ID NO: 68163 - DNA, 22 bp, Homo sapiens
gctctaatgcccctttctccat

SEQ ID NO: 68164 - DNA, 23 bp, Homo sapiens
gagaccaaacccaccatcatggt

SEQ ID NO: 68165 - DNA, 21 bp, Homo sapiens
gtgcagagtgaacccaggagc

SEQ ID NO: 68166 - DNA, 17 bp, Homo sapiens
gtgacttgggttcaggc

SEQ ID NO: 68167 - DNA, 21 bp, Homo sapiens
caacgccctccctctcaaatg

SEQ ID NO: 68168 - DNA, 23 bp, Homo sapiens
ctgcttctgaactttgggagagg

SEQ ID NO: 68169 - DNA, 23 bp, Homo sapiens
gtcaaaaaagtccccgttgtagg

SEQ ID NO: 68170 - DNA, 20 bp, Homo sapiens
gtcttttctgccagagacgg

SEQ ID NO: 68171 - DNA, 24 bp, Homo sapiens
aaaccacctttggatcagatgagc

SEQ ID NO: 68172 - DNA, 18 bp, Homo sapiens
cttattcctgccccgccc

SEQ ID NO: 68173 - DNA, 18 bp, Homo sapiens
cagaatatgaaggcccct

SEQ ID NO: 68174 - DNA, 17 bp, Homo sapiens
aaagctcatggagctgc

SEQ ID NO: 68175 - DNA, 17 bp, Homo sapiens
cctcatcaccaacaggg

SEQ ID NO: 68176 - DNA, 20 bp, Homo sapiens
gtccgttcttcccacaatac

SEQ ID NO: 68177 - DNA, 18 bp, Homo sapiens
ttcttggctttgcagcct

SEQ ID NO: 68178 - DNA, 21 bp, Homo sapiens
gttcattgaagacacaaaagg

SEQ ID NO: 68179 - DNA, 20 bp, Homo sapiens
ctgtggacttctttgtagtg

SEQ ID NO: 68180 - DNA, 18 bp, Homo sapiens
tcttctgaaacaatctcc

SEQ ID NO: 68181 - DNA, 23 bp, Homo sapiens
ctacatgatcgatggccaggtga

SEQ ID NO: 68182 - DNA, 18 bp, Homo sapiens
gtcggaacggcttggttg

SEQ ID NO: 68183 - DNA, 18 bp, Homo sapiens
aactgcccctcaagtttc

SEQ ID NO: 68184 - DNA, 23 bp, Homo sapiens
actaacagtggggcagatgctgc

SEQ ID NO: 68185 - DNA, 21 bp, Homo sapiens
gctttatgcttattttgtccc

SEQ ID NO: 68186 - DNA, 24 bp, Homo sapiens
ggagcttacttcccagaagccacc

SEQ ID NO: 68187 - DNA, 16 bp, Homo sapiens
gggaggtagagcaggc

SEQ ID NO: 68188 - DNA, 21 bp, Homo sapiens
ctggtctgtctcagcatcagg

SEQ ID NO: 68189 - DNA, 20 bp, Homo sapiens
ggttagtcttagggtccttc

SEQ ID NO: 68190 - DNA, 16 bp, Homo sapiens
cgccgagatgaccttg

SEQ ID NO: 68191 - DNA, 23 bp, Homo sapiens
ttaataaagtatttgggggaaaa

SEQ ID NO: 68192 - DNA, 18 bp, Homo sapiens
ttttgcaggctcattggt

SEQ ID NO: 68193 - DNA, 23 bp, Homo sapiens
ccagcactgaagaatattctctc

SEQ ID NO: 68194 - DNA, 22 bp, Homo sapiens
gatcattatgggtgaatccaca

SEQ ID NO: 68195 - DNA, 24 bp, Homo sapiens
agcaaaacttacaggtcgttcaac

SEQ ID NO: 68196 - DNA, 23 bp, Homo sapiens
gtggtgagtggggcagggttggg

SEQ ID NO: 68197 - DNA, 22 bp, Homo sapiens
tcctcggtatctgacattgtac

SEQ ID NO: 68198 - DNA, 16 bp, Homo sapiens
cgagtacgatgttccc

SEQ ID NO: 68199 - DNA, 22 bp, Homo sapiens
ctacatccaggaaagtctattc

SEQ ID NO: 68200 - DNA, 20 bp, Homo sapiens
ttactgatgaagaggaaacc

SEQ ID NO: 68201 - DNA, 24 bp, Homo sapiens
ctgttaggaaattcatgtgagcag

SEQ ID NO: 68202 - DNA, 20 bp, Homo sapiens
cctggcagctgagttagttg

SEQ ID NO: 68203 - DNA, 24 bp, Homo sapiens
tcaatggagaggcggatgtggtag

SEQ ID NO: 68204 - DNA, 19 bp, Homo sapiens
ttgaactctggtctcacct

SEQ ID NO: 68205 - DNA, 22 bp, Homo sapiens
aactggtcagctatcttcttag

SEQ ID NO: 68206 - DNA, 20 bp, Homo sapiens
taaaggaaggactgccttgg

SEQ ID NO: 68207 - DNA, 16 bp, Homo sapiens
agctctgctttccagg

SEQ ID NO: 68208 - DNA, 24 bp, Homo sapiens
atacagaaatctctacctaattgc

SEQ ID NO: 68209 - DNA, 18 bp, Homo sapiens
gaggaaggagatctcccc

SEQ ID NO: 68210 - DNA, 23 bp, Homo sapiens
ggtaactttgttgctacgtgttc

SEQ ID NO: 68211 - DNA, 24 bp, Homo sapiens
ggtgggtttgaagcgaaattacat

SEQ ID NO: 68212 - DNA, 19 bp, Homo sapiens
tgctcacaagaccaaagtt

SEQ ID NO: 68213 - DNA, 24 bp, Homo sapiens
aagtcctatttctcttgaaccaat

SEQ ID NO: 68214 - DNA, 21 bp, Homo sapiens
ctgctccctgttcttcttcac

SEQ ID NO: 68215 - DNA, 19 bp, Homo sapiens
gccaactctttgacttgtg

SEQ ID NO: 68216 - DNA, 24 bp, Homo sapiens
tcctccacagtgtggaaggacagc

SEQ ID NO: 68217 - DNA, 19 bp, Homo sapiens
aaagagctctagtggtgtt

SEQ ID NO: 68218 - DNA, 20 bp, Homo sapiens
tgcaaaagtggagactgtcc

SEQ ID NO: 68219 - DNA, 17 bp, Homo sapiens
ccacaccgccccatcac

SEQ ID NO: 68220 - DNA, 19 bp, Homo sapiens
gattagggttgtgagcgag

SEQ ID NO: 68221 - DNA, 22 bp, Homo sapiens
cctgccaggaacaatgtagact

SEQ ID NO: 68222 - DNA, 18 bp, Homo sapiens
ggaaataggcaaggaagg

SEQ ID NO: 68223 - DNA, 23 bp, Homo sapiens
caccaagtccagatcctctttgg

SEQ ID NO: 68224 - DNA, 20 bp, Homo sapiens
gtgtgtttcatagactcagg

SEQ ID NO: 68225 - DNA, 24 bp, Homo sapiens
tcttggagagaaaagatgaaactt

SEQ ID NO: 68226 - DNA, 20 bp, Homo sapiens
actcttaacaggtggctttg

SEQ ID NO: 68227 - DNA, 24 bp, Homo sapiens
gctttccattggtaaaatacattt

SEQ ID NO: 68228 - DNA, 24 bp, Homo sapiens
aggagcaagcaatgtgttttcact

SEQ ID NO: 68229 - DNA, 23 bp, Homo sapiens
gaatgacacacaggtcgtctgac

SEQ ID NO: 68230 - DNA, 18 bp, Homo sapiens
atgctaccaaggtcaagg

SEQ ID NO: 68231 - DNA, 23 bp, Homo sapiens
tgtagaaatacggtttatagggc

SEQ ID NO: 68232 - DNA, 21 bp, Homo sapiens
actgacctctctcaggacatc

SEQ ID NO: 68233 - DNA, 17 bp, Homo sapiens
cagtgcagtggattact

SEQ ID NO: 68234 - DNA, 17 bp, Homo sapiens
gctatgggctgctgtgc

SEQ ID NO: 68235 - DNA, 19 bp, Homo sapiens
gtctgtgttgactgattct

SEQ ID NO: 68236 - DNA, 20 bp, Homo sapiens
tgaacacccataaaagtggg

SEQ ID NO: 68237 - DNA, 17 bp, Homo sapiens
tgagtttcccgaaaggt

SEQ ID NO: 68238 - DNA, 23 bp, Homo sapiens
tctgcttccgtcatcttgaataa

SEQ ID NO: 68239 - DNA, 19 bp, Homo sapiens
aggctggtagtgttaatgt

SEQ ID NO: 68240 - DNA, 23 bp, Homo sapiens
ggccctcaatgacgttaaagagg

SEQ ID NO: 68241 - DNA, 22 bp, Homo sapiens
gttttgagcggctgaaggagcc

SEQ ID NO: 68242 - DNA, 21 bp, Homo sapiens
ctcaaagttccctcatgtgtc

SEQ ID NO: 68243 - DNA, 16 bp, Homo sapiens
ttcggcactcaagcgc

SEQ ID NO: 68244 - DNA, 17 bp, Homo sapiens
cagccatattcctgggt

SEQ ID NO: 68245 - DNA, 22 bp, Homo sapiens
ttacaaattaagcacggggttc

SEQ ID NO: 68246 - DNA, 24 bp, Homo sapiens
aatgagccagcctgtcttctcacc

SEQ ID NO: 68247 - DNA, 23 bp, Homo sapiens
agagcaagactccgtctcaaaaa

SEQ ID NO: 68248 - DNA, 23 bp, Homo sapiens
atcttatccgtccactgactccg

SEQ ID NO: 68249 - DNA, 20 bp, Homo sapiens
ggacccaggcgcggatggcg

SEQ ID NO: 68250 - DNA, 17 bp, Homo sapiens
caggcgcggcgagtgcg

SEQ ID NO: 68251 - DNA, 24 bp, Homo sapiens
tttctcccctgaagcagaggtggt

SEQ ID NO: 68252 - DNA, 16 bp, Homo sapiens
gacggccccatggcac

SEQ ID NO: 68253 - DNA, 19 bp, Homo sapiens
tgatggacggcggcatttc

SEQ ID NO: 68254 - DNA, 16 bp, Homo sapiens
cacctgctggcctcgc

SEQ ID NO: 68255 - DNA, 16 bp, Homo sapiens
ccgggcgccggcgcca

SEQ ID NO: 68256 - DNA, 18 bp, Homo sapiens
tctttggatccaataggc

SEQ ID NO: 68257 - DNA, 20 bp, Homo sapiens
tcaaacaaattttccagcgc

SEQ ID NO: 68258 - DNA, 20 bp, Homo sapiens
aaatttgtcaatacctgctt

SEQ ID NO: 68259 - DNA, 20 bp, Homo sapiens
tccctgtgtaagtgcatttt

SEQ ID NO: 68260 - DNA, 20 bp, Homo sapiens
actgggtttttagcaagcat

SEQ ID NO: 68261 - DNA, 23 bp, Homo sapiens
tggaggaatatcgtaggtaaaaa

SEQ ID NO: 68262 - DNA, 24 bp, Homo sapiens
tgttaactggatttatacacacat

SEQ ID NO: 68263 - DNA, 24 bp, Homo sapiens
aaatttttaagacacgctgcaaca

SEQ ID NO: 68264 - DNA, 24 bp, Homo sapiens
accaattaagacttattggtccta

SEQ ID NO: 68265 - DNA, 27 bp, Homo sapiens
gatcttgtttaattaatatgccttaac

SEQ ID NO: 68266 - DNA, 20 bp, Homo sapiens
ttcagattcttctgcaggtt

SEQ ID NO: 68267 - DNA, 23 bp, Homo sapiens
tatgatctttaactgttctgggt

SEQ ID NO: 68268 - DNA, 20 bp, Homo sapiens
tggtttcctttgtggagttt

SEQ ID NO: 68269 - DNA, 24 bp, Homo sapiens
ggtgggattttttttttaaataga

SEQ ID NO: 68270 - DNA, 17 bp, Homo sapiens
cagagtcagcccttgct

SEQ ID NO: 68271 - DNA, 17 bp, Homo sapiens
ttcagaagctccaccct

SEQ ID NO: 68272 - DNA, 20 bp, Homo sapiens
tgcattacttacctaagtct

SEQ ID NO: 68273 - DNA, 22 bp, Homo sapiens
acgaaccaaacctatttaaaac

SEQ ID NO: 68274 - DNA, 20 bp, Homo sapiens
agattttaacacaggtttgc

SEQ ID NO: 68275 - DNA, 24 bp, Homo sapiens
ctccaataatattcaaagagcaag

SEQ ID NO: 68276 - DNA, 17 bp, Homo sapiens
gaggaaaaagaggccag

SEQ ID NO: 68277 - DNA, 30 bp, Homo sapiens
aagaattagataaattcaaattagacttag

SEQ ID NO: 68278 - DNA, 20 bp, Homo sapiens
aacattccttcctgaaacag

SEQ ID NO: 68279 - DNA, 19 bp, Homo sapiens
tcagcaaactgaaaaacct

SEQ ID NO: 68280 - DNA, 23 bp, Homo sapiens
caggaaacatcatctgcttgatc

SEQ ID NO: 68281 - DNA, 25 bp, Homo sapiens
gaggagactttttgtttttaaacac

SEQ ID NO: 68282 - DNA, 24 bp, Homo sapiens
atattttaatataatagcttcatc

SEQ ID NO: 68283 - DNA, 26 bp, Homo sapiens
tacattctcactgaattattgtactg

SEQ ID NO: 68284 - DNA, 21 bp, Homo sapiens
agcataaaaatcagattcatc

SEQ ID NO: 68285 - DNA, 24 bp, Homo sapiens
aaagtcttcgcacagtgaaaacta

SEQ ID NO: 68286 - DNA, 24 bp, Homo sapiens
aacctaaaagattatttaaaaatg

SEQ ID NO: 68287 - DNA, 24 bp, Homo sapiens
cttgtcttagtgaaaggtatgatg

SEQ ID NO: 68288 - DNA, 22 bp, Homo sapiens
acatgtgtacattgtagaacaa

SEQ ID NO: 68289 - DNA, 30 bp, Homo sapiens
ctttttaaaatgtaatataaaatatctaaa

SEQ ID NO: 68290 - DNA, 19 bp, Homo sapiens
agaataaaaagcattgttt

SEQ ID NO: 68291 - DNA, 26 bp, Homo sapiens
aatcttcttttaaaaataagataaac

SEQ ID NO: 68292 - DNA, 19 bp, Homo sapiens
actgggggtaaaaaaaggg

SEQ ID NO: 68293 - DNA, 23 bp, Homo sapiens
gctttgttttattttagtcctgt

SEQ ID NO: 68294 - DNA, 21 bp, Homo sapiens
aaaccaggtagaatatttacc

SEQ ID NO: 68295 - DNA, 20 bp, Homo sapiens
agtcaggtatgattaaaaac

SEQ ID NO: 68296 - DNA, 22 bp, Homo sapiens
atttgtaaatctcagggcaaag

SEQ ID NO: 68297 - DNA, 20 bp, Homo sapiens
aaaacttaacaattttcccc

SEQ ID NO: 68298 - DNA, 24 bp, Homo sapiens
tttatttcacttaacgtttactga

SEQ ID NO: 68299 - DNA, 21 bp, Homo sapiens
atacaccaaagtttgtgaagg

SEQ ID NO: 68300 - DNA, 24 bp, Homo sapiens
gtaattgagaatttgacaatagcg

SEQ ID NO: 68301 - DNA, 19 bp, Homo sapiens
acctcagctcctagacttt

SEQ ID NO: 68302 - DNA, 20 bp, Homo sapiens
ttctgcctcatacaggcaat

SEQ ID NO: 68303 - DNA, 16 bp, Homo sapiens
ctaagggtgggtggtg

SEQ ID NO: 68304 - DNA, 20 bp, Homo sapiens
atatccttaatgatcagggc

SEQ ID NO: 68305 - DNA, 21 bp, Homo sapiens
acaattatcaacctcatctgc

SEQ ID NO: 68306 - DNA, 18 bp, Homo sapiens
gtcgtcagacaccaaaac

SEQ ID NO: 68307 - DNA, 24 bp, Homo sapiens
tcaaagacattatctaatattttc

SEQ ID NO: 68308 - DNA, 22 bp, Homo sapiens
tcttggtcaagttctttagcta

SEQ ID NO: 68309 - DNA, 22 bp, Homo sapiens
tgtatttattccaatctacact

SEQ ID NO: 68310 - DNA, 21 bp, Homo sapiens
agatgcttcttcatttctgac

SEQ ID NO: 68311 - DNA, 22 bp, Homo sapiens
acttaagtacttgaatcaattc

SEQ ID NO: 68312 - DNA, 22 bp, Homo sapiens
ttcaacagtctaatcaatgtca

SEQ ID NO: 68313 - DNA, 21 bp, Homo sapiens
atgtgctttttgatgtctgac

SEQ ID NO: 68314 - DNA, 21 bp, Homo sapiens
aggaaattaaaaatgtaagat

SEQ ID NO: 68315 - DNA, 22 bp, Homo sapiens
aaatttttatcttacagtcaga

SEQ ID NO: 68316 - DNA, 18 bp, Homo sapiens
tcacatataggaccaggt

SEQ ID NO: 68317 - DNA, 23 bp, Homo sapiens
actactgctgtaagtaaatatga

SEQ ID NO: 68318 - DNA, 23 bp, Homo sapiens
cagactttcatcatgattggaaa

SEQ ID NO: 68319 - DNA, 18 bp, Homo sapiens
tggacctaggttgattgc

SEQ ID NO: 68320 - DNA, 22 bp, Homo sapiens
tgatttgtgttttcactgtctg

SEQ ID NO: 68321 - DNA, 22 bp, Homo sapiens
ataaggggggactactactata

SEQ ID NO: 68322 - DNA, 22 bp, Homo sapiens
acaacaacaacaaaaaaacctg

SEQ ID NO: 68323 - DNA, 20 bp, Homo sapiens
ttgcagaatgtgaaaagcta

SEQ ID NO: 68324 - DNA, 18 bp, Homo sapiens
agatcacgggtgacagag

SEQ ID NO: 68325 - DNA, 23 bp, Homo sapiens
agatttatcgcttctgtgacaga

SEQ ID NO: 68326 - DNA, 22 bp, Homo sapiens
tctcagctacttggcaagctga

SEQ ID NO: 68327 - DNA, 24 bp, Homo sapiens
gtcatggtaagtcctctgtttagt

SEQ ID NO: 68328 - DNA, 17 bp, Homo sapiens
acaggagaaggggtgac

SEQ ID NO: 68329 - DNA, 19 bp, Homo sapiens
aaatgaattccctgatgtt

SEQ ID NO: 68330 - DNA, 22 bp, Homo sapiens
aaccctttaaatactgatatgt

SEQ ID NO: 68331 - DNA, 26 bp, Homo sapiens
gtttcatatacttcatcttctaggac

SEQ ID NO: 68332 - DNA, 23 bp, Homo sapiens
aaaggttgtgagaataatataaa

SEQ ID NO: 68333 - DNA, 24 bp, Homo sapiens
tttttgttctacatttagaaaaac

SEQ ID NO: 68334 - DNA, 20 bp, Homo sapiens
acaggatttggaaaaacatc

SEQ ID NO: 68335 - DNA, 25 bp, Homo sapiens
gtttgcttcatggaaaatttttttc

SEQ ID NO: 68336 - DNA, 21 bp, Homo sapiens
gaccacattggaaagtcaatg

SEQ ID NO: 68337 - DNA, 21 bp, Homo sapiens
tcagatacaaatgagtatttt

SEQ ID NO: 68338 - DNA, 22 bp, Homo sapiens
atacctctgaagaagatagttt

SEQ ID NO: 68339 - DNA, 18 bp, Homo sapiens
aagggcttctgatttgct

SEQ ID NO: 68340 - DNA, 20 bp, Homo sapiens
agaactagcaagactaggaa

SEQ ID NO: 68341 - DNA, 16 bp, Homo sapiens
cacaggccaaagacgg

SEQ ID NO: 68342 - DNA, 22 bp, Homo sapiens
aatctaaaaaccaagtgaaaga

SEQ ID NO: 68343 - DNA, 21 bp, Homo sapiens
tgcaataggggtattttctcc

SEQ ID NO: 68344 - DNA, 24 bp, Homo sapiens
aaatgatactgatccattagattc

SEQ ID NO: 68345 - DNA, 20 bp, Homo sapiens
tttcttttgttctctgtgtc

SEQ ID NO: 68346 - DNA, 19 bp, Homo sapiens
tccaaggaagttgtaccgt

SEQ ID NO: 68347 - DNA, 20 bp, Homo sapiens
gattttggtaggctagaaat

SEQ ID NO: 68348 - DNA, 22 bp, Homo sapiens
gtctaaatggagcccagatgga

SEQ ID NO: 68349 - DNA, 19 bp, Homo sapiens
aagatgctgctcttcatct

SEQ ID NO: 68350 - DNA, 24 bp, Homo sapiens
ccaaaatatttcagaaaaagacct

SEQ ID NO: 68351 - DNA, 18 bp, Homo sapiens
gccactggagaagttcca

SEQ ID NO: 68352 - DNA, 20 bp, Homo sapiens
tcagagaattctttgccacg

SEQ ID NO: 68353 - DNA, 21 bp, Homo sapiens
agtctctttaggtgattctct

SEQ ID NO: 68354 - DNA, 22 bp, Homo sapiens
acagtggtaaataagagagatg

SEQ ID NO: 68355 - DNA, 20 bp, Homo sapiens
cagaggcttcagtttctttt

SEQ ID NO: 68356 - DNA, 21 bp, Homo sapiens
cttgcagtaaagcaggcaata

SEQ ID NO: 68357 - DNA, 19 bp, Homo sapiens
acataaggagtcctccttc

SEQ ID NO: 68358 - DNA, 24 bp, Homo sapiens
aaagtctatattcagaataagaga

SEQ ID NO: 68359 - DNA, 23 bp, Homo sapiens
gcattcttcaaagctacagaatt

SEQ ID NO: 68360 - DNA, 22 bp, Homo sapiens
aggtcatatgactgatccaaac

SEQ ID NO: 68361 - DNA, 24 bp, Homo sapiens
tcatcatgtatagcataaataaac

SEQ ID NO: 68362 - DNA, 18 bp, Homo sapiens
actgtttgctcacagaag

SEQ ID NO: 68363 - DNA, 27 bp, Homo sapiens
tgaacagttaattagttctgatttttg

SEQ ID NO: 68364 - DNA, 18 bp, Homo sapiens
ctggccagccaccaccac

SEQ ID NO: 68365 - DNA, 21 bp, Homo sapiens
tcagcatttgcaaatgtaagt

SEQ ID NO: 68366 - DNA, 22 bp, Homo sapiens
tatccactttgaaaaagaaaac

SEQ ID NO: 68367 - DNA, 25 bp, Homo sapiens
cagaaggaatcgtcatctataaaac

SEQ ID NO: 68368 - DNA, 24 bp, Homo sapiens
aaaggaaaaaaaataccgaaagac

SEQ ID NO: 68369 - DNA, 23 bp, Homo sapiens
acagatgatgcctaagattaaat

SEQ ID NO: 68370 - DNA, 20 bp, Homo sapiens
gcaaatgcttttgaagcacc

SEQ ID NO: 68371 - DNA, 21 bp, Homo sapiens
tgtttgagtgacctgattcta

SEQ ID NO: 68372 - DNA, 21 bp, Homo sapiens
gcttcttttcacagaagaatg

SEQ ID NO: 68373 - DNA, 20 bp, Homo sapiens
cctcccaaaagtgctgagat

SEQ ID NO: 68374 - DNA, 18 bp, Homo sapiens
tgtcccaaaagagctagt

SEQ ID NO: 68375 - DNA, 23 bp, Homo sapiens
aacttagtgaaaaatatttagtg

SEQ ID NO: 68376 - DNA, 20 bp, Homo sapiens
tcaagatcctgagagattac

SEQ ID NO: 68377 - DNA, 25 bp, Homo sapiens
gtgtttttatgtttaggtttattgc

SEQ ID NO: 68378 - DNA, 19 bp, Homo sapiens
atcagcttctggggtaata

SEQ ID NO: 68379 - DNA, 24 bp, Homo sapiens
tctgaagaaccaactttgtcctta

SEQ ID NO: 68380 - DNA, 21 bp, Homo sapiens
aacttttttgctttttggatc

SEQ ID NO: 68381 - DNA, 24 bp, Homo sapiens
tgaaacatgttctaataatacagt

SEQ ID NO: 68382 - DNA, 19 bp, Homo sapiens
ttccacttttgaatgttgt

SEQ ID NO: 68383 - DNA, 21 bp, Homo sapiens
taataaggaaaaactacagtt

SEQ ID NO: 68384 - DNA, 18 bp, Homo sapiens
gctggcattttcatgatc

SEQ ID NO: 68385 - DNA, 22 bp, Homo sapiens
aaggacagtgtgaaaatgatcc

SEQ ID NO: 68386 - DNA, 19 bp, Homo sapiens
gaaatcatgactaggtttg

SEQ ID NO: 68387 - DNA, 18 bp, Homo sapiens
ttggctgcagcatgtcac

SEQ ID NO: 68388 - DNA, 22 bp, Homo sapiens
catcagattcataattgttacc

SEQ ID NO: 68389 - DNA, 21 bp, Homo sapiens
tttcaatcccagaaaagtctt

SEQ ID NO: 68390 - DNA, 21 bp, Homo sapiens
ttcatttaaagcacatacatc

SEQ ID NO: 68391 - DNA, 24 bp, Homo sapiens
actcctacttccaaggatgttctg

SEQ ID NO: 68392 - DNA, 20 bp, Homo sapiens
tgaaggtgatgctactctca

SEQ ID NO: 68393 - DNA, 20 bp, Homo sapiens
tgtcagacaagctcaaaggt

SEQ ID NO: 68394 - DNA, 21 bp, Homo sapiens
ttcttcttgatttttttggat

SEQ ID NO: 68395 - DNA, 22 bp, Homo sapiens
cccatggaaaagaatcaagatg

SEQ ID NO: 68396 - DNA, 25 bp, Homo sapiens
tattctcattgtctgagaaaagttc

SEQ ID NO: 68397 - DNA, 21 bp, Homo sapiens
ctgttgccacctgaaaaatac

SEQ ID NO: 68398 - DNA, 23 bp, Homo sapiens
ccttagtatttcctaaagcaaga

SEQ ID NO: 68399 - DNA, 23 bp, Homo sapiens
acacaaatctaagagtaatccaa

SEQ ID NO: 68400 - DNA, 22 bp, Homo sapiens
tggtagagttcttgaaaatggg

SEQ ID NO: 68401 - DNA, 22 bp, Homo sapiens
taactgtcaatccagactctga

SEQ ID NO: 68402 - DNA, 21 bp, Homo sapiens
atcttttttaattgacacttg

SEQ ID NO: 68403 - DNA, 23 bp, Homo sapiens
ccaagtagctaatgaaaggaata

SEQ ID NO: 68404 - DNA, 23 bp, Homo sapiens
gacctagagtcatttttatatgc

SEQ ID NO: 68405 - DNA, 21 bp, Homo sapiens
ttgacttgtgtaaacgaaccc

SEQ ID NO: 68406 - DNA, 22 bp, Homo sapiens
aatcattatttttttctggtat

SEQ ID NO: 68407 - DNA, 24 bp, Homo sapiens
caggtgataaacaagcaacccaag

SEQ ID NO: 68408 - DNA, 19 bp, Homo sapiens
agctacctccaaaactgtg

SEQ ID NO: 68409 - DNA, 25 bp, Homo sapiens
agaggagaacaaaaatagtgtaaag

SEQ ID NO: 68410 - DNA, 23 bp, Homo sapiens
tgctcttcttaatgttatgttca

SEQ ID NO: 68411 - DNA, 23 bp, Homo sapiens
atcggacatctccttgaatatag

SEQ ID NO: 68412 - DNA, 19 bp, Homo sapiens
caacacaagctaaactagt

SEQ ID NO: 68413 - DNA, 21 bp, Homo sapiens
tgggcaggactcttaggtcca

SEQ ID NO: 68414 - DNA, 16 bp, Homo sapiens
attgactgaggcttgc

SEQ ID NO: 68415 - DNA, 20 bp, Homo sapiens
aggaaatcaagctctctgaa

SEQ ID NO: 68416 - DNA, 23 bp, Homo sapiens
tgaggggttatatgactattttt

SEQ ID NO: 68417 - DNA, 23 bp, Homo sapiens
gatattgaagaacaatatcctac

SEQ ID NO: 68418 - DNA, 24 bp, Homo sapiens
cttttggctaggtgttaaattatg

SEQ ID NO: 68419 - DNA, 19 bp, Homo sapiens
tcaaaagaaactgagcaag

SEQ ID NO: 68420 - DNA, 23 bp, Homo sapiens
tgagtaaattcaaactgacttcc

SEQ ID NO: 68421 - DNA, 23 bp, Homo sapiens
acagagtagtgtagttgtttctg

SEQ ID NO: 68422 - DNA, 21 bp, Homo sapiens
ggttttcaggcacttcaaatg

SEQ ID NO: 68423 - DNA, 23 bp, Homo sapiens
agcaggattttaattcaaaccat

SEQ ID NO: 68424 - DNA, 19 bp, Homo sapiens
catgaagatcagcatctct

SEQ ID NO: 68425 - DNA, 24 bp, Homo sapiens
acagaactttctactatattagaa

SEQ ID NO: 68426 - DNA, 21 bp, Homo sapiens
tcaactgtaccttcaaattgc

SEQ ID NO: 68427 - DNA, 21 bp, Homo sapiens
ccaagctacatattgcagaag

SEQ ID NO: 68428 - DNA, 20 bp, Homo sapiens
accagaagcacttttgttac

SEQ ID NO: 68429 - DNA, 21 bp, Homo sapiens
aagaccacttctgaggaatgc

SEQ ID NO: 68430 - DNA, 18 bp, Homo sapiens
gttttgtgccatgagcag

SEQ ID NO: 68431 - DNA, 22 bp, Homo sapiens
gattggtcaggtagacagcagc

SEQ ID NO: 68432 - DNA, 29 bp, Homo sapiens
cctcactaatattctcaatatcactaaac

SEQ ID NO: 68433 - DNA, 24 bp, Homo sapiens
tgctggcctgttgaaaaatgactg

SEQ ID NO: 68434 - DNA, 21 bp, Homo sapiens
tcatgacatttacttgaagat

SEQ ID NO: 68435 - DNA, 18 bp, Homo sapiens
tggggtttaggggctttt

SEQ ID NO: 68436 - DNA, 21 bp, Homo sapiens
tttttcacttacagttttatc

SEQ ID NO: 68437 - DNA, 21 bp, Homo sapiens
gctctgcaaaaagctgtgaaa

SEQ ID NO: 68438 - DNA, 20 bp, Homo sapiens
tcttcaacaaaagtgccagt

SEQ ID NO: 68439 - DNA, 21 bp, Homo sapiens
gcagaggtacatccaataagt

SEQ ID NO: 68440 - DNA, 19 bp, Homo sapiens
tggcagcagtatatttgtt

SEQ ID NO: 68441 - DNA, 26 bp, Homo sapiens
ttaagatagaaaatcataatgataaa

SEQ ID NO: 68442 - DNA, 22 bp, Homo sapiens
caaacagtatcatttttacttg

SEQ ID NO: 68443 - DNA, 23 bp, Homo sapiens
ttacaaaataatattgaaatgac

SEQ ID NO: 68444 - DNA, 19 bp, Homo sapiens
gacatatgttgtgctgatc

SEQ ID NO: 68445 - DNA, 21 bp, Homo sapiens
acaagagaaatactgaaaatg

SEQ ID NO: 68446 - DNA, 21 bp, Homo sapiens
agttaaatctgacaaatcttc

SEQ ID NO: 68447 - DNA, 22 bp, Homo sapiens
taacttagaatttgatggcagt

SEQ ID NO: 68448 - DNA, 27 bp, Homo sapiens
ctgttctttatttgaagtattaccatg

SEQ ID NO: 68449 - DNA, 22 bp, Homo sapiens
tgaaacggacttgctatttact

SEQ ID NO: 68450 - DNA, 25 bp, Homo sapiens
tctgaaaaaatgtatcagaagtctc

SEQ ID NO: 68451 - DNA, 24 bp, Homo sapiens
tttatgaaggagggaaacactcag

SEQ ID NO: 68452 - DNA, 23 bp, Homo sapiens
tttacaattttattaaatgactc

SEQ ID NO: 68453 - DNA, 21 bp, Homo sapiens
gcgaaagctcaagaagcatgt

SEQ ID NO: 68454 - DNA, 24 bp, Homo sapiens
gtcagaatgtaattcagaatttaa

SEQ ID NO: 68455 - DNA, 21 bp, Homo sapiens
acggagcaaaatataaaagat

SEQ ID NO: 68456 - DNA, 22 bp, Homo sapiens
tgtgtttaactatgtctgtttc

SEQ ID NO: 68457 - DNA, 20 bp, Homo sapiens
atattagtgtcgccaaagag

SEQ ID NO: 68458 - DNA, 18 bp, Homo sapiens
tccctggaaggtcactag

SEQ ID NO: 68459 - DNA, 24 bp, Homo sapiens
cagaaaccagaagaattgcataac

SEQ ID NO: 68460 - DNA, 19 bp, Homo sapiens
cgctagctgtatgaaaacc

SEQ ID NO: 68461 - DNA, 25 bp, Homo sapiens
aaaatggacattctaagttatgagg

SEQ ID NO: 68462 - DNA, 24 bp, Homo sapiens
atcaaaaaggtttttcactttgtc

SEQ ID NO: 68463 - DNA, 24 bp, Homo sapiens
aaagaaagtgtcccagttggtact

SEQ ID NO: 68464 - DNA, 16 bp, Homo sapiens
tttgcccattgatggc

SEQ ID NO: 68465 - DNA, 23 bp, Homo sapiens
tgaaaagatcaaagaacctactc

SEQ ID NO: 68466 - DNA, 18 bp, Homo sapiens
tgatctcaatggtctcac

SEQ ID NO: 68467 - DNA, 20 bp, Homo sapiens
ttgcaaaggaatctttggac

SEQ ID NO: 68468 - DNA, 22 bp, Homo sapiens
tctcaatagaaacaaggttttt

SEQ ID NO: 68469 - DNA, 24 bp, Homo sapiens
gtactagtgaaatcaccagtttta

SEQ ID NO: 68470 - DNA, 22 bp, Homo sapiens
ttgagattttcagtttgtctac

SEQ ID NO: 68471 - DNA, 20 bp, Homo sapiens
agaccttgaattagcatgtg

SEQ ID NO: 68472 - DNA, 24 bp, Homo sapiens
tgtttctttttctacattttcatg

SEQ ID NO: 68473 - DNA, 22 bp, Homo sapiens
agaaatgcagaattctctcaat

SEQ ID NO: 68474 - DNA, 21 bp, Homo sapiens
ggctgaattttcaatgactga

SEQ ID NO: 68475 - DNA, 25 bp, Homo sapiens
cacctaagctcttaagtgataattt

SEQ ID NO: 68476 - DNA, 22 bp, Homo sapiens
agtaatgaagtctgactcacag

SEQ ID NO: 68477 - DNA, 24 bp, Homo sapiens
tttttgaaagttaaagtacatgaa

SEQ ID NO: 68478 - DNA, 24 bp, Homo sapiens
tctgcagtatttattctttctggt

SEQ ID NO: 68479 - DNA, 22 bp, Homo sapiens
aacttgttacacaaatcagtcc

SEQ ID NO: 68480 - DNA, 23 bp, Homo sapiens
tgtcattttcagctatagtactg

SEQ ID NO: 68481 - DNA, 23 bp, Homo sapiens
gttgtagtagaaaaacttctgtg

SEQ ID NO: 68482 - DNA, 22 bp, Homo sapiens
ctgttagacatgctactgttac

SEQ ID NO: 68483 - DNA, 23 bp, Homo sapiens
tagagaaggaatatttgatggtc

SEQ ID NO: 68484 - DNA, 21 bp, Homo sapiens
attttttgagagatatcctga

SEQ ID NO: 68485 - DNA, 24 bp, Homo sapiens
ggaaattatttgtatgaaaataat

SEQ ID NO: 68486 - DNA, 26 bp, Homo sapiens
aaactagtgtttttttgatcttcaac

SEQ ID NO: 68487 - DNA, 22 bp, Homo sapiens
aaaacaagatacttatttaagt

SEQ ID NO: 68488 - DNA, 21 bp, Homo sapiens
tcttcatttacagtttgtggg

SEQ ID NO: 68489 - DNA, 24 bp, Homo sapiens
tgatgaggtatataatgattcagg

SEQ ID NO: 68490 - DNA, 21 bp, Homo sapiens
tggctgcatttttatttttgc

SEQ ID NO: 68491 - DNA, 22 bp, Homo sapiens
gagccagtattgaagaatgttg

SEQ ID NO: 68492 - DNA, 16 bp, Homo sapiens
taaatgcaggtggccc

SEQ ID NO: 68493 - DNA, 19 bp, Homo sapiens
aagatgcaaatgcataccc

SEQ ID NO: 68494 - DNA, 25 bp, Homo sapiens
aactgtctgtaaatatgtctttcac

SEQ ID NO: 68495 - DNA, 18 bp, Homo sapiens
actagctcttcaccctgc

SEQ ID NO: 68496 - DNA, 21 bp, Homo sapiens
tcgtttggcaaatttttgatt

SEQ ID NO: 68497 - DNA, 22 bp, Homo sapiens
tagtaataattttgaggtaggg

SEQ ID NO: 68498 - DNA, 24 bp, Homo sapiens
agagttatgaagaatatcctctga

SEQ ID NO: 68499 - DNA, 23 bp, Homo sapiens
tgtgtttcacatgaaacaattaa

SEQ ID NO: 68500 - DNA, 21 bp, Homo sapiens
ttcttcactctgaatgtcagc

SEQ ID NO: 68501 - DNA, 18 bp, Homo sapiens
aaggaaaacaacgagaat

SEQ ID NO: 68502 - DNA, 23 bp, Homo sapiens
ggtgatattttagaaactttctc

SEQ ID NO: 68503 - DNA, 20 bp, Homo sapiens
gttacgaggcattggatgat

SEQ ID NO: 68504 - DNA, 20 bp, Homo sapiens
actgacttatgaagcttccc

SEQ ID NO: 68505 - DNA, 20 bp, Homo sapiens
gtagcacgcattcacataag

SEQ ID NO: 68506 - DNA, 21 bp, Homo sapiens
gacagattttccacttgctgt

SEQ ID NO: 68507 - DNA, 22 bp, Homo sapiens
accaaaatatgtctggattgga

SEQ ID NO: 68508 - DNA, 22 bp, Homo sapiens
gcttggtactatcttctatttc

SEQ ID NO: 68509 - DNA, 28 bp, Homo sapiens
gtttggaaacttcagatatatgtaaatg

SEQ ID NO: 68510 - DNA, 18 bp, Homo sapiens
gagctggtctgaatgttc

SEQ ID NO: 68511 - DNA, 21 bp, Homo sapiens
tacttgtgggatttttagcac

SEQ ID NO: 68512 - DNA, 20 bp, Homo sapiens
atgaaaagcctttttgggat

SEQ ID NO: 68513 - DNA, 22 bp, Homo sapiens
aaaacgcaagacaagtgttttc

SEQ ID NO: 68514 - DNA, 20 bp, Homo sapiens
acttgctttccacttgctgt

SEQ ID NO: 68515 - DNA, 23 bp, Homo sapiens
agtattgtttaaaagtaacgaac

SEQ ID NO: 68516 - DNA, 22 bp, Homo sapiens
tctgattaaatcaaattcctct

SEQ ID NO: 68517 - DNA, 24 bp, Homo sapiens
cgtactccagaacatttaatatcc

SEQ ID NO: 68518 - DNA, 24 bp, Homo sapiens
aacacgaggaagtatttttgatac

SEQ ID NO: 68519 - DNA, 22 bp, Homo sapiens
ctgctttctctggatttagtac

SEQ ID NO: 68520 - DNA, 20 bp, Homo sapiens
ctgcaggttttttccatttc

SEQ ID NO: 68521 - DNA, 18 bp, Homo sapiens
gttaagggagtgttagag

SEQ ID NO: 68522 - DNA, 24 bp, Homo sapiens
agagtgattattttctgaagaacc

SEQ ID NO: 68523 - DNA, 22 bp, Homo sapiens
cactattcacctacgtctagac

SEQ ID NO: 68524 - DNA, 20 bp, Homo sapiens
accaactgttgtttgtcttg

SEQ ID NO: 68525 - DNA, 21 bp, Homo sapiens
gagcactgtgtaaactcagaa

SEQ ID NO: 68526 - DNA, 20 bp, Homo sapiens
gaagcctgttcttttcccaa

SEQ ID NO: 68527 - DNA, 20 bp, Homo sapiens
acttaaatgttgaaggtggt

SEQ ID NO: 68528 - DNA, 22 bp, Homo sapiens
ttcacaggaacatcagaaaaag

SEQ ID NO: 68529 - DNA, 21 bp, Homo sapiens
ctctctcaatttcaacaagac

SEQ ID NO: 68530 - DNA, 23 bp, Homo sapiens
tgcttctgtttcaaagtagtttt

SEQ ID NO: 68531 - DNA, 21 bp, Homo sapiens
gagaacattcatgttttggga

SEQ ID NO: 68532 - DNA, 20 bp, Homo sapiens
ggcagtttagaatctgtcag

SEQ ID NO: 68533 - DNA, 21 bp, Homo sapiens
ggtaaaactgaaactttttct

SEQ ID NO: 68534 - DNA, 18 bp, Homo sapiens
tgacaaaaccatttcctc

SEQ ID NO: 68535 - DNA, 23 bp, Homo sapiens
acttactccaaagattcagaaaa

SEQ ID NO: 68536 - DNA, 24 bp, Homo sapiens
aggtaaaaatgaacacttacccac

SEQ ID NO: 68537 - DNA, 23 bp, Homo sapiens
agcttttatggaagatgatgaac

SEQ ID NO: 68538 - DNA, 21 bp, Homo sapiens
gttagcataccaagtctactg

SEQ ID NO: 68539 - DNA, 21 bp, Homo sapiens
acatgtcccgaaaatgaggaa

SEQ ID NO: 68540 - DNA, 19 bp, Homo sapiens
actcccccaaactgactac

SEQ ID NO: 68541 - DNA, 21 bp, Homo sapiens
gagagccccttatcttagtgg

SEQ ID NO: 68542 - DNA, 20 bp, Homo sapiens
agtttcttttgattgagggt

SEQ ID NO: 68543 - DNA, 20 bp, Homo sapiens
ggtcactatttgttgtaagt

SEQ ID NO: 68544 - DNA, 21 bp, Homo sapiens
gtgctttttgaagcctttaag

SEQ ID NO: 68545 - DNA, 26 bp, Homo sapiens
aaaaaaatggtctatagacttttgag

SEQ ID NO: 68546 - DNA, 23 bp, Homo sapiens
taccatacctatagagggagaac

SEQ ID NO: 68547 - DNA, 18 bp, Homo sapiens
tgtctgtaatcccagcac

SEQ ID NO: 68548 - DNA, 24 bp, Homo sapiens
acaggataatagaaaatcaagaaa

SEQ ID NO: 68549 - DNA, 21 bp, Homo sapiens
gctcttttaggtcctcagtaa

SEQ ID NO: 68550 - DNA, 20 bp, Homo sapiens
cttcgatcttttattgtgcc

SEQ ID NO: 68551 - DNA, 20 bp, Homo sapiens
gttaacatttattgagcatc

SEQ ID NO: 68552 - DNA, 20 bp, Homo sapiens
tgtcttaccgaaagggtaca

SEQ ID NO: 68553 - DNA, 24 bp, Homo sapiens
aattttttgtgtatttacagtaac

SEQ ID NO: 68554 - DNA, 20 bp, Homo sapiens
tcatttataaaaacgagact

SEQ ID NO: 68555 - DNA, 20 bp, Homo sapiens
aaaataattgtttcctaggc

SEQ ID NO: 68556 - DNA, 21 bp, Homo sapiens
aaattttataaaacgggaagt

SEQ ID NO: 68557 - DNA, 18 bp, Homo sapiens
agagccgattacctgtgt

SEQ ID NO: 68558 - DNA, 18 bp, Homo sapiens
cttagttgtgctgcaatg

SEQ ID NO: 68559 - DNA, 20 bp, Homo sapiens
ttttggaatggcaaccatgg

SEQ ID NO: 68560 - DNA, 25 bp, Homo sapiens
tgagatttagacagaaattcttgac

SEQ ID NO: 68561 - DNA, 21 bp, Homo sapiens
tagcaaatgagggtctgcaac

SEQ ID NO: 68562 - DNA, 18 bp, Homo sapiens
tggatgtcctgaaactgc

SEQ ID NO: 68563 - DNA, 19 bp, Homo sapiens
tatattttctccccattgc

SEQ ID NO: 68564 - DNA, 22 bp, Homo sapiens
tgcctgtagtaatcaagtgtct

SEQ ID NO: 68565 - DNA, 23 bp, Homo sapiens
atccaaattttaccgcacctggt

SEQ ID NO: 68566 - DNA, 21 bp, Homo sapiens
cactgttcaactctgtgaaaa

SEQ ID NO: 68567 - DNA, 21 bp, Homo sapiens
actttggaaaaatcttcaagc

SEQ ID NO: 68568 - DNA, 19 bp, Homo sapiens
gtccatcaatgttttgctt

SEQ ID NO: 68569 - DNA, 25 bp, Homo sapiens
aagaaatgaaaaaatgagacacttg

SEQ ID NO: 68570 - DNA, 24 bp, Homo sapiens
agttgtttttgttaaactgatgaa

SEQ ID NO: 68571 - DNA, 24 bp, Homo sapiens
tgttccaccttttaaaactaaatc

SEQ ID NO: 68572 - DNA, 22 bp, Homo sapiens
caatacctaaaggttcttcttc

SEQ ID NO: 68573 - DNA, 21 bp, Homo sapiens
tggaggaaaacagacaaaagc

SEQ ID NO: 68574 - DNA, 24 bp, Homo sapiens
atcaggacattatttaacaacgga

SEQ ID NO: 68575 - DNA, 23 bp, Homo sapiens
aagattaatgacaatgagattca

SEQ ID NO: 68576 - DNA, 22 bp, Homo sapiens
tctaaaacattaaaaagggctt

SEQ ID NO: 68577 - DNA, 21 bp, Homo sapiens
agctgtaactttcacaaagtg

SEQ ID NO: 68578 - DNA, 22 bp, Homo sapiens
ggcattctgaagacttgtaatt

SEQ ID NO: 68579 - DNA, 20 bp, Homo sapiens
actcccgacctcagatgatc

SEQ ID NO: 68580 - DNA, 18 bp, Homo sapiens
gtgagccactgtgcctgg

SEQ ID NO: 68581 - DNA, 18 bp, Homo sapiens
ttcagagagattcgaggc

SEQ ID NO: 68582 - DNA, 24 bp, Homo sapiens
tgctaagtatttattctttgatag

SEQ ID NO: 68583 - DNA, 22 bp, Homo sapiens
ttgtagacaaacacatacctgt

SEQ ID NO: 68584 - DNA, 23 bp, Homo sapiens
caggatatgcgaattaagaagaa

SEQ ID NO: 68585 - DNA, 21 bp, Homo sapiens
agccatttgtagatactagtt

SEQ ID NO: 68586 - DNA, 20 bp, Homo sapiens
tgcaaaaacatccactctgc

SEQ ID NO: 68587 - DNA, 24 bp, Homo sapiens
ggctaattagaaaatatgatgatt

SEQ ID NO: 68588 - DNA, 24 bp, Homo sapiens
ctctgcgtgttctcataaacaggt

SEQ ID NO: 68589 - DNA, 18 bp, Homo sapiens
acgccatacgtatacagc

SEQ ID NO: 68590 - DNA, 26 bp, Homo sapiens
ataacttaaatgtttttgtagtgaag

SEQ ID NO: 68591 - DNA, 20 bp, Homo sapiens
cagtgtgaaactgaaaagac

SEQ ID NO: 68592 - DNA, 23 bp, Homo sapiens
cagttttggtttgttataattgt

SEQ ID NO: 68593 - DNA, 19 bp, Homo sapiens
tccaccatcagccaactgt

SEQ ID NO: 68594 - DNA, 21 bp, Homo sapiens
ttgtgtgtgtttattttgtgt

SEQ ID NO: 68595 - DNA, 24 bp, Homo sapiens
ttgcatagagtacctataaaattc

SEQ ID NO: 68596 - DNA, 18 bp, Homo sapiens
cagcaaaaatgcagagtc

SEQ ID NO: 68597 - DNA, 23 bp, Homo sapiens
ttaagagaagaaagagggatgag

SEQ ID NO: 68598 - DNA, 22 bp, Homo sapiens
aaagtttatggactggaaaagg

SEQ ID NO: 68599 - DNA, 23 bp, Homo sapiens
gcacttaaaacaattaaatgcat

SEQ ID NO: 68600 - DNA, 20 bp, Homo sapiens
tggaaaggctggaaaagaag

SEQ ID NO: 68601 - DNA, 18 bp, Homo sapiens
cccaggacaaacagcact

SEQ ID NO: 68602 - DNA, 21 bp, Homo sapiens
atcagtatgatactttgatac

SEQ ID NO: 68603 - DNA, 16 bp, Homo sapiens
ggatccacacctggag

SEQ ID NO: 68604 - DNA, 27 bp, Homo sapiens
atatgaactcataaaaacttaatgatc

SEQ ID NO: 68605 - DNA, 20 bp, Homo sapiens
tccatagctgccagtttcca

SEQ ID NO: 68606 - DNA, 25 bp, Homo sapiens
tgtagttgttgaattcagtatcatc

SEQ ID NO: 68607 - DNA, 16 bp, Homo sapiens
gcaccctttctgggct

SEQ ID NO: 68608 - DNA, 21 bp, Homo sapiens
tgttcagggctctgtgtgaca

SEQ ID NO: 68609 - DNA, 23 bp, Homo sapiens
accatactgccgtatatgattac

SEQ ID NO: 68610 - DNA, 24 bp, Homo sapiens
gggtttataatcactatagatgga

SEQ ID NO: 68611 - DNA, 17 bp, Homo sapiens
aactggcttgtgcaaca

SEQ ID NO: 68612 - DNA, 24 bp, Homo sapiens
ctaaggaatttgctaatagatgcc

SEQ ID NO: 68613 - DNA, 18 bp, Homo sapiens
tcttaaatgggggctagg

SEQ ID NO: 68614 - DNA, 22 bp, Homo sapiens
ttttgctttttaaaaataattg

SEQ ID NO: 68615 - DNA, 17 bp, Homo sapiens
agccgatcttctgcttc

SEQ ID NO: 68616 - DNA, 23 bp, Homo sapiens
tttaattctcagtatttcttaga

SEQ ID NO: 68617 - DNA, 19 bp, Homo sapiens
tgtcagaaacacagagaac

SEQ ID NO: 68618 - DNA, 21 bp, Homo sapiens
aacagtggaattctagagtca

SEQ ID NO: 68619 - DNA, 22 bp, Homo sapiens
ttgggtatctgcactactagtt

SEQ ID NO: 68620 - DNA, 22 bp, Homo sapiens
tagatatgatacggaaattgat

SEQ ID NO: 68621 - DNA, 20 bp, Homo sapiens
actgggccttaacagcatac

SEQ ID NO: 68622 - DNA, 22 bp, Homo sapiens
gggatgacacagctgcaaaaac

SEQ ID NO: 68623 - DNA, 19 bp, Homo sapiens
aatcttctgaccaactgtc

SEQ ID NO: 68624 - DNA, 24 bp, Homo sapiens
cgcaaatatatctgaaacttctag

SEQ ID NO: 68625 - DNA, 17 bp, Homo sapiens
ggggcttcaagaggtgt

SEQ ID NO: 68626 - DNA, 20 bp, Homo sapiens
cttacagatgggtggtatgc

SEQ ID NO: 68627 - DNA, 22 bp, Homo sapiens
actgaatcaatgactgattttt

SEQ ID NO: 68628 - DNA, 20 bp, Homo sapiens
gctgtcttaaagaatggcag

SEQ ID NO: 68629 - DNA, 24 bp, Homo sapiens
agtacatctaagaaattgagcatc

SEQ ID NO: 68630 - DNA, 18 bp, Homo sapiens
tcctgatgcctgtacacc

SEQ ID NO: 68631 - DNA, 22 bp, Homo sapiens
aactgcacaaaaactttaactg

SEQ ID NO: 68632 - DNA, 18 bp, Homo sapiens
agcagaaatctggacaaa

SEQ ID NO: 68633 - DNA, 24 bp, Homo sapiens
tacttatttactgtcttactaatc

SEQ ID NO: 68634 - DNA, 18 bp, Homo sapiens
aggtctagggtcaggaaa

SEQ ID NO: 68635 - DNA, 27 bp, Homo sapiens
agttctagaagaatgaaaactcttatg

SEQ ID NO: 68636 - DNA, 17 bp, Homo sapiens
acatcaacacaaccaac

SEQ ID NO: 68637 - DNA, 28 bp, Homo sapiens
aaatcaatatatttattaatttgtccag

SEQ ID NO: 68638 - DNA, 24 bp, Homo sapiens
atcaaaagaaagaaatatatggta

SEQ ID NO: 68639 - DNA, 20 bp, Homo sapiens
ccaaacttggattctttcct

SEQ ID NO: 68640 - DNA, 17 bp, Homo sapiens
ggcaagagaccgaaact

SEQ ID NO: 68641 - DNA, 24 bp, Homo sapiens
tcgcttttcagtgatggaggaaat

SEQ ID NO: 68642 - DNA, 22 bp, Homo sapiens
atacaggtatgatgtattcttg

SEQ ID NO: 68643 - DNA, 24 bp, Homo sapiens
catccactgtaataatgtgttaca

SEQ ID NO: 68644 - DNA, 18 bp, Homo sapiens
ttggtcaggctgatctcg

SEQ ID NO: 68645 - DNA, 19 bp, Homo sapiens
tcttcctctctttcattgc

SEQ ID NO: 68646 - DNA, 23 bp, Homo sapiens
aaagttctgggattacagatgtg

SEQ ID NO: 68647 - DNA, 20 bp, Homo sapiens
attttagtgaataaggcttc

SEQ ID NO: 68648 - DNA, 19 bp, Homo sapiens
tgtgacttttttggtgtgt

SEQ ID NO: 68649 - DNA, 23 bp, Homo sapiens
attagaaataacaatgtgtacca

SEQ ID NO: 68650 - DNA, 21 bp, Homo sapiens
tctggattatacatatttcgc

SEQ ID NO: 68651 - DNA, 22 bp, Homo sapiens
aaaaacaatttactcattaaaa

SEQ ID NO: 68652 - DNA, 18 bp, Homo sapiens
aggcccaacaaaagagac

SEQ ID NO: 68653 - DNA, 20 bp, Homo sapiens
acaccaaaaaagaataccct

SEQ ID NO: 68654 - DNA, 22 bp, Homo sapiens
gaacatgaaggtaaaattagtt

SEQ ID NO: 68655 - DNA, 20 bp, Homo sapiens
tgcactcccagattgggtga

SEQ ID NO: 68656 - DNA, 21 bp, Homo sapiens
acgtgatggtaaatatggttt

SEQ ID NO: 68657 - DNA, 24 bp, Homo sapiens
aaaacttttagcagttatatagtt

SEQ ID NO: 68658 - DNA, 19 bp, Homo sapiens
ctgcttcataaagctctgc

SEQ ID NO: 68659 - DNA, 24 bp, Homo sapiens
tgcttggttctttagttttagttg

SEQ ID NO: 68660 - DNA, 22 bp, Homo sapiens
tcaagcctcattatatgtcctc

SEQ ID NO: 68661 - DNA, 22 bp, Homo sapiens
tcttagaaaacacaacaaaacc

SEQ ID NO: 68662 - DNA, 16 bp, Homo sapiens
ccttcctgtgatggcc

SEQ ID NO: 68663 - DNA, 22 bp, Homo sapiens
gttcgtgctttgcaagatggtg

SEQ ID NO: 68664 - DNA, 19 bp, Homo sapiens
acatcactgaaaatcccag

SEQ ID NO: 68665 - DNA, 23 bp, Homo sapiens
cagcttaccttgaggtgagagag

SEQ ID NO: 68666 - DNA, 23 bp, Homo sapiens
tgctcttcactgaaataaccctg

SEQ ID NO: 68667 - DNA, 20 bp, Homo sapiens
tgtgagaaactgattacatt

SEQ ID NO: 68668 - DNA, 23 bp, Homo sapiens
tgagcttgtttcttatcattcaa

SEQ ID NO: 68669 - DNA, 22 bp, Homo sapiens
gtatttgtcctgtttaaagcca

SEQ ID NO: 68670 - DNA, 22 bp, Homo sapiens
catcccttgataaaccttgttc

SEQ ID NO: 68671 - DNA, 24 bp, Homo sapiens
ttattccaatatcttaaatggtca

SEQ ID NO: 68672 - DNA, 23 bp, Homo sapiens
atctttttctttttttgaatagc

SEQ ID NO: 68673 - DNA, 22 bp, Homo sapiens
gaataatcacaggcaaatgttg

SEQ ID NO: 68674 - DNA, 21 bp, Homo sapiens
agtaaggtcattttttaagtt

SEQ ID NO: 68675 - DNA, 17 bp, Homo sapiens
ggccatggaatctgctg

SEQ ID NO: 68676 - DNA, 24 bp, Homo sapiens
gtggattttgcttctctgatataa

SEQ ID NO: 68677 - DNA, 23 bp, Homo sapiens
ccgtgtggaagttgcgtattgta

SEQ ID NO: 68678 - DNA, 27 bp, Homo sapiens
tttgtttcaaaataaatacagatcctc

SEQ ID NO: 68679 - DNA, 23 bp, Homo sapiens
tccagataaagtataaagttagt

SEQ ID NO: 68680 - DNA, 21 bp, Homo sapiens
tctttccttctgttaacagag

SEQ ID NO: 68681 - DNA, 26 bp, Homo sapiens
cccacaaagagataatataaaagagg

SEQ ID NO: 68682 - DNA, 24 bp, Homo sapiens
ctaactgtatgttagctctttcag

SEQ ID NO: 68683 - DNA, 20 bp, Homo sapiens
tcacttcttccattgcatct

SEQ ID NO: 68684 - DNA, 18 bp, Homo sapiens
tgaaaggtttgtaccggt

SEQ ID NO: 68685 - DNA, 23 bp, Homo sapiens
ggcgtccatcatcagatttatat

SEQ ID NO: 68686 - DNA, 20 bp, Homo sapiens
aattcaacatatggagattc

SEQ ID NO: 68687 - DNA, 22 bp, Homo sapiens
tgcaacttcaaaatctaaaagt

SEQ ID NO: 68688 - DNA, 18 bp, Homo sapiens
ccgtggctggtaaatctg

SEQ ID NO: 68689 - DNA, 20 bp, Homo sapiens
actcagtatcaacaactacc

SEQ ID NO: 68690 - DNA, 19 bp, Homo sapiens
ccacctcagaacaagatgg

SEQ ID NO: 68691 - DNA, 22 bp, Homo sapiens
agtgcttgttagtttatggaat

SEQ ID NO: 68692 - DNA, 29 bp, Homo sapiens
aaaaaaaattaactatattgtgcattacc

SEQ ID NO: 68693 - DNA, 24 bp, Homo sapiens
gtttcagatgaaattttatttcag

SEQ ID NO: 68694 - DNA, 23 bp, Homo sapiens
gtagctccaactaatcataagag

SEQ ID NO: 68695 - DNA, 21 bp, Homo sapiens
tagatccagactttcagccat

SEQ ID NO: 68696 - DNA, 16 bp, Homo sapiens
gttcaaagaggcttac

SEQ ID NO: 68697 - DNA, 24 bp, Homo sapiens
ctgttgtgaaaaaaacaggtaatg

SEQ ID NO: 68698 - DNA, 20 bp, Homo sapiens
gaaattttagcactgtaagc

SEQ ID NO: 68699 - DNA, 19 bp, Homo sapiens
gacaaatagacgaaagggg

SEQ ID NO: 68700 - DNA, 24 bp, Homo sapiens
gccaaattcagctattttgatttg

SEQ ID NO: 68701 - DNA, 24 bp, Homo sapiens
cttaataatgtcctcattaaggtc

SEQ ID NO: 68702 - DNA, 22 bp, Homo sapiens
agagtttcctttcttgcatctt

SEQ ID NO: 68703 - DNA, 19 bp, Homo sapiens
aggcctgatttggattctg

SEQ ID NO: 68704 - DNA, 20 bp, Homo sapiens
tttccattctaggacttgcc

SEQ ID NO: 68705 - DNA, 18 bp, Homo sapiens
ggccctcttttggactag

SEQ ID NO: 68706 - DNA, 23 bp, Homo sapiens
actggcaataaagttttggatag

SEQ ID NO: 68707 - DNA, 20 bp, Homo sapiens
ggtgatgctgaaaagtaacc

SEQ ID NO: 68708 - DNA, 18 bp, Homo sapiens
caagcaacctccagtggc

SEQ ID NO: 68709 - DNA, 23 bp, Homo sapiens
ttgtataaaagctatttccttga

SEQ ID NO: 68710 - DNA, 20 bp, Homo sapiens
ttctgtgttttctgctagtc

SEQ ID NO: 68711 - DNA, 19 bp, Homo sapiens
aggttcatgggcaattaat

SEQ ID NO: 68712 - DNA, 21 bp, Homo sapiens
aaaatactgttgaggtaaggt

SEQ ID NO: 68713 - DNA, 21 bp, Homo sapiens
gcttcattgcaaagtatgtca

SEQ ID NO: 68714 - DNA, 19 bp, Homo sapiens
ttggtatcacatttagggt

SEQ ID NO: 68715 - DNA, 16 bp, Homo sapiens
gggtggaccacttggg

SEQ ID NO: 68716 - DNA, 24 bp, Homo sapiens
tgcttttaaaggaaatacttttgg

SEQ ID NO: 68717 - DNA, 20 bp, Homo sapiens
agcttgtttcctgtaccagg

SEQ ID NO: 68718 - DNA, 22 bp, Homo sapiens
gcttttccacttattttcttag

SEQ ID NO: 68719 - DNA, 18 bp, Homo sapiens
acgatggcctccatatat

SEQ ID NO: 68720 - DNA, 20 bp, Homo sapiens
tactgcatgcaaatgatccc

SEQ ID NO: 68721 - DNA, 22 bp, Homo sapiens
accacattttctaattaagttt

SEQ ID NO: 68722 - DNA, 23 bp, Homo sapiens
ggccgtacactgctcaaatcatt

SEQ ID NO: 68723 - DNA, 22 bp, Homo sapiens
ccagagtttcatatcttgcttc

SEQ ID NO: 68724 - DNA, 23 bp, Homo sapiens
tctcacaattaggagaagacatc

SEQ ID NO: 68725 - DNA, 19 bp, Homo sapiens
cctattaggagttagggga

SEQ ID NO: 68726 - DNA, 19 bp, Homo sapiens
tgtggaaacagacttcctt

SEQ ID NO: 68727 - DNA, 21 bp, Homo sapiens
ttcaatgaaaagttactttga

SEQ ID NO: 68728 - DNA, 23 bp, Homo sapiens
cagttcttttggtcatcaatctc

SEQ ID NO: 68729 - DNA, 24 bp, Homo sapiens
ggctacgttttcatttttttatca

SEQ ID NO: 68730 - DNA, 18 bp, Homo sapiens
ggtggaggtaaaggcagt

SEQ ID NO: 68731 - DNA, 23 bp, Homo sapiens
tatcactttgtatggccaaaagg

SEQ ID NO: 68732 - DNA, 17 bp, Homo sapiens
cttggtggctgaaatgc

SEQ ID NO: 68733 - DNA, 21 bp, Homo sapiens
aagtcttgtaaaggggagaaa

SEQ ID NO: 68734 - DNA, 21 bp, Homo sapiens
gtcatctgaggagaattcagt

SEQ ID NO: 68735 - DNA, 21 bp, Homo sapiens
tggatttcttgagtagactgc

SEQ ID NO: 68736 - DNA, 23 bp, Homo sapiens
gcaagttcttcgtcagctattga

SEQ ID NO: 68737 - DNA, 21 bp, Homo sapiens
tgtttctccggctgcacagaa

SEQ ID NO: 68738 - DNA, 24 bp, Homo sapiens
cagatataaattgtttttctcctg

SEQ ID NO: 68739 - DNA, 24 bp, Homo sapiens
acacccataaagaaaaaagaactg

SEQ ID NO: 68740 - DNA, 24 bp, Homo sapiens
gtttcagtctgagataatcttctg

SEQ ID NO: 68741 - DNA, 22 bp, Homo sapiens
tgaaatttctcttttggaaagt

SEQ ID NO: 68742 - DNA, 16 bp, Homo sapiens
tccgtactggcctggg

SEQ ID NO: 68743 - DNA, 24 bp, Homo sapiens
tacccaagctcttttgtctggttc

SEQ ID NO: 68744 - DNA, 21 bp, Homo sapiens
gtcgcctttgcaaatgcttag

SEQ ID NO: 68745 - DNA, 21 bp, Homo sapiens
taggactgctcccaccagttc

SEQ ID NO: 68746 - DNA, 24 bp, Homo sapiens
ggtttgaaattatattccagtctt

SEQ ID NO: 68747 - DNA, 21 bp, Homo sapiens
tcaaagaacaggagagttccc

SEQ ID NO: 68748 - DNA, 20 bp, Homo sapiens
gctgaggtaaatttgaaact

SEQ ID NO: 68749 - DNA, 22 bp, Homo sapiens
ttacaactaaaaaatatatcta

SEQ ID NO: 68750 - DNA, 18 bp, Homo sapiens
gggttttgggcggcatga

SEQ ID NO: 68751 - DNA, 21 bp, Homo sapiens
cgtccggtttttctcagggga

SEQ ID NO: 68752 - DNA, 16 bp, Homo sapiens
ggcggcggtgccgggg

SEQ ID NO: 68753 - DNA, 23 bp, Homo sapiens
ggacggggcgtgccccgacgtgc

SEQ ID NO: 68754 - DNA, 17 bp, Homo sapiens
cctgacgagaggcaggt

SEQ ID NO: 68755 - DNA, 17 bp, Homo sapiens
gcggaaaggcgtcatgc

SEQ ID NO: 68756 - DNA, 16 bp, Homo sapiens
ccgccctacgcacacc

SEQ ID NO: 68757 - DNA, 22 bp, Homo sapiens
gccgccgctgccgccgcggaac

SEQ ID NO: 68758 - DNA, 17 bp, Homo sapiens
gcctcctcccgccggga

SEQ ID NO: 68759 - DNA, 17 bp, Homo sapiens
gacagcggcccggagga

SEQ ID NO: 68760 - DNA, 20 bp, Homo sapiens
tcttcaaactcaagcctacc

SEQ ID NO: 68761 - DNA, 22 bp, Homo sapiens
tgtttttctaagataaaataag

SEQ ID NO: 68762 - DNA, 22 bp, Homo sapiens
ctctctgacatgatctggtatc

SEQ ID NO: 68763 - DNA, 22 bp, Homo sapiens
agtgttatgtgcaaactattga

SEQ ID NO: 68764 - DNA, 21 bp, Homo sapiens
ttaccaatactccatccacag

SEQ ID NO: 68765 - DNA, 25 bp, Homo sapiens
atatgccaattatatgattattttc

SEQ ID NO: 68766 - DNA, 20 bp, Homo sapiens
agtgatttgaagttgttttt

SEQ ID NO: 68767 - DNA, 20 bp, Homo sapiens
attttactgcattatgtcag

SEQ ID NO: 68768 - DNA, 23 bp, Homo sapiens
ctctgggtaatggaattattatt

SEQ ID NO: 68769 - DNA, 21 bp, Homo sapiens
gggagaaagtttcatctgtgg

SEQ ID NO: 68770 - DNA, 22 bp, Homo sapiens
ccccacagttcctttttctttt

SEQ ID NO: 68771 - DNA, 22 bp, Homo sapiens
caaatatacagtattacaaaca

SEQ ID NO: 68772 - DNA, 19 bp, Homo sapiens
aaagtgaacgacatctcat

SEQ ID NO: 68773 - DNA, 21 bp, Homo sapiens
agttttaacatagtatccagt

SEQ ID NO: 68774 - DNA, 24 bp, Homo sapiens
cttttatggcagaggcttatattt

SEQ ID NO: 68775 - DNA, 20 bp, Homo sapiens
tgttcccagggaggttatat

SEQ ID NO: 68776 - DNA, 23 bp, Homo sapiens
agcatttctcactaattcacaaa

SEQ ID NO: 68777 - DNA, 20 bp, Homo sapiens
agcagttgacctagatgaga

SEQ ID NO: 68778 - DNA, 18 bp, Homo sapiens
agagaatggcagttcact

SEQ ID NO: 68779 - DNA, 20 bp, Homo sapiens
tgcaaaaagtaattccttcc

SEQ ID NO: 68780 - DNA, 22 bp, Homo sapiens
aacagtcttgacatagcattat

SEQ ID NO: 68781 - DNA, 25 bp, Homo sapiens
aatcttttgaattgaaatatctatg

SEQ ID NO: 68782 - DNA, 20 bp, Homo sapiens
actttacctttccaatttgc

SEQ ID NO: 68783 - DNA, 22 bp, Homo sapiens
tttacttttttctattctttcc

SEQ ID NO: 68784 - DNA, 24 bp, Homo sapiens
aattcccagaatctaattgtgaac

SEQ ID NO: 68785 - DNA, 23 bp, Homo sapiens
aattgataccagtaccaaagttg

SEQ ID NO: 68786 - DNA, 21 bp, Homo sapiens
aacattaaaagggacaagtct

SEQ ID NO: 68787 - DNA, 22 bp, Homo sapiens
tgatgtattgtttgcactcttc

SEQ ID NO: 68788 - DNA, 19 bp, Homo sapiens
tgctgggttgtgtcaaata

SEQ ID NO: 68789 - DNA, 25 bp, Homo sapiens
gttttataatgctatatattttttg

SEQ ID NO: 68790 - DNA, 27 bp, Homo sapiens
attattccataaaaatcttttttttta

SEQ ID NO: 68791 - DNA, 24 bp, Homo sapiens
aaagcatgagaaaactactatgac

SEQ ID NO: 68792 - DNA, 22 bp, Homo sapiens
gggcttaatttatgaagtagcc

SEQ ID NO: 68793 - DNA, 22 bp, Homo sapiens
cttttcaggacatgtgaactta

SEQ ID NO: 68794 - DNA, 20 bp, Homo sapiens
actattttctttgtgagaag

SEQ ID NO: 68795 - DNA, 22 bp, Homo sapiens
tgcaattaaaatggactgcatt

SEQ ID NO: 68796 - DNA, 28 bp, Homo sapiens
cttacctttagctaataaaaatgtgatc

SEQ ID NO: 68797 - DNA, 22 bp, Homo sapiens
cacaaaaagaaacacccaaaag

SEQ ID NO: 68798 - DNA, 24 bp, Homo sapiens
tccaaaggaatgccaatttaatta

SEQ ID NO: 68799 - DNA, 23 bp, Homo sapiens
tttcctgttttttttctgctttc

SEQ ID NO: 68800 - DNA, 18 bp, Homo sapiens
ccaagcagagaatgaggg

SEQ ID NO: 68801 - DNA, 21 bp, Homo sapiens
tggtgctaaaagtttcttgga

SEQ ID NO: 68802 - DNA, 21 bp, Homo sapiens
caccagatcatcttccatttg

SEQ ID NO: 68803 - DNA, 21 bp, Homo sapiens
agaaaatctttaccatgctga

SEQ ID NO: 68804 - DNA, 18 bp, Homo sapiens
acatgggaggtgagagtt

SEQ ID NO: 68805 - DNA, 19 bp, Homo sapiens
actctaccctgcgattttc

SEQ ID NO: 68806 - DNA, 20 bp, Homo sapiens
tgagaaagtaaaaggggcat

SEQ ID NO: 68807 - DNA, 20 bp, Homo sapiens
tttttcaggggaagtattac

SEQ ID NO: 68808 - DNA, 18 bp, Homo sapiens
cctgtcagccttagaacc

SEQ ID NO: 68809 - DNA, 20 bp, Homo sapiens
tgctatgtgtccttgactat

SEQ ID NO: 68810 - DNA, 23 bp, Homo sapiens
tgtcttatctttccttctataac

SEQ ID NO: 68811 - DNA, 24 bp, Homo sapiens
tggatgaaattgttatccttctaa

SEQ ID NO: 68812 - DNA, 17 bp, Homo sapiens
atccgtgcactcctgtt

SEQ ID NO: 68813 - DNA, 25 bp, Homo sapiens
ttaccaagattatttttgacctaag

SEQ ID NO: 68814 - DNA, 24 bp, Homo sapiens
attacattcatgttctttacagag

SEQ ID NO: 68815 - DNA, 25 bp, Homo sapiens
caattgttcttatctaatttaccac

SEQ ID NO: 68816 - DNA, 23 bp, Homo sapiens
catctaaatctactttaactgtt

SEQ ID NO: 68817 - DNA, 19 bp, Homo sapiens
acctcgaacacccaggcga

SEQ ID NO: 68818 - DNA, 22 bp, Homo sapiens
aattacaaaaaaaacatgctca

SEQ ID NO: 68819 - DNA, 28 bp, Homo sapiens
aaatgatacaagaattattgaagttctc

SEQ ID NO: 68820 - DNA, 25 bp, Homo sapiens
aactaaatataacgaattaattttt

SEQ ID NO: 68821 - DNA, 29 bp, Homo sapiens
ccttctctaagaaaataataaaaaataaa

SEQ ID NO: 68822 - DNA, 23 bp, Homo sapiens
ctggaagtccattagatgttaca

SEQ ID NO: 68823 - DNA, 20 bp, Homo sapiens
gacacctctaacttaccctg

SEQ ID NO: 68824 - DNA, 19 bp, Homo sapiens
cctccacagtctcaaaaca

SEQ ID NO: 68825 - DNA, 19 bp, Homo sapiens
tgatcatgttgtaacttca

SEQ ID NO: 68826 - DNA, 20 bp, Homo sapiens
gggcaaaaaaaaaatgtgat

SEQ ID NO: 68827 - DNA, 22 bp, Homo sapiens
accttttatgaattctcttgga

SEQ ID NO: 68828 - DNA, 24 bp, Homo sapiens
tcaaaagctttttgttactataca

SEQ ID NO: 68829 - DNA, 21 bp, Homo sapiens
tcgtttagaaagattttcaac

SEQ ID NO: 68830 - DNA, 17 bp, Homo sapiens
tgcatgcgaactcagtg

SEQ ID NO: 68831 - DNA, 27 bp, Homo sapiens
agagttttatcatgatccaaaaataat

SEQ ID NO: 68832 - DNA, 16 bp, Homo sapiens
tctgtgcctctgtgtg

SEQ ID NO: 68833 - DNA, 21 bp, Homo sapiens
agcaaatcaatcaaatatacc

SEQ ID NO: 68834 - DNA, 23 bp, Homo sapiens
tcagtgacttttttctttcaagg

SEQ ID NO: 68835 - DNA, 19 bp, Homo sapiens
aggtcactaagctaaagac

SEQ ID NO: 68836 - DNA, 19 bp, Homo sapiens
aagatctagatgcaagatt

SEQ ID NO: 68837 - DNA, 20 bp, Homo sapiens
actgttaaacttttctttgt

SEQ ID NO: 68838 - DNA, 19 bp, Homo sapiens
tggtgttctctgtgtttca

SEQ ID NO: 68839 - DNA, 22 bp, Homo sapiens
ttctatcctatctattattgag

SEQ ID NO: 68840 - DNA, 22 bp, Homo sapiens
attcatacctaactggagtgtg

SEQ ID NO: 68841 - DNA, 19 bp, Homo sapiens
tatactgcttttttgatgc

SEQ ID NO: 68842 - DNA, 19 bp, Homo sapiens
tctgaaacactataaagcc

SEQ ID NO: 68843 - DNA, 28 bp, Homo sapiens
tgacttcacttattgttatttagttttg

SEQ ID NO: 68844 - DNA, 20 bp, Homo sapiens
acacctggccttcaatatat

SEQ ID NO: 68845 - DNA, 22 bp, Homo sapiens
tcatcattaattgttggatagt

SEQ ID NO: 68846 - DNA, 23 bp, Homo sapiens
aatgtagagacaagtgggaggca

SEQ ID NO: 68847 - DNA, 20 bp, Homo sapiens
tggcttacgttaaaatagga

SEQ ID NO: 68848 - DNA, 24 bp, Homo sapiens
tttcattttttctttttttctccc

SEQ ID NO: 68849 - DNA, 22 bp, Homo sapiens
tttaacttttaatttcaagttt

SEQ ID NO: 68850 - DNA, 24 bp, Homo sapiens
tctaggactgttatgaacactatc

SEQ ID NO: 68851 - DNA, 27 bp, Homo sapiens
caagaaaagattatggataactacatg

SEQ ID NO: 68852 - DNA, 23 bp, Homo sapiens
aaccttcagaaaatctgatttcc

SEQ ID NO: 68853 - DNA, 19 bp, Homo sapiens
ggattcactgtgcagttct

SEQ ID NO: 68854 - DNA, 21 bp, Homo sapiens
cagtagttgtggttacctagt

SEQ ID NO: 68855 - DNA, 21 bp, Homo sapiens
agctttagcaaatttctcttt

SEQ ID NO: 68856 - DNA, 24 bp, Homo sapiens
aaaaagtcatatattatggagcag

SEQ ID NO: 68857 - DNA, 24 bp, Homo sapiens
accacgaattacaatgaattcaag

SEQ ID NO: 68858 - DNA, 19 bp, Homo sapiens
tttttacctcctaaagaac

SEQ ID NO: 68859 - DNA, 21 bp, Homo sapiens
gagtatttatacgaactggaa

SEQ ID NO: 68860 - DNA, 25 bp, Homo sapiens
aagagtgaaggatataggatacatc

SEQ ID NO: 68861 - DNA, 18 bp, Homo sapiens
caggcagcagggatatag

SEQ ID NO: 68862 - DNA, 21 bp, Homo sapiens
tgtcgaaattggatcacaggt

SEQ ID NO: 68863 - DNA, 21 bp, Homo sapiens
agcgaactccaagtttgtatc

SEQ ID NO: 68864 - DNA, 23 bp, Homo sapiens
ccaaagcaggaggatctcttgag

SEQ ID NO: 68865 - DNA, 24 bp, Homo sapiens
ttttatattgtttttaacttactg

SEQ ID NO: 68866 - DNA, 24 bp, Homo sapiens
tcttatttttctttttgtttgttt

SEQ ID NO: 68867 - DNA, 19 bp, Homo sapiens
gggtttcaccattttggcc

SEQ ID NO: 68868 - DNA, 23 bp, Homo sapiens
aatttacctaaaattttgaatgg

SEQ ID NO: 68869 - DNA, 16 bp, Homo sapiens
acagagcaagacacca

SEQ ID NO: 68870 - DNA, 20 bp, Homo sapiens
tgctgacacaaataaggttt

SEQ ID NO: 68871 - DNA, 21 bp, Homo sapiens
gcacgccaataaagacatatg

SEQ ID NO: 68872 - DNA, 24 bp, Homo sapiens
tgtttcaggaagaagaacgattat

SEQ ID NO: 68873 - DNA, 28 bp, Homo sapiens
aacaaaagtgtttatttatgaaaattta

SEQ ID NO: 68874 - DNA, 23 bp, Homo sapiens
ttttttctttttatagaagtaag

SEQ ID NO: 68875 - DNA, 19 bp, Homo sapiens
cctcacactatccctctcc

SEQ ID NO: 68876 - DNA, 25 bp, Homo sapiens
aaacttctgaatgacaacatttttc

SEQ ID NO: 68877 - DNA, 21 bp, Homo sapiens
tgaccaattacattcttcagt

SEQ ID NO: 68878 - DNA, 20 bp, Homo sapiens
tggccacatatagcagtaag

SEQ ID NO: 68879 - DNA, 24 bp, Homo sapiens
caagattctgagatgtacttccta

SEQ ID NO: 68880 - DNA, 22 bp, Homo sapiens
agtccgtagactccaaaataaa

SEQ ID NO: 68881 - DNA, 25 bp, Homo sapiens
aatcaaaggcttttaaattaagcac

SEQ ID NO: 68882 - DNA, 23 bp, Homo sapiens
ttctttgtctgataataacttcc

SEQ ID NO: 68883 - DNA, 18 bp, Homo sapiens
tgtcaagttgccttctgc

SEQ ID NO: 68884 - DNA, 22 bp, Homo sapiens
gttacttttttttttcattttt

SEQ ID NO: 68885 - DNA, 18 bp, Homo sapiens
ccatgcaagggattccat

SEQ ID NO: 68886 - DNA, 18 bp, Homo sapiens
tgtctttcccatggattc

SEQ ID NO: 68887 - DNA, 25 bp, Homo sapiens
tctcactaacaataatttgttagcc

SEQ ID NO: 68888 - DNA, 20 bp, Homo sapiens
cgaaagttttatcaaagcag

SEQ ID NO: 68889 - DNA, 23 bp, Homo sapiens
ataacattattcattaaattccc

SEQ ID NO: 68890 - DNA, 21 bp, Homo sapiens
aacgatgtgaacatcgaatca

SEQ ID NO: 68891 - DNA, 21 bp, Homo sapiens
gatcaaataaaggtgaatcct

SEQ ID NO: 68892 - DNA, 22 bp, Homo sapiens
aaaatatttcattctgactttt

SEQ ID NO: 68893 - DNA, 19 bp, Homo sapiens
gcagattcaaggtgatcag

SEQ ID NO: 68894 - DNA, 24 bp, Homo sapiens
agtacttaccatgtcaaacaatat

SEQ ID NO: 68895 - DNA, 23 bp, Homo sapiens
catatattttgcttacatatctg

SEQ ID NO: 68896 - DNA, 23 bp, Homo sapiens
tgtggttttaatttcatcatgtt

SEQ ID NO: 68897 - DNA, 18 bp, Homo sapiens
agaatgttacattgcact

SEQ ID NO: 68898 - DNA, 19 bp, Homo sapiens
aaggaccgagaaggaccaa

SEQ ID NO: 68899 - DNA, 23 bp, Homo sapiens
actaatttcttaaaaacagaaac

SEQ ID NO: 68900 - DNA, 16 bp, Homo sapiens
tcacactgcagcagat

SEQ ID NO: 68901 - DNA, 21 bp, Homo sapiens
tcttacaggagaaagatacct

SEQ ID NO: 68902 - DNA, 21 bp, Homo sapiens
ctttcccagcttgcatttaaa

SEQ ID NO: 68903 - DNA, 17 bp, Homo sapiens
gttgcttgtgtctctgc

SEQ ID NO: 68904 - DNA, 24 bp, Homo sapiens
atctgggtgtacaaccttgaagtg

SEQ ID NO: 68905 - DNA, 19 bp, Homo sapiens
aaaacagtgaaagagaggt

SEQ ID NO: 68906 - DNA, 28 bp, Homo sapiens
acttttcctttaaatatatctaggtatc

SEQ ID NO: 68907 - DNA, 20 bp, Homo sapiens
cccagtcagcctagtttcag

SEQ ID NO: 68908 - DNA, 21 bp, Homo sapiens
tacgcgtgtaaattctactgc

SEQ ID NO: 68909 - DNA, 21 bp, Homo sapiens
agagatattaagtgacttgcc

SEQ ID NO: 68910 - DNA, 21 bp, Homo sapiens
ccagaagccattgaaatctac

SEQ ID NO: 68911 - DNA, 20 bp, Homo sapiens
gtcaagaaagatctcgcaac

SEQ ID NO: 68912 - DNA, 21 bp, Homo sapiens
cggagataggctagccgatac

SEQ ID NO: 68913 - DNA, 21 bp, Homo sapiens
ggggaaagaaaagagtggtag

SEQ ID NO: 68914 - DNA, 18 bp, Homo sapiens
tgttctaattctgggtgc

SEQ ID NO: 68915 - DNA, 23 bp, Homo sapiens
attagagcgatttcatgatttga

SEQ ID NO: 68916 - DNA, 20 bp, Homo sapiens
atgcctgtctctcatgagtt

SEQ ID NO: 68917 - DNA, 23 bp, Homo sapiens
ctaatttttcttattcccacagt

SEQ ID NO: 68918 - DNA, 21 bp, Homo sapiens
agttaacaagtaagtagggag

SEQ ID NO: 68919 - DNA, 19 bp, Homo sapiens
gcacaccctgcagaatgag

SEQ ID NO: 68920 - DNA, 23 bp, Homo sapiens
aacagagtgagactctatctcaa

SEQ ID NO: 68921 - DNA, 21 bp, Homo sapiens
tggaacacatcataatctagt

SEQ ID NO: 68922 - DNA, 21 bp, Homo sapiens
tgtagactttcaaactgagct

SEQ ID NO: 68923 - DNA, 25 bp, Homo sapiens
cttgtatgctgttacaatgattttg

SEQ ID NO: 68924 - DNA, 22 bp, Homo sapiens
tgaggctaaaagaaagaaaatg

SEQ ID NO: 68925 - DNA, 28 bp, Homo sapiens
tcaaaaaaacttactatggaaaattacc

SEQ ID NO: 68926 - DNA, 21 bp, Homo sapiens
aattctgactacttttacatc

SEQ ID NO: 68927 - DNA, 23 bp, Homo sapiens
ctcattaatgaataaatgagatc

SEQ ID NO: 68928 - DNA, 21 bp, Homo sapiens
gcaaagtgaagaatatagacc

SEQ ID NO: 68929 - DNA, 28 bp, Homo sapiens
taatataaaagtttttatttgtgaattt

SEQ ID NO: 68930 - DNA, 18 bp, Homo sapiens
tgctgttcaggaggtagg

SEQ ID NO: 68931 - DNA, 24 bp, Homo sapiens
tttttcctttataatatgtgcttc

SEQ ID NO: 68932 - DNA, 18 bp, Homo sapiens
ctctgcatgaagaccgag

SEQ ID NO: 68933 - DNA, 27 bp, Homo sapiens
aaaagaaaatctaaaggtagaaatttt

SEQ ID NO: 68934 - DNA, 21 bp, Homo sapiens
aaggatacttttgacctaccc

SEQ ID NO: 68935 - DNA, 21 bp, Homo sapiens
tttttttttactgttcttcct

SEQ ID NO: 68936 - DNA, 23 bp, Homo sapiens
acaaaaaagtagattatttattt

SEQ ID NO: 68937 - DNA, 24 bp, Homo sapiens
gaggagtatgattctattatagta

SEQ ID NO: 68938 - DNA, 21 bp, Homo sapiens
tgtaagggcttcgaggaatgt

SEQ ID NO: 68939 - DNA, 24 bp, Homo sapiens
aatattttgcagtatgcttccacc

SEQ ID NO: 68940 - DNA, 22 bp, Homo sapiens
tggactcttcaggggtgaaata

SEQ ID NO: 68941 - DNA, 21 bp, Homo sapiens
tgtaatgggtccaccaaaaca

SEQ ID NO: 68942 - DNA, 22 bp, Homo sapiens
acacacaccttgatcttggagt

SEQ ID NO: 68943 - DNA, 22 bp, Homo sapiens
ccctaccttgtcaccaatacct

SEQ ID NO: 68944 - DNA, 22 bp, Homo sapiens
ttcttggatcaaaataatcccc

SEQ ID NO: 68945 - DNA, 19 bp, Homo sapiens
cggattcctggagggaaca

SEQ ID NO: 68946 - DNA, 21 bp, Homo sapiens
agcaaatagagtttcaagagt

SEQ ID NO: 68947 - DNA, 18 bp, Homo sapiens
aggtctgccaacaccaac

SEQ ID NO: 68948 - DNA, 19 bp, Homo sapiens
tcaccccgaatgattcacc

SEQ ID NO: 68949 - DNA, 21 bp, Homo sapiens
tggttctagggtagaggtaac

SEQ ID NO: 68950 - DNA, 25 bp, Homo sapiens
aagctttaatttcttttatacttac

SEQ ID NO: 68951 - DNA, 20 bp, Homo sapiens
tgctcatctctgcaaaattg

SEQ ID NO: 68952 - DNA, 16 bp, Homo sapiens
atgcctggatgaggtg

SEQ ID NO: 68953 - DNA, 26 bp, Homo sapiens
acttgacagaatcttagtatcaattg

SEQ ID NO: 68954 - DNA, 25 bp, Homo sapiens
taccatctgatttattttctggaac

SEQ ID NO: 68955 - DNA, 24 bp, Homo sapiens
ccaatgaagcagaaaatttaaatg

SEQ ID NO: 68956 - DNA, 17 bp, Homo sapiens
ggagggttgcttccttc

SEQ ID NO: 68957 - DNA, 22 bp, Homo sapiens
acttgaggttgctaactatgaa

SEQ ID NO: 68958 - DNA, 19 bp, Homo sapiens
cctaccttccatctgcttc

SEQ ID NO: 68959 - DNA, 25 bp, Homo sapiens
ctgtaatttgtagacttctgagaag

SEQ ID NO: 68960 - DNA, 21 bp, Homo sapiens
gcagtgctgagactctggatt

SEQ ID NO: 68961 - DNA, 22 bp, Homo sapiens
gctcaaaagaagtgctgaagga

SEQ ID NO: 68962 - DNA, 22 bp, Homo sapiens
gccattctcacaacttccaaat

SEQ ID NO: 68963 - DNA, 24 bp, Homo sapiens
tgatattgaaggatcagatgaagc

SEQ ID NO: 68964 - DNA, 20 bp, Homo sapiens
tctgctgaaatttggactct

SEQ ID NO: 68965 - DNA, 21 bp, Homo sapiens
aaaagctactcactaaaataa

SEQ ID NO: 68966 - DNA, 24 bp, Homo sapiens
tgcagtgtaaacaattgtttattt

SEQ ID NO: 68967 - DNA, 26 bp, Homo sapiens
catagttactggaaatttgagttttc

SEQ ID NO: 68968 - DNA, 19 bp, Homo sapiens
acctgccaactgaagaaat

SEQ ID NO: 68969 - DNA, 18 bp, Homo sapiens
acatctcccaggagagtc

SEQ ID NO: 68970 - DNA, 20 bp, Homo sapiens
aatccacaaatgtttgtaga

SEQ ID NO: 68971 - DNA, 21 bp, Homo sapiens
ccctacggtactgtcaaatac

SEQ ID NO: 68972 - DNA, 19 bp, Homo sapiens
ttccttgtttgaggtatcc

SEQ ID NO: 68973 - DNA, 24 bp, Homo sapiens
gcgccatcagtttgacatgagcat

SEQ ID NO: 68974 - DNA, 19 bp, Homo sapiens
gagacaatgaatccagagg

SEQ ID NO: 68975 - DNA, 21 bp, Homo sapiens
gctgttaacagttcttcatcc

SEQ ID NO: 68976 - DNA, 21 bp, Homo sapiens
gctgaagatattaaatgtggc

SEQ ID NO: 68977 - DNA, 23 bp, Homo sapiens
aaaatgaatgatagcatggatac

SEQ ID NO: 68978 - DNA, 18 bp, Homo sapiens
agtggcttaggaatcacc

SEQ ID NO: 68979 - DNA, 21 bp, Homo sapiens
ccttttccaactgttttctgc

SEQ ID NO: 68980 - DNA, 24 bp, Homo sapiens
actaaatcctagcaagtcagtctc

SEQ ID NO: 68981 - DNA, 22 bp, Homo sapiens
ccttccccagggaacaaagatg

SEQ ID NO: 68982 - DNA, 21 bp, Homo sapiens
gctttgtttgttacctttgtg

SEQ ID NO: 68983 - DNA, 22 bp, Homo sapiens
gcagagatttggtttagcagtt

SEQ ID NO: 68984 - DNA, 23 bp, Homo sapiens
gaaactttttctgattagccatg

SEQ ID NO: 68985 - DNA, 23 bp, Homo sapiens
gctgtatctcatgacaagaggaa

SEQ ID NO: 68986 - DNA, 23 bp, Homo sapiens
aaagacaggtgggagggttaact

SEQ ID NO: 68987 - DNA, 21 bp, Homo sapiens
gaagaagctccggatggaggc

SEQ ID NO: 68988 - DNA, 24 bp, Homo sapiens
taaaaatttaaaaaaaaaagggag

SEQ ID NO: 68989 - DNA, 16 bp, Homo sapiens
tgggggctcggactcc

SEQ ID NO: 68990 - DNA, 19 bp, Homo sapiens
taccaacgaactgaaagga

SEQ ID NO: 68991 - DNA, 19 bp, Homo sapiens
ccaactacccctcctcaga

SEQ ID NO: 68992 - DNA, 20 bp, Homo sapiens
cctgccccgagtggcttagc

SEQ ID NO: 68993 - DNA, 20 bp, Homo sapiens
ctcccttggttgccttttag

SEQ ID NO: 68994 - DNA, 24 bp, Homo sapiens
ctcttcaggctcagactccgagct

SEQ ID NO: 68995 - DNA, 20 bp, Homo sapiens
ctggaccctgagtctgagac

SEQ ID NO: 68996 - DNA, 21 bp, Homo sapiens
cttggcgttggtgtagaggct

SEQ ID NO: 68997 - DNA, 20 bp, Homo sapiens
ctacttctgagcatcttgag

SEQ ID NO: 68998 - DNA, 17 bp, Homo sapiens
ttctccagtgcacggac

SEQ ID NO: 68999 - DNA, 23 bp, Homo sapiens
aagatgcaagtaaaaggaaatgc

SEQ ID NO: 69000 - DNA, 22 bp, Homo sapiens
ctgcctggcccagtaaccaacc

SEQ ID NO: 69001 - DNA, 19 bp, Homo sapiens
cgagagctgatcaagttct

SEQ ID NO: 69002 - DNA, 17 bp, Homo sapiens
gcttgagcctggaaggt

SEQ ID NO: 69003 - DNA, 18 bp, Homo sapiens
tatgggctaggcccatgc

SEQ ID NO: 69004 - DNA, 24 bp, Homo sapiens
ggttttctaacccaggtggttact

SEQ ID NO: 69005 - DNA, 22 bp, Homo sapiens
gtgttcagggacagtgagccct

SEQ ID NO: 69006 - DNA, 23 bp, Homo sapiens
agagaagtgaattccccaggaac

SEQ ID NO: 69007 - DNA, 22 bp, Homo sapiens
gtctgaaaagagctttgaggtc

SEQ ID NO: 69008 - DNA, 18 bp, Homo sapiens
ctcaggacggctctaaca

SEQ ID NO: 69009 - DNA, 24 bp, Homo sapiens
cacaccagcaagatattgacgacc

SEQ ID NO: 69010 - DNA, 24 bp, Homo sapiens
agcctgctactgagcacatactcc

SEQ ID NO: 69011 - DNA, 20 bp, Homo sapiens
ccaaatcctagacaaagcca

SEQ ID NO: 69012 - DNA, 16 bp, Homo sapiens
ctggagcacagcaggg

SEQ ID NO: 69013 - DNA, 20 bp, Homo sapiens
tgggtttttattttgtcccc

SEQ ID NO: 69014 - DNA, 17 bp, Homo sapiens
gaagagcattctgccgc

SEQ ID NO: 69015 - DNA, 17 bp, Homo sapiens
tctcgtttccagccacc

SEQ ID NO: 69016 - DNA, 25 bp, Homo sapiens
cttcgcatatactggatatattctg

SEQ ID NO: 69017 - DNA, 23 bp, Homo sapiens
aaataaataaataaagcctacag

SEQ ID NO: 69018 - DNA, 24 bp, Homo sapiens
cacaagaaaaaagaatgcaagatt

SEQ ID NO: 69019 - DNA, 17 bp, Homo sapiens
cttcctgctgccagggc

SEQ ID NO: 69020 - DNA, 22 bp, Homo sapiens
atcgtcaaagtttgatgcagaa

SEQ ID NO: 69021 - DNA, 19 bp, Homo sapiens
aaggcagagctatcagccc

SEQ ID NO: 69022 - DNA, 22 bp, Homo sapiens
tccacatgtttatttactagct

SEQ ID NO: 69023 - DNA, 21 bp, Homo sapiens
gtgtaaggggtcaaaacaatc

SEQ ID NO: 69024 - DNA, 23 bp, Homo sapiens
aactaattcagtaaacaaaagtt

SEQ ID NO: 69025 - DNA, 17 bp, Homo sapiens
aggtgtggcatttctgc

SEQ ID NO: 69026 - DNA, 21 bp, Homo sapiens
gttttgagagtaccagtttca

SEQ ID NO: 69027 - DNA, 20 bp, Homo sapiens
tccaaaagaggaaatagagc

SEQ ID NO: 69028 - DNA, 20 bp, Homo sapiens
ctccaaggagagaaggtgag

SEQ ID NO: 69029 - DNA, 23 bp, Homo sapiens
tcctccaaacagtcaaaaataag

SEQ ID NO: 69030 - DNA, 18 bp, Homo sapiens
aaacgtagggaccacatc

SEQ ID NO: 69031 - DNA, 22 bp, Homo sapiens
tttccttcccaataggtgagtg

SEQ ID NO: 69032 - DNA, 20 bp, Homo sapiens
tgttctttctcccattcttc

SEQ ID NO: 69033 - DNA, 24 bp, Homo sapiens
tggccagctactcagctttctcag

SEQ ID NO: 69034 - DNA, 16 bp, Homo sapiens
cttccaggctgtaccc

SEQ ID NO: 69035 - DNA, 22 bp, Homo sapiens
aaactgtgaaagctgtctttga

SEQ ID NO: 69036 - DNA, 21 bp, Homo sapiens
agactcctaactgcccacctc

SEQ ID NO: 69037 - DNA, 23 bp, Homo sapiens
gatgagcccgtttgtcagcctag

SEQ ID NO: 69038 - DNA, 24 bp, Homo sapiens
ttattccaggaagagcaaccgagg

SEQ ID NO: 69039 - DNA, 24 bp, Homo sapiens
tcaccttagtggttaacattagag

SEQ ID NO: 69040 - DNA, 27 bp, Homo sapiens
ttctttcttattattgaatgttaagtg

SEQ ID NO: 69041 - DNA, 17 bp, Homo sapiens
tctctgaccccaaaaag

SEQ ID NO: 69042 - DNA, 18 bp, Homo sapiens
gtgtcgggctgactcccc

SEQ ID NO: 69043 - DNA, 24 bp, Homo sapiens
aggagacgtaccgcagattgaaac

SEQ ID NO: 69044 - DNA, 16 bp, Homo sapiens
gaggcactcctggccc

SEQ ID NO: 69045 - DNA, 16 bp, Homo sapiens
ccgctgcagtggccgc

SEQ ID NO: 69046 - DNA, 19 bp, Homo sapiens
ctcccgccgtcgccccgct

SEQ ID NO: 69047 - DNA, 24 bp, Homo sapiens
tgtgtgggggggactcggcttgtt

SEQ ID NO: 69048 - DNA, 24 bp, Homo sapiens
cgggaaggaagaagccccaggact

SEQ ID NO: 69049 - DNA, 24 bp, Homo sapiens
cttgcccgtgttgtgtgtgtgtgt

SEQ ID NO: 69050 - DNA, 16 bp, Homo sapiens
gaccatcctggagacc

SEQ ID NO: 69051 - DNA, 23 bp, Homo sapiens
tcctaaggattctttgttacaac

SEQ ID NO: 69052 - DNA, 20 bp, Homo sapiens
tgtaagcaaatgctggagtc

SEQ ID NO: 69053 - DNA, 24 bp, Homo sapiens
gcatcattataattgtattatcac

SEQ ID NO: 69054 - DNA, 16 bp, Homo sapiens
caccatgaagcagcct

SEQ ID NO: 69055 - DNA, 24 bp, Homo sapiens
ggtcttttatctgcaggttgacaa

SEQ ID NO: 69056 - DNA, 18 bp, Homo sapiens
attcatggcctggtgagc

SEQ ID NO: 69057 - DNA, 21 bp, Homo sapiens
tttggctggcatctggatgga

SEQ ID NO: 69058 - DNA, 20 bp, Homo sapiens
tgctaacggaaacttcaaac

SEQ ID NO: 69059 - DNA, 20 bp, Homo sapiens
agaagcagatatccagaggc

SEQ ID NO: 69060 - DNA, 24 bp, Homo sapiens
ataggataataaaggcatctactt

SEQ ID NO: 69061 - DNA, 19 bp, Homo sapiens
aggccccgagtggaatatc

SEQ ID NO: 69062 - DNA, 20 bp, Homo sapiens
accatgagaaagtagagtct

SEQ ID NO: 69063 - DNA, 16 bp, Homo sapiens
catgagctccacctgc

SEQ ID NO: 69064 - DNA, 23 bp, Homo sapiens
tctaaacccctagagggcaagaa

SEQ ID NO: 69065 - DNA, 17 bp, Homo sapiens
ccagtcaactctgccac

SEQ ID NO: 69066 - DNA, 21 bp, Homo sapiens
agggcttttcctgtgtgatat

SEQ ID NO: 69067 - DNA, 18 bp, Homo sapiens
acagggatttggagggtc

SEQ ID NO: 69068 - DNA, 23 bp, Homo sapiens
tgaactacttctgattccctcgc

SEQ ID NO: 69069 - DNA, 18 bp, Homo sapiens
gccccaacttttcatggg

SEQ ID NO: 69070 - DNA, 20 bp, Homo sapiens
ccttttggcaacatccccaa

SEQ ID NO: 69071 - DNA, 23 bp, Homo sapiens
gaatggaaataacaatttctggg

SEQ ID NO: 69072 - DNA, 18 bp, Homo sapiens
tagtgaggatcaggggta

SEQ ID NO: 69073 - DNA, 24 bp, Homo sapiens
ataaaaattctagaataaatttcc

SEQ ID NO: 69074 - DNA, 19 bp, Homo sapiens
aggggtgttttctagacat

SEQ ID NO: 69075 - DNA, 23 bp, Homo sapiens
ctgctagtgttctaagttactac

SEQ ID NO: 69076 - DNA, 20 bp, Homo sapiens
tgttccggatcaaagagatg

SEQ ID NO: 69077 - DNA, 24 bp, Homo sapiens
tgtttttgataaattaactcttag

SEQ ID NO: 69078 - DNA, 22 bp, Homo sapiens
ccaaagtgcaaaatctactaac

SEQ ID NO: 69079 - DNA, 24 bp, Homo sapiens
ctgtttgcagcagatgatggatgt

SEQ ID NO: 69080 - DNA, 17 bp, Homo sapiens
tcttctctccttctgcc

SEQ ID NO: 69081 - DNA, 19 bp, Homo sapiens
ccagttgcaccagcatctc

SEQ ID NO: 69082 - DNA, 20 bp, Homo sapiens
agtcatgacttgaagctctg

SEQ ID NO: 69083 - DNA, 22 bp, Homo sapiens
ctttctgacacgacattccttt

SEQ ID NO: 69084 - DNA, 17 bp, Homo sapiens
gcacgtgttaccctccg

SEQ ID NO: 69085 - DNA, 24 bp, Homo sapiens
atctaggggacacaccaagtattg

SEQ ID NO: 69086 - DNA, 20 bp, Homo sapiens
ggtttcagcctgttcactgc

SEQ ID NO: 69087 - DNA, 24 bp, Homo sapiens
gcattttttgttttcttttctccc

SEQ ID NO: 69088 - DNA, 23 bp, Homo sapiens
tgtcacatggaccagtgtttctc

SEQ ID NO: 69089 - DNA, 18 bp, Homo sapiens
gaggagagagacgaaagc

SEQ ID NO: 69090 - DNA, 22 bp, Homo sapiens
cttgtagatatggattgacact

SEQ ID NO: 69091 - DNA, 22 bp, Homo sapiens
tccttatcctcatctgaaaaat

SEQ ID NO: 69092 - DNA, 22 bp, Homo sapiens
ttcttttctgagatgtctgtat

SEQ ID NO: 69093 - DNA, 18 bp, Homo sapiens
atgctgaggcctaacagg

SEQ ID NO: 69094 - DNA, 22 bp, Homo sapiens
gtttgtttgtttttcagagtgt

SEQ ID NO: 69095 - DNA, 23 bp, Homo sapiens
atctatgtaagaaacatgctgtc

SEQ ID NO: 69096 - DNA, 24 bp, Homo sapiens
gttgttgcaaagaagtctgtcccc

SEQ ID NO: 69097 - DNA, 19 bp, Homo sapiens
gaatcatcggtgtgaagac

SEQ ID NO: 69098 - DNA, 16 bp, Homo sapiens
ttggccacctttggcc

SEQ ID NO: 69099 - DNA, 20 bp, Homo sapiens
aggagcttataacccagttg

SEQ ID NO: 69100 - DNA, 21 bp, Homo sapiens
tttacacatccagctaggtta

SEQ ID NO: 69101 - DNA, 16 bp, Homo sapiens
ggccgcgtgcaagata

SEQ ID NO: 69102 - DNA, 21 bp, Homo sapiens
ctatgtaaggaggcagctttg

SEQ ID NO: 69103 - DNA, 23 bp, Homo sapiens
accttttatgacgtctttaaaac

SEQ ID NO: 69104 - DNA, 21 bp, Homo sapiens
tatatgtgcctcattcaactg

SEQ ID NO: 69105 - DNA, 20 bp, Homo sapiens
ccaccaaagtgagaggtaat

SEQ ID NO: 69106 - DNA, 23 bp, Homo sapiens
tctcatttttctttttatcttga

SEQ ID NO: 69107 - DNA, 22 bp, Homo sapiens
tctaaaaaaagaaaagaaagac

SEQ ID NO: 69108 - DNA, 24 bp, Homo sapiens
tgaatgagcatgatggaatgtttt

SEQ ID NO: 69109 - DNA, 24 bp, Homo sapiens
ctggctgattctatgaaagacttg

SEQ ID NO: 69110 - DNA, 24 bp, Homo sapiens
cacctggctaattttttttgtatt

SEQ ID NO: 69111 - DNA, 24 bp, Homo sapiens
cctaattcatacaggtactgtgag

SEQ ID NO: 69112 - DNA, 16 bp, Homo sapiens
ttcagcagccggcagc

SEQ ID NO: 69113 - DNA, 24 bp, Homo sapiens
gcgtttaaatgctaggtgctatta

SEQ ID NO: 69114 - DNA, 21 bp, Homo sapiens
ctctgagtcattgtgctgggc

SEQ ID NO: 69115 - DNA, 24 bp, Homo sapiens
tcttcccctctctgtgcttccttt

SEQ ID NO: 69116 - DNA, 16 bp, Homo sapiens
cccttggccccgcccc

SEQ ID NO: 69117 - DNA, 18 bp, Homo sapiens
tcttggggaccctgctgc

SEQ ID NO: 69118 - DNA, 16 bp, Homo sapiens
ccgtcacatgcagggc

SEQ ID NO: 69119 - DNA, 16 bp, Homo sapiens
cccgccagacaaggcc

SEQ ID NO: 69120 - DNA, 18 bp, Homo sapiens
tggatggtctgcttaagc

SEQ ID NO: 69121 - DNA, 18 bp, Homo sapiens
agcctggctccaggaacc

SEQ ID NO: 69122 - DNA, 21 bp, Homo sapiens
aagagttgcactggccgtaac

SEQ ID NO: 69123 - DNA, 17 bp, Homo sapiens
ggagtccagccaagagg

SEQ ID NO: 69124 - DNA, 18 bp, Homo sapiens
cttgcagaaggagcagga

SEQ ID NO: 69125 - DNA, 21 bp, Homo sapiens
gagactggtgcaaaacccagc

SEQ ID NO: 69126 - DNA, 21 bp, Homo sapiens
tcttggtaggtggctgtagtt

SEQ ID NO: 69127 - DNA, 21 bp, Homo sapiens
gcaccatcatcaaccgcttct

SEQ ID NO: 69128 - DNA, 22 bp, Homo sapiens
ttggcttaatccaaatcgatgg

SEQ ID NO: 69129 - DNA, 24 bp, Homo sapiens
atccggaaggaggaaggttccttt

SEQ ID NO: 69130 - DNA, 21 bp, Homo sapiens
tttaggtctgggacttcctgg

SEQ ID NO: 69131 - DNA, 22 bp, Homo sapiens
tgatggtcacactcaactgccc

SEQ ID NO: 69132 - DNA, 16 bp, Homo sapiens
gctgggggttcttctg

SEQ ID NO: 69133 - DNA, 24 bp, Homo sapiens
gtgtgaagcagtgtcgttgcatat

SEQ ID NO: 69134 - DNA, 18 bp, Homo sapiens
tttgaggaacagcagcca

SEQ ID NO: 69135 - DNA, 23 bp, Homo sapiens
aaaaaaagtcctattactctggg

SEQ ID NO: 69136 - DNA, 23 bp, Homo sapiens
tggttttgaaagacttaatttat

SEQ ID NO: 69137 - DNA, 22 bp, Homo sapiens
ctcccctcaaaaaacattgtga

SEQ ID NO: 69138 - DNA, 19 bp, Homo sapiens
aagttagtgcctatgtgac

SEQ ID NO: 69139 - DNA, 23 bp, Homo sapiens
ctcactttttaggattatggctg

SEQ ID NO: 69140 - DNA, 21 bp, Homo sapiens
cagcttcatttcctcatctgt

SEQ ID NO: 69141 - DNA, 20 bp, Homo sapiens
acgtcactcagccagaacac

SEQ ID NO: 69142 - DNA, 20 bp, Homo sapiens
ggtgctgctaaaacatactc

SEQ ID NO: 69143 - DNA, 28 bp, Homo sapiens
gaagatgttttctttttaaaagtgaaac

SEQ ID NO: 69144 - DNA, 21 bp, Homo sapiens
cgagagagatggattctttgc

SEQ ID NO: 69145 - DNA, 21 bp, Homo sapiens
tcttaatacaggtgtttttgc

SEQ ID NO: 69146 - DNA, 21 bp, Homo sapiens
aattagttttgtagagttggg

SEQ ID NO: 69147 - DNA, 19 bp, Homo sapiens
tgtggtgttgggtagaggt

SEQ ID NO: 69148 - DNA, 24 bp, Homo sapiens
gtttttccattatttttcagaggt

SEQ ID NO: 69149 - DNA, 19 bp, Homo sapiens
tctgtgtttcctgtcctgc

SEQ ID NO: 69150 - DNA, 21 bp, Homo sapiens
actaatgtgtcagtagcaaaa

SEQ ID NO: 69151 - DNA, 20 bp, Homo sapiens
tgggtagtgcatacaacttc

SEQ ID NO: 69152 - DNA, 20 bp, Homo sapiens
agacttttccttcagtgaac

SEQ ID NO: 69153 - DNA, 18 bp, Homo sapiens
ctaatttcttgagagcag

SEQ ID NO: 69154 - DNA, 17 bp, Homo sapiens
aaaatgctccagcagga

SEQ ID NO: 69155 - DNA, 21 bp, Homo sapiens
atcaaagtcatccatatcatc

SEQ ID NO: 69156 - DNA, 19 bp, Homo sapiens
tttcttgcagactccgaag

SEQ ID NO: 69157 - DNA, 23 bp, Homo sapiens
agtgcttactcttacaaagtgac

SEQ ID NO: 69158 - DNA, 21 bp, Homo sapiens
aagaaatcccgggatactgct

SEQ ID NO: 69159 - DNA, 24 bp, Homo sapiens
tactgtgtttgttgtataaagctg

SEQ ID NO: 69160 - DNA, 22 bp, Homo sapiens
taagtaccatcaatgattggga

SEQ ID NO: 69161 - DNA, 22 bp, Homo sapiens
ctcagtcaaatctatttgctcg

SEQ ID NO: 69162 - DNA, 22 bp, Homo sapiens
catttgttacaccaccccaaag

SEQ ID NO: 69163 - DNA, 20 bp, Homo sapiens
ccatcatcgatgcaaatcac

SEQ ID NO: 69164 - DNA, 25 bp, Homo sapiens
ggtaagagaaacttttttaaagcac

SEQ ID NO: 69165 - DNA, 22 bp, Homo sapiens
ccaaatgagttttcagagagtc

SEQ ID NO: 69166 - DNA, 18 bp, Homo sapiens
ccaccctcctctgaaagc

SEQ ID NO: 69167 - DNA, 23 bp, Homo sapiens
gaataaaaaagtacaatgaacat

SEQ ID NO: 69168 - DNA, 24 bp, Homo sapiens
gactcagaatggttaagcagcgat

SEQ ID NO: 69169 - DNA, 20 bp, Homo sapiens
ccttaaggacaaaagctcta

SEQ ID NO: 69170 - DNA, 19 bp, Homo sapiens
agatgctcaggaaagtgac

SEQ ID NO: 69171 - DNA, 17 bp, Homo sapiens
tgcctcaaaaatgtggc

SEQ ID NO: 69172 - DNA, 22 bp, Homo sapiens
tccaaattcttcttcttttcgc

SEQ ID NO: 69173 - DNA, 19 bp, Homo sapiens
tgtaaagggagaggatcca

SEQ ID NO: 69174 - DNA, 23 bp, Homo sapiens
atcatcatcatcaaattcaatac

SEQ ID NO: 69175 - DNA, 22 bp, Homo sapiens
ttcttaatcgctcatgccctgt

SEQ ID NO: 69176 - DNA, 19 bp, Homo sapiens
aggaagaagaagcagaaat

SEQ ID NO: 69177 - DNA, 20 bp, Homo sapiens
tcaactgttttactgtagat

SEQ ID NO: 69178 - DNA, 22 bp, Homo sapiens
tcccagaaacaaataataatgc

SEQ ID NO: 69179 - DNA, 24 bp, Homo sapiens
attacattcaactgagaaagttcc

SEQ ID NO: 69180 - DNA, 20 bp, Homo sapiens
aaagcacaaaatacttttat

SEQ ID NO: 69181 - DNA, 19 bp, Homo sapiens
tccaccttctccagaagaa

SEQ ID NO: 69182 - DNA, 24 bp, Homo sapiens
gcaaccaattaaatgtataaacag

SEQ ID NO: 69183 - DNA, 17 bp, Homo sapiens
tcagaggtgtcaaggtc

SEQ ID NO: 69184 - DNA, 23 bp, Homo sapiens
aaaactacttctcttttctgtta

SEQ ID NO: 69185 - DNA, 21 bp, Homo sapiens
tgcatactcattttctcaggt

SEQ ID NO: 69186 - DNA, 23 bp, Homo sapiens
aagggtttcaaaattatacattt

SEQ ID NO: 69187 - DNA, 23 bp, Homo sapiens
acatggtatgtctaaaatattgc

SEQ ID NO: 69188 - DNA, 20 bp, Homo sapiens
gcagtacgttaaaggacctt

SEQ ID NO: 69189 - DNA, 21 bp, Homo sapiens
gccacaggttcaaaacacaat

SEQ ID NO: 69190 - DNA, 25 bp, Homo sapiens
acatcaaaagatcttttgtcaaaac

SEQ ID NO: 69191 - DNA, 24 bp, Homo sapiens
agtaaacaaggttatgacattaga

SEQ ID NO: 69192 - DNA, 21 bp, Homo sapiens
cagcacagactgtgacggtac

SEQ ID NO: 69193 - DNA, 24 bp, Homo sapiens
tgttgcccaggctggtcttgaact

SEQ ID NO: 69194 - DNA, 24 bp, Homo sapiens
catcaggaatagtatcaattaatt

SEQ ID NO: 69195 - DNA, 20 bp, Homo sapiens
gggattacagtcatgagcca

SEQ ID NO: 69196 - DNA, 16 bp, Homo sapiens
cgctgctgaagcagtt

SEQ ID NO: 69197 - DNA, 24 bp, Homo sapiens
aagaaaaatattaacaacataatt

SEQ ID NO: 69198 - DNA, 23 bp, Homo sapiens
atttttcacttagagtggtagaa

SEQ ID NO: 69199 - DNA, 18 bp, Homo sapiens
gtgatggagcacatctgt

SEQ ID NO: 69200 - DNA, 21 bp, Homo sapiens
gatcatccttatgccatttcc

SEQ ID NO: 69201 - DNA, 16 bp, Homo sapiens
tgtgggaacgaactgc

SEQ ID NO: 69202 - DNA, 19 bp, Homo sapiens
acgaatgttaaaggagtgg

SEQ ID NO: 69203 - DNA, 21 bp, Homo sapiens
tgtttacttttcaaaccactc

SEQ ID NO: 69204 - DNA, 25 bp, Homo sapiens
gactggcatcacttttattaaaatc

SEQ ID NO: 69205 - DNA, 24 bp, Homo sapiens
tgggaaaaaagcgaatatattttg

SEQ ID NO: 69206 - DNA, 19 bp, Homo sapiens
ccctccatagggccatcaa

SEQ ID NO: 69207 - DNA, 23 bp, Homo sapiens
ttttgtggcctaccagagtaaac

SEQ ID NO: 69208 - DNA, 21 bp, Homo sapiens
cagaatttgagggaaggtgtg

SEQ ID NO: 69209 - DNA, 24 bp, Homo sapiens
cagaaggaaacttctaacggaagt

SEQ ID NO: 69210 - DNA, 21 bp, Homo sapiens
gcagagaatcctgtctttcct

SEQ ID NO: 69211 - DNA, 22 bp, Homo sapiens
ggagatacaggcctgattcact

SEQ ID NO: 69212 - DNA, 21 bp, Homo sapiens
acaaaggacttctgtaaatgg

SEQ ID NO: 69213 - DNA, 24 bp, Homo sapiens
agggaattctatgaaggagttaaa

SEQ ID NO: 69214 - DNA, 20 bp, Homo sapiens
tcctgggaaataagagcttt

SEQ ID NO: 69215 - DNA, 24 bp, Homo sapiens
ggactgtttactgactaccaccct

SEQ ID NO: 69216 - DNA, 24 bp, Homo sapiens
gtcatttattgaagcagtatgttt

SEQ ID NO: 69217 - DNA, 23 bp, Homo sapiens
tgaaaggcctttattcaataccc

SEQ ID NO: 69218 - DNA, 23 bp, Homo sapiens
catcatcaaagtcatctatgtca

SEQ ID NO: 69219 - DNA, 22 bp, Homo sapiens
aaacaccaagactaggaaaaaa

SEQ ID NO: 69220 - DNA, 16 bp, Homo sapiens
agatttgctggctgct

SEQ ID NO: 69221 - DNA, 20 bp, Homo sapiens
actgctgtgaaagatcagaa

SEQ ID NO: 69222 - DNA, 22 bp, Homo sapiens
ctgaggaaagtctttctgatac

SEQ ID NO: 69223 - DNA, 22 bp, Homo sapiens
cccaaccttcctatgatattga

SEQ ID NO: 69224 - DNA, 27 bp, Homo sapiens
tgaattgactctgagaagtttatattt

SEQ ID NO: 69225 - DNA, 23 bp, Homo sapiens
ataatgcataatttagcagccag

SEQ ID NO: 69226 - DNA, 24 bp, Homo sapiens
ggacagttttgttttcatataagc

SEQ ID NO: 69227 - DNA, 18 bp, Homo sapiens
aggtcggccaattaaatc

SEQ ID NO: 69228 - DNA, 21 bp, Homo sapiens
tgttttcaggcaatgatgatt

SEQ ID NO: 69229 - DNA, 21 bp, Homo sapiens
tcttccagtgtcatctactgc

SEQ ID NO: 69230 - DNA, 22 bp, Homo sapiens
gcaacttgcttttgaaattgtg

SEQ ID NO: 69231 - DNA, 21 bp, Homo sapiens
agacttgtagggaaggaaagc

SEQ ID NO: 69232 - DNA, 24 bp, Homo sapiens
tgtatgaggaaaactaagactttg

SEQ ID NO: 69233 - DNA, 18 bp, Homo sapiens
tgccagtgattctgcagg

SEQ ID NO: 69234 - DNA, 21 bp, Homo sapiens
gttctaaaattatgcaggcca

SEQ ID NO: 69235 - DNA, 22 bp, Homo sapiens
tgtactgatttttcttaacgtt

SEQ ID NO: 69236 - DNA, 22 bp, Homo sapiens
cggcatcaggataaaacagtct

SEQ ID NO: 69237 - DNA, 20 bp, Homo sapiens
tctgaaacatgagcgtttcc

SEQ ID NO: 69238 - DNA, 23 bp, Homo sapiens
agagctttcatttaacatctgcc

SEQ ID NO: 69239 - DNA, 21 bp, Homo sapiens
ttttcataaaaaatttggcct

SEQ ID NO: 69240 - DNA, 23 bp, Homo sapiens
ggaggtttaagaggtccctaaat

SEQ ID NO: 69241 - DNA, 23 bp, Homo sapiens
caatgctgcactgcttggtgaag

SEQ ID NO: 69242 - DNA, 19 bp, Homo sapiens
aacaaccagaacaaaggat

SEQ ID NO: 69243 - DNA, 19 bp, Homo sapiens
gagctggtaacacaaactc

SEQ ID NO: 69244 - DNA, 23 bp, Homo sapiens
tcatttgagtatggcaaattgtt

SEQ ID NO: 69245 - DNA, 22 bp, Homo sapiens
cgataagtgatctcaagggaga

SEQ ID NO: 69246 - DNA, 22 bp, Homo sapiens
tgatttcttttgtaacttttac

SEQ ID NO: 69247 - DNA, 24 bp, Homo sapiens
ggcgtgtttttattagtattttta

SEQ ID NO: 69248 - DNA, 19 bp, Homo sapiens
gttctctttcaggaggtgg

SEQ ID NO: 69249 - DNA, 24 bp, Homo sapiens
acaaatcacgaactatttaataaa

SEQ ID NO: 69250 - DNA, 22 bp, Homo sapiens
ctcctggggtcactgttgtcat

SEQ ID NO: 69251 - DNA, 24 bp, Homo sapiens
atctgtatcaaattttcagacttc

SEQ ID NO: 69252 - DNA, 23 bp, Homo sapiens
agtcttatcacctgtcagatatg

SEQ ID NO: 69253 - DNA, 23 bp, Homo sapiens
catacttgttatgttgagatatg

SEQ ID NO: 69254 - DNA, 20 bp, Homo sapiens
atgattgggtctttttttga

SEQ ID NO: 69255 - DNA, 22 bp, Homo sapiens
taaaacctaaggacaaatgtaa

SEQ ID NO: 69256 - DNA, 28 bp, Homo sapiens
gtggtctttaatatattttaaaataatg

SEQ ID NO: 69257 - DNA, 20 bp, Homo sapiens
tatacttagattccagctac

SEQ ID NO: 69258 - DNA, 21 bp, Homo sapiens
tctttgcactacgtatacaaa

SEQ ID NO: 69259 - DNA, 21 bp, Homo sapiens
tatttacctccagttatcaaa

SEQ ID NO: 69260 - DNA, 26 bp, Homo sapiens
caaagcaattatagtaaaatgttacc

SEQ ID NO: 69261 - DNA, 23 bp, Homo sapiens
gagtagaaatgagtctgttactt

SEQ ID NO: 69262 - DNA, 22 bp, Homo sapiens
ttacaggcgtgagccaccgcac

SEQ ID NO: 69263 - DNA, 20 bp, Homo sapiens
ctgacacaatgtgcttcatc

SEQ ID NO: 69264 - DNA, 22 bp, Homo sapiens
ggaatttgaagaccacagaatc

SEQ ID NO: 69265 - DNA, 25 bp, Homo sapiens
attgttggtagtatgtatttatcgg

SEQ ID NO: 69266 - DNA, 18 bp, Homo sapiens
ctggcctagatctgtgca

SEQ ID NO: 69267 - DNA, 22 bp, Homo sapiens
cagtaaaataggagactcgttc

SEQ ID NO: 69268 - DNA, 19 bp, Homo sapiens
aggaagctcttggcacgtt

SEQ ID NO: 69269 - DNA, 21 bp, Homo sapiens
cttggagcttccttctataaa

SEQ ID NO: 69270 - DNA, 20 bp, Homo sapiens
cttgacgaaaatcatgtccc

SEQ ID NO: 69271 - DNA, 22 bp, Homo sapiens
ataaaaacccacactgagtgaa

SEQ ID NO: 69272 - DNA, 18 bp, Homo sapiens
gccgtaagagccatcacc

SEQ ID NO: 69273 - DNA, 24 bp, Homo sapiens
cttaatacattgagcagtgttggc

SEQ ID NO: 69274 - DNA, 19 bp, Homo sapiens
ggtctgagaatcttcagct

SEQ ID NO: 69275 - DNA, 24 bp, Homo sapiens
atttttttttccaactagtgggga

SEQ ID NO: 69276 - DNA, 16 bp, Homo sapiens
tggcagtcactgcccc

SEQ ID NO: 69277 - DNA, 20 bp, Homo sapiens
cttcgccagaagtttccttc

SEQ ID NO: 69278 - DNA, 16 bp, Homo sapiens
ggggtgggggtggggt

SEQ ID NO: 69279 - DNA, 24 bp, Homo sapiens
ggtacagaaggacatcctgactca

SEQ ID NO: 69280 - DNA, 24 bp, Homo sapiens
aaatactggctctcagccccaaac

SEQ ID NO: 69281 - DNA, 23 bp, Homo sapiens
cagattatgtctgttaaagctca

SEQ ID NO: 69282 - DNA, 22 bp, Homo sapiens
cggaggctccaactcctaatac

SEQ ID NO: 69283 - DNA, 20 bp, Homo sapiens
gatccattctaggcaatcaa

SEQ ID NO: 69284 - DNA, 23 bp, Homo sapiens
acatgtagtctataacaatacct

SEQ ID NO: 69285 - DNA, 23 bp, Homo sapiens
gacatttgttacttctagacagc

SEQ ID NO: 69286 - DNA, 22 bp, Homo sapiens
ttgggacttttttaggtttagc

SEQ ID NO: 69287 - DNA, 23 bp, Homo sapiens
ctgtcataatgcaaaaaggaatg

SEQ ID NO: 69288 - DNA, 20 bp, Homo sapiens
aaaaagcctaaaaaggtggc

SEQ ID NO: 69289 - DNA, 20 bp, Homo sapiens
tttccagaattgagagagtt

SEQ ID NO: 69290 - DNA, 24 bp, Homo sapiens
cttgcttgaattattcacgtgtgt

SEQ ID NO: 69291 - DNA, 16 bp, Homo sapiens
ctgtaacgtgtcagcc

SEQ ID NO: 69292 - DNA, 23 bp, Homo sapiens
ggttcatatatttctgaaaatgt

SEQ ID NO: 69293 - DNA, 19 bp, Homo sapiens
gctgcacttcatctctggc

SEQ ID NO: 69294 - DNA, 22 bp, Homo sapiens
tgtttctcagtactcttggttt

SEQ ID NO: 69295 - DNA, 25 bp, Homo sapiens
agattatttctattatttgtttatc

SEQ ID NO: 69296 - DNA, 21 bp, Homo sapiens
agaatgtgacaccatggctga

SEQ ID NO: 69297 - DNA, 22 bp, Homo sapiens
ggtaaaaacagtttgcattcta

SEQ ID NO: 69298 - DNA, 18 bp, Homo sapiens
ccatgctggcctcagtga

SEQ ID NO: 69299 - DNA, 23 bp, Homo sapiens
gaagtctcaaagaaaatctgttt

SEQ ID NO: 69300 - DNA, 18 bp, Homo sapiens
ggatggctgtcaggtaac

SEQ ID NO: 69301 - DNA, 21 bp, Homo sapiens
caatccccattccaaatgcaa

SEQ ID NO: 69302 - DNA, 22 bp, Homo sapiens
attaggttgttatgtagtgtgc

SEQ ID NO: 69303 - DNA, 19 bp, Homo sapiens
ccctccacagatttaggga

SEQ ID NO: 69304 - DNA, 24 bp, Homo sapiens
gcatctattatgaaaatgttcctt

SEQ ID NO: 69305 - DNA, 19 bp, Homo sapiens
gaaaagcaggcagtgagat

SEQ ID NO: 69306 - DNA, 23 bp, Homo sapiens
ttatatcaggttatctgtgctac

SEQ ID NO: 69307 - DNA, 19 bp, Homo sapiens
gagcccagcttactcatta

SEQ ID NO: 69308 - DNA, 22 bp, Homo sapiens
gcgatttgtgattcatgcatct

SEQ ID NO: 69309 - DNA, 19 bp, Homo sapiens
cacaatagcaggagtagac

SEQ ID NO: 69310 - DNA, 20 bp, Homo sapiens
cagagctggaagagatgggg

SEQ ID NO: 69311 - DNA, 21 bp, Homo sapiens
gccaatctgtataaactcctc

SEQ ID NO: 69312 - DNA, 20 bp, Homo sapiens
tgtgaccagactgaaaagac

SEQ ID NO: 69313 - DNA, 24 bp, Homo sapiens
attgaagtgagtttctcttgtatg

SEQ ID NO: 69314 - DNA, 23 bp, Homo sapiens
caatgctgttaacagtaattttc

SEQ ID NO: 69315 - DNA, 20 bp, Homo sapiens
agctgtattctcctgcattc

SEQ ID NO: 69316 - DNA, 23 bp, Homo sapiens
tctatgatatgctctatttttcc

SEQ ID NO: 69317 - DNA, 23 bp, Homo sapiens
tctgggtgtttcttacaaaaatc

SEQ ID NO: 69318 - DNA, 20 bp, Homo sapiens
agtggaaaaagatggaaacc

SEQ ID NO: 69319 - DNA, 22 bp, Homo sapiens
aagaattttaaaacttcttttt

SEQ ID NO: 69320 - DNA, 22 bp, Homo sapiens
gcatggtacattactgtgaaaa

SEQ ID NO: 69321 - DNA, 20 bp, Homo sapiens
ccaccttttgcaatctaatt

SEQ ID NO: 69322 - DNA, 21 bp, Homo sapiens
tggtgaaaatggatttaatcc

SEQ ID NO: 69323 - DNA, 24 bp, Homo sapiens
tgtttccattccaaattactactg

SEQ ID NO: 69324 - DNA, 27 bp, Homo sapiens
tcacatctcttgttttataatcctatg

SEQ ID NO: 69325 - DNA, 24 bp, Homo sapiens
aagaatgaacatttgaaatttccg

SEQ ID NO: 69326 - DNA, 23 bp, Homo sapiens
cattccttgtgatgaactatgtt

SEQ ID NO: 69327 - DNA, 21 bp, Homo sapiens
actatagttaatattaaaccc

SEQ ID NO: 69328 - DNA, 22 bp, Homo sapiens
tcgaccagcatattcatagtaa

SEQ ID NO: 69329 - DNA, 24 bp, Homo sapiens
agcagaaagtattctctttttatt

SEQ ID NO: 69330 - DNA, 24 bp, Homo sapiens
ctttagatgttcaatttcaattga

SEQ ID NO: 69331 - DNA, 20 bp, Homo sapiens
tgtaagatttgttcaagaac

SEQ ID NO: 69332 - DNA, 27 bp, Homo sapiens
aaactcaagttttataagaaaatagac

SEQ ID NO: 69333 - DNA, 21 bp, Homo sapiens
aggtccttctggaagatttac

SEQ ID NO: 69334 - DNA, 23 bp, Homo sapiens
atataaaacagtataataattga

SEQ ID NO: 69335 - DNA, 18 bp, Homo sapiens
tgcactcttactccctga

SEQ ID NO: 69336 - DNA, 20 bp, Homo sapiens
aacagaaatgagtgtctgtg

SEQ ID NO: 69337 - DNA, 17 bp, Homo sapiens
ttcggcattgtgtcgtg

SEQ ID NO: 69338 - DNA, 23 bp, Homo sapiens
tgtccataaatgactttttagcc

SEQ ID NO: 69339 - DNA, 22 bp, Homo sapiens
cattggcattgatatataagtc

SEQ ID NO: 69340 - DNA, 21 bp, Homo sapiens
catcttacttcctgtatcttc

SEQ ID NO: 69341 - DNA, 20 bp, Homo sapiens
aaattgccatttagtacagt

SEQ ID NO: 69342 - DNA, 23 bp, Homo sapiens
tttggaaaaggatctgcttattc

SEQ ID NO: 69343 - DNA, 18 bp, Homo sapiens
tttggttcactcattgtg

SEQ ID NO: 69344 - DNA, 22 bp, Homo sapiens
acaagattttggatgaagactt

SEQ ID NO: 69345 - DNA, 23 bp, Homo sapiens
agaacagtatatataaattcagt

SEQ ID NO: 69346 - DNA, 23 bp, Homo sapiens
ttatgtgatgctcggaaataaag

SEQ ID NO: 69347 - DNA, 23 bp, Homo sapiens
acttgggttgaattttaagatct

SEQ ID NO: 69348 - DNA, 24 bp, Homo sapiens
actgctggaattttctgtttccat

SEQ ID NO: 69349 - DNA, 21 bp, Homo sapiens
gttcccagtgggctcactatc

SEQ ID NO: 69350 - DNA, 24 bp, Homo sapiens
acattttttaaccatctcttccct

SEQ ID NO: 69351 - DNA, 21 bp, Homo sapiens
taaataaagcccctgtatggg

SEQ ID NO: 69352 - DNA, 19 bp, Homo sapiens
caccaaaaactttccccag

SEQ ID NO: 69353 - DNA, 21 bp, Homo sapiens
ctcataaaggtagactttatg

SEQ ID NO: 69354 - DNA, 17 bp, Homo sapiens
gtgtacccacctgcaag

SEQ ID NO: 69355 - DNA, 20 bp, Homo sapiens
agcgttagtagcaaaagtgt

SEQ ID NO: 69356 - DNA, 20 bp, Homo sapiens
cacttaaggagttccctagc

SEQ ID NO: 69357 - DNA, 22 bp, Homo sapiens
cagaagtctgcaaatctctggg

SEQ ID NO: 69358 - DNA, 18 bp, Homo sapiens
ccccgtctcaaaacaaac

SEQ ID NO: 69359 - DNA, 24 bp, Homo sapiens
tttaataccgtcactctcaagaag

SEQ ID NO: 69360 - DNA, 24 bp, Homo sapiens
caggatcagaagataaagattctg

SEQ ID NO: 69361 - DNA, 22 bp, Homo sapiens
gccttttacaaaattggcctgt

SEQ ID NO: 69362 - DNA, 19 bp, Homo sapiens
gcaccatatttttccagtt

SEQ ID NO: 69363 - DNA, 19 bp, Homo sapiens
gctgaatgcgtgaatgagc

SEQ ID NO: 69364 - DNA, 18 bp, Homo sapiens
ctgtgtactaacctggcg

SEQ ID NO: 69365 - DNA, 20 bp, Homo sapiens
tttatgcctttgcacagaat

SEQ ID NO: 69366 - DNA, 20 bp, Homo sapiens
tgcatccttctaattcagtg

SEQ ID NO: 69367 - DNA, 22 bp, Homo sapiens
attgatggtgttactgaagaca

SEQ ID NO: 69368 - DNA, 16 bp, Homo sapiens
ctgggggctgacttgg

SEQ ID NO: 69369 - DNA, 22 bp, Homo sapiens
aaatactctgaatggacatcgc

SEQ ID NO: 69370 - DNA, 19 bp, Homo sapiens
gggaactgtcttcagctac

SEQ ID NO: 69371 - DNA, 24 bp, Homo sapiens
tttggttcttgctgaattgttgaa

SEQ ID NO: 69372 - DNA, 16 bp, Homo sapiens
gctcctcagcggcact

SEQ ID NO: 69373 - DNA, 23 bp, Homo sapiens
ccctgcagcgtgtctcttcatat

SEQ ID NO: 69374 - DNA, 22 bp, Homo sapiens
cctcttcctttcatttctggtt

SEQ ID NO: 69375 - DNA, 24 bp, Homo sapiens
cacctgtaaacatctgcattttcc

SEQ ID NO: 69376 - DNA, 22 bp, Homo sapiens
tttgccttggaaccactggaag

SEQ ID NO: 69377 - DNA, 18 bp, Homo sapiens
cagaggccccggaagaag

SEQ ID NO: 69378 - DNA, 18 bp, Homo sapiens
cctttcttcccttgttcc

SEQ ID NO: 69379 - DNA, 24 bp, Homo sapiens
cttcccactactttgcaagtaaaa

SEQ ID NO: 69380 - DNA, 24 bp, Homo sapiens
ccattagcaatatttaataatggc

SEQ ID NO: 69381 - DNA, 21 bp, Homo sapiens
gtctaagaggagaaaaactgc

SEQ ID NO: 69382 - DNA, 21 bp, Homo sapiens
atttttgttttggatcaaacc

SEQ ID NO: 69383 - DNA, 24 bp, Homo sapiens
gatttcgttttggaagatatcttt

SEQ ID NO: 69384 - DNA, 23 bp, Homo sapiens
taggcagaaaatgcacaaggaca

SEQ ID NO: 69385 - DNA, 20 bp, Homo sapiens
cctgatgtcgcttgagaagt

SEQ ID NO: 69386 - DNA, 22 bp, Homo sapiens
aggaaggtcattcatttttggt

SEQ ID NO: 69387 - DNA, 20 bp, Homo sapiens
tgaaggcttaagaaacggtc

SEQ ID NO: 69388 - DNA, 21 bp, Homo sapiens
atttcagggggtctgccacat

SEQ ID NO: 69389 - DNA, 22 bp, Homo sapiens
acaaacaagaaagagggtctat

SEQ ID NO: 69390 - DNA, 23 bp, Homo sapiens
cattggatccagttcagcctcac

SEQ ID NO: 69391 - DNA, 21 bp, Homo sapiens
acttcaaatggtataacaaga

SEQ ID NO: 69392 - DNA, 17 bp, Homo sapiens
ttatggctccaccgaag

SEQ ID NO: 69393 - DNA, 21 bp, Homo sapiens
ttaaaaagaagaactatcacc

SEQ ID NO: 69394 - DNA, 16 bp, Homo sapiens
aaccaagccctctgcc

SEQ ID NO: 69395 - DNA, 21 bp, Homo sapiens
agacatcagccagatcccatc

SEQ ID NO: 69396 - DNA, 16 bp, Homo sapiens
cttggtgggcttcggc

SEQ ID NO: 69397 - DNA, 22 bp, Homo sapiens
tcctgaagcgtaaagccacttc

SEQ ID NO: 69398 - DNA, 16 bp, Homo sapiens
cagcactgacccagcc

SEQ ID NO: 69399 - DNA, 16 bp, Homo sapiens
agagaccctgggcggc

SEQ ID NO: 69400 - DNA, 21 bp, Homo sapiens
ggctgcctaggtatgagtatg

SEQ ID NO: 69401 - DNA, 18 bp, Homo sapiens
gtgcacaggcagacaggt

SEQ ID NO: 69402 - DNA, 23 bp, Homo sapiens
ctgaggtggaccaagaaggcaac

SEQ ID NO: 69403 - DNA, 22 bp, Homo sapiens
ccacagctccctgtgggggtgg

SEQ ID NO: 69404 - DNA, 16 bp, Homo sapiens
accccgcttggcctcc

SEQ ID NO: 69405 - DNA, 23 bp, Homo sapiens
gctcttctccctaggaagccccc

SEQ ID NO: 69406 - DNA, 16 bp, Homo sapiens
cagactcgcctctggg

SEQ ID NO: 69407 - DNA, 19 bp, Homo sapiens
tctcctctggggacttggt

SEQ ID NO: 69408 - DNA, 16 bp, Homo sapiens
aggcttgcagccaggg

SEQ ID NO: 69409 - DNA, 18 bp, Homo sapiens
catgcgtgtccactgctg

SEQ ID NO: 69410 - DNA, 17 bp, Homo sapiens
tggggcactgtgtcagg

SEQ ID NO: 69411 - DNA, 18 bp, Homo sapiens
gagcacctttctgactct

SEQ ID NO: 69412 - DNA, 16 bp, Homo sapiens
agctggtggcgctgcc

SEQ ID NO: 69413 - DNA, 19 bp, Homo sapiens
aggtcacaaggatgtgggg

SEQ ID NO: 69414 - DNA, 16 bp, Homo sapiens
tcaagcagaccagcgc

SEQ ID NO: 69415 - DNA, 24 bp, Homo sapiens
ccgccctcctctactcaccaatgc

SEQ ID NO: 69416 - DNA, 16 bp, Homo sapiens
gctgtgcccttgcctc

SEQ ID NO: 69417 - DNA, 19 bp, Homo sapiens
ccatcttgggcccaacacc

SEQ ID NO: 69418 - DNA, 17 bp, Homo sapiens
gtgcaggtagctctggc

SEQ ID NO: 69419 - DNA, 19 bp, Homo sapiens
tagtgctgctgcaggatgg

SEQ ID NO: 69420 - DNA, 18 bp, Homo sapiens
ctgccctccgcttgttcc

SEQ ID NO: 69421 - DNA, 16 bp, Homo sapiens
ccacggcctggggggg

SEQ ID NO: 69422 - DNA, 18 bp, Homo sapiens
tggacagcatcctgcaga

SEQ ID NO: 69423 - DNA, 22 bp, Homo sapiens
cacttcctgcaccgtcgccacc

SEQ ID NO: 69424 - DNA, 20 bp, Homo sapiens
ccaaaccaaagaccaggtga

SEQ ID NO: 69425 - DNA, 18 bp, Homo sapiens
ggcccccgttgccacagg

SEQ ID NO: 69426 - DNA, 18 bp, Homo sapiens
ccctgtcactgcacaagc

SEQ ID NO: 69427 - DNA, 24 bp, Homo sapiens
cccagcgtggcatcatctgtctgc

SEQ ID NO: 69428 - DNA, 16 bp, Homo sapiens
gagggcggggggcgga

SEQ ID NO: 69429 - DNA, 16 bp, Homo sapiens
ggcgcccgccgtcacc

SEQ ID NO: 69430 - DNA, 17 bp, Homo sapiens
caccccacagggggagg

SEQ ID NO: 69431 - DNA, 20 bp, Homo sapiens
agcacctggtacctgcgtac

SEQ ID NO: 69432 - DNA, 24 bp, Homo sapiens
gggactgagcactgctatgactcc

SEQ ID NO: 69433 - DNA, 18 bp, Homo sapiens
tgtccatcctcccaaggt

SEQ ID NO: 69434 - DNA, 18 bp, Homo sapiens
agctggtcaacatccgtg

SEQ ID NO: 69435 - DNA, 21 bp, Homo sapiens
gggtagaaagaaaacaaggac

SEQ ID NO: 69436 - DNA, 16 bp, Homo sapiens
agggggctgagcccct

SEQ ID NO: 69437 - DNA, 24 bp, Homo sapiens
ccctgcctacctttgggggggcac

SEQ ID NO: 69438 - DNA, 16 bp, Homo sapiens
gcgtccgcggaaagca

SEQ ID NO: 69439 - DNA, 24 bp, Homo sapiens
caggtgcatcctttttgttcctca

SEQ ID NO: 69440 - DNA, 16 bp, Homo sapiens
ccaccagagggactgc

SEQ ID NO: 69441 - DNA, 23 bp, Homo sapiens
ctcccagactggcaccttgaggg

SEQ ID NO: 69442 - DNA, 24 bp, Homo sapiens
gttgtggcatgaacgagtgagggg

SEQ ID NO: 69443 - DNA, 19 bp, Homo sapiens
ataggccacacgcagtctc

SEQ ID NO: 69444 - DNA, 21 bp, Homo sapiens
cataccccagactgcagaggg

SEQ ID NO: 69445 - DNA, 17 bp, Homo sapiens
agaagagaggctgcagc

SEQ ID NO: 69446 - DNA, 17 bp, Homo sapiens
gtgggaaccgttcgcgg

SEQ ID NO: 69447 - DNA, 16 bp, Homo sapiens
cctgggacccggggct

SEQ ID NO: 69448 - DNA, 19 bp, Homo sapiens
aggaggcggcccgggactc

SEQ ID NO: 69449 - DNA, 17 bp, Homo sapiens
gatgtgtagtccgcagg

SEQ ID NO: 69450 - DNA, 16 bp, Homo sapiens
cacggcgcggcgctac

SEQ ID NO: 69451 - DNA, 16 bp, Homo sapiens
cctctggcggaaaggc

SEQ ID NO: 69452 - DNA, 24 bp, Homo sapiens
ctccctacacccccgcggcccagc

SEQ ID NO: 69453 - DNA, 16 bp, Homo sapiens
gcattgcgcggagggc

SEQ ID NO: 69454 - DNA, 17 bp, Homo sapiens
ctcaaggcggtcatgcc

SEQ ID NO: 69455 - DNA, 16 bp, Homo sapiens
cctagagaggcggacc

SEQ ID NO: 69456 - DNA, 16 bp, Homo sapiens
tgccgccgcgaagtcc

SEQ ID NO: 69457 - DNA, 24 bp, Homo sapiens
gcccactgcaacccgactccggag

SEQ ID NO: 69458 - DNA, 22 bp, Homo sapiens
cctggtctagagagctctctac

SEQ ID NO: 69459 - DNA, 16 bp, Homo sapiens
ctgctgcaggcggctc

SEQ ID NO: 69460 - DNA, 23 bp, Homo sapiens
ttgttggtttggccatggtggac

SEQ ID NO: 69461 - DNA, 24 bp, Homo sapiens
ggagtgtgggaggaaaggttatgc

SEQ ID NO: 69462 - DNA, 18 bp, Homo sapiens
cctcggtgttcccagtcc

SEQ ID NO: 69463 - DNA, 16 bp, Homo sapiens
gtgggcagaggtgttg

SEQ ID NO: 69464 - DNA, 23 bp, Homo sapiens
tctcagtatttccgcggtgatga

SEQ ID NO: 69465 - DNA, 24 bp, Homo sapiens
gaggggttttctggtgcgtcctgg

SEQ ID NO: 69466 - DNA, 18 bp, Homo sapiens
ccttctctgcatttccct

SEQ ID NO: 69467 - DNA, 24 bp, Homo sapiens
ggcttgaaggagaagtttaagatt

SEQ ID NO: 69468 - DNA, 19 bp, Homo sapiens
ttcctgtgtagacagttgc

SEQ ID NO: 69469 - DNA, 24 bp, Homo sapiens
agagggtaaacagacggagtttat

SEQ ID NO: 69470 - DNA, 18 bp, Homo sapiens
ctgactttcgaagtctcc

SEQ ID NO: 69471 - DNA, 24 bp, Homo sapiens
cggctcgtcaagtgaatcttgatt

SEQ ID NO: 69472 - DNA, 20 bp, Homo sapiens
tttgcgacttcacaaatctg

SEQ ID NO: 69473 - DNA, 21 bp, Homo sapiens
tgcagtgggagtctttaggtg

SEQ ID NO: 69474 - DNA, 21 bp, Homo sapiens
ctacgtgcctctctctagtag

SEQ ID NO: 69475 - DNA, 24 bp, Homo sapiens
gagcactggcccctttttcttctt

SEQ ID NO: 69476 - DNA, 18 bp, Homo sapiens
catcggcagtcagctgtc

SEQ ID NO: 69477 - DNA, 19 bp, Homo sapiens
aatcgcatccggatgatag

SEQ ID NO: 69478 - DNA, 18 bp, Homo sapiens
ggcgacagagcaagactc

SEQ ID NO: 69479 - DNA, 21 bp, Homo sapiens
aggagatacgagctttggagg

SEQ ID NO: 69480 - DNA, 16 bp, Homo sapiens
gggcctccagcggccg

SEQ ID NO: 69481 - DNA, 16 bp, Homo sapiens
ctccgctcacggcact

SEQ ID NO: 69482 - DNA, 16 bp, Homo sapiens
tcgccctgggccttac

SEQ ID NO: 69483 - DNA, 19 bp, Homo sapiens
ctgtcccctctgctggtga

SEQ ID NO: 69484 - DNA, 16 bp, Homo sapiens
gagtccaaacacggcc

SEQ ID NO: 69485 - DNA, 23 bp, Homo sapiens
ggatctgttgcagccggagcggc

SEQ ID NO: 69486 - DNA, 16 bp, Homo sapiens
atccagctccagagcc

SEQ ID NO: 69487 - DNA, 18 bp, Homo sapiens
tcgtgcaggggcaggtaa

SEQ ID NO: 69488 - DNA, 16 bp, Homo sapiens
acccccaaacgctcgc

SEQ ID NO: 69489 - DNA, 17 bp, Homo sapiens
ctgtctcttgcagggcg

SEQ ID NO: 69490 - DNA, 18 bp, Homo sapiens
ttcgtgaaggtcttcgtt

SEQ ID NO: 69491 - DNA, 19 bp, Homo sapiens
ccctgcacttcagggactt

SEQ ID NO: 69492 - DNA, 20 bp, Homo sapiens
ctccaagtaggtgatgtgtc

SEQ ID NO: 69493 - DNA, 23 bp, Homo sapiens
gatcctgtggcttttgtctttag

SEQ ID NO: 69494 - DNA, 20 bp, Homo sapiens
gttacacttgatcgtcaagg

SEQ ID NO: 69495 - DNA, 24 bp, Homo sapiens
tctttaaggtcatcaaggattacc

SEQ ID NO: 69496 - DNA, 17 bp, Homo sapiens
caggccatccctgagaa

SEQ ID NO: 69497 - DNA, 24 bp, Homo sapiens
gccctcacagacaatgggagacac

SEQ ID NO: 69498 - DNA, 16 bp, Homo sapiens
tcaggggcactccggc

SEQ ID NO: 69499 - DNA, 20 bp, Homo sapiens
actgcaggacaaagtcagct

SEQ ID NO: 69500 - DNA, 22 bp, Homo sapiens
cagtgcgtggtctgtctgttgc

SEQ ID NO: 69501 - DNA, 24 bp, Homo sapiens
gaatttgaccaagttcaccagcac

SEQ ID NO: 69502 - DNA, 24 bp, Homo sapiens
gggtttggacacactgtcctgcgg

SEQ ID NO: 69503 - DNA, 22 bp, Homo sapiens
aggatctcaattcttttcttac

SEQ ID NO: 69504 - DNA, 17 bp, Homo sapiens
caaactgccgccgcttc

SEQ ID NO: 69505 - DNA, 21 bp, Homo sapiens
ggtggtttcaactttattcac

SEQ ID NO: 69506 - DNA, 18 bp, Homo sapiens
cctcggaattccttctgg

SEQ ID NO: 69507 - DNA, 18 bp, Homo sapiens
acagcagacagatcatcc

SEQ ID NO: 69508 - DNA, 17 bp, Homo sapiens
cttgttgggtgggtggg

SEQ ID NO: 69509 - DNA, 16 bp, Homo sapiens
gggccggccctgggga

SEQ ID NO: 69510 - DNA, 24 bp, Homo sapiens
tcatagagtgactagaccacagcc

SEQ ID NO: 69511 - DNA, 17 bp, Homo sapiens
caggtggcacacagggc

SEQ ID NO: 69512 - DNA, 17 bp, Homo sapiens
tgctccctgcaggatga

SEQ ID NO: 69513 - DNA, 19 bp, Homo sapiens
ctgacttacatgggggact

SEQ ID NO: 69514 - DNA, 24 bp, Homo sapiens
gacgtcaggtgcttcccacatgcc

SEQ ID NO: 69515 - DNA, 16 bp, Homo sapiens
gccggcaggcagttgt

SEQ ID NO: 69516 - DNA, 17 bp, Homo sapiens
gtggcagcgcaggctga

SEQ ID NO: 69517 - DNA, 17 bp, Homo sapiens
ctcgcagagctccttga

SEQ ID NO: 69518 - DNA, 19 bp, Homo sapiens
gggaggagctggggtagga

SEQ ID NO: 69519 - DNA, 20 bp, Homo sapiens
atccatgtgctctcaggaac

SEQ ID NO: 69520 - DNA, 16 bp, Homo sapiens
gccgtggtctgctaca

SEQ ID NO: 69521 - DNA, 16 bp, Homo sapiens
tggccaccccaagaat

SEQ ID NO: 69522 - DNA, 18 bp, Homo sapiens
taccctctgtcgcaccat

SEQ ID NO: 69523 - DNA, 16 bp, Homo sapiens
tgacctcagctcaact

SEQ ID NO: 69524 - DNA, 22 bp, Homo sapiens
cctgctgcctctgtctttggga

SEQ ID NO: 69525 - DNA, 17 bp, Homo sapiens
tgtcctccatgaggtgg

SEQ ID NO: 69526 - DNA, 24 bp, Homo sapiens
ctatagggcagcagccaggcgggg

SEQ ID NO: 69527 - DNA, 17 bp, Homo sapiens
ctgccccgagggctgtg

SEQ ID NO: 69528 - DNA, 17 bp, Homo sapiens
cctgacacgcattgtgt

SEQ ID NO: 69529 - DNA, 16 bp, Homo sapiens
gcccgagaggacaagg

SEQ ID NO: 69530 - DNA, 24 bp, Homo sapiens
cctgggccacagcgccatctacaa

SEQ ID NO: 69531 - DNA, 16 bp, Homo sapiens
cagcaggggcgcgtcc

SEQ ID NO: 69532 - DNA, 18 bp, Homo sapiens
ctcctgccccccccaagc

SEQ ID NO: 69533 - DNA, 21 bp, Homo sapiens
gagttcctgagagaatagagc

SEQ ID NO: 69534 - DNA, 17 bp, Homo sapiens
acatccatggcggaccc

SEQ ID NO: 69535 - DNA, 21 bp, Homo sapiens
cagctcactgcacacagaaac

SEQ ID NO: 69536 - DNA, 24 bp, Homo sapiens
aacacttttagagcctacatggag

SEQ ID NO: 69537 - DNA, 16 bp, Homo sapiens
caggacccccagtggg

SEQ ID NO: 69538 - DNA, 17 bp, Homo sapiens
gctctctggggagccca

SEQ ID NO: 69539 - DNA, 16 bp, Homo sapiens
cccccagctgcaaagc

SEQ ID NO: 69540 - DNA, 16 bp, Homo sapiens
ggcctggaacacgagc

SEQ ID NO: 69541 - DNA, 20 bp, Homo sapiens
cacctgctgtttctgcggcc

SEQ ID NO: 69542 - DNA, 19 bp, Homo sapiens
cttgatgagcctggtgatg

SEQ ID NO: 69543 - DNA, 16 bp, Homo sapiens
ctctcggtcccaaggg

SEQ ID NO: 69544 - DNA, 24 bp, Homo sapiens
tgctgaaggagccgttcgatgatg

SEQ ID NO: 69545 - DNA, 20 bp, Homo sapiens
accctgtgtgctggccgggc

SEQ ID NO: 69546 - DNA, 21 bp, Homo sapiens
gcctgtctgggttcccggtgc

SEQ ID NO: 69547 - DNA, 21 bp, Homo sapiens
tgagatcgtcctgtccatcac

SEQ ID NO: 69548 - DNA, 17 bp, Homo sapiens
ctctgcgggacccccag

SEQ ID NO: 69549 - DNA, 19 bp, Homo sapiens
gtggcgtgggacattctgc

SEQ ID NO: 69550 - DNA, 16 bp, Homo sapiens
tggaaggtggatgagc

SEQ ID NO: 69551 - DNA, 24 bp, Homo sapiens
gtcatggacgatggtcctgagctc

SEQ ID NO: 69552 - DNA, 24 bp, Homo sapiens
tgtccccatgcggcccagagcggc

SEQ ID NO: 69553 - DNA, 24 bp, Homo sapiens
atctctcctgagacccgtggaact

SEQ ID NO: 69554 - DNA, 18 bp, Homo sapiens
ggcctctggtgccaagtc

SEQ ID NO: 69555 - DNA, 16 bp, Homo sapiens
agggggtctcacaggc

SEQ ID NO: 69556 - DNA, 24 bp, Homo sapiens
ctggtactgcagaccttggacagc

SEQ ID NO: 69557 - DNA, 24 bp, Homo sapiens
ctcagaaagctgcacttcacccag

SEQ ID NO: 69558 - DNA, 19 bp, Homo sapiens
ggaggagctgtgtgaccag

SEQ ID NO: 69559 - DNA, 20 bp, Homo sapiens
gagtgcagaaacctggaaag

SEQ ID NO: 69560 - DNA, 23 bp, Homo sapiens
ggagagatgtgcggaccagaggc

SEQ ID NO: 69561 - DNA, 18 bp, Homo sapiens
ccaggagtgcctttgtgt

SEQ ID NO: 69562 - DNA, 17 bp, Homo sapiens
atccagccgtccttggc

SEQ ID NO: 69563 - DNA, 17 bp, Homo sapiens
acagcaaaccagcctct

SEQ ID NO: 69564 - DNA, 23 bp, Homo sapiens
gcaaggctacagaggacccccta

SEQ ID NO: 69565 - DNA, 17 bp, Homo sapiens
agaggggcaacaccggc

SEQ ID NO: 69566 - DNA, 16 bp, Homo sapiens
tcctgagacccagccc

SEQ ID NO: 69567 - DNA, 22 bp, Homo sapiens
ctcctatagagcgcagtccatc

SEQ ID NO: 69568 - DNA, 16 bp, Homo sapiens
cctgctcacccagagc

SEQ ID NO: 69569 - DNA, 22 bp, Homo sapiens
ctgatggagagattcttcaggt

SEQ ID NO: 69570 - DNA, 23 bp, Homo sapiens
gatgctccctgggaagcagagct

SEQ ID NO: 69571 - DNA, 19 bp, Homo sapiens
actgcctgttgatgagcag

SEQ ID NO: 69572 - DNA, 24 bp, Homo sapiens
cccagagtcgggctggcctgcgcc

SEQ ID NO: 69573 - DNA, 19 bp, Homo sapiens
cggagaaatagccctgagc

SEQ ID NO: 69574 - DNA, 24 bp, Homo sapiens
tccccacccgccccagcaggctgc

SEQ ID NO: 69575 - DNA, 22 bp, Homo sapiens
ggaccgaagtcccaggcagagc

SEQ ID NO: 69576 - DNA, 17 bp, Homo sapiens
acgtgctgtcctttgtg

SEQ ID NO: 69577 - DNA, 18 bp, Homo sapiens
cagtgaatgaacaggggt

SEQ ID NO: 69578 - DNA, 21 bp, Homo sapiens
agttaatcagctcctcctgca

SEQ ID NO: 69579 - DNA, 16 bp, Homo sapiens
cgggtgcttgtgctct

SEQ ID NO: 69580 - DNA, 24 bp, Homo sapiens
tttcggacctggtggtctttatcc

SEQ ID NO: 69581 - DNA, 18 bp, Homo sapiens
cgggtcggttcctgagga

SEQ ID NO: 69582 - DNA, 17 bp, Homo sapiens
gaagtggtgtgtgtggc

SEQ ID NO: 69583 - DNA, 20 bp, Homo sapiens
ctcattggcctcccttgtgc

SEQ ID NO: 69584 - DNA, 16 bp, Homo sapiens
cgctagcacccggccc

SEQ ID NO: 69585 - DNA, 24 bp, Homo sapiens
agctctcccacatccccgaggata

SEQ ID NO: 69586 - DNA, 19 bp, Homo sapiens
tccggtcactcgaagagga

SEQ ID NO: 69587 - DNA, 16 bp, Homo sapiens
acctggcagagggctg

SEQ ID NO: 69588 - DNA, 16 bp, Homo sapiens
caggcctcgggacacc

SEQ ID NO: 69589 - DNA, 17 bp, Homo sapiens
ggagagggagcgggcca

SEQ ID NO: 69590 - DNA, 24 bp, Homo sapiens
cagcctgggcgacagagcaagact

SEQ ID NO: 69591 - DNA, 18 bp, Homo sapiens
ggctgtcttcacatcctc

SEQ ID NO: 69592 - DNA, 24 bp, Homo sapiens
tgtttgtggtagaaagtgttctca

SEQ ID NO: 69593 - DNA, 24 bp, Homo sapiens
gccccgggagcagaggcctcgtgc

SEQ ID NO: 69594 - DNA, 21 bp, Homo sapiens
cttctcttcaaaggtgatggc

SEQ ID NO: 69595 - DNA, 18 bp, Homo sapiens
tggggaacagactccaac

SEQ ID NO: 69596 - DNA, 21 bp, Homo sapiens
ggatgtggccgcatactcggc

SEQ ID NO: 69597 - DNA, 16 bp, Homo sapiens
tgctgcctgctgagac

SEQ ID NO: 69598 - DNA, 16 bp, Homo sapiens
cctggtggtcctgggt

SEQ ID NO: 69599 - DNA, 16 bp, Homo sapiens
gctgaatgtggctgac

SEQ ID NO: 69600 - DNA, 23 bp, Homo sapiens
gcagccgccccggcccctgctcc

SEQ ID NO: 69601 - DNA, 24 bp, Homo sapiens
cccagccaccatacctgcagccgg

SEQ ID NO: 69602 - DNA, 18 bp, Homo sapiens
gtgagctgcgtcctctct

SEQ ID NO: 69603 - DNA, 17 bp, Homo sapiens
gccgagacggggatacc

SEQ ID NO: 69604 - DNA, 20 bp, Homo sapiens
ccacgcgtgtgtatgagatg

SEQ ID NO: 69605 - DNA, 17 bp, Homo sapiens
gggacggtcagctgagg

SEQ ID NO: 69606 - DNA, 17 bp, Homo sapiens
caatcgcgagcagcatc

SEQ ID NO: 69607 - DNA, 24 bp, Homo sapiens
gtgagtcggcccgcagcagcaaca

SEQ ID NO: 69608 - DNA, 22 bp, Homo sapiens
cacatcagcaggtggccttttc

SEQ ID NO: 69609 - DNA, 17 bp, Homo sapiens
acgcagtaggggctgaa

SEQ ID NO: 69610 - DNA, 24 bp, Homo sapiens
agcaggtgggacgccgcctgtcct

SEQ ID NO: 69611 - DNA, 16 bp, Homo sapiens
ctctgacgccctgagc

SEQ ID NO: 69612 - DNA, 22 bp, Homo sapiens
tcctgacaggcctttgacttcc

SEQ ID NO: 69613 - DNA, 16 bp, Homo sapiens
cttcccaaccctggga

SEQ ID NO: 69614 - DNA, 18 bp, Homo sapiens
ccaacaaggatggagtcg

SEQ ID NO: 69615 - DNA, 23 bp, Homo sapiens
ctccctgcagaagcaagagaagc

SEQ ID NO: 69616 - DNA, 16 bp, Homo sapiens
ctcgcccacggcccat

SEQ ID NO: 69617 - DNA, 17 bp, Homo sapiens
ctgtgggaggagaaagg

SEQ ID NO: 69618 - DNA, 18 bp, Homo sapiens
catgtctgagggatgtcc

SEQ ID NO: 69619 - DNA, 16 bp, Homo sapiens
gagtagggcacggacc

SEQ ID NO: 69620 - DNA, 19 bp, Homo sapiens
ggacttggcctcagctgct

SEQ ID NO: 69621 - DNA, 17 bp, Homo sapiens
gacggatggtccctgcc

SEQ ID NO: 69622 - DNA, 18 bp, Homo sapiens
agaagaagaccagcggcc

SEQ ID NO: 69623 - DNA, 17 bp, Homo sapiens
agacagggagggaggcc

SEQ ID NO: 69624 - DNA, 16 bp, Homo sapiens
cgtgcggctggggtcc

SEQ ID NO: 69625 - DNA, 18 bp, Homo sapiens
ctgctcggggaaggggga

SEQ ID NO: 69626 - DNA, 18 bp, Homo sapiens
gcaccttccagtcagact

SEQ ID NO: 69627 - DNA, 20 bp, Homo sapiens
gcaggctcccccggctgaga

SEQ ID NO: 69628 - DNA, 17 bp, Homo sapiens
gggaagtaaagatgagc

SEQ ID NO: 69629 - DNA, 24 bp, Homo sapiens
caaagcagagcctcagatgctagc

SEQ ID NO: 69630 - DNA, 16 bp, Homo sapiens
ccaggccggccatggt

SEQ ID NO: 69631 - DNA, 23 bp, Homo sapiens
acgcctcctctcctcgcaggagt

SEQ ID NO: 69632 - DNA, 16 bp, Homo sapiens
gctctgcccagaggct

SEQ ID NO: 69633 - DNA, 19 bp, Homo sapiens
gagtccctgcgctataaag

SEQ ID NO: 69634 - DNA, 17 bp, Homo sapiens
cgctccagagtgcagct

SEQ ID NO: 69635 - DNA, 21 bp, Homo sapiens
ctgctctctgctccatggtac

SEQ ID NO: 69636 - DNA, 19 bp, Homo sapiens
tgtctttgggcctgaaagc

SEQ ID NO: 69637 - DNA, 16 bp, Homo sapiens
cttcctgggagggagg

SEQ ID NO: 69638 - DNA, 17 bp, Homo sapiens
caggtgcaagtcagttc

SEQ ID NO: 69639 - DNA, 17 bp, Homo sapiens
cgttcccagggcctccc

SEQ ID NO: 69640 - DNA, 20 bp, Homo sapiens
cctgtttggttttgtccagg

SEQ ID NO: 69641 - DNA, 17 bp, Homo sapiens
tcatgcctggatttggt

SEQ ID NO: 69642 - DNA, 16 bp, Homo sapiens
ccaggccctcgaatcc

SEQ ID NO: 69643 - DNA, 19 bp, Homo sapiens
gcgccccagaaggcttctc

SEQ ID NO: 69644 - DNA, 18 bp, Homo sapiens
aactcactcatccctggc

SEQ ID NO: 69645 - DNA, 24 bp, Homo sapiens
acagcattaatctcttaccataac

SEQ ID NO: 69646 - DNA, 23 bp, Homo sapiens
tagctcagcactgctggctctgc

SEQ ID NO: 69647 - DNA, 20 bp, Homo sapiens
acaaggccacgacgcactgg

SEQ ID NO: 69648 - DNA, 23 bp, Homo sapiens
cccggtggagcactcgaggttgg

SEQ ID NO: 69649 - DNA, 18 bp, Homo sapiens
ttcaccaccagaacaggc

SEQ ID NO: 69650 - DNA, 16 bp, Homo sapiens
gcctgaggtgtcctgt

SEQ ID NO: 69651 - DNA, 20 bp, Homo sapiens
cactggacaggaactccagc

SEQ ID NO: 69652 - DNA, 22 bp, Homo sapiens
cctcatccaccgctgtgccagc

SEQ ID NO: 69653 - DNA, 17 bp, Homo sapiens
cgcacaggttacacagc

SEQ ID NO: 69654 - DNA, 24 bp, Homo sapiens
tgcctgacatcatcatcaaggcgc

SEQ ID NO: 69655 - DNA, 17 bp, Homo sapiens
gcagaaggcgagacacc

SEQ ID NO: 69656 - DNA, 24 bp, Homo sapiens
agccacagccagcatggccgtccc

SEQ ID NO: 69657 - DNA, 17 bp, Homo sapiens
agttcctgtagaggtgc

SEQ ID NO: 69658 - DNA, 18 bp, Homo sapiens
ggccgtggccttctctcc

SEQ ID NO: 69659 - DNA, 20 bp, Homo sapiens
acttggaggggttggtgtac

SEQ ID NO: 69660 - DNA, 24 bp, Homo sapiens
cgtgttggccttcagaggcgctgc

SEQ ID NO: 69661 - DNA, 16 bp, Homo sapiens
tgccgcaaggcctagc

SEQ ID NO: 69662 - DNA, 24 bp, Homo sapiens
cagctctggccaggctgccgcacc

SEQ ID NO: 69663 - DNA, 24 bp, Homo sapiens
acatccccagggcatgaagtgcaa

SEQ ID NO: 69664 - DNA, 24 bp, Homo sapiens
ccagtgtgttcgccatctccctgc

SEQ ID NO: 69665 - DNA, 17 bp, Homo sapiens
cctcccagccgtggccc

SEQ ID NO: 69666 - DNA, 17 bp, Homo sapiens
cggcacctgatgaacca

SEQ ID NO: 69667 - DNA, 23 bp, Homo sapiens
caaggcctgagcgcctcggtttt

SEQ ID NO: 69668 - DNA, 16 bp, Homo sapiens
ttcaccggccctgagc

SEQ ID NO: 69669 - DNA, 16 bp, Homo sapiens
gatggagtgccagccc

SEQ ID NO: 69670 - DNA, 17 bp, Homo sapiens
ctctgcccgaccatgga

SEQ ID NO: 69671 - DNA, 21 bp, Homo sapiens
catcacgtcatagccatgtgg

SEQ ID NO: 69672 - DNA, 16 bp, Homo sapiens
cccccagcgccacagg

SEQ ID NO: 69673 - DNA, 24 bp, Homo sapiens
tgtccctttcatcactaaggtggg

SEQ ID NO: 69674 - DNA, 22 bp, Homo sapiens
tttgatgcgcggcaggcattga

SEQ ID NO: 69675 - DNA, 18 bp, Homo sapiens
ccctgaagctgtccttct

SEQ ID NO: 69676 - DNA, 21 bp, Homo sapiens
agcttgtccctggccaggggg

SEQ ID NO: 69677 - DNA, 16 bp, Homo sapiens
actccaggcacacccc

SEQ ID NO: 69678 - DNA, 23 bp, Homo sapiens
cacccctcactgtctgggtgtgc

SEQ ID NO: 69679 - DNA, 24 bp, Homo sapiens
atttccactcactgacttggaggc

SEQ ID NO: 69680 - DNA, 18 bp, Homo sapiens
cttttgatgacacccccg

SEQ ID NO: 69681 - DNA, 21 bp, Homo sapiens
gttagcggcccttgcaggtcc

SEQ ID NO: 69682 - DNA, 20 bp, Homo sapiens
catggctctttttgctcatc

SEQ ID NO: 69683 - DNA, 24 bp, Homo sapiens
gctctccttgaattctttcacggg

SEQ ID NO: 69684 - DNA, 18 bp, Homo sapiens
cctttcctcctcacccct

SEQ ID NO: 69685 - DNA, 17 bp, Homo sapiens
cggaccacatgttcaga

SEQ ID NO: 69686 - DNA, 18 bp, Homo sapiens
gttggggctccttcctca

SEQ ID NO: 69687 - DNA, 16 bp, Homo sapiens
caggtgctcacggggc

SEQ ID NO: 69688 - DNA, 23 bp, Homo sapiens
acaaggcttgaataactctccac

SEQ ID NO: 69689 - DNA, 16 bp, Homo sapiens
ccagggaggacacggg

SEQ ID NO: 69690 - DNA, 22 bp, Homo sapiens
gtgccgcagcatcagtgtgtct

SEQ ID NO: 69691 - DNA, 20 bp, Homo sapiens
gagggacgtctgtatcctgc

SEQ ID NO: 69692 - DNA, 18 bp, Homo sapiens
gctgggccgcccacgccc

SEQ ID NO: 69693 - DNA, 16 bp, Homo sapiens
tatcgtcagcctgggc

SEQ ID NO: 69694 - DNA, 20 bp, Homo sapiens
gcatgcgttgagctttggcc

SEQ ID NO: 69695 - DNA, 18 bp, Homo sapiens
cgtatcgagccatcatgt

SEQ ID NO: 69696 - DNA, 24 bp, Homo sapiens
ccctgaccctggtcacggcctctc

SEQ ID NO: 69697 - DNA, 16 bp, Homo sapiens
cccagccctgtagtgc

SEQ ID NO: 69698 - DNA, 23 bp, Homo sapiens
cttggggtctgcagatgagaact

SEQ ID NO: 69699 - DNA, 24 bp, Homo sapiens
ctcgcccacaggagacctagaaga

SEQ ID NO: 69700 - DNA, 18 bp, Homo sapiens
gctcacggaaacctgtct

SEQ ID NO: 69701 - DNA, 22 bp, Homo sapiens
cagtgacaagcttgttcccaac

SEQ ID NO: 69702 - DNA, 16 bp, Homo sapiens
gaggtccaggcggcac

SEQ ID NO: 69703 - DNA, 17 bp, Homo sapiens
cccgagtccaggcctag

SEQ ID NO: 69704 - DNA, 17 bp, Homo sapiens
ggtttcacgctccctgt

SEQ ID NO: 69705 - DNA, 16 bp, Homo sapiens
ggcaggcgcggaggaa

SEQ ID NO: 69706 - DNA, 17 bp, Homo sapiens
gcaggaccaaaacctgg

SEQ ID NO: 69707 - DNA, 18 bp, Homo sapiens
cttagtccccaggctggt

SEQ ID NO: 69708 - DNA, 19 bp, Homo sapiens
ccgggacccggtcgttact

SEQ ID NO: 69709 - DNA, 19 bp, Homo sapiens
gtctgtctcacatgcaccc

SEQ ID NO: 69710 - DNA, 23 bp, Homo sapiens
ggtgactgcaccttcctttcctc

SEQ ID NO: 69711 - DNA, 17 bp, Homo sapiens
cccacgggacacctgct

SEQ ID NO: 69712 - DNA, 17 bp, Homo sapiens
acgtggcaccctcgtac

SEQ ID NO: 69713 - DNA, 18 bp, Homo sapiens
gtgcctgtgtggaggtgg

SEQ ID NO: 69714 - DNA, 23 bp, Homo sapiens
gattctcttctcagctccagccc

SEQ ID NO: 69715 - DNA, 16 bp, Homo sapiens
gcccctgggctcgggg

SEQ ID NO: 69716 - DNA, 24 bp, Homo sapiens
ccaagctggagtcccaggctgggc

SEQ ID NO: 69717 - DNA, 18 bp, Homo sapiens
agctgtggaaggctcacc

SEQ ID NO: 69718 - DNA, 18 bp, Homo sapiens
ctcgaagaccatggcccc

SEQ ID NO: 69719 - DNA, 16 bp, Homo sapiens
ccccaagggcagagct

SEQ ID NO: 69720 - DNA, 18 bp, Homo sapiens
gtggtcctggagaagtgg

SEQ ID NO: 69721 - DNA, 17 bp, Homo sapiens
gagcattcagcttgagg

SEQ ID NO: 69722 - DNA, 23 bp, Homo sapiens
ttcgtcttctcctgcacaggaac

SEQ ID NO: 69723 - DNA, 18 bp, Homo sapiens
ccctcttcttcagggggc

SEQ ID NO: 69724 - DNA, 16 bp, Homo sapiens
aggatctccgcccagc

SEQ ID NO: 69725 - DNA, 17 bp, Homo sapiens
cagttcctgggcagtgc

SEQ ID NO: 69726 - DNA, 18 bp, Homo sapiens
ggtgactggcagaaagat

SEQ ID NO: 69727 - DNA, 16 bp, Homo sapiens
ggcctcagctggcacc

SEQ ID NO: 69728 - DNA, 18 bp, Homo sapiens
gttacccccaaatatccc

SEQ ID NO: 69729 - DNA, 16 bp, Homo sapiens
ccctgctgacccaggg

SEQ ID NO: 69730 - DNA, 16 bp, Homo sapiens
cactgcgttccagcgt

SEQ ID NO: 69731 - DNA, 17 bp, Homo sapiens
tctccaggctcatcagc

SEQ ID NO: 69732 - DNA, 19 bp, Homo sapiens
tcctgaggattgtgggagg

SEQ ID NO: 69733 - DNA, 18 bp, Homo sapiens
gcgttagacagctcctgc

SEQ ID NO: 69734 - DNA, 17 bp, Homo sapiens
gggggccagagatgggt

SEQ ID NO: 69735 - DNA, 24 bp, Homo sapiens
caccgacagtgacttgtacagggc

SEQ ID NO: 69736 - DNA, 16 bp, Homo sapiens
agggaacaccagctgg

SEQ ID NO: 69737 - DNA, 16 bp, Homo sapiens
ctcacctgtgttggag

SEQ ID NO: 69738 - DNA, 23 bp, Homo sapiens
cctcggacatcaacaacatgccc

SEQ ID NO: 69739 - DNA, 17 bp, Homo sapiens
attgccgtcaccgggag

SEQ ID NO: 69740 - DNA, 16 bp, Homo sapiens
agcaccgggacacagc

SEQ ID NO: 69741 - DNA, 16 bp, Homo sapiens
caggccagggaccact

SEQ ID NO: 69742 - DNA, 16 bp, Homo sapiens
cctcctctgcctcgct

SEQ ID NO: 69743 - DNA, 18 bp, Homo sapiens
cagggaggagaaagaggc

SEQ ID NO: 69744 - DNA, 16 bp, Homo sapiens
ccgtgcgcgcccctgc

SEQ ID NO: 69745 - DNA, 22 bp, Homo sapiens
cttccctctgagaggcgatacc

SEQ ID NO: 69746 - DNA, 16 bp, Homo sapiens
gcctgtgctctctgct

SEQ ID NO: 69747 - DNA, 16 bp, Homo sapiens
cgacgagcacagcacc

SEQ ID NO: 69748 - DNA, 18 bp, Homo sapiens
cttcccttgcagtggcct

SEQ ID NO: 69749 - DNA, 16 bp, Homo sapiens
gtcgggacctgctccc

SEQ ID NO: 69750 - DNA, 21 bp, Homo sapiens
cagctgcacaggagcgtttcc

SEQ ID NO: 69751 - DNA, 16 bp, Homo sapiens
gaccacggcggagtct

SEQ ID NO: 69752 - DNA, 18 bp, Homo sapiens
agcagtaagcagagccct

SEQ ID NO: 69753 - DNA, 16 bp, Homo sapiens
tcaacgtcctccaacc

SEQ ID NO: 69754 - DNA, 16 bp, Homo sapiens
ttctcggaggccacgt

SEQ ID NO: 69755 - DNA, 19 bp, Homo sapiens
gctctgagccacactcacc

SEQ ID NO: 69756 - DNA, 20 bp, Homo sapiens
cgtctgtgtcctcccagact

SEQ ID NO: 69757 - DNA, 16 bp, Homo sapiens
acacccacgcagagcc

SEQ ID NO: 69758 - DNA, 21 bp, Homo sapiens
ggttcctgtgctggtggagcc

SEQ ID NO: 69759 - DNA, 19 bp, Homo sapiens
gcacgagggatgtggaaga

SEQ ID NO: 69760 - DNA, 16 bp, Homo sapiens
cacggatgcctacagc

SEQ ID NO: 69761 - DNA, 16 bp, Homo sapiens
tcctcctggctggaga

SEQ ID NO: 69762 - DNA, 16 bp, Homo sapiens
tagcctggtgctcggg

SEQ ID NO: 69763 - DNA, 17 bp, Homo sapiens
acgactcgctcgatggg

SEQ ID NO: 69764 - DNA, 18 bp, Homo sapiens
aggtcaaccccaggtggg

SEQ ID NO: 69765 - DNA, 24 bp, Homo sapiens
gagctggacttgctcaggggctgc

SEQ ID NO: 69766 - DNA, 22 bp, Homo sapiens
ggatggtcctttctagtcgtcc

SEQ ID NO: 69767 - DNA, 16 bp, Homo sapiens
ttgtccccagggtccc

SEQ ID NO: 69768 - DNA, 16 bp, Homo sapiens
gttggcaggggcatcc

SEQ ID NO: 69769 - DNA, 18 bp, Homo sapiens
agggtccctgactgtgac

SEQ ID NO: 69770 - DNA, 17 bp, Homo sapiens
gacctctccttccagcc

SEQ ID NO: 69771 - DNA, 20 bp, Homo sapiens
agggaccctcgggctggccc

SEQ ID NO: 69772 - DNA, 18 bp, Homo sapiens
gactctgcaggacatcct

SEQ ID NO: 69773 - DNA, 20 bp, Homo sapiens
gagatggtgtaacctcgggg

SEQ ID NO: 69774 - DNA, 17 bp, Homo sapiens
tgaggttaaggcccggt

SEQ ID NO: 69775 - DNA, 17 bp, Homo sapiens
tgctctttaaggcgtcc

SEQ ID NO: 69776 - DNA, 17 bp, Homo sapiens
cctcgggcgaagacagt

SEQ ID NO: 69777 - DNA, 17 bp, Homo sapiens
gaagcaagaggcccacc

SEQ ID NO: 69778 - DNA, 16 bp, Homo sapiens
cccagtggcctccggc

SEQ ID NO: 69779 - DNA, 16 bp, Homo sapiens
gcctggggcaagtgag

SEQ ID NO: 69780 - DNA, 19 bp, Homo sapiens
agagagtagagagggacgc

SEQ ID NO: 69781 - DNA, 16 bp, Homo sapiens
gccctcccaggggttc

SEQ ID NO: 69782 - DNA, 19 bp, Homo sapiens
aagtgccaggcatcaaccc

SEQ ID NO: 69783 - DNA, 19 bp, Homo sapiens
tggtagagctgcaggaaca

SEQ ID NO: 69784 - DNA, 16 bp, Homo sapiens
gtgccctagggctggc

SEQ ID NO: 69785 - DNA, 17 bp, Homo sapiens
ctacctcattgggcagc

SEQ ID NO: 69786 - DNA, 18 bp, Homo sapiens
tgtgttcctccctgtggg

SEQ ID NO: 69787 - DNA, 16 bp, Homo sapiens
ccccccaccattcacc

SEQ ID NO: 69788 - DNA, 21 bp, Homo sapiens
catcccctccctgtgcagttt

SEQ ID NO: 69789 - DNA, 18 bp, Homo sapiens
tgccacagggagcttagg

SEQ ID NO: 69790 - DNA, 22 bp, Homo sapiens
tcaaacaagccaatcctgctgc

SEQ ID NO: 69791 - DNA, 20 bp, Homo sapiens
gagctgtgtggctcgggtga

SEQ ID NO: 69792 - DNA, 24 bp, Homo sapiens
tatgatgggatctggtcgaggagc

SEQ ID NO: 69793 - DNA, 22 bp, Homo sapiens
caggcttgcagagggctctggc

SEQ ID NO: 69794 - DNA, 16 bp, Homo sapiens
cctcacctggccttct

SEQ ID NO: 69795 - DNA, 16 bp, Homo sapiens
cggcctcctgtggacg

SEQ ID NO: 69796 - DNA, 19 bp, Homo sapiens
actccctacccactgcagg

SEQ ID NO: 69797 - DNA, 24 bp, Homo sapiens
agtcctttgagcggtcggtgcagc

SEQ ID NO: 69798 - DNA, 20 bp, Homo sapiens
gcacttcatgctgtagggga

SEQ ID NO: 69799 - DNA, 19 bp, Homo sapiens
tcgccgtcctgtatgttgg

SEQ ID NO: 69800 - DNA, 16 bp, Homo sapiens
tcattggacaggatgg

SEQ ID NO: 69801 - DNA, 24 bp, Homo sapiens
ctggaatggatggtcttgtctgcc

SEQ ID NO: 69802 - DNA, 17 bp, Homo sapiens
cagctcgatgagccggc

SEQ ID NO: 69803 - DNA, 17 bp, Homo sapiens
ctctgcggggcagggcc

SEQ ID NO: 69804 - DNA, 18 bp, Homo sapiens
cgtcctcaccacacacgt

SEQ ID NO: 69805 - DNA, 19 bp, Homo sapiens
acagagcaacagcgagctc

SEQ ID NO: 69806 - DNA, 16 bp, Homo sapiens
cgggtaggcgccaggc

SEQ ID NO: 69807 - DNA, 24 bp, Homo sapiens
cacggagttcctgacgggcctggg

SEQ ID NO: 69808 - DNA, 17 bp, Homo sapiens
agggcgtggggtagcag

SEQ ID NO: 69809 - DNA, 24 bp, Homo sapiens
ggtgtacctgggaggcctggacgt

SEQ ID NO: 69810 - DNA, 16 bp, Homo sapiens
tgttaggctcggaacc

SEQ ID NO: 69811 - DNA, 17 bp, Homo sapiens
gggcatcagggtggcga

SEQ ID NO: 69812 - DNA, 16 bp, Homo sapiens
gcaccagaggacgtgg

SEQ ID NO: 69813 - DNA, 21 bp, Homo sapiens
aatggacacaaagtcgttgcc

SEQ ID NO: 69814 - DNA, 18 bp, Homo sapiens
cagtgcaaggcacagagg

SEQ ID NO: 69815 - DNA, 18 bp, Homo sapiens
cccctcactcaccttgat

SEQ ID NO: 69816 - DNA, 24 bp, Homo sapiens
accctcagccgtcttccacatcgc

SEQ ID NO: 69817 - DNA, 16 bp, Homo sapiens
ccaccaacccgggaca

SEQ ID NO: 69818 - DNA, 17 bp, Homo sapiens
cgacaagaagcgccacc

SEQ ID NO: 69819 - DNA, 16 bp, Homo sapiens
ctgagcactgcggcct

SEQ ID NO: 69820 - DNA, 20 bp, Homo sapiens
gaggacttcaagcttggcac

SEQ ID NO: 69821 - DNA, 18 bp, Homo sapiens
acaaagttgaactggccc

SEQ ID NO: 69822 - DNA, 17 bp, Homo sapiens
cgctgccagaggggaaa

SEQ ID NO: 69823 - DNA, 21 bp, Homo sapiens
tttcctgcactgcagggacac

SEQ ID NO: 69824 - DNA, 16 bp, Homo sapiens
tagcagtgcaaccagg

SEQ ID NO: 69825 - DNA, 23 bp, Homo sapiens
cacactgcagggccccacccggc

SEQ ID NO: 69826 - DNA, 21 bp, Homo sapiens
ggatgaccctttctcttgtcc

SEQ ID NO: 69827 - DNA, 17 bp, Homo sapiens
ccatgtctggggagact

SEQ ID NO: 69828 - DNA, 19 bp, Homo sapiens
gctggactacgagtgcaac

SEQ ID NO: 69829 - DNA, 17 bp, Homo sapiens
ccacgaagggcaggttg

SEQ ID NO: 69830 - DNA, 19 bp, Homo sapiens
cagtgcaggaaaggtaggg

SEQ ID NO: 69831 - DNA, 24 bp, Homo sapiens
tgggcctgtcccaccagctcacgc

SEQ ID NO: 69832 - DNA, 16 bp, Homo sapiens
ggcgtgaccaccaagt

SEQ ID NO: 69833 - DNA, 18 bp, Homo sapiens
tgtgaggccatctgggga

SEQ ID NO: 69834 - DNA, 19 bp, Homo sapiens
ccaagatcgtgtctgaccg

SEQ ID NO: 69835 - DNA, 19 bp, Homo sapiens
ccgggcaatccacttggag

SEQ ID NO: 69836 - DNA, 16 bp, Homo sapiens
tgagtgggggtgggtc

SEQ ID NO: 69837 - DNA, 17 bp, Homo sapiens
caccccgctgagggagc

SEQ ID NO: 69838 - DNA, 20 bp, Homo sapiens
tagtgagctcaccccctgcc

SEQ ID NO: 69839 - DNA, 16 bp, Homo sapiens
gggaggcgtggcaacc

SEQ ID NO: 69840 - DNA, 20 bp, Homo sapiens
caaccccaccgatatctacc

SEQ ID NO: 69841 - DNA, 16 bp, Homo sapiens
ctggggttggagtagg

SEQ ID NO: 69842 - DNA, 19 bp, Homo sapiens
cgccagcgggtagggaata

SEQ ID NO: 69843 - DNA, 16 bp, Homo sapiens
gctcggctggagtctg

SEQ ID NO: 69844 - DNA, 24 bp, Homo sapiens
tgtggggcgggtgtgtgggcagag

SEQ ID NO: 69845 - DNA, 24 bp, Homo sapiens
actcggtgaagtcctccaccgagg

SEQ ID NO: 69846 - DNA, 22 bp, Homo sapiens
gccttcagatctgcgaggaagc

SEQ ID NO: 69847 - DNA, 17 bp, Homo sapiens
ggcaataccgtccaagg

SEQ ID NO: 69848 - DNA, 17 bp, Homo sapiens
gtcccatagcaaagccc

SEQ ID NO: 69849 - DNA, 18 bp, Homo sapiens
tgactgcaatctgtgcct

SEQ ID NO: 69850 - DNA, 18 bp, Homo sapiens
ccagcggaagcgcctcat

SEQ ID NO: 69851 - DNA, 16 bp, Homo sapiens
agagcctcgacacccc

SEQ ID NO: 69852 - DNA, 22 bp, Homo sapiens
tggaaatatatttgtataccac

SEQ ID NO: 69853 - DNA, 21 bp, Homo sapiens
taagtctgtctggacataaac

SEQ ID NO: 69854 - DNA, 21 bp, Homo sapiens
gaccaacattggtcttttgtg

SEQ ID NO: 69855 - DNA, 22 bp, Homo sapiens
tatttaaaactccaaaaaatac

SEQ ID NO: 69856 - DNA, 22 bp, Homo sapiens
acaattgccatttgggacttac

SEQ ID NO: 69857 - DNA, 22 bp, Homo sapiens
taccctaacttatgaatagtgg

SEQ ID NO: 69858 - DNA, 20 bp, Homo sapiens
ggttcctggaaggtgacgtg

SEQ ID NO: 69859 - DNA, 19 bp, Homo sapiens
tgagagtctgtacccgacc

SEQ ID NO: 69860 - DNA, 24 bp, Homo sapiens
ccttttttttttttttaattgttt

SEQ ID NO: 69861 - DNA, 22 bp, Homo sapiens
ggaggagggcagtacactgacc

SEQ ID NO: 69862 - DNA, 22 bp, Homo sapiens
gcattcatagttacagggattt

SEQ ID NO: 69863 - DNA, 22 bp, Homo sapiens
agattgctgctgcacagtgatc

SEQ ID NO: 69864 - DNA, 16 bp, Homo sapiens
ttcctccagggcaggc

SEQ ID NO: 69865 - DNA, 24 bp, Homo sapiens
tacttctgaatattcctatcatga

SEQ ID NO: 69866 - DNA, 22 bp, Homo sapiens
agccctgtgtttcagctcattg

SEQ ID NO: 69867 - DNA, 21 bp, Homo sapiens
atctagtttttgtgtttgcac

SEQ ID NO: 69868 - DNA, 23 bp, Homo sapiens
ggcttctctttattgtcctgagt

SEQ ID NO: 69869 - DNA, 19 bp, Homo sapiens
ttatgcacacttgcctgcc

SEQ ID NO: 69870 - DNA, 21 bp, Homo sapiens
ttttcctgacatactcttgac

SEQ ID NO: 69871 - DNA, 18 bp, Homo sapiens
gtcgtcttagggttaatc

SEQ ID NO: 69872 - DNA, 17 bp, Homo sapiens
gagcctatcggtcattg

SEQ ID NO: 69873 - DNA, 23 bp, Homo sapiens
ctcactctctttggcacagggat

SEQ ID NO: 69874 - DNA, 21 bp, Homo sapiens
atctcaacagttcctagacgg

SEQ ID NO: 69875 - DNA, 20 bp, Homo sapiens
gcttcagtctgtcacaaagc

SEQ ID NO: 69876 - DNA, 22 bp, Homo sapiens
ggacaaacattgctatccaatt

SEQ ID NO: 69877 - DNA, 24 bp, Homo sapiens
tatctaaggaatttaaaaactggt

SEQ ID NO: 69878 - DNA, 21 bp, Homo sapiens
tgcttatgacttactgctctc

SEQ ID NO: 69879 - DNA, 23 bp, Homo sapiens
agaaaatattttctgaatactgg

SEQ ID NO: 69880 - DNA, 22 bp, Homo sapiens
gccagtcattacttaccatttc

SEQ ID NO: 69881 - DNA, 20 bp, Homo sapiens
gagctcttagttttttccct

SEQ ID NO: 69882 - DNA, 20 bp, Homo sapiens
tgtgcatctttttcaggagt

SEQ ID NO: 69883 - DNA, 21 bp, Homo sapiens
atgaacaacattgttatttgg

SEQ ID NO: 69884 - DNA, 24 bp, Homo sapiens
aacaaaaacaacaacaacagcaac

SEQ ID NO: 69885 - DNA, 21 bp, Homo sapiens
ggagactatactaacttttgc

SEQ ID NO: 69886 - DNA, 21 bp, Homo sapiens
tcttcacaacaaccctgtaaa

SEQ ID NO: 69887 - DNA, 24 bp, Homo sapiens
agtactgacttttcatactgtttt

SEQ ID NO: 69888 - DNA, 24 bp, Homo sapiens
ctgaggacctagagggaaagctta

SEQ ID NO: 69889 - DNA, 18 bp, Homo sapiens
tgcagttcaacaatgcgg

SEQ ID NO: 69890 - DNA, 19 bp, Homo sapiens
tcttgcatcccttggacct

SEQ ID NO: 69891 - DNA, 24 bp, Homo sapiens
tagaaagtttagtatacacgtttt

SEQ ID NO: 69892 - DNA, 21 bp, Homo sapiens
aattggttttctttgcctctg

SEQ ID NO: 69893 - DNA, 19 bp, Homo sapiens
tgacgtttgcagaagatgg

SEQ ID NO: 69894 - DNA, 22 bp, Homo sapiens
cctagtgttgatgcggtacatg

SEQ ID NO: 69895 - DNA, 17 bp, Homo sapiens
acaaagaggaggctagt

SEQ ID NO: 69896 - DNA, 21 bp, Homo sapiens
caactttctctgaaacctgtg

SEQ ID NO: 69897 - DNA, 22 bp, Homo sapiens
tctgatgatgaaagtgaaaagc

SEQ ID NO: 69898 - DNA, 23 bp, Homo sapiens
tcaatcaatgcttttcttaccct

SEQ ID NO: 69899 - DNA, 19 bp, Homo sapiens
actcctcacatcaccccat

SEQ ID NO: 69900 - DNA, 21 bp, Homo sapiens
gaaagggtcccactgctacta

SEQ ID NO: 69901 - DNA, 24 bp, Homo sapiens
gcaagactctgtctcaaaaaaaaa

SEQ ID NO: 69902 - DNA, 24 bp, Homo sapiens
atttccagacttcagtagtacttg

SEQ ID NO: 69903 - DNA, 22 bp, Homo sapiens
gggaggcagagttgcagtgagc

SEQ ID NO: 69904 - DNA, 20 bp, Homo sapiens
tgtagctttgggaaatttgg

SEQ ID NO: 69905 - DNA, 23 bp, Homo sapiens
ctctctctctttagatctttcag

SEQ ID NO: 69906 - DNA, 22 bp, Homo sapiens
tgctttgttttatttaggttcc

SEQ ID NO: 69907 - DNA, 20 bp, Homo sapiens
aaccagctgacagagacaaa

SEQ ID NO: 69908 - DNA, 23 bp, Homo sapiens
tgataaattttggaaaatctgga

SEQ ID NO: 69909 - DNA, 21 bp, Homo sapiens
acctgatctctctgatttcca

SEQ ID NO: 69910 - DNA, 21 bp, Homo sapiens
ctgagccttcaaatgatgaaa

SEQ ID NO: 69911 - DNA, 23 bp, Homo sapiens
actggaactatctgtaatactgg

SEQ ID NO: 69912 - DNA, 22 bp, Homo sapiens
tgggaaaaactttatacctggc

SEQ ID NO: 69913 - DNA, 21 bp, Homo sapiens
tgttgggaaaaaaacctcatc

SEQ ID NO: 69914 - DNA, 22 bp, Homo sapiens
tgtatcataactgcttgcgaag

SEQ ID NO: 69915 - DNA, 24 bp, Homo sapiens
ttggtaagctgcccatctacatta

SEQ ID NO: 69916 - DNA, 21 bp, Homo sapiens
ggttcctgttccgtagatgtg

SEQ ID NO: 69917 - DNA, 24 bp, Homo sapiens
gattcccacttacctctgcgaagt

SEQ ID NO: 69918 - DNA, 16 bp, Homo sapiens
aacagcactcgagtgc

SEQ ID NO: 69919 - DNA, 24 bp, Homo sapiens
tttccaaagagaaactacatcttc

SEQ ID NO: 69920 - DNA, 23 bp, Homo sapiens
acttaaattttacatacctactg

SEQ ID NO: 69921 - DNA, 20 bp, Homo sapiens
tctttcccaaaacatggcac

SEQ ID NO: 69922 - DNA, 20 bp, Homo sapiens
aggcatttttttaggtacat

SEQ ID NO: 69923 - DNA, 22 bp, Homo sapiens
caacctacaattggtttcagag

SEQ ID NO: 69924 - DNA, 22 bp, Homo sapiens
tctgtttttctgaatctgttta

SEQ ID NO: 69925 - DNA, 22 bp, Homo sapiens
ttgttttcacagactgaaacag

SEQ ID NO: 69926 - DNA, 26 bp, Homo sapiens
agaagctatatgactgaattcttttc

SEQ ID NO: 69927 - DNA, 17 bp, Homo sapiens
gagtgggtaatgcaggc

SEQ ID NO: 69928 - DNA, 23 bp, Homo sapiens
tggaagagaatattcttctgacc

SEQ ID NO: 69929 - DNA, 17 bp, Homo sapiens
ttggagctttgctgctg

SEQ ID NO: 69930 - DNA, 19 bp, Homo sapiens
cagaagcaggaagctctgc

SEQ ID NO: 69931 - DNA, 24 bp, Homo sapiens
agaatgaacttaatgattacaatg

SEQ ID NO: 69932 - DNA, 23 bp, Homo sapiens
tcacttttaaagaaaatcagctc

SEQ ID NO: 69933 - DNA, 16 bp, Homo sapiens
caatgcgcaagcaagt

SEQ ID NO: 69934 - DNA, 18 bp, Homo sapiens
cctacctgtgactgtgac

SEQ ID NO: 69935 - DNA, 22 bp, Homo sapiens
cttcagagaaaatttcacagag

SEQ ID NO: 69936 - DNA, 19 bp, Homo sapiens
gacagttcaggcagcccag

SEQ ID NO: 69937 - DNA, 23 bp, Homo sapiens
ctcctggcatgtgtttctacaga

SEQ ID NO: 69938 - DNA, 18 bp, Homo sapiens
gcacaccccaacttgctc

SEQ ID NO: 69939 - DNA, 16 bp, Homo sapiens
tggcgggacagagtca

SEQ ID NO: 69940 - DNA, 16 bp, Homo sapiens
tttggccctcaaggct

SEQ ID NO: 69941 - DNA, 23 bp, Homo sapiens
ttgcagggtggtatgtggttttg

SEQ ID NO: 69942 - DNA, 19 bp, Homo sapiens
caggcctaccacagacatg

SEQ ID NO: 69943 - DNA, 24 bp, Homo sapiens
actggcaagacagactgagtcttt

SEQ ID NO: 69944 - DNA, 19 bp, Homo sapiens
ggcctttcttcatccatat

SEQ ID NO: 69945 - DNA, 23 bp, Homo sapiens
gcaacttctgtagatgctttttc

SEQ ID NO: 69946 - DNA, 21 bp, Homo sapiens
gttctaccaggaaaatcacat

SEQ ID NO: 69947 - DNA, 22 bp, Homo sapiens
ggaaagcaggtgaacacatgtc

SEQ ID NO: 69948 - DNA, 19 bp, Homo sapiens
ggaactgagtcctaaacgc

SEQ ID NO: 69949 - DNA, 23 bp, Homo sapiens
accgtatttaaaggagtataaag

SEQ ID NO: 69950 - DNA, 22 bp, Homo sapiens
gccctttgagtcaaaaatgttt

SEQ ID NO: 69951 - DNA, 23 bp, Homo sapiens
ctttgcgagtttggccttttggg

SEQ ID NO: 69952 - DNA, 21 bp, Homo sapiens
ctgatgaagactttggacctc

SEQ ID NO: 69953 - DNA, 21 bp, Homo sapiens
cctccatttctgtatccatgc

SEQ ID NO: 69954 - DNA, 21 bp, Homo sapiens
atggaatgctgagtttaaagc

SEQ ID NO: 69955 - DNA, 24 bp, Homo sapiens
tccctctttaagatgtctctctcc

SEQ ID NO: 69956 - DNA, 24 bp, Homo sapiens
tggagtaatagtgcttatttatcc

SEQ ID NO: 69957 - DNA, 22 bp, Homo sapiens
gcaggacttcactttttcaagc

SEQ ID NO: 69958 - DNA, 25 bp, Homo sapiens
tgtgacttatttttcttctttaggg

SEQ ID NO: 69959 - DNA, 21 bp, Homo sapiens
actgagaaaagacagtagttg

SEQ ID NO: 69960 - DNA, 21 bp, Homo sapiens
tctttgtcatcagtgaaacag

SEQ ID NO: 69961 - DNA, 20 bp, Homo sapiens
ccgtgaaagcatcatcatcc

SEQ ID NO: 69962 - DNA, 21 bp, Homo sapiens
tcattctggggaaattaaggt

SEQ ID NO: 69963 - DNA, 20 bp, Homo sapiens
tgatgacgacttttcttccc

SEQ ID NO: 69964 - DNA, 23 bp, Homo sapiens
tcagcacgaaaaattatttattc

SEQ ID NO: 69965 - DNA, 24 bp, Homo sapiens
aagtgctgggattacagacgtaag

SEQ ID NO: 69966 - DNA, 18 bp, Homo sapiens
tctagcctgtcgattgtt

SEQ ID NO: 69967 - DNA, 21 bp, Homo sapiens
aaggaagtgccaggcaaatag

SEQ ID NO: 69968 - DNA, 21 bp, Homo sapiens
acaggaaaaagaaaatcagcc

SEQ ID NO: 69969 - DNA, 24 bp, Homo sapiens
caaacacatcttgatttacctttc

SEQ ID NO: 69970 - DNA, 21 bp, Homo sapiens
ggcccactgaagataatgact

SEQ ID NO: 69971 - DNA, 23 bp, Homo sapiens
gtgacttcttccttggacctgtt

SEQ ID NO: 69972 - DNA, 19 bp, Homo sapiens
ccaagttcaagaacctctc

SEQ ID NO: 69973 - DNA, 21 bp, Homo sapiens
gatctgatgctggggtgcagg

SEQ ID NO: 69974 - DNA, 20 bp, Homo sapiens
aacctttccaatgaggaaac

SEQ ID NO: 69975 - DNA, 18 bp, Homo sapiens
tgggcaactgccttccta

SEQ ID NO: 69976 - DNA, 21 bp, Homo sapiens
ggatgtcaagaaaaaagggtt

SEQ ID NO: 69977 - DNA, 24 bp, Homo sapiens
actttagttaatgagagaagtttc

SEQ ID NO: 69978 - DNA, 18 bp, Homo sapiens
gaagcatgtccaattgcc

SEQ ID NO: 69979 - DNA, 23 bp, Homo sapiens
acatcctaatttcactttggtca

SEQ ID NO: 69980 - DNA, 20 bp, Homo sapiens
cattcttgcacagtgcctga

SEQ ID NO: 69981 - DNA, 24 bp, Homo sapiens
atccttatttttatttttaaaccc

SEQ ID NO: 69982 - DNA, 24 bp, Homo sapiens
gtgagattctaagtcaacctaaga

SEQ ID NO: 69983 - DNA, 21 bp, Homo sapiens
gcctccacggctactttcctc

SEQ ID NO: 69984 - DNA, 21 bp, Homo sapiens
atctttaaaatctcccagtga

SEQ ID NO: 69985 - DNA, 20 bp, Homo sapiens
ggaaacagaaggccttcagg

SEQ ID NO: 69986 - DNA, 22 bp, Homo sapiens
tcacctacaataacttaccagc

SEQ ID NO: 69987 - DNA, 19 bp, Homo sapiens
tgcttccaggctaagactc

SEQ ID NO: 69988 - DNA, 17 bp, Homo sapiens
caactgcccacaagttc

SEQ ID NO: 69989 - DNA, 21 bp, Homo sapiens
cctgccatcaagagtgtcact

SEQ ID NO: 69990 - DNA, 21 bp, Homo sapiens
acaaggcaaaaaaatgactgt

SEQ ID NO: 69991 - DNA, 23 bp, Homo sapiens
tttaagttttggttttcatttgc

SEQ ID NO: 69992 - DNA, 23 bp, Homo sapiens
agtgaacttactactcacgacct

SEQ ID NO: 69993 - DNA, 22 bp, Homo sapiens
acatgaaatatttgcctctaaa

SEQ ID NO: 69994 - DNA, 19 bp, Homo sapiens
cagatagcggtagtagtca

SEQ ID NO: 69995 - DNA, 24 bp, Homo sapiens
tatttacaaggaggttatctgtag

SEQ ID NO: 69996 - DNA, 24 bp, Homo sapiens
ggtgttgatacattcctaagaaga

SEQ ID NO: 69997 - DNA, 24 bp, Homo sapiens
tacaggtgaagtaaatctaatgtt

SEQ ID NO: 69998 - DNA, 23 bp, Homo sapiens
accagttacagaaattaatgaag

SEQ ID NO: 69999 - DNA, 19 bp, Homo sapiens
gtgttcaaggtgctgacta

SEQ ID NO: 70000 - DNA, 24 bp, Homo sapiens
cagtaactgaaataagaactcacc

SEQ ID NO: 70001 - DNA, 23 bp, Homo sapiens
gtagtcgccctggtgaaattagg

SEQ ID NO: 70002 - DNA, 23 bp, Homo sapiens
ttgtctgggaaaagactaaagga

SEQ ID NO: 70003 - DNA, 23 bp, Homo sapiens
gggcagttggtggaattaataca

SEQ ID NO: 70004 - DNA, 22 bp, Homo sapiens
ggacatttatttcacaggagag

SEQ ID NO: 70005 - DNA, 23 bp, Homo sapiens
ctggaagttcagatttaagactt

SEQ ID NO: 70006 - DNA, 19 bp, Homo sapiens
agtgaccctagtggtgagc

SEQ ID NO: 70007 - DNA, 21 bp, Homo sapiens
tttttgctactgatttcttcc

SEQ ID NO: 70008 - DNA, 20 bp, Homo sapiens
cccaggaggattacctatac

SEQ ID NO: 70009 - DNA, 17 bp, Homo sapiens
tgccaaagacacagtct

SEQ ID NO: 70010 - DNA, 24 bp, Homo sapiens
aactggagaaaagacatctatcac

SEQ ID NO: 70011 - DNA, 22 bp, Homo sapiens
tcttctgcttggcagcttctgc

SEQ ID NO: 70012 - DNA, 23 bp, Homo sapiens
gaacctaaaaataaaatatgtgt

SEQ ID NO: 70013 - DNA, 21 bp, Homo sapiens
tgttcttgggtgtcatctgtt

SEQ ID NO: 70014 - DNA, 24 bp, Homo sapiens
ttttttgttttattttataagaaa

SEQ ID NO: 70015 - DNA, 17 bp, Homo sapiens
aggcccaacatcaagtg

SEQ ID NO: 70016 - DNA, 22 bp, Homo sapiens
tcactgattctttcttaaataa

SEQ ID NO: 70017 - DNA, 22 bp, Homo sapiens
tgggttttgatgtgtaacttgt

SEQ ID NO: 70018 - DNA, 23 bp, Homo sapiens
ctctcaccgcagctaaaacactc

SEQ ID NO: 70019 - DNA, 30 bp, Homo sapiens
ctgtctcaaaaaaataaaattaaaattaaa

SEQ ID NO: 70020 - DNA, 23 bp, Homo sapiens
attaagcattctattaagaaaac

SEQ ID NO: 70021 - DNA, 24 bp, Homo sapiens
acactgtgggaaaaagaacaatag

SEQ ID NO: 70022 - DNA, 20 bp, Homo sapiens
aaacgtatttctggggctgt

SEQ ID NO: 70023 - DNA, 23 bp, Homo sapiens
agtgaatggtctagatttacctg

SEQ ID NO: 70024 - DNA, 22 bp, Homo sapiens
tctcaaattaaggtgttatagt

SEQ ID NO: 70025 - DNA, 23 bp, Homo sapiens
aacaatcttgttcttctactgtt

SEQ ID NO: 70026 - DNA, 23 bp, Homo sapiens
cattcttgaaaagggaatacagc

SEQ ID NO: 70027 - DNA, 22 bp, Homo sapiens
ggcacgctagaggagacaaaaa

SEQ ID NO: 70028 - DNA, 19 bp, Homo sapiens
ttccacttgcccagtattg

SEQ ID NO: 70029 - DNA, 23 bp, Homo sapiens
agaactgtttttaaattgtttgt

SEQ ID NO: 70030 - DNA, 19 bp, Homo sapiens
tgcctcttgccaagggacc

SEQ ID NO: 70031 - DNA, 22 bp, Homo sapiens
ttacctgaaggcgggctagtgt

SEQ ID NO: 70032 - DNA, 18 bp, Homo sapiens
aatggtcagagcttggtg

SEQ ID NO: 70033 - DNA, 18 bp, Homo sapiens
cccctcagctgtgaggag

SEQ ID NO: 70034 - DNA, 18 bp, Homo sapiens
agccctaagaggaggggg

SEQ ID NO: 70035 - DNA, 18 bp, Homo sapiens
ggcgacggctgctctttt

SEQ ID NO: 70036 - DNA, 23 bp, Homo sapiens
ggacacaaagccaggcctaaaac

SEQ ID NO: 70037 - DNA, 16 bp, Homo sapiens
ttcctggggcgcctcc

SEQ ID NO: 70038 - DNA, 18 bp, Homo sapiens
acccccggcaccttttcc

SEQ ID NO: 70039 - DNA, 16 bp, Homo sapiens
cccgcgtgggtcagct

SEQ ID NO: 70040 - DNA, 16 bp, Homo sapiens
gccgagaggctgcggc

SEQ ID NO: 70041 - DNA, 24 bp, Homo sapiens
ccctctcagtggcgtcggaactgc

SEQ ID NO: 70042 - DNA, 16 bp, Homo sapiens
cggcccgaatgcgtcc

SEQ ID NO: 70043 - DNA, 16 bp, Homo sapiens
ctccagcccggcccga

SEQ ID NO: 70044 - DNA, 22 bp, Homo sapiens
actttcttggaagaagggaagc

SEQ ID NO: 70045 - DNA, 24 bp, Homo sapiens
cggccagccatgggcccttggagc

SEQ ID NO: 70046 - DNA, 21 bp, Homo sapiens
ccatcactggggggtccggag

SEQ ID NO: 70047 - DNA, 16 bp, Homo sapiens
tccggctcctggcaga

SEQ ID NO: 70048 - DNA, 16 bp, Homo sapiens
ggctggggtcctcccc

SEQ ID NO: 70049 - DNA, 16 bp, Homo sapiens
ggtggcgccggggcac

SEQ ID NO: 70050 - DNA, 24 bp, Homo sapiens
ctgttggtttcggtgagcaggagg

SEQ ID NO: 70051 - DNA, 17 bp, Homo sapiens
actccgcccagggacac

SEQ ID NO: 70052 - DNA, 18 bp, Homo sapiens
gtctcctcttggctctgc

SEQ ID NO: 70053 - DNA, 16 bp, Homo sapiens
cttgcccattgcaacc

SEQ ID NO: 70054 - DNA, 24 bp, Homo sapiens
ccgagagctacacgttcacggtgc

SEQ ID NO: 70055 - DNA, 21 bp, Homo sapiens
aaacgtttggatccccaaatc

SEQ ID NO: 70056 - DNA, 24 bp, Homo sapiens
attatggtgatagctttgttgttc

SEQ ID NO: 70057 - DNA, 19 bp, Homo sapiens
ctttgaatcgggtgtcgag

SEQ ID NO: 70058 - DNA, 22 bp, Homo sapiens
ttgtgggagtcttcccacaagt

SEQ ID NO: 70059 - DNA, 22 bp, Homo sapiens
atggatctgtgggttatgaaac

SEQ ID NO: 70060 - DNA, 24 bp, Homo sapiens
tccaatttcctaatctctgtgatt

SEQ ID NO: 70061 - DNA, 24 bp, Homo sapiens
ccactgtattcagcgtgactttgg

SEQ ID NO: 70062 - DNA, 24 bp, Homo sapiens
tcgacaaaggacagcctatttttc

SEQ ID NO: 70063 - DNA, 21 bp, Homo sapiens
acttctcagaaaaatgccaac

SEQ ID NO: 70064 - DNA, 24 bp, Homo sapiens
gattacagtcaaaaggcctctacg

SEQ ID NO: 70065 - DNA, 17 bp, Homo sapiens
tgtcaacggtaccaagg

SEQ ID NO: 70066 - DNA, 23 bp, Homo sapiens
tccacctacagaaagttttccac

SEQ ID NO: 70067 - DNA, 22 bp, Homo sapiens
tgcttgctaaacatcctacaca

SEQ ID NO: 70068 - DNA, 16 bp, Homo sapiens
ttccagaaacggaggc

SEQ ID NO: 70069 - DNA, 22 bp, Homo sapiens
agagaatgtgtcattaaattca

SEQ ID NO: 70070 - DNA, 18 bp, Homo sapiens
aacccagtctctcttctg

SEQ ID NO: 70071 - DNA, 24 bp, Homo sapiens
gtctggctaggttggactgttaga

SEQ ID NO: 70072 - DNA, 24 bp, Homo sapiens
ctgaaccaggtttttaggaaatgg

SEQ ID NO: 70073 - DNA, 21 bp, Homo sapiens
tcttctttccttttaggcctc

SEQ ID NO: 70074 - DNA, 18 bp, Homo sapiens
tccttggtacttctctgc

SEQ ID NO: 70075 - DNA, 20 bp, Homo sapiens
cctctcctggcctcagaaga

SEQ ID NO: 70076 - DNA, 24 bp, Homo sapiens
tgaagacaaaatgaaagaaaaaga

SEQ ID NO: 70077 - DNA, 21 bp, Homo sapiens
tgcccagaaaatgaaaaaggc

SEQ ID NO: 70078 - DNA, 20 bp, Homo sapiens
gccagtgatgctgtagaaaa

SEQ ID NO: 70079 - DNA, 23 bp, Homo sapiens
tctctgtttctctgggagggatt

SEQ ID NO: 70080 - DNA, 18 bp, Homo sapiens
gccatcctgtttctcttt

SEQ ID NO: 70081 - DNA, 24 bp, Homo sapiens
cccagtgttgggatccttctttac

SEQ ID NO: 70082 - DNA, 22 bp, Homo sapiens
agcttctaagagatacttacag

SEQ ID NO: 70083 - DNA, 24 bp, Homo sapiens
ccaacaaagacaaagaaggcaagg

SEQ ID NO: 70084 - DNA, 16 bp, Homo sapiens
ggatccagcatgggtt

SEQ ID NO: 70085 - DNA, 24 bp, Homo sapiens
cccctgttggtgtctttattattg

SEQ ID NO: 70086 - DNA, 18 bp, Homo sapiens
caacaggtcaagaggtgt

SEQ ID NO: 70087 - DNA, 24 bp, Homo sapiens
gatagagaacgcattgccacatac

SEQ ID NO: 70088 - DNA, 22 bp, Homo sapiens
gatgacacagcgtgagagaaga

SEQ ID NO: 70089 - DNA, 18 bp, Homo sapiens
gaaaagtcacccactggg

SEQ ID NO: 70090 - DNA, 19 bp, Homo sapiens
cattctgatcggttaccgt

SEQ ID NO: 70091 - DNA, 20 bp, Homo sapiens
gctctggctgggccccttct

SEQ ID NO: 70092 - DNA, 18 bp, Homo sapiens
ggaagagcaccttccatg

SEQ ID NO: 70093 - DNA, 21 bp, Homo sapiens
ccctcacttggttctttcagc

SEQ ID NO: 70094 - DNA, 19 bp, Homo sapiens
ggtccaaagaacctaagag

SEQ ID NO: 70095 - DNA, 24 bp, Homo sapiens
tgaggatccaatggagattttgat

SEQ ID NO: 70096 - DNA, 19 bp, Homo sapiens
ttctgtccgtaggaaggat

SEQ ID NO: 70097 - DNA, 23 bp, Homo sapiens
cacccaggaggtctttaaggggt

SEQ ID NO: 70098 - DNA, 21 bp, Homo sapiens
gtctgtggctgtgacctccat

SEQ ID NO: 70099 - DNA, 23 bp, Homo sapiens
aggaattagggaactctgacacg

SEQ ID NO: 70100 - DNA, 21 bp, Homo sapiens
cttggctgaggatggtgtaag

SEQ ID NO: 70101 - DNA, 22 bp, Homo sapiens
attggattaagcagtattgacc

SEQ ID NO: 70102 - DNA, 20 bp, Homo sapiens
tgatgactcctgtgttcctg

SEQ ID NO: 70103 - DNA, 24 bp, Homo sapiens
ccttgaactcttccaggaacctct

SEQ ID NO: 70104 - DNA, 22 bp, Homo sapiens
tttgtcctccacaccctctgga

SEQ ID NO: 70105 - DNA, 21 bp, Homo sapiens
ctacaatgccgccatcgctta

SEQ ID NO: 70106 - DNA, 24 bp, Homo sapiens
tattaactgacaactggcctagca

SEQ ID NO: 70107 - DNA, 24 bp, Homo sapiens
aaaatatgttcaccattaacagga

SEQ ID NO: 70108 - DNA, 21 bp, Homo sapiens
ttctaggcacggaacctctgg

SEQ ID NO: 70109 - DNA, 22 bp, Homo sapiens
tctaagctttgcatctaagctt

SEQ ID NO: 70110 - DNA, 18 bp, Homo sapiens
taacccctcaccttgaag

SEQ ID NO: 70111 - DNA, 22 bp, Homo sapiens
agcacatggttaaatattctgg

SEQ ID NO: 70112 - DNA, 22 bp, Homo sapiens
attgaagatcggaggattatcg

SEQ ID NO: 70113 - DNA, 21 bp, Homo sapiens
gctagtgttcctggtcctgac

SEQ ID NO: 70114 - DNA, 22 bp, Homo sapiens
gaacaacaaaagacctttcttt

SEQ ID NO: 70115 - DNA, 18 bp, Homo sapiens
gttcaagctgctgacctt

SEQ ID NO: 70116 - DNA, 22 bp, Homo sapiens
tagtctggagagagttttcaaa

SEQ ID NO: 70117 - DNA, 19 bp, Homo sapiens
cacagtcactgacaccaac

SEQ ID NO: 70118 - DNA, 19 bp, Homo sapiens
ctaaaagacaactgccatc

SEQ ID NO: 70119 - DNA, 17 bp, Homo sapiens
gttctcaggcacctgac

SEQ ID NO: 70120 - DNA, 24 bp, Homo sapiens
tcgctcaaatacactccagcctgg

SEQ ID NO: 70121 - DNA, 18 bp, Homo sapiens
ggtattgggggcatcagc

SEQ ID NO: 70122 - DNA, 21 bp, Homo sapiens
ggaatcctttagccccctgag

SEQ ID NO: 70123 - DNA, 19 bp, Homo sapiens
gtgacgacaaattgtccac

SEQ ID NO: 70124 - DNA, 24 bp, Homo sapiens
tgacacatctctttgctctgcagt

SEQ ID NO: 70125 - DNA, 20 bp, Homo sapiens
tgccaggtaccatacaaacc

SEQ ID NO: 70126 - DNA, 24 bp, Homo sapiens
taatcaccacactgaaagtgactg

SEQ ID NO: 70127 - DNA, 22 bp, Homo sapiens
ttctaagaagataccaggggac

SEQ ID NO: 70128 - DNA, 23 bp, Homo sapiens
tacaccatattgaatgatgatgg

SEQ ID NO: 70129 - DNA, 21 bp, Homo sapiens
cacatggtccactacaatctg

SEQ ID NO: 70130 - DNA, 21 bp, Homo sapiens
gcattttgaaaacagcaaagg

SEQ ID NO: 70131 - DNA, 16 bp, Homo sapiens
gtactgctgcttggcc

SEQ ID NO: 70132 - DNA, 23 bp, Homo sapiens
tcatggcagaaaccacagttact

SEQ ID NO: 70133 - DNA, 17 bp, Homo sapiens
gctgtggaggtggtgag

SEQ ID NO: 70134 - DNA, 24 bp, Homo sapiens
ggatttaattttatttttactaac

SEQ ID NO: 70135 - DNA, 19 bp, Homo sapiens
ttcaggaggcacaaagatg

SEQ ID NO: 70136 - DNA, 24 bp, Homo sapiens
tttctgctctctagggcttggatt

SEQ ID NO: 70137 - DNA, 23 bp, Homo sapiens
ctgggcagtgtaggatgtgattt

SEQ ID NO: 70138 - DNA, 20 bp, Homo sapiens
cgaatgtggtaccttttgag

SEQ ID NO: 70139 - DNA, 21 bp, Homo sapiens
ctgcaagtcagttgaaaaatc

SEQ ID NO: 70140 - DNA, 19 bp, Homo sapiens
gtgctggatgtgaatgaag

SEQ ID NO: 70141 - DNA, 24 bp, Homo sapiens
gacaaaatgccatgaagtacatat

SEQ ID NO: 70142 - DNA, 22 bp, Homo sapiens
gaggactttggcgtgggccagg

SEQ ID NO: 70143 - DNA, 24 bp, Homo sapiens
gcacagataaagggaataaaaaat

SEQ ID NO: 70144 - DNA, 23 bp, Homo sapiens
tatggaacagaaaataacgtaag

SEQ ID NO: 70145 - DNA, 18 bp, Homo sapiens
ggcagtgtctctccaaat

SEQ ID NO: 70146 - DNA, 24 bp, Homo sapiens
cgcgaccggcctattgttggtttt

SEQ ID NO: 70147 - DNA, 17 bp, Homo sapiens
ctgtccagctcagcccg

SEQ ID NO: 70148 - DNA, 24 bp, Homo sapiens
aagaagcgcttaagccgttttcag

SEQ ID NO: 70149 - DNA, 21 bp, Homo sapiens
ccccttaccattgtctgtagc

SEQ ID NO: 70150 - DNA, 23 bp, Homo sapiens
tccccgttcagatatcggatttg

SEQ ID NO: 70151 - DNA, 24 bp, Homo sapiens
agaagggaggggcaaggaactgaa

SEQ ID NO: 70152 - DNA, 23 bp, Homo sapiens
cggacactggtgccatttccact

SEQ ID NO: 70153 - DNA, 20 bp, Homo sapiens
aatccagcaaacaaaaagga

SEQ ID NO: 70154 - DNA, 19 bp, Homo sapiens
gcacgtacacagccctaat

SEQ ID NO: 70155 - DNA, 22 bp, Homo sapiens
cctgttccagtagcaactggag

SEQ ID NO: 70156 - DNA, 16 bp, Homo sapiens
gcgggtggagtggggc

SEQ ID NO: 70157 - DNA, 18 bp, Homo sapiens
agttcgaggttctggtat

SEQ ID NO: 70158 - DNA, 24 bp, Homo sapiens
tctagacttggtctggtggaaggc

SEQ ID NO: 70159 - DNA, 22 bp, Homo sapiens
aggtctgcatcaatgatgttta

SEQ ID NO: 70160 - DNA, 24 bp, Homo sapiens
gtgtattttctcttaggttctcca

SEQ ID NO: 70161 - DNA, 16 bp, Homo sapiens
gtccagttggcactcg

SEQ ID NO: 70162 - DNA, 24 bp, Homo sapiens
tcctgtctgatgtgaatgacaacg

SEQ ID NO: 70163 - DNA, 18 bp, Homo sapiens
cagttggagcaaagttgc

SEQ ID NO: 70164 - DNA, 19 bp, Homo sapiens
aaagcctcaggtcataaac

SEQ ID NO: 70165 - DNA, 24 bp, Homo sapiens
gtgacatctagaagttgagaaggg

SEQ ID NO: 70166 - DNA, 22 bp, Homo sapiens
cccttcacagcagaactaacac

SEQ ID NO: 70167 - DNA, 19 bp, Homo sapiens
gacctttggagcaaggcct

SEQ ID NO: 70168 - DNA, 19 bp, Homo sapiens
cctctaaggccatctttgg

SEQ ID NO: 70169 - DNA, 17 bp, Homo sapiens
caagcagctctgctctc

SEQ ID NO: 70170 - DNA, 22 bp, Homo sapiens
cttggtctttattctggttatc

SEQ ID NO: 70171 - DNA, 23 bp, Homo sapiens
ttctggaatgagctttttatttt

SEQ ID NO: 70172 - DNA, 19 bp, Homo sapiens
ttcctacagacgccagcgg

SEQ ID NO: 70173 - DNA, 24 bp, Homo sapiens
ctttctccagcccaagaatctatc

SEQ ID NO: 70174 - DNA, 21 bp, Homo sapiens
aattcctccaagaatccccag

SEQ ID NO: 70175 - DNA, 23 bp, Homo sapiens
tcaatctcaagctcatggataac

SEQ ID NO: 70176 - DNA, 24 bp, Homo sapiens
tcctccatttttttaagtcaaagg

SEQ ID NO: 70177 - DNA, 20 bp, Homo sapiens
gcgtgtgtgactgtgaaggg

SEQ ID NO: 70178 - DNA, 23 bp, Homo sapiens
catcagctaacctatatccttat

SEQ ID NO: 70179 - DNA, 22 bp, Homo sapiens
ggattgcaaattcctgccattc

SEQ ID NO: 70180 - DNA, 24 bp, Homo sapiens
aaatgttcagtaagagacaaactt

SEQ ID NO: 70181 - DNA, 23 bp, Homo sapiens
agcaagagcagcagaatcagaac

SEQ ID NO: 70182 - DNA, 24 bp, Homo sapiens
attgacatcttcaagtgtattgaa

SEQ ID NO: 70183 - DNA, 22 bp, Homo sapiens
cccgggtgtcatcctctggggg

SEQ ID NO: 70184 - DNA, 18 bp, Homo sapiens
gctctgtgatagctgctg

SEQ ID NO: 70185 - DNA, 22 bp, Homo sapiens
aaacccacctggtcctcttctc

SEQ ID NO: 70186 - DNA, 20 bp, Homo sapiens
ctctgtctcccccaccatcc

SEQ ID NO: 70187 - DNA, 23 bp, Homo sapiens
tcttactaatcattgcttcttcc

SEQ ID NO: 70188 - DNA, 22 bp, Homo sapiens
gagagcggtggtcaaagagccc

SEQ ID NO: 70189 - DNA, 22 bp, Homo sapiens
gggtaaggccttaaaaagataa

SEQ ID NO: 70190 - DNA, 19 bp, Homo sapiens
atgatgaagaaggaggcgg

SEQ ID NO: 70191 - DNA, 16 bp, Homo sapiens
caggcccctgtgcagc

SEQ ID NO: 70192 - DNA, 23 bp, Homo sapiens
actggtaaagatcatacagttgg

SEQ ID NO: 70193 - DNA, 18 bp, Homo sapiens
accgggggacactcatga

SEQ ID NO: 70194 - DNA, 24 bp, Homo sapiens
atagccctgtgtgtatgactattt

SEQ ID NO: 70195 - DNA, 21 bp, Homo sapiens
tccacgtggattacttacttc

SEQ ID NO: 70196 - DNA, 24 bp, Homo sapiens
tctccaaaggactttgacttgagc

SEQ ID NO: 70197 - DNA, 23 bp, Homo sapiens
ttttctcatttttgacacaactc

SEQ ID NO: 70198 - DNA, 17 bp, Homo sapiens
acgacgttgcaccaacc

SEQ ID NO: 70199 - DNA, 16 bp, Homo sapiens
gctccagggctcaggc

SEQ ID NO: 70200 - DNA, 24 bp, Homo sapiens
atcccgatgaaattggaaatttta

SEQ ID NO: 70201 - DNA, 18 bp, Homo sapiens
tacgttgttggtgttcac

SEQ ID NO: 70202 - DNA, 21 bp, Homo sapiens
ccttcatagtcaaacacgagc

SEQ ID NO: 70203 - DNA, 24 bp, Homo sapiens
gtcgtaccttacatattgctagac

SEQ ID NO: 70204 - DNA, 24 bp, Homo sapiens
atagtcctggtctttgtctgactc

SEQ ID NO: 70205 - DNA, 24 bp, Homo sapiens
actaaaagatgcttttgtcccttc

SEQ ID NO: 70206 - DNA, 16 bp, Homo sapiens
gtacatgtcagccagc

SEQ ID NO: 70207 - DNA, 23 bp, Homo sapiens
gccccgccttatgattctctgct

SEQ ID NO: 70208 - DNA, 23 bp, Homo sapiens
tgcatttcccagcacatgggtct

SEQ ID NO: 70209 - DNA, 21 bp, Homo sapiens
gagctccctgaactcctcaga

SEQ ID NO: 70210 - DNA, 22 bp, Homo sapiens
tccccagaaactcatctcaagg

SEQ ID NO: 70211 - DNA, 23 bp, Homo sapiens
aatggggcaatcgcttcaagaag

SEQ ID NO: 70212 - DNA, 21 bp, Homo sapiens
gagctataaagtggagagagt

SEQ ID NO: 70213 - DNA, 24 bp, Homo sapiens
tgttcaagacagaagggcctgact

SEQ ID NO: 70214 - DNA, 19 bp, Homo sapiens
aaatggaagtcctgggtgc

SEQ ID NO: 70215 - DNA, 20 bp, Homo sapiens
cctacagccacctgaagtcc

SEQ ID NO: 70216 - DNA, 21 bp, Homo sapiens
aaaacccaaaatggcagggga

SEQ ID NO: 70217 - DNA, 21 bp, Homo sapiens
gaaaaggggcacagaccctct

SEQ ID NO: 70218 - DNA, 24 bp, Homo sapiens
gaagtggagaatgtcagtctgagt

SEQ ID NO: 70219 - DNA, 24 bp, Homo sapiens
ggccaccatcttgatttgaattcc

SEQ ID NO: 70220 - DNA, 19 bp, Homo sapiens
agactgaccctttttggac

SEQ ID NO: 70221 - DNA, 18 bp, Homo sapiens
gaaggagccaggggggag

SEQ ID NO: 70222 - DNA, 16 bp, Homo sapiens
cccaatgagatggggt

SEQ ID NO: 70223 - DNA, 16 bp, Homo sapiens
gcgcttcgagatgttc

SEQ ID NO: 70224 - DNA, 24 bp, Homo sapiens
aatggaatcctatggctttccaac

SEQ ID NO: 70225 - DNA, 24 bp, Homo sapiens
ctcaggtactgtgtatatacttac

SEQ ID NO: 70226 - DNA, 20 bp, Homo sapiens
ctcacctggagtgagccctg

SEQ ID NO: 70227 - DNA, 23 bp, Homo sapiens
aatgcatgttgcttttgtaccgt

SEQ ID NO: 70228 - DNA, 23 bp, Homo sapiens
tgagttccaaggcctcattcagc

SEQ ID NO: 70229 - DNA, 29 bp, Homo sapiens
ataaataaataaatatttttaaaagtcag

SEQ ID NO: 70230 - DNA, 20 bp, Homo sapiens
agagagcatgaaaatggttc

SEQ ID NO: 70231 - DNA, 20 bp, Homo sapiens
aagcaggctaggctaagcta

SEQ ID NO: 70232 - DNA, 30 bp, Homo sapiens
caccaacttataccataatatatattttaa

SEQ ID NO: 70233 - DNA, 18 bp, Homo sapiens
ttttcaacttacgacgag

SEQ ID NO: 70234 - DNA, 19 bp, Homo sapiens
gtgatgcctcaaagacaat

SEQ ID NO: 70235 - DNA, 24 bp, Homo sapiens
agtagcatctgtatcaggcaaagt

SEQ ID NO: 70236 - DNA, 20 bp, Homo sapiens
acactcaaaatgccgttttc

SEQ ID NO: 70237 - DNA, 23 bp, Homo sapiens
ttttgaaagctggtctggtcctt

SEQ ID NO: 70238 - DNA, 24 bp, Homo sapiens
gttagttagctacaaccaggagcc

SEQ ID NO: 70239 - DNA, 16 bp, Homo sapiens
caacaccagctcctct

SEQ ID NO: 70240 - DNA, 20 bp, Homo sapiens
ccaattgcaggtaaaacagt

SEQ ID NO: 70241 - DNA, 19 bp, Homo sapiens
ggtgcagttatgcctcaga

SEQ ID NO: 70242 - DNA, 24 bp, Homo sapiens
actttccacttgataagaggtccc

SEQ ID NO: 70243 - DNA, 18 bp, Homo sapiens
cccagggagcactaagcg

SEQ ID NO: 70244 - DNA, 24 bp, Homo sapiens
tttcttctttggctggggagagga

SEQ ID NO: 70245 - DNA, 16 bp, Homo sapiens
ggagagaccggcgcac

SEQ ID NO: 70246 - DNA, 24 bp, Homo sapiens
caaggaaaggtgataaaagtgaat

SEQ ID NO: 70247 - DNA, 22 bp, Homo sapiens
atcctgagtagtggtaatctac

SEQ ID NO: 70248 - DNA, 23 bp, Homo sapiens
cttcttgtcctgcttgcttacct

SEQ ID NO: 70249 - DNA, 21 bp, Homo sapiens
tttttaaatgggacaggtagg

SEQ ID NO: 70250 - DNA, 24 bp, Homo sapiens
tcccctttcttgcggagattctct

SEQ ID NO: 70251 - DNA, 19 bp, Homo sapiens
tggagctggagcttaggct

SEQ ID NO: 70252 - DNA, 20 bp, Homo sapiens
cacctcaaagctgttccgtc

SEQ ID NO: 70253 - DNA, 22 bp, Homo sapiens
ccatcatcacactggaagactc

SEQ ID NO: 70254 - DNA, 24 bp, Homo sapiens
ggagattccccgccggggatgtga

SEQ ID NO: 70255 - DNA, 21 bp, Homo sapiens
accatccactacaactacatg

SEQ ID NO: 70256 - DNA, 16 bp, Homo sapiens
cccaggggtcagaggc

SEQ ID NO: 70257 - DNA, 17 bp, Homo sapiens
ctggcctcatcttgggc

SEQ ID NO: 70258 - DNA, 16 bp, Homo sapiens
ctcctgacctggagtc

SEQ ID NO: 70259 - DNA, 24 bp, Homo sapiens
cgagattccatctcaaaaaaaaaa

SEQ ID NO: 70260 - DNA, 24 bp, Homo sapiens
gtggagcttgcagtgagctgagat

SEQ ID NO: 70261 - DNA, 16 bp, Homo sapiens
gtggtgccctatgagc

SEQ ID NO: 70262 - DNA, 22 bp, Homo sapiens
acccatttactttgcacatctc

SEQ ID NO: 70263 - DNA, 21 bp, Homo sapiens
tccgagtggaaggaaatttgc

SEQ ID NO: 70264 - DNA, 18 bp, Homo sapiens
ctactgctcacctggagg

SEQ ID NO: 70265 - DNA, 19 bp, Homo sapiens
ccaggcctctgattcctca

SEQ ID NO: 70266 - DNA, 17 bp, Homo sapiens
agttgcaaaccagacct

SEQ ID NO: 70267 - DNA, 24 bp, Homo sapiens
gctgctcagatagcgatggtgagc

SEQ ID NO: 70268 - DNA, 24 bp, Homo sapiens
aagtgtttctgtcatccaaatact

SEQ ID NO: 70269 - DNA, 24 bp, Homo sapiens
ctacaagcagtcacagcacatgac

SEQ ID NO: 70270 - DNA, 16 bp, Homo sapiens
agacctaagagcaatc

SEQ ID NO: 70271 - DNA, 20 bp, Homo sapiens
gctgtgggttgattccacac

SEQ ID NO: 70272 - DNA, 18 bp, Homo sapiens
ctgtcgtctctccagccc

SEQ ID NO: 70273 - DNA, 22 bp, Homo sapiens
cttcctacagtactcccctgcc

SEQ ID NO: 70274 - DNA, 17 bp, Homo sapiens
cagcgcctcacaacctc

SEQ ID NO: 70275 - DNA, 23 bp, Homo sapiens
tcttccagttgctttatctgttc

SEQ ID NO: 70276 - DNA, 18 bp, Homo sapiens
ggacgcgggtgccgggcg

SEQ ID NO: 70277 - DNA, 17 bp, Homo sapiens
gctcgctagtgggttgc

SEQ ID NO: 70278 - DNA, 21 bp, Homo sapiens
agttggcaaaacatcttgttg

SEQ ID NO: 70279 - DNA, 22 bp, Homo sapiens
cagagatcacacattaagtggg

SEQ ID NO: 70280 - DNA, 16 bp, Homo sapiens
cagggcagctacggtt

SEQ ID NO: 70281 - DNA, 24 bp, Homo sapiens
gaagaggaatcccaaagttccaaa

SEQ ID NO: 70282 - DNA, 16 bp, Homo sapiens
cccctgcaccagcccc

SEQ ID NO: 70283 - DNA, 24 bp, Homo sapiens
aagtctcatggaagccagcccctc

SEQ ID NO: 70284 - DNA, 23 bp, Homo sapiens
atgaagctcccagaatgccagag

SEQ ID NO: 70285 - DNA, 24 bp, Homo sapiens
gaatgcaagaagcccagacggaaa

SEQ ID NO: 70286 - DNA, 19 bp, Homo sapiens
tttgatgctgtccccggac

SEQ ID NO: 70287 - DNA, 24 bp, Homo sapiens
gacagaagatgacaggggccagga

SEQ ID NO: 70288 - DNA, 18 bp, Homo sapiens
tctgactgctcttttcac

SEQ ID NO: 70289 - DNA, 23 bp, Homo sapiens
ggggccacggggggagcagcctc

SEQ ID NO: 70290 - DNA, 22 bp, Homo sapiens
ttgggctggggacctggagggc

SEQ ID NO: 70291 - DNA, 23 bp, Homo sapiens
tcttcagtgaaccattgttcaat

SEQ ID NO: 70292 - DNA, 22 bp, Homo sapiens
ctgactttctgctcttgtcttt

SEQ ID NO: 70293 - DNA, 24 bp, Homo sapiens
caagggggactgtagatgggtgaa

SEQ ID NO: 70294 - DNA, 16 bp, Homo sapiens
aaccccagccccctag

SEQ ID NO: 70295 - DNA, 16 bp, Homo sapiens
ccagccctccaggtcc

SEQ ID NO: 70296 - DNA, 24 bp, Homo sapiens
caggaaacattttcagacctatgg

SEQ ID NO: 70297 - DNA, 22 bp, Homo sapiens
cagaacgttgttttcaggaagt

SEQ ID NO: 70298 - DNA, 18 bp, Homo sapiens
actgccatggaggagccg

SEQ ID NO: 70299 - DNA, 24 bp, Homo sapiens
ttttcgcttcccacaggtctctgc

SEQ ID NO: 70300 - DNA, 24 bp, Homo sapiens
gttggaagtgtctcatgctggatc

SEQ ID NO: 70301 - DNA, 22 bp, Homo sapiens
caatggatccactcacagtttc

SEQ ID NO: 70302 - DNA, 22 bp, Homo sapiens
cagacactggcatggtgttggg

SEQ ID NO: 70303 - DNA, 20 bp, Homo sapiens
gctaggatctgactgcggct

SEQ ID NO: 70304 - DNA, 22 bp, Homo sapiens
ggctctcggctccgtgtatttt

SEQ ID NO: 70305 - DNA, 21 bp, Homo sapiens
aacatccccatcatctacacc

SEQ ID NO: 70306 - DNA, 22 bp, Homo sapiens
acgcttccctggattgggtaag

SEQ ID NO: 70307 - DNA, 24 bp, Homo sapiens
tagccaagcttccatcccactcac

SEQ ID NO: 70308 - DNA, 24 bp, Homo sapiens
gtagctgctgggctccggggacac

SEQ ID NO: 70309 - DNA, 16 bp, Homo sapiens
gcgattttcccgagct

SEQ ID NO: 70310 - DNA, 23 bp, Homo sapiens
agactggcgctaaaagttttgag

SEQ ID NO: 70311 - DNA, 24 bp, Homo sapiens
ggactcatcaagttcagtcaggag

SEQ ID NO: 70312 - DNA, 16 bp, Homo sapiens
gtgccaggagcctcgc

SEQ ID NO: 70313 - DNA, 16 bp, Homo sapiens
cccgaacgcaaagtgt

SEQ ID NO: 70314 - DNA, 22 bp, Homo sapiens
ttcctttgcttcctccggcagg

SEQ ID NO: 70315 - DNA, 22 bp, Homo sapiens
tggctctagacttttgagaagc

SEQ ID NO: 70316 - DNA, 24 bp, Homo sapiens
tgttagtatctacggcaccaggtc

SEQ ID NO: 70317 - DNA, 22 bp, Homo sapiens
ggggaaaaccccaatcccatca

SEQ ID NO: 70318 - DNA, 22 bp, Homo sapiens
tccaccaattctgccctcacag

SEQ ID NO: 70319 - DNA, 22 bp, Homo sapiens
tgacaagtaagggcaagtaatc

SEQ ID NO: 70320 - DNA, 18 bp, Homo sapiens
gctttcttccttccaccc

SEQ ID NO: 70321 - DNA, 22 bp, Homo sapiens
aggagggtgcagagtcaggatt

SEQ ID NO: 70322 - DNA, 22 bp, Homo sapiens
cggaaagccttcctaaaaaatg

SEQ ID NO: 70323 - DNA, 22 bp, Homo sapiens
ggaaaattctgcaagccagagc

SEQ ID NO: 70324 - DNA, 22 bp, Homo sapiens
ataagatggtgtgatataaagt

SEQ ID NO: 70325 - DNA, 22 bp, Homo sapiens
gcattgtgtcaaatatgaaggg

SEQ ID NO: 70326 - DNA, 16 bp, Homo sapiens
cacagcctcggagtct

SEQ ID NO: 70327 - DNA, 20 bp, Homo sapiens
tgatggtttcccttccttgc

SEQ ID NO: 70328 - DNA, 20 bp, Homo sapiens
agttctggatgactggcctg

SEQ ID NO: 70329 - DNA, 24 bp, Homo sapiens
agggacagtccctctcacggggct

SEQ ID NO: 70330 - DNA, 19 bp, Homo sapiens
gaggacacacagaagctgc

SEQ ID NO: 70331 - DNA, 17 bp, Homo sapiens
gggtcagttccgagact

SEQ ID NO: 70332 - DNA, 24 bp, Homo sapiens
ttttcttcagcaaagtgaaggtgc

SEQ ID NO: 70333 - DNA, 23 bp, Homo sapiens
gaggtgtgacttgtaggtcttgc

SEQ ID NO: 70334 - DNA, 16 bp, Homo sapiens
ggccccgtgaccaggg

SEQ ID NO: 70335 - DNA, 17 bp, Homo sapiens
gacgcacccaggatgct

SEQ ID NO: 70336 - DNA, 19 bp, Homo sapiens
tggattccagctctgcctg

SEQ ID NO: 70337 - DNA, 21 bp, Homo sapiens
ccttggtgaacttaaaaagca

SEQ ID NO: 70338 - DNA, 16 bp, Homo sapiens
agtgcctcgtctgcct

SEQ ID NO: 70339 - DNA, 19 bp, Homo sapiens
cccaacctcttctctcggc

SEQ ID NO: 70340 - DNA, 21 bp, Homo sapiens
catcctgaataagattgaagc

SEQ ID NO: 70341 - DNA, 20 bp, Homo sapiens
gaaacagctccaggttttct

SEQ ID NO: 70342 - DNA, 17 bp, Homo sapiens
cccgcgctaacgcctgc

SEQ ID NO: 70343 - DNA, 24 bp, Homo sapiens
gttgcttacttcatccactcctcc

SEQ ID NO: 70344 - DNA, 18 bp, Homo sapiens
cctgtagctgcagaccga

SEQ ID NO: 70345 - DNA, 16 bp, Homo sapiens
ggttggtcagagccgc

SEQ ID NO: 70346 - DNA, 18 bp, Homo sapiens
gtgtgaggatgaccagtc

SEQ ID NO: 70347 - DNA, 24 bp, Homo sapiens
gagaagggcaggggcagagcaagg

SEQ ID NO: 70348 - DNA, 22 bp, Homo sapiens
tgttgttacagagtttgctgtc

SEQ ID NO: 70349 - DNA, 18 bp, Homo sapiens
acactctgcctgggggca

SEQ ID NO: 70350 - DNA, 23 bp, Homo sapiens
cggtgggctagcgcaggggaggt

SEQ ID NO: 70351 - DNA, 24 bp, Homo sapiens
caaactcgtacttgctgagagact

SEQ ID NO: 70352 - DNA, 17 bp, Homo sapiens
gtcttttcaccagcagc

SEQ ID NO: 70353 - DNA, 17 bp, Homo sapiens
gcggctgcgtggacctc

SEQ ID NO: 70354 - DNA, 18 bp, Homo sapiens
cccccacgtgctctcctc

SEQ ID NO: 70355 - DNA, 19 bp, Homo sapiens
gcccagagccatgggggaa

SEQ ID NO: 70356 - DNA, 19 bp, Homo sapiens
cagccagtacgaggaggcc

SEQ ID NO: 70357 - DNA, 20 bp, Homo sapiens
gatctggttccactttgggc

SEQ ID NO: 70358 - DNA, 19 bp, Homo sapiens
ctgctgtcctcctcagacc

SEQ ID NO: 70359 - DNA, 17 bp, Homo sapiens
cgggggcacgcacctga

SEQ ID NO: 70360 - DNA, 18 bp, Homo sapiens
gtagtagagcatggatgg

SEQ ID NO: 70361 - DNA, 20 bp, Homo sapiens
gagccccaggaagttgcacc

SEQ ID NO: 70362 - DNA, 20 bp, Homo sapiens
gagtctggggactcctctgg

SEQ ID NO: 70363 - DNA, 24 bp, Homo sapiens
gatgcggacgcagcccacgggaag

SEQ ID NO: 70364 - DNA, 18 bp, Homo sapiens
gacctcgtccagtcagct

SEQ ID NO: 70365 - DNA, 22 bp, Homo sapiens
agtggagaccgtgtggtgcaca

SEQ ID NO: 70366 - DNA, 20 bp, Homo sapiens
cttctttccgcatgctggcc

SEQ ID NO: 70367 - DNA, 22 bp, Homo sapiens
gacgccaggcaccaggccaata

SEQ ID NO: 70368 - DNA, 23 bp, Homo sapiens
aaccatttctactagtcacgctg

SEQ ID NO: 70369 - DNA, 24 bp, Homo sapiens
ttctcacccgaagtacttcaaaag

SEQ ID NO: 70370 - DNA, 24 bp, Homo sapiens
tgtctttgctctacaaagttttat

SEQ ID NO: 70371 - DNA, 20 bp, Homo sapiens
ttccccatgagaacgtgcca

SEQ ID NO: 70372 - DNA, 23 bp, Homo sapiens
ccctttaaccctgggccgggcac

SEQ ID NO: 70373 - DNA, 18 bp, Homo sapiens
gcacatgaggcaggtagg

SEQ ID NO: 70374 - DNA, 20 bp, Homo sapiens
tcagccacccaccgaggagg

SEQ ID NO: 70375 - DNA, 19 bp, Homo sapiens
cctctctctcaggctgtgg

SEQ ID NO: 70376 - DNA, 16 bp, Homo sapiens
aggcaaggcgtgtggg

SEQ ID NO: 70377 - DNA, 16 bp, Homo sapiens
tgtgttgccagagagt

SEQ ID NO: 70378 - DNA, 17 bp, Homo sapiens
atgcgctgtgcccctgc

SEQ ID NO: 70379 - DNA, 24 bp, Homo sapiens
ctgtcttgcagatttagaagagga

SEQ ID NO: 70380 - DNA, 17 bp, Homo sapiens
ttccggggctgccagct

SEQ ID NO: 70381 - DNA, 24 bp, Homo sapiens
tcttgggctgaagtcacaggatga

SEQ ID NO: 70382 - DNA, 18 bp, Homo sapiens
cccgcccttctgtactct

SEQ ID NO: 70383 - DNA, 16 bp, Homo sapiens
gagcataggacctggc

SEQ ID NO: 70384 - DNA, 20 bp, Homo sapiens
tcagagttgtcccagctttc

SEQ ID NO: 70385 - DNA, 24 bp, Homo sapiens
tatcacaaaatcgggacgagaagc

SEQ ID NO: 70386 - DNA, 16 bp, Homo sapiens
gagggaaacgcggctc

SEQ ID NO: 70387 - DNA, 24 bp, Homo sapiens
cacctgtgaattttccccacctag

SEQ ID NO: 70388 - DNA, 16 bp, Homo sapiens
ccttggcccggatggc

SEQ ID NO: 70389 - DNA, 24 bp, Homo sapiens
cgagacaggaaatcacaacaatca

SEQ ID NO: 70390 - DNA, 21 bp, Homo sapiens
aggataccttggtccagatgg

SEQ ID NO: 70391 - DNA, 21 bp, Homo sapiens
ctcgttctgggctgattcaga

SEQ ID NO: 70392 - DNA, 18 bp, Homo sapiens
ctcctgaaggcgtgtggc

SEQ ID NO: 70393 - DNA, 24 bp, Homo sapiens
aggagagcagacagctggtaccgc

SEQ ID NO: 70394 - DNA, 23 bp, Homo sapiens
gtgagcgtcaggtttgctttttc

SEQ ID NO: 70395 - DNA, 22 bp, Homo sapiens
cctgcctcaccagcgagcttct

SEQ ID NO: 70396 - DNA, 21 bp, Homo sapiens
ccctgctggtgttcttttata

SEQ ID NO: 70397 - DNA, 16 bp, Homo sapiens
ggtcagccggctgcca

SEQ ID NO: 70398 - DNA, 20 bp, Homo sapiens
ctgacaagtgcccacaggcc

SEQ ID NO: 70399 - DNA, 21 bp, Homo sapiens
caacgccgcccgctcgctgac

SEQ ID NO: 70400 - DNA, 23 bp, Homo sapiens
ctaaggactgttctcccaaatcc

SEQ ID NO: 70401 - DNA, 24 bp, Homo sapiens
cacagcgtgctcagaggatgaaca

SEQ ID NO: 70402 - DNA, 24 bp, Homo sapiens
aacagatatgccaaaagcagagac

SEQ ID NO: 70403 - DNA, 23 bp, Homo sapiens
cttaaagaggccatcccttccct

SEQ ID NO: 70404 - DNA, 24 bp, Homo sapiens
gcccacaggttgtcatcacttgtc

SEQ ID NO: 70405 - DNA, 17 bp, Homo sapiens
caggtcctggagttggc

SEQ ID NO: 70406 - DNA, 23 bp, Homo sapiens
taggaatggcgtgaaggctgtgt

SEQ ID NO: 70407 - DNA, 24 bp, Homo sapiens
gattggactggtggcactttgtgt

SEQ ID NO: 70408 - DNA, 16 bp, Homo sapiens
ggcaaggcgctcaagg

SEQ ID NO: 70409 - DNA, 22 bp, Homo sapiens
gaagccaagagactacaattca

SEQ ID NO: 70410 - DNA, 24 bp, Homo sapiens
ctacctcatcaactcctggccctt

SEQ ID NO: 70411 - DNA, 18 bp, Homo sapiens
cggtctccaggcctcaac

SEQ ID NO: 70412 - DNA, 16 bp, Homo sapiens
caggggcttccagcgc

SEQ ID NO: 70413 - DNA, 20 bp, Homo sapiens
cggcacctcatctctgaatt

SEQ ID NO: 70414 - DNA, 24 bp, Homo sapiens
catcttcttcggagatgagcagca

SEQ ID NO: 70415 - DNA, 17 bp, Homo sapiens
ggaccttccccagcagg

SEQ ID NO: 70416 - DNA, 18 bp, Homo sapiens
ggaaagggctgtctgagt

SEQ ID NO: 70417 - DNA, 23 bp, Homo sapiens
gatggtgatgatgctgtaccagc

SEQ ID NO: 70418 - DNA, 20 bp, Homo sapiens
atttgtgccagctgactctg

SEQ ID NO: 70419 - DNA, 24 bp, Homo sapiens
agaaggtgtggctgaacacaaagc

SEQ ID NO: 70420 - DNA, 19 bp, Homo sapiens
agtcttcggctctcatggc

SEQ ID NO: 70421 - DNA, 18 bp, Homo sapiens
cggagcctgagctgtgag

SEQ ID NO: 70422 - DNA, 22 bp, Homo sapiens
gtgctgtgctgatctgcgggtc

SEQ ID NO: 70423 - DNA, 16 bp, Homo sapiens
tcagccaccagcaccc

SEQ ID NO: 70424 - DNA, 17 bp, Homo sapiens
ctggctccgagcccacc

SEQ ID NO: 70425 - DNA, 16 bp, Homo sapiens
acttgctgcagggcac

SEQ ID NO: 70426 - DNA, 19 bp, Homo sapiens
ggccacaaggctcacctca

SEQ ID NO: 70427 - DNA, 23 bp, Homo sapiens
taagagagtttgtcgccctgctt

SEQ ID NO: 70428 - DNA, 17 bp, Homo sapiens
gaagagctgggggtggc

SEQ ID NO: 70429 - DNA, 23 bp, Homo sapiens
gccaattatttttttacaaaaat

SEQ ID NO: 70430 - DNA, 17 bp, Homo sapiens
atatatcccgggtgccc

SEQ ID NO: 70431 - DNA, 21 bp, Homo sapiens
gttctgttttcctctttagga

SEQ ID NO: 70432 - DNA, 20 bp, Homo sapiens
ccaaaaagtcggacatgtgc

SEQ ID NO: 70433 - DNA, 16 bp, Homo sapiens
gaaagaactgaagggc

SEQ ID NO: 70434 - DNA, 16 bp, Homo sapiens
gatgcgtgcgcacagc

SEQ ID NO: 70435 - DNA, 23 bp, Homo sapiens
cactgctctcaggtcctcctgtc

SEQ ID NO: 70436 - DNA, 24 bp, Homo sapiens
gatgggaatgaggacagtcctggc

SEQ ID NO: 70437 - DNA, 24 bp, Homo sapiens
caagaccccaaagacacttgcctc

SEQ ID NO: 70438 - DNA, 16 bp, Homo sapiens
ccgcactctcttctgc

SEQ ID NO: 70439 - DNA, 24 bp, Homo sapiens
ctcgacgctggccccctctgcggg

SEQ ID NO: 70440 - DNA, 19 bp, Homo sapiens
ttgcagtctccaaggcacc

SEQ ID NO: 70441 - DNA, 20 bp, Homo sapiens
tcttcttccgcctgctcacc

SEQ ID NO: 70442 - DNA, 23 bp, Homo sapiens
gggaggtttcatggagtcaatag

SEQ ID NO: 70443 - DNA, 16 bp, Homo sapiens
gggcgtgcagcacctc

SEQ ID NO: 70444 - DNA, 16 bp, Homo sapiens
gcaggaagtccatggc

SEQ ID NO: 70445 - DNA, 24 bp, Homo sapiens
gaagtggcagagagccacgatggc

SEQ ID NO: 70446 - DNA, 19 bp, Homo sapiens
ccacccccgtgggaacact

SEQ ID NO: 70447 - DNA, 17 bp, Homo sapiens
gccggttacctgctcgt

SEQ ID NO: 70448 - DNA, 22 bp, Homo sapiens
ttccctcacctcagcctccgct

SEQ ID NO: 70449 - DNA, 17 bp, Homo sapiens
ccctcacctactctgtc

SEQ ID NO: 70450 - DNA, 23 bp, Homo sapiens
cttccctccgccgccccccggcc

SEQ ID NO: 70451 - DNA, 22 bp, Homo sapiens
ccttctcttcccttcccttcct

SEQ ID NO: 70452 - DNA, 16 bp, Homo sapiens
gccgtggtcagccgct

SEQ ID NO: 70453 - DNA, 22 bp, Homo sapiens
aggttgattgaaaatcggagtt

SEQ ID NO: 70454 - DNA, 21 bp, Homo sapiens
attagacattccttgttgtgc

SEQ ID NO: 70455 - DNA, 21 bp, Homo sapiens
acgtcatgattttcaatggca

SEQ ID NO: 70456 - DNA, 21 bp, Homo sapiens
tttaaaatagtagtgaggccg

SEQ ID NO: 70457 - DNA, 20 bp, Homo sapiens
tgttaacgtgtttttttttt

SEQ ID NO: 70458 - DNA, 20 bp, Homo sapiens
gaaaagaaagcaaattcccc

SEQ ID NO: 70459 - DNA, 19 bp, Homo sapiens
accaaagtcagtactgagc

SEQ ID NO: 70460 - DNA, 21 bp, Homo sapiens
gtccacagaaaatcactttcc

SEQ ID NO: 70461 - DNA, 18 bp, Homo sapiens
tctttggttataagcggc

SEQ ID NO: 70462 - DNA, 28 bp, Homo sapiens
tttgacaaaataaaattaaaaggttatc

SEQ ID NO: 70463 - DNA, 19 bp, Homo sapiens
tttcagcagcttctccaaa

SEQ ID NO: 70464 - DNA, 29 bp, Homo sapiens
taatatatttaagtatagtataatctggg

SEQ ID NO: 70465 - DNA, 20 bp, Homo sapiens
ccccagcaagacatttttcc

SEQ ID NO: 70466 - DNA, 22 bp, Homo sapiens
ttcacttttcagatgtgtgttg

SEQ ID NO: 70467 - DNA, 23 bp, Homo sapiens
tgggacataagatcattctcaag

SEQ ID NO: 70468 - DNA, 24 bp, Homo sapiens
tctgaatatcttttctgttagaga

SEQ ID NO: 70469 - DNA, 19 bp, Homo sapiens
tgtctcagacaaaagtcca

SEQ ID NO: 70470 - DNA, 22 bp, Homo sapiens
gttgattatattggatacactg

SEQ ID NO: 70471 - DNA, 19 bp, Homo sapiens
ttgtgtcctttggttgcta

SEQ ID NO: 70472 - DNA, 22 bp, Homo sapiens
tgaaacgttaacagttgttaaa

SEQ ID NO: 70473 - DNA, 16 bp, Homo sapiens
ggcagatttctggcag

SEQ ID NO: 70474 - DNA, 23 bp, Homo sapiens
ttgttctgtgtgtgtgtttgaaa

SEQ ID NO: 70475 - DNA, 19 bp, Homo sapiens
ccccagaggcagaattccg

SEQ ID NO: 70476 - DNA, 24 bp, Homo sapiens
gtttagaataatgtgattatttct

SEQ ID NO: 70477 - DNA, 21 bp, Homo sapiens
cctggtagaaatgcgactaaa

SEQ ID NO: 70478 - DNA, 22 bp, Homo sapiens
aacgatgctggtcaaacagttg

SEQ ID NO: 70479 - DNA, 23 bp, Homo sapiens
tgtagacaaaaaacaaaacttct

SEQ ID NO: 70480 - DNA, 20 bp, Homo sapiens
agcatgcagctgaacttcgg

SEQ ID NO: 70481 - DNA, 23 bp, Homo sapiens
gcaaaagaacttgtctcaaaaac

SEQ ID NO: 70482 - DNA, 24 bp, Homo sapiens
agctgcaacaacttcaatgcagtc

SEQ ID NO: 70483 - DNA, 23 bp, Homo sapiens
acaaacagttaattcctgtaacc

SEQ ID NO: 70484 - DNA, 23 bp, Homo sapiens
aatccacattgatatactgtaac

SEQ ID NO: 70485 - DNA, 21 bp, Homo sapiens
gaagtgctgggattacaggtg

SEQ ID NO: 70486 - DNA, 29 bp, Homo sapiens
gatttttttcagatatattatacatttaa

SEQ ID NO: 70487 - DNA, 19 bp, Homo sapiens
tggtttttactttttaggt

SEQ ID NO: 70488 - DNA, 23 bp, Homo sapiens
ggtgttctagttcagcacaatta

SEQ ID NO: 70489 - DNA, 25 bp, Homo sapiens
tgttgatgttcatgatatagaattg

SEQ ID NO: 70490 - DNA, 20 bp, Homo sapiens
acccatttgtattactggtt

SEQ ID NO: 70491 - DNA, 22 bp, Homo sapiens
accttctttagggctttaaatt

SEQ ID NO: 70492 - DNA, 21 bp, Homo sapiens
aggtgtctttacctttcattg

SEQ ID NO: 70493 - DNA, 21 bp, Homo sapiens
accagagaggttgtaacttac

SEQ ID NO: 70494 - DNA, 23 bp, Homo sapiens
gaaagttattttgctctgagttg

SEQ ID NO: 70495 - DNA, 23 bp, Homo sapiens
actttttgattcaggatgctaac

SEQ ID NO: 70496 - DNA, 22 bp, Homo sapiens
ttgtgttttttccagaaacagc

SEQ ID NO: 70497 - DNA, 21 bp, Homo sapiens
aataatattacaatgtattct

SEQ ID NO: 70498 - DNA, 24 bp, Homo sapiens
cagttataaatagcctggaaaagg

SEQ ID NO: 70499 - DNA, 22 bp, Homo sapiens
gttttgtaaattcatctggata

SEQ ID NO: 70500 - DNA, 22 bp, Homo sapiens
ttcacattcattttcaggaaga

SEQ ID NO: 70501 - DNA, 27 bp, Homo sapiens
aaaaaaaaaaaaaaaatcaatcgtatc

SEQ ID NO: 70502 - DNA, 28 bp, Homo sapiens
gtttgtgacattttatttactgtattac

SEQ ID NO: 70503 - DNA, 21 bp, Homo sapiens
acttggaaaacgatgataggt

SEQ ID NO: 70504 - DNA, 22 bp, Homo sapiens
ggcattttggaactgggtagaa

SEQ ID NO: 70505 - DNA, 18 bp, Homo sapiens
ttcctatttgacaccagt

SEQ ID NO: 70506 - DNA, 21 bp, Homo sapiens
ccaccaagtcaaatagctttt

SEQ ID NO: 70507 - DNA, 24 bp, Homo sapiens
gtgtagttgcttaaatgaagttcc

SEQ ID NO: 70508 - DNA, 21 bp, Homo sapiens
agaatgatttgtagtggccaa

SEQ ID NO: 70509 - DNA, 22 bp, Homo sapiens
tgtcagcttttactttaatgcc

SEQ ID NO: 70510 - DNA, 20 bp, Homo sapiens
tgttgttttcatcaaccacg

SEQ ID NO: 70511 - DNA, 18 bp, Homo sapiens
ttcatgcagaatgtgcag

SEQ ID NO: 70512 - DNA, 23 bp, Homo sapiens
agtaaaataaactgcttcacatc

SEQ ID NO: 70513 - DNA, 21 bp, Homo sapiens
gcaccaaacgtaaagcagcag

SEQ ID NO: 70514 - DNA, 18 bp, Homo sapiens
tccctgaaatactttgct

SEQ ID NO: 70515 - DNA, 20 bp, Homo sapiens
tccaggatatatccaaagac

SEQ ID NO: 70516 - DNA, 20 bp, Homo sapiens
tgtatgagtatgtctcttct

SEQ ID NO: 70517 - DNA, 19 bp, Homo sapiens
agagcttttcgtagactgt

SEQ ID NO: 70518 - DNA, 24 bp, Homo sapiens
accacaaatataaattatgcattc

SEQ ID NO: 70519 - DNA, 17 bp, Homo sapiens
ttgacacaggcaattgc

SEQ ID NO: 70520 - DNA, 21 bp, Homo sapiens
ttagctacatctggaatagaa

SEQ ID NO: 70521 - DNA, 20 bp, Homo sapiens
accatggactgaacaagtag

SEQ ID NO: 70522 - DNA, 22 bp, Homo sapiens
tctgtagaagttatttctggac

SEQ ID NO: 70523 - DNA, 24 bp, Homo sapiens
attttcttaaagtttgtagtagag

SEQ ID NO: 70524 - DNA, 18 bp, Homo sapiens
gctgacagaaagtgctgc

SEQ ID NO: 70525 - DNA, 22 bp, Homo sapiens
gagtcagaactttaatgttagc

SEQ ID NO: 70526 - DNA, 21 bp, Homo sapiens
tgggaagataactctgtcatt

SEQ ID NO: 70527 - DNA, 19 bp, Homo sapiens
ggctgatgaacacagtaac

SEQ ID NO: 70528 - DNA, 20 bp, Homo sapiens
acttggattaaaaagcaggt

SEQ ID NO: 70529 - DNA, 24 bp, Homo sapiens
gaaccacagtatgggtgctttgtg

SEQ ID NO: 70530 - DNA, 20 bp, Homo sapiens
aggcagtcaatcattagatc

SEQ ID NO: 70531 - DNA, 24 bp, Homo sapiens
gggtaatgtgttgatgttattaca

SEQ ID NO: 70532 - DNA, 21 bp, Homo sapiens
gataaaaaccaatgctctcac

SEQ ID NO: 70533 - DNA, 22 bp, Homo sapiens
tctgttggggtttttatagaac

SEQ ID NO: 70534 - DNA, 22 bp, Homo sapiens
acctattaatctctatagtctt

SEQ ID NO: 70535 - DNA, 19 bp, Homo sapiens
cagtcagcctgcagatgtg

SEQ ID NO: 70536 - DNA, 20 bp, Homo sapiens
ggtcttgaaacgaacatcaa

SEQ ID NO: 70537 - DNA, 20 bp, Homo sapiens
gccctcacaacaaccaacac

SEQ ID NO: 70538 - DNA, 23 bp, Homo sapiens
tcggtatttctcactattatgta

SEQ ID NO: 70539 - DNA, 22 bp, Homo sapiens
gattcgatggagtgaatttacc

SEQ ID NO: 70540 - DNA, 22 bp, Homo sapiens
taaactttctatttgctgttct

SEQ ID NO: 70541 - DNA, 28 bp, Homo sapiens
caaagaaaagaaagaaaaaaattttttt

SEQ ID NO: 70542 - DNA, 22 bp, Homo sapiens
aaataatctgcttttttttttc

SEQ ID NO: 70543 - DNA, 24 bp, Homo sapiens
acatctaaattcagaacctttttg

SEQ ID NO: 70544 - DNA, 20 bp, Homo sapiens
acatttcactatgtgctggt

SEQ ID NO: 70545 - DNA, 26 bp, Homo sapiens
aaaaatacaaatatttatcaattatc

SEQ ID NO: 70546 - DNA, 18 bp, Homo sapiens
catgcttgaaagtgctct

SEQ ID NO: 70547 - DNA, 24 bp, Homo sapiens
acactaaaaatattcaaagagtgg

SEQ ID NO: 70548 - DNA, 17 bp, Homo sapiens
tccaggcatgcttggaa

SEQ ID NO: 70549 - DNA, 24 bp, Homo sapiens
aaacccaaatatatacttttttga

SEQ ID NO: 70550 - DNA, 19 bp, Homo sapiens
agagtagaagaggatgcac

SEQ ID NO: 70551 - DNA, 18 bp, Homo sapiens
accaatccaatgcggact

SEQ ID NO: 70552 - DNA, 22 bp, Homo sapiens
actttggaaatcatggtgtgtg

SEQ ID NO: 70553 - DNA, 24 bp, Homo sapiens
gaagtgtttcaccaaacatatttc

SEQ ID NO: 70554 - DNA, 22 bp, Homo sapiens
aaaactacagtgataaacagag

SEQ ID NO: 70555 - DNA, 18 bp, Homo sapiens
cttaccggtgccattcgt

SEQ ID NO: 70556 - DNA, 22 bp, Homo sapiens
ggtctttgtttttctctagtcc

SEQ ID NO: 70557 - DNA, 24 bp, Homo sapiens
gcaggaataggataaagacactaa

SEQ ID NO: 70558 - DNA, 20 bp, Homo sapiens
ttgtcactcggttgaacttc

SEQ ID NO: 70559 - DNA, 22 bp, Homo sapiens
accacaacatttagaggaaatg

SEQ ID NO: 70560 - DNA, 18 bp, Homo sapiens
gagcacacccagcaatac

SEQ ID NO: 70561 - DNA, 20 bp, Homo sapiens
aaggcttgttactttttctt

SEQ ID NO: 70562 - DNA, 19 bp, Homo sapiens
taccacacatttggtagta

SEQ ID NO: 70563 - DNA, 21 bp, Homo sapiens
accatggacaagagaagatac

SEQ ID NO: 70564 - DNA, 21 bp, Homo sapiens
tcttttaaaaggttggatagc

SEQ ID NO: 70565 - DNA, 29 bp, Homo sapiens
tgagacatttcataaaaaaatacttacac

SEQ ID NO: 70566 - DNA, 20 bp, Homo sapiens
ttgtttttagagtcttacat

SEQ ID NO: 70567 - DNA, 18 bp, Homo sapiens
ggtcttggcgtttcagct

SEQ ID NO: 70568 - DNA, 24 bp, Homo sapiens
acctacagacctggagacaagaag

SEQ ID NO: 70569 - DNA, 22 bp, Homo sapiens
acgtcttagttttcaggtatga

SEQ ID NO: 70570 - DNA, 19 bp, Homo sapiens
tgcagatccaaagctcttg

SEQ ID NO: 70571 - DNA, 19 bp, Homo sapiens
cccctgttttcttggattc

SEQ ID NO: 70572 - DNA, 24 bp, Homo sapiens
ccgcgtccagcctagttctagaac

SEQ ID NO: 70573 - DNA, 18 bp, Homo sapiens
tgagggaccagttggacg

SEQ ID NO: 70574 - DNA, 23 bp, Homo sapiens
cagtcactgtctatttcttcctc

SEQ ID NO: 70575 - DNA, 22 bp, Homo sapiens
agaacatggaattcattttccc

SEQ ID NO: 70576 - DNA, 22 bp, Homo sapiens
tcctttttttccttgcagaatc

SEQ ID NO: 70577 - DNA, 18 bp, Homo sapiens
agaaaccacacaccaaag

SEQ ID NO: 70578 - DNA, 18 bp, Homo sapiens
taattacagggctcgtcc

SEQ ID NO: 70579 - DNA, 23 bp, Homo sapiens
tggagttttataaaacaatgtat

SEQ ID NO: 70580 - DNA, 22 bp, Homo sapiens
ccagagtttctctctttttacc

SEQ ID NO: 70581 - DNA, 21 bp, Homo sapiens
ccaaaatgtttctacaggagc

SEQ ID NO: 70582 - DNA, 27 bp, Homo sapiens
atttcttagcatttataaaataagtac

SEQ ID NO: 70583 - DNA, 29 bp, Homo sapiens
caaaaatacaaaataaaatttaaaagttg

SEQ ID NO: 70584 - DNA, 20 bp, Homo sapiens
ctctttgtctttctcttttt

SEQ ID NO: 70585 - DNA, 22 bp, Homo sapiens
tggaagtgtaagttttacaatg

SEQ ID NO: 70586 - DNA, 19 bp, Homo sapiens
gcattgatttgtggaatcc

SEQ ID NO: 70587 - DNA, 22 bp, Homo sapiens
tcttacagttaaaacaagaaat

SEQ ID NO: 70588 - DNA, 25 bp, Homo sapiens
tgtacttttattttttaaattcaac

SEQ ID NO: 70589 - DNA, 20 bp, Homo sapiens
gggtgacaaaatttagcact

SEQ ID NO: 70590 - DNA, 24 bp, Homo sapiens
tgactagttaatttcttgcagatg

SEQ ID NO: 70591 - DNA, 24 bp, Homo sapiens
accttacaagaaaaactaagcttc

SEQ ID NO: 70592 - DNA, 19 bp, Homo sapiens
gcagatcaatatttcccgc

SEQ ID NO: 70593 - DNA, 23 bp, Homo sapiens
tgtctggttatatctgcattagg

SEQ ID NO: 70594 - DNA, 30 bp, Homo sapiens
attccaaatattcttccattttttaaatat

SEQ ID NO: 70595 - DNA, 22 bp, Homo sapiens
actgcagctcacaaatgctttt

SEQ ID NO: 70596 - DNA, 23 bp, Homo sapiens
gctgaaatagaacctaatttggc

SEQ ID NO: 70597 - DNA, 23 bp, Homo sapiens
agtagcacagaaattctcaagtg

SEQ ID NO: 70598 - DNA, 20 bp, Homo sapiens
ccagtcattgtcctctgcat

SEQ ID NO: 70599 - DNA, 22 bp, Homo sapiens
aggaacttctatctgcctgcta

SEQ ID NO: 70600 - DNA, 23 bp, Homo sapiens
ctagtgaatctccttcaagttgg

SEQ ID NO: 70601 - DNA, 22 bp, Homo sapiens
actggtatttccactagaagga

SEQ ID NO: 70602 - DNA, 20 bp, Homo sapiens
gtctcaaacaggaagacaac

SEQ ID NO: 70603 - DNA, 21 bp, Homo sapiens
ccggagagaggctccaggagt

SEQ ID NO: 70604 - DNA, 24 bp, Homo sapiens
ttcagtaaagcttatttatttatt

SEQ ID NO: 70605 - DNA, 24 bp, Homo sapiens
acagagcacataaaatgatacaga

SEQ ID NO: 70606 - DNA, 17 bp, Homo sapiens
acggggtaggatgtgat

SEQ ID NO: 70607 - DNA, 23 bp, Homo sapiens
ctattacactatattacctagat

SEQ ID NO: 70608 - DNA, 25 bp, Homo sapiens
gatcatgaagaattactacgtactc

SEQ ID NO: 70609 - DNA, 17 bp, Homo sapiens
tgcccaaagttccacaa

SEQ ID NO: 70610 - DNA, 16 bp, Homo sapiens
gggggggttccgctgc

SEQ ID NO: 70611 - DNA, 24 bp, Homo sapiens
attgtatgcggagacacacacaca

SEQ ID NO: 70612 - DNA, 24 bp, Homo sapiens
ttgttagattttatacataaaatt

SEQ ID NO: 70613 - DNA, 21 bp, Homo sapiens
accggatatctgcttcctcac

SEQ ID NO: 70614 - DNA, 22 bp, Homo sapiens
ctcaggatagtgcagcaggatg

SEQ ID NO: 70615 - DNA, 24 bp, Homo sapiens
gcaaactccatgaatgtgttatag

SEQ ID NO: 70616 - DNA, 19 bp, Homo sapiens
agtggccctgtacatgttt

SEQ ID NO: 70617 - DNA, 24 bp, Homo sapiens
actgagtaaaaaaaaccactattc

SEQ ID NO: 70618 - DNA, 17 bp, Homo sapiens
cctgtttccgccacctc

SEQ ID NO: 70619 - DNA, 23 bp, Homo sapiens
acttacaaagtagtgaccttaaa

SEQ ID NO: 70620 - DNA, 22 bp, Homo sapiens
agtgtcagtgcataacctcttg

SEQ ID NO: 70621 - DNA, 24 bp, Homo sapiens
tcatcttactttgttcagaaaagg

SEQ ID NO: 70622 - DNA, 22 bp, Homo sapiens
agtgccatcactcttttctgaa

SEQ ID NO: 70623 - DNA, 24 bp, Homo sapiens
gtttttggctttatcatttgaagc

SEQ ID NO: 70624 - DNA, 18 bp, Homo sapiens
tgttgctaagggcatacc

SEQ ID NO: 70625 - DNA, 24 bp, Homo sapiens
ttatcaggttctccattggcaggc

SEQ ID NO: 70626 - DNA, 25 bp, Homo sapiens
ctattcctgatcacacatatgtaac

SEQ ID NO: 70627 - DNA, 20 bp, Homo sapiens
gcttaggaagagcagcactt

SEQ ID NO: 70628 - DNA, 23 bp, Homo sapiens
aaatactcagatattatacttgt

SEQ ID NO: 70629 - DNA, 21 bp, Homo sapiens
atcccactgcaggaaacactg

SEQ ID NO: 70630 - DNA, 21 bp, Homo sapiens
cccattttgcatgtgtatctt

SEQ ID NO: 70631 - DNA, 25 bp, Homo sapiens
taaatccaagatacgtgcatattac

SEQ ID NO: 70632 - DNA, 18 bp, Homo sapiens
cttacctggccatcttcc

SEQ ID NO: 70633 - DNA, 19 bp, Homo sapiens
acttggctgtagctgattg

SEQ ID NO: 70634 - DNA, 23 bp, Homo sapiens
aagattatcaaagtgaagtacat

SEQ ID NO: 70635 - DNA, 24 bp, Homo sapiens
aattgccttcattttaggcttggg

SEQ ID NO: 70636 - DNA, 22 bp, Homo sapiens
accacaactaaatatcagtctt

SEQ ID NO: 70637 - DNA, 20 bp, Homo sapiens
ctatccaaaagccaaaatgg

SEQ ID NO: 70638 - DNA, 18 bp, Homo sapiens
cttgtgaaggctttcagc

SEQ ID NO: 70639 - DNA, 22 bp, Homo sapiens
ttttatgggttgattttaatgt

SEQ ID NO: 70640 - DNA, 21 bp, Homo sapiens
ggagtctgtgtcagacaaatc

SEQ ID NO: 70641 - DNA, 23 bp, Homo sapiens
ggataaagcataatttgtcaagt

SEQ ID NO: 70642 - DNA, 18 bp, Homo sapiens
acactcccccaagggcac

SEQ ID NO: 70643 - DNA, 23 bp, Homo sapiens
acaaaaattttgtgtttaggctg

SEQ ID NO: 70644 - DNA, 18 bp, Homo sapiens
tgactggacccatgggtg

SEQ ID NO: 70645 - DNA, 19 bp, Homo sapiens
tgtgagtggaggaggatcc

SEQ ID NO: 70646 - DNA, 18 bp, Homo sapiens
aggtgtatctgcgtttcc

SEQ ID NO: 70647 - DNA, 24 bp, Homo sapiens
gatcaacatgactggcttcctttg

SEQ ID NO: 70648 - DNA, 21 bp, Homo sapiens
gaagtcccactttctcatggt

SEQ ID NO: 70649 - DNA, 20 bp, Homo sapiens
tggcctggcaacctatagcc

SEQ ID NO: 70650 - DNA, 21 bp, Homo sapiens
ttggatacagagcaggactca

SEQ ID NO: 70651 - DNA, 21 bp, Homo sapiens
gtgatgtcttcagagggaaac

SEQ ID NO: 70652 - DNA, 18 bp, Homo sapiens
cctgtccttgggagtcaa

SEQ ID NO: 70653 - DNA, 22 bp, Homo sapiens
gttgtccttaatggtgtgtaac

SEQ ID NO: 70654 - DNA, 21 bp, Homo sapiens
aggcttatttcaaacaagtca

SEQ ID NO: 70655 - DNA, 20 bp, Homo sapiens
tggtgggtctagaattgagt

SEQ ID NO: 70656 - DNA, 22 bp, Homo sapiens
ctttctgcaattttttggaaat

SEQ ID NO: 70657 - DNA, 21 bp, Homo sapiens
taccatcagcaagttttttga

SEQ ID NO: 70658 - DNA, 21 bp, Homo sapiens
ccctgtgtatgggtacgagtg

SEQ ID NO: 70659 - DNA, 23 bp, Homo sapiens
tcttcattatagctatggtttgt

SEQ ID NO: 70660 - DNA, 19 bp, Homo sapiens
ggtgcacttactctgtgtg

SEQ ID NO: 70661 - DNA, 18 bp, Homo sapiens
gctagcttgccctagatg

SEQ ID NO: 70662 - DNA, 22 bp, Homo sapiens
cttctgggcattgatggcaaat

SEQ ID NO: 70663 - DNA, 20 bp, Homo sapiens
aaatgtttctgctacatttc

SEQ ID NO: 70664 - DNA, 22 bp, Homo sapiens
accaatactcaatttgtagaac

SEQ ID NO: 70665 - DNA, 22 bp, Homo sapiens
aagaatggccagttattttatc

SEQ ID NO: 70666 - DNA, 19 bp, Homo sapiens
cgtacacaacttctggcta

SEQ ID NO: 70667 - DNA, 24 bp, Homo sapiens
acaaactagggtgtgacagtaagg

SEQ ID NO: 70668 - DNA, 21 bp, Homo sapiens
cgtttttatttgaattgcatg

SEQ ID NO: 70669 - DNA, 22 bp, Homo sapiens
tgttttcaaacttacatttaat

SEQ ID NO: 70670 - DNA, 20 bp, Homo sapiens
tcttggcaaaatgagaggtc

SEQ ID NO: 70671 - DNA, 24 bp, Homo sapiens
aatgccttctcttttgtctatatc

SEQ ID NO: 70672 - DNA, 25 bp, Homo sapiens
ggacatattaagatttacaagaccc

SEQ ID NO: 70673 - DNA, 19 bp, Homo sapiens
ttgggaatatggtccatgc

SEQ ID NO: 70674 - DNA, 23 bp, Homo sapiens
gctctcttttcatgtcctccttt

SEQ ID NO: 70675 - DNA, 17 bp, Homo sapiens
tggcaaggagagatgac

SEQ ID NO: 70676 - DNA, 20 bp, Homo sapiens
ggcacaaagcttagggaaat

SEQ ID NO: 70677 - DNA, 23 bp, Homo sapiens
ttatgtctgtgatagcagtatct

SEQ ID NO: 70678 - DNA, 17 bp, Homo sapiens
tcatctgctgcttggtt

SEQ ID NO: 70679 - DNA, 24 bp, Homo sapiens
ttgcactataagaaatcttacgtg

SEQ ID NO: 70680 - DNA, 21 bp, Homo sapiens
tcacagtaaaacccactaata

SEQ ID NO: 70681 - DNA, 20 bp, Homo sapiens
gctgtttctcttttctccac

SEQ ID NO: 70682 - DNA, 23 bp, Homo sapiens
tgacatctcaaaagtttaaatac

SEQ ID NO: 70683 - DNA, 20 bp, Homo sapiens
actgggttatgggaacatca

SEQ ID NO: 70684 - DNA, 26 bp, Homo sapiens
tcagtcaaaaaaaagcagtaataaag

SEQ ID NO: 70685 - DNA, 17 bp, Homo sapiens
tgcctggtccaaatctc

SEQ ID NO: 70686 - DNA, 22 bp, Homo sapiens
gggttgtgctaataatttgttt

SEQ ID NO: 70687 - DNA, 20 bp, Homo sapiens
acaccatctccttcttcagg

SEQ ID NO: 70688 - DNA, 22 bp, Homo sapiens
aagaggtttatttgaggggaag

SEQ ID NO: 70689 - DNA, 22 bp, Homo sapiens
tatgttttttggtgactgaaat

SEQ ID NO: 70690 - DNA, 23 bp, Homo sapiens
tttttttttttttttcagagatt

SEQ ID NO: 70691 - DNA, 23 bp, Homo sapiens
tgtcatgggtattatttctttgc

SEQ ID NO: 70692 - DNA, 20 bp, Homo sapiens
tctagctggtctccctctgc

SEQ ID NO: 70693 - DNA, 22 bp, Homo sapiens
cactgatcatattactttcttt

SEQ ID NO: 70694 - DNA, 21 bp, Homo sapiens
gcacacttcataataagccac

SEQ ID NO: 70695 - DNA, 23 bp, Homo sapiens
cgcactttcatcttcaacttcac

SEQ ID NO: 70696 - DNA, 24 bp, Homo sapiens
agttaacccagggccattcacacc

SEQ ID NO: 70697 - DNA, 16 bp, Homo sapiens
agtgatgccagcctcc

SEQ ID NO: 70698 - DNA, 23 bp, Homo sapiens
tctagttgatacggccttcacta

SEQ ID NO: 70699 - DNA, 20 bp, Homo sapiens
ggagtgcatgagaccactgt

SEQ ID NO: 70700 - DNA, 19 bp, Homo sapiens
aaccttttgaatgactgca

SEQ ID NO: 70701 - DNA, 22 bp, Homo sapiens
acatgccagttctctaggtttt

SEQ ID NO: 70702 - DNA, 19 bp, Homo sapiens
aggaaacgtggcatgtctc

SEQ ID NO: 70703 - DNA, 21 bp, Homo sapiens
gacaaacagatgcaaatttac

SEQ ID NO: 70704 - DNA, 22 bp, Homo sapiens
atgtcaaacttactcaatgcca

SEQ ID NO: 70705 - DNA, 22 bp, Homo sapiens
tcagaacttccataaatgtagc

SEQ ID NO: 70706 - DNA, 24 bp, Homo sapiens
tcaaatgaaagtttcatatagaaa

SEQ ID NO: 70707 - DNA, 19 bp, Homo sapiens
cagccaatactgtttctgc

SEQ ID NO: 70708 - DNA, 22 bp, Homo sapiens
attacttcagcaaggccatgtt

SEQ ID NO: 70709 - DNA, 19 bp, Homo sapiens
gggagttctccttgatcac

SEQ ID NO: 70710 - DNA, 24 bp, Homo sapiens
ttaccacaaggatctccagacaag

SEQ ID NO: 70711 - DNA, 20 bp, Homo sapiens
tccccgcttactctaatcac

SEQ ID NO: 70712 - DNA, 24 bp, Homo sapiens
acaaggcacagaatttgacacact

SEQ ID NO: 70713 - DNA, 23 bp, Homo sapiens
tcaacaaacatttattgaacaaa

SEQ ID NO: 70714 - DNA, 19 bp, Homo sapiens
tggtcacaatgatgggtga

SEQ ID NO: 70715 - DNA, 24 bp, Homo sapiens
gctgaaaaatcacctaactaaaca

SEQ ID NO: 70716 - DNA, 24 bp, Homo sapiens
atgtggttccttgttctcagtggg

SEQ ID NO: 70717 - DNA, 19 bp, Homo sapiens
actcgagctagttcatcct

SEQ ID NO: 70718 - DNA, 23 bp, Homo sapiens
ctcaggataaatattaatcagtc

SEQ ID NO: 70719 - DNA, 17 bp, Homo sapiens
tgttccagagcagttgg

SEQ ID NO: 70720 - DNA, 21 bp, Homo sapiens
tgggtttacatttttgctact

SEQ ID NO: 70721 - DNA, 17 bp, Homo sapiens
agctgttgcctcggaag

SEQ ID NO: 70722 - DNA, 24 bp, Homo sapiens
cactaacctgattttgttttgttc

SEQ ID NO: 70723 - DNA, 22 bp, Homo sapiens
gcacacacatacacacaaaatg

SEQ ID NO: 70724 - DNA, 21 bp, Homo sapiens
attctcggcatttactctacc

SEQ ID NO: 70725 - DNA, 24 bp, Homo sapiens
ttaccttaaaagaagacaatcagc

SEQ ID NO: 70726 - DNA, 20 bp, Homo sapiens
gactccatgcagactctctt

SEQ ID NO: 70727 - DNA, 22 bp, Homo sapiens
ccatatacctacagaaatgcac

SEQ ID NO: 70728 - DNA, 22 bp, Homo sapiens
ctgtttcaaggtttgtatcatt

SEQ ID NO: 70729 - DNA, 20 bp, Homo sapiens
agaggatgtgatcacaattc

SEQ ID NO: 70730 - DNA, 23 bp, Homo sapiens
attatgtacagaatgtgcagggc

SEQ ID NO: 70731 - DNA, 20 bp, Homo sapiens
cagcggttctatgtgaaaag

SEQ ID NO: 70732 - DNA, 18 bp, Homo sapiens
taaactcctattcgtgca

SEQ ID NO: 70733 - DNA, 22 bp, Homo sapiens
ggtgccttgcttcatgcagtgt

SEQ ID NO: 70734 - DNA, 22 bp, Homo sapiens
aactcctggatcctttattacg

SEQ ID NO: 70735 - DNA, 21 bp, Homo sapiens
acgtgtatttgtatataactt

SEQ ID NO: 70736 - DNA, 20 bp, Homo sapiens
agtggatcctaccaggtttg

SEQ ID NO: 70737 - DNA, 17 bp, Homo sapiens
ttccgctggttttcctc

SEQ ID NO: 70738 - DNA, 20 bp, Homo sapiens
ccaatgaagtctacacgttg

SEQ ID NO: 70739 - DNA, 20 bp, Homo sapiens
gggggaattctgaggaggaa

SEQ ID NO: 70740 - DNA, 23 bp, Homo sapiens
aggagtgatttttgttatttgtt

SEQ ID NO: 70741 - DNA, 23 bp, Homo sapiens
atctctaactgtaagcatacctg

SEQ ID NO: 70742 - DNA, 18 bp, Homo sapiens
agaaccatcagagagcct

SEQ ID NO: 70743 - DNA, 20 bp, Homo sapiens
gcagctagatccttctttga

SEQ ID NO: 70744 - DNA, 20 bp, Homo sapiens
agttcttccatgccatcatc

SEQ ID NO: 70745 - DNA, 24 bp, Homo sapiens
ccaacaattctcaatgtattattc

SEQ ID NO: 70746 - DNA, 19 bp, Homo sapiens
tgccactgtttataccagg

SEQ ID NO: 70747 - DNA, 17 bp, Homo sapiens
gggagtggcaagttgcc

SEQ ID NO: 70748 - DNA, 25 bp, Homo sapiens
cattcctcaaaattcagttgatttc

SEQ ID NO: 70749 - DNA, 21 bp, Homo sapiens
tccaaacttactgattttttg

SEQ ID NO: 70750 - DNA, 22 bp, Homo sapiens
gtaattttatgtacaagccaac

SEQ ID NO: 70751 - DNA, 21 bp, Homo sapiens
attcttaacaaacagcaaaag

SEQ ID NO: 70752 - DNA, 22 bp, Homo sapiens
acttgtttgtgctcatctctgt

SEQ ID NO: 70753 - DNA, 21 bp, Homo sapiens
tgtgccagaattagtagaatg

SEQ ID NO: 70754 - DNA, 22 bp, Homo sapiens
agtaaaagaaaaaaaggaaaac

SEQ ID NO: 70755 - DNA, 17 bp, Homo sapiens
tgttctgagggaaacgc

SEQ ID NO: 70756 - DNA, 23 bp, Homo sapiens
aaatatgtcattcatgaggactg

SEQ ID NO: 70757 - DNA, 19 bp, Homo sapiens
cggtgagacaatggcagga

SEQ ID NO: 70758 - DNA, 20 bp, Homo sapiens
actctttgttttcatgtctt

SEQ ID NO: 70759 - DNA, 23 bp, Homo sapiens
tcacctttgacattaacttcaag

SEQ ID NO: 70760 - DNA, 18 bp, Homo sapiens
ggtggttagccagcgttt

SEQ ID NO: 70761 - DNA, 19 bp, Homo sapiens
aaatttagttggaagggga

SEQ ID NO: 70762 - DNA, 24 bp, Homo sapiens
ccatgttcctcagatttatcaatc

SEQ ID NO: 70763 - DNA, 24 bp, Homo sapiens
aagcacataactgaaaaccatagg

SEQ ID NO: 70764 - DNA, 19 bp, Homo sapiens
aaagccaccacctagaatc

SEQ ID NO: 70765 - DNA, 23 bp, Homo sapiens
acactacctaaaataatttatag

SEQ ID NO: 70766 - DNA, 16 bp, Homo sapiens
tcattgaaaggccgca

SEQ ID NO: 70767 - DNA, 23 bp, Homo sapiens
caatgagaaaattcatgttttta

SEQ ID NO: 70768 - DNA, 17 bp, Homo sapiens
gcaactgagtaagtggc

SEQ ID NO: 70769 - DNA, 21 bp, Homo sapiens
tctgattatttataaccctgt

SEQ ID NO: 70770 - DNA, 23 bp, Homo sapiens
acaggaacttcatgtaaaacagg

SEQ ID NO: 70771 - DNA, 21 bp, Homo sapiens
tctcttcacaaaagaagaaca

SEQ ID NO: 70772 - DNA, 20 bp, Homo sapiens
aaataagacaagctatgtct

SEQ ID NO: 70773 - DNA, 21 bp, Homo sapiens
acttgtaggacaatcagatgc

SEQ ID NO: 70774 - DNA, 19 bp, Homo sapiens
tgtgaacaagccctccata

SEQ ID NO: 70775 - DNA, 21 bp, Homo sapiens
agacgatgtaaagcaagcaca

SEQ ID NO: 70776 - DNA, 23 bp, Homo sapiens
aaatttaattcaaacataagtct

SEQ ID NO: 70777 - DNA, 19 bp, Homo sapiens
tcttacctgttgctggaaa

SEQ ID NO: 70778 - DNA, 23 bp, Homo sapiens
aaggtttttccttgatatagcat

SEQ ID NO: 70779 - DNA, 23 bp, Homo sapiens
atgaccaataattgtattaatct

SEQ ID NO: 70780 - DNA, 21 bp, Homo sapiens
ccttcataagtgacggcaatg

SEQ ID NO: 70781 - DNA, 23 bp, Homo sapiens
agaatctttctctttctaaacca

SEQ ID NO: 70782 - DNA, 18 bp, Homo sapiens
ttgggcagtatctttcca

SEQ ID NO: 70783 - DNA, 19 bp, Homo sapiens
aggtcgtcttccaacagct

SEQ ID NO: 70784 - DNA, 23 bp, Homo sapiens
acatggtcctgaggtctttttgg

SEQ ID NO: 70785 - DNA, 19 bp, Homo sapiens
aggtttgtgctctggagga

SEQ ID NO: 70786 - DNA, 24 bp, Homo sapiens
gcaaccagttacaagttaaagaaa

SEQ ID NO: 70787 - DNA, 26 bp, Homo sapiens
tttacctagtcataaattcctcaaac

SEQ ID NO: 70788 - DNA, 20 bp, Homo sapiens
agtttgctgtatctagggat

SEQ ID NO: 70789 - DNA, 22 bp, Homo sapiens
gcaaactctccttctcaaccaa

SEQ ID NO: 70790 - DNA, 18 bp, Homo sapiens
cttgcatacctgggtcct

SEQ ID NO: 70791 - DNA, 24 bp, Homo sapiens
tggcaatgtgattattaaatacat

SEQ ID NO: 70792 - DNA, 24 bp, Homo sapiens
gtccagccttaaccttaccagttc

SEQ ID NO: 70793 - DNA, 23 bp, Homo sapiens
gccttgaattcttctttttcatg

SEQ ID NO: 70794 - DNA, 17 bp, Homo sapiens
ccagctttggaagtccc

SEQ ID NO: 70795 - DNA, 24 bp, Homo sapiens
ttatccaattatagacttttttac

SEQ ID NO: 70796 - DNA, 21 bp, Homo sapiens
ttctgttaagagacccaaaac

SEQ ID NO: 70797 - DNA, 20 bp, Homo sapiens
tttcttttaggcatcaggta

SEQ ID NO: 70798 - DNA, 21 bp, Homo sapiens
tcctgttaagtcaactgggaa

SEQ ID NO: 70799 - DNA, 20 bp, Homo sapiens
agtattttctaccaagctgg

SEQ ID NO: 70800 - DNA, 17 bp, Homo sapiens
acgcaggctatttaccc

SEQ ID NO: 70801 - DNA, 21 bp, Homo sapiens
tcaccattgatttgaccagtt

SEQ ID NO: 70802 - DNA, 20 bp, Homo sapiens
tccagactttgaagaattgt

SEQ ID NO: 70803 - DNA, 23 bp, Homo sapiens
actacaatttcatatggctttgc

SEQ ID NO: 70804 - DNA, 22 bp, Homo sapiens
taaaattgattagtggcatctg

SEQ ID NO: 70805 - DNA, 22 bp, Homo sapiens
aaccacttagagagaaagtctg

SEQ ID NO: 70806 - DNA, 22 bp, Homo sapiens
ttgtcattttccttaggttcaa

SEQ ID NO: 70807 - DNA, 20 bp, Homo sapiens
agatatagactgcggagacg

SEQ ID NO: 70808 - DNA, 21 bp, Homo sapiens
tactgactttaaagccatatt

SEQ ID NO: 70809 - DNA, 18 bp, Homo sapiens
ccagtcagcagccgctca

SEQ ID NO: 70810 - DNA, 21 bp, Homo sapiens
cataccgggcctagcaatcgc

SEQ ID NO: 70811 - DNA, 18 bp, Homo sapiens
atgtgctcagccagtttc

SEQ ID NO: 70812 - DNA, 23 bp, Homo sapiens
tttcctggctttgcttacgacaa

SEQ ID NO: 70813 - DNA, 20 bp, Homo sapiens
tgtggaataccttcaggtcc

SEQ ID NO: 70814 - DNA, 24 bp, Homo sapiens
gggagtacaccaagtatcatgagc

SEQ ID NO: 70815 - DNA, 22 bp, Homo sapiens
acagactggaacttactttaat

SEQ ID NO: 70816 - DNA, 18 bp, Homo sapiens
tagactgtcctgggaaac

SEQ ID NO: 70817 - DNA, 20 bp, Homo sapiens
gaggccaggatatagtctag

SEQ ID NO: 70818 - DNA, 24 bp, Homo sapiens
tacctgctgccaccttggctttag

SEQ ID NO: 70819 - DNA, 16 bp, Homo sapiens
tgagccaccgcgacag

SEQ ID NO: 70820 - DNA, 24 bp, Homo sapiens
gctagctcacaaagacaccaaagt

SEQ ID NO: 70821 - DNA, 19 bp, Homo sapiens
acttggacagcagtagaac

SEQ ID NO: 70822 - DNA, 21 bp, Homo sapiens
tgaatatacaatggtgggaac

SEQ ID NO: 70823 - DNA, 25 bp, Homo sapiens
ccgaagcataataaatgtcatttag

SEQ ID NO: 70824 - DNA, 21 bp, Homo sapiens
ggtttctggagccttttagaa

SEQ ID NO: 70825 - DNA, 23 bp, Homo sapiens
ccctggtttgcaatggttaaggt

SEQ ID NO: 70826 - DNA, 24 bp, Homo sapiens
caccaccactttccaggttggttc

SEQ ID NO: 70827 - DNA, 17 bp, Homo sapiens
gactggacaatggcttc

SEQ ID NO: 70828 - DNA, 23 bp, Homo sapiens
aagtcctagggcaatcagtcttt

SEQ ID NO: 70829 - DNA, 17 bp, Homo sapiens
tcttggtgtgttggggg

SEQ ID NO: 70830 - DNA, 24 bp, Homo sapiens
aaatctgcctagtagatgagaacc

SEQ ID NO: 70831 - DNA, 23 bp, Homo sapiens
gaactgcctaaattaagtaatgc

SEQ ID NO: 70832 - DNA, 23 bp, Homo sapiens
tcaccttcatgcaccaggagtgt

SEQ ID NO: 70833 - DNA, 22 bp, Homo sapiens
taaaagcaacaaaccccaaatc

SEQ ID NO: 70834 - DNA, 17 bp, Homo sapiens
actgtcacagcccgact

SEQ ID NO: 70835 - DNA, 24 bp, Homo sapiens
ccaatttacaatattaaggtagag

SEQ ID NO: 70836 - DNA, 24 bp, Homo sapiens
gggacactgctcaatatcgcatta

SEQ ID NO: 70837 - DNA, 19 bp, Homo sapiens
gtgaataccccacaacttg

SEQ ID NO: 70838 - DNA, 21 bp, Homo sapiens
aggcacacagaagattatagg

SEQ ID NO: 70839 - DNA, 28 bp, Homo sapiens
ttctaactgatcataaaatttaaaaata

SEQ ID NO: 70840 - DNA, 21 bp, Homo sapiens
gggatacataaacctgatgtc

SEQ ID NO: 70841 - DNA, 22 bp, Homo sapiens
tgttatgaaaaaattttggaac

SEQ ID NO: 70842 - DNA, 16 bp, Homo sapiens
attggctgccagtgtc

SEQ ID NO: 70843 - DNA, 18 bp, Homo sapiens
ttctcctaggtcagctgc

SEQ ID NO: 70844 - DNA, 22 bp, Homo sapiens
acttactagatttgctaaatcc

SEQ ID NO: 70845 - DNA, 18 bp, Homo sapiens
tcgagggccagttactag

SEQ ID NO: 70846 - DNA, 23 bp, Homo sapiens
tgaaatgaaagggttttctttga

SEQ ID NO: 70847 - DNA, 23 bp, Homo sapiens
ccctctttattgtctctattagt

SEQ ID NO: 70848 - DNA, 22 bp, Homo sapiens
aaatcagaagaggaaaaaaagt

SEQ ID NO: 70849 - DNA, 20 bp, Homo sapiens
ttggaagagtgtatttctgg

SEQ ID NO: 70850 - DNA, 22 bp, Homo sapiens
agttctctaaaattaaggaggc

SEQ ID NO: 70851 - DNA, 19 bp, Homo sapiens
aataaaagcaaagcggcaa

SEQ ID NO: 70852 - DNA, 24 bp, Homo sapiens
cgtgaactgtacatttacaataaa

SEQ ID NO: 70853 - DNA, 24 bp, Homo sapiens
cttacaaagtattttcttcactgt

SEQ ID NO: 70854 - DNA, 20 bp, Homo sapiens
aaacaaagtcagaactgact

SEQ ID NO: 70855 - DNA, 19 bp, Homo sapiens
ttccaaacaaaggtgtttc

SEQ ID NO: 70856 - DNA, 21 bp, Homo sapiens
gtcttttctccaggcctgatt

SEQ ID NO: 70857 - DNA, 19 bp, Homo sapiens
tgtcgtttggcatcatcat

SEQ ID NO: 70858 - DNA, 23 bp, Homo sapiens
tctttatgttaaataattgttga

SEQ ID NO: 70859 - DNA, 22 bp, Homo sapiens
catctgtttttcattgatggtc

SEQ ID NO: 70860 - DNA, 23 bp, Homo sapiens
ttttccaggtattgaattgaaac

SEQ ID NO: 70861 - DNA, 19 bp, Homo sapiens
agcaaactcaatacctgcc

SEQ ID NO: 70862 - DNA, 22 bp, Homo sapiens
aatctagttcgtttttgcaagc

SEQ ID NO: 70863 - DNA, 16 bp, Homo sapiens
ttgcccaatgtggcac

SEQ ID NO: 70864 - DNA, 22 bp, Homo sapiens
tgacaagctgataacaatgacc

SEQ ID NO: 70865 - DNA, 21 bp, Homo sapiens
acatgctttctgaaggaggaa

SEQ ID NO: 70866 - DNA, 20 bp, Homo sapiens
aaaaatatggggaagccttg

SEQ ID NO: 70867 - DNA, 21 bp, Homo sapiens
gtacaacatcaagcagatctg

SEQ ID NO: 70868 - DNA, 24 bp, Homo sapiens
gacaggcctgtaaataaaatctag

SEQ ID NO: 70869 - DNA, 22 bp, Homo sapiens
ctcagcttttattgatcccaag

SEQ ID NO: 70870 - DNA, 21 bp, Homo sapiens
aggctgttccaatgaatattt

SEQ ID NO: 70871 - DNA, 21 bp, Homo sapiens
gtgattaccttgcttgaaacc

SEQ ID NO: 70872 - DNA, 20 bp, Homo sapiens
tccttcttcaactagattac

SEQ ID NO: 70873 - DNA, 20 bp, Homo sapiens
acctcctgatgataaaacag

SEQ ID NO: 70874 - DNA, 17 bp, Homo sapiens
gcaacaggtggcttggg

SEQ ID NO: 70875 - DNA, 21 bp, Homo sapiens
ggactcaaagttttagcacaa

SEQ ID NO: 70876 - DNA, 20 bp, Homo sapiens
ctttggcttctggaaatgtg

SEQ ID NO: 70877 - DNA, 21 bp, Homo sapiens
gcacatccttccaataacctg

SEQ ID NO: 70878 - DNA, 22 bp, Homo sapiens
gccttctgtactatagcatatc

SEQ ID NO: 70879 - DNA, 20 bp, Homo sapiens
tcccacataagatgttgttc

SEQ ID NO: 70880 - DNA, 21 bp, Homo sapiens
ttaaactgaacttttttgtgc

SEQ ID NO: 70881 - DNA, 23 bp, Homo sapiens
acatcaagggaattgttgaagga

SEQ ID NO: 70882 - DNA, 24 bp, Homo sapiens
aaaaaatcctgcttctttacaggt

SEQ ID NO: 70883 - DNA, 19 bp, Homo sapiens
cggacctgtggctactaag

SEQ ID NO: 70884 - DNA, 24 bp, Homo sapiens
acatgcttatctccaactcctact

SEQ ID NO: 70885 - DNA, 21 bp, Homo sapiens
tgaacaagtacacagagagtg

SEQ ID NO: 70886 - DNA, 19 bp, Homo sapiens
acgctacatgctgatgctg

SEQ ID NO: 70887 - DNA, 20 bp, Homo sapiens
ggaactggtaaacacaaatt

SEQ ID NO: 70888 - DNA, 23 bp, Homo sapiens
cctacctcttccacgttgttact

SEQ ID NO: 70889 - DNA, 22 bp, Homo sapiens
gtgttagagcacaaacataaat

SEQ ID NO: 70890 - DNA, 22 bp, Homo sapiens
tggactggtcattaatatcatt

SEQ ID NO: 70891 - DNA, 24 bp, Homo sapiens
ggaagtaatttattttctttttgg

SEQ ID NO: 70892 - DNA, 21 bp, Homo sapiens
aatacaatgtatctagaggtt

SEQ ID NO: 70893 - DNA, 20 bp, Homo sapiens
acagcaagtaaaatttgggt

SEQ ID NO: 70894 - DNA, 22 bp, Homo sapiens
ggtattcaaattttctaaattc

SEQ ID NO: 70895 - DNA, 18 bp, Homo sapiens
cccggtaactggaacgga

SEQ ID NO: 70896 - DNA, 21 bp, Homo sapiens
attttctgtctttacttgttc

SEQ ID NO: 70897 - DNA, 18 bp, Homo sapiens
ttccaaggatgtcaaagc

SEQ ID NO: 70898 - DNA, 22 bp, Homo sapiens
gtctgacagagttctcattacc

SEQ ID NO: 70899 - DNA, 23 bp, Homo sapiens
aacttagtttcttatcattttgg

SEQ ID NO: 70900 - DNA, 17 bp, Homo sapiens
tgctgtcattgccttcc

SEQ ID NO: 70901 - DNA, 22 bp, Homo sapiens
tagcacaataaaccaatatttc

SEQ ID NO: 70902 - DNA, 23 bp, Homo sapiens
ctcctatgagagagagacttttg

SEQ ID NO: 70903 - DNA, 20 bp, Homo sapiens
cctgttaccaataacacagt

SEQ ID NO: 70904 - DNA, 18 bp, Homo sapiens
gccacttgcacgttggaa

SEQ ID NO: 70905 - DNA, 19 bp, Homo sapiens
aaaacacttgcatggactg

SEQ ID NO: 70906 - DNA, 22 bp, Homo sapiens
tgcatatttttacaacttatat

SEQ ID NO: 70907 - DNA, 21 bp, Homo sapiens
taaacattatttaaacagttc

SEQ ID NO: 70908 - DNA, 29 bp, Homo sapiens
tatatactaaataataaattataacattg

SEQ ID NO: 70909 - DNA, 19 bp, Homo sapiens
tttaggcatgcatgagaga

SEQ ID NO: 70910 - DNA, 21 bp, Homo sapiens
atgcaaatctgcaattaaaag

SEQ ID NO: 70911 - DNA, 24 bp, Homo sapiens
aactagctcaaaggtatgtcctaa

SEQ ID NO: 70912 - DNA, 18 bp, Homo sapiens
tcgtttgctaatacaccc

SEQ ID NO: 70913 - DNA, 22 bp, Homo sapiens
atacagctattactgtatgatc

SEQ ID NO: 70914 - DNA, 17 bp, Homo sapiens
gcggaacaggtaccttg

SEQ ID NO: 70915 - DNA, 19 bp, Homo sapiens
tttataagttctgtggatc

SEQ ID NO: 70916 - DNA, 24 bp, Homo sapiens
cttttagaaaaatgaaagatatgc

SEQ ID NO: 70917 - DNA, 21 bp, Homo sapiens
gcaaccaagagctcttgttgt

SEQ ID NO: 70918 - DNA, 24 bp, Homo sapiens
cattttaaaggcttaataagtaac

SEQ ID NO: 70919 - DNA, 24 bp, Homo sapiens
cagataatccgtattcttagcaag

SEQ ID NO: 70920 - DNA, 21 bp, Homo sapiens
tgtcaggtccttttaagcaac

SEQ ID NO: 70921 - DNA, 23 bp, Homo sapiens
caagatcaccatagcatgagaaa

SEQ ID NO: 70922 - DNA, 20 bp, Homo sapiens
ggctgtaatttggttagtgc

SEQ ID NO: 70923 - DNA, 21 bp, Homo sapiens
ttccgagattcagtttaggag

SEQ ID NO: 70924 - DNA, 23 bp, Homo sapiens
aacactgatacccaaaatgaatg

SEQ ID NO: 70925 - DNA, 20 bp, Homo sapiens
tcctaaaaggcacttgagag

SEQ ID NO: 70926 - DNA, 24 bp, Homo sapiens
tctttataacttattctcaattca

SEQ ID NO: 70927 - DNA, 24 bp, Homo sapiens
tctgatagaagctacagtaatagc

SEQ ID NO: 70928 - DNA, 27 bp, Homo sapiens
tcttctaatatgactacttcaaacaac

SEQ ID NO: 70929 - DNA, 16 bp, Homo sapiens
agaggcgagtcctggc

SEQ ID NO: 70930 - DNA, 24 bp, Homo sapiens
agagcttactcatatctttatctt

SEQ ID NO: 70931 - DNA, 21 bp, Homo sapiens
acctgctgaatacaagttgac

SEQ ID NO: 70932 - DNA, 22 bp, Homo sapiens
gctttatttttaactgcagtgt

SEQ ID NO: 70933 - DNA, 22 bp, Homo sapiens
tgtcattgaatatacggagact

SEQ ID NO: 70934 - DNA, 24 bp, Homo sapiens
agcctcaaacatatcttctttgcc

SEQ ID NO: 70935 - DNA, 23 bp, Homo sapiens
aagatggaagagtactaaatttg

SEQ ID NO: 70936 - DNA, 17 bp, Homo sapiens
ggctgtgctgcagcttg

SEQ ID NO: 70937 - DNA, 24 bp, Homo sapiens
cattatacaaattcctacttaagt

SEQ ID NO: 70938 - DNA, 21 bp, Homo sapiens
acctgcatactttagatagtc

SEQ ID NO: 70939 - DNA, 21 bp, Homo sapiens
ggattccggattgccataaat

SEQ ID NO: 70940 - DNA, 24 bp, Homo sapiens
agtcaactgaaaataatttctctc

SEQ ID NO: 70941 - DNA, 24 bp, Homo sapiens
aaagttagagttgaaattgagtcc

SEQ ID NO: 70942 - DNA, 23 bp, Homo sapiens
caaaattaagtgagcctttaaag

SEQ ID NO: 70943 - DNA, 24 bp, Homo sapiens
aaaatattctaaataaggcttttt

SEQ ID NO: 70944 - DNA, 24 bp, Homo sapiens
atctttaatagagtccagaggaag

SEQ ID NO: 70945 - DNA, 23 bp, Homo sapiens
ttcaatttatttcaagtaatcac

SEQ ID NO: 70946 - DNA, 22 bp, Homo sapiens
actgcaagcaaatggatcattt

SEQ ID NO: 70947 - DNA, 19 bp, Homo sapiens
caccacgcctggcctagtt

SEQ ID NO: 70948 - DNA, 21 bp, Homo sapiens
ggacaccttttaaaaggtaaa

SEQ ID NO: 70949 - DNA, 23 bp, Homo sapiens
tagcaggtgaaggatgcctgtac

SEQ ID NO: 70950 - DNA, 23 bp, Homo sapiens
ttaccttcccaaatggctattct

SEQ ID NO: 70951 - DNA, 22 bp, Homo sapiens
tctgtgtttgttaaccagagtt

SEQ ID NO: 70952 - DNA, 19 bp, Homo sapiens
agtcagggaagaagacctc

SEQ ID NO: 70953 - DNA, 16 bp, Homo sapiens
tgctaagtaggccacg

SEQ ID NO: 70954 - DNA, 23 bp, Homo sapiens
ttgtttgtttgttttttgtaggg

SEQ ID NO: 70955 - DNA, 21 bp, Homo sapiens
actttttgggtgatccttata

SEQ ID NO: 70956 - DNA, 23 bp, Homo sapiens
agtcagaattttacatacactac

SEQ ID NO: 70957 - DNA, 21 bp, Homo sapiens
ccactaaaggactagactgtg

SEQ ID NO: 70958 - DNA, 20 bp, Homo sapiens
agtgaatacacagagcgtgg

SEQ ID NO: 70959 - DNA, 22 bp, Homo sapiens
gaacttcttcagacactgtaag

SEQ ID NO: 70960 - DNA, 22 bp, Homo sapiens
tttcacatttatgtagtcttcc

SEQ ID NO: 70961 - DNA, 23 bp, Homo sapiens
ttttccattgaaatatcagtaag

SEQ ID NO: 70962 - DNA, 22 bp, Homo sapiens
aggagactgtaagaagttcatc

SEQ ID NO: 70963 - DNA, 21 bp, Homo sapiens
tccacttacctataggaaggg

SEQ ID NO: 70964 - DNA, 22 bp, Homo sapiens
accgttttccttttagctttac

SEQ ID NO: 70965 - DNA, 20 bp, Homo sapiens
gcctccattagttggaaaat

SEQ ID NO: 70966 - DNA, 20 bp, Homo sapiens
acatagaaagtcacttcttc

SEQ ID NO: 70967 - DNA, 19 bp, Homo sapiens
actcttcctaggccatctc

SEQ ID NO: 70968 - DNA, 19 bp, Homo sapiens
tcccattcatcatggtgac

SEQ ID NO: 70969 - DNA, 21 bp, Homo sapiens
gctgagtctcctttagtgtcc

SEQ ID NO: 70970 - DNA, 22 bp, Homo sapiens
tatcctaaagccctttaaagtg

SEQ ID NO: 70971 - DNA, 19 bp, Homo sapiens
ccgacagttggataggtgg

SEQ ID NO: 70972 - DNA, 24 bp, Homo sapiens
aataggacagccacttggaaggag

SEQ ID NO: 70973 - DNA, 20 bp, Homo sapiens
cctgagaaggttgccccatg

SEQ ID NO: 70974 - DNA, 20 bp, Homo sapiens
ttgttttcatctttcaggac

SEQ ID NO: 70975 - DNA, 27 bp, Homo sapiens
tttttttaaataataaaaaaaatctac

SEQ ID NO: 70976 - DNA, 18 bp, Homo sapiens
aggataccttgcagccac

SEQ ID NO: 70977 - DNA, 24 bp, Homo sapiens
tggaaaattttgataatcctgaaa

SEQ ID NO: 70978 - DNA, 21 bp, Homo sapiens
aggaaatccatgagcctggac

SEQ ID NO: 70979 - DNA, 22 bp, Homo sapiens
tgcttaactgatctatcaaact

SEQ ID NO: 70980 - DNA, 23 bp, Homo sapiens
gtgatcaaaacttttccttgttc

SEQ ID NO: 70981 - DNA, 24 bp, Homo sapiens
actgctccagggatgtattagagc

SEQ ID NO: 70982 - DNA, 18 bp, Homo sapiens
gttgtgatccctgattcc

SEQ ID NO: 70983 - DNA, 24 bp, Homo sapiens
tgtccaaacattttctttttagtg

SEQ ID NO: 70984 - DNA, 22 bp, Homo sapiens
atcaatactttgtttctcaccc

SEQ ID NO: 70985 - DNA, 23 bp, Homo sapiens
tcttaacttttgtttataggaac

SEQ ID NO: 70986 - DNA, 21 bp, Homo sapiens
agaaatggctggaaaataaac

SEQ ID NO: 70987 - DNA, 19 bp, Homo sapiens
aaggctcctaaaaggcaag

SEQ ID NO: 70988 - DNA, 23 bp, Homo sapiens
atggtagagtttatcttttgaga

SEQ ID NO: 70989 - DNA, 21 bp, Homo sapiens
gaaactgattatgaaatgggt

SEQ ID NO: 70990 - DNA, 20 bp, Homo sapiens
aaaacttttgtgtaggcgaa

SEQ ID NO: 70991 - DNA, 19 bp, Homo sapiens
agacactgaaactttacgt

SEQ ID NO: 70992 - DNA, 22 bp, Homo sapiens
atctactaaagaaagctgttga

SEQ ID NO: 70993 - DNA, 16 bp, Homo sapiens
cagcgcctggatcttc

SEQ ID NO: 70994 - DNA, 21 bp, Homo sapiens
atccaggtgtttgatcacgtt

SEQ ID NO: 70995 - DNA, 23 bp, Homo sapiens
agactggaataaaaatttgaggg

SEQ ID NO: 70996 - DNA, 20 bp, Homo sapiens
caacagcacccacatttacg

SEQ ID NO: 70997 - DNA, 21 bp, Homo sapiens
gggtgagaagtagaagactgt

SEQ ID NO: 70998 - DNA, 22 bp, Homo sapiens
agaagtacttactgatccgaag

SEQ ID NO: 70999 - DNA, 20 bp, Homo sapiens
atgcaaaaaagtaaacacac

SEQ ID NO: 71000 - DNA, 20 bp, Homo sapiens
tcccctttttgagtccccca

SEQ ID NO: 71001 - DNA, 21 bp, Homo sapiens
ttcataaagaattcgttgatc

SEQ ID NO: 71002 - DNA, 22 bp, Homo sapiens
attaaaaacatgaataggatac

SEQ ID NO: 71003 - DNA, 23 bp, Homo sapiens
aaggagatacttacacaacagga

SEQ ID NO: 71004 - DNA, 23 bp, Homo sapiens
ttcagccacaaagtaaaaatgtt

SEQ ID NO: 71005 - DNA, 20 bp, Homo sapiens
acattactgggtaagcattt

SEQ ID NO: 71006 - DNA, 24 bp, Homo sapiens
tggtaaaatataccacagatgagt

SEQ ID NO: 71007 - DNA, 20 bp, Homo sapiens
aacctactgtctcaaagcta

SEQ ID NO: 71008 - DNA, 20 bp, Homo sapiens
gtgtttcccaaagtctttcc

SEQ ID NO: 71009 - DNA, 20 bp, Homo sapiens
acagggtgttgatcttagag

SEQ ID NO: 71010 - DNA, 20 bp, Homo sapiens
gtaaaaagcactcatctccc

SEQ ID NO: 71011 - DNA, 18 bp, Homo sapiens
tgcacaattccatggatt

SEQ ID NO: 71012 - DNA, 21 bp, Homo sapiens
tgttttccactacatattttc

SEQ ID NO: 71013 - DNA, 27 bp, Homo sapiens
gatacatttatttactttgcaggtaag

SEQ ID NO: 71014 - DNA, 21 bp, Homo sapiens
ttttaggcataatttgttgga

SEQ ID NO: 71015 - DNA, 16 bp, Homo sapiens
ttctacaacagcgcgc

SEQ ID NO: 71016 - DNA, 25 bp, Homo sapiens
gatccaaatttgttaaatccaatcc

SEQ ID NO: 71017 - DNA, 22 bp, Homo sapiens
aatggaatatggaaataaaagt

SEQ ID NO: 71018 - DNA, 22 bp, Homo sapiens
aatccccaccacaataccaaac

SEQ ID NO: 71019 - DNA, 19 bp, Homo sapiens
ccacaagccattaaaacca

SEQ ID NO: 71020 - DNA, 22 bp, Homo sapiens
agttgctttgacactcattcta

SEQ ID NO: 71021 - DNA, 21 bp, Homo sapiens
ttgccaaaagttagagaaaaa

SEQ ID NO: 71022 - DNA, 22 bp, Homo sapiens
agctatatgacttatttaattt

SEQ ID NO: 71023 - DNA, 21 bp, Homo sapiens
ctggttttcagcacattgtgt

SEQ ID NO: 71024 - DNA, 21 bp, Homo sapiens
aaatttgatttgttgcaggtt

SEQ ID NO: 71025 - DNA, 22 bp, Homo sapiens
ccttgtgatgagaaacttttta

SEQ ID NO: 71026 - DNA, 22 bp, Homo sapiens
aacttaacaataagctcagcat

SEQ ID NO: 71027 - DNA, 22 bp, Homo sapiens
atgataagtaatacaaaggaag

SEQ ID NO: 71028 - DNA, 23 bp, Homo sapiens
gattcttcactggtttcttcatc

SEQ ID NO: 71029 - DNA, 23 bp, Homo sapiens
tatttttggcttcagatggggat

SEQ ID NO: 71030 - DNA, 17 bp, Homo sapiens
ctaagctggctctgcag

SEQ ID NO: 71031 - DNA, 22 bp, Homo sapiens
acagcaaacacaaattccagac

SEQ ID NO: 71032 - DNA, 18 bp, Homo sapiens
ggaatgctgggaagttgc

SEQ ID NO: 71033 - DNA, 20 bp, Homo sapiens
cacgtacctgcctggaattg

SEQ ID NO: 71034 - DNA, 24 bp, Homo sapiens
agggaattcctaatgttggtgtct

SEQ ID NO: 71035 - DNA, 17 bp, Homo sapiens
tccttaccctcctgcac

SEQ ID NO: 71036 - DNA, 24 bp, Homo sapiens
gaaatgtaaggtgaatctcataag

SEQ ID NO: 71037 - DNA, 21 bp, Homo sapiens
taattccatgacctcacttgc

SEQ ID NO: 71038 - DNA, 19 bp, Homo sapiens
ctccttgtcgattcctgga

SEQ ID NO: 71039 - DNA, 24 bp, Homo sapiens
gtaagtacactccacaatatttgc

SEQ ID NO: 71040 - DNA, 16 bp, Homo sapiens
tccgtggcgagttcgt

SEQ ID NO: 71041 - DNA, 23 bp, Homo sapiens
cccgttgttaagcgacacatgac

SEQ ID NO: 71042 - DNA, 24 bp, Homo sapiens
acgatcttcttaatgctattacgt

SEQ ID NO: 71043 - DNA, 23 bp, Homo sapiens
agtaactggctgttctctttttc

SEQ ID NO: 71044 - DNA, 19 bp, Homo sapiens
gggtcactagtgaagagcc

SEQ ID NO: 71045 - DNA, 23 bp, Homo sapiens
ggccactgtaacagtggacgaac

SEQ ID NO: 71046 - DNA, 21 bp, Homo sapiens
attataaaacaggaagtgcag

SEQ ID NO: 71047 - DNA, 24 bp, Homo sapiens
aaagaagcgctggcagtttcaaac

SEQ ID NO: 71048 - DNA, 21 bp, Homo sapiens
aatttaggcaaggcttcgaag

SEQ ID NO: 71049 - DNA, 20 bp, Homo sapiens
tgccacattacagggtgatc

SEQ ID NO: 71050 - DNA, 16 bp, Homo sapiens
gtctcttctggccagc

SEQ ID NO: 71051 - DNA, 24 bp, Homo sapiens
tccagccaacaggtttccaggaga

SEQ ID NO: 71052 - DNA, 24 bp, Homo sapiens
cagtaaacagcaggcgttactggg

SEQ ID NO: 71053 - DNA, 17 bp, Homo sapiens
aactaaagaagctaccc

SEQ ID NO: 71054 - DNA, 24 bp, Homo sapiens
tttcccaaacaacagcacaggtca

SEQ ID NO: 71055 - DNA, 16 bp, Homo sapiens
gggtggtttccatacc

SEQ ID NO: 71056 - DNA, 19 bp, Homo sapiens
cccaggtcccaatgtctac

SEQ ID NO: 71057 - DNA, 18 bp, Homo sapiens
atcttcccgacaggtgag

SEQ ID NO: 71058 - DNA, 19 bp, Homo sapiens
tggagttaagcaacccaag

SEQ ID NO: 71059 - DNA, 21 bp, Homo sapiens
gattctcctggacaccatcga

SEQ ID NO: 71060 - DNA, 23 bp, Homo sapiens
taaagagttcttctcgaagacat

SEQ ID NO: 71061 - DNA, 16 bp, Homo sapiens
ggaggctcaaacctgc

SEQ ID NO: 71062 - DNA, 23 bp, Homo sapiens
catcttcctggggctggctcacc

SEQ ID NO: 71063 - DNA, 24 bp, Homo sapiens
actagcattatggatctgtaagtc

SEQ ID NO: 71064 - DNA, 17 bp, Homo sapiens
cgcctgatgctcctgct

SEQ ID NO: 71065 - DNA, 19 bp, Homo sapiens
ggcctctgttttcctctcc

SEQ ID NO: 71066 - DNA, 23 bp, Homo sapiens
ctccaggagcgtccgagggcagg

SEQ ID NO: 71067 - DNA, 18 bp, Homo sapiens
ttctagttccagacctgc

SEQ ID NO: 71068 - DNA, 16 bp, Homo sapiens
cgggaccttggcatgg

SEQ ID NO: 71069 - DNA, 16 bp, Homo sapiens
ggaagctgggatatgt

SEQ ID NO: 71070 - DNA, 17 bp, Homo sapiens
tgcttctcctcctcctg

SEQ ID NO: 71071 - DNA, 24 bp, Homo sapiens
tgacatttaagggaaataaagagc

SEQ ID NO: 71072 - DNA, 21 bp, Homo sapiens
cccagctctggagtctggtct

SEQ ID NO: 71073 - DNA, 16 bp, Homo sapiens
accaccactgccatgc

SEQ ID NO: 71074 - DNA, 19 bp, Homo sapiens
agggaaggtgagtgatgtg

SEQ ID NO: 71075 - DNA, 24 bp, Homo sapiens
ccagctgcatcatcaaggccaagc

SEQ ID NO: 71076 - DNA, 22 bp, Homo sapiens
gtgaaggtggtggttgtggact

SEQ ID NO: 71077 - DNA, 16 bp, Homo sapiens
cagggatggggctggc

SEQ ID NO: 71078 - DNA, 18 bp, Homo sapiens
tgacaggttcatgagtgc

SEQ ID NO: 71079 - DNA, 16 bp, Homo sapiens
ccaggctctgccacat

SEQ ID NO: 71080 - DNA, 22 bp, Homo sapiens
tgggggggctatttcttactag

SEQ ID NO: 71081 - DNA, 24 bp, Homo sapiens
gggaaaccaccgcagtgaccgagt

SEQ ID NO: 71082 - DNA, 22 bp, Homo sapiens
agggagacattgctgctgatga

SEQ ID NO: 71083 - DNA, 16 bp, Homo sapiens
ctccgaggcactgtgg

SEQ ID NO: 71084 - DNA, 19 bp, Homo sapiens
gcaagcatagttggagtca

SEQ ID NO: 71085 - DNA, 20 bp, Homo sapiens
agaagctctccggaggatcc

SEQ ID NO: 71086 - DNA, 19 bp, Homo sapiens
acctgcccacagagatagc

SEQ ID NO: 71087 - DNA, 19 bp, Homo sapiens
cccctactccctcttatcc

SEQ ID NO: 71088 - DNA, 24 bp, Homo sapiens
agaacagcaggctcacctgctggg

SEQ ID NO: 71089 - DNA, 24 bp, Homo sapiens
tcatttgccaccctggacctgagt

SEQ ID NO: 71090 - DNA, 20 bp, Homo sapiens
aagatgtcaaatgcatgcac

SEQ ID NO: 71091 - DNA, 24 bp, Homo sapiens
tactttacagctcagcacccaggc

SEQ ID NO: 71092 - DNA, 22 bp, Homo sapiens
cttcaggctaaaacccaggatg

SEQ ID NO: 71093 - DNA, 22 bp, Homo sapiens
acgagatgtattaatagaacag

SEQ ID NO: 71094 - DNA, 23 bp, Homo sapiens
acgtcctatatgtagattccaat

SEQ ID NO: 71095 - DNA, 23 bp, Homo sapiens
cttacaatgttaagggataatgg

SEQ ID NO: 71096 - DNA, 18 bp, Homo sapiens
cacccccaggtatgtctc

SEQ ID NO: 71097 - DNA, 20 bp, Homo sapiens
catcctgcccttacctgttc

SEQ ID NO: 71098 - DNA, 20 bp, Homo sapiens
aaggtttggtggggagctcc

SEQ ID NO: 71099 - DNA, 19 bp, Homo sapiens
gaagctgtcagccctccat

SEQ ID NO: 71100 - DNA, 21 bp, Homo sapiens
gagagaagatgggtaataagg

SEQ ID NO: 71101 - DNA, 23 bp, Homo sapiens
ccacatttgctgccatacagaga

SEQ ID NO: 71102 - DNA, 20 bp, Homo sapiens
aatgggctgagtcccgaccc

SEQ ID NO: 71103 - DNA, 24 bp, Homo sapiens
actgcttgatgctggtctctatac

SEQ ID NO: 71104 - DNA, 23 bp, Homo sapiens
aacccattagtacgctgaagctc

SEQ ID NO: 71105 - DNA, 20 bp, Homo sapiens
cttcctcctaacctcttgtg

SEQ ID NO: 71106 - DNA, 22 bp, Homo sapiens
cctaaatcctcctgactgctgg

SEQ ID NO: 71107 - DNA, 17 bp, Homo sapiens
aaagacagaaccagtgc

SEQ ID NO: 71108 - DNA, 23 bp, Homo sapiens
ctacaatttcagtcacttctcca

SEQ ID NO: 71109 - DNA, 18 bp, Homo sapiens
gcattccctccttaccag

SEQ ID NO: 71110 - DNA, 21 bp, Homo sapiens
tttcgatgaacgaggcactgc

SEQ ID NO: 71111 - DNA, 19 bp, Homo sapiens
catgatccgcccacctcag

SEQ ID NO: 71112 - DNA, 16 bp, Homo sapiens
agaaggcaggacttgg

SEQ ID NO: 71113 - DNA, 20 bp, Homo sapiens
ccggcctagaatgatgattt

SEQ ID NO: 71114 - DNA, 19 bp, Homo sapiens
acctgggaggactgcagct

SEQ ID NO: 71115 - DNA, 24 bp, Homo sapiens
atgaaataatgtaccgtgaagtgc

SEQ ID NO: 71116 - DNA, 24 bp, Homo sapiens
ttggccttgggcttagggagttta

SEQ ID NO: 71117 - DNA, 24 bp, Homo sapiens
gaaagtccatctgttcctccatgc

SEQ ID NO: 71118 - DNA, 22 bp, Homo sapiens
gagctgtaagcaccgagggagg

SEQ ID NO: 71119 - DNA, 22 bp, Homo sapiens
ccacgatctccctgcggggacc

SEQ ID NO: 71120 - DNA, 16 bp, Homo sapiens
cccctgcccttaaggc

SEQ ID NO: 71121 - DNA, 24 bp, Homo sapiens
tcagatgtcctgacccctttcctt

SEQ ID NO: 71122 - DNA, 18 bp, Homo sapiens
tccccgtgaatggcgctg

SEQ ID NO: 71123 - DNA, 23 bp, Homo sapiens
ctagactcaagcatcaaaagcag

SEQ ID NO: 71124 - DNA, 16 bp, Homo sapiens
ggccctttggcaggcc

SEQ ID NO: 71125 - DNA, 24 bp, Homo sapiens
ttcttccccaagtacacacacaaa

SEQ ID NO: 71126 - DNA, 24 bp, Homo sapiens
ttgagaagtagggtgaatgacacc

SEQ ID NO: 71127 - DNA, 22 bp, Homo sapiens
ggtcttcagttcctcgtagaga

SEQ ID NO: 71128 - DNA, 21 bp, Homo sapiens
caacaacaataacaaaagtcc

SEQ ID NO: 71129 - DNA, 20 bp, Homo sapiens
gcctcagggcaaccagggcc

SEQ ID NO: 71130 - DNA, 23 bp, Homo sapiens
ggatggtctcgaactcctgactt

SEQ ID NO: 71131 - DNA, 18 bp, Homo sapiens
aaaaccaagtgtgggagg

SEQ ID NO: 71132 - DNA, 22 bp, Homo sapiens
cactcaggtttggaatgtggag

SEQ ID NO: 71133 - DNA, 21 bp, Homo sapiens
tttcacactggcctcctgaga

SEQ ID NO: 71134 - DNA, 24 bp, Homo sapiens
tctgagctacctcttccaggtctg

SEQ ID NO: 71135 - DNA, 17 bp, Homo sapiens
gcccacccttcctgagc

SEQ ID NO: 71136 - DNA, 19 bp, Homo sapiens
actgtgccctggccttacc

SEQ ID NO: 71137 - DNA, 17 bp, Homo sapiens
tgcaggtatgccagggc

SEQ ID NO: 71138 - DNA, 18 bp, Homo sapiens
acgtgacgtgcagtcccc

SEQ ID NO: 71139 - DNA, 24 bp, Homo sapiens
cgaggcccgcgcggctccctggca

SEQ ID NO: 71140 - DNA, 18 bp, Homo sapiens
gtcctctctaggaagggg

SEQ ID NO: 71141 - DNA, 24 bp, Homo sapiens
tgagaagctggatcatctcctcgg

SEQ ID NO: 71142 - DNA, 16 bp, Homo sapiens
cccttggtgccgcctc

SEQ ID NO: 71143 - DNA, 24 bp, Homo sapiens
agaagatgagaaaaaagaataagt

SEQ ID NO: 71144 - DNA, 23 bp, Homo sapiens
ggctcatgatgctaaatggtcca

SEQ ID NO: 71145 - DNA, 21 bp, Homo sapiens
aacactggctcggagagcaac

SEQ ID NO: 71146 - DNA, 24 bp, Homo sapiens
attaatacacaaaccacgtaacac

SEQ ID NO: 71147 - DNA, 16 bp, Homo sapiens
tgggcaggagggggtc

SEQ ID NO: 71148 - DNA, 24 bp, Homo sapiens
gtatttagaacacacaaaacaagg

SEQ ID NO: 71149 - DNA, 22 bp, Homo sapiens
cttgaagaaacaacagagagcc

SEQ ID NO: 71150 - DNA, 23 bp, Homo sapiens
tctgttggtggctcctccactgt

SEQ ID NO: 71151 - DNA, 23 bp, Homo sapiens
agagtaaaatttcatcttggaac

SEQ ID NO: 71152 - DNA, 22 bp, Homo sapiens
ttccttcctctgccatactgtc

SEQ ID NO: 71153 - DNA, 19 bp, Homo sapiens
cacatgtggctagtggctt

SEQ ID NO: 71154 - DNA, 23 bp, Homo sapiens
gacgtgccttcttcaccattctg

SEQ ID NO: 71155 - DNA, 21 bp, Homo sapiens
ccaaattgttccaacattctt

SEQ ID NO: 71156 - DNA, 20 bp, Homo sapiens
agaagaaagacgacgagaac

SEQ ID NO: 71157 - DNA, 22 bp, Homo sapiens
aatttagtactgggaatcaccc

SEQ ID NO: 71158 - DNA, 22 bp, Homo sapiens
aagctgagcgcagtcagagcag

SEQ ID NO: 71159 - DNA, 24 bp, Homo sapiens
gaaaaacctaaattaaagacagcc

SEQ ID NO: 71160 - DNA, 24 bp, Homo sapiens
attgcacaggcagaggaacaggcc

SEQ ID NO: 71161 - DNA, 22 bp, Homo sapiens
gtgggttacctgtctccatcgg

SEQ ID NO: 71162 - DNA, 23 bp, Homo sapiens
tttctgattagttgtgcggtctg

SEQ ID NO: 71163 - DNA, 24 bp, Homo sapiens
gctgcttgttcttcctcaggaacg

SEQ ID NO: 71164 - DNA, 24 bp, Homo sapiens
ttttgaaagaatatatctggctca

SEQ ID NO: 71165 - DNA, 23 bp, Homo sapiens
tccttctccctttcctcctgcct

SEQ ID NO: 71166 - DNA, 23 bp, Homo sapiens
cacacatacaggtgtatagatat

SEQ ID NO: 71167 - DNA, 22 bp, Homo sapiens
caattttctccatatccacttc

SEQ ID NO: 71168 - DNA, 20 bp, Homo sapiens
aaaaaaaggatcctacaggt

SEQ ID NO: 71169 - DNA, 16 bp, Homo sapiens
acgacaccaggagaag

SEQ ID NO: 71170 - DNA, 21 bp, Homo sapiens
aaaaacactattttggaaaaa

SEQ ID NO: 71171 - DNA, 20 bp, Homo sapiens
acaattatgaagcctgatcc

SEQ ID NO: 71172 - DNA, 23 bp, Homo sapiens
agtatagttaacatattaaacag

SEQ ID NO: 71173 - DNA, 27 bp, Homo sapiens
tctaaagttcaaaacattatttggtac

SEQ ID NO: 71174 - DNA, 21 bp, Homo sapiens
gctttccaggaatttcctctt

SEQ ID NO: 71175 - DNA, 18 bp, Homo sapiens
ctttgtgctgcattttgt

SEQ ID NO: 71176 - DNA, 24 bp, Homo sapiens
tgggaaaggtccacttccttaaac

SEQ ID NO: 71177 - DNA, 18 bp, Homo sapiens
gtcagttgtcacaacagc

SEQ ID NO: 71178 - DNA, 22 bp, Homo sapiens
tttaacaggtagatttaggcat

SEQ ID NO: 71179 - DNA, 16 bp, Homo sapiens
agagaaaccaccgcct

SEQ ID NO: 71180 - DNA, 24 bp, Homo sapiens
ggcacatcttattgaaatgaatgt

SEQ ID NO: 71181 - DNA, 23 bp, Homo sapiens
ccagaacaatttgttcactccag

SEQ ID NO: 71182 - DNA, 24 bp, Homo sapiens
cctgccgtttgaggacctgcattc

SEQ ID NO: 71183 - DNA, 24 bp, Homo sapiens
tggtaattaagtgttaacattgtt

SEQ ID NO: 71184 - DNA, 23 bp, Homo sapiens
ctctcactaagaatttcactgat

SEQ ID NO: 71185 - DNA, 16 bp, Homo sapiens
ctcccatgacgctggg

SEQ ID NO: 71186 - DNA, 20 bp, Homo sapiens
tgcttcattgaaaagccatc

SEQ ID NO: 71187 - DNA, 19 bp, Homo sapiens
gcattcagcctgctgaaga

SEQ ID NO: 71188 - DNA, 22 bp, Homo sapiens
ccaaaatactaagacgatactt

SEQ ID NO: 71189 - DNA, 21 bp, Homo sapiens
tgctttagaggaagaaagtcg

SEQ ID NO: 71190 - DNA, 23 bp, Homo sapiens
aaacttatacttaagagatttct

SEQ ID NO: 71191 - DNA, 21 bp, Homo sapiens
gcctatcataattcccccgcg

SEQ ID NO: 71192 - DNA, 21 bp, Homo sapiens
ttttttcttttaccatctgga

SEQ ID NO: 71193 - DNA, 23 bp, Homo sapiens
tgcaaaatgttaattataaaacc

SEQ ID NO: 71194 - DNA, 20 bp, Homo sapiens
tgcgagattgtctctgtcga

SEQ ID NO: 71195 - DNA, 23 bp, Homo sapiens
cctgtttacatcatatcttttga

SEQ ID NO: 71196 - DNA, 18 bp, Homo sapiens
atgtaagcaaggtacgcg

SEQ ID NO: 71197 - DNA, 18 bp, Homo sapiens
gtttctcaaggcctcaga

SEQ ID NO: 71198 - DNA, 24 bp, Homo sapiens
tctcactgatgaagaaaaacaaga

SEQ ID NO: 71199 - DNA, 24 bp, Homo sapiens
gtagacagagcctcagtactgcat

SEQ ID NO: 71200 - DNA, 20 bp, Homo sapiens
aaccctgacctaaagttgtg

SEQ ID NO: 71201 - DNA, 24 bp, Homo sapiens
gccaatgttttatgtactttacac

SEQ ID NO: 71202 - DNA, 23 bp, Homo sapiens
tcagtattaacatttcatctgtt

SEQ ID NO: 71203 - DNA, 20 bp, Homo sapiens
ccttttctgcttcgtattcg

SEQ ID NO: 71204 - DNA, 23 bp, Homo sapiens
tctgctttgtatgttgaaaagtt

SEQ ID NO: 71205 - DNA, 21 bp, Homo sapiens
ccaccaataatcttgccaatc

SEQ ID NO: 71206 - DNA, 24 bp, Homo sapiens
gccagttcttgataatttttgaag

SEQ ID NO: 71207 - DNA, 20 bp, Homo sapiens
ataagccgctgatgccctac

SEQ ID NO: 71208 - DNA, 24 bp, Homo sapiens
aaaaaccgtatttttttggacctt

SEQ ID NO: 71209 - DNA, 18 bp, Homo sapiens
tttcgtaggcatcctctg

SEQ ID NO: 71210 - DNA, 22 bp, Homo sapiens
tggatgttaagcaaagaagcag

SEQ ID NO: 71211 - DNA, 20 bp, Homo sapiens
gggactctcttttcagtttg

SEQ ID NO: 71212 - DNA, 24 bp, Homo sapiens
ctaagcacctacctttctgctgta

SEQ ID NO: 71213 - DNA, 23 bp, Homo sapiens
gtgatagctattttcagtgaaga

SEQ ID NO: 71214 - DNA, 21 bp, Homo sapiens
gttttggaatcgtgataccag

SEQ ID NO: 71215 - DNA, 21 bp, Homo sapiens
gagatgctacaacgaatgttg

SEQ ID NO: 71216 - DNA, 18 bp, Homo sapiens
ccatacagtcatctcgcc

SEQ ID NO: 71217 - DNA, 24 bp, Homo sapiens
gctgtgcttatgattcaaaaagac

SEQ ID NO: 71218 - DNA, 21 bp, Homo sapiens
tttgtctcatttgtttccatc

SEQ ID NO: 71219 - DNA, 22 bp, Homo sapiens
tgtttgccggatgctgtaatag

SEQ ID NO: 71220 - DNA, 23 bp, Homo sapiens
catatgcagatcatttttcattt

SEQ ID NO: 71221 - DNA, 21 bp, Homo sapiens
tccctcccagcctgtagttgt

SEQ ID NO: 71222 - DNA, 24 bp, Homo sapiens
tcagtggaaaaaaagaacaattac

SEQ ID NO: 71223 - DNA, 18 bp, Homo sapiens
ccccagctcctgcaacag

SEQ ID NO: 71224 - DNA, 25 bp, Homo sapiens
agtaggaagtgcttttttttttttc

SEQ ID NO: 71225 - DNA, 21 bp, Homo sapiens
tctcagttgtttacaagaagt

SEQ ID NO: 71226 - DNA, 19 bp, Homo sapiens
actgtcactggaagacatc

SEQ ID NO: 71227 - DNA, 24 bp, Homo sapiens
actctcatttttttttcttcaaaa

SEQ ID NO: 71228 - DNA, 24 bp, Homo sapiens
caagaaaattaaaacttactgttg

SEQ ID NO: 71229 - DNA, 29 bp, Homo sapiens
ttatatttatcaatctatgttaataagag

SEQ ID NO: 71230 - DNA, 24 bp, Homo sapiens
attcattcttaaggaactgagaac

SEQ ID NO: 71231 - DNA, 22 bp, Homo sapiens
tatgcaacaaaactaccaatgg

SEQ ID NO: 71232 - DNA, 21 bp, Homo sapiens
atgcttgctgagttttgattc

SEQ ID NO: 71233 - DNA, 19 bp, Homo sapiens
tgctagggcattagtctct

SEQ ID NO: 71234 - DNA, 22 bp, Homo sapiens
agtaattttactcagaaatacc

SEQ ID NO: 71235 - DNA, 23 bp, Homo sapiens
acttcaagcagaaaatctttaag

SEQ ID NO: 71236 - DNA, 22 bp, Homo sapiens
cctacctgataccccagatccc

SEQ ID NO: 71237 - DNA, 24 bp, Homo sapiens
cataaaatatttagtagccaggac

SEQ ID NO: 71238 - DNA, 17 bp, Homo sapiens
cgagagtgggtgttgga

SEQ ID NO: 71239 - DNA, 23 bp, Homo sapiens
cctggaaaggccactttgtaagc

SEQ ID NO: 71240 - DNA, 24 bp, Homo sapiens
cactaatctctgcttgtgttctct

SEQ ID NO: 71241 - DNA, 18 bp, Homo sapiens
gctgcagtcagtagtggc

SEQ ID NO: 71242 - DNA, 22 bp, Homo sapiens
catacaaccaggaccctggagt

SEQ ID NO: 71243 - DNA, 19 bp, Homo sapiens
cactggtagagtgctacac

SEQ ID NO: 71244 - DNA, 19 bp, Homo sapiens
aagactccgtctcaaaaaa

SEQ ID NO: 71245 - DNA, 24 bp, Homo sapiens
cacacatctgcccaattgctggag

SEQ ID NO: 71246 - DNA, 23 bp, Homo sapiens
gaaacagttcatgtattactttt

SEQ ID NO: 71247 - DNA, 18 bp, Homo sapiens
gatgcctggacagaggac

SEQ ID NO: 71248 - DNA, 21 bp, Homo sapiens
ttagccattcattcaacaaat

SEQ ID NO: 71249 - DNA, 23 bp, Homo sapiens
cactttgaatgctctttccttcc

SEQ ID NO: 71250 - DNA, 23 bp, Homo sapiens
aggtaatgagtgataaaccaaac

SEQ ID NO: 71251 - DNA, 21 bp, Homo sapiens
gaccctgtctcaaaaacaaac

SEQ ID NO: 71252 - DNA, 23 bp, Homo sapiens
cccttggcacagtaagtattggg

SEQ ID NO: 71253 - DNA, 24 bp, Homo sapiens
ccatcccttacagatggagtcttt

SEQ ID NO: 71254 - DNA, 19 bp, Homo sapiens
ggaatggatggtacagctg

SEQ ID NO: 71255 - DNA, 18 bp, Homo sapiens
gggcatccatagggactg

SEQ ID NO: 71256 - DNA, 21 bp, Homo sapiens
tgggttaagtatgcagattac

SEQ ID NO: 71257 - DNA, 18 bp, Homo sapiens
cctctctgacagggcacc

SEQ ID NO: 71258 - DNA, 17 bp, Homo sapiens
ctcccattgagaggtct

SEQ ID NO: 71259 - DNA, 24 bp, Homo sapiens
cttcaccacagaagcaccacacag

SEQ ID NO: 71260 - DNA, 21 bp, Homo sapiens
tgacttaaaatccatacccct

SEQ ID NO: 71261 - DNA, 17 bp, Homo sapiens
cccttcaccaacatgcc

SEQ ID NO: 71262 - DNA, 22 bp, Homo sapiens
gtagagaaatagaatagcctct

SEQ ID NO: 71263 - DNA, 17 bp, Homo sapiens
ccctctctcttcctctc

SEQ ID NO: 71264 - DNA, 23 bp, Homo sapiens
tgggatcttgcttataatactcc

SEQ ID NO: 71265 - DNA, 23 bp, Homo sapiens
gtctgttttttgaataaaagcca

SEQ ID NO: 71266 - DNA, 22 bp, Homo sapiens
gttctcccaggctcttacctgt

SEQ ID NO: 71267 - DNA, 21 bp, Homo sapiens
gaagtagcagcagaaatcatc

SEQ ID NO: 71268 - DNA, 21 bp, Homo sapiens
cccctgaagatctggaagaag

SEQ ID NO: 71269 - DNA, 20 bp, Homo sapiens
gcaagagaatcccaggacag

SEQ ID NO: 71270 - DNA, 21 bp, Homo sapiens
acctgtgtgaaagtatctagc

SEQ ID NO: 71271 - DNA, 21 bp, Homo sapiens
gcatgattttgaagtcagagg

SEQ ID NO: 71272 - DNA, 18 bp, Homo sapiens
cccatctctgcaaagggg

SEQ ID NO: 71273 - DNA, 19 bp, Homo sapiens
ccattgaaggaagcttctc

SEQ ID NO: 71274 - DNA, 22 bp, Homo sapiens
ttgagggagggagctttacctt

SEQ ID NO: 71275 - DNA, 22 bp, Homo sapiens
attacaggggtgagccactgcg

SEQ ID NO: 71276 - DNA, 24 bp, Homo sapiens
gtggtttcttccattgaccacatc

SEQ ID NO: 71277 - DNA, 19 bp, Homo sapiens
ggtgtcgaactcctgacct

SEQ ID NO: 71278 - DNA, 20 bp, Homo sapiens
tgctgaatgaggtaagtact

SEQ ID NO: 71279 - DNA, 21 bp, Homo sapiens
gcaggcctgcataattcttga

SEQ ID NO: 71280 - DNA, 20 bp, Homo sapiens
tgtatgtaacctgtcttttc

SEQ ID NO: 71281 - DNA, 23 bp, Homo sapiens
ggaaagtggtgcattgatggaag

SEQ ID NO: 71282 - DNA, 19 bp, Homo sapiens
gtgctcttttgtgaatcgc

SEQ ID NO: 71283 - DNA, 22 bp, Homo sapiens
tctctggttagtttgtaacatc

SEQ ID NO: 71284 - DNA, 21 bp, Homo sapiens
acaagccttattaaagggctg

SEQ ID NO: 71285 - DNA, 23 bp, Homo sapiens
gactgggtcacccctaaagagat

SEQ ID NO: 71286 - DNA, 22 bp, Homo sapiens
agttagctatttctgtaagtat

SEQ ID NO: 71287 - DNA, 24 bp, Homo sapiens
tattaaagataaaagtagtttagt

SEQ ID NO: 71288 - DNA, 18 bp, Homo sapiens
gtgtgtgaacggacactg

SEQ ID NO: 71289 - DNA, 20 bp, Homo sapiens
tcagcaaaaaccttaggtgt

SEQ ID NO: 71290 - DNA, 20 bp, Homo sapiens
tcctgattttgttttcaact

SEQ ID NO: 71291 - DNA, 22 bp, Homo sapiens
aagggaggaggggagaaatagt

SEQ ID NO: 71292 - DNA, 19 bp, Homo sapiens
tccagattgatcttgggag

SEQ ID NO: 71293 - DNA, 24 bp, Homo sapiens
tcccgcaattcctagaaaatattt

SEQ ID NO: 71294 - DNA, 24 bp, Homo sapiens
acctgctggttataattagtggtg

SEQ ID NO: 71295 - DNA, 20 bp, Homo sapiens
acaagtttgccagaaaacac

SEQ ID NO: 71296 - DNA, 16 bp, Homo sapiens
tacaggcatgcgccac

SEQ ID NO: 71297 - DNA, 19 bp, Homo sapiens
gtgctagaggtaactcatg

SEQ ID NO: 71298 - DNA, 19 bp, Homo sapiens
ttctgtaaaggttcttggt

SEQ ID NO: 71299 - DNA, 17 bp, Homo sapiens
acgtgcaggattgctac

SEQ ID NO: 71300 - DNA, 21 bp, Homo sapiens
agattagttaaagtgatgtgg

SEQ ID NO: 71301 - DNA, 24 bp, Homo sapiens
agagcaagactctgtctaaaaaaa

SEQ ID NO: 71302 - DNA, 22 bp, Homo sapiens
tccacactatagctttatctag

SEQ ID NO: 71303 - DNA, 16 bp, Homo sapiens
gtggtgtctggcctga

SEQ ID NO: 71304 - DNA, 21 bp, Homo sapiens
tacacagaactgtgattgttt

SEQ ID NO: 71305 - DNA, 16 bp, Homo sapiens
gtgagcagggagaagc

SEQ ID NO: 71306 - DNA, 23 bp, Homo sapiens
acataaaactctttccagaatgt

SEQ ID NO: 71307 - DNA, 18 bp, Homo sapiens
gtccagctgctgctcata

SEQ ID NO: 71308 - DNA, 22 bp, Homo sapiens
tacactcacaaattcttctggg

SEQ ID NO: 71309 - DNA, 20 bp, Homo sapiens
gttggcaacataccatcttc

SEQ ID NO: 71310 - DNA, 23 bp, Homo sapiens
tttctgttgaagctgtcaattct

SEQ ID NO: 71311 - DNA, 22 bp, Homo sapiens
ctctgatgaccctgaatctgat

SEQ ID NO: 71312 - DNA, 23 bp, Homo sapiens
cccagcagtatcagtagtatgag

SEQ ID NO: 71313 - DNA, 23 bp, Homo sapiens
gtaaattaaacttctcccattcc

SEQ ID NO: 71314 - DNA, 18 bp, Homo sapiens
ttggggaactttcaatgc

SEQ ID NO: 71315 - DNA, 24 bp, Homo sapiens
attggtctttttaattcttaacag

SEQ ID NO: 71316 - DNA, 20 bp, Homo sapiens
gctctgtcttcagaaggatc

SEQ ID NO: 71317 - DNA, 19 bp, Homo sapiens
atttccaccaacactgtat

SEQ ID NO: 71318 - DNA, 17 bp, Homo sapiens
aggtaaggggttccctc

SEQ ID NO: 71319 - DNA, 17 bp, Homo sapiens
ttgccaaggcaagatct

SEQ ID NO: 71320 - DNA, 24 bp, Homo sapiens
ttttctaaagtgggcttaattaag

SEQ ID NO: 71321 - DNA, 16 bp, Homo sapiens
gtggaggagcaacagc

SEQ ID NO: 71322 - DNA, 21 bp, Homo sapiens
agttggttaaccagaatatct

SEQ ID NO: 71323 - DNA, 18 bp, Homo sapiens
tgctctgggagtcttcag

SEQ ID NO: 71324 - DNA, 25 bp, Homo sapiens
tccaatacagcagatgaaatattac

SEQ ID NO: 71325 - DNA, 18 bp, Homo sapiens
tctttctaggtcatcccc

SEQ ID NO: 71326 - DNA, 18 bp, Homo sapiens
tggcccagactcttccag

SEQ ID NO: 71327 - DNA, 21 bp, Homo sapiens
tgcccagcaagtatgatttgt

SEQ ID NO: 71328 - DNA, 23 bp, Homo sapiens
tgagatgggtagtttctattctg

SEQ ID NO: 71329 - DNA, 20 bp, Homo sapiens
tcttttttgccagtcatttc

SEQ ID NO: 71330 - DNA, 20 bp, Homo sapiens
tgatgggcatttagaagggg

SEQ ID NO: 71331 - DNA, 18 bp, Homo sapiens
aaccaggagtggaaaggt

SEQ ID NO: 71332 - DNA, 21 bp, Homo sapiens
aaaagaagtatcctagagcaa

SEQ ID NO: 71333 - DNA, 20 bp, Homo sapiens
cctttctgctgacaagtttg

SEQ ID NO: 71334 - DNA, 24 bp, Homo sapiens
tggagaaagtatggtgaaaaaaat

SEQ ID NO: 71335 - DNA, 26 bp, Homo sapiens
ctcattccatttaaagcagtattaac

SEQ ID NO: 71336 - DNA, 22 bp, Homo sapiens
ccacagcatctttacattgatg

SEQ ID NO: 71337 - DNA, 22 bp, Homo sapiens
tctaacctgaattatcactatc

SEQ ID NO: 71338 - DNA, 18 bp, Homo sapiens
tctgcagacacctcaaac

SEQ ID NO: 71339 - DNA, 23 bp, Homo sapiens
gcctgatatacttgtttaaaaac

SEQ ID NO: 71340 - DNA, 24 bp, Homo sapiens
ggtattcactacttttctgtgaag

SEQ ID NO: 71341 - DNA, 21 bp, Homo sapiens
tccatttggtgctagcatctg

SEQ ID NO: 71342 - DNA, 24 bp, Homo sapiens
gcctgggcaacaaaagtgaaactt

SEQ ID NO: 71343 - DNA, 20 bp, Homo sapiens
cagagggaaggctcagatac

SEQ ID NO: 71344 - DNA, 23 bp, Homo sapiens
ccgttcccttgatgtctacaatt

SEQ ID NO: 71345 - DNA, 21 bp, Homo sapiens
gccagaaccaccatctttcag

SEQ ID NO: 71346 - DNA, 24 bp, Homo sapiens
agaggcacctgatatatgttctct

SEQ ID NO: 71347 - DNA, 21 bp, Homo sapiens
atgcgaatctgtaagaaaggt

SEQ ID NO: 71348 - DNA, 22 bp, Homo sapiens
cagaaaaaggtgtgtattgttg

SEQ ID NO: 71349 - DNA, 23 bp, Homo sapiens
agttgtgagcagggacaagaacc

SEQ ID NO: 71350 - DNA, 24 bp, Homo sapiens
ctacccttccatcataagtgactc

SEQ ID NO: 71351 - DNA, 24 bp, Homo sapiens
aaaatgttggagctaggtccttac

SEQ ID NO: 71352 - DNA, 18 bp, Homo sapiens
tggctgaactagaagctg

SEQ ID NO: 71353 - DNA, 18 bp, Homo sapiens
tatcagtgtttggccaac

SEQ ID NO: 71354 - DNA, 23 bp, Homo sapiens
tggtgccatttatcgtttttgaa

SEQ ID NO: 71355 - DNA, 19 bp, Homo sapiens
gcaggtcctcaagggcaga

SEQ ID NO: 71356 - DNA, 24 bp, Homo sapiens
ttaatttgtatgatatattttcat

SEQ ID NO: 71357 - DNA, 21 bp, Homo sapiens
tggctcccatgctgttctaac

SEQ ID NO: 71358 - DNA, 20 bp, Homo sapiens
ttcagctagaacttgtagtt

SEQ ID NO: 71359 - DNA, 19 bp, Homo sapiens
ttgcatggtatccctctgc

SEQ ID NO: 71360 - DNA, 20 bp, Homo sapiens
gacattttaaccactcaggt

SEQ ID NO: 71361 - DNA, 24 bp, Homo sapiens
tctaatttaaggagacaatgaacc

SEQ ID NO: 71362 - DNA, 21 bp, Homo sapiens
atctgggtgtgagagtgaaac

SEQ ID NO: 71363 - DNA, 21 bp, Homo sapiens
gtcagcaaacctaagaatgtg

SEQ ID NO: 71364 - DNA, 24 bp, Homo sapiens
agcgtttatagtctgcttttacat

SEQ ID NO: 71365 - DNA, 23 bp, Homo sapiens
cgcatgtgcacacacacacacgc

SEQ ID NO: 71366 - DNA, 23 bp, Homo sapiens
ttgtgtgacatgaaagtaaatcc

SEQ ID NO: 71367 - DNA, 20 bp, Homo sapiens
cctgagcagtcttcagagac

SEQ ID NO: 71368 - DNA, 24 bp, Homo sapiens
cttctggtttcattttataaaagc

SEQ ID NO: 71369 - DNA, 19 bp, Homo sapiens
aggtattggaaccaggttt

SEQ ID NO: 71370 - DNA, 23 bp, Homo sapiens
ttctatgaaaagcaccttaggag

SEQ ID NO: 71371 - DNA, 16 bp, Homo sapiens
agaggaacgggcttgg

SEQ ID NO: 71372 - DNA, 23 bp, Homo sapiens
acttggaaatttgtaaaatgtgc

SEQ ID NO: 71373 - DNA, 19 bp, Homo sapiens
ggcatcagtctgaaagcca

SEQ ID NO: 71374 - DNA, 21 bp, Homo sapiens
aaatagactggggcaaacaca

SEQ ID NO: 71375 - DNA, 21 bp, Homo sapiens
tggaagacttgactgcaaata

SEQ ID NO: 71376 - DNA, 23 bp, Homo sapiens
tgctcttcttgattattttcttc

SEQ ID NO: 71377 - DNA, 22 bp, Homo sapiens
accttagtgaggaaacaaaatg

SEQ ID NO: 71378 - DNA, 24 bp, Homo sapiens
attccttgtcactcagaccaactc

SEQ ID NO: 71379 - DNA, 23 bp, Homo sapiens
tgaagaatagcttaaatgactgc

SEQ ID NO: 71380 - DNA, 19 bp, Homo sapiens
agaaaggatcctgggtgtt

SEQ ID NO: 71381 - DNA, 17 bp, Homo sapiens
cgttgctaccgagtgtc

SEQ ID NO: 71382 - DNA, 20 bp, Homo sapiens
agaaaacaagctagcagaac

SEQ ID NO: 71383 - DNA, 19 bp, Homo sapiens
tgcttccaacacttgttat

SEQ ID NO: 71384 - DNA, 21 bp, Homo sapiens
gccaatattacctggttactg

SEQ ID NO: 71385 - DNA, 21 bp, Homo sapiens
ggggccaagaaattagagtcc

SEQ ID NO: 71386 - DNA, 23 bp, Homo sapiens
attctcctctgtgttcttagaca

SEQ ID NO: 71387 - DNA, 18 bp, Homo sapiens
cttagcaggagtcctagc

SEQ ID NO: 71388 - DNA, 24 bp, Homo sapiens
gagaaggtatattgtttactttac

SEQ ID NO: 71389 - DNA, 20 bp, Homo sapiens
tgctgaaaatgacattaagg

SEQ ID NO: 71390 - DNA, 18 bp, Homo sapiens
aagttctcttctgaggac

SEQ ID NO: 71391 - DNA, 18 bp, Homo sapiens
ttgttctgagacacctga

SEQ ID NO: 71392 - DNA, 23 bp, Homo sapiens
ccaaatgtgtatgggtgaaaggg

SEQ ID NO: 71393 - DNA, 24 bp, Homo sapiens
cagatttctctccatatctgattt

SEQ ID NO: 71394 - DNA, 19 bp, Homo sapiens
aaacagcagaactttcctt

SEQ ID NO: 71395 - DNA, 21 bp, Homo sapiens
agcatcctgaaataaaaaagc

SEQ ID NO: 71396 - DNA, 21 bp, Homo sapiens
ttcaccatcatctaacaggtc

SEQ ID NO: 71397 - DNA, 16 bp, Homo sapiens
ggggttttgcaacctg

SEQ ID NO: 71398 - DNA, 22 bp, Homo sapiens
cttcccataggctgttctaagt

SEQ ID NO: 71399 - DNA, 22 bp, Homo sapiens
cagtgatgaaaacattcaagca

SEQ ID NO: 71400 - DNA, 22 bp, Homo sapiens
actacttcttcatattcttgct

SEQ ID NO: 71401 - DNA, 21 bp, Homo sapiens
aatgaagtaggttccagtact

SEQ ID NO: 71402 - DNA, 24 bp, Homo sapiens
caggaagactttgtttatagacct

SEQ ID NO: 71403 - DNA, 21 bp, Homo sapiens
agcacaattagccgtaataac

SEQ ID NO: 71404 - DNA, 19 bp, Homo sapiens
ggccctctgtttctaccta

SEQ ID NO: 71405 - DNA, 21 bp, Homo sapiens
ggaacattcaatgtcacctga

SEQ ID NO: 71406 - DNA, 19 bp, Homo sapiens
tactggagcccacttcatt

SEQ ID NO: 71407 - DNA, 23 bp, Homo sapiens
actttttcccatcaagtcatttg

SEQ ID NO: 71408 - DNA, 23 bp, Homo sapiens
tttaaaaacattttctctaatgt

SEQ ID NO: 71409 - DNA, 22 bp, Homo sapiens
actggactcattactccaaata

SEQ ID NO: 71410 - DNA, 21 bp, Homo sapiens
tgttctcatttcccatttctc

SEQ ID NO: 71411 - DNA, 21 bp, Homo sapiens
aatgtagtatcaaaggaggct

SEQ ID NO: 71412 - DNA, 24 bp, Homo sapiens
ctagcagatttttcttacatttag

SEQ ID NO: 71413 - DNA, 16 bp, Homo sapiens
gcaggctttcctgtgg

SEQ ID NO: 71414 - DNA, 21 bp, Homo sapiens
gggttttgtaaaagtccatgt

SEQ ID NO: 71415 - DNA, 22 bp, Homo sapiens
tgtgaacaaaaggaagaaaatc

SEQ ID NO: 71416 - DNA, 21 bp, Homo sapiens
actgagatgatagacaaaacc

SEQ ID NO: 71417 - DNA, 17 bp, Homo sapiens
ctgcccactctgggtcc

SEQ ID NO: 71418 - DNA, 22 bp, Homo sapiens
ctggcttatctttctgaccaac

SEQ ID NO: 71419 - DNA, 17 bp, Homo sapiens
gcgccagtcatttgctc

SEQ ID NO: 71420 - DNA, 23 bp, Homo sapiens
caggcttgatattagactcattc

SEQ ID NO: 71421 - DNA, 23 bp, Homo sapiens
aagcatagaaatggaagaaagtg

SEQ ID NO: 71422 - DNA, 23 bp, Homo sapiens
tggactttgtttctttaaggacc

SEQ ID NO: 71423 - DNA, 20 bp, Homo sapiens
cacagaaggctttaagtatc

SEQ ID NO: 71424 - DNA, 22 bp, Homo sapiens
tgcatttcctggatttgaaaac

SEQ ID NO: 71425 - DNA, 17 bp, Homo sapiens
cagcatttgaaaacccc

SEQ ID NO: 71426 - DNA, 19 bp, Homo sapiens
tactgagcatcaagttcac

SEQ ID NO: 71427 - DNA, 20 bp, Homo sapiens
cgttactggaagttagcact

SEQ ID NO: 71428 - DNA, 22 bp, Homo sapiens
ggttaacttcatgtcccaatgg

SEQ ID NO: 71429 - DNA, 24 bp, Homo sapiens
atctgtagagagtagcagtatttc

SEQ ID NO: 71430 - DNA, 23 bp, Homo sapiens
aacaaccatgaattagtcccttg

SEQ ID NO: 71431 - DNA, 19 bp, Homo sapiens
gaccccaaagatctcatgt

SEQ ID NO: 71432 - DNA, 21 bp, Homo sapiens
tggttctgtttttgccttccc

SEQ ID NO: 71433 - DNA, 19 bp, Homo sapiens
cctagccttccaagagaag

SEQ ID NO: 71434 - DNA, 21 bp, Homo sapiens
ccataatcagtaccaggtacc

SEQ ID NO: 71435 - DNA, 18 bp, Homo sapiens
tgcacctggttcttttac

SEQ ID NO: 71436 - DNA, 24 bp, Homo sapiens
tttgcaaaaccctttctccactta

SEQ ID NO: 71437 - DNA, 22 bp, Homo sapiens
aatgaacagacaagtaaaagac

SEQ ID NO: 71438 - DNA, 23 bp, Homo sapiens
tgtttctagtttctcttcttttt

SEQ ID NO: 71439 - DNA, 20 bp, Homo sapiens
cctacaactcatggaaggta

SEQ ID NO: 71440 - DNA, 23 bp, Homo sapiens
tttaagttcactggtatttgaac

SEQ ID NO: 71441 - DNA, 23 bp, Homo sapiens
ttctagcagtgaagagataaaga

SEQ ID NO: 71442 - DNA, 22 bp, Homo sapiens
tgggaaagtatcgctgtcatgt

SEQ ID NO: 71443 - DNA, 24 bp, Homo sapiens
cgcttgaactagtagtcagtagaa

SEQ ID NO: 71444 - DNA, 22 bp, Homo sapiens
gctccagttgcaggttctttac

SEQ ID NO: 71445 - DNA, 21 bp, Homo sapiens
gcacctaaaaagaataggctg

SEQ ID NO: 71446 - DNA, 23 bp, Homo sapiens
gcatttggttgtacttttttttc

SEQ ID NO: 71447 - DNA, 21 bp, Homo sapiens
agctgaacctataagcagcag

SEQ ID NO: 71448 - DNA, 19 bp, Homo sapiens
agtacaattaggtgggctt

SEQ ID NO: 71449 - DNA, 22 bp, Homo sapiens
agaatgagaaaaatcctaaccc

SEQ ID NO: 71450 - DNA, 17 bp, Homo sapiens
agacttcctcctcagcc

SEQ ID NO: 71451 - DNA, 23 bp, Homo sapiens
tggtcaagtgatgaatattacta

SEQ ID NO: 71452 - DNA, 22 bp, Homo sapiens
ttaattcgagttccatattgct

SEQ ID NO: 71453 - DNA, 23 bp, Homo sapiens
gcagttcaaaagactcctgaaat

SEQ ID NO: 71454 - DNA, 21 bp, Homo sapiens
aagcagattctttttcgagtg

SEQ ID NO: 71455 - DNA, 18 bp, Homo sapiens
ggagacctacatcaggcc

SEQ ID NO: 71456 - DNA, 24 bp, Homo sapiens
ttttgttttattctcatgaccact

SEQ ID NO: 71457 - DNA, 21 bp, Homo sapiens
agcatttgttactgagccaca

SEQ ID NO: 71458 - DNA, 21 bp, Homo sapiens
tggttagttccctgatttatc

SEQ ID NO: 71459 - DNA, 17 bp, Homo sapiens
gaagaaggcaagcctcc

SEQ ID NO: 71460 - DNA, 18 bp, Homo sapiens
cctcaggatgaaggcctg

SEQ ID NO: 71461 - DNA, 21 bp, Homo sapiens
aaagagttcactccaaatcag

SEQ ID NO: 71462 - DNA, 21 bp, Homo sapiens
ggggacgctcttgtattatct

SEQ ID NO: 71463 - DNA, 23 bp, Homo sapiens
ctggttcttcagagaaaatagac

SEQ ID NO: 71464 - DNA, 19 bp, Homo sapiens
tacatggcttaagttgggg

SEQ ID NO: 71465 - DNA, 19 bp, Homo sapiens
aatgccaaagtagctgatg

SEQ ID NO: 71466 - DNA, 23 bp, Homo sapiens
tttgtcttcaatattactctcta

SEQ ID NO: 71467 - DNA, 21 bp, Homo sapiens
ggttttccagaagtgatgaac

SEQ ID NO: 71468 - DNA, 19 bp, Homo sapiens
catgaggatcactggccag

SEQ ID NO: 71469 - DNA, 24 bp, Homo sapiens
atcctagagatactgaagatgttc

SEQ ID NO: 71470 - DNA, 23 bp, Homo sapiens
tacctcatttagaacgtccaata

SEQ ID NO: 71471 - DNA, 19 bp, Homo sapiens
cccctgtgtgagagaaaag

SEQ ID NO: 71472 - DNA, 21 bp, Homo sapiens
tcatcagaacctaacagttca

SEQ ID NO: 71473 - DNA, 21 bp, Homo sapiens
aggaaacatgtaatgataggc

SEQ ID NO: 71474 - DNA, 21 bp, Homo sapiens
tgctgctatttagtgttatcc

SEQ ID NO: 71475 - DNA, 22 bp, Homo sapiens
tctgtaataaaagcaaacagcc

SEQ ID NO: 71476 - DNA, 20 bp, Homo sapiens
gcttattccattcttttctc

SEQ ID NO: 71477 - DNA, 22 bp, Homo sapiens
catgagaacagcagtttattac

SEQ ID NO: 71478 - DNA, 23 bp, Homo sapiens
ctttttttctgtgctgggagtcc

SEQ ID NO: 71479 - DNA, 21 bp, Homo sapiens
tctgtttcaaacttgcatgtg

SEQ ID NO: 71480 - DNA, 21 bp, Homo sapiens
tatgttggctccttgctaagc

SEQ ID NO: 71481 - DNA, 20 bp, Homo sapiens
tttgaacaccactgagaagc

SEQ ID NO: 71482 - DNA, 22 bp, Homo sapiens
acattcattctgtctttagtga

SEQ ID NO: 71483 - DNA, 20 bp, Homo sapiens
ttgtgaattttctgagacgg

SEQ ID NO: 71484 - DNA, 18 bp, Homo sapiens
tttgtgccacatggctcc

SEQ ID NO: 71485 - DNA, 22 bp, Homo sapiens
tgtatttttttaatgacaattc

SEQ ID NO: 71486 - DNA, 21 bp, Homo sapiens
tggatgcctctcagctgcacg

SEQ ID NO: 71487 - DNA, 21 bp, Homo sapiens
tatgaggttagtttctctaat

SEQ ID NO: 71488 - DNA, 21 bp, Homo sapiens
tcagtatttgttacatccgtc

SEQ ID NO: 71489 - DNA, 24 bp, Homo sapiens
aggtaaataggaattaaatgaaag

SEQ ID NO: 71490 - DNA, 24 bp, Homo sapiens
agtctagtaccatttaaatctatc

SEQ ID NO: 71491 - DNA, 20 bp, Homo sapiens
ccagggatgaaatcagtttg

SEQ ID NO: 71492 - DNA, 19 bp, Homo sapiens
gccaagagattttgtgggt

SEQ ID NO: 71493 - DNA, 21 bp, Homo sapiens
ctctgtcttttccctatagtg

SEQ ID NO: 71494 - DNA, 20 bp, Homo sapiens
acagtactgtatctacccac

SEQ ID NO: 71495 - DNA, 22 bp, Homo sapiens
aatgtttgatcttggtcatttg

SEQ ID NO: 71496 - DNA, 21 bp, Homo sapiens
ttacccttttttgcagaatcc

SEQ ID NO: 71497 - DNA, 18 bp, Homo sapiens
gagcagctttcactaact

SEQ ID NO: 71498 - DNA, 22 bp, Homo sapiens
gtaacaattcttgatctcccac

SEQ ID NO: 71499 - DNA, 22 bp, Homo sapiens
acccggatgatgaaaaaaatct

SEQ ID NO: 71500 - DNA, 22 bp, Homo sapiens
gaagataccgttaataaggcaa

SEQ ID NO: 71501 - DNA, 18 bp, Homo sapiens
actgcacatacatccctg

SEQ ID NO: 71502 - DNA, 26 bp, Homo sapiens
taattaagaaaacttttattgattta

SEQ ID NO: 71503 - DNA, 30 bp, Homo sapiens
aaacatcaatccttaatattaactaaatag

SEQ ID NO: 71504 - DNA, 24 bp, Homo sapiens
gctcagtaaatatttctagttgaa

SEQ ID NO: 71505 - DNA, 24 bp, Homo sapiens
tctctttgactcacctgcaataag

SEQ ID NO: 71506 - DNA, 22 bp, Homo sapiens
accacttctctgtattacatac

SEQ ID NO: 71507 - DNA, 19 bp, Homo sapiens
tgaattgggtaagggtctc

SEQ ID NO: 71508 - DNA, 20 bp, Homo sapiens
tttataactcaccatagggc

SEQ ID NO: 71509 - DNA, 20 bp, Homo sapiens
gaactgtgagaactctgagg

SEQ ID NO: 71510 - DNA, 24 bp, Homo sapiens
acaaatacaaattatgaccaagat

SEQ ID NO: 71511 - DNA, 23 bp, Homo sapiens
tgcttgactgttctttaccatac

SEQ ID NO: 71512 - DNA, 19 bp, Homo sapiens
acttaaaaaacctgagacc

SEQ ID NO: 71513 - DNA, 19 bp, Homo sapiens
ccatggtgtcaagtttctc

SEQ ID NO: 71514 - DNA, 23 bp, Homo sapiens
tgaggttgtatccgctgctttgt

SEQ ID NO: 71515 - DNA, 18 bp, Homo sapiens
gggcattttttccaggca

SEQ ID NO: 71516 - DNA, 24 bp, Homo sapiens
cactgagactggtttcctgctaaa

SEQ ID NO: 71517 - DNA, 22 bp, Homo sapiens
cccgaaaatccttccttggtaa

SEQ ID NO: 71518 - DNA, 21 bp, Homo sapiens
gtggcgcgtgcctgtaatccc

SEQ ID NO: 71519 - DNA, 19 bp, Homo sapiens
catccaaagtatgggctac

SEQ ID NO: 71520 - DNA, 20 bp, Homo sapiens
tgggccacagagcaagactc

SEQ ID NO: 71521 - DNA, 22 bp, Homo sapiens
atgcaaacagctataattttgc

SEQ ID NO: 71522 - DNA, 24 bp, Homo sapiens
gaagaagaagaagaaaacaaatgg

SEQ ID NO: 71523 - DNA, 22 bp, Homo sapiens
tcatacatttttctctaactgc

SEQ ID NO: 71524 - DNA, 21 bp, Homo sapiens
gaagtcttttggcacggtttc

SEQ ID NO: 71525 - DNA, 19 bp, Homo sapiens
tgcattgtcttaacacaac

SEQ ID NO: 71526 - DNA, 23 bp, Homo sapiens
gatgttcaggagagttattttcc

SEQ ID NO: 71527 - DNA, 24 bp, Homo sapiens
ggagtaaaatttccagttgatttt

SEQ ID NO: 71528 - DNA, 20 bp, Homo sapiens
caggtttggagtgtaagtgt

SEQ ID NO: 71529 - DNA, 24 bp, Homo sapiens
cagtgggagtaattttttaaaaat

SEQ ID NO: 71530 - DNA, 21 bp, Homo sapiens
tttagtcaacttgttgaagag

SEQ ID NO: 71531 - DNA, 24 bp, Homo sapiens
aaaggtcttatcaccacgtcatag

SEQ ID NO: 71532 - DNA, 17 bp, Homo sapiens
tgctgagtgtgtttctc

SEQ ID NO: 71533 - DNA, 20 bp, Homo sapiens
gcacttgagtgtcattcttg

SEQ ID NO: 71534 - DNA, 24 bp, Homo sapiens
gttgctgcatcttatttttatttg

SEQ ID NO: 71535 - DNA, 23 bp, Homo sapiens
gcacaaatgattttcaatagctc

SEQ ID NO: 71536 - DNA, 20 bp, Homo sapiens
acacggtttatacagatgtc

SEQ ID NO: 71537 - DNA, 23 bp, Homo sapiens
taagaatgatataaccaaaaggt

SEQ ID NO: 71538 - DNA, 24 bp, Homo sapiens
actttggaaataatttactgtgtg

SEQ ID NO: 71539 - DNA, 18 bp, Homo sapiens
tttgcatgctgaaacttc

SEQ ID NO: 71540 - DNA, 30 bp, Homo sapiens
gttttataggaacgctatgttattaaataa

SEQ ID NO: 71541 - DNA, 23 bp, Homo sapiens
gccttttgagtattctttctaca

SEQ ID NO: 71542 - DNA, 23 bp, Homo sapiens
gcatcattaccaaattatatacc

SEQ ID NO: 71543 - DNA, 22 bp, Homo sapiens
gccattactttttaaatggctc

SEQ ID NO: 71544 - DNA, 19 bp, Homo sapiens
ggccctttcttctggttga

SEQ ID NO: 71545 - DNA, 19 bp, Homo sapiens
ttttgcttatgcagcatcc

SEQ ID NO: 71546 - DNA, 22 bp, Homo sapiens
aggaactatgattacaaccaac

SEQ ID NO: 71547 - DNA, 21 bp, Homo sapiens
caaggaacctgtctccacaaa

SEQ ID NO: 71548 - DNA, 23 bp, Homo sapiens
atggagttggatttttcgttctc

SEQ ID NO: 71549 - DNA, 19 bp, Homo sapiens
ttgagcctcatttattttc

SEQ ID NO: 71550 - DNA, 22 bp, Homo sapiens
ctgggttatgaaggacaaaaac

SEQ ID NO: 71551 - DNA, 22 bp, Homo sapiens
cagtcataacagctcaaagttg

SEQ ID NO: 71552 - DNA, 24 bp, Homo sapiens
acttacttgcaaaatatgtggtca

SEQ ID NO: 71553 - DNA, 18 bp, Homo sapiens
tgacacagcagacattta

SEQ ID NO: 71554 - DNA, 18 bp, Homo sapiens
catctggtaagtcagcac

SEQ ID NO: 71555 - DNA, 21 bp, Homo sapiens
agttcttcagttaagaaaatc

SEQ ID NO: 71556 - DNA, 18 bp, Homo sapiens
ctgctcttcgcgttgaag

SEQ ID NO: 71557 - DNA, 20 bp, Homo sapiens
tcttccctagtatgtaaggt

SEQ ID NO: 71558 - DNA, 29 bp, Homo sapiens
aaaaagatatatatatatgtttttctaat

SEQ ID NO: 71559 - DNA, 24 bp, Homo sapiens
atcccaaattaatacactcttgtg

SEQ ID NO: 71560 - DNA, 28 bp, Homo sapiens
taaatttactttattttaaaatgataaa

SEQ ID NO: 71561 - DNA, 24 bp, Homo sapiens
ctgcatagcattaatgacattttg

SEQ ID NO: 71562 - DNA, 20 bp, Homo sapiens
aaaggacgttgtcattagtt

SEQ ID NO: 71563 - DNA, 21 bp, Homo sapiens
gttctcgccaaggtgaagaac

SEQ ID NO: 71564 - DNA, 17 bp, Homo sapiens
ggaagggtgttgtctct

SEQ ID NO: 71565 - DNA, 18 bp, Homo sapiens
ctctcggagcgccagatt

SEQ ID NO: 71566 - DNA, 21 bp, Homo sapiens
ggttcctggtctccccaggac

SEQ ID NO: 71567 - DNA, 20 bp, Homo sapiens
gagtatgcggctaacaagtt

SEQ ID NO: 71568 - DNA, 24 bp, Homo sapiens
ctcttaaggggtagcgctgttctt

SEQ ID NO: 71569 - DNA, 20 bp, Homo sapiens
tcgtcgcggccgcaagaaac

SEQ ID NO: 71570 - DNA, 24 bp, Homo sapiens
cggttctgaaaccagatggtaatc

SEQ ID NO: 71571 - DNA, 24 bp, Homo sapiens
cttttcctccctccctttcacgcc

SEQ ID NO: 71572 - DNA, 21 bp, Homo sapiens
cttgtccttggtgatgaactt

SEQ ID NO: 71573 - DNA, 23 bp, Homo sapiens
acttagcttggggcttgcaaggc

SEQ ID NO: 71574 - DNA, 20 bp, Homo sapiens
ttgctgtacggaatgcgttt

SEQ ID NO: 71575 - DNA, 19 bp, Homo sapiens
tttggaggaacaggattgc

SEQ ID NO: 71576 - DNA, 16 bp, Homo sapiens
gcccgctggagtctgc

SEQ ID NO: 71577 - DNA, 18 bp, Homo sapiens
caggtcccttttggaagg

SEQ ID NO: 71578 - DNA, 22 bp, Homo sapiens
ctaataaccaagggaggagcac

SEQ ID NO: 71579 - DNA, 16 bp, Homo sapiens
gctctcgctggtggct

SEQ ID NO: 71580 - DNA, 16 bp, Homo sapiens
ggaaatgccattggga

SEQ ID NO: 71581 - DNA, 22 bp, Homo sapiens
actctgggtgctcctggagaac

SEQ ID NO: 71582 - DNA, 24 bp, Homo sapiens
aatagaggtacctgcaaatgctgc

SEQ ID NO: 71583 - DNA, 17 bp, Homo sapiens
ccgggatatccgggaac

SEQ ID NO: 71584 - DNA, 24 bp, Homo sapiens
cctggcaacacatctggctgttcc

SEQ ID NO: 71585 - DNA, 24 bp, Homo sapiens
cgtaccccgcggagactcccacgg

SEQ ID NO: 71586 - DNA, 19 bp, Homo sapiens
ggagtcatgtcgcggttct

SEQ ID NO: 71587 - DNA, 16 bp, Homo sapiens
cgagtgtcccggagct

SEQ ID NO: 71588 - DNA, 21 bp, Homo sapiens
ccaggtaactggccataggct

SEQ ID NO: 71589 - DNA, 17 bp, Homo sapiens
gggacgtccccagctcc

SEQ ID NO: 71590 - DNA, 19 bp, Homo sapiens
ctggggtactcttccccgg

SEQ ID NO: 71591 - DNA, 16 bp, Homo sapiens
ttggatctgccaggct

SEQ ID NO: 71592 - DNA, 18 bp, Homo sapiens
tgggcacagggtttcagc

SEQ ID NO: 71593 - DNA, 21 bp, Homo sapiens
actcccctctgaccagccacc

SEQ ID NO: 71594 - DNA, 22 bp, Homo sapiens
cctccaaagtaaccataaggca

SEQ ID NO: 71595 - DNA, 20 bp, Homo sapiens
gagccaaggatatcgaaggc

SEQ ID NO: 71596 - DNA, 21 bp, Homo sapiens
gtggcattgctttggcggctc

SEQ ID NO: 71597 - DNA, 16 bp, Homo sapiens
acctcatgagccgacc

SEQ ID NO: 71598 - DNA, 16 bp, Homo sapiens
gtaggcgccgctgggt

SEQ ID NO: 71599 - DNA, 17 bp, Homo sapiens
tttggattcccccggcc

SEQ ID NO: 71600 - DNA, 16 bp, Homo sapiens
gctcccagcaagcctt

SEQ ID NO: 71601 - DNA, 17 bp, Homo sapiens
aagacggccgtgctgag

SEQ ID NO: 71602 - DNA, 16 bp, Homo sapiens
gaacgtcttcccgcgc

SEQ ID NO: 71603 - DNA, 18 bp, Homo sapiens
cgcaaagctgcaaggccc

SEQ ID NO: 71604 - DNA, 21 bp, Homo sapiens
caccagcttcacccgcaccgc

SEQ ID NO: 71605 - DNA, 22 bp, Homo sapiens
gctttacgtctgacgtcacgcc

SEQ ID NO: 71606 - DNA, 17 bp, Homo sapiens
agctcggagggtttcac

SEQ ID NO: 71607 - DNA, 18 bp, Homo sapiens
gttagcaggtgagcctgc

SEQ ID NO: 71608 - DNA, 16 bp, Homo sapiens
gaggcggcgctgacgg

SEQ ID NO: 71609 - DNA, 24 bp, Homo sapiens
ggatttggtgagtttcccgctgtc

SEQ ID NO: 71610 - DNA, 24 bp, Homo sapiens
gacgtgggaggaagcagaatctaa

SEQ ID NO: 71611 - DNA, 24 bp, Homo sapiens
agactgctgaggaactcctagagg

SEQ ID NO: 71612 - DNA, 24 bp, Homo sapiens
ccaaactgaaaaattaaatggttg

SEQ ID NO: 71613 - DNA, 22 bp, Homo sapiens
tggtttatttgtgagacattct

SEQ ID NO: 71614 - DNA, 24 bp, Homo sapiens
actgttgtctacaaattaataaag

SEQ ID NO: 71615 - DNA, 18 bp, Homo sapiens
agttccagtgctgtacac

SEQ ID NO: 71616 - DNA, 24 bp, Homo sapiens
ctaaaattagggttctttttttct

SEQ ID NO: 71617 - DNA, 22 bp, Homo sapiens
acccccaagaatatcatctagt

SEQ ID NO: 71618 - DNA, 23 bp, Homo sapiens
ccttagaaactctgcaaattatc

SEQ ID NO: 71619 - DNA, 17 bp, Homo sapiens
caacacctggtgcacca

SEQ ID NO: 71620 - DNA, 21 bp, Homo sapiens
tgagtcacacaagaagtgtac

SEQ ID NO: 71621 - DNA, 24 bp, Homo sapiens
ctttcataatatgttattaaaccc

SEQ ID NO: 71622 - DNA, 21 bp, Homo sapiens
cataatcaccttctgttcagc

SEQ ID NO: 71623 - DNA, 24 bp, Homo sapiens
acacttaaaattaagagcacatat

SEQ ID NO: 71624 - DNA, 19 bp, Homo sapiens
acaacagaaatttgtggtg

SEQ ID NO: 71625 - DNA, 21 bp, Homo sapiens
gggataatgaagtaacacaaa

SEQ ID NO: 71626 - DNA, 22 bp, Homo sapiens
ctggagtcatgaagagttagac

SEQ ID NO: 71627 - DNA, 16 bp, Homo sapiens
ctgcttcacctgccac

SEQ ID NO: 71628 - DNA, 22 bp, Homo sapiens
tttagtgatacctaacttgtca

SEQ ID NO: 71629 - DNA, 16 bp, Homo sapiens
aggcagtagcaaggtc

SEQ ID NO: 71630 - DNA, 22 bp, Homo sapiens
tcatgatttggttgtttgtcat

SEQ ID NO: 71631 - DNA, 23 bp, Homo sapiens
agaagatcatttactaacttacc

SEQ ID NO: 71632 - DNA, 19 bp, Homo sapiens
atgttttggaggagtggca

SEQ ID NO: 71633 - DNA, 18 bp, Homo sapiens
gagtgttgctgaggtctc

SEQ ID NO: 71634 - DNA, 20 bp, Homo sapiens
tggttgatagagtggtagac

SEQ ID NO: 71635 - DNA, 23 bp, Homo sapiens
acagtagtaaaagagtttaacac

SEQ ID NO: 71636 - DNA, 19 bp, Homo sapiens
gaaaaacacaagggagagg

SEQ ID NO: 71637 - DNA, 20 bp, Homo sapiens
agagtgaaatcctccaaagc

SEQ ID NO: 71638 - DNA, 19 bp, Homo sapiens
tgtcatctttcagttaaag

SEQ ID NO: 71639 - DNA, 21 bp, Homo sapiens
gtgccagtaactctgtgtagt

SEQ ID NO: 71640 - DNA, 23 bp, Homo sapiens
agcattgtttttctacaattgcc

SEQ ID NO: 71641 - DNA, 20 bp, Homo sapiens
tcagtagtctgactcatacc

SEQ ID NO: 71642 - DNA, 20 bp, Homo sapiens
gtttcagaacaccgaaaagc

SEQ ID NO: 71643 - DNA, 23 bp, Homo sapiens
ctgtactggttattttttcatgc

SEQ ID NO: 71644 - DNA, 19 bp, Homo sapiens
ttattttcgctgtcgtgac

SEQ ID NO: 71645 - DNA, 19 bp, Homo sapiens
tgtaggtcaaggaaggaag

SEQ ID NO: 71646 - DNA, 23 bp, Homo sapiens
atttcctttcagaacactcaaag

SEQ ID NO: 71647 - DNA, 18 bp, Homo sapiens
ccatccactatcactagt

SEQ ID NO: 71648 - DNA, 24 bp, Homo sapiens
ggggatgatatagtaaataagaca

SEQ ID NO: 71649 - DNA, 19 bp, Homo sapiens
aggccatttaataaccgag

SEQ ID NO: 71650 - DNA, 22 bp, Homo sapiens
cttggagagagagagcattttt

SEQ ID NO: 71651 - DNA, 24 bp, Homo sapiens
tcttcactagttaatacttacagc

SEQ ID NO: 71652 - DNA, 22 bp, Homo sapiens
tctgtatttaggttcgactagt

SEQ ID NO: 71653 - DNA, 24 bp, Homo sapiens
acgctattttgacatttctagaca

SEQ ID NO: 71654 - DNA, 18 bp, Homo sapiens
tgacctgtctcttcgtac

SEQ ID NO: 71655 - DNA, 22 bp, Homo sapiens
aaccaaacgtaactttactcaa

SEQ ID NO: 71656 - DNA, 21 bp, Homo sapiens
tgcaaataatcacagattagc

SEQ ID NO: 71657 - DNA, 20 bp, Homo sapiens
ctttgttgtcatctgattgg

SEQ ID NO: 71658 - DNA, 18 bp, Homo sapiens
catgccaccatgtctggt

SEQ ID NO: 71659 - DNA, 19 bp, Homo sapiens
ggccagactggtctacttg

SEQ ID NO: 71660 - DNA, 23 bp, Homo sapiens
tgaagcgtatagtactcaatgag

SEQ ID NO: 71661 - DNA, 26 bp, Homo sapiens
ttttgtttttgtaggtaattttaacc

SEQ ID NO: 71662 - DNA, 19 bp, Homo sapiens
cggtactgtgcttagtgct

SEQ ID NO: 71663 - DNA, 20 bp, Homo sapiens
tgcttgttcctgcattaggt

SEQ ID NO: 71664 - DNA, 18 bp, Homo sapiens
agccgtattgtagcagca

SEQ ID NO: 71665 - DNA, 24 bp, Homo sapiens
tttttgaaagcaagtatactttcg

SEQ ID NO: 71666 - DNA, 24 bp, Homo sapiens
aacccaatattcggagttattaac

SEQ ID NO: 71667 - DNA, 22 bp, Homo sapiens
gcgttctgagaaatgtataacc

SEQ ID NO: 71668 - DNA, 19 bp, Homo sapiens
tccacaggactagctctaa

SEQ ID NO: 71669 - DNA, 24 bp, Homo sapiens
tttttactctcaggggaaagttgg

SEQ ID NO: 71670 - DNA, 21 bp, Homo sapiens
ttgctctaggtgatatcagac

SEQ ID NO: 71671 - DNA, 16 bp, Homo sapiens
ctggctgggtgacttg

SEQ ID NO: 71672 - DNA, 23 bp, Homo sapiens
ttttgtgttcttagagaaaaaat

SEQ ID NO: 71673 - DNA, 22 bp, Homo sapiens
atatcaaaatcccactctaatc

SEQ ID NO: 71674 - DNA, 23 bp, Homo sapiens
tgagtttggtcatctgaactttt

SEQ ID NO: 71675 - DNA, 19 bp, Homo sapiens
agttgacagaagcaagttg

SEQ ID NO: 71676 - DNA, 21 bp, Homo sapiens
ttctttaagcaggttggcaac

SEQ ID NO: 71677 - DNA, 18 bp, Homo sapiens
ttttggggacaatgttct

SEQ ID NO: 71678 - DNA, 23 bp, Homo sapiens
gtactgtttcaaatcaaagtcag

SEQ ID NO: 71679 - DNA, 21 bp, Homo sapiens
acaacagtatctctaaatccc

SEQ ID NO: 71680 - DNA, 16 bp, Homo sapiens
tgaccgtttccgggtg

SEQ ID NO: 71681 - DNA, 28 bp, Homo sapiens
ttacttaaaaatatttctaagatcagtc

SEQ ID NO: 71682 - DNA, 27 bp, Homo sapiens
attgatttcacaacatcaataaatttg

SEQ ID NO: 71683 - DNA, 21 bp, Homo sapiens
ttttatctttcagcctcaggg

SEQ ID NO: 71684 - DNA, 23 bp, Homo sapiens
tcattcatgccatagtgtgttta

SEQ ID NO: 71685 - DNA, 20 bp, Homo sapiens
agaaggttccttgagcaccc

SEQ ID NO: 71686 - DNA, 23 bp, Homo sapiens
actttcacagaatcatatttagg

SEQ ID NO: 71687 - DNA, 23 bp, Homo sapiens
ccaaaaataaaggcatgtttcct

SEQ ID NO: 71688 - DNA, 21 bp, Homo sapiens
aacatttacatttctgaacat

SEQ ID NO: 71689 - DNA, 20 bp, Homo sapiens
actggaactgggaaaaactc

SEQ ID NO: 71690 - DNA, 23 bp, Homo sapiens
acaaattattacttacaacagag

SEQ ID NO: 71691 - DNA, 21 bp, Homo sapiens
gaagaaagtaaaattgatgac

SEQ ID NO: 71692 - DNA, 30 bp, Homo sapiens
gcttgagagttaagtattattacttaaaac

SEQ ID NO: 71693 - DNA, 20 bp, Homo sapiens
ccagagaagtgaaagctgag

SEQ ID NO: 71694 - DNA, 29 bp, Homo sapiens
gatggtttaaagttctttatttctatttc

SEQ ID NO: 71695 - DNA, 21 bp, Homo sapiens
caattcagattgcattttagc

SEQ ID NO: 71696 - DNA, 20 bp, Homo sapiens
acattaccatcaatgtcatc

SEQ ID NO: 71697 - DNA, 21 bp, Homo sapiens
acagatgaagaaaaaaatgac

SEQ ID NO: 71698 - DNA, 21 bp, Homo sapiens
tgtatctatgcaatcctcagc

SEQ ID NO: 71699 - DNA, 22 bp, Homo sapiens
ttgaaacagaagcagaagatga

SEQ ID NO: 71700 - DNA, 19 bp, Homo sapiens
tttcaaaaaggtctttagc

SEQ ID NO: 71701 - DNA, 22 bp, Homo sapiens
ggatccagacattgaattgtct

SEQ ID NO: 71702 - DNA, 22 bp, Homo sapiens
ttcctctatcagtttcagctag

SEQ ID NO: 71703 - DNA, 21 bp, Homo sapiens
gccacccttactagaaaaaat

SEQ ID NO: 71704 - DNA, 26 bp, Homo sapiens
agttcaggtgtaaaatagatagattc

SEQ ID NO: 71705 - DNA, 17 bp, Homo sapiens
cgtttggatcatgccct

SEQ ID NO: 71706 - DNA, 22 bp, Homo sapiens
tggactgtttatcttcttcact

SEQ ID NO: 71707 - DNA, 22 bp, Homo sapiens
ggaaagtaaaactgttttgccc

SEQ ID NO: 71708 - DNA, 23 bp, Homo sapiens
gaacagagcggatgttcagaatg

SEQ ID NO: 71709 - DNA, 18 bp, Homo sapiens
ctcgggtcatcagagaat

SEQ ID NO: 71710 - DNA, 18 bp, Homo sapiens
tggtttctgattgagggc

SEQ ID NO: 71711 - DNA, 22 bp, Homo sapiens
agctggtcaagctttaattctt

SEQ ID NO: 71712 - DNA, 21 bp, Homo sapiens
acatttatcagtgaagggcaa

SEQ ID NO: 71713 - DNA, 24 bp, Homo sapiens
aaagcagaaaaaattgtgatttcc

SEQ ID NO: 71714 - DNA, 24 bp, Homo sapiens
acggggaggactagaggcactatt

SEQ ID NO: 71715 - DNA, 24 bp, Homo sapiens
aatctcttaaattcttgtattctt

SEQ ID NO: 71716 - DNA, 23 bp, Homo sapiens
ttttaccagtaaaatactgtccc

SEQ ID NO: 71717 - DNA, 29 bp, Homo sapiens
tatttaggtatttctaataaataattatt

SEQ ID NO: 71718 - DNA, 17 bp, Homo sapiens
agttgggcttgtggatc

SEQ ID NO: 71719 - DNA, 24 bp, Homo sapiens
ccaagatgaaaatccactagtatt

SEQ ID NO: 71720 - DNA, 21 bp, Homo sapiens
ttccaggaatactggatcatc

SEQ ID NO: 71721 - DNA, 21 bp, Homo sapiens
tccagaaaggagaaaagtatg

SEQ ID NO: 71722 - DNA, 24 bp, Homo sapiens
tacaccatactgtttcactatttt

SEQ ID NO: 71723 - DNA, 21 bp, Homo sapiens
tgtccaggaactacagtgtcc

SEQ ID NO: 71724 - DNA, 21 bp, Homo sapiens
tctatacccaaataaatatca

SEQ ID NO: 71725 - DNA, 19 bp, Homo sapiens
tggaagcagcaagtcatct

SEQ ID NO: 71726 - DNA, 20 bp, Homo sapiens
tgggaagaacttttcatact

SEQ ID NO: 71727 - DNA, 19 bp, Homo sapiens
acaggacaatgagtctaca

SEQ ID NO: 71728 - DNA, 22 bp, Homo sapiens
gaggtgaatttttggtaataat

SEQ ID NO: 71729 - DNA, 21 bp, Homo sapiens
gctgaattttccaaaaagcat

SEQ ID NO: 71730 - DNA, 21 bp, Homo sapiens
tccacaaaattttctggtgat

SEQ ID NO: 71731 - DNA, 16 bp, Homo sapiens
gcagcagattcagcac

SEQ ID NO: 71732 - DNA, 21 bp, Homo sapiens
actgtactttaaagaggtcac

SEQ ID NO: 71733 - DNA, 29 bp, Homo sapiens
attttaataactaagtaaccaaattttcc

SEQ ID NO: 71734 - DNA, 23 bp, Homo sapiens
atggatacattaagaactttttg

SEQ ID NO: 71735 - DNA, 24 bp, Homo sapiens
tcaaaatacaaattaggttacttc

SEQ ID NO: 71736 - DNA, 20 bp, Homo sapiens
tcaaaggttgaatggtgctg

SEQ ID NO: 71737 - DNA, 21 bp, Homo sapiens
atgtagtaaaattgctgaatt

SEQ ID NO: 71738 - DNA, 23 bp, Homo sapiens
taacccaagtcgctatatatctg

SEQ ID NO: 71739 - DNA, 22 bp, Homo sapiens
atctgctgtgaaatactgtgct

SEQ ID NO: 71740 - DNA, 19 bp, Homo sapiens
gacacagaaatgattgggg

SEQ ID NO: 71741 - DNA, 23 bp, Homo sapiens
agagctcatgttatgtgtttttc

SEQ ID NO: 71742 - DNA, 23 bp, Homo sapiens
actggaaaactggatttatttcc

SEQ ID NO: 71743 - DNA, 22 bp, Homo sapiens
tactctaagcccagctgagatc

SEQ ID NO: 71744 - DNA, 22 bp, Homo sapiens
caaattgtttaaaggaatctat

SEQ ID NO: 71745 - DNA, 20 bp, Homo sapiens
ctagaataagagctccccaa

SEQ ID NO: 71746 - DNA, 19 bp, Homo sapiens
acatctagtttgttacatt

SEQ ID NO: 71747 - DNA, 17 bp, Homo sapiens
gccttaaaccaggccct

SEQ ID NO: 71748 - DNA, 22 bp, Homo sapiens
gaatacataccagttcctatgg

SEQ ID NO: 71749 - DNA, 21 bp, Homo sapiens
ccaccattcaaaattgagagg

SEQ ID NO: 71750 - DNA, 21 bp, Homo sapiens
agtaaagtagcaagactagat

SEQ ID NO: 71751 - DNA, 30 bp, Homo sapiens
ttaattatctactaattttttaaatatatt

SEQ ID NO: 71752 - DNA, 17 bp, Homo sapiens
cttacctaccaagggcc

SEQ ID NO: 71753 - DNA, 23 bp, Homo sapiens
aaaaatatgtatattcaaactgt

SEQ ID NO: 71754 - DNA, 18 bp, Homo sapiens
cggccaggtagaagacct

SEQ ID NO: 71755 - DNA, 23 bp, Homo sapiens
aaaactattttaaatgaaacgaa

SEQ ID NO: 71756 - DNA, 21 bp, Homo sapiens
tccttttccaaatgtgaaaga

SEQ ID NO: 71757 - DNA, 24 bp, Homo sapiens
tgcagggttaccataaaccttcaa

SEQ ID NO: 71758 - DNA, 18 bp, Homo sapiens
gtgagggtctggatttct

SEQ ID NO: 71759 - DNA, 23 bp, Homo sapiens
atgagggatccctgcaattaact

SEQ ID NO: 71760 - DNA, 18 bp, Homo sapiens
atgcttttttctgttgtt

SEQ ID NO: 71761 - DNA, 21 bp, Homo sapiens
ttgatggcctacctgtagatc

SEQ ID NO: 71762 - DNA, 26 bp, Homo sapiens
tgtaattactataattataaatcagg

SEQ ID NO: 71763 - DNA, 17 bp, Homo sapiens
acgggcattgtcatctg

SEQ ID NO: 71764 - DNA, 24 bp, Homo sapiens
tgaacttttaaaactttatctcat

SEQ ID NO: 71765 - DNA, 19 bp, Homo sapiens
ccaggagagctccatctta

SEQ ID NO: 71766 - DNA, 21 bp, Homo sapiens
tgacgcaatcaaatacaaagg

SEQ ID NO: 71767 - DNA, 23 bp, Homo sapiens
cccaatttattttcttttcactc

SEQ ID NO: 71768 - DNA, 18 bp, Homo sapiens
tgtagaaccacagggagg

SEQ ID NO: 71769 - DNA, 22 bp, Homo sapiens
aaaattataattgtaccttctt

SEQ ID NO: 71770 - DNA, 22 bp, Homo sapiens
aattaaaagaacgttggctctc

SEQ ID NO: 71771 - DNA, 20 bp, Homo sapiens
tttccagttacctttctctc

SEQ ID NO: 71772 - DNA, 22 bp, Homo sapiens
gtttgtttagctagacacacaa

SEQ ID NO: 71773 - DNA, 21 bp, Homo sapiens
tcatcaaaatttgttttttct

SEQ ID NO: 71774 - DNA, 22 bp, Homo sapiens
acagagagattaatatacttgc

SEQ ID NO: 71775 - DNA, 23 bp, Homo sapiens
caactccagattatgccataaac

SEQ ID NO: 71776 - DNA, 20 bp, Homo sapiens
accccataacagctctatga

SEQ ID NO: 71777 - DNA, 16 bp, Homo sapiens
tgccatcttacaaggt

SEQ ID NO: 71778 - DNA, 23 bp, Homo sapiens
tgtgatgtttagaaaactatagt

SEQ ID NO: 71779 - DNA, 16 bp, Homo sapiens
gtgggagcacttttgt

SEQ ID NO: 71780 - DNA, 25 bp, Homo sapiens
tgtggtaattttaaaattagcatgc

SEQ ID NO: 71781 - DNA, 18 bp, Homo sapiens
caagggtcggaatctctg

SEQ ID NO: 71782 - DNA, 24 bp, Homo sapiens
gcaaaagaaacaataaatattccc

SEQ ID NO: 71783 - DNA, 22 bp, Homo sapiens
caggcataactctaataatgac

SEQ ID NO: 71784 - DNA, 18 bp, Homo sapiens
gtctggcacacagataac

SEQ ID NO: 71785 - DNA, 21 bp, Homo sapiens
ttgttgcttgatcttttatgt

SEQ ID NO: 71786 - DNA, 19 bp, Homo sapiens
ttctggaaggtagcacaga

SEQ ID NO: 71787 - DNA, 24 bp, Homo sapiens
ctgtatacagttaattgaaggtaa

SEQ ID NO: 71788 - DNA, 22 bp, Homo sapiens
ccagctggaggctaatcatatc

SEQ ID NO: 71789 - DNA, 23 bp, Homo sapiens
actggaatgttgaatttcctacc

SEQ ID NO: 71790 - DNA, 22 bp, Homo sapiens
tctggtacattatcaccaatga

SEQ ID NO: 71791 - DNA, 23 bp, Homo sapiens
ttgtttacatagttatattgaag

SEQ ID NO: 71792 - DNA, 21 bp, Homo sapiens
tgttttcttttaggccttttc

SEQ ID NO: 71793 - DNA, 27 bp, Homo sapiens
actaacctgtgaatttttaatgatatg

SEQ ID NO: 71794 - DNA, 16 bp, Homo sapiens
aggtgtgagccacttt

SEQ ID NO: 71795 - DNA, 24 bp, Homo sapiens
acaccaagttctgacgaaaaggat

SEQ ID NO: 71796 - DNA, 19 bp, Homo sapiens
gctggtctcagactcctag

SEQ ID NO: 71797 - DNA, 22 bp, Homo sapiens
gagctgagattgcaccactgca

SEQ ID NO: 71798 - DNA, 18 bp, Homo sapiens
acagaaaactgcagttca

SEQ ID NO: 71799 - DNA, 21 bp, Homo sapiens
acaacaacaacaaacaactat

SEQ ID NO: 71800 - DNA, 23 bp, Homo sapiens
aatcagattgatatttcagacaa

SEQ ID NO: 71801 - DNA, 23 bp, Homo sapiens
tactgagcaagaagacaaaattt

SEQ ID NO: 71802 - DNA, 21 bp, Homo sapiens
ttgcatctagatttgcagatg

SEQ ID NO: 71803 - DNA, 21 bp, Homo sapiens
gcaccaaaagtttagcacatg

SEQ ID NO: 71804 - DNA, 19 bp, Homo sapiens
attgtatgtagctgggtca

SEQ ID NO: 71805 - DNA, 22 bp, Homo sapiens
tagaaccaacaacccatttttg

SEQ ID NO: 71806 - DNA, 24 bp, Homo sapiens
ggagaatgttatttttgaatggga

SEQ ID NO: 71807 - DNA, 25 bp, Homo sapiens
tctgttgaatcgcaattttataatc

SEQ ID NO: 71808 - DNA, 22 bp, Homo sapiens
tggtacttgactatctttttag

SEQ ID NO: 71809 - DNA, 28 bp, Homo sapiens
atataataatatctataacacttgtttt

SEQ ID NO: 71810 - DNA, 22 bp, Homo sapiens
gagaagtacctgttattagtgc

SEQ ID NO: 71811 - DNA, 20 bp, Homo sapiens
ttaaacacatgctagcatcc

SEQ ID NO: 71812 - DNA, 22 bp, Homo sapiens
ggacatttttctgctgttcttc

SEQ ID NO: 71813 - DNA, 25 bp, Homo sapiens
ttatcttcacttacctgctattttg

SEQ ID NO: 71814 - DNA, 18 bp, Homo sapiens
tccaattccctcccaacc

SEQ ID NO: 71815 - DNA, 21 bp, Homo sapiens
gcattatttgagttgatgcac

SEQ ID NO: 71816 - DNA, 22 bp, Homo sapiens
tgttcacctaaaatttcaatgc

SEQ ID NO: 71817 - DNA, 21 bp, Homo sapiens
tggtgagattttttcctcttt

SEQ ID NO: 71818 - DNA, 22 bp, Homo sapiens
actggggatgaaatttcaatat

SEQ ID NO: 71819 - DNA, 24 bp, Homo sapiens
tcacttaaagattatcaaatttag

SEQ ID NO: 71820 - DNA, 22 bp, Homo sapiens
atatggagtggaaatgaaatgc

SEQ ID NO: 71821 - DNA, 19 bp, Homo sapiens
ctgggttactcactagatt

SEQ ID NO: 71822 - DNA, 20 bp, Homo sapiens
ggttagaagcaaacgctgaa

SEQ ID NO: 71823 - DNA, 24 bp, Homo sapiens
aatacgtttcacaggtagaaaaaa

SEQ ID NO: 71824 - DNA, 21 bp, Homo sapiens
gctgaaatagtgtgtgtaagg

SEQ ID NO: 71825 - DNA, 23 bp, Homo sapiens
ggtgatacccattttgtgtaaag

SEQ ID NO: 71826 - DNA, 26 bp, Homo sapiens
cctaagaatgtcaagatatacagatc

SEQ ID NO: 71827 - DNA, 21 bp, Homo sapiens
tcataatctctttctacaaga

SEQ ID NO: 71828 - DNA, 21 bp, Homo sapiens
tgcaatatgagacatgaatgc

SEQ ID NO: 71829 - DNA, 20 bp, Homo sapiens
tgctgtagcctcattaagta

SEQ ID NO: 71830 - DNA, 19 bp, Homo sapiens
taaagcttaactggcaagg

SEQ ID NO: 71831 - DNA, 23 bp, Homo sapiens
ggatgaactagatagtatggtca

SEQ ID NO: 71832 - DNA, 22 bp, Homo sapiens
actaactttaaatactctggca

SEQ ID NO: 71833 - DNA, 17 bp, Homo sapiens
gctcgggaatcagcaag

SEQ ID NO: 71834 - DNA, 22 bp, Homo sapiens
acactaatagacaaatcttctt

SEQ ID NO: 71835 - DNA, 23 bp, Homo sapiens
ggatttaaatctgaaagaacagg

SEQ ID NO: 71836 - DNA, 26 bp, Homo sapiens
ggttcatgatctttcttccttatatt

SEQ ID NO: 71837 - DNA, 22 bp, Homo sapiens
gcctgctgttgttaaatctatt

SEQ ID NO: 71838 - DNA, 21 bp, Homo sapiens
gaagctgaacttctgttacac

SEQ ID NO: 71839 - DNA, 24 bp, Homo sapiens
ttatgtaattgcatttgcaatatt

SEQ ID NO: 71840 - DNA, 23 bp, Homo sapiens
tgagcttcatctaaaatgacaac

SEQ ID NO: 71841 - DNA, 17 bp, Homo sapiens
tggttggccatagtgct

SEQ ID NO: 71842 - DNA, 19 bp, Homo sapiens
aactatcttctagatgcac

SEQ ID NO: 71843 - DNA, 22 bp, Homo sapiens
actctaatatgtttacacaaat

SEQ ID NO: 71844 - DNA, 19 bp, Homo sapiens
tgtccatattacacagccc

SEQ ID NO: 71845 - DNA, 24 bp, Homo sapiens
aagcttttacattcaacatttaca

SEQ ID NO: 71846 - DNA, 17 bp, Homo sapiens
gtgcaaagcctgggata

SEQ ID NO: 71847 - DNA, 21 bp, Homo sapiens
actcacactttcccttatttg

SEQ ID NO: 71848 - DNA, 23 bp, Homo sapiens
cctgctatttttatcatggagtt

SEQ ID NO: 71849 - DNA, 23 bp, Homo sapiens
gtcagcatcttgtattagttctc

SEQ ID NO: 71850 - DNA, 23 bp, Homo sapiens
ccttctatgctaatattggttca

SEQ ID NO: 71851 - DNA, 20 bp, Homo sapiens
ccaggctgacaagttcttct

SEQ ID NO: 71852 - DNA, 17 bp, Homo sapiens
agccttgtggctttaat

SEQ ID NO: 71853 - DNA, 24 bp, Homo sapiens
taatgtgtgctgatcactaatttt

SEQ ID NO: 71854 - DNA, 21 bp, Homo sapiens
tgtagctatggtattgtctca

SEQ ID NO: 71855 - DNA, 20 bp, Homo sapiens
gtgcatggaattgctagatg

SEQ ID NO: 71856 - DNA, 22 bp, Homo sapiens
aaaagatatcaatactagcagt

SEQ ID NO: 71857 - DNA, 19 bp, Homo sapiens
gcagggatcatacttgtgt

SEQ ID NO: 71858 - DNA, 22 bp, Homo sapiens
acatataaaacacatactgagt

SEQ ID NO: 71859 - DNA, 20 bp, Homo sapiens
agattactagagagctccgg

SEQ ID NO: 71860 - DNA, 24 bp, Homo sapiens
acacaaaataactttactcacgtt

SEQ ID NO: 71861 - DNA, 22 bp, Homo sapiens
catacagggaaatccaagatac

SEQ ID NO: 71862 - DNA, 18 bp, Homo sapiens
gttaccgactacctcagg

SEQ ID NO: 71863 - DNA, 24 bp, Homo sapiens
gctgttgttctactaaacaaggaa

SEQ ID NO: 71864 - DNA, 24 bp, Homo sapiens
cattggaacccctgaatatgccgt

SEQ ID NO: 71865 - DNA, 24 bp, Homo sapiens
ggtagtttagatattagttatcgt

SEQ ID NO: 71866 - DNA, 21 bp, Homo sapiens
tgtcccaaaatatattttggg

SEQ ID NO: 71867 - DNA, 23 bp, Homo sapiens
tgtgattcattacttacaggttc

SEQ ID NO: 71868 - DNA, 21 bp, Homo sapiens
tcgatgactcttgactgtttc

SEQ ID NO: 71869 - DNA, 22 bp, Homo sapiens
tttttctttaatggcaagtttt

SEQ ID NO: 71870 - DNA, 17 bp, Homo sapiens
tccttttcgccacagaa

SEQ ID NO: 71871 - DNA, 24 bp, Homo sapiens
aacagagatgtgacagcattgagg

SEQ ID NO: 71872 - DNA, 19 bp, Homo sapiens
tggatgcaaaagttgattc

SEQ ID NO: 71873 - DNA, 22 bp, Homo sapiens
tcctcttttgtcaaaaattggt

SEQ ID NO: 71874 - DNA, 22 bp, Homo sapiens
ttcattttggttctgtgtttac

SEQ ID NO: 71875 - DNA, 21 bp, Homo sapiens
tggcattaatacatactttct

SEQ ID NO: 71876 - DNA, 20 bp, Homo sapiens
agagctgttttggcctttga

SEQ ID NO: 71877 - DNA, 24 bp, Homo sapiens
agagttgagttttacagtctttcc

SEQ ID NO: 71878 - DNA, 22 bp, Homo sapiens
atttcttttattattgcctgtt

SEQ ID NO: 71879 - DNA, 23 bp, Homo sapiens
ccaaagcaatgacgttttctaat

SEQ ID NO: 71880 - DNA, 22 bp, Homo sapiens
agtaactctacaaaatgaaatt

SEQ ID NO: 71881 - DNA, 24 bp, Homo sapiens
gcatccatatacagagatgaaaat

SEQ ID NO: 71882 - DNA, 20 bp, Homo sapiens
tccacaagtgcattaaaaac

SEQ ID NO: 71883 - DNA, 18 bp, Homo sapiens
ctcccctgaaaaaaccac

SEQ ID NO: 71884 - DNA, 23 bp, Homo sapiens
tgggttatttactgccaataaac

SEQ ID NO: 71885 - DNA, 21 bp, Homo sapiens
cttctagaaaaattgcctacc

SEQ ID NO: 71886 - DNA, 24 bp, Homo sapiens
ttcttttcttctctacttgaaaat

SEQ ID NO: 71887 - DNA, 24 bp, Homo sapiens
aagtttcatgttttagattatggt

SEQ ID NO: 71888 - DNA, 18 bp, Homo sapiens
actttgcagccagagtgg

SEQ ID NO: 71889 - DNA, 18 bp, Homo sapiens
ggcacttcatcaacttgt

SEQ ID NO: 71890 - DNA, 24 bp, Homo sapiens
ttttaaaatcattccagagaaact

SEQ ID NO: 71891 - DNA, 20 bp, Homo sapiens
acaatgacatgaaccaagga

SEQ ID NO: 71892 - DNA, 20 bp, Homo sapiens
ttagggcttataacagtaat

SEQ ID NO: 71893 - DNA, 23 bp, Homo sapiens
gtgaaaaagctgaagtacaattg

SEQ ID NO: 71894 - DNA, 23 bp, Homo sapiens
caggcaaaatataaattaccttg

SEQ ID NO: 71895 - DNA, 30 bp, Homo sapiens
attagatatattataaatagatgttctttc

SEQ ID NO: 71896 - DNA, 22 bp, Homo sapiens
ggatagttgaaatgacgtgaag

SEQ ID NO: 71897 - DNA, 17 bp, Homo sapiens
ctcccaatcctgggtga

SEQ ID NO: 71898 - DNA, 21 bp, Homo sapiens
atggcatgcacaacaacatga

SEQ ID NO: 71899 - DNA, 18 bp, Homo sapiens
gtccaggtttgccaggta

SEQ ID NO: 71900 - DNA, 19 bp, Homo sapiens
tgctttagcatggcaacaa

SEQ ID NO: 71901 - DNA, 22 bp, Homo sapiens
tttcaaagaaacatctttaaac

SEQ ID NO: 71902 - DNA, 18 bp, Homo sapiens
agcaacattgtttgttgg

SEQ ID NO: 71903 - DNA, 29 bp, Homo sapiens
agtctggataaagaatactgtattatatt

SEQ ID NO: 71904 - DNA, 29 bp, Homo sapiens
aaagttaatatgtttattattttcattgg

SEQ ID NO: 71905 - DNA, 22 bp, Homo sapiens
agcaactacttaccactaagag

SEQ ID NO: 71906 - DNA, 20 bp, Homo sapiens
tctcacttttccttgctgtt

SEQ ID NO: 71907 - DNA, 23 bp, Homo sapiens
gctttttccacttcctgtgggac

SEQ ID NO: 71908 - DNA, 22 bp, Homo sapiens
aggaatacagtttggatttaac

SEQ ID NO: 71909 - DNA, 17 bp, Homo sapiens
tacccgtcacagcttgc

SEQ ID NO: 71910 - DNA, 22 bp, Homo sapiens
ttcttccaagtgaacccagaaa

SEQ ID NO: 71911 - DNA, 20 bp, Homo sapiens
gcactatgtcttcaatgtgg

SEQ ID NO: 71912 - DNA, 23 bp, Homo sapiens
atactcaatgtactttatgggtc

SEQ ID NO: 71913 - DNA, 20 bp, Homo sapiens
ggcgtgtctcaatatttgac

SEQ ID NO: 71914 - DNA, 21 bp, Homo sapiens
acagaattcatcatagcaagc

SEQ ID NO: 71915 - DNA, 18 bp, Homo sapiens
tgtttccagatttctccc

SEQ ID NO: 71916 - DNA, 22 bp, Homo sapiens
cccaccaattgtatattcagac

SEQ ID NO: 71917 - DNA, 23 bp, Homo sapiens
cgaaggcccactggccgattctt

SEQ ID NO: 71918 - DNA, 21 bp, Homo sapiens
ggagatctgggaggatgagac

SEQ ID NO: 71919 - DNA, 24 bp, Homo sapiens
cttcaaaatgttttgtcgcagttg

SEQ ID NO: 71920 - DNA, 24 bp, Homo sapiens
ttggttttccttttaaggtattac

SEQ ID NO: 71921 - DNA, 22 bp, Homo sapiens
acagttcaccaaagccagaccc

SEQ ID NO: 71922 - DNA, 23 bp, Homo sapiens
ttggtatgcttttcttttcaaca

SEQ ID NO: 71923 - DNA, 24 bp, Homo sapiens
ccggccttcatacatcgggagcac

SEQ ID NO: 71924 - DNA, 18 bp, Homo sapiens
gtgtacaggcacacctgc

SEQ ID NO: 71925 - DNA, 24 bp, Homo sapiens
acaggcaaactcatcgcttgcttt

SEQ ID NO: 71926 - DNA, 22 bp, Homo sapiens
ccactttaaagagcagctcagc

SEQ ID NO: 71927 - DNA, 16 bp, Homo sapiens
ctgagccccctcccac

SEQ ID NO: 71928 - DNA, 20 bp, Homo sapiens
gtggggaagaaattccatac

SEQ ID NO: 71929 - DNA, 22 bp, Homo sapiens
ctccaggctctggctcttggtt

SEQ ID NO: 71930 - DNA, 16 bp, Homo sapiens
ctggcaggtgtccacg

SEQ ID NO: 71931 - DNA, 26 bp, Homo sapiens
actcttacctataatttccctttttg

SEQ ID NO: 71932 - DNA, 22 bp, Homo sapiens
tgtctgctttaaaatgctaaac

SEQ ID NO: 71933 - DNA, 24 bp, Homo sapiens
aagctctgagccttcagcatcctc

SEQ ID NO: 71934 - DNA, 21 bp, Homo sapiens
tgtttggataccctgtcactt

SEQ ID NO: 71935 - DNA, 22 bp, Homo sapiens
aaccaactcactggcctggagc

SEQ ID NO: 71936 - DNA, 24 bp, Homo sapiens
ctgactctgggatgtggggctctg

SEQ ID NO: 71937 - DNA, 16 bp, Homo sapiens
cctggctccagaagag

SEQ ID NO: 71938 - DNA, 24 bp, Homo sapiens
gtttactgttcctcatcactagcg

SEQ ID NO: 71939 - DNA, 18 bp, Homo sapiens
agcagagggacaggaatc

SEQ ID NO: 71940 - DNA, 24 bp, Homo sapiens
tcatgaaaatgaaactccagatag

SEQ ID NO: 71941 - DNA, 22 bp, Homo sapiens
gacaacagtgtacctctaaatc

SEQ ID NO: 71942 - DNA, 21 bp, Homo sapiens
tgtcaggtaaagacactcact

SEQ ID NO: 71943 - DNA, 17 bp, Homo sapiens
tgtctcttcaggaggcc

SEQ ID NO: 71944 - DNA, 24 bp, Homo sapiens
cgtctgaacagtggccgaatgatt

SEQ ID NO: 71945 - DNA, 18 bp, Homo sapiens
tcttcagccactgttaac

SEQ ID NO: 71946 - DNA, 16 bp, Homo sapiens
aagcccccaaagcagc

SEQ ID NO: 71947 - DNA, 24 bp, Homo sapiens
agcttactcatccataagtaattc

SEQ ID NO: 71948 - DNA, 16 bp, Homo sapiens
acccaacacgctggct

SEQ ID NO: 71949 - DNA, 20 bp, Homo sapiens
gagaggccctccccattagc

SEQ ID NO: 71950 - DNA, 16 bp, Homo sapiens
cccccgcaccaccccc

SEQ ID NO: 71951 - DNA, 21 bp, Homo sapiens
acctaggacccttcacttcca

SEQ ID NO: 71952 - DNA, 16 bp, Homo sapiens
cccgctcgtctccagg

SEQ ID NO: 71953 - DNA, 22 bp, Homo sapiens
gacaggcctcctccagctgagc

SEQ ID NO: 71954 - DNA, 24 bp, Homo sapiens
ttttctctctgctcattccttgtt

SEQ ID NO: 71955 - DNA, 21 bp, Homo sapiens
ggtcctgggtgaacaggtggg

SEQ ID NO: 71956 - DNA, 22 bp, Homo sapiens
agacaagtttctattgaagtca

SEQ ID NO: 71957 - DNA, 16 bp, Homo sapiens
cggctggctcgttcgc

SEQ ID NO: 71958 - DNA, 18 bp, Homo sapiens
cccctgttcatgttatgg

SEQ ID NO: 71959 - DNA, 21 bp, Homo sapiens
ccttttttgtgctttgggcac

SEQ ID NO: 71960 - DNA, 24 bp, Homo sapiens
atttttgtggtctgctcagtccaa

SEQ ID NO: 71961 - DNA, 24 bp, Homo sapiens
ggaaggagacaggtcgcaggatgt

SEQ ID NO: 71962 - DNA, 17 bp, Homo sapiens
ccgcggactgcaaaaac

SEQ ID NO: 71963 - DNA, 16 bp, Homo sapiens
cagggaaggaggggcc

SEQ ID NO: 71964 - DNA, 21 bp, Homo sapiens
cgcggccgcggcggcggcaag

SEQ ID NO: 71965 - DNA, 19 bp, Homo sapiens
cagaggcagtaccttgccc

SEQ ID NO: 71966 - DNA, 22 bp, Homo sapiens
ctcactctccagcatccactgc

SEQ ID NO: 71967 - DNA, 19 bp, Homo sapiens
cccggagatttaaccgggt

SEQ ID NO: 71968 - DNA, 18 bp, Homo sapiens
gctgcagggccccagctc

SEQ ID NO: 71969 - DNA, 20 bp, Homo sapiens
tgcatgggtctttcgtgtca

SEQ ID NO: 71970 - DNA, 16 bp, Homo sapiens
gcctttcccattgcgt

SEQ ID NO: 71971 - DNA, 24 bp, Homo sapiens
acaggcatttagtttctaagaggg

SEQ ID NO: 71972 - DNA, 16 bp, Homo sapiens
ggaaaccatgcccagc

SEQ ID NO: 71973 - DNA, 16 bp, Homo sapiens
gtgcactctgccgccc

SEQ ID NO: 71974 - DNA, 16 bp, Homo sapiens
gcttctgccctggggg

SEQ ID NO: 71975 - DNA, 17 bp, Homo sapiens
cctgcccatggacctgg

SEQ ID NO: 71976 - DNA, 16 bp, Homo sapiens
tgccgtccccaagacc

SEQ ID NO: 71977 - DNA, 21 bp, Homo sapiens
gcacttacccaaactgctcgc

SEQ ID NO: 71978 - DNA, 17 bp, Homo sapiens
gcaaaggctttgtgacc

SEQ ID NO: 71979 - DNA, 24 bp, Homo sapiens
catttcgagtagcagtaatactcg

SEQ ID NO: 71980 - DNA, 16 bp, Homo sapiens
cgcccggtggcaagct

SEQ ID NO: 71981 - DNA, 19 bp, Homo sapiens
cctcgatctcctccttggt

SEQ ID NO: 71982 - DNA, 20 bp, Homo sapiens
tatagcccccgctcccgctc

SEQ ID NO: 71983 - DNA, 22 bp, Homo sapiens
gacatgcttcgtcgtctgcttg

SEQ ID NO: 71984 - DNA, 16 bp, Homo sapiens
acctgtccagggtcct

SEQ ID NO: 71985 - DNA, 22 bp, Homo sapiens
ccggcgaggcggccgcgggagg

SEQ ID NO: 71986 - DNA, 18 bp, Homo sapiens
cccctctccctactgccc

SEQ ID NO: 71987 - DNA, 24 bp, Homo sapiens
cgaatggtggtggtggtggtggtc

SEQ ID NO: 71988 - DNA, 24 bp, Homo sapiens
cctttcaggatgaagagagagagg

SEQ ID NO: 71989 - DNA, 18 bp, Homo sapiens
agccaggggtcttgagga

SEQ ID NO: 71990 - DNA, 16 bp, Homo sapiens
gggcctctggcccttc

SEQ ID NO: 71991 - DNA, 16 bp, Homo sapiens
cgtagctgccggaggg

SEQ ID NO: 71992 - DNA, 19 bp, Homo sapiens
gcgtggctgtgggcgtgca

SEQ ID NO: 71993 - DNA, 18 bp, Homo sapiens
tgagtgtgagctcggagc

SEQ ID NO: 71994 - DNA, 20 bp, Homo sapiens
atgcgcacacagcccacgcc

SEQ ID NO: 71995 - DNA, 16 bp, Homo sapiens
ggagttggagagccgc

SEQ ID NO: 71996 - DNA, 16 bp, Homo sapiens
gcacatgcgcacaccc

SEQ ID NO: 71997 - DNA, 24 bp, Homo sapiens
ggagatgacccccgtggaacccgc

SEQ ID NO: 71998 - DNA, 24 bp, Homo sapiens
acgagcgctcacgccgtggacgga

SEQ ID NO: 71999 - DNA, 19 bp, Homo sapiens
aacgtgcctcctccctttc

SEQ ID NO: 72000 - DNA, 16 bp, Homo sapiens
cgctcctccaggctgt

SEQ ID NO: 72001 - DNA, 16 bp, Homo sapiens
gtgcacagcgcctggt

SEQ ID NO: 72002 - DNA, 24 bp, Homo sapiens
tcgagatcagctcagctgcaaagg

SEQ ID NO: 72003 - DNA, 18 bp, Homo sapiens
taaaagtcccgagcagcc

SEQ ID NO: 72004 - DNA, 19 bp, Homo sapiens
tctctacctcatttcccgg

SEQ ID NO: 72005 - DNA, 24 bp, Homo sapiens
cttttctctccctttgccctaggg

SEQ ID NO: 72006 - DNA, 22 bp, Homo sapiens
gtgtgggcagtaagaaacagct

SEQ ID NO: 72007 - DNA, 21 bp, Homo sapiens
ccccattccaccacccatttc

SEQ ID NO: 72008 - DNA, 17 bp, Homo sapiens
agcctgtggattctgtc

SEQ ID NO: 72009 - DNA, 24 bp, Homo sapiens
ctcctcactccagactgtactcac

SEQ ID NO: 72010 - DNA, 19 bp, Homo sapiens
cggcgggatctcaagatgg

SEQ ID NO: 72011 - DNA, 24 bp, Homo sapiens
cacactgcgatgcatttctctctg

SEQ ID NO: 72012 - DNA, 23 bp, Homo sapiens
gtccttccctgtgggagcaccga

SEQ ID NO: 72013 - DNA, 23 bp, Homo sapiens
gacggatgattccatgtccatga

SEQ ID NO: 72014 - DNA, 22 bp, Homo sapiens
ctgatgtccatacatgcacagg

SEQ ID NO: 72015 - DNA, 23 bp, Homo sapiens
aggttctggctatgtctttgcac

SEQ ID NO: 72016 - DNA, 20 bp, Homo sapiens
ctggctaagtgctcaggtgg

SEQ ID NO: 72017 - DNA, 20 bp, Homo sapiens
actttgcccataggtccttc

SEQ ID NO: 72018 - DNA, 23 bp, Homo sapiens
gatactcacacactgctgtccgt

SEQ ID NO: 72019 - DNA, 22 bp, Homo sapiens
gtcctggggtcacctgattacc

SEQ ID NO: 72020 - DNA, 23 bp, Homo sapiens
tatctcactgtcgttggcgctgg

SEQ ID NO: 72021 - DNA, 16 bp, Homo sapiens
gcaactggacctgggc

SEQ ID NO: 72022 - DNA, 23 bp, Homo sapiens
gattaacaggatcgctcctcttg

SEQ ID NO: 72023 - DNA, 24 bp, Homo sapiens
caacaaaaagcaagatcaaaaagg

SEQ ID NO: 72024 - DNA, 18 bp, Homo sapiens
ccagcaaaactctgaggg

SEQ ID NO: 72025 - DNA, 19 bp, Homo sapiens
gtctctgcagcacacccat

SEQ ID NO: 72026 - DNA, 20 bp, Homo sapiens
gaagaagaggagtggacttg

SEQ ID NO: 72027 - DNA, 23 bp, Homo sapiens
cacagcatcagcccacccgcccc

SEQ ID NO: 72028 - DNA, 18 bp, Homo sapiens
gagtaatgggggactcgg

SEQ ID NO: 72029 - DNA, 20 bp, Homo sapiens
gacctcacactcgccgtggc

SEQ ID NO: 72030 - DNA, 24 bp, Homo sapiens
ccagatgtttttgacttctgatat

SEQ ID NO: 72031 - DNA, 23 bp, Homo sapiens
cgaaagtttgcacttgaagtcgg

SEQ ID NO: 72032 - DNA, 22 bp, Homo sapiens
catgtttgaccaggcgcagacc

SEQ ID NO: 72033 - DNA, 23 bp, Homo sapiens
atagccacacacgacctttaggc

SEQ ID NO: 72034 - DNA, 19 bp, Homo sapiens
gaagcctgccaccaagacc

SEQ ID NO: 72035 - DNA, 19 bp, Homo sapiens
actcctcacatattcgagg

SEQ ID NO: 72036 - DNA, 19 bp, Homo sapiens
agtagccaaagcgatctac

SEQ ID NO: 72037 - DNA, 22 bp, Homo sapiens
tcctccatcaccgactggatct

SEQ ID NO: 72038 - DNA, 18 bp, Homo sapiens
tggtttgcctgcaatgga

SEQ ID NO: 72039 - DNA, 23 bp, Homo sapiens
ctgcttcttgatgccatctctta

SEQ ID NO: 72040 - DNA, 18 bp, Homo sapiens
gacggtgcttacctgttc

SEQ ID NO: 72041 - DNA, 21 bp, Homo sapiens
tgctgttgttctcaatgtacc

SEQ ID NO: 72042 - DNA, 19 bp, Homo sapiens
ctccggattcccctctgac

SEQ ID NO: 72043 - DNA, 19 bp, Homo sapiens
caggttcatctgcctgaat

SEQ ID NO: 72044 - DNA, 20 bp, Homo sapiens
ctgtctcttccaacaccagg

SEQ ID NO: 72045 - DNA, 23 bp, Homo sapiens
catttctccctctccaggaaagt

SEQ ID NO: 72046 - DNA, 16 bp, Homo sapiens
ggagaccccaccgtgt

SEQ ID NO: 72047 - DNA, 18 bp, Homo sapiens
gtaaggacttggtccacc

SEQ ID NO: 72048 - DNA, 16 bp, Homo sapiens
gaccccagcagcagct

SEQ ID NO: 72049 - DNA, 19 bp, Homo sapiens
caacccatcttcgttccgc

SEQ ID NO: 72050 - DNA, 22 bp, Homo sapiens
gaaaaattcccagactcagtgg

SEQ ID NO: 72051 - DNA, 16 bp, Homo sapiens
gcccacccctggctga

SEQ ID NO: 72052 - DNA, 20 bp, Homo sapiens
ctgacttgagagagacagag

SEQ ID NO: 72053 - DNA, 16 bp, Homo sapiens
gcatcctcacggaagc

SEQ ID NO: 72054 - DNA, 19 bp, Homo sapiens
tttctctctccccacctcc

SEQ ID NO: 72055 - DNA, 23 bp, Homo sapiens
ctagtccccacttccctgtttaa

SEQ ID NO: 72056 - DNA, 18 bp, Homo sapiens
tctggacgtagagctcac

SEQ ID NO: 72057 - DNA, 24 bp, Homo sapiens
agttgtctaatgaatttagcaagt

SEQ ID NO: 72058 - DNA, 18 bp, Homo sapiens
ggtcgagcagtgcacaac

SEQ ID NO: 72059 - DNA, 24 bp, Homo sapiens
caagcatgtgtgtgtttttttctc

SEQ ID NO: 72060 - DNA, 21 bp, Homo sapiens
tccccacatttatttttacct

SEQ ID NO: 72061 - DNA, 22 bp, Homo sapiens
cacgcagccttcgagaatgtga

SEQ ID NO: 72062 - DNA, 22 bp, Homo sapiens
acaaattagtaacattccagtt

SEQ ID NO: 72063 - DNA, 23 bp, Homo sapiens
tcaaagattctattgtgcagttg

SEQ ID NO: 72064 - DNA, 23 bp, Homo sapiens
tcttatttgaaattgttttagac

SEQ ID NO: 72065 - DNA, 21 bp, Homo sapiens
gggaatactttgagaggttgg

SEQ ID NO: 72066 - DNA, 23 bp, Homo sapiens
tgcagattctgaatctgttttgc

SEQ ID NO: 72067 - DNA, 24 bp, Homo sapiens
tttggaattggtgttttcctctta

SEQ ID NO: 72068 - DNA, 21 bp, Homo sapiens
gtggaggaggagaaatctcat

SEQ ID NO: 72069 - DNA, 24 bp, Homo sapiens
tagactatcattggaacatgagag

SEQ ID NO: 72070 - DNA, 18 bp, Homo sapiens
ccgtgtagacctcagcgc

SEQ ID NO: 72071 - DNA, 23 bp, Homo sapiens
tgcaaactcgtaatttctttcag

SEQ ID NO: 72072 - DNA, 22 bp, Homo sapiens
gcatccccccgatattcaaata

SEQ ID NO: 72073 - DNA, 23 bp, Homo sapiens
gtacagactcaagggaggatgag

SEQ ID NO: 72074 - DNA, 24 bp, Homo sapiens
accctgttttgtattttatgattc

SEQ ID NO: 72075 - DNA, 22 bp, Homo sapiens
gaggcgacgaggtgctatcagc

SEQ ID NO: 72076 - DNA, 20 bp, Homo sapiens
agaaacctgttttccagtac

SEQ ID NO: 72077 - DNA, 24 bp, Homo sapiens
ggatcaaagatagtacaagtgtgt

SEQ ID NO: 72078 - DNA, 23 bp, Homo sapiens
atgtgaaaacagcacattctttt

SEQ ID NO: 72079 - DNA, 21 bp, Homo sapiens
ggcttgacatttaattgaagc

SEQ ID NO: 72080 - DNA, 22 bp, Homo sapiens
acccttacttgaaaaatagtgt

SEQ ID NO: 72081 - DNA, 19 bp, Homo sapiens
tgtcatttgaccttcagtt

SEQ ID NO: 72082 - DNA, 22 bp, Homo sapiens
ggtgaacaattactaagagctc

SEQ ID NO: 72083 - DNA, 22 bp, Homo sapiens
ccgctttagccaaagccattga

SEQ ID NO: 72084 - DNA, 21 bp, Homo sapiens
tctcttccgtgaatttcaaac

SEQ ID NO: 72085 - DNA, 22 bp, Homo sapiens
cgaaaacatggcatcaaaaata

SEQ ID NO: 72086 - DNA, 23 bp, Homo sapiens
attgttttcaacacttgttgcaa

SEQ ID NO: 72087 - DNA, 16 bp, Homo sapiens
gaggcccttaccttgc

SEQ ID NO: 72088 - DNA, 24 bp, Homo sapiens
tctggggtctttaattctaagctt

SEQ ID NO: 72089 - DNA, 23 bp, Homo sapiens
cttcaataaaacaaaaccaaaaa

SEQ ID NO: 72090 - DNA, 21 bp, Homo sapiens
acgaggccttctctcttttgc

SEQ ID NO: 72091 - DNA, 24 bp, Homo sapiens
agaaaaatccaatagtataacaga

SEQ ID NO: 72092 - DNA, 20 bp, Homo sapiens
caggagagactgtgattcag

SEQ ID NO: 72093 - DNA, 21 bp, Homo sapiens
agaagttatccccttcatcac

SEQ ID NO: 72094 - DNA, 22 bp, Homo sapiens
tgattttctttcccctgaaaga

SEQ ID NO: 72095 - DNA, 24 bp, Homo sapiens
agatcaacatatttttgatattgg

SEQ ID NO: 72096 - DNA, 23 bp, Homo sapiens
gtaaaataagtttattgttttgt

SEQ ID NO: 72097 - DNA, 18 bp, Homo sapiens
tgacccttcaaaatcact

SEQ ID NO: 72098 - DNA, 22 bp, Homo sapiens
tgcttctaacttttttaccctc

SEQ ID NO: 72099 - DNA, 21 bp, Homo sapiens
tgtgtcataaaaatacttggc

SEQ ID NO: 72100 - DNA, 18 bp, Homo sapiens
tggttgcccattcattgt

SEQ ID NO: 72101 - DNA, 24 bp, Homo sapiens
tgtactgcaaacataatatattct

SEQ ID NO: 72102 - DNA, 18 bp, Homo sapiens
ctgctctcggtgttccat

SEQ ID NO: 72103 - DNA, 22 bp, Homo sapiens
aaggtttgagggtttttaacat

SEQ ID NO: 72104 - DNA, 20 bp, Homo sapiens
cttctatagctgtctcggtc

SEQ ID NO: 72105 - DNA, 23 bp, Homo sapiens
tcacttgcactttaggtctatgt

SEQ ID NO: 72106 - DNA, 23 bp, Homo sapiens
acattagttacgtagatgagaat

SEQ ID NO: 72107 - DNA, 20 bp, Homo sapiens
gctttggagaacttgctttg

SEQ ID NO: 72108 - DNA, 23 bp, Homo sapiens
agaaatatttgctcattaaaaga

SEQ ID NO: 72109 - DNA, 20 bp, Homo sapiens
tgtgaaattgtggggcatcg

SEQ ID NO: 72110 - DNA, 18 bp, Homo sapiens
ctgggcttaatgcaaagt

SEQ ID NO: 72111 - DNA, 20 bp, Homo sapiens
attcctcatacatcttccgc

SEQ ID NO: 72112 - DNA, 20 bp, Homo sapiens
agcaacaagctttgactttc

SEQ ID NO: 72113 - DNA, 16 bp, Homo sapiens
agcaaagttaacacac

SEQ ID NO: 72114 - DNA, 20 bp, Homo sapiens
ttccatagcattatgtggtg

SEQ ID NO: 72115 - DNA, 22 bp, Homo sapiens
agcaattatactttcagaaggc

SEQ ID NO: 72116 - DNA, 24 bp, Homo sapiens
tttatttttagggaagcacactga

SEQ ID NO: 72117 - DNA, 17 bp, Homo sapiens
tgtccacagtcagaagg

SEQ ID NO: 72118 - DNA, 17 bp, Homo sapiens
cccacttgtccagagac

SEQ ID NO: 72119 - DNA, 22 bp, Homo sapiens
gacaggtaccacttttaatctg

SEQ ID NO: 72120 - DNA, 17 bp, Homo sapiens
acaatcttctgcccatc

SEQ ID NO: 72121 - DNA, 24 bp, Homo sapiens
ggttgaatctctttatactttctt

SEQ ID NO: 72122 - DNA, 21 bp, Homo sapiens
ttaaattctgagttctttacc

SEQ ID NO: 72123 - DNA, 21 bp, Homo sapiens
tgattcttgtctttcagagtc

SEQ ID NO: 72124 - DNA, 23 bp, Homo sapiens
cttagagcgtacaactttttaaa

SEQ ID NO: 72125 - DNA, 22 bp, Homo sapiens
cattggaaccagtgcagtttga

SEQ ID NO: 72126 - DNA, 23 bp, Homo sapiens
aaataaaatggtcaggtattctt

SEQ ID NO: 72127 - DNA, 21 bp, Homo sapiens
cttcattattttagaggtaaa

SEQ ID NO: 72128 - DNA, 17 bp, Homo sapiens
ccgacgttgtagcacag

SEQ ID NO: 72129 - DNA, 24 bp, Homo sapiens
ggtgactaactttaaagtcatttt

SEQ ID NO: 72130 - DNA, 22 bp, Homo sapiens
gggaattcatacataccaaaat

SEQ ID NO: 72131 - DNA, 18 bp, Homo sapiens
ttaaggtgccaccctggg

SEQ ID NO: 72132 - DNA, 23 bp, Homo sapiens
tggaagactacaatatctcactg

SEQ ID NO: 72133 - DNA, 18 bp, Homo sapiens
taggggtcagctgctgtg

SEQ ID NO: 72134 - DNA, 17 bp, Homo sapiens
gagccaaaaaagactgc

SEQ ID NO: 72135 - DNA, 18 bp, Homo sapiens
tgggaagattggggcctt

SEQ ID NO: 72136 - DNA, 18 bp, Homo sapiens
cgaggacgattcatcagt

SEQ ID NO: 72137 - DNA, 24 bp, Homo sapiens
tttgatctttactcatttaatgaa

SEQ ID NO: 72138 - DNA, 19 bp, Homo sapiens
aaatctaggtcggtccagc

SEQ ID NO: 72139 - DNA, 24 bp, Homo sapiens
tcagaagtgcactgctttaaggaa

SEQ ID NO: 72140 - DNA, 21 bp, Homo sapiens
gacacaaaactgttgtactgc

SEQ ID NO: 72141 - DNA, 22 bp, Homo sapiens
tttctccaggtgaaattgcact

SEQ ID NO: 72142 - DNA, 24 bp, Homo sapiens
catggattggggagaggagaaaag

SEQ ID NO: 72143 - DNA, 21 bp, Homo sapiens
ggccccttgaagtgcgttaag

SEQ ID NO: 72144 - DNA, 18 bp, Homo sapiens
agtggccacttggcgctg

SEQ ID NO: 72145 - DNA, 20 bp, Homo sapiens
cagacatcctcaaacgaaac

SEQ ID NO: 72146 - DNA, 21 bp, Homo sapiens
gctccaaattgaaaatggtgc

SEQ ID NO: 72147 - DNA, 20 bp, Homo sapiens
gaatgctcctccttgagatg

SEQ ID NO: 72148 - DNA, 16 bp, Homo sapiens
cctccccttgaatggc

SEQ ID NO: 72149 - DNA, 21 bp, Homo sapiens
gatctgcagcccacaggttag

SEQ ID NO: 72150 - DNA, 20 bp, Homo sapiens
aagcacattctggaggaaag

SEQ ID NO: 72151 - DNA, 24 bp, Homo sapiens
agtgaaataatatgtattgagtcc

SEQ ID NO: 72152 - DNA, 20 bp, Homo sapiens
ctgcaggtcacctcatcatc

SEQ ID NO: 72153 - DNA, 24 bp, Homo sapiens
ttatattttattcataacaacagc

SEQ ID NO: 72154 - DNA, 22 bp, Homo sapiens
attcgtaatagacatattgtcc

SEQ ID NO: 72155 - DNA, 23 bp, Homo sapiens
ttttcttttttaggttatcctga

SEQ ID NO: 72156 - DNA, 19 bp, Homo sapiens
tggcacatcaaactatgca

SEQ ID NO: 72157 - DNA, 20 bp, Homo sapiens
tgttgtttttcactgtttcc

SEQ ID NO: 72158 - DNA, 21 bp, Homo sapiens
cagcttctttaccaaactttc

SEQ ID NO: 72159 - DNA, 25 bp, Homo sapiens
taaaaggaaaaacttgaacaaatgg

SEQ ID NO: 72160 - DNA, 20 bp, Homo sapiens
ggatgagctccatttgtagt

SEQ ID NO: 72161 - DNA, 20 bp, Homo sapiens
tgatgcctgtctgagcattg

SEQ ID NO: 72162 - DNA, 17 bp, Homo sapiens
ctaacctgaagcctccc

SEQ ID NO: 72163 - DNA, 24 bp, Homo sapiens
acatttgcaaaaagagcaattgaa

SEQ ID NO: 72164 - DNA, 21 bp, Homo sapiens
tgaaaggaaacgtagcaagtt

SEQ ID NO: 72165 - DNA, 20 bp, Homo sapiens
ttggattctttaataacagc

SEQ ID NO: 72166 - DNA, 19 bp, Homo sapiens
acaggatgcacagtatctg

SEQ ID NO: 72167 - DNA, 23 bp, Homo sapiens
ccatacagagaacattggatggg

SEQ ID NO: 72168 - DNA, 16 bp, Homo sapiens
tcctttccgaccagcc

SEQ ID NO: 72169 - DNA, 24 bp, Homo sapiens
gttattgtgaattttagttttctt

SEQ ID NO: 72170 - DNA, 21 bp, Homo sapiens
atgttttagttcatttttgtg

SEQ ID NO: 72171 - DNA, 23 bp, Homo sapiens
ggattgtgaggattaaatcagaa

SEQ ID NO: 72172 - DNA, 17 bp, Homo sapiens
tggattcacacagacac

SEQ ID NO: 72173 - DNA, 21 bp, Homo sapiens
tggtcgtttatttttctaggt

SEQ ID NO: 72174 - DNA, 21 bp, Homo sapiens
tcttaggatgaaagcaaagtc

SEQ ID NO: 72175 - DNA, 18 bp, Homo sapiens
ctggaggtggcctgatct

SEQ ID NO: 72176 - DNA, 25 bp, Homo sapiens
ctatcttccaaatttataatttaac

SEQ ID NO: 72177 - DNA, 21 bp, Homo sapiens
tgcgtttgacttaaaatgtga

SEQ ID NO: 72178 - DNA, 26 bp, Homo sapiens
ttaaatacgtatattaaaaatgtctg

SEQ ID NO: 72179 - DNA, 20 bp, Homo sapiens
tgcagtgttaatcctgagag

SEQ ID NO: 72180 - DNA, 19 bp, Homo sapiens
agcgtttatgctacttctg

SEQ ID NO: 72181 - DNA, 22 bp, Homo sapiens
gataggacaaaacaaagagaaa

SEQ ID NO: 72182 - DNA, 24 bp, Homo sapiens
tttggtttaaatttacattctctg

SEQ ID NO: 72183 - DNA, 16 bp, Homo sapiens
gttactgcctgccgct

SEQ ID NO: 72184 - DNA, 22 bp, Homo sapiens
tcatttgttttcccctttaaac

SEQ ID NO: 72185 - DNA, 20 bp, Homo sapiens
agttttaaatgcccctaacc

SEQ ID NO: 72186 - DNA, 20 bp, Homo sapiens
ccttcaccatcatacttgat

SEQ ID NO: 72187 - DNA, 23 bp, Homo sapiens
aaaaattctgaattaaggttagt

SEQ ID NO: 72188 - DNA, 22 bp, Homo sapiens
tggtttgaattgaatgtccttc

SEQ ID NO: 72189 - DNA, 24 bp, Homo sapiens
acttgctaataagatttttttttc

SEQ ID NO: 72190 - DNA, 17 bp, Homo sapiens
gctggggtgctgtatgt

SEQ ID NO: 72191 - DNA, 22 bp, Homo sapiens
ttttctatatagctccatcaag

SEQ ID NO: 72192 - DNA, 19 bp, Homo sapiens
ggaagccacaggaatgttg

SEQ ID NO: 72193 - DNA, 20 bp, Homo sapiens
gagggacagccatcgttgtc

SEQ ID NO: 72194 - DNA, 21 bp, Homo sapiens
aagcaatgattaggaaaactc

SEQ ID NO: 72195 - DNA, 23 bp, Homo sapiens
aagtaatcgtgcatcgacagaga

SEQ ID NO: 72196 - DNA, 24 bp, Homo sapiens
actacagttacttttaatgtttac

SEQ ID NO: 72197 - DNA, 21 bp, Homo sapiens
gctaccagcactgccaacttt

SEQ ID NO: 72198 - DNA, 23 bp, Homo sapiens
gccattacttaaattccaagtga

SEQ ID NO: 72199 - DNA, 16 bp, Homo sapiens
atactggcaggctgac

SEQ ID NO: 72200 - DNA, 23 bp, Homo sapiens
ctgataggccatgggtgagttac

SEQ ID NO: 72201 - DNA, 16 bp, Homo sapiens
tgtcctggctgaggcc

SEQ ID NO: 72202 - DNA, 24 bp, Homo sapiens
aattggtccttcatttagtatatg

SEQ ID NO: 72203 - DNA, 26 bp, Homo sapiens
tttaaaagattttttaaagtatgtac

SEQ ID NO: 72204 - DNA, 21 bp, Homo sapiens
gtcttcttgttcctctaggtc

SEQ ID NO: 72205 - DNA, 18 bp, Homo sapiens
ccacatgggttaatttgc

SEQ ID NO: 72206 - DNA, 23 bp, Homo sapiens
aggactgttgcagatagcatcag

SEQ ID NO: 72207 - DNA, 18 bp, Homo sapiens
tgtgtatggtgcagtcct

SEQ ID NO: 72208 - DNA, 24 bp, Homo sapiens
tcagccagctacttaccatcatag

SEQ ID NO: 72209 - DNA, 17 bp, Homo sapiens
ggatggggcggcatagg

SEQ ID NO: 72210 - DNA, 22 bp, Homo sapiens
agtaggcagcctttataaaagc

SEQ ID NO: 72211 - DNA, 21 bp, Homo sapiens
aagccctaccaaaaaaaaaaa

SEQ ID NO: 72212 - DNA, 18 bp, Homo sapiens
accacctggactggaagt

SEQ ID NO: 72213 - DNA, 20 bp, Homo sapiens
tgaaacaaaatcacaggatg

SEQ ID NO: 72214 - DNA, 19 bp, Homo sapiens
acggccatcttcagcacca

SEQ ID NO: 72215 - DNA, 24 bp, Homo sapiens
aaaggtaggataactatgaaaaat

SEQ ID NO: 72216 - DNA, 17 bp, Homo sapiens
aggctggaatgcaagct

SEQ ID NO: 72217 - DNA, 24 bp, Homo sapiens
acattgcataagcttgttttaaac

SEQ ID NO: 72218 - DNA, 27 bp, Homo sapiens
caatcaccactaaatcaatctaaatac

SEQ ID NO: 72219 - DNA, 24 bp, Homo sapiens
tgaaagttttagcattagacaact

SEQ ID NO: 72220 - DNA, 22 bp, Homo sapiens
ttgtactcatctgagaagtgac

SEQ ID NO: 72221 - DNA, 19 bp, Homo sapiens
gggcctgttcacaatgagc

SEQ ID NO: 72222 - DNA, 21 bp, Homo sapiens
tgtgtgactatattgactact

SEQ ID NO: 72223 - DNA, 21 bp, Homo sapiens
ggaacaccaatactcaggagc

SEQ ID NO: 72224 - DNA, 20 bp, Homo sapiens
aatccagttgttttgggtgc

SEQ ID NO: 72225 - DNA, 18 bp, Homo sapiens
agggcagcttgaaggaac

SEQ ID NO: 72226 - DNA, 22 bp, Homo sapiens
aggaaaaactgtgttgtggagt

SEQ ID NO: 72227 - DNA, 19 bp, Homo sapiens
ccaaacaaaagcgatctcc

SEQ ID NO: 72228 - DNA, 22 bp, Homo sapiens
ttcccatttatttcctatagct

SEQ ID NO: 72229 - DNA, 23 bp, Homo sapiens
tgactatacaatcaataccttgc

SEQ ID NO: 72230 - DNA, 20 bp, Homo sapiens
gatgttcaggtaggagagac

SEQ ID NO: 72231 - DNA, 22 bp, Homo sapiens
catgggaaaacataaccttgaa

SEQ ID NO: 72232 - DNA, 17 bp, Homo sapiens
tacgtggacccttctgg

SEQ ID NO: 72233 - DNA, 21 bp, Homo sapiens
tgagttttcaacatgaccttt

SEQ ID NO: 72234 - DNA, 20 bp, Homo sapiens
acagaagccattgagagagc

SEQ ID NO: 72235 - DNA, 18 bp, Homo sapiens
cacctttgcctatgtgca

SEQ ID NO: 72236 - DNA, 21 bp, Homo sapiens
tgttaatagctatcttttggt

SEQ ID NO: 72237 - DNA, 16 bp, Homo sapiens
accgcgtggtcactaa

SEQ ID NO: 72238 - DNA, 21 bp, Homo sapiens
agcatgctatacaatctgaac

SEQ ID NO: 72239 - DNA, 18 bp, Homo sapiens
gaacagcatctccaggtg

SEQ ID NO: 72240 - DNA, 22 bp, Homo sapiens
tcttttttcttcctaaggttgc

SEQ ID NO: 72241 - DNA, 24 bp, Homo sapiens
gctttaagtctaaaatattcaaat

SEQ ID NO: 72242 - DNA, 16 bp, Homo sapiens
tgtttgggtcaggtgc

SEQ ID NO: 72243 - DNA, 20 bp, Homo sapiens
acatttttccattccttcca

SEQ ID NO: 72244 - DNA, 17 bp, Homo sapiens
gaagctgggcgtgcacc

SEQ ID NO: 72245 - DNA, 18 bp, Homo sapiens
tgccctcagaaaatgtgt

SEQ ID NO: 72246 - DNA, 24 bp, Homo sapiens
cacaatgtacataaaagtttacat

SEQ ID NO: 72247 - DNA, 16 bp, Homo sapiens
ctgctgcagcttgtgc

SEQ ID NO: 72248 - DNA, 24 bp, Homo sapiens
aactgagttttaaataagtcaggc

SEQ ID NO: 72249 - DNA, 17 bp, Homo sapiens
gctggagctattccacc

SEQ ID NO: 72250 - DNA, 24 bp, Homo sapiens
tttatgaactcatagtatgaaatg

SEQ ID NO: 72251 - DNA, 23 bp, Homo sapiens
tcaagataaaaatatcaactatt

SEQ ID NO: 72252 - DNA, 20 bp, Homo sapiens
gatgcagcagcaggcggcta

SEQ ID NO: 72253 - DNA, 24 bp, Homo sapiens
tcccagtaaaaaaaaactttaatt

SEQ ID NO: 72254 - DNA, 16 bp, Homo sapiens
tccctggcccaggatc

SEQ ID NO: 72255 - DNA, 16 bp, Homo sapiens
cagcagctgacagacc

SEQ ID NO: 72256 - DNA, 24 bp, Homo sapiens
actgttacttcttggcactttagc

SEQ ID NO: 72257 - DNA, 21 bp, Homo sapiens
agcctttcacaaaactcatcc

SEQ ID NO: 72258 - DNA, 24 bp, Homo sapiens
gctggtcacttgattaatttagaa

SEQ ID NO: 72259 - DNA, 21 bp, Homo sapiens
agtgaatttcaatccagcaag

SEQ ID NO: 72260 - DNA, 24 bp, Homo sapiens
tgtcttccaaatcttttctgttag

SEQ ID NO: 72261 - DNA, 17 bp, Homo sapiens
tgtgggtctgcaatcgg

SEQ ID NO: 72262 - DNA, 23 bp, Homo sapiens
cttcgtcgcttatgcatactcag

SEQ ID NO: 72263 - DNA, 18 bp, Homo sapiens
tccaccatcctgataagg

SEQ ID NO: 72264 - DNA, 20 bp, Homo sapiens
cagagcatcaaagaaacacc

SEQ ID NO: 72265 - DNA, 24 bp, Homo sapiens
cctttatgaaaagataaagcagaa

SEQ ID NO: 72266 - DNA, 22 bp, Homo sapiens
cctagacgaagtacttcatacc

SEQ ID NO: 72267 - DNA, 17 bp, Homo sapiens
atccagtttctgtctgc

SEQ ID NO: 72268 - DNA, 18 bp, Homo sapiens
gcccagctgctgcgggtc

SEQ ID NO: 72269 - DNA, 24 bp, Homo sapiens
ggtttttgttgccttttttttttc

SEQ ID NO: 72270 - DNA, 18 bp, Homo sapiens
gagtcgatgcggtggatg

SEQ ID NO: 72271 - DNA, 16 bp, Homo sapiens
ggaaggaccgctcacc

SEQ ID NO: 72272 - DNA, 18 bp, Homo sapiens
caggtacttgccgatgag

SEQ ID NO: 72273 - DNA, 16 bp, Homo sapiens
catggaggtggtggac

SEQ ID NO: 72274 - DNA, 16 bp, Homo sapiens
ccgagtccagcacctc

SEQ ID NO: 72275 - DNA, 22 bp, Homo sapiens
ggtgggtatggacacgttcatc

SEQ ID NO: 72276 - DNA, 18 bp, Homo sapiens
cccgttggggatccttcg

SEQ ID NO: 72277 - DNA, 17 bp, Homo sapiens
cgcaagcgggccaagct

SEQ ID NO: 72278 - DNA, 17 bp, Homo sapiens
ctggcccggcccggccc

SEQ ID NO: 72279 - DNA, 23 bp, Homo sapiens
ctcttacggcaaggtgaaggagg

SEQ ID NO: 72280 - DNA, 24 bp, Homo sapiens
gtgttaagaggaagtaagggaggg

SEQ ID NO: 72281 - DNA, 22 bp, Homo sapiens
gatcctcaagaagaagaagttg

SEQ ID NO: 72282 - DNA, 16 bp, Homo sapiens
cccaaccacgctctcc

SEQ ID NO: 72283 - DNA, 24 bp, Homo sapiens
gtaacctcctcagtagttgaattt

SEQ ID NO: 72284 - DNA, 21 bp, Homo sapiens
gcactgtgaactcacagcttc

SEQ ID NO: 72285 - DNA, 24 bp, Homo sapiens
atattttctgcttctcttcgttgt

SEQ ID NO: 72286 - DNA, 23 bp, Homo sapiens
ggagatggggaggccgactccag

SEQ ID NO: 72287 - DNA, 16 bp, Homo sapiens
ccccagcccctcccac

SEQ ID NO: 72288 - DNA, 19 bp, Homo sapiens
cccctgtcctctctgtccc

SEQ ID NO: 72289 - DNA, 17 bp, Homo sapiens
cgtgtgccagtctcctt

SEQ ID NO: 72290 - DNA, 21 bp, Homo sapiens
atccagctggtggatgtgtta

SEQ ID NO: 72291 - DNA, 19 bp, Homo sapiens
tgccacacacgcagtactc

SEQ ID NO: 72292 - DNA, 16 bp, Homo sapiens
tggtcccgaggagggg

SEQ ID NO: 72293 - DNA, 23 bp, Homo sapiens
acccgtgggcctggcacactggg

SEQ ID NO: 72294 - DNA, 21 bp, Homo sapiens
ttttctggcccccgtgctccc

SEQ ID NO: 72295 - DNA, 16 bp, Homo sapiens
agcctgccctgcctgg

SEQ ID NO: 72296 - DNA, 21 bp, Homo sapiens
ttagcgccccacgtatatggt

SEQ ID NO: 72297 - DNA, 19 bp, Homo sapiens
aaaacttgggccttcatgt

SEQ ID NO: 72298 - DNA, 20 bp, Homo sapiens
gtgccggagaagcgtttccc

SEQ ID NO: 72299 - DNA, 24 bp, Homo sapiens
caatcagctgacagaagtacctgc

SEQ ID NO: 72300 - DNA, 24 bp, Homo sapiens
ctagcctttcctctgtcctgtgtg

SEQ ID NO: 72301 - DNA, 20 bp, Homo sapiens
cggcttgatgtccttgtgca

SEQ ID NO: 72302 - DNA, 18 bp, Homo sapiens
tttgggaggctcccaggc

SEQ ID NO: 72303 - DNA, 24 bp, Homo sapiens
tgcctacctcggccacgcccaggt

SEQ ID NO: 72304 - DNA, 16 bp, Homo sapiens
gacgggtgtgtgctgc

SEQ ID NO: 72305 - DNA, 16 bp, Homo sapiens
agccctcagggagtgc

SEQ ID NO: 72306 - DNA, 21 bp, Homo sapiens
ctgcatagccagggcattgtg

SEQ ID NO: 72307 - DNA, 17 bp, Homo sapiens
ggtccggcaggtgtcgt

SEQ ID NO: 72308 - DNA, 19 bp, Homo sapiens
ggtggcaccctcaaaatct

SEQ ID NO: 72309 - DNA, 17 bp, Homo sapiens
ggagaaggtgtccaggc

SEQ ID NO: 72310 - DNA, 16 bp, Homo sapiens
ctggggcgccccctcc

SEQ ID NO: 72311 - DNA, 16 bp, Homo sapiens
gagtgcccgggggggc

SEQ ID NO: 72312 - DNA, 17 bp, Homo sapiens
gttcgcggcggacgaca

SEQ ID NO: 72313 - DNA, 16 bp, Homo sapiens
ccacaggccggcagct

SEQ ID NO: 72314 - DNA, 18 bp, Homo sapiens
cccgagattgccaacggc

SEQ ID NO: 72315 - DNA, 21 bp, Homo sapiens
tttccataaagtaagcacccc

SEQ ID NO: 72316 - DNA, 20 bp, Homo sapiens
ggtggtgaagacagaggtgt

SEQ ID NO: 72317 - DNA, 19 bp, Homo sapiens
ccgatgttctcaaacaact

SEQ ID NO: 72318 - DNA, 17 bp, Homo sapiens
tgtccctggggtagagc

SEQ ID NO: 72319 - DNA, 24 bp, Homo sapiens
tgaggctcccacctttcagcaggt

SEQ ID NO: 72320 - DNA, 24 bp, Homo sapiens
gaccacgcctttcttccctcccct

SEQ ID NO: 72321 - DNA, 22 bp, Homo sapiens
ccctacatttctgcacaaaagc

SEQ ID NO: 72322 - DNA, 24 bp, Homo sapiens
ttcgaaggggacaacatctacaag

SEQ ID NO: 72323 - DNA, 20 bp, Homo sapiens
gtcctctcaatgcctgctgg

SEQ ID NO: 72324 - DNA, 16 bp, Homo sapiens
tggccccccgctctct

SEQ ID NO: 72325 - DNA, 18 bp, Homo sapiens
ctctgtcagggagaccgc

SEQ ID NO: 72326 - DNA, 16 bp, Homo sapiens
ctcacctgtgctgccg

SEQ ID NO: 72327 - DNA, 19 bp, Homo sapiens
gggcctgacaacagaggct

SEQ ID NO: 72328 - DNA, 16 bp, Homo sapiens
cgctcaaccagctgcc

SEQ ID NO: 72329 - DNA, 16 bp, Homo sapiens
ctgacaggctcctcgc

SEQ ID NO: 72330 - DNA, 16 bp, Homo sapiens
gcacggggtctggccc

SEQ ID NO: 72331 - DNA, 19 bp, Homo sapiens
gttctccatccggcagatc

SEQ ID NO: 72332 - DNA, 24 bp, Homo sapiens
gatgtttcttccggaaccagctgc

SEQ ID NO: 72333 - DNA, 21 bp, Homo sapiens
tgagcttctgtggtcacagcc

SEQ ID NO: 72334 - DNA, 17 bp, Homo sapiens
tccttggtgtctgggct

SEQ ID NO: 72335 - DNA, 18 bp, Homo sapiens
ccctgggcccagaggagc

SEQ ID NO: 72336 - DNA, 16 bp, Homo sapiens
tcgtcctcgtccgcgc

SEQ ID NO: 72337 - DNA, 16 bp, Homo sapiens
ctgcttctgggcgttt

SEQ ID NO: 72338 - DNA, 17 bp, Homo sapiens
ccgggcaccgtgaagtc

SEQ ID NO: 72339 - DNA, 22 bp, Homo sapiens
accagtgcccatcccaccgagc

SEQ ID NO: 72340 - DNA, 16 bp, Homo sapiens
ctcccgtgggacatcc

SEQ ID NO: 72341 - DNA, 19 bp, Homo sapiens
cgtacttggaggacctgca

SEQ ID NO: 72342 - DNA, 20 bp, Homo sapiens
gggacgtgggattggccacc

SEQ ID NO: 72343 - DNA, 23 bp, Homo sapiens
atgacatcatctacactcaggac

SEQ ID NO: 72344 - DNA, 19 bp, Homo sapiens
tcctcttctgggacctgtc

SEQ ID NO: 72345 - DNA, 18 bp, Homo sapiens
ggatacacctgggcctga

SEQ ID NO: 72346 - DNA, 18 bp, Homo sapiens
gccgttcatacacacggc

SEQ ID NO: 72347 - DNA, 16 bp, Homo sapiens
gtggtgggggccagcc

SEQ ID NO: 72348 - DNA, 16 bp, Homo sapiens
gcagggttgggggccc

SEQ ID NO: 72349 - DNA, 18 bp, Homo sapiens
cacacttgccgtctccct

SEQ ID NO: 72350 - DNA, 16 bp, Homo sapiens
cctcactgctgcttgc

SEQ ID NO: 72351 - DNA, 17 bp, Homo sapiens
cggggcctccccaaggc

SEQ ID NO: 72352 - DNA, 17 bp, Homo sapiens
cgttgtccccacatgcc

SEQ ID NO: 72353 - DNA, 18 bp, Homo sapiens
caaatccagggcggaggg

SEQ ID NO: 72354 - DNA, 18 bp, Homo sapiens
acgtgacggtcaccatga

SEQ ID NO: 72355 - DNA, 17 bp, Homo sapiens
caagatccgccggctgt

SEQ ID NO: 72356 - DNA, 16 bp, Homo sapiens
actggcttcctgtggg

SEQ ID NO: 72357 - DNA, 16 bp, Homo sapiens
gccagggcccggggaa

SEQ ID NO: 72358 - DNA, 24 bp, Homo sapiens
ccttgctatccctgtcctgcctcg

SEQ ID NO: 72359 - DNA, 16 bp, Homo sapiens
atgctgtgggcggagc

SEQ ID NO: 72360 - DNA, 17 bp, Homo sapiens
ccactgtctgcagctcc

SEQ ID NO: 72361 - DNA, 17 bp, Homo sapiens
caggcccctgggtgggg

SEQ ID NO: 72362 - DNA, 19 bp, Homo sapiens
ctcctcggccaggtccttc

SEQ ID NO: 72363 - DNA, 16 bp, Homo sapiens
aggcgggcacagggat

SEQ ID NO: 72364 - DNA, 16 bp, Homo sapiens
gtccctcgccgggctc

SEQ ID NO: 72365 - DNA, 17 bp, Homo sapiens
cctccaagtaaggccct

SEQ ID NO: 72366 - DNA, 19 bp, Homo sapiens
ctcagcaggacaccccatc

SEQ ID NO: 72367 - DNA, 16 bp, Homo sapiens
gggtagggggctgagc

SEQ ID NO: 72368 - DNA, 18 bp, Homo sapiens
ccttctcatgcatggact

SEQ ID NO: 72369 - DNA, 17 bp, Homo sapiens
ctggggactggggagat

SEQ ID NO: 72370 - DNA, 16 bp, Homo sapiens
tgaccgcatccccatt

SEQ ID NO: 72371 - DNA, 16 bp, Homo sapiens
tcgggcagcgcatagc

SEQ ID NO: 72372 - DNA, 22 bp, Homo sapiens
agttctgtaccttgggagtgct

SEQ ID NO: 72373 - DNA, 17 bp, Homo sapiens
atggtccctctcgcagc

SEQ ID NO: 72374 - DNA, 20 bp, Homo sapiens
ccaggggaggaaaatgatct

SEQ ID NO: 72375 - DNA, 24 bp, Homo sapiens
gctacaaccagatgaaaggaatgg

SEQ ID NO: 72376 - DNA, 16 bp, Homo sapiens
ggccacccacccggct

SEQ ID NO: 72377 - DNA, 16 bp, Homo sapiens
ccccatggaccagcac

SEQ ID NO: 72378 - DNA, 16 bp, Homo sapiens
tcagagccacccaggg

SEQ ID NO: 72379 - DNA, 24 bp, Homo sapiens
cctggttgactcaagagaaggatg

SEQ ID NO: 72380 - DNA, 24 bp, Homo sapiens
tcctggcccggaagacatctgggg

SEQ ID NO: 72381 - DNA, 24 bp, Homo sapiens
tagggggaagaggctgtaaaaatc

SEQ ID NO: 72382 - DNA, 16 bp, Homo sapiens
ccccggttctgctgcc

SEQ ID NO: 72383 - DNA, 19 bp, Homo sapiens
ttctctgcaggttacccct

SEQ ID NO: 72384 - DNA, 19 bp, Homo sapiens
gtaggccatgatctgagct

SEQ ID NO: 72385 - DNA, 16 bp, Homo sapiens
tggcccgtcttcgggg

SEQ ID NO: 72386 - DNA, 16 bp, Homo sapiens
gcttgccctgcaccgc

SEQ ID NO: 72387 - DNA, 16 bp, Homo sapiens
gtgctgacccccaggc

SEQ ID NO: 72388 - DNA, 16 bp, Homo sapiens
ttgcggacaccgaggg

SEQ ID NO: 72389 - DNA, 16 bp, Homo sapiens
gcaccagctcagagct

SEQ ID NO: 72390 - DNA, 19 bp, Homo sapiens
gtaatttggaggtgccggg

SEQ ID NO: 72391 - DNA, 22 bp, Homo sapiens
ctccccgaccacctgcagatgg

SEQ ID NO: 72392 - DNA, 18 bp, Homo sapiens
ccattcgctctgagacac

SEQ ID NO: 72393 - DNA, 16 bp, Homo sapiens
caacgctacctccacc

SEQ ID NO: 72394 - DNA, 16 bp, Homo sapiens
aaccggggaacccagt

SEQ ID NO: 72395 - DNA, 22 bp, Homo sapiens
ccctggccccggcccgggtccc

SEQ ID NO: 72396 - DNA, 17 bp, Homo sapiens
gcatttagctgccccca

SEQ ID NO: 72397 - DNA, 19 bp, Homo sapiens
ctgggggaggcatgttggg

SEQ ID NO: 72398 - DNA, 17 bp, Homo sapiens
cccctggggccgctggt

SEQ ID NO: 72399 - DNA, 16 bp, Homo sapiens
cagggcttgggaggcc

SEQ ID NO: 72400 - DNA, 20 bp, Homo sapiens
acggggctgggcgcaggcat

SEQ ID NO: 72401 - DNA, 20 bp, Homo sapiens
agcttgagatggggagtaag

SEQ ID NO: 72402 - DNA, 23 bp, Homo sapiens
cctacatgtaggtatgggagggc

SEQ ID NO: 72403 - DNA, 22 bp, Homo sapiens
gctgcagttcagcctgaccacc

SEQ ID NO: 72404 - DNA, 22 bp, Homo sapiens
cgggatgccaggccagcctcct

SEQ ID NO: 72405 - DNA, 16 bp, Homo sapiens
tcgtgggggcagcagc

SEQ ID NO: 72406 - DNA, 24 bp, Homo sapiens
tgaaaggtgggagatgggcggggt

SEQ ID NO: 72407 - DNA, 16 bp, Homo sapiens
cagggggcgcggggga

SEQ ID NO: 72408 - DNA, 24 bp, Homo sapiens
tttccatttccagcccgggatggg

SEQ ID NO: 72409 - DNA, 16 bp, Homo sapiens
gccggctgcccggggg

SEQ ID NO: 72410 - DNA, 24 bp, Homo sapiens
ttctcccaggacccatggcgaatg

SEQ ID NO: 72411 - DNA, 19 bp, Homo sapiens
gcttctggatgggggtgat

SEQ ID NO: 72412 - DNA, 16 bp, Homo sapiens
ccaacgggccgccctt

SEQ ID NO: 72413 - DNA, 19 bp, Homo sapiens
ggccccgccctcacctgta

SEQ ID NO: 72414 - DNA, 17 bp, Homo sapiens
ccaccgcagacccagtc

SEQ ID NO: 72415 - DNA, 18 bp, Homo sapiens
aaagttgagtggcttccc

SEQ ID NO: 72416 - DNA, 21 bp, Homo sapiens
ccagaagcagagccgcatcac

SEQ ID NO: 72417 - DNA, 19 bp, Homo sapiens
tgaggaaggaggtgtaggc

SEQ ID NO: 72418 - DNA, 18 bp, Homo sapiens
caggagcgcgagtacagg

SEQ ID NO: 72419 - DNA, 19 bp, Homo sapiens
ggccagcatcctcttctga

SEQ ID NO: 72420 - DNA, 17 bp, Homo sapiens
gttcgcaaatccccggc

SEQ ID NO: 72421 - DNA, 23 bp, Homo sapiens
tcgagggatgggtcccctgcagc

SEQ ID NO: 72422 - DNA, 19 bp, Homo sapiens
ccacctgcctctggaagtt

SEQ ID NO: 72423 - DNA, 22 bp, Homo sapiens
ctttgctccttgtctctgctcc

SEQ ID NO: 72424 - DNA, 22 bp, Homo sapiens
tttggagccttagcagcagtgt

SEQ ID NO: 72425 - DNA, 23 bp, Homo sapiens
gaacttgaaaaccttcccgggtc

SEQ ID NO: 72426 - DNA, 17 bp, Homo sapiens
gccacggctgcttttca

SEQ ID NO: 72427 - DNA, 17 bp, Homo sapiens
cctcaggctgctgaact

SEQ ID NO: 72428 - DNA, 16 bp, Homo sapiens
ccgcatgcacaccacc

SEQ ID NO: 72429 - DNA, 24 bp, Homo sapiens
tgggtgtgtaaggcacttacaatg

SEQ ID NO: 72430 - DNA, 16 bp, Homo sapiens
gactggcgcttgctgc

SEQ ID NO: 72431 - DNA, 24 bp, Homo sapiens
tacgtgtttgtcattgtggatgcc

SEQ ID NO: 72432 - DNA, 17 bp, Homo sapiens
cgctcctgctcgatctt

SEQ ID NO: 72433 - DNA, 24 bp, Homo sapiens
tcctacagctgcgccaggaggtgg

SEQ ID NO: 72434 - DNA, 16 bp, Homo sapiens
ggcgggctgcagggcc

SEQ ID NO: 72435 - DNA, 24 bp, Homo sapiens
ctcaatgctaaggcctacaagcgc

SEQ ID NO: 72436 - DNA, 18 bp, Homo sapiens
catgtttaggaacaaagc

SEQ ID NO: 72437 - DNA, 20 bp, Homo sapiens
gagaagctggagaagcagca

SEQ ID NO: 72438 - DNA, 23 bp, Homo sapiens
ttttacaccaatacactctcagt

SEQ ID NO: 72439 - DNA, 20 bp, Homo sapiens
tcctgacctcgtgatctgcc

SEQ ID NO: 72440 - DNA, 18 bp, Homo sapiens
ctggattttgcctgtgac

SEQ ID NO: 72441 - DNA, 24 bp, Homo sapiens
attctaggttttaaacaagccttg

SEQ ID NO: 72442 - DNA, 18 bp, Homo sapiens
ctctttcttctgctcccg

SEQ ID NO: 72443 - DNA, 24 bp, Homo sapiens
agccttctcttttgtgctttcctg

SEQ ID NO: 72444 - DNA, 19 bp, Homo sapiens
cacgtcaagaaggcaggac

SEQ ID NO: 72445 - DNA, 24 bp, Homo sapiens
ttcaaggaatatcacagatccgtc

SEQ ID NO: 72446 - DNA, 16 bp, Homo sapiens
accctggggagtgacc

SEQ ID NO: 72447 - DNA, 16 bp, Homo sapiens
gccaacacggagcggg

SEQ ID NO: 72448 - DNA, 17 bp, Homo sapiens
cgcgcctgctcttttcc

SEQ ID NO: 72449 - DNA, 16 bp, Homo sapiens
agcttgcggtacccct

SEQ ID NO: 72450 - DNA, 17 bp, Homo sapiens
ctggtggcacggcaccc

SEQ ID NO: 72451 - DNA, 24 bp, Homo sapiens
gaggttagccacgtactcgtctgt

SEQ ID NO: 72452 - DNA, 20 bp, Homo sapiens
ccatgggtgctcacagacat

SEQ ID NO: 72453 - DNA, 23 bp, Homo sapiens
tttcttctttttctccttggcga

SEQ ID NO: 72454 - DNA, 24 bp, Homo sapiens
cttttgtaggctgaagatgaggag

SEQ ID NO: 72455 - DNA, 16 bp, Homo sapiens
ctgctcccatcccacc

SEQ ID NO: 72456 - DNA, 20 bp, Homo sapiens
cctggcctacctcttgcagc

SEQ ID NO: 72457 - DNA, 22 bp, Homo sapiens
aatagagagagacacggtcagg

SEQ ID NO: 72458 - DNA, 20 bp, Homo sapiens
cacaaggctgcccaggtcgc

SEQ ID NO: 72459 - DNA, 16 bp, Homo sapiens
cctcgccatccggccc

SEQ ID NO: 72460 - DNA, 16 bp, Homo sapiens
ctggcatggtgcccgc

SEQ ID NO: 72461 - DNA, 21 bp, Homo sapiens
aaagtctgaaacagaccaacg

SEQ ID NO: 72462 - DNA, 18 bp, Homo sapiens
cttgtgggtcagggcctg

SEQ ID NO: 72463 - DNA, 20 bp, Homo sapiens
gggattctcaccatcatcac

SEQ ID NO: 72464 - DNA, 24 bp, Homo sapiens
aaatgcagaaggacagacgcctgc

SEQ ID NO: 72465 - DNA, 24 bp, Homo sapiens
tgagtatacagtttacgcattttc

SEQ ID NO: 72466 - DNA, 20 bp, Homo sapiens
gaggatcttcccactctcca

SEQ ID NO: 72467 - DNA, 24 bp, Homo sapiens
tgcaaacagttgagtgggtgcttc

SEQ ID NO: 72468 - DNA, 24 bp, Homo sapiens
actcaccccgggttcatctcgagc

SEQ ID NO: 72469 - DNA, 23 bp, Homo sapiens
cctcagtgtcacacgaatgactc

SEQ ID NO: 72470 - DNA, 16 bp, Homo sapiens
cccaccgaggacttgg

SEQ ID NO: 72471 - DNA, 18 bp, Homo sapiens
ggtgaaggtgatccacgt

SEQ ID NO: 72472 - DNA, 18 bp, Homo sapiens
ccaaacctgccgggaatt

SEQ ID NO: 72473 - DNA, 16 bp, Homo sapiens
ccgggcagctggaggc

SEQ ID NO: 72474 - DNA, 22 bp, Homo sapiens
cattccagatgcagtggggatc

SEQ ID NO: 72475 - DNA, 21 bp, Homo sapiens
tcttcctcttcttctgagcca

SEQ ID NO: 72476 - DNA, 24 bp, Homo sapiens
agccaggagcaattttacttctgt

SEQ ID NO: 72477 - DNA, 17 bp, Homo sapiens
gtggaagtcactgccag

SEQ ID NO: 72478 - DNA, 21 bp, Homo sapiens
ctggctctgagcagatttgta

SEQ ID NO: 72479 - DNA, 16 bp, Homo sapiens
gctgttccctgcccca

SEQ ID NO: 72480 - DNA, 24 bp, Homo sapiens
ggtctgatagtgaagaaagtggct

SEQ ID NO: 72481 - DNA, 17 bp, Homo sapiens
tgctcttcctcctcctc

SEQ ID NO: 72482 - DNA, 23 bp, Homo sapiens
taaataataaacagcacacattc

SEQ ID NO: 72483 - DNA, 24 bp, Homo sapiens
ctgtctggatctggaatcttcttc

SEQ ID NO: 72484 - DNA, 24 bp, Homo sapiens
cacttgcttctgagactgttctcc

SEQ ID NO: 72485 - DNA, 17 bp, Homo sapiens
gaccccttactcaatga

SEQ ID NO: 72486 - DNA, 24 bp, Homo sapiens
ctgaggtgacatgggcttgtctct

SEQ ID NO: 72487 - DNA, 18 bp, Homo sapiens
attctagccactcccacc

SEQ ID NO: 72488 - DNA, 17 bp, Homo sapiens
accctgcccgtggagga

SEQ ID NO: 72489 - DNA, 21 bp, Homo sapiens
gtctctgtagttccacagtag

SEQ ID NO: 72490 - DNA, 17 bp, Homo sapiens
gtggacgcgcggcacat

SEQ ID NO: 72491 - DNA, 21 bp, Homo sapiens
gccatattcatcatcgacatc

SEQ ID NO: 72492 - DNA, 16 bp, Homo sapiens
gtgctggccacaggtc

SEQ ID NO: 72493 - DNA, 16 bp, Homo sapiens
cagtgacagcatgggc

SEQ ID NO: 72494 - DNA, 23 bp, Homo sapiens
gagccagcacattgtcacagata

SEQ ID NO: 72495 - DNA, 21 bp, Homo sapiens
ctcacctggtactgtttgagg

SEQ ID NO: 72496 - DNA, 18 bp, Homo sapiens
gaatgccaagcaagatgt

SEQ ID NO: 72497 - DNA, 16 bp, Homo sapiens
tgggaacacctgcacc

SEQ ID NO: 72498 - DNA, 19 bp, Homo sapiens
gcctgcagtcctactatgc

SEQ ID NO: 72499 - DNA, 21 bp, Homo sapiens
agtgcattgcccacaaagagc

SEQ ID NO: 72500 - DNA, 18 bp, Homo sapiens
gcttatggtcaatggtgt

SEQ ID NO: 72501 - DNA, 19 bp, Homo sapiens
aaaaatccgtggtaaaggc

SEQ ID NO: 72502 - DNA, 16 bp, Homo sapiens
gcccatctcgtcggcc

SEQ ID NO: 72503 - DNA, 19 bp, Homo sapiens
ggtgtcttgactctctgaa

SEQ ID NO: 72504 - DNA, 18 bp, Homo sapiens
ttgatgcgtttgtgctcc

SEQ ID NO: 72505 - DNA, 16 bp, Homo sapiens
gcgtggccgcatctgt

SEQ ID NO: 72506 - DNA, 21 bp, Homo sapiens
gggatgttgctggcagcgggt

SEQ ID NO: 72507 - DNA, 19 bp, Homo sapiens
acaacaacaacctgaacgg

SEQ ID NO: 72508 - DNA, 18 bp, Homo sapiens
tgtggtattctactgcgg

SEQ ID NO: 72509 - DNA, 18 bp, Homo sapiens
cgcgctcatcacgtacct

SEQ ID NO: 72510 - DNA, 19 bp, Homo sapiens
caccttgaccctggacttc

SEQ ID NO: 72511 - DNA, 17 bp, Homo sapiens
tgtcaaactcgtacgcc

SEQ ID NO: 72512 - DNA, 21 bp, Homo sapiens
agtttctctgcccactcggag

SEQ ID NO: 72513 - DNA, 16 bp, Homo sapiens
cctcagtggctgtgac

SEQ ID NO: 72514 - DNA, 20 bp, Homo sapiens
tatgggtttgcacagtgagc

SEQ ID NO: 72515 - DNA, 23 bp, Homo sapiens
ggttcactgtccagaggtatgtg

SEQ ID NO: 72516 - DNA, 22 bp, Homo sapiens
cttgttccatcagaacgctgtc

SEQ ID NO: 72517 - DNA, 17 bp, Homo sapiens
gttccaggctgtcctgg

SEQ ID NO: 72518 - DNA, 24 bp, Homo sapiens
ggtgaaggtgtcttacaaggtagg

SEQ ID NO: 72519 - DNA, 19 bp, Homo sapiens
ggacaaaggcccgtcttgc

SEQ ID NO: 72520 - DNA, 24 bp, Homo sapiens
tttccccactacccctgtgaggac

SEQ ID NO: 72521 - DNA, 21 bp, Homo sapiens
tgtctttgatgatgtactcgt

SEQ ID NO: 72522 - DNA, 16 bp, Homo sapiens
tgcccctcttgccacc

SEQ ID NO: 72523 - DNA, 17 bp, Homo sapiens
cccatggcctggcattt

SEQ ID NO: 72524 - DNA, 17 bp, Homo sapiens
ttgcagggatccccagc

SEQ ID NO: 72525 - DNA, 17 bp, Homo sapiens
gaagaaacttgtagggg

SEQ ID NO: 72526 - DNA, 24 bp, Homo sapiens
aagttcaacgtcttgctgacgacg

SEQ ID NO: 72527 - DNA, 18 bp, Homo sapiens
ccacctaggcctttcccc

SEQ ID NO: 72528 - DNA, 23 bp, Homo sapiens
tcatgtacttccaacggatctgc

SEQ ID NO: 72529 - DNA, 16 bp, Homo sapiens
acgtcaggcctgtgct

SEQ ID NO: 72530 - DNA, 17 bp, Homo sapiens
acctgcgtcagcttgca

SEQ ID NO: 72531 - DNA, 16 bp, Homo sapiens
ctgggcgcagagtggg

SEQ ID NO: 72532 - DNA, 20 bp, Homo sapiens
cttgttctgcagcggtgtgc

SEQ ID NO: 72533 - DNA, 17 bp, Homo sapiens
ctgattgcccactctgg

SEQ ID NO: 72534 - DNA, 23 bp, Homo sapiens
ggtgctgcagctcttgaagatgg

SEQ ID NO: 72535 - DNA, 18 bp, Homo sapiens
gcatgaagaaccaccact

SEQ ID NO: 72536 - DNA, 16 bp, Homo sapiens
aaacccaccttttccc

SEQ ID NO: 72537 - DNA, 16 bp, Homo sapiens
gcctgctgctgacggg

SEQ ID NO: 72538 - DNA, 24 bp, Homo sapiens
tcaacacgttccaaccagcaaagc

SEQ ID NO: 72539 - DNA, 20 bp, Homo sapiens
gctgctcaacttcctgctgc

SEQ ID NO: 72540 - DNA, 19 bp, Homo sapiens
ccatgcagatgcagactct

SEQ ID NO: 72541 - DNA, 24 bp, Homo sapiens
gtttaacgcaccctttgccatgac

SEQ ID NO: 72542 - DNA, 24 bp, Homo sapiens
aatggtttcctcctcattcaggtc

SEQ ID NO: 72543 - DNA, 16 bp, Homo sapiens
ctgaaaagccacgtgc

SEQ ID NO: 72544 - DNA, 24 bp, Homo sapiens
cttcttgagtcgtcggagcaagaa

SEQ ID NO: 72545 - DNA, 17 bp, Homo sapiens
cgcaccttctagtgaga

SEQ ID NO: 72546 - DNA, 23 bp, Homo sapiens
cactggtggctcccctcaaaact

SEQ ID NO: 72547 - DNA, 21 bp, Homo sapiens
ttctcctgtcttgggggcttc

SEQ ID NO: 72548 - DNA, 19 bp, Homo sapiens
gagaggccctgagcacgcc

SEQ ID NO: 72549 - DNA, 16 bp, Homo sapiens
cacaaagtgctgcggc

SEQ ID NO: 72550 - DNA, 24 bp, Homo sapiens
tttacagacccagtggcgtcatcg

SEQ ID NO: 72551 - DNA, 21 bp, Homo sapiens
gtcgcacttgatgacgtactc

SEQ ID NO: 72552 - DNA, 17 bp, Homo sapiens
gtctcctcacccacacc

SEQ ID NO: 72553 - DNA, 20 bp, Homo sapiens
gtcagcagcacgcccttggc

SEQ ID NO: 72554 - DNA, 24 bp, Homo sapiens
agggggtcagagctgggttcggat

SEQ ID NO: 72555 - DNA, 16 bp, Homo sapiens
aatgcagttgggggac

SEQ ID NO: 72556 - DNA, 21 bp, Homo sapiens
gcattatgtgtcccctgcagg

SEQ ID NO: 72557 - DNA, 18 bp, Homo sapiens
cccgatggtcagagcacg

SEQ ID NO: 72558 - DNA, 21 bp, Homo sapiens
gagtgctctaccgccacatgc

SEQ ID NO: 72559 - DNA, 22 bp, Homo sapiens
caagccaccagccatcataacc

SEQ ID NO: 72560 - DNA, 23 bp, Homo sapiens
gcatgatggtgttcatcagggtc

SEQ ID NO: 72561 - DNA, 19 bp, Homo sapiens
caaaagccactcttcccca

SEQ ID NO: 72562 - DNA, 24 bp, Homo sapiens
cggcgggctcacctcgatgtgctg

SEQ ID NO: 72563 - DNA, 17 bp, Homo sapiens
accaagcccaccccacc

SEQ ID NO: 72564 - DNA, 20 bp, Homo sapiens
agccagctctgcctaggagc

SEQ ID NO: 72565 - DNA, 17 bp, Homo sapiens
caaaggcggcaccaaga

SEQ ID NO: 72566 - DNA, 21 bp, Homo sapiens
acagatgtacaggcattacct

SEQ ID NO: 72567 - DNA, 23 bp, Homo sapiens
gatctgcaaccacccctacatgt

SEQ ID NO: 72568 - DNA, 22 bp, Homo sapiens
catctgtgtctggtctcagagc

SEQ ID NO: 72569 - DNA, 22 bp, Homo sapiens
cccatccagttgggaagcttct

SEQ ID NO: 72570 - DNA, 24 bp, Homo sapiens
cctctgagcacgagcggtgtgtgc

SEQ ID NO: 72571 - DNA, 21 bp, Homo sapiens
acataacagcagcaataaagc

SEQ ID NO: 72572 - DNA, 17 bp, Homo sapiens
cactgacccctctctcc

SEQ ID NO: 72573 - DNA, 24 bp, Homo sapiens
gatttgtattatttgctttggatt

SEQ ID NO: 72574 - DNA, 19 bp, Homo sapiens
atttacccgaggctcggta

SEQ ID NO: 72575 - DNA, 18 bp, Homo sapiens
aggatgcatgtctgtgcc

SEQ ID NO: 72576 - DNA, 21 bp, Homo sapiens
agaacagcagcactttgtggt

SEQ ID NO: 72577 - DNA, 23 bp, Homo sapiens
tgccttacctgcctgcagggttc

SEQ ID NO: 72578 - DNA, 24 bp, Homo sapiens
tatttaaagccgcgatacgcaaag

SEQ ID NO: 72579 - DNA, 18 bp, Homo sapiens
ctccaggctggacctgta

SEQ ID NO: 72580 - DNA, 22 bp, Homo sapiens
acaacaaaaccctgtaagaaac

SEQ ID NO: 72581 - DNA, 24 bp, Homo sapiens
aattcttcccaaactccgagcaac

SEQ ID NO: 72582 - DNA, 16 bp, Homo sapiens
ctcaccctgcctcaca

SEQ ID NO: 72583 - DNA, 22 bp, Homo sapiens
atgaccatcatggaagattact

SEQ ID NO: 72584 - DNA, 17 bp, Homo sapiens
cgagtgcccaagatgct

SEQ ID NO: 72585 - DNA, 24 bp, Homo sapiens
ttttcagcagcatgccccggtcct

SEQ ID NO: 72586 - DNA, 17 bp, Homo sapiens
ggatctggggatgctgg

SEQ ID NO: 72587 - DNA, 16 bp, Homo sapiens
ccagcccgggtgctga

SEQ ID NO: 72588 - DNA, 19 bp, Homo sapiens
ttggtgtccccactctacc

SEQ ID NO: 72589 - DNA, 21 bp, Homo sapiens
ggtgaggattccagtcgctgt

SEQ ID NO: 72590 - DNA, 24 bp, Homo sapiens
gcccgtcaggaaccacgaaggcgg

SEQ ID NO: 72591 - DNA, 16 bp, Homo sapiens
aggcacccccttcctt

SEQ ID NO: 72592 - DNA, 21 bp, Homo sapiens
tgagtacttcatcttcctgct

SEQ ID NO: 72593 - DNA, 19 bp, Homo sapiens
ctggggtccaagacaatgt

SEQ ID NO: 72594 - DNA, 24 bp, Homo sapiens
tcggcagacactgtgatcattttt

SEQ ID NO: 72595 - DNA, 18 bp, Homo sapiens
tctgttttcatgcggcgg

SEQ ID NO: 72596 - DNA, 16 bp, Homo sapiens
gcagaggcggagcaca

SEQ ID NO: 72597 - DNA, 19 bp, Homo sapiens
acacctctccagctagtgt

SEQ ID NO: 72598 - DNA, 20 bp, Homo sapiens
ccacgttgagcttgtacttg

SEQ ID NO: 72599 - DNA, 23 bp, Homo sapiens
ctcctttgggactgactggcacc

SEQ ID NO: 72600 - DNA, 24 bp, Homo sapiens
tgcaggaaggcgcgccgctcatgg

SEQ ID NO: 72601 - DNA, 16 bp, Homo sapiens
cagcagaacgaggtgc

SEQ ID NO: 72602 - DNA, 17 bp, Homo sapiens
ccggtgctgggctcacc

SEQ ID NO: 72603 - DNA, 23 bp, Homo sapiens
gaagatcctagctgcagccaagt

SEQ ID NO: 72604 - DNA, 24 bp, Homo sapiens
gtgcaaaaaaggtaaaaaaacaaa

SEQ ID NO: 72605 - DNA, 20 bp, Homo sapiens
tgttcgaccagaagtcctcc

SEQ ID NO: 72606 - DNA, 22 bp, Homo sapiens
ctctttccgttcagcccacact

SEQ ID NO: 72607 - DNA, 22 bp, Homo sapiens
acgaggagcaggatgaggtgag

SEQ ID NO: 72608 - DNA, 20 bp, Homo sapiens
tgctgcagtgtctgctctgt

SEQ ID NO: 72609 - DNA, 24 bp, Homo sapiens
tttttgcatccctttggagtaaag

SEQ ID NO: 72610 - DNA, 16 bp, Homo sapiens
gttgacgcccgctggc

SEQ ID NO: 72611 - DNA, 24 bp, Homo sapiens
tgctttttctttgaagtggttttt

SEQ ID NO: 72612 - DNA, 24 bp, Homo sapiens
attgaatgggcatggagactgaac

SEQ ID NO: 72613 - DNA, 24 bp, Homo sapiens
ctggagactgaagtcctctattta

SEQ ID NO: 72614 - DNA, 17 bp, Homo sapiens
cacgctccgtgggacca

SEQ ID NO: 72615 - DNA, 23 bp, Homo sapiens
gccagcttcgcccacactgcccc

SEQ ID NO: 72616 - DNA, 16 bp, Homo sapiens
gctgcggtggatgggg

SEQ ID NO: 72617 - DNA, 17 bp, Homo sapiens
ggcacctcgtcttcctc

SEQ ID NO: 72618 - DNA, 21 bp, Homo sapiens
ctttcgctgccgtgtgggtcc

SEQ ID NO: 72619 - DNA, 20 bp, Homo sapiens
tgaacagatcaaactcctcc

SEQ ID NO: 72620 - DNA, 22 bp, Homo sapiens
cacggacgccgccgctcgcctc

SEQ ID NO: 72621 - DNA, 22 bp, Homo sapiens
ctcctggtggcagcagagtggg

SEQ ID NO: 72622 - DNA, 24 bp, Homo sapiens
cggcactgacagtttgcaatctta

SEQ ID NO: 72623 - DNA, 16 bp, Homo sapiens
tccctggctccctgac

SEQ ID NO: 72624 - DNA, 22 bp, Homo sapiens
caaccagatgatcgcccggcac

SEQ ID NO: 72625 - DNA, 17 bp, Homo sapiens
ctcctcgcgcctgcggt

SEQ ID NO: 72626 - DNA, 24 bp, Homo sapiens
gctactgtttaactctcgcagcag

SEQ ID NO: 72627 - DNA, 24 bp, Homo sapiens
ccttgatgatccacgaggggagct

SEQ ID NO: 72628 - DNA, 22 bp, Homo sapiens
gtgttctggctctagcgtgccc

SEQ ID NO: 72629 - DNA, 18 bp, Homo sapiens
acatcttctcctcctcct

SEQ ID NO: 72630 - DNA, 16 bp, Homo sapiens
caccagcgcatggacc

SEQ ID NO: 72631 - DNA, 20 bp, Homo sapiens
cttctccgtcagtgagtcgc

SEQ ID NO: 72632 - DNA, 18 bp, Homo sapiens
gcgcctcatggaggagga

SEQ ID NO: 72633 - DNA, 16 bp, Homo sapiens
ctggcgctggcctgcg

SEQ ID NO: 72634 - DNA, 18 bp, Homo sapiens
ggagcggctgacctgtga

SEQ ID NO: 72635 - DNA, 19 bp, Homo sapiens
aggaaagcattttggaccc

SEQ ID NO: 72636 - DNA, 20 bp, Homo sapiens
aaggaggtggactacagcga

SEQ ID NO: 72637 - DNA, 18 bp, Homo sapiens
tgaccatccctggcccac

SEQ ID NO: 72638 - DNA, 21 bp, Homo sapiens
gctgtgtcatggatatctttt

SEQ ID NO: 72639 - DNA, 16 bp, Homo sapiens
aatgagaccctgtctc

SEQ ID NO: 72640 - DNA, 16 bp, Homo sapiens
cgcacgtgtgcagaac

SEQ ID NO: 72641 - DNA, 24 bp, Homo sapiens
gaacaaggggaggctaaattaggg

SEQ ID NO: 72642 - DNA, 17 bp, Homo sapiens
tccccagtgttgtgcag

SEQ ID NO: 72643 - DNA, 24 bp, Homo sapiens
aattttgttgtagaaaattacagg

SEQ ID NO: 72644 - DNA, 24 bp, Homo sapiens
atcatatataacataaaatttacc

SEQ ID NO: 72645 - DNA, 19 bp, Homo sapiens
caattccagcgtggccttc

SEQ ID NO: 72646 - DNA, 18 bp, Homo sapiens
tcttcccatcttagcctc

SEQ ID NO: 72647 - DNA, 16 bp, Homo sapiens
tgccctcctcgatggc

SEQ ID NO: 72648 - DNA, 17 bp, Homo sapiens
cccgagccagtcaagct

SEQ ID NO: 72649 - DNA, 16 bp, Homo sapiens
tcgcttgcgcttccgt

SEQ ID NO: 72650 - DNA, 18 bp, Homo sapiens
gcccctgggattgcgtcg

SEQ ID NO: 72651 - DNA, 17 bp, Homo sapiens
tctcgtcgtccttgtcg

SEQ ID NO: 72652 - DNA, 24 bp, Homo sapiens
ttttactactattgaccctgaagg

SEQ ID NO: 72653 - DNA, 20 bp, Homo sapiens
gtgggttaggggagagtttc

SEQ ID NO: 72654 - DNA, 19 bp, Homo sapiens
tccggcagaagaaatcatc

SEQ ID NO: 72655 - DNA, 22 bp, Homo sapiens
ttacctgtccttgtacttgatc

SEQ ID NO: 72656 - DNA, 24 bp, Homo sapiens
ctccaccccgaccaccagcacccg

SEQ ID NO: 72657 - DNA, 24 bp, Homo sapiens
cagagtgcagatgccaggcctgct

SEQ ID NO: 72658 - DNA, 18 bp, Homo sapiens
gccgcctgccgagaaact

SEQ ID NO: 72659 - DNA, 22 bp, Homo sapiens
cagtcagtgtttgtggatgagt

SEQ ID NO: 72660 - DNA, 24 bp, Homo sapiens
gaagaagattgtggatgccgtgat

SEQ ID NO: 72661 - DNA, 19 bp, Homo sapiens
caagaaatagctcctgagc

SEQ ID NO: 72662 - DNA, 18 bp, Homo sapiens
ttgaagtccacgggcttg

SEQ ID NO: 72663 - DNA, 21 bp, Homo sapiens
ctgaggtggggtgggggctcc

SEQ ID NO: 72664 - DNA, 24 bp, Homo sapiens
gtcagactcccctccgggcacatg

SEQ ID NO: 72665 - DNA, 20 bp, Homo sapiens
cttgcagcagcagtggacgt

SEQ ID NO: 72666 - DNA, 20 bp, Homo sapiens
gtggtttctggtcattctgc

SEQ ID NO: 72667 - DNA, 24 bp, Homo sapiens
gctgcccgagtactacgagctcat

SEQ ID NO: 72668 - DNA, 19 bp, Homo sapiens
tacaaggaaccccaaaagc

SEQ ID NO: 72669 - DNA, 16 bp, Homo sapiens
ttgaggctgcggtact

SEQ ID NO: 72670 - DNA, 24 bp, Homo sapiens
ttcggccacatcctcataggcacg

SEQ ID NO: 72671 - DNA, 17 bp, Homo sapiens
gccctccaggttgaagg

SEQ ID NO: 72672 - DNA, 23 bp, Homo sapiens
gcctgcgggcaggcgaggcgggg

SEQ ID NO: 72673 - DNA, 17 bp, Homo sapiens
ttgggtcaaagcccagc

SEQ ID NO: 72674 - DNA, 23 bp, Homo sapiens
gagcgcattcgcaaccacaagta

SEQ ID NO: 72675 - DNA, 17 bp, Homo sapiens
aaccaccacagctagcg

SEQ ID NO: 72676 - DNA, 16 bp, Homo sapiens
ggctgaagccccgacc

SEQ ID NO: 72677 - DNA, 21 bp, Homo sapiens
tcctccttctcgattttctgc

SEQ ID NO: 72678 - DNA, 24 bp, Homo sapiens
aggggcaacacagggctggggctg

SEQ ID NO: 72679 - DNA, 16 bp, Homo sapiens
ttcggagccttcctcc

SEQ ID NO: 72680 - DNA, 19 bp, Homo sapiens
actcaagcccctggtgtct

SEQ ID NO: 72681 - DNA, 17 bp, Homo sapiens
ttgggggctctcgggcc

SEQ ID NO: 72682 - DNA, 24 bp, Homo sapiens
tgcagtcggtcttcaccagcgtgc

SEQ ID NO: 72683 - DNA, 16 bp, Homo sapiens
cccccacagcaagggg

SEQ ID NO: 72684 - DNA, 23 bp, Homo sapiens
gagagtgaggaggaggaagaggg

SEQ ID NO: 72685 - DNA, 23 bp, Homo sapiens
atcttcactttgacggaccgagc

SEQ ID NO: 72686 - DNA, 17 bp, Homo sapiens
ttcaggacgccggggtt

SEQ ID NO: 72687 - DNA, 16 bp, Homo sapiens
ccggccgcccttcagc

SEQ ID NO: 72688 - DNA, 17 bp, Homo sapiens
gctcccagacgcccctt

SEQ ID NO: 72689 - DNA, 20 bp, Homo sapiens
ctcttgttcctcctcactgt

SEQ ID NO: 72690 - DNA, 18 bp, Homo sapiens
tctttccctcccggtccc

SEQ ID NO: 72691 - DNA, 19 bp, Homo sapiens
gatgcctcctgccacatgc

SEQ ID NO: 72692 - DNA, 19 bp, Homo sapiens
aaggcacaggaccggctga

SEQ ID NO: 72693 - DNA, 23 bp, Homo sapiens
ttcccacctgcagcgtgggggcg

SEQ ID NO: 72694 - DNA, 20 bp, Homo sapiens
aagccggtcgtgagtgacga

SEQ ID NO: 72695 - DNA, 17 bp, Homo sapiens
ccctgccacatactggc

SEQ ID NO: 72696 - DNA, 22 bp, Homo sapiens
agtcttcttcgctgccacttcc

SEQ ID NO: 72697 - DNA, 24 bp, Homo sapiens
gattacgggcgtgagccaccgtgc

SEQ ID NO: 72698 - DNA, 22 bp, Homo sapiens
cctatgccatctcagctctgga

SEQ ID NO: 72699 - DNA, 24 bp, Homo sapiens
atttaaagtttggcaggtccctgg

SEQ ID NO: 72700 - DNA, 24 bp, Homo sapiens
ttatacagttttactccaagtctg

SEQ ID NO: 72701 - DNA, 17 bp, Homo sapiens
gtcccctctccaggacc

SEQ ID NO: 72702 - DNA, 17 bp, Homo sapiens
acaaacagtcctacagc

SEQ ID NO: 72703 - DNA, 16 bp, Homo sapiens
tggtcaaggccatggg

SEQ ID NO: 72704 - DNA, 21 bp, Homo sapiens
gaggcaccggaatctcctagt

SEQ ID NO: 72705 - DNA, 18 bp, Homo sapiens
acagctgagccgcgaact

SEQ ID NO: 72706 - DNA, 17 bp, Homo sapiens
gaccccaaaccactccc

SEQ ID NO: 72707 - DNA, 18 bp, Homo sapiens
ggagacgcagcagaaggt

SEQ ID NO: 72708 - DNA, 17 bp, Homo sapiens
gcctcacgcgcagttgc

SEQ ID NO: 72709 - DNA, 16 bp, Homo sapiens
gagcgcaacaacatcg

SEQ ID NO: 72710 - DNA, 16 bp, Homo sapiens
cgcagcgtgtccagtt

SEQ ID NO: 72711 - DNA, 16 bp, Homo sapiens
ggcgcgggcaaggcca

SEQ ID NO: 72712 - DNA, 22 bp, Homo sapiens
ggtcattgtcactggtcagctc

SEQ ID NO: 72713 - DNA, 16 bp, Homo sapiens
cagcgcgctcaagggg

SEQ ID NO: 72714 - DNA, 24 bp, Homo sapiens
tggccttgtcgcggctcttgcgca

SEQ ID NO: 72715 - DNA, 16 bp, Homo sapiens
cccgtgcccagcccgc

SEQ ID NO: 72716 - DNA, 19 bp, Homo sapiens
ctgttcttgtccaccgact

SEQ ID NO: 72717 - DNA, 21 bp, Homo sapiens
agatcgcgcactgcggccaga

SEQ ID NO: 72718 - DNA, 24 bp, Homo sapiens
gaggtcggggtgcgcggcgcccag

SEQ ID NO: 72719 - DNA, 19 bp, Homo sapiens
ctcgcacccgcacccgcac

SEQ ID NO: 72720 - DNA, 23 bp, Homo sapiens
gcaccgagcgcgggcgcggggtg

SEQ ID NO: 72721 - DNA, 21 bp, Homo sapiens
aggatgaagccaagcagctgg

SEQ ID NO: 72722 - DNA, 18 bp, Homo sapiens
gctgcaggtgcatggtgg

SEQ ID NO: 72723 - DNA, 16 bp, Homo sapiens
ggggcgccggcgctgc

SEQ ID NO: 72724 - DNA, 17 bp, Homo sapiens
gtgcgcgggcggcgggt

SEQ ID NO: 72725 - DNA, 24 bp, Homo sapiens
cgcccggctacggctgcgcggccg

SEQ ID NO: 72726 - DNA, 18 bp, Homo sapiens
ggtaagggaagaggccgg

SEQ ID NO: 72727 - DNA, 24 bp, Homo sapiens
gactacccgggcgcgcccgcgggc

SEQ ID NO: 72728 - DNA, 19 bp, Homo sapiens
tgcttgatcaccagcggcc

SEQ ID NO: 72729 - DNA, 16 bp, Homo sapiens
gaaggccaaggcggcc

SEQ ID NO: 72730 - DNA, 16 bp, Homo sapiens
ccaggtagccggcggc

SEQ ID NO: 72731 - DNA, 18 bp, Homo sapiens
cggccgccttcaacgacg

SEQ ID NO: 72732 - DNA, 16 bp, Homo sapiens
gcatgacggcgccgcc

SEQ ID NO: 72733 - DNA, 16 bp, Homo sapiens
agccgctgggcggcat

SEQ ID NO: 72734 - DNA, 21 bp, Homo sapiens
gccgccgcccgtggggcccac

SEQ ID NO: 72735 - DNA, 16 bp, Homo sapiens
cgccttcggctttccc

SEQ ID NO: 72736 - DNA, 18 bp, Homo sapiens
ggtcggccaggaactcgt

SEQ ID NO: 72737 - DNA, 23 bp, Homo sapiens
ctacgaggcggagccgcggcccc

SEQ ID NO: 72738 - DNA, 19 bp, Homo sapiens
gtctcgtgctcgcagatgc

SEQ ID NO: 72739 - DNA, 18 bp, Homo sapiens
aggctcgccatgccggga

SEQ ID NO: 72740 - DNA, 22 bp, Homo sapiens
ggaggctgcgcggggcccgcgc

SEQ ID NO: 72741 - DNA, 16 bp, Homo sapiens
gggcgagcagggtctc

SEQ ID NO: 72742 - DNA, 24 bp, Homo sapiens
ggctctgcaggtggctgctcatcg

SEQ ID NO: 72743 - DNA, 18 bp, Homo sapiens
cgggtataaaagctgggc

SEQ ID NO: 72744 - DNA, 24 bp, Homo sapiens
tccatgggggagttagagttctcc

SEQ ID NO: 72745 - DNA, 18 bp, Homo sapiens
cgccgccgcagcccgggg

SEQ ID NO: 72746 - DNA, 18 bp, Homo sapiens
ggcgtcgccgccgcccac

SEQ ID NO: 72747 - DNA, 23 bp, Homo sapiens
gagcgcggcgctgtgccgcgctg

SEQ ID NO: 72748 - DNA, 16 bp, Homo sapiens
ccgccgcttgccatcc

SEQ ID NO: 72749 - DNA, 23 bp, Homo sapiens
ggtgcagagagctatgttagtac

SEQ ID NO: 72750 - DNA, 20 bp, Homo sapiens
catcatcatcccagaggccc

SEQ ID NO: 72751 - DNA, 19 bp, Homo sapiens
gcatgggatgccatggaga

SEQ ID NO: 72752 - DNA, 21 bp, Homo sapiens
tgttctgcctccatctcctcc

SEQ ID NO: 72753 - DNA, 19 bp, Homo sapiens
aagctccaacttgcccagc

SEQ ID NO: 72754 - DNA, 16 bp, Homo sapiens
ccccctccaggactga

SEQ ID NO: 72755 - DNA, 23 bp, Homo sapiens
gggtgcccccaaagcgggcccgt

SEQ ID NO: 72756 - DNA, 16 bp, Homo sapiens
aaggcaagaccagggg

SEQ ID NO: 72757 - DNA, 24 bp, Homo sapiens
tcccaattcgaggaggacctggca

SEQ ID NO: 72758 - DNA, 21 bp, Homo sapiens
aggattcaaaattggccagag

SEQ ID NO: 72759 - DNA, 17 bp, Homo sapiens
aggagctgcagtcagtc

SEQ ID NO: 72760 - DNA, 18 bp, Homo sapiens
ggccagaatcactgtagg

SEQ ID NO: 72761 - DNA, 17 bp, Homo sapiens
ccagcgaggatctatgg

SEQ ID NO: 72762 - DNA, 24 bp, Homo sapiens
ctcttccaagtttcctgcctgacc

SEQ ID NO: 72763 - DNA, 23 bp, Homo sapiens
gtcaatctccaactgttggaaga

SEQ ID NO: 72764 - DNA, 18 bp, Homo sapiens
atcctggccggggaagac

SEQ ID NO: 72765 - DNA, 16 bp, Homo sapiens
ggagcgcagggcccca

SEQ ID NO: 72766 - DNA, 16 bp, Homo sapiens
aggtcccaccatcagc

SEQ ID NO: 72767 - DNA, 24 bp, Homo sapiens
ctggcccggcctctgccccaggag

SEQ ID NO: 72768 - DNA, 18 bp, Homo sapiens
agacagagcccctcatct

SEQ ID NO: 72769 - DNA, 20 bp, Homo sapiens
ggtctgttctgtcactacag

SEQ ID NO: 72770 - DNA, 16 bp, Homo sapiens
ccccaggcacaggctg

SEQ ID NO: 72771 - DNA, 20 bp, Homo sapiens
tgaaatggacacagggaacg

SEQ ID NO: 72772 - DNA, 16 bp, Homo sapiens
tcggtgaccccgaagg

SEQ ID NO: 72773 - DNA, 19 bp, Homo sapiens
tatttcgaggctgtggaga

SEQ ID NO: 72774 - DNA, 24 bp, Homo sapiens
caccagggggcgctggggtgtaga

SEQ ID NO: 72775 - DNA, 24 bp, Homo sapiens
taccctgtgaccccacaggcccag

SEQ ID NO: 72776 - DNA, 17 bp, Homo sapiens
agaggtgcagggggctc

SEQ ID NO: 72777 - DNA, 18 bp, Homo sapiens
cgtgcctgtgctccgcgc

SEQ ID NO: 72778 - DNA, 19 bp, Homo sapiens
agctcccgttgcaggtcac

SEQ ID NO: 72779 - DNA, 24 bp, Homo sapiens
acatccacggcttcgctccctact

SEQ ID NO: 72780 - DNA, 16 bp, Homo sapiens
acggccggcccagtca

SEQ ID NO: 72781 - DNA, 17 bp, Homo sapiens
cccctccctgagccact

SEQ ID NO: 72782 - DNA, 16 bp, Homo sapiens
tccaacccgctgatcc

SEQ ID NO: 72783 - DNA, 17 bp, Homo sapiens
ccgagcacatgggtgac

SEQ ID NO: 72784 - DNA, 17 bp, Homo sapiens
gtacccaaacatgcctg

SEQ ID NO: 72785 - DNA, 24 bp, Homo sapiens
gggacagtcgcggggggagggagc

SEQ ID NO: 72786 - DNA, 16 bp, Homo sapiens
cacgaggcgcggcagc

SEQ ID NO: 72787 - DNA, 24 bp, Homo sapiens
cgagagagtgagtgctcccccagg

SEQ ID NO: 72788 - DNA, 23 bp, Homo sapiens
gtagggcgcgaagctgggcgtgc

SEQ ID NO: 72789 - DNA, 20 bp, Homo sapiens
tcccagcttcttccatccac

SEQ ID NO: 72790 - DNA, 16 bp, Homo sapiens
agaagtgaggcagagg

SEQ ID NO: 72791 - DNA, 16 bp, Homo sapiens
gcatcaccgtggcgct

SEQ ID NO: 72792 - DNA, 20 bp, Homo sapiens
atgaacctggagggggctgg

SEQ ID NO: 72793 - DNA, 17 bp, Homo sapiens
gcatccgtgtggcaggc

SEQ ID NO: 72794 - DNA, 16 bp, Homo sapiens
tcagggcgtatttccc

SEQ ID NO: 72795 - DNA, 21 bp, Homo sapiens
gactttgagatccggtacggc

SEQ ID NO: 72796 - DNA, 24 bp, Homo sapiens
gtggcagcagggtaccagctcccc

SEQ ID NO: 72797 - DNA, 17 bp, Homo sapiens
cccctgtccactgaccc

SEQ ID NO: 72798 - DNA, 17 bp, Homo sapiens
tccgcctccagctggca

SEQ ID NO: 72799 - DNA, 16 bp, Homo sapiens
aactggctggagctcc

SEQ ID NO: 72800 - DNA, 16 bp, Homo sapiens
gggcgcaatgcgctgc

SEQ ID NO: 72801 - DNA, 16 bp, Homo sapiens
cttcccagggcagggc

SEQ ID NO: 72802 - DNA, 16 bp, Homo sapiens
gcccggggacagacct

SEQ ID NO: 72803 - DNA, 19 bp, Homo sapiens
cccacaggctacgcagtgc

SEQ ID NO: 72804 - DNA, 20 bp, Homo sapiens
attccctccaccggacctgc

SEQ ID NO: 72805 - DNA, 24 bp, Homo sapiens
ggtcagtcacccaccggaagggcc

SEQ ID NO: 72806 - DNA, 20 bp, Homo sapiens
actccatctggccacatggg

SEQ ID NO: 72807 - DNA, 17 bp, Homo sapiens
gagtgcgccggccgcaa

SEQ ID NO: 72808 - DNA, 18 bp, Homo sapiens
tggaggtgagagcagagc

SEQ ID NO: 72809 - DNA, 16 bp, Homo sapiens
ccccccagcgcaggcc

SEQ ID NO: 72810 - DNA, 22 bp, Homo sapiens
ggggacagccccggggagatgg

SEQ ID NO: 72811 - DNA, 16 bp, Homo sapiens
cacccaggatgggggc

SEQ ID NO: 72812 - DNA, 24 bp, Homo sapiens
ggcaggagtcaggcccctgcatcc

SEQ ID NO: 72813 - DNA, 16 bp, Homo sapiens
gtggagcgagagctac

SEQ ID NO: 72814 - DNA, 23 bp, Homo sapiens
accctgtcatccagatctgctcg

SEQ ID NO: 72815 - DNA, 18 bp, Homo sapiens
cacccaggagctgatggc

SEQ ID NO: 72816 - DNA, 17 bp, Homo sapiens
cgctcaccctgcggccc

SEQ ID NO: 72817 - DNA, 21 bp, Homo sapiens
ctaattgcacaggggcccacc

SEQ ID NO: 72818 - DNA, 24 bp, Homo sapiens
ggaggaggacctgctgcaggtagc

SEQ ID NO: 72819 - DNA, 17 bp, Homo sapiens
ggtgtctgtgggtctgg

SEQ ID NO: 72820 - DNA, 23 bp, Homo sapiens
atgttgtaaccggtgatcacgtc

SEQ ID NO: 72821 - DNA, 20 bp, Homo sapiens
ggttctgcaggattttcagg

SEQ ID NO: 72822 - DNA, 16 bp, Homo sapiens
caccttgagggtctgg

SEQ ID NO: 72823 - DNA, 16 bp, Homo sapiens
gaggcagggcaaccac

SEQ ID NO: 72824 - DNA, 16 bp, Homo sapiens
cagggcccggaggcca

SEQ ID NO: 72825 - DNA, 24 bp, Homo sapiens
tccaccttcatccgtatcatggac

SEQ ID NO: 72826 - DNA, 18 bp, Homo sapiens
ggctgaggcacacagagc

SEQ ID NO: 72827 - DNA, 24 bp, Homo sapiens
ttcgaccttccgtacctcatctct

SEQ ID NO: 72828 - DNA, 22 bp, Homo sapiens
gccacacggcccaggaaaggga

SEQ ID NO: 72829 - DNA, 24 bp, Homo sapiens
gtctttctgcccccagggttgctc

SEQ ID NO: 72830 - DNA, 16 bp, Homo sapiens
ggcccgtctgcttgga

SEQ ID NO: 72831 - DNA, 24 bp, Homo sapiens
ggtctcaatctccgttcttcaggc

SEQ ID NO: 72832 - DNA, 24 bp, Homo sapiens
cacctcccgcccatacctgcagca

SEQ ID NO: 72833 - DNA, 22 bp, Homo sapiens
cctcctcaggtacaaacattcc

SEQ ID NO: 72834 - DNA, 16 bp, Homo sapiens
ctggtgggctgcgggc

SEQ ID NO: 72835 - DNA, 18 bp, Homo sapiens
gactcttcattccagtcc

SEQ ID NO: 72836 - DNA, 19 bp, Homo sapiens
gcattgagcgtgtaggagc

SEQ ID NO: 72837 - DNA, 17 bp, Homo sapiens
cgcgtgcagatggacat

SEQ ID NO: 72838 - DNA, 16 bp, Homo sapiens
tgatgatgctgtgctg

SEQ ID NO: 72839 - DNA, 16 bp, Homo sapiens
ttggaaggccactgcc

SEQ ID NO: 72840 - DNA, 17 bp, Homo sapiens
gaagggtgaggtggagg

SEQ ID NO: 72841 - DNA, 16 bp, Homo sapiens
gcgggagtacaagctc

SEQ ID NO: 72842 - DNA, 22 bp, Homo sapiens
taacagcaggtcaaagagtgag

SEQ ID NO: 72843 - DNA, 16 bp, Homo sapiens
cagaaggaggacgtgc

SEQ ID NO: 72844 - DNA, 20 bp, Homo sapiens
cacccagaccctgacgactt

SEQ ID NO: 72845 - DNA, 16 bp, Homo sapiens
gccgcagtggcaggta

SEQ ID NO: 72846 - DNA, 17 bp, Homo sapiens
tcaccctgacccccact

SEQ ID NO: 72847 - DNA, 16 bp, Homo sapiens
cagtgaccctcgccat

SEQ ID NO: 72848 - DNA, 16 bp, Homo sapiens
ctgaccccatccgtgc

SEQ ID NO: 72849 - DNA, 18 bp, Homo sapiens
caacagctgggatacgac

SEQ ID NO: 72850 - DNA, 17 bp, Homo sapiens
tactgcctgaaggatgc

SEQ ID NO: 72851 - DNA, 16 bp, Homo sapiens
ggagggggccacagac

SEQ ID NO: 72852 - DNA, 19 bp, Homo sapiens
ctggtgaacgccgtggaga

SEQ ID NO: 72853 - DNA, 16 bp, Homo sapiens
gggccgtgcggattgg

SEQ ID NO: 72854 - DNA, 21 bp, Homo sapiens
cgtggccagcaggtcaaggtc

SEQ ID NO: 72855 - DNA, 16 bp, Homo sapiens
catcagcagcccctcg

SEQ ID NO: 72856 - DNA, 20 bp, Homo sapiens
ctcgccaccccccaccaggc

SEQ ID NO: 72857 - DNA, 16 bp, Homo sapiens
ggctcgatgacagtgg

SEQ ID NO: 72858 - DNA, 21 bp, Homo sapiens
ctttttctccccactcccaat

SEQ ID NO: 72859 - DNA, 23 bp, Homo sapiens
caccttctcccctcccaggccat

SEQ ID NO: 72860 - DNA, 24 bp, Homo sapiens
tgtggagcaggggcctcgctatgt

SEQ ID NO: 72861 - DNA, 17 bp, Homo sapiens
cgaggactacacgggag

SEQ ID NO: 72862 - DNA, 17 bp, Homo sapiens
gtcttgtggcctcaccc

SEQ ID NO: 72863 - DNA, 24 bp, Homo sapiens
ttttttgtagagatagggttttgc

SEQ ID NO: 72864 - DNA, 16 bp, Homo sapiens
gggaggggagcagccg

SEQ ID NO: 72865 - DNA, 18 bp, Homo sapiens
ctgcctcagcctcccaat

SEQ ID NO: 72866 - DNA, 24 bp, Homo sapiens
catcatgatggacgggtacagcga

SEQ ID NO: 72867 - DNA, 24 bp, Homo sapiens
cagccaatgaatgatttttttttt

SEQ ID NO: 72868 - DNA, 18 bp, Homo sapiens
ccagtttctgtgcagtcc

SEQ ID NO: 72869 - DNA, 24 bp, Homo sapiens
atgggaactcctagccctgactcc

SEQ ID NO: 72870 - DNA, 16 bp, Homo sapiens
cccccaagggaaggcc

SEQ ID NO: 72871 - DNA, 16 bp, Homo sapiens
cctggacttctcctcg

SEQ ID NO: 72872 - DNA, 16 bp, Homo sapiens
gcacccctccactccc

SEQ ID NO: 72873 - DNA, 16 bp, Homo sapiens
ctccttcggcccggga

SEQ ID NO: 72874 - DNA, 24 bp, Homo sapiens
tgatgaactgatcctcagtcaggc

SEQ ID NO: 72875 - DNA, 20 bp, Homo sapiens
cacaggcccagagatagtag

SEQ ID NO: 72876 - DNA, 20 bp, Homo sapiens
tctggggcagcagccccttc

SEQ ID NO: 72877 - DNA, 18 bp, Homo sapiens
aaggccaggaccgtaggg

SEQ ID NO: 72878 - DNA, 18 bp, Homo sapiens
ctccaagcaggcgatctc

SEQ ID NO: 72879 - DNA, 19 bp, Homo sapiens
caacatcttccaacccagc

SEQ ID NO: 72880 - DNA, 16 bp, Homo sapiens
cagccctggggtgtcc

SEQ ID NO: 72881 - DNA, 21 bp, Homo sapiens
gagtttgtgaagacctcagtg

SEQ ID NO: 72882 - DNA, 16 bp, Homo sapiens
tgccaggaggggatgc

SEQ ID NO: 72883 - DNA, 20 bp, Homo sapiens
gtgcgtgaattagcacaagg

SEQ ID NO: 72884 - DNA, 17 bp, Homo sapiens
cggagggggtctgtctc

SEQ ID NO: 72885 - DNA, 22 bp, Homo sapiens
cagaagcttctgtgcagtgcac

SEQ ID NO: 72886 - DNA, 20 bp, Homo sapiens
ccagtgaagccgtatacgga

SEQ ID NO: 72887 - DNA, 18 bp, Homo sapiens
gaccaatgcccaggtgcc

SEQ ID NO: 72888 - DNA, 16 bp, Homo sapiens
gagtgcccacctgtga

SEQ ID NO: 72889 - DNA, 18 bp, Homo sapiens
cgagctggccaaggagac

SEQ ID NO: 72890 - DNA, 16 bp, Homo sapiens
catggagccctggtct

SEQ ID NO: 72891 - DNA, 16 bp, Homo sapiens
gcgctgaaggtgagcg

SEQ ID NO: 72892 - DNA, 19 bp, Homo sapiens
gcatcctctctctagaagg

SEQ ID NO: 72893 - DNA, 20 bp, Homo sapiens
agttgccgtgcctggagatc

SEQ ID NO: 72894 - DNA, 24 bp, Homo sapiens
ttctcgatcatctgacgtccgaac

SEQ ID NO: 72895 - DNA, 17 bp, Homo sapiens
ggggcagagtggcttgt

SEQ ID NO: 72896 - DNA, 17 bp, Homo sapiens
tgctgtagccattctcc

SEQ ID NO: 72897 - DNA, 16 bp, Homo sapiens
ccggcccacgttcact

SEQ ID NO: 72898 - DNA, 16 bp, Homo sapiens
catccccccacctgcc

SEQ ID NO: 72899 - DNA, 16 bp, Homo sapiens
agagcgtcacggggtt

SEQ ID NO: 72900 - DNA, 18 bp, Homo sapiens
agagtgggcagggtgtga

SEQ ID NO: 72901 - DNA, 24 bp, Homo sapiens
ggagtctaagtacacagtggagaa

SEQ ID NO: 72902 - DNA, 16 bp, Homo sapiens
caccatacaccacctg

SEQ ID NO: 72903 - DNA, 18 bp, Homo sapiens
cgtgcctcctggtcacac

SEQ ID NO: 72904 - DNA, 16 bp, Homo sapiens
gccatcgcctcagcca

SEQ ID NO: 72905 - DNA, 18 bp, Homo sapiens
cattagccacctgccacc

SEQ ID NO: 72906 - DNA, 16 bp, Homo sapiens
actccagccggatggg

SEQ ID NO: 72907 - DNA, 16 bp, Homo sapiens
acacatccccaccgcc

SEQ ID NO: 72908 - DNA, 19 bp, Homo sapiens
tgagtaccctgatgagggc

SEQ ID NO: 72909 - DNA, 18 bp, Homo sapiens
gattcggcgtgtcctcgg

SEQ ID NO: 72910 - DNA, 20 bp, Homo sapiens
aatctaagcagcaacatccc

SEQ ID NO: 72911 - DNA, 17 bp, Homo sapiens
gtcaggtcacttcccgt

SEQ ID NO: 72912 - DNA, 21 bp, Homo sapiens
agcaggtatgggaagtagacc

SEQ ID NO: 72913 - DNA, 17 bp, Homo sapiens
gtccatcccaccaggct

SEQ ID NO: 72914 - DNA, 16 bp, Homo sapiens
cgtcgggccgggagga

SEQ ID NO: 72915 - DNA, 23 bp, Homo sapiens
ccctgtctaccttcagtttctgg

SEQ ID NO: 72916 - DNA, 16 bp, Homo sapiens
gagggggcagttgtcc

SEQ ID NO: 72917 - DNA, 17 bp, Homo sapiens
gtcttggccatggctcc

SEQ ID NO: 72918 - DNA, 16 bp, Homo sapiens
aggaggccccacacac

SEQ ID NO: 72919 - DNA, 17 bp, Homo sapiens
ggcctgctcttctcctc

SEQ ID NO: 72920 - DNA, 19 bp, Homo sapiens
gcctagactcctgggtctg

SEQ ID NO: 72921 - DNA, 16 bp, Homo sapiens
aggccgtgcgcaggga

SEQ ID NO: 72922 - DNA, 18 bp, Homo sapiens
gatctgaggaggaggggg

SEQ ID NO: 72923 - DNA, 16 bp, Homo sapiens
ccgcctgctcatcgac

SEQ ID NO: 72924 - DNA, 18 bp, Homo sapiens
ttcaggccctgcctctgc

SEQ ID NO: 72925 - DNA, 21 bp, Homo sapiens
cagcaggtccgagatgacgtc

SEQ ID NO: 72926 - DNA, 21 bp, Homo sapiens
cctcagccctaagagctcatc

SEQ ID NO: 72927 - DNA, 24 bp, Homo sapiens
atagtcggaggccgcgcgggtcag

SEQ ID NO: 72928 - DNA, 21 bp, Homo sapiens
ccctcagtgccttttggtgac

SEQ ID NO: 72929 - DNA, 16 bp, Homo sapiens
ccccgcgcaggacctc

SEQ ID NO: 72930 - DNA, 17 bp, Homo sapiens
gctcacgcacaggacgt

SEQ ID NO: 72931 - DNA, 16 bp, Homo sapiens
ggtgtaggaagtgggc

SEQ ID NO: 72932 - DNA, 24 bp, Homo sapiens
tctcccagctggtcatcaccaagg

SEQ ID NO: 72933 - DNA, 18 bp, Homo sapiens
cctcatcctgcgtggaga

SEQ ID NO: 72934 - DNA, 17 bp, Homo sapiens
ggagctggccgagaggt

SEQ ID NO: 72935 - DNA, 20 bp, Homo sapiens
actgatgatcacgtagggga

SEQ ID NO: 72936 - DNA, 17 bp, Homo sapiens
cttcctgccagctgggc

SEQ ID NO: 72937 - DNA, 16 bp, Homo sapiens
agccaggtgggcctga

SEQ ID NO: 72938 - DNA, 16 bp, Homo sapiens
ctcacccacccgccac

SEQ ID NO: 72939 - DNA, 16 bp, Homo sapiens
cgcaggcccgcccatc

SEQ ID NO: 72940 - DNA, 24 bp, Homo sapiens
ggagtgcgcccagcctgggcgacc

SEQ ID NO: 72941 - DNA, 16 bp, Homo sapiens
cacacccaggctgcca

SEQ ID NO: 72942 - DNA, 16 bp, Homo sapiens
acgaacagcgggtcct

SEQ ID NO: 72943 - DNA, 18 bp, Homo sapiens
ccccatcccagacccagg

SEQ ID NO: 72944 - DNA, 16 bp, Homo sapiens
gccagctgctgctcca

SEQ ID NO: 72945 - DNA, 16 bp, Homo sapiens
ccccaggccccatgac

SEQ ID NO: 72946 - DNA, 19 bp, Homo sapiens
gtacgcagtagcacagcct

SEQ ID NO: 72947 - DNA, 17 bp, Homo sapiens
tgtgactgccatgtggc

SEQ ID NO: 72948 - DNA, 16 bp, Homo sapiens
tgggccggtgatctcc

SEQ ID NO: 72949 - DNA, 21 bp, Homo sapiens
ccattgacacgcagtactacc

SEQ ID NO: 72950 - DNA, 17 bp, Homo sapiens
ccgtgagcaccgtcttg

SEQ ID NO: 72951 - DNA, 24 bp, Homo sapiens
gcccatcctgggcgagggccgtgc

SEQ ID NO: 72952 - DNA, 16 bp, Homo sapiens
gcggcagccaatgcag

SEQ ID NO: 72953 - DNA, 16 bp, Homo sapiens
gggcaccctggggggg

SEQ ID NO: 72954 - DNA, 16 bp, Homo sapiens
ggttgagggccagtgg

SEQ ID NO: 72955 - DNA, 16 bp, Homo sapiens
ggaccacacgcgctgc

SEQ ID NO: 72956 - DNA, 16 bp, Homo sapiens
cactgggtggcagtgc

SEQ ID NO: 72957 - DNA, 16 bp, Homo sapiens
cgccgcaactgctgca

SEQ ID NO: 72958 - DNA, 16 bp, Homo sapiens
gggccgaggaccctct

SEQ ID NO: 72959 - DNA, 17 bp, Homo sapiens
ctggcagaactcacaca

SEQ ID NO: 72960 - DNA, 23 bp, Homo sapiens
gggagttttcccagcacacttgc

SEQ ID NO: 72961 - DNA, 17 bp, Homo sapiens
ctggcccctcctcacct

SEQ ID NO: 72962 - DNA, 17 bp, Homo sapiens
gtgggcagggatggggt

SEQ ID NO: 72963 - DNA, 22 bp, Homo sapiens
ccagggcattcagatgggatac

SEQ ID NO: 72964 - DNA, 23 bp, Homo sapiens
ctgacccgcctccccacaggagc

SEQ ID NO: 72965 - DNA, 16 bp, Homo sapiens
aggctgccctggcagc

SEQ ID NO: 72966 - DNA, 21 bp, Homo sapiens
atcagaaggaggtgagagggc

SEQ ID NO: 72967 - DNA, 23 bp, Homo sapiens
agctgggaaggggcggggcagcc

SEQ ID NO: 72968 - DNA, 17 bp, Homo sapiens
ccgctgccgtccccagg

SEQ ID NO: 72969 - DNA, 17 bp, Homo sapiens
aggagaggccttggagt

SEQ ID NO: 72970 - DNA, 18 bp, Homo sapiens
ctctggacgcagtgccag

SEQ ID NO: 72971 - DNA, 24 bp, Homo sapiens
tttttcagacaaggacactgaggc

SEQ ID NO: 72972 - DNA, 20 bp, Homo sapiens
tgcgcatgtagaagatgggg

SEQ ID NO: 72973 - DNA, 17 bp, Homo sapiens
gctgcgggagggggcgg

SEQ ID NO: 72974 - DNA, 16 bp, Homo sapiens
gggtccgaagcgccgc

SEQ ID NO: 72975 - DNA, 16 bp, Homo sapiens
ccacccctctcccagg

SEQ ID NO: 72976 - DNA, 20 bp, Homo sapiens
taattctccctggtcccgcc

SEQ ID NO: 72977 - DNA, 16 bp, Homo sapiens
cgcagccgggactgcc

SEQ ID NO: 72978 - DNA, 24 bp, Homo sapiens
cttatgaaaccagacagtgtcccc

SEQ ID NO: 72979 - DNA, 17 bp, Homo sapiens
agaccaggagcagctcc

SEQ ID NO: 72980 - DNA, 23 bp, Homo sapiens
cttttgctgaggatgaggggcgg

SEQ ID NO: 72981 - DNA, 24 bp, Homo sapiens
gcctggaggaggccgtgtggaggc

SEQ ID NO: 72982 - DNA, 24 bp, Homo sapiens
cgtcgggcgccctcggccccagga

SEQ ID NO: 72983 - DNA, 16 bp, Homo sapiens
ggaggccgagggcagc

SEQ ID NO: 72984 - DNA, 17 bp, Homo sapiens
acaggaggcccgcgcgc

SEQ ID NO: 72985 - DNA, 17 bp, Homo sapiens
ccaacgcctccaccggc

SEQ ID NO: 72986 - DNA, 16 bp, Homo sapiens
cgcctcagtagggcct

SEQ ID NO: 72987 - DNA, 19 bp, Homo sapiens
cggctcctaccagttctcc

SEQ ID NO: 72988 - DNA, 16 bp, Homo sapiens
ggggagttgctgtggc

SEQ ID NO: 72989 - DNA, 16 bp, Homo sapiens
gaggcccgttccaagc

SEQ ID NO: 72990 - DNA, 17 bp, Homo sapiens
ctggggttgagcagcgc

SEQ ID NO: 72991 - DNA, 16 bp, Homo sapiens
ccacgcgctaccacac

SEQ ID NO: 72992 - DNA, 16 bp, Homo sapiens
gctcgccgcccaccat

SEQ ID NO: 72993 - DNA, 16 bp, Homo sapiens
acctactccccgacgc

SEQ ID NO: 72994 - DNA, 22 bp, Homo sapiens
agtacaggtggtaggagggcga

SEQ ID NO: 72995 - DNA, 16 bp, Homo sapiens
ccagttccccgcgctg

SEQ ID NO: 72996 - DNA, 24 bp, Homo sapiens
gccggggtagggcggcggcaggta

SEQ ID NO: 72997 - DNA, 21 bp, Homo sapiens
tactcacttccgctccgttct

SEQ ID NO: 72998 - DNA, 24 bp, Homo sapiens
gccgatgccgatgcccgaggtgac

SEQ ID NO: 72999 - DNA, 19 bp, Homo sapiens
tatcatcctgggtagcccc

SEQ ID NO: 73000 - DNA, 18 bp, Homo sapiens
ggggtcggagatggaggg

SEQ ID NO: 73001 - DNA, 17 bp, Homo sapiens
gtggtccccgtcctccc

SEQ ID NO: 73002 - DNA, 18 bp, Homo sapiens
ctgcagaactttccagtc

SEQ ID NO: 73003 - DNA, 21 bp, Homo sapiens
gtagagataggtcacctttaa

SEQ ID NO: 73004 - DNA, 19 bp, Homo sapiens
tctccttctgtgcacccag

SEQ ID NO: 73005 - DNA, 23 bp, Homo sapiens
tccttcatgcacctctagtctcc

SEQ ID NO: 73006 - DNA, 20 bp, Homo sapiens
cagatccaaccatccccacc

SEQ ID NO: 73007 - DNA, 20 bp, Homo sapiens
aagtggcttacttgagagtc

SEQ ID NO: 73008 - DNA, 17 bp, Homo sapiens
cccaccccactttacat

SEQ ID NO: 73009 - DNA, 19 bp, Homo sapiens
ccaggtgaaatgggcgttg

SEQ ID NO: 73010 - DNA, 21 bp, Homo sapiens
ccacatacatgtatgtgacat

SEQ ID NO: 73011 - DNA, 21 bp, Homo sapiens
ttggtaggactgatcgtagga

SEQ ID NO: 73012 - DNA, 17 bp, Homo sapiens
cagaggcagatacttgg

SEQ ID NO: 73013 - DNA, 17 bp, Homo sapiens
aggaagacacagcaccc

SEQ ID NO: 73014 - DNA, 24 bp, Homo sapiens
acattctgccttcctcataacgtg

SEQ ID NO: 73015 - DNA, 22 bp, Homo sapiens
tgcattcgcggctctataaaga

SEQ ID NO: 73016 - DNA, 23 bp, Homo sapiens
tgaggatgagatggaaaagatag

SEQ ID NO: 73017 - DNA, 23 bp, Homo sapiens
cagaatctcttcctgatttcctc

SEQ ID NO: 73018 - DNA, 20 bp, Homo sapiens
gccttaacatctccagggtg

SEQ ID NO: 73019 - DNA, 22 bp, Homo sapiens
ctttaaccctcagcctcagagt

SEQ ID NO: 73020 - DNA, 19 bp, Homo sapiens
gaggcctttctctgagcat

SEQ ID NO: 73021 - DNA, 16 bp, Homo sapiens
ccacaccacccagccc

SEQ ID NO: 73022 - DNA, 16 bp, Homo sapiens
agttgtgggtggtggc

SEQ ID NO: 73023 - DNA, 24 bp, Homo sapiens
ggagcttgtccttttccgagcggc

SEQ ID NO: 73024 - DNA, 23 bp, Homo sapiens
ctggtacttaccctgcatctgac

SEQ ID NO: 73025 - DNA, 19 bp, Homo sapiens
cctgctccccacaatagga

SEQ ID NO: 73026 - DNA, 24 bp, Homo sapiens
ggcacgagggttgggcgtgggggc

SEQ ID NO: 73027 - DNA, 24 bp, Homo sapiens
aggaaatccacaatactttttctg

SEQ ID NO: 73028 - DNA, 22 bp, Homo sapiens
cagctgctccagttcactgagc

SEQ ID NO: 73029 - DNA, 24 bp, Homo sapiens
ctctagcgagtctatgttggggtg

SEQ ID NO: 73030 - DNA, 23 bp, Homo sapiens
gatcatctagtttctgccgatgt

SEQ ID NO: 73031 - DNA, 21 bp, Homo sapiens
atgcaactttttggctttacg

SEQ ID NO: 73032 - DNA, 18 bp, Homo sapiens
cacaaacccaccgcaagt

SEQ ID NO: 73033 - DNA, 22 bp, Homo sapiens
ccaaggaatctgagacatggtc

SEQ ID NO: 73034 - DNA, 20 bp, Homo sapiens
ttttgttctctatcgtgtcc

SEQ ID NO: 73035 - DNA, 17 bp, Homo sapiens
taccagccccaagtgga

SEQ ID NO: 73036 - DNA, 22 bp, Homo sapiens
gacagcataaattaatgattgg

SEQ ID NO: 73037 - DNA, 24 bp, Homo sapiens
gtgattttgatggctctgtggtag

SEQ ID NO: 73038 - DNA, 17 bp, Homo sapiens
caaagccaaaattccgg

SEQ ID NO: 73039 - DNA, 19 bp, Homo sapiens
gtcggtcgaagtggaagag

SEQ ID NO: 73040 - DNA, 19 bp, Homo sapiens
tttaagagcttgacatagc

SEQ ID NO: 73041 - DNA, 17 bp, Homo sapiens
atgctaccgcagccatg

SEQ ID NO: 73042 - DNA, 23 bp, Homo sapiens
gggattccatcacagaaatcact

SEQ ID NO: 73043 - DNA, 16 bp, Homo sapiens
ggcactctggtcactg

SEQ ID NO: 73044 - DNA, 24 bp, Homo sapiens
tcaagcatagttttgacagataac

SEQ ID NO: 73045 - DNA, 19 bp, Homo sapiens
cctgatgtctgcatttgtc

SEQ ID NO: 73046 - DNA, 21 bp, Homo sapiens
aaatcttgcaacctggttctt

SEQ ID NO: 73047 - DNA, 24 bp, Homo sapiens
atcattgaatatacatttaatttt

SEQ ID NO: 73048 - DNA, 21 bp, Homo sapiens
ttttcatcattgccagccatc

SEQ ID NO: 73049 - DNA, 20 bp, Homo sapiens
acttttctgttgttttgctt

SEQ ID NO: 73050 - DNA, 19 bp, Homo sapiens
actggcgctgcaacaagac

SEQ ID NO: 73051 - DNA, 16 bp, Homo sapiens
ctgcgggggccccttt

SEQ ID NO: 73052 - DNA, 16 bp, Homo sapiens
cgagctggtgcgcacc

SEQ ID NO: 73053 - DNA, 24 bp, Homo sapiens
ctcgcggatctcccccggcctcgc

SEQ ID NO: 73054 - DNA, 16 bp, Homo sapiens
ggccggcaagctgagg

SEQ ID NO: 73055 - DNA, 21 bp, Homo sapiens
cagtaccttgaaagcgatggg

SEQ ID NO: 73056 - DNA, 23 bp, Homo sapiens
cttccaccgcgctgagcccaggc

SEQ ID NO: 73057 - DNA, 20 bp, Homo sapiens
cagaggaagttggggctgtc

SEQ ID NO: 73058 - DNA, 16 bp, Homo sapiens
gttgtgatgcgtatcc

SEQ ID NO: 73059 - DNA, 16 bp, Homo sapiens
tgctgcggtcgccgct

SEQ ID NO: 73060 - DNA, 21 bp, Homo sapiens
atccgcgcccctgtcgccgtc

SEQ ID NO: 73061 - DNA, 16 bp, Homo sapiens
acgcctcgctcatctt

SEQ ID NO: 73062 - DNA, 17 bp, Homo sapiens
gcagtaataaaggcccc

SEQ ID NO: 73063 - DNA, 24 bp, Homo sapiens
gaagcggcggctcgtgctggcatc

SEQ ID NO: 73064 - DNA, 20 bp, Homo sapiens
gcatacttggaatgaatcct

SEQ ID NO: 73065 - DNA, 22 bp, Homo sapiens
aaacagccttaattatttggtt

SEQ ID NO: 73066 - DNA, 23 bp, Homo sapiens
cgggggaaagttaatttttaaac

SEQ ID NO: 73067 - DNA, 22 bp, Homo sapiens
tcatatacacatctatgaaggt

SEQ ID NO: 73068 - DNA, 23 bp, Homo sapiens
aaagctataaaaatctccagtgc

SEQ ID NO: 73069 - DNA, 20 bp, Homo sapiens
acataccgtggacgtctcta

SEQ ID NO: 73070 - DNA, 22 bp, Homo sapiens
aacagtttatttcttatttggt

SEQ ID NO: 73071 - DNA, 16 bp, Homo sapiens
ttcgtacccacagtgc

SEQ ID NO: 73072 - DNA, 23 bp, Homo sapiens
tgaattcctctcacaaacaagac

SEQ ID NO: 73073 - DNA, 22 bp, Homo sapiens
cttcagaagagggtgcattttc

SEQ ID NO: 73074 - DNA, 19 bp, Homo sapiens
tgaaacaagctgccatttc

SEQ ID NO: 73075 - DNA, 20 bp, Homo sapiens
cagtgacctgtcttggtttt

SEQ ID NO: 73076 - DNA, 23 bp, Homo sapiens
gcatgtactcacctctcatgaag

SEQ ID NO: 73077 - DNA, 20 bp, Homo sapiens
gtcccagaggtatccagcag

SEQ ID NO: 73078 - DNA, 22 bp, Homo sapiens
cttctgcccgaaggtcttgctc

SEQ ID NO: 73079 - DNA, 16 bp, Homo sapiens
ccggtccgcatttcgc

SEQ ID NO: 73080 - DNA, 20 bp, Homo sapiens
tacctcggagccgatcatgt

SEQ ID NO: 73081 - DNA, 17 bp, Homo sapiens
ccccagccctcctgatc

SEQ ID NO: 73082 - DNA, 22 bp, Homo sapiens
ggcgcatgggcccgccccgggg

SEQ ID NO: 73083 - DNA, 24 bp, Homo sapiens
gcaatgatgatgatggcgctgagc

SEQ ID NO: 73084 - DNA, 16 bp, Homo sapiens
ccgagcgcgcgcgcgc

SEQ ID NO: 73085 - DNA, 24 bp, Homo sapiens
ctggaggacgacggcgagttctac

SEQ ID NO: 73086 - DNA, 21 bp, Homo sapiens
acagagaacctcggaacatac

SEQ ID NO: 73087 - DNA, 19 bp, Homo sapiens
gtggcgcctgggggccacc

SEQ ID NO: 73088 - DNA, 24 bp, Homo sapiens
gcaactattttcttcctctcttcc

SEQ ID NO: 73089 - DNA, 18 bp, Homo sapiens
caggaccctccccttccc

SEQ ID NO: 73090 - DNA, 20 bp, Homo sapiens
aaaccctcgtgaagacgcac

SEQ ID NO: 73091 - DNA, 23 bp, Homo sapiens
ttactcataggtgggaaactacc

SEQ ID NO: 73092 - DNA, 24 bp, Homo sapiens
actctggagtgaaaacgttttatc

SEQ ID NO: 73093 - DNA, 20 bp, Homo sapiens
ctctggaggcgactagccac

SEQ ID NO: 73094 - DNA, 17 bp, Homo sapiens
ccaccccgggatgctcc

SEQ ID NO: 73095 - DNA, 24 bp, Homo sapiens
tggtaaaaaaacaaaacctaacac

SEQ ID NO: 73096 - DNA, 23 bp, Homo sapiens
ccttttggaagaggccagcattc

SEQ ID NO: 73097 - DNA, 20 bp, Homo sapiens
tccagaatctcttccacttc

SEQ ID NO: 73098 - DNA, 20 bp, Homo sapiens
catgcgaggaccttgatgtg

SEQ ID NO: 73099 - DNA, 24 bp, Homo sapiens
attacctgaggtaggtggggggct

SEQ ID NO: 73100 - DNA, 23 bp, Homo sapiens
cagcagagtgacccagtgatgtt

SEQ ID NO: 73101 - DNA, 20 bp, Homo sapiens
cttgagtctcagaaaagacc

SEQ ID NO: 73102 - DNA, 22 bp, Homo sapiens
ccagtgtgaccctgttaaaagc

SEQ ID NO: 73103 - DNA, 23 bp, Homo sapiens
ttccatctcaaaaaaaaaaaaaa

SEQ ID NO: 73104 - DNA, 16 bp, Homo sapiens
gccttctgttccctga

SEQ ID NO: 73105 - DNA, 20 bp, Homo sapiens
aaagtcaggtgcacagacaa

SEQ ID NO: 73106 - DNA, 17 bp, Homo sapiens
cacggcatctaagtggt

SEQ ID NO: 73107 - DNA, 24 bp, Homo sapiens
agtgggcatccctggagcattagt

SEQ ID NO: 73108 - DNA, 22 bp, Homo sapiens
ccaaagggggaaggttctcttc

SEQ ID NO: 73109 - DNA, 23 bp, Homo sapiens
gactgggaggacttttcttgtat

SEQ ID NO: 73110 - DNA, 20 bp, Homo sapiens
ctggagaactaaggcggaat

SEQ ID NO: 73111 - DNA, 16 bp, Homo sapiens
caccctgcccaacagc

SEQ ID NO: 73112 - DNA, 18 bp, Homo sapiens
gttgtggggagcacaagg

SEQ ID NO: 73113 - DNA, 18 bp, Homo sapiens
cgcatgggccgagacaag

SEQ ID NO: 73114 - DNA, 18 bp, Homo sapiens
ggacaatgtcctggaagt

SEQ ID NO: 73115 - DNA, 21 bp, Homo sapiens
cactcaccctccgtgctgatt

SEQ ID NO: 73116 - DNA, 19 bp, Homo sapiens
atcacagctgggtcatggt

SEQ ID NO: 73117 - DNA, 20 bp, Homo sapiens
ctgttagctgacaagcggcc

SEQ ID NO: 73118 - DNA, 22 bp, Homo sapiens
gatctccatgtccagccggatg

SEQ ID NO: 73119 - DNA, 24 bp, Homo sapiens
cagagagagaggctgaaaatttgc

SEQ ID NO: 73120 - DNA, 18 bp, Homo sapiens
cgactgccttgtaccatt

SEQ ID NO: 73121 - DNA, 19 bp, Homo sapiens
tttcactttcagctttgat

SEQ ID NO: 73122 - DNA, 23 bp, Homo sapiens
cagctggcaggaaacgggactgt

SEQ ID NO: 73123 - DNA, 16 bp, Homo sapiens
ccgaggtgctggtccc

SEQ ID NO: 73124 - DNA, 17 bp, Homo sapiens
ctccaaaactatgcccc

SEQ ID NO: 73125 - DNA, 21 bp, Homo sapiens
ccttcacctggaacatgaatg

SEQ ID NO: 73126 - DNA, 24 bp, Homo sapiens
tcacagaggatttctgaaaacatc

SEQ ID NO: 73127 - DNA, 24 bp, Homo sapiens
cccagtgccctggttgtcctctcc

SEQ ID NO: 73128 - DNA, 16 bp, Homo sapiens
tggcagaggcgatggc

SEQ ID NO: 73129 - DNA, 16 bp, Homo sapiens
gtccatgcccaagcat

SEQ ID NO: 73130 - DNA, 16 bp, Homo sapiens
ggtctgactggtcctc

SEQ ID NO: 73131 - DNA, 23 bp, Homo sapiens
gatttcagagaagttgatgacgc

SEQ ID NO: 73132 - DNA, 16 bp, Homo sapiens
ctgagggccaggaagg

SEQ ID NO: 73133 - DNA, 23 bp, Homo sapiens
atttgaacccgctgacgtttgtg

SEQ ID NO: 73134 - DNA, 24 bp, Homo sapiens
atgatatggaacccaaagacgggc

SEQ ID NO: 73135 - DNA, 17 bp, Homo sapiens
gacagcatcctggagga

SEQ ID NO: 73136 - DNA, 24 bp, Homo sapiens
tcagcctatgcccttcctggggga

SEQ ID NO: 73137 - DNA, 19 bp, Homo sapiens
accagggaaatgtttccca

SEQ ID NO: 73138 - DNA, 20 bp, Homo sapiens
gaccacctgcagttctcagc

SEQ ID NO: 73139 - DNA, 21 bp, Homo sapiens
cttcagggcaaacttctctgg

SEQ ID NO: 73140 - DNA, 16 bp, Homo sapiens
ctcctcgcggcctccc

SEQ ID NO: 73141 - DNA, 22 bp, Homo sapiens
cggatgctgtatgcgatggtgg

SEQ ID NO: 73142 - DNA, 21 bp, Homo sapiens
tgttgcctcagctgaacatcc

SEQ ID NO: 73143 - DNA, 20 bp, Homo sapiens
gagagactcatgcatgatcc

SEQ ID NO: 73144 - DNA, 24 bp, Homo sapiens
acatgtcagagaaggagaactcac

SEQ ID NO: 73145 - DNA, 20 bp, Homo sapiens
caccgctcacacagagaagt

SEQ ID NO: 73146 - DNA, 19 bp, Homo sapiens
gcggggagtttgtcaccac

SEQ ID NO: 73147 - DNA, 16 bp, Homo sapiens
gcaaacacacagaccc

SEQ ID NO: 73148 - DNA, 24 bp, Homo sapiens
atcagaagacctacgccttcaggt

SEQ ID NO: 73149 - DNA, 16 bp, Homo sapiens
atctccactgtgggca

SEQ ID NO: 73150 - DNA, 24 bp, Homo sapiens
gtgactggagcatccactgggtgc

SEQ ID NO: 73151 - DNA, 23 bp, Homo sapiens
catctcagcgtctgtcagagtct

SEQ ID NO: 73152 - DNA, 23 bp, Homo sapiens
gccaaagctttctgaggattctc

SEQ ID NO: 73153 - DNA, 16 bp, Homo sapiens
acagggccaggggtac

SEQ ID NO: 73154 - DNA, 19 bp, Homo sapiens
gtagcgagaaccctctgcc

SEQ ID NO: 73155 - DNA, 16 bp, Homo sapiens
gggaaaggcaatggcc

SEQ ID NO: 73156 - DNA, 19 bp, Homo sapiens
gaccagtggtgcccactgc

SEQ ID NO: 73157 - DNA, 23 bp, Homo sapiens
ttatcacccagaagcctgcctgc

SEQ ID NO: 73158 - DNA, 20 bp, Homo sapiens
aggacaggaacacgaggtac

SEQ ID NO: 73159 - DNA, 17 bp, Homo sapiens
gaggctgagagaaggct

SEQ ID NO: 73160 - DNA, 16 bp, Homo sapiens
cgtgtgctgatgggct

SEQ ID NO: 73161 - DNA, 17 bp, Homo sapiens
cctacacttggctgccc

SEQ ID NO: 73162 - DNA, 17 bp, Homo sapiens
ctcgcctctgtccttgc

SEQ ID NO: 73163 - DNA, 17 bp, Homo sapiens
ccgactcattgccctcc

SEQ ID NO: 73164 - DNA, 17 bp, Homo sapiens
acctggaagcccccact

SEQ ID NO: 73165 - DNA, 16 bp, Homo sapiens
ggcctggtaaccagcc

SEQ ID NO: 73166 - DNA, 17 bp, Homo sapiens
gagggtggggtgggggg

SEQ ID NO: 73167 - DNA, 17 bp, Homo sapiens
ggccgcctctcctccat

SEQ ID NO: 73168 - DNA, 16 bp, Homo sapiens
gctgtgtgtgctgctg

SEQ ID NO: 73169 - DNA, 24 bp, Homo sapiens
tttaattgtacatcagtgactgtg

SEQ ID NO: 73170 - DNA, 16 bp, Homo sapiens
ctagtcgaaagcggcc

SEQ ID NO: 73171 - DNA, 24 bp, Homo sapiens
agactcaaagaaaagaaagatgac

SEQ ID NO: 73172 - DNA, 21 bp, Homo sapiens
aatcttaaagaagccagtgat

SEQ ID NO: 73173 - DNA, 22 bp, Homo sapiens
ttcaaaccacggagttcacaac

SEQ ID NO: 73174 - DNA, 24 bp, Homo sapiens
tttttggttctagaatttcacatc

SEQ ID NO: 73175 - DNA, 19 bp, Homo sapiens
ctcggcttccccttcacgg

SEQ ID NO: 73176 - DNA, 22 bp, Homo sapiens
gctggagcgaatcaagttaaaa

SEQ ID NO: 73177 - DNA, 24 bp, Homo sapiens
acatgaagagaaagtttcaagatc

SEQ ID NO: 73178 - DNA, 23 bp, Homo sapiens
gcaattgctactcaggaaaatct

SEQ ID NO: 73179 - DNA, 19 bp, Homo sapiens
attatccttcagacacagc

SEQ ID NO: 73180 - DNA, 23 bp, Homo sapiens
agactacatttagtgatcatcag

SEQ ID NO: 73181 - DNA, 17 bp, Homo sapiens
cggacatttttcctccc

SEQ ID NO: 73182 - DNA, 24 bp, Homo sapiens
ctgtggattcattttcctcagaca

SEQ ID NO: 73183 - DNA, 17 bp, Homo sapiens
agaggcgggcaacacat

SEQ ID NO: 73184 - DNA, 17 bp, Homo sapiens
acccgtggcttcaggtg

SEQ ID NO: 73185 - DNA, 24 bp, Homo sapiens
gttgtaacccatcctccaagatac

SEQ ID NO: 73186 - DNA, 21 bp, Homo sapiens
agaagttgttggtagtggatc

SEQ ID NO: 73187 - DNA, 22 bp, Homo sapiens
aaacatgtttctgtcctctgtc

SEQ ID NO: 73188 - DNA, 24 bp, Homo sapiens
tgataatatatttatccttttcac

SEQ ID NO: 73189 - DNA, 20 bp, Homo sapiens
ttatgctagcaggcactgtc

SEQ ID NO: 73190 - DNA, 17 bp, Homo sapiens
ccctctctgctctttct

SEQ ID NO: 73191 - DNA, 19 bp, Homo sapiens
gtaaaacgtgcctttggat

SEQ ID NO: 73192 - DNA, 21 bp, Homo sapiens
ctctgaatacagagagtgagg

SEQ ID NO: 73193 - DNA, 17 bp, Homo sapiens
gtctgggcagaagtctc

SEQ ID NO: 73194 - DNA, 22 bp, Homo sapiens
tggtgtgaaactaacaatagaa

SEQ ID NO: 73195 - DNA, 21 bp, Homo sapiens
gcataggactcaagtgtcact

SEQ ID NO: 73196 - DNA, 24 bp, Homo sapiens
atttgggaagaaactcccaccaca

SEQ ID NO: 73197 - DNA, 22 bp, Homo sapiens
ttgatttcttttcctttctctc

SEQ ID NO: 73198 - DNA, 24 bp, Homo sapiens
ttcatattcatacctttctctgag

SEQ ID NO: 73199 - DNA, 21 bp, Homo sapiens
tctgacttttcattatgctga

SEQ ID NO: 73200 - DNA, 20 bp, Homo sapiens
tgatctgatccttcagtgac

SEQ ID NO: 73201 - DNA, 16 bp, Homo sapiens
ggcattgtgcccagcc

SEQ ID NO: 73202 - DNA, 18 bp, Homo sapiens
taaccgtgctgtggactg

SEQ ID NO: 73203 - DNA, 24 bp, Homo sapiens
ggctacagttagccaagatcaagc

SEQ ID NO: 73204 - DNA, 16 bp, Homo sapiens
acccccacctacttgg

SEQ ID NO: 73205 - DNA, 22 bp, Homo sapiens
gtgacttcatctaatcacctcc

SEQ ID NO: 73206 - DNA, 20 bp, Homo sapiens
agattactgattttgggcac

SEQ ID NO: 73207 - DNA, 25 bp, Homo sapiens
aaaaagaataactcctaaactccag

SEQ ID NO: 73208 - DNA, 22 bp, Homo sapiens
tggcagactatgttaatctttt

SEQ ID NO: 73209 - DNA, 24 bp, Homo sapiens
caacagaaacaagaacttcaggcg

SEQ ID NO: 73210 - DNA, 18 bp, Homo sapiens
ggcaggtgtgaattgtac

SEQ ID NO: 73211 - DNA, 19 bp, Homo sapiens
cccaaaatcttggagtgcc

SEQ ID NO: 73212 - DNA, 21 bp, Homo sapiens
atctcaagaagaggactgtct

SEQ ID NO: 73213 - DNA, 23 bp, Homo sapiens
acctgatctctaaaataattggt

SEQ ID NO: 73214 - DNA, 20 bp, Homo sapiens
agtaccttcatgaaaacggt

SEQ ID NO: 73215 - DNA, 23 bp, Homo sapiens
cccactttttatttgaggaatta

SEQ ID NO: 73216 - DNA, 23 bp, Homo sapiens
aactttgattctacttaagtatc

SEQ ID NO: 73217 - DNA, 22 bp, Homo sapiens
cagaatgccaatttcttacctt

SEQ ID NO: 73218 - DNA, 19 bp, Homo sapiens
gtgtgtatcacggcttacg

SEQ ID NO: 73219 - DNA, 17 bp, Homo sapiens
ggctttaagtcacggtg

SEQ ID NO: 73220 - DNA, 22 bp, Homo sapiens
gctctatttttaccagatgctc

SEQ ID NO: 73221 - DNA, 23 bp, Homo sapiens
ttgccaagaagagaacagcaaac

SEQ ID NO: 73222 - DNA, 22 bp, Homo sapiens
ggagagctgtttgacaaagtgg

SEQ ID NO: 73223 - DNA, 23 bp, Homo sapiens
cgatttctgcctaattcagggag

SEQ ID NO: 73224 - DNA, 18 bp, Homo sapiens
cgttttcccccaggaatg

SEQ ID NO: 73225 - DNA, 20 bp, Homo sapiens
gcttcttttacctgcacagc

SEQ ID NO: 73226 - DNA, 24 bp, Homo sapiens
tgaataaaaatgtcaactgtttgc

SEQ ID NO: 73227 - DNA, 19 bp, Homo sapiens
aggcgtttattccccacca

SEQ ID NO: 73228 - DNA, 22 bp, Homo sapiens
ggacatctgattgtgaataaac

SEQ ID NO: 73229 - DNA, 18 bp, Homo sapiens
acacagactttgtgggcc

SEQ ID NO: 73230 - DNA, 20 bp, Homo sapiens
cctcttcttagccttgcatc

SEQ ID NO: 73231 - DNA, 21 bp, Homo sapiens
aaggcaagcctacattagatt

SEQ ID NO: 73232 - DNA, 19 bp, Homo sapiens
tgttctaagctcttgtggt

SEQ ID NO: 73233 - DNA, 24 bp, Homo sapiens
aacagaaatttttaaaaagtttac

SEQ ID NO: 73234 - DNA, 16 bp, Homo sapiens
ctctgaggcagggggc

SEQ ID NO: 73235 - DNA, 24 bp, Homo sapiens
aaaagtttttaatcttgatgatgc

SEQ ID NO: 73236 - DNA, 24 bp, Homo sapiens
actaataaactctgttattctgtt

SEQ ID NO: 73237 - DNA, 27 bp, Homo sapiens
attatactgaaaggctttatactcttc

SEQ ID NO: 73238 - DNA, 19 bp, Homo sapiens
cagccttgagtcaactgag

SEQ ID NO: 73239 - DNA, 24 bp, Homo sapiens
gagtcatataataatacttacatg

SEQ ID NO: 73240 - DNA, 19 bp, Homo sapiens
tcattgacctgggctttga

SEQ ID NO: 73241 - DNA, 22 bp, Homo sapiens
gccccaaaattttccatgttct

SEQ ID NO: 73242 - DNA, 23 bp, Homo sapiens
aggaaaacatgtaagaaagtagc

SEQ ID NO: 73243 - DNA, 23 bp, Homo sapiens
ttcctgagtttaaaaatcatcaa

SEQ ID NO: 73244 - DNA, 22 bp, Homo sapiens
tcactatctttgtttttccctc

SEQ ID NO: 73245 - DNA, 22 bp, Homo sapiens
tgttaataaaaggtgatcagcc

SEQ ID NO: 73246 - DNA, 16 bp, Homo sapiens
aagtggacccaggagt

SEQ ID NO: 73247 - DNA, 22 bp, Homo sapiens
aaacttccttttgctgatgatc

SEQ ID NO: 73248 - DNA, 17 bp, Homo sapiens
cctctgcaaacagggac

SEQ ID NO: 73249 - DNA, 22 bp, Homo sapiens
cagctttacctctccacaggca

SEQ ID NO: 73250 - DNA, 18 bp, Homo sapiens
acatcatgtcaaaaactc

SEQ ID NO: 73251 - DNA, 20 bp, Homo sapiens
tacacaaatagataccatac

SEQ ID NO: 73252 - DNA, 26 bp, Homo sapiens
ttagtttttgtcttttttgatctgac

SEQ ID NO: 73253 - DNA, 19 bp, Homo sapiens
atgagaaaccaccaatcac

SEQ ID NO: 73254 - DNA, 18 bp, Homo sapiens
agtgatcgcctcttgtga

SEQ ID NO: 73255 - DNA, 18 bp, Homo sapiens
tttaccttccaagagttt

SEQ ID NO: 73256 - DNA, 22 bp, Homo sapiens
aggttacatgttaaatgtagtt

SEQ ID NO: 73257 - DNA, 25 bp, Homo sapiens
taggataaactgactgatcatctac

SEQ ID NO: 73258 - DNA, 24 bp, Homo sapiens
actgtcactaagcagaaataaagg

SEQ ID NO: 73259 - DNA, 21 bp, Homo sapiens
atacagagcttgtagggaaag

SEQ ID NO: 73260 - DNA, 23 bp, Homo sapiens
aaccatattctgtaaggacagga

SEQ ID NO: 73261 - DNA, 23 bp, Homo sapiens
gggtcctaaaaactcttacattg

SEQ ID NO: 73262 - DNA, 28 bp, Homo sapiens
aattccagtaaccataagataataatat

SEQ ID NO: 73263 - DNA, 24 bp, Homo sapiens
ttcccactataaatctctgctatt

SEQ ID NO: 73264 - DNA, 17 bp, Homo sapiens
tcaaaggacggcgtttt

SEQ ID NO: 73265 - DNA, 19 bp, Homo sapiens
acccatgtatctaggagag

SEQ ID NO: 73266 - DNA, 23 bp, Homo sapiens
tccattgccactgtgatcttcta

SEQ ID NO: 73267 - DNA, 24 bp, Homo sapiens
gctgaaaagaacagataaataccg

SEQ ID NO: 73268 - DNA, 24 bp, Homo sapiens
aatagagaacattttgtttcagac

SEQ ID NO: 73269 - DNA, 17 bp, Homo sapiens
tggtttgggagggacaa

SEQ ID NO: 73270 - DNA, 19 bp, Homo sapiens
accaaattaccagctctcc

SEQ ID NO: 73271 - DNA, 21 bp, Homo sapiens
acatgaaattcaacagccctc

SEQ ID NO: 73272 - DNA, 22 bp, Homo sapiens
aagtgtttcttgctgtatgttc

SEQ ID NO: 73273 - DNA, 20 bp, Homo sapiens
tgattgccttcttaggctat

SEQ ID NO: 73274 - DNA, 23 bp, Homo sapiens
caaagcaatattcacagcttttg

SEQ ID NO: 73275 - DNA, 24 bp, Homo sapiens
ggtaatgttgttttttctctccta

SEQ ID NO: 73276 - DNA, 16 bp, Homo sapiens
cggccagtttgcagtc

SEQ ID NO: 73277 - DNA, 24 bp, Homo sapiens
gcggaagggaaaggaaaggaaagc

SEQ ID NO: 73278 - DNA, 17 bp, Homo sapiens
tgatcctcctgcctcag

SEQ ID NO: 73279 - DNA, 22 bp, Homo sapiens
aaggaaaaaagaaaggggaaag

SEQ ID NO: 73280 - DNA, 22 bp, Homo sapiens
ttattttttgtagagacagagt

SEQ ID NO: 73281 - DNA, 24 bp, Homo sapiens
aaagacccacagctaacatcatac

SEQ ID NO: 73282 - DNA, 24 bp, Homo sapiens
ctatgctttcattgcttgttcatg

SEQ ID NO: 73283 - DNA, 18 bp, Homo sapiens
ctgaggagcctacccctg

SEQ ID NO: 73284 - DNA, 20 bp, Homo sapiens
aactccaatcagaaccttcc

SEQ ID NO: 73285 - DNA, 19 bp, Homo sapiens
acagtgtccactcaggaac

SEQ ID NO: 73286 - DNA, 24 bp, Homo sapiens
aaaacgtgatactatacaacaaag

SEQ ID NO: 73287 - DNA, 18 bp, Homo sapiens
cagcacgatgccaaactc

SEQ ID NO: 73288 - DNA, 18 bp, Homo sapiens
ataatcgagcccaggggg

SEQ ID NO: 73289 - DNA, 24 bp, Homo sapiens
cccatggcagcgttacccagtccc

SEQ ID NO: 73290 - DNA, 24 bp, Homo sapiens
ggtcctcaggaatagaatagagtt

SEQ ID NO: 73291 - DNA, 24 bp, Homo sapiens
tgtctcgggagtcggatgttgagg

SEQ ID NO: 73292 - DNA, 18 bp, Homo sapiens
ctggagtgagaggactgg

SEQ ID NO: 73293 - DNA, 19 bp, Homo sapiens
ttgtgccttgaaactcacc

SEQ ID NO: 73294 - DNA, 18 bp, Homo sapiens
gggactgtgaggaggagc

SEQ ID NO: 73295 - DNA, 24 bp, Homo sapiens
tttttttttttcttttcttttgct

SEQ ID NO: 73296 - DNA, 24 bp, Homo sapiens
acaggcactgctgccatgagactg

SEQ ID NO: 73297 - DNA, 16 bp, Homo sapiens
aggtctgggctgttag

SEQ ID NO: 73298 - DNA, 17 bp, Homo sapiens
gaagcgatggccccggc

SEQ ID NO: 73299 - DNA, 17 bp, Homo sapiens
cgcagcccagaccgttc

SEQ ID NO: 73300 - DNA, 21 bp, Homo sapiens
gacgatcctcacggtgaacgt

SEQ ID NO: 73301 - DNA, 22 bp, Homo sapiens
tgtgcagcaactccaggggggc

SEQ ID NO: 73302 - DNA, 16 bp, Homo sapiens
cagcagtcggggctgc

SEQ ID NO: 73303 - DNA, 16 bp, Homo sapiens
agccccgcgccatggc

SEQ ID NO: 73304 - DNA, 22 bp, Homo sapiens
agctacacccataagatgatat

SEQ ID NO: 73305 - DNA, 21 bp, Homo sapiens
caagaggaagcaacccaagac

SEQ ID NO: 73306 - DNA, 24 bp, Homo sapiens
gcagcaatcatctttaacatgagg

SEQ ID NO: 73307 - DNA, 22 bp, Homo sapiens
tggagttcaattgcgaggtaac

SEQ ID NO: 73308 - DNA, 17 bp, Homo sapiens
ggtccttccctttccac

SEQ ID NO: 73309 - DNA, 24 bp, Homo sapiens
attatttaggaattcagtcctcat

SEQ ID NO: 73310 - DNA, 19 bp, Homo sapiens
gtactgcagtccaaagaac

SEQ ID NO: 73311 - DNA, 24 bp, Homo sapiens
ggagagtgcagagaaaaggtttta

SEQ ID NO: 73312 - DNA, 17 bp, Homo sapiens
cgagttctagcccaacc

SEQ ID NO: 73313 - DNA, 24 bp, Homo sapiens
ggtttgttattgcagatgaagtgg

SEQ ID NO: 73314 - DNA, 18 bp, Homo sapiens
gatgagctaggcgcctgc

SEQ ID NO: 73315 - DNA, 19 bp, Homo sapiens
tggggctccgagaaacctg

SEQ ID NO: 73316 - DNA, 23 bp, Homo sapiens
cctgctttctgcatgacttaatt

SEQ ID NO: 73317 - DNA, 24 bp, Homo sapiens
cctggctcaaaatggacaagaagg

SEQ ID NO: 73318 - DNA, 22 bp, Homo sapiens
cctttgaaacatcatgatccag

SEQ ID NO: 73319 - DNA, 22 bp, Homo sapiens
atcacaactttcaggaaatgtg

SEQ ID NO: 73320 - DNA, 19 bp, Homo sapiens
cctcttcagcattctcagg

SEQ ID NO: 73321 - DNA, 22 bp, Homo sapiens
ccttgcaaaggcttctttgagg

SEQ ID NO: 73322 - DNA, 18 bp, Homo sapiens
agccttgactgatgtacc

SEQ ID NO: 73323 - DNA, 24 bp, Homo sapiens
cttttgctctgcaattctgcaggt

SEQ ID NO: 73324 - DNA, 18 bp, Homo sapiens
gtcaactctgaggccaac

SEQ ID NO: 73325 - DNA, 20 bp, Homo sapiens
cttggccaaattttatcctg

SEQ ID NO: 73326 - DNA, 18 bp, Homo sapiens
attacagaaccaaagggg

SEQ ID NO: 73327 - DNA, 24 bp, Homo sapiens
acacaacatttattcttcttacag

SEQ ID NO: 73328 - DNA, 24 bp, Homo sapiens
gtaaaaaaaaaattgtaccctttg

SEQ ID NO: 73329 - DNA, 18 bp, Homo sapiens
cgtaagaagccaggagca

SEQ ID NO: 73330 - DNA, 21 bp, Homo sapiens
ctcattagaacgccgtgaggc

SEQ ID NO: 73331 - DNA, 21 bp, Homo sapiens
aaattaacgcccaggaaaaat

SEQ ID NO: 73332 - DNA, 17 bp, Homo sapiens
tgtctcccttgttgctc

SEQ ID NO: 73333 - DNA, 20 bp, Homo sapiens
ggggcaagtctctctgaagt

SEQ ID NO: 73334 - DNA, 22 bp, Homo sapiens
agatctactgccctcctgaggc

SEQ ID NO: 73335 - DNA, 23 bp, Homo sapiens
cactggaacagtgacagtggttc

SEQ ID NO: 73336 - DNA, 18 bp, Homo sapiens
ggggtcgtagtcaccata

SEQ ID NO: 73337 - DNA, 24 bp, Homo sapiens
aactagcaaggttgaaatcttgac

SEQ ID NO: 73338 - DNA, 24 bp, Homo sapiens
gggaatttaatctcttaccctttt

SEQ ID NO: 73339 - DNA, 23 bp, Homo sapiens
ggaatgagattggtccagctctg

SEQ ID NO: 73340 - DNA, 21 bp, Homo sapiens
ccttcaagtcctttggttagc

SEQ ID NO: 73341 - DNA, 23 bp, Homo sapiens
gctctccctttcttctttccagt

SEQ ID NO: 73342 - DNA, 23 bp, Homo sapiens
ctgtttactggagattacaaaat

SEQ ID NO: 73343 - DNA, 19 bp, Homo sapiens
ggcccaagaggaattgctt

SEQ ID NO: 73344 - DNA, 17 bp, Homo sapiens
ccctctctctgtgtgac

SEQ ID NO: 73345 - DNA, 18 bp, Homo sapiens
tctgcgtaccaagcagta

SEQ ID NO: 73346 - DNA, 23 bp, Homo sapiens
actgttttgtaaaaatgatgcat

SEQ ID NO: 73347 - DNA, 22 bp, Homo sapiens
aaaaaaagcccataaaggaatg

SEQ ID NO: 73348 - DNA, 23 bp, Homo sapiens
tgtgtaggttttttattttgctc

SEQ ID NO: 73349 - DNA, 22 bp, Homo sapiens
tgcattttgtttaacaagcatg

SEQ ID NO: 73350 - DNA, 23 bp, Homo sapiens
gaaatgtgggaggagagaattac

SEQ ID NO: 73351 - DNA, 22 bp, Homo sapiens
actgaagaccaacgttactccc

SEQ ID NO: 73352 - DNA, 22 bp, Homo sapiens
gctttgctggtgtctgctgtgg

SEQ ID NO: 73353 - DNA, 20 bp, Homo sapiens
attgcaaagtagttcacacc

SEQ ID NO: 73354 - DNA, 23 bp, Homo sapiens
gaatggcagggtcagaatgcttg

SEQ ID NO: 73355 - DNA, 21 bp, Homo sapiens
agtctggccctcactcagtct

SEQ ID NO: 73356 - DNA, 20 bp, Homo sapiens
tgacagtgtcttccgttctc

SEQ ID NO: 73357 - DNA, 23 bp, Homo sapiens
accacagaaccataaaagagtct

SEQ ID NO: 73358 - DNA, 19 bp, Homo sapiens
tcaggacctggagatgtac

SEQ ID NO: 73359 - DNA, 24 bp, Homo sapiens
aatcttcttggtttataagacagc

SEQ ID NO: 73360 - DNA, 21 bp, Homo sapiens
ctgttctcagggtcataaatg

SEQ ID NO: 73361 - DNA, 24 bp, Homo sapiens
acatgtgacagtgtgtgccagatt

SEQ ID NO: 73362 - DNA, 22 bp, Homo sapiens
acctccttgtcactgtacgaga

SEQ ID NO: 73363 - DNA, 23 bp, Homo sapiens
acagtagctgttcttattggatc

SEQ ID NO: 73364 - DNA, 18 bp, Homo sapiens
ggcagacagggaaagatc

SEQ ID NO: 73365 - DNA, 17 bp, Homo sapiens
atgccctggggcttcac

SEQ ID NO: 73366 - DNA, 23 bp, Homo sapiens
caaagcctgggaattaaaggact

SEQ ID NO: 73367 - DNA, 20 bp, Homo sapiens
cttcccgtggaatgaaatcc

SEQ ID NO: 73368 - DNA, 24 bp, Homo sapiens
acatcaattttcttatccagtggt

SEQ ID NO: 73369 - DNA, 21 bp, Homo sapiens
ggatactgggaagccaggaca

SEQ ID NO: 73370 - DNA, 20 bp, Homo sapiens
tctcaacttaccagcttatt

SEQ ID NO: 73371 - DNA, 20 bp, Homo sapiens
gtggaatttccaattgctgg

SEQ ID NO: 73372 - DNA, 23 bp, Homo sapiens
tcctttaaaaagaagtattcaat

SEQ ID NO: 73373 - DNA, 23 bp, Homo sapiens
tctgcttcattcttccagtttac

SEQ ID NO: 73374 - DNA, 19 bp, Homo sapiens
gaaagtatgcgccaagtga

SEQ ID NO: 73375 - DNA, 18 bp, Homo sapiens
actcctcaaagcttcgtg

SEQ ID NO: 73376 - DNA, 18 bp, Homo sapiens
ggctttggtgtttcactc

SEQ ID NO: 73377 - DNA, 21 bp, Homo sapiens
tctgctgaacttccaaagaat

SEQ ID NO: 73378 - DNA, 20 bp, Homo sapiens
ctgctatggcactagtgggc

SEQ ID NO: 73379 - DNA, 18 bp, Homo sapiens
aaacaaggttgtgctcac

SEQ ID NO: 73380 - DNA, 24 bp, Homo sapiens
taacctttttgtctgcttctgtgg

SEQ ID NO: 73381 - DNA, 17 bp, Homo sapiens
ccagcccatgaccactc

SEQ ID NO: 73382 - DNA, 24 bp, Homo sapiens
ctatttatgaggagaaggaaagcc

SEQ ID NO: 73383 - DNA, 21 bp, Homo sapiens
gcaaatgaagatccaaaaggt

SEQ ID NO: 73384 - DNA, 21 bp, Homo sapiens
gaggagaaggctagaaagcag

SEQ ID NO: 73385 - DNA, 21 bp, Homo sapiens
gtggggggcaataagaatgac

SEQ ID NO: 73386 - DNA, 17 bp, Homo sapiens
atccctcgtgcgttcag

SEQ ID NO: 73387 - DNA, 21 bp, Homo sapiens
agactggagatggggcatctt

SEQ ID NO: 73388 - DNA, 22 bp, Homo sapiens
gaaatcaccagtgcttcgttgg

SEQ ID NO: 73389 - DNA, 24 bp, Homo sapiens
gtgattcaatgactgtttttcttc

SEQ ID NO: 73390 - DNA, 18 bp, Homo sapiens
ccaagctccagaaaagcc

SEQ ID NO: 73391 - DNA, 18 bp, Homo sapiens
agaagcagatgagggagg

SEQ ID NO: 73392 - DNA, 22 bp, Homo sapiens
tcaaagctgaaattaagtattt

SEQ ID NO: 73393 - DNA, 20 bp, Homo sapiens
aagaagaagcaacaatggcc

SEQ ID NO: 73394 - DNA, 24 bp, Homo sapiens
ttgtcatttcttgtcagagggtca

SEQ ID NO: 73395 - DNA, 17 bp, Homo sapiens
cagaagttttgcctcct

SEQ ID NO: 73396 - DNA, 20 bp, Homo sapiens
gtttgtcccatctcagtgtt

SEQ ID NO: 73397 - DNA, 24 bp, Homo sapiens
tcctccgtgcgaatcgctgtggcc

SEQ ID NO: 73398 - DNA, 24 bp, Homo sapiens
atcccacttcagctaagagcactg

SEQ ID NO: 73399 - DNA, 16 bp, Homo sapiens
ccagcacctcggcttc

SEQ ID NO: 73400 - DNA, 24 bp, Homo sapiens
gttggctgaaaaggcccagatcac

SEQ ID NO: 73401 - DNA, 18 bp, Homo sapiens
tcctcgccagtctggtgc

SEQ ID NO: 73402 - DNA, 16 bp, Homo sapiens
agcaggaaatgcagcg

SEQ ID NO: 73403 - DNA, 24 bp, Homo sapiens
cttgaggacaactgctgtagagct

SEQ ID NO: 73404 - DNA, 17 bp, Homo sapiens
cagaaggtgctggaagc

SEQ ID NO: 73405 - DNA, 23 bp, Homo sapiens
ataaagcaccagtcaccatcagc

SEQ ID NO: 73406 - DNA, 24 bp, Homo sapiens
ttcatgtaaatatccctgtctcac

SEQ ID NO: 73407 - DNA, 23 bp, Homo sapiens
gagcttctgcttggctcttcgct

SEQ ID NO: 73408 - DNA, 16 bp, Homo sapiens
caggtccctcctctgc

SEQ ID NO: 73409 - DNA, 16 bp, Homo sapiens
tggtggcccccaggct

SEQ ID NO: 73410 - DNA, 22 bp, Homo sapiens
tctgtgaagctgacatctcatc

SEQ ID NO: 73411 - DNA, 20 bp, Homo sapiens
aaggcaccgccagatgaact

SEQ ID NO: 73412 - DNA, 24 bp, Homo sapiens
aggacctgcaggaagcacgcgagg

SEQ ID NO: 73413 - DNA, 24 bp, Homo sapiens
taactgcaggctctctgcacctct

SEQ ID NO: 73414 - DNA, 23 bp, Homo sapiens
gaggcaacggtgctggaattggg

SEQ ID NO: 73415 - DNA, 23 bp, Homo sapiens
ggtggcattgggaggtgggaccc

SEQ ID NO: 73416 - DNA, 24 bp, Homo sapiens
cagtatctttgaagtcgaaagaca

SEQ ID NO: 73417 - DNA, 24 bp, Homo sapiens
ggatcggttgtcaacacagtagtg

SEQ ID NO: 73418 - DNA, 17 bp, Homo sapiens
cacagggggctacatac

SEQ ID NO: 73419 - DNA, 22 bp, Homo sapiens
ttctcattaacagcccatgaac

SEQ ID NO: 73420 - DNA, 20 bp, Homo sapiens
ctcacctctgccccagcttc

SEQ ID NO: 73421 - DNA, 24 bp, Homo sapiens
tcaacctcattggtgacagcctgt

SEQ ID NO: 73422 - DNA, 21 bp, Homo sapiens
ggtgtaagagcagagcaaacc

SEQ ID NO: 73423 - DNA, 26 bp, Homo sapiens
catggagatagagaaagaaaagtatg

SEQ ID NO: 73424 - DNA, 21 bp, Homo sapiens
tgcagatgcttgctcttttcc

SEQ ID NO: 73425 - DNA, 22 bp, Homo sapiens
gtggccaagtagagacgtgaac

SEQ ID NO: 73426 - DNA, 21 bp, Homo sapiens
cctctctttcagtttcaaggc

SEQ ID NO: 73427 - DNA, 19 bp, Homo sapiens
cagagcacctgagccgtgt

SEQ ID NO: 73428 - DNA, 16 bp, Homo sapiens
cttgctgctgccaccc

SEQ ID NO: 73429 - DNA, 23 bp, Homo sapiens
ttgccggcagagtggaatacatg

SEQ ID NO: 73430 - DNA, 17 bp, Homo sapiens
gatggtcctgatcagca

SEQ ID NO: 73431 - DNA, 22 bp, Homo sapiens
gaactcaagacagaaatcgagg

SEQ ID NO: 73432 - DNA, 21 bp, Homo sapiens
tgccaatagtctagtgacttg

SEQ ID NO: 73433 - DNA, 20 bp, Homo sapiens
tgcacaatgagaactccgac

SEQ ID NO: 73434 - DNA, 23 bp, Homo sapiens
cagattaaattccctttctggca

SEQ ID NO: 73435 - DNA, 22 bp, Homo sapiens
ctggagagaccccgttccaagc

SEQ ID NO: 73436 - DNA, 21 bp, Homo sapiens
acatagagagtacctgggaac

SEQ ID NO: 73437 - DNA, 24 bp, Homo sapiens
gcctatccaagcattttgcagatg

SEQ ID NO: 73438 - DNA, 17 bp, Homo sapiens
acagagacaggcaagct

SEQ ID NO: 73439 - DNA, 24 bp, Homo sapiens
tttttcttcattttattttgctgg

SEQ ID NO: 73440 - DNA, 22 bp, Homo sapiens
tagactcaaagcatgctgcggc

SEQ ID NO: 73441 - DNA, 23 bp, Homo sapiens
ggactgacagccaacttcttgag

SEQ ID NO: 73442 - DNA, 16 bp, Homo sapiens
ggctgggtcacctgct

SEQ ID NO: 73443 - DNA, 24 bp, Homo sapiens
cacctttgaggtgagtccaagtgg

SEQ ID NO: 73444 - DNA, 24 bp, Homo sapiens
tggatggctctcttgatatctggt

SEQ ID NO: 73445 - DNA, 20 bp, Homo sapiens
cctctcagcttcttctctgc

SEQ ID NO: 73446 - DNA, 19 bp, Homo sapiens
actcagctggggaaagttc

SEQ ID NO: 73447 - DNA, 23 bp, Homo sapiens
ggccttctttgaagagctctagc

SEQ ID NO: 73448 - DNA, 17 bp, Homo sapiens
tcctggtgcactgactg

SEQ ID NO: 73449 - DNA, 24 bp, Homo sapiens
catggttagtcctctacttcatgg

SEQ ID NO: 73450 - DNA, 18 bp, Homo sapiens
ggaacgttcattccccgc

SEQ ID NO: 73451 - DNA, 20 bp, Homo sapiens
aaataagaaagtggttccct

SEQ ID NO: 73452 - DNA, 17 bp, Homo sapiens
cctggaaacagtcagca

SEQ ID NO: 73453 - DNA, 16 bp, Homo sapiens
ctgggcaccaggcagt

SEQ ID NO: 73454 - DNA, 20 bp, Homo sapiens
ttgcatttcaaatccttctc

SEQ ID NO: 73455 - DNA, 24 bp, Homo sapiens
gatggccatgctggtgagaagctt

SEQ ID NO: 73456 - DNA, 17 bp, Homo sapiens
cagacacatgctcgagc

SEQ ID NO: 73457 - DNA, 23 bp, Homo sapiens
cttatctcgttgtccttcggagt

SEQ ID NO: 73458 - DNA, 19 bp, Homo sapiens
ctcacagtggcctttttct

SEQ ID NO: 73459 - DNA, 23 bp, Homo sapiens
gcttgtatagtctttccttgaag

SEQ ID NO: 73460 - DNA, 19 bp, Homo sapiens
atgaagatgagtgcattgg

SEQ ID NO: 73461 - DNA, 21 bp, Homo sapiens
gggaattgcagacagcgggtt

SEQ ID NO: 73462 - DNA, 21 bp, Homo sapiens
cccaaaggtagagttctggat

SEQ ID NO: 73463 - DNA, 22 bp, Homo sapiens
ttacatttgggtcagcactaat

SEQ ID NO: 73464 - DNA, 18 bp, Homo sapiens
gagctgatgcattcctgg

SEQ ID NO: 73465 - DNA, 24 bp, Homo sapiens
tttatcattccatcaccagagcct

SEQ ID NO: 73466 - DNA, 23 bp, Homo sapiens
cattgaacatttttaatgcctcc

SEQ ID NO: 73467 - DNA, 19 bp, Homo sapiens
ttcaaacccttcctcatcc

SEQ ID NO: 73468 - DNA, 22 bp, Homo sapiens
aagagtataagcagtttacacc

SEQ ID NO: 73469 - DNA, 24 bp, Homo sapiens
aaggaatggaatgaaaaaccagtt

SEQ ID NO: 73470 - DNA, 24 bp, Homo sapiens
ctctctccccctcctcctctctct

SEQ ID NO: 73471 - DNA, 23 bp, Homo sapiens
tgacaaaccttttctttaccttc

SEQ ID NO: 73472 - DNA, 22 bp, Homo sapiens
tccacatacctggttaatgtgc

SEQ ID NO: 73473 - DNA, 20 bp, Homo sapiens
tggtcagtctgactgttgat

SEQ ID NO: 73474 - DNA, 23 bp, Homo sapiens
ggcccttcattttcagctcatgg

SEQ ID NO: 73475 - DNA, 22 bp, Homo sapiens
actgtaaatagacactatgtgg

SEQ ID NO: 73476 - DNA, 18 bp, Homo sapiens
ggacaagaactcgtggag

SEQ ID NO: 73477 - DNA, 23 bp, Homo sapiens
gccaccgcatccagcctcataga

SEQ ID NO: 73478 - DNA, 24 bp, Homo sapiens
tctatagtgctttgcctggctaca

SEQ ID NO: 73479 - DNA, 30 bp, Homo sapiens
gatagaagacataattaacttttatataaa

SEQ ID NO: 73480 - DNA, 25 bp, Homo sapiens
acagatgttttgtttttcttttagg

SEQ ID NO: 73481 - DNA, 22 bp, Homo sapiens
tttcaaaaaagatcacctctcc

SEQ ID NO: 73482 - DNA, 23 bp, Homo sapiens
ctgtcatgctgataaggaaatta

SEQ ID NO: 73483 - DNA, 18 bp, Homo sapiens
cagggctatggctgcaga

SEQ ID NO: 73484 - DNA, 21 bp, Homo sapiens
agccaagaatgtctttaaaag

SEQ ID NO: 73485 - DNA, 25 bp, Homo sapiens
tgaaagacttcaacttctgaattag

SEQ ID NO: 73486 - DNA, 19 bp, Homo sapiens
aagaaaccttatccagccg

SEQ ID NO: 73487 - DNA, 29 bp, Homo sapiens
gataaaatttaattaatcaagcactctac

SEQ ID NO: 73488 - DNA, 24 bp, Homo sapiens
tctgcttattatcctgaagatctc

SEQ ID NO: 73489 - DNA, 23 bp, Homo sapiens
tttcactctagtggtttttgacc

SEQ ID NO: 73490 - DNA, 22 bp, Homo sapiens
gcatttcttttttcagattggc

SEQ ID NO: 73491 - DNA, 21 bp, Homo sapiens
agaaacctctcaccttcttcg

SEQ ID NO: 73492 - DNA, 21 bp, Homo sapiens
tgcctttcagaatttgtttct

SEQ ID NO: 73493 - DNA, 25 bp, Homo sapiens
gagcaacttttaatactttcttgtc

SEQ ID NO: 73494 - DNA, 20 bp, Homo sapiens
tttttgactctagtcatagc

SEQ ID NO: 73495 - DNA, 22 bp, Homo sapiens
ggcgttgttgagaatgggcaca

SEQ ID NO: 73496 - DNA, 22 bp, Homo sapiens
tgtatagggctagacttacagg

SEQ ID NO: 73497 - DNA, 20 bp, Homo sapiens
aagctgcaggttggacaagc

SEQ ID NO: 73498 - DNA, 24 bp, Homo sapiens
tttttttttttcaaggaaactgag

SEQ ID NO: 73499 - DNA, 19 bp, Homo sapiens
aaacctggcctaccacccc

SEQ ID NO: 73500 - DNA, 20 bp, Homo sapiens
aattttccctgccctacaat

SEQ ID NO: 73501 - DNA, 24 bp, Homo sapiens
tgacctggtcccatagcttcactc

SEQ ID NO: 73502 - DNA, 23 bp, Homo sapiens
atggatttctctttttaatctgt

SEQ ID NO: 73503 - DNA, 19 bp, Homo sapiens
atttgaagtgccatatttt

SEQ ID NO: 73504 - DNA, 20 bp, Homo sapiens
cagtatgtccagaagaatgc

SEQ ID NO: 73505 - DNA, 20 bp, Homo sapiens
agtccatcatcaccccttcc

SEQ ID NO: 73506 - DNA, 23 bp, Homo sapiens
acagaatctatgacatggagaac

SEQ ID NO: 73507 - DNA, 23 bp, Homo sapiens
gtacctgctactggccacctcac

SEQ ID NO: 73508 - DNA, 22 bp, Homo sapiens
agattgacaagtactggagaga

SEQ ID NO: 73509 - DNA, 24 bp, Homo sapiens
gtactcacagtggtggtcagcttt

SEQ ID NO: 73510 - DNA, 16 bp, Homo sapiens
tggcggttactgcaat

SEQ ID NO: 73511 - DNA, 24 bp, Homo sapiens
gattgttgaaaagagaccaagcag

SEQ ID NO: 73512 - DNA, 19 bp, Homo sapiens
ccgaatgctcaccagaatg

SEQ ID NO: 73513 - DNA, 21 bp, Homo sapiens
agttcttcaagggacagaatg

SEQ ID NO: 73514 - DNA, 22 bp, Homo sapiens
gctctgaatcttggaattgaag

SEQ ID NO: 73515 - DNA, 23 bp, Homo sapiens
catacagccttgcatgaccacat

SEQ ID NO: 73516 - DNA, 19 bp, Homo sapiens
aagcttattatgacccagg

SEQ ID NO: 73517 - DNA, 23 bp, Homo sapiens
ggcagtaagagcagtaccacatt

SEQ ID NO: 73518 - DNA, 17 bp, Homo sapiens
ggacatcaatgagtgcc

SEQ ID NO: 73519 - DNA, 21 bp, Homo sapiens
gatcagttgtgttgatcactt

SEQ ID NO: 73520 - DNA, 17 bp, Homo sapiens
gcctgtttccagtcatc

SEQ ID NO: 73521 - DNA, 21 bp, Homo sapiens
agtgacttgcagtgacttgga

SEQ ID NO: 73522 - DNA, 20 bp, Homo sapiens
gtctctctacatcttgggtt

SEQ ID NO: 73523 - DNA, 21 bp, Homo sapiens
tttcaggtcacgtcttgctcc

SEQ ID NO: 73524 - DNA, 17 bp, Homo sapiens
tacccaagcctgactcc

SEQ ID NO: 73525 - DNA, 21 bp, Homo sapiens
cctgggttcattagctgggta

SEQ ID NO: 73526 - DNA, 19 bp, Homo sapiens
ggcctttgaaattgttgtt

SEQ ID NO: 73527 - DNA, 23 bp, Homo sapiens
catgtcatctacattgatgtcag

SEQ ID NO: 73528 - DNA, 20 bp, Homo sapiens
acactggattttcatgcttt

SEQ ID NO: 73529 - DNA, 20 bp, Homo sapiens
aactcaaaagcttgtggagt

SEQ ID NO: 73530 - DNA, 17 bp, Homo sapiens
ttaacgcaaatgggacc

SEQ ID NO: 73531 - DNA, 21 bp, Homo sapiens
gtagttcttggcatggcgaac

SEQ ID NO: 73532 - DNA, 22 bp, Homo sapiens
ttaattattcagaatgctgcgg

SEQ ID NO: 73533 - DNA, 23 bp, Homo sapiens
tttctcactgggaggtttttaat

SEQ ID NO: 73534 - DNA, 20 bp, Homo sapiens
agcacgattgaacatggaac

SEQ ID NO: 73535 - DNA, 19 bp, Homo sapiens
tatttgaaagcccagtgcc

SEQ ID NO: 73536 - DNA, 17 bp, Homo sapiens
tctccctaagggcccaa

SEQ ID NO: 73537 - DNA, 22 bp, Homo sapiens
cccagaactcaccttggaaaac

SEQ ID NO: 73538 - DNA, 19 bp, Homo sapiens
tgtgagagagagatcctgc

SEQ ID NO: 73539 - DNA, 24 bp, Homo sapiens
acttgcagactgaagcagctgttc

SEQ ID NO: 73540 - DNA, 20 bp, Homo sapiens
gtttgccatgtgtgagtgtg

SEQ ID NO: 73541 - DNA, 18 bp, Homo sapiens
ttgagcagcatgttgggc

SEQ ID NO: 73542 - DNA, 22 bp, Homo sapiens
aagatgaaacgtaattttgaat

SEQ ID NO: 73543 - DNA, 18 bp, Homo sapiens
gaaactcccgtgccaggt

SEQ ID NO: 73544 - DNA, 19 bp, Homo sapiens
caggcacaccgaccactcc

SEQ ID NO: 73545 - DNA, 20 bp, Homo sapiens
acctgtcaccaagtccgctc

SEQ ID NO: 73546 - DNA, 16 bp, Homo sapiens
gcgctcagggtacagc

SEQ ID NO: 73547 - DNA, 19 bp, Homo sapiens
gctgctcagcttggacttc

SEQ ID NO: 73548 - DNA, 18 bp, Homo sapiens
gctcaagggacccctcct

SEQ ID NO: 73549 - DNA, 18 bp, Homo sapiens
tcctagctccctgcgaag

SEQ ID NO: 73550 - DNA, 24 bp, Homo sapiens
tccgggctgcagtctctggaagaa

SEQ ID NO: 73551 - DNA, 16 bp, Homo sapiens
ccaggcttgccgagtc

SEQ ID NO: 73552 - DNA, 16 bp, Homo sapiens
gcctgtcccgggaagt

SEQ ID NO: 73553 - DNA, 22 bp, Homo sapiens
gtagctgcgaggaaacttttgc

SEQ ID NO: 73554 - DNA, 24 bp, Homo sapiens
cgcggtgcgcacggtcccggccat

SEQ ID NO: 73555 - DNA, 19 bp, Homo sapiens
tgatggcaacctataagga

SEQ ID NO: 73556 - DNA, 26 bp, Homo sapiens
tttttattatacatgctgtattcatg

SEQ ID NO: 73557 - DNA, 23 bp, Homo sapiens
ttgattcttttctcttttttcaa

SEQ ID NO: 73558 - DNA, 19 bp, Homo sapiens
aattatgttcagctctgag

SEQ ID NO: 73559 - DNA, 21 bp, Homo sapiens
ccagctgaggaaggagtttca

SEQ ID NO: 73560 - DNA, 23 bp, Homo sapiens
ttaaactgaagctttcttctcct

SEQ ID NO: 73561 - DNA, 18 bp, Homo sapiens
cccctatggttttgaggg

SEQ ID NO: 73562 - DNA, 19 bp, Homo sapiens
ccctggattcagacccttg

SEQ ID NO: 73563 - DNA, 17 bp, Homo sapiens
ctaggctcacactgaaa

SEQ ID NO: 73564 - DNA, 19 bp, Homo sapiens
aggacccattctctctata

SEQ ID NO: 73565 - DNA, 24 bp, Homo sapiens
tgactagggttgctctctgccaat

SEQ ID NO: 73566 - DNA, 18 bp, Homo sapiens
cctatcgctggatgattg

SEQ ID NO: 73567 - DNA, 21 bp, Homo sapiens
tctgaggcagagctgagggtc

SEQ ID NO: 73568 - DNA, 20 bp, Homo sapiens
ttgagccagggtgccgctct

SEQ ID NO: 73569 - DNA, 18 bp, Homo sapiens
gtgtggcagcggtataga

SEQ ID NO: 73570 - DNA, 24 bp, Homo sapiens
agagtatggagatgaggcatctaa

SEQ ID NO: 73571 - DNA, 17 bp, Homo sapiens
agtcatctctggagtca

SEQ ID NO: 73572 - DNA, 21 bp, Homo sapiens
agatttaccgaaagcaagtga

SEQ ID NO: 73573 - DNA, 16 bp, Homo sapiens
tggtggaacggagaca

SEQ ID NO: 73574 - DNA, 19 bp, Homo sapiens
gaaaccaggcccctcagaa

SEQ ID NO: 73575 - DNA, 16 bp, Homo sapiens
acaggacgggctctac

SEQ ID NO: 73576 - DNA, 22 bp, Homo sapiens
ttctggatgcttgagtttcaat

SEQ ID NO: 73577 - DNA, 17 bp, Homo sapiens
tcagctgaagacatagc

SEQ ID NO: 73578 - DNA, 19 bp, Homo sapiens
caggccccagatatttgtc

SEQ ID NO: 73579 - DNA, 20 bp, Homo sapiens
ttttgctaagaaaattcaca

SEQ ID NO: 73580 - DNA, 22 bp, Homo sapiens
cagcaggcacagagaatgcact

SEQ ID NO: 73581 - DNA, 18 bp, Homo sapiens
cggccctaagaggatgag

SEQ ID NO: 73582 - DNA, 16 bp, Homo sapiens
tctcaggaaggcaagc

SEQ ID NO: 73583 - DNA, 16 bp, Homo sapiens
atggcttgcatcagct

SEQ ID NO: 73584 - DNA, 18 bp, Homo sapiens
aggatttgagcaacttct

SEQ ID NO: 73585 - DNA, 23 bp, Homo sapiens
aataaattcttcagattgaaaca

SEQ ID NO: 73586 - DNA, 20 bp, Homo sapiens
gctgaggtgatgatggaatc

SEQ ID NO: 73587 - DNA, 23 bp, Homo sapiens
ctatggactgcagatactgctgc

SEQ ID NO: 73588 - DNA, 16 bp, Homo sapiens
cctggcatagagtgga

SEQ ID NO: 73589 - DNA, 18 bp, Homo sapiens
atggatttgtactgtgca

SEQ ID NO: 73590 - DNA, 18 bp, Homo sapiens
gtcctcctcctgccataa

SEQ ID NO: 73591 - DNA, 16 bp, Homo sapiens
taccctcttccacaca

SEQ ID NO: 73592 - DNA, 19 bp, Homo sapiens
gaggagccttaaatactca

SEQ ID NO: 73593 - DNA, 16 bp, Homo sapiens
ggcaacactctagctt

SEQ ID NO: 73594 - DNA, 21 bp, Homo sapiens
agcactgccccccatgcaaat

SEQ ID NO: 73595 - DNA, 21 bp, Homo sapiens
atgggtgaggatgtgttaaat

SEQ ID NO: 73596 - DNA, 23 bp, Homo sapiens
aacaagatcctttatcacataca

SEQ ID NO: 73597 - DNA, 16 bp, Homo sapiens
agcaaggaggatccag

SEQ ID NO: 73598 - DNA, 21 bp, Homo sapiens
gtgtcaatccttcgggtgcaa

SEQ ID NO: 73599 - DNA, 16 bp, Homo sapiens
gaaaagccaacaggca

SEQ ID NO: 73600 - DNA, 21 bp, Homo sapiens
ggttagaattttggatgcatt

SEQ ID NO: 73601 - DNA, 22 bp, Homo sapiens
gaatgaagttgactctactttg

SEQ ID NO: 73602 - DNA, 19 bp, Homo sapiens
tcacccagcagagagctgc

SEQ ID NO: 73603 - DNA, 21 bp, Homo sapiens
accactggatatttttctttg

SEQ ID NO: 73604 - DNA, 22 bp, Homo sapiens
tctttggaagaccacaagtatc

SEQ ID NO: 73605 - DNA, 18 bp, Homo sapiens
caggtgtctccgattata

SEQ ID NO: 73606 - DNA, 20 bp, Homo sapiens
tgcatgatcttcggaaggtc

SEQ ID NO: 73607 - DNA, 18 bp, Homo sapiens
ctacagaacaaattccga

SEQ ID NO: 73608 - DNA, 16 bp, Homo sapiens
accatggggccacatc

SEQ ID NO: 73609 - DNA, 16 bp, Homo sapiens
ttataggcgtgagcca

SEQ ID NO: 73610 - DNA, 18 bp, Homo sapiens
aaggctggagacaaacct

SEQ ID NO: 73611 - DNA, 17 bp, Homo sapiens
cggatgatctcagattt

SEQ ID NO: 73612 - DNA, 19 bp, Homo sapiens
ccagacagctgcagccaca

SEQ ID NO: 73613 - DNA, 19 bp, Homo sapiens
caaatcaagaactctcctt

SEQ ID NO: 73614 - DNA, 22 bp, Homo sapiens
tctaatttttttttcctttttg

SEQ ID NO: 73615 - DNA, 21 bp, Homo sapiens
cataagtctgcatatgaggtt

SEQ ID NO: 73616 - DNA, 20 bp, Homo sapiens
tgtgtgagtttatatccagc

SEQ ID NO: 73617 - DNA, 18 bp, Homo sapiens
ttcttgatacggggagct

SEQ ID NO: 73618 - DNA, 21 bp, Homo sapiens
gtgcttaatacttgttggata

SEQ ID NO: 73619 - DNA, 16 bp, Homo sapiens
gccggccacaaccctt

SEQ ID NO: 73620 - DNA, 24 bp, Homo sapiens
gggaggaggtcctccatctccctg

SEQ ID NO: 73621 - DNA, 18 bp, Homo sapiens
gtggggctgacgtcagga

SEQ ID NO: 73622 - DNA, 24 bp, Homo sapiens
cccatcagctccaggcagtctctg

SEQ ID NO: 73623 - DNA, 20 bp, Homo sapiens
gatgtaggctgggcgccgcg

SEQ ID NO: 73624 - DNA, 23 bp, Homo sapiens
ctcacctgcaggcaggctccgcc

SEQ ID NO: 73625 - DNA, 22 bp, Homo sapiens
ccacccgggaaaccggaagccg

SEQ ID NO: 73626 - DNA, 19 bp, Homo sapiens
ctgatgcacacagcctcaa

SEQ ID NO: 73627 - DNA, 17 bp, Homo sapiens
accagtctgagcaacat

SEQ ID NO: 73628 - DNA, 18 bp, Homo sapiens
gtcggaaaaagccccgca

SEQ ID NO: 73629 - DNA, 23 bp, Homo sapiens
aaataactacaaaaataagcact

SEQ ID NO: 73630 - DNA, 19 bp, Homo sapiens
ctccctccttccatttttt

SEQ ID NO: 73631 - DNA, 23 bp, Homo sapiens
gtgtcactgggctgcactgttga

SEQ ID NO: 73632 - DNA, 17 bp, Homo sapiens
ggggaaagggagagagg

SEQ ID NO: 73633 - DNA, 16 bp, Homo sapiens
gacttgctggcccatg

SEQ ID NO: 73634 - DNA, 16 bp, Homo sapiens
ttgaggcaggatgaaa

SEQ ID NO: 73635 - DNA, 19 bp, Homo sapiens
taggttttccgtgtgtatc

SEQ ID NO: 73636 - DNA, 23 bp, Homo sapiens
tccagtgaagcctggagtggaga

SEQ ID NO: 73637 - DNA, 17 bp, Homo sapiens
gaacaccggtttatctc

SEQ ID NO: 73638 - DNA, 18 bp, Homo sapiens
aacctatggactcaggcc

SEQ ID NO: 73639 - DNA, 16 bp, Homo sapiens
atgcctggccaaaaaa

SEQ ID NO: 73640 - DNA, 19 bp, Homo sapiens
caggtccctggctgttggc

SEQ ID NO: 73641 - DNA, 16 bp, Homo sapiens
gagatggaggttgcag

SEQ ID NO: 73642 - DNA, 18 bp, Homo sapiens
caggaggaatttcacacc

SEQ ID NO: 73643 - DNA, 24 bp, Homo sapiens
acagagcgattctccgtctcaaaa

SEQ ID NO: 73644 - DNA, 16 bp, Homo sapiens
tggccttggaagggca

SEQ ID NO: 73645 - DNA, 22 bp, Homo sapiens
agaacatgtaggaaacacaagg

SEQ ID NO: 73646 - DNA, 16 bp, Homo sapiens
acccttcctccaggtt

SEQ ID NO: 73647 - DNA, 16 bp, Homo sapiens
ggaaacagctgcggtg

SEQ ID NO: 73648 - DNA, 24 bp, Homo sapiens
aagtgagcagcggaatagccaagg

SEQ ID NO: 73649 - DNA, 24 bp, Homo sapiens
gtacggtggtcactggggtctgcc

SEQ ID NO: 73650 - DNA, 18 bp, Homo sapiens
acagcgttgggctgggcc

SEQ ID NO: 73651 - DNA, 22 bp, Homo sapiens
tgatgtgagagaaggtgtggac

SEQ ID NO: 73652 - DNA, 21 bp, Homo sapiens
gtccgtgacctgggagccctc

SEQ ID NO: 73653 - DNA, 24 bp, Homo sapiens
gtggatatagcctcaaaagccaac

SEQ ID NO: 73654 - DNA, 22 bp, Homo sapiens
gctgaggcctgacccctgcctg

SEQ ID NO: 73655 - DNA, 20 bp, Homo sapiens
gccggaggtgcgtggctggg

SEQ ID NO: 73656 - DNA, 22 bp, Homo sapiens
ctgggcgtggagggcagtggca

SEQ ID NO: 73657 - DNA, 24 bp, Homo sapiens
ttgcgctgaagctgctctgagggc

SEQ ID NO: 73658 - DNA, 24 bp, Homo sapiens
agcctggggcccttggggcccaaa

SEQ ID NO: 73659 - DNA, 16 bp, Homo sapiens
cagacctgagagggag

SEQ ID NO: 73660 - DNA, 22 bp, Homo sapiens
cagaaaggccagccgcaagccc

SEQ ID NO: 73661 - DNA, 24 bp, Homo sapiens
ctccattctctcttgttactcatg

SEQ ID NO: 73662 - DNA, 16 bp, Homo sapiens
cctgtgcctgcctccc

SEQ ID NO: 73663 - DNA, 21 bp, Homo sapiens
gggcctctgcaccagcagaat

SEQ ID NO: 73664 - DNA, 21 bp, Homo sapiens
aaagccctcttggcttgagta

SEQ ID NO: 73665 - DNA, 22 bp, Homo sapiens
tggcagagctctcctccctggg

SEQ ID NO: 73666 - DNA, 17 bp, Homo sapiens
cctgagtaagattctgc

SEQ ID NO: 73667 - DNA, 20 bp, Homo sapiens
cagggtctggtcccagggct

SEQ ID NO: 73668 - DNA, 19 bp, Homo sapiens
aacctagcccccaccccaa

SEQ ID NO: 73669 - DNA, 18 bp, Homo sapiens
gaacggagatccccgaac

SEQ ID NO: 73670 - DNA, 21 bp, Homo sapiens
ctcttagcctcagggagcctg

SEQ ID NO: 73671 - DNA, 23 bp, Homo sapiens
gagtgggctttggccgggttctg

SEQ ID NO: 73672 - DNA, 16 bp, Homo sapiens
gagtgactctgcccta

SEQ ID NO: 73673 - DNA, 17 bp, Homo sapiens
gactgggccaggaaggg

SEQ ID NO: 73674 - DNA, 21 bp, Homo sapiens
tggagagcctgtgccgggcac

SEQ ID NO: 73675 - DNA, 23 bp, Homo sapiens
cactcctccacgtcaggactgcc

SEQ ID NO: 73676 - DNA, 18 bp, Homo sapiens
ggagctaggggccacagt

SEQ ID NO: 73677 - DNA, 21 bp, Homo sapiens
gaggcacagggttgagtgtca

SEQ ID NO: 73678 - DNA, 18 bp, Homo sapiens
tctagcccagcagctggt

SEQ ID NO: 73679 - DNA, 16 bp, Homo sapiens
agtaggcttactctct

SEQ ID NO: 73680 - DNA, 23 bp, Homo sapiens
aagggtgcttcaggggtgtctgc

SEQ ID NO: 73681 - DNA, 16 bp, Homo sapiens
cgctgtggggtacaca

SEQ ID NO: 73682 - DNA, 23 bp, Homo sapiens
ccattggtgctgatcccagcagc

SEQ ID NO: 73683 - DNA, 24 bp, Homo sapiens
aaatctcctggccgggctgggtcc

SEQ ID NO: 73684 - DNA, 18 bp, Homo sapiens
aaccggtgtggtggatgg

SEQ ID NO: 73685 - DNA, 21 bp, Homo sapiens
tgtgaagcagagctcctttgc

SEQ ID NO: 73686 - DNA, 21 bp, Homo sapiens
ctttgtgcgtgcccagcctcc

SEQ ID NO: 73687 - DNA, 18 bp, Homo sapiens
agagctgctgggaaacaa

SEQ ID NO: 73688 - DNA, 22 bp, Homo sapiens
cacagctggggccattgcctct

SEQ ID NO: 73689 - DNA, 24 bp, Homo sapiens
cacagcacccgtgctacgttgcca

SEQ ID NO: 73690 - DNA, 23 bp, Homo sapiens
agggggccacatgccacgtacag

SEQ ID NO: 73691 - DNA, 21 bp, Homo sapiens
gttagcctgggctgggaggaa

SEQ ID NO: 73692 - DNA, 20 bp, Homo sapiens
gagtcttgggtgtcttataa

SEQ ID NO: 73693 - DNA, 23 bp, Homo sapiens
gagatcacctggccaaaggcgat

SEQ ID NO: 73694 - DNA, 16 bp, Homo sapiens
ctgcaggagggagctc

SEQ ID NO: 73695 - DNA, 23 bp, Homo sapiens
aggcaggagctgctgcagggtct

SEQ ID NO: 73696 - DNA, 24 bp, Homo sapiens
tctgatcctacccacaggaggtga

SEQ ID NO: 73697 - DNA, 19 bp, Homo sapiens
attggagtgcaagactcaa

SEQ ID NO: 73698 - DNA, 16 bp, Homo sapiens
agggtaggggaaatag

SEQ ID NO: 73699 - DNA, 22 bp, Homo sapiens
catccccttaccttccgagctc

SEQ ID NO: 73700 - DNA, 18 bp, Homo sapiens
ctgtggctatagaagtgg

SEQ ID NO: 73701 - DNA, 18 bp, Homo sapiens
ccagcccagagttgattc

SEQ ID NO: 73702 - DNA, 17 bp, Homo sapiens
gtagagaaggcttcctc

SEQ ID NO: 73703 - DNA, 18 bp, Homo sapiens
agtccctctattgttcct

SEQ ID NO: 73704 - DNA, 16 bp, Homo sapiens
gaggaagggaagggtc

SEQ ID NO: 73705 - DNA, 17 bp, Homo sapiens
ccaggtcctgcagtgta

SEQ ID NO: 73706 - DNA, 17 bp, Homo sapiens
cagacccaggttgccac

SEQ ID NO: 73707 - DNA, 19 bp, Homo sapiens
caagggtgaaggtggtaga

SEQ ID NO: 73708 - DNA, 17 bp, Homo sapiens
gtcagcagtgtcctcat

SEQ ID NO: 73709 - DNA, 19 bp, Homo sapiens
atctggggtctgacccatg

SEQ ID NO: 73710 - DNA, 21 bp, Homo sapiens
ctcctgagagcagggccactt

SEQ ID NO: 73711 - DNA, 21 bp, Homo sapiens
cggtatagtagttgatcacag

SEQ ID NO: 73712 - DNA, 22 bp, Homo sapiens
tgacaggcagaagatgagatgg

SEQ ID NO: 73713 - DNA, 22 bp, Homo sapiens
cactgggggaaaggggttggca

SEQ ID NO: 73714 - DNA, 24 bp, Homo sapiens
agggacagtgggtgggaggcaggc

SEQ ID NO: 73715 - DNA, 24 bp, Homo sapiens
cccagacccaagggcctcgaggca

SEQ ID NO: 73716 - DNA, 20 bp, Homo sapiens
tacgaccaagagaaacggga

SEQ ID NO: 73717 - DNA, 24 bp, Homo sapiens
tatgcccgcctgtccaggtccatc

SEQ ID NO: 73718 - DNA, 16 bp, Homo sapiens
tattcagagacgtagc

SEQ ID NO: 73719 - DNA, 23 bp, Homo sapiens
aggagttagggtggagggggctg

SEQ ID NO: 73720 - DNA, 24 bp, Homo sapiens
ctggggccccagcaggcctggcca

SEQ ID NO: 73721 - DNA, 17 bp, Homo sapiens
acccgtcttctccatgg

SEQ ID NO: 73722 - DNA, 17 bp, Homo sapiens
gtgtcccaagaccctga

SEQ ID NO: 73723 - DNA, 16 bp, Homo sapiens
gaaggctgtgacttca

SEQ ID NO: 73724 - DNA, 17 bp, Homo sapiens
caaagcttaagggggtt

SEQ ID NO: 73725 - DNA, 17 bp, Homo sapiens
ataccacctcttccggc

SEQ ID NO: 73726 - DNA, 23 bp, Homo sapiens
agaaaattaaggccagaaactta

SEQ ID NO: 73727 - DNA, 23 bp, Homo sapiens
gcaatcatccctgcacaggctgt

SEQ ID NO: 73728 - DNA, 24 bp, Homo sapiens
caagggatccacctgcctcggcct

SEQ ID NO: 73729 - DNA, 23 bp, Homo sapiens
cccttagtaagtctcttaatgtc

SEQ ID NO: 73730 - DNA, 17 bp, Homo sapiens
ggaagccacgagcagcc

SEQ ID NO: 73731 - DNA, 17 bp, Homo sapiens
cctttcatggccaatga

SEQ ID NO: 73732 - DNA, 16 bp, Homo sapiens
ggcctcattgtgactg

SEQ ID NO: 73733 - DNA, 18 bp, Homo sapiens
tggcctgactgttgttct

SEQ ID NO: 73734 - DNA, 24 bp, Homo sapiens
tgagagaagctggaccccatgtga

SEQ ID NO: 73735 - DNA, 21 bp, Homo sapiens
tgcttcctgtgaccacttccc

SEQ ID NO: 73736 - DNA, 23 bp, Homo sapiens
tatctcagtgctgcagccagcca

SEQ ID NO: 73737 - DNA, 23 bp, Homo sapiens
gccggcagcacaggccaataggc

SEQ ID NO: 73738 - DNA, 24 bp, Homo sapiens
atcgtcactgtcggcggccatgac

SEQ ID NO: 73739 - DNA, 16 bp, Homo sapiens
gacgtctgaacggaag

SEQ ID NO: 73740 - DNA, 24 bp, Homo sapiens
ctttgaaggctacctctgggaagc

SEQ ID NO: 73741 - DNA, 24 bp, Homo sapiens
atccccgactgcctgaaccgcgcc

SEQ ID NO: 73742 - DNA, 20 bp, Homo sapiens
aggagcctctagaactatga

SEQ ID NO: 73743 - DNA, 17 bp, Homo sapiens
gggagacgagcggtgtc

SEQ ID NO: 73744 - DNA, 16 bp, Homo sapiens
ccactgaagtcacctc

SEQ ID NO: 73745 - DNA, 19 bp, Homo sapiens
ccttttaaagagactctcg

SEQ ID NO: 73746 - DNA, 18 bp, Homo sapiens
agttatcagcaaaacgtg

SEQ ID NO: 73747 - DNA, 22 bp, Homo sapiens
cgcctccgccctcgggtggcgg

SEQ ID NO: 73748 - DNA, 22 bp, Homo sapiens
gatccccgagcgcttggcctcc

SEQ ID NO: 73749 - DNA, 24 bp, Homo sapiens
acccaagatggctgcgctgttgct

SEQ ID NO: 73750 - DNA, 24 bp, Homo sapiens
agttgtagcttttcaactagaaaa

SEQ ID NO: 73751 - DNA, 18 bp, Homo sapiens
tactttctgatacagagc

SEQ ID NO: 73752 - DNA, 17 bp, Homo sapiens
tctatcccttcacccct

SEQ ID NO: 73753 - DNA, 22 bp, Homo sapiens
aaatgtgtattgatttttgatt

SEQ ID NO: 73754 - DNA, 16 bp, Homo sapiens
cccaagaggcggcgct

SEQ ID NO: 73755 - DNA, 22 bp, Homo sapiens
gaacttgtgacctcaggtgatc

SEQ ID NO: 73756 - DNA, 22 bp, Homo sapiens
ttccagaaccgctccatctctt

SEQ ID NO: 73757 - DNA, 22 bp, Homo sapiens
ctgagcaaccatgcctggcttg

SEQ ID NO: 73758 - DNA, 19 bp, Homo sapiens
ccttccttacctgtagata

SEQ ID NO: 73759 - DNA, 20 bp, Homo sapiens
attaaaccaagtttactttt

SEQ ID NO: 73760 - DNA, 18 bp, Homo sapiens
gctaaagatcaaccttca

SEQ ID NO: 73761 - DNA, 19 bp, Homo sapiens
tttgggaaccacggccaaa

SEQ ID NO: 73762 - DNA, 19 bp, Homo sapiens
tcacctcatctacatagca

SEQ ID NO: 73763 - DNA, 19 bp, Homo sapiens
ccgtcctctgtctccccac

SEQ ID NO: 73764 - DNA, 21 bp, Homo sapiens
gccagcctgggcaacagagcg

SEQ ID NO: 73765 - DNA, 16 bp, Homo sapiens
cctgcactcaaagcaa

SEQ ID NO: 73766 - DNA, 22 bp, Homo sapiens
cctatttcagaattagtttata

SEQ ID NO: 73767 - DNA, 18 bp, Homo sapiens
gccaatgaaacagccaag

SEQ ID NO: 73768 - DNA, 21 bp, Homo sapiens
cctttttaaaattgtctttgt

SEQ ID NO: 73769 - DNA, 19 bp, Homo sapiens
gacttactgttccctctaa

SEQ ID NO: 73770 - DNA, 18 bp, Homo sapiens
catctgccaccgtggcac

SEQ ID NO: 73771 - DNA, 17 bp, Homo sapiens
atgagactctgtctcaa

SEQ ID NO: 73772 - DNA, 20 bp, Homo sapiens
agttccaaataagactcaaa

SEQ ID NO: 73773 - DNA, 24 bp, Homo sapiens
aaaatggtttagaattgtatgagg

SEQ ID NO: 73774 - DNA, 16 bp, Homo sapiens
caaacttagctgtgtg

SEQ ID NO: 73775 - DNA, 18 bp, Homo sapiens
ttatgagcagctgtgaca

SEQ ID NO: 73776 - DNA, 19 bp, Homo sapiens
cgaattaacttaccaagtg

SEQ ID NO: 73777 - DNA, 16 bp, Homo sapiens
ctgttactccctggga

SEQ ID NO: 73778 - DNA, 20 bp, Homo sapiens
acccagtaatgaaggaaaga

SEQ ID NO: 73779 - DNA, 18 bp, Homo sapiens
ggccagcactgatccaca

SEQ ID NO: 73780 - DNA, 17 bp, Homo sapiens
gcaatagagcgagactc

SEQ ID NO: 73781 - DNA, 20 bp, Homo sapiens
atacctggaatgggatccga

SEQ ID NO: 73782 - DNA, 17 bp, Homo sapiens
gtatagctggggaatct

SEQ ID NO: 73783 - DNA, 17 bp, Homo sapiens
agaatcatgctgagagg

SEQ ID NO: 73784 - DNA, 16 bp, Homo sapiens
ggctgccagccccata

SEQ ID NO: 73785 - DNA, 19 bp, Homo sapiens
tgtcctatttactgaaatt

SEQ ID NO: 73786 - DNA, 20 bp, Homo sapiens
acaaacagaaagatgggtga

SEQ ID NO: 73787 - DNA, 20 bp, Homo sapiens
ggacctaggaaaaggcctga

SEQ ID NO: 73788 - DNA, 22 bp, Homo sapiens
ctgaaaatacaaaaggatctaa

SEQ ID NO: 73789 - DNA, 19 bp, Homo sapiens
gttcttactgtgttgtcct

SEQ ID NO: 73790 - DNA, 18 bp, Homo sapiens
agacccttttccactatt

SEQ ID NO: 73791 - DNA, 20 bp, Homo sapiens
catcttcctacacattatta

SEQ ID NO: 73792 - DNA, 16 bp, Homo sapiens
ggcaaaaaaggggagt

SEQ ID NO: 73793 - DNA, 20 bp, Homo sapiens
gcctgggaaaagttctcctt

SEQ ID NO: 73794 - DNA, 22 bp, Homo sapiens
cctgctgctgtcgtaggcgagg

SEQ ID NO: 73795 - DNA, 24 bp, Homo sapiens
ttcaccacaatctccttcttctgg

SEQ ID NO: 73796 - DNA, 20 bp, Homo sapiens
gcgaaggaggaggaggaaga

SEQ ID NO: 73797 - DNA, 22 bp, Homo sapiens
aacatagttggtcttcacattc

SEQ ID NO: 73798 - DNA, 23 bp, Homo sapiens
cagcggcggcgccccgagccggc

SEQ ID NO: 73799 - DNA, 24 bp, Homo sapiens
ctgggggcgcccaactctgccctg

SEQ ID NO: 73800 - DNA, 18 bp, Homo sapiens
tgcgacagtacaacatcc

SEQ ID NO: 73801 - DNA, 19 bp, Homo sapiens
tttatcccatccccagggg

SEQ ID NO: 73802 - DNA, 17 bp, Homo sapiens
gggagttctcctggccc

SEQ ID NO: 73803 - DNA, 18 bp, Homo sapiens
ccttaccctaaaagtgca

SEQ ID NO: 73804 - DNA, 22 bp, Homo sapiens
ctttgtgtttcttttgtgatca

SEQ ID NO: 73805 - DNA, 17 bp, Homo sapiens
tccaatgtgtagtactc

SEQ ID NO: 73806 - DNA, 22 bp, Homo sapiens
ttttgttagctatgttaaactc

SEQ ID NO: 73807 - DNA, 16 bp, Homo sapiens
cagctgcacgtcggac

SEQ ID NO: 73808 - DNA, 22 bp, Homo sapiens
agagttgaattagaattgtcag

SEQ ID NO: 73809 - DNA, 22 bp, Homo sapiens
cctgtctcttaaataaataaaa

SEQ ID NO: 73810 - DNA, 24 bp, Homo sapiens
gaaaggaaggccaacccagagagt

SEQ ID NO: 73811 - DNA, 17 bp, Homo sapiens
tgagctatgatcacacc

SEQ ID NO: 73812 - DNA, 20 bp, Homo sapiens
acgtgcacctttctcatcct

SEQ ID NO: 73813 - DNA, 17 bp, Homo sapiens
ttcgatcaggtcttcta

SEQ ID NO: 73814 - DNA, 20 bp, Homo sapiens
aaaatacgttttttcaagat

SEQ ID NO: 73815 - DNA, 22 bp, Homo sapiens
ttaagactgggaacaatttaaa

SEQ ID NO: 73816 - DNA, 23 bp, Homo sapiens
attaagttgtgtatcattgttat

SEQ ID NO: 73817 - DNA, 22 bp, Homo sapiens
aaatacaaattctcttccctct

SEQ ID NO: 73818 - DNA, 16 bp, Homo sapiens
ttcctgtggttagaag

SEQ ID NO: 73819 - DNA, 16 bp, Homo sapiens
aagaaaaaggtgagca

SEQ ID NO: 73820 - DNA, 16 bp, Homo sapiens
gggagcgcttctgtct

SEQ ID NO: 73821 - DNA, 17 bp, Homo sapiens
acctagagaaaatcacc

SEQ ID NO: 73822 - DNA, 23 bp, Homo sapiens
ggcttctgaaagttcaatataaa

SEQ ID NO: 73823 - DNA, 25 bp, Homo sapiens
cttgtaataatatccaatatatatg

SEQ ID NO: 73824 - DNA, 19 bp, Homo sapiens
ctgcagctcgtttgactat

SEQ ID NO: 73825 - DNA, 20 bp, Homo sapiens
tcagcaacatcggcaagtat

SEQ ID NO: 73826 - DNA, 19 bp, Homo sapiens
aatacagtttctttacctc

SEQ ID NO: 73827 - DNA, 22 bp, Homo sapiens
gtatgtcttgttgcatatttat

SEQ ID NO: 73828 - DNA, 21 bp, Homo sapiens
ctgcaatcaaagaatccttgt

SEQ ID NO: 73829 - DNA, 20 bp, Homo sapiens
cacatttatttacttctctt

SEQ ID NO: 73830 - DNA, 19 bp, Homo sapiens
caattgttctttctaccac

SEQ ID NO: 73831 - DNA, 18 bp, Homo sapiens
gcaaagaaaccacgaatt

SEQ ID NO: 73832 - DNA, 21 bp, Homo sapiens
attgttattatctttacgtag

SEQ ID NO: 73833 - DNA, 16 bp, Homo sapiens
ggcagccaatctctct

SEQ ID NO: 73834 - DNA, 21 bp, Homo sapiens
cctagaattgtagaggtagga

SEQ ID NO: 73835 - DNA, 26 bp, Homo sapiens
ctttctacttaaaaagaattcttacc

SEQ ID NO: 73836 - DNA, 26 bp, Homo sapiens
tttcttcctaaaagttcaataaaaat

SEQ ID NO: 73837 - DNA, 21 bp, Homo sapiens
gtggagagcattttaatattc

SEQ ID NO: 73838 - DNA, 20 bp, Homo sapiens
gagtgtgtgcgccttgataa

SEQ ID NO: 73839 - DNA, 19 bp, Homo sapiens
tacgaacttaagagcaaag

SEQ ID NO: 73840 - DNA, 22 bp, Homo sapiens
ggattgtacagactgaacagat

SEQ ID NO: 73841 - DNA, 24 bp, Homo sapiens
tttatataattgcagaatagcaag

SEQ ID NO: 73842 - DNA, 17 bp, Homo sapiens
ttggctttgattgcagc

SEQ ID NO: 73843 - DNA, 19 bp, Homo sapiens
tgtaagtgtttttaccaga

SEQ ID NO: 73844 - DNA, 18 bp, Homo sapiens
agggcagttatgtcatca

SEQ ID NO: 73845 - DNA, 21 bp, Homo sapiens
ctccaggaatgcctgctgtga

SEQ ID NO: 73846 - DNA, 18 bp, Homo sapiens
actctctctctgctgaca

SEQ ID NO: 73847 - DNA, 16 bp, Homo sapiens
tggaaaaaattgctgc

SEQ ID NO: 73848 - DNA, 25 bp, Homo sapiens
agtaaaatattttaattacctttcc

SEQ ID NO: 73849 - DNA, 18 bp, Homo sapiens
actgatctagatgatgac

SEQ ID NO: 73850 - DNA, 18 bp, Homo sapiens
ccaattctataaccacag

SEQ ID NO: 73851 - DNA, 21 bp, Homo sapiens
ctgaggtagatgtgacccgag

SEQ ID NO: 73852 - DNA, 18 bp, Homo sapiens
ttactgagctttcaaaga

SEQ ID NO: 73853 - DNA, 21 bp, Homo sapiens
actatcttacaaagcacagga

SEQ ID NO: 73854 - DNA, 18 bp, Homo sapiens
tcttagtagtggttggtt

SEQ ID NO: 73855 - DNA, 16 bp, Homo sapiens
gcccttcttctctggc

SEQ ID NO: 73856 - DNA, 24 bp, Homo sapiens
tatgtagtagggaagaatcgatag

SEQ ID NO: 73857 - DNA, 17 bp, Homo sapiens
gtaaagcattcttacca

SEQ ID NO: 73858 - DNA, 23 bp, Homo sapiens
tttaaagtgggcttaattaaaat

SEQ ID NO: 73859 - DNA, 20 bp, Homo sapiens
tgtcttcaacgttactacac

SEQ ID NO: 73860 - DNA, 18 bp, Homo sapiens
tgcaattcttcaatctgt

SEQ ID NO: 73861 - DNA, 21 bp, Homo sapiens
catctttcagatatgctaaag

SEQ ID NO: 73862 - DNA, 18 bp, Homo sapiens
ccccaaatgcagcacctg

SEQ ID NO: 73863 - DNA, 22 bp, Homo sapiens
gcctgtggtcccagctacttgg

SEQ ID NO: 73864 - DNA, 20 bp, Homo sapiens
tttcctgatcgtatctgtta

SEQ ID NO: 73865 - DNA, 22 bp, Homo sapiens
cttggctgcagtgagccatggt

SEQ ID NO: 73866 - DNA, 16 bp, Homo sapiens
aaccacactaagggga

SEQ ID NO: 73867 - DNA, 22 bp, Homo sapiens
aaaaatattaacaagtaactca

SEQ ID NO: 73868 - DNA, 18 bp, Homo sapiens
gtagacattactttgcca

SEQ ID NO: 73869 - DNA, 16 bp, Homo sapiens
ctatcccagctgccta

SEQ ID NO: 73870 - DNA, 18 bp, Homo sapiens
ggttgtgtcccaacaaaa

SEQ ID NO: 73871 - DNA, 17 bp, Homo sapiens
gtaggttcccatagtgt

SEQ ID NO: 73872 - DNA, 20 bp, Homo sapiens
agattcaaggctttgtatat

SEQ ID NO: 73873 - DNA, 16 bp, Homo sapiens
agaacatctacagcca

SEQ ID NO: 73874 - DNA, 19 bp, Homo sapiens
taggtcataagatacatga

SEQ ID NO: 73875 - DNA, 27 bp, Homo sapiens
tgaaataaaaaatatgagagactaaag

SEQ ID NO: 73876 - DNA, 19 bp, Homo sapiens
cggaaggcttcaaaattga

SEQ ID NO: 73877 - DNA, 20 bp, Homo sapiens
caaataatacaccacacaga

SEQ ID NO: 73878 - DNA, 23 bp, Homo sapiens
atttttttcttaaactgtaggtc

SEQ ID NO: 73879 - DNA, 16 bp, Homo sapiens
ttggtactggctgggc

SEQ ID NO: 73880 - DNA, 19 bp, Homo sapiens
gaacaagagacagagagat

SEQ ID NO: 73881 - DNA, 19 bp, Homo sapiens
ctaaaaacttgcactgtta

SEQ ID NO: 73882 - DNA, 25 bp, Homo sapiens
tgtaaagaaactttgatcttatata

SEQ ID NO: 73883 - DNA, 21 bp, Homo sapiens
aaacatgactttgcaatgtat

SEQ ID NO: 73884 - DNA, 21 bp, Homo sapiens
ggaagactcagactcctgcag

SEQ ID NO: 73885 - DNA, 16 bp, Homo sapiens
tcttctgatttggggg

SEQ ID NO: 73886 - DNA, 23 bp, Homo sapiens
cttctgatttacagttagtcata

SEQ ID NO: 73887 - DNA, 17 bp, Homo sapiens
gcctggttttgcaatca

SEQ ID NO: 73888 - DNA, 22 bp, Homo sapiens
gaaaataagaatatggttttta

SEQ ID NO: 73889 - DNA, 18 bp, Homo sapiens
aaatcagaatggatacca

SEQ ID NO: 73890 - DNA, 18 bp, Homo sapiens
gtttctcaagcaagacct

SEQ ID NO: 73891 - DNA, 19 bp, Homo sapiens
gggtgttcgagatcctata

SEQ ID NO: 73892 - DNA, 29 bp, Homo sapiens
attattaaatattttttaatatccactgg

SEQ ID NO: 73893 - DNA, 21 bp, Homo sapiens
cttttgcattaagcatggtta

SEQ ID NO: 73894 - DNA, 22 bp, Homo sapiens
ttataatcttttaacttttagt

SEQ ID NO: 73895 - DNA, 18 bp, Homo sapiens
tctcaatatcctacgtac

SEQ ID NO: 73896 - DNA, 19 bp, Homo sapiens
ctacctgtaaattttgtct

SEQ ID NO: 73897 - DNA, 22 bp, Homo sapiens
ccgaaattttgttttttccaaa

SEQ ID NO: 73898 - DNA, 20 bp, Homo sapiens
accacctctttaataaccat

SEQ ID NO: 73899 - DNA, 25 bp, Homo sapiens
aaaagaatatattctgttttgaaaa

SEQ ID NO: 73900 - DNA, 19 bp, Homo sapiens
acaaccttgtttcttcttt

SEQ ID NO: 73901 - DNA, 18 bp, Homo sapiens
gcctgggcaataagaaaa

SEQ ID NO: 73902 - DNA, 16 bp, Homo sapiens
gccccctggttgcatc

SEQ ID NO: 73903 - DNA, 17 bp, Homo sapiens
cattttcatcacgtgga

SEQ ID NO: 73904 - DNA, 18 bp, Homo sapiens
gtcttgaggcataagttt

SEQ ID NO: 73905 - DNA, 16 bp, Homo sapiens
tgtcccatcagatgaa

SEQ ID NO: 73906 - DNA, 18 bp, Homo sapiens
ttcattctcttgggttca

SEQ ID NO: 73907 - DNA, 23 bp, Homo sapiens
ctaatacaaagaagaaaagacca

SEQ ID NO: 73908 - DNA, 16 bp, Homo sapiens
aggcaacatagtgaga

SEQ ID NO: 73909 - DNA, 22 bp, Homo sapiens
cttatagagtagtagaccagcc

SEQ ID NO: 73910 - DNA, 17 bp, Homo sapiens
aaggtggtaagtactgt

SEQ ID NO: 73911 - DNA, 16 bp, Homo sapiens
aactgccatgcaggac

SEQ ID NO: 73912 - DNA, 18 bp, Homo sapiens
tgaatgtttatgggactg

SEQ ID NO: 73913 - DNA, 24 bp, Homo sapiens
caaagagaatcttacttttagcaa

SEQ ID NO: 73914 - DNA, 17 bp, Homo sapiens
tctccgtctgtccccta

SEQ ID NO: 73915 - DNA, 23 bp, Homo sapiens
atatgactgtttctcttaaataa

SEQ ID NO: 73916 - DNA, 22 bp, Homo sapiens
gttgtagccgtttttgtgcagg

SEQ ID NO: 73917 - DNA, 24 bp, Homo sapiens
gcttaaacattaacatatgttact

SEQ ID NO: 73918 - DNA, 18 bp, Homo sapiens
tggatcaccagttgatat

SEQ ID NO: 73919 - DNA, 17 bp, Homo sapiens
tcctcattttagtgtcc

SEQ ID NO: 73920 - DNA, 19 bp, Homo sapiens
cagacgaacttcatcatac

SEQ ID NO: 73921 - DNA, 28 bp, Homo sapiens
taaagataatattttaaaagatcacttt

SEQ ID NO: 73922 - DNA, 19 bp, Homo sapiens
atgacgtttgtgatagctg

SEQ ID NO: 73923 - DNA, 24 bp, Homo sapiens
aaatttttttctttttttttattt

SEQ ID NO: 73924 - DNA, 22 bp, Homo sapiens
aagcatattttagaatcggaat

SEQ ID NO: 73925 - DNA, 16 bp, Homo sapiens
gccttccatctgaagt

SEQ ID NO: 73926 - DNA, 24 bp, Homo sapiens
acaactctatggaacttaaaattt

SEQ ID NO: 73927 - DNA, 23 bp, Homo sapiens
aacagtattagaactcagctatc

SEQ ID NO: 73928 - DNA, 20 bp, Homo sapiens
actgaagataagcatcaagt

SEQ ID NO: 73929 - DNA, 19 bp, Homo sapiens
ttttgggaaacattggaca

SEQ ID NO: 73930 - DNA, 19 bp, Homo sapiens
agcttattccagagtcttt

SEQ ID NO: 73931 - DNA, 16 bp, Homo sapiens
tggaggagccaaataa

SEQ ID NO: 73932 - DNA, 27 bp, Homo sapiens
ttctgttgattttaagttttaagaaat

SEQ ID NO: 73933 - DNA, 16 bp, Homo sapiens
tctgtgaccttcttca

SEQ ID NO: 73934 - DNA, 23 bp, Homo sapiens
tatagtcattataacctaccata

SEQ ID NO: 73935 - DNA, 18 bp, Homo sapiens
tggatgacaggtatcatc

SEQ ID NO: 73936 - DNA, 19 bp, Homo sapiens
tcgcacttgagattctgaa

SEQ ID NO: 73937 - DNA, 24 bp, Homo sapiens
ccatcttagacctagcacatccta

SEQ ID NO: 73938 - DNA, 18 bp, Homo sapiens
gcagagcagtttgacgaa

SEQ ID NO: 73939 - DNA, 20 bp, Homo sapiens
aagttcaatagcagtttcct

SEQ ID NO: 73940 - DNA, 20 bp, Homo sapiens
aagacagcacacaaaaatgg

SEQ ID NO: 73941 - DNA, 28 bp, Homo sapiens
gtttttttaaattttatacatgtttatt

SEQ ID NO: 73942 - DNA, 18 bp, Homo sapiens
tgctaacccatatgtcgt

SEQ ID NO: 73943 - DNA, 20 bp, Homo sapiens
ccttaggttttacccattcg

SEQ ID NO: 73944 - DNA, 21 bp, Homo sapiens
gcatcaatatcaagtaaacaa

SEQ ID NO: 73945 - DNA, 19 bp, Homo sapiens
cagtttcctttaaggttga

SEQ ID NO: 73946 - DNA, 24 bp, Homo sapiens
ttattgagataatcactgttaact

SEQ ID NO: 73947 - DNA, 22 bp, Homo sapiens
tatagtacctttccacacaatt

SEQ ID NO: 73948 - DNA, 16 bp, Homo sapiens
aggatcaacaagctga

SEQ ID NO: 73949 - DNA, 24 bp, Homo sapiens
aagaaatttgctgttctcaaacac

SEQ ID NO: 73950 - DNA, 18 bp, Homo sapiens
ggggatgcttcagtttcc

SEQ ID NO: 73951 - DNA, 21 bp, Homo sapiens
tttgcattcaaaatgatatta

SEQ ID NO: 73952 - DNA, 21 bp, Homo sapiens
ccaacattagagactcattca

SEQ ID NO: 73953 - DNA, 27 bp, Homo sapiens
cagaaaataatatgttattggacaaaa

SEQ ID NO: 73954 - DNA, 19 bp, Homo sapiens
cagttttctgtaaaggaaa

SEQ ID NO: 73955 - DNA, 24 bp, Homo sapiens
ccttaaaatttgtagaagatctat

SEQ ID NO: 73956 - DNA, 20 bp, Homo sapiens
agcaatggacattttgagtt

SEQ ID NO: 73957 - DNA, 22 bp, Homo sapiens
cttccaactgctacttatgtca

SEQ ID NO: 73958 - DNA, 16 bp, Homo sapiens
catggttgcagcccaa

SEQ ID NO: 73959 - DNA, 22 bp, Homo sapiens
acaaaaccaagataataagcct

SEQ ID NO: 73960 - DNA, 16 bp, Homo sapiens
actctgtcattggtgg

SEQ ID NO: 73961 - DNA, 17 bp, Homo sapiens
tcattggcttgaaaaca

SEQ ID NO: 73962 - DNA, 24 bp, Homo sapiens
ttgtatatcttactctatttagtg

SEQ ID NO: 73963 - DNA, 24 bp, Homo sapiens
cagcaacatggttccccatgactt

SEQ ID NO: 73964 - DNA, 17 bp, Homo sapiens
ttggttggtttgtttca

SEQ ID NO: 73965 - DNA, 17 bp, Homo sapiens
ccagcagtcctgaccag

SEQ ID NO: 73966 - DNA, 22 bp, Homo sapiens
ctcggtcaggtctgggagaatt

SEQ ID NO: 73967 - DNA, 20 bp, Homo sapiens
cgggataactttaaacaaag

SEQ ID NO: 73968 - DNA, 16 bp, Homo sapiens
gcctgcagtctgatga

SEQ ID NO: 73969 - DNA, 24 bp, Homo sapiens
gacctagtcaagttttagctccaa

SEQ ID NO: 73970 - DNA, 16 bp, Homo sapiens
ttgaagctctggctgc

SEQ ID NO: 73971 - DNA, 23 bp, Homo sapiens
ttcctggttcattttcaggcaag

SEQ ID NO: 73972 - DNA, 20 bp, Homo sapiens
gttcacccatctaggatatt

SEQ ID NO: 73973 - DNA, 23 bp, Homo sapiens
aatatcatttgctatcttcatca

SEQ ID NO: 73974 - DNA, 20 bp, Homo sapiens
ttcgtatattggaactttct

SEQ ID NO: 73975 - DNA, 16 bp, Homo sapiens
gagcgtcatgagcagc

SEQ ID NO: 73976 - DNA, 18 bp, Homo sapiens
tgtagacaaaatttgagt

SEQ ID NO: 73977 - DNA, 22 bp, Homo sapiens
aattaacattataacttcagaa

SEQ ID NO: 73978 - DNA, 18 bp, Homo sapiens
actagaattggctttgca

SEQ ID NO: 73979 - DNA, 23 bp, Homo sapiens
tcatttctaactttaaattcaca

SEQ ID NO: 73980 - DNA, 18 bp, Homo sapiens
tgccatgccaagaatcta

SEQ ID NO: 73981 - DNA, 19 bp, Homo sapiens
atgagaaatgaaaatgaga

SEQ ID NO: 73982 - DNA, 20 bp, Homo sapiens
cttttcaggaatttagtggt

SEQ ID NO: 73983 - DNA, 18 bp, Homo sapiens
tgcagcaaccttttctgc

SEQ ID NO: 73984 - DNA, 17 bp, Homo sapiens
tgcagttagagtaactt

SEQ ID NO: 73985 - DNA, 16 bp, Homo sapiens
gcctccagctgcgagc

SEQ ID NO: 73986 - DNA, 21 bp, Homo sapiens
aaacttgattagcttgtaatt

SEQ ID NO: 73987 - DNA, 19 bp, Homo sapiens
tacttgttgaacataacca

SEQ ID NO: 73988 - DNA, 17 bp, Homo sapiens
actcatactcaggatgc

SEQ ID NO: 73989 - DNA, 21 bp, Homo sapiens
ctctgtcactgaagtttccgg

SEQ ID NO: 73990 - DNA, 20 bp, Homo sapiens
ttacatgatgctcttgatgc

SEQ ID NO: 73991 - DNA, 18 bp, Homo sapiens
gacacattggccatttgt

SEQ ID NO: 73992 - DNA, 18 bp, Homo sapiens
cacagcaatgcacattgc

SEQ ID NO: 73993 - DNA, 20 bp, Homo sapiens
cctgcccaagagtaagtgga

SEQ ID NO: 73994 - DNA, 25 bp, Homo sapiens
tttaacattttatatttcttttgaa

SEQ ID NO: 73995 - DNA, 17 bp, Homo sapiens
ctttggattttgcatca

SEQ ID NO: 73996 - DNA, 20 bp, Homo sapiens
agttagttggagagtttttt

SEQ ID NO: 73997 - DNA, 21 bp, Homo sapiens
tacttcatgaacttctattgc

SEQ ID NO: 73998 - DNA, 19 bp, Homo sapiens
taataactcacctatgaca

SEQ ID NO: 73999 - DNA, 22 bp, Homo sapiens
taaggattgaaacataaaacca

SEQ ID NO: 74000 - DNA, 19 bp, Homo sapiens
gcaagatacctgtgcatcc

SEQ ID NO: 74001 - DNA, 24 bp, Homo sapiens
ccttatccattaaataatgaacac

SEQ ID NO: 74002 - DNA, 20 bp, Homo sapiens
tgaatgtaaatgaagtcatt

SEQ ID NO: 74003 - DNA, 22 bp, Homo sapiens
caatctcaggtatgcttttcaa

SEQ ID NO: 74004 - DNA, 26 bp, Homo sapiens
ctgaaggtaaattaaatgatcatttt

SEQ ID NO: 74005 - DNA, 23 bp, Homo sapiens
ggcttttattaacatgatcgttg

SEQ ID NO: 74006 - DNA, 22 bp, Homo sapiens
tcagcattattatttccttttt

SEQ ID NO: 74007 - DNA, 19 bp, Homo sapiens
ttgctctattgctaatgac

SEQ ID NO: 74008 - DNA, 17 bp, Homo sapiens
agtgatgcttcagaagc

SEQ ID NO: 74009 - DNA, 18 bp, Homo sapiens
agtctgccataccacgag

SEQ ID NO: 74010 - DNA, 22 bp, Homo sapiens
agtgaattgtcataccattcac

SEQ ID NO: 74011 - DNA, 21 bp, Homo sapiens
aagcaccatattaatatcacc

SEQ ID NO: 74012 - DNA, 18 bp, Homo sapiens
accaggattatggtcttg

SEQ ID NO: 74013 - DNA, 22 bp, Homo sapiens
tcaagaattcacagttcccctt

SEQ ID NO: 74014 - DNA, 20 bp, Homo sapiens
ttttagaccccagttattaa

SEQ ID NO: 74015 - DNA, 21 bp, Homo sapiens
gaggttattaagcaaacacac

SEQ ID NO: 74016 - DNA, 21 bp, Homo sapiens
tgccaaaataataaacttcca

SEQ ID NO: 74017 - DNA, 18 bp, Homo sapiens
tgcattagcaatctttgg

SEQ ID NO: 74018 - DNA, 23 bp, Homo sapiens
aacattttagagctatagtgtta

SEQ ID NO: 74019 - DNA, 17 bp, Homo sapiens
caagatgccaaaagctt

SEQ ID NO: 74020 - DNA, 23 bp, Homo sapiens
aaacttcaaaaagttctttaaca

SEQ ID NO: 74021 - DNA, 20 bp, Homo sapiens
accgtgagatctacgatgaa

SEQ ID NO: 74022 - DNA, 22 bp, Homo sapiens
ttttctaataactttacatttt

SEQ ID NO: 74023 - DNA, 22 bp, Homo sapiens
atatgatacctttggtgaacta

SEQ ID NO: 74024 - DNA, 22 bp, Homo sapiens
tgaatacagcctacttcatcca

SEQ ID NO: 74025 - DNA, 21 bp, Homo sapiens
ttcttttcaacttgtaatagt

SEQ ID NO: 74026 - DNA, 20 bp, Homo sapiens
gttctgtcacacctccaatc

SEQ ID NO: 74027 - DNA, 20 bp, Homo sapiens
aggtttctttctctttaaca

SEQ ID NO: 74028 - DNA, 16 bp, Homo sapiens
tggcacctttagttca

SEQ ID NO: 74029 - DNA, 19 bp, Homo sapiens
gacctgaaagtgaggaaga

SEQ ID NO: 74030 - DNA, 22 bp, Homo sapiens
gaggcccgccacgccggcacgg

SEQ ID NO: 74031 - DNA, 24 bp, Homo sapiens
agcttcggctcccggcttgggtgg

SEQ ID NO: 74032 - DNA, 24 bp, Homo sapiens
cggggaatctctcccgccaagtcg

SEQ ID NO: 74033 - DNA, 24 bp, Homo sapiens
taccgagcacttcggctcctcgcg

SEQ ID NO: 74034 - DNA, 16 bp, Homo sapiens
ggggaggccgggggat

SEQ ID NO: 74035 - DNA, 24 bp, Homo sapiens
gtggaggcgtggccacagccgccc

SEQ ID NO: 74036 - DNA, 23 bp, Homo sapiens
caaaacgagggcacggccgcgcc

SEQ ID NO: 74037 - DNA, 22 bp, Homo sapiens
tgaggctgttgattggataaga

SEQ ID NO: 74038 - DNA, 16 bp, Homo sapiens
cacgaggggacgcgag

SEQ ID NO: 74039 - DNA, 20 bp, Homo sapiens
aacccgccccctcattcttt

SEQ ID NO: 74040 - DNA, 22 bp, Homo sapiens
cctttctaaagcattttcaaaa

SEQ ID NO: 74041 - DNA, 21 bp, Homo sapiens
cattacgaggataccattctg

SEQ ID NO: 74042 - DNA, 24 bp, Homo sapiens
caaaacaaaacgtgacatttggtc

SEQ ID NO: 74043 - DNA, 16 bp, Homo sapiens
caattacggctaccag

SEQ ID NO: 74044 - DNA, 21 bp, Homo sapiens
ggtcttagggatcccaaggaa

SEQ ID NO: 74045 - DNA, 19 bp, Homo sapiens
tgccaatatgaaggaggta

SEQ ID NO: 74046 - DNA, 24 bp, Homo sapiens
tggttcatgctattcttgcttttc

SEQ ID NO: 74047 - DNA, 16 bp, Homo sapiens
taacgttgcaactggg

SEQ ID NO: 74048 - DNA, 23 bp, Homo sapiens
tagcggcttctaagggcaagccc

SEQ ID NO: 74049 - DNA, 16 bp, Homo sapiens
caaagaaggagccaca

SEQ ID NO: 74050 - DNA, 18 bp, Homo sapiens
tagcctgaacagaggtac

SEQ ID NO: 74051 - DNA, 18 bp, Homo sapiens
gaacccaacgtacggctc

SEQ ID NO: 74052 - DNA, 22 bp, Homo sapiens
agcagtgaggcccccggaagtc

SEQ ID NO: 74053 - DNA, 16 bp, Homo sapiens
tccaaccctccttcgg

SEQ ID NO: 74054 - DNA, 22 bp, Homo sapiens
ctccagccccaggttacccctg

SEQ ID NO: 74055 - DNA, 16 bp, Homo sapiens
gagtccctagagggcc

SEQ ID NO: 74056 - DNA, 22 bp, Homo sapiens
gtgggtttctctgtaaaccagg

SEQ ID NO: 74057 - DNA, 17 bp, Homo sapiens
ctctgcctaccacctcc

SEQ ID NO: 74058 - DNA, 24 bp, Homo sapiens
tttctggatccgtggaccttgtgc

SEQ ID NO: 74059 - DNA, 16 bp, Homo sapiens
ctcctggtctctcaac

SEQ ID NO: 74060 - DNA, 23 bp, Homo sapiens
gtgtcccccttccacggccggcc

SEQ ID NO: 74061 - DNA, 16 bp, Homo sapiens
acttgtggaagaggaa

SEQ ID NO: 74062 - DNA, 23 bp, Homo sapiens
tttctttgcagccttgccagagg

SEQ ID NO: 74063 - DNA, 23 bp, Homo sapiens
ttttaataatttcccctacggca

SEQ ID NO: 74064 - DNA, 17 bp, Homo sapiens
ctcctcccgttttgcct

SEQ ID NO: 74065 - DNA, 23 bp, Homo sapiens
taacatcatctctaaggtatctt

SEQ ID NO: 74066 - DNA, 19 bp, Homo sapiens
gcctcacaggcactttctc

SEQ ID NO: 74067 - DNA, 18 bp, Homo sapiens
gcctgtaagttactatat

SEQ ID NO: 74068 - DNA, 21 bp, Homo sapiens
agcggtgttgattacatccgg

SEQ ID NO: 74069 - DNA, 19 bp, Homo sapiens
ccagtcatttcattttaga

SEQ ID NO: 74070 - DNA, 17 bp, Homo sapiens
cagcctgaagacaggcc

SEQ ID NO: 74071 - DNA, 18 bp, Homo sapiens
tgactggcttgacctatt

SEQ ID NO: 74072 - DNA, 24 bp, Homo sapiens
ctccttattttaattaatgtgctt

SEQ ID NO: 74073 - DNA, 17 bp, Homo sapiens
tgttgaccaaagggaga

SEQ ID NO: 74074 - DNA, 16 bp, Homo sapiens
gtattcgttgcaaccc

SEQ ID NO: 74075 - DNA, 19 bp, Homo sapiens
caaaatgatggcaaagttg

SEQ ID NO: 74076 - DNA, 16 bp, Homo sapiens
tgaccaatcagcaggg

SEQ ID NO: 74077 - DNA, 22 bp, Homo sapiens
atctcactgaagtcgcagtcac

SEQ ID NO: 74078 - DNA, 17 bp, Homo sapiens
agttctggagtttgtca

SEQ ID NO: 74079 - DNA, 19 bp, Homo sapiens
cttcatcttaaagaagcat

SEQ ID NO: 74080 - DNA, 16 bp, Homo sapiens
agtgctgctatgggaa

SEQ ID NO: 74081 - DNA, 24 bp, Homo sapiens
tagtaactagcagaagtgttccta

SEQ ID NO: 74082 - DNA, 17 bp, Homo sapiens
gtgggtgggtgtgtcta

SEQ ID NO: 74083 - DNA, 16 bp, Homo sapiens
ccggcctccactggtg

SEQ ID NO: 74084 - DNA, 16 bp, Homo sapiens
tgggggaaaaaaaggt

SEQ ID NO: 74085 - DNA, 22 bp, Homo sapiens
ggcatatatccaagagaaaaga

SEQ ID NO: 74086 - DNA, 26 bp, Homo sapiens
tcatgtgtagtattttcttatttttt

SEQ ID NO: 74087 - DNA, 19 bp, Homo sapiens
ggccttcatggaaggaata

SEQ ID NO: 74088 - DNA, 21 bp, Homo sapiens
ttgattcttctcttttccctc

SEQ ID NO: 74089 - DNA, 21 bp, Homo sapiens
cagggcgagctactatagaaa

SEQ ID NO: 74090 - DNA, 18 bp, Homo sapiens
gcccaggagcaccacctt

SEQ ID NO: 74091 - DNA, 21 bp, Homo sapiens
cagggcagatgcttaatgcca

SEQ ID NO: 74092 - DNA, 20 bp, Homo sapiens
catgtgtctgttttagaagt

SEQ ID NO: 74093 - DNA, 21 bp, Homo sapiens
atggttaatttcagaccttta

SEQ ID NO: 74094 - DNA, 23 bp, Homo sapiens
ctggcagcatggcacagcctccc

SEQ ID NO: 74095 - DNA, 23 bp, Homo sapiens
ttcttaactaaatgatctgtgtg

SEQ ID NO: 74096 - DNA, 23 bp, Homo sapiens
ggtcactaattaaggtttcccat

SEQ ID NO: 74097 - DNA, 17 bp, Homo sapiens
gagtggccaagattgga

SEQ ID NO: 74098 - DNA, 23 bp, Homo sapiens
tagaaagttgacagggtaccagg

SEQ ID NO: 74099 - DNA, 23 bp, Homo sapiens
ggaaatgcatttcctttcttccc

SEQ ID NO: 74100 - DNA, 18 bp, Homo sapiens
gctgaggtggaagagaca

SEQ ID NO: 74101 - DNA, 18 bp, Homo sapiens
aaaatcctagtgatggcc

SEQ ID NO: 74102 - DNA, 19 bp, Homo sapiens
cgggccatcccgaagtctc

SEQ ID NO: 74103 - DNA, 24 bp, Homo sapiens
tgaagtatactatactaaaggaaa

SEQ ID NO: 74104 - DNA, 21 bp, Homo sapiens
gaggcagtttctggcagcaat

SEQ ID NO: 74105 - DNA, 19 bp, Homo sapiens
gctgtcagtatttggagga

SEQ ID NO: 74106 - DNA, 20 bp, Homo sapiens
ctctggagggagacctagta

SEQ ID NO: 74107 - DNA, 16 bp, Homo sapiens
cagccctcctccctgg

SEQ ID NO: 74108 - DNA, 24 bp, Homo sapiens
atctgcggggaagcacacagatca

SEQ ID NO: 74109 - DNA, 20 bp, Homo sapiens
gatttccctcctctcactga

SEQ ID NO: 74110 - DNA, 17 bp, Homo sapiens
ggtggatgaagtggttt

SEQ ID NO: 74111 - DNA, 17 bp, Homo sapiens
gtgtagctgcatgttca

SEQ ID NO: 74112 - DNA, 19 bp, Homo sapiens
acgtgcagaaggtccagca

SEQ ID NO: 74113 - DNA, 22 bp, Homo sapiens
gtccattctcttccagccagtc

SEQ ID NO: 74114 - DNA, 18 bp, Homo sapiens
gagctcatggcgggggga

SEQ ID NO: 74115 - DNA, 23 bp, Homo sapiens
catcgaggaacttgctacccagg

SEQ ID NO: 74116 - DNA, 17 bp, Homo sapiens
ccaccagaacattgttc

SEQ ID NO: 74117 - DNA, 19 bp, Homo sapiens
ggcacaacaactgcagcaa

SEQ ID NO: 74118 - DNA, 16 bp, Homo sapiens
gactcagctcagttaa

SEQ ID NO: 74119 - DNA, 20 bp, Homo sapiens
ggaaggacttgaggtctccc

SEQ ID NO: 74120 - DNA, 19 bp, Homo sapiens
tacattgtagctgctgaaa

SEQ ID NO: 74121 - DNA, 22 bp, Homo sapiens
gggattgcaggctcaccccaat

SEQ ID NO: 74122 - DNA, 20 bp, Homo sapiens
gcaagattctgggtttaggc

SEQ ID NO: 74123 - DNA, 21 bp, Homo sapiens
ttctggtaagaagtgtctaga

SEQ ID NO: 74124 - DNA, 20 bp, Homo sapiens
gaagtgtgctctgaacagga

SEQ ID NO: 74125 - DNA, 16 bp, Homo sapiens
gatttcccttggagat

SEQ ID NO: 74126 - DNA, 19 bp, Homo sapiens
ttctcagctcacagcctcc

SEQ ID NO: 74127 - DNA, 24 bp, Homo sapiens
gggggcagaggggagttggggtga

SEQ ID NO: 74128 - DNA, 17 bp, Homo sapiens
ggtaagaagtggctcac

SEQ ID NO: 74129 - DNA, 23 bp, Homo sapiens
tgaggaaatccagttcgtcctgt

SEQ ID NO: 74130 - DNA, 18 bp, Homo sapiens
gaggtgtatgaaggccag

SEQ ID NO: 74131 - DNA, 16 bp, Homo sapiens
ggtggggaggaggagg

SEQ ID NO: 74132 - DNA, 19 bp, Homo sapiens
tttgactctgtctcctctt

SEQ ID NO: 74133 - DNA, 16 bp, Homo sapiens
aagggcaggctcaaga

SEQ ID NO: 74134 - DNA, 16 bp, Homo sapiens
ctaaatgtgacgccca

SEQ ID NO: 74135 - DNA, 17 bp, Homo sapiens
gtcgttgggcattccgg

SEQ ID NO: 74136 - DNA, 16 bp, Homo sapiens
gccatgttgagggtat

SEQ ID NO: 74137 - DNA, 20 bp, Homo sapiens
atacatggccctgaatgtca

SEQ ID NO: 74138 - DNA, 21 bp, Homo sapiens
agacctcctccatcagtgacc

SEQ ID NO: 74139 - DNA, 20 bp, Homo sapiens
tctgccggccttttgtggct

SEQ ID NO: 74140 - DNA, 20 bp, Homo sapiens
gagcaagctccgcacctcga

SEQ ID NO: 74141 - DNA, 23 bp, Homo sapiens
ccctacactgcacccctctcctc

SEQ ID NO: 74142 - DNA, 23 bp, Homo sapiens
taccgccggaagcaccaggagct

SEQ ID NO: 74143 - DNA, 24 bp, Homo sapiens
tttttccgcggcacctccttcagg

SEQ ID NO: 74144 - DNA, 24 bp, Homo sapiens
gtagtgcttcaagggccaggctgc

SEQ ID NO: 74145 - DNA, 16 bp, Homo sapiens
gttgtagtcggtcatg

SEQ ID NO: 74146 - DNA, 20 bp, Homo sapiens
tcagagctcaggggaggata

SEQ ID NO: 74147 - DNA, 19 bp, Homo sapiens
tgcagctccatctgcatgg

SEQ ID NO: 74148 - DNA, 20 bp, Homo sapiens
aaagacacaccttctttaat

SEQ ID NO: 74149 - DNA, 23 bp, Homo sapiens
ctctgccctcgtggccgccctgg

SEQ ID NO: 74150 - DNA, 21 bp, Homo sapiens
caattccagggactagcataa

SEQ ID NO: 74151 - DNA, 16 bp, Homo sapiens
cacccaccccggagcc

SEQ ID NO: 74152 - DNA, 20 bp, Homo sapiens
attcagtcctgccttcctgc

SEQ ID NO: 74153 - DNA, 17 bp, Homo sapiens
ctcaaaggagacctggt

SEQ ID NO: 74154 - DNA, 16 bp, Homo sapiens
atgatgccggagaaag

SEQ ID NO: 74155 - DNA, 23 bp, Homo sapiens
gtctccagcgatgggaaggagca

SEQ ID NO: 74156 - DNA, 19 bp, Homo sapiens
aggatcagcgagagtggca

SEQ ID NO: 74157 - DNA, 21 bp, Homo sapiens
cacctttcacacagtggtcag

SEQ ID NO: 74158 - DNA, 24 bp, Homo sapiens
tcatctgcttctgtgaccacggga

SEQ ID NO: 74159 - DNA, 23 bp, Homo sapiens
agtttacaaaaccgaatccaggg

SEQ ID NO: 74160 - DNA, 16 bp, Homo sapiens
gtcactgtgaggtaga

SEQ ID NO: 74161 - DNA, 18 bp, Homo sapiens
aaatctcaggctatgggc

SEQ ID NO: 74162 - DNA, 24 bp, Homo sapiens
tgaccctccctccttgtcactagt

SEQ ID NO: 74163 - DNA, 24 bp, Homo sapiens
caggagacgccatcctcagccagc

SEQ ID NO: 74164 - DNA, 18 bp, Homo sapiens
tggagacatagtactgag

SEQ ID NO: 74165 - DNA, 18 bp, Homo sapiens
catgtgacattcgtctac

SEQ ID NO: 74166 - DNA, 16 bp, Homo sapiens
gtgcttccagtggcta

SEQ ID NO: 74167 - DNA, 19 bp, Homo sapiens
cacttccccgtggccttcc

SEQ ID NO: 74168 - DNA, 24 bp, Homo sapiens
tcctgacttctggaaaatgtggtg

SEQ ID NO: 74169 - DNA, 16 bp, Homo sapiens
gaagatggggtttcct

SEQ ID NO: 74170 - DNA, 20 bp, Homo sapiens
tgcctctgtatcctggatac

SEQ ID NO: 74171 - DNA, 22 bp, Homo sapiens
aactctgctctggtttgctact

SEQ ID NO: 74172 - DNA, 22 bp, Homo sapiens
acctaagcaagtttgttctgct

SEQ ID NO: 74173 - DNA, 17 bp, Homo sapiens
atgccccactgacgtgt

SEQ ID NO: 74174 - DNA, 20 bp, Homo sapiens
caggatgcccagtggactga

SEQ ID NO: 74175 - DNA, 21 bp, Homo sapiens
ttccctccccgcatccctgcc

SEQ ID NO: 74176 - DNA, 22 bp, Homo sapiens
gtttgaggctgcattgccgcct

SEQ ID NO: 74177 - DNA, 23 bp, Homo sapiens
ctctggctggtccaggcaggtcg

SEQ ID NO: 74178 - DNA, 19 bp, Homo sapiens
gacaagagggggtttcgga

SEQ ID NO: 74179 - DNA, 22 bp, Homo sapiens
caggccaggggagggcagggga

SEQ ID NO: 74180 - DNA, 20 bp, Homo sapiens
tttgcaggagggtgccaccg

SEQ ID NO: 74181 - DNA, 17 bp, Homo sapiens
tgacaccttgaacacga

SEQ ID NO: 74182 - DNA, 16 bp, Homo sapiens
ggtggaggtggctgga

SEQ ID NO: 74183 - DNA, 23 bp, Homo sapiens
gaggagcacccccctccaccccc

SEQ ID NO: 74184 - DNA, 17 bp, Homo sapiens
agcatggctaattgaac

SEQ ID NO: 74185 - DNA, 23 bp, Homo sapiens
ttcatggcctgggggcaggaatg

SEQ ID NO: 74186 - DNA, 19 bp, Homo sapiens
atgggccccgggagctgga

SEQ ID NO: 74187 - DNA, 24 bp, Homo sapiens
agagcaaggaagtgttatcattcc

SEQ ID NO: 74188 - DNA, 20 bp, Homo sapiens
ctgccctccctccctggata

SEQ ID NO: 74189 - DNA, 16 bp, Homo sapiens
acccagagagactgga

SEQ ID NO: 74190 - DNA, 24 bp, Homo sapiens
agtgactaagatgccctcaggcat

SEQ ID NO: 74191 - DNA, 16 bp, Homo sapiens
cccctgatcattgcag

SEQ ID NO: 74192 - DNA, 23 bp, Homo sapiens
gaggttctgggagagggcacgct

SEQ ID NO: 74193 - DNA, 17 bp, Homo sapiens
agctcggtttctcaatg

SEQ ID NO: 74194 - DNA, 21 bp, Homo sapiens
agaaccgaggagttattctcc

SEQ ID NO: 74195 - DNA, 16 bp, Homo sapiens
cagcaaaccctcagtc

SEQ ID NO: 74196 - DNA, 22 bp, Homo sapiens
gtaggccctgccaccacctccg

SEQ ID NO: 74197 - DNA, 21 bp, Homo sapiens
ctattgtaacaagggttcaga

SEQ ID NO: 74198 - DNA, 24 bp, Homo sapiens
cccaaaatactaggattacaggaa

SEQ ID NO: 74199 - DNA, 16 bp, Homo sapiens
gaagcgtgcatgagtg

SEQ ID NO: 74200 - DNA, 16 bp, Homo sapiens
gagcatctgaggtgtt

SEQ ID NO: 74201 - DNA, 18 bp, Homo sapiens
atccagaaagtctgcatt

SEQ ID NO: 74202 - DNA, 19 bp, Homo sapiens
cacaggaacctggtggaaa

SEQ ID NO: 74203 - DNA, 16 bp, Homo sapiens
actctggtttggccac

SEQ ID NO: 74204 - DNA, 16 bp, Homo sapiens
ccctcctcctccgcct

SEQ ID NO: 74205 - DNA, 18 bp, Homo sapiens
ttttgagagagagtcaga

SEQ ID NO: 74206 - DNA, 17 bp, Homo sapiens
tcacattgttctctcca

SEQ ID NO: 74207 - DNA, 16 bp, Homo sapiens
ctgcccagagtgacag

SEQ ID NO: 74208 - DNA, 24 bp, Homo sapiens
gaaccactggggtgctgggagttt

SEQ ID NO: 74209 - DNA, 17 bp, Homo sapiens
acatgctgtacatcctg

SEQ ID NO: 74210 - DNA, 16 bp, Homo sapiens
ggtatgaacttccagg

SEQ ID NO: 74211 - DNA, 16 bp, Homo sapiens
gaacaccatgatgcgg

SEQ ID NO: 74212 - DNA, 24 bp, Homo sapiens
tcccggggcctgacagagtgcaga

SEQ ID NO: 74213 - DNA, 16 bp, Homo sapiens
aacgttctttgtccca

SEQ ID NO: 74214 - DNA, 20 bp, Homo sapiens
ctctccctgctgcccaacca

SEQ ID NO: 74215 - DNA, 16 bp, Homo sapiens
ctggaagctgctgggt

SEQ ID NO: 74216 - DNA, 20 bp, Homo sapiens
cagcacagacacgccgtggg

SEQ ID NO: 74217 - DNA, 16 bp, Homo sapiens
ttctgcagggactgat

SEQ ID NO: 74218 - DNA, 18 bp, Homo sapiens
gtagcccgagatgctgca

SEQ ID NO: 74219 - DNA, 16 bp, Homo sapiens
gatctggaaggtgcca

SEQ ID NO: 74220 - DNA, 17 bp, Homo sapiens
ctgttgcctttgaacct

SEQ ID NO: 74221 - DNA, 23 bp, Homo sapiens
aacaacgcctaccagaactccaa

SEQ ID NO: 74222 - DNA, 24 bp, Homo sapiens
ggcaagactccaggcttcttcgga

SEQ ID NO: 74223 - DNA, 23 bp, Homo sapiens
agttcattggctgttcaccacat

SEQ ID NO: 74224 - DNA, 22 bp, Homo sapiens
gcacctgtaggtgtcggtggct

SEQ ID NO: 74225 - DNA, 23 bp, Homo sapiens
gaggcccctggaggagggagggc

SEQ ID NO: 74226 - DNA, 20 bp, Homo sapiens
cacctccacgctcaggttgg

SEQ ID NO: 74227 - DNA, 23 bp, Homo sapiens
tgccatcttggatggagggtttg

SEQ ID NO: 74228 - DNA, 18 bp, Homo sapiens
ccatggggcccgctggcc

SEQ ID NO: 74229 - DNA, 16 bp, Homo sapiens
ggaagtttccagttcg

SEQ ID NO: 74230 - DNA, 19 bp, Homo sapiens
gaccccatagtcagagtgt

SEQ ID NO: 74231 - DNA, 17 bp, Homo sapiens
cccaaacaaggagctga

SEQ ID NO: 74232 - DNA, 22 bp, Homo sapiens
cagcacagctccccaccctaaa

SEQ ID NO: 74233 - DNA, 16 bp, Homo sapiens
gaggacaagatcctgc

SEQ ID NO: 74234 - DNA, 24 bp, Homo sapiens
aagttactgtgctcacatttgtga

SEQ ID NO: 74235 - DNA, 18 bp, Homo sapiens
tctcaccctgaaatcaac

SEQ ID NO: 74236 - DNA, 24 bp, Homo sapiens
ttggtgaattttccccgggtttca

SEQ ID NO: 74237 - DNA, 16 bp, Homo sapiens
cccctcctcagcctaa

SEQ ID NO: 74238 - DNA, 24 bp, Homo sapiens
ttgatttgggtgctgtattctgca

SEQ ID NO: 74239 - DNA, 21 bp, Homo sapiens
cccacgggctgagttaggtga

SEQ ID NO: 74240 - DNA, 19 bp, Homo sapiens
gacaaggatccagagccat

SEQ ID NO: 74241 - DNA, 19 bp, Homo sapiens
gagagacagtcaggcttag

SEQ ID NO: 74242 - DNA, 23 bp, Homo sapiens
ctcctcacacacattcctcttga

SEQ ID NO: 74243 - DNA, 20 bp, Homo sapiens
gggacagagtgctggggtca

SEQ ID NO: 74244 - DNA, 16 bp, Homo sapiens
tgatcagcacacacct

SEQ ID NO: 74245 - DNA, 20 bp, Homo sapiens
tggagatattgtcaaaagcc

SEQ ID NO: 74246 - DNA, 23 bp, Homo sapiens
tgctcttctctcgccactgctct

SEQ ID NO: 74247 - DNA, 16 bp, Homo sapiens
gtgtgtgtgtgcacgt

SEQ ID NO: 74248 - DNA, 24 bp, Homo sapiens
gtcgccgcctatgaaggcttgagc

SEQ ID NO: 74249 - DNA, 24 bp, Homo sapiens
catgtgtgtcttgggtaaaaggca

SEQ ID NO: 74250 - DNA, 19 bp, Homo sapiens
gtgctagtggagaacaaaa

SEQ ID NO: 74251 - DNA, 21 bp, Homo sapiens
gaggagaagggtattggggga

SEQ ID NO: 74252 - DNA, 16 bp, Homo sapiens
acagctccgaatgtcc

SEQ ID NO: 74253 - DNA, 20 bp, Homo sapiens
gcaacaccatccactgccac

SEQ ID NO: 74254 - DNA, 18 bp, Homo sapiens
gagaattccagaaagggg

SEQ ID NO: 74255 - DNA, 18 bp, Homo sapiens
ttgctccttcccggtttt

SEQ ID NO: 74256 - DNA, 18 bp, Homo sapiens
atccagctcttctcacca

SEQ ID NO: 74257 - DNA, 21 bp, Homo sapiens
actccacgaatgagccaggac

SEQ ID NO: 74258 - DNA, 24 bp, Homo sapiens
tgttgatggacatgctctgcctcg

SEQ ID NO: 74259 - DNA, 22 bp, Homo sapiens
tgaaagtgctacagtgaccagt

SEQ ID NO: 74260 - DNA, 17 bp, Homo sapiens
accagcccagccagcta

SEQ ID NO: 74261 - DNA, 24 bp, Homo sapiens
tgtgattcttttcctctctcctag

SEQ ID NO: 74262 - DNA, 23 bp, Homo sapiens
agaggtgggaggagaaattagag

SEQ ID NO: 74263 - DNA, 16 bp, Homo sapiens
attaaccctgcacccc

SEQ ID NO: 74264 - DNA, 16 bp, Homo sapiens
tcggtgcaggaaacgt

SEQ ID NO: 74265 - DNA, 17 bp, Homo sapiens
caggccagaaacctgtt

SEQ ID NO: 74266 - DNA, 24 bp, Homo sapiens
atcagtggtactgagcaatagagc

SEQ ID NO: 74267 - DNA, 22 bp, Homo sapiens
aaggtgtgaagagggaattgtg

SEQ ID NO: 74268 - DNA, 17 bp, Homo sapiens
tcaccccacactcctca

SEQ ID NO: 74269 - DNA, 16 bp, Homo sapiens
aggtggggtgaagtcc

SEQ ID NO: 74270 - DNA, 16 bp, Homo sapiens
gggtttttactgcaac

SEQ ID NO: 74271 - DNA, 24 bp, Homo sapiens
atgggcaccagagagaaggcagga

SEQ ID NO: 74272 - DNA, 19 bp, Homo sapiens
ttgcctttagtggtcctga

SEQ ID NO: 74273 - DNA, 18 bp, Homo sapiens
ttagggtcctgacctgcc

SEQ ID NO: 74274 - DNA, 21 bp, Homo sapiens
gggagctatattactaatgaa

SEQ ID NO: 74275 - DNA, 22 bp, Homo sapiens
cagccacagaagccatcttcaa

SEQ ID NO: 74276 - DNA, 23 bp, Homo sapiens
tagggcttgggggcttctcttca

SEQ ID NO: 74277 - DNA, 23 bp, Homo sapiens
acaaatcttagctctgcctcttg

SEQ ID NO: 74278 - DNA, 17 bp, Homo sapiens
acttccaccaggactgt

SEQ ID NO: 74279 - DNA, 17 bp, Homo sapiens
atatcaggaaggctgtc

SEQ ID NO: 74280 - DNA, 23 bp, Homo sapiens
aagatggccctgcagagctcctt

SEQ ID NO: 74281 - DNA, 22 bp, Homo sapiens
tgagcatgggctgggctcaggc

SEQ ID NO: 74282 - DNA, 23 bp, Homo sapiens
ggccatgcaaacttaccatggtt

SEQ ID NO: 74283 - DNA, 24 bp, Homo sapiens
ggctctcatcttctccctgggcac

SEQ ID NO: 74284 - DNA, 23 bp, Homo sapiens
aatgctgtccctgcagcctgccc

SEQ ID NO: 74285 - DNA, 22 bp, Homo sapiens
actgtcccattccaacaagtga

SEQ ID NO: 74286 - DNA, 18 bp, Homo sapiens
gatggagatgcagatgtc

SEQ ID NO: 74287 - DNA, 20 bp, Homo sapiens
gaatacatctccagtggaaa

SEQ ID NO: 74288 - DNA, 23 bp, Homo sapiens
tcataagtgtgcacattcccagc

SEQ ID NO: 74289 - DNA, 16 bp, Homo sapiens
gtgctccagggaagaa

SEQ ID NO: 74290 - DNA, 21 bp, Homo sapiens
ggctaccaaggagcgtgggaa

SEQ ID NO: 74291 - DNA, 19 bp, Homo sapiens
taggcctaattctcatatc

SEQ ID NO: 74292 - DNA, 23 bp, Homo sapiens
caaagaagtccactgcagacaag

SEQ ID NO: 74293 - DNA, 18 bp, Homo sapiens
gcccatgaagaatgtgag

SEQ ID NO: 74294 - DNA, 24 bp, Homo sapiens
gaaatgggttgtctggacgcccga

SEQ ID NO: 74295 - DNA, 23 bp, Homo sapiens
caagacactacctaagggatatt

SEQ ID NO: 74296 - DNA, 16 bp, Homo sapiens
ctgctgccccacaacg

SEQ ID NO: 74297 - DNA, 21 bp, Homo sapiens
atcatgagtttgtaagtagat

SEQ ID NO: 74298 - DNA, 16 bp, Homo sapiens
acactggccgtctcgg

SEQ ID NO: 74299 - DNA, 24 bp, Homo sapiens
tcacctggtataaaatcaattttg

SEQ ID NO: 74300 - DNA, 16 bp, Homo sapiens
agctgactccaagcac

SEQ ID NO: 74301 - DNA, 19 bp, Homo sapiens
tcaggaggatctctcttgc

SEQ ID NO: 74302 - DNA, 23 bp, Homo sapiens
tcttacctgaacacatctgcaga

SEQ ID NO: 74303 - DNA, 22 bp, Homo sapiens
gagggctgcaggtgcctgtgca

SEQ ID NO: 74304 - DNA, 23 bp, Homo sapiens
agtatctctgattttgatgccat

SEQ ID NO: 74305 - DNA, 20 bp, Homo sapiens
catccacggactcaggatgg

SEQ ID NO: 74306 - DNA, 20 bp, Homo sapiens
tctaagaatggaggaagaag

SEQ ID NO: 74307 - DNA, 21 bp, Homo sapiens
cttgcatggcccaagaagcca

SEQ ID NO: 74308 - DNA, 17 bp, Homo sapiens
tcccagatggacttgct

SEQ ID NO: 74309 - DNA, 24 bp, Homo sapiens
aaacagagcagaacaggagtgaag

SEQ ID NO: 74310 - DNA, 16 bp, Homo sapiens
ccactgcatgacctca

SEQ ID NO: 74311 - DNA, 21 bp, Homo sapiens
ctgacccacccaggacatcac

SEQ ID NO: 74312 - DNA, 18 bp, Homo sapiens
ggctattattgcaggtct

SEQ ID NO: 74313 - DNA, 18 bp, Homo sapiens
tctgccccaggcccatcc

SEQ ID NO: 74314 - DNA, 22 bp, Homo sapiens
caacctcctagtgtggagtgga

SEQ ID NO: 74315 - DNA, 22 bp, Homo sapiens
caggaccagctctggttcctga

SEQ ID NO: 74316 - DNA, 18 bp, Homo sapiens
tgacaactgatctccctt

SEQ ID NO: 74317 - DNA, 20 bp, Homo sapiens
gaagtcaaagctgcactcca

SEQ ID NO: 74318 - DNA, 16 bp, Homo sapiens
gaaagactccttccct

SEQ ID NO: 74319 - DNA, 17 bp, Homo sapiens
gggagctgagggaatgc

SEQ ID NO: 74320 - DNA, 17 bp, Homo sapiens
tcaccaacaaacatgcc

SEQ ID NO: 74321 - DNA, 23 bp, Homo sapiens
cacagagtccttattatgagata

SEQ ID NO: 74322 - DNA, 16 bp, Homo sapiens
cccaagcacatggatc

SEQ ID NO: 74323 - DNA, 17 bp, Homo sapiens
atcggctgcgatgagac

SEQ ID NO: 74324 - DNA, 17 bp, Homo sapiens
gaaagccccttataaac

SEQ ID NO: 74325 - DNA, 16 bp, Homo sapiens
aatcaggagaaggaga

SEQ ID NO: 74326 - DNA, 17 bp, Homo sapiens
caactcagtctactggt

SEQ ID NO: 74327 - DNA, 23 bp, Homo sapiens
cggtctgattcgggaaggaggtt

SEQ ID NO: 74328 - DNA, 23 bp, Homo sapiens
ggcagagagggaaggctgtccgc

SEQ ID NO: 74329 - DNA, 17 bp, Homo sapiens
gggtggaagtgaagatt

SEQ ID NO: 74330 - DNA, 16 bp, Homo sapiens
agggcgactgaggatc

SEQ ID NO: 74331 - DNA, 24 bp, Homo sapiens
acactaaatcccggcacactcagg

SEQ ID NO: 74332 - DNA, 20 bp, Homo sapiens
ggctgtggggctgctccagt

SEQ ID NO: 74333 - DNA, 18 bp, Homo sapiens
gctgggaggcgcgaattg

SEQ ID NO: 74334 - DNA, 23 bp, Homo sapiens
gttggtgctggagctgggcgagg

SEQ ID NO: 74335 - DNA, 24 bp, Homo sapiens
cttcttctcgggcatcaggcggat

SEQ ID NO: 74336 - DNA, 23 bp, Homo sapiens
cccggacgctgtccagggtgctg

SEQ ID NO: 74337 - DNA, 24 bp, Homo sapiens
aactgaacagctcgctgagattga

SEQ ID NO: 74338 - DNA, 18 bp, Homo sapiens
ttgctggggccggcgccg

SEQ ID NO: 74339 - DNA, 23 bp, Homo sapiens
caaccctccaagatcgcctcctc

SEQ ID NO: 74340 - DNA, 23 bp, Homo sapiens
gagctgaaggctggcaggcccga

SEQ ID NO: 74341 - DNA, 24 bp, Homo sapiens
ttgcgcacggagccgcccttcagc

SEQ ID NO: 74342 - DNA, 16 bp, Homo sapiens
gctcttccgtgtctac

SEQ ID NO: 74343 - DNA, 23 bp, Homo sapiens
ggtgaaccggcggtccaggagac

SEQ ID NO: 74344 - DNA, 22 bp, Homo sapiens
cagccccgggagccactcagct

SEQ ID NO: 74345 - DNA, 24 bp, Homo sapiens
ccagagctagcgagccgcgggcct

SEQ ID NO: 74346 - DNA, 22 bp, Homo sapiens
ctccgggatggggaccggccag

SEQ ID NO: 74347 - DNA, 23 bp, Homo sapiens
tggcagcagtaggtcccgggcgt

SEQ ID NO: 74348 - DNA, 20 bp, Homo sapiens
gatgggagccatcgggctcc

SEQ ID NO: 74349 - DNA, 23 bp, Homo sapiens
gccagactcttcctctgcaggcg

SEQ ID NO: 74350 - DNA, 24 bp, Homo sapiens
ctcggggagagcgaagggtgaggc

SEQ ID NO: 74351 - DNA, 20 bp, Homo sapiens
ctggggagcccgcgcgctgg

SEQ ID NO: 74352 - DNA, 24 bp, Homo sapiens
tcctctggagatcaggtggaagga

SEQ ID NO: 74353 - DNA, 24 bp, Homo sapiens
gaaagcagcagcggcaggagccac

SEQ ID NO: 74354 - DNA, 23 bp, Homo sapiens
cggcaagcagaagcccgaacgcg

SEQ ID NO: 74355 - DNA, 22 bp, Homo sapiens
gacccgcgtgccccaggcctcg

SEQ ID NO: 74356 - DNA, 23 bp, Homo sapiens
ctccacaactctgctccaatccg

SEQ ID NO: 74357 - DNA, 22 bp, Homo sapiens
ggcgcacgccctcccgcgagtc

SEQ ID NO: 74358 - DNA, 23 bp, Homo sapiens
ttatgcccgtttcgggggccgag

SEQ ID NO: 74359 - DNA, 23 bp, Homo sapiens
cagcatggcgcccccgcaggtcc

SEQ ID NO: 74360 - DNA, 16 bp, Homo sapiens
cgcaccgtccggtctc

SEQ ID NO: 74361 - DNA, 18 bp, Homo sapiens
gcagctcaggaaggtgag

SEQ ID NO: 74362 - DNA, 19 bp, Homo sapiens
agtgccaggcacttaggca

SEQ ID NO: 74363 - DNA, 21 bp, Homo sapiens
ttattcacaaagcagtttacg

SEQ ID NO: 74364 - DNA, 21 bp, Homo sapiens
tttaaggttttgtgtccttgt

SEQ ID NO: 74365 - DNA, 18 bp, Homo sapiens
cacgctttgagcaaatga

SEQ ID NO: 74366 - DNA, 19 bp, Homo sapiens
agagttaatagatccacat

SEQ ID NO: 74367 - DNA, 23 bp, Homo sapiens
caattaaagaagtattaagtcaa

SEQ ID NO: 74368 - DNA, 19 bp, Homo sapiens
gtgaaaactacaagctggc

SEQ ID NO: 74369 - DNA, 18 bp, Homo sapiens
acacttactttgtaacat

SEQ ID NO: 74370 - DNA, 17 bp, Homo sapiens
tggtgcacaaaatactg

SEQ ID NO: 74371 - DNA, 21 bp, Homo sapiens
tggcttaaatctgaatcatgt

SEQ ID NO: 74372 - DNA, 20 bp, Homo sapiens
ttgctcttctcccaagtttt

SEQ ID NO: 74373 - DNA, 24 bp, Homo sapiens
tttcaaataatctttgaccctgga

SEQ ID NO: 74374 - DNA, 17 bp, Homo sapiens
ccgctctcatcgcagtc

SEQ ID NO: 74375 - DNA, 24 bp, Homo sapiens
tcagttatttttcagtttggcatt

SEQ ID NO: 74376 - DNA, 16 bp, Homo sapiens
gtgttcacacaccagc

SEQ ID NO: 74377 - DNA, 20 bp, Homo sapiens
gaaggcagaaatgaatggct

SEQ ID NO: 74378 - DNA, 19 bp, Homo sapiens
ctaggttctcactcgctca

SEQ ID NO: 74379 - DNA, 16 bp, Homo sapiens
atgatgggctttatga

SEQ ID NO: 74380 - DNA, 27 bp, Homo sapiens
atcaaaaataaatttaattaaatgaat

SEQ ID NO: 74381 - DNA, 17 bp, Homo sapiens
cacctccatgtgctggt

SEQ ID NO: 74382 - DNA, 24 bp, Homo sapiens
gaagcttttcactggacactcata

SEQ ID NO: 74383 - DNA, 23 bp, Homo sapiens
aaggacactgaaataacctgctc

SEQ ID NO: 74384 - DNA, 19 bp, Homo sapiens
gatgtgtaagggaagaaat

SEQ ID NO: 74385 - DNA, 17 bp, Homo sapiens
cgtccgcaaacttttac

SEQ ID NO: 74386 - DNA, 24 bp, Homo sapiens
tataattcgagaattttaggatta

SEQ ID NO: 74387 - DNA, 20 bp, Homo sapiens
tggtgtaggatggaagattt

SEQ ID NO: 74388 - DNA, 18 bp, Homo sapiens
gtcaactgacattgtctt

SEQ ID NO: 74389 - DNA, 21 bp, Homo sapiens
ttcaagtaactttatttttca

SEQ ID NO: 74390 - DNA, 23 bp, Homo sapiens
gcaagagaaaaaccttatgatag

SEQ ID NO: 74391 - DNA, 23 bp, Homo sapiens
tatcaatggatgattccagcctg

SEQ ID NO: 74392 - DNA, 17 bp, Homo sapiens
ttttggatccagttgat

SEQ ID NO: 74393 - DNA, 24 bp, Homo sapiens
aaaattttaactttaatgacagtt

SEQ ID NO: 74394 - DNA, 16 bp, Homo sapiens
ctgtctgctaaagctc

SEQ ID NO: 74395 - DNA, 17 bp, Homo sapiens
actgttgtgtggtacaa

SEQ ID NO: 74396 - DNA, 18 bp, Homo sapiens
gtgcatttaaccaccact

SEQ ID NO: 74397 - DNA, 21 bp, Homo sapiens
cacttcagaaggagatcacaa

SEQ ID NO: 74398 - DNA, 22 bp, Homo sapiens
aaaaaaacagtaacaggaaatt

SEQ ID NO: 74399 - DNA, 23 bp, Homo sapiens
ttagtgataaacttagttatcca

SEQ ID NO: 74400 - DNA, 20 bp, Homo sapiens
ttctgagttttttgagaaga

SEQ ID NO: 74401 - DNA, 22 bp, Homo sapiens
attatagaaaatcaaacactga

SEQ ID NO: 74402 - DNA, 23 bp, Homo sapiens
agaagatgatactcacatctttt

SEQ ID NO: 74403 - DNA, 22 bp, Homo sapiens
tatattagtattaatttgtatt

SEQ ID NO: 74404 - DNA, 26 bp, Homo sapiens
aaaaggtgatgaaatatatttaattc

SEQ ID NO: 74405 - DNA, 20 bp, Homo sapiens
tcactattgatctggttcaa

SEQ ID NO: 74406 - DNA, 20 bp, Homo sapiens
gggaggacaaaattaacggc

SEQ ID NO: 74407 - DNA, 22 bp, Homo sapiens
tgatgtggcttattattttgaa

SEQ ID NO: 74408 - DNA, 20 bp, Homo sapiens
tcctgtaataaacagttttt

SEQ ID NO: 74409 - DNA, 18 bp, Homo sapiens
ttccccatttactgtcag

SEQ ID NO: 74410 - DNA, 23 bp, Homo sapiens
ataaagattcttggcagcggttc

SEQ ID NO: 74411 - DNA, 18 bp, Homo sapiens
ttcaggtgctttttcatc

SEQ ID NO: 74412 - DNA, 26 bp, Homo sapiens
ggttggtttccttaaatatttttaat

SEQ ID NO: 74413 - DNA, 18 bp, Homo sapiens
gctatcaccacaaccaca

SEQ ID NO: 74414 - DNA, 21 bp, Homo sapiens
tccttgtttcattctaagaaa

SEQ ID NO: 74415 - DNA, 22 bp, Homo sapiens
atatacccttaaatgaaatttt

SEQ ID NO: 74416 - DNA, 22 bp, Homo sapiens
aaactttaatttattatgttga

SEQ ID NO: 74417 - DNA, 17 bp, Homo sapiens
ggataacaggtgtggtg

SEQ ID NO: 74418 - DNA, 24 bp, Homo sapiens
ctaaaagctggtgttattgctgtt

SEQ ID NO: 74419 - DNA, 16 bp, Homo sapiens
gtctcaaactcctggg

SEQ ID NO: 74420 - DNA, 25 bp, Homo sapiens
aaatttttaatttaagaagcaataa

SEQ ID NO: 74421 - DNA, 17 bp, Homo sapiens
aatccatttacctcagc

SEQ ID NO: 74422 - DNA, 20 bp, Homo sapiens
cagatcaaaattatgtccat

SEQ ID NO: 74423 - DNA, 18 bp, Homo sapiens
tgtaggaaggtagagtga

SEQ ID NO: 74424 - DNA, 20 bp, Homo sapiens
aatagcagtcctaaaacaat

SEQ ID NO: 74425 - DNA, 20 bp, Homo sapiens
aagactgtccctaagaccct

SEQ ID NO: 74426 - DNA, 17 bp, Homo sapiens
agtatgagaaggctgag

SEQ ID NO: 74427 - DNA, 24 bp, Homo sapiens
taactttttctttttttatttaaa

SEQ ID NO: 74428 - DNA, 26 bp, Homo sapiens
cccttcttctataatcttcaaattat

SEQ ID NO: 74429 - DNA, 28 bp, Homo sapiens
gttcctttaatttcatttttatttaata

SEQ ID NO: 74430 - DNA, 16 bp, Homo sapiens
tcttcgtcccacgcac

SEQ ID NO: 74431 - DNA, 18 bp, Homo sapiens
agaatttttttctgtgct

SEQ ID NO: 74432 - DNA, 17 bp, Homo sapiens
tgagtacaggtttcact

SEQ ID NO: 74433 - DNA, 24 bp, Homo sapiens
tgcatagggaactcaatgcataac

SEQ ID NO: 74434 - DNA, 24 bp, Homo sapiens
gatcctcagagccaagaagagtct

SEQ ID NO: 74435 - DNA, 16 bp, Homo sapiens
cctcctcccagtattt

SEQ ID NO: 74436 - DNA, 17 bp, Homo sapiens
agtggatgaaacgataa

SEQ ID NO: 74437 - DNA, 18 bp, Homo sapiens
gtgcccggaagcatggga

SEQ ID NO: 74438 - DNA, 22 bp, Homo sapiens
tagaataaacccgtaatcccga

SEQ ID NO: 74439 - DNA, 16 bp, Homo sapiens
caagggtaggttgcca

SEQ ID NO: 74440 - DNA, 23 bp, Homo sapiens
ggagaggggcacacgttttaaca

SEQ ID NO: 74441 - DNA, 17 bp, Homo sapiens
ccttagtagagctcctt

SEQ ID NO: 74442 - DNA, 20 bp, Homo sapiens
caagtttccttctgatgtta

SEQ ID NO: 74443 - DNA, 22 bp, Homo sapiens
ggtgactttagctactgcgcat

SEQ ID NO: 74444 - DNA, 24 bp, Homo sapiens
gccggaaatctcccacctggtggc

SEQ ID NO: 74445 - DNA, 16 bp, Homo sapiens
tctgccgcggcaacca

SEQ ID NO: 74446 - DNA, 22 bp, Homo sapiens
caagccttgcagctgagtaaac

SEQ ID NO: 74447 - DNA, 21 bp, Homo sapiens
gagcggcgtccggccacggcg

SEQ ID NO: 74448 - DNA, 24 bp, Homo sapiens
cgcgcgacctaggcgcaggcatgc

SEQ ID NO: 74449 - DNA, 21 bp, Homo sapiens
gaagaaaatgcgcgaccccac

SEQ ID NO: 74450 - DNA, 19 bp, Homo sapiens
cgtctgcttatgattggtt

SEQ ID NO: 74451 - DNA, 22 bp, Homo sapiens
ctctccaactgcagcgtctcct

SEQ ID NO: 74452 - DNA, 23 bp, Homo sapiens
ccctggaagctgattgggtgtgg

SEQ ID NO: 74453 - DNA, 23 bp, Homo sapiens
ctgtggtggtcggcttctccggc

SEQ ID NO: 74454 - DNA, 17 bp, Homo sapiens
gaaacagcttagtgggt

SEQ ID NO: 74455 - DNA, 20 bp, Homo sapiens
cagcagcgcgtcctcgccgt

SEQ ID NO: 74456 - DNA, 21 bp, Homo sapiens
cgacatggcggtgcagccgaa

SEQ ID NO: 74457 - DNA, 16 bp, Homo sapiens
ccggccccatgtactt

SEQ ID NO: 74458 - DNA, 23 bp, Homo sapiens
cttcgtgcgcttctttcagggca

SEQ ID NO: 74459 - DNA, 24 bp, Homo sapiens
gaggcgggaaaggagccgcgccac

SEQ ID NO: 74460 - DNA, 23 bp, Homo sapiens
ggggcgacttctatacggcgcac

SEQ ID NO: 74461 - DNA, 16 bp, Homo sapiens
tccgcccccgtgcctc

SEQ ID NO: 74462 - DNA, 24 bp, Homo sapiens
gtgttcaagacccagggggtgatc

SEQ ID NO: 74463 - DNA, 19 bp, Homo sapiens
tttcaaaaccaatcatgca

SEQ ID NO: 74464 - DNA, 23 bp, Homo sapiens
cattgtatctgggaagtaactaa

SEQ ID NO: 74465 - DNA, 17 bp, Homo sapiens
ggacatagccaaaccat

SEQ ID NO: 74466 - DNA, 20 bp, Homo sapiens
gtcttgaatgagactttgga

SEQ ID NO: 74467 - DNA, 16 bp, Homo sapiens
aactatctcccaccag

SEQ ID NO: 74468 - DNA, 17 bp, Homo sapiens
ccttctgccatgattgt

SEQ ID NO: 74469 - DNA, 22 bp, Homo sapiens
attcaaaattcattttactaag

SEQ ID NO: 74470 - DNA, 18 bp, Homo sapiens
ttttcttcccagtctcgg

SEQ ID NO: 74471 - DNA, 22 bp, Homo sapiens
ccagctctattcttataaactt

SEQ ID NO: 74472 - DNA, 22 bp, Homo sapiens
tgcttgaacatgtaatatctca

SEQ ID NO: 74473 - DNA, 25 bp, Homo sapiens
ttaaaaaggaagataattaccttat

SEQ ID NO: 74474 - DNA, 16 bp, Homo sapiens
tgcagagtgttgtgct

SEQ ID NO: 74475 - DNA, 25 bp, Homo sapiens
aaaacacaattaaattcttcacatt

SEQ ID NO: 74476 - DNA, 17 bp, Homo sapiens
cgtcagtatagagttga

SEQ ID NO: 74477 - DNA, 23 bp, Homo sapiens
acatgctaattgctattaaagtg

SEQ ID NO: 74478 - DNA, 20 bp, Homo sapiens
atgattggtatttggcatat

SEQ ID NO: 74479 - DNA, 20 bp, Homo sapiens
ctctagcctgggtgacagag

SEQ ID NO: 74480 - DNA, 20 bp, Homo sapiens
aagctgacatatcattgtta

SEQ ID NO: 74481 - DNA, 19 bp, Homo sapiens
aaggttcatagagtttgga

SEQ ID NO: 74482 - DNA, 16 bp, Homo sapiens
acctgtctctggccat

SEQ ID NO: 74483 - DNA, 21 bp, Homo sapiens
ttcaagagtttgttaaatttt

SEQ ID NO: 74484 - DNA, 23 bp, Homo sapiens
aactgatcattatcagggaattc

SEQ ID NO: 74485 - DNA, 22 bp, Homo sapiens
tctctcagtttgaagacattct

SEQ ID NO: 74486 - DNA, 19 bp, Homo sapiens
cgggtaaaacacattcctt

SEQ ID NO: 74487 - DNA, 21 bp, Homo sapiens
gtgttaaaatgtccgcagttg

SEQ ID NO: 74488 - DNA, 20 bp, Homo sapiens
cactagactcaatttgctta

SEQ ID NO: 74489 - DNA, 22 bp, Homo sapiens
ccatacagaggaaactaggact

SEQ ID NO: 74490 - DNA, 23 bp, Homo sapiens
aaatgaaacagtatcatgtcaat

SEQ ID NO: 74491 - DNA, 16 bp, Homo sapiens
tccagattggaccaaa

SEQ ID NO: 74492 - DNA, 21 bp, Homo sapiens
tctgtaaacatcagaacatta

SEQ ID NO: 74493 - DNA, 17 bp, Homo sapiens
ggggaaactgagacagg

SEQ ID NO: 74494 - DNA, 24 bp, Homo sapiens
ttattgatgtaaaaagtgtatcag

SEQ ID NO: 74495 - DNA, 21 bp, Homo sapiens
tggaaaagtcagctttttttc

SEQ ID NO: 74496 - DNA, 22 bp, Homo sapiens
aatgtaggtgaatctgttatca

SEQ ID NO: 74497 - DNA, 16 bp, Homo sapiens
tgctctccctttttgc

SEQ ID NO: 74498 - DNA, 22 bp, Homo sapiens
gcttttcttattccttttctca

SEQ ID NO: 74499 - DNA, 23 bp, Homo sapiens
taattcacatttataatccatgt

SEQ ID NO: 74500 - DNA, 19 bp, Homo sapiens
aggaggaattctgatcaca

SEQ ID NO: 74501 - DNA, 19 bp, Homo sapiens
aaagtcactatagtttaca

SEQ ID NO: 74502 - DNA, 17 bp, Homo sapiens
accggttgttgaaaggc

SEQ ID NO: 74503 - DNA, 21 bp, Homo sapiens
gcttaatatcattgatacaca

SEQ ID NO: 74504 - DNA, 21 bp, Homo sapiens
agagattaacctttagttttc

SEQ ID NO: 74505 - DNA, 20 bp, Homo sapiens
gttggaatcatctgataaga

SEQ ID NO: 74506 - DNA, 24 bp, Homo sapiens
gaatttattttcattttgcatttg

SEQ ID NO: 74507 - DNA, 20 bp, Homo sapiens
gactgctgcaatatccaatt

SEQ ID NO: 74508 - DNA, 21 bp, Homo sapiens
ggtatagaaatcttcgatttt

SEQ ID NO: 74509 - DNA, 20 bp, Homo sapiens
tttttaaccctttttttttt

SEQ ID NO: 74510 - DNA, 24 bp, Homo sapiens
ggtaatcaagtttttagaactctt

SEQ ID NO: 74511 - DNA, 18 bp, Homo sapiens
gctcctttataagcttct

SEQ ID NO: 74512 - DNA, 16 bp, Homo sapiens
tttgacttcagccagt

SEQ ID NO: 74513 - DNA, 17 bp, Homo sapiens
gccatttaaagctagtt

SEQ ID NO: 74514 - DNA, 21 bp, Homo sapiens
gattaagaggttgaaagttgg

SEQ ID NO: 74515 - DNA, 19 bp, Homo sapiens
ggttttacacttattcagc

SEQ ID NO: 74516 - DNA, 23 bp, Homo sapiens
aatattatgttattgttcctctg

SEQ ID NO: 74517 - DNA, 19 bp, Homo sapiens
gttcttatccatgagaggc

SEQ ID NO: 74518 - DNA, 21 bp, Homo sapiens
gcttgccattctttctatttt

SEQ ID NO: 74519 - DNA, 17 bp, Homo sapiens
ggtaactgcaggttaca

SEQ ID NO: 74520 - DNA, 17 bp, Homo sapiens
tcagtctctggctgcct

SEQ ID NO: 74521 - DNA, 23 bp, Homo sapiens
ctgtacagttaaatggtaacata

SEQ ID NO: 74522 - DNA, 18 bp, Homo sapiens
accagtggattaagcagc

SEQ ID NO: 74523 - DNA, 23 bp, Homo sapiens
aaaatgagttctttaatcaatct

SEQ ID NO: 74524 - DNA, 20 bp, Homo sapiens
ctcaaagtgctgggattaca

SEQ ID NO: 74525 - DNA, 17 bp, Homo sapiens
ttcttgtaaagtctgcc

SEQ ID NO: 74526 - DNA, 20 bp, Homo sapiens
tggaattttgagctgattta

SEQ ID NO: 74527 - DNA, 20 bp, Homo sapiens
gctgcttgtctttgaaactt

SEQ ID NO: 74528 - DNA, 27 bp, Homo sapiens
actaaaatattttacattaattcaagt

SEQ ID NO: 74529 - DNA, 20 bp, Homo sapiens
agcctgtataacattaggta

SEQ ID NO: 74530 - DNA, 19 bp, Homo sapiens
agatgcagaattgaggcag

SEQ ID NO: 74531 - DNA, 18 bp, Homo sapiens
ttgtatgagttgaaggaa

SEQ ID NO: 74532 - DNA, 23 bp, Homo sapiens
agatcttaaccgacttgccaaga

SEQ ID NO: 74533 - DNA, 16 bp, Homo sapiens
agagtgagtcaccacc

SEQ ID NO: 74534 - DNA, 22 bp, Homo sapiens
atcagggtataaatcaactacc

SEQ ID NO: 74535 - DNA, 19 bp, Homo sapiens
tagccttggcaacggagca

SEQ ID NO: 74536 - DNA, 24 bp, Homo sapiens
gaaacaatttgaattaaaacacct

SEQ ID NO: 74537 - DNA, 18 bp, Homo sapiens
tcagtaagaggagtcaca

SEQ ID NO: 74538 - DNA, 18 bp, Homo sapiens
tgtaccttttggatcaaa

SEQ ID NO: 74539 - DNA, 21 bp, Homo sapiens
attgcatacctgatccatatc

SEQ ID NO: 74540 - DNA, 25 bp, Homo sapiens
attctgtaaaatgagatctttttat

SEQ ID NO: 74541 - DNA, 16 bp, Homo sapiens
aaagtggcctttgctt

SEQ ID NO: 74542 - DNA, 16 bp, Homo sapiens
tggcagtttttgtgac

SEQ ID NO: 74543 - DNA, 18 bp, Homo sapiens
acatccactgtccacaaa

SEQ ID NO: 74544 - DNA, 19 bp, Homo sapiens
tcaggaaatgatagaaaca

SEQ ID NO: 74545 - DNA, 24 bp, Homo sapiens
atttctataaatagaaagtcctta

SEQ ID NO: 74546 - DNA, 18 bp, Homo sapiens
ttcactgagattaggatc

SEQ ID NO: 74547 - DNA, 23 bp, Homo sapiens
ttaactgaaaacagtaaaattta

SEQ ID NO: 74548 - DNA, 19 bp, Homo sapiens
ggctgcacttattaatgtt

SEQ ID NO: 74549 - DNA, 21 bp, Homo sapiens
acccattatttataggatttt

SEQ ID NO: 74550 - DNA, 21 bp, Homo sapiens
tgtctatacagtgtatagaca

SEQ ID NO: 74551 - DNA, 22 bp, Homo sapiens
taaaaccttcatttgatcctaa

SEQ ID NO: 74552 - DNA, 19 bp, Homo sapiens
agtcatcatcttggggaca

SEQ ID NO: 74553 - DNA, 22 bp, Homo sapiens
acttggaaaagaagatgcagtc

SEQ ID NO: 74554 - DNA, 21 bp, Homo sapiens
ggcttgtttaaatgacatcat

SEQ ID NO: 74555 - DNA, 23 bp, Homo sapiens
aattcatgtagttttcaagtaag

SEQ ID NO: 74556 - DNA, 17 bp, Homo sapiens
tgtgcactggaatccag

SEQ ID NO: 74557 - DNA, 24 bp, Homo sapiens
tatgttgtcatataataacagtat

SEQ ID NO: 74558 - DNA, 22 bp, Homo sapiens
aaagtttttattgttacgaagg

SEQ ID NO: 74559 - DNA, 20 bp, Homo sapiens
tggtagtaggtatttatgga

SEQ ID NO: 74560 - DNA, 16 bp, Homo sapiens
gacttgcaaacctgtt

SEQ ID NO: 74561 - DNA, 19 bp, Homo sapiens
ccctggcaaacagattaaa

SEQ ID NO: 74562 - DNA, 20 bp, Homo sapiens
catagaacattcacatcatg

SEQ ID NO: 74563 - DNA, 19 bp, Homo sapiens
aggaagaaaaagtccttcg

SEQ ID NO: 74564 - DNA, 18 bp, Homo sapiens
acagctgactgctctatg

SEQ ID NO: 74565 - DNA, 23 bp, Homo sapiens
gaatggtgttaaatttaccaaca

SEQ ID NO: 74566 - DNA, 17 bp, Homo sapiens
tgtccctaaggagttgt

SEQ ID NO: 74567 - DNA, 20 bp, Homo sapiens
gcttcttcatattctgtttt

SEQ ID NO: 74568 - DNA, 19 bp, Homo sapiens
tttggatgtttcataggat

SEQ ID NO: 74569 - DNA, 24 bp, Homo sapiens
ttattagttctattaagtttacct

SEQ ID NO: 74570 - DNA, 27 bp, Homo sapiens
agtacacattttaatatttttaataaa

SEQ ID NO: 74571 - DNA, 21 bp, Homo sapiens
acacacttcaaatatcatgat

SEQ ID NO: 74572 - DNA, 21 bp, Homo sapiens
agagtataccaaaaataaaac

SEQ ID NO: 74573 - DNA, 21 bp, Homo sapiens
ttttatataggaaacctaaca

SEQ ID NO: 74574 - DNA, 19 bp, Homo sapiens
tgtcaatatttcttcaggt

SEQ ID NO: 74575 - DNA, 17 bp, Homo sapiens
agctaacacatcattga

SEQ ID NO: 74576 - DNA, 22 bp, Homo sapiens
gtaaattaggaaatgggttttg

SEQ ID NO: 74577 - DNA, 19 bp, Homo sapiens
tcgtacatatggaacaggt

SEQ ID NO: 74578 - DNA, 26 bp, Homo sapiens
tatatctgtttattattcagtattcc

SEQ ID NO: 74579 - DNA, 16 bp, Homo sapiens
gcatgcctggatgctt

SEQ ID NO: 74580 - DNA, 16 bp, Homo sapiens
agaaccaatgcagaca

SEQ ID NO: 74581 - DNA, 21 bp, Homo sapiens
tctgtttatctttttcaaagt

SEQ ID NO: 74582 - DNA, 17 bp, Homo sapiens
cacgtgtcaaatggagc

SEQ ID NO: 74583 - DNA, 16 bp, Homo sapiens
acccccacaaagccca

SEQ ID NO: 74584 - DNA, 22 bp, Homo sapiens
aagaattatattaaaagcatcc

SEQ ID NO: 74585 - DNA, 22 bp, Homo sapiens
ctccatcaattttaaatatatt

SEQ ID NO: 74586 - DNA, 19 bp, Homo sapiens
gcatttattcctaatgacg

SEQ ID NO: 74587 - DNA, 20 bp, Homo sapiens
gaatagattactaactggta

SEQ ID NO: 74588 - DNA, 23 bp, Homo sapiens
taatatgggcagtaactctgtcc

SEQ ID NO: 74589 - DNA, 17 bp, Homo sapiens
cccagtttgtcgaatat

SEQ ID NO: 74590 - DNA, 23 bp, Homo sapiens
tgctatgtcagtgtaaacctacg

SEQ ID NO: 74591 - DNA, 17 bp, Homo sapiens
acttctgctgactcaca

SEQ ID NO: 74592 - DNA, 23 bp, Homo sapiens
ttagtagcagaaagaagtttaaa

SEQ ID NO: 74593 - DNA, 17 bp, Homo sapiens
gactcctttcaattgac

SEQ ID NO: 74594 - DNA, 20 bp, Homo sapiens
ccaatatgggaggtaaatca

SEQ ID NO: 74595 - DNA, 16 bp, Homo sapiens
aggagatgcacttacc

SEQ ID NO: 74596 - DNA, 20 bp, Homo sapiens
aattgggtgttttgtgccat

SEQ ID NO: 74597 - DNA, 20 bp, Homo sapiens
tgagaatctgcaaatatact

SEQ ID NO: 74598 - DNA, 20 bp, Homo sapiens
cccgagtaggggctggtgac

SEQ ID NO: 74599 - DNA, 17 bp, Homo sapiens
tccacaggaaaacaact

SEQ ID NO: 74600 - DNA, 19 bp, Homo sapiens
ctgcttctatcctcaggta

SEQ ID NO: 74601 - DNA, 24 bp, Homo sapiens
cttcccaattcatctatgattatt

SEQ ID NO: 74602 - DNA, 22 bp, Homo sapiens
ataatccattatgtttgtggca

SEQ ID NO: 74603 - DNA, 22 bp, Homo sapiens
tgttgcaatgtattctgatata

SEQ ID NO: 74604 - DNA, 21 bp, Homo sapiens
atgtgtatgttaccacatttt

SEQ ID NO: 74605 - DNA, 18 bp, Homo sapiens
tgattggccaaggcagta

SEQ ID NO: 74606 - DNA, 24 bp, Homo sapiens
gcaaccaaagattcattaataatc

SEQ ID NO: 74607 - DNA, 16 bp, Homo sapiens
ggtctcttcagtggtg

SEQ ID NO: 74608 - DNA, 21 bp, Homo sapiens
ggatttgggttagcatgggct

SEQ ID NO: 74609 - DNA, 21 bp, Homo sapiens
ttaccaagttctgaatttaga

SEQ ID NO: 74610 - DNA, 19 bp, Homo sapiens
cccattttcatgaacttac

SEQ ID NO: 74611 - DNA, 26 bp, Homo sapiens
atttatactaacttagaataaggcaa

SEQ ID NO: 74612 - DNA, 18 bp, Homo sapiens
tacatgtcacagcactca

SEQ ID NO: 74613 - DNA, 16 bp, Homo sapiens
ctacccccagactgtg

SEQ ID NO: 74614 - DNA, 24 bp, Homo sapiens
tttgagacttaattaaaatgcctt

SEQ ID NO: 74615 - DNA, 16 bp, Homo sapiens
agcaagctctgcaaca

SEQ ID NO: 74616 - DNA, 21 bp, Homo sapiens
aatccgaaattaagttttcta

SEQ ID NO: 74617 - DNA, 18 bp, Homo sapiens
tgaaactcctcaagttcc

SEQ ID NO: 74618 - DNA, 19 bp, Homo sapiens
ctgtctcttctcatgctgt

SEQ ID NO: 74619 - DNA, 18 bp, Homo sapiens
gatagcacttctttgctg

SEQ ID NO: 74620 - DNA, 21 bp, Homo sapiens
tgtgatcaaagttttgggatt

SEQ ID NO: 74621 - DNA, 26 bp, Homo sapiens
tgtttatgtaataatagagaagctaa

SEQ ID NO: 74622 - DNA, 18 bp, Homo sapiens
gctaaacagaaagccctg

SEQ ID NO: 74623 - DNA, 19 bp, Homo sapiens
gcactagaaacacagagga

SEQ ID NO: 74624 - DNA, 18 bp, Homo sapiens
tatcatggaaccagcagc

SEQ ID NO: 74625 - DNA, 19 bp, Homo sapiens
tgcagaaatcaaaataaca

SEQ ID NO: 74626 - DNA, 17 bp, Homo sapiens
catagtgagaccctcgt

SEQ ID NO: 74627 - DNA, 17 bp, Homo sapiens
agggcatttgtttcacc

SEQ ID NO: 74628 - DNA, 20 bp, Homo sapiens
tgtgtgatatgtttagatgg

SEQ ID NO: 74629 - DNA, 20 bp, Homo sapiens
tctttgctattacttcagct

SEQ ID NO: 74630 - DNA, 24 bp, Homo sapiens
atattttaattactaatgggacat

SEQ ID NO: 74631 - DNA, 20 bp, Homo sapiens
ggatttttcacgtagtaact

SEQ ID NO: 74632 - DNA, 18 bp, Homo sapiens
ggagttcctgtccaaggt

SEQ ID NO: 74633 - DNA, 25 bp, Homo sapiens
ataaaacaatataaaactattacag

SEQ ID NO: 74634 - DNA, 19 bp, Homo sapiens
agttaaaacagctaaaagc

SEQ ID NO: 74635 - DNA, 18 bp, Homo sapiens
ttattaagttgatagccc

SEQ ID NO: 74636 - DNA, 24 bp, Homo sapiens
aatcatttcacgaataaaagttac

SEQ ID NO: 74637 - DNA, 18 bp, Homo sapiens
ttggggaagaagctgtac

SEQ ID NO: 74638 - DNA, 22 bp, Homo sapiens
ccgggttcctccggcggagcgc

SEQ ID NO: 74639 - DNA, 18 bp, Homo sapiens
cacggccgccttcgcgtg

SEQ ID NO: 74640 - DNA, 21 bp, Homo sapiens
ggtagatgcggtgcttttagg

SEQ ID NO: 74641 - DNA, 21 bp, Homo sapiens
cagcctcgctccaggccgcat

SEQ ID NO: 74642 - DNA, 24 bp, Homo sapiens
gtcggtatgtcgcgacagagcacc

SEQ ID NO: 74643 - DNA, 21 bp, Homo sapiens
cgttgaggttcttcgccttgg

SEQ ID NO: 74644 - DNA, 23 bp, Homo sapiens
atgccaacaaggcctcggccagg

SEQ ID NO: 74645 - DNA, 17 bp, Homo sapiens
cccacccccaccccgct

SEQ ID NO: 74646 - DNA, 24 bp, Homo sapiens
tctccttccccaggcggggatgcg

SEQ ID NO: 74647 - DNA, 16 bp, Homo sapiens
tgcgagcctcccctcg

SEQ ID NO: 74648 - DNA, 16 bp, Homo sapiens
tccgcgtcaccgccca

SEQ ID NO: 74649 - DNA, 21 bp, Homo sapiens
ttcaagccaactctgcggccc

SEQ ID NO: 74650 - DNA, 20 bp, Homo sapiens
cctgctgcccccaccaggta

SEQ ID NO: 74651 - DNA, 16 bp, Homo sapiens
tcttggcccaaaccaa

SEQ ID NO: 74652 - DNA, 24 bp, Homo sapiens
tattctagaatttctgtgcttcaa

SEQ ID NO: 74653 - DNA, 17 bp, Homo sapiens
aatgttccatcaaaggg

SEQ ID NO: 74654 - DNA, 20 bp, Homo sapiens
actgcctttaaggaaacttg

SEQ ID NO: 74655 - DNA, 16 bp, Homo sapiens
cccttgttgggctgtc

SEQ ID NO: 74656 - DNA, 20 bp, Homo sapiens
ttgtgacttctcaccaggag

SEQ ID NO: 74657 - DNA, 22 bp, Homo sapiens
cacacacacatggcagtagtga

SEQ ID NO: 74658 - DNA, 19 bp, Homo sapiens
agaaaaaagtctgcctgtc

SEQ ID NO: 74659 - DNA, 21 bp, Homo sapiens
cgtgttcatgtacagtttttt

SEQ ID NO: 74660 - DNA, 22 bp, Homo sapiens
gctttcacaactgccacccctt

SEQ ID NO: 74661 - DNA, 17 bp, Homo sapiens
aaagccatatacaggta

SEQ ID NO: 74662 - DNA, 21 bp, Homo sapiens
caaaatgctgggattacaggc

SEQ ID NO: 74663 - DNA, 16 bp, Homo sapiens
atttcaggctttgcac

SEQ ID NO: 74664 - DNA, 24 bp, Homo sapiens
atagagatggggtttgctatgttg

SEQ ID NO: 74665 - DNA, 19 bp, Homo sapiens
caagcctcttaatcttgtc

SEQ ID NO: 74666 - DNA, 21 bp, Homo sapiens
cacccggcccttattgtttat

SEQ ID NO: 74667 - DNA, 16 bp, Homo sapiens
tcccacctccatctct

SEQ ID NO: 74668 - DNA, 17 bp, Homo sapiens
cagaagggaggtcattt

SEQ ID NO: 74669 - DNA, 19 bp, Homo sapiens
aatacaccctccccctttc

SEQ ID NO: 74670 - DNA, 22 bp, Homo sapiens
gaagccttaaataaagacaaga

SEQ ID NO: 74671 - DNA, 24 bp, Homo sapiens
atgcatgtatgtataataaaataa

SEQ ID NO: 74672 - DNA, 23 bp, Homo sapiens
gagccctcagagccagaagagga

SEQ ID NO: 74673 - DNA, 24 bp, Homo sapiens
gcctattttataataaggaattgc

SEQ ID NO: 74674 - DNA, 24 bp, Homo sapiens
tttcattatcttcttcactcttat

SEQ ID NO: 74675 - DNA, 22 bp, Homo sapiens
atgaaaaacagtggctgcacgg

SEQ ID NO: 74676 - DNA, 16 bp, Homo sapiens
ggcggctacttcgcct

SEQ ID NO: 74677 - DNA, 19 bp, Homo sapiens
tggttttccaaattttgat

SEQ ID NO: 74678 - DNA, 16 bp, Homo sapiens
cacatcagagccacca

SEQ ID NO: 74679 - DNA, 21 bp, Homo sapiens
taggcacaacttacgtaacag

SEQ ID NO: 74680 - DNA, 16 bp, Homo sapiens
tcccccactccactgc

SEQ ID NO: 74681 - DNA, 23 bp, Homo sapiens
ggaagtacagcctaagacacaag

SEQ ID NO: 74682 - DNA, 18 bp, Homo sapiens
attctcttccgctttcga

SEQ ID NO: 74683 - DNA, 18 bp, Homo sapiens
tcagattctgagagtgac

SEQ ID NO: 74684 - DNA, 16 bp, Homo sapiens
gctgagggcgtttcct

SEQ ID NO: 74685 - DNA, 18 bp, Homo sapiens
aggaaggaagcagtgatg

SEQ ID NO: 74686 - DNA, 19 bp, Homo sapiens
aggggcagagaaagctctc

SEQ ID NO: 74687 - DNA, 22 bp, Homo sapiens
ctgaacagccctgtcaaagttg

SEQ ID NO: 74688 - DNA, 17 bp, Homo sapiens
tagggcgactactgtca

SEQ ID NO: 74689 - DNA, 18 bp, Homo sapiens
aaaagctctaggaaggaa

SEQ ID NO: 74690 - DNA, 19 bp, Homo sapiens
ctgtgctcatctcttctct

SEQ ID NO: 74691 - DNA, 19 bp, Homo sapiens
aaccaagaatactttgaga

SEQ ID NO: 74692 - DNA, 16 bp, Homo sapiens
gaaatcctcaggcaca

SEQ ID NO: 74693 - DNA, 19 bp, Homo sapiens
cacgttagtggaggtggtg

SEQ ID NO: 74694 - DNA, 19 bp, Homo sapiens
agatcaaagttctgagact

SEQ ID NO: 74695 - DNA, 17 bp, Homo sapiens
tggcttaaggaggaaaa

SEQ ID NO: 74696 - DNA, 20 bp, Homo sapiens
tgactccaataagagcatcc

SEQ ID NO: 74697 - DNA, 21 bp, Homo sapiens
ttttgatgcatctacactcta

SEQ ID NO: 74698 - DNA, 18 bp, Homo sapiens
tcaggaaagccagaatgg

SEQ ID NO: 74699 - DNA, 22 bp, Homo sapiens
atgaggaagtggtggcagatta

SEQ ID NO: 74700 - DNA, 16 bp, Homo sapiens
tccactcgtgctactt

SEQ ID NO: 74701 - DNA, 20 bp, Homo sapiens
aattttatgagctgtaccac

SEQ ID NO: 74702 - DNA, 20 bp, Homo sapiens
acttggatatatgtgccatc

SEQ ID NO: 74703 - DNA, 24 bp, Homo sapiens
tggtattcatgaaaggcaactggg

SEQ ID NO: 74704 - DNA, 17 bp, Homo sapiens
ctgtgtacccttggtaa

SEQ ID NO: 74705 - DNA, 22 bp, Homo sapiens
agattccctggtgcagaagggc

SEQ ID NO: 74706 - DNA, 19 bp, Homo sapiens
ttgaggctaagaagatact

SEQ ID NO: 74707 - DNA, 21 bp, Homo sapiens
aaatgatggaggcacgatgta

SEQ ID NO: 74708 - DNA, 16 bp, Homo sapiens
tcaacaaagcacacac

SEQ ID NO: 74709 - DNA, 18 bp, Homo sapiens
gggagatctgtaggatca

SEQ ID NO: 74710 - DNA, 17 bp, Homo sapiens
aaatctcgaacaatggc

SEQ ID NO: 74711 - DNA, 22 bp, Homo sapiens
gatccctctgagaactacagta

SEQ ID NO: 74712 - DNA, 19 bp, Homo sapiens
tcctttgagagatttcctt

SEQ ID NO: 74713 - DNA, 17 bp, Homo sapiens
ctcgtgcatatggtgtg

SEQ ID NO: 74714 - DNA, 19 bp, Homo sapiens
ggtatcagaccttcctgaa

SEQ ID NO: 74715 - DNA, 21 bp, Homo sapiens
gtcagttttcagatgatcgcc

SEQ ID NO: 74716 - DNA, 22 bp, Homo sapiens
ttccctaaaatattcttcctca

SEQ ID NO: 74717 - DNA, 23 bp, Homo sapiens
ccccagtacaagttttatttgaa

SEQ ID NO: 74718 - DNA, 18 bp, Homo sapiens
gtcatacctttaagcacc

SEQ ID NO: 74719 - DNA, 22 bp, Homo sapiens
gttcattgtcctgttctcttca

SEQ ID NO: 74720 - DNA, 17 bp, Homo sapiens
gcagagagggccaattc

SEQ ID NO: 74721 - DNA, 21 bp, Homo sapiens
aaaactttgagaactctcctt

SEQ ID NO: 74722 - DNA, 21 bp, Homo sapiens
ttgataaaagctcctgatcaa

SEQ ID NO: 74723 - DNA, 17 bp, Homo sapiens
ggtgatgttaccccagg

SEQ ID NO: 74724 - DNA, 18 bp, Homo sapiens
caccagatcttgtagtgc

SEQ ID NO: 74725 - DNA, 19 bp, Homo sapiens
ttgacaccaggagagaaaa

SEQ ID NO: 74726 - DNA, 20 bp, Homo sapiens
ccaagttgtttaatgtcact

SEQ ID NO: 74727 - DNA, 18 bp, Homo sapiens
aatgccttattgatcagg

SEQ ID NO: 74728 - DNA, 18 bp, Homo sapiens
agtatcaaccctctctag

SEQ ID NO: 74729 - DNA, 22 bp, Homo sapiens
attcccttggattctgacacag

SEQ ID NO: 74730 - DNA, 16 bp, Homo sapiens
gagtggggcacaaagc

SEQ ID NO: 74731 - DNA, 19 bp, Homo sapiens
acgaatggtgctagatgca

SEQ ID NO: 74732 - DNA, 17 bp, Homo sapiens
gtcaggcacaaccatga

SEQ ID NO: 74733 - DNA, 18 bp, Homo sapiens
ggttctactgaaggaacc

SEQ ID NO: 74734 - DNA, 17 bp, Homo sapiens
tgagtagcctctcaaga

SEQ ID NO: 74735 - DNA, 18 bp, Homo sapiens
tcctaaagcaatggcttt

SEQ ID NO: 74736 - DNA, 16 bp, Homo sapiens
tatagccctgctgtct

SEQ ID NO: 74737 - DNA, 19 bp, Homo sapiens
cgtctagatgccatagaag

SEQ ID NO: 74738 - DNA, 19 bp, Homo sapiens
tccagagcagaaagaaaat

SEQ ID NO: 74739 - DNA, 16 bp, Homo sapiens
agaagcttccagatct

SEQ ID NO: 74740 - DNA, 16 bp, Homo sapiens
aaaccatcagcaactt

SEQ ID NO: 74741 - DNA, 23 bp, Homo sapiens
ctcccctgaagagtcagaaccac

SEQ ID NO: 74742 - DNA, 17 bp, Homo sapiens
gaaaacgaccttcagga

SEQ ID NO: 74743 - DNA, 20 bp, Homo sapiens
gcaagaagaagattattgat

SEQ ID NO: 74744 - DNA, 16 bp, Homo sapiens
cgagccttttcatggt

SEQ ID NO: 74745 - DNA, 22 bp, Homo sapiens
aaaattatagggatcatggaag

SEQ ID NO: 74746 - DNA, 16 bp, Homo sapiens
agcaagagcttggtca

SEQ ID NO: 74747 - DNA, 23 bp, Homo sapiens
ggtcatctctctgcagacaaaaa

SEQ ID NO: 74748 - DNA, 16 bp, Homo sapiens
attctgttgcgctgtt

SEQ ID NO: 74749 - DNA, 22 bp, Homo sapiens
ccgatgggatacagcctttgac

SEQ ID NO: 74750 - DNA, 17 bp, Homo sapiens
ctcaggaatttccagct

SEQ ID NO: 74751 - DNA, 22 bp, Homo sapiens
aaagcaggctttgactctgatt

SEQ ID NO: 74752 - DNA, 16 bp, Homo sapiens
cagcccttcttggtag

SEQ ID NO: 74753 - DNA, 18 bp, Homo sapiens
tcctggaatacctagaga

SEQ ID NO: 74754 - DNA, 19 bp, Homo sapiens
ccgttcttcagcatttatg

SEQ ID NO: 74755 - DNA, 22 bp, Homo sapiens
gggggattggtaggaaccgtta

SEQ ID NO: 74756 - DNA, 26 bp, Homo sapiens
gtccttgtaatttttatcaaagttat

SEQ ID NO: 74757 - DNA, 23 bp, Homo sapiens
tttgccagaagaatacgagttga

SEQ ID NO: 74758 - DNA, 19 bp, Homo sapiens
ttgttcaaagtcttaccca

SEQ ID NO: 74759 - DNA, 19 bp, Homo sapiens
aagaagttggctaatctca

SEQ ID NO: 74760 - DNA, 26 bp, Homo sapiens
acttatttttagggataatatacagc

SEQ ID NO: 74761 - DNA, 16 bp, Homo sapiens
catgcggcgactgttc

SEQ ID NO: 74762 - DNA, 18 bp, Homo sapiens
gcctagtcaggatgcaaa

SEQ ID NO: 74763 - DNA, 17 bp, Homo sapiens
agagtgtatcgcagtgt

SEQ ID NO: 74764 - DNA, 23 bp, Homo sapiens
gtccagatgttagagggtaagta

SEQ ID NO: 74765 - DNA, 20 bp, Homo sapiens
ctgggcgacacataggacca

SEQ ID NO: 74766 - DNA, 24 bp, Homo sapiens
tcttataatgaaatgtgttatata

SEQ ID NO: 74767 - DNA, 17 bp, Homo sapiens
ggatggcgtgatccttt

SEQ ID NO: 74768 - DNA, 16 bp, Homo sapiens
tgaagcctcactttta

SEQ ID NO: 74769 - DNA, 20 bp, Homo sapiens
ttcctcacagcctattagaa

SEQ ID NO: 74770 - DNA, 23 bp, Homo sapiens
ggctaactatagtcgagggggtg

SEQ ID NO: 74771 - DNA, 20 bp, Homo sapiens
catatttggtccagtaacaa

SEQ ID NO: 74772 - DNA, 21 bp, Homo sapiens
cccccccttcttagagcttaa

SEQ ID NO: 74773 - DNA, 22 bp, Homo sapiens
tgactttctgataacaaaactt

SEQ ID NO: 74774 - DNA, 25 bp, Homo sapiens
gagatgattttattcctaatgacat

SEQ ID NO: 74775 - DNA, 20 bp, Homo sapiens
ttttatgtaactgtgtttgg

SEQ ID NO: 74776 - DNA, 19 bp, Homo sapiens
ggcaaagcctattgtgtgc

SEQ ID NO: 74777 - DNA, 20 bp, Homo sapiens
tcaattttataacacaggga

SEQ ID NO: 74778 - DNA, 23 bp, Homo sapiens
cttagcctcaactttctccatgt

SEQ ID NO: 74779 - DNA, 18 bp, Homo sapiens
cgtaacaacccatctggg

SEQ ID NO: 74780 - DNA, 23 bp, Homo sapiens
catgtgattgtgaaagttgtttt

SEQ ID NO: 74781 - DNA, 17 bp, Homo sapiens
ggcaccaagtctagtaa

SEQ ID NO: 74782 - DNA, 18 bp, Homo sapiens
atgaaactgttactacca

SEQ ID NO: 74783 - DNA, 19 bp, Homo sapiens
cacatctaaatgactgaat

SEQ ID NO: 74784 - DNA, 18 bp, Homo sapiens
attagctgtaatggccca

SEQ ID NO: 74785 - DNA, 22 bp, Homo sapiens
aacaccagaaaaatcaaatatt

SEQ ID NO: 74786 - DNA, 23 bp, Homo sapiens
caattgatagagtgtttactaga

SEQ ID NO: 74787 - DNA, 19 bp, Homo sapiens
aaaaaaagagagagagact

SEQ ID NO: 74788 - DNA, 21 bp, Homo sapiens
gagtatgctggcagtttcact

SEQ ID NO: 74789 - DNA, 20 bp, Homo sapiens
tcttttataccaatatgtgt

SEQ ID NO: 74790 - DNA, 24 bp, Homo sapiens
tgagaagtttaatgtcttacctaa

SEQ ID NO: 74791 - DNA, 22 bp, Homo sapiens
atatgatttgcaaaatgagtat

SEQ ID NO: 74792 - DNA, 25 bp, Homo sapiens
taatcttctataaaaatagttattt

SEQ ID NO: 74793 - DNA, 23 bp, Homo sapiens
ttttttgttgaattaagtgaaac

SEQ ID NO: 74794 - DNA, 17 bp, Homo sapiens
cacaatggtgagtgcgt

SEQ ID NO: 74795 - DNA, 17 bp, Homo sapiens
tggtgcttgtggatgaa

SEQ ID NO: 74796 - DNA, 23 bp, Homo sapiens
gctgctaagcagactcgtgtagc

SEQ ID NO: 74797 - DNA, 22 bp, Homo sapiens
gtctcagcaagttctttaacaa

SEQ ID NO: 74798 - DNA, 18 bp, Homo sapiens
ccgatgttgcttttctgt

SEQ ID NO: 74799 - DNA, 24 bp, Homo sapiens
aatcttctactaatgaatggtagt

SEQ ID NO: 74800 - DNA, 24 bp, Homo sapiens
ttaattcctttgagttacttcctt

SEQ ID NO: 74801 - DNA, 21 bp, Homo sapiens
gaatttgtggaaaaaaacaat

SEQ ID NO: 74802 - DNA, 24 bp, Homo sapiens
catttgatgggacggcaatagcaa

SEQ ID NO: 74803 - DNA, 21 bp, Homo sapiens
aagaaaaatattagcgataca

SEQ ID NO: 74804 - DNA, 21 bp, Homo sapiens
ttttcaactcactaccattca

SEQ ID NO: 74805 - DNA, 17 bp, Homo sapiens
gtaatagtctcctggct

SEQ ID NO: 74806 - DNA, 17 bp, Homo sapiens
gacatatggtatgtgca

SEQ ID NO: 74807 - DNA, 17 bp, Homo sapiens
ttgctgcattaaagcca

SEQ ID NO: 74808 - DNA, 16 bp, Homo sapiens
ttgctagcacatgtat

SEQ ID NO: 74809 - DNA, 18 bp, Homo sapiens
cttctcaaattctcttgc

SEQ ID NO: 74810 - DNA, 16 bp, Homo sapiens
atgtgaagaccccagc

SEQ ID NO: 74811 - DNA, 25 bp, Homo sapiens
ggtcagttagttataattccattat

SEQ ID NO: 74812 - DNA, 19 bp, Homo sapiens
tgtcctaaaagctatggct

SEQ ID NO: 74813 - DNA, 20 bp, Homo sapiens
tgttttttcatagtgcatca

SEQ ID NO: 74814 - DNA, 20 bp, Homo sapiens
aaaagggacatagaaaagca

SEQ ID NO: 74815 - DNA, 17 bp, Homo sapiens
gacctttcactagccag

SEQ ID NO: 74816 - DNA, 23 bp, Homo sapiens
acgattatttcggtaactaacta

SEQ ID NO: 74817 - DNA, 19 bp, Homo sapiens
gtcagtctataattcctta

SEQ ID NO: 74818 - DNA, 20 bp, Homo sapiens
aaacagtaaaaggggaaggg

SEQ ID NO: 74819 - DNA, 17 bp, Homo sapiens
tgttgtctgaatttacc

SEQ ID NO: 74820 - DNA, 20 bp, Homo sapiens
attttaagggaagtttgcct

SEQ ID NO: 74821 - DNA, 22 bp, Homo sapiens
agggtttaatttcctagaaaga

SEQ ID NO: 74822 - DNA, 22 bp, Homo sapiens
cataaattgctgactttgatta

SEQ ID NO: 74823 - DNA, 23 bp, Homo sapiens
gcagggatacttggatgacccta

SEQ ID NO: 74824 - DNA, 20 bp, Homo sapiens
ggaatatgaggtcatcaacc

SEQ ID NO: 74825 - DNA, 18 bp, Homo sapiens
tcaggatcctaccagtga

SEQ ID NO: 74826 - DNA, 16 bp, Homo sapiens
aggaagaggagcaggc

SEQ ID NO: 74827 - DNA, 24 bp, Homo sapiens
gcagagttgagggaggggctgccg

SEQ ID NO: 74828 - DNA, 24 bp, Homo sapiens
gtggcaggagctggtggagcctca

SEQ ID NO: 74829 - DNA, 16 bp, Homo sapiens
tggctggaactggttg

SEQ ID NO: 74830 - DNA, 17 bp, Homo sapiens
gaagtaccatggatccc

SEQ ID NO: 74831 - DNA, 22 bp, Homo sapiens
tccatctctgagagcagctcca

SEQ ID NO: 74832 - DNA, 17 bp, Homo sapiens
gtcattggcttttctta

SEQ ID NO: 74833 - DNA, 21 bp, Homo sapiens
ggaggttggctgccgtggcca

SEQ ID NO: 74834 - DNA, 24 bp, Homo sapiens
tagctgtggagtgctcactaattc

SEQ ID NO: 74835 - DNA, 23 bp, Homo sapiens
agctaacggcgaaggtgacatag

SEQ ID NO: 74836 - DNA, 16 bp, Homo sapiens
gaatggggtttgggta

SEQ ID NO: 74837 - DNA, 22 bp, Homo sapiens
ccaagatgagttcagaagccca

SEQ ID NO: 74838 - DNA, 17 bp, Homo sapiens
caggaatcccatggtca

SEQ ID NO: 74839 - DNA, 23 bp, Homo sapiens
tgctgacaccctgacactctggg

SEQ ID NO: 74840 - DNA, 23 bp, Homo sapiens
tttgggccgaagcatcctgctct

SEQ ID NO: 74841 - DNA, 19 bp, Homo sapiens
cctgctcagagaaaccaga

SEQ ID NO: 74842 - DNA, 22 bp, Homo sapiens
tcatcgccgccttctgtttcct

SEQ ID NO: 74843 - DNA, 23 bp, Homo sapiens
gtagcagttcctctcccactgtg

SEQ ID NO: 74844 - DNA, 19 bp, Homo sapiens
ttggttctccctctacaga

SEQ ID NO: 74845 - DNA, 22 bp, Homo sapiens
gcatagcgacgagtgatcttca

SEQ ID NO: 74846 - DNA, 16 bp, Homo sapiens
ctccttctaggtgggg

SEQ ID NO: 74847 - DNA, 24 bp, Homo sapiens
gaaagcggagagactacacaggat

SEQ ID NO: 74848 - DNA, 16 bp, Homo sapiens
ctaagacagcgtcctc

SEQ ID NO: 74849 - DNA, 23 bp, Homo sapiens
actgtctggggattcatgcagaa

SEQ ID NO: 74850 - DNA, 23 bp, Homo sapiens
gccggaccccaaacagagccacc

SEQ ID NO: 74851 - DNA, 21 bp, Homo sapiens
ctgttcgcgccaggagctggg

SEQ ID NO: 74852 - DNA, 22 bp, Homo sapiens
ttcaaccaagtgtctggtccct

SEQ ID NO: 74853 - DNA, 18 bp, Homo sapiens
tctatcacggcgctgtgc

SEQ ID NO: 74854 - DNA, 24 bp, Homo sapiens
ccccaccgaggctttaagggccag

SEQ ID NO: 74855 - DNA, 16 bp, Homo sapiens
gcagcgctctgcccaa

SEQ ID NO: 74856 - DNA, 24 bp, Homo sapiens
catagcccaacacgtcggagaccc

SEQ ID NO: 74857 - DNA, 22 bp, Homo sapiens
ggcatgtacgcccccggaggcg

SEQ ID NO: 74858 - DNA, 23 bp, Homo sapiens
caggcgggctcggcgagggcagt

SEQ ID NO: 74859 - DNA, 21 bp, Homo sapiens
ctgcgcgccccgcggaggtcg

SEQ ID NO: 74860 - DNA, 21 bp, Homo sapiens
cgaggccaggctacgctccgg

SEQ ID NO: 74861 - DNA, 24 bp, Homo sapiens
cagtcccggcttcacctgcagcga

SEQ ID NO: 74862 - DNA, 19 bp, Homo sapiens
gccgggcagccctgcgcct

SEQ ID NO: 74863 - DNA, 20 bp, Homo sapiens
attcctaatctggcattaga

SEQ ID NO: 74864 - DNA, 18 bp, Homo sapiens
cgagctggtttatagact

SEQ ID NO: 74865 - DNA, 24 bp, Homo sapiens
tgaatgactctacctatttgtaaa

SEQ ID NO: 74866 - DNA, 21 bp, Homo sapiens
catctatgaagatttgtgtaa

SEQ ID NO: 74867 - DNA, 24 bp, Homo sapiens
acaaaccgtgcaaattcaatttga

SEQ ID NO: 74868 - DNA, 16 bp, Homo sapiens
tcgcataccatgcgag

SEQ ID NO: 74869 - DNA, 23 bp, Homo sapiens
gaagcaactcaaaggacatcaca

SEQ ID NO: 74870 - DNA, 21 bp, Homo sapiens
gggccagatcctcagtagaaa

SEQ ID NO: 74871 - DNA, 16 bp, Homo sapiens
cctctctgggtgataa

SEQ ID NO: 74872 - DNA, 16 bp, Homo sapiens
gtggggaaccttcaaa

SEQ ID NO: 74873 - DNA, 16 bp, Homo sapiens
gctgatcagaatcggg

SEQ ID NO: 74874 - DNA, 20 bp, Homo sapiens
ctttaacaaatgttttctca

SEQ ID NO: 74875 - DNA, 16 bp, Homo sapiens
ctgtctggcttgggct

SEQ ID NO: 74876 - DNA, 24 bp, Homo sapiens
aacttgtatttttattttcctcat

SEQ ID NO: 74877 - DNA, 19 bp, Homo sapiens
taaggttgtcctttggatg

SEQ ID NO: 74878 - DNA, 17 bp, Homo sapiens
tgaatctgaaatgcttc

SEQ ID NO: 74879 - DNA, 16 bp, Homo sapiens
cagctttggcaactga

SEQ ID NO: 74880 - DNA, 24 bp, Homo sapiens
ttactgctcatcgtgatcatcttt

SEQ ID NO: 74881 - DNA, 19 bp, Homo sapiens
aaaagtatgaaattcctga

SEQ ID NO: 74882 - DNA, 18 bp, Homo sapiens
gtcacctgtagctgttga

SEQ ID NO: 74883 - DNA, 19 bp, Homo sapiens
ttcttgtgtttttgtcagg

SEQ ID NO: 74884 - DNA, 23 bp, Homo sapiens
aataagaacaatgaaagttgtat

SEQ ID NO: 74885 - DNA, 24 bp, Homo sapiens
cttaggtaaattgcttgattttaa

SEQ ID NO: 74886 - DNA, 17 bp, Homo sapiens
cttctgcgtggaccttc

SEQ ID NO: 74887 - DNA, 23 bp, Homo sapiens
atttctgtttgcattttagaata

SEQ ID NO: 74888 - DNA, 17 bp, Homo sapiens
catgcttttacccctga

SEQ ID NO: 74889 - DNA, 19 bp, Homo sapiens
attacaggcttgagccacc

SEQ ID NO: 74890 - DNA, 16 bp, Homo sapiens
gaagtgtatgcttggg

SEQ ID NO: 74891 - DNA, 20 bp, Homo sapiens
aaaattaacatcaagttcct

SEQ ID NO: 74892 - DNA, 18 bp, Homo sapiens
tcttactgctttttttgt

SEQ ID NO: 74893 - DNA, 23 bp, Homo sapiens
gtctaattcatttcttaattctc

SEQ ID NO: 74894 - DNA, 18 bp, Homo sapiens
tgagttataagaagcagg

SEQ ID NO: 74895 - DNA, 21 bp, Homo sapiens
agcatccattgagaatcccaa

SEQ ID NO: 74896 - DNA, 20 bp, Homo sapiens
agtagtcttacacttaagtg

SEQ ID NO: 74897 - DNA, 24 bp, Homo sapiens
attactgaaaaaaaatttagatgt

SEQ ID NO: 74898 - DNA, 16 bp, Homo sapiens
gctcagtgagcttgca

SEQ ID NO: 74899 - DNA, 22 bp, Homo sapiens
caatggttaaaacatatgtaaa

SEQ ID NO: 74900 - DNA, 16 bp, Homo sapiens
gtagggatggacctct

SEQ ID NO: 74901 - DNA, 16 bp, Homo sapiens
tctaccccacctccca

SEQ ID NO: 74902 - DNA, 19 bp, Homo sapiens
gtctagtcgtctaatgttt

SEQ ID NO: 74903 - DNA, 19 bp, Homo sapiens
agccttaagaattactgca

SEQ ID NO: 74904 - DNA, 23 bp, Homo sapiens
agtaaactaagtaatgaaattca

SEQ ID NO: 74905 - DNA, 18 bp, Homo sapiens
gcctataagtacaagagg

SEQ ID NO: 74906 - DNA, 24 bp, Homo sapiens
agagaaaaaatttatttaaaaggt

SEQ ID NO: 74907 - DNA, 21 bp, Homo sapiens
tgtctttgaatccacagtagc

SEQ ID NO: 74908 - DNA, 18 bp, Homo sapiens
atgaaatcgctattgctg

SEQ ID NO: 74909 - DNA, 17 bp, Homo sapiens
tggtcaaatggaaattt

SEQ ID NO: 74910 - DNA, 19 bp, Homo sapiens
ctgcacttattttaccagt

SEQ ID NO: 74911 - DNA, 20 bp, Homo sapiens
aaatgtcccaaagctaaatc

SEQ ID NO: 74912 - DNA, 23 bp, Homo sapiens
ttgtatattattaaggatgttga

SEQ ID NO: 74913 - DNA, 18 bp, Homo sapiens
tcttctctggtagcagca

SEQ ID NO: 74914 - DNA, 17 bp, Homo sapiens
tctagattcttctgcct

SEQ ID NO: 74915 - DNA, 19 bp, Homo sapiens
caggccgcagaccaaatat

SEQ ID NO: 74916 - DNA, 17 bp, Homo sapiens
atgagtgcagaatgtga

SEQ ID NO: 74917 - DNA, 17 bp, Homo sapiens
gcagccaagaatgggca

SEQ ID NO: 74918 - DNA, 19 bp, Homo sapiens
actattttaaagtctgctt

SEQ ID NO: 74919 - DNA, 21 bp, Homo sapiens
ccagcataaggcattggtgaa

SEQ ID NO: 74920 - DNA, 25 bp, Homo sapiens
tccattttaaaaataatttttacgt

SEQ ID NO: 74921 - DNA, 26 bp, Homo sapiens
ttttcaaaaaatttaattagcatgaa

SEQ ID NO: 74922 - DNA, 17 bp, Homo sapiens
cagcttgactatatcca

SEQ ID NO: 74923 - DNA, 26 bp, Homo sapiens
tttctaaagtgtgatattataatatc

SEQ ID NO: 74924 - DNA, 20 bp, Homo sapiens
cattttgatacccggtggtg

SEQ ID NO: 74925 - DNA, 21 bp, Homo sapiens
agtgtttttgagtatttaggt

SEQ ID NO: 74926 - DNA, 22 bp, Homo sapiens
cttcaggtgcccatgattgcaa

SEQ ID NO: 74927 - DNA, 23 bp, Homo sapiens
aagctagaaggaaagtaatcatg

SEQ ID NO: 74928 - DNA, 23 bp, Homo sapiens
aataccttttacaaaatggaagt

SEQ ID NO: 74929 - DNA, 23 bp, Homo sapiens
aaaagagtatatgtggcagagga

SEQ ID NO: 74930 - DNA, 22 bp, Homo sapiens
tccttaatgctttttaatttcc

SEQ ID NO: 74931 - DNA, 24 bp, Homo sapiens
acacagaaagaatgagaataaaaa

SEQ ID NO: 74932 - DNA, 23 bp, Homo sapiens
ttaagttttactttatattgaag

SEQ ID NO: 74933 - DNA, 18 bp, Homo sapiens
taacatttggatcacttc

SEQ ID NO: 74934 - DNA, 16 bp, Homo sapiens
acacccggcctaataa

SEQ ID NO: 74935 - DNA, 21 bp, Homo sapiens
aagaaatcatagaggagagac

SEQ ID NO: 74936 - DNA, 22 bp, Homo sapiens
gaagtatcatgtctgtgaaagg

SEQ ID NO: 74937 - DNA, 19 bp, Homo sapiens
gcgagtgatgtctagtccc

SEQ ID NO: 74938 - DNA, 17 bp, Homo sapiens
tgctttatagttggcct

SEQ ID NO: 74939 - DNA, 22 bp, Homo sapiens
ccgatgaattcattagtctttc

SEQ ID NO: 74940 - DNA, 19 bp, Homo sapiens
tagaagcaatatggagcaa

SEQ ID NO: 74941 - DNA, 16 bp, Homo sapiens
ccttcatgcaaacgta

SEQ ID NO: 74942 - DNA, 19 bp, Homo sapiens
gggcaacagcttcattgct

SEQ ID NO: 74943 - DNA, 20 bp, Homo sapiens
tggagattttgttaagcaaa

SEQ ID NO: 74944 - DNA, 19 bp, Homo sapiens
tgtagaaggtggtgtacct

SEQ ID NO: 74945 - DNA, 17 bp, Homo sapiens
tagactttccagtccca

SEQ ID NO: 74946 - DNA, 16 bp, Homo sapiens
ccctgatgtaccacca

SEQ ID NO: 74947 - DNA, 26 bp, Homo sapiens
aaaaattatcttacatctaagaaatc

SEQ ID NO: 74948 - DNA, 20 bp, Homo sapiens
ggtatattttctgagggcac

SEQ ID NO: 74949 - DNA, 17 bp, Homo sapiens
agagtctccagacacta

SEQ ID NO: 74950 - DNA, 21 bp, Homo sapiens
catctcttagaaatgggactg

SEQ ID NO: 74951 - DNA, 20 bp, Homo sapiens
ccttgacagaatctgaatgt

SEQ ID NO: 74952 - DNA, 19 bp, Homo sapiens
attttctaatggcaaagat

SEQ ID NO: 74953 - DNA, 20 bp, Homo sapiens
gccaaccatctgttatctcc

SEQ ID NO: 74954 - DNA, 22 bp, Homo sapiens
agtcactacttcattcctgctc

SEQ ID NO: 74955 - DNA, 18 bp, Homo sapiens
tggtgaatttgactccaa

SEQ ID NO: 74956 - DNA, 19 bp, Homo sapiens
gacttcagttaaacttcca

SEQ ID NO: 74957 - DNA, 23 bp, Homo sapiens
ggaaaaaagcaaaaaaagaaaac

SEQ ID NO: 74958 - DNA, 19 bp, Homo sapiens
ttcaccatttatctgagga

SEQ ID NO: 74959 - DNA, 19 bp, Homo sapiens
gtcctcctgcagatgtttc

SEQ ID NO: 74960 - DNA, 17 bp, Homo sapiens
tagattcctctttggag

SEQ ID NO: 74961 - DNA, 18 bp, Homo sapiens
cccagcctgcaataaaaa

SEQ ID NO: 74962 - DNA, 16 bp, Homo sapiens
ttggttgatttcagct

SEQ ID NO: 74963 - DNA, 17 bp, Homo sapiens
ggtttagccctcgaagt

SEQ ID NO: 74964 - DNA, 19 bp, Homo sapiens
agcctttttagccctctca

SEQ ID NO: 74965 - DNA, 18 bp, Homo sapiens
gataaacctaggaaaagt

SEQ ID NO: 74966 - DNA, 16 bp, Homo sapiens
tgctgagcacttgcat

SEQ ID NO: 74967 - DNA, 20 bp, Homo sapiens
gggagcaataaatttcatgt

SEQ ID NO: 74968 - DNA, 19 bp, Homo sapiens
cacaacatatctgactttc

SEQ ID NO: 74969 - DNA, 22 bp, Homo sapiens
attaaaagatgatacactttag

SEQ ID NO: 74970 - DNA, 22 bp, Homo sapiens
ttgtttcctgcatcattaaaca

SEQ ID NO: 74971 - DNA, 22 bp, Homo sapiens
gaatgagtgaatatctgctatc

SEQ ID NO: 74972 - DNA, 19 bp, Homo sapiens
gactcaatggctatttaaa

SEQ ID NO: 74973 - DNA, 19 bp, Homo sapiens
gacagcatgattcaacttt

SEQ ID NO: 74974 - DNA, 17 bp, Homo sapiens
gaactccagatagatgt

SEQ ID NO: 74975 - DNA, 17 bp, Homo sapiens
tggatgtccagtgtgtt

SEQ ID NO: 74976 - DNA, 20 bp, Homo sapiens
actgatgaatttaactaaga

SEQ ID NO: 74977 - DNA, 22 bp, Homo sapiens
gggttgcttttttttttttttt

SEQ ID NO: 74978 - DNA, 18 bp, Homo sapiens
agcaaatttcgaagctta

SEQ ID NO: 74979 - DNA, 22 bp, Homo sapiens
tgctccatttatttctgttcaa

SEQ ID NO: 74980 - DNA, 18 bp, Homo sapiens
ttgtatccaggccggggt

SEQ ID NO: 74981 - DNA, 19 bp, Homo sapiens
aaaacagtattcaacaagg

SEQ ID NO: 74982 - DNA, 23 bp, Homo sapiens
acacagttttaaagatcaaacta

SEQ ID NO: 74983 - DNA, 19 bp, Homo sapiens
acagtactaacattctgag

SEQ ID NO: 74984 - DNA, 19 bp, Homo sapiens
acaaacatcaagtaccatt

SEQ ID NO: 74985 - DNA, 16 bp, Homo sapiens
tgggtgtgagatgttt

SEQ ID NO: 74986 - DNA, 24 bp, Homo sapiens
aaaatacagttgtactatatacat

SEQ ID NO: 74987 - DNA, 21 bp, Homo sapiens
tgcatccttaataccttctgc

SEQ ID NO: 74988 - DNA, 23 bp, Homo sapiens
cctcctaaacacacaggctctct

SEQ ID NO: 74989 - DNA, 24 bp, Homo sapiens
gaatgagaagcagaagttgttaat

SEQ ID NO: 74990 - DNA, 16 bp, Homo sapiens
gcgctcgaccgcctgg

SEQ ID NO: 74991 - DNA, 23 bp, Homo sapiens
gactgcagcgcgggaacggaagg

SEQ ID NO: 74992 - DNA, 19 bp, Homo sapiens
ggaacgagcctcgttccgc

SEQ ID NO: 74993 - DNA, 16 bp, Homo sapiens
gcgacccgtgccctcg

SEQ ID NO: 74994 - DNA, 20 bp, Homo sapiens
aggcgggacgatgccggata

SEQ ID NO: 74995 - DNA, 24 bp, Homo sapiens
cgagcagcgcagcagcttctccag

SEQ ID NO: 74996 - DNA, 24 bp, Homo sapiens
cagcttccctgtggtttcccgagg

SEQ ID NO: 74997 - DNA, 24 bp, Homo sapiens
gaccatccggttccatggcgggcg

SEQ ID NO: 74998 - DNA, 22 bp, Homo sapiens
ctctggcggcccgccgtcccag

SEQ ID NO: 74999 - DNA, 24 bp, Homo sapiens
ctgccggttcctcggctgccgatt

SEQ ID NO: 75000 - DNA, 24 bp, Homo sapiens
gcgcacagcctccggccggctatt

SEQ ID NO: 75001 - DNA, 22 bp, Homo sapiens
ttcgacgcctgcctcctccgcg

SEQ ID NO: 75002 - DNA, 24 bp, Homo sapiens
cgaagactacggaggtcgactcgg

SEQ ID NO: 75003 - DNA, 24 bp, Homo sapiens
cttccgggccggactcctcggcgc

SEQ ID NO: 75004 - DNA, 24 bp, Homo sapiens
ggatcccgcggcgtccggcccggg

SEQ ID NO: 75005 - DNA, 23 bp, Homo sapiens
cacgggccgcggccgcccggcct

SEQ ID NO: 75006 - DNA, 24 bp, Homo sapiens
gaactgggacgaggccgaggtagg

SEQ ID NO: 75007 - DNA, 23 bp, Homo sapiens
gcgcggactgcgattgcagaaga

SEQ ID NO: 75008 - DNA, 24 bp, Homo sapiens
agaagacggcggggaggagtcggg

SEQ ID NO: 75009 - DNA, 17 bp, Homo sapiens
ttgggtagggctgcggc

SEQ ID NO: 75010 - DNA, 24 bp, Homo sapiens
ctgggcgccgaggaggagatggag

SEQ ID NO: 75011 - DNA, 17 bp, Homo sapiens
ggcctaagcgccgggcc

SEQ ID NO: 75012 - DNA, 20 bp, Homo sapiens
gcgagccctcccaggtcatc

SEQ ID NO: 75013 - DNA, 22 bp, Homo sapiens
aaaatggaccccggggcggtag

SEQ ID NO: 75014 - DNA, 21 bp, Homo sapiens
gtatggctcaacttcgacggc

SEQ ID NO: 75015 - DNA, 16 bp, Homo sapiens
agcagcgtcaccctgg

SEQ ID NO: 75016 - DNA, 16 bp, Homo sapiens
ccacagctaccgaggt

SEQ ID NO: 75017 - DNA, 24 bp, Homo sapiens
agacgaggtttcaccacgttagcc

SEQ ID NO: 75018 - DNA, 17 bp, Homo sapiens
ttcagtttggttaacca

SEQ ID NO: 75019 - DNA, 16 bp, Homo sapiens
ggcagtgtgatattgg

SEQ ID NO: 75020 - DNA, 20 bp, Homo sapiens
tttaacaacctttgcttgtc

SEQ ID NO: 75021 - DNA, 17 bp, Homo sapiens
gtggtctatcctgtact

SEQ ID NO: 75022 - DNA, 21 bp, Homo sapiens
cagggacacacgatgggcttc

SEQ ID NO: 75023 - DNA, 22 bp, Homo sapiens
gatacaaaaagattggataacg

SEQ ID NO: 75024 - DNA, 17 bp, Homo sapiens
gacagcctatttttgcc

SEQ ID NO: 75025 - DNA, 17 bp, Homo sapiens
ataacacactgccacat

SEQ ID NO: 75026 - DNA, 17 bp, Homo sapiens
ttctcaggcttgactag

SEQ ID NO: 75027 - DNA, 19 bp, Homo sapiens
cagtagtacaggtagttgt

SEQ ID NO: 75028 - DNA, 16 bp, Homo sapiens
cacatttgggtggtct

SEQ ID NO: 75029 - DNA, 22 bp, Homo sapiens
gtctgccactgaggatttggtt

SEQ ID NO: 75030 - DNA, 16 bp, Homo sapiens
aatctcccatccgttg

SEQ ID NO: 75031 - DNA, 19 bp, Homo sapiens
cctccaggttgtccggagc

SEQ ID NO: 75032 - DNA, 18 bp, Homo sapiens
caagactcatcagtacca

SEQ ID NO: 75033 - DNA, 22 bp, Homo sapiens
caggtcgctctacgaagatctg

SEQ ID NO: 75034 - DNA, 20 bp, Homo sapiens
tgcctattttactctgagaa

SEQ ID NO: 75035 - DNA, 16 bp, Homo sapiens
ggagcgcattgcacat

SEQ ID NO: 75036 - DNA, 24 bp, Homo sapiens
gtgctcagcctcgtagtggcgcct

SEQ ID NO: 75037 - DNA, 16 bp, Homo sapiens
ctaacgttggccctgc

SEQ ID NO: 75038 - DNA, 17 bp, Homo sapiens
caggcacagggccccat

SEQ ID NO: 75039 - DNA, 21 bp, Homo sapiens
gatctggcgcagagcggagga

SEQ ID NO: 75040 - DNA, 24 bp, Homo sapiens
gtccactcgggccggaaaactaga

SEQ ID NO: 75041 - DNA, 16 bp, Homo sapiens
gccaataggagcagag

SEQ ID NO: 75042 - DNA, 21 bp, Homo sapiens
attctgcgggaggccacaaga

SEQ ID NO: 75043 - DNA, 21 bp, Homo sapiens
gttagagatcgctgtccgctc

SEQ ID NO: 75044 - DNA, 20 bp, Homo sapiens
gaggagcctgagaagcgcca

SEQ ID NO: 75045 - DNA, 24 bp, Homo sapiens
ctgggtctcttcgtccctccctga

SEQ ID NO: 75046 - DNA, 17 bp, Homo sapiens
caagcccggttccggca

SEQ ID NO: 75047 - DNA, 18 bp, Homo sapiens
agctattgattggacagc

SEQ ID NO: 75048 - DNA, 24 bp, Homo sapiens
cgagctcctaaaaacgaaccaata

SEQ ID NO: 75049 - DNA, 21 bp, Homo sapiens
ctcgtgctcacgttcttcctt

SEQ ID NO: 75050 - DNA, 17 bp, Homo sapiens
taggtagcgggcagtag

SEQ ID NO: 75051 - DNA, 23 bp, Homo sapiens
agaagagccaaggaaacgtctag

SEQ ID NO: 75052 - DNA, 22 bp, Homo sapiens
agagttgagaaatttgactggc

SEQ ID NO: 75053 - DNA, 17 bp, Homo sapiens
cactgtctcgtccagcc

SEQ ID NO: 75054 - DNA, 22 bp, Homo sapiens
ctggatggcgtaagctacagct

SEQ ID NO: 75055 - DNA, 20 bp, Homo sapiens
tcatctctttgatagcatta

SEQ ID NO: 75056 - DNA, 23 bp, Homo sapiens
gctgaaggcacttccgttgagca

SEQ ID NO: 75057 - DNA, 17 bp, Homo sapiens
ttaagtcgtagccctta

SEQ ID NO: 75058 - DNA, 21 bp, Homo sapiens
gtggcaggggttattcggcgg

SEQ ID NO: 75059 - DNA, 22 bp, Homo sapiens
tgggcatgcgctgtacatgcct

SEQ ID NO: 75060 - DNA, 24 bp, Homo sapiens
ggggaagttatccagcggccagct

SEQ ID NO: 75061 - DNA, 17 bp, Homo sapiens
ggaaaaggagaaggcct

SEQ ID NO: 75062 - DNA, 18 bp, Homo sapiens
catacagtgtatgagcct

SEQ ID NO: 75063 - DNA, 16 bp, Homo sapiens
cttcaggcctccctct

SEQ ID NO: 75064 - DNA, 24 bp, Homo sapiens
ctattgtttgtatttggagtttgt

SEQ ID NO: 75065 - DNA, 16 bp, Homo sapiens
cctgctactttgaggt

SEQ ID NO: 75066 - DNA, 19 bp, Homo sapiens
agttgcagactgataaatt

SEQ ID NO: 75067 - DNA, 19 bp, Homo sapiens
cccatctgcaaaagcctag

SEQ ID NO: 75068 - DNA, 19 bp, Homo sapiens
tcaagtgattgttaaagag

SEQ ID NO: 75069 - DNA, 23 bp, Homo sapiens
taataggtactcaataaatattt

SEQ ID NO: 75070 - DNA, 21 bp, Homo sapiens
tgcagtttactagtagtgaac

SEQ ID NO: 75071 - DNA, 19 bp, Homo sapiens
actcttctaagaggatttt

SEQ ID NO: 75072 - DNA, 16 bp, Homo sapiens
acctcacctcgaaagc

SEQ ID NO: 75073 - DNA, 22 bp, Homo sapiens
atttggaaaaatgagtaacatg

SEQ ID NO: 75074 - DNA, 18 bp, Homo sapiens
actaacaaatgacagaca

SEQ ID NO: 75075 - DNA, 22 bp, Homo sapiens
atctggatattgtatgtgaaag

SEQ ID NO: 75076 - DNA, 22 bp, Homo sapiens
tcagatttgcatacatttaaca

SEQ ID NO: 75077 - DNA, 17 bp, Homo sapiens
tttctacctatggcttt

SEQ ID NO: 75078 - DNA, 23 bp, Homo sapiens
ttttcaacatgtcatcaaagcaa

SEQ ID NO: 75079 - DNA, 18 bp, Homo sapiens
acactttccatcagctgt

SEQ ID NO: 75080 - DNA, 20 bp, Homo sapiens
ggaagcagcagttcagataa

SEQ ID NO: 75081 - DNA, 23 bp, Homo sapiens
gcaaaaaatacatttcagaatga

SEQ ID NO: 75082 - DNA, 21 bp, Homo sapiens
gtgagtttttctttcagtcta

SEQ ID NO: 75083 - DNA, 19 bp, Homo sapiens
tctgccaaaaaagataaca

SEQ ID NO: 75084 - DNA, 24 bp, Homo sapiens
tcatgttactattacaacgaaaac

SEQ ID NO: 75085 - DNA, 21 bp, Homo sapiens
acctaataatcatccttgagg

SEQ ID NO: 75086 - DNA, 19 bp, Homo sapiens
tgattatggaagtagtgga

SEQ ID NO: 75087 - DNA, 18 bp, Homo sapiens
gcacatggtttaggaggg

SEQ ID NO: 75088 - DNA, 29 bp, Homo sapiens
gataatatataatatggctatattttaat

SEQ ID NO: 75089 - DNA, 18 bp, Homo sapiens
aagcttcaacaatttact

SEQ ID NO: 75090 - DNA, 22 bp, Homo sapiens
ctatctctctactggatattaa

SEQ ID NO: 75091 - DNA, 26 bp, Homo sapiens
attcattttattattaccctgaaaac

SEQ ID NO: 75092 - DNA, 21 bp, Homo sapiens
tcagatggaaaactgaaagcc

SEQ ID NO: 75093 - DNA, 22 bp, Homo sapiens
ccaatagtcatttatcttgctt

SEQ ID NO: 75094 - DNA, 17 bp, Homo sapiens
aatgctgtcttatccct

SEQ ID NO: 75095 - DNA, 19 bp, Homo sapiens
cttggattttttaaagctt

SEQ ID NO: 75096 - DNA, 18 bp, Homo sapiens
ttcactatcttaagacct

SEQ ID NO: 75097 - DNA, 16 bp, Homo sapiens
cactcccagattttgg

SEQ ID NO: 75098 - DNA, 20 bp, Homo sapiens
agtacttctatgaatttaca

SEQ ID NO: 75099 - DNA, 18 bp, Homo sapiens
cagcaactgttcaatgta

SEQ ID NO: 75100 - DNA, 18 bp, Homo sapiens
gccacgaggagaaaagct

SEQ ID NO: 75101 - DNA, 18 bp, Homo sapiens
tggtggctaaaccttgac

SEQ ID NO: 75102 - DNA, 23 bp, Homo sapiens
tttggaagttgttggcaggtaca

SEQ ID NO: 75103 - DNA, 23 bp, Homo sapiens
gtaaaatattaataggctgtatg

SEQ ID NO: 75104 - DNA, 18 bp, Homo sapiens
tcccccataaaccaagaa

SEQ ID NO: 75105 - DNA, 23 bp, Homo sapiens
tactcaactccactaatttattt

SEQ ID NO: 75106 - DNA, 17 bp, Homo sapiens
ctccaccagcaaactat

SEQ ID NO: 75107 - DNA, 22 bp, Homo sapiens
tggcaactcttttcttactctt

SEQ ID NO: 75108 - DNA, 17 bp, Homo sapiens
acagcagaagacacaag

SEQ ID NO: 75109 - DNA, 20 bp, Homo sapiens
agtttctcagttaaaaaagt

SEQ ID NO: 75110 - DNA, 16 bp, Homo sapiens
cggttgaggcattggg

SEQ ID NO: 75111 - DNA, 19 bp, Homo sapiens
aaggggatttttaatagtt

SEQ ID NO: 75112 - DNA, 23 bp, Homo sapiens
ttttatataggttatcgacatac

SEQ ID NO: 75113 - DNA, 18 bp, Homo sapiens
gagacaataaatccttgt

SEQ ID NO: 75114 - DNA, 17 bp, Homo sapiens
tcttgaaaggttccaaa

SEQ ID NO: 75115 - DNA, 17 bp, Homo sapiens
gctgatgttaggacact

SEQ ID NO: 75116 - DNA, 17 bp, Homo sapiens
agcataaaacaagcctg

SEQ ID NO: 75117 - DNA, 17 bp, Homo sapiens
tggatgaatggacaggc

SEQ ID NO: 75118 - DNA, 18 bp, Homo sapiens
tgaaggctagggttttat

SEQ ID NO: 75119 - DNA, 20 bp, Homo sapiens
tcacaaagttagtttatggg

SEQ ID NO: 75120 - DNA, 18 bp, Homo sapiens
agagtaagaagatgcact

SEQ ID NO: 75121 - DNA, 18 bp, Homo sapiens
aatgtttgagttttgagt

SEQ ID NO: 75122 - DNA, 18 bp, Homo sapiens
ctgtgggtgtttcctgtg

SEQ ID NO: 75123 - DNA, 17 bp, Homo sapiens
gaaattggatgtgagga

SEQ ID NO: 75124 - DNA, 20 bp, Homo sapiens
ggtttctccatgtttaatca

SEQ ID NO: 75125 - DNA, 20 bp, Homo sapiens
tgcaaactactcagtgaaga

SEQ ID NO: 75126 - DNA, 17 bp, Homo sapiens
agcacagacttaggaca

SEQ ID NO: 75127 - DNA, 17 bp, Homo sapiens
gcttttctcaaggaagt

SEQ ID NO: 75128 - DNA, 22 bp, Homo sapiens
gtgatgtgcatatcactacaga

SEQ ID NO: 75129 - DNA, 18 bp, Homo sapiens
cctgaggtacaggaatgg

SEQ ID NO: 75130 - DNA, 20 bp, Homo sapiens
ctgtgacctcacccctcagg

SEQ ID NO: 75131 - DNA, 20 bp, Homo sapiens
aggagagcctgatagaacat

SEQ ID NO: 75132 - DNA, 19 bp, Homo sapiens
gatcgtctggtagaatcaa

SEQ ID NO: 75133 - DNA, 19 bp, Homo sapiens
ccagtggtgtatgggattc

SEQ ID NO: 75134 - DNA, 22 bp, Homo sapiens
tatttgcccaaaaacacacacc

SEQ ID NO: 75135 - DNA, 20 bp, Homo sapiens
tcttaagtagcagtgccaat

SEQ ID NO: 75136 - DNA, 16 bp, Homo sapiens
atgctttgtggggtgc

SEQ ID NO: 75137 - DNA, 22 bp, Homo sapiens
tgtgtcatctggcctcaaatct

SEQ ID NO: 75138 - DNA, 17 bp, Homo sapiens
cttgctctcgatgtgct

SEQ ID NO: 75139 - DNA, 21 bp, Homo sapiens
cccctcccactatctaaggta

SEQ ID NO: 75140 - DNA, 16 bp, Homo sapiens
atgagaagcgccctga

SEQ ID NO: 75141 - DNA, 22 bp, Homo sapiens
cccagaatgtggatgttaatgt

SEQ ID NO: 75142 - DNA, 18 bp, Homo sapiens
gcaaaaatctgggctctc

SEQ ID NO: 75143 - DNA, 19 bp, Homo sapiens
gcatcctggagcgggtgca

SEQ ID NO: 75144 - DNA, 22 bp, Homo sapiens
gttcaaagaagaaaatgttaaa

SEQ ID NO: 75145 - DNA, 22 bp, Homo sapiens
aggatgtacttcacccaggtca

SEQ ID NO: 75146 - DNA, 23 bp, Homo sapiens
ggcagaattgcttctataacaat

SEQ ID NO: 75147 - DNA, 20 bp, Homo sapiens
agacttgttgtggatttaac

SEQ ID NO: 75148 - DNA, 17 bp, Homo sapiens
tggggacctgtatatct

SEQ ID NO: 75149 - DNA, 16 bp, Homo sapiens
aaccatctggtgggca

SEQ ID NO: 75150 - DNA, 22 bp, Homo sapiens
atatatattttttttttttttt

SEQ ID NO: 75151 - DNA, 16 bp, Homo sapiens
ggacaggggtttgctc

SEQ ID NO: 75152 - DNA, 17 bp, Homo sapiens
ctctggggagatggtta

SEQ ID NO: 75153 - DNA, 18 bp, Homo sapiens
ctagccctgccactagaa

SEQ ID NO: 75154 - DNA, 20 bp, Homo sapiens
ggaagtagtgataaggtcta

SEQ ID NO: 75155 - DNA, 16 bp, Homo sapiens
atttttggcagccact

SEQ ID NO: 75156 - DNA, 17 bp, Homo sapiens
gatgcatttctgcagcc

SEQ ID NO: 75157 - DNA, 24 bp, Homo sapiens
ctggaagtaggtcctctcttctct

SEQ ID NO: 75158 - DNA, 21 bp, Homo sapiens
cagaggataagacagatattt

SEQ ID NO: 75159 - DNA, 24 bp, Homo sapiens
tttattacagaataaaggaggtag

SEQ ID NO: 75160 - DNA, 17 bp, Homo sapiens
tcccagcccctgctgaa

SEQ ID NO: 75161 - DNA, 18 bp, Homo sapiens
gtcaggcagagagaagat

SEQ ID NO: 75162 - DNA, 23 bp, Homo sapiens
caaaggggacttcagaaatgtca

SEQ ID NO: 75163 - DNA, 16 bp, Homo sapiens
tcaaaggcagacagtg

SEQ ID NO: 75164 - DNA, 19 bp, Homo sapiens
gactgatcttgttggcctt

SEQ ID NO: 75165 - DNA, 17 bp, Homo sapiens
tcctttcgggaatcatc

SEQ ID NO: 75166 - DNA, 24 bp, Homo sapiens
cagagaagttgcttgctcctccaa

SEQ ID NO: 75167 - DNA, 19 bp, Homo sapiens
tggagactcaaaacactag

SEQ ID NO: 75168 - DNA, 17 bp, Homo sapiens
taatgatctgcacttcc

SEQ ID NO: 75169 - DNA, 20 bp, Homo sapiens
tatgcatcccaggcaggcca

SEQ ID NO: 75170 - DNA, 17 bp, Homo sapiens
gtggaaatggtggaaga

SEQ ID NO: 75171 - DNA, 17 bp, Homo sapiens
ctctgacaacatgactg

SEQ ID NO: 75172 - DNA, 22 bp, Homo sapiens
ggagaaggatcattaacctcac

SEQ ID NO: 75173 - DNA, 19 bp, Homo sapiens
aagctgatgctattgtggg

SEQ ID NO: 75174 - DNA, 23 bp, Homo sapiens
tattttattcctcatttgtgttc

SEQ ID NO: 75175 - DNA, 17 bp, Homo sapiens
ctgaggattcacacagc

SEQ ID NO: 75176 - DNA, 23 bp, Homo sapiens
tctttgcttacttggtgtctcta

SEQ ID NO: 75177 - DNA, 16 bp, Homo sapiens
tacctaagcttggtgg

SEQ ID NO: 75178 - DNA, 20 bp, Homo sapiens
aggattctattacttacctg

SEQ ID NO: 75179 - DNA, 16 bp, Homo sapiens
gtgctccctggaccat

SEQ ID NO: 75180 - DNA, 22 bp, Homo sapiens
gatgttgcataaccactccttc

SEQ ID NO: 75181 - DNA, 21 bp, Homo sapiens
atgtgtctgactccaaagcct

SEQ ID NO: 75182 - DNA, 19 bp, Homo sapiens
caagttataccttctcaac

SEQ ID NO: 75183 - DNA, 22 bp, Homo sapiens
taagagattttgttagactgtt

SEQ ID NO: 75184 - DNA, 18 bp, Homo sapiens
tgagaacaccaaaattgg

SEQ ID NO: 75185 - DNA, 17 bp, Homo sapiens
tccatgtttcagggatt

SEQ ID NO: 75186 - DNA, 21 bp, Homo sapiens
gctactattttcagaaacgat

SEQ ID NO: 75187 - DNA, 21 bp, Homo sapiens
attcagcttttccttaaagtc

SEQ ID NO: 75188 - DNA, 21 bp, Homo sapiens
gcaactatccttagaagtttt

SEQ ID NO: 75189 - DNA, 19 bp, Homo sapiens
actcatttatgattttgcc

SEQ ID NO: 75190 - DNA, 23 bp, Homo sapiens
ctaaaaagtataaaacttcttat

SEQ ID NO: 75191 - DNA, 17 bp, Homo sapiens
aagcatggcaaggtcaa

SEQ ID NO: 75192 - DNA, 22 bp, Homo sapiens
atgggggatgagtgttacattt

SEQ ID NO: 75193 - DNA, 17 bp, Homo sapiens
tcagcaagtccttcttt

SEQ ID NO: 75194 - DNA, 20 bp, Homo sapiens
aattcaggcttcatttggat

SEQ ID NO: 75195 - DNA, 21 bp, Homo sapiens
tttccaaagagaaatagtctg

SEQ ID NO: 75196 - DNA, 20 bp, Homo sapiens
gagccagcaccgctctttga

SEQ ID NO: 75197 - DNA, 21 bp, Homo sapiens
cccggctggaaattttatttg

SEQ ID NO: 75198 - DNA, 24 bp, Homo sapiens
gtggctggacagaggaagatggtc

SEQ ID NO: 75199 - DNA, 16 bp, Homo sapiens
atctgcccacctcagc

SEQ ID NO: 75200 - DNA, 22 bp, Homo sapiens
aagaagaaggctgagatgcttg

SEQ ID NO: 75201 - DNA, 22 bp, Homo sapiens
ggcacatagttgtcaatcagaa

SEQ ID NO: 75202 - DNA, 22 bp, Homo sapiens
gtcacccagagtggcagatagg

SEQ ID NO: 75203 - DNA, 24 bp, Homo sapiens
cttgatcactgacctcagtggcta

SEQ ID NO: 75204 - DNA, 22 bp, Homo sapiens
ttgtttaaactatgacagcatt

SEQ ID NO: 75205 - DNA, 16 bp, Homo sapiens
atttgccctttccctc

SEQ ID NO: 75206 - DNA, 16 bp, Homo sapiens
cctgattggattaccc

SEQ ID NO: 75207 - DNA, 17 bp, Homo sapiens
agagcaggccttcagct

SEQ ID NO: 75208 - DNA, 19 bp, Homo sapiens
atcttcattcttcgactag

SEQ ID NO: 75209 - DNA, 16 bp, Homo sapiens
tcgtcccaattcacct

SEQ ID NO: 75210 - DNA, 19 bp, Homo sapiens
gcaatattcagcagtccca

SEQ ID NO: 75211 - DNA, 18 bp, Homo sapiens
gcttccggatggaataga

SEQ ID NO: 75212 - DNA, 24 bp, Homo sapiens
ttttagctttaagtagtctgtgat

SEQ ID NO: 75213 - DNA, 18 bp, Homo sapiens
gccagtgtgcatcaccac

SEQ ID NO: 75214 - DNA, 16 bp, Homo sapiens
atttctttggaccagg

SEQ ID NO: 75215 - DNA, 19 bp, Homo sapiens
gagatgggcaagtttcatc

SEQ ID NO: 75216 - DNA, 19 bp, Homo sapiens
aaagaatgcgctatgttct

SEQ ID NO: 75217 - DNA, 19 bp, Homo sapiens
aataaaagctgactgttgt

SEQ ID NO: 75218 - DNA, 16 bp, Homo sapiens
ctctcaggccagcagg

SEQ ID NO: 75219 - DNA, 19 bp, Homo sapiens
gtgggatcccctgagaggc

SEQ ID NO: 75220 - DNA, 20 bp, Homo sapiens
caaggctttatagacaatgt

SEQ ID NO: 75221 - DNA, 19 bp, Homo sapiens
gtctttccagacccagtgc

SEQ ID NO: 75222 - DNA, 19 bp, Homo sapiens
aagctgcaggatatttcca

SEQ ID NO: 75223 - DNA, 18 bp, Homo sapiens
cagggaggcttatgacat

SEQ ID NO: 75224 - DNA, 23 bp, Homo sapiens
acagtgcataaataaccatattt

SEQ ID NO: 75225 - DNA, 17 bp, Homo sapiens
tcctggaagtggactgt

SEQ ID NO: 75226 - DNA, 19 bp, Homo sapiens
cacactttgatacaacact

SEQ ID NO: 75227 - DNA, 20 bp, Homo sapiens
aaacatttcacagaagatgg

SEQ ID NO: 75228 - DNA, 19 bp, Homo sapiens
tcagaaggcaagtataagt

SEQ ID NO: 75229 - DNA, 19 bp, Homo sapiens
caaagtctttgagaggtgt

SEQ ID NO: 75230 - DNA, 17 bp, Homo sapiens
gaaacgctctcgcccct

SEQ ID NO: 75231 - DNA, 24 bp, Homo sapiens
ggcctggactctccagctgggact

SEQ ID NO: 75232 - DNA, 18 bp, Homo sapiens
gtgcggcggcgccaaggg

SEQ ID NO: 75233 - DNA, 24 bp, Homo sapiens
cagggaaggaccctggtgagggcc

SEQ ID NO: 75234 - DNA, 18 bp, Homo sapiens
ctcaagggtctctacctc

SEQ ID NO: 75235 - DNA, 23 bp, Homo sapiens
ctcactggcgcttggccttgtag

SEQ ID NO: 75236 - DNA, 16 bp, Homo sapiens
cttggggcacagggag

SEQ ID NO: 75237 - DNA, 23 bp, Homo sapiens
cttgtggagccggccgatgctga

SEQ ID NO: 75238 - DNA, 22 bp, Homo sapiens
aatgccctgctgagggccgtgt

SEQ ID NO: 75239 - DNA, 23 bp, Homo sapiens
cacctttatctccatgctggctc

SEQ ID NO: 75240 - DNA, 21 bp, Homo sapiens
caggagctgaggctctcatgg

SEQ ID NO: 75241 - DNA, 22 bp, Homo sapiens
tcttctctcctacagattgatg

SEQ ID NO: 75242 - DNA, 17 bp, Homo sapiens
caggggaggggagctga

SEQ ID NO: 75243 - DNA, 19 bp, Homo sapiens
ctggcctctcccgaggtcc

SEQ ID NO: 75244 - DNA, 21 bp, Homo sapiens
agcgcatcccctcaccttcct

SEQ ID NO: 75245 - DNA, 17 bp, Homo sapiens
ggaggtagagaagagga

SEQ ID NO: 75246 - DNA, 21 bp, Homo sapiens
gttgtgggtccttctctggtc

SEQ ID NO: 75247 - DNA, 18 bp, Homo sapiens
agctgctggcactgctga

SEQ ID NO: 75248 - DNA, 18 bp, Homo sapiens
aatcttgccagagcagcc

SEQ ID NO: 75249 - DNA, 21 bp, Homo sapiens
ttgctcgtggggctttgttgc

SEQ ID NO: 75250 - DNA, 16 bp, Homo sapiens
ccaccttgaacttctt

SEQ ID NO: 75251 - DNA, 16 bp, Homo sapiens
ggggccttgataggca

SEQ ID NO: 75252 - DNA, 21 bp, Homo sapiens
tttgcaatctcagcctccaca

SEQ ID NO: 75253 - DNA, 17 bp, Homo sapiens
ttgagtggggagaaata

SEQ ID NO: 75254 - DNA, 23 bp, Homo sapiens
ttctggcacatggctccagccac

SEQ ID NO: 75255 - DNA, 16 bp, Homo sapiens
gaaggaggtcgtggaa

SEQ ID NO: 75256 - DNA, 24 bp, Homo sapiens
ctgggcaggaggagctcaggcctt

SEQ ID NO: 75257 - DNA, 21 bp, Homo sapiens
ggaagggttcctcgccctcca

SEQ ID NO: 75258 - DNA, 16 bp, Homo sapiens
tcaccttgggtgagta

SEQ ID NO: 75259 - DNA, 21 bp, Homo sapiens
ccacaaagtgtcctgcactct

SEQ ID NO: 75260 - DNA, 19 bp, Homo sapiens
gtcttctctctgctgtccg

SEQ ID NO: 75261 - DNA, 17 bp, Homo sapiens
gactggctcactggcca

SEQ ID NO: 75262 - DNA, 24 bp, Homo sapiens
cctggctgccttggattggtctga

SEQ ID NO: 75263 - DNA, 23 bp, Homo sapiens
cacaggcctgctgcacctggctg

SEQ ID NO: 75264 - DNA, 23 bp, Homo sapiens
agagaggtcacaagaaaatcatc

SEQ ID NO: 75265 - DNA, 16 bp, Homo sapiens
cgtgttgactgcatac

SEQ ID NO: 75266 - DNA, 16 bp, Homo sapiens
ctcctgggtgcaccaa

SEQ ID NO: 75267 - DNA, 16 bp, Homo sapiens
cagccctgtcacctcc

SEQ ID NO: 75268 - DNA, 24 bp, Homo sapiens
caggggactcagcaccccatcctc

SEQ ID NO: 75269 - DNA, 22 bp, Homo sapiens
ctgagatcggcagtgctttcaa

SEQ ID NO: 75270 - DNA, 22 bp, Homo sapiens
agatcacggacagcacggttgt

SEQ ID NO: 75271 - DNA, 16 bp, Homo sapiens
cacacactcgcagccc

SEQ ID NO: 75272 - DNA, 24 bp, Homo sapiens
caaaaagcaccttggagatgtggg

SEQ ID NO: 75273 - DNA, 22 bp, Homo sapiens
gacctctcaattcctctgtcca

SEQ ID NO: 75274 - DNA, 22 bp, Homo sapiens
cggataggcgagcgcagtggcg

SEQ ID NO: 75275 - DNA, 19 bp, Homo sapiens
ctgcagcccaacaccatca

SEQ ID NO: 75276 - DNA, 24 bp, Homo sapiens
tgtactctcattgctgggggtggg

SEQ ID NO: 75277 - DNA, 22 bp, Homo sapiens
tataaggggaagggaacaggga

SEQ ID NO: 75278 - DNA, 19 bp, Homo sapiens
gccccgctgctagtcttga

SEQ ID NO: 75279 - DNA, 21 bp, Homo sapiens
actgctgggtatggtcacctg

SEQ ID NO: 75280 - DNA, 17 bp, Homo sapiens
tctcagccaagacgttg

SEQ ID NO: 75281 - DNA, 19 bp, Homo sapiens
ataaggagttttagggtca

SEQ ID NO: 75282 - DNA, 17 bp, Homo sapiens
gctcaatgcccctggct

SEQ ID NO: 75283 - DNA, 17 bp, Homo sapiens
gtcagaacttgatgcca

SEQ ID NO: 75284 - DNA, 23 bp, Homo sapiens
gacgaggaggatgacgtgcagaa

SEQ ID NO: 75285 - DNA, 16 bp, Homo sapiens
cccaaactccgcaggt

SEQ ID NO: 75286 - DNA, 16 bp, Homo sapiens
cagtccgcccacccca

SEQ ID NO: 75287 - DNA, 21 bp, Homo sapiens
gatattcaggatgggatccga

SEQ ID NO: 75288 - DNA, 17 bp, Homo sapiens
aactgccctggtctttg

SEQ ID NO: 75289 - DNA, 19 bp, Homo sapiens
taagggcagagttggtgtt

SEQ ID NO: 75290 - DNA, 16 bp, Homo sapiens
tctctctggctgtgag

SEQ ID NO: 75291 - DNA, 23 bp, Homo sapiens
catcatctgagtactgctggggt

SEQ ID NO: 75292 - DNA, 24 bp, Homo sapiens
caagccaaggacaggccatggaac

SEQ ID NO: 75293 - DNA, 20 bp, Homo sapiens
cggcctttctagacaatcac

SEQ ID NO: 75294 - DNA, 23 bp, Homo sapiens
caggcccaggcagcttgacccag

SEQ ID NO: 75295 - DNA, 16 bp, Homo sapiens
cagcctcaatggggtt

SEQ ID NO: 75296 - DNA, 20 bp, Homo sapiens
gttgcagcctctcaagagaa

SEQ ID NO: 75297 - DNA, 16 bp, Homo sapiens
cacaagccccatccca

SEQ ID NO: 75298 - DNA, 16 bp, Homo sapiens
atgggggacttggcat

SEQ ID NO: 75299 - DNA, 18 bp, Homo sapiens
gaggtcctgcctgtgttc

SEQ ID NO: 75300 - DNA, 23 bp, Homo sapiens
tgggagtggggttggggtgaacc

SEQ ID NO: 75301 - DNA, 16 bp, Homo sapiens
tgggaagtgctggttc

SEQ ID NO: 75302 - DNA, 22 bp, Homo sapiens
gtttgttgggagggctgtggga

SEQ ID NO: 75303 - DNA, 21 bp, Homo sapiens
tgcgggatcatgacttagagc

SEQ ID NO: 75304 - DNA, 17 bp, Homo sapiens
ctttacaggtgcctttc

SEQ ID NO: 75305 - DNA, 16 bp, Homo sapiens
ggaagcaaacagggcc

SEQ ID NO: 75306 - DNA, 20 bp, Homo sapiens
gaagaacactgcccaaggac

SEQ ID NO: 75307 - DNA, 16 bp, Homo sapiens
tcaagagtcacagctg

SEQ ID NO: 75308 - DNA, 23 bp, Homo sapiens
ccatgtcagacattagcgggtgg

SEQ ID NO: 75309 - DNA, 21 bp, Homo sapiens
tggattctgttgttagctgat

SEQ ID NO: 75310 - DNA, 22 bp, Homo sapiens
gtggttgccctcagaggctgca

SEQ ID NO: 75311 - DNA, 20 bp, Homo sapiens
tcctcagcccttagctattt

SEQ ID NO: 75312 - DNA, 19 bp, Homo sapiens
tgacttggactcctcaggc

SEQ ID NO: 75313 - DNA, 17 bp, Homo sapiens
tgggtgttttatttccc

SEQ ID NO: 75314 - DNA, 21 bp, Homo sapiens
ggctgtgttactcttatcagc

SEQ ID NO: 75315 - DNA, 18 bp, Homo sapiens
aaccgtcagacagtacta

SEQ ID NO: 75316 - DNA, 20 bp, Homo sapiens
gttagctgaagcccagatct

SEQ ID NO: 75317 - DNA, 16 bp, Homo sapiens
ctgatggcagtggtgc

SEQ ID NO: 75318 - DNA, 24 bp, Homo sapiens
gtgggggaagggaggaggaatgca

SEQ ID NO: 75319 - DNA, 18 bp, Homo sapiens
gagctgctctcacggctg

SEQ ID NO: 75320 - DNA, 17 bp, Homo sapiens
ctgcagagcctctagta

SEQ ID NO: 75321 - DNA, 16 bp, Homo sapiens
gactgcagggagccct

SEQ ID NO: 75322 - DNA, 24 bp, Homo sapiens
cctcatacttgatcctgcggtcgg

SEQ ID NO: 75323 - DNA, 16 bp, Homo sapiens
gcatgtatggctagtc

SEQ ID NO: 75324 - DNA, 24 bp, Homo sapiens
cccaggcaggaaataagacaacaa

SEQ ID NO: 75325 - DNA, 16 bp, Homo sapiens
aggagtggacagacaa

SEQ ID NO: 75326 - DNA, 18 bp, Homo sapiens
ccttgcaatttacaaatc

SEQ ID NO: 75327 - DNA, 20 bp, Homo sapiens
ctcagggtttccttctcgct

SEQ ID NO: 75328 - DNA, 24 bp, Homo sapiens
cagctccagagagtagaacagggc

SEQ ID NO: 75329 - DNA, 21 bp, Homo sapiens
gattccctggctcaactgctc

SEQ ID NO: 75330 - DNA, 18 bp, Homo sapiens
atgatgacccgccgggcc

SEQ ID NO: 75331 - DNA, 21 bp, Homo sapiens
tcggtaccgacacccggctct

SEQ ID NO: 75332 - DNA, 23 bp, Homo sapiens
gtctaccccattgaccatggtag

SEQ ID NO: 75333 - DNA, 17 bp, Homo sapiens
gtgtagggtgaaacccc

SEQ ID NO: 75334 - DNA, 21 bp, Homo sapiens
cactttgtcagctatgtgcct

SEQ ID NO: 75335 - DNA, 23 bp, Homo sapiens
gtaccacataccagagggccctg

SEQ ID NO: 75336 - DNA, 21 bp, Homo sapiens
gagccacgccacctccctgag

SEQ ID NO: 75337 - DNA, 20 bp, Homo sapiens
ggcctccagctcatggtgcc

SEQ ID NO: 75338 - DNA, 16 bp, Homo sapiens
ggagtagggggagtat

SEQ ID NO: 75339 - DNA, 23 bp, Homo sapiens
cagctcaaagagccggcctgtga

SEQ ID NO: 75340 - DNA, 20 bp, Homo sapiens
gttggccaaggcccataata

SEQ ID NO: 75341 - DNA, 16 bp, Homo sapiens
ctaaggccattctgct

SEQ ID NO: 75342 - DNA, 24 bp, Homo sapiens
attattctgatacggccttatttt

SEQ ID NO: 75343 - DNA, 20 bp, Homo sapiens
cagagtcagggcccaaaaaa

SEQ ID NO: 75344 - DNA, 16 bp, Homo sapiens
ccaggctgctctctga

SEQ ID NO: 75345 - DNA, 21 bp, Homo sapiens
cccacacacctggcatggcta

SEQ ID NO: 75346 - DNA, 24 bp, Homo sapiens
ctcttttctgcccccaccagcctt

SEQ ID NO: 75347 - DNA, 21 bp, Homo sapiens
atttaagagtcaaatgtaaca

SEQ ID NO: 75348 - DNA, 16 bp, Homo sapiens
tgcagcagcgtggacc

SEQ ID NO: 75349 - DNA, 22 bp, Homo sapiens
tacccaatatcatgtggtagca

SEQ ID NO: 75350 - DNA, 24 bp, Homo sapiens
tcttggtttcacagctgataccca

SEQ ID NO: 75351 - DNA, 16 bp, Homo sapiens
gatgaaggcactgcag

SEQ ID NO: 75352 - DNA, 19 bp, Homo sapiens
ccattcttgatgtatatgg

SEQ ID NO: 75353 - DNA, 21 bp, Homo sapiens
atgcgactcagggtgggtccc

SEQ ID NO: 75354 - DNA, 18 bp, Homo sapiens
gatgaaaggagctgagaa

SEQ ID NO: 75355 - DNA, 17 bp, Homo sapiens
gttgcacaagagttggg

SEQ ID NO: 75356 - DNA, 23 bp, Homo sapiens
tgatattgtgaataacatgttct

SEQ ID NO: 75357 - DNA, 21 bp, Homo sapiens
ggatttctgtagctaccaccc

SEQ ID NO: 75358 - DNA, 17 bp, Homo sapiens
cgaagagcgccggtccc

SEQ ID NO: 75359 - DNA, 17 bp, Homo sapiens
ccaagcaaaaacatggc

SEQ ID NO: 75360 - DNA, 24 bp, Homo sapiens
ctggctctgccccttacttccccc

SEQ ID NO: 75361 - DNA, 19 bp, Homo sapiens
cagacctggtgggcaaaga

SEQ ID NO: 75362 - DNA, 21 bp, Homo sapiens
cagtgcaaaggattaatggga

SEQ ID NO: 75363 - DNA, 17 bp, Homo sapiens
accaaggtagagacctt

SEQ ID NO: 75364 - DNA, 19 bp, Homo sapiens
ttgggaagaagccagggga

SEQ ID NO: 75365 - DNA, 17 bp, Homo sapiens
aaatccatatacagggc

SEQ ID NO: 75366 - DNA, 19 bp, Homo sapiens
atcagtttgatcaggagcg

SEQ ID NO: 75367 - DNA, 16 bp, Homo sapiens
aagggggtgcaagtgg

SEQ ID NO: 75368 - DNA, 21 bp, Homo sapiens
tacaacgtagggttcctggca

SEQ ID NO: 75369 - DNA, 16 bp, Homo sapiens
cgccctcactcatcag

SEQ ID NO: 75370 - DNA, 16 bp, Homo sapiens
ctgggtgtaaggggca

SEQ ID NO: 75371 - DNA, 19 bp, Homo sapiens
ctcgtggaagatttcggta

SEQ ID NO: 75372 - DNA, 22 bp, Homo sapiens
gaaggtcgtagatctcctccac

SEQ ID NO: 75373 - DNA, 16 bp, Homo sapiens
cgcctgcctgaccatc

SEQ ID NO: 75374 - DNA, 24 bp, Homo sapiens
agtagggaaggacagcccctgatg

SEQ ID NO: 75375 - DNA, 24 bp, Homo sapiens
ggagagcgacccaggtgaggaggg

SEQ ID NO: 75376 - DNA, 16 bp, Homo sapiens
ggagaaaaggctctta

SEQ ID NO: 75377 - DNA, 24 bp, Homo sapiens
gggcctggacatggcgctgagggg

SEQ ID NO: 75378 - DNA, 24 bp, Homo sapiens
ctgggtggggcgacaagaggaggg

SEQ ID NO: 75379 - DNA, 16 bp, Homo sapiens
cccgggggcggtgggg

SEQ ID NO: 75380 - DNA, 22 bp, Homo sapiens
cccagcccctggccctcccggt

SEQ ID NO: 75381 - DNA, 24 bp, Homo sapiens
ggtgacgtctgccgccggcgcggg

SEQ ID NO: 75382 - DNA, 21 bp, Homo sapiens
gggtgcgagtgtaaactcccc

SEQ ID NO: 75383 - DNA, 20 bp, Homo sapiens
ctcctccccgacttcgaaat

SEQ ID NO: 75384 - DNA, 16 bp, Homo sapiens
ctgcgccggggcgcac

SEQ ID NO: 75385 - DNA, 23 bp, Homo sapiens
tgtcaccactcacctgctcttca

SEQ ID NO: 75386 - DNA, 24 bp, Homo sapiens
cccccgggctctgttctcactttc

SEQ ID NO: 75387 - DNA, 17 bp, Homo sapiens
gagtggcagacgcagtg

SEQ ID NO: 75388 - DNA, 24 bp, Homo sapiens
aatcggggatcgtgccggatttcg

SEQ ID NO: 75389 - DNA, 19 bp, Homo sapiens
tgctccggggcaagggcac

SEQ ID NO: 75390 - DNA, 22 bp, Homo sapiens
acctattacgaactcaaaagtc

SEQ ID NO: 75391 - DNA, 20 bp, Homo sapiens
caaagggccaaggcagccct

SEQ ID NO: 75392 - DNA, 17 bp, Homo sapiens
gaaaatagctcgtggga

SEQ ID NO: 75393 - DNA, 17 bp, Homo sapiens
gagtttggtgtgattgt

SEQ ID NO: 75394 - DNA, 18 bp, Homo sapiens
tctgtattaccttcttga

SEQ ID NO: 75395 - DNA, 19 bp, Homo sapiens
aatcttgggaattcagacc

SEQ ID NO: 75396 - DNA, 19 bp, Homo sapiens
agattgacatcccttaaaa

SEQ ID NO: 75397 - DNA, 18 bp, Homo sapiens
acttcagtggttttccca

SEQ ID NO: 75398 - DNA, 19 bp, Homo sapiens
cagaaagcaatctagccat

SEQ ID NO: 75399 - DNA, 18 bp, Homo sapiens
aattgactctgtgcctgt

SEQ ID NO: 75400 - DNA, 22 bp, Homo sapiens
ctgctgttgcagacagaaacca

SEQ ID NO: 75401 - DNA, 16 bp, Homo sapiens
aagctttcaaaggagc

SEQ ID NO: 75402 - DNA, 17 bp, Homo sapiens
gggccttatcaggagcc

SEQ ID NO: 75403 - DNA, 17 bp, Homo sapiens
aaactgctcctcttaag

SEQ ID NO: 75404 - DNA, 20 bp, Homo sapiens
tttcactcttcgccaagggc

SEQ ID NO: 75405 - DNA, 20 bp, Homo sapiens
cagcttcagtatttttaact

SEQ ID NO: 75406 - DNA, 18 bp, Homo sapiens
ttcagatgttcatgccat

SEQ ID NO: 75407 - DNA, 22 bp, Homo sapiens
gacttaaatcctgtcacctctt

SEQ ID NO: 75408 - DNA, 16 bp, Homo sapiens
agcttatcggaggctt

SEQ ID NO: 75409 - DNA, 23 bp, Homo sapiens
atttgcgcagactcattttatag

SEQ ID NO: 75410 - DNA, 16 bp, Homo sapiens
ctgctcctgcatctgc

SEQ ID NO: 75411 - DNA, 23 bp, Homo sapiens
aacgaagggtctcattaggaaac

SEQ ID NO: 75412 - DNA, 18 bp, Homo sapiens
gcactctctgttgcatga

SEQ ID NO: 75413 - DNA, 21 bp, Homo sapiens
gagcatcctggggcctccaag

SEQ ID NO: 75414 - DNA, 16 bp, Homo sapiens
gtggcagagggaaggg

SEQ ID NO: 75415 - DNA, 18 bp, Homo sapiens
ctacgccagcaactcatg

SEQ ID NO: 75416 - DNA, 24 bp, Homo sapiens
atggaagagagtttggtccaacca

SEQ ID NO: 75417 - DNA, 16 bp, Homo sapiens
ggcggcccagttcatg

SEQ ID NO: 75418 - DNA, 21 bp, Homo sapiens
agggtcagtctaacaaaatac

SEQ ID NO: 75419 - DNA, 19 bp, Homo sapiens
aacgtcagtgtgcccacca

SEQ ID NO: 75420 - DNA, 23 bp, Homo sapiens
ccttcttttaaaatataaagcca

SEQ ID NO: 75421 - DNA, 19 bp, Homo sapiens
aaatctcacctgatagtga

SEQ ID NO: 75422 - DNA, 23 bp, Homo sapiens
ccttgtttatagtaccttctctt

SEQ ID NO: 75423 - DNA, 25 bp, Homo sapiens
caaaaagtggattaaatcaatttat

SEQ ID NO: 75424 - DNA, 19 bp, Homo sapiens
gagggagggatagtctacc

SEQ ID NO: 75425 - DNA, 18 bp, Homo sapiens
cagcattaaaagagcaga

SEQ ID NO: 75426 - DNA, 19 bp, Homo sapiens
gctggaaatgctagaatat

SEQ ID NO: 75427 - DNA, 22 bp, Homo sapiens
gtaatatcaaaatccgttagca

SEQ ID NO: 75428 - DNA, 16 bp, Homo sapiens
ctgccgttgggcttgc

SEQ ID NO: 75429 - DNA, 17 bp, Homo sapiens
gtggcctggtcagtttc

SEQ ID NO: 75430 - DNA, 16 bp, Homo sapiens
aagctcaggacttggt

SEQ ID NO: 75431 - DNA, 24 bp, Homo sapiens
aaataacagcgctgttttcttttc

SEQ ID NO: 75432 - DNA, 21 bp, Homo sapiens
ctgttgggtgcgctgctcccc

SEQ ID NO: 75433 - DNA, 18 bp, Homo sapiens
ccaccaagtaccacatac

SEQ ID NO: 75434 - DNA, 20 bp, Homo sapiens
gagacatgaattacctcttt

SEQ ID NO: 75435 - DNA, 19 bp, Homo sapiens
agcaaataaacatgccaac

SEQ ID NO: 75436 - DNA, 19 bp, Homo sapiens
agtgtgggaatcatattca

SEQ ID NO: 75437 - DNA, 18 bp, Homo sapiens
gatcatgtcatgccaccg

SEQ ID NO: 75438 - DNA, 21 bp, Homo sapiens
gatggtgaatcggggacaaag

SEQ ID NO: 75439 - DNA, 23 bp, Homo sapiens
cttacgcttaactccaactgtga

SEQ ID NO: 75440 - DNA, 19 bp, Homo sapiens
cactgcttcataaactgaa

SEQ ID NO: 75441 - DNA, 16 bp, Homo sapiens
ttgtctccatcgctgg

SEQ ID NO: 75442 - DNA, 22 bp, Homo sapiens
ctcttctatttttgcttttcct

SEQ ID NO: 75443 - DNA, 22 bp, Homo sapiens
ccctctccaagtgaaatgtgga

SEQ ID NO: 75444 - DNA, 23 bp, Homo sapiens
ggagaaataaaaataatattcca

SEQ ID NO: 75445 - DNA, 17 bp, Homo sapiens
tcttctcttccatgcct

SEQ ID NO: 75446 - DNA, 21 bp, Homo sapiens
agttcttccttcattatttca

SEQ ID NO: 75447 - DNA, 16 bp, Homo sapiens
gtgttcatgcctgggc

SEQ ID NO: 75448 - DNA, 19 bp, Homo sapiens
catcttgttgctgtgccat

SEQ ID NO: 75449 - DNA, 16 bp, Homo sapiens
agtgttcatcctcagg

SEQ ID NO: 75450 - DNA, 21 bp, Homo sapiens
caagttatagactgtttttgc

SEQ ID NO: 75451 - DNA, 16 bp, Homo sapiens
gggggaaaaaaatgct

SEQ ID NO: 75452 - DNA, 19 bp, Homo sapiens
gggcagagagcgagtgccc

SEQ ID NO: 75453 - DNA, 20 bp, Homo sapiens
actatgaggaaaatggcaat

SEQ ID NO: 75454 - DNA, 22 bp, Homo sapiens
tatacttcaatactattttagt

SEQ ID NO: 75455 - DNA, 24 bp, Homo sapiens
tcctcattataacttgattctagg

SEQ ID NO: 75456 - DNA, 22 bp, Homo sapiens
ctaaagaccattattgctttgg

SEQ ID NO: 75457 - DNA, 18 bp, Homo sapiens
aaaaggttatcaataccg

SEQ ID NO: 75458 - DNA, 26 bp, Homo sapiens
catagtttatttatttttgtctctct

SEQ ID NO: 75459 - DNA, 24 bp, Homo sapiens
gataaaataaaagtttaagaaaaa

SEQ ID NO: 75460 - DNA, 18 bp, Homo sapiens
cgatgacatcattagcct

SEQ ID NO: 75461 - DNA, 21 bp, Homo sapiens
tgatcctgagataattctcca

SEQ ID NO: 75462 - DNA, 19 bp, Homo sapiens
tgctttgcaaatggcaaat

SEQ ID NO: 75463 - DNA, 22 bp, Homo sapiens
taaacatctcatattttcctat

SEQ ID NO: 75464 - DNA, 16 bp, Homo sapiens
aggcctggtgggggca

SEQ ID NO: 75465 - DNA, 23 bp, Homo sapiens
cttaaataaatcctagagtagga

SEQ ID NO: 75466 - DNA, 16 bp, Homo sapiens
ttacctgtgagctccc

SEQ ID NO: 75467 - DNA, 22 bp, Homo sapiens
caacagttaatttctgttactg

SEQ ID NO: 75468 - DNA, 19 bp, Homo sapiens
taactttgtcttatcagga

SEQ ID NO: 75469 - DNA, 17 bp, Homo sapiens
atggaaaccaaggtctg

SEQ ID NO: 75470 - DNA, 18 bp, Homo sapiens
gcagagacctataaaagt

SEQ ID NO: 75471 - DNA, 20 bp, Homo sapiens
cttcccaacataaaaaggga

SEQ ID NO: 75472 - DNA, 16 bp, Homo sapiens
tggccagtgctcttgc

SEQ ID NO: 75473 - DNA, 22 bp, Homo sapiens
tttacttagagtcaagtcaaat

SEQ ID NO: 75474 - DNA, 24 bp, Homo sapiens
tcatgaacataaataaaaccaact

SEQ ID NO: 75475 - DNA, 16 bp, Homo sapiens
ttgtgcaacttcaaac

SEQ ID NO: 75476 - DNA, 20 bp, Homo sapiens
tcaactctcctctacagaat

SEQ ID NO: 75477 - DNA, 16 bp, Homo sapiens
tttcccacagagtctg

SEQ ID NO: 75478 - DNA, 22 bp, Homo sapiens
ggtttctgtcaaatacaatttt

SEQ ID NO: 75479 - DNA, 22 bp, Homo sapiens
tgcaataccaagaacatagtaa

SEQ ID NO: 75480 - DNA, 19 bp, Homo sapiens
ttgggaatcaaagtaccta

SEQ ID NO: 75481 - DNA, 24 bp, Homo sapiens
atgacctggagaagttaatatgca

SEQ ID NO: 75482 - DNA, 21 bp, Homo sapiens
acattcaggtacgaaaaatat

SEQ ID NO: 75483 - DNA, 16 bp, Homo sapiens
tagcctttcctgtgct

SEQ ID NO: 75484 - DNA, 19 bp, Homo sapiens
aggggagacttctttactt

SEQ ID NO: 75485 - DNA, 18 bp, Homo sapiens
aaatgaccgcattaaaga

SEQ ID NO: 75486 - DNA, 18 bp, Homo sapiens
gcttgatgagactaacca

SEQ ID NO: 75487 - DNA, 21 bp, Homo sapiens
cactaaagaacttatccatgt

SEQ ID NO: 75488 - DNA, 16 bp, Homo sapiens
atagtccacggatgct

SEQ ID NO: 75489 - DNA, 22 bp, Homo sapiens
aattttaaaaagttcaaaaaga

SEQ ID NO: 75490 - DNA, 16 bp, Homo sapiens
tttcttctgtcggttt

SEQ ID NO: 75491 - DNA, 21 bp, Homo sapiens
tgagcctcaaatcctaaaaat

SEQ ID NO: 75492 - DNA, 16 bp, Homo sapiens
ttacacaactcaggct

SEQ ID NO: 75493 - DNA, 18 bp, Homo sapiens
agggaaccatcttaaaag

SEQ ID NO: 75494 - DNA, 17 bp, Homo sapiens
tcccctatggctcatta

SEQ ID NO: 75495 - DNA, 19 bp, Homo sapiens
aacgcgcaaaagaacttga

SEQ ID NO: 75496 - DNA, 22 bp, Homo sapiens
aaattcacacacacagaatcca

SEQ ID NO: 75497 - DNA, 20 bp, Homo sapiens
ttgctcagaatacaggtacg

SEQ ID NO: 75498 - DNA, 20 bp, Homo sapiens
atcctccaaagtctatactt

SEQ ID NO: 75499 - DNA, 18 bp, Homo sapiens
ggaataagggaaagtcca

SEQ ID NO: 75500 - DNA, 22 bp, Homo sapiens
gccaaatgtctaatgacgcgca

SEQ ID NO: 75501 - DNA, 17 bp, Homo sapiens
tcaagaacgggttcttg

SEQ ID NO: 75502 - DNA, 22 bp, Homo sapiens
cttaaaagtcctctgtgctctg

SEQ ID NO: 75503 - DNA, 17 bp, Homo sapiens
agttgttgtacaggtta

SEQ ID NO: 75504 - DNA, 23 bp, Homo sapiens
cttgaaatgcaggctcgagctca

SEQ ID NO: 75505 - DNA, 16 bp, Homo sapiens
cctcagtcccagttcc

SEQ ID NO: 75506 - DNA, 22 bp, Homo sapiens
ccagatttggtgaatcggatca

SEQ ID NO: 75507 - DNA, 17 bp, Homo sapiens
cgtccatcaggatgtct

SEQ ID NO: 75508 - DNA, 18 bp, Homo sapiens
catcatgcagacctaacc

SEQ ID NO: 75509 - DNA, 16 bp, Homo sapiens
ggaagctccgggggac

SEQ ID NO: 75510 - DNA, 16 bp, Homo sapiens
aacaacaacctcggaa

SEQ ID NO: 75511 - DNA, 16 bp, Homo sapiens
ctaacaagtgtgctcc

SEQ ID NO: 75512 - DNA, 18 bp, Homo sapiens
aaatgggatccaaactgg

SEQ ID NO: 75513 - DNA, 21 bp, Homo sapiens
aggtaagttattaaatctacg

SEQ ID NO: 75514 - DNA, 18 bp, Homo sapiens
actgatccactcctttcc

SEQ ID NO: 75515 - DNA, 23 bp, Homo sapiens
gctattgataaagcatgaaaaaa

SEQ ID NO: 75516 - DNA, 16 bp, Homo sapiens
catggaagagacggag

SEQ ID NO: 75517 - DNA, 16 bp, Homo sapiens
gccaagaggacccagc

SEQ ID NO: 75518 - DNA, 24 bp, Homo sapiens
ttttattaatcaatctgtagacat

SEQ ID NO: 75519 - DNA, 22 bp, Homo sapiens
aggataatgtcccccttctttt

SEQ ID NO: 75520 - DNA, 17 bp, Homo sapiens
agcctccaaactcctag

SEQ ID NO: 75521 - DNA, 20 bp, Homo sapiens
ttgatttgagatcttgatct

SEQ ID NO: 75522 - DNA, 17 bp, Homo sapiens
tttatagctgctgctgg

SEQ ID NO: 75523 - DNA, 20 bp, Homo sapiens
gagaagagattggcagatta

SEQ ID NO: 75524 - DNA, 22 bp, Homo sapiens
tacgggccagaccagcgagccc

SEQ ID NO: 75525 - DNA, 23 bp, Homo sapiens
agataggacaaagtttgaaaaaa

SEQ ID NO: 75526 - DNA, 19 bp, Homo sapiens
ggagtagcagctaaagatc

SEQ ID NO: 75527 - DNA, 16 bp, Homo sapiens
gtgggggcaataagct

SEQ ID NO: 75528 - DNA, 18 bp, Homo sapiens
acgcccggccatgtcatc

SEQ ID NO: 75529 - DNA, 21 bp, Homo sapiens
ggcaaatatcatagcctgtaa

SEQ ID NO: 75530 - DNA, 23 bp, Homo sapiens
catgccatgaagccagagagtag

SEQ ID NO: 75531 - DNA, 16 bp, Homo sapiens
atcccagcgtcaagtt

SEQ ID NO: 75532 - DNA, 19 bp, Homo sapiens
ctaaagtcgttgactagaa

SEQ ID NO: 75533 - DNA, 16 bp, Homo sapiens
caaaactcagggtggc

SEQ ID NO: 75534 - DNA, 18 bp, Homo sapiens
aatttccgtgggtttcgc

SEQ ID NO: 75535 - DNA, 16 bp, Homo sapiens
tgtgctctgagcagtt

SEQ ID NO: 75536 - DNA, 24 bp, Homo sapiens
acagcagcccagcccttcttccca

SEQ ID NO: 75537 - DNA, 18 bp, Homo sapiens
atttgccactgccgtgga

SEQ ID NO: 75538 - DNA, 17 bp, Homo sapiens
tttctaaggccttggaa

SEQ ID NO: 75539 - DNA, 17 bp, Homo sapiens
ctgctcccagtgccccg

SEQ ID NO: 75540 - DNA, 24 bp, Homo sapiens
ctttgaaccttgatgagttctgca

SEQ ID NO: 75541 - DNA, 18 bp, Homo sapiens
gggaatatggtaaaccgt

SEQ ID NO: 75542 - DNA, 16 bp, Homo sapiens
ctggctcaggcgtctc

SEQ ID NO: 75543 - DNA, 19 bp, Homo sapiens
atcccaaatggtcatgata

SEQ ID NO: 75544 - DNA, 16 bp, Homo sapiens
ctgaggagtctgctgg

SEQ ID NO: 75545 - DNA, 18 bp, Homo sapiens
agttgataaatgagacca

SEQ ID NO: 75546 - DNA, 21 bp, Homo sapiens
ctgccatggcagtggcctggt

SEQ ID NO: 75547 - DNA, 19 bp, Homo sapiens
ctcagcacctcttcactca

SEQ ID NO: 75548 - DNA, 16 bp, Homo sapiens
tcagctgcaattgtgc

SEQ ID NO: 75549 - DNA, 21 bp, Homo sapiens
caggtcagttatgcctcctcc

SEQ ID NO: 75550 - DNA, 17 bp, Homo sapiens
cagatatccctttcctc

SEQ ID NO: 75551 - DNA, 20 bp, Homo sapiens
ctccgaaccatccccaatga

SEQ ID NO: 75552 - DNA, 22 bp, Homo sapiens
atcacctctaccacatgctgga

SEQ ID NO: 75553 - DNA, 17 bp, Homo sapiens
ctggaactgggtgggca

SEQ ID NO: 75554 - DNA, 20 bp, Homo sapiens
aagatctgggccactggaga

SEQ ID NO: 75555 - DNA, 23 bp, Homo sapiens
gagaaattccgagaggaagctga

SEQ ID NO: 75556 - DNA, 16 bp, Homo sapiens
tcgctggccagccaga

SEQ ID NO: 75557 - DNA, 18 bp, Homo sapiens
agtactctgatgaggaag

SEQ ID NO: 75558 - DNA, 16 bp, Homo sapiens
ccaaccacgtggaagt

SEQ ID NO: 75559 - DNA, 18 bp, Homo sapiens
caaagtcatcgtggtttt

SEQ ID NO: 75560 - DNA, 21 bp, Homo sapiens
ccttcttcaggaattcccgga

SEQ ID NO: 75561 - DNA, 16 bp, Homo sapiens
gcaatatcacgggcaa

SEQ ID NO: 75562 - DNA, 24 bp, Homo sapiens
cagttaaatgtttcttcccaaaac

SEQ ID NO: 75563 - DNA, 16 bp, Homo sapiens
cgccatgcctcagtac

SEQ ID NO: 75564 - DNA, 16 bp, Homo sapiens
gacctctcagaaaggt

SEQ ID NO: 75565 - DNA, 21 bp, Homo sapiens
ctgggcagatcccaggcttcc

SEQ ID NO: 75566 - DNA, 19 bp, Homo sapiens
ctgtacagaggggtcggaa

SEQ ID NO: 75567 - DNA, 18 bp, Homo sapiens
gttttgccaaggagtttt

SEQ ID NO: 75568 - DNA, 17 bp, Homo sapiens
ccgtaaatgcgtgtaat

SEQ ID NO: 75569 - DNA, 20 bp, Homo sapiens
aaaggacctttacctgtgga

SEQ ID NO: 75570 - DNA, 20 bp, Homo sapiens
agcaggtatatatatcttgc

SEQ ID NO: 75571 - DNA, 22 bp, Homo sapiens
agcaacagctcgacagccttcc

SEQ ID NO: 75572 - DNA, 21 bp, Homo sapiens
cacgcctcaactttcttgatg

SEQ ID NO: 75573 - DNA, 19 bp, Homo sapiens
gtcgagaccccttacatag

SEQ ID NO: 75574 - DNA, 16 bp, Homo sapiens
gcccaactctgcttta

SEQ ID NO: 75575 - DNA, 21 bp, Homo sapiens
cagtctactccattgcccacg

SEQ ID NO: 75576 - DNA, 21 bp, Homo sapiens
atttagtggcttcatttaaat

SEQ ID NO: 75577 - DNA, 16 bp, Homo sapiens
ccaatggctcctgtgc

SEQ ID NO: 75578 - DNA, 18 bp, Homo sapiens
ttcaaatcagttgctcaa

SEQ ID NO: 75579 - DNA, 22 bp, Homo sapiens
taacaccggcaagtactttggt

SEQ ID NO: 75580 - DNA, 18 bp, Homo sapiens
gctcccccatattgtttg

SEQ ID NO: 75581 - DNA, 23 bp, Homo sapiens
acgttcctcccactttgttggaa

SEQ ID NO: 75582 - DNA, 21 bp, Homo sapiens
agttgatgatggaatagttcc

SEQ ID NO: 75583 - DNA, 22 bp, Homo sapiens
ctaattagttctatgtggcagc

SEQ ID NO: 75584 - DNA, 16 bp, Homo sapiens
acgttgtaatacccga

SEQ ID NO: 75585 - DNA, 19 bp, Homo sapiens
aagcacctacggcatctaa

SEQ ID NO: 75586 - DNA, 16 bp, Homo sapiens
aacccactccacagga

SEQ ID NO: 75587 - DNA, 22 bp, Homo sapiens
gagtgtggtgacctggtgggga

SEQ ID NO: 75588 - DNA, 17 bp, Homo sapiens
agtttcctgcccctggt

SEQ ID NO: 75589 - DNA, 22 bp, Homo sapiens
ggctccatcgtgtttaaggaag

SEQ ID NO: 75590 - DNA, 19 bp, Homo sapiens
ggaagtggactctttattt

SEQ ID NO: 75591 - DNA, 20 bp, Homo sapiens
cttcatcaacgaggagaaaa

SEQ ID NO: 75592 - DNA, 18 bp, Homo sapiens
cactaaacactgtggatt

SEQ ID NO: 75593 - DNA, 24 bp, Homo sapiens
cacactttcccatagtcatctgtc

SEQ ID NO: 75594 - DNA, 16 bp, Homo sapiens
agttggagaagggcac

SEQ ID NO: 75595 - DNA, 22 bp, Homo sapiens
cctggaatgggcccaacgtctg

SEQ ID NO: 75596 - DNA, 22 bp, Homo sapiens
tcaaagcagcaggtgggctccc

SEQ ID NO: 75597 - DNA, 21 bp, Homo sapiens
ttacatgttttgaagagacag

SEQ ID NO: 75598 - DNA, 18 bp, Homo sapiens
gaggggttcccttacctg

SEQ ID NO: 75599 - DNA, 24 bp, Homo sapiens
ctttgtgctgtctgtcctccaggt

SEQ ID NO: 75600 - DNA, 16 bp, Homo sapiens
catgggcttcactgac

SEQ ID NO: 75601 - DNA, 20 bp, Homo sapiens
caggaaagggatcattgagg

SEQ ID NO: 75602 - DNA, 19 bp, Homo sapiens
tttgtgatgctcagatata

SEQ ID NO: 75603 - DNA, 24 bp, Homo sapiens
cctgatggggagtatagtgatgag

SEQ ID NO: 75604 - DNA, 22 bp, Homo sapiens
cggggttcagcatatttttgat

SEQ ID NO: 75605 - DNA, 17 bp, Homo sapiens
tggttctcattggacca

SEQ ID NO: 75606 - DNA, 23 bp, Homo sapiens
aaatatgtagtgaccacatccaa

SEQ ID NO: 75607 - DNA, 16 bp, Homo sapiens
gatcccaaagggctcc

SEQ ID NO: 75608 - DNA, 24 bp, Homo sapiens
ttagtctgtgccacacaataactc

SEQ ID NO: 75609 - DNA, 17 bp, Homo sapiens
aacacacccagcacaaa

SEQ ID NO: 75610 - DNA, 20 bp, Homo sapiens
tgtaacaagtgcccagatga

SEQ ID NO: 75611 - DNA, 16 bp, Homo sapiens
gaggaggaggtaggag

SEQ ID NO: 75612 - DNA, 24 bp, Homo sapiens
gatcgagtttctgtcgtggacgga

SEQ ID NO: 75613 - DNA, 19 bp, Homo sapiens
gtcctggggctccccgatg

SEQ ID NO: 75614 - DNA, 20 bp, Homo sapiens
cattttcctgacagcctttg

SEQ ID NO: 75615 - DNA, 17 bp, Homo sapiens
ggatgcatgagatgcag

SEQ ID NO: 75616 - DNA, 22 bp, Homo sapiens
attgtcaaggccaccaaccgag

SEQ ID NO: 75617 - DNA, 21 bp, Homo sapiens
cggtggaagctggtggggatc

SEQ ID NO: 75618 - DNA, 24 bp, Homo sapiens
tctccagctccctgttcttcatcg

SEQ ID NO: 75619 - DNA, 24 bp, Homo sapiens
aatctgcatgaaggtgcagaggaa

SEQ ID NO: 75620 - DNA, 20 bp, Homo sapiens
ggcctttggcatcagcttcg

SEQ ID NO: 75621 - DNA, 16 bp, Homo sapiens
tggttgcggtagcttg

SEQ ID NO: 75622 - DNA, 21 bp, Homo sapiens
tcctcctggtgtttgaggcca

SEQ ID NO: 75623 - DNA, 24 bp, Homo sapiens
caggaagcccagggccatgaggga

SEQ ID NO: 75624 - DNA, 24 bp, Homo sapiens
gctcaacctgcagttcctgctggt

SEQ ID NO: 75625 - DNA, 18 bp, Homo sapiens
gacttgaaggcaaagaag

SEQ ID NO: 75626 - DNA, 21 bp, Homo sapiens
ctggctctacaccgcgccccc

SEQ ID NO: 75627 - DNA, 18 bp, Homo sapiens
tgaagaagatgagcatgc

SEQ ID NO: 75628 - DNA, 22 bp, Homo sapiens
tcttcatcacgtgccacgaggg

SEQ ID NO: 75629 - DNA, 21 bp, Homo sapiens
ggcagagacaaacttgccata

SEQ ID NO: 75630 - DNA, 24 bp, Homo sapiens
ctgcctgctggctgccatctgctt

SEQ ID NO: 75631 - DNA, 24 bp, Homo sapiens
tagatcttgttgaagaagatgcac

SEQ ID NO: 75632 - DNA, 17 bp, Homo sapiens
gaagccaagttcatcac

SEQ ID NO: 75633 - DNA, 16 bp, Homo sapiens
aacgcacctcctcgat

SEQ ID NO: 75634 - DNA, 22 bp, Homo sapiens
attccagcctatgccagcacct

SEQ ID NO: 75635 - DNA, 23 bp, Homo sapiens
gcttgcgggagacgttgctgcgg

SEQ ID NO: 75636 - DNA, 24 bp, Homo sapiens
tggcagccagctttggcttgctgg

SEQ ID NO: 75637 - DNA, 17 bp, Homo sapiens
tggaggaggagggggtg

SEQ ID NO: 75638 - DNA, 23 bp, Homo sapiens
caagccatcccgcaacaccatcg

SEQ ID NO: 75639 - DNA, 24 bp, Homo sapiens
cagcggctgctgctgcttctgcct

SEQ ID NO: 75640 - DNA, 23 bp, Homo sapiens
ttcaaggtggctgcccgggccac

SEQ ID NO: 75641 - DNA, 24 bp, Homo sapiens
gagatcgttgctgctgtgggaggg

SEQ ID NO: 75642 - DNA, 16 bp, Homo sapiens
ctccacgggatccacc

SEQ ID NO: 75643 - DNA, 21 bp, Homo sapiens
aaggtgaccgtgccgctgcca

SEQ ID NO: 75644 - DNA, 22 bp, Homo sapiens
aagacccattcccacagcccga

SEQ ID NO: 75645 - DNA, 22 bp, Homo sapiens
gagttctggtgcgtagaattcc

SEQ ID NO: 75646 - DNA, 24 bp, Homo sapiens
gcaagagcagcagcagcagcccct

SEQ ID NO: 75647 - DNA, 22 bp, Homo sapiens
tgcagcgggagtaatggctcgt

SEQ ID NO: 75648 - DNA, 18 bp, Homo sapiens
cagaaggtcatctttggc

SEQ ID NO: 75649 - DNA, 18 bp, Homo sapiens
acaggtccttgcagacct

SEQ ID NO: 75650 - DNA, 24 bp, Homo sapiens
tgagcctcagaagaacgccatggc

SEQ ID NO: 75651 - DNA, 21 bp, Homo sapiens
acactacaagtgctggggaca

SEQ ID NO: 75652 - DNA, 22 bp, Homo sapiens
gaaaagcagcgatacgctgacc

SEQ ID NO: 75653 - DNA, 22 bp, Homo sapiens
ctacgttttctgtaacagtgct

SEQ ID NO: 75654 - DNA, 16 bp, Homo sapiens
atctgaccgtccagga

SEQ ID NO: 75655 - DNA, 16 bp, Homo sapiens
aagaaacctctctgca

SEQ ID NO: 75656 - DNA, 19 bp, Homo sapiens
tggaggaccctgaagagtt

SEQ ID NO: 75657 - DNA, 19 bp, Homo sapiens
attatcccttcttcctcag

SEQ ID NO: 75658 - DNA, 23 bp, Homo sapiens
ctttgtcatcagtggtggaggca

SEQ ID NO: 75659 - DNA, 18 bp, Homo sapiens
tgggtcaattcactgtca

SEQ ID NO: 75660 - DNA, 20 bp, Homo sapiens
agtaactgctggcaggctgc

SEQ ID NO: 75661 - DNA, 16 bp, Homo sapiens
tccagcctctccttcg

SEQ ID NO: 75662 - DNA, 22 bp, Homo sapiens
ggcaggagtggtgtcggccttc

SEQ ID NO: 75663 - DNA, 20 bp, Homo sapiens
tgtgggccacctcccgccct

SEQ ID NO: 75664 - DNA, 24 bp, Homo sapiens
cacccatcccgggagtgcccggtc

SEQ ID NO: 75665 - DNA, 16 bp, Homo sapiens
gagaagtcatccccct

SEQ ID NO: 75666 - DNA, 23 bp, Homo sapiens
ctggacgggtgggggtggccgaa

SEQ ID NO: 75667 - DNA, 23 bp, Homo sapiens
tgtccaacaagtccaagaagagc

SEQ ID NO: 75668 - DNA, 20 bp, Homo sapiens
gatgtgtccggagtggctga

SEQ ID NO: 75669 - DNA, 22 bp, Homo sapiens
ctaggttaacaggccactgacc

SEQ ID NO: 75670 - DNA, 16 bp, Homo sapiens
agctgcactgaagggg

SEQ ID NO: 75671 - DNA, 16 bp, Homo sapiens
tgggaggaatgttgct

SEQ ID NO: 75672 - DNA, 23 bp, Homo sapiens
gaagcactccgcccctttcttgc

SEQ ID NO: 75673 - DNA, 16 bp, Homo sapiens
attcctggcttcctgg

SEQ ID NO: 75674 - DNA, 17 bp, Homo sapiens
gatcccttccttcttca

SEQ ID NO: 75675 - DNA, 16 bp, Homo sapiens
ctgcaacgcctgtggc

SEQ ID NO: 75676 - DNA, 23 bp, Homo sapiens
cagggcagcagcttcccaagcca

SEQ ID NO: 75677 - DNA, 16 bp, Homo sapiens
tgttgtgcaaattgtc

SEQ ID NO: 75678 - DNA, 24 bp, Homo sapiens
cacaaagcgcagaggtcccctggg

SEQ ID NO: 75679 - DNA, 21 bp, Homo sapiens
gcgtgggagtccagcctgctg

SEQ ID NO: 75680 - DNA, 24 bp, Homo sapiens
acattgtgcagcttgtagtagagg

SEQ ID NO: 75681 - DNA, 16 bp, Homo sapiens
gagctggtggggactg

SEQ ID NO: 75682 - DNA, 16 bp, Homo sapiens
taaggtggtggttgtc

SEQ ID NO: 75683 - DNA, 19 bp, Homo sapiens
ctaaaattccatggttctg

SEQ ID NO: 75684 - DNA, 19 bp, Homo sapiens
gcagcctgaagataaggaa

SEQ ID NO: 75685 - DNA, 30 bp, Homo sapiens
aaaaaatatatttattattcttagcatttt

SEQ ID NO: 75686 - DNA, 22 bp, Homo sapiens
agtgattttaaaaaaatgccct

SEQ ID NO: 75687 - DNA, 19 bp, Homo sapiens
tttcaaaacagcccagcga

SEQ ID NO: 75688 - DNA, 18 bp, Homo sapiens
ctaaaaaaacctgccctt

SEQ ID NO: 75689 - DNA, 21 bp, Homo sapiens
gaatctggccagaaagagaga

SEQ ID NO: 75690 - DNA, 17 bp, Homo sapiens
agatgaatgggcagaac

SEQ ID NO: 75691 - DNA, 22 bp, Homo sapiens
ggatttcaagcggcaaagcgtc

SEQ ID NO: 75692 - DNA, 17 bp, Homo sapiens
tctctggcggcgggacg

SEQ ID NO: 75693 - DNA, 23 bp, Homo sapiens
aaccgccagctcctgcccagcag

SEQ ID NO: 75694 - DNA, 16 bp, Homo sapiens
gtgtctctccctgttc

SEQ ID NO: 75695 - DNA, 22 bp, Homo sapiens
cgcttgggcttgatgagtggtc

SEQ ID NO: 75696 - DNA, 17 bp, Homo sapiens
ggctgctttcctgccct

SEQ ID NO: 75697 - DNA, 24 bp, Homo sapiens
ttgcacaggtagtggccggtgccg

SEQ ID NO: 75698 - DNA, 16 bp, Homo sapiens
aggctgttgcagccag

SEQ ID NO: 75699 - DNA, 22 bp, Homo sapiens
ttcacccctaagcagcgcagca

SEQ ID NO: 75700 - DNA, 23 bp, Homo sapiens
gagcgagacatcacccatcccca

SEQ ID NO: 75701 - DNA, 16 bp, Homo sapiens
acgactacagcagcgg

SEQ ID NO: 75702 - DNA, 21 bp, Homo sapiens
ccccaccacaaaaacgcaaat

SEQ ID NO: 75703 - DNA, 23 bp, Homo sapiens
tatgggcacccagcctgctacac

SEQ ID NO: 75704 - DNA, 21 bp, Homo sapiens
acctgaacaggaacgagcctt

SEQ ID NO: 75705 - DNA, 17 bp, Homo sapiens
agagcatgaagatggaa

SEQ ID NO: 75706 - DNA, 23 bp, Homo sapiens
aggaagcctccggggtggaagag

SEQ ID NO: 75707 - DNA, 20 bp, Homo sapiens
ggggggtagtgcagcccgag

SEQ ID NO: 75708 - DNA, 24 bp, Homo sapiens
taggaggggtaggtggggatgggg

SEQ ID NO: 75709 - DNA, 17 bp, Homo sapiens
ccaaagaagtgtctcct

SEQ ID NO: 75710 - DNA, 17 bp, Homo sapiens
caggggactgccacttt

SEQ ID NO: 75711 - DNA, 24 bp, Homo sapiens
cagtggcctccctcacccctacag

SEQ ID NO: 75712 - DNA, 24 bp, Homo sapiens
acttgacgccgtccttgtcctctc

SEQ ID NO: 75713 - DNA, 23 bp, Homo sapiens
cccactctctgtgtacccagggg

SEQ ID NO: 75714 - DNA, 16 bp, Homo sapiens
gtggtgctagggtcag

SEQ ID NO: 75715 - DNA, 22 bp, Homo sapiens
cgtgagccccttctccaagacg

SEQ ID NO: 75716 - DNA, 24 bp, Homo sapiens
agccgaaaaggtgggagccagagt

SEQ ID NO: 75717 - DNA, 21 bp, Homo sapiens
ctggctggacgggggcaaagc

SEQ ID NO: 75718 - DNA, 24 bp, Homo sapiens
ctcccccgctcccacccccagccc

SEQ ID NO: 75719 - DNA, 18 bp, Homo sapiens
tgaccggaggccagatgt

SEQ ID NO: 75720 - DNA, 20 bp, Homo sapiens
agcagctgaggggtgcagtg

SEQ ID NO: 75721 - DNA, 23 bp, Homo sapiens
tccctagctctgcctaccctgat

SEQ ID NO: 75722 - DNA, 16 bp, Homo sapiens
cagcggcagagagggc

SEQ ID NO: 75723 - DNA, 16 bp, Homo sapiens
ggaggggatgactgct

SEQ ID NO: 75724 - DNA, 20 bp, Homo sapiens
caacaagtgtgggcggcaca

SEQ ID NO: 75725 - DNA, 24 bp, Homo sapiens
aaccccgctcacgcgcgggcgcgc

SEQ ID NO: 75726 - DNA, 24 bp, Homo sapiens
ttcagcagctcgattcctgcggat

SEQ ID NO: 75727 - DNA, 23 bp, Homo sapiens
ctccagacgaggtggacgtcttc

SEQ ID NO: 75728 - DNA, 18 bp, Homo sapiens
cgcctggcgcgcggcgcc

SEQ ID NO: 75729 - DNA, 22 bp, Homo sapiens
cgactcacaccacccgggcctg

SEQ ID NO: 75730 - DNA, 24 bp, Homo sapiens
ccgtgcgcggggctgtaggagacg

SEQ ID NO: 75731 - DNA, 20 bp, Homo sapiens
aggtggcgcccgagcagccg

SEQ ID NO: 75732 - DNA, 18 bp, Homo sapiens
agtcgaggtgattgaaga

SEQ ID NO: 75733 - DNA, 21 bp, Homo sapiens
ccttcctcgcgcagggccgtt

SEQ ID NO: 75734 - DNA, 16 bp, Homo sapiens
atgtagttgtgcgcca

SEQ ID NO: 75735 - DNA, 21 bp, Homo sapiens
gacacctcgtggtgggacttt

SEQ ID NO: 75736 - DNA, 24 bp, Homo sapiens
agcacggccgggtgcgccatccag

SEQ ID NO: 75737 - DNA, 24 bp, Homo sapiens
ctcccacccgggactggtgctctt

SEQ ID NO: 75738 - DNA, 23 bp, Homo sapiens
cgattccctgagctgtgggacgt

SEQ ID NO: 75739 - DNA, 24 bp, Homo sapiens
caatttgcagcacactggcccagt

SEQ ID NO: 75740 - DNA, 23 bp, Homo sapiens
ggttcaggcctttcaggccgcag

SEQ ID NO: 75741 - DNA, 24 bp, Homo sapiens
gccggcgaggggtgacggatgcgc

SEQ ID NO: 75742 - DNA, 17 bp, Homo sapiens
ctgccaccgcgaagagt

SEQ ID NO: 75743 - DNA, 24 bp, Homo sapiens
tgcatgtgtgagccgagtcctggg

SEQ ID NO: 75744 - DNA, 24 bp, Homo sapiens
ctgcccagcccccgaaccccgcct

SEQ ID NO: 75745 - DNA, 24 bp, Homo sapiens
ctcgctccgttcctcttcctgcgg

SEQ ID NO: 75746 - DNA, 23 bp, Homo sapiens
agcaaacaaaaaatgtcagctgc

SEQ ID NO: 75747 - DNA, 23 bp, Homo sapiens
gagagacccgcggctgacagagc

SEQ ID NO: 75748 - DNA, 23 bp, Homo sapiens
gctgactttcagcgggcggaaaa

SEQ ID NO: 75749 - DNA, 23 bp, Homo sapiens
gggccgaccgcggcctccaggcg

SEQ ID NO: 75750 - DNA, 24 bp, Homo sapiens
ctaaccctaactgagaagggcgta

SEQ ID NO: 75751 - DNA, 24 bp, Homo sapiens
ccccgggaggggcgaacgggccag

SEQ ID NO: 75752 - DNA, 16 bp, Homo sapiens
cagcgcaccgggttgc

SEQ ID NO: 75753 - DNA, 20 bp, Homo sapiens
ggaaggcggcaggccgaggc

SEQ ID NO: 75754 - DNA, 16 bp, Homo sapiens
gagagtcagcttggcc

SEQ ID NO: 75755 - DNA, 22 bp, Homo sapiens
ggagcaaaagcacggcgcctac

SEQ ID NO: 75756 - DNA, 19 bp, Homo sapiens
actttaatttcccgttccc

SEQ ID NO: 75757 - DNA, 23 bp, Homo sapiens
cacccctcccaggcccaccctcc

SEQ ID NO: 75758 - DNA, 19 bp, Homo sapiens
ctttattcttagcgcgatt

SEQ ID NO: 75759 - DNA, 18 bp, Homo sapiens
cctatcttcgctccaaag

SEQ ID NO: 75760 - DNA, 24 bp, Homo sapiens
gacgacaatagccttgggcctacc

SEQ ID NO: 75761 - DNA, 17 bp, Homo sapiens
ccggccccggccccatc

SEQ ID NO: 75762 - DNA, 20 bp, Homo sapiens
ctgtcgccgccgccgccgcc

SEQ ID NO: 75763 - DNA, 18 bp, Homo sapiens
cggcagcggcggcagctg

SEQ ID NO: 75764 - DNA, 24 bp, Homo sapiens
ctaaggcggctttggcaccgttgg

SEQ ID NO: 75765 - DNA, 19 bp, Homo sapiens
gaacccggcaagggcggcg

SEQ ID NO: 75766 - DNA, 22 bp, Homo sapiens
gaatccgggatggaggtgatgg

SEQ ID NO: 75767 - DNA, 21 bp, Homo sapiens
aggcggcggcggcgggcccag

SEQ ID NO: 75768 - DNA, 22 bp, Homo sapiens
cccccagccgcagccaggcctc

SEQ ID NO: 75769 - DNA, 24 bp, Homo sapiens
acccggacagcactgggggcccag

SEQ ID NO: 75770 - DNA, 23 bp, Homo sapiens
ggccgccgccgctgctgctgcgc

SEQ ID NO: 75771 - DNA, 22 bp, Homo sapiens
aaaaagtctgactcttccaggg

SEQ ID NO: 75772 - DNA, 22 bp, Homo sapiens
cccgccgcccccggagctccag

SEQ ID NO: 75773 - DNA, 24 bp, Homo sapiens
aagtttcgcaagcaggagcgcgca

SEQ ID NO: 75774 - DNA, 24 bp, Homo sapiens
gctgggggtggggttgggattggg

SEQ ID NO: 75775 - DNA, 22 bp, Homo sapiens
ttcaccgtctctccttccgtct

SEQ ID NO: 75776 - DNA, 18 bp, Homo sapiens
tgctctcgtcgtccctgg

SEQ ID NO: 75777 - DNA, 18 bp, Homo sapiens
agaacttgggccacccta

SEQ ID NO: 75778 - DNA, 23 bp, Homo sapiens
ttggccgcggccgctgcggctgc

SEQ ID NO: 75779 - DNA, 23 bp, Homo sapiens
tggatgtgcgcgcgggggtgatc

SEQ ID NO: 75780 - DNA, 24 bp, Homo sapiens
taagcctctctcgaacgcacagcc

SEQ ID NO: 75781 - DNA, 17 bp, Homo sapiens
ggaggagctggccctga

SEQ ID NO: 75782 - DNA, 22 bp, Homo sapiens
taggtccttctcactcgaggct

SEQ ID NO: 75783 - DNA, 19 bp, Homo sapiens
cccagctcaaagagctgga

SEQ ID NO: 75784 - DNA, 16 bp, Homo sapiens
gaccagtgcggcggag

SEQ ID NO: 75785 - DNA, 23 bp, Homo sapiens
cacggaccacggcggcctcaacg

SEQ ID NO: 75786 - DNA, 16 bp, Homo sapiens
gtgaggtcgatcttca

SEQ ID NO: 75787 - DNA, 18 bp, Homo sapiens
ctgatttgctcactttct

SEQ ID NO: 75788 - DNA, 24 bp, Homo sapiens
tgagtctccgcgaagaccctttcc

SEQ ID NO: 75789 - DNA, 16 bp, Homo sapiens
cgtatgacctgacctt

SEQ ID NO: 75790 - DNA, 19 bp, Homo sapiens
ctgcttgcgcttctcgttg

SEQ ID NO: 75791 - DNA, 17 bp, Homo sapiens
aatttcctcggtttctt

SEQ ID NO: 75792 - DNA, 24 bp, Homo sapiens
tacccctccctgcaatcgcttcta

SEQ ID NO: 75793 - DNA, 16 bp, Homo sapiens
acgccgggatcctgca

SEQ ID NO: 75794 - DNA, 23 bp, Homo sapiens
gtaaatactaaacacatttccat

SEQ ID NO: 75795 - DNA, 16 bp, Homo sapiens
gcttccagtataaccc

SEQ ID NO: 75796 - DNA, 19 bp, Homo sapiens
cggcttcctccgctgagaa

SEQ ID NO: 75797 - DNA, 20 bp, Homo sapiens
gggatggacacctcgagcct

SEQ ID NO: 75798 - DNA, 19 bp, Homo sapiens
gtccctgagggtgcccagg

SEQ ID NO: 75799 - DNA, 23 bp, Homo sapiens
ccttttcaatgtataaaatggaa

SEQ ID NO: 75800 - DNA, 20 bp, Homo sapiens
ccccaaaagtggtccttatc

SEQ ID NO: 75801 - DNA, 24 bp, Homo sapiens
caccttctccatatccatctttta

SEQ ID NO: 75802 - DNA, 24 bp, Homo sapiens
ggaactgaagtcagcataggctga

SEQ ID NO: 75803 - DNA, 23 bp, Homo sapiens
ctggtagtaaggaggccagtttg

SEQ ID NO: 75804 - DNA, 17 bp, Homo sapiens
gcagaggaattgaggta

SEQ ID NO: 75805 - DNA, 17 bp, Homo sapiens
gaaggaagagactggaa

SEQ ID NO: 75806 - DNA, 24 bp, Homo sapiens
tactgagcaaaaaataaataaaaa

SEQ ID NO: 75807 - DNA, 18 bp, Homo sapiens
gcggcgtctgtgtcgcaa

SEQ ID NO: 75808 - DNA, 18 bp, Homo sapiens
ttccagcaattcttgtag

SEQ ID NO: 75809 - DNA, 18 bp, Homo sapiens
ctcgtaagaactactgcg

SEQ ID NO: 75810 - DNA, 18 bp, Homo sapiens
aagcattaacaaccaagg

SEQ ID NO: 75811 - DNA, 19 bp, Homo sapiens
ctgtgttgcccaggctgga

SEQ ID NO: 75812 - DNA, 18 bp, Homo sapiens
caggcagatcatttgagc

SEQ ID NO: 75813 - DNA, 18 bp, Homo sapiens
ctcaagtgatccttccac

SEQ ID NO: 75814 - DNA, 16 bp, Homo sapiens
ctaaagagaggccagg

SEQ ID NO: 75815 - DNA, 20 bp, Homo sapiens
ccaccacgcctggctaaatt

SEQ ID NO: 75816 - DNA, 22 bp, Homo sapiens
gactacaaacatgaaataagaa

SEQ ID NO: 75817 - DNA, 19 bp, Homo sapiens
gactggtcttgaactcctg

SEQ ID NO: 75818 - DNA, 18 bp, Homo sapiens
ctcaaaaccaagtgtctt

SEQ ID NO: 75819 - DNA, 23 bp, Homo sapiens
ggcgtcttactgtttgaaccttg

SEQ ID NO: 75820 - DNA, 17 bp, Homo sapiens
gtgagaagacagcctaa

SEQ ID NO: 75821 - DNA, 18 bp, Homo sapiens
attttctgttgtgcaaaa

SEQ ID NO: 75822 - DNA, 21 bp, Homo sapiens
gcacaaagcttaaaaaaacaa

SEQ ID NO: 75823 - DNA, 18 bp, Homo sapiens
tgctgtttctgttgactt

SEQ ID NO: 75824 - DNA, 24 bp, Homo sapiens
atagttttctatttcttttcactc

SEQ ID NO: 75825 - DNA, 21 bp, Homo sapiens
tcccatccggcgttcctggtc

SEQ ID NO: 75826 - DNA, 23 bp, Homo sapiens
tgcagtggctgttataatggggg

SEQ ID NO: 75827 - DNA, 19 bp, Homo sapiens
cattttcatttggaaggat

SEQ ID NO: 75828 - DNA, 19 bp, Homo sapiens
tggtcattgttcatctaag

SEQ ID NO: 75829 - DNA, 17 bp, Homo sapiens
ttcactctccccaaagc

SEQ ID NO: 75830 - DNA, 18 bp, Homo sapiens
ctttctgactgcatccta

SEQ ID NO: 75831 - DNA, 22 bp, Homo sapiens
gttttcttcatttctgatttcc

SEQ ID NO: 75832 - DNA, 21 bp, Homo sapiens
ctgccagctttcattaccctc

SEQ ID NO: 75833 - DNA, 17 bp, Homo sapiens
gtgggccgccgaggcac

SEQ ID NO: 75834 - DNA, 17 bp, Homo sapiens
cttttctctgagatgct

SEQ ID NO: 75835 - DNA, 17 bp, Homo sapiens
ctgccttcaagctcatt

SEQ ID NO: 75836 - DNA, 23 bp, Homo sapiens
aagaagagagctccgatgtggaa

SEQ ID NO: 75837 - DNA, 17 bp, Homo sapiens
gaagagaagaagcttgg

SEQ ID NO: 75838 - DNA, 18 bp, Homo sapiens
cggtcttggaagtgagca

SEQ ID NO: 75839 - DNA, 22 bp, Homo sapiens
cccgcaataaatattaattatt

SEQ ID NO: 75840 - DNA, 18 bp, Homo sapiens
accacactcagacagaag

SEQ ID NO: 75841 - DNA, 27 bp, Homo sapiens
atttcttgataatattacaaatgattt

SEQ ID NO: 75842 - DNA, 20 bp, Homo sapiens
ttgtagctgtcatgataact

SEQ ID NO: 75843 - DNA, 21 bp, Homo sapiens
acgatgactaaataatccgtc

SEQ ID NO: 75844 - DNA, 23 bp, Homo sapiens
gaacttcatacctaatatcaata

SEQ ID NO: 75845 - DNA, 16 bp, Homo sapiens
caggagtctcgggatc

SEQ ID NO: 75846 - DNA, 22 bp, Homo sapiens
aaaggtgaaattaatgtctaat

SEQ ID NO: 75847 - DNA, 19 bp, Homo sapiens
ccattaaagccctgtctgc

SEQ ID NO: 75848 - DNA, 23 bp, Homo sapiens
cctttgtacctctaggaatgacg

SEQ ID NO: 75849 - DNA, 17 bp, Homo sapiens
tggtctggaacttcttt

SEQ ID NO: 75850 - DNA, 16 bp, Homo sapiens
ttgtcgcacaactgat

SEQ ID NO: 75851 - DNA, 19 bp, Homo sapiens
tttaaagaaggaaggagat

SEQ ID NO: 75852 - DNA, 22 bp, Homo sapiens
ggtggtacctgcctcctacgac

SEQ ID NO: 75853 - DNA, 22 bp, Homo sapiens
accagtgatgatgatttaaaaa

SEQ ID NO: 75854 - DNA, 16 bp, Homo sapiens
ggccaccgtcaaagga

SEQ ID NO: 75855 - DNA, 19 bp, Homo sapiens
cacagacattgtattagct

SEQ ID NO: 75856 - DNA, 19 bp, Homo sapiens
caatcaagccttgtgagat

SEQ ID NO: 75857 - DNA, 17 bp, Homo sapiens
tttcccctgacttatac

SEQ ID NO: 75858 - DNA, 18 bp, Homo sapiens
tttcagggttttcttaaa

SEQ ID NO: 75859 - DNA, 18 bp, Homo sapiens
cagggtaagtccattgaa

SEQ ID NO: 75860 - DNA, 20 bp, Homo sapiens
ctgtggatttttaggccctt

SEQ ID NO: 75861 - DNA, 17 bp, Homo sapiens
gccctgttgctctgctc

SEQ ID NO: 75862 - DNA, 22 bp, Homo sapiens
ctagaaatggaagctcttaaaa

SEQ ID NO: 75863 - DNA, 19 bp, Homo sapiens
tagagaaactcagtgatgt

SEQ ID NO: 75864 - DNA, 23 bp, Homo sapiens
gtttttaacaatgaggtggttga

SEQ ID NO: 75865 - DNA, 16 bp, Homo sapiens
gagtcctaaaggccat

SEQ ID NO: 75866 - DNA, 23 bp, Homo sapiens
ttccctacacccacacatgtgta

SEQ ID NO: 75867 - DNA, 19 bp, Homo sapiens
tggatgggactttgatttc

SEQ ID NO: 75868 - DNA, 22 bp, Homo sapiens
ataactgctgaacctccattga

SEQ ID NO: 75869 - DNA, 17 bp, Homo sapiens
cgtaatctccactgtct

SEQ ID NO: 75870 - DNA, 20 bp, Homo sapiens
ctaggagcgagctttttaaa

SEQ ID NO: 75871 - DNA, 18 bp, Homo sapiens
cagaaatagtgactttct

SEQ ID NO: 75872 - DNA, 20 bp, Homo sapiens
aaaggcatcacaatgctgga

SEQ ID NO: 75873 - DNA, 16 bp, Homo sapiens
tatggatcccgagcag

SEQ ID NO: 75874 - DNA, 22 bp, Homo sapiens
ggtccccgaggccacggtgaaa

SEQ ID NO: 75875 - DNA, 24 bp, Homo sapiens
gaaggtgggtttgatttcaatgaa

SEQ ID NO: 75876 - DNA, 23 bp, Homo sapiens
gctaccagggaggtcaaagaaat

SEQ ID NO: 75877 - DNA, 18 bp, Homo sapiens
gcacctctacaacaaaat

SEQ ID NO: 75878 - DNA, 21 bp, Homo sapiens
taaaatgtcagttgtccatgc

SEQ ID NO: 75879 - DNA, 21 bp, Homo sapiens
tcaatcagagtcagattgttt

SEQ ID NO: 75880 - DNA, 22 bp, Homo sapiens
aaactcttccctgtacagagaa

SEQ ID NO: 75881 - DNA, 20 bp, Homo sapiens
cagagagtttctttacctta

SEQ ID NO: 75882 - DNA, 18 bp, Homo sapiens
aacctgcatgaagtcaaa

SEQ ID NO: 75883 - DNA, 16 bp, Homo sapiens
cacacacaaacctcag

SEQ ID NO: 75884 - DNA, 21 bp, Homo sapiens
ccaggatatcctggctgaaaa

SEQ ID NO: 75885 - DNA, 17 bp, Homo sapiens
aagcatctcttaactca

SEQ ID NO: 75886 - DNA, 19 bp, Homo sapiens
tggaaaagattcaggaaat

SEQ ID NO: 75887 - DNA, 21 bp, Homo sapiens
tgtgtgcactatatattgaga

SEQ ID NO: 75888 - DNA, 18 bp, Homo sapiens
atggccactgtcttcttc

SEQ ID NO: 75889 - DNA, 24 bp, Homo sapiens
tttactttttacagtaaaaataaa

SEQ ID NO: 75890 - DNA, 18 bp, Homo sapiens
ccttgagttaacagttca

SEQ ID NO: 75891 - DNA, 17 bp, Homo sapiens
acttagctactgcttgt

SEQ ID NO: 75892 - DNA, 19 bp, Homo sapiens
aggctttccttggaagaca

SEQ ID NO: 75893 - DNA, 24 bp, Homo sapiens
attaaagctgatccgtgctaagga

SEQ ID NO: 75894 - DNA, 16 bp, Homo sapiens
actgcttctcccctaa

SEQ ID NO: 75895 - DNA, 19 bp, Homo sapiens
agatgctgtgaagagctat

SEQ ID NO: 75896 - DNA, 21 bp, Homo sapiens
gctaaccatgtgggtctgtct

SEQ ID NO: 75897 - DNA, 17 bp, Homo sapiens
ttgagccatggtgatca

SEQ ID NO: 75898 - DNA, 19 bp, Homo sapiens
ggagtgttttgaatgccat

SEQ ID NO: 75899 - DNA, 17 bp, Homo sapiens
tccactcaatatcagga

SEQ ID NO: 75900 - DNA, 18 bp, Homo sapiens
ctgggacacgagctattc

SEQ ID NO: 75901 - DNA, 17 bp, Homo sapiens
ctgaccacgaaagaaga

SEQ ID NO: 75902 - DNA, 18 bp, Homo sapiens
attctggacttggtcgat

SEQ ID NO: 75903 - DNA, 21 bp, Homo sapiens
aaaccctatcttatagtcaat

SEQ ID NO: 75904 - DNA, 21 bp, Homo sapiens
cacagctgaaggcacgccgct

SEQ ID NO: 75905 - DNA, 19 bp, Homo sapiens
ccttcttctcacagctatt

SEQ ID NO: 75906 - DNA, 18 bp, Homo sapiens
gttttaatgttcatctgc

SEQ ID NO: 75907 - DNA, 19 bp, Homo sapiens
cgtgatgatgtttgagaca

SEQ ID NO: 75908 - DNA, 24 bp, Homo sapiens
agacaaggtcccaactccttgcca

SEQ ID NO: 75909 - DNA, 16 bp, Homo sapiens
ttggcgaaagtcacac

SEQ ID NO: 75910 - DNA, 17 bp, Homo sapiens
ggaattggccctatact

SEQ ID NO: 75911 - DNA, 16 bp, Homo sapiens
ggttctcagctccaag

SEQ ID NO: 75912 - DNA, 24 bp, Homo sapiens
acttcctggactattttggccaac

SEQ ID NO: 75913 - DNA, 18 bp, Homo sapiens
ctcagctgatgagttgtc

SEQ ID NO: 75914 - DNA, 16 bp, Homo sapiens
gtaccgtggagggccg

SEQ ID NO: 75915 - DNA, 20 bp, Homo sapiens
cttgggaccttcatttctat

SEQ ID NO: 75916 - DNA, 16 bp, Homo sapiens
tggctaagaatctcct

SEQ ID NO: 75917 - DNA, 24 bp, Homo sapiens
caaaaaacaaaacaaaataaaaca

SEQ ID NO: 75918 - DNA, 20 bp, Homo sapiens
gtttgagagatggtactgcc

SEQ ID NO: 75919 - DNA, 20 bp, Homo sapiens
gatgatcacaatcaccaaca

SEQ ID NO: 75920 - DNA, 19 bp, Homo sapiens
tgagagattcctggctcag

SEQ ID NO: 75921 - DNA, 23 bp, Homo sapiens
agatctttagttttatgagaaaa

SEQ ID NO: 75922 - DNA, 21 bp, Homo sapiens
ctgccaggaaacttttcattg

SEQ ID NO: 75923 - DNA, 19 bp, Homo sapiens
ctgtgccaagcactgaact

SEQ ID NO: 75924 - DNA, 20 bp, Homo sapiens
cacggtggctgctgcagtcc

SEQ ID NO: 75925 - DNA, 17 bp, Homo sapiens
actggacacagtagagt

SEQ ID NO: 75926 - DNA, 23 bp, Homo sapiens
cctggttgtcatttggaaacagg

SEQ ID NO: 75927 - DNA, 18 bp, Homo sapiens
acaagcatagcaacctag

SEQ ID NO: 75928 - DNA, 19 bp, Homo sapiens
gggctgattgattcaatga

SEQ ID NO: 75929 - DNA, 18 bp, Homo sapiens
ggagtgaacgttgttgga

SEQ ID NO: 75930 - DNA, 18 bp, Homo sapiens
ctcccatcttgagtcata

SEQ ID NO: 75931 - DNA, 22 bp, Homo sapiens
tctggtgcactgggactttggt

SEQ ID NO: 75932 - DNA, 17 bp, Homo sapiens
gagtcttgggaggttac

SEQ ID NO: 75933 - DNA, 16 bp, Homo sapiens
aattcgctggagggtc

SEQ ID NO: 75934 - DNA, 17 bp, Homo sapiens
cacaagctcagatctct

SEQ ID NO: 75935 - DNA, 20 bp, Homo sapiens
atgtggacccgatgcagctg

SEQ ID NO: 75936 - DNA, 18 bp, Homo sapiens
tgtcaagacagaaatgta

SEQ ID NO: 75937 - DNA, 17 bp, Homo sapiens
ttcaaccaccttcccaa

SEQ ID NO: 75938 - DNA, 20 bp, Homo sapiens
ttactccaaacaggaaagac

SEQ ID NO: 75939 - DNA, 24 bp, Homo sapiens
ttacgttttagcatcttcactgca

SEQ ID NO: 75940 - DNA, 18 bp, Homo sapiens
gaaagctgaggaggcgtc

SEQ ID NO: 75941 - DNA, 17 bp, Homo sapiens
atccccatgctcaaaaa

SEQ ID NO: 75942 - DNA, 17 bp, Homo sapiens
gtcttggggtctggagc

SEQ ID NO: 75943 - DNA, 17 bp, Homo sapiens
caggacctagtcctaaa

SEQ ID NO: 75944 - DNA, 19 bp, Homo sapiens
cggtcccaacctgtcatga

SEQ ID NO: 75945 - DNA, 20 bp, Homo sapiens
ctgaggccaagtagctatct

SEQ ID NO: 75946 - DNA, 16 bp, Homo sapiens
gtggccccaggtgagt

SEQ ID NO: 75947 - DNA, 24 bp, Homo sapiens
caggattagtcatattcttggttt

SEQ ID NO: 75948 - DNA, 16 bp, Homo sapiens
ccaggtcagtgagccc

SEQ ID NO: 75949 - DNA, 23 bp, Homo sapiens
atatgtgatttattctttcaaca

SEQ ID NO: 75950 - DNA, 21 bp, Homo sapiens
gagtggaggatttaagcctga

SEQ ID NO: 75951 - DNA, 18 bp, Homo sapiens
ctgaagataatgactcac

SEQ ID NO: 75952 - DNA, 16 bp, Homo sapiens
agggaccagtcagctc

SEQ ID NO: 75953 - DNA, 20 bp, Homo sapiens
gagcctgcaccaagtcaggt

SEQ ID NO: 75954 - DNA, 19 bp, Homo sapiens
agcaatactctgtgatgat

SEQ ID NO: 75955 - DNA, 16 bp, Homo sapiens
ggtggctcaggaagct

SEQ ID NO: 75956 - DNA, 23 bp, Homo sapiens
atggtctgcaggacaattcatgg

SEQ ID NO: 75957 - DNA, 17 bp, Homo sapiens
gctttcatcagcagggt

SEQ ID NO: 75958 - DNA, 21 bp, Homo sapiens
ttttgtccccataggccccat

SEQ ID NO: 75959 - DNA, 18 bp, Homo sapiens
tttgtgatgcctgtaaga

SEQ ID NO: 75960 - DNA, 22 bp, Homo sapiens
atttgcataagaatagggatag

SEQ ID NO: 75961 - DNA, 16 bp, Homo sapiens
gctaccttgggcactg

SEQ ID NO: 75962 - DNA, 24 bp, Homo sapiens
gaaagagctggatatctttggatt

SEQ ID NO: 75963 - DNA, 23 bp, Homo sapiens
tagacatcatgcatctctctgca

SEQ ID NO: 75964 - DNA, 20 bp, Homo sapiens
gctcatttccttgactagat

SEQ ID NO: 75965 - DNA, 20 bp, Homo sapiens
gcttcatgtccatgtagtca

SEQ ID NO: 75966 - DNA, 19 bp, Homo sapiens
cagttagctcccatgccta

SEQ ID NO: 75967 - DNA, 22 bp, Homo sapiens
atatttagaaacctctttcctt

SEQ ID NO: 75968 - DNA, 20 bp, Homo sapiens
atgaccacttcagaagggca

SEQ ID NO: 75969 - DNA, 25 bp, Homo sapiens
cttttacctaacatagatttcttct

SEQ ID NO: 75970 - DNA, 22 bp, Homo sapiens
ttatcttttgaaaacaatggtg

SEQ ID NO: 75971 - DNA, 22 bp, Homo sapiens
taagtatcatattaaaccactg

SEQ ID NO: 75972 - DNA, 20 bp, Homo sapiens
gtatgtccccatgctagaaa

SEQ ID NO: 75973 - DNA, 16 bp, Homo sapiens
agagaccacgtgggct

SEQ ID NO: 75974 - DNA, 23 bp, Homo sapiens
actctatgatcgtccagcctcat

SEQ ID NO: 75975 - DNA, 24 bp, Homo sapiens
aagctcagtacacaatattttcca

SEQ ID NO: 75976 - DNA, 16 bp, Homo sapiens
catgactcaggttcct

SEQ ID NO: 75977 - DNA, 24 bp, Homo sapiens
gggtgaacttccaagcgcttttaa

SEQ ID NO: 75978 - DNA, 18 bp, Homo sapiens
tttcagatagtcacggaa

SEQ ID NO: 75979 - DNA, 17 bp, Homo sapiens
ctcccctcccatattgt

SEQ ID NO: 75980 - DNA, 21 bp, Homo sapiens
gaagttctcaattctttttga

SEQ ID NO: 75981 - DNA, 16 bp, Homo sapiens
gagatgtcagaggaac

SEQ ID NO: 75982 - DNA, 18 bp, Homo sapiens
tagtcccatctggaaggg

SEQ ID NO: 75983 - DNA, 19 bp, Homo sapiens
cagaccactgctttctggc

SEQ ID NO: 75984 - DNA, 23 bp, Homo sapiens
tctaagatagaatctttgcatag

SEQ ID NO: 75985 - DNA, 16 bp, Homo sapiens
aaagtaaggccttctg

SEQ ID NO: 75986 - DNA, 24 bp, Homo sapiens
attaagaaaatatttttggatgtg

SEQ ID NO: 75987 - DNA, 19 bp, Homo sapiens
tttttgaagccaaaaactc

SEQ ID NO: 75988 - DNA, 20 bp, Homo sapiens
cctgctgcctgccagcacca

SEQ ID NO: 75989 - DNA, 17 bp, Homo sapiens
tccacactccactcact

SEQ ID NO: 75990 - DNA, 19 bp, Homo sapiens
cctcctttcagatgataac

SEQ ID NO: 75991 - DNA, 16 bp, Homo sapiens
taagtaagaggcccct

SEQ ID NO: 75992 - DNA, 22 bp, Homo sapiens
aagttgcccgaggaatggagtt

SEQ ID NO: 75993 - DNA, 24 bp, Homo sapiens
ctgttgggagtgggtggagtgaga

SEQ ID NO: 75994 - DNA, 20 bp, Homo sapiens
tcacagatcttcacaatttt

SEQ ID NO: 75995 - DNA, 22 bp, Homo sapiens
ccaagtgccaccatggatcagc

SEQ ID NO: 75996 - DNA, 16 bp, Homo sapiens
tgcctttcgacacata

SEQ ID NO: 75997 - DNA, 19 bp, Homo sapiens
atcctgagtcatttcttcc

SEQ ID NO: 75998 - DNA, 21 bp, Homo sapiens
cctgactttagagattaaagt

SEQ ID NO: 75999 - DNA, 16 bp, Homo sapiens
ctcctggcacaaggaa

SEQ ID NO: 76000 - DNA, 20 bp, Homo sapiens
ctgaccccttgaaatctatt

SEQ ID NO: 76001 - DNA, 24 bp, Homo sapiens
agacatcatgcatgattcgaacta

SEQ ID NO: 76002 - DNA, 23 bp, Homo sapiens
gagttcagtaatgaacaaaacac

SEQ ID NO: 76003 - DNA, 18 bp, Homo sapiens
cactcagtgtggtgtaga

SEQ ID NO: 76004 - DNA, 22 bp, Homo sapiens
aagttattaagagcccaagggg

SEQ ID NO: 76005 - DNA, 16 bp, Homo sapiens
gcccataccaagggaa

SEQ ID NO: 76006 - DNA, 21 bp, Homo sapiens
tgggtttaactgtctccctcc

SEQ ID NO: 76007 - DNA, 18 bp, Homo sapiens
ggcttgaaagaacacatt

SEQ ID NO: 76008 - DNA, 19 bp, Homo sapiens
cctgagagcatctttgaca

SEQ ID NO: 76009 - DNA, 16 bp, Homo sapiens
ggctgcagcatactgg

SEQ ID NO: 76010 - DNA, 19 bp, Homo sapiens
ctctgggagatcttttccc

SEQ ID NO: 76011 - DNA, 24 bp, Homo sapiens
ggtttgagctggtctctgaagtca

SEQ ID NO: 76012 - DNA, 25 bp, Homo sapiens
gatcttattgtagaaagtagaatcc

SEQ ID NO: 76013 - DNA, 24 bp, Homo sapiens
gtgcttcaaggctataggatctga

SEQ ID NO: 76014 - DNA, 22 bp, Homo sapiens
tggggaaggagctcacacttca

SEQ ID NO: 76015 - DNA, 24 bp, Homo sapiens
cagcaatgcactgagcgtttgtta

SEQ ID NO: 76016 - DNA, 18 bp, Homo sapiens
cagggcccctccctcccc

SEQ ID NO: 76017 - DNA, 21 bp, Homo sapiens
ccccggcatgatggtggattc

SEQ ID NO: 76018 - DNA, 17 bp, Homo sapiens
ttcaccatgatctcgta

SEQ ID NO: 76019 - DNA, 19 bp, Homo sapiens
aagcctgaccacgctacca

SEQ ID NO: 76020 - DNA, 17 bp, Homo sapiens
acaatctcactcaggtg

SEQ ID NO: 76021 - DNA, 17 bp, Homo sapiens
ttcacagtctgtgggtc

SEQ ID NO: 76022 - DNA, 23 bp, Homo sapiens
tatccagacctttccacccacag

SEQ ID NO: 76023 - DNA, 20 bp, Homo sapiens
ctcttgagttctgtccccac

SEQ ID NO: 76024 - DNA, 17 bp, Homo sapiens
tttgaaaatgctcctct

SEQ ID NO: 76025 - DNA, 22 bp, Homo sapiens
gaagagaccctccttttaccac

SEQ ID NO: 76026 - DNA, 18 bp, Homo sapiens
ctcgtggagcaccgccat

SEQ ID NO: 76027 - DNA, 17 bp, Homo sapiens
tctatgtctctggggat

SEQ ID NO: 76028 - DNA, 17 bp, Homo sapiens
gtcactcttcaggaagt

SEQ ID NO: 76029 - DNA, 24 bp, Homo sapiens
cacatcttccaggtagtttggaga

SEQ ID NO: 76030 - DNA, 19 bp, Homo sapiens
ctcgtttttgtaggtgaca

SEQ ID NO: 76031 - DNA, 22 bp, Homo sapiens
attcatttttgaggtttggttg

SEQ ID NO: 76032 - DNA, 16 bp, Homo sapiens
gcgctcagtctctgct

SEQ ID NO: 76033 - DNA, 18 bp, Homo sapiens
aaaaattcacctggactt

SEQ ID NO: 76034 - DNA, 16 bp, Homo sapiens
tcctcctcctcaggga

SEQ ID NO: 76035 - DNA, 20 bp, Homo sapiens
gactcagacaatgcatacat

SEQ ID NO: 76036 - DNA, 16 bp, Homo sapiens
ggaggggaaaggtgag

SEQ ID NO: 76037 - DNA, 16 bp, Homo sapiens
ggtggtctggatgagc

SEQ ID NO: 76038 - DNA, 23 bp, Homo sapiens
catatttaccaaccgggagtgca

SEQ ID NO: 76039 - DNA, 18 bp, Homo sapiens
acattgaccctgtccctg

SEQ ID NO: 76040 - DNA, 18 bp, Homo sapiens
ggaagcattttcaaaacc

SEQ ID NO: 76041 - DNA, 19 bp, Homo sapiens
ctaccacagcatgtcaggc

SEQ ID NO: 76042 - DNA, 17 bp, Homo sapiens
tctcttgatgaaggtgg

SEQ ID NO: 76043 - DNA, 18 bp, Homo sapiens
atgccaaaggctttcgtt

SEQ ID NO: 76044 - DNA, 17 bp, Homo sapiens
gtctgaagagtctatgc

SEQ ID NO: 76045 - DNA, 23 bp, Homo sapiens
ggagttgtaatatttgctcttct

SEQ ID NO: 76046 - DNA, 20 bp, Homo sapiens
gaggtggccccagaagtgga

SEQ ID NO: 76047 - DNA, 16 bp, Homo sapiens
gggttccagcagttcc

SEQ ID NO: 76048 - DNA, 16 bp, Homo sapiens
cctcctctcaacctct

SEQ ID NO: 76049 - DNA, 22 bp, Homo sapiens
cgacatgatggatgacatcggc

SEQ ID NO: 76050 - DNA, 20 bp, Homo sapiens
ttcattcatatttagaacgc

SEQ ID NO: 76051 - DNA, 22 bp, Homo sapiens
gaggaggggcgtggccggcgcg

SEQ ID NO: 76052 - DNA, 24 bp, Homo sapiens
cctgtctggacgcgaagcagtagg

SEQ ID NO: 76053 - DNA, 24 bp, Homo sapiens
tcgcggctctgggggctcggcttt

SEQ ID NO: 76054 - DNA, 16 bp, Homo sapiens
cacaggcttcgccgag

SEQ ID NO: 76055 - DNA, 24 bp, Homo sapiens
gaacgtggaccagagctcggatcc

SEQ ID NO: 76056 - DNA, 24 bp, Homo sapiens
gaacgcacgggcactgagggcccg

SEQ ID NO: 76057 - DNA, 24 bp, Homo sapiens
gattttctctgcgttctgctccta

SEQ ID NO: 76058 - DNA, 23 bp, Homo sapiens
tttatagatgaacttaagacatt

SEQ ID NO: 76059 - DNA, 16 bp, Homo sapiens
gttcccctggactcac

SEQ ID NO: 76060 - DNA, 20 bp, Homo sapiens
gcagggcagctttgtcctat

SEQ ID NO: 76061 - DNA, 19 bp, Homo sapiens
taatctcgtcgcccacgcg

SEQ ID NO: 76062 - DNA, 22 bp, Homo sapiens
ggaagaagtgctttatttcgcc

SEQ ID NO: 76063 - DNA, 19 bp, Homo sapiens
ctcattcgtttcatccagg

SEQ ID NO: 76064 - DNA, 22 bp, Homo sapiens
tggcaggctcttctcaaccatc

SEQ ID NO: 76065 - DNA, 17 bp, Homo sapiens
tatttgccggtgttggt

SEQ ID NO: 76066 - DNA, 19 bp, Homo sapiens
cagacttaatagtccgcgt

SEQ ID NO: 76067 - DNA, 18 bp, Homo sapiens
ttacctctaacaaacaca

SEQ ID NO: 76068 - DNA, 24 bp, Homo sapiens
gggctttgtcaaatggacttttga

SEQ ID NO: 76069 - DNA, 21 bp, Homo sapiens
atccaaaattaagagcaggat

SEQ ID NO: 76070 - DNA, 16 bp, Homo sapiens
aaaaggcagaagccac

SEQ ID NO: 76071 - DNA, 21 bp, Homo sapiens
gttttaggccttctagaccca

SEQ ID NO: 76072 - DNA, 22 bp, Homo sapiens
ggcttaagcaattccatttatg

SEQ ID NO: 76073 - DNA, 17 bp, Homo sapiens
cccatacaaggagcggt

SEQ ID NO: 76074 - DNA, 24 bp, Homo sapiens
cagaaaaaagcagccatttgggcc

SEQ ID NO: 76075 - DNA, 16 bp, Homo sapiens
ttggtcacttctgggt

SEQ ID NO: 76076 - DNA, 24 bp, Homo sapiens
aaagtgttttcagtgtctgtgacc

SEQ ID NO: 76077 - DNA, 17 bp, Homo sapiens
tggggtcaggaataaac

SEQ ID NO: 76078 - DNA, 18 bp, Homo sapiens
ccaagcttttccttgttg

SEQ ID NO: 76079 - DNA, 16 bp, Homo sapiens
atgcagacagagccga

SEQ ID NO: 76080 - DNA, 17 bp, Homo sapiens
tcctctcacagacccag

SEQ ID NO: 76081 - DNA, 16 bp, Homo sapiens
tggcctcactttcagg

SEQ ID NO: 76082 - DNA, 18 bp, Homo sapiens
ctcttcccaaggacttga

SEQ ID NO: 76083 - DNA, 20 bp, Homo sapiens
aagagaagtcttctttagat

SEQ ID NO: 76084 - DNA, 19 bp, Homo sapiens
gtgtgaaacgcgcctacca

SEQ ID NO: 76085 - DNA, 17 bp, Homo sapiens
gggaactatgaacagct

SEQ ID NO: 76086 - DNA, 19 bp, Homo sapiens
tcagtgctgtcggaaaaat

SEQ ID NO: 76087 - DNA, 17 bp, Homo sapiens
gcttgctttggacacag

SEQ ID NO: 76088 - DNA, 24 bp, Homo sapiens
gtattttatttaaaagatgacaaa

SEQ ID NO: 76089 - DNA, 24 bp, Homo sapiens
cagaactagacacatcttttattg

SEQ ID NO: 76090 - DNA, 25 bp, Homo sapiens
aaatttcatgctataatacaaatta

SEQ ID NO: 76091 - DNA, 19 bp, Homo sapiens
gagaagaatgaagcgattc

SEQ ID NO: 76092 - DNA, 19 bp, Homo sapiens
caaagctgtgcctgttgtg

SEQ ID NO: 76093 - DNA, 18 bp, Homo sapiens
agtttcaggacagactct

SEQ ID NO: 76094 - DNA, 23 bp, Homo sapiens
aagaattcacagtgacgtgcaca

SEQ ID NO: 76095 - DNA, 16 bp, Homo sapiens
atgcaatcccaacact

SEQ ID NO: 76096 - DNA, 17 bp, Homo sapiens
gacttgtcatgatgctt

SEQ ID NO: 76097 - DNA, 19 bp, Homo sapiens
gcctgacgttcataattga

SEQ ID NO: 76098 - DNA, 21 bp, Homo sapiens
tggagaagttaattgctgcta

SEQ ID NO: 76099 - DNA, 17 bp, Homo sapiens
aacacatgaacactcca

SEQ ID NO: 76100 - DNA, 20 bp, Homo sapiens
atcttcatttttttttctcc

SEQ ID NO: 76101 - DNA, 19 bp, Homo sapiens
tagaggtatttacctacta

SEQ ID NO: 76102 - DNA, 17 bp, Homo sapiens
aatagctggcatcacgg

SEQ ID NO: 76103 - DNA, 22 bp, Homo sapiens
taaaaaagaaactgtctaataa

SEQ ID NO: 76104 - DNA, 20 bp, Homo sapiens
agcgagagttaatgattctg

SEQ ID NO: 76105 - DNA, 24 bp, Homo sapiens
tttcattcattcagtgataacaaa

SEQ ID NO: 76106 - DNA, 21 bp, Homo sapiens
tgtcacaacaaccttggaagt

SEQ ID NO: 76107 - DNA, 24 bp, Homo sapiens
tctacaagagcaaaataaaatgaa

SEQ ID NO: 76108 - DNA, 20 bp, Homo sapiens
ccatcgtttacaaatactgt

SEQ ID NO: 76109 - DNA, 18 bp, Homo sapiens
tcaaccaattgtttttgt

SEQ ID NO: 76110 - DNA, 17 bp, Homo sapiens
ctggtgttcaggtttgg

SEQ ID NO: 76111 - DNA, 22 bp, Homo sapiens
agttgtagataatggtttcttt

SEQ ID NO: 76112 - DNA, 17 bp, Homo sapiens
tcattctcagacttggg

SEQ ID NO: 76113 - DNA, 18 bp, Homo sapiens
tcttccccatgataaaca

SEQ ID NO: 76114 - DNA, 17 bp, Homo sapiens
tggaaaagggggtaatg

SEQ ID NO: 76115 - DNA, 17 bp, Homo sapiens
atatgaagcattcccca

SEQ ID NO: 76116 - DNA, 16 bp, Homo sapiens
aggtatcttctcgtgg

SEQ ID NO: 76117 - DNA, 24 bp, Homo sapiens
aaccttcactgataaatgggaaga

SEQ ID NO: 76118 - DNA, 17 bp, Homo sapiens
acacacaacaaaatgga

SEQ ID NO: 76119 - DNA, 21 bp, Homo sapiens
cggtgccttttaatctcgtta

SEQ ID NO: 76120 - DNA, 25 bp, Homo sapiens
cttactgaattaaatgagttatatt

SEQ ID NO: 76121 - DNA, 17 bp, Homo sapiens
atggcagcattgacgtc

SEQ ID NO: 76122 - DNA, 16 bp, Homo sapiens
acatgccttccaaggc

SEQ ID NO: 76123 - DNA, 22 bp, Homo sapiens
aaaagaataaaaaattaaaagg

SEQ ID NO: 76124 - DNA, 22 bp, Homo sapiens
ttgtagatacgtaagtgaactt

SEQ ID NO: 76125 - DNA, 21 bp, Homo sapiens
cgttatttacatagtacacaa

SEQ ID NO: 76126 - DNA, 19 bp, Homo sapiens
tcctagtgtccaattctga

SEQ ID NO: 76127 - DNA, 18 bp, Homo sapiens
cacactctaaccaccaaa

SEQ ID NO: 76128 - DNA, 19 bp, Homo sapiens
ctccttgtaccttccactc

SEQ ID NO: 76129 - DNA, 16 bp, Homo sapiens
gagcatgccattcacg

SEQ ID NO: 76130 - DNA, 20 bp, Homo sapiens
ggctactcagcagcctcagg

SEQ ID NO: 76131 - DNA, 18 bp, Homo sapiens
tcagttcctggacaaaaa

SEQ ID NO: 76132 - DNA, 17 bp, Homo sapiens
ttccagcactctgacat

SEQ ID NO: 76133 - DNA, 17 bp, Homo sapiens
aattgcagtccttcccc

SEQ ID NO: 76134 - DNA, 16 bp, Homo sapiens
acgacaggctcgtgaa

SEQ ID NO: 76135 - DNA, 22 bp, Homo sapiens
aaaaacaataatcaaaacaaag

SEQ ID NO: 76136 - DNA, 20 bp, Homo sapiens
gagcccacaatagattggta

SEQ ID NO: 76137 - DNA, 18 bp, Homo sapiens
ctgcacatccactggcag

SEQ ID NO: 76138 - DNA, 24 bp, Homo sapiens
gtaaaaggacattttctgttgatt

SEQ ID NO: 76139 - DNA, 18 bp, Homo sapiens
tgcactagaatctataga

SEQ ID NO: 76140 - DNA, 23 bp, Homo sapiens
cccaagtgttttatgtatttatt

SEQ ID NO: 76141 - DNA, 16 bp, Homo sapiens
tcttgcccacatcgtt

SEQ ID NO: 76142 - DNA, 17 bp, Homo sapiens
ctgcttctgtactgcca

SEQ ID NO: 76143 - DNA, 24 bp, Homo sapiens
cccttaaattggattaaaaagaaa

SEQ ID NO: 76144 - DNA, 21 bp, Homo sapiens
ccgtttggaaagctagtggtt

SEQ ID NO: 76145 - DNA, 19 bp, Homo sapiens
gttggaatgaacttaaaat

SEQ ID NO: 76146 - DNA, 18 bp, Homo sapiens
atgtaaggcttacaacga

SEQ ID NO: 76147 - DNA, 18 bp, Homo sapiens
tagtgagtttgatgacag

SEQ ID NO: 76148 - DNA, 18 bp, Homo sapiens
aaggtaacaacaaaggta

SEQ ID NO: 76149 - DNA, 20 bp, Homo sapiens
ttcatttgaataacaagagt

SEQ ID NO: 76150 - DNA, 17 bp, Homo sapiens
cagcaaaggagtgaaca

SEQ ID NO: 76151 - DNA, 19 bp, Homo sapiens
catcctgccatgggctgtg

SEQ ID NO: 76152 - DNA, 19 bp, Homo sapiens
ttgtaggtcagaatcatca

SEQ ID NO: 76153 - DNA, 20 bp, Homo sapiens
tagagatcccatcctgccaa

SEQ ID NO: 76154 - DNA, 23 bp, Homo sapiens
ataattattgtctcagtcattag

SEQ ID NO: 76155 - DNA, 19 bp, Homo sapiens
caaatccatccccacaccc

SEQ ID NO: 76156 - DNA, 19 bp, Homo sapiens
ttccactgtacttcataca

SEQ ID NO: 76157 - DNA, 21 bp, Homo sapiens
gcatgatgtgcattattgtga

SEQ ID NO: 76158 - DNA, 21 bp, Homo sapiens
atcataaggaagttgtgttgg

SEQ ID NO: 76159 - DNA, 22 bp, Homo sapiens
ttgttctctctccagagtgctc

SEQ ID NO: 76160 - DNA, 19 bp, Homo sapiens
cctgtttcatactgaccaa

SEQ ID NO: 76161 - DNA, 22 bp, Homo sapiens
tttccctttctccccacagaaa

SEQ ID NO: 76162 - DNA, 17 bp, Homo sapiens
ccactggagttccttaa

SEQ ID NO: 76163 - DNA, 20 bp, Homo sapiens
tggaaacaattatgtttaca

SEQ ID NO: 76164 - DNA, 16 bp, Homo sapiens
aaaaggggcgcaattt

SEQ ID NO: 76165 - DNA, 20 bp, Homo sapiens
tcccagaaacaggctgagtt

SEQ ID NO: 76166 - DNA, 18 bp, Homo sapiens
accttcccgaaagctcca

SEQ ID NO: 76167 - DNA, 17 bp, Homo sapiens
tgtctctggacaacatt

SEQ ID NO: 76168 - DNA, 16 bp, Homo sapiens
tacagcgacagtcatg

SEQ ID NO: 76169 - DNA, 16 bp, Homo sapiens
gtccttcaattccacc

SEQ ID NO: 76170 - DNA, 16 bp, Homo sapiens
actggcaaactgatgt

SEQ ID NO: 76171 - DNA, 17 bp, Homo sapiens
gggaaaaccctgggtgc

SEQ ID NO: 76172 - DNA, 17 bp, Homo sapiens
ttcccgttctgtcaaat

SEQ ID NO: 76173 - DNA, 18 bp, Homo sapiens
aattaagtcagatgcggc

SEQ ID NO: 76174 - DNA, 24 bp, Homo sapiens
gtagattcacaatattcatgtgat

SEQ ID NO: 76175 - DNA, 22 bp, Homo sapiens
gtatggtactgcatgcgcttga

SEQ ID NO: 76176 - DNA, 18 bp, Homo sapiens
acagacaataaaaggcag

SEQ ID NO: 76177 - DNA, 16 bp, Homo sapiens
ttagcgagtgcccatt

SEQ ID NO: 76178 - DNA, 19 bp, Homo sapiens
tccaagcagtttataatct

SEQ ID NO: 76179 - DNA, 21 bp, Homo sapiens
cctgagttaccttggtaatca

SEQ ID NO: 76180 - DNA, 20 bp, Homo sapiens
ttcttaagaacaatgaggaa

SEQ ID NO: 76181 - DNA, 24 bp, Homo sapiens
ataaggctgcttttttgataagca

SEQ ID NO: 76182 - DNA, 21 bp, Homo sapiens
attcaaaagatcaccatagca

SEQ ID NO: 76183 - DNA, 19 bp, Homo sapiens
tgatccactgaagctgaat

SEQ ID NO: 76184 - DNA, 17 bp, Homo sapiens
gcatgatcttcctgctt

SEQ ID NO: 76185 - DNA, 23 bp, Homo sapiens
taatctatatatctcaccttctt

SEQ ID NO: 76186 - DNA, 19 bp, Homo sapiens
aaatcagtcttaccaggaa

SEQ ID NO: 76187 - DNA, 21 bp, Homo sapiens
accctggtcattacagaatat

SEQ ID NO: 76188 - DNA, 17 bp, Homo sapiens
agccttgattgcaaacc

SEQ ID NO: 76189 - DNA, 21 bp, Homo sapiens
ttcatttatttgttcaaagca

SEQ ID NO: 76190 - DNA, 25 bp, Homo sapiens
taaatgatttaataattttgatttc

SEQ ID NO: 76191 - DNA, 16 bp, Homo sapiens
gcattcaaaggagtct

SEQ ID NO: 76192 - DNA, 22 bp, Homo sapiens
aaaactcatttcttacagaaca

SEQ ID NO: 76193 - DNA, 18 bp, Homo sapiens
ctccaggtttcatgtcca

SEQ ID NO: 76194 - DNA, 23 bp, Homo sapiens
tttcctcaaattggtccagtcta

SEQ ID NO: 76195 - DNA, 18 bp, Homo sapiens
ctcacctattctcacaga

SEQ ID NO: 76196 - DNA, 19 bp, Homo sapiens
atgagtgcccttctacatg

SEQ ID NO: 76197 - DNA, 22 bp, Homo sapiens
atattccacattagcatgatat

SEQ ID NO: 76198 - DNA, 20 bp, Homo sapiens
gcagcgatagtactaatgag

SEQ ID NO: 76199 - DNA, 19 bp, Homo sapiens
gcactgctaccataaagca

SEQ ID NO: 76200 - DNA, 23 bp, Homo sapiens
accaaggccgacaaaaggagatc

SEQ ID NO: 76201 - DNA, 16 bp, Homo sapiens
tggcgggagtcacatc

SEQ ID NO: 76202 - DNA, 23 bp, Homo sapiens
aagtgatctgcctgcaagttcac

SEQ ID NO: 76203 - DNA, 18 bp, Homo sapiens
cacctggtaagaaaagct

SEQ ID NO: 76204 - DNA, 23 bp, Homo sapiens
cactgtcttttcctttcctgacc

SEQ ID NO: 76205 - DNA, 19 bp, Homo sapiens
cacaaaactctttagagaa

SEQ ID NO: 76206 - DNA, 21 bp, Homo sapiens
caggctcatacatagaaagag

SEQ ID NO: 76207 - DNA, 18 bp, Homo sapiens
aaatgctctgttctcaaa

SEQ ID NO: 76208 - DNA, 16 bp, Homo sapiens
gaagacttgctgagct

SEQ ID NO: 76209 - DNA, 24 bp, Homo sapiens
aactaaatttcctctgcttttggt

SEQ ID NO: 76210 - DNA, 24 bp, Homo sapiens
ggcgtacttttgatttttattttt

SEQ ID NO: 76211 - DNA, 17 bp, Homo sapiens
ctttgtgatccgaccat

SEQ ID NO: 76212 - DNA, 25 bp, Homo sapiens
tttttataatataagcaacactata

SEQ ID NO: 76213 - DNA, 19 bp, Homo sapiens
cacgtttcctttaaccaca

SEQ ID NO: 76214 - DNA, 22 bp, Homo sapiens
ttaaatggttttcttttctcct

SEQ ID NO: 76215 - DNA, 20 bp, Homo sapiens
aatttttatcgaaagttgaa

SEQ ID NO: 76216 - DNA, 16 bp, Homo sapiens
ctccttactcatggtc

SEQ ID NO: 76217 - DNA, 22 bp, Homo sapiens
taaaatgtgtgatatccctaga

SEQ ID NO: 76218 - DNA, 23 bp, Homo sapiens
agacatcaagaatgattctaatt

SEQ ID NO: 76219 - DNA, 23 bp, Homo sapiens
tgggatcatctgagttcatatag

SEQ ID NO: 76220 - DNA, 16 bp, Homo sapiens
aacgtgtatacacagt

SEQ ID NO: 76221 - DNA, 21 bp, Homo sapiens
cacatttcagcaacagcagca

SEQ ID NO: 76222 - DNA, 22 bp, Homo sapiens
gcaaggatcattttacctaaag

SEQ ID NO: 76223 - DNA, 16 bp, Homo sapiens
attgactctgttgtgc

SEQ ID NO: 76224 - DNA, 18 bp, Homo sapiens
ggacaccaatgaaacttc

SEQ ID NO: 76225 - DNA, 19 bp, Homo sapiens
cctgaaagcattttcaact

SEQ ID NO: 76226 - DNA, 16 bp, Homo sapiens
caggataggggctgct

SEQ ID NO: 76227 - DNA, 18 bp, Homo sapiens
ctttgggagctgttctct

SEQ ID NO: 76228 - DNA, 16 bp, Homo sapiens
ctgagcatccggaagc

SEQ ID NO: 76229 - DNA, 20 bp, Homo sapiens
tagactcagagcatcttctt

SEQ ID NO: 76230 - DNA, 16 bp, Homo sapiens
aaacgtgacctaaagg

SEQ ID NO: 76231 - DNA, 18 bp, Homo sapiens
aaactgtgtctcaggaag

SEQ ID NO: 76232 - DNA, 19 bp, Homo sapiens
aaactgtgttatgaaaacc

SEQ ID NO: 76233 - DNA, 18 bp, Homo sapiens
agatgatcaaggaaggct

SEQ ID NO: 76234 - DNA, 23 bp, Homo sapiens
agattatgaaaataaactacaga

SEQ ID NO: 76235 - DNA, 24 bp, Homo sapiens
aatacagaaagtttcagtaatatt

SEQ ID NO: 76236 - DNA, 17 bp, Homo sapiens
ttttaggggatctgcat

SEQ ID NO: 76237 - DNA, 17 bp, Homo sapiens
atgtccagttgcatagc

SEQ ID NO: 76238 - DNA, 18 bp, Homo sapiens
tgattggtgctctctgaa

SEQ ID NO: 76239 - DNA, 22 bp, Homo sapiens
tttgaaaacaagctgagggcat

SEQ ID NO: 76240 - DNA, 16 bp, Homo sapiens
ggacacacctggaact

SEQ ID NO: 76241 - DNA, 23 bp, Homo sapiens
taatgaagacttgctgggatgca

SEQ ID NO: 76242 - DNA, 20 bp, Homo sapiens
tgcaacctaagattaggaga

SEQ ID NO: 76243 - DNA, 18 bp, Homo sapiens
aattgagaagcagatttc

SEQ ID NO: 76244 - DNA, 23 bp, Homo sapiens
gtcagtatgacttgggttttggc

SEQ ID NO: 76245 - DNA, 17 bp, Homo sapiens
cacagaatggtctacca

SEQ ID NO: 76246 - DNA, 24 bp, Homo sapiens
atcagttagttgtgatcttgacac

SEQ ID NO: 76247 - DNA, 16 bp, Homo sapiens
tcgtcgtgcacaagca

SEQ ID NO: 76248 - DNA, 17 bp, Homo sapiens
actgctgtattgactat

SEQ ID NO: 76249 - DNA, 17 bp, Homo sapiens
tggaagccaaaagaaga

SEQ ID NO: 76250 - DNA, 17 bp, Homo sapiens
ccccaaccgacagaagc

SEQ ID NO: 76251 - DNA, 16 bp, Homo sapiens
agtggggtgcccacta

SEQ ID NO: 76252 - DNA, 20 bp, Homo sapiens
caccgcttcctcctcccagc

SEQ ID NO: 76253 - DNA, 24 bp, Homo sapiens
caggcgccgagcgctcagcagccg

SEQ ID NO: 76254 - DNA, 16 bp, Homo sapiens
ccggcgtggtgcgcag

SEQ ID NO: 76255 - DNA, 22 bp, Homo sapiens
ccccgcctgccccgccccggtc

SEQ ID NO: 76256 - DNA, 24 bp, Homo sapiens
cggtgtggtgcgcaggcgcagtct

SEQ ID NO: 76257 - DNA, 16 bp, Homo sapiens
cccgctccgctcggac

SEQ ID NO: 76258 - DNA, 22 bp, Homo sapiens
gacatgtcgggggtccggggcc

SEQ ID NO: 76259 - DNA, 24 bp, Homo sapiens
cttcccctcgcaccggcccagggc

SEQ ID NO: 76260 - DNA, 21 bp, Homo sapiens
gggctgccttcagggttaagt

SEQ ID NO: 76261 - DNA, 18 bp, Homo sapiens
atcaacagtgaagtgaaa

SEQ ID NO: 76262 - DNA, 21 bp, Homo sapiens
cctgggtacataagaaggtga

SEQ ID NO: 76263 - DNA, 18 bp, Homo sapiens
tggaacaaaaagcatgaa

SEQ ID NO: 76264 - DNA, 21 bp, Homo sapiens
ttcaggacactaaccctctgg

SEQ ID NO: 76265 - DNA, 22 bp, Homo sapiens
tctatgactcatatgaaaacaa

SEQ ID NO: 76266 - DNA, 16 bp, Homo sapiens
aaacaggaacccgagg

SEQ ID NO: 76267 - DNA, 23 bp, Homo sapiens
gtattattacactgaaaataatt

SEQ ID NO: 76268 - DNA, 16 bp, Homo sapiens
ctccccgaactgttca

SEQ ID NO: 76269 - DNA, 24 bp, Homo sapiens
cagcgcctaccaccactgcatcaa

SEQ ID NO: 76270 - DNA, 23 bp, Homo sapiens
ccagcagttgctccttttatctt

SEQ ID NO: 76271 - DNA, 18 bp, Homo sapiens
gctgtattaaaccctgcc

SEQ ID NO: 76272 - DNA, 23 bp, Homo sapiens
gtttggcatagtggaacatgtga

SEQ ID NO: 76273 - DNA, 18 bp, Homo sapiens
ggcacctttctcttacct

SEQ ID NO: 76274 - DNA, 24 bp, Homo sapiens
atccagtagtggatcatgaatttg

SEQ ID NO: 76275 - DNA, 18 bp, Homo sapiens
ctgcccaggtagaaagtg

SEQ ID NO: 76276 - DNA, 24 bp, Homo sapiens
tgcgagctgcatttggcctttctg

SEQ ID NO: 76277 - DNA, 16 bp, Homo sapiens
gagctgagtaaggcac

SEQ ID NO: 76278 - DNA, 22 bp, Homo sapiens
ctaccaggtcacacactgttgc

SEQ ID NO: 76279 - DNA, 21 bp, Homo sapiens
ctccagttgtcctcctccatg

SEQ ID NO: 76280 - DNA, 17 bp, Homo sapiens
gtcactgtgtgagtagt

SEQ ID NO: 76281 - DNA, 23 bp, Homo sapiens
tagtggatggcatcctggtcccc

SEQ ID NO: 76282 - DNA, 23 bp, Homo sapiens
ctggaagacaaagttggcgctcc

SEQ ID NO: 76283 - DNA, 16 bp, Homo sapiens
gagcctcccgcccatc

SEQ ID NO: 76284 - DNA, 16 bp, Homo sapiens
atgctgctctggggaa

SEQ ID NO: 76285 - DNA, 20 bp, Homo sapiens
cctcaattgcttacattttt

SEQ ID NO: 76286 - DNA, 19 bp, Homo sapiens
gtgaagggctccgactggc

SEQ ID NO: 76287 - DNA, 18 bp, Homo sapiens
cggaaaaagactcttctt

SEQ ID NO: 76288 - DNA, 16 bp, Homo sapiens
ccgccgtggtcgaggt

SEQ ID NO: 76289 - DNA, 23 bp, Homo sapiens
atatgtaacaagaaaacttctct

SEQ ID NO: 76290 - DNA, 17 bp, Homo sapiens
tgcacgctgataaatct

SEQ ID NO: 76291 - DNA, 23 bp, Homo sapiens
tttgggtttgcagatttgtgtta

SEQ ID NO: 76292 - DNA, 16 bp, Homo sapiens
cagcagcaccgatggg

SEQ ID NO: 76293 - DNA, 21 bp, Homo sapiens
taaggtgttaaggtttttgtt

SEQ ID NO: 76294 - DNA, 17 bp, Homo sapiens
acgggggcggccttacc

SEQ ID NO: 76295 - DNA, 18 bp, Homo sapiens
cagaactgaagatgggaa

SEQ ID NO: 76296 - DNA, 20 bp, Homo sapiens
ggcacgctaacccattcccc

SEQ ID NO: 76297 - DNA, 24 bp, Homo sapiens
ctcaagtttggaaagggcgggcag

SEQ ID NO: 76298 - DNA, 16 bp, Homo sapiens
cgccccacgctgctgt

SEQ ID NO: 76299 - DNA, 20 bp, Homo sapiens
tattgcacaccttatatgga

SEQ ID NO: 76300 - DNA, 19 bp, Homo sapiens
tggaatgcctctcgggctc

SEQ ID NO: 76301 - DNA, 17 bp, Homo sapiens
ccaaggcaaaatactcc

SEQ ID NO: 76302 - DNA, 24 bp, Homo sapiens
cctggtccatttggatcaagttct

SEQ ID NO: 76303 - DNA, 20 bp, Homo sapiens
ggatggacccgtcctctatg

SEQ ID NO: 76304 - DNA, 18 bp, Homo sapiens
aaagtttggcttaacact

SEQ ID NO: 76305 - DNA, 24 bp, Homo sapiens
aataaagtagaaatgagattccta

SEQ ID NO: 76306 - DNA, 20 bp, Homo sapiens
gataccagctattttgtgga

SEQ ID NO: 76307 - DNA, 25 bp, Homo sapiens
ctctattttcattaaaataaagaaa

SEQ ID NO: 76308 - DNA, 20 bp, Homo sapiens
tgccgtggtgtcatcgcact

SEQ ID NO: 76309 - DNA, 18 bp, Homo sapiens
aggccatcaccctcacat

SEQ ID NO: 76310 - DNA, 24 bp, Homo sapiens
aagaacactgttgttgccacaggg

SEQ ID NO: 76311 - DNA, 22 bp, Homo sapiens
cagtggcgcggcccctagtgat

SEQ ID NO: 76312 - DNA, 23 bp, Homo sapiens
cgtcgccagtgctggtgtgggca

SEQ ID NO: 76313 - DNA, 22 bp, Homo sapiens
acagcactgagaagacggtgct

SEQ ID NO: 76314 - DNA, 17 bp, Homo sapiens
aactctaggtcctggca

SEQ ID NO: 76315 - DNA, 24 bp, Homo sapiens
ggaggtccagatgtgggccgctgt

SEQ ID NO: 76316 - DNA, 17 bp, Homo sapiens
acacacacaagccaaac

SEQ ID NO: 76317 - DNA, 17 bp, Homo sapiens
cacctacttcagctgca

SEQ ID NO: 76318 - DNA, 22 bp, Homo sapiens
aaccatgttattacataaaact

SEQ ID NO: 76319 - DNA, 16 bp, Homo sapiens
gggcaggccttccttg

SEQ ID NO: 76320 - DNA, 18 bp, Homo sapiens
tccttaggtaaatgacgt

SEQ ID NO: 76321 - DNA, 21 bp, Homo sapiens
tgttatccagactttctactg

SEQ ID NO: 76322 - DNA, 17 bp, Homo sapiens
ctccacgacatccttcc

SEQ ID NO: 76323 - DNA, 23 bp, Homo sapiens
ttctgcttatctttttcctcttt

SEQ ID NO: 76324 - DNA, 16 bp, Homo sapiens
cttcgcgacaggggcg

SEQ ID NO: 76325 - DNA, 21 bp, Homo sapiens
tgaaatagagatctagcaatt

SEQ ID NO: 76326 - DNA, 21 bp, Homo sapiens
accttccttctcggatctcca

SEQ ID NO: 76327 - DNA, 17 bp, Homo sapiens
gctggttgtctcattac

SEQ ID NO: 76328 - DNA, 21 bp, Homo sapiens
acagaagcaaccccggcccgt

SEQ ID NO: 76329 - DNA, 24 bp, Homo sapiens
caaggcgaaaggtttatggagcga

SEQ ID NO: 76330 - DNA, 24 bp, Homo sapiens
gctaagagaggtggctgtgcacat

SEQ ID NO: 76331 - DNA, 17 bp, Homo sapiens
tcggtccatgactctgg

SEQ ID NO: 76332 - DNA, 16 bp, Homo sapiens
ctgcaggtagacgtga

SEQ ID NO: 76333 - DNA, 24 bp, Homo sapiens
catgaggggaaattttcctcagta

SEQ ID NO: 76334 - DNA, 18 bp, Homo sapiens
gctgtctctgaaatgcca

SEQ ID NO: 76335 - DNA, 24 bp, Homo sapiens
cgtattctcaggtctcctgccgtt

SEQ ID NO: 76336 - DNA, 16 bp, Homo sapiens
taatgcacggtgggga

SEQ ID NO: 76337 - DNA, 17 bp, Homo sapiens
ctgtggccctgagaaag

SEQ ID NO: 76338 - DNA, 21 bp, Homo sapiens
gtgggggaggagccagcacca

SEQ ID NO: 76339 - DNA, 22 bp, Homo sapiens
gagcagctggccacgcgcctgc

SEQ ID NO: 76340 - DNA, 20 bp, Homo sapiens
ctgtaagatctaaagagaca

SEQ ID NO: 76341 - DNA, 18 bp, Homo sapiens
aaggagccgatccctgtc

SEQ ID NO: 76342 - DNA, 18 bp, Homo sapiens
agtgcaatctagaaaaca

SEQ ID NO: 76343 - DNA, 21 bp, Homo sapiens
aggcggcctccccacaggcgt

SEQ ID NO: 76344 - DNA, 23 bp, Homo sapiens
tctctctgacctgcagcacagac

SEQ ID NO: 76345 - DNA, 23 bp, Homo sapiens
acaaccaggtccaagagcgagtt

SEQ ID NO: 76346 - DNA, 17 bp, Homo sapiens
catttcacctgaaatct

SEQ ID NO: 76347 - DNA, 17 bp, Homo sapiens
agaaaacacttaccagg

SEQ ID NO: 76348 - DNA, 22 bp, Homo sapiens
ccaggatcagattgtgcccggc

SEQ ID NO: 76349 - DNA, 22 bp, Homo sapiens
caaaaaaaagaaaaaagacttt

SEQ ID NO: 76350 - DNA, 24 bp, Homo sapiens
atggtgccaaccgcctcggggcaa

SEQ ID NO: 76351 - DNA, 18 bp, Homo sapiens
gaggttgaggctgctatg

SEQ ID NO: 76352 - DNA, 19 bp, Homo sapiens
cctgagcatcgaagagtca

SEQ ID NO: 76353 - DNA, 21 bp, Homo sapiens
atggcctcagctgtagggtgg

SEQ ID NO: 76354 - DNA, 19 bp, Homo sapiens
aagattcatgacagattct

SEQ ID NO: 76355 - DNA, 23 bp, Homo sapiens
ccaagctccttgagtggctgtgc

SEQ ID NO: 76356 - DNA, 16 bp, Homo sapiens
ctgcatgctgagtcgc

SEQ ID NO: 76357 - DNA, 22 bp, Homo sapiens
taaaacggttttcaaaagttaa

SEQ ID NO: 76358 - DNA, 16 bp, Homo sapiens
cagggccaggtatgca

SEQ ID NO: 76359 - DNA, 19 bp, Homo sapiens
accaaacgctggggaagaa

SEQ ID NO: 76360 - DNA, 17 bp, Homo sapiens
ccagtacatccacacaa

SEQ ID NO: 76361 - DNA, 20 bp, Homo sapiens
ggaagcataagaacatcgga

SEQ ID NO: 76362 - DNA, 22 bp, Homo sapiens
taagtttggagtaataaactca

SEQ ID NO: 76363 - DNA, 16 bp, Homo sapiens
accttcttgcaacacg

SEQ ID NO: 76364 - DNA, 19 bp, Homo sapiens
agtgaaatgcaaaacaaca

SEQ ID NO: 76365 - DNA, 17 bp, Homo sapiens
caccccggtcgaacgtc

SEQ ID NO: 76366 - DNA, 22 bp, Homo sapiens
tctatggattaaaagtttacaa

SEQ ID NO: 76367 - DNA, 16 bp, Homo sapiens
caccagcccaccctgc

SEQ ID NO: 76368 - DNA, 16 bp, Homo sapiens
ccgtgtgggaagcgtg

SEQ ID NO: 76369 - DNA, 20 bp, Homo sapiens
tttatagctgtgggccagga

SEQ ID NO: 76370 - DNA, 16 bp, Homo sapiens
acctaaagcacctgaa

SEQ ID NO: 76371 - DNA, 17 bp, Homo sapiens
cttgctgtctggatggg

SEQ ID NO: 76372 - DNA, 17 bp, Homo sapiens
gatggtctgcagcgcac

SEQ ID NO: 76373 - DNA, 24 bp, Homo sapiens
ccatggactagcaggcccaggctg

SEQ ID NO: 76374 - DNA, 24 bp, Homo sapiens
aaggcccaccttgtagtcttccct

SEQ ID NO: 76375 - DNA, 24 bp, Homo sapiens
cctgcccctgatggaactttttgt

SEQ ID NO: 76376 - DNA, 22 bp, Homo sapiens
gggctgagtcccaccaggtggc

SEQ ID NO: 76377 - DNA, 18 bp, Homo sapiens
gagctgcagaacctgatg

SEQ ID NO: 76378 - DNA, 22 bp, Homo sapiens
attttttggatttacttttggg

SEQ ID NO: 76379 - DNA, 21 bp, Homo sapiens
gaaggagtcacggggcgcgca

SEQ ID NO: 76380 - DNA, 20 bp, Homo sapiens
ggttctgaacatgttgatgg

SEQ ID NO: 76381 - DNA, 20 bp, Homo sapiens
ctcaaagggcttcttctgtt

SEQ ID NO: 76382 - DNA, 23 bp, Homo sapiens
ctagggcatctgtctcttagatc

SEQ ID NO: 76383 - DNA, 16 bp, Homo sapiens
ctgaccttcccagtgc

SEQ ID NO: 76384 - DNA, 23 bp, Homo sapiens
gttagagtaataagaaacgtgat

SEQ ID NO: 76385 - DNA, 23 bp, Homo sapiens
cagcaaggccagcccgcaggcct

SEQ ID NO: 76386 - DNA, 18 bp, Homo sapiens
ccatccaggggcaacaga

SEQ ID NO: 76387 - DNA, 16 bp, Homo sapiens
aatctgtcgggagttg

SEQ ID NO: 76388 - DNA, 23 bp, Homo sapiens
tgtcctatgtggacgttggcact

SEQ ID NO: 76389 - DNA, 22 bp, Homo sapiens
agggttctcccactttacatga

SEQ ID NO: 76390 - DNA, 18 bp, Homo sapiens
cagtcagcctcgttcaaa

SEQ ID NO: 76391 - DNA, 23 bp, Homo sapiens
cacatgccataaatctactttta

SEQ ID NO: 76392 - DNA, 18 bp, Homo sapiens
agctgattctgtcatcac

SEQ ID NO: 76393 - DNA, 21 bp, Homo sapiens
tttttgtgcttaacttaccac

SEQ ID NO: 76394 - DNA, 21 bp, Homo sapiens
cgtatgaagacagttatgaca

SEQ ID NO: 76395 - DNA, 17 bp, Homo sapiens
atcgacaaaactttgaa

SEQ ID NO: 76396 - DNA, 24 bp, Homo sapiens
ctggcaagctcccagccactaggt

SEQ ID NO: 76397 - DNA, 24 bp, Homo sapiens
tcagccggacactcagccttcagc

SEQ ID NO: 76398 - DNA, 23 bp, Homo sapiens
agccaacccggcactgccctcag

SEQ ID NO: 76399 - DNA, 24 bp, Homo sapiens
tcaggcctcagactcccagcggtg

SEQ ID NO: 76400 - DNA, 16 bp, Homo sapiens
cagctgagtcggaagc

SEQ ID NO: 76401 - DNA, 22 bp, Homo sapiens
agagcccggcgtgacagggctg

SEQ ID NO: 76402 - DNA, 24 bp, Homo sapiens
ggagggttggaggatgccacctct

SEQ ID NO: 76403 - DNA, 24 bp, Homo sapiens
gccatcagtccaggatggtcttga

SEQ ID NO: 76404 - DNA, 24 bp, Homo sapiens
tcccaccagccagggccacgaggt

SEQ ID NO: 76405 - DNA, 21 bp, Homo sapiens
cagtcagcgtcgtccccggga

SEQ ID NO: 76406 - DNA, 24 bp, Homo sapiens
agcgtttaatcacatagggctgcc

SEQ ID NO: 76407 - DNA, 24 bp, Homo sapiens
cattcctgctcaagctgactcgac

SEQ ID NO: 76408 - DNA, 24 bp, Homo sapiens
gtctgcacttcagcagcatctgag

SEQ ID NO: 76409 - DNA, 20 bp, Homo sapiens
gggccaagggcgccgccggc

SEQ ID NO: 76410 - DNA, 16 bp, Homo sapiens
gggcccgcactggcct

SEQ ID NO: 76411 - DNA, 18 bp, Homo sapiens
agctgggctgggcctgtg

SEQ ID NO: 76412 - DNA, 16 bp, Homo sapiens
cacgtaggtgacacgg

SEQ ID NO: 76413 - DNA, 18 bp, Homo sapiens
gatggagccaccccgcag

SEQ ID NO: 76414 - DNA, 24 bp, Homo sapiens
cagccactgcacggcctcggaggg

SEQ ID NO: 76415 - DNA, 24 bp, Homo sapiens
tggagaagccgaagaaaacatttc

SEQ ID NO: 76416 - DNA, 22 bp, Homo sapiens
gggcgggcagacgagcctgaca

SEQ ID NO: 76417 - DNA, 20 bp, Homo sapiens
ttcctgcgcgtcatctctga

SEQ ID NO: 76418 - DNA, 16 bp, Homo sapiens
acttcctaagcccaga

SEQ ID NO: 76419 - DNA, 20 bp, Homo sapiens
tttcacgcatgtgtgctgca

SEQ ID NO: 76420 - DNA, 23 bp, Homo sapiens
actgctgccactgaggccaggca

SEQ ID NO: 76421 - DNA, 20 bp, Homo sapiens
cacccacgagcaccgtctga

SEQ ID NO: 76422 - DNA, 24 bp, Homo sapiens
gagtagcagagggaggccgtgtca

SEQ ID NO: 76423 - DNA, 17 bp, Homo sapiens
atgaggaaacccatgca

SEQ ID NO: 76424 - DNA, 21 bp, Homo sapiens
acttgctgatgaaatgggagc

SEQ ID NO: 76425 - DNA, 16 bp, Homo sapiens
gaacagaactgtgcac

SEQ ID NO: 76426 - DNA, 16 bp, Homo sapiens
aacagcctccagacgg

SEQ ID NO: 76427 - DNA, 18 bp, Homo sapiens
taaaacccaggagttcca

SEQ ID NO: 76428 - DNA, 21 bp, Homo sapiens
gtaaaaacttaaaatcccaga

SEQ ID NO: 76429 - DNA, 18 bp, Homo sapiens
tccctggaggctgggcct

SEQ ID NO: 76430 - DNA, 23 bp, Homo sapiens
tttcttgtcaaaatgttcctctt

SEQ ID NO: 76431 - DNA, 21 bp, Homo sapiens
gaggatcttgtagatgttggt

SEQ ID NO: 76432 - DNA, 24 bp, Homo sapiens
acacatgtatgtgctcacgtgtat

SEQ ID NO: 76433 - DNA, 16 bp, Homo sapiens
gcgtcgcaaactcttt

SEQ ID NO: 76434 - DNA, 20 bp, Homo sapiens
catcagccttgcaggcacgc

SEQ ID NO: 76435 - DNA, 16 bp, Homo sapiens
ggacctccatcagagc

SEQ ID NO: 76436 - DNA, 22 bp, Homo sapiens
tctgaactctgtgctgaccatc

SEQ ID NO: 76437 - DNA, 21 bp, Homo sapiens
tttgcaggagggggctgggtg

SEQ ID NO: 76438 - DNA, 20 bp, Homo sapiens
cttcagccgcaagaccccaa

SEQ ID NO: 76439 - DNA, 16 bp, Homo sapiens
ccaggcaggacaagga

SEQ ID NO: 76440 - DNA, 24 bp, Homo sapiens
cggttgaaggtgagactggctctg

SEQ ID NO: 76441 - DNA, 24 bp, Homo sapiens
gaaagatgcatttctgctcagccc

SEQ ID NO: 76442 - DNA, 18 bp, Homo sapiens
gtgcggcctgctgctgga

SEQ ID NO: 76443 - DNA, 16 bp, Homo sapiens
cagtcgcctgccccac

SEQ ID NO: 76444 - DNA, 23 bp, Homo sapiens
aagacgaggccctgggtggcacg

SEQ ID NO: 76445 - DNA, 21 bp, Homo sapiens
cacctgccccagccgggcaca

SEQ ID NO: 76446 - DNA, 22 bp, Homo sapiens
cgaggtgtccctgagtatggct

SEQ ID NO: 76447 - DNA, 22 bp, Homo sapiens
tctgcacctccagggtccgggt

SEQ ID NO: 76448 - DNA, 23 bp, Homo sapiens
tcctgggtgacggccccgcatcc

SEQ ID NO: 76449 - DNA, 17 bp, Homo sapiens
tgaacaaaagccgtgcc

SEQ ID NO: 76450 - DNA, 17 bp, Homo sapiens
aaatcaccacttctctg

SEQ ID NO: 76451 - DNA, 24 bp, Homo sapiens
caccactgtcttccgcaagttcac

SEQ ID NO: 76452 - DNA, 23 bp, Homo sapiens
tctggagcagggctgggtccagg

SEQ ID NO: 76453 - DNA, 17 bp, Homo sapiens
ctgggtgcacggccaag

SEQ ID NO: 76454 - DNA, 19 bp, Homo sapiens
tggatgatttcttgttggt

SEQ ID NO: 76455 - DNA, 16 bp, Homo sapiens
tggcagagacaacgct

SEQ ID NO: 76456 - DNA, 20 bp, Homo sapiens
cgtaaaaagtgtaaagttaa

SEQ ID NO: 76457 - DNA, 19 bp, Homo sapiens
caggctgtggaggtcccca

SEQ ID NO: 76458 - DNA, 23 bp, Homo sapiens
aatgttactttatttatggctgt

SEQ ID NO: 76459 - DNA, 21 bp, Homo sapiens
cgcgtgggtgaggtgaggtgt

SEQ ID NO: 76460 - DNA, 17 bp, Homo sapiens
ctcgtctgttggaaaga

SEQ ID NO: 76461 - DNA, 22 bp, Homo sapiens
gtgcaacccctcccgtgcggct

SEQ ID NO: 76462 - DNA, 16 bp, Homo sapiens
tacggcgacatggaga

SEQ ID NO: 76463 - DNA, 24 bp, Homo sapiens
gttcctcaagacagagcagtcatg

SEQ ID NO: 76464 - DNA, 16 bp, Homo sapiens
tacgtccagtgccagg

SEQ ID NO: 76465 - DNA, 20 bp, Homo sapiens
agcaaatcaacccccaccca

SEQ ID NO: 76466 - DNA, 22 bp, Homo sapiens
agtgtacgcatgtccagcacat

SEQ ID NO: 76467 - DNA, 17 bp, Homo sapiens
aaacagcttgttctcca

SEQ ID NO: 76468 - DNA, 20 bp, Homo sapiens
tgaatggtagacgtgtcgtt

SEQ ID NO: 76469 - DNA, 20 bp, Homo sapiens
gatggagccctgcgggatcc

SEQ ID NO: 76470 - DNA, 22 bp, Homo sapiens
agcccaggagccggagggggcg

SEQ ID NO: 76471 - DNA, 23 bp, Homo sapiens
ggccagcagtggcctcttcgacg

SEQ ID NO: 76472 - DNA, 24 bp, Homo sapiens
gaagggcagtggggaaggggcagg

SEQ ID NO: 76473 - DNA, 18 bp, Homo sapiens
cggctcactcccatgtgt

SEQ ID NO: 76474 - DNA, 24 bp, Homo sapiens
gccacccgcagggcaatggcacct

SEQ ID NO: 76475 - DNA, 20 bp, Homo sapiens
acactgaccccaaaagggac

SEQ ID NO: 76476 - DNA, 23 bp, Homo sapiens
acatgaagcgtaggaagacgtcg

SEQ ID NO: 76477 - DNA, 22 bp, Homo sapiens
gagactcggcccggccagccca

SEQ ID NO: 76478 - DNA, 23 bp, Homo sapiens
gcatggcccagctcagatttcgc

SEQ ID NO: 76479 - DNA, 17 bp, Homo sapiens
tcacctgcaggagacca

SEQ ID NO: 76480 - DNA, 23 bp, Homo sapiens
cattccccccactgccccccagg

SEQ ID NO: 76481 - DNA, 21 bp, Homo sapiens
ctctcctctgccggcaggtct

SEQ ID NO: 76482 - DNA, 23 bp, Homo sapiens
gggaggacccactgctgggagtc

SEQ ID NO: 76483 - DNA, 21 bp, Homo sapiens
gatcggaagaaacaagtgccc

SEQ ID NO: 76484 - DNA, 24 bp, Homo sapiens
gctcgatgacgacggcatccctca

SEQ ID NO: 76485 - DNA, 22 bp, Homo sapiens
ttcccaggcgctctctgggctt

SEQ ID NO: 76486 - DNA, 21 bp, Homo sapiens
tgtacggctggaggtctgtca

SEQ ID NO: 76487 - DNA, 24 bp, Homo sapiens
cagaaggccgcccatgggcacgtc

SEQ ID NO: 76488 - DNA, 21 bp, Homo sapiens
tgtgtaaatcatggaagtacc

SEQ ID NO: 76489 - DNA, 16 bp, Homo sapiens
tcgccagcatcatcaa

SEQ ID NO: 76490 - DNA, 24 bp, Homo sapiens
ttctagacacattcatatcccaga

SEQ ID NO: 76491 - DNA, 22 bp, Homo sapiens
cactcacacaggtggatgtgac

SEQ ID NO: 76492 - DNA, 20 bp, Homo sapiens
ctcttgaaggccttgcggac

SEQ ID NO: 76493 - DNA, 24 bp, Homo sapiens
gccctgagggcagaggtgatgtct

SEQ ID NO: 76494 - DNA, 18 bp, Homo sapiens
cagtacgtgttctggggt

SEQ ID NO: 76495 - DNA, 23 bp, Homo sapiens
ctgcccttggggtctggagtggt

SEQ ID NO: 76496 - DNA, 16 bp, Homo sapiens
gatggtgtcgtacgcg

SEQ ID NO: 76497 - DNA, 21 bp, Homo sapiens
gctgaaggcctccaccctagg

SEQ ID NO: 76498 - DNA, 22 bp, Homo sapiens
ccttcgtgctgcgtgtgcgggc

SEQ ID NO: 76499 - DNA, 22 bp, Homo sapiens
ctccctgcggcccacccaggag

SEQ ID NO: 76500 - DNA, 23 bp, Homo sapiens
ccggcctcctgggcgcctctgtg

SEQ ID NO: 76501 - DNA, 17 bp, Homo sapiens
caaggtccagcagggct

SEQ ID NO: 76502 - DNA, 24 bp, Homo sapiens
ccgagcgtctcacctcgagggtga

SEQ ID NO: 76503 - DNA, 23 bp, Homo sapiens
aaagtacagctcaggcggcgggt

SEQ ID NO: 76504 - DNA, 24 bp, Homo sapiens
gtgggcacttggccggatccactt

SEQ ID NO: 76505 - DNA, 23 bp, Homo sapiens
gatatcgtccaggcccagcacag

SEQ ID NO: 76506 - DNA, 21 bp, Homo sapiens
gggtggctggggacactgggg

SEQ ID NO: 76507 - DNA, 16 bp, Homo sapiens
ttgagcacgctgaaca

SEQ ID NO: 76508 - DNA, 16 bp, Homo sapiens
gaacccgtttcaaaca

SEQ ID NO: 76509 - DNA, 16 bp, Homo sapiens
ctcactgtgcgcacaa

SEQ ID NO: 76510 - DNA, 17 bp, Homo sapiens
gggctgcggccgattgt

SEQ ID NO: 76511 - DNA, 16 bp, Homo sapiens
ccgggcccttcatcta

SEQ ID NO: 76512 - DNA, 16 bp, Homo sapiens
atcgggaagccaggcc

SEQ ID NO: 76513 - DNA, 23 bp, Homo sapiens
gtttaaaaaggaagttaaaccaa

SEQ ID NO: 76514 - DNA, 21 bp, Homo sapiens
ctattgcagacagcacttgaa

SEQ ID NO: 76515 - DNA, 18 bp, Homo sapiens
gacgtagtccatgttcac

SEQ ID NO: 76516 - DNA, 24 bp, Homo sapiens
cttcccgtgagcttccccctagtc

SEQ ID NO: 76517 - DNA, 18 bp, Homo sapiens
gagtctggacgtcagcag

SEQ ID NO: 76518 - DNA, 22 bp, Homo sapiens
ttcagcgtgtgctgccgtgggt

SEQ ID NO: 76519 - DNA, 23 bp, Homo sapiens
cagctcccgcagctgcaccctct

SEQ ID NO: 76520 - DNA, 16 bp, Homo sapiens
agagccttgcacagaa

SEQ ID NO: 76521 - DNA, 23 bp, Homo sapiens
ttttctaccggaagagtgtctgg

SEQ ID NO: 76522 - DNA, 21 bp, Homo sapiens
cagcccagagctgcacagcca

SEQ ID NO: 76523 - DNA, 22 bp, Homo sapiens
gtcgagctgctcaggtctttct

SEQ ID NO: 76524 - DNA, 16 bp, Homo sapiens
gtgttccaggacttcg

SEQ ID NO: 76525 - DNA, 19 bp, Homo sapiens
caccgtctgcgtgaggaga

SEQ ID NO: 76526 - DNA, 18 bp, Homo sapiens
ctttgcaacttgctccag

SEQ ID NO: 76527 - DNA, 17 bp, Homo sapiens
ctggatgtggcatgtcc

SEQ ID NO: 76528 - DNA, 24 bp, Homo sapiens
acgtggtctccgtgacataaaaga

SEQ ID NO: 76529 - DNA, 23 bp, Homo sapiens
ccttggtgagctggatgtgcggt

SEQ ID NO: 76530 - DNA, 24 bp, Homo sapiens
agccagtgcaggaacttggccagg

SEQ ID NO: 76531 - DNA, 16 bp, Homo sapiens
gatgtgccgtgtccgg

SEQ ID NO: 76532 - DNA, 23 bp, Homo sapiens
gagagcagaggcagagatcaccg

SEQ ID NO: 76533 - DNA, 16 bp, Homo sapiens
gctgacgtggaagatg

SEQ ID NO: 76534 - DNA, 16 bp, Homo sapiens
gatggagacaggagga

SEQ ID NO: 76535 - DNA, 21 bp, Homo sapiens
gcttcctcaggaacaccaaga

SEQ ID NO: 76536 - DNA, 16 bp, Homo sapiens
tctggggcctgggccc

SEQ ID NO: 76537 - DNA, 23 bp, Homo sapiens
cgggcctgcctgcgccggctggt

SEQ ID NO: 76538 - DNA, 22 bp, Homo sapiens
cagccaagcgcagtcccgcacg

SEQ ID NO: 76539 - DNA, 22 bp, Homo sapiens
cccccgtcgcctggtgcagctg

SEQ ID NO: 76540 - DNA, 23 bp, Homo sapiens
catgcttccccagggagatgaac

SEQ ID NO: 76541 - DNA, 19 bp, Homo sapiens
ccgggagaagccccagggc

SEQ ID NO: 76542 - DNA, 24 bp, Homo sapiens
ctggagccccagaggcctgggggc

SEQ ID NO: 76543 - DNA, 24 bp, Homo sapiens
cctacggggtgctcctcaagacgc

SEQ ID NO: 76544 - DNA, 24 bp, Homo sapiens
ccaggggctgctgtgctggcggag

SEQ ID NO: 76545 - DNA, 23 bp, Homo sapiens
agcgctactggcaaatgcggccc

SEQ ID NO: 76546 - DNA, 24 bp, Homo sapiens
tcctcgggggccgccacagagccc

SEQ ID NO: 76547 - DNA, 24 bp, Homo sapiens
atctttctgggttccaggccctgg

SEQ ID NO: 76548 - DNA, 23 bp, Homo sapiens
ggggtgaccgcagctcgcagcgg

SEQ ID NO: 76549 - DNA, 24 bp, Homo sapiens
cctactcagctctctgaggcccag

SEQ ID NO: 76550 - DNA, 24 bp, Homo sapiens
gcgtggttcccaagcagctccaga

SEQ ID NO: 76551 - DNA, 20 bp, Homo sapiens
cgagaccaagcacttcctct

SEQ ID NO: 76552 - DNA, 24 bp, Homo sapiens
ggggcaacctgcggggagtccctg

SEQ ID NO: 76553 - DNA, 16 bp, Homo sapiens
cccccatccacatcgc

SEQ ID NO: 76554 - DNA, 23 bp, Homo sapiens
ctccgagcgccagtcaggctggg

SEQ ID NO: 76555 - DNA, 22 bp, Homo sapiens
tggagggtgcgctctctggcac

SEQ ID NO: 76556 - DNA, 22 bp, Homo sapiens
ctccttgtcgcctgaggagtag

SEQ ID NO: 76557 - DNA, 21 bp, Homo sapiens
gaccgtggtttctgtgtggtg

SEQ ID NO: 76558 - DNA, 24 bp, Homo sapiens
acaaggcgtgtcccagggacgtgg

SEQ ID NO: 76559 - DNA, 16 bp, Homo sapiens
gacgcccgttgggcag

SEQ ID NO: 76560 - DNA, 24 bp, Homo sapiens
cacggatgggtgggagtggcgcgt

SEQ ID NO: 76561 - DNA, 21 bp, Homo sapiens
gggggcagtgccagccgaagt

SEQ ID NO: 76562 - DNA, 23 bp, Homo sapiens
cttcggcgggtctggcaggtgac

SEQ ID NO: 76563 - DNA, 22 bp, Homo sapiens
tagcgtcagggaggccggggtc

SEQ ID NO: 76564 - DNA, 22 bp, Homo sapiens
cccgggtgggcccaggacccct

SEQ ID NO: 76565 - DNA, 23 bp, Homo sapiens
cggcccccgccacacgctagtgg

SEQ ID NO: 76566 - DNA, 19 bp, Homo sapiens
ctgggcctcttgggcaacg

SEQ ID NO: 76567 - DNA, 16 bp, Homo sapiens
ccaggtgtgcgggccg

SEQ ID NO: 76568 - DNA, 22 bp, Homo sapiens
cacccggggctggcaggcccag

SEQ ID NO: 76569 - DNA, 22 bp, Homo sapiens
gggcgacgacgtgctggttcac

SEQ ID NO: 76570 - DNA, 24 bp, Homo sapiens
tcgcatcccagacgccttcggggt

SEQ ID NO: 76571 - DNA, 24 bp, Homo sapiens
caacacggtgaccgacgcactgcg

SEQ ID NO: 76572 - DNA, 24 bp, Homo sapiens
cgccgagctggtacagcggcggcc

SEQ ID NO: 76573 - DNA, 16 bp, Homo sapiens
cgggggcccccccgag

SEQ ID NO: 76574 - DNA, 24 bp, Homo sapiens
gcacaaagagcgcgcagcgtgcca

SEQ ID NO: 76575 - DNA, 24 bp, Homo sapiens
cagaggctgtgcgagcgcggcgcg

SEQ ID NO: 76576 - DNA, 22 bp, Homo sapiens
cagcccccacgccccgctcccc

SEQ ID NO: 76577 - DNA, 22 bp, Homo sapiens
aggcgactcagggcgcttcccc

SEQ ID NO: 76578 - DNA, 20 bp, Homo sapiens
cacgctggtggtgaaggcct

SEQ ID NO: 76579 - DNA, 24 bp, Homo sapiens
ggcgtccggctggggttgagggcg

SEQ ID NO: 76580 - DNA, 24 bp, Homo sapiens
agccgaaggccagcacgttcttcg

SEQ ID NO: 76581 - DNA, 22 bp, Homo sapiens
gacgcacggccgccccccgccg

SEQ ID NO: 76582 - DNA, 24 bp, Homo sapiens
caccagctccttcaggcaggacac

SEQ ID NO: 76583 - DNA, 23 bp, Homo sapiens
agcgcggggacccggcggctttc

SEQ ID NO: 76584 - DNA, 24 bp, Homo sapiens
tccgcatgtcgctggttccccccg

SEQ ID NO: 76585 - DNA, 21 bp, Homo sapiens
cgaggtgctgccgctggccac

SEQ ID NO: 76586 - DNA, 24 bp, Homo sapiens
ggcccacctggcggaaggaggggg

SEQ ID NO: 76587 - DNA, 16 bp, Homo sapiens
gcgcgctccccgctgc

SEQ ID NO: 76588 - DNA, 24 bp, Homo sapiens
cactgggccaccagcgcgcggaaa

SEQ ID NO: 76589 - DNA, 17 bp, Homo sapiens
cagcgctgcgtcctgct

SEQ ID NO: 76590 - DNA, 17 bp, Homo sapiens
ccaggcgccgcacgaac

SEQ ID NO: 76591 - DNA, 16 bp, Homo sapiens
cccagcccctcccctt

SEQ ID NO: 76592 - DNA, 24 bp, Homo sapiens
ctgcgcagcagggagcgcacggct

SEQ ID NO: 76593 - DNA, 23 bp, Homo sapiens
gagctggaggcagcgaggccgcc

SEQ ID NO: 76594 - DNA, 23 bp, Homo sapiens
ccccggcgcacgcagggtcgcgg

SEQ ID NO: 76595 - DNA, 24 bp, Homo sapiens
ggatttcaggcttcccgtagactg

SEQ ID NO: 76596 - DNA, 21 bp, Homo sapiens
gccgcgggctcgcgctcctcg

SEQ ID NO: 76597 - DNA, 16 bp, Homo sapiens
cgctgcagcgccaggg

SEQ ID NO: 76598 - DNA, 24 bp, Homo sapiens
catgtctcgccggaagcctgcgtc

SEQ ID NO: 76599 - DNA, 23 bp, Homo sapiens
ggcagctggggcgggaaggcggg

SEQ ID NO: 76600 - DNA, 22 bp, Homo sapiens
cggttttgagccgattcttcca

SEQ ID NO: 76601 - DNA, 22 bp, Homo sapiens
caagccccgcccccccagcccc

SEQ ID NO: 76602 - DNA, 24 bp, Homo sapiens
cacaggtgcagccgaccaggtgga

SEQ ID NO: 76603 - DNA, 18 bp, Homo sapiens
tcctcctccagccctatc

SEQ ID NO: 76604 - DNA, 18 bp, Homo sapiens
ccccagcgcccccagctc

SEQ ID NO: 76605 - DNA, 16 bp, Homo sapiens
tttgtagccccggctg

SEQ ID NO: 76606 - DNA, 20 bp, Homo sapiens
ttcacccatagggttttcca

SEQ ID NO: 76607 - DNA, 19 bp, Homo sapiens
tttctttttaacaggccca

SEQ ID NO: 76608 - DNA, 22 bp, Homo sapiens
aggaaccttgtcattcagttgt

SEQ ID NO: 76609 - DNA, 23 bp, Homo sapiens
ctcaccagagttgccagacattc

SEQ ID NO: 76610 - DNA, 19 bp, Homo sapiens
agagataacacatcatttt

SEQ ID NO: 76611 - DNA, 20 bp, Homo sapiens
ctggagaattccagaatacc

SEQ ID NO: 76612 - DNA, 17 bp, Homo sapiens
cattggaaaatgatggg

SEQ ID NO: 76613 - DNA, 17 bp, Homo sapiens
caaaagggacctttctc

SEQ ID NO: 76614 - DNA, 23 bp, Homo sapiens
aaaaggaaggaggaagtgatctg

SEQ ID NO: 76615 - DNA, 18 bp, Homo sapiens
tccagagactttgaaaca

SEQ ID NO: 76616 - DNA, 18 bp, Homo sapiens
ttcattgctttattggga

SEQ ID NO: 76617 - DNA, 17 bp, Homo sapiens
tctgtctggactctact

SEQ ID NO: 76618 - DNA, 19 bp, Homo sapiens
tgacataatgagaccaaaa

SEQ ID NO: 76619 - DNA, 20 bp, Homo sapiens
gactgatatcatcaaaatca

SEQ ID NO: 76620 - DNA, 19 bp, Homo sapiens
agaaatgtctgaggaccag

SEQ ID NO: 76621 - DNA, 23 bp, Homo sapiens
ccttttgattaatttgacgtttc

SEQ ID NO: 76622 - DNA, 17 bp, Homo sapiens
tgcgattctgcccttcc

SEQ ID NO: 76623 - DNA, 16 bp, Homo sapiens
gtacttcagaacccac

SEQ ID NO: 76624 - DNA, 22 bp, Homo sapiens
ttgcagttctgccaaaatgtac

SEQ ID NO: 76625 - DNA, 18 bp, Homo sapiens
ctcagatgattcagaaga

SEQ ID NO: 76626 - DNA, 19 bp, Homo sapiens
tttcttctgaagattcgaa

SEQ ID NO: 76627 - DNA, 22 bp, Homo sapiens
actttgaaaatatttgtaacct

SEQ ID NO: 76628 - DNA, 22 bp, Homo sapiens
tgacttgtatttgatgatccaa

SEQ ID NO: 76629 - DNA, 20 bp, Homo sapiens
ttcatctagattcactaagt

SEQ ID NO: 76630 - DNA, 18 bp, Homo sapiens
ttttggaccgtttgttag

SEQ ID NO: 76631 - DNA, 24 bp, Homo sapiens
gggaacttattattgtggttaata

SEQ ID NO: 76632 - DNA, 18 bp, Homo sapiens
caaaactgcatctttgtg

SEQ ID NO: 76633 - DNA, 22 bp, Homo sapiens
ctttttgatctcagtcagtttg

SEQ ID NO: 76634 - DNA, 18 bp, Homo sapiens
gacttacctctgcatctt

SEQ ID NO: 76635 - DNA, 18 bp, Homo sapiens
cttccaaatcagctaaca

SEQ ID NO: 76636 - DNA, 24 bp, Homo sapiens
aacaaaaatactgaaaaatatcta

SEQ ID NO: 76637 - DNA, 21 bp, Homo sapiens
atacatagaaatgaagcagca

SEQ ID NO: 76638 - DNA, 20 bp, Homo sapiens
acagtattttttaaaaggtg

SEQ ID NO: 76639 - DNA, 17 bp, Homo sapiens
agattctttggggaaga

SEQ ID NO: 76640 - DNA, 22 bp, Homo sapiens
cataggcttctatacagggaac

SEQ ID NO: 76641 - DNA, 18 bp, Homo sapiens
agttgtgatctaaatggc

SEQ ID NO: 76642 - DNA, 21 bp, Homo sapiens
tacaaatcctaaatgtatacc

SEQ ID NO: 76643 - DNA, 16 bp, Homo sapiens
ttttgccaccaggcgg

SEQ ID NO: 76644 - DNA, 23 bp, Homo sapiens
catagggaatcttaaaatataaa

SEQ ID NO: 76645 - DNA, 19 bp, Homo sapiens
gaggagaatcccaatttcc

SEQ ID NO: 76646 - DNA, 21 bp, Homo sapiens
agcccgagagctcaatattta

SEQ ID NO: 76647 - DNA, 18 bp, Homo sapiens
atgcaaaattctaaacca

SEQ ID NO: 76648 - DNA, 17 bp, Homo sapiens
cacagactgtttgttca

SEQ ID NO: 76649 - DNA, 24 bp, Homo sapiens
atatgttaaaaactcataaataca

SEQ ID NO: 76650 - DNA, 20 bp, Homo sapiens
gcagtttcagtttgcttcac

SEQ ID NO: 76651 - DNA, 23 bp, Homo sapiens
ctttaaaccctacatctgaacgt

SEQ ID NO: 76652 - DNA, 16 bp, Homo sapiens
aaagggcagtcaattt

SEQ ID NO: 76653 - DNA, 21 bp, Homo sapiens
gaaatgagtttttacaagtca

SEQ ID NO: 76654 - DNA, 16 bp, Homo sapiens
agaaaaactcccgtcc

SEQ ID NO: 76655 - DNA, 24 bp, Homo sapiens
ttatttttgttgaaggtgggagtt

SEQ ID NO: 76656 - DNA, 20 bp, Homo sapiens
aagagcaactaaaaaacaaa

SEQ ID NO: 76657 - DNA, 24 bp, Homo sapiens
aacagaagttcactcttttcccgg

SEQ ID NO: 76658 - DNA, 18 bp, Homo sapiens
agcacacctaatcaaggg

SEQ ID NO: 76659 - DNA, 22 bp, Homo sapiens
caccttggcctcctaaagtgct

SEQ ID NO: 76660 - DNA, 22 bp, Homo sapiens
gtagaagtatcagtcattatct

SEQ ID NO: 76661 - DNA, 25 bp, Homo sapiens
tattttaaaggagaaaatagttaat

SEQ ID NO: 76662 - DNA, 19 bp, Homo sapiens
tgcccttttttttgtccct

SEQ ID NO: 76663 - DNA, 22 bp, Homo sapiens
catataattatttttctttaat

SEQ ID NO: 76664 - DNA, 20 bp, Homo sapiens
taccatgaacatctaacatt

SEQ ID NO: 76665 - DNA, 19 bp, Homo sapiens
gctgtaaatgttgatgaga

SEQ ID NO: 76666 - DNA, 19 bp, Homo sapiens
aggtacacttcatcagata

SEQ ID NO: 76667 - DNA, 22 bp, Homo sapiens
aataaggaaaatgttagggaca

SEQ ID NO: 76668 - DNA, 20 bp, Homo sapiens
gtaactagcgatttaacata

SEQ ID NO: 76669 - DNA, 20 bp, Homo sapiens
ggaaactatcaaacacaacc

SEQ ID NO: 76670 - DNA, 21 bp, Homo sapiens
tacatacatactcctgagtgt

SEQ ID NO: 76671 - DNA, 16 bp, Homo sapiens
tctactggctgcaggc

SEQ ID NO: 76672 - DNA, 22 bp, Homo sapiens
tagccataactggggaaataca

SEQ ID NO: 76673 - DNA, 16 bp, Homo sapiens
gtggctctgtggatga

SEQ ID NO: 76674 - DNA, 17 bp, Homo sapiens
ctgccacaggcgaggtt

SEQ ID NO: 76675 - DNA, 22 bp, Homo sapiens
ttggaactaaacctaagtttca

SEQ ID NO: 76676 - DNA, 17 bp, Homo sapiens
aacccggatgtcaagcc

SEQ ID NO: 76677 - DNA, 22 bp, Homo sapiens
actacagtggaaatataatttt

SEQ ID NO: 76678 - DNA, 16 bp, Homo sapiens
acagaggcgctcatcc

SEQ ID NO: 76679 - DNA, 16 bp, Homo sapiens
ccaccatgcccagctt

SEQ ID NO: 76680 - DNA, 22 bp, Homo sapiens
agcattttggcagagaaacttt

SEQ ID NO: 76681 - DNA, 25 bp, Homo sapiens
ggctgtattcaaaataaatgttatc

SEQ ID NO: 76682 - DNA, 22 bp, Homo sapiens
ataaatctttatcttttttttt

SEQ ID NO: 76683 - DNA, 19 bp, Homo sapiens
acctttgatgtcaactgta

SEQ ID NO: 76684 - DNA, 25 bp, Homo sapiens
atttcatgataatggataagttatc

SEQ ID NO: 76685 - DNA, 21 bp, Homo sapiens
aatacctttatccaaatttca

SEQ ID NO: 76686 - DNA, 18 bp, Homo sapiens
tcgagtcgaaaggatgga

SEQ ID NO: 76687 - DNA, 18 bp, Homo sapiens
gctcttcttctcccacat

SEQ ID NO: 76688 - DNA, 22 bp, Homo sapiens
ggcagttacagagttttatgca

SEQ ID NO: 76689 - DNA, 19 bp, Homo sapiens
taggagatattgtccaaat

SEQ ID NO: 76690 - DNA, 19 bp, Homo sapiens
gccaaagagcaaatcacag

SEQ ID NO: 76691 - DNA, 22 bp, Homo sapiens
ttaataatgctaacaagttaat

SEQ ID NO: 76692 - DNA, 17 bp, Homo sapiens
ggtttggagagcatctt

SEQ ID NO: 76693 - DNA, 23 bp, Homo sapiens
taaaagaatttttataacaagtt

SEQ ID NO: 76694 - DNA, 25 bp, Homo sapiens
aattcaatttaagaaatgttcataa

SEQ ID NO: 76695 - DNA, 18 bp, Homo sapiens
ttgttaacttagagaagc

SEQ ID NO: 76696 - DNA, 21 bp, Homo sapiens
gcaccctagtattctatcaat

SEQ ID NO: 76697 - DNA, 21 bp, Homo sapiens
cctcaaagaattcaacttgga

SEQ ID NO: 76698 - DNA, 18 bp, Homo sapiens
acaacagcctgatgaatt

SEQ ID NO: 76699 - DNA, 19 bp, Homo sapiens
tgttgttccattaattgtc

SEQ ID NO: 76700 - DNA, 21 bp, Homo sapiens
tttttgccataatgtagctgg

SEQ ID NO: 76701 - DNA, 17 bp, Homo sapiens
aatcaactagcccttgt

SEQ ID NO: 76702 - DNA, 18 bp, Homo sapiens
atgcacttacatctaggc

SEQ ID NO: 76703 - DNA, 16 bp, Homo sapiens
tttcacctgtacctct

SEQ ID NO: 76704 - DNA, 25 bp, Homo sapiens
agtaaaatggaatttatgacaatta

SEQ ID NO: 76705 - DNA, 17 bp, Homo sapiens
ttctccaaaaagagcta

SEQ ID NO: 76706 - DNA, 22 bp, Homo sapiens
gtcagtacttcattctgtatgt

SEQ ID NO: 76707 - DNA, 18 bp, Homo sapiens
tgtggtctaaaacccaca

SEQ ID NO: 76708 - DNA, 23 bp, Homo sapiens
acacctgttatgagccacattgt

SEQ ID NO: 76709 - DNA, 18 bp, Homo sapiens
atttaaggagtggctggg

SEQ ID NO: 76710 - DNA, 21 bp, Homo sapiens
aatttggcacaaataattgtc

SEQ ID NO: 76711 - DNA, 25 bp, Homo sapiens
ctttaatttcaaaattttataattt

SEQ ID NO: 76712 - DNA, 21 bp, Homo sapiens
tgaaaaccaaaggaagtttgc

SEQ ID NO: 76713 - DNA, 20 bp, Homo sapiens
aatgttctccaatttaaaac

SEQ ID NO: 76714 - DNA, 20 bp, Homo sapiens
acggaagttaaagaagtggg

SEQ ID NO: 76715 - DNA, 23 bp, Homo sapiens
gaaaaaaatccttgtaatactag

SEQ ID NO: 76716 - DNA, 21 bp, Homo sapiens
tacgcccattggagttttgtc

SEQ ID NO: 76717 - DNA, 18 bp, Homo sapiens
atggagaacttccgatac

SEQ ID NO: 76718 - DNA, 17 bp, Homo sapiens
tgtgcctaataagtggc

SEQ ID NO: 76719 - DNA, 17 bp, Homo sapiens
tctatgtcgggcaattt

SEQ ID NO: 76720 - DNA, 21 bp, Homo sapiens
tctatattctgaattcctaac

SEQ ID NO: 76721 - DNA, 17 bp, Homo sapiens
cactgtcagctttaata

SEQ ID NO: 76722 - DNA, 17 bp, Homo sapiens
atgcccggcttgatgct

SEQ ID NO: 76723 - DNA, 25 bp, Homo sapiens
taaaataataatagagctctcaaaa

SEQ ID NO: 76724 - DNA, 21 bp, Homo sapiens
gaaaatcatctacgtaaattg

SEQ ID NO: 76725 - DNA, 23 bp, Homo sapiens
tgtactattaaaatttctgagga

SEQ ID NO: 76726 - DNA, 22 bp, Homo sapiens
agtatttaacctcatttagaaa

SEQ ID NO: 76727 - DNA, 18 bp, Homo sapiens
aattctgactttaggtga

SEQ ID NO: 76728 - DNA, 20 bp, Homo sapiens
aaactttcctcaattctgat

SEQ ID NO: 76729 - DNA, 16 bp, Homo sapiens
cggtccggagcaagtc

SEQ ID NO: 76730 - DNA, 22 bp, Homo sapiens
catgtatcttatgctatttcat

SEQ ID NO: 76731 - DNA, 23 bp, Homo sapiens
agcttgttcattgagtatcttta

SEQ ID NO: 76732 - DNA, 22 bp, Homo sapiens
tcttcttgattgtcaaaacttt

SEQ ID NO: 76733 - DNA, 22 bp, Homo sapiens
gaattatactgactggtgaaaa

SEQ ID NO: 76734 - DNA, 20 bp, Homo sapiens
gctgttaattcccacattca

SEQ ID NO: 76735 - DNA, 22 bp, Homo sapiens
tcatgcaacttctattattatt

SEQ ID NO: 76736 - DNA, 18 bp, Homo sapiens
gtccagtggagcattact

SEQ ID NO: 76737 - DNA, 19 bp, Homo sapiens
ccagctgtaatgtaacact

SEQ ID NO: 76738 - DNA, 17 bp, Homo sapiens
tttgaccatcctcagag

SEQ ID NO: 76739 - DNA, 20 bp, Homo sapiens
gggaagtcagaaaggtcttt

SEQ ID NO: 76740 - DNA, 17 bp, Homo sapiens
ccacatttttctgactt

SEQ ID NO: 76741 - DNA, 18 bp, Homo sapiens
tcggatctcgtcaataac

SEQ ID NO: 76742 - DNA, 18 bp, Homo sapiens
gcgataactgctgtaatt

SEQ ID NO: 76743 - DNA, 20 bp, Homo sapiens
atactgtcacatattgtgca

SEQ ID NO: 76744 - DNA, 20 bp, Homo sapiens
gagttggggataaaactgaa

SEQ ID NO: 76745 - DNA, 24 bp, Homo sapiens
cttttctactagagtaaaactaat

SEQ ID NO: 76746 - DNA, 20 bp, Homo sapiens
aggatgaaattcaaggtgtt

SEQ ID NO: 76747 - DNA, 24 bp, Homo sapiens
aaacagaaaatttgaaaagataat

SEQ ID NO: 76748 - DNA, 21 bp, Homo sapiens
aaaatactaaaaaatccttct

SEQ ID NO: 76749 - DNA, 22 bp, Homo sapiens
tctgtattgacatatatacagt

SEQ ID NO: 76750 - DNA, 21 bp, Homo sapiens
cctaccttccaacctttaccc

SEQ ID NO: 76751 - DNA, 25 bp, Homo sapiens
tatataataaattgttataccacaa

SEQ ID NO: 76752 - DNA, 24 bp, Homo sapiens
acatagatatacagatgtcatcat

SEQ ID NO: 76753 - DNA, 24 bp, Homo sapiens
ggttacttatctaaatctctgttt

SEQ ID NO: 76754 - DNA, 23 bp, Homo sapiens
aaataagtaaaaagaattgcttt

SEQ ID NO: 76755 - DNA, 23 bp, Homo sapiens
tgtatcttgtataccaactgatt

SEQ ID NO: 76756 - DNA, 22 bp, Homo sapiens
agagttcaggaccataattaaa

SEQ ID NO: 76757 - DNA, 18 bp, Homo sapiens
cggagctgattcagatgt

SEQ ID NO: 76758 - DNA, 26 bp, Homo sapiens
tcatcagagaataataaataactaat

SEQ ID NO: 76759 - DNA, 20 bp, Homo sapiens
aaactcactctagaaaatca

SEQ ID NO: 76760 - DNA, 19 bp, Homo sapiens
atttgtgttctttcccctc

SEQ ID NO: 76761 - DNA, 20 bp, Homo sapiens
tggaaagatttttccagtct

SEQ ID NO: 76762 - DNA, 25 bp, Homo sapiens
cttttattgtagaaaattacagaca

SEQ ID NO: 76763 - DNA, 20 bp, Homo sapiens
acacatgtactcaactattt

SEQ ID NO: 76764 - DNA, 19 bp, Homo sapiens
gctgaatggcttgattttc

SEQ ID NO: 76765 - DNA, 17 bp, Homo sapiens
agctgtttggtgtaatc

SEQ ID NO: 76766 - DNA, 16 bp, Homo sapiens
aggtgatgcactgctt

SEQ ID NO: 76767 - DNA, 24 bp, Homo sapiens
ctgatcatctgtatgcttacacta

SEQ ID NO: 76768 - DNA, 17 bp, Homo sapiens
cctgcagtaatctcctt

SEQ ID NO: 76769 - DNA, 17 bp, Homo sapiens
cagtttgctcacctttt

SEQ ID NO: 76770 - DNA, 26 bp, Homo sapiens
ctataattaattgaataatgtcatct

SEQ ID NO: 76771 - DNA, 19 bp, Homo sapiens
atcactccttgtgtaaagc

SEQ ID NO: 76772 - DNA, 18 bp, Homo sapiens
ctttcccaagagtctaac

SEQ ID NO: 76773 - DNA, 17 bp, Homo sapiens
ggtcgctaagcaaggag

SEQ ID NO: 76774 - DNA, 19 bp, Homo sapiens
aacttttatactcaaggtt

SEQ ID NO: 76775 - DNA, 20 bp, Homo sapiens
gccttccattttttattaca

SEQ ID NO: 76776 - DNA, 20 bp, Homo sapiens
ttgttttctgtcgtacaaac

SEQ ID NO: 76777 - DNA, 26 bp, Homo sapiens
tacttactgataaatctgtattattt

SEQ ID NO: 76778 - DNA, 19 bp, Homo sapiens
ggctatttccatgcctagt

SEQ ID NO: 76779 - DNA, 22 bp, Homo sapiens
tgtttctttggtatgtaaaagt

SEQ ID NO: 76780 - DNA, 26 bp, Homo sapiens
gaagaaagaaaaattgtaataaaaaa

SEQ ID NO: 76781 - DNA, 22 bp, Homo sapiens
gtccaggcttagcccatttaaa

SEQ ID NO: 76782 - DNA, 19 bp, Homo sapiens
aggatcaatatgtcccaaa

SEQ ID NO: 76783 - DNA, 20 bp, Homo sapiens
ttctgcagtatcacacagtt

SEQ ID NO: 76784 - DNA, 16 bp, Homo sapiens
tccacccatgtttggt

SEQ ID NO: 76785 - DNA, 19 bp, Homo sapiens
acaaagtaatgttttgcct

SEQ ID NO: 76786 - DNA, 17 bp, Homo sapiens
ggaacataggagccaat

SEQ ID NO: 76787 - DNA, 21 bp, Homo sapiens
tcaaaaacttttctggtacaa

SEQ ID NO: 76788 - DNA, 22 bp, Homo sapiens
tgaattaacgtacttaccttgt

SEQ ID NO: 76789 - DNA, 18 bp, Homo sapiens
tgataattaccggaccaa

SEQ ID NO: 76790 - DNA, 19 bp, Homo sapiens
aggaaaattcatgcgataa

SEQ ID NO: 76791 - DNA, 21 bp, Homo sapiens
ttgattaccatcatggctcag

SEQ ID NO: 76792 - DNA, 23 bp, Homo sapiens
cggccttgaaataatttatttaa

SEQ ID NO: 76793 - DNA, 24 bp, Homo sapiens
caattgggattgtggatggcattt

SEQ ID NO: 76794 - DNA, 23 bp, Homo sapiens
acactctttacatccaacatgtt

SEQ ID NO: 76795 - DNA, 21 bp, Homo sapiens
agtcagttcttccataaatgt

SEQ ID NO: 76796 - DNA, 22 bp, Homo sapiens
tatagattcttagtgatctttt

SEQ ID NO: 76797 - DNA, 22 bp, Homo sapiens
tagttcatccaagataaccaag

SEQ ID NO: 76798 - DNA, 24 bp, Homo sapiens
tcctaataagaaagtgaagaggaa

SEQ ID NO: 76799 - DNA, 21 bp, Homo sapiens
tgaaatactcaagtgtagcat

SEQ ID NO: 76800 - DNA, 22 bp, Homo sapiens
gcagacaatatatataaaggac

SEQ ID NO: 76801 - DNA, 24 bp, Homo sapiens
aataatttacaaattaatttcttt

SEQ ID NO: 76802 - DNA, 20 bp, Homo sapiens
cagaaaagcaacatcacagt

SEQ ID NO: 76803 - DNA, 20 bp, Homo sapiens
gtttcaaaacatcacattgt

SEQ ID NO: 76804 - DNA, 17 bp, Homo sapiens
tggaattgccattgcct

SEQ ID NO: 76805 - DNA, 17 bp, Homo sapiens
tgaggtgaggaatgtgt

SEQ ID NO: 76806 - DNA, 22 bp, Homo sapiens
ggtaaaatattaacaattgatt

SEQ ID NO: 76807 - DNA, 16 bp, Homo sapiens
tcacaaactggcggat

SEQ ID NO: 76808 - DNA, 21 bp, Homo sapiens
tttcttgtgacttttaggaag

SEQ ID NO: 76809 - DNA, 19 bp, Homo sapiens
tcctcactgaccaagaatc

SEQ ID NO: 76810 - DNA, 25 bp, Homo sapiens
tttaattacaataaaatttaaaaat

SEQ ID NO: 76811 - DNA, 23 bp, Homo sapiens
atgaaaaccaatatttgtaccaa

SEQ ID NO: 76812 - DNA, 18 bp, Homo sapiens
ccctgtttgtcacccatt

SEQ ID NO: 76813 - DNA, 24 bp, Homo sapiens
tttcattattaataagcagtaagt

SEQ ID NO: 76814 - DNA, 18 bp, Homo sapiens
ccaggtggggaattacca

SEQ ID NO: 76815 - DNA, 19 bp, Homo sapiens
acctaaagcttagcaaaaa

SEQ ID NO: 76816 - DNA, 22 bp, Homo sapiens
acccttttctagacatatcaaa

SEQ ID NO: 76817 - DNA, 21 bp, Homo sapiens
cctctagttatttggtaaagg

SEQ ID NO: 76818 - DNA, 20 bp, Homo sapiens
atttcagattgtacgattta

SEQ ID NO: 76819 - DNA, 17 bp, Homo sapiens
tctccaggaacatctgc

SEQ ID NO: 76820 - DNA, 20 bp, Homo sapiens
atttatttcagctttcaggc

SEQ ID NO: 76821 - DNA, 25 bp, Homo sapiens
accttttcgtatttattaatccttc

SEQ ID NO: 76822 - DNA, 17 bp, Homo sapiens
cctgattttgtcacctt

SEQ ID NO: 76823 - DNA, 21 bp, Homo sapiens
tctttcttggacaacttagaa

SEQ ID NO: 76824 - DNA, 19 bp, Homo sapiens
tggattaaatgtggctaaa

SEQ ID NO: 76825 - DNA, 16 bp, Homo sapiens
tgaagaggtgcttaaa

SEQ ID NO: 76826 - DNA, 18 bp, Homo sapiens
tcaaaagagctggaagga

SEQ ID NO: 76827 - DNA, 17 bp, Homo sapiens
aagctcctttcactgga

SEQ ID NO: 76828 - DNA, 18 bp, Homo sapiens
gcaggtcttgtgcattat

SEQ ID NO: 76829 - DNA, 21 bp, Homo sapiens
tgcccggtattcaagtgttat

SEQ ID NO: 76830 - DNA, 21 bp, Homo sapiens
tgtagtcttcattttaatgaa

SEQ ID NO: 76831 - DNA, 27 bp, Homo sapiens
ccagcaatttcatttattaaataagta

SEQ ID NO: 76832 - DNA, 22 bp, Homo sapiens
actggagagttattttgtacag

SEQ ID NO: 76833 - DNA, 19 bp, Homo sapiens
gcaaagttatggacgatgc

SEQ ID NO: 76834 - DNA, 20 bp, Homo sapiens
aggaatataccatggtcata

SEQ ID NO: 76835 - DNA, 19 bp, Homo sapiens
tggaagaaacacagacttc

SEQ ID NO: 76836 - DNA, 20 bp, Homo sapiens
tctccgtttctccgctatct

SEQ ID NO: 76837 - DNA, 19 bp, Homo sapiens
ctgcctaggcagccgagtc

SEQ ID NO: 76838 - DNA, 22 bp, Homo sapiens
ctttctatcatcagcgtctagt

SEQ ID NO: 76839 - DNA, 19 bp, Homo sapiens
caatgggtgctgcgctccg

SEQ ID NO: 76840 - DNA, 20 bp, Homo sapiens
ggaataatggactagtgtgt

SEQ ID NO: 76841 - DNA, 16 bp, Homo sapiens
gagaggtgttgctggc

SEQ ID NO: 76842 - DNA, 16 bp, Homo sapiens
taagtgctgcaactga

SEQ ID NO: 76843 - DNA, 16 bp, Homo sapiens
ttgctacttgccctcc

SEQ ID NO: 76844 - DNA, 24 bp, Homo sapiens
acagaacagcgaagcagtgcccgg

SEQ ID NO: 76845 - DNA, 16 bp, Homo sapiens
tgagcccgcaggtccc

SEQ ID NO: 76846 - DNA, 24 bp, Homo sapiens
aggctctagtctccgggctgtggg

SEQ ID NO: 76847 - DNA, 20 bp, Homo sapiens
cctcaccaacagccaacaac

SEQ ID NO: 76848 - DNA, 20 bp, Homo sapiens
tcccacctcccacaagatgg

SEQ ID NO: 76849 - DNA, 24 bp, Homo sapiens
cccagggaggcgtacatagggggc

SEQ ID NO: 76850 - DNA, 24 bp, Homo sapiens
ggaagcctagccgctgctcggggg

SEQ ID NO: 76851 - DNA, 16 bp, Homo sapiens
gacccgagaactgagg

SEQ ID NO: 76852 - DNA, 23 bp, Homo sapiens
gctcgatgctgttcccaggtact

SEQ ID NO: 76853 - DNA, 19 bp, Homo sapiens
tacgagcgccgcccgggct

SEQ ID NO: 76854 - DNA, 22 bp, Homo sapiens
ccttctcgggcctcggcgcccc

SEQ ID NO: 76855 - DNA, 22 bp, Homo sapiens
gaggagacgtcaatgcctgcag

SEQ ID NO: 76856 - DNA, 24 bp, Homo sapiens
cccctttgcccgcttctgtaccac

SEQ ID NO: 76857 - DNA, 23 bp, Homo sapiens
gggccgagcaccgtagggtcccg

SEQ ID NO: 76858 - DNA, 21 bp, Homo sapiens
gctgcgtccggcaggagacga

SEQ ID NO: 76859 - DNA, 23 bp, Homo sapiens
tgaatggggagtgcggggagggg

SEQ ID NO: 76860 - DNA, 22 bp, Homo sapiens
gtctggcaggtgagtgaggctg

SEQ ID NO: 76861 - DNA, 16 bp, Homo sapiens
atccactgcgtgagaa

SEQ ID NO: 76862 - DNA, 21 bp, Homo sapiens
ctttgccccgccgctgctcgg

SEQ ID NO: 76863 - DNA, 21 bp, Homo sapiens
cacttgcaggggcgaagctcc

SEQ ID NO: 76864 - DNA, 24 bp, Homo sapiens
ttctctccatgtctcaccctctcc

SEQ ID NO: 76865 - DNA, 20 bp, Homo sapiens
gggaagcgactaaaatggga

SEQ ID NO: 76866 - DNA, 16 bp, Homo sapiens
ctttgcaggtcctcca

SEQ ID NO: 76867 - DNA, 23 bp, Homo sapiens
attttcccaggcagagagtttaa

SEQ ID NO: 76868 - DNA, 20 bp, Homo sapiens
ctttcctggctgctgctgga

SEQ ID NO: 76869 - DNA, 20 bp, Homo sapiens
attcaccggcctttggataa

SEQ ID NO: 76870 - DNA, 19 bp, Homo sapiens
tgggtgggtcgtccgccct

SEQ ID NO: 76871 - DNA, 16 bp, Homo sapiens
acctaaccatccaagg

SEQ ID NO: 76872 - DNA, 21 bp, Homo sapiens
cttgcttcctctaaaagtttt

SEQ ID NO: 76873 - DNA, 18 bp, Homo sapiens
tgaacaatcatttgccaa

SEQ ID NO: 76874 - DNA, 17 bp, Homo sapiens
acaaagaaagggctgtt

SEQ ID NO: 76875 - DNA, 28 bp, Homo sapiens
aaattattcattgtaattcatttaatat

SEQ ID NO: 76876 - DNA, 16 bp, Homo sapiens
tacccctcgggggtat

SEQ ID NO: 76877 - DNA, 24 bp, Homo sapiens
atcgagatgtaatttattactctc

SEQ ID NO: 76878 - DNA, 19 bp, Homo sapiens
ccgcactccgcagtggggc

SEQ ID NO: 76879 - DNA, 18 bp, Homo sapiens
gacctcccccgactcttt

SEQ ID NO: 76880 - DNA, 17 bp, Homo sapiens
gagcgccctggtccgca

SEQ ID NO: 76881 - DNA, 24 bp, Homo sapiens
gctggggactggggccgcgagggc

SEQ ID NO: 76882 - DNA, 23 bp, Homo sapiens
gcaccaatacagccacatgtcgg

SEQ ID NO: 76883 - DNA, 16 bp, Homo sapiens
cggggccctgtgcccc

SEQ ID NO: 76884 - DNA, 22 bp, Homo sapiens
accccatttccgagtccggcag

SEQ ID NO: 76885 - DNA, 24 bp, Homo sapiens
gaagcagctgtgtaatccgctgga

SEQ ID NO: 76886 - DNA, 24 bp, Homo sapiens
agggaaaaccaccttcccccctcc

SEQ ID NO: 76887 - DNA, 20 bp, Homo sapiens
attggctgggtgtgggcgca

SEQ ID NO: 76888 - DNA, 18 bp, Homo sapiens
atgctgcagtggaccctg

SEQ ID NO: 76889 - DNA, 24 bp, Homo sapiens
agggtgtcactggagacagaatgg

SEQ ID NO: 76890 - DNA, 21 bp, Homo sapiens
gaaatccatctccagtgctgc

SEQ ID NO: 76891 - DNA, 20 bp, Homo sapiens
catggccaggcttgctgcgg

SEQ ID NO: 76892 - DNA, 20 bp, Homo sapiens
aacacttctacccctccccc

SEQ ID NO: 76893 - DNA, 19 bp, Homo sapiens
atggcctttccttggcaca

SEQ ID NO: 76894 - DNA, 22 bp, Homo sapiens
gcattataaaaacaaaaacccc

SEQ ID NO: 76895 - DNA, 18 bp, Homo sapiens
cgtccccccgccccccac

SEQ ID NO: 76896 - DNA, 16 bp, Homo sapiens
gttgtcctctacccgt

SEQ ID NO: 76897 - DNA, 22 bp, Homo sapiens
tgaacaatattgttttgagacc

SEQ ID NO: 76898 - DNA, 19 bp, Homo sapiens
ctccatcttcagtgcctca

SEQ ID NO: 76899 - DNA, 19 bp, Homo sapiens
gttttgtttcctttacccc

SEQ ID NO: 76900 - DNA, 20 bp, Homo sapiens
ttccagttttgtaagatgat

SEQ ID NO: 76901 - DNA, 19 bp, Homo sapiens
caaaatcctttttaacctt

SEQ ID NO: 76902 - DNA, 24 bp, Homo sapiens
ctgaataaaaatggataaactaca

SEQ ID NO: 76903 - DNA, 19 bp, Homo sapiens
atgatcagttgttaaagca

SEQ ID NO: 76904 - DNA, 26 bp, Homo sapiens
ttaaaatacacttttaagtaaagtgt

SEQ ID NO: 76905 - DNA, 23 bp, Homo sapiens
gctagaagataattccaatcatc

SEQ ID NO: 76906 - DNA, 28 bp, Homo sapiens
atatcttatttaaaaatataaatgctaa

SEQ ID NO: 76907 - DNA, 25 bp, Homo sapiens
tttggccatgatttatttattaata

SEQ ID NO: 76908 - DNA, 18 bp, Homo sapiens
ccagaagaagccatagct

SEQ ID NO: 76909 - DNA, 18 bp, Homo sapiens
ctgaatttttttctcagc

SEQ ID NO: 76910 - DNA, 24 bp, Homo sapiens
aaaattattttaaaacaccttttt

SEQ ID NO: 76911 - DNA, 23 bp, Homo sapiens
tgaagttatttagaatttcatgt

SEQ ID NO: 76912 - DNA, 17 bp, Homo sapiens
tcgagagaagctgtact

SEQ ID NO: 76913 - DNA, 19 bp, Homo sapiens
aaggaagtattgaagatga

SEQ ID NO: 76914 - DNA, 18 bp, Homo sapiens
aacaattacatcctgagg

SEQ ID NO: 76915 - DNA, 18 bp, Homo sapiens
gacccaagtggacttttc

SEQ ID NO: 76916 - DNA, 16 bp, Homo sapiens
accgcagttttactcc

SEQ ID NO: 76917 - DNA, 21 bp, Homo sapiens
tttgtggttaaaatgtaaacc

SEQ ID NO: 76918 - DNA, 16 bp, Homo sapiens
ctccagaacggcttga

SEQ ID NO: 76919 - DNA, 16 bp, Homo sapiens
agactgcttaaagcaa

SEQ ID NO: 76920 - DNA, 22 bp, Homo sapiens
tactttctctgcttccatttac

SEQ ID NO: 76921 - DNA, 18 bp, Homo sapiens
agcagtaatttccctgga

SEQ ID NO: 76922 - DNA, 21 bp, Homo sapiens
gcaatgtttactatatgaaga

SEQ ID NO: 76923 - DNA, 17 bp, Homo sapiens
agccgggaaggatctgt

SEQ ID NO: 76924 - DNA, 27 bp, Homo sapiens
cacctactataaattcacaatttaaat

SEQ ID NO: 76925 - DNA, 19 bp, Homo sapiens
ttccaagaagagggtttgt

SEQ ID NO: 76926 - DNA, 20 bp, Homo sapiens
acatgctatctttgagttta

SEQ ID NO: 76927 - DNA, 21 bp, Homo sapiens
aacttgagaaagagaggtaac

SEQ ID NO: 76928 - DNA, 18 bp, Homo sapiens
attctaagtcctaccttt

SEQ ID NO: 76929 - DNA, 21 bp, Homo sapiens
ccagtctttttccttttcttc

SEQ ID NO: 76930 - DNA, 20 bp, Homo sapiens
tcattattagcactttaggt

SEQ ID NO: 76931 - DNA, 19 bp, Homo sapiens
agttaaaggaagactatct

SEQ ID NO: 76932 - DNA, 23 bp, Homo sapiens
tctgcagtctttattagcattgt

SEQ ID NO: 76933 - DNA, 23 bp, Homo sapiens
tttaaaatatcaagttattaaag

SEQ ID NO: 76934 - DNA, 16 bp, Homo sapiens
tcttgctgatcttgac

SEQ ID NO: 76935 - DNA, 22 bp, Homo sapiens
aaacatattgcaatttacaaat

SEQ ID NO: 76936 - DNA, 23 bp, Homo sapiens
cttcagaatctcactaaaagaat

SEQ ID NO: 76937 - DNA, 23 bp, Homo sapiens
tttaccaacaaaaattcattaac

SEQ ID NO: 76938 - DNA, 19 bp, Homo sapiens
aaacactccttggagtaaa

SEQ ID NO: 76939 - DNA, 17 bp, Homo sapiens
ctctgatttgccttgct

SEQ ID NO: 76940 - DNA, 22 bp, Homo sapiens
attcattttctttattggttct

SEQ ID NO: 76941 - DNA, 18 bp, Homo sapiens
aacttacctgtgctcgtt

SEQ ID NO: 76942 - DNA, 26 bp, Homo sapiens
atacaagatattgatacttttttatt

SEQ ID NO: 76943 - DNA, 18 bp, Homo sapiens
cagagctgtaattcattt

SEQ ID NO: 76944 - DNA, 21 bp, Homo sapiens
caattggaatatgaagcaagg

SEQ ID NO: 76945 - DNA, 19 bp, Homo sapiens
ttgaaatagagccaaaata

SEQ ID NO: 76946 - DNA, 24 bp, Homo sapiens
taggtacctgccaggatatggaaa

SEQ ID NO: 76947 - DNA, 17 bp, Homo sapiens
gtccttttcgatttgct

SEQ ID NO: 76948 - DNA, 21 bp, Homo sapiens
agctttttaaatgagaatgat

SEQ ID NO: 76949 - DNA, 19 bp, Homo sapiens
ggcaatttactaacctctg

SEQ ID NO: 76950 - DNA, 27 bp, Homo sapiens
atgattatttctattaatattattaat

SEQ ID NO: 76951 - DNA, 24 bp, Homo sapiens
taaattatacatgttttcttttct

SEQ ID NO: 76952 - DNA, 16 bp, Homo sapiens
agccagaattcagcaa

SEQ ID NO: 76953 - DNA, 19 bp, Homo sapiens
tcacgaaaaaaattacggt

SEQ ID NO: 76954 - DNA, 17 bp, Homo sapiens
agcaacagaagcagagg

SEQ ID NO: 76955 - DNA, 20 bp, Homo sapiens
gtactggaggttatgaagtg

SEQ ID NO: 76956 - DNA, 16 bp, Homo sapiens
accttcattctgccgc

SEQ ID NO: 76957 - DNA, 20 bp, Homo sapiens
attcagagctttaaagcaaa

SEQ ID NO: 76958 - DNA, 26 bp, Homo sapiens
aaatatgataaaataatttatttacc

SEQ ID NO: 76959 - DNA, 20 bp, Homo sapiens
tgtactgatgttaactccat

SEQ ID NO: 76960 - DNA, 19 bp, Homo sapiens
tagatcattcttagaacca

SEQ ID NO: 76961 - DNA, 17 bp, Homo sapiens
cggctcacatgatgctg

SEQ ID NO: 76962 - DNA, 18 bp, Homo sapiens
actgaatgcttctggaaa

SEQ ID NO: 76963 - DNA, 17 bp, Homo sapiens
acttctggtaatggtca

SEQ ID NO: 76964 - DNA, 22 bp, Homo sapiens
agcgtataggtaaaaaatattt

SEQ ID NO: 76965 - DNA, 20 bp, Homo sapiens
gagtgtgtgctactagaact

SEQ ID NO: 76966 - DNA, 21 bp, Homo sapiens
ttatcatacagacacttcatt

SEQ ID NO: 76967 - DNA, 21 bp, Homo sapiens
tgtaatcttctgttaccttgg

SEQ ID NO: 76968 - DNA, 25 bp, Homo sapiens
tatagtctaaattataccatctata

SEQ ID NO: 76969 - DNA, 16 bp, Homo sapiens
cactgcacctggccaa

SEQ ID NO: 76970 - DNA, 23 bp, Homo sapiens
ccatgaaacagccagtgttttga

SEQ ID NO: 76971 - DNA, 23 bp, Homo sapiens
tgacaagtcatctgggaaccaag

SEQ ID NO: 76972 - DNA, 19 bp, Homo sapiens
atcctggaaaggttttccg

SEQ ID NO: 76973 - DNA, 19 bp, Homo sapiens
tcgcgacatatcatcctta

SEQ ID NO: 76974 - DNA, 21 bp, Homo sapiens
ttatagtaaatatcccattca

SEQ ID NO: 76975 - DNA, 17 bp, Homo sapiens
cagactgtcgcatggat

SEQ ID NO: 76976 - DNA, 20 bp, Homo sapiens
agtcgtaattttgtttctaa

SEQ ID NO: 76977 - DNA, 22 bp, Homo sapiens
atttcccaacaatacagagtct

SEQ ID NO: 76978 - DNA, 23 bp, Homo sapiens
ttgttgtcaatgcttggtactca

SEQ ID NO: 76979 - DNA, 20 bp, Homo sapiens
gaatgatgttgtggagtgct

SEQ ID NO: 76980 - DNA, 24 bp, Homo sapiens
gctcccaagacagctgtatatcca

SEQ ID NO: 76981 - DNA, 20 bp, Homo sapiens
tgttccaaaagatgaaggac

SEQ ID NO: 76982 - DNA, 20 bp, Homo sapiens
ttacatggcaatgacaaaga

SEQ ID NO: 76983 - DNA, 16 bp, Homo sapiens
gcctggttcatgagct

SEQ ID NO: 76984 - DNA, 16 bp, Homo sapiens
gggccagggccagtgc

SEQ ID NO: 76985 - DNA, 16 bp, Homo sapiens
tgaaacatgcactacg

SEQ ID NO: 76986 - DNA, 16 bp, Homo sapiens
caggcgtgaaatccga

SEQ ID NO: 76987 - DNA, 19 bp, Homo sapiens
cttagtcataaagacagca

SEQ ID NO: 76988 - DNA, 22 bp, Homo sapiens
aaacctgttgggagtggcagga

SEQ ID NO: 76989 - DNA, 21 bp, Homo sapiens
ttctagggaaatacagactta

SEQ ID NO: 76990 - DNA, 24 bp, Homo sapiens
tattttttgttccacatttgtagt

SEQ ID NO: 76991 - DNA, 18 bp, Homo sapiens
agaacacacacagcagga

SEQ ID NO: 76992 - DNA, 18 bp, Homo sapiens
ttccgtgaattagggtta

SEQ ID NO: 76993 - DNA, 17 bp, Homo sapiens
tttgtcttacctagttc

SEQ ID NO: 76994 - DNA, 19 bp, Homo sapiens
gctcttcaaataacaaagc

SEQ ID NO: 76995 - DNA, 19 bp, Homo sapiens
actatactgaatttctacc

SEQ ID NO: 76996 - DNA, 19 bp, Homo sapiens
tgaacatcagatctgtcct

SEQ ID NO: 76997 - DNA, 17 bp, Homo sapiens
agaagttggtggcctta

SEQ ID NO: 76998 - DNA, 18 bp, Homo sapiens
gcatagacatgcaatgaa

SEQ ID NO: 76999 - DNA, 22 bp, Homo sapiens
acagaagttctttataacagtt

SEQ ID NO: 77000 - DNA, 17 bp, Homo sapiens
tacatttcacagtccac

SEQ ID NO: 77001 - DNA, 20 bp, Homo sapiens
tattctcattgattgagttt

SEQ ID NO: 77002 - DNA, 21 bp, Homo sapiens
gtcaagtttgtcaaagccatt

SEQ ID NO: 77003 - DNA, 21 bp, Homo sapiens
tgttttattttagatgattgt

SEQ ID NO: 77004 - DNA, 20 bp, Homo sapiens
gctatcttaagaaatacatg

SEQ ID NO: 77005 - DNA, 19 bp, Homo sapiens
cattgcagaattattgcaa

SEQ ID NO: 77006 - DNA, 22 bp, Homo sapiens
aggagagtgaaaaaaaagaaaa

SEQ ID NO: 77007 - DNA, 18 bp, Homo sapiens
ctaagacgatatgctgga

SEQ ID NO: 77008 - DNA, 18 bp, Homo sapiens
taaagataagcgaatgtg

SEQ ID NO: 77009 - DNA, 22 bp, Homo sapiens
tgtcttttatttaggtaatctt

SEQ ID NO: 77010 - DNA, 18 bp, Homo sapiens
tcagattttagttgggcc

SEQ ID NO: 77011 - DNA, 22 bp, Homo sapiens
taatgaaaactgaattagacat

SEQ ID NO: 77012 - DNA, 24 bp, Homo sapiens
tcaaagaaaaagagaaaaaagaaa

SEQ ID NO: 77013 - DNA, 21 bp, Homo sapiens
gttgtctttttaatgatcctc

SEQ ID NO: 77014 - DNA, 18 bp, Homo sapiens
gctgagattgcacaactg

SEQ ID NO: 77015 - DNA, 22 bp, Homo sapiens
gaaaggctgcatgagagcactt

SEQ ID NO: 77016 - DNA, 17 bp, Homo sapiens
cctcgagaggctgaagt

SEQ ID NO: 77017 - DNA, 23 bp, Homo sapiens
acgtctttttactatttacatct

SEQ ID NO: 77018 - DNA, 24 bp, Homo sapiens
tttcttaatagatttctattctta

SEQ ID NO: 77019 - DNA, 24 bp, Homo sapiens
aaggtacctttttaacttctaaag

SEQ ID NO: 77020 - DNA, 24 bp, Homo sapiens
ttatgtataaattaatctaaaatt

SEQ ID NO: 77021 - DNA, 21 bp, Homo sapiens
aggcagcaaaaaaaagccaaa

SEQ ID NO: 77022 - DNA, 16 bp, Homo sapiens
ttgtcttggcgagcag

SEQ ID NO: 77023 - DNA, 26 bp, Homo sapiens
attcatattatagtactgaataatac

SEQ ID NO: 77024 - DNA, 20 bp, Homo sapiens
gtgaaagcattgatggaatg

SEQ ID NO: 77025 - DNA, 20 bp, Homo sapiens
acatttttctaaatggaaag

SEQ ID NO: 77026 - DNA, 16 bp, Homo sapiens
gtgcaatgtgctgaca

SEQ ID NO: 77027 - DNA, 28 bp, Homo sapiens
agattaaaaaatagcttttattcaatat

SEQ ID NO: 77028 - DNA, 19 bp, Homo sapiens
ggtaagtaagagtgccaac

SEQ ID NO: 77029 - DNA, 21 bp, Homo sapiens
ccaactctaattagatgaccc

SEQ ID NO: 77030 - DNA, 18 bp, Homo sapiens
tccgtaatatcccacctc

SEQ ID NO: 77031 - DNA, 22 bp, Homo sapiens
gagtgccttatggaatttgtca

SEQ ID NO: 77032 - DNA, 22 bp, Homo sapiens
tttaaaagtaatataaaactct

SEQ ID NO: 77033 - DNA, 18 bp, Homo sapiens
ctgtagatggtgcacttg

SEQ ID NO: 77034 - DNA, 26 bp, Homo sapiens
catgattatataaaacattgcttaca

SEQ ID NO: 77035 - DNA, 18 bp, Homo sapiens
gccattattgaaagtgga

SEQ ID NO: 77036 - DNA, 21 bp, Homo sapiens
ttaaactaagagttagtagtt

SEQ ID NO: 77037 - DNA, 23 bp, Homo sapiens
tttaaaacattaaacattacatg

SEQ ID NO: 77038 - DNA, 25 bp, Homo sapiens
tttaagtgttgtaataaagtttgta

SEQ ID NO: 77039 - DNA, 23 bp, Homo sapiens
tataggataattggtacaatcat

SEQ ID NO: 77040 - DNA, 18 bp, Homo sapiens
tgagagattccacaaagt

SEQ ID NO: 77041 - DNA, 21 bp, Homo sapiens
tactgcatacacattgtgacc

SEQ ID NO: 77042 - DNA, 17 bp, Homo sapiens
aggttcttgagcatgct

SEQ ID NO: 77043 - DNA, 19 bp, Homo sapiens
agaacaactgtctacaaac

SEQ ID NO: 77044 - DNA, 18 bp, Homo sapiens
gagattccttaaagctgc

SEQ ID NO: 77045 - DNA, 24 bp, Homo sapiens
caatagtcagtaatgcatgtggaa

SEQ ID NO: 77046 - DNA, 16 bp, Homo sapiens
gcaagcttgagccagg

SEQ ID NO: 77047 - DNA, 19 bp, Homo sapiens
agcattatgggacatgggg

SEQ ID NO: 77048 - DNA, 18 bp, Homo sapiens
aagtgctgagcatctaat

SEQ ID NO: 77049 - DNA, 17 bp, Homo sapiens
gctatgggaagtgctgc

SEQ ID NO: 77050 - DNA, 18 bp, Homo sapiens
tctgcttactacgatgag

SEQ ID NO: 77051 - DNA, 17 bp, Homo sapiens
acaaggatgccaatatt

SEQ ID NO: 77052 - DNA, 19 bp, Homo sapiens
tatcatcatgtcgattggt

SEQ ID NO: 77053 - DNA, 16 bp, Homo sapiens
aagccctagaagcaga

SEQ ID NO: 77054 - DNA, 24 bp, Homo sapiens
tgtagtattcaaatatggtgaaag

SEQ ID NO: 77055 - DNA, 21 bp, Homo sapiens
tagacaatttaagtcccaagg

SEQ ID NO: 77056 - DNA, 19 bp, Homo sapiens
ctttttcagaacgagaact

SEQ ID NO: 77057 - DNA, 20 bp, Homo sapiens
atggtgattatgtttttgac

SEQ ID NO: 77058 - DNA, 16 bp, Homo sapiens
tctgttgctggatggt

SEQ ID NO: 77059 - DNA, 21 bp, Homo sapiens
ctggcaacatgactgtccttt

SEQ ID NO: 77060 - DNA, 16 bp, Homo sapiens
caatctgggctgcagt

SEQ ID NO: 77061 - DNA, 20 bp, Homo sapiens
caagaggaagcttagatagt

SEQ ID NO: 77062 - DNA, 16 bp, Homo sapiens
acccagaacttctgtc

SEQ ID NO: 77063 - DNA, 18 bp, Homo sapiens
ttggtctaggcaactacc

SEQ ID NO: 77064 - DNA, 16 bp, Homo sapiens
cagcagagcttcttct

SEQ ID NO: 77065 - DNA, 16 bp, Homo sapiens
tgcagatctccaccac

SEQ ID NO: 77066 - DNA, 17 bp, Homo sapiens
ggcatagaacatgtcct

SEQ ID NO: 77067 - DNA, 17 bp, Homo sapiens
cctctcaggaagacaga

SEQ ID NO: 77068 - DNA, 23 bp, Homo sapiens
cactactactgacactatttaaa

SEQ ID NO: 77069 - DNA, 19 bp, Homo sapiens
gagaaatgcacttagaaga

SEQ ID NO: 77070 - DNA, 21 bp, Homo sapiens
catcttcagaataggattcaa

SEQ ID NO: 77071 - DNA, 20 bp, Homo sapiens
ctaagtcggaaaattcaaat

SEQ ID NO: 77072 - DNA, 19 bp, Homo sapiens
tgtattttatgggctaggt

SEQ ID NO: 77073 - DNA, 25 bp, Homo sapiens
agagatcttcaaatgatagtttaaa

SEQ ID NO: 77074 - DNA, 20 bp, Homo sapiens
agactataatttattggtgt

SEQ ID NO: 77075 - DNA, 22 bp, Homo sapiens
aagaggtcaaatgaaaccctcg

SEQ ID NO: 77076 - DNA, 19 bp, Homo sapiens
gcccatctttcattctgtg

SEQ ID NO: 77077 - DNA, 17 bp, Homo sapiens
atggtcaatacccagcc

SEQ ID NO: 77078 - DNA, 16 bp, Homo sapiens
attgtctttgctcact

SEQ ID NO: 77079 - DNA, 18 bp, Homo sapiens
ggagaactagatacacca

SEQ ID NO: 77080 - DNA, 19 bp, Homo sapiens
gttggaacttgaggtgttt

SEQ ID NO: 77081 - DNA, 23 bp, Homo sapiens
gttgaactctggaaggcaaagtc

SEQ ID NO: 77082 - DNA, 17 bp, Homo sapiens
ttggctccccgtgacct

SEQ ID NO: 77083 - DNA, 24 bp, Homo sapiens
agaagatgaaataaaacaaagtga

SEQ ID NO: 77084 - DNA, 16 bp, Homo sapiens
agactggcttacattt

SEQ ID NO: 77085 - DNA, 16 bp, Homo sapiens
actgagagcactgatg

SEQ ID NO: 77086 - DNA, 17 bp, Homo sapiens
tcagagtaacgttcact

SEQ ID NO: 77087 - DNA, 20 bp, Homo sapiens
atgtgtttctccatacaggt

SEQ ID NO: 77088 - DNA, 24 bp, Homo sapiens
ctcttcattatattttatgctata

SEQ ID NO: 77089 - DNA, 23 bp, Homo sapiens
tgggttctaatcatggaattaat

SEQ ID NO: 77090 - DNA, 20 bp, Homo sapiens
gaaggaatatctgtggcata

SEQ ID NO: 77091 - DNA, 17 bp, Homo sapiens
tgataagcctaccaatt

SEQ ID NO: 77092 - DNA, 18 bp, Homo sapiens
ggttttactgctttgtcc

SEQ ID NO: 77093 - DNA, 22 bp, Homo sapiens
gagagaccaacaaattatagca

SEQ ID NO: 77094 - DNA, 16 bp, Homo sapiens
ttctgcctcttggcat

SEQ ID NO: 77095 - DNA, 23 bp, Homo sapiens
attatagtttaaaatatgccaca

SEQ ID NO: 77096 - DNA, 16 bp, Homo sapiens
tgcaagtggcagcctt

SEQ ID NO: 77097 - DNA, 19 bp, Homo sapiens
aaagagttcatctggacaa

SEQ ID NO: 77098 - DNA, 17 bp, Homo sapiens
ggagtatcttctacaca

SEQ ID NO: 77099 - DNA, 16 bp, Homo sapiens
acgtccacaccttcat

SEQ ID NO: 77100 - DNA, 20 bp, Homo sapiens
catcctatttcatcttcagc

SEQ ID NO: 77101 - DNA, 21 bp, Homo sapiens
cacagagtagaagtggtcagc

SEQ ID NO: 77102 - DNA, 21 bp, Homo sapiens
ttcttttatttctgctatttg

SEQ ID NO: 77103 - DNA, 20 bp, Homo sapiens
acaatacagacttattgtgt

SEQ ID NO: 77104 - DNA, 16 bp, Homo sapiens
ggtgctgtgacactgc

SEQ ID NO: 77105 - DNA, 24 bp, Homo sapiens
attatcatctttgtcatcagctga

SEQ ID NO: 77106 - DNA, 18 bp, Homo sapiens
tgcctggctgattctgaa

SEQ ID NO: 77107 - DNA, 21 bp, Homo sapiens
gcagattctgctaataccctg

SEQ ID NO: 77108 - DNA, 16 bp, Homo sapiens
tgggtgtctgagcacc

SEQ ID NO: 77109 - DNA, 20 bp, Homo sapiens
ctgaagatcctgtgagcgaa

SEQ ID NO: 77110 - DNA, 19 bp, Homo sapiens
aagtacatctgctaaacat

SEQ ID NO: 77111 - DNA, 18 bp, Homo sapiens
ctgcagggttctagttta

SEQ ID NO: 77112 - DNA, 16 bp, Homo sapiens
cactctgaacggagct

SEQ ID NO: 77113 - DNA, 18 bp, Homo sapiens
gagcgaaatctccctcca

SEQ ID NO: 77114 - DNA, 18 bp, Homo sapiens
gtccagggctatctggaa

SEQ ID NO: 77115 - DNA, 20 bp, Homo sapiens
atgttcaggagaccccactc

SEQ ID NO: 77116 - DNA, 16 bp, Homo sapiens
gtttgagctgtttgag

SEQ ID NO: 77117 - DNA, 16 bp, Homo sapiens
gagtcgttcgattgcc

SEQ ID NO: 77118 - DNA, 16 bp, Homo sapiens
ttaggtccactctctc

SEQ ID NO: 77119 - DNA, 24 bp, Homo sapiens
gcattataagccccagtgatcttc

SEQ ID NO: 77120 - DNA, 18 bp, Homo sapiens
taaagtatcagcatctgg

SEQ ID NO: 77121 - DNA, 20 bp, Homo sapiens
aacacctccaccacctcctc

SEQ ID NO: 77122 - DNA, 16 bp, Homo sapiens
agcactcaggctggat

SEQ ID NO: 77123 - DNA, 18 bp, Homo sapiens
acctactgctgaaaagag

SEQ ID NO: 77124 - DNA, 18 bp, Homo sapiens
ctgaactggaggcattat

SEQ ID NO: 77125 - DNA, 18 bp, Homo sapiens
cagagggtccaggttctt

SEQ ID NO: 77126 - DNA, 19 bp, Homo sapiens
ttggttttcatttgattct

SEQ ID NO: 77127 - DNA, 18 bp, Homo sapiens
ccagatggattttcttgt

SEQ ID NO: 77128 - DNA, 21 bp, Homo sapiens
tcatcatcatctgaatcatct

SEQ ID NO: 77129 - DNA, 23 bp, Homo sapiens
tacagaaagatgtggaattaaga

SEQ ID NO: 77130 - DNA, 18 bp, Homo sapiens
tgatgactttgttggcat

SEQ ID NO: 77131 - DNA, 24 bp, Homo sapiens
aatgaaacagaatcagagcagcct

SEQ ID NO: 77132 - DNA, 16 bp, Homo sapiens
tccttgccacaggtgg

SEQ ID NO: 77133 - DNA, 17 bp, Homo sapiens
tgattctgaaaaggacc

SEQ ID NO: 77134 - DNA, 16 bp, Homo sapiens
tgcttttggggttgca

SEQ ID NO: 77135 - DNA, 22 bp, Homo sapiens
aatgtattatttctgccatgcc

SEQ ID NO: 77136 - DNA, 16 bp, Homo sapiens
taggtgtcccttcaac

SEQ ID NO: 77137 - DNA, 17 bp, Homo sapiens
ctgcttcaaaattacct

SEQ ID NO: 77138 - DNA, 17 bp, Homo sapiens
ctcatttggaggggatt

SEQ ID NO: 77139 - DNA, 23 bp, Homo sapiens
acaaacttctaccatcacaaaac

SEQ ID NO: 77140 - DNA, 19 bp, Homo sapiens
gaatggtatctcgtttttc

SEQ ID NO: 77141 - DNA, 20 bp, Homo sapiens
atgatatgccacgggtgtat

SEQ ID NO: 77142 - DNA, 17 bp, Homo sapiens
tggttacagatgaggtt

SEQ ID NO: 77143 - DNA, 20 bp, Homo sapiens
gtgatctaacaatcgaatcc

SEQ ID NO: 77144 - DNA, 22 bp, Homo sapiens
agaattaatgcattctgcaaga

SEQ ID NO: 77145 - DNA, 16 bp, Homo sapiens
gcacagtcaggtgaat

SEQ ID NO: 77146 - DNA, 19 bp, Homo sapiens
ggacctggtccattatctt

SEQ ID NO: 77147 - DNA, 24 bp, Homo sapiens
agaagtacagatgaggctcaagga

SEQ ID NO: 77148 - DNA, 18 bp, Homo sapiens
ttcttaccatctaactga

SEQ ID NO: 77149 - DNA, 17 bp, Homo sapiens
aagcagaggaaggtgat

SEQ ID NO: 77150 - DNA, 19 bp, Homo sapiens
ttacacgtgtcctatattc

SEQ ID NO: 77151 - DNA, 17 bp, Homo sapiens
gtcacaagcctttccgt

SEQ ID NO: 77152 - DNA, 18 bp, Homo sapiens
tgttgtctgagaaaactc

SEQ ID NO: 77153 - DNA, 16 bp, Homo sapiens
ttctgcacccaacaaa

SEQ ID NO: 77154 - DNA, 18 bp, Homo sapiens
tgggagcttatcattgaa

SEQ ID NO: 77155 - DNA, 21 bp, Homo sapiens
aaacctataccacaaaatact

SEQ ID NO: 77156 - DNA, 18 bp, Homo sapiens
aggcgtgtaatgatgagg

SEQ ID NO: 77157 - DNA, 16 bp, Homo sapiens
aaatgctgagagagtt

SEQ ID NO: 77158 - DNA, 22 bp, Homo sapiens
tcatcatcaaaatctagagaac

SEQ ID NO: 77159 - DNA, 21 bp, Homo sapiens
tgaaaaataattccaaggtct

SEQ ID NO: 77160 - DNA, 22 bp, Homo sapiens
tgattccttattttcttttgcc

SEQ ID NO: 77161 - DNA, 22 bp, Homo sapiens
aggaagttttgcttttgattca

SEQ ID NO: 77162 - DNA, 20 bp, Homo sapiens
tcttattagctgattgttgg

SEQ ID NO: 77163 - DNA, 20 bp, Homo sapiens
cacgaaatgattctttgagt

SEQ ID NO: 77164 - DNA, 19 bp, Homo sapiens
tgtttctgaagtatgggtt

SEQ ID NO: 77165 - DNA, 22 bp, Homo sapiens
cagggaaaaggctgaattaaga

SEQ ID NO: 77166 - DNA, 16 bp, Homo sapiens
cagttgctgcccctct

SEQ ID NO: 77167 - DNA, 17 bp, Homo sapiens
acacagaactaacctcc

SEQ ID NO: 77168 - DNA, 22 bp, Homo sapiens
agaactcagagaggaattatga

SEQ ID NO: 77169 - DNA, 20 bp, Homo sapiens
gccaataaatcgaggtcagc

SEQ ID NO: 77170 - DNA, 20 bp, Homo sapiens
tcagtctctttgataggttc

SEQ ID NO: 77171 - DNA, 22 bp, Homo sapiens
gtcatccaaagacataccagac

SEQ ID NO: 77172 - DNA, 17 bp, Homo sapiens
gcatagcctgatgcttg

SEQ ID NO: 77173 - DNA, 20 bp, Homo sapiens
ttgaaaatactccggtttgc

SEQ ID NO: 77174 - DNA, 20 bp, Homo sapiens
gagaactgagagaactgttt

SEQ ID NO: 77175 - DNA, 21 bp, Homo sapiens
gaccaagaaaacaacaataaa

SEQ ID NO: 77176 - DNA, 22 bp, Homo sapiens
ttttcttttttggcattgcgga

SEQ ID NO: 77177 - DNA, 20 bp, Homo sapiens
gggagaaccaagtaaacctc

SEQ ID NO: 77178 - DNA, 19 bp, Homo sapiens
gccacccatatttctggga

SEQ ID NO: 77179 - DNA, 21 bp, Homo sapiens
gataccccagtttgtttctca

SEQ ID NO: 77180 - DNA, 18 bp, Homo sapiens
tgttctgaatctggtctc

SEQ ID NO: 77181 - DNA, 18 bp, Homo sapiens
gacctgttgcaggaatgt

SEQ ID NO: 77182 - DNA, 17 bp, Homo sapiens
gcaccttcctgaatagc

SEQ ID NO: 77183 - DNA, 20 bp, Homo sapiens
agggtgataatgaaaaacat

SEQ ID NO: 77184 - DNA, 17 bp, Homo sapiens
gacgaagcttgtctaga

SEQ ID NO: 77185 - DNA, 21 bp, Homo sapiens
ctgacacttgatttgaaagat

SEQ ID NO: 77186 - DNA, 18 bp, Homo sapiens
aaatggtgatcccagaga

SEQ ID NO: 77187 - DNA, 18 bp, Homo sapiens
ttttgattggaaagctat

SEQ ID NO: 77188 - DNA, 16 bp, Homo sapiens
gaattcgtgggccttt

SEQ ID NO: 77189 - DNA, 16 bp, Homo sapiens
agctgctgctgctgca

SEQ ID NO: 77190 - DNA, 20 bp, Homo sapiens
cctcctttgattcctttact

SEQ ID NO: 77191 - DNA, 20 bp, Homo sapiens
gaaatcaggaatctctctgg

SEQ ID NO: 77192 - DNA, 23 bp, Homo sapiens
aaatttctgaattagatcgaact

SEQ ID NO: 77193 - DNA, 22 bp, Homo sapiens
aaaaccctttacaagtaataaa

SEQ ID NO: 77194 - DNA, 16 bp, Homo sapiens
tgcctcgagagattga

SEQ ID NO: 77195 - DNA, 23 bp, Homo sapiens
ctaaaaagatagaatctgaaagt

SEQ ID NO: 77196 - DNA, 16 bp, Homo sapiens
tagaaacaggacttgt

SEQ ID NO: 77197 - DNA, 24 bp, Homo sapiens
aagtttgattactggaaaagttcg

SEQ ID NO: 77198 - DNA, 16 bp, Homo sapiens
ggtggctgtttgacct

SEQ ID NO: 77199 - DNA, 18 bp, Homo sapiens
cttcaagcaaacatgcct

SEQ ID NO: 77200 - DNA, 17 bp, Homo sapiens
ctgcctggcaacagggc

SEQ ID NO: 77201 - DNA, 20 bp, Homo sapiens
ttcgaaatagctcctcaagt

SEQ ID NO: 77202 - DNA, 18 bp, Homo sapiens
ggtcgaatctctagatcc

SEQ ID NO: 77203 - DNA, 19 bp, Homo sapiens
ctccaaaagccctagtgaa

SEQ ID NO: 77204 - DNA, 20 bp, Homo sapiens
attgagtttcggccaggaga

SEQ ID NO: 77205 - DNA, 17 bp, Homo sapiens
aatcagaattaagccct

SEQ ID NO: 77206 - DNA, 17 bp, Homo sapiens
gtccttggaagttgaga

SEQ ID NO: 77207 - DNA, 18 bp, Homo sapiens
aaagcaccttctagatca

SEQ ID NO: 77208 - DNA, 22 bp, Homo sapiens
cctggagatgtatatgacattt

SEQ ID NO: 77209 - DNA, 20 bp, Homo sapiens
agtagacctatacagtctcc

SEQ ID NO: 77210 - DNA, 20 bp, Homo sapiens
ctactggcattcttggataa

SEQ ID NO: 77211 - DNA, 22 bp, Homo sapiens
agtcctcctaacaaattatctc

SEQ ID NO: 77212 - DNA, 20 bp, Homo sapiens
tggctccattaccattattc

SEQ ID NO: 77213 - DNA, 16 bp, Homo sapiens
gtcctcaggttctgga

SEQ ID NO: 77214 - DNA, 19 bp, Homo sapiens
cagattcacttccacttga

SEQ ID NO: 77215 - DNA, 20 bp, Homo sapiens
aaccttaccaaacaaacagg

SEQ ID NO: 77216 - DNA, 17 bp, Homo sapiens
gcttggagcttctttga

SEQ ID NO: 77217 - DNA, 19 bp, Homo sapiens
cctccaaaggactaaatca

SEQ ID NO: 77218 - DNA, 22 bp, Homo sapiens
tctagatgatggagaaagagat

SEQ ID NO: 77219 - DNA, 22 bp, Homo sapiens
actttctagaatgtcttcaact

SEQ ID NO: 77220 - DNA, 16 bp, Homo sapiens
caggaagggaaggact

SEQ ID NO: 77221 - DNA, 18 bp, Homo sapiens
ttagtacgccagtcaact

SEQ ID NO: 77222 - DNA, 17 bp, Homo sapiens
gtgggagttttcgccat

SEQ ID NO: 77223 - DNA, 17 bp, Homo sapiens
aggaatctgcttcattt

SEQ ID NO: 77224 - DNA, 16 bp, Homo sapiens
tatcatggcgctttgc

SEQ ID NO: 77225 - DNA, 19 bp, Homo sapiens
gtcccaggcacaaactcca

SEQ ID NO: 77226 - DNA, 16 bp, Homo sapiens
tccaggttcctgacct

SEQ ID NO: 77227 - DNA, 20 bp, Homo sapiens
attcgtctgttcaggctggt

SEQ ID NO: 77228 - DNA, 17 bp, Homo sapiens
ccagttcttctccaagt

SEQ ID NO: 77229 - DNA, 19 bp, Homo sapiens
taatgatggaagaccagca

SEQ ID NO: 77230 - DNA, 22 bp, Homo sapiens
tgtttttcatcctcactttttg

SEQ ID NO: 77231 - DNA, 17 bp, Homo sapiens
acttccaatcaataggt

SEQ ID NO: 77232 - DNA, 20 bp, Homo sapiens
tttgcggatacttggttttc

SEQ ID NO: 77233 - DNA, 16 bp, Homo sapiens
tcgagtaagcacttgg

SEQ ID NO: 77234 - DNA, 17 bp, Homo sapiens
acggtctgagaagtact

SEQ ID NO: 77235 - DNA, 23 bp, Homo sapiens
ctgcttcatcagaatccagtgaa

SEQ ID NO: 77236 - DNA, 18 bp, Homo sapiens
agcaggtgccatttgata

SEQ ID NO: 77237 - DNA, 21 bp, Homo sapiens
caggaaccaaacaaagtaaag

SEQ ID NO: 77238 - DNA, 19 bp, Homo sapiens
aggattgttaatgggacag

SEQ ID NO: 77239 - DNA, 19 bp, Homo sapiens
aaatgaattttctcccaca

SEQ ID NO: 77240 - DNA, 19 bp, Homo sapiens
tttctgaaacactgtcaat

SEQ ID NO: 77241 - DNA, 16 bp, Homo sapiens
gctgaatcaaagactc

SEQ ID NO: 77242 - DNA, 20 bp, Homo sapiens
ccattacccacattttgttt

SEQ ID NO: 77243 - DNA, 24 bp, Homo sapiens
gatgtttgggtgagaattgaggac

SEQ ID NO: 77244 - DNA, 19 bp, Homo sapiens
gcatccacctgaataaagg

SEQ ID NO: 77245 - DNA, 17 bp, Homo sapiens
taatactcccccggtga

SEQ ID NO: 77246 - DNA, 17 bp, Homo sapiens
ctgatacagggacagga

SEQ ID NO: 77247 - DNA, 19 bp, Homo sapiens
agataatcaggcaaaacaa

SEQ ID NO: 77248 - DNA, 16 bp, Homo sapiens
ttgagctgctagaact

SEQ ID NO: 77249 - DNA, 22 bp, Homo sapiens
gtgggtttggaaaatcgcctga

SEQ ID NO: 77250 - DNA, 19 bp, Homo sapiens
ttgggttgtaattaaaagg

SEQ ID NO: 77251 - DNA, 24 bp, Homo sapiens
gaactgagataaaaccaggacaaa

SEQ ID NO: 77252 - DNA, 16 bp, Homo sapiens
tggagttgggatctga

SEQ ID NO: 77253 - DNA, 17 bp, Homo sapiens
ggaacgtaccccattca

SEQ ID NO: 77254 - DNA, 17 bp, Homo sapiens
ggttccactggattctg

SEQ ID NO: 77255 - DNA, 22 bp, Homo sapiens
gactgttgctgccagagtgact

SEQ ID NO: 77256 - DNA, 21 bp, Homo sapiens
tttcattcttcctctctttta

SEQ ID NO: 77257 - DNA, 17 bp, Homo sapiens
ttcagctcggccatctc

SEQ ID NO: 77258 - DNA, 23 bp, Homo sapiens
tttcatttgaaacaaaatgtcta

SEQ ID NO: 77259 - DNA, 17 bp, Homo sapiens
ccaaaactgacagcaca

SEQ ID NO: 77260 - DNA, 18 bp, Homo sapiens
acaaaaaccctctaacaa

SEQ ID NO: 77261 - DNA, 16 bp, Homo sapiens
accttgtgacatctgt

SEQ ID NO: 77262 - DNA, 16 bp, Homo sapiens
cacgcccagaatgctc

SEQ ID NO: 77263 - DNA, 16 bp, Homo sapiens
atcctcctgaccctga

SEQ ID NO: 77264 - DNA, 21 bp, Homo sapiens
aaaattgtaagggggctgaag

SEQ ID NO: 77265 - DNA, 17 bp, Homo sapiens
ctcagttaagcctttgt

SEQ ID NO: 77266 - DNA, 16 bp, Homo sapiens
aactgaaggcggctac

SEQ ID NO: 77267 - DNA, 17 bp, Homo sapiens
cccggatcgaaaagatg

SEQ ID NO: 77268 - DNA, 17 bp, Homo sapiens
ttctgctcctaaggaga

SEQ ID NO: 77269 - DNA, 23 bp, Homo sapiens
aaagataagcaaattatcacttt

SEQ ID NO: 77270 - DNA, 19 bp, Homo sapiens
gcctgcaggccacacccta

SEQ ID NO: 77271 - DNA, 24 bp, Homo sapiens
ttaacacttaatcatatttttatt

SEQ ID NO: 77272 - DNA, 16 bp, Homo sapiens
tcctttggttccagga

SEQ ID NO: 77273 - DNA, 23 bp, Homo sapiens
tccatgataaataatatttttgt

SEQ ID NO: 77274 - DNA, 30 bp, Homo sapiens
gctattatcatttttataattataaaaata

SEQ ID NO: 77275 - DNA, 22 bp, Homo sapiens
tataacgaaataatgtaatttt

SEQ ID NO: 77276 - DNA, 18 bp, Homo sapiens
ctgactttcatttctctt

SEQ ID NO: 77277 - DNA, 20 bp, Homo sapiens
tgtactggagatttccctcc

SEQ ID NO: 77278 - DNA, 21 bp, Homo sapiens
ggaggaggaaaacacatgaaa

SEQ ID NO: 77279 - DNA, 16 bp, Homo sapiens
atctgggctctcacat

SEQ ID NO: 77280 - DNA, 21 bp, Homo sapiens
cactcattttggatgtttttc

SEQ ID NO: 77281 - DNA, 19 bp, Homo sapiens
ttctgagtacacaccatag

SEQ ID NO: 77282 - DNA, 16 bp, Homo sapiens
cagaaccaacactggt

SEQ ID NO: 77283 - DNA, 18 bp, Homo sapiens
cacctactttgttctagt

SEQ ID NO: 77284 - DNA, 18 bp, Homo sapiens
ctcaagaaacagatgtga

SEQ ID NO: 77285 - DNA, 19 bp, Homo sapiens
ccatcaacttacagaccta

SEQ ID NO: 77286 - DNA, 20 bp, Homo sapiens
tggagaacttatagctgtgc

SEQ ID NO: 77287 - DNA, 25 bp, Homo sapiens
aaagtctaaagtctattgaaaaaaa

SEQ ID NO: 77288 - DNA, 20 bp, Homo sapiens
taaaactctggaaggagtca

SEQ ID NO: 77289 - DNA, 19 bp, Homo sapiens
agtttaagagttacacttt

SEQ ID NO: 77290 - DNA, 16 bp, Homo sapiens
cggtcaatttctgcac

SEQ ID NO: 77291 - DNA, 20 bp, Homo sapiens
agggcctttttttttattct

SEQ ID NO: 77292 - DNA, 23 bp, Homo sapiens
tgatgacagaaaatgacattatt

SEQ ID NO: 77293 - DNA, 24 bp, Homo sapiens
gatacactgaaggttattttacat

SEQ ID NO: 77294 - DNA, 18 bp, Homo sapiens
tctcatcaaacttttgct

SEQ ID NO: 77295 - DNA, 19 bp, Homo sapiens
aggtcagtctgagctctaa

SEQ ID NO: 77296 - DNA, 20 bp, Homo sapiens
gttcaataacttaatggact

SEQ ID NO: 77297 - DNA, 17 bp, Homo sapiens
ccaaggctgtgctaaat

SEQ ID NO: 77298 - DNA, 19 bp, Homo sapiens
tgacctttctgctttttaa

SEQ ID NO: 77299 - DNA, 22 bp, Homo sapiens
ctttaagtgaaggaaaggcttt

SEQ ID NO: 77300 - DNA, 19 bp, Homo sapiens
cacagaaagacaagtgaaa

SEQ ID NO: 77301 - DNA, 21 bp, Homo sapiens
cctgattgacagtataaatgt

SEQ ID NO: 77302 - DNA, 16 bp, Homo sapiens
tctgacgtacctgccg

SEQ ID NO: 77303 - DNA, 19 bp, Homo sapiens
aaaaactcattgtaactgt

SEQ ID NO: 77304 - DNA, 19 bp, Homo sapiens
gctttttccttatattgct

SEQ ID NO: 77305 - DNA, 22 bp, Homo sapiens
cataatttactttgccagaaat

SEQ ID NO: 77306 - DNA, 19 bp, Homo sapiens
tcctttgaagatgttaact

SEQ ID NO: 77307 - DNA, 20 bp, Homo sapiens
agccttagaaacacttcggc

SEQ ID NO: 77308 - DNA, 25 bp, Homo sapiens
attaaaaataaaatcaagttacctt

SEQ ID NO: 77309 - DNA, 22 bp, Homo sapiens
tggaactaaaatatctgaagca

SEQ ID NO: 77310 - DNA, 20 bp, Homo sapiens
cacgatgtatacttatatca

SEQ ID NO: 77311 - DNA, 18 bp, Homo sapiens
caagtaaggaagcccagt

SEQ ID NO: 77312 - DNA, 17 bp, Homo sapiens
gtgttctcaccataaaa

SEQ ID NO: 77313 - DNA, 18 bp, Homo sapiens
acttgatccattgaaggt

SEQ ID NO: 77314 - DNA, 16 bp, Homo sapiens
tctctaggcctgctct

SEQ ID NO: 77315 - DNA, 19 bp, Homo sapiens
aggctttaatttcattgtc

SEQ ID NO: 77316 - DNA, 23 bp, Homo sapiens
ttttactaaatgcctggacctgg

SEQ ID NO: 77317 - DNA, 18 bp, Homo sapiens
ttttctcttccagttcac

SEQ ID NO: 77318 - DNA, 26 bp, Homo sapiens
agtgagttttatttatgtaatgtttc

SEQ ID NO: 77319 - DNA, 20 bp, Homo sapiens
gttcattacaataatcccaa

SEQ ID NO: 77320 - DNA, 25 bp, Homo sapiens
atctctctaaaataatgaaacttga

SEQ ID NO: 77321 - DNA, 22 bp, Homo sapiens
acatagaagtaacaagatctgt

SEQ ID NO: 77322 - DNA, 23 bp, Homo sapiens
gcaaatggagaaagataatagtg

SEQ ID NO: 77323 - DNA, 20 bp, Homo sapiens
gccatccacattggaaaaaa

SEQ ID NO: 77324 - DNA, 18 bp, Homo sapiens
actgttctctggtgattg

SEQ ID NO: 77325 - DNA, 19 bp, Homo sapiens
attgaataaggtttggttt

SEQ ID NO: 77326 - DNA, 21 bp, Homo sapiens
gattctttatttagtttttcc

SEQ ID NO: 77327 - DNA, 22 bp, Homo sapiens
gtttgtacattaaagcttttta

SEQ ID NO: 77328 - DNA, 16 bp, Homo sapiens
ttttgtcctaccctgt

SEQ ID NO: 77329 - DNA, 24 bp, Homo sapiens
actaaatgacttatatcacaatca

SEQ ID NO: 77330 - DNA, 20 bp, Homo sapiens
tccttggagattcttcattc

SEQ ID NO: 77331 - DNA, 21 bp, Homo sapiens
ggtagactgtcatcgtgaact

SEQ ID NO: 77332 - DNA, 18 bp, Homo sapiens
aaatggaaacatactgtg

SEQ ID NO: 77333 - DNA, 16 bp, Homo sapiens
tgcttgttgaacaggg

SEQ ID NO: 77334 - DNA, 19 bp, Homo sapiens
gttgtgatattttactgca

SEQ ID NO: 77335 - DNA, 17 bp, Homo sapiens
tgaatctctagctcgga

SEQ ID NO: 77336 - DNA, 19 bp, Homo sapiens
tacaagagacacactgcat

SEQ ID NO: 77337 - DNA, 16 bp, Homo sapiens
aatggtccacgctcaa

SEQ ID NO: 77338 - DNA, 22 bp, Homo sapiens
accagttgaaaaaaaaattatg

SEQ ID NO: 77339 - DNA, 16 bp, Homo sapiens
gcttccccttcttgtc

SEQ ID NO: 77340 - DNA, 23 bp, Homo sapiens
gctgcaagcagatcgccatcaag

SEQ ID NO: 77341 - DNA, 24 bp, Homo sapiens
tgatgcaaacaaaataacaaatac

SEQ ID NO: 77342 - DNA, 16 bp, Homo sapiens
gaattggatggctttg

SEQ ID NO: 77343 - DNA, 18 bp, Homo sapiens
aaatatgccaaaatggag

SEQ ID NO: 77344 - DNA, 20 bp, Homo sapiens
caaacttgtgagagagagac

SEQ ID NO: 77345 - DNA, 21 bp, Homo sapiens
acttaagaacatttgcttcaa

SEQ ID NO: 77346 - DNA, 18 bp, Homo sapiens
cacaatgataaaattgcc

SEQ ID NO: 77347 - DNA, 21 bp, Homo sapiens
ctcttatctcatctatctgtt

SEQ ID NO: 77348 - DNA, 23 bp, Homo sapiens
aacacacgactgtacttttttgt

SEQ ID NO: 77349 - DNA, 23 bp, Homo sapiens
tacttaggatttctgattttaac

SEQ ID NO: 77350 - DNA, 27 bp, Homo sapiens
aaacttaaattgtttagtaaattatta

SEQ ID NO: 77351 - DNA, 17 bp, Homo sapiens
agatccttccaactgct

SEQ ID NO: 77352 - DNA, 22 bp, Homo sapiens
tttgcagaaaaagagactctga

SEQ ID NO: 77353 - DNA, 24 bp, Homo sapiens
tattagattattcaaacaatatct

SEQ ID NO: 77354 - DNA, 24 bp, Homo sapiens
ctgggaagaataattgagttaaaa

SEQ ID NO: 77355 - DNA, 20 bp, Homo sapiens
tgctataatcttaggatcaa

SEQ ID NO: 77356 - DNA, 18 bp, Homo sapiens
agtatgaattacagcagt

SEQ ID NO: 77357 - DNA, 20 bp, Homo sapiens
tcagatgaattcattttaca

SEQ ID NO: 77358 - DNA, 21 bp, Homo sapiens
accaggagctcataaaagctg

SEQ ID NO: 77359 - DNA, 18 bp, Homo sapiens
aagatataccttagagca

SEQ ID NO: 77360 - DNA, 18 bp, Homo sapiens
ggtttctacattgctgtt

SEQ ID NO: 77361 - DNA, 23 bp, Homo sapiens
aaacagtaatatttggaacattc

SEQ ID NO: 77362 - DNA, 17 bp, Homo sapiens
gggtcctgtctaagtct

SEQ ID NO: 77363 - DNA, 23 bp, Homo sapiens
cattattttaattcttgcacaaa

SEQ ID NO: 77364 - DNA, 17 bp, Homo sapiens
tgggtacgtgttgttgt

SEQ ID NO: 77365 - DNA, 18 bp, Homo sapiens
cgtgagttaagcaaggct

SEQ ID NO: 77366 - DNA, 18 bp, Homo sapiens
aagtaccagacagtataa

SEQ ID NO: 77367 - DNA, 18 bp, Homo sapiens
agtctccaaaatgaaaaa

SEQ ID NO: 77368 - DNA, 21 bp, Homo sapiens
tcaataccaacttaatacctt

SEQ ID NO: 77369 - DNA, 19 bp, Homo sapiens
ggagcagttaaaccatcat

SEQ ID NO: 77370 - DNA, 20 bp, Homo sapiens
acttttaagcttgaaagtct

SEQ ID NO: 77371 - DNA, 21 bp, Homo sapiens
agaaagaccatccccacttga

SEQ ID NO: 77372 - DNA, 16 bp, Homo sapiens
tcactgtgcctagatt

SEQ ID NO: 77373 - DNA, 25 bp, Homo sapiens
atatttttatagttttaagcttaga

SEQ ID NO: 77374 - DNA, 16 bp, Homo sapiens
atgtagccagtcttca

SEQ ID NO: 77375 - DNA, 18 bp, Homo sapiens
tgtggagatatagacttt

SEQ ID NO: 77376 - DNA, 16 bp, Homo sapiens
gttgcaacttacttca

SEQ ID NO: 77377 - DNA, 24 bp, Homo sapiens
gaacaaatcagaaaaataaaatct

SEQ ID NO: 77378 - DNA, 25 bp, Homo sapiens
tattttaaaacaattaaacaggtaa

SEQ ID NO: 77379 - DNA, 18 bp, Homo sapiens
ttcccaacaaaaaacagc

SEQ ID NO: 77380 - DNA, 22 bp, Homo sapiens
tctccttgtatgtaagaactaa

SEQ ID NO: 77381 - DNA, 16 bp, Homo sapiens
agggacagacttgcca

SEQ ID NO: 77382 - DNA, 23 bp, Homo sapiens
aggcagaagtggactagtccctc

SEQ ID NO: 77383 - DNA, 23 bp, Homo sapiens
ttctttttagttcattatttata

SEQ ID NO: 77384 - DNA, 22 bp, Homo sapiens
cttgtcatgatttgttggcaga

SEQ ID NO: 77385 - DNA, 17 bp, Homo sapiens
cctggctaccacaaaca

SEQ ID NO: 77386 - DNA, 23 bp, Homo sapiens
tattttaaaatgaaaatccatat

SEQ ID NO: 77387 - DNA, 16 bp, Homo sapiens
tacctcgctgttttga

SEQ ID NO: 77388 - DNA, 23 bp, Homo sapiens
catctgagcagaataaaaatcat

SEQ ID NO: 77389 - DNA, 20 bp, Homo sapiens
acagttacctgtgaatgaaa

SEQ ID NO: 77390 - DNA, 19 bp, Homo sapiens
tacgaagacaagctgtttg

SEQ ID NO: 77391 - DNA, 18 bp, Homo sapiens
ggactgaaatccaagcca

SEQ ID NO: 77392 - DNA, 20 bp, Homo sapiens
ggcttaaagaggaaattgaa

SEQ ID NO: 77393 - DNA, 26 bp, Homo sapiens
aaatatcagaatttttatttctttta

SEQ ID NO: 77394 - DNA, 17 bp, Homo sapiens
ggcaacatgactggttt

SEQ ID NO: 77395 - DNA, 22 bp, Homo sapiens
tatagaaaaagatacaaccgta

SEQ ID NO: 77396 - DNA, 17 bp, Homo sapiens
tgcaaatcactgatgac

SEQ ID NO: 77397 - DNA, 22 bp, Homo sapiens
tggtgatataatttattttctt

SEQ ID NO: 77398 - DNA, 19 bp, Homo sapiens
cctttttttttagctctga

SEQ ID NO: 77399 - DNA, 19 bp, Homo sapiens
gttcattactcagctaaca

SEQ ID NO: 77400 - DNA, 19 bp, Homo sapiens
aatcccattcttacctcat

SEQ ID NO: 77401 - DNA, 19 bp, Homo sapiens
cagaggctgagttacaaga

SEQ ID NO: 77402 - DNA, 16 bp, Homo sapiens
gcccaggcatgagatg

SEQ ID NO: 77403 - DNA, 20 bp, Homo sapiens
ataaactcaagtcaacagaa

SEQ ID NO: 77404 - DNA, 21 bp, Homo sapiens
atcttcttatcatagaagtga

SEQ ID NO: 77405 - DNA, 16 bp, Homo sapiens
acttgtgcccatgagg

SEQ ID NO: 77406 - DNA, 17 bp, Homo sapiens
tggtatttccttctcct

SEQ ID NO: 77407 - DNA, 20 bp, Homo sapiens
gataccctgaaaagaacaca

SEQ ID NO: 77408 - DNA, 19 bp, Homo sapiens
tctatgtcgttctttaggc

SEQ ID NO: 77409 - DNA, 19 bp, Homo sapiens
cctcagtctaactgtgaga

SEQ ID NO: 77410 - DNA, 17 bp, Homo sapiens
caggcatactttggcac

SEQ ID NO: 77411 - DNA, 20 bp, Homo sapiens
cataattgatttgaaggaga

SEQ ID NO: 77412 - DNA, 23 bp, Homo sapiens
caagttttattctgccttaaact

SEQ ID NO: 77413 - DNA, 22 bp, Homo sapiens
tgtcaatagagacatacagcgc

SEQ ID NO: 77414 - DNA, 17 bp, Homo sapiens
cctgaatactagctact

SEQ ID NO: 77415 - DNA, 19 bp, Homo sapiens
atgcctgaagaagaaagtg

SEQ ID NO: 77416 - DNA, 16 bp, Homo sapiens
tctccctgagggtatc

SEQ ID NO: 77417 - DNA, 22 bp, Homo sapiens
tcaacatctttaagttccatct

SEQ ID NO: 77418 - DNA, 24 bp, Homo sapiens
tcctattaaactttgctaaaattg

SEQ ID NO: 77419 - DNA, 17 bp, Homo sapiens
tggacagttcgatctaa

SEQ ID NO: 77420 - DNA, 22 bp, Homo sapiens
gataagagcaattaatttttaa

SEQ ID NO: 77421 - DNA, 18 bp, Homo sapiens
gacacagactgtattacc

SEQ ID NO: 77422 - DNA, 25 bp, Homo sapiens
tttgttatattcttaagatggaact

SEQ ID NO: 77423 - DNA, 19 bp, Homo sapiens
aaaattgactgtaaaaggc

SEQ ID NO: 77424 - DNA, 21 bp, Homo sapiens
gcagctaagctacaaggaata

SEQ ID NO: 77425 - DNA, 21 bp, Homo sapiens
cttttcagaaaaaaagagcaa

SEQ ID NO: 77426 - DNA, 19 bp, Homo sapiens
agagaaacagcacaagtta

SEQ ID NO: 77427 - DNA, 16 bp, Homo sapiens
agcagggttctcattg

SEQ ID NO: 77428 - DNA, 16 bp, Homo sapiens
tctgttcctgctggtc

SEQ ID NO: 77429 - DNA, 18 bp, Homo sapiens
tgtggattccatagaccg

SEQ ID NO: 77430 - DNA, 23 bp, Homo sapiens
aaattagtggatatctgaagttt

SEQ ID NO: 77431 - DNA, 23 bp, Homo sapiens
tctatgcccttacattaattact

SEQ ID NO: 77432 - DNA, 19 bp, Homo sapiens
aagactgaacttcagtgga

SEQ ID NO: 77433 - DNA, 16 bp, Homo sapiens
agcttatacaggacca

SEQ ID NO: 77434 - DNA, 24 bp, Homo sapiens
aataattaaaataattttacaaaa

SEQ ID NO: 77435 - DNA, 18 bp, Homo sapiens
aaatctgagaaacttcag

SEQ ID NO: 77436 - DNA, 19 bp, Homo sapiens
gctgaggcaagagaatcac

SEQ ID NO: 77437 - DNA, 20 bp, Homo sapiens
ataggactgaaaatgatggt

SEQ ID NO: 77438 - DNA, 21 bp, Homo sapiens
ctggaacttttccaatgttgt

SEQ ID NO: 77439 - DNA, 16 bp, Homo sapiens
ttagagcctggcacat

SEQ ID NO: 77440 - DNA, 21 bp, Homo sapiens
tcttactttatcctgtgctat

SEQ ID NO: 77441 - DNA, 23 bp, Homo sapiens
agtaagataatggaatattatat

SEQ ID NO: 77442 - DNA, 18 bp, Homo sapiens
tggtgctatgaacataag

SEQ ID NO: 77443 - DNA, 19 bp, Homo sapiens
gcaggtaagccctttggaa

SEQ ID NO: 77444 - DNA, 26 bp, Homo sapiens
ccatgaatctgaaaatactatttatc

SEQ ID NO: 77445 - DNA, 23 bp, Homo sapiens
aaaaaaatacaagcaacaaaata

SEQ ID NO: 77446 - DNA, 23 bp, Homo sapiens
atatttttaaccttctctttaat

SEQ ID NO: 77447 - DNA, 16 bp, Homo sapiens
attcagtagtggtgga

SEQ ID NO: 77448 - DNA, 17 bp, Homo sapiens
agtcgtctttcccatct

SEQ ID NO: 77449 - DNA, 18 bp, Homo sapiens
tttactgtgctctcctgt

SEQ ID NO: 77450 - DNA, 22 bp, Homo sapiens
ttaagcacatgaataaaaatac

SEQ ID NO: 77451 - DNA, 19 bp, Homo sapiens
ttttctacagctgaatgat

SEQ ID NO: 77452 - DNA, 19 bp, Homo sapiens
acttagttgagctattact

SEQ ID NO: 77453 - DNA, 26 bp, Homo sapiens
aaagacattgagaattatattcaaga

SEQ ID NO: 77454 - DNA, 18 bp, Homo sapiens
tatcttgtctcatgagtc

SEQ ID NO: 77455 - DNA, 26 bp, Homo sapiens
aaaattatttatttgattgtattttt

SEQ ID NO: 77456 - DNA, 23 bp, Homo sapiens
tatagaaaagaatgtcataggtg

SEQ ID NO: 77457 - DNA, 25 bp, Homo sapiens
aagaaactgaacttaataaagtaat

SEQ ID NO: 77458 - DNA, 19 bp, Homo sapiens
ttggcctctttcctttttg

SEQ ID NO: 77459 - DNA, 19 bp, Homo sapiens
aatgaagatatgagactca

SEQ ID NO: 77460 - DNA, 22 bp, Homo sapiens
tccagattgccccagacctgta

SEQ ID NO: 77461 - DNA, 21 bp, Homo sapiens
tttctttttcttaaagtaagg

SEQ ID NO: 77462 - DNA, 22 bp, Homo sapiens
gattctaagtaagacagaaatg

SEQ ID NO: 77463 - DNA, 17 bp, Homo sapiens
tttgacccatttccttc

SEQ ID NO: 77464 - DNA, 20 bp, Homo sapiens
tttcatgttagtaacttggt

SEQ ID NO: 77465 - DNA, 19 bp, Homo sapiens
agacgtttatttaaactga

SEQ ID NO: 77466 - DNA, 18 bp, Homo sapiens
tggctacaagataacctt

SEQ ID NO: 77467 - DNA, 18 bp, Homo sapiens
accaggctgaggctaaaa

SEQ ID NO: 77468 - DNA, 22 bp, Homo sapiens
gaaagaaaacaacatttgaagg

SEQ ID NO: 77469 - DNA, 20 bp, Homo sapiens
aggccatgaaatataattgt

SEQ ID NO: 77470 - DNA, 19 bp, Homo sapiens
tctttagtaccaaagccct

SEQ ID NO: 77471 - DNA, 24 bp, Homo sapiens
aatgccaaattatgatttcttttt

SEQ ID NO: 77472 - DNA, 21 bp, Homo sapiens
ttgctaaggagaatgatactt

SEQ ID NO: 77473 - DNA, 19 bp, Homo sapiens
tctcgaagttctttcttaa

SEQ ID NO: 77474 - DNA, 22 bp, Homo sapiens
aaaagctaaaaaatggtcctca

SEQ ID NO: 77475 - DNA, 20 bp, Homo sapiens
tgttgtcctcataacaatca

SEQ ID NO: 77476 - DNA, 22 bp, Homo sapiens
gttggaagagaacatagacaat

SEQ ID NO: 77477 - DNA, 22 bp, Homo sapiens
agtctaatacttactggtcaag

SEQ ID NO: 77478 - DNA, 24 bp, Homo sapiens
aaggttatgaagaagaaattattc

SEQ ID NO: 77479 - DNA, 20 bp, Homo sapiens
tgagagaaaagatgactaaa

SEQ ID NO: 77480 - DNA, 22 bp, Homo sapiens
gctgaggaaaagtatagagaaa

SEQ ID NO: 77481 - DNA, 17 bp, Homo sapiens
ctgggaaacaagagtga

SEQ ID NO: 77482 - DNA, 24 bp, Homo sapiens
acaaggatctggatatttattata

SEQ ID NO: 77483 - DNA, 20 bp, Homo sapiens
agctcttactatattctact

SEQ ID NO: 77484 - DNA, 16 bp, Homo sapiens
tcgccacaggtcacgt

SEQ ID NO: 77485 - DNA, 22 bp, Homo sapiens
tttttatatattatatatttta

SEQ ID NO: 77486 - DNA, 16 bp, Homo sapiens
gggctttggaaagagc

SEQ ID NO: 77487 - DNA, 19 bp, Homo sapiens
atgaagtaccaatgacttc

SEQ ID NO: 77488 - DNA, 16 bp, Homo sapiens
gggtccagggaggtaa

SEQ ID NO: 77489 - DNA, 23 bp, Homo sapiens
aaatggaagaaatcaataaaatt

SEQ ID NO: 77490 - DNA, 18 bp, Homo sapiens
gctacaagatgttgccaa

SEQ ID NO: 77491 - DNA, 18 bp, Homo sapiens
aggctcttgaatcctccc

SEQ ID NO: 77492 - DNA, 19 bp, Homo sapiens
tgatacattttcatcggca

SEQ ID NO: 77493 - DNA, 16 bp, Homo sapiens
ctggtaatgtcagcct

SEQ ID NO: 77494 - DNA, 16 bp, Homo sapiens
gtgtctcccttcagca

SEQ ID NO: 77495 - DNA, 24 bp, Homo sapiens
aatgacaaaaggctacagagcata

SEQ ID NO: 77496 - DNA, 17 bp, Homo sapiens
tccccaggcttttgaga

SEQ ID NO: 77497 - DNA, 16 bp, Homo sapiens
aaatacggtctgatgc

SEQ ID NO: 77498 - DNA, 17 bp, Homo sapiens
ccttgggtgcttccact

SEQ ID NO: 77499 - DNA, 22 bp, Homo sapiens
aattataactaccgagtggtga

SEQ ID NO: 77500 - DNA, 18 bp, Homo sapiens
gctgagcctgattcattt

SEQ ID NO: 77501 - DNA, 20 bp, Homo sapiens
cagtgctggacaaaaggcag

SEQ ID NO: 77502 - DNA, 18 bp, Homo sapiens
aagaatctggtcccagtg

SEQ ID NO: 77503 - DNA, 16 bp, Homo sapiens
agaacgtttcagccag

SEQ ID NO: 77504 - DNA, 18 bp, Homo sapiens
tgtgacgtttcccacttt

SEQ ID NO: 77505 - DNA, 16 bp, Homo sapiens
tgttttctcggtcaag

SEQ ID NO: 77506 - DNA, 19 bp, Homo sapiens
gagatgagaaggtctgtgc

SEQ ID NO: 77507 - DNA, 16 bp, Homo sapiens
actcaaccagagcatg

SEQ ID NO: 77508 - DNA, 22 bp, Homo sapiens
actcatcattcgcctggccctg

SEQ ID NO: 77509 - DNA, 18 bp, Homo sapiens
ttcatcacagaactctct

SEQ ID NO: 77510 - DNA, 24 bp, Homo sapiens
ccttggatgagccaacaacaaatc

SEQ ID NO: 77511 - DNA, 17 bp, Homo sapiens
cagggcctggcaccaac

SEQ ID NO: 77512 - DNA, 19 bp, Homo sapiens
ctggctggcctgaaggcct

SEQ ID NO: 77513 - DNA, 17 bp, Homo sapiens
tgattaccagaagctgg

SEQ ID NO: 77514 - DNA, 19 bp, Homo sapiens
acacacagcacaagttcat

SEQ ID NO: 77515 - DNA, 19 bp, Homo sapiens
atcctgtagaatttctcca

SEQ ID NO: 77516 - DNA, 22 bp, Homo sapiens
aaggggttatgctctttactaa

SEQ ID NO: 77517 - DNA, 18 bp, Homo sapiens
cccagggagctaacactg

SEQ ID NO: 77518 - DNA, 18 bp, Homo sapiens
agcagcgtaacttccagc

SEQ ID NO: 77519 - DNA, 17 bp, Homo sapiens
ttctgaggacctacatt

SEQ ID NO: 77520 - DNA, 17 bp, Homo sapiens
ttaggacgttctgaata

SEQ ID NO: 77521 - DNA, 25 bp, Homo sapiens
tgttcctttgaaagaatatattttc

SEQ ID NO: 77522 - DNA, 19 bp, Homo sapiens
agattgtgaaatgcagtgt

SEQ ID NO: 77523 - DNA, 21 bp, Homo sapiens
gaaacaagtttcatgatttta

SEQ ID NO: 77524 - DNA, 22 bp, Homo sapiens
ttaagaggttgtaaggtttact

SEQ ID NO: 77525 - DNA, 19 bp, Homo sapiens
aggatcccacttgaagttt

SEQ ID NO: 77526 - DNA, 21 bp, Homo sapiens
tagtgaatatagctttcctga

SEQ ID NO: 77527 - DNA, 16 bp, Homo sapiens
tgtaacaagaggctcc

SEQ ID NO: 77528 - DNA, 17 bp, Homo sapiens
ttgtgtttgatgtttgc

SEQ ID NO: 77529 - DNA, 16 bp, Homo sapiens
acccaggcctgtgcta

SEQ ID NO: 77530 - DNA, 18 bp, Homo sapiens
tgtccatgcaggcaacat

SEQ ID NO: 77531 - DNA, 19 bp, Homo sapiens
gtcacctaaactcaagtac

SEQ ID NO: 77532 - DNA, 20 bp, Homo sapiens
gttgagagactgttggagcc

SEQ ID NO: 77533 - DNA, 24 bp, Homo sapiens
ggaaattaaatatagcatcattgc

SEQ ID NO: 77534 - DNA, 16 bp, Homo sapiens
agagggccctttacta

SEQ ID NO: 77535 - DNA, 23 bp, Homo sapiens
taatgttcagtggaatctcatgt

SEQ ID NO: 77536 - DNA, 18 bp, Homo sapiens
ctcagttgcttgttcaac

SEQ ID NO: 77537 - DNA, 20 bp, Homo sapiens
agtttgtcattttaattgac

SEQ ID NO: 77538 - DNA, 16 bp, Homo sapiens
cctccttgagaaactg

SEQ ID NO: 77539 - DNA, 17 bp, Homo sapiens
cccttgtaaacaccaat

SEQ ID NO: 77540 - DNA, 22 bp, Homo sapiens
tttacctaaaaagcagtaatga

SEQ ID NO: 77541 - DNA, 19 bp, Homo sapiens
aggcccatgttttggctgc

SEQ ID NO: 77542 - DNA, 19 bp, Homo sapiens
atgagaatactgaccacaa

SEQ ID NO: 77543 - DNA, 19 bp, Homo sapiens
aaaattgcgaaggagagcc

SEQ ID NO: 77544 - DNA, 22 bp, Homo sapiens
gtccaacttaatacatctccaa

SEQ ID NO: 77545 - DNA, 20 bp, Homo sapiens
agtgatagctataaaacaaa

SEQ ID NO: 77546 - DNA, 18 bp, Homo sapiens
gggatcatctgcgaactc

SEQ ID NO: 77547 - DNA, 23 bp, Homo sapiens
aactcttaaactaaatttgtgca

SEQ ID NO: 77548 - DNA, 18 bp, Homo sapiens
cagagagcaaagctcgag

SEQ ID NO: 77549 - DNA, 20 bp, Homo sapiens
agatcagttatttgagttca

SEQ ID NO: 77550 - DNA, 18 bp, Homo sapiens
gctgaacaagtaatttgt

SEQ ID NO: 77551 - DNA, 20 bp, Homo sapiens
tgatttgatgaaggctgctg

SEQ ID NO: 77552 - DNA, 18 bp, Homo sapiens
tagcaatcttcctgtgat

SEQ ID NO: 77553 - DNA, 16 bp, Homo sapiens
gttcgggcagctcgag

SEQ ID NO: 77554 - DNA, 22 bp, Homo sapiens
ccattgagataaaccaaattca

SEQ ID NO: 77555 - DNA, 17 bp, Homo sapiens
tgacatggcagatgtct

SEQ ID NO: 77556 - DNA, 22 bp, Homo sapiens
gtttaaatgttagaagaccatg

SEQ ID NO: 77557 - DNA, 19 bp, Homo sapiens
actggattcctaagtcttg

SEQ ID NO: 77558 - DNA, 21 bp, Homo sapiens
gttgttaacaggaatgaaaat

SEQ ID NO: 77559 - DNA, 16 bp, Homo sapiens
gttgtcttttggctgc

SEQ ID NO: 77560 - DNA, 18 bp, Homo sapiens
tttttgggttttggggtc

SEQ ID NO: 77561 - DNA, 20 bp, Homo sapiens
cagaatgagtttttccctct

SEQ ID NO: 77562 - DNA, 17 bp, Homo sapiens
tgctggcaatgaacaag

SEQ ID NO: 77563 - DNA, 23 bp, Homo sapiens
ttaaatgttttaatggaactata

SEQ ID NO: 77564 - DNA, 18 bp, Homo sapiens
aagctgaacattatggca

SEQ ID NO: 77565 - DNA, 23 bp, Homo sapiens
atactgccttctttgtgattgac

SEQ ID NO: 77566 - DNA, 17 bp, Homo sapiens
cgttcttctgcaggatt

SEQ ID NO: 77567 - DNA, 22 bp, Homo sapiens
agaaattctaacttttcagcat

SEQ ID NO: 77568 - DNA, 16 bp, Homo sapiens
aggctgcgacatcagg

SEQ ID NO: 77569 - DNA, 20 bp, Homo sapiens
gagtgctccaatttcttgtt

SEQ ID NO: 77570 - DNA, 17 bp, Homo sapiens
gcattggaaatgcctgt

SEQ ID NO: 77571 - DNA, 22 bp, Homo sapiens
tcagatggctgcagctagagga

SEQ ID NO: 77572 - DNA, 18 bp, Homo sapiens
ctcctcctcctccaccct

SEQ ID NO: 77573 - DNA, 16 bp, Homo sapiens
caggcatgcctacagc

SEQ ID NO: 77574 - DNA, 19 bp, Homo sapiens
tcaagagctggaaatttcc

SEQ ID NO: 77575 - DNA, 18 bp, Homo sapiens
acaagcagctgcagcagg

SEQ ID NO: 77576 - DNA, 20 bp, Homo sapiens
tatcatcagaagccttgatc

SEQ ID NO: 77577 - DNA, 16 bp, Homo sapiens
ctcacagcaccagggt

SEQ ID NO: 77578 - DNA, 20 bp, Homo sapiens
tcaagtagactgatgattca

SEQ ID NO: 77579 - DNA, 24 bp, Homo sapiens
cttctgtgggacagccccttacct

SEQ ID NO: 77580 - DNA, 16 bp, Homo sapiens
cctccagggaaggcct

SEQ ID NO: 77581 - DNA, 21 bp, Homo sapiens
tgtgttaaatcttgatattac

SEQ ID NO: 77582 - DNA, 16 bp, Homo sapiens
atcacgcgtgcaggac

SEQ ID NO: 77583 - DNA, 23 bp, Homo sapiens
agagatgagtactaacattcggt

SEQ ID NO: 77584 - DNA, 19 bp, Homo sapiens
cgaaagcaggtcctgcagg

SEQ ID NO: 77585 - DNA, 20 bp, Homo sapiens
cttcagcgaggagcgcttta

SEQ ID NO: 77586 - DNA, 24 bp, Homo sapiens
ctcatccataaatatcttacttca

SEQ ID NO: 77587 - DNA, 16 bp, Homo sapiens
ctgccttgatggccga

SEQ ID NO: 77588 - DNA, 23 bp, Homo sapiens
aaggacatatttggtatttatag

SEQ ID NO: 77589 - DNA, 20 bp, Homo sapiens
gcagagtgtaatgctgtccg

SEQ ID NO: 77590 - DNA, 21 bp, Homo sapiens
ttagccatttatccatttctt

SEQ ID NO: 77591 - DNA, 20 bp, Homo sapiens
atctattgcagaattgagtg

SEQ ID NO: 77592 - DNA, 22 bp, Homo sapiens
ttgagtttaagaagttgtactg

SEQ ID NO: 77593 - DNA, 21 bp, Homo sapiens
aaaacaatcagcactttcatc

SEQ ID NO: 77594 - DNA, 20 bp, Homo sapiens
atcattaggtttctttgtaa

SEQ ID NO: 77595 - DNA, 16 bp, Homo sapiens
taaggccagtgcttat

SEQ ID NO: 77596 - DNA, 17 bp, Homo sapiens
gaaagaagtgatgcact

SEQ ID NO: 77597 - DNA, 18 bp, Homo sapiens
acaaaacaaagataggca

SEQ ID NO: 77598 - DNA, 18 bp, Homo sapiens
ggacttgcgtagacaggt

SEQ ID NO: 77599 - DNA, 16 bp, Homo sapiens
tctgaaacgtggtcca

SEQ ID NO: 77600 - DNA, 22 bp, Homo sapiens
cctcatgtaagtgcagcaagtc

SEQ ID NO: 77601 - DNA, 19 bp, Homo sapiens
catttccattctttgcagc

SEQ ID NO: 77602 - DNA, 21 bp, Homo sapiens
agcaatctatttaataccttt

SEQ ID NO: 77603 - DNA, 19 bp, Homo sapiens
cctcaatcaatttgttggc

SEQ ID NO: 77604 - DNA, 20 bp, Homo sapiens
ttagctccgcaaagctgtca

SEQ ID NO: 77605 - DNA, 19 bp, Homo sapiens
gtgattaaaactcaccaca

SEQ ID NO: 77606 - DNA, 18 bp, Homo sapiens
ggtattgattgaagctgc

SEQ ID NO: 77607 - DNA, 22 bp, Homo sapiens
tatcatctcagacatgttgtat

SEQ ID NO: 77608 - DNA, 16 bp, Homo sapiens
ttccgtgaacatgcca

SEQ ID NO: 77609 - DNA, 19 bp, Homo sapiens
gtgtagagttaaaaatgtg

SEQ ID NO: 77610 - DNA, 23 bp, Homo sapiens
tacaccttcttcattatttgaga

SEQ ID NO: 77611 - DNA, 16 bp, Homo sapiens
cacccttggtgccctt

SEQ ID NO: 77612 - DNA, 17 bp, Homo sapiens
tacctgaggacagaggg

SEQ ID NO: 77613 - DNA, 22 bp, Homo sapiens
gtgtgttttttccttagcagtc

SEQ ID NO: 77614 - DNA, 16 bp, Homo sapiens
aacctcatctccactt

SEQ ID NO: 77615 - DNA, 17 bp, Homo sapiens
tgccaacttggcctgtt

SEQ ID NO: 77616 - DNA, 18 bp, Homo sapiens
tgatctgtccccaagact

SEQ ID NO: 77617 - DNA, 20 bp, Homo sapiens
tctgcaagccagttagaagc

SEQ ID NO: 77618 - DNA, 22 bp, Homo sapiens
tgtattaattcaacttcaccat

SEQ ID NO: 77619 - DNA, 18 bp, Homo sapiens
ccagtttactctgtggtt

SEQ ID NO: 77620 - DNA, 22 bp, Homo sapiens
gatagttaggatagagcatgtg

SEQ ID NO: 77621 - DNA, 16 bp, Homo sapiens
agaacacggacttgtt

SEQ ID NO: 77622 - DNA, 17 bp, Homo sapiens
agccatgactctgaaaa

SEQ ID NO: 77623 - DNA, 17 bp, Homo sapiens
accagctcattacctga

SEQ ID NO: 77624 - DNA, 19 bp, Homo sapiens
tgctgcactggctttagca

SEQ ID NO: 77625 - DNA, 20 bp, Homo sapiens
gcccattaatacaacttaga

SEQ ID NO: 77626 - DNA, 18 bp, Homo sapiens
agaacaatgggaaaaaca

SEQ ID NO: 77627 - DNA, 20 bp, Homo sapiens
aaaatgaaaaccagcacaat

SEQ ID NO: 77628 - DNA, 20 bp, Homo sapiens
ccattgatgacttcttggct

SEQ ID NO: 77629 - DNA, 18 bp, Homo sapiens
agtttctgtctctgtcac

SEQ ID NO: 77630 - DNA, 20 bp, Homo sapiens
ggagagcaatgacacatttg

SEQ ID NO: 77631 - DNA, 24 bp, Homo sapiens
taaaactttcagcactgtggctgg

SEQ ID NO: 77632 - DNA, 16 bp, Homo sapiens
ctgcccggcctcgaat

SEQ ID NO: 77633 - DNA, 20 bp, Homo sapiens
ccaccttttcatagaaagcc

SEQ ID NO: 77634 - DNA, 16 bp, Homo sapiens
tgtgtagactcctggc

SEQ ID NO: 77635 - DNA, 22 bp, Homo sapiens
tcacattttggaagatgtgaac

SEQ ID NO: 77636 - DNA, 17 bp, Homo sapiens
ctggaaagggagagttc

SEQ ID NO: 77637 - DNA, 23 bp, Homo sapiens
ctggaccgcacagctggtgcaat

SEQ ID NO: 77638 - DNA, 23 bp, Homo sapiens
ttcctcaccacagggctgggcta

SEQ ID NO: 77639 - DNA, 19 bp, Homo sapiens
agatggacaactatgagcc

SEQ ID NO: 77640 - DNA, 16 bp, Homo sapiens
gcttctcaggagcccg

SEQ ID NO: 77641 - DNA, 16 bp, Homo sapiens
taaaacgtggcatgac

SEQ ID NO: 77642 - DNA, 24 bp, Homo sapiens
tcaactgtaaatacccttcacaca

SEQ ID NO: 77643 - DNA, 20 bp, Homo sapiens
aactcattctcatccatggg

SEQ ID NO: 77644 - DNA, 16 bp, Homo sapiens
ctgagtgattcaggga

SEQ ID NO: 77645 - DNA, 19 bp, Homo sapiens
actgctttcctgatgtccc

SEQ ID NO: 77646 - DNA, 20 bp, Homo sapiens
ctgtgcctctttctccacag

SEQ ID NO: 77647 - DNA, 20 bp, Homo sapiens
tagcaaatgataagaaagaa

SEQ ID NO: 77648 - DNA, 19 bp, Homo sapiens
agccctcagctcggaccct

SEQ ID NO: 77649 - DNA, 16 bp, Homo sapiens
atatactgccaccgca

SEQ ID NO: 77650 - DNA, 16 bp, Homo sapiens
atgatggcatccggga

SEQ ID NO: 77651 - DNA, 20 bp, Homo sapiens
actaacagtcattttagaca

SEQ ID NO: 77652 - DNA, 17 bp, Homo sapiens
ctcgagacaaatgctga

SEQ ID NO: 77653 - DNA, 18 bp, Homo sapiens
caaaatcttctgtctcaa

SEQ ID NO: 77654 - DNA, 22 bp, Homo sapiens
gcacattaaaatccagaattct

SEQ ID NO: 77655 - DNA, 24 bp, Homo sapiens
ttacccgggcactctggccagcta

SEQ ID NO: 77656 - DNA, 24 bp, Homo sapiens
ggctgggggctggtggcccagaga

SEQ ID NO: 77657 - DNA, 16 bp, Homo sapiens
acagggaaagtcggca

SEQ ID NO: 77658 - DNA, 18 bp, Homo sapiens
gagttggatgactctgac

SEQ ID NO: 77659 - DNA, 18 bp, Homo sapiens
agagagacagagagagag

SEQ ID NO: 77660 - DNA, 18 bp, Homo sapiens
cagaagacgatcagctga

SEQ ID NO: 77661 - DNA, 23 bp, Homo sapiens
tttctgcaaaaaatgagagaaat

SEQ ID NO: 77662 - DNA, 16 bp, Homo sapiens
gccacctgttccgcaa

SEQ ID NO: 77663 - DNA, 19 bp, Homo sapiens
gccacagattgcctgttgg

SEQ ID NO: 77664 - DNA, 16 bp, Homo sapiens
ccactgtcgtcccatt

SEQ ID NO: 77665 - DNA, 21 bp, Homo sapiens
ctttttatgtaagagctcttt

SEQ ID NO: 77666 - DNA, 19 bp, Homo sapiens
gtaaagtctgtcatctcca

SEQ ID NO: 77667 - DNA, 19 bp, Homo sapiens
caaaaagcgaagattgcgg

SEQ ID NO: 77668 - DNA, 20 bp, Homo sapiens
gcaggtgacctgtggggaag

SEQ ID NO: 77669 - DNA, 24 bp, Homo sapiens
caagctggatgctgaagtgtccaa

SEQ ID NO: 77670 - DNA, 22 bp, Homo sapiens
gaaaaagaagattgtccacaaa

SEQ ID NO: 77671 - DNA, 18 bp, Homo sapiens
tgtgcatgattatgatgg

SEQ ID NO: 77672 - DNA, 16 bp, Homo sapiens
caggctgcacaggggc

SEQ ID NO: 77673 - DNA, 16 bp, Homo sapiens
cagcaattttcttggc

SEQ ID NO: 77674 - DNA, 16 bp, Homo sapiens
ccatggggctttgtgg

SEQ ID NO: 77675 - DNA, 17 bp, Homo sapiens
ggcaagtctgtcactta

SEQ ID NO: 77676 - DNA, 23 bp, Homo sapiens
cttcacatacaataatccttgtt

SEQ ID NO: 77677 - DNA, 16 bp, Homo sapiens
cctgaatggaccaggc

SEQ ID NO: 77678 - DNA, 17 bp, Homo sapiens
tcatcagtgctgccaag

SEQ ID NO: 77679 - DNA, 20 bp, Homo sapiens
ctatgctgggattaataaga

SEQ ID NO: 77680 - DNA, 19 bp, Homo sapiens
cgcaccattgcagaccatg

SEQ ID NO: 77681 - DNA, 18 bp, Homo sapiens
ctgtgactgcctcaggta

SEQ ID NO: 77682 - DNA, 16 bp, Homo sapiens
gcagtagagggcgatg

SEQ ID NO: 77683 - DNA, 19 bp, Homo sapiens
gtgagtgccacactgaacc

SEQ ID NO: 77684 - DNA, 23 bp, Homo sapiens
cagagacaacaagctccccgccg

SEQ ID NO: 77685 - DNA, 21 bp, Homo sapiens
gccaggatacttggtgttaag

SEQ ID NO: 77686 - DNA, 17 bp, Homo sapiens
gtcagcacgttcccact

SEQ ID NO: 77687 - DNA, 16 bp, Homo sapiens
tgctggcctacctgca

SEQ ID NO: 77688 - DNA, 22 bp, Homo sapiens
gtttctgcacagcacactttcc

SEQ ID NO: 77689 - DNA, 23 bp, Homo sapiens
caaggtcaaggccgaggtgcaga

SEQ ID NO: 77690 - DNA, 19 bp, Homo sapiens
gggaacagatgatggacag

SEQ ID NO: 77691 - DNA, 20 bp, Homo sapiens
tgaacaaaaagagggccagt

SEQ ID NO: 77692 - DNA, 17 bp, Homo sapiens
caaaggggaggaggcca

SEQ ID NO: 77693 - DNA, 16 bp, Homo sapiens
ataaacacctgccctg

SEQ ID NO: 77694 - DNA, 18 bp, Homo sapiens
caccacgcccggtcccaa

SEQ ID NO: 77695 - DNA, 16 bp, Homo sapiens
tcccaggctcaagtaa

SEQ ID NO: 77696 - DNA, 24 bp, Homo sapiens
tgcggggcactgcaagggctgaaa

SEQ ID NO: 77697 - DNA, 24 bp, Homo sapiens
agtcttgttctgttgcccagacgg

SEQ ID NO: 77698 - DNA, 24 bp, Homo sapiens
taagagcagccgttgagggtgttc

SEQ ID NO: 77699 - DNA, 21 bp, Homo sapiens
cacagcattcatcaagttctt

SEQ ID NO: 77700 - DNA, 16 bp, Homo sapiens
ctggtcttgcagagga

SEQ ID NO: 77701 - DNA, 20 bp, Homo sapiens
ataccctgtgacttttggta

SEQ ID NO: 77702 - DNA, 22 bp, Homo sapiens
cacgaggctggaggtcaggccg

SEQ ID NO: 77703 - DNA, 22 bp, Homo sapiens
caccaatggctttttctctggt

SEQ ID NO: 77704 - DNA, 20 bp, Homo sapiens
gccatgtccctgatccaggc

SEQ ID NO: 77705 - DNA, 19 bp, Homo sapiens
cttctgagatgcccgttta

SEQ ID NO: 77706 - DNA, 24 bp, Homo sapiens
catcctacgtcgcctctaccaaat

SEQ ID NO: 77707 - DNA, 16 bp, Homo sapiens
gatgctgtccatagct

SEQ ID NO: 77708 - DNA, 24 bp, Homo sapiens
ttcctgctgtgtcatggaagatga

SEQ ID NO: 77709 - DNA, 16 bp, Homo sapiens
gacgaacagtgactga

SEQ ID NO: 77710 - DNA, 16 bp, Homo sapiens
gagacacagaccaaga

SEQ ID NO: 77711 - DNA, 16 bp, Homo sapiens
tcagtctgcccatttc

SEQ ID NO: 77712 - DNA, 20 bp, Homo sapiens
aggccctcagcgagttcaaa

SEQ ID NO: 77713 - DNA, 22 bp, Homo sapiens
gaaaaggttctcaagatcactt

SEQ ID NO: 77714 - DNA, 16 bp, Homo sapiens
tccccatggaaggcca

SEQ ID NO: 77715 - DNA, 21 bp, Homo sapiens
caggttcattttaaaacaaaa

SEQ ID NO: 77716 - DNA, 17 bp, Homo sapiens
acacaagcgagatgaag

SEQ ID NO: 77717 - DNA, 20 bp, Homo sapiens
aaaaccaattattccataca

SEQ ID NO: 77718 - DNA, 22 bp, Homo sapiens
caaaaaactactaaaacgttga

SEQ ID NO: 77719 - DNA, 18 bp, Homo sapiens
cgatgtgtctcatggttg

SEQ ID NO: 77720 - DNA, 16 bp, Homo sapiens
tcttgtccagccttat

SEQ ID NO: 77721 - DNA, 19 bp, Homo sapiens
catgtgggtgatcagtttc

SEQ ID NO: 77722 - DNA, 23 bp, Homo sapiens
gagggctgagatctagaacctag

SEQ ID NO: 77723 - DNA, 22 bp, Homo sapiens
gagtcaagcagatgtttgcctc

SEQ ID NO: 77724 - DNA, 24 bp, Homo sapiens
gtaaaatgacccctggcaatcaca

SEQ ID NO: 77725 - DNA, 17 bp, Homo sapiens
gaactgatcttcatgct

SEQ ID NO: 77726 - DNA, 16 bp, Homo sapiens
ttcctcgactgcaagc

SEQ ID NO: 77727 - DNA, 18 bp, Homo sapiens
gaaagggctaaactgatt

SEQ ID NO: 77728 - DNA, 16 bp, Homo sapiens
cttccggcaggctctg

SEQ ID NO: 77729 - DNA, 18 bp, Homo sapiens
acgtgtttgtcaagtcat

SEQ ID NO: 77730 - DNA, 19 bp, Homo sapiens
gaccccagggctgtcgctc

SEQ ID NO: 77731 - DNA, 17 bp, Homo sapiens
gtctgtatctcctgacc

SEQ ID NO: 77732 - DNA, 19 bp, Homo sapiens
cccggctactttttgtatt

SEQ ID NO: 77733 - DNA, 22 bp, Homo sapiens
tctgatagaaaatctggaaata

SEQ ID NO: 77734 - DNA, 20 bp, Homo sapiens
aaactcctgacctcaggcga

SEQ ID NO: 77735 - DNA, 20 bp, Homo sapiens
ttgtgtttttcagacctcag

SEQ ID NO: 77736 - DNA, 19 bp, Homo sapiens
gtgagccaccacacccagc

SEQ ID NO: 77737 - DNA, 18 bp, Homo sapiens
tcatttcatttctgctgt

SEQ ID NO: 77738 - DNA, 20 bp, Homo sapiens
aagccattctttctaaatat

SEQ ID NO: 77739 - DNA, 18 bp, Homo sapiens
agctgagtagtgttgtta

SEQ ID NO: 77740 - DNA, 20 bp, Homo sapiens
acagcagttaagttgagagt

SEQ ID NO: 77741 - DNA, 24 bp, Homo sapiens
cctccttcctagatctcttctttt

SEQ ID NO: 77742 - DNA, 18 bp, Homo sapiens
acgagaagtataacttcg

SEQ ID NO: 77743 - DNA, 18 bp, Homo sapiens
tcaaactcctggcctctt

SEQ ID NO: 77744 - DNA, 23 bp, Homo sapiens
cctgggatttataataaccaaac

SEQ ID NO: 77745 - DNA, 20 bp, Homo sapiens
gggggagtctgggaatgaac

SEQ ID NO: 77746 - DNA, 20 bp, Homo sapiens
cattttctacctgcagtaaa

SEQ ID NO: 77747 - DNA, 16 bp, Homo sapiens
tgtgctgctgcagcat

SEQ ID NO: 77748 - DNA, 22 bp, Homo sapiens
tttttttttattacagtgttct

SEQ ID NO: 77749 - DNA, 18 bp, Homo sapiens
atcctcattcagtttggt

SEQ ID NO: 77750 - DNA, 19 bp, Homo sapiens
caaaaaaaaagaaagcggg

SEQ ID NO: 77751 - DNA, 22 bp, Homo sapiens
tttccatttctgcaaacatcgt

SEQ ID NO: 77752 - DNA, 18 bp, Homo sapiens
gctgaggcaggagaaacg

SEQ ID NO: 77753 - DNA, 24 bp, Homo sapiens
tcctggagaaaatcaagcagccga

SEQ ID NO: 77754 - DNA, 22 bp, Homo sapiens
aagatcatgccactgcattcca

SEQ ID NO: 77755 - DNA, 16 bp, Homo sapiens
cacagcaaagtgaagg

SEQ ID NO: 77756 - DNA, 27 bp, Homo sapiens
ataaaaataaaaattttagataaaaag

SEQ ID NO: 77757 - DNA, 16 bp, Homo sapiens
tgcccctggacttttc

SEQ ID NO: 77758 - DNA, 22 bp, Homo sapiens
ttttcttagttcatcttcggct

SEQ ID NO: 77759 - DNA, 20 bp, Homo sapiens
agttagtaaatactcaggac

SEQ ID NO: 77760 - DNA, 16 bp, Homo sapiens
attctgttccccttca

SEQ ID NO: 77761 - DNA, 20 bp, Homo sapiens
ccaaacacaaagcgttttaa

SEQ ID NO: 77762 - DNA, 21 bp, Homo sapiens
cgtttagctaaagaactcata

SEQ ID NO: 77763 - DNA, 18 bp, Homo sapiens
aggaagataccggatgta

SEQ ID NO: 77764 - DNA, 20 bp, Homo sapiens
ctacatcaacctgagaggct

SEQ ID NO: 77765 - DNA, 16 bp, Homo sapiens
tctcaggagaaagcgc

SEQ ID NO: 77766 - DNA, 21 bp, Homo sapiens
gaactggaaagaatttcttct

SEQ ID NO: 77767 - DNA, 17 bp, Homo sapiens
cactgcagcagcgagta

SEQ ID NO: 77768 - DNA, 21 bp, Homo sapiens
ctgaggcaaaactcgaaattt

SEQ ID NO: 77769 - DNA, 17 bp, Homo sapiens
cacggcagcacttccgt

SEQ ID NO: 77770 - DNA, 23 bp, Homo sapiens
catctgaaaaagagtcgtcagtt

SEQ ID NO: 77771 - DNA, 16 bp, Homo sapiens
gagttccagtcacgga

SEQ ID NO: 77772 - DNA, 22 bp, Homo sapiens
tgtcccctggggagctggccgc

SEQ ID NO: 77773 - DNA, 23 bp, Homo sapiens
ctgtcttctagcacttcaggtgc

SEQ ID NO: 77774 - DNA, 16 bp, Homo sapiens
cctcagaatccacgga

SEQ ID NO: 77775 - DNA, 23 bp, Homo sapiens
agcctcacagcccaaagactcca

SEQ ID NO: 77776 - DNA, 17 bp, Homo sapiens
tagggtcactgggtccg

SEQ ID NO: 77777 - DNA, 16 bp, Homo sapiens
ccatttccagactgcg

SEQ ID NO: 77778 - DNA, 17 bp, Homo sapiens
tttgtcagagatggcac

SEQ ID NO: 77779 - DNA, 16 bp, Homo sapiens
tggtagaaaagcagga

SEQ ID NO: 77780 - DNA, 16 bp, Homo sapiens
agggctccttcttggt

SEQ ID NO: 77781 - DNA, 16 bp, Homo sapiens
tccgtccacgtttgct

SEQ ID NO: 77782 - DNA, 19 bp, Homo sapiens
acgaagagaaaaggcctct

SEQ ID NO: 77783 - DNA, 19 bp, Homo sapiens
ttgtgaagtatctgttcac

SEQ ID NO: 77784 - DNA, 18 bp, Homo sapiens
cttaatgaaggggattga

SEQ ID NO: 77785 - DNA, 21 bp, Homo sapiens
agttttattttgaacattgaa

SEQ ID NO: 77786 - DNA, 23 bp, Homo sapiens
catgcatttttattaagttacct

SEQ ID NO: 77787 - DNA, 21 bp, Homo sapiens
cactgcagtccagcctgggtg

SEQ ID NO: 77788 - DNA, 19 bp, Homo sapiens
tcaacaagctaaatgtcag

SEQ ID NO: 77789 - DNA, 24 bp, Homo sapiens
ataaaataatataagagactttgt

SEQ ID NO: 77790 - DNA, 17 bp, Homo sapiens
gaaaagcttttgttggc

SEQ ID NO: 77791 - DNA, 23 bp, Homo sapiens
aacacattagctaaaagctttag

SEQ ID NO: 77792 - DNA, 17 bp, Homo sapiens
gccttagaatgcgttga

SEQ ID NO: 77793 - DNA, 16 bp, Homo sapiens
ccagcagtggctgctg

SEQ ID NO: 77794 - DNA, 27 bp, Homo sapiens
cgctgtctgaaaataataattaataaa

SEQ ID NO: 77795 - DNA, 24 bp, Homo sapiens
tatcaaagaggtctttaaaactgc

SEQ ID NO: 77796 - DNA, 16 bp, Homo sapiens
tgagctgagatcgcgc

SEQ ID NO: 77797 - DNA, 18 bp, Homo sapiens
acaccagtatccatttgt

SEQ ID NO: 77798 - DNA, 20 bp, Homo sapiens
acttacatgaccataaattg

SEQ ID NO: 77799 - DNA, 18 bp, Homo sapiens
cttgtattttgtgcaggt

SEQ ID NO: 77800 - DNA, 22 bp, Homo sapiens
tttattctttgaggcattagtc

SEQ ID NO: 77801 - DNA, 21 bp, Homo sapiens
tggttagaatagaatgttgtt

SEQ ID NO: 77802 - DNA, 23 bp, Homo sapiens
gaatcaacagaaatgttaagaac

SEQ ID NO: 77803 - DNA, 18 bp, Homo sapiens
gaccttgactcaaaaaaa

SEQ ID NO: 77804 - DNA, 19 bp, Homo sapiens
ctcattcacgagtctgcag

SEQ ID NO: 77805 - DNA, 24 bp, Homo sapiens
gctgggggccatctgcggtagact

SEQ ID NO: 77806 - DNA, 16 bp, Homo sapiens
gttcaacagacagaca

SEQ ID NO: 77807 - DNA, 21 bp, Homo sapiens
ctcaaagtcccgagctccacg

SEQ ID NO: 77808 - DNA, 23 bp, Homo sapiens
tattaatgttgaatagcatctca

SEQ ID NO: 77809 - DNA, 19 bp, Homo sapiens
tcaaaggcataaagaacaa

SEQ ID NO: 77810 - DNA, 20 bp, Homo sapiens
actttaagaatgtgccatgt

SEQ ID NO: 77811 - DNA, 22 bp, Homo sapiens
aaggccgccggttgataaagaa

SEQ ID NO: 77812 - DNA, 19 bp, Homo sapiens
aactgcaatagtgatcctt

SEQ ID NO: 77813 - DNA, 22 bp, Homo sapiens
gtgcattgtgaaatgaaacctg

SEQ ID NO: 77814 - DNA, 16 bp, Homo sapiens
cgtgtgtgaagagtac

SEQ ID NO: 77815 - DNA, 19 bp, Homo sapiens
gacacgaaactattagcct

SEQ ID NO: 77816 - DNA, 23 bp, Homo sapiens
tgtgaattttttttttttttttt

SEQ ID NO: 77817 - DNA, 18 bp, Homo sapiens
tgttcaattgtagttctc

SEQ ID NO: 77818 - DNA, 22 bp, Homo sapiens
gcttgactaagaaagaaaacag

SEQ ID NO: 77819 - DNA, 19 bp, Homo sapiens
atcggaacagctcaaaccg

SEQ ID NO: 77820 - DNA, 20 bp, Homo sapiens
tcaaaaaacaaaacaaaaca

SEQ ID NO: 77821 - DNA, 23 bp, Homo sapiens
aaaaggaatgaggctttgcaact

SEQ ID NO: 77822 - DNA, 24 bp, Homo sapiens
caacaccactgcactccagcctgg

SEQ ID NO: 77823 - DNA, 17 bp, Homo sapiens
atgcacaggtggaagcc

SEQ ID NO: 77824 - DNA, 26 bp, Homo sapiens
tcaattctaagattttattctccatt

SEQ ID NO: 77825 - DNA, 16 bp, Homo sapiens
catccgtgtaagttgc

SEQ ID NO: 77826 - DNA, 19 bp, Homo sapiens
tagagcaataagaggcgtt

SEQ ID NO: 77827 - DNA, 17 bp, Homo sapiens
ttaaacaggagtatgcc

SEQ ID NO: 77828 - DNA, 16 bp, Homo sapiens
tttcctttatgctggg

SEQ ID NO: 77829 - DNA, 18 bp, Homo sapiens
taacttgagctgtgtaat

SEQ ID NO: 77830 - DNA, 21 bp, Homo sapiens
tccttgtccaagctgattggt

SEQ ID NO: 77831 - DNA, 17 bp, Homo sapiens
ttctgtcaacagtgctt

SEQ ID NO: 77832 - DNA, 17 bp, Homo sapiens
acctggaccattttggc

SEQ ID NO: 77833 - DNA, 16 bp, Homo sapiens
cactacctgtgcgcca

SEQ ID NO: 77834 - DNA, 24 bp, Homo sapiens
aaagcatttctcaataatttatgg

SEQ ID NO: 77835 - DNA, 16 bp, Homo sapiens
accccctacccccgcc

SEQ ID NO: 77836 - DNA, 17 bp, Homo sapiens
tgctcatgtgcattaac

SEQ ID NO: 77837 - DNA, 16 bp, Homo sapiens
acgcatcggcgaaggt

SEQ ID NO: 77838 - DNA, 18 bp, Homo sapiens
attcctttgaaattcctt

SEQ ID NO: 77839 - DNA, 17 bp, Homo sapiens
gtctctcactgaacaca

SEQ ID NO: 77840 - DNA, 24 bp, Homo sapiens
ttaagaaaattttgagagaaaagc

SEQ ID NO: 77841 - DNA, 18 bp, Homo sapiens
acatcagtcgagttccaa

SEQ ID NO: 77842 - DNA, 20 bp, Homo sapiens
gattttatgatgactcctca

SEQ ID NO: 77843 - DNA, 21 bp, Homo sapiens
gctgtgagagaataccaggca

SEQ ID NO: 77844 - DNA, 19 bp, Homo sapiens
aaagcaaagcatgtttagt

SEQ ID NO: 77845 - DNA, 19 bp, Homo sapiens
gttgaaacttttggctttc

SEQ ID NO: 77846 - DNA, 23 bp, Homo sapiens
agttgagatgttgagatagaaaa

SEQ ID NO: 77847 - DNA, 16 bp, Homo sapiens
cagctctgaaacatca

SEQ ID NO: 77848 - DNA, 18 bp, Homo sapiens
gtttctctaaggggtcaa

SEQ ID NO: 77849 - DNA, 23 bp, Homo sapiens
atatcatgtatattttgttgtta

SEQ ID NO: 77850 - DNA, 18 bp, Homo sapiens
agtgagctcagagcttcc

SEQ ID NO: 77851 - DNA, 22 bp, Homo sapiens
tgtctcagaattttgagtaaca

SEQ ID NO: 77852 - DNA, 18 bp, Homo sapiens
cttgaatcttagatgtgt

SEQ ID NO: 77853 - DNA, 21 bp, Homo sapiens
atctcaagtgctataacaaca

SEQ ID NO: 77854 - DNA, 19 bp, Homo sapiens
atggagtggatcttattga

SEQ ID NO: 77855 - DNA, 20 bp, Homo sapiens
actgtttttgcatttcccaa

SEQ ID NO: 77856 - DNA, 21 bp, Homo sapiens
gcatgggtccgtttttaataa

SEQ ID NO: 77857 - DNA, 22 bp, Homo sapiens
ataggattagaaaaagtcaact

SEQ ID NO: 77858 - DNA, 20 bp, Homo sapiens
gttatgactcttaaatttgc

SEQ ID NO: 77859 - DNA, 18 bp, Homo sapiens
tccattgtctgaaacttc

SEQ ID NO: 77860 - DNA, 20 bp, Homo sapiens
gaaaggactttataacaatg

SEQ ID NO: 77861 - DNA, 22 bp, Homo sapiens
tgcggtaaaggagttagtagaa

SEQ ID NO: 77862 - DNA, 22 bp, Homo sapiens
aatttattactacatcaacact

SEQ ID NO: 77863 - DNA, 22 bp, Homo sapiens
tacaacaacattcacagatcat

SEQ ID NO: 77864 - DNA, 23 bp, Homo sapiens
tgatttgtttcttgtaactgatt

SEQ ID NO: 77865 - DNA, 18 bp, Homo sapiens
agcatccagactgttttc

SEQ ID NO: 77866 - DNA, 20 bp, Homo sapiens
ttatttacagtgttgagtca

SEQ ID NO: 77867 - DNA, 18 bp, Homo sapiens
acctgcccagagcaaatc

SEQ ID NO: 77868 - DNA, 28 bp, Homo sapiens
gtttctatttctggatataataaatgta

SEQ ID NO: 77869 - DNA, 24 bp, Homo sapiens
atcgctgcaacactgaggtcgcca

SEQ ID NO: 77870 - DNA, 24 bp, Homo sapiens
tggagggaactttcccagtccccg

SEQ ID NO: 77871 - DNA, 24 bp, Homo sapiens
cggccatgttccccccatttccag

SEQ ID NO: 77872 - DNA, 21 bp, Homo sapiens
gtggagcacaacgtcgaaagc

SEQ ID NO: 77873 - DNA, 24 bp, Homo sapiens
agaggggacaccggaagactgcga

SEQ ID NO: 77874 - DNA, 18 bp, Homo sapiens
caataggcgaaaaggaga

SEQ ID NO: 77875 - DNA, 17 bp, Homo sapiens
gccaggagcgctgcccc

SEQ ID NO: 77876 - DNA, 23 bp, Homo sapiens
ggccacctcgtcggcgtccgccc

SEQ ID NO: 77877 - DNA, 22 bp, Homo sapiens
gagacacgcccttacctttctt

SEQ ID NO: 77878 - DNA, 24 bp, Homo sapiens
gcacggccccctgactccgtccag

SEQ ID NO: 77879 - DNA, 19 bp, Homo sapiens
gttgggcgggctgcggggt

SEQ ID NO: 77880 - DNA, 24 bp, Homo sapiens
agcgatgcgaccctccgggacggc

SEQ ID NO: 77881 - DNA, 20 bp, Homo sapiens
tgatctcaaggaaacaggaa

SEQ ID NO: 77882 - DNA, 22 bp, Homo sapiens
gagtcgggctctggaggaaaag

SEQ ID NO: 77883 - DNA, 24 bp, Homo sapiens
agctcactaagttagtaagctttg

SEQ ID NO: 77884 - DNA, 16 bp, Homo sapiens
ttcaaaagtgcccaac

SEQ ID NO: 77885 - DNA, 23 bp, Homo sapiens
gtgtggagagagtgaagaaactg

SEQ ID NO: 77886 - DNA, 19 bp, Homo sapiens
atttccaaattcccaagga

SEQ ID NO: 77887 - DNA, 18 bp, Homo sapiens
ttttctgcatttctcagt

SEQ ID NO: 77888 - DNA, 17 bp, Homo sapiens
tcaaagtcaccaacctt

SEQ ID NO: 77889 - DNA, 18 bp, Homo sapiens
gtaacaagctcacgcagt

SEQ ID NO: 77890 - DNA, 16 bp, Homo sapiens
ggaattctgcccaggc

SEQ ID NO: 77891 - DNA, 20 bp, Homo sapiens
gttcaataactgtgaggtgg

SEQ ID NO: 77892 - DNA, 17 bp, Homo sapiens
tcgtttgtagctctgta

SEQ ID NO: 77893 - DNA, 25 bp, Homo sapiens
ggaattatgatctttccttcttaaa

SEQ ID NO: 77894 - DNA, 18 bp, Homo sapiens
ggcaatgaggacataacc

SEQ ID NO: 77895 - DNA, 21 bp, Homo sapiens
gttgagcactcgtgtgcatta

SEQ ID NO: 77896 - DNA, 21 bp, Homo sapiens
tttcgtagtacatatttcctc

SEQ ID NO: 77897 - DNA, 18 bp, Homo sapiens
cttgagttcttgagttcc

SEQ ID NO: 77898 - DNA, 20 bp, Homo sapiens
gctccttcagtccggtttta

SEQ ID NO: 77899 - DNA, 20 bp, Homo sapiens
agaccatccaggaggtggct

SEQ ID NO: 77900 - DNA, 17 bp, Homo sapiens
tatgaacccccagcctt

SEQ ID NO: 77901 - DNA, 24 bp, Homo sapiens
ttcctttggaaaacctgcagatca

SEQ ID NO: 77902 - DNA, 16 bp, Homo sapiens
gaggtggaattgagtg

SEQ ID NO: 77903 - DNA, 19 bp, Homo sapiens
atctaactatgatgcaaat

SEQ ID NO: 77904 - DNA, 17 bp, Homo sapiens
cagtatcttacacacag

SEQ ID NO: 77905 - DNA, 24 bp, Homo sapiens
gggcagggttgttgctgaaccgca

SEQ ID NO: 77906 - DNA, 22 bp, Homo sapiens
gactcttgttcgcaccatggca

SEQ ID NO: 77907 - DNA, 18 bp, Homo sapiens
tgctgagaaagtcactgc

SEQ ID NO: 77908 - DNA, 20 bp, Homo sapiens
catccttcatgggaatttaa

SEQ ID NO: 77909 - DNA, 19 bp, Homo sapiens
tagtgtgtatgcgacactt

SEQ ID NO: 77910 - DNA, 21 bp, Homo sapiens
aaatcctgcatggcgccgtgc

SEQ ID NO: 77911 - DNA, 17 bp, Homo sapiens
ttctctcccctgcccca

SEQ ID NO: 77912 - DNA, 17 bp, Homo sapiens
tccagtggcgggacata

SEQ ID NO: 77913 - DNA, 18 bp, Homo sapiens
gtggtcagatattttgct

SEQ ID NO: 77914 - DNA, 19 bp, Homo sapiens
agaaccacctgggcagctg

SEQ ID NO: 77915 - DNA, 16 bp, Homo sapiens
tcccattgggacagct

SEQ ID NO: 77916 - DNA, 21 bp, Homo sapiens
atcagagaataagttgaaaag

SEQ ID NO: 77917 - DNA, 24 bp, Homo sapiens
gcggtcacacatgggtctgaggct

SEQ ID NO: 77918 - DNA, 21 bp, Homo sapiens
aaagggcgtcatcagtttctc

SEQ ID NO: 77919 - DNA, 18 bp, Homo sapiens
cagagggaaaacaaatcc

SEQ ID NO: 77920 - DNA, 18 bp, Homo sapiens
aagtgtgatccaagctgt

SEQ ID NO: 77921 - DNA, 24 bp, Homo sapiens
atttgcaagactgtccttcaccta

SEQ ID NO: 77922 - DNA, 22 bp, Homo sapiens
cagaaaagggcatggtttgact

SEQ ID NO: 77923 - DNA, 21 bp, Homo sapiens
ggcagcagtcactgggggact

SEQ ID NO: 77924 - DNA, 21 bp, Homo sapiens
tttcatgaaaaagtctgcaag

SEQ ID NO: 77925 - DNA, 21 bp, Homo sapiens
ggcatcttaccaggcagtcgc

SEQ ID NO: 77926 - DNA, 22 bp, Homo sapiens
tcttcagctcacagggaacctt

SEQ ID NO: 77927 - DNA, 18 bp, Homo sapiens
ctggtgtgggtggggcgg

SEQ ID NO: 77928 - DNA, 23 bp, Homo sapiens
ccagcagtgctccgggcgctgcc

SEQ ID NO: 77929 - DNA, 22 bp, Homo sapiens
caatatcctgtctgttatgaca

SEQ ID NO: 77930 - DNA, 16 bp, Homo sapiens
cacaggcccccgggag

SEQ ID NO: 77931 - DNA, 21 bp, Homo sapiens
ctgcagagggcgccagctggg

SEQ ID NO: 77932 - DNA, 20 bp, Homo sapiens
tagagcatgagtggggggca

SEQ ID NO: 77933 - DNA, 23 bp, Homo sapiens
gtaacttgggctttctgacggga

SEQ ID NO: 77934 - DNA, 24 bp, Homo sapiens
aggtggcaccaaagctgtatttgc

SEQ ID NO: 77935 - DNA, 22 bp, Homo sapiens
gtgtacttacctcacttgccca

SEQ ID NO: 77936 - DNA, 18 bp, Homo sapiens
gaccagttagagggccca

SEQ ID NO: 77937 - DNA, 24 bp, Homo sapiens
gagacgaagccacgtgcaaggaca

SEQ ID NO: 77938 - DNA, 18 bp, Homo sapiens
gactctccaagatgggat

SEQ ID NO: 77939 - DNA, 24 bp, Homo sapiens
agatggatgtgaaccccgagggca

SEQ ID NO: 77940 - DNA, 24 bp, Homo sapiens
ctcgcctgtgtgcctggacgggca

SEQ ID NO: 77941 - DNA, 16 bp, Homo sapiens
gcacgagccgtgatct

SEQ ID NO: 77942 - DNA, 23 bp, Homo sapiens
aaagtaaataaagccaaaggagg

SEQ ID NO: 77943 - DNA, 16 bp, Homo sapiens
ttcttacacttgcgga

SEQ ID NO: 77944 - DNA, 23 bp, Homo sapiens
gcctgtgtgaggcccgagcacct

SEQ ID NO: 77945 - DNA, 16 bp, Homo sapiens
agaacaagcctcgtcc

SEQ ID NO: 77946 - DNA, 21 bp, Homo sapiens
aggtaattatgtggtgacaga

SEQ ID NO: 77947 - DNA, 23 bp, Homo sapiens
tgttttttaatgagaagaggaag

SEQ ID NO: 77948 - DNA, 16 bp, Homo sapiens
gaggaagacggcgtcc

SEQ ID NO: 77949 - DNA, 16 bp, Homo sapiens
aacctagctttacagc

SEQ ID NO: 77950 - DNA, 16 bp, Homo sapiens
ctccccagccccttca

SEQ ID NO: 77951 - DNA, 19 bp, Homo sapiens
tcgtagcatttatggagag

SEQ ID NO: 77952 - DNA, 21 bp, Homo sapiens
cggttccggtgaccggaattc

SEQ ID NO: 77953 - DNA, 16 bp, Homo sapiens
ggcaggatgtggagat

SEQ ID NO: 77954 - DNA, 24 bp, Homo sapiens
tcttaatccaacaaatgtgaacgg

SEQ ID NO: 77955 - DNA, 20 bp, Homo sapiens
taaaaaggcagattttgttt

SEQ ID NO: 77956 - DNA, 21 bp, Homo sapiens
tggtgaatttaaagactcact

SEQ ID NO: 77957 - DNA, 19 bp, Homo sapiens
gtgaaggagtcactgaaac

SEQ ID NO: 77958 - DNA, 18 bp, Homo sapiens
cacctccatcagtggcga

SEQ ID NO: 77959 - DNA, 18 bp, Homo sapiens
ttcctttacggttttcag

SEQ ID NO: 77960 - DNA, 18 bp, Homo sapiens
aggttcagttgcttgtat

SEQ ID NO: 77961 - DNA, 18 bp, Homo sapiens
gttctctctctaaaacac

SEQ ID NO: 77962 - DNA, 20 bp, Homo sapiens
tcaataatcaccctgttgtt

SEQ ID NO: 77963 - DNA, 19 bp, Homo sapiens
acggtaaaatttcagaaga

SEQ ID NO: 77964 - DNA, 20 bp, Homo sapiens
cacaggaactggatattctg

SEQ ID NO: 77965 - DNA, 16 bp, Homo sapiens
ttttgcctgcaggaga

SEQ ID NO: 77966 - DNA, 22 bp, Homo sapiens
catgtacactcagagaagatga

SEQ ID NO: 77967 - DNA, 18 bp, Homo sapiens
aggttctcaaaggcatgg

SEQ ID NO: 77968 - DNA, 24 bp, Homo sapiens
tgttcatataatacagagtccctg

SEQ ID NO: 77969 - DNA, 16 bp, Homo sapiens
ctaccaggctttggct

SEQ ID NO: 77970 - DNA, 17 bp, Homo sapiens
gtgtctgaagtctttca

SEQ ID NO: 77971 - DNA, 16 bp, Homo sapiens
gccctatcttagcaac

SEQ ID NO: 77972 - DNA, 19 bp, Homo sapiens
ctgaaaacaggacggacct

SEQ ID NO: 77973 - DNA, 16 bp, Homo sapiens
tgtgcctgctcatgtg

SEQ ID NO: 77974 - DNA, 21 bp, Homo sapiens
ttaaaaacacctgcagttttc

SEQ ID NO: 77975 - DNA, 24 bp, Homo sapiens
atcccaaggatgttatgttcaggc

SEQ ID NO: 77976 - DNA, 21 bp, Homo sapiens
taccatcattggaaagcagtt

SEQ ID NO: 77977 - DNA, 21 bp, Homo sapiens
tttttgtttcctgaaattatc

SEQ ID NO: 77978 - DNA, 25 bp, Homo sapiens
cagggatacattgtttttataattt

SEQ ID NO: 77979 - DNA, 16 bp, Homo sapiens
ctgaccggaggtccca

SEQ ID NO: 77980 - DNA, 21 bp, Homo sapiens
cagttttctcttgcagtcgtc

SEQ ID NO: 77981 - DNA, 16 bp, Homo sapiens
aacagaaagcggtgac

SEQ ID NO: 77982 - DNA, 20 bp, Homo sapiens
gagataagtgatggagatgt

SEQ ID NO: 77983 - DNA, 17 bp, Homo sapiens
tgggaatagcccttcaa

SEQ ID NO: 77984 - DNA, 20 bp, Homo sapiens
ctggaaaaaactgtttggga

SEQ ID NO: 77985 - DNA, 23 bp, Homo sapiens
cagttaggaatcttaagatttta

SEQ ID NO: 77986 - DNA, 24 bp, Homo sapiens
cggtcggcctctgggaagcccagt

SEQ ID NO: 77987 - DNA, 22 bp, Homo sapiens
ccagcagccctcgggggagcac

SEQ ID NO: 77988 - DNA, 23 bp, Homo sapiens
tcacccaaggtcatggagcacag

SEQ ID NO: 77989 - DNA, 24 bp, Homo sapiens
ttgtccacgcattccctgcctcgg

SEQ ID NO: 77990 - DNA, 19 bp, Homo sapiens
ctcgggtccctgctctgtc

SEQ ID NO: 77991 - DNA, 21 bp, Homo sapiens
tttttgatcaacgcaagggga

SEQ ID NO: 77992 - DNA, 17 bp, Homo sapiens
tgccatgccttgtgctc

SEQ ID NO: 77993 - DNA, 23 bp, Homo sapiens
aaggaagagaaaatcaaacagaa

SEQ ID NO: 77994 - DNA, 22 bp, Homo sapiens
gtctcttgccggaatgtcagcc

SEQ ID NO: 77995 - DNA, 20 bp, Homo sapiens
cttcccgtctccccacagaa

SEQ ID NO: 77996 - DNA, 16 bp, Homo sapiens
cactcagagttctcca

SEQ ID NO: 77997 - DNA, 24 bp, Homo sapiens
tatatagtcctggagtcccaactc

SEQ ID NO: 77998 - DNA, 16 bp, Homo sapiens
cttacccgtcctgtgc

SEQ ID NO: 77999 - DNA, 19 bp, Homo sapiens
atttgtgttcctgcaataa

SEQ ID NO: 78000 - DNA, 17 bp, Homo sapiens
atcactgttcggcttct

SEQ ID NO: 78001 - DNA, 24 bp, Homo sapiens
tcagtgagccaagggagtttgtgg

SEQ ID NO: 78002 - DNA, 21 bp, Homo sapiens
tctcctctgggaagtggctct

SEQ ID NO: 78003 - DNA, 24 bp, Homo sapiens
tgcctgcctcaggccatgaacatc

SEQ ID NO: 78004 - DNA, 19 bp, Homo sapiens
tcaatgtagtgggcacact

SEQ ID NO: 78005 - DNA, 24 bp, Homo sapiens
agaatttttctatcatttggcttt

SEQ ID NO: 78006 - DNA, 16 bp, Homo sapiens
agggtgttgttttctc

SEQ ID NO: 78007 - DNA, 22 bp, Homo sapiens
cattttgaaagagaaaagaaag

SEQ ID NO: 78008 - DNA, 16 bp, Homo sapiens
gtaggtgcagtttgga

SEQ ID NO: 78009 - DNA, 17 bp, Homo sapiens
accagacaactgtatcc

SEQ ID NO: 78010 - DNA, 22 bp, Homo sapiens
agacatttttgatctctgaatt

SEQ ID NO: 78011 - DNA, 22 bp, Homo sapiens
ccggcaggagtcatgggagaaa

SEQ ID NO: 78012 - DNA, 21 bp, Homo sapiens
caccttaagtaactgactcaa

SEQ ID NO: 78013 - DNA, 17 bp, Homo sapiens
ccacctgtgccatccaa

SEQ ID NO: 78014 - DNA, 21 bp, Homo sapiens
ctgggcttaggggaggtccag

SEQ ID NO: 78015 - DNA, 19 bp, Homo sapiens
gtagaaaggaaatgcagtt

SEQ ID NO: 78016 - DNA, 21 bp, Homo sapiens
tgtataagaaatagtttgcca

SEQ ID NO: 78017 - DNA, 23 bp, Homo sapiens
atatgtcaaatgaatagtgtcag

SEQ ID NO: 78018 - DNA, 19 bp, Homo sapiens
gtggtcatttttctaatgt

SEQ ID NO: 78019 - DNA, 18 bp, Homo sapiens
aaggctcagaatcaggaa

SEQ ID NO: 78020 - DNA, 19 bp, Homo sapiens
aaaaaggcagaataacatg

SEQ ID NO: 78021 - DNA, 20 bp, Homo sapiens
gaacagagacctggagagca

SEQ ID NO: 78022 - DNA, 17 bp, Homo sapiens
agctgggctcccgctct

SEQ ID NO: 78023 - DNA, 18 bp, Homo sapiens
tccccaggcctctcacat

SEQ ID NO: 78024 - DNA, 17 bp, Homo sapiens
agctgaaactctgacgg

SEQ ID NO: 78025 - DNA, 24 bp, Homo sapiens
gccaggaaatgagagtctcaaagc

SEQ ID NO: 78026 - DNA, 16 bp, Homo sapiens
aggccgtgatgatcac

SEQ ID NO: 78027 - DNA, 21 bp, Homo sapiens
aagtaatgatggcagcgtgtc

SEQ ID NO: 78028 - DNA, 20 bp, Homo sapiens
aggggtggcagaaaggaaaa

SEQ ID NO: 78029 - DNA, 24 bp, Homo sapiens
ggatggatcccttctcttctgccg

SEQ ID NO: 78030 - DNA, 16 bp, Homo sapiens
agtggaaggaaggaaa

SEQ ID NO: 78031 - DNA, 20 bp, Homo sapiens
catgcctggccttctgcatc

SEQ ID NO: 78032 - DNA, 24 bp, Homo sapiens
gaggaagaggtcagtcctgggggt

SEQ ID NO: 78033 - DNA, 23 bp, Homo sapiens
gcataataaataattaaccacca

SEQ ID NO: 78034 - DNA, 18 bp, Homo sapiens
agctgtgaacacttaccc

SEQ ID NO: 78035 - DNA, 21 bp, Homo sapiens
agtagtttagcatatattgct

SEQ ID NO: 78036 - DNA, 16 bp, Homo sapiens
tgcaggaaagcatctt

SEQ ID NO: 78037 - DNA, 20 bp, Homo sapiens
aagtagaatgagaaaaatgt

SEQ ID NO: 78038 - DNA, 16 bp, Homo sapiens
gggtaggctggcccag

SEQ ID NO: 78039 - DNA, 22 bp, Homo sapiens
tcttgaaggctgtccaacgaat

SEQ ID NO: 78040 - DNA, 23 bp, Homo sapiens
gttttttctccttttagaagcta

SEQ ID NO: 78041 - DNA, 16 bp, Homo sapiens
ccaccaccagcagcaa

SEQ ID NO: 78042 - DNA, 24 bp, Homo sapiens
agatgtcagtgcactgaaacatgc

SEQ ID NO: 78043 - DNA, 21 bp, Homo sapiens
gcagcagcctccgcagcgtgc

SEQ ID NO: 78044 - DNA, 21 bp, Homo sapiens
ctcacccttccttgttcctcc

SEQ ID NO: 78045 - DNA, 22 bp, Homo sapiens
ttcctgtcggggtgcgagggct

SEQ ID NO: 78046 - DNA, 24 bp, Homo sapiens
ctgggatggtgggggccctcctct

SEQ ID NO: 78047 - DNA, 24 bp, Homo sapiens
acaattatgtatctaacatacaca

SEQ ID NO: 78048 - DNA, 19 bp, Homo sapiens
ggcgccacatcgttcggaa

SEQ ID NO: 78049 - DNA, 23 bp, Homo sapiens
taccaacatgtcaccaactgggt

SEQ ID NO: 78050 - DNA, 17 bp, Homo sapiens
tacatttgtccttccaa

SEQ ID NO: 78051 - DNA, 23 bp, Homo sapiens
gtttccttcaagatcctcaagag

SEQ ID NO: 78052 - DNA, 16 bp, Homo sapiens
gtggctgctggtcccc

SEQ ID NO: 78053 - DNA, 17 bp, Homo sapiens
ttatacaccgtgccgaa

SEQ ID NO: 78054 - DNA, 24 bp, Homo sapiens
ctgaggtgacccttgtctctgtgt

SEQ ID NO: 78055 - DNA, 16 bp, Homo sapiens
agaccatgagaggccc

SEQ ID NO: 78056 - DNA, 19 bp, Homo sapiens
agtggagaagctcccaacc

SEQ ID NO: 78057 - DNA, 17 bp, Homo sapiens
cagtgaaacaaagagta

SEQ ID NO: 78058 - DNA, 21 bp, Homo sapiens
agatcaaagtgctgggctccg

SEQ ID NO: 78059 - DNA, 19 bp, Homo sapiens
gacgggaattttaactttc

SEQ ID NO: 78060 - DNA, 17 bp, Homo sapiens
agccccagtgtccctca

SEQ ID NO: 78061 - DNA, 21 bp, Homo sapiens
atcgaggatttccttgttggc

SEQ ID NO: 78062 - DNA, 22 bp, Homo sapiens
gggcagcatgtggcaccatctc

SEQ ID NO: 78063 - DNA, 16 bp, Homo sapiens
ggtgggcctgaggttc

SEQ ID NO: 78064 - DNA, 23 bp, Homo sapiens
catagggactctggatcccagaa

SEQ ID NO: 78065 - DNA, 20 bp, Homo sapiens
tagaaagtgaacatttagga

SEQ ID NO: 78066 - DNA, 17 bp, Homo sapiens
gaagcaacatctccgaa

SEQ ID NO: 78067 - DNA, 23 bp, Homo sapiens
tgcgtaaacgtccctgtgctagg

SEQ ID NO: 78068 - DNA, 16 bp, Homo sapiens
gcggcacacgtggggg

SEQ ID NO: 78069 - DNA, 24 bp, Homo sapiens
tacgtattttgaaactcaagatcg

SEQ ID NO: 78070 - DNA, 16 bp, Homo sapiens
ccgaagggcatgagct

SEQ ID NO: 78071 - DNA, 17 bp, Homo sapiens
ccaccatgcgaagccac

SEQ ID NO: 78072 - DNA, 23 bp, Homo sapiens
acaccagttgagcaggtactggg

SEQ ID NO: 78073 - DNA, 20 bp, Homo sapiens
gtgatggccagcgtggacaa

SEQ ID NO: 78074 - DNA, 24 bp, Homo sapiens
gatcctggctccttatctcccctc

SEQ ID NO: 78075 - DNA, 16 bp, Homo sapiens
ctcatcacgcagctca

SEQ ID NO: 78076 - DNA, 22 bp, Homo sapiens
cgcacacacatatccccatggc

SEQ ID NO: 78077 - DNA, 23 bp, Homo sapiens
acacaaagacaatattggctccc

SEQ ID NO: 78078 - DNA, 22 bp, Homo sapiens
gcacaagaagatcaacttgatt

SEQ ID NO: 78079 - DNA, 22 bp, Homo sapiens
catcttctttcatgcgcctttc

SEQ ID NO: 78080 - DNA, 16 bp, Homo sapiens
ggtcgcggtgcaccaa

SEQ ID NO: 78081 - DNA, 16 bp, Homo sapiens
taagtcctcgacgtgg

SEQ ID NO: 78082 - DNA, 20 bp, Homo sapiens
gcccaaaatctgtgatcttg

SEQ ID NO: 78083 - DNA, 20 bp, Homo sapiens
agagcttcttcccatgatga

SEQ ID NO: 78084 - DNA, 17 bp, Homo sapiens
ctccttactttgcctcc

SEQ ID NO: 78085 - DNA, 21 bp, Homo sapiens
catgaactacttggaggaccg

SEQ ID NO: 78086 - DNA, 24 bp, Homo sapiens
aatacagctagtgggaaggcagcc

SEQ ID NO: 78087 - DNA, 22 bp, Homo sapiens
gtgaaaacaccgcagcatgtca

SEQ ID NO: 78088 - DNA, 16 bp, Homo sapiens
gagctcacccagaatg

SEQ ID NO: 78089 - DNA, 24 bp, Homo sapiens
ggaagagaaagaataccatgcaga

SEQ ID NO: 78090 - DNA, 17 bp, Homo sapiens
tcagactgaaatcccct

SEQ ID NO: 78091 - DNA, 23 bp, Homo sapiens
gtgggtatagattctgtgtaaaa

SEQ ID NO: 78092 - DNA, 22 bp, Homo sapiens
ggggtgatctggctcgtctgtg

SEQ ID NO: 78093 - DNA, 21 bp, Homo sapiens
cagtacaaactcattagcatc

SEQ ID NO: 78094 - DNA, 20 bp, Homo sapiens
tccaacagagggaaactaat

SEQ ID NO: 78095 - DNA, 21 bp, Homo sapiens
aatacttgcatgtcagaggat

SEQ ID NO: 78096 - DNA, 16 bp, Homo sapiens
tggatggcattggaat

SEQ ID NO: 78097 - DNA, 19 bp, Homo sapiens
gtacaatagatagacagca

SEQ ID NO: 78098 - DNA, 17 bp, Homo sapiens
cttggatccaaaggtca

SEQ ID NO: 78099 - DNA, 23 bp, Homo sapiens
gactacagaaatgtaggtttcta

SEQ ID NO: 78100 - DNA, 16 bp, Homo sapiens
ggaggcgttctccttt

SEQ ID NO: 78101 - DNA, 22 bp, Homo sapiens
ttgtgattgttcattcatgatc

SEQ ID NO: 78102 - DNA, 16 bp, Homo sapiens
ccagtcactcacactt

SEQ ID NO: 78103 - DNA, 18 bp, Homo sapiens
gtttgggagttgatgacc

SEQ ID NO: 78104 - DNA, 16 bp, Homo sapiens
ctcagctgtttggcta

SEQ ID NO: 78105 - DNA, 18 bp, Homo sapiens
agatctcctccatcctgg

SEQ ID NO: 78106 - DNA, 20 bp, Homo sapiens
cagatgtttctggatttgtg

SEQ ID NO: 78107 - DNA, 19 bp, Homo sapiens
gatgtctacatgatcatgg

SEQ ID NO: 78108 - DNA, 22 bp, Homo sapiens
actagctggccaagacagaaaa

SEQ ID NO: 78109 - DNA, 20 bp, Homo sapiens
tggagaattcgatgatcaac

SEQ ID NO: 78110 - DNA, 17 bp, Homo sapiens
aagtgtcgcatcaccaa

SEQ ID NO: 78111 - DNA, 17 bp, Homo sapiens
tggaagcacagactgca

SEQ ID NO: 78112 - DNA, 21 bp, Homo sapiens
gtgttctaattgcactgtttt

SEQ ID NO: 78113 - DNA, 17 bp, Homo sapiens
ggctggcatgtgacaga

SEQ ID NO: 78114 - DNA, 16 bp, Homo sapiens
ccaaagttccgtgagt

SEQ ID NO: 78115 - DNA, 17 bp, Homo sapiens
tgaggcttgctctaatg

SEQ ID NO: 78116 - DNA, 23 bp, Homo sapiens
gcgctaccttgtcattcaggtac

SEQ ID NO: 78117 - DNA, 16 bp, Homo sapiens
tctgtaggacttggca

SEQ ID NO: 78118 - DNA, 22 bp, Homo sapiens
ttcattataacaaaattggcaa

SEQ ID NO: 78119 - DNA, 23 bp, Homo sapiens
gatgaggtactcgtcggcatcca

SEQ ID NO: 78120 - DNA, 24 bp, Homo sapiens
gccaagaagtggaatagcatctct

SEQ ID NO: 78121 - DNA, 16 bp, Homo sapiens
gaggggagtccgtgac

SEQ ID NO: 78122 - DNA, 17 bp, Homo sapiens
tgaaagaatgcatttgc

SEQ ID NO: 78123 - DNA, 22 bp, Homo sapiens
aatttgttcaaatgagtagaca

SEQ ID NO: 78124 - DNA, 19 bp, Homo sapiens
agaagacatggacgacgtg

SEQ ID NO: 78125 - DNA, 19 bp, Homo sapiens
ttgacttcatatccatgtg

SEQ ID NO: 78126 - DNA, 16 bp, Homo sapiens
tcagcagcccctccac

SEQ ID NO: 78127 - DNA, 17 bp, Homo sapiens
caagccacggtggaatt

SEQ ID NO: 78128 - DNA, 21 bp, Homo sapiens
aacgattaagacaaaaattaa

SEQ ID NO: 78129 - DNA, 19 bp, Homo sapiens
agtggagagctgtaaattc

SEQ ID NO: 78130 - DNA, 19 bp, Homo sapiens
tcaggaaaagtggatgaga

SEQ ID NO: 78131 - DNA, 20 bp, Homo sapiens
actcaagattatctgggtta

SEQ ID NO: 78132 - DNA, 23 bp, Homo sapiens
ttctttttcagagtgcaaccagc

SEQ ID NO: 78133 - DNA, 17 bp, Homo sapiens
tttgaacggcactgtga

SEQ ID NO: 78134 - DNA, 23 bp, Homo sapiens
gctgcaagaagctgtcttccttg

SEQ ID NO: 78135 - DNA, 23 bp, Homo sapiens
agactctcaggcctgcccaacct

SEQ ID NO: 78136 - DNA, 21 bp, Homo sapiens
ctgggaggaaggtgtcgtcta

SEQ ID NO: 78137 - DNA, 21 bp, Homo sapiens
tgcaaacactgaagttggggc

SEQ ID NO: 78138 - DNA, 17 bp, Homo sapiens
ggtcgaggaggttgagg

SEQ ID NO: 78139 - DNA, 23 bp, Homo sapiens
tgcagctgcaaagctgtcccatc

SEQ ID NO: 78140 - DNA, 16 bp, Homo sapiens
tggagatgctggaggg

SEQ ID NO: 78141 - DNA, 18 bp, Homo sapiens
gcgccttgactgaggaca

SEQ ID NO: 78142 - DNA, 21 bp, Homo sapiens
tcatgtgtttatctgctcctt

SEQ ID NO: 78143 - DNA, 18 bp, Homo sapiens
ttgtctggaaacagtcct

SEQ ID NO: 78144 - DNA, 23 bp, Homo sapiens
agattcattcttacaacagaggt

SEQ ID NO: 78145 - DNA, 16 bp, Homo sapiens
gtccaagccaggtgct

SEQ ID NO: 78146 - DNA, 19 bp, Homo sapiens
acacacacagatgtgtatg

SEQ ID NO: 78147 - DNA, 22 bp, Homo sapiens
gaacccactttcttttgcagca

SEQ ID NO: 78148 - DNA, 24 bp, Homo sapiens
gtgatagacaggattctgcacaga

SEQ ID NO: 78149 - DNA, 23 bp, Homo sapiens
cataagtctccttgttgaggaca

SEQ ID NO: 78150 - DNA, 16 bp, Homo sapiens
ggtcctggtagtgtgg

SEQ ID NO: 78151 - DNA, 20 bp, Homo sapiens
tttgctgattacttcacctc

SEQ ID NO: 78152 - DNA, 16 bp, Homo sapiens
tgacacaggtgggctg

SEQ ID NO: 78153 - DNA, 23 bp, Homo sapiens
ttcccaaaaggcccgctggctct

SEQ ID NO: 78154 - DNA, 17 bp, Homo sapiens
gggttgtccaggctaat

SEQ ID NO: 78155 - DNA, 16 bp, Homo sapiens
cagcagagacccacac

SEQ ID NO: 78156 - DNA, 18 bp, Homo sapiens
gcccttaaagatgccatt

SEQ ID NO: 78157 - DNA, 16 bp, Homo sapiens
atctcaacactgtcca

SEQ ID NO: 78158 - DNA, 19 bp, Homo sapiens
ctccaataaattcactgct

SEQ ID NO: 78159 - DNA, 17 bp, Homo sapiens
ggcccagaaaggcagcc

SEQ ID NO: 78160 - DNA, 16 bp, Homo sapiens
tgggtatcgaaagagt

SEQ ID NO: 78161 - DNA, 22 bp, Homo sapiens
ctttcccaaggaagccaagcca

SEQ ID NO: 78162 - DNA, 16 bp, Homo sapiens
tgggtctaagagctaa

SEQ ID NO: 78163 - DNA, 20 bp, Homo sapiens
aatacctaagggtcgcgcca

SEQ ID NO: 78164 - DNA, 16 bp, Homo sapiens
tgtgcccgaggtggaa

SEQ ID NO: 78165 - DNA, 16 bp, Homo sapiens
cacgaggatgccaggt

SEQ ID NO: 78166 - DNA, 24 bp, Homo sapiens
tccagttgggaagctttatttctg

SEQ ID NO: 78167 - DNA, 18 bp, Homo sapiens
atctcggactttgctagt

SEQ ID NO: 78168 - DNA, 17 bp, Homo sapiens
aactgaactgctctcgc

SEQ ID NO: 78169 - DNA, 18 bp, Homo sapiens
cattctggatgggtgttt

SEQ ID NO: 78170 - DNA, 16 bp, Homo sapiens
ctgtgcttgcacctgg

SEQ ID NO: 78171 - DNA, 25 bp, Homo sapiens
tcttcctcatttaaaacataaatgt

SEQ ID NO: 78172 - DNA, 22 bp, Homo sapiens
gagcaatggggagtgtaaagag

SEQ ID NO: 78173 - DNA, 18 bp, Homo sapiens
aatctgggtgttccagca

SEQ ID NO: 78174 - DNA, 20 bp, Homo sapiens
cagcttcccaacttcaccgc

SEQ ID NO: 78175 - DNA, 17 bp, Homo sapiens
ctttccaaacacctcct

SEQ ID NO: 78176 - DNA, 23 bp, Homo sapiens
cacattttccttggtgccactaa

SEQ ID NO: 78177 - DNA, 18 bp, Homo sapiens
gctgccacagctaatgag

SEQ ID NO: 78178 - DNA, 24 bp, Homo sapiens
tgctgagtacaagactgggcctgt

SEQ ID NO: 78179 - DNA, 17 bp, Homo sapiens
actgtatgtcagcagta

SEQ ID NO: 78180 - DNA, 23 bp, Homo sapiens
cagcaaagccaatttatcaggag

SEQ ID NO: 78181 - DNA, 17 bp, Homo sapiens
caggacactggctgggc

SEQ ID NO: 78182 - DNA, 21 bp, Homo sapiens
gacacctactatgatgatcaa

SEQ ID NO: 78183 - DNA, 21 bp, Homo sapiens
acaaagaagttgatgaaccgg

SEQ ID NO: 78184 - DNA, 17 bp, Homo sapiens
tgtctttccccacaatc

SEQ ID NO: 78185 - DNA, 18 bp, Homo sapiens
atcgaatgcaatggatga

SEQ ID NO: 78186 - DNA, 19 bp, Homo sapiens
tctccccacagatagaaga

SEQ ID NO: 78187 - DNA, 18 bp, Homo sapiens
taggactggtccgtcaaa

SEQ ID NO: 78188 - DNA, 20 bp, Homo sapiens
gccaaagtcctttcatctgt

SEQ ID NO: 78189 - DNA, 18 bp, Homo sapiens
ctttcaaaggcatggaca

SEQ ID NO: 78190 - DNA, 21 bp, Homo sapiens
ttcttatttcccagatcatcc

SEQ ID NO: 78191 - DNA, 19 bp, Homo sapiens
gtgaaaagtctgagcatct

SEQ ID NO: 78192 - DNA, 18 bp, Homo sapiens
tggttttatgtttttgac

SEQ ID NO: 78193 - DNA, 17 bp, Homo sapiens
aggcatttccatgtagg

SEQ ID NO: 78194 - DNA, 19 bp, Homo sapiens
cttaccccattaagtatgt

SEQ ID NO: 78195 - DNA, 16 bp, Homo sapiens
cacttccttctttgtg

SEQ ID NO: 78196 - DNA, 24 bp, Homo sapiens
cttcttgacggtccaaagggaaac

SEQ ID NO: 78197 - DNA, 17 bp, Homo sapiens
ctatttgtctagcaagc

SEQ ID NO: 78198 - DNA, 21 bp, Homo sapiens
ttccataaactctggattgca

SEQ ID NO: 78199 - DNA, 17 bp, Homo sapiens
cagaatctggcttgctt

SEQ ID NO: 78200 - DNA, 21 bp, Homo sapiens
agaaaagagaaaaaagagatc

SEQ ID NO: 78201 - DNA, 16 bp, Homo sapiens
gaagaagtcgttgaca

SEQ ID NO: 78202 - DNA, 19 bp, Homo sapiens
cagcaagcctggggcccag

SEQ ID NO: 78203 - DNA, 17 bp, Homo sapiens
gattgggtccgtaaaaa

SEQ ID NO: 78204 - DNA, 18 bp, Homo sapiens
ttcggggtgttcgcacaa

SEQ ID NO: 78205 - DNA, 21 bp, Homo sapiens
ctaatttatacctcacagttt

SEQ ID NO: 78206 - DNA, 21 bp, Homo sapiens
gcattccctatcaaatatgtc

SEQ ID NO: 78207 - DNA, 20 bp, Homo sapiens
acaccatttacaaagcacaa

SEQ ID NO: 78208 - DNA, 17 bp, Homo sapiens
gtgagatgtctccagca

SEQ ID NO: 78209 - DNA, 20 bp, Homo sapiens
aatgaagattcaattcctca

SEQ ID NO: 78210 - DNA, 16 bp, Homo sapiens
gcgcttcacagcctga

SEQ ID NO: 78211 - DNA, 18 bp, Homo sapiens
ttgcatgattatccttgc

SEQ ID NO: 78212 - DNA, 20 bp, Homo sapiens
gacccatgaataagtcaacg

SEQ ID NO: 78213 - DNA, 17 bp, Homo sapiens
ttaccagcttgttcatg

SEQ ID NO: 78214 - DNA, 17 bp, Homo sapiens
ggtgaggtctcctttaa

SEQ ID NO: 78215 - DNA, 23 bp, Homo sapiens
attccagacacttctgagaaatt

SEQ ID NO: 78216 - DNA, 23 bp, Homo sapiens
cagacacagctactctcagaaag

SEQ ID NO: 78217 - DNA, 17 bp, Homo sapiens
accacagctttgcagcg

SEQ ID NO: 78218 - DNA, 21 bp, Homo sapiens
gcaaataccttactgcaaaaa

SEQ ID NO: 78219 - DNA, 22 bp, Homo sapiens
atctatatccaccttcattaaa

SEQ ID NO: 78220 - DNA, 17 bp, Homo sapiens
gtttggctttcagtctg

SEQ ID NO: 78221 - DNA, 17 bp, Homo sapiens
tcgcttcatgcaggtaa

SEQ ID NO: 78222 - DNA, 21 bp, Homo sapiens
gattagaagatgacatattga

SEQ ID NO: 78223 - DNA, 19 bp, Homo sapiens
ccaggagaaaattcacatg

SEQ ID NO: 78224 - DNA, 21 bp, Homo sapiens
cacccacaagccctgctaatc

SEQ ID NO: 78225 - DNA, 17 bp, Homo sapiens
gtagccattttggttta

SEQ ID NO: 78226 - DNA, 20 bp, Homo sapiens
aactgagcttgttggaataa

SEQ ID NO: 78227 - DNA, 17 bp, Homo sapiens
aaaccacgtctatggaa

SEQ ID NO: 78228 - DNA, 19 bp, Homo sapiens
caggaccatcaacccctca

SEQ ID NO: 78229 - DNA, 21 bp, Homo sapiens
ttaagatgaagagagacatta

SEQ ID NO: 78230 - DNA, 21 bp, Homo sapiens
gaagtgattgtggagcataca

SEQ ID NO: 78231 - DNA, 21 bp, Homo sapiens
agatttcagaagatctctgga

SEQ ID NO: 78232 - DNA, 24 bp, Homo sapiens
ttttaatcaccgttatgacaggat

SEQ ID NO: 78233 - DNA, 16 bp, Homo sapiens
gcattgactgcaggac

SEQ ID NO: 78234 - DNA, 20 bp, Homo sapiens
aatgatatttacatgtacct

SEQ ID NO: 78235 - DNA, 16 bp, Homo sapiens
ttcctccgatcgcaca

SEQ ID NO: 78236 - DNA, 18 bp, Homo sapiens
ctctggaagctctttcca

SEQ ID NO: 78237 - DNA, 19 bp, Homo sapiens
gattcctaccttgtagatt

SEQ ID NO: 78238 - DNA, 19 bp, Homo sapiens
gcagacatttccagtcctg

SEQ ID NO: 78239 - DNA, 22 bp, Homo sapiens
aaccaaaccaaaccaaaaaaaa

SEQ ID NO: 78240 - DNA, 16 bp, Homo sapiens
gctggtgccacgacaa

SEQ ID NO: 78241 - DNA, 29 bp, Homo sapiens
taaatgagtaaattgatttttaaattttt

SEQ ID NO: 78242 - DNA, 18 bp, Homo sapiens
acagatctgtctgcctgc

SEQ ID NO: 78243 - DNA, 16 bp, Homo sapiens
gccttgtccctccttc

SEQ ID NO: 78244 - DNA, 23 bp, Homo sapiens
aattgtgggaaaatgaaagaatt

SEQ ID NO: 78245 - DNA, 22 bp, Homo sapiens
actctagttttctttaaatcaa

SEQ ID NO: 78246 - DNA, 28 bp, Homo sapiens
catatatgtgaaaaattataatatattg

SEQ ID NO: 78247 - DNA, 19 bp, Homo sapiens
acgtattcatcgtgctctc

SEQ ID NO: 78248 - DNA, 20 bp, Homo sapiens
ggttttcccaaatagtgcac

SEQ ID NO: 78249 - DNA, 20 bp, Homo sapiens
ttcattcaaaaacaaaacct

SEQ ID NO: 78250 - DNA, 24 bp, Homo sapiens
gatttcggaggaataataaatttg

SEQ ID NO: 78251 - DNA, 17 bp, Homo sapiens
caggccaagaccctttt

SEQ ID NO: 78252 - DNA, 22 bp, Homo sapiens
aatgagagctgcaccttgactt

SEQ ID NO: 78253 - DNA, 18 bp, Homo sapiens
tgcttattcatggcagga

SEQ ID NO: 78254 - DNA, 18 bp, Homo sapiens
tgcttgctattcaaagca

SEQ ID NO: 78255 - DNA, 19 bp, Homo sapiens
cataggagaatgtactgta

SEQ ID NO: 78256 - DNA, 18 bp, Homo sapiens
acaacctaaccagaaaat

SEQ ID NO: 78257 - DNA, 25 bp, Homo sapiens
ttataatttaaatagattaagtaaa

SEQ ID NO: 78258 - DNA, 17 bp, Homo sapiens
aatgcacagttggtcct

SEQ ID NO: 78259 - DNA, 16 bp, Homo sapiens
attacaggatcctgga

SEQ ID NO: 78260 - DNA, 22 bp, Homo sapiens
tatttcaaatggccacgggaca

SEQ ID NO: 78261 - DNA, 20 bp, Homo sapiens
aggtaatttccagttaaagt

SEQ ID NO: 78262 - DNA, 22 bp, Homo sapiens
tctatcctatcatgtttgattt

SEQ ID NO: 78263 - DNA, 22 bp, Homo sapiens
tttaaagtacatgtttttccac

SEQ ID NO: 78264 - DNA, 16 bp, Homo sapiens
ttatctcccctccagg

SEQ ID NO: 78265 - DNA, 21 bp, Homo sapiens
ttaatttttaaggtacagata

SEQ ID NO: 78266 - DNA, 21 bp, Homo sapiens
gtcctatggctggtggcactt

SEQ ID NO: 78267 - DNA, 22 bp, Homo sapiens
gtaaacaaataaacatcttgat

SEQ ID NO: 78268 - DNA, 20 bp, Homo sapiens
agacacatttcaattggtgg

SEQ ID NO: 78269 - DNA, 17 bp, Homo sapiens
ccagtcagattaaacag

SEQ ID NO: 78270 - DNA, 18 bp, Homo sapiens
cagttgaaatggtttggg

SEQ ID NO: 78271 - DNA, 17 bp, Homo sapiens
aggaaccattgagttat

SEQ ID NO: 78272 - DNA, 19 bp, Homo sapiens
cggtaactgaagatgcttg

SEQ ID NO: 78273 - DNA, 25 bp, Homo sapiens
atctctaatagctaaaattcacttc

SEQ ID NO: 78274 - DNA, 20 bp, Homo sapiens
tcagaagcttctacttacct

SEQ ID NO: 78275 - DNA, 17 bp, Homo sapiens
tgttataccccagccca

SEQ ID NO: 78276 - DNA, 20 bp, Homo sapiens
ctcttgactattctacagca

SEQ ID NO: 78277 - DNA, 23 bp, Homo sapiens
cttagccaaccgagagacaagca

SEQ ID NO: 78278 - DNA, 19 bp, Homo sapiens
ggaaagaagccttcaaaag

SEQ ID NO: 78279 - DNA, 18 bp, Homo sapiens
catccaaccaaatctttt

SEQ ID NO: 78280 - DNA, 19 bp, Homo sapiens
acaaatgcatttcttaagc

SEQ ID NO: 78281 - DNA, 16 bp, Homo sapiens
ccactggcaaagcaaa

SEQ ID NO: 78282 - DNA, 20 bp, Homo sapiens
ttgtttccaaagaacagtta

SEQ ID NO: 78283 - DNA, 19 bp, Homo sapiens
ccattctcgggacactaac

SEQ ID NO: 78284 - DNA, 22 bp, Homo sapiens
acctgtaatcagtgcaggtgat

SEQ ID NO: 78285 - DNA, 17 bp, Homo sapiens
ccattgctcaaaggact

SEQ ID NO: 78286 - DNA, 18 bp, Homo sapiens
ctcaacattgtcagtttt

SEQ ID NO: 78287 - DNA, 18 bp, Homo sapiens
atgtctcaggtaccatga

SEQ ID NO: 78288 - DNA, 18 bp, Homo sapiens
aacctgaattcagttagt

SEQ ID NO: 78289 - DNA, 18 bp, Homo sapiens
aaatactacttggctaca

SEQ ID NO: 78290 - DNA, 21 bp, Homo sapiens
gataattttgcatgtatcgtg

SEQ ID NO: 78291 - DNA, 17 bp, Homo sapiens
ggagtggtacaacagat

SEQ ID NO: 78292 - DNA, 26 bp, Homo sapiens
acagattttttcaaaaattatatatt

SEQ ID NO: 78293 - DNA, 18 bp, Homo sapiens
catgaaaaaggctttggt

SEQ ID NO: 78294 - DNA, 17 bp, Homo sapiens
ggatgttgccaagctgt

SEQ ID NO: 78295 - DNA, 18 bp, Homo sapiens
aggcttaaacacaggatt

SEQ ID NO: 78296 - DNA, 21 bp, Homo sapiens
tgtcaacatcgctctaattca

SEQ ID NO: 78297 - DNA, 20 bp, Homo sapiens
cttaccttaatttccagtac

SEQ ID NO: 78298 - DNA, 18 bp, Homo sapiens
ctgcaactccccctgaaa

SEQ ID NO: 78299 - DNA, 19 bp, Homo sapiens
tcacatagctatgaagtca

SEQ ID NO: 78300 - DNA, 20 bp, Homo sapiens
actttgatctcatttatgta

SEQ ID NO: 78301 - DNA, 25 bp, Homo sapiens
gtttttcagagtttatatatttgct

SEQ ID NO: 78302 - DNA, 17 bp, Homo sapiens
atgggcaatgaaaatgt

SEQ ID NO: 78303 - DNA, 16 bp, Homo sapiens
catgctcccctttagc

SEQ ID NO: 78304 - DNA, 17 bp, Homo sapiens
cttcacctttaactgct

SEQ ID NO: 78305 - DNA, 17 bp, Homo sapiens
tggcaaacaacatggcc

SEQ ID NO: 78306 - DNA, 17 bp, Homo sapiens
ccgtgcataaaacggct

SEQ ID NO: 78307 - DNA, 19 bp, Homo sapiens
tagcattcctgcagaactg

SEQ ID NO: 78308 - DNA, 16 bp, Homo sapiens
tgcaggaatcccacct

SEQ ID NO: 78309 - DNA, 20 bp, Homo sapiens
atgatattgaccctgaagca

SEQ ID NO: 78310 - DNA, 24 bp, Homo sapiens
ttattttaagcctgagaataacat

SEQ ID NO: 78311 - DNA, 23 bp, Homo sapiens
gtgagaatatacacttacattct

SEQ ID NO: 78312 - DNA, 17 bp, Homo sapiens
aggaatgcaggctgagt

SEQ ID NO: 78313 - DNA, 19 bp, Homo sapiens
aattgaacagcgagctaaa

SEQ ID NO: 78314 - DNA, 16 bp, Homo sapiens
ccaggcttggggaagg

SEQ ID NO: 78315 - DNA, 21 bp, Homo sapiens
aggaagccagtgtaattatgt

SEQ ID NO: 78316 - DNA, 17 bp, Homo sapiens
tccaaggacggttgaag

SEQ ID NO: 78317 - DNA, 20 bp, Homo sapiens
gcagttatgccatttgtaga

SEQ ID NO: 78318 - DNA, 19 bp, Homo sapiens
gatattgagacaacaccag

SEQ ID NO: 78319 - DNA, 23 bp, Homo sapiens
tgtgtagtacaaatatctatcat

SEQ ID NO: 78320 - DNA, 22 bp, Homo sapiens
ttaatttgctttctctttttca

SEQ ID NO: 78321 - DNA, 18 bp, Homo sapiens
gtggaagcaagcaatttc

SEQ ID NO: 78322 - DNA, 17 bp, Homo sapiens
tgtaatgactgtgttct

SEQ ID NO: 78323 - DNA, 21 bp, Homo sapiens
gaatttcacaggattgattgc

SEQ ID NO: 78324 - DNA, 21 bp, Homo sapiens
gtgcccagaactcatgggttt

SEQ ID NO: 78325 - DNA, 23 bp, Homo sapiens
acttgggtttttcctgtggctga

SEQ ID NO: 78326 - DNA, 18 bp, Homo sapiens
gaagttaccttaagaaca

SEQ ID NO: 78327 - DNA, 17 bp, Homo sapiens
tgtgtactcttgcatcg

SEQ ID NO: 78328 - DNA, 24 bp, Homo sapiens
ttgtgtgctgtcttatatgtagtc

SEQ ID NO: 78329 - DNA, 18 bp, Homo sapiens
tgaaaccatttctgtagt

SEQ ID NO: 78330 - DNA, 21 bp, Homo sapiens
ctggggcccatgatagccgtc

SEQ ID NO: 78331 - DNA, 24 bp, Homo sapiens
ttctcagaacaataaactgaaata

SEQ ID NO: 78332 - DNA, 21 bp, Homo sapiens
gggcagtgaattagttcgcta

SEQ ID NO: 78333 - DNA, 19 bp, Homo sapiens
tgcaaaaccaaaaataaac

SEQ ID NO: 78334 - DNA, 17 bp, Homo sapiens
agtgtaagcccaactac

SEQ ID NO: 78335 - DNA, 23 bp, Homo sapiens
ttttgtgtcaaatacttacttgg

SEQ ID NO: 78336 - DNA, 17 bp, Homo sapiens
acttttccagaaggtat

SEQ ID NO: 78337 - DNA, 24 bp, Homo sapiens
aaatgaaaatctgtaaacatctaa

SEQ ID NO: 78338 - DNA, 16 bp, Homo sapiens
tgtcggcatgaaccgt

SEQ ID NO: 78339 - DNA, 23 bp, Homo sapiens
tttcccaatttattatcattttt

SEQ ID NO: 78340 - DNA, 20 bp, Homo sapiens
ggactggatatatcagagtc

SEQ ID NO: 78341 - DNA, 18 bp, Homo sapiens
ccccattaaatgaggttt

SEQ ID NO: 78342 - DNA, 17 bp, Homo sapiens
cctggaccagctctgga

SEQ ID NO: 78343 - DNA, 18 bp, Homo sapiens
ttcctaattcatctcaga

SEQ ID NO: 78344 - DNA, 19 bp, Homo sapiens
tgacttcattgaaatgcac

SEQ ID NO: 78345 - DNA, 18 bp, Homo sapiens
catcctaactagtgggga

SEQ ID NO: 78346 - DNA, 20 bp, Homo sapiens
agataaaatgcttactggaa

SEQ ID NO: 78347 - DNA, 18 bp, Homo sapiens
cacattgacctcagtgct

SEQ ID NO: 78348 - DNA, 23 bp, Homo sapiens
atcactgctctgtcagttgcttt

SEQ ID NO: 78349 - DNA, 17 bp, Homo sapiens
ggcccagtagcctgatt

SEQ ID NO: 78350 - DNA, 22 bp, Homo sapiens
atttacaaacacacctacgtac

SEQ ID NO: 78351 - DNA, 17 bp, Homo sapiens
cttgccatcattgtcca

SEQ ID NO: 78352 - DNA, 20 bp, Homo sapiens
tttgctgtatagaaagaaga

SEQ ID NO: 78353 - DNA, 20 bp, Homo sapiens
tccatggttaaataaaatgc

SEQ ID NO: 78354 - DNA, 24 bp, Homo sapiens
tttcataattaaatgttacgcagt

SEQ ID NO: 78355 - DNA, 19 bp, Homo sapiens
ggaaagtgtaaatcaacgt

SEQ ID NO: 78356 - DNA, 20 bp, Homo sapiens
ggttgtgtatatcatgggac

SEQ ID NO: 78357 - DNA, 22 bp, Homo sapiens
agaacaaaacaaattttcagga

SEQ ID NO: 78358 - DNA, 20 bp, Homo sapiens
tgtgatgtaaaaagaacact

SEQ ID NO: 78359 - DNA, 23 bp, Homo sapiens
gggatgactaaaatctttcatga

SEQ ID NO: 78360 - DNA, 22 bp, Homo sapiens
gtgtggtttaccatttcattgc

SEQ ID NO: 78361 - DNA, 16 bp, Homo sapiens
ccaccagcggagaccc

SEQ ID NO: 78362 - DNA, 19 bp, Homo sapiens
agttaatgtctccaccact

SEQ ID NO: 78363 - DNA, 18 bp, Homo sapiens
acatgagtctcatttcga

SEQ ID NO: 78364 - DNA, 21 bp, Homo sapiens
cccaatttctgaccgagggaa

SEQ ID NO: 78365 - DNA, 16 bp, Homo sapiens
tgaagggatggctggc

SEQ ID NO: 78366 - DNA, 17 bp, Homo sapiens
gggaatctgcctgcgaa

SEQ ID NO: 78367 - DNA, 21 bp, Homo sapiens
gatgctaacattttaaatgtg

SEQ ID NO: 78368 - DNA, 19 bp, Homo sapiens
ggagatcttcgaaatttca

SEQ ID NO: 78369 - DNA, 20 bp, Homo sapiens
gcctctcaaagttctgggat

SEQ ID NO: 78370 - DNA, 19 bp, Homo sapiens
agatatttcatgcctttgg

SEQ ID NO: 78371 - DNA, 23 bp, Homo sapiens
caagataattttttataaataaa

SEQ ID NO: 78372 - DNA, 20 bp, Homo sapiens
cagagattctgatacttaca

SEQ ID NO: 78373 - DNA, 23 bp, Homo sapiens
agtttatgcttttctaactctct

SEQ ID NO: 78374 - DNA, 16 bp, Homo sapiens
tgaacagtgggaaaca

SEQ ID NO: 78375 - DNA, 16 bp, Homo sapiens
ttggtcttcaagtagc

SEQ ID NO: 78376 - DNA, 21 bp, Homo sapiens
acacatcgatttaagattgta

SEQ ID NO: 78377 - DNA, 24 bp, Homo sapiens
agagacttggctgcaagaaactgt

SEQ ID NO: 78378 - DNA, 23 bp, Homo sapiens
ttctgttgtaatttagtgttagt

SEQ ID NO: 78379 - DNA, 18 bp, Homo sapiens
gtctctggcaagaccaaa

SEQ ID NO: 78380 - DNA, 16 bp, Homo sapiens
tcaaatactgaagcca

SEQ ID NO: 78381 - DNA, 16 bp, Homo sapiens
tcactggcagctttgc

SEQ ID NO: 78382 - DNA, 16 bp, Homo sapiens
tttcagccacgggtaa

SEQ ID NO: 78383 - DNA, 18 bp, Homo sapiens
acattaccacatctgact

SEQ ID NO: 78384 - DNA, 18 bp, Homo sapiens
cacagtcaaggttgctga

SEQ ID NO: 78385 - DNA, 25 bp, Homo sapiens
gataaaacttcaaaaaaagttggat

SEQ ID NO: 78386 - DNA, 16 bp, Homo sapiens
acaacaaaacaggtgc

SEQ ID NO: 78387 - DNA, 19 bp, Homo sapiens
tacatatgaagaaaactgg

SEQ ID NO: 78388 - DNA, 20 bp, Homo sapiens
caaactcaaaagtttaccac

SEQ ID NO: 78389 - DNA, 22 bp, Homo sapiens
taaacaagtcatgaaatgtata

SEQ ID NO: 78390 - DNA, 16 bp, Homo sapiens
gggctcctcttgtcat

SEQ ID NO: 78391 - DNA, 21 bp, Homo sapiens
attgagtatgtaaagccaagt

SEQ ID NO: 78392 - DNA, 17 bp, Homo sapiens
tcttctcccttgcaaca

SEQ ID NO: 78393 - DNA, 21 bp, Homo sapiens
atatatgtatggtcacatctc

SEQ ID NO: 78394 - DNA, 18 bp, Homo sapiens
acgtaagaggtacagaaa

SEQ ID NO: 78395 - DNA, 16 bp, Homo sapiens
cctctgggagctgatg

SEQ ID NO: 78396 - DNA, 19 bp, Homo sapiens
ccaaaaagaaagacatgct

SEQ ID NO: 78397 - DNA, 20 bp, Homo sapiens
atataactgtttacttgttg

SEQ ID NO: 78398 - DNA, 16 bp, Homo sapiens
gatgggcgcatttcgg

SEQ ID NO: 78399 - DNA, 24 bp, Homo sapiens
tgcccagaccccttgtaagtagtc

SEQ ID NO: 78400 - DNA, 17 bp, Homo sapiens
ggacatagtgctcccca

SEQ ID NO: 78401 - DNA, 18 bp, Homo sapiens
aagggtctcttacagcat

SEQ ID NO: 78402 - DNA, 16 bp, Homo sapiens
tgacaacagagaagga

SEQ ID NO: 78403 - DNA, 23 bp, Homo sapiens
ctaaaatgctggcaccctaaagc

SEQ ID NO: 78404 - DNA, 18 bp, Homo sapiens
atgtctcccagaaggagg

SEQ ID NO: 78405 - DNA, 19 bp, Homo sapiens
atcttctctactttcattg

SEQ ID NO: 78406 - DNA, 19 bp, Homo sapiens
gcagtgaaaaaaccattgg

SEQ ID NO: 78407 - DNA, 20 bp, Homo sapiens
gaacgtaaaatgtgtcgctc

SEQ ID NO: 78408 - DNA, 19 bp, Homo sapiens
acaagtcctataatagtgc

SEQ ID NO: 78409 - DNA, 16 bp, Homo sapiens
acacacgaccagcctc

SEQ ID NO: 78410 - DNA, 17 bp, Homo sapiens
tcagatttttgacacca

SEQ ID NO: 78411 - DNA, 18 bp, Homo sapiens
tcccatacccatgctaac

SEQ ID NO: 78412 - DNA, 19 bp, Homo sapiens
ggttggaatgcttcatcaa

SEQ ID NO: 78413 - DNA, 17 bp, Homo sapiens
acagggaaggtgagtgg

SEQ ID NO: 78414 - DNA, 26 bp, Homo sapiens
gagttatttattttgttttaatggtt

SEQ ID NO: 78415 - DNA, 18 bp, Homo sapiens
gattacatcttctgcaac

SEQ ID NO: 78416 - DNA, 24 bp, Homo sapiens
tcaagccaaaataaatgttaattt

SEQ ID NO: 78417 - DNA, 20 bp, Homo sapiens
ccatttgtgacattgtatga

SEQ ID NO: 78418 - DNA, 21 bp, Homo sapiens
agtatgtattttgaagagaga

SEQ ID NO: 78419 - DNA, 16 bp, Homo sapiens
ttttatccctgccact

SEQ ID NO: 78420 - DNA, 21 bp, Homo sapiens
atcatggatatgttttgtcct

SEQ ID NO: 78421 - DNA, 18 bp, Homo sapiens
agtaaatcatttggaagc

SEQ ID NO: 78422 - DNA, 17 bp, Homo sapiens
tcttccagattccagca

SEQ ID NO: 78423 - DNA, 22 bp, Homo sapiens
ttagtgctatctcaagtaaaag

SEQ ID NO: 78424 - DNA, 24 bp, Homo sapiens
ataacattaaaaaggattaatatt

SEQ ID NO: 78425 - DNA, 17 bp, Homo sapiens
ttttattcctggaggac

SEQ ID NO: 78426 - DNA, 18 bp, Homo sapiens
agagggaaactgtctaga

SEQ ID NO: 78427 - DNA, 16 bp, Homo sapiens
tcagaacttctgatgc

SEQ ID NO: 78428 - DNA, 21 bp, Homo sapiens
taagattttggagttgagacc

SEQ ID NO: 78429 - DNA, 23 bp, Homo sapiens
ataaaaaaagagatacatacaca

SEQ ID NO: 78430 - DNA, 18 bp, Homo sapiens
tgatgatggaacaggagt

SEQ ID NO: 78431 - DNA, 19 bp, Homo sapiens
ttttaaggtgccttaagtc

SEQ ID NO: 78432 - DNA, 17 bp, Homo sapiens
tcactagcactgggtat

SEQ ID NO: 78433 - DNA, 29 bp, Homo sapiens
gtattcaattttttaaatattatttttta

SEQ ID NO: 78434 - DNA, 25 bp, Homo sapiens
ataaaacaattttaactttaccttg

SEQ ID NO: 78435 - DNA, 18 bp, Homo sapiens
tccatgagataggcttct

SEQ ID NO: 78436 - DNA, 19 bp, Homo sapiens
ttttctttgtatcttgagt

SEQ ID NO: 78437 - DNA, 19 bp, Homo sapiens
acatattggaggggtacaa

SEQ ID NO: 78438 - DNA, 24 bp, Homo sapiens
tttaaatttacaaagtctgtttat

SEQ ID NO: 78439 - DNA, 23 bp, Homo sapiens
tccatacaaaatctaaattccct

SEQ ID NO: 78440 - DNA, 20 bp, Homo sapiens
ggaacaggtatactttcagg

SEQ ID NO: 78441 - DNA, 26 bp, Homo sapiens
ttatttttaaatatttatggttcttt

SEQ ID NO: 78442 - DNA, 16 bp, Homo sapiens
aattgcagggcatgga

SEQ ID NO: 78443 - DNA, 26 bp, Homo sapiens
taatttatattttaaaactacacatg

SEQ ID NO: 78444 - DNA, 20 bp, Homo sapiens
gatgttttatcaaccaggga

SEQ ID NO: 78445 - DNA, 20 bp, Homo sapiens
ctcttgtgaaacaaacaagc

SEQ ID NO: 78446 - DNA, 19 bp, Homo sapiens
cagcaccatttcttataca

SEQ ID NO: 78447 - DNA, 23 bp, Homo sapiens
ttgatgggtgcagcaaaccacaa

SEQ ID NO: 78448 - DNA, 21 bp, Homo sapiens
tttaatagtgtaattcctgtg

SEQ ID NO: 78449 - DNA, 20 bp, Homo sapiens
tgaccccagaacttaaaagt

SEQ ID NO: 78450 - DNA, 25 bp, Homo sapiens
gatttatttattctcttaacaggag

SEQ ID NO: 78451 - DNA, 19 bp, Homo sapiens
acccatagtgatgtattgt

SEQ ID NO: 78452 - DNA, 19 bp, Homo sapiens
tacctcacacgttatttaa

SEQ ID NO: 78453 - DNA, 19 bp, Homo sapiens
aggtcttcgtggccagatc

SEQ ID NO: 78454 - DNA, 29 bp, Homo sapiens
acatttacaaattaatattttttacatac

SEQ ID NO: 78455 - DNA, 17 bp, Homo sapiens
cactgagtgtacctcct

SEQ ID NO: 78456 - DNA, 22 bp, Homo sapiens
ttgaacctagttaacatatata

SEQ ID NO: 78457 - DNA, 23 bp, Homo sapiens
attttgtgaaaaataatggtatt

SEQ ID NO: 78458 - DNA, 17 bp, Homo sapiens
tgtactaggttgtctgt

SEQ ID NO: 78459 - DNA, 22 bp, Homo sapiens
ttatatgattcaaaaatctgga

SEQ ID NO: 78460 - DNA, 21 bp, Homo sapiens
tgcaaaaggagtattctaaca

SEQ ID NO: 78461 - DNA, 20 bp, Homo sapiens
taatttttcaggatggtgca

SEQ ID NO: 78462 - DNA, 21 bp, Homo sapiens
acattcatttgaaagcgggag

SEQ ID NO: 78463 - DNA, 24 bp, Homo sapiens
aaatcgatttctatcatttcattg

SEQ ID NO: 78464 - DNA, 21 bp, Homo sapiens
tcctttttgatttttagtggt

SEQ ID NO: 78465 - DNA, 24 bp, Homo sapiens
tgtaagaatgatactttttaattt

SEQ ID NO: 78466 - DNA, 18 bp, Homo sapiens
tctggggttttagttgca

SEQ ID NO: 78467 - DNA, 23 bp, Homo sapiens
ctgcaaagtgaattatctccata

SEQ ID NO: 78468 - DNA, 27 bp, Homo sapiens
agaataatttattctctaagaatttag

SEQ ID NO: 78469 - DNA, 20 bp, Homo sapiens
gcccagaagactatttcagt

SEQ ID NO: 78470 - DNA, 26 bp, Homo sapiens
aatatatatattaacaatttacttat

SEQ ID NO: 78471 - DNA, 17 bp, Homo sapiens
acaaaaagctcctcaac

SEQ ID NO: 78472 - DNA, 25 bp, Homo sapiens
tatacacacaaataatatgaaaacg

SEQ ID NO: 78473 - DNA, 25 bp, Homo sapiens
tataaaaattctttacagtacttac

SEQ ID NO: 78474 - DNA, 21 bp, Homo sapiens
acatttagggcaatgaagttt

SEQ ID NO: 78475 - DNA, 17 bp, Homo sapiens
ggttcaggaggatgcat

SEQ ID NO: 78476 - DNA, 17 bp, Homo sapiens
tgctcggatgcggtatt

SEQ ID NO: 78477 - DNA, 20 bp, Homo sapiens
cccttcctttcatggagtga

SEQ ID NO: 78478 - DNA, 20 bp, Homo sapiens
tccaaatactgatgatctgt

SEQ ID NO: 78479 - DNA, 19 bp, Homo sapiens
tacgaggtagaaagatgtc

SEQ ID NO: 78480 - DNA, 19 bp, Homo sapiens
gctttaaaggatatgtgtt

SEQ ID NO: 78481 - DNA, 18 bp, Homo sapiens
tgaagttgtaatggactt

SEQ ID NO: 78482 - DNA, 22 bp, Homo sapiens
gtagaggcagactttattatgc

SEQ ID NO: 78483 - DNA, 23 bp, Homo sapiens
tatttatattttcttcagtttct

SEQ ID NO: 78484 - DNA, 16 bp, Homo sapiens
agcagatagctgttga

SEQ ID NO: 78485 - DNA, 23 bp, Homo sapiens
gagagaattgatatcttaacaat

SEQ ID NO: 78486 - DNA, 18 bp, Homo sapiens
ttcagatgttatctgtca

SEQ ID NO: 78487 - DNA, 22 bp, Homo sapiens
tcctctactacatgaaattatt

SEQ ID NO: 78488 - DNA, 26 bp, Homo sapiens
aatttgaaattgtattctttcaatta

SEQ ID NO: 78489 - DNA, 26 bp, Homo sapiens
gataaaactattttatttagcaagaa

SEQ ID NO: 78490 - DNA, 17 bp, Homo sapiens
ttctggattttgtgggt

SEQ ID NO: 78491 - DNA, 17 bp, Homo sapiens
aaagctgtcgtcaggtt

SEQ ID NO: 78492 - DNA, 20 bp, Homo sapiens
agcaatagatcctttactga

SEQ ID NO: 78493 - DNA, 24 bp, Homo sapiens
gtcaaatttgcagattctaaatcc

SEQ ID NO: 78494 - DNA, 18 bp, Homo sapiens
agctctatgagcctataa

SEQ ID NO: 78495 - DNA, 17 bp, Homo sapiens
agggtcttgccagaaag

SEQ ID NO: 78496 - DNA, 20 bp, Homo sapiens
atggcaaatggcacaaaagg

SEQ ID NO: 78497 - DNA, 22 bp, Homo sapiens
agaatcagacaatgttaagttt

SEQ ID NO: 78498 - DNA, 17 bp, Homo sapiens
cggcttaatcgatacct

SEQ ID NO: 78499 - DNA, 17 bp, Homo sapiens
aggttggaagctttctt

SEQ ID NO: 78500 - DNA, 17 bp, Homo sapiens
tccacatcagagttact

SEQ ID NO: 78501 - DNA, 23 bp, Homo sapiens
aaagttttaaatatcagaagtat

SEQ ID NO: 78502 - DNA, 22 bp, Homo sapiens
acctccatgaagatgaaactct

SEQ ID NO: 78503 - DNA, 20 bp, Homo sapiens
tagtatatttcctgactggt

SEQ ID NO: 78504 - DNA, 22 bp, Homo sapiens
tggtatgaaggctatagattct

SEQ ID NO: 78505 - DNA, 27 bp, Homo sapiens
ttatcttttaataatttattgtaacat

SEQ ID NO: 78506 - DNA, 18 bp, Homo sapiens
agacattttagtctacga

SEQ ID NO: 78507 - DNA, 21 bp, Homo sapiens
agactgtatcacctatacatg

SEQ ID NO: 78508 - DNA, 16 bp, Homo sapiens
acaagaccttgttctt

SEQ ID NO: 78509 - DNA, 23 bp, Homo sapiens
taatttataaaaacataaaataa

SEQ ID NO: 78510 - DNA, 18 bp, Homo sapiens
ctactctcttatggcagg

SEQ ID NO: 78511 - DNA, 16 bp, Homo sapiens
tgaacatggttatcgt

SEQ ID NO: 78512 - DNA, 18 bp, Homo sapiens
tgtttccaggaaaaaact

SEQ ID NO: 78513 - DNA, 20 bp, Homo sapiens
tgtgacttaaatcaccttca

SEQ ID NO: 78514 - DNA, 22 bp, Homo sapiens
tgtcatatttaaaatagtgcca

SEQ ID NO: 78515 - DNA, 16 bp, Homo sapiens
ggtgtcctggtgccat

SEQ ID NO: 78516 - DNA, 21 bp, Homo sapiens
tacaagagtagagctgcatga

SEQ ID NO: 78517 - DNA, 16 bp, Homo sapiens
tcagctcttgggcaaa

SEQ ID NO: 78518 - DNA, 21 bp, Homo sapiens
gtataatacacagcatgcttt

SEQ ID NO: 78519 - DNA, 18 bp, Homo sapiens
accgtcttggacattact

SEQ ID NO: 78520 - DNA, 22 bp, Homo sapiens
catgtaagtggtgctaacttat

SEQ ID NO: 78521 - DNA, 16 bp, Homo sapiens
tactgaggaccacaaa

SEQ ID NO: 78522 - DNA, 23 bp, Homo sapiens
gatgctccgtccacttctgcttt

SEQ ID NO: 78523 - DNA, 17 bp, Homo sapiens
acgtttgagggaacttt

SEQ ID NO: 78524 - DNA, 23 bp, Homo sapiens
ttggctgaacatcacacaatttt

SEQ ID NO: 78525 - DNA, 24 bp, Homo sapiens
ctttcttagattcaagtatataaa

SEQ ID NO: 78526 - DNA, 18 bp, Homo sapiens
acgtaaggcttctaccat

SEQ ID NO: 78527 - DNA, 16 bp, Homo sapiens
taggttgtgcatcagt

SEQ ID NO: 78528 - DNA, 18 bp, Homo sapiens
gtatgataggggctccca

SEQ ID NO: 78529 - DNA, 18 bp, Homo sapiens
aaaaaatgccctctctta

SEQ ID NO: 78530 - DNA, 16 bp, Homo sapiens
accctgagtctccttt

SEQ ID NO: 78531 - DNA, 23 bp, Homo sapiens
tcttactgtaaattatttgaagt

SEQ ID NO: 78532 - DNA, 21 bp, Homo sapiens
gcccttccaataatttataaa

SEQ ID NO: 78533 - DNA, 21 bp, Homo sapiens
gcttgctgtcatgttctaaca

SEQ ID NO: 78534 - DNA, 19 bp, Homo sapiens
ttgtggaccagacaaatgt

SEQ ID NO: 78535 - DNA, 17 bp, Homo sapiens
acagagttctcttcaaa

SEQ ID NO: 78536 - DNA, 22 bp, Homo sapiens
atattgaaagtcaggtaaaata

SEQ ID NO: 78537 - DNA, 17 bp, Homo sapiens
agcgaacaatatctcca

SEQ ID NO: 78538 - DNA, 22 bp, Homo sapiens
taaaaggaagaataaggtttgg

SEQ ID NO: 78539 - DNA, 17 bp, Homo sapiens
agagcaggcaagttagt

SEQ ID NO: 78540 - DNA, 18 bp, Homo sapiens
agtgtgtattgaaagcca

SEQ ID NO: 78541 - DNA, 20 bp, Homo sapiens
tttacaaattaaactagcca

SEQ ID NO: 78542 - DNA, 20 bp, Homo sapiens
caatgtctatggtgttgtga

SEQ ID NO: 78543 - DNA, 20 bp, Homo sapiens
gtcagaactgagcttctatt

SEQ ID NO: 78544 - DNA, 20 bp, Homo sapiens
ggttccagcaacaaattata

SEQ ID NO: 78545 - DNA, 18 bp, Homo sapiens
aatgcatttccactccaa

SEQ ID NO: 78546 - DNA, 22 bp, Homo sapiens
acatgattctacaatgtaaata

SEQ ID NO: 78547 - DNA, 20 bp, Homo sapiens
atatgggggcttaaagaact

SEQ ID NO: 78548 - DNA, 19 bp, Homo sapiens
taacttcttttagacactt

SEQ ID NO: 78549 - DNA, 20 bp, Homo sapiens
agttgattcaggggtgtata

SEQ ID NO: 78550 - DNA, 24 bp, Homo sapiens
tctaatataacattatcagctata

SEQ ID NO: 78551 - DNA, 19 bp, Homo sapiens
caggtttatgtcaaatctt

SEQ ID NO: 78552 - DNA, 19 bp, Homo sapiens
caatatcagactacaaagt

SEQ ID NO: 78553 - DNA, 22 bp, Homo sapiens
tgtaatcacattggaggttatc

SEQ ID NO: 78554 - DNA, 19 bp, Homo sapiens
ggcatatacaggtataggt

SEQ ID NO: 78555 - DNA, 23 bp, Homo sapiens
ttatgtcatcctagtgaatttga

SEQ ID NO: 78556 - DNA, 20 bp, Homo sapiens
tataacctatgcttggacct

SEQ ID NO: 78557 - DNA, 16 bp, Homo sapiens
catttccgctgctgtg

SEQ ID NO: 78558 - DNA, 20 bp, Homo sapiens
ggttttcattcatattgaca

SEQ ID NO: 78559 - DNA, 22 bp, Homo sapiens
gaacaacatacctttctttctt

SEQ ID NO: 78560 - DNA, 21 bp, Homo sapiens
catgaagacattgttttttgg

SEQ ID NO: 78561 - DNA, 17 bp, Homo sapiens
actgactctttgcacag

SEQ ID NO: 78562 - DNA, 18 bp, Homo sapiens
attggaaacaactgcaca

SEQ ID NO: 78563 - DNA, 18 bp, Homo sapiens
aggtcctggtgcatttag

SEQ ID NO: 78564 - DNA, 18 bp, Homo sapiens
aagatgtgctgtagaaga

SEQ ID NO: 78565 - DNA, 17 bp, Homo sapiens
aggggaggtcatcttca

SEQ ID NO: 78566 - DNA, 23 bp, Homo sapiens
ttaattgataaaacttagaacta

SEQ ID NO: 78567 - DNA, 19 bp, Homo sapiens
tgacaggaaagagcaatca

SEQ ID NO: 78568 - DNA, 23 bp, Homo sapiens
tgaacatttgttatttgatgtga

SEQ ID NO: 78569 - DNA, 17 bp, Homo sapiens
ctaagggtccaaattca

SEQ ID NO: 78570 - DNA, 17 bp, Homo sapiens
tgttcggaagagtgttt

SEQ ID NO: 78571 - DNA, 16 bp, Homo sapiens
tgaacacacctcacct

SEQ ID NO: 78572 - DNA, 17 bp, Homo sapiens
ttacgatgctagtgatt

SEQ ID NO: 78573 - DNA, 24 bp, Homo sapiens
ttaattcagtgacttttatttgaa

SEQ ID NO: 78574 - DNA, 19 bp, Homo sapiens
ctccatgtcaaatcccacc

SEQ ID NO: 78575 - DNA, 20 bp, Homo sapiens
ccagataacttgaacagtct

SEQ ID NO: 78576 - DNA, 18 bp, Homo sapiens
cacaactgaattagtgca

SEQ ID NO: 78577 - DNA, 23 bp, Homo sapiens
gcagaagtttaaaattttaacat

SEQ ID NO: 78578 - DNA, 19 bp, Homo sapiens
aaatgtagagataccaacc

SEQ ID NO: 78579 - DNA, 16 bp, Homo sapiens
tcagatggggatgtgg

SEQ ID NO: 78580 - DNA, 23 bp, Homo sapiens
aaagaacttaattttatagggat

SEQ ID NO: 78581 - DNA, 18 bp, Homo sapiens
acttggcaaagttgcact

SEQ ID NO: 78582 - DNA, 21 bp, Homo sapiens
tcaggtagaacataaatactt

SEQ ID NO: 78583 - DNA, 16 bp, Homo sapiens
tttcttccatgtcagg

SEQ ID NO: 78584 - DNA, 17 bp, Homo sapiens
ccctggggaaaaactgt

SEQ ID NO: 78585 - DNA, 17 bp, Homo sapiens
actcaaggtcaatgtgt

SEQ ID NO: 78586 - DNA, 21 bp, Homo sapiens
ctgatctccttcaattcctac

SEQ ID NO: 78587 - DNA, 19 bp, Homo sapiens
acataaacatggtatgtat

SEQ ID NO: 78588 - DNA, 19 bp, Homo sapiens
ggcaacatctgtcaactcc

SEQ ID NO: 78589 - DNA, 23 bp, Homo sapiens
aataacaagaaaatgttacagtt

SEQ ID NO: 78590 - DNA, 25 bp, Homo sapiens
gtaacacaaaataatcttcatcatg

SEQ ID NO: 78591 - DNA, 18 bp, Homo sapiens
gcagttaaaaaggcaggt

SEQ ID NO: 78592 - DNA, 25 bp, Homo sapiens
ttatataacaagctttttcaaaaaa

SEQ ID NO: 78593 - DNA, 23 bp, Homo sapiens
ttgatatcaaattgaagaatttt

SEQ ID NO: 78594 - DNA, 22 bp, Homo sapiens
aataaaggttttcattaaagaa

SEQ ID NO: 78595 - DNA, 23 bp, Homo sapiens
tgaggcttttagtgacagggaat

SEQ ID NO: 78596 - DNA, 18 bp, Homo sapiens
agctgtttacctaagagg

SEQ ID NO: 78597 - DNA, 21 bp, Homo sapiens
aattttatttgtggtatgttc

SEQ ID NO: 78598 - DNA, 18 bp, Homo sapiens
agtttctggtcctcagtg

SEQ ID NO: 78599 - DNA, 19 bp, Homo sapiens
ctgattttactgtgttgct

SEQ ID NO: 78600 - DNA, 20 bp, Homo sapiens
aaacacatcacaatttctaa

SEQ ID NO: 78601 - DNA, 16 bp, Homo sapiens
tctggttaaacacctc

SEQ ID NO: 78602 - DNA, 20 bp, Homo sapiens
agtttctgccactactataa

SEQ ID NO: 78603 - DNA, 18 bp, Homo sapiens
ttggagtaaatttcctct

SEQ ID NO: 78604 - DNA, 21 bp, Homo sapiens
agtttcactaaatgtcttcct

SEQ ID NO: 78605 - DNA, 24 bp, Homo sapiens
attattaaatgaggacatattgat

SEQ ID NO: 78606 - DNA, 17 bp, Homo sapiens
acctttgcacagtatca

SEQ ID NO: 78607 - DNA, 21 bp, Homo sapiens
gggtgctttgtgaatcattct

SEQ ID NO: 78608 - DNA, 18 bp, Homo sapiens
acctcacaaaagagtgaa

SEQ ID NO: 78609 - DNA, 21 bp, Homo sapiens
ttcggtgatctttagcatact

SEQ ID NO: 78610 - DNA, 20 bp, Homo sapiens
gaagttatagtactaaatgc

SEQ ID NO: 78611 - DNA, 21 bp, Homo sapiens
accgaaatttagagattttgg

SEQ ID NO: 78612 - DNA, 16 bp, Homo sapiens
tcatcttgggccctga

SEQ ID NO: 78613 - DNA, 22 bp, Homo sapiens
agtgattgaggcaatttgggga

SEQ ID NO: 78614 - DNA, 19 bp, Homo sapiens
cacttcctcagagattgaa

SEQ ID NO: 78615 - DNA, 20 bp, Homo sapiens
aaaatgaaaatttgatccct

SEQ ID NO: 78616 - DNA, 18 bp, Homo sapiens
aacctccgtgggttttcc

SEQ ID NO: 78617 - DNA, 22 bp, Homo sapiens
gtttgaaaattaatattgattt

SEQ ID NO: 78618 - DNA, 26 bp, Homo sapiens
atataggaaaatgtgataaaaaaata

SEQ ID NO: 78619 - DNA, 18 bp, Homo sapiens
aacaaacagttgacttca

SEQ ID NO: 78620 - DNA, 21 bp, Homo sapiens
gtgtgtgtattcaagcaaatt

SEQ ID NO: 78621 - DNA, 19 bp, Homo sapiens
tcctcatgctttcagtaaa

SEQ ID NO: 78622 - DNA, 16 bp, Homo sapiens
tatgggcattagggaa

SEQ ID NO: 78623 - DNA, 17 bp, Homo sapiens
tcatcctcctcagtgaa

SEQ ID NO: 78624 - DNA, 19 bp, Homo sapiens
cttagaaagcttttacttg

SEQ ID NO: 78625 - DNA, 26 bp, Homo sapiens
cttcaaaggataataagtttaaatta

SEQ ID NO: 78626 - DNA, 19 bp, Homo sapiens
atgcaattgaagttgaatt

SEQ ID NO: 78627 - DNA, 19 bp, Homo sapiens
ttaaaacttcatgttctct

SEQ ID NO: 78628 - DNA, 20 bp, Homo sapiens
aggatatttcagaaaatcta

SEQ ID NO: 78629 - DNA, 18 bp, Homo sapiens
ccatcatgtttagctaaa

SEQ ID NO: 78630 - DNA, 20 bp, Homo sapiens
agactgaactgaggcccagc

SEQ ID NO: 78631 - DNA, 20 bp, Homo sapiens
tgtcttctactccatcttca

SEQ ID NO: 78632 - DNA, 18 bp, Homo sapiens
gagtacaacagaaacaaa

SEQ ID NO: 78633 - DNA, 20 bp, Homo sapiens
ttctgtaatatctaacgaca

SEQ ID NO: 78634 - DNA, 22 bp, Homo sapiens
aaacatgggacccaacacttga

SEQ ID NO: 78635 - DNA, 25 bp, Homo sapiens
ttataagcaatatcactaagatatt

SEQ ID NO: 78636 - DNA, 18 bp, Homo sapiens
ggaacgaaaagaagatgg

SEQ ID NO: 78637 - DNA, 20 bp, Homo sapiens
gccagaacctactaataact

SEQ ID NO: 78638 - DNA, 19 bp, Homo sapiens
gaaagagcttgtttgatgt

SEQ ID NO: 78639 - DNA, 20 bp, Homo sapiens
agactgtatgtcccacaaag

SEQ ID NO: 78640 - DNA, 17 bp, Homo sapiens
cagcagtctcaggaaga

SEQ ID NO: 78641 - DNA, 16 bp, Homo sapiens
ttgtctgtggctgctt

SEQ ID NO: 78642 - DNA, 26 bp, Homo sapiens
ttttatctatcatataaatatgtaaa

SEQ ID NO: 78643 - DNA, 23 bp, Homo sapiens
ccatttctaaatcttcatcactc

SEQ ID NO: 78644 - DNA, 23 bp, Homo sapiens
tgtctaaagatatctagtatata

SEQ ID NO: 78645 - DNA, 19 bp, Homo sapiens
tggaaagaacttgaagtaa

SEQ ID NO: 78646 - DNA, 22 bp, Homo sapiens
atattggaaattaatgcttaat

SEQ ID NO: 78647 - DNA, 18 bp, Homo sapiens
ttcattgtggtagaacct

SEQ ID NO: 78648 - DNA, 22 bp, Homo sapiens
atacgtcctatgtaattgagag

SEQ ID NO: 78649 - DNA, 18 bp, Homo sapiens
agactacatgaaagaaac

SEQ ID NO: 78650 - DNA, 23 bp, Homo sapiens
tctatcatataaatatgtaaata

SEQ ID NO: 78651 - DNA, 21 bp, Homo sapiens
ctccatttctaaatcttcatc

SEQ ID NO: 78652 - DNA, 23 bp, Homo sapiens
atatctagtatataggagctttg

SEQ ID NO: 78653 - DNA, 19 bp, Homo sapiens
tcctttggaaagaacttga

SEQ ID NO: 78654 - DNA, 24 bp, Homo sapiens
attggaaattaatgcttaatactt

SEQ ID NO: 78655 - DNA, 20 bp, Homo sapiens
gcaatttcattgtggtggaa

SEQ ID NO: 78656 - DNA, 22 bp, Homo sapiens
atacgtcctatgtaattgagag

SEQ ID NO: 78657 - DNA, 24 bp, Homo sapiens
tagactacataaaagaaacatgaa

SEQ ID NO: 78658 - DNA, 21 bp, Homo sapiens
cacatatttaaaccggagcac

SEQ ID NO: 78659 - DNA, 22 bp, Homo sapiens
tttccatttttaagcatttaga

SEQ ID NO: 78660 - DNA, 22 bp, Homo sapiens
tttcgacaaaattgtaggccct

SEQ ID NO: 78661 - DNA, 22 bp, Homo sapiens
ttagcttcattttcatcatctt

SEQ ID NO: 78662 - DNA, 19 bp, Homo sapiens
actgtcagtggttttgctt

SEQ ID NO: 78663 - DNA, 20 bp, Homo sapiens
cacaggtgagtcatttcaaa

SEQ ID NO: 78664 - DNA, 18 bp, Homo sapiens
agtggcacggtagaacca

SEQ ID NO: 78665 - DNA, 17 bp, Homo sapiens
ccctgacctccaaacca

SEQ ID NO: 78666 - DNA, 19 bp, Homo sapiens
tcctactaaagaagaagaa

SEQ ID NO: 78667 - DNA, 19 bp, Homo sapiens
caaaagcactaaggagaca

SEQ ID NO: 78668 - DNA, 22 bp, Homo sapiens
agaagaccagtttgtattggaa

SEQ ID NO: 78669 - DNA, 17 bp, Homo sapiens
ggaatggccaaagtaca

SEQ ID NO: 78670 - DNA, 17 bp, Homo sapiens
tctttcaaagaagccaa

SEQ ID NO: 78671 - DNA, 21 bp, Homo sapiens
ccttgttttaaagagaatact

SEQ ID NO: 78672 - DNA, 21 bp, Homo sapiens
cttgaacataaatgcacattt

SEQ ID NO: 78673 - DNA, 22 bp, Homo sapiens
ataactatagtgaagttgtgct

SEQ ID NO: 78674 - DNA, 19 bp, Homo sapiens
agttacttgcctcaagatg

SEQ ID NO: 78675 - DNA, 25 bp, Homo sapiens
ttatataaatatcactttgaaataa

SEQ ID NO: 78676 - DNA, 19 bp, Homo sapiens
tgtttgttttaaagttcca

SEQ ID NO: 78677 - DNA, 16 bp, Homo sapiens
tgccatgacagcaaca

SEQ ID NO: 78678 - DNA, 26 bp, Homo sapiens
taaattctatgagaggaaatgaaaaa

SEQ ID NO: 78679 - DNA, 21 bp, Homo sapiens
gcatttcaaactctttatgtt

SEQ ID NO: 78680 - DNA, 20 bp, Homo sapiens
atagctttttgcttttcacc

SEQ ID NO: 78681 - DNA, 21 bp, Homo sapiens
tttacatcatttgtagttgca

SEQ ID NO: 78682 - DNA, 24 bp, Homo sapiens
agtattagaagaaagaagagataa

SEQ ID NO: 78683 - DNA, 20 bp, Homo sapiens
acagatgctcagatttatgt

SEQ ID NO: 78684 - DNA, 18 bp, Homo sapiens
aggccaatcttgcctaca

SEQ ID NO: 78685 - DNA, 24 bp, Homo sapiens
ccattcatctgtataagtacattg

SEQ ID NO: 78686 - DNA, 19 bp, Homo sapiens
acttacttaagctgtagca

SEQ ID NO: 78687 - DNA, 22 bp, Homo sapiens
tatatttttttcattttatttt

SEQ ID NO: 78688 - DNA, 17 bp, Homo sapiens
gatcagatgtttcaccc

SEQ ID NO: 78689 - DNA, 17 bp, Homo sapiens
tccagtatccacctgtt

SEQ ID NO: 78690 - DNA, 18 bp, Homo sapiens
agataaagcaatacctgc

SEQ ID NO: 78691 - DNA, 20 bp, Homo sapiens
ttctctgatggaagaccaag

SEQ ID NO: 78692 - DNA, 20 bp, Homo sapiens
attctgataaggcccttgaa

SEQ ID NO: 78693 - DNA, 18 bp, Homo sapiens
gactgtgctgatccaagg

SEQ ID NO: 78694 - DNA, 16 bp, Homo sapiens
attgcaaagaacagga

SEQ ID NO: 78695 - DNA, 19 bp, Homo sapiens
tccaaaataaaagttgagg

SEQ ID NO: 78696 - DNA, 23 bp, Homo sapiens
aattgatatgtgtaatgtgtaca

SEQ ID NO: 78697 - DNA, 16 bp, Homo sapiens
cctcagcaacatgtaa

SEQ ID NO: 78698 - DNA, 17 bp, Homo sapiens
catcccagcttgcttcc

SEQ ID NO: 78699 - DNA, 20 bp, Homo sapiens
ttctctcatataccacagac

SEQ ID NO: 78700 - DNA, 21 bp, Homo sapiens
ctgcatatatatagcattctt

SEQ ID NO: 78701 - DNA, 18 bp, Homo sapiens
acctgaacagtattctgg

SEQ ID NO: 78702 - DNA, 20 bp, Homo sapiens
aggtatcttgattttaagtt

SEQ ID NO: 78703 - DNA, 20 bp, Homo sapiens
acagagatctttctttatca

SEQ ID NO: 78704 - DNA, 22 bp, Homo sapiens
tttcccttcctgtttttttttt

SEQ ID NO: 78705 - DNA, 19 bp, Homo sapiens
taacagaagtgaaatccag

SEQ ID NO: 78706 - DNA, 19 bp, Homo sapiens
ttgtatacgtaactccaga

SEQ ID NO: 78707 - DNA, 17 bp, Homo sapiens
caagttagagagtcaga

SEQ ID NO: 78708 - DNA, 18 bp, Homo sapiens
acagtgagcctcatccac

SEQ ID NO: 78709 - DNA, 22 bp, Homo sapiens
tgcttctgtttttataggaacc

SEQ ID NO: 78710 - DNA, 16 bp, Homo sapiens
ctgtctttagggagcc

SEQ ID NO: 78711 - DNA, 20 bp, Homo sapiens
agtttattttttcctttcga

SEQ ID NO: 78712 - DNA, 19 bp, Homo sapiens
tgctctccttattaagaat

SEQ ID NO: 78713 - DNA, 21 bp, Homo sapiens
tacaggtatcacgctcattgc

SEQ ID NO: 78714 - DNA, 22 bp, Homo sapiens
acattatccatttgctctttta

SEQ ID NO: 78715 - DNA, 16 bp, Homo sapiens
cattcaggaagttggg

SEQ ID NO: 78716 - DNA, 21 bp, Homo sapiens
ttcctcaatagattatatacc

SEQ ID NO: 78717 - DNA, 21 bp, Homo sapiens
aaggctgagaaacaagttagt

SEQ ID NO: 78718 - DNA, 17 bp, Homo sapiens
tcccggattgaagaact

SEQ ID NO: 78719 - DNA, 17 bp, Homo sapiens
tgtaccacaaactgttg

SEQ ID NO: 78720 - DNA, 17 bp, Homo sapiens
tcaaaaccagtacaggt

SEQ ID NO: 78721 - DNA, 17 bp, Homo sapiens
tgaatgagctctttcct

SEQ ID NO: 78722 - DNA, 17 bp, Homo sapiens
tggctgcagatcctgaa

SEQ ID NO: 78723 - DNA, 18 bp, Homo sapiens
tgcacttactgctactgc

SEQ ID NO: 78724 - DNA, 21 bp, Homo sapiens
aaaaaaggaaatcattaccaa

SEQ ID NO: 78725 - DNA, 19 bp, Homo sapiens
tgagaaatcctcagatcac

SEQ ID NO: 78726 - DNA, 19 bp, Homo sapiens
tatgcattagaaggaaatc

SEQ ID NO: 78727 - DNA, 18 bp, Homo sapiens
ttaggcgaaaaacaggga

SEQ ID NO: 78728 - DNA, 26 bp, Homo sapiens
gaattgattatataacatcatgcttg

SEQ ID NO: 78729 - DNA, 20 bp, Homo sapiens
tgttttaaattttcatgcac

SEQ ID NO: 78730 - DNA, 18 bp, Homo sapiens
ttctagaaggacagtaga

SEQ ID NO: 78731 - DNA, 23 bp, Homo sapiens
tagtcttttctttagaaggtaga

SEQ ID NO: 78732 - DNA, 16 bp, Homo sapiens
tgttccacaggataga

SEQ ID NO: 78733 - DNA, 19 bp, Homo sapiens
tgaagcatgtataaagtat

SEQ ID NO: 78734 - DNA, 23 bp, Homo sapiens
catctcttacaaacctatgatga

SEQ ID NO: 78735 - DNA, 18 bp, Homo sapiens
ttgaaggtccaacaatca

SEQ ID NO: 78736 - DNA, 17 bp, Homo sapiens
tccacttccactatgag

SEQ ID NO: 78737 - DNA, 17 bp, Homo sapiens
aggtgaacttaggaaac

SEQ ID NO: 78738 - DNA, 21 bp, Homo sapiens
gctttatgttcaacacaaaga

SEQ ID NO: 78739 - DNA, 19 bp, Homo sapiens
caaggaaagacattcatca

SEQ ID NO: 78740 - DNA, 23 bp, Homo sapiens
cagataatctgtaaatgattggt

SEQ ID NO: 78741 - DNA, 17 bp, Homo sapiens
atgacttggcgaatgtc

SEQ ID NO: 78742 - DNA, 21 bp, Homo sapiens
aagttaacgaacaaattattc

SEQ ID NO: 78743 - DNA, 20 bp, Homo sapiens
ccatcacgaccagctctacc

SEQ ID NO: 78744 - DNA, 21 bp, Homo sapiens
atatgtttgtcaaactgtgtt

SEQ ID NO: 78745 - DNA, 25 bp, Homo sapiens
tttacctatttaagttaatgtctgc

SEQ ID NO: 78746 - DNA, 19 bp, Homo sapiens
tgggcattaataaagctga

SEQ ID NO: 78747 - DNA, 23 bp, Homo sapiens
ttgaggtttatatggaaagaaag

SEQ ID NO: 78748 - DNA, 21 bp, Homo sapiens
atggaatcatattatcaggag

SEQ ID NO: 78749 - DNA, 24 bp, Homo sapiens
tttttttactttaaatgcactcac

SEQ ID NO: 78750 - DNA, 22 bp, Homo sapiens
cctctgggctcctgcagacatt

SEQ ID NO: 78751 - DNA, 17 bp, Homo sapiens
acaacagaactttctga

SEQ ID NO: 78752 - DNA, 25 bp, Homo sapiens
catctttaatttgtataatcgaaac

SEQ ID NO: 78753 - DNA, 19 bp, Homo sapiens
gggttttgtagataatgaa

SEQ ID NO: 78754 - DNA, 22 bp, Homo sapiens
taatacatactgtctcctacat

SEQ ID NO: 78755 - DNA, 23 bp, Homo sapiens
aatacagttttacatattcctgt

SEQ ID NO: 78756 - DNA, 19 bp, Homo sapiens
ttagccaaattgttgtctt

SEQ ID NO: 78757 - DNA, 23 bp, Homo sapiens
cgtaatgagaagtttcgattata

SEQ ID NO: 78758 - DNA, 20 bp, Homo sapiens
agccttaaaaattcagcaca

SEQ ID NO: 78759 - DNA, 20 bp, Homo sapiens
tcattctagcagatgtagga

SEQ ID NO: 78760 - DNA, 18 bp, Homo sapiens
tgtcctcaaaatgagaca

SEQ ID NO: 78761 - DNA, 24 bp, Homo sapiens
tgtctgagtaaactgaagtcaaat

SEQ ID NO: 78762 - DNA, 18 bp, Homo sapiens
tgcaattatcacagcatt

SEQ ID NO: 78763 - DNA, 19 bp, Homo sapiens
ttcaggaatgaacttaaca

SEQ ID NO: 78764 - DNA, 17 bp, Homo sapiens
aggaagagaaagaaaga

SEQ ID NO: 78765 - DNA, 19 bp, Homo sapiens
tgtcttgggtagaatcatc

SEQ ID NO: 78766 - DNA, 24 bp, Homo sapiens
cacattcattgttttgtttaaaaa

SEQ ID NO: 78767 - DNA, 21 bp, Homo sapiens
tgggaattatgggaactgaaa

SEQ ID NO: 78768 - DNA, 19 bp, Homo sapiens
gctactttacatactcggg

SEQ ID NO: 78769 - DNA, 19 bp, Homo sapiens
ggaccaaagtcccaggatg

SEQ ID NO: 78770 - DNA, 21 bp, Homo sapiens
ttgagatattttttacttggc

SEQ ID NO: 78771 - DNA, 17 bp, Homo sapiens
ttccaaatttttcgcct

SEQ ID NO: 78772 - DNA, 19 bp, Homo sapiens
tgcctttgctaagctttct

SEQ ID NO: 78773 - DNA, 21 bp, Homo sapiens
ctatgaagggaattcacagat

SEQ ID NO: 78774 - DNA, 16 bp, Homo sapiens
tggatgactcagagga

SEQ ID NO: 78775 - DNA, 19 bp, Homo sapiens
tacaatcataatactgcaa

SEQ ID NO: 78776 - DNA, 23 bp, Homo sapiens
ttttgtctgctgtggacatctta

SEQ ID NO: 78777 - DNA, 20 bp, Homo sapiens
tgtagtgtttaactggaact

SEQ ID NO: 78778 - DNA, 19 bp, Homo sapiens
atttatttgtgagtggagt

SEQ ID NO: 78779 - DNA, 16 bp, Homo sapiens
aaactgtgcctgcgat

SEQ ID NO: 78780 - DNA, 26 bp, Homo sapiens
tttttaaagttgaaatttagtgtaaa

SEQ ID NO: 78781 - DNA, 16 bp, Homo sapiens
atcagctgacgggaaa

SEQ ID NO: 78782 - DNA, 26 bp, Homo sapiens
ttaacctatatgtttaaattagcatt

SEQ ID NO: 78783 - DNA, 16 bp, Homo sapiens
ttcgtaagggcgcaaa

SEQ ID NO: 78784 - DNA, 22 bp, Homo sapiens
cagcgtcttgccgatcaatatc

SEQ ID NO: 78785 - DNA, 17 bp, Homo sapiens
tggagtgggaaacaaaa

SEQ ID NO: 78786 - DNA, 17 bp, Homo sapiens
ggtggaaggctttttcc

SEQ ID NO: 78787 - DNA, 21 bp, Homo sapiens
ctgagattctgtattagcttt

SEQ ID NO: 78788 - DNA, 19 bp, Homo sapiens
tctcggtataacaaattta

SEQ ID NO: 78789 - DNA, 18 bp, Homo sapiens
aggcagaagcaacttctt

SEQ ID NO: 78790 - DNA, 17 bp, Homo sapiens
ctgcctgtttgacttaa

SEQ ID NO: 78791 - DNA, 18 bp, Homo sapiens
tcacataaatagcaacaa

SEQ ID NO: 78792 - DNA, 19 bp, Homo sapiens
tagggtagaaattggcttc

SEQ ID NO: 78793 - DNA, 20 bp, Homo sapiens
aggcatacaaaaacaaacag

SEQ ID NO: 78794 - DNA, 22 bp, Homo sapiens
aagctaatgaagaattgtgtcc

SEQ ID NO: 78795 - DNA, 24 bp, Homo sapiens
ttaaagcttccagagctttttcta

SEQ ID NO: 78796 - DNA, 18 bp, Homo sapiens
taattcaactggtacttg

SEQ ID NO: 78797 - DNA, 22 bp, Homo sapiens
cttattcatctttctgagaatg

SEQ ID NO: 78798 - DNA, 25 bp, Homo sapiens
atttgaatcaataaagaatgaaata

SEQ ID NO: 78799 - DNA, 23 bp, Homo sapiens
taacatttgaaataatttaattt

SEQ ID NO: 78800 - DNA, 23 bp, Homo sapiens
atatatgccattttctctttaat

SEQ ID NO: 78801 - DNA, 23 bp, Homo sapiens
cgggcaccaaagagcattgttat

SEQ ID NO: 78802 - DNA, 25 bp, Homo sapiens
tatacaataaattttagtctgttca

SEQ ID NO: 78803 - DNA, 24 bp, Homo sapiens
actacctttagaactttagaaact

SEQ ID NO: 78804 - DNA, 20 bp, Homo sapiens
gaaatcttatcacatggttt

SEQ ID NO: 78805 - DNA, 18 bp, Homo sapiens
agcttgattaggcaaaga

SEQ ID NO: 78806 - DNA, 25 bp, Homo sapiens
aaagcaagtatagaacatagaaata

SEQ ID NO: 78807 - DNA, 23 bp, Homo sapiens
acatttaaaagttttttgaaact

SEQ ID NO: 78808 - DNA, 17 bp, Homo sapiens
tgaaatagcccaacatc

SEQ ID NO: 78809 - DNA, 24 bp, Homo sapiens
aacttggagaagttatattcttat

SEQ ID NO: 78810 - DNA, 19 bp, Homo sapiens
agctcactttgatcattct

SEQ ID NO: 78811 - DNA, 18 bp, Homo sapiens
aggctgttgtcatttaaa

SEQ ID NO: 78812 - DNA, 20 bp, Homo sapiens
gctcttgtgccgaaataaca

SEQ ID NO: 78813 - DNA, 18 bp, Homo sapiens
atttggaaagacattctc

SEQ ID NO: 78814 - DNA, 24 bp, Homo sapiens
ataactatcctatcataaactaat

SEQ ID NO: 78815 - DNA, 25 bp, Homo sapiens
aaaagcttttattatttattttctt

SEQ ID NO: 78816 - DNA, 21 bp, Homo sapiens
actcttagcttaagaacaatt

SEQ ID NO: 78817 - DNA, 17 bp, Homo sapiens
acagttcctcacagcct

SEQ ID NO: 78818 - DNA, 19 bp, Homo sapiens
tcagataccacatttttcc

SEQ ID NO: 78819 - DNA, 18 bp, Homo sapiens
ctgtattttgccagcatt

SEQ ID NO: 78820 - DNA, 17 bp, Homo sapiens
ttggcatgtttctgcct

SEQ ID NO: 78821 - DNA, 22 bp, Homo sapiens
tcagtttatattcattctaagg

SEQ ID NO: 78822 - DNA, 17 bp, Homo sapiens
ttggccatatccaccag

SEQ ID NO: 78823 - DNA, 26 bp, Homo sapiens
ctagatcttttaagtacactttaaaa

SEQ ID NO: 78824 - DNA, 26 bp, Homo sapiens
tattttccaaatctattttgttagaa

SEQ ID NO: 78825 - DNA, 18 bp, Homo sapiens
ttggtagaagctaggcag

SEQ ID NO: 78826 - DNA, 17 bp, Homo sapiens
gagtcacctcccagatg

SEQ ID NO: 78827 - DNA, 23 bp, Homo sapiens
ctattctggcaacaaacaagata

SEQ ID NO: 78828 - DNA, 19 bp, Homo sapiens
gttgtattatacgttgttt

SEQ ID NO: 78829 - DNA, 18 bp, Homo sapiens
catggcagctttgccttc

SEQ ID NO: 78830 - DNA, 19 bp, Homo sapiens
taggaagctgaacatcagc

SEQ ID NO: 78831 - DNA, 23 bp, Homo sapiens
gtattttacctgaacactatttg

SEQ ID NO: 78832 - DNA, 17 bp, Homo sapiens
tttgttgttgttgttgt

SEQ ID NO: 78833 - DNA, 19 bp, Homo sapiens
gggtacttttgaaatggtt

SEQ ID NO: 78834 - DNA, 18 bp, Homo sapiens
gatggtgtttctgaaggc

SEQ ID NO: 78835 - DNA, 20 bp, Homo sapiens
ttcattttctaagtgtccag

SEQ ID NO: 78836 - DNA, 17 bp, Homo sapiens
tctgccaaacaaatagt

SEQ ID NO: 78837 - DNA, 25 bp, Homo sapiens
ttaaaatcaatatgttaaaaatcca

SEQ ID NO: 78838 - DNA, 18 bp, Homo sapiens
cgtcttctgttcttcttg

SEQ ID NO: 78839 - DNA, 16 bp, Homo sapiens
tgttgcttatgggttt

SEQ ID NO: 78840 - DNA, 19 bp, Homo sapiens
agagtatgtgatggccata

SEQ ID NO: 78841 - DNA, 25 bp, Homo sapiens
tatattctattattgtattgatatt

SEQ ID NO: 78842 - DNA, 17 bp, Homo sapiens
ccctgtaacatgaaagt

SEQ ID NO: 78843 - DNA, 21 bp, Homo sapiens
agacctcttttcaagtacaaa

SEQ ID NO: 78844 - DNA, 18 bp, Homo sapiens
tcccaagtcagaacttta

SEQ ID NO: 78845 - DNA, 17 bp, Homo sapiens
atgcacactttcacagt

SEQ ID NO: 78846 - DNA, 23 bp, Homo sapiens
acattctcttttaaaattaaaga

SEQ ID NO: 78847 - DNA, 21 bp, Homo sapiens
agttttaaagaaattctgaaa

SEQ ID NO: 78848 - DNA, 17 bp, Homo sapiens
gggataagtgcatgcca

SEQ ID NO: 78849 - DNA, 24 bp, Homo sapiens
tcacactgagcatttactacctga

SEQ ID NO: 78850 - DNA, 16 bp, Homo sapiens
tctggagtcaggcctg

SEQ ID NO: 78851 - DNA, 19 bp, Homo sapiens
cttttacaactcactgggt

SEQ ID NO: 78852 - DNA, 16 bp, Homo sapiens
gcctctcacctgagtt

SEQ ID NO: 78853 - DNA, 17 bp, Homo sapiens
ggattctgcctctcatg

SEQ ID NO: 78854 - DNA, 21 bp, Homo sapiens
agtgaaaaatatagtggattg

SEQ ID NO: 78855 - DNA, 17 bp, Homo sapiens
atttggagcgagcaggc

SEQ ID NO: 78856 - DNA, 19 bp, Homo sapiens
gaaaaagaatcacaaaagt

SEQ ID NO: 78857 - DNA, 18 bp, Homo sapiens
atccgaaaccctcccgtc

SEQ ID NO: 78858 - DNA, 18 bp, Homo sapiens
ttccgtaaggctataggc

SEQ ID NO: 78859 - DNA, 20 bp, Homo sapiens
ggataaggtacgtgtcaatg

SEQ ID NO: 78860 - DNA, 23 bp, Homo sapiens
ctttctacagaatatttcagtat

SEQ ID NO: 78861 - DNA, 19 bp, Homo sapiens
acatgaaggttgaagtccg

SEQ ID NO: 78862 - DNA, 20 bp, Homo sapiens
ttattttgaaatggagtttt

SEQ ID NO: 78863 - DNA, 19 bp, Homo sapiens
ttctcttagaacttgaaca

SEQ ID NO: 78864 - DNA, 19 bp, Homo sapiens
tcagaatgttagttcctga

SEQ ID NO: 78865 - DNA, 23 bp, Homo sapiens
aactgacactttatgaaaattct

SEQ ID NO: 78866 - DNA, 16 bp, Homo sapiens
aacatggtcctgacag

SEQ ID NO: 78867 - DNA, 21 bp, Homo sapiens
agaattcataacagttcaaaa

SEQ ID NO: 78868 - DNA, 18 bp, Homo sapiens
tcccggttctgaagagat

SEQ ID NO: 78869 - DNA, 24 bp, Homo sapiens
tctcagatcatatttatgaaaagc

SEQ ID NO: 78870 - DNA, 16 bp, Homo sapiens
ccacacaggtaatcgt

SEQ ID NO: 78871 - DNA, 22 bp, Homo sapiens
tattttgtttggatgggggaga

SEQ ID NO: 78872 - DNA, 18 bp, Homo sapiens
acctccccttttcgtttt

SEQ ID NO: 78873 - DNA, 23 bp, Homo sapiens
ttgcaactaataccccttctcag

SEQ ID NO: 78874 - DNA, 18 bp, Homo sapiens
tcctcttataatacagca

SEQ ID NO: 78875 - DNA, 17 bp, Homo sapiens
cttcatctgcagagaga

SEQ ID NO: 78876 - DNA, 22 bp, Homo sapiens
gaactttgtaattagaatgatt

SEQ ID NO: 78877 - DNA, 21 bp, Homo sapiens
ccagcaagaaattaatggaca

SEQ ID NO: 78878 - DNA, 16 bp, Homo sapiens
atgaattgcggaaggc

SEQ ID NO: 78879 - DNA, 18 bp, Homo sapiens
ctttgcagatacaatcct

SEQ ID NO: 78880 - DNA, 18 bp, Homo sapiens
gccataaaacattgtaac

SEQ ID NO: 78881 - DNA, 23 bp, Homo sapiens
gttctttacctttaaaagaaata

SEQ ID NO: 78882 - DNA, 22 bp, Homo sapiens
tgttggcctgaagtagatgctt

SEQ ID NO: 78883 - DNA, 18 bp, Homo sapiens
tctgatcctaaggacaaa

SEQ ID NO: 78884 - DNA, 22 bp, Homo sapiens
tctcctttttaaataaggattg

SEQ ID NO: 78885 - DNA, 16 bp, Homo sapiens
tgagaggtgcttaagt

SEQ ID NO: 78886 - DNA, 20 bp, Homo sapiens
ttttgacaggtacaaaatca

SEQ ID NO: 78887 - DNA, 20 bp, Homo sapiens
tctatgaggacagaagaaac

SEQ ID NO: 78888 - DNA, 27 bp, Homo sapiens
atcactatagcaattcattaactatat

SEQ ID NO: 78889 - DNA, 18 bp, Homo sapiens
acatctctcaaaggtaca

SEQ ID NO: 78890 - DNA, 17 bp, Homo sapiens
cagatgtggtgacctcc

SEQ ID NO: 78891 - DNA, 19 bp, Homo sapiens
agactcttcttttgcatgt

SEQ ID NO: 78892 - DNA, 23 bp, Homo sapiens
tttaaagaagtgttatggaaggg

SEQ ID NO: 78893 - DNA, 21 bp, Homo sapiens
gctcgaaagaatacagaacta

SEQ ID NO: 78894 - DNA, 22 bp, Homo sapiens
gaatgactttatgtcacttatt

SEQ ID NO: 78895 - DNA, 18 bp, Homo sapiens
ggagcaggaaaacttcca

SEQ ID NO: 78896 - DNA, 16 bp, Homo sapiens
tggaccaaagtgcaat

SEQ ID NO: 78897 - DNA, 21 bp, Homo sapiens
tggtcatttttgtttgttaat

SEQ ID NO: 78898 - DNA, 18 bp, Homo sapiens
tgccttagccactcttct

SEQ ID NO: 78899 - DNA, 19 bp, Homo sapiens
acatctttggcacttatgc

SEQ ID NO: 78900 - DNA, 18 bp, Homo sapiens
cctccaatgatgtgtgga

SEQ ID NO: 78901 - DNA, 21 bp, Homo sapiens
caaaaacagatgggtttagaa

SEQ ID NO: 78902 - DNA, 26 bp, Homo sapiens
ggtgttcaatatattcattaactgta

SEQ ID NO: 78903 - DNA, 18 bp, Homo sapiens
tgatgattatggtcaact

SEQ ID NO: 78904 - DNA, 19 bp, Homo sapiens
agcagaagaagtatcagtt

SEQ ID NO: 78905 - DNA, 23 bp, Homo sapiens
tattgactgaatttagatcactg

SEQ ID NO: 78906 - DNA, 24 bp, Homo sapiens
ggtatctctaaaaacatttcaaac

SEQ ID NO: 78907 - DNA, 21 bp, Homo sapiens
tttaagaacaatgacaaactt

SEQ ID NO: 78908 - DNA, 25 bp, Homo sapiens
ttttgaatttcttgaaattttttag

SEQ ID NO: 78909 - DNA, 22 bp, Homo sapiens
aaatgacaagtgacttttcttt

SEQ ID NO: 78910 - DNA, 20 bp, Homo sapiens
gagtttttaatcaccagtga

SEQ ID NO: 78911 - DNA, 20 bp, Homo sapiens
tcaggtacaagaaataaaac

SEQ ID NO: 78912 - DNA, 18 bp, Homo sapiens
tcactatcatcctgaagt

SEQ ID NO: 78913 - DNA, 25 bp, Homo sapiens
caaataaataaaataataataataa

SEQ ID NO: 78914 - DNA, 18 bp, Homo sapiens
gaactcaaggaagactca

SEQ ID NO: 78915 - DNA, 19 bp, Homo sapiens
catgaagtaagccataatt

SEQ ID NO: 78916 - DNA, 20 bp, Homo sapiens
tcctatgaacagtatttttt

SEQ ID NO: 78917 - DNA, 17 bp, Homo sapiens
gagatgacagtccccgt

SEQ ID NO: 78918 - DNA, 22 bp, Homo sapiens
tttacacttcatcttattcaaa

SEQ ID NO: 78919 - DNA, 16 bp, Homo sapiens
tttctttagctgacca

SEQ ID NO: 78920 - DNA, 17 bp, Homo sapiens
aaatgcctggtcataca

SEQ ID NO: 78921 - DNA, 19 bp, Homo sapiens
acactttcagtgatgaagc

SEQ ID NO: 78922 - DNA, 20 bp, Homo sapiens
agtactgagtgttaaagaca

SEQ ID NO: 78923 - DNA, 18 bp, Homo sapiens
acaggaggaagatgtcaa

SEQ ID NO: 78924 - DNA, 18 bp, Homo sapiens
acctgttagcattctaag

SEQ ID NO: 78925 - DNA, 18 bp, Homo sapiens
ggaacagttattcaagga

SEQ ID NO: 78926 - DNA, 21 bp, Homo sapiens
tattttgctactttctggtac

SEQ ID NO: 78927 - DNA, 18 bp, Homo sapiens
gcagaaaagctaagatca

SEQ ID NO: 78928 - DNA, 17 bp, Homo sapiens
tccttggcctttttcta

SEQ ID NO: 78929 - DNA, 23 bp, Homo sapiens
acttatttacagatacagattta

SEQ ID NO: 78930 - DNA, 20 bp, Homo sapiens
tttctaactctggttttgtg

SEQ ID NO: 78931 - DNA, 17 bp, Homo sapiens
aataaggagcagcatct

SEQ ID NO: 78932 - DNA, 22 bp, Homo sapiens
cacatcatccatttcccttttt

SEQ ID NO: 78933 - DNA, 18 bp, Homo sapiens
agaaacgtcttgttctct

SEQ ID NO: 78934 - DNA, 21 bp, Homo sapiens
agaatttttcacaatagattt

SEQ ID NO: 78935 - DNA, 16 bp, Homo sapiens
atctaagggaaaggga

SEQ ID NO: 78936 - DNA, 16 bp, Homo sapiens
cacaggctcattctca

SEQ ID NO: 78937 - DNA, 16 bp, Homo sapiens
tgccaaactaaatggt

SEQ ID NO: 78938 - DNA, 20 bp, Homo sapiens
caggttgtgtttgttctaaa

SEQ ID NO: 78939 - DNA, 23 bp, Homo sapiens
tccagtaatattgttaataaaat

SEQ ID NO: 78940 - DNA, 19 bp, Homo sapiens
ttgattttcttcatccctt

SEQ ID NO: 78941 - DNA, 20 bp, Homo sapiens
ctccatcagaaactactttc

SEQ ID NO: 78942 - DNA, 24 bp, Homo sapiens
gcggtcaaaaagctgcagcagcag

SEQ ID NO: 78943 - DNA, 20 bp, Homo sapiens
accaactaaattgccaagta

SEQ ID NO: 78944 - DNA, 25 bp, Homo sapiens
tctacaacagtataaaaaactttca

SEQ ID NO: 78945 - DNA, 20 bp, Homo sapiens
tagtatggtatcaaatactt

SEQ ID NO: 78946 - DNA, 23 bp, Homo sapiens
aacagacctttttttggtagacg

SEQ ID NO: 78947 - DNA, 18 bp, Homo sapiens
cagaatgctttcacaaga

SEQ ID NO: 78948 - DNA, 17 bp, Homo sapiens
agccctatctttacttt

SEQ ID NO: 78949 - DNA, 19 bp, Homo sapiens
cagggatttgagtgaaagg

SEQ ID NO: 78950 - DNA, 18 bp, Homo sapiens
tctcatcttagccaaagt

SEQ ID NO: 78951 - DNA, 24 bp, Homo sapiens
ctttgtttctctattaaagttgct

SEQ ID NO: 78952 - DNA, 18 bp, Homo sapiens
ctcctttacagtgggtgc

SEQ ID NO: 78953 - DNA, 20 bp, Homo sapiens
agtgtatttttgtctaaaaa

SEQ ID NO: 78954 - DNA, 21 bp, Homo sapiens
gactttgatttcttttggcct

SEQ ID NO: 78955 - DNA, 22 bp, Homo sapiens
aaaacctgctgacccttgtcct

SEQ ID NO: 78956 - DNA, 17 bp, Homo sapiens
cccagtgaacactacaa

SEQ ID NO: 78957 - DNA, 18 bp, Homo sapiens
gacaacctgataaagggc

SEQ ID NO: 78958 - DNA, 16 bp, Homo sapiens
actccaggaccaagcc

SEQ ID NO: 78959 - DNA, 23 bp, Homo sapiens
gatagaataataacaatagtacg

SEQ ID NO: 78960 - DNA, 19 bp, Homo sapiens
tcttctatctagcagttgt

SEQ ID NO: 78961 - DNA, 18 bp, Homo sapiens
ctgtgtcagctacgtatg

SEQ ID NO: 78962 - DNA, 19 bp, Homo sapiens
agtattccctagttaatcc

SEQ ID NO: 78963 - DNA, 21 bp, Homo sapiens
caactgacacgccttgtgaaa

SEQ ID NO: 78964 - DNA, 17 bp, Homo sapiens
gctgcttatagactgtt

SEQ ID NO: 78965 - DNA, 24 bp, Homo sapiens
tggcagccacaaatatttatggaa

SEQ ID NO: 78966 - DNA, 17 bp, Homo sapiens
ggcggtgattttcatga

SEQ ID NO: 78967 - DNA, 22 bp, Homo sapiens
gtgaatatggtcacccctagca

SEQ ID NO: 78968 - DNA, 26 bp, Homo sapiens
atacttaaactattttattctaatag

SEQ ID NO: 78969 - DNA, 19 bp, Homo sapiens
aaagttgctaacgaatcaa

SEQ ID NO: 78970 - DNA, 19 bp, Homo sapiens
agaggttgctttatcttga

SEQ ID NO: 78971 - DNA, 21 bp, Homo sapiens
aggatcacagtaattctttgt

SEQ ID NO: 78972 - DNA, 20 bp, Homo sapiens
tatagtactctgcatttgaa

SEQ ID NO: 78973 - DNA, 24 bp, Homo sapiens
caggaataggtctaagaccttgcc

SEQ ID NO: 78974 - DNA, 19 bp, Homo sapiens
gatcgtgccactgcactcc

SEQ ID NO: 78975 - DNA, 18 bp, Homo sapiens
tgactgtcagaagaaatg

SEQ ID NO: 78976 - DNA, 24 bp, Homo sapiens
aaaattcttgtatctacttttaca

SEQ ID NO: 78977 - DNA, 16 bp, Homo sapiens
ttggctccgggaacgt

SEQ ID NO: 78978 - DNA, 18 bp, Homo sapiens
ctcctacttgcagttttt

SEQ ID NO: 78979 - DNA, 16 bp, Homo sapiens
ttggaggtggggaagc

SEQ ID NO: 78980 - DNA, 23 bp, Homo sapiens
attattgactgaatccatttctt

SEQ ID NO: 78981 - DNA, 26 bp, Homo sapiens
aattactacattttactttaaaaaat

SEQ ID NO: 78982 - DNA, 19 bp, Homo sapiens
tcctgtatcaacaacacac

SEQ ID NO: 78983 - DNA, 22 bp, Homo sapiens
tcttgaattgtacttctatgtt

SEQ ID NO: 78984 - DNA, 19 bp, Homo sapiens
tgttatcaacctagcttcc

SEQ ID NO: 78985 - DNA, 18 bp, Homo sapiens
ctagggactttctcaaag

SEQ ID NO: 78986 - DNA, 16 bp, Homo sapiens
ggtctggtgcctgggg

SEQ ID NO: 78987 - DNA, 16 bp, Homo sapiens
ggacggcaggaaagaa

SEQ ID NO: 78988 - DNA, 22 bp, Homo sapiens
aatacgttaacaactactgata

SEQ ID NO: 78989 - DNA, 17 bp, Homo sapiens
tacagtttttacccacc

SEQ ID NO: 78990 - DNA, 22 bp, Homo sapiens
ttaggaaaatttagcttataac

SEQ ID NO: 78991 - DNA, 20 bp, Homo sapiens
tcactccgtttacaatttaa

SEQ ID NO: 78992 - DNA, 20 bp, Homo sapiens
ccctttgaagatttgttttc

SEQ ID NO: 78993 - DNA, 23 bp, Homo sapiens
cttaaaaaaaatactataaaggt

SEQ ID NO: 78994 - DNA, 18 bp, Homo sapiens
agatggttcatcaagagg

SEQ ID NO: 78995 - DNA, 21 bp, Homo sapiens
ttggggaactctttctttaca

SEQ ID NO: 78996 - DNA, 18 bp, Homo sapiens
actgaattcctgaaagca

SEQ ID NO: 78997 - DNA, 20 bp, Homo sapiens
cacagcaactattacatcct

SEQ ID NO: 78998 - DNA, 20 bp, Homo sapiens
gtagacaatatgtgcactca

SEQ ID NO: 78999 - DNA, 24 bp, Homo sapiens
tatcatataagtgacatcttgtta

SEQ ID NO: 79000 - DNA, 23 bp, Homo sapiens
taacttaaaacttttctttaaaa

SEQ ID NO: 79001 - DNA, 22 bp, Homo sapiens
ttgtggaggctgcttcttggac

SEQ ID NO: 79002 - DNA, 17 bp, Homo sapiens
agagagatgaaagggaa

SEQ ID NO: 79003 - DNA, 18 bp, Homo sapiens
tggacgtccacaaatgag

SEQ ID NO: 79004 - DNA, 19 bp, Homo sapiens
gccactcaagcctaaatgg

SEQ ID NO: 79005 - DNA, 18 bp, Homo sapiens
gacagaagaatgcactca

SEQ ID NO: 79006 - DNA, 20 bp, Homo sapiens
aacagttctgatagttttaa

SEQ ID NO: 79007 - DNA, 18 bp, Homo sapiens
gtctctgggaaaactgct

SEQ ID NO: 79008 - DNA, 27 bp, Homo sapiens
tcaaataacttatttttaacataagaa

SEQ ID NO: 79009 - DNA, 24 bp, Homo sapiens
taacttattctcatttacagaata

SEQ ID NO: 79010 - DNA, 17 bp, Homo sapiens
accatgacaaggtgagt

SEQ ID NO: 79011 - DNA, 26 bp, Homo sapiens
ttaaagttttaaagtactaaaaattg

SEQ ID NO: 79012 - DNA, 24 bp, Homo sapiens
gttgcaatatagcttgatttaaag

SEQ ID NO: 79013 - DNA, 17 bp, Homo sapiens
ggttacaaagggtaaca

SEQ ID NO: 79014 - DNA, 20 bp, Homo sapiens
atgcaaccaaaggctcatac

SEQ ID NO: 79015 - DNA, 20 bp, Homo sapiens
tggaagtaaattcaggtaag

SEQ ID NO: 79016 - DNA, 21 bp, Homo sapiens
ctcaccacccatggcacagag

SEQ ID NO: 79017 - DNA, 16 bp, Homo sapiens
gaatggcttttcccga

SEQ ID NO: 79018 - DNA, 26 bp, Homo sapiens
aaattcattaatcagaaatatcattt

SEQ ID NO: 79019 - DNA, 21 bp, Homo sapiens
gatgaaatccctgtattgaca

SEQ ID NO: 79020 - DNA, 26 bp, Homo sapiens
tttaaaatcaattttaaaatgtctta

SEQ ID NO: 79021 - DNA, 19 bp, Homo sapiens
tgaatgtactgagtggtaa

SEQ ID NO: 79022 - DNA, 17 bp, Homo sapiens
tcccccgacttcaaagt

SEQ ID NO: 79023 - DNA, 16 bp, Homo sapiens
gttagccacctgccta

SEQ ID NO: 79024 - DNA, 23 bp, Homo sapiens
aaggtaccatacttagaattatc

SEQ ID NO: 79025 - DNA, 17 bp, Homo sapiens
agttgagtgatcttcct

SEQ ID NO: 79026 - DNA, 19 bp, Homo sapiens
cactgccacaatataagta

SEQ ID NO: 79027 - DNA, 17 bp, Homo sapiens
tcagtcgatcagccgaa

SEQ ID NO: 79028 - DNA, 21 bp, Homo sapiens
tgacaaatcctgtgaactctc

SEQ ID NO: 79029 - DNA, 16 bp, Homo sapiens
ggcgttgagtacgttg

SEQ ID NO: 79030 - DNA, 17 bp, Homo sapiens
acccccttactggaaac

SEQ ID NO: 79031 - DNA, 19 bp, Homo sapiens
tgtgtctatcaacttatct

SEQ ID NO: 79032 - DNA, 17 bp, Homo sapiens
gttagcagttaacacag

SEQ ID NO: 79033 - DNA, 24 bp, Homo sapiens
tttgtcatacctatatcatataca

SEQ ID NO: 79034 - DNA, 19 bp, Homo sapiens
acagtttttccttccaaca

SEQ ID NO: 79035 - DNA, 19 bp, Homo sapiens
acacaagtttgacatatgt

SEQ ID NO: 79036 - DNA, 24 bp, Homo sapiens
cgccgtgctgcccgggaagaatat

SEQ ID NO: 79037 - DNA, 20 bp, Homo sapiens
cctgaggagccggaccgatg

SEQ ID NO: 79038 - DNA, 23 bp, Homo sapiens
gcagcgtccccgggcaggaacgg

SEQ ID NO: 79039 - DNA, 24 bp, Homo sapiens
caggcgccgtatccgcgctcgtct

SEQ ID NO: 79040 - DNA, 24 bp, Homo sapiens
cgaggcagtcgctaccgggaaaat

SEQ ID NO: 79041 - DNA, 22 bp, Homo sapiens
tcatccaaggcagcctgcgtgg

SEQ ID NO: 79042 - DNA, 20 bp, Homo sapiens
gcccgcggcgggcagcagtt

SEQ ID NO: 79043 - DNA, 24 bp, Homo sapiens
caagagggcccataaaaacaaagt

SEQ ID NO: 79044 - DNA, 17 bp, Homo sapiens
gcacctgagcttccatg

SEQ ID NO: 79045 - DNA, 23 bp, Homo sapiens
ttcccacaccctgtggcaggttt

SEQ ID NO: 79046 - DNA, 23 bp, Homo sapiens
cgtaggaagcccctgctacccgg

SEQ ID NO: 79047 - DNA, 24 bp, Homo sapiens
acaaccccagctctacccgacatc

SEQ ID NO: 79048 - DNA, 23 bp, Homo sapiens
ggaggctccacccgctgcaggct

SEQ ID NO: 79049 - DNA, 24 bp, Homo sapiens
ttccgtggccaggcccaccagggc

SEQ ID NO: 79050 - DNA, 17 bp, Homo sapiens
cctgggaggccccaccc

SEQ ID NO: 79051 - DNA, 24 bp, Homo sapiens
agcgtcggtcctgcccgtacacct

SEQ ID NO: 79052 - DNA, 18 bp, Homo sapiens
ccagaggagaagttctcc

SEQ ID NO: 79053 - DNA, 24 bp, Homo sapiens
gacacagccgtgagccccagcccc

SEQ ID NO: 79054 - DNA, 23 bp, Homo sapiens
gtccacacagctccaggattggg

SEQ ID NO: 79055 - DNA, 21 bp, Homo sapiens
cagcccccagccccagcctgc

SEQ ID NO: 79056 - DNA, 24 bp, Homo sapiens
catggggcttgctctgtggatgca

SEQ ID NO: 79057 - DNA, 16 bp, Homo sapiens
acagccctgctggaga

SEQ ID NO: 79058 - DNA, 21 bp, Homo sapiens
caggccagagtgagtgcagta

SEQ ID NO: 79059 - DNA, 24 bp, Homo sapiens
gtcgcagcggacctggtcctccca

SEQ ID NO: 79060 - DNA, 23 bp, Homo sapiens
tttgaggaagaggaagggcagga

SEQ ID NO: 79061 - DNA, 23 bp, Homo sapiens
ctctgagctcccgtggcactgca

SEQ ID NO: 79062 - DNA, 23 bp, Homo sapiens
ctgcctggagcagcaggatgagg

SEQ ID NO: 79063 - DNA, 23 bp, Homo sapiens
aaccccgatgagctgcctggcct

SEQ ID NO: 79064 - DNA, 24 bp, Homo sapiens
gcagtgatcagctctgacaggctc

SEQ ID NO: 79065 - DNA, 23 bp, Homo sapiens
ctgtgcgtcctccatgcctcccg

SEQ ID NO: 79066 - DNA, 20 bp, Homo sapiens
gcctttcacaggttgggagg

SEQ ID NO: 79067 - DNA, 24 bp, Homo sapiens
ggtccttgagcctggtgctgcgct

SEQ ID NO: 79068 - DNA, 24 bp, Homo sapiens
ttcctctatggccgtgtgcaggcc

SEQ ID NO: 79069 - DNA, 22 bp, Homo sapiens
ggaaggctacgctgtggggagg

SEQ ID NO: 79070 - DNA, 20 bp, Homo sapiens
ccaccttcgcagcccggggg

SEQ ID NO: 79071 - DNA, 20 bp, Homo sapiens
gtcccaggccccgcccgcct

SEQ ID NO: 79072 - DNA, 20 bp, Homo sapiens
ctttccggcaggtgtgcggc

SEQ ID NO: 79073 - DNA, 23 bp, Homo sapiens
gacgggccagggcctggcgctcc

SEQ ID NO: 79074 - DNA, 17 bp, Homo sapiens
gacaggtgcgcctctcc

SEQ ID NO: 79075 - DNA, 24 bp, Homo sapiens
gtccttctcctcagcggtcaagtc

SEQ ID NO: 79076 - DNA, 23 bp, Homo sapiens
gctgggagctggcctctgtgcgg

SEQ ID NO: 79077 - DNA, 16 bp, Homo sapiens
aagcacccctgtccca

SEQ ID NO: 79078 - DNA, 23 bp, Homo sapiens
ctgaggacccagggcaaggcagc

SEQ ID NO: 79079 - DNA, 24 bp, Homo sapiens
ggcagcgtccagggcggtgtgggg

SEQ ID NO: 79080 - DNA, 22 bp, Homo sapiens
ccctttttccctgggcacaggt

SEQ ID NO: 79081 - DNA, 21 bp, Homo sapiens
agctggcagagagcccgccgc

SEQ ID NO: 79082 - DNA, 23 bp, Homo sapiens
aagcacgccctgcccagttggag

SEQ ID NO: 79083 - DNA, 24 bp, Homo sapiens
gcttgaccatgtcaaactccacgg

SEQ ID NO: 79084 - DNA, 21 bp, Homo sapiens
ttgccgtctgaactgccctgg

SEQ ID NO: 79085 - DNA, 24 bp, Homo sapiens
tgggccaagcacacagccaaaggg

SEQ ID NO: 79086 - DNA, 24 bp, Homo sapiens
tttgctgtgctacctggagctgca

SEQ ID NO: 79087 - DNA, 24 bp, Homo sapiens
ccctgattctccaacctcgtctcc

SEQ ID NO: 79088 - DNA, 24 bp, Homo sapiens
aggggtgtggaggggctgtccccg

SEQ ID NO: 79089 - DNA, 22 bp, Homo sapiens
cctggagctgggcagggccccc

SEQ ID NO: 79090 - DNA, 16 bp, Homo sapiens
gtacaggctttggaca

SEQ ID NO: 79091 - DNA, 24 bp, Homo sapiens
cagctccagccagtggtgtgggtg

SEQ ID NO: 79092 - DNA, 22 bp, Homo sapiens
gcagccccaggacccagaaggg

SEQ ID NO: 79093 - DNA, 23 bp, Homo sapiens
ctgggggcagagcagggctcagc

SEQ ID NO: 79094 - DNA, 23 bp, Homo sapiens
gtgggtggggagaggcctgtgcc

SEQ ID NO: 79095 - DNA, 24 bp, Homo sapiens
accccaggttcctcaccctcctcc

SEQ ID NO: 79096 - DNA, 16 bp, Homo sapiens
cagcctgcacctgcac

SEQ ID NO: 79097 - DNA, 20 bp, Homo sapiens
ctcatggcccatgcagaccc

SEQ ID NO: 79098 - DNA, 21 bp, Homo sapiens
tgcgcagacatgtgcacgccg

SEQ ID NO: 79099 - DNA, 24 bp, Homo sapiens
tcagcctcttgaggggggtacttg

SEQ ID NO: 79100 - DNA, 21 bp, Homo sapiens
cagtggtccaccccaccctca

SEQ ID NO: 79101 - DNA, 19 bp, Homo sapiens
gagggcggcctggtgcagg

SEQ ID NO: 79102 - DNA, 16 bp, Homo sapiens
cctgcagccccaggtt

SEQ ID NO: 79103 - DNA, 23 bp, Homo sapiens
tcttcacagccaggaagtccgtg

SEQ ID NO: 79104 - DNA, 23 bp, Homo sapiens
tcgagagctacgtgcaggccgtg

SEQ ID NO: 79105 - DNA, 24 bp, Homo sapiens
tcttcgccctgcagggcaactttc

SEQ ID NO: 79106 - DNA, 23 bp, Homo sapiens
ggatggggctggaccggccagat

SEQ ID NO: 79107 - DNA, 23 bp, Homo sapiens
gcagtgtggggggggggggtgcc

SEQ ID NO: 79108 - DNA, 21 bp, Homo sapiens
gggtacagcgagccttcatgc

SEQ ID NO: 79109 - DNA, 21 bp, Homo sapiens
cccgtcacgcccggcccggcc

SEQ ID NO: 79110 - DNA, 16 bp, Homo sapiens
ccccaaaaccacagcc

SEQ ID NO: 79111 - DNA, 22 bp, Homo sapiens
cagatgcagcacagcccgcaca

SEQ ID NO: 79112 - DNA, 17 bp, Homo sapiens
ttgggcacacatggtcc

SEQ ID NO: 79113 - DNA, 22 bp, Homo sapiens
ccaccacccggcaactggccct

SEQ ID NO: 79114 - DNA, 16 bp, Homo sapiens
tgggtcccagggtctg

SEQ ID NO: 79115 - DNA, 16 bp, Homo sapiens
gcgtggtaggcctcgg

SEQ ID NO: 79116 - DNA, 16 bp, Homo sapiens
aaccggcgcgaggaca

SEQ ID NO: 79117 - DNA, 18 bp, Homo sapiens
atggtcagtgggatggga

SEQ ID NO: 79118 - DNA, 24 bp, Homo sapiens
cctcatcaggcactgttgacgctg

SEQ ID NO: 79119 - DNA, 24 bp, Homo sapiens
ctgtccatgccgcacctccagacc

SEQ ID NO: 79120 - DNA, 16 bp, Homo sapiens
ctgcacacgccgaccc

SEQ ID NO: 79121 - DNA, 23 bp, Homo sapiens
aggagcgcagcgatccgctctgt

SEQ ID NO: 79122 - DNA, 16 bp, Homo sapiens
ttctcactccccaccg

SEQ ID NO: 79123 - DNA, 24 bp, Homo sapiens
cgaggttttgaaaacgtttgcctt

SEQ ID NO: 79124 - DNA, 16 bp, Homo sapiens
catggacagggacaca

SEQ ID NO: 79125 - DNA, 23 bp, Homo sapiens
cgtggggagtgaggaggggtcgg

SEQ ID NO: 79126 - DNA, 24 bp, Homo sapiens
cacctggctgtggctgaagagcct

SEQ ID NO: 79127 - DNA, 23 bp, Homo sapiens
ggagtgaggaggggtcggcgtgg

SEQ ID NO: 79128 - DNA, 24 bp, Homo sapiens
ctgcttcctgggcctcacagccac

SEQ ID NO: 79129 - DNA, 23 bp, Homo sapiens
cacacacacccacctggtctgtg

SEQ ID NO: 79130 - DNA, 22 bp, Homo sapiens
ggcggcctcacaccactgccgc

SEQ ID NO: 79131 - DNA, 24 bp, Homo sapiens
ggtgggaactggggctggcccgtg

SEQ ID NO: 79132 - DNA, 19 bp, Homo sapiens
gcaaggtgagccatatgtg

SEQ ID NO: 79133 - DNA, 24 bp, Homo sapiens
cacgtcactggcagtgcggcgtgt

SEQ ID NO: 79134 - DNA, 22 bp, Homo sapiens
ctgcattgatgaggcccactgc

SEQ ID NO: 79135 - DNA, 22 bp, Homo sapiens
ctcccgaagcacctgcaccaga

SEQ ID NO: 79136 - DNA, 24 bp, Homo sapiens
cactggtgggggcgggaggcctcc

SEQ ID NO: 79137 - DNA, 16 bp, Homo sapiens
cccaccccagttcaca

SEQ ID NO: 79138 - DNA, 21 bp, Homo sapiens
gatcttgctgccttcagattc

SEQ ID NO: 79139 - DNA, 24 bp, Homo sapiens
gggccggaagttgtgggaccactg

SEQ ID NO: 79140 - DNA, 23 bp, Homo sapiens
ggcctcatgggcctaggggtgag

SEQ ID NO: 79141 - DNA, 21 bp, Homo sapiens
tggaggcagctgtgcggctgg

SEQ ID NO: 79142 - DNA, 24 bp, Homo sapiens
tcaaggcggcctgcatacactcgg

SEQ ID NO: 79143 - DNA, 24 bp, Homo sapiens
cagcacgtgtacctgggctgcccg

SEQ ID NO: 79144 - DNA, 22 bp, Homo sapiens
cgtatgacggctgtcgctcctg

SEQ ID NO: 79145 - DNA, 23 bp, Homo sapiens
ccaggtgcccgcccgctgcctcc

SEQ ID NO: 79146 - DNA, 20 bp, Homo sapiens
ctaggatggacatggcagca

SEQ ID NO: 79147 - DNA, 22 bp, Homo sapiens
acagattcccgttgcttcctgg

SEQ ID NO: 79148 - DNA, 21 bp, Homo sapiens
caggtggctctaaacccttag

SEQ ID NO: 79149 - DNA, 18 bp, Homo sapiens
gtcgtctctcccctgctg

SEQ ID NO: 79150 - DNA, 24 bp, Homo sapiens
ggccacagacaccttgaagctccc

SEQ ID NO: 79151 - DNA, 20 bp, Homo sapiens
caagtccctgtgctaccagc

SEQ ID NO: 79152 - DNA, 24 bp, Homo sapiens
ttgggagtcacaagtgctggttct

SEQ ID NO: 79153 - DNA, 17 bp, Homo sapiens
gactcccgccccatcca

SEQ ID NO: 79154 - DNA, 24 bp, Homo sapiens
cacacctggtcatccatgagtgac

SEQ ID NO: 79155 - DNA, 17 bp, Homo sapiens
gtctggtgagcgtggct

SEQ ID NO: 79156 - DNA, 23 bp, Homo sapiens
gctgtagagcagcgctgggagct

SEQ ID NO: 79157 - DNA, 17 bp, Homo sapiens
ctggagcagctggggca

SEQ ID NO: 79158 - DNA, 23 bp, Homo sapiens
agcaccagcagcgtggagatgcc

SEQ ID NO: 79159 - DNA, 19 bp, Homo sapiens
caagtcatggtgatcaaca

SEQ ID NO: 79160 - DNA, 21 bp, Homo sapiens
ctcagcccagcctcagccctg

SEQ ID NO: 79161 - DNA, 22 bp, Homo sapiens
cagggcagttggcaggtgagca

SEQ ID NO: 79162 - DNA, 24 bp, Homo sapiens
gcacgctcctgcccagggcgaaag

SEQ ID NO: 79163 - DNA, 24 bp, Homo sapiens
aacctgtacctgaggtgcccagcc

SEQ ID NO: 79164 - DNA, 21 bp, Homo sapiens
ggcgtctctgcagacacagat

SEQ ID NO: 79165 - DNA, 18 bp, Homo sapiens
agtgaggaagacacagat

SEQ ID NO: 79166 - DNA, 23 bp, Homo sapiens
tgaaggctctgggccagaagctg

SEQ ID NO: 79167 - DNA, 24 bp, Homo sapiens
gtggccagtggttgtcttgcccga

SEQ ID NO: 79168 - DNA, 23 bp, Homo sapiens
gagtagagtggcagcacggtggg

SEQ ID NO: 79169 - DNA, 21 bp, Homo sapiens
aaagtagcccagaggaagggc

SEQ ID NO: 79170 - DNA, 20 bp, Homo sapiens
aaccagtggctcaggcccaa

SEQ ID NO: 79171 - DNA, 24 bp, Homo sapiens
aaagagtgacagccatcgtcgtcc

SEQ ID NO: 79172 - DNA, 22 bp, Homo sapiens
tgtttcctgaacgagcagttcg

SEQ ID NO: 79173 - DNA, 23 bp, Homo sapiens
gaccaggggtacctggaaggcct

SEQ ID NO: 79174 - DNA, 16 bp, Homo sapiens
aagaaaggggagtgtt

SEQ ID NO: 79175 - DNA, 24 bp, Homo sapiens
ctgcgccctctccacagtgttggc

SEQ ID NO: 79176 - DNA, 20 bp, Homo sapiens
ctcccgtatttcccgcccag

SEQ ID NO: 79177 - DNA, 16 bp, Homo sapiens
gctgcccagtgatcga

SEQ ID NO: 79178 - DNA, 18 bp, Homo sapiens
aagcaggtaagacagcga

SEQ ID NO: 79179 - DNA, 24 bp, Homo sapiens
actgtggcaccaccacccccaaaa

SEQ ID NO: 79180 - DNA, 19 bp, Homo sapiens
tcaacatgaagcagaaaca

SEQ ID NO: 79181 - DNA, 24 bp, Homo sapiens
ggggggtgcccacataggagggtc

SEQ ID NO: 79182 - DNA, 16 bp, Homo sapiens
cccccctgcacatctt

SEQ ID NO: 79183 - DNA, 24 bp, Homo sapiens
aaagggaatgcctgtcctggcccg

SEQ ID NO: 79184 - DNA, 20 bp, Homo sapiens
aaccccaggtaccacggact

SEQ ID NO: 79185 - DNA, 17 bp, Homo sapiens
cccgcacgtagtgtttc

SEQ ID NO: 79186 - DNA, 20 bp, Homo sapiens
tgaggaagaccctccagggg

SEQ ID NO: 79187 - DNA, 24 bp, Homo sapiens
tggcgggccagccgagggaagatg

SEQ ID NO: 79188 - DNA, 22 bp, Homo sapiens
caggtccagcaggagagcagcc

SEQ ID NO: 79189 - DNA, 24 bp, Homo sapiens
cctagcttgactggaggggctgag

SEQ ID NO: 79190 - DNA, 17 bp, Homo sapiens
cagtggaggcgagaagc

SEQ ID NO: 79191 - DNA, 24 bp, Homo sapiens
gctgaggtggctgtgcctgtacag

SEQ ID NO: 79192 - DNA, 18 bp, Homo sapiens
cagggcccagaggcttca

SEQ ID NO: 79193 - DNA, 24 bp, Homo sapiens
ccctccgatgggggtccagcttgg

SEQ ID NO: 79194 - DNA, 24 bp, Homo sapiens
ctcagaggaatcacaacttctgat

SEQ ID NO: 79195 - DNA, 16 bp, Homo sapiens
tcctcgttccatctcc

SEQ ID NO: 79196 - DNA, 17 bp, Homo sapiens
gaggtcccagattttct

SEQ ID NO: 79197 - DNA, 17 bp, Homo sapiens
ctgacttcttggaaggc

SEQ ID NO: 79198 - DNA, 24 bp, Homo sapiens
agcatctgcaggcatccctgagcc

SEQ ID NO: 79199 - DNA, 24 bp, Homo sapiens
aaggacagccgactcaccagggat

SEQ ID NO: 79200 - DNA, 16 bp, Homo sapiens
agtgatgagcctccac

SEQ ID NO: 79201 - DNA, 24 bp, Homo sapiens
caggctttgggggcccccagaaaa

SEQ ID NO: 79202 - DNA, 18 bp, Homo sapiens
atctaaggcatccacccc

SEQ ID NO: 79203 - DNA, 23 bp, Homo sapiens
caggatctagggagcccagccgc

SEQ ID NO: 79204 - DNA, 23 bp, Homo sapiens
ttgttcccctcccaggccggacc

SEQ ID NO: 79205 - DNA, 16 bp, Homo sapiens
gggctcagggagctgt

SEQ ID NO: 79206 - DNA, 21 bp, Homo sapiens
aggtaggttttagagtctaca

SEQ ID NO: 79207 - DNA, 16 bp, Homo sapiens
ccctgtacctgggggc

SEQ ID NO: 79208 - DNA, 17 bp, Homo sapiens
actccctttctagtcca

SEQ ID NO: 79209 - DNA, 19 bp, Homo sapiens
gtctgcggcccagggctgg

SEQ ID NO: 79210 - DNA, 16 bp, Homo sapiens
ggccaatctgaaaggc

SEQ ID NO: 79211 - DNA, 24 bp, Homo sapiens
cgagaagctccctgaagactcgtg

SEQ ID NO: 79212 - DNA, 16 bp, Homo sapiens
ctacgccagggcggag

SEQ ID NO: 79213 - DNA, 23 bp, Homo sapiens
gaaaaaatgacaagagggcgacc

SEQ ID NO: 79214 - DNA, 16 bp, Homo sapiens
cgccagagccccgctg

SEQ ID NO: 79215 - DNA, 22 bp, Homo sapiens
cctgcccactcctcacctgcag

SEQ ID NO: 79216 - DNA, 24 bp, Homo sapiens
aggggtggctgggagcgcttctgc

SEQ ID NO: 79217 - DNA, 24 bp, Homo sapiens
tagtccggcaccgagccctggcgg

SEQ ID NO: 79218 - DNA, 24 bp, Homo sapiens
agaacttgggagggggactgggca

SEQ ID NO: 79219 - DNA, 24 bp, Homo sapiens
gcccgattcagatggggcccccag

SEQ ID NO: 79220 - DNA, 16 bp, Homo sapiens
cccgcggcggccgaag

SEQ ID NO: 79221 - DNA, 24 bp, Homo sapiens
ggagcgaggcccggcccttcttca

SEQ ID NO: 79222 - DNA, 20 bp, Homo sapiens
taccgcactctgaagcgtac

SEQ ID NO: 79223 - DNA, 21 bp, Homo sapiens
ggcctggccgcgactccgtgg

SEQ ID NO: 79224 - DNA, 22 bp, Homo sapiens
caggggcccaggccccaccctg

SEQ ID NO: 79225 - DNA, 24 bp, Homo sapiens
ctggggcggcggggcctgggtacc

SEQ ID NO: 79226 - DNA, 21 bp, Homo sapiens
gaggagacccgcggtgagcgc

SEQ ID NO: 79227 - DNA, 21 bp, Homo sapiens
gccggcctggcccgtggtacg

SEQ ID NO: 79228 - DNA, 18 bp, Homo sapiens
ctgagggcgcggcccgcg

SEQ ID NO: 79229 - DNA, 21 bp, Homo sapiens
gagcgggaggcggggtcaggg

SEQ ID NO: 79230 - DNA, 16 bp, Homo sapiens
gacggcagcgcgggcg

SEQ ID NO: 79231 - DNA, 16 bp, Homo sapiens
gccccgccgcgcgctc

SEQ ID NO: 79232 - DNA, 16 bp, Homo sapiens
gcgccatggagcggct

SEQ ID NO: 79233 - DNA, 21 bp, Homo sapiens
gtcctgtaaagggaacgcgtc

SEQ ID NO: 79234 - DNA, 16 bp, Homo sapiens
ccccgcgacggctgcg

SEQ ID NO: 79235 - DNA, 23 bp, Homo sapiens
cagcccgcacctggctcggtcgc

SEQ ID NO: 79236 - DNA, 24 bp, Homo sapiens
cggactggctgcccaggggcggtg

SEQ ID NO: 79237 - DNA, 21 bp, Homo sapiens
ctcccgcacgtcccgcagccg

SEQ ID NO: 79238 - DNA, 19 bp, Homo sapiens
ggaaggcatatatctacgt

SEQ ID NO: 79239 - DNA, 16 bp, Homo sapiens
tctaacgcctgttttc

SEQ ID NO: 79240 - DNA, 23 bp, Homo sapiens
aatgaaaactacgaaagcggggt

SEQ ID NO: 79241 - DNA, 21 bp, Homo sapiens
tatttcaatgccggtagggac

SEQ ID NO: 79242 - DNA, 20 bp, Homo sapiens
tgactgatgatctaagtttc

SEQ ID NO: 79243 - DNA, 16 bp, Homo sapiens
ggtggcggcgggtaca

SEQ ID NO: 79244 - DNA, 20 bp, Homo sapiens
aaaccatttgtgggtttgta

SEQ ID NO: 79245 - DNA, 16 bp, Homo sapiens
tttcccttcccgcatc

SEQ ID NO: 79246 - DNA, 17 bp, Homo sapiens
gaagccagagcacatga

SEQ ID NO: 79247 - DNA, 22 bp, Homo sapiens
ccagccagcttgcgataaccaa

SEQ ID NO: 79248 - DNA, 23 bp, Homo sapiens
atgctgcctcgggagaaccgaac

SEQ ID NO: 79249 - DNA, 16 bp, Homo sapiens
tacgcatgcctgcttc

SEQ ID NO: 79250 - DNA, 16 bp, Homo sapiens
caagtgcaaatgctcc

SEQ ID NO: 79251 - DNA, 16 bp, Homo sapiens
gatagggagactcagg

SEQ ID NO: 79252 - DNA, 21 bp, Homo sapiens
ctgcggggggcaccagaggca

SEQ ID NO: 79253 - DNA, 24 bp, Homo sapiens
aagaccggagactggtctcccggg

SEQ ID NO: 79254 - DNA, 16 bp, Homo sapiens
gtggacctggctgagg

SEQ ID NO: 79255 - DNA, 23 bp, Homo sapiens
ggaagctctcagggtacaaattc

SEQ ID NO: 79256 - DNA, 22 bp, Homo sapiens
acgctggtggtgctgcaccggg

SEQ ID NO: 79257 - DNA, 24 bp, Homo sapiens
tctatgcgggcatggttactgcct

SEQ ID NO: 79258 - DNA, 18 bp, Homo sapiens
accccgccactctcaccc

SEQ ID NO: 79259 - DNA, 24 bp, Homo sapiens
catcgcgatggcccagctcctcag

SEQ ID NO: 79260 - DNA, 23 bp, Homo sapiens
ggtcatgatgatgggcagcgccc

SEQ ID NO: 79261 - DNA, 19 bp, Homo sapiens
cagccgcgccccggcccgg

SEQ ID NO: 79262 - DNA, 23 bp, Homo sapiens
agcttcctttccgtcatgccggc

SEQ ID NO: 79263 - DNA, 22 bp, Homo sapiens
gggcagcgtcgtgcacgggtcg

SEQ ID NO: 79264 - DNA, 22 bp, Homo sapiens
aattagacacctggggcttgtg

SEQ ID NO: 79265 - DNA, 16 bp, Homo sapiens
cagcagcagctccgcc

SEQ ID NO: 79266 - DNA, 20 bp, Homo sapiens
aagaatggatagagaactca

SEQ ID NO: 79267 - DNA, 22 bp, Homo sapiens
gaggctaagtagtcccagcaca

SEQ ID NO: 79268 - DNA, 16 bp, Homo sapiens
gacctcctcctggcga

SEQ ID NO: 79269 - DNA, 24 bp, Homo sapiens
aaattttgtatctgataaagagca

SEQ ID NO: 79270 - DNA, 16 bp, Homo sapiens
gcgcttcgattctccg

SEQ ID NO: 79271 - DNA, 16 bp, Homo sapiens
cttctcagcattcgag

SEQ ID NO: 79272 - DNA, 23 bp, Homo sapiens
cgggagcaggggatggcgggcga

SEQ ID NO: 79273 - DNA, 20 bp, Homo sapiens
cttcccaagcccccagggcg

SEQ ID NO: 79274 - DNA, 16 bp, Homo sapiens
aacgcaccgaatagtt

SEQ ID NO: 79275 - DNA, 24 bp, Homo sapiens
gaaaactccccaggaagcctcccc

SEQ ID NO: 79276 - DNA, 22 bp, Homo sapiens
cacggccgcggcccggggtcgg

SEQ ID NO: 79277 - DNA, 22 bp, Homo sapiens
ctgcaaacttcgtcctccagag

SEQ ID NO: 79278 - DNA, 17 bp, Homo sapiens
gagcagcatggagccgg

SEQ ID NO: 79279 - DNA, 23 bp, Homo sapiens
acccacctggatcggcctccgac

SEQ ID NO: 79280 - DNA, 16 bp, Homo sapiens
gaccgcgtgcgctcgg

SEQ ID NO: 79281 - DNA, 22 bp, Homo sapiens
cagcagcgcccgcacctcctct

SEQ ID NO: 79282 - DNA, 18 bp, Homo sapiens
ctcttccgccagcaccgg

SEQ ID NO: 79283 - DNA, 18 bp, Homo sapiens
gctccatgctgctccccg

SEQ ID NO: 79284 - DNA, 22 bp, Homo sapiens
gtccccttgcctggaaagatac

SEQ ID NO: 79285 - DNA, 22 bp, Homo sapiens
actgcgagaaccacatgtctaa

SEQ ID NO: 79286 - DNA, 17 bp, Homo sapiens
tgaggagccagcgtcta

SEQ ID NO: 79287 - DNA, 24 bp, Homo sapiens
cggcggttatctcctcctcctcct

SEQ ID NO: 79288 - DNA, 16 bp, Homo sapiens
cacgggggagtgggca

SEQ ID NO: 79289 - DNA, 20 bp, Homo sapiens
accaaacaaaacaagtgccg

SEQ ID NO: 79290 - DNA, 20 bp, Homo sapiens
ccggattcggcgcgcgtgcg

SEQ ID NO: 79291 - DNA, 23 bp, Homo sapiens
tcttctaggaagcggctgctgcc

SEQ ID NO: 79292 - DNA, 19 bp, Homo sapiens
ctgccgagctcggccctgg

SEQ ID NO: 79293 - DNA, 19 bp, Homo sapiens
cgggcgcccctggcgctgc

SEQ ID NO: 79294 - DNA, 20 bp, Homo sapiens
cccagtctgcagttaagggg

SEQ ID NO: 79295 - DNA, 24 bp, Homo sapiens
gaaaaccctcactcgcggcgggcc

SEQ ID NO: 79296 - DNA, 22 bp, Homo sapiens
gcgctcagggaaggcgggtgcg

SEQ ID NO: 79297 - DNA, 20 bp, Homo sapiens
actggcccgagagctcctta

SEQ ID NO: 79298 - DNA, 16 bp, Homo sapiens
cacagcccagcgaggg

SEQ ID NO: 79299 - DNA, 16 bp, Homo sapiens
accttgtacagatgga

SEQ ID NO: 79300 - DNA, 19 bp, Homo sapiens
tgtcctgtggccctggcga

SEQ ID NO: 79301 - DNA, 24 bp, Homo sapiens
cttctcttctgtcctgattgcaga

SEQ ID NO: 79302 - DNA, 17 bp, Homo sapiens
gacttgagttcgcagct

SEQ ID NO: 79303 - DNA, 16 bp, Homo sapiens
gtccctggacaaagga

SEQ ID NO: 79304 - DNA, 22 bp, Homo sapiens
gctttcaatgccaagacgattc

SEQ ID NO: 79305 - DNA, 18 bp, Homo sapiens
tactttggaactgatgga

SEQ ID NO: 79306 - DNA, 20 bp, Homo sapiens
gtgagttatctcagcagtgt

SEQ ID NO: 79307 - DNA, 23 bp, Homo sapiens
gaaggggcaggctctggggtcca

SEQ ID NO: 79308 - DNA, 18 bp, Homo sapiens
ctgctctgggctcctgga

SEQ ID NO: 79309 - DNA, 21 bp, Homo sapiens
cagcatcctggtacacacact

SEQ ID NO: 79310 - DNA, 18 bp, Homo sapiens
acagacacagacctcaga

SEQ ID NO: 79311 - DNA, 23 bp, Homo sapiens
tggagcagaaatgagtactagga

SEQ ID NO: 79312 - DNA, 18 bp, Homo sapiens
aatgtccagaagcagcag

SEQ ID NO: 79313 - DNA, 24 bp, Homo sapiens
atgacatcccaggcgatcgtgtgg

SEQ ID NO: 79314 - DNA, 19 bp, Homo sapiens
tctcccctgtgaaatacta

SEQ ID NO: 79315 - DNA, 18 bp, Homo sapiens
tgttgtgcaggagctctg

SEQ ID NO: 79316 - DNA, 23 bp, Homo sapiens
ttctgggggttgtttcaaagcaa

SEQ ID NO: 79317 - DNA, 23 bp, Homo sapiens
ctgcaggtcctgggctgagaggc

SEQ ID NO: 79318 - DNA, 22 bp, Homo sapiens
agtgtaaattcggccgctgcct

SEQ ID NO: 79319 - DNA, 21 bp, Homo sapiens
tggaagcaagccctggccggg

SEQ ID NO: 79320 - DNA, 23 bp, Homo sapiens
gagacgagacgctgccagcccat

SEQ ID NO: 79321 - DNA, 23 bp, Homo sapiens
ctgctgccggcacacccctcaga

SEQ ID NO: 79322 - DNA, 17 bp, Homo sapiens
gtgatctccagccttgt

SEQ ID NO: 79323 - DNA, 21 bp, Homo sapiens
gaccctggggcagatatggca

SEQ ID NO: 79324 - DNA, 18 bp, Homo sapiens
ttggcttccatgacacct

SEQ ID NO: 79325 - DNA, 16 bp, Homo sapiens
ttcgttttgcaggaga

SEQ ID NO: 79326 - DNA, 23 bp, Homo sapiens
ctgcatgtgtttggggtgggctc

SEQ ID NO: 79327 - DNA, 24 bp, Homo sapiens
ggacaggagaacgcctctgaccac

SEQ ID NO: 79328 - DNA, 16 bp, Homo sapiens
tgatgggaggcagcag

SEQ ID NO: 79329 - DNA, 24 bp, Homo sapiens
atatgccatctgtgggcagagctc

SEQ ID NO: 79330 - DNA, 23 bp, Homo sapiens
gcaattactgatgtcggcagccg

SEQ ID NO: 79331 - DNA, 21 bp, Homo sapiens
caagctcctctcagcccccca

SEQ ID NO: 79332 - DNA, 22 bp, Homo sapiens
tttgagagctggttcctgttca

SEQ ID NO: 79333 - DNA, 19 bp, Homo sapiens
caccatagtctgtgctctc

SEQ ID NO: 79334 - DNA, 23 bp, Homo sapiens
gaagaagaatttaggttgtcaac

SEQ ID NO: 79335 - DNA, 20 bp, Homo sapiens
cagcagggccgtggggggtt

SEQ ID NO: 79336 - DNA, 16 bp, Homo sapiens
ttaagccaaccgttgg

SEQ ID NO: 79337 - DNA, 22 bp, Homo sapiens
cagcccatcctccgaagtgaat

SEQ ID NO: 79338 - DNA, 18 bp, Homo sapiens
gacaggctttctgaatct

SEQ ID NO: 79339 - DNA, 19 bp, Homo sapiens
tgcgcttcctccacttctc

SEQ ID NO: 79340 - DNA, 19 bp, Homo sapiens
cactgaagcatatttctga

SEQ ID NO: 79341 - DNA, 22 bp, Homo sapiens
gtcccagaccagtaatgccttc

SEQ ID NO: 79342 - DNA, 20 bp, Homo sapiens
ctcagttgccctctgacgta

SEQ ID NO: 79343 - DNA, 21 bp, Homo sapiens
gaaaccatgtgtgaagtagat

SEQ ID NO: 79344 - DNA, 17 bp, Homo sapiens
tcccaaagactcttcag

SEQ ID NO: 79345 - DNA, 20 bp, Homo sapiens
gcttctctgagcagttcaga

SEQ ID NO: 79346 - DNA, 16 bp, Homo sapiens
ggctgggaaaagcatg

SEQ ID NO: 79347 - DNA, 22 bp, Homo sapiens
tctcatatcaaaatccacagaa

SEQ ID NO: 79348 - DNA, 19 bp, Homo sapiens
ctttccttacacttctcca

SEQ ID NO: 79349 - DNA, 24 bp, Homo sapiens
gttctgtctccctcatgctgtaga

SEQ ID NO: 79350 - DNA, 19 bp, Homo sapiens
tgttcatgctctttggatt

SEQ ID NO: 79351 - DNA, 21 bp, Homo sapiens
ctcttcccaggaaatcattct

SEQ ID NO: 79352 - DNA, 22 bp, Homo sapiens
tgggtcttttttgggcagagga

SEQ ID NO: 79353 - DNA, 19 bp, Homo sapiens
cagcagcaccatggcaaga

SEQ ID NO: 79354 - DNA, 18 bp, Homo sapiens
ttgggagcttatttttca

SEQ ID NO: 79355 - DNA, 25 bp, Homo sapiens
agatcttgatttatgttaagttaaa

SEQ ID NO: 79356 - DNA, 17 bp, Homo sapiens
tgctttgtagaagctct

SEQ ID NO: 79357 - DNA, 19 bp, Homo sapiens
tctttgtgagcaaaacagt

SEQ ID NO: 79358 - DNA, 16 bp, Homo sapiens
ggtgtgcactcctgga

SEQ ID NO: 79359 - DNA, 20 bp, Homo sapiens
aatactctcaacagcgtctt

SEQ ID NO: 79360 - DNA, 16 bp, Homo sapiens
catgtttgccggatta

SEQ ID NO: 79361 - DNA, 18 bp, Homo sapiens
tgcttgctttctccagag

SEQ ID NO: 79362 - DNA, 16 bp, Homo sapiens
tgctgaagcttatggc

SEQ ID NO: 79363 - DNA, 18 bp, Homo sapiens
atgatttccagggcccca

SEQ ID NO: 79364 - DNA, 19 bp, Homo sapiens
ttgagtttttacctctaat

SEQ ID NO: 79365 - DNA, 16 bp, Homo sapiens
caagcagcctgccacc

SEQ ID NO: 79366 - DNA, 16 bp, Homo sapiens
tccccatgatacagcc

SEQ ID NO: 79367 - DNA, 18 bp, Homo sapiens
gcaagtttctgagaaagt

SEQ ID NO: 79368 - DNA, 22 bp, Homo sapiens
aaatggaaccttttttacatca

SEQ ID NO: 79369 - DNA, 18 bp, Homo sapiens
agtatgccagttttctgg

SEQ ID NO: 79370 - DNA, 23 bp, Homo sapiens
tctcatcaacaacccggaatatg

SEQ ID NO: 79371 - DNA, 16 bp, Homo sapiens
agccccctatgttagt

SEQ ID NO: 79372 - DNA, 18 bp, Homo sapiens
ctgagaaggatcgaatgc

SEQ ID NO: 79373 - DNA, 16 bp, Homo sapiens
ggttccaattgctctt

SEQ ID NO: 79374 - DNA, 16 bp, Homo sapiens
cagccttgaaaaagca

SEQ ID NO: 79375 - DNA, 22 bp, Homo sapiens
aaatgattccaagcatctcctt

SEQ ID NO: 79376 - DNA, 22 bp, Homo sapiens
ttctgaaaggaagaagatttct

SEQ ID NO: 79377 - DNA, 23 bp, Homo sapiens
atcttttataaagcattcgatcc

SEQ ID NO: 79378 - DNA, 23 bp, Homo sapiens
tgaactttttttaatcttctttt

SEQ ID NO: 79379 - DNA, 16 bp, Homo sapiens
aagatgcagcattgct

SEQ ID NO: 79380 - DNA, 23 bp, Homo sapiens
attagccactgctgtgaccatga

SEQ ID NO: 79381 - DNA, 16 bp, Homo sapiens
cagctgacatggggag

SEQ ID NO: 79382 - DNA, 19 bp, Homo sapiens
caccacacctggccgggat

SEQ ID NO: 79383 - DNA, 18 bp, Homo sapiens
ggacgtgaacctcaggaa

SEQ ID NO: 79384 - DNA, 23 bp, Homo sapiens
aaaaacgtttggacactgctgtc

SEQ ID NO: 79385 - DNA, 21 bp, Homo sapiens
cacttattaccctgacagatg

SEQ ID NO: 79386 - DNA, 24 bp, Homo sapiens
aaaaacgacgcaggatgacaggaa

SEQ ID NO: 79387 - DNA, 20 bp, Homo sapiens
tttcttatttcttccataga

SEQ ID NO: 79388 - DNA, 22 bp, Homo sapiens
gcctcaaagaactctggctgga

SEQ ID NO: 79389 - DNA, 21 bp, Homo sapiens
ctttttagcatgaaggttttt

SEQ ID NO: 79390 - DNA, 19 bp, Homo sapiens
ccaccagggggtcaacatc

SEQ ID NO: 79391 - DNA, 20 bp, Homo sapiens
gatggtgttagagtcattct

SEQ ID NO: 79392 - DNA, 17 bp, Homo sapiens
gccactcgctcgggagc

SEQ ID NO: 79393 - DNA, 17 bp, Homo sapiens
aaactcaccaatttgct

SEQ ID NO: 79394 - DNA, 19 bp, Homo sapiens
tagcgtctgaactcagaga

SEQ ID NO: 79395 - DNA, 18 bp, Homo sapiens
aactgaacatccatttcc

SEQ ID NO: 79396 - DNA, 17 bp, Homo sapiens
cctgtttgcagcgtgag

SEQ ID NO: 79397 - DNA, 20 bp, Homo sapiens
tttgaaacctgagaagaagg

SEQ ID NO: 79398 - DNA, 17 bp, Homo sapiens
ggttgggggaatctcaa

SEQ ID NO: 79399 - DNA, 22 bp, Homo sapiens
ccattaagatgattctctctga

SEQ ID NO: 79400 - DNA, 19 bp, Homo sapiens
tagtaaatgtgacatggca

SEQ ID NO: 79401 - DNA, 20 bp, Homo sapiens
gtatgcacctatagattact

SEQ ID NO: 79402 - DNA, 25 bp, Homo sapiens
aagagataaacaaagaaaagttaaa

SEQ ID NO: 79403 - DNA, 16 bp, Homo sapiens
actttcagcactcaga

SEQ ID NO: 79404 - DNA, 17 bp, Homo sapiens
tttgctgatggcacatt

SEQ ID NO: 79405 - DNA, 21 bp, Homo sapiens
ggcacttgcatttacttttaa

SEQ ID NO: 79406 - DNA, 16 bp, Homo sapiens
agcaaaccaggatagt

SEQ ID NO: 79407 - DNA, 16 bp, Homo sapiens
catagagaccaccccc

SEQ ID NO: 79408 - DNA, 20 bp, Homo sapiens
agagcaacttctttatcaaa

SEQ ID NO: 79409 - DNA, 22 bp, Homo sapiens
atttctcttttacactttgaat

SEQ ID NO: 79410 - DNA, 22 bp, Homo sapiens
aactttttactcagcaagataa

SEQ ID NO: 79411 - DNA, 18 bp, Homo sapiens
ttaacaaagaaccacaga

SEQ ID NO: 79412 - DNA, 17 bp, Homo sapiens
gaactggattccacccc

SEQ ID NO: 79413 - DNA, 24 bp, Homo sapiens
attaagttttcctttttgtagatg

SEQ ID NO: 79414 - DNA, 16 bp, Homo sapiens
ttcaaagaagtgcaga

SEQ ID NO: 79415 - DNA, 25 bp, Homo sapiens
gagattttcctaaatataatgttta

SEQ ID NO: 79416 - DNA, 17 bp, Homo sapiens
ttgtccagaattctgtg

SEQ ID NO: 79417 - DNA, 18 bp, Homo sapiens
tggcgagaaagcaaatgt

SEQ ID NO: 79418 - DNA, 20 bp, Homo sapiens
gaattttttggctttcatct

SEQ ID NO: 79419 - DNA, 18 bp, Homo sapiens
aggaagccatctttgtaa

SEQ ID NO: 79420 - DNA, 17 bp, Homo sapiens
gattccccacaattggt

SEQ ID NO: 79421 - DNA, 20 bp, Homo sapiens
aaactaggagaaaggttcat

SEQ ID NO: 79422 - DNA, 17 bp, Homo sapiens
atgcctttactgaccaa

SEQ ID NO: 79423 - DNA, 17 bp, Homo sapiens
tgagaggacacgttttt

SEQ ID NO: 79424 - DNA, 17 bp, Homo sapiens
aacaagaagcattcacg

SEQ ID NO: 79425 - DNA, 17 bp, Homo sapiens
ttgccaacagttgacca

SEQ ID NO: 79426 - DNA, 25 bp, Homo sapiens
tttgaattacttacctaaagatctt

SEQ ID NO: 79427 - DNA, 18 bp, Homo sapiens
ataaatcggagactagga

SEQ ID NO: 79428 - DNA, 17 bp, Homo sapiens
ccaggagttcctaagga

SEQ ID NO: 79429 - DNA, 20 bp, Homo sapiens
cggcacttcagtcaatacca

SEQ ID NO: 79430 - DNA, 16 bp, Homo sapiens
gtatgggatcaggctt

SEQ ID NO: 79431 - DNA, 18 bp, Homo sapiens
ggtagagtccctgaagtc

SEQ ID NO: 79432 - DNA, 20 bp, Homo sapiens
tccaagatggctcaagattc

SEQ ID NO: 79433 - DNA, 23 bp, Homo sapiens
tctctttcaaggcttcatacatc

SEQ ID NO: 79434 - DNA, 24 bp, Homo sapiens
gaccatttccttcagtgctggaca

SEQ ID NO: 79435 - DNA, 20 bp, Homo sapiens
tgctgggtttccaaagtgga

SEQ ID NO: 79436 - DNA, 20 bp, Homo sapiens
aaagagccttttagaaatgc

SEQ ID NO: 79437 - DNA, 21 bp, Homo sapiens
tgataatcacaagaaagatct

SEQ ID NO: 79438 - DNA, 19 bp, Homo sapiens
gacgtggaatgcgaggaga

SEQ ID NO: 79439 - DNA, 17 bp, Homo sapiens
gtgggatgtgcccgagc

SEQ ID NO: 79440 - DNA, 20 bp, Homo sapiens
ctttccacgtccggtgtgag

SEQ ID NO: 79441 - DNA, 24 bp, Homo sapiens
aaccttgtcctcctctttgcctgg

SEQ ID NO: 79442 - DNA, 23 bp, Homo sapiens
ccgagggggactctgcccaggct

SEQ ID NO: 79443 - DNA, 24 bp, Homo sapiens
gttggagctgcttccccggggcct

SEQ ID NO: 79444 - DNA, 22 bp, Homo sapiens
tctgcctccgtgactgtcgccg

SEQ ID NO: 79445 - DNA, 24 bp, Homo sapiens
caccttcgaatccctcctctcaca

SEQ ID NO: 79446 - DNA, 22 bp, Homo sapiens
gtccactgccatgggcagctcc

SEQ ID NO: 79447 - DNA, 22 bp, Homo sapiens
acaggccgtggtcagtctcagg

SEQ ID NO: 79448 - DNA, 21 bp, Homo sapiens
aatagggcccgctggggccct

SEQ ID NO: 79449 - DNA, 17 bp, Homo sapiens
ggacaggcggcgggtgc

SEQ ID NO: 79450 - DNA, 19 bp, Homo sapiens
ctacagaccgcgcagagac

SEQ ID NO: 79451 - DNA, 23 bp, Homo sapiens
gatgggctggcagtagccgggca

SEQ ID NO: 79452 - DNA, 24 bp, Homo sapiens
cctcccggacggcaaggccagcag

SEQ ID NO: 79453 - DNA, 23 bp, Homo sapiens
gtgagaacgggccccgcgagggc

SEQ ID NO: 79454 - DNA, 19 bp, Homo sapiens
caggcatcacccaccctcg

SEQ ID NO: 79455 - DNA, 20 bp, Homo sapiens
tcagtagaaatttcaaaagc

SEQ ID NO: 79456 - DNA, 24 bp, Homo sapiens
ccatgcccagcctgggataccacc

SEQ ID NO: 79457 - DNA, 24 bp, Homo sapiens
ttctctgggggggtccctgcgggg

SEQ ID NO: 79458 - DNA, 18 bp, Homo sapiens
gactgagtctttggtgaa

SEQ ID NO: 79459 - DNA, 16 bp, Homo sapiens
gctgtctcgggttcga

SEQ ID NO: 79460 - DNA, 18 bp, Homo sapiens
gaggttattagaaggaca

SEQ ID NO: 79461 - DNA, 24 bp, Homo sapiens
gagttaaatactggttatttccta

SEQ ID NO: 79462 - DNA, 16 bp, Homo sapiens
cctgcccaccaagtga

SEQ ID NO: 79463 - DNA, 24 bp, Homo sapiens
cctgtgtgatgtgctgctcagcag

SEQ ID NO: 79464 - DNA, 24 bp, Homo sapiens
agacgacagtgtcaggcctcagcg

SEQ ID NO: 79465 - DNA, 17 bp, Homo sapiens
gtgggaagacccctccc

SEQ ID NO: 79466 - DNA, 16 bp, Homo sapiens
ccgcccggccacacgc

SEQ ID NO: 79467 - DNA, 24 bp, Homo sapiens
aagacggggttttctgtggcttcc

SEQ ID NO: 79468 - DNA, 16 bp, Homo sapiens
cttgaaccgcctgccc

SEQ ID NO: 79469 - DNA, 16 bp, Homo sapiens
agtgccgaagctcctc

SEQ ID NO: 79470 - DNA, 18 bp, Homo sapiens
aggtaaatggacaagaac

SEQ ID NO: 79471 - DNA, 16 bp, Homo sapiens
gaggaatcagacccgc

SEQ ID NO: 79472 - DNA, 16 bp, Homo sapiens
ggaacagaggcccctg

SEQ ID NO: 79473 - DNA, 18 bp, Homo sapiens
gggtggctcaggggaggg

SEQ ID NO: 79474 - DNA, 23 bp, Homo sapiens
ctgaaggtcctccaggtggtaga

SEQ ID NO: 79475 - DNA, 20 bp, Homo sapiens
cagtacaccgaagaggaaaa

SEQ ID NO: 79476 - DNA, 16 bp, Homo sapiens
ggcgttctcaatgggc

SEQ ID NO: 79477 - DNA, 20 bp, Homo sapiens
agtggggaggcacctaagta

SEQ ID NO: 79478 - DNA, 21 bp, Homo sapiens
cgtgttcccgtttcctcttga

SEQ ID NO: 79479 - DNA, 24 bp, Homo sapiens
ccggcctacacgtgggacatcccc

SEQ ID NO: 79480 - DNA, 16 bp, Homo sapiens
atgctgctgtgtcggg

SEQ ID NO: 79481 - DNA, 17 bp, Homo sapiens
cacgggaagcaaaacca

SEQ ID NO: 79482 - DNA, 23 bp, Homo sapiens
tgtgttgaatgtgaactgcggtt

SEQ ID NO: 79483 - DNA, 19 bp, Homo sapiens
gagtggagatgagtttcac

SEQ ID NO: 79484 - DNA, 16 bp, Homo sapiens
gggagtgctgatgctg

SEQ ID NO: 79485 - DNA, 24 bp, Homo sapiens
ctgatccacccgcctcggcctcct

SEQ ID NO: 79486 - DNA, 23 bp, Homo sapiens
gcccaatcacaatgatttctaaa

SEQ ID NO: 79487 - DNA, 17 bp, Homo sapiens
tcttgtgaacatcctca

SEQ ID NO: 79488 - DNA, 20 bp, Homo sapiens
agtcgaactcagatcccgcc

SEQ ID NO: 79489 - DNA, 23 bp, Homo sapiens
gttctgagagcttgtaacattta

SEQ ID NO: 79490 - DNA, 19 bp, Homo sapiens
ggacgggtgcaaacatgtg

SEQ ID NO: 79491 - DNA, 21 bp, Homo sapiens
ctgctagttgagctactctga

SEQ ID NO: 79492 - DNA, 18 bp, Homo sapiens
ccgtcagaaaggcctgtg

SEQ ID NO: 79493 - DNA, 20 bp, Homo sapiens
gagggaaaggaatccagaaa

SEQ ID NO: 79494 - DNA, 24 bp, Homo sapiens
atcctgatcgcttctgttggcata

SEQ ID NO: 79495 - DNA, 23 bp, Homo sapiens
cttttcactgccacgcacaggga

SEQ ID NO: 79496 - DNA, 20 bp, Homo sapiens
gagctgttcggcatgatggg

SEQ ID NO: 79497 - DNA, 24 bp, Homo sapiens
gaggaaatgggttgttttttcaca

SEQ ID NO: 79498 - DNA, 16 bp, Homo sapiens
ccactgaccactgtgt

SEQ ID NO: 79499 - DNA, 24 bp, Homo sapiens
aacggtgaactccactcctatgcc

SEQ ID NO: 79500 - DNA, 22 bp, Homo sapiens
ctgaaccgaggacaccttagcc

SEQ ID NO: 79501 - DNA, 17 bp, Homo sapiens
gattccgatgaggccca

SEQ ID NO: 79502 - DNA, 23 bp, Homo sapiens
ttaggcagtaaaggcagtgtcca

SEQ ID NO: 79503 - DNA, 24 bp, Homo sapiens
tagaggttctaccttaaccatgga

SEQ ID NO: 79504 - DNA, 16 bp, Homo sapiens
ctcgtgtgcgctgtct

SEQ ID NO: 79505 - DNA, 20 bp, Homo sapiens
gcaagctataccctcctcca

SEQ ID NO: 79506 - DNA, 18 bp, Homo sapiens
gtacatcggcctccgcca

SEQ ID NO: 79507 - DNA, 23 bp, Homo sapiens
gagctatgctgaaaggaatttga

SEQ ID NO: 79508 - DNA, 17 bp, Homo sapiens
cgagcctggggctgtcc

SEQ ID NO: 79509 - DNA, 16 bp, Homo sapiens
ccgtccaggggttcag

SEQ ID NO: 79510 - DNA, 16 bp, Homo sapiens
ggacacctcagacttt

SEQ ID NO: 79511 - DNA, 18 bp, Homo sapiens
gctgatgaacagcagcag

SEQ ID NO: 79512 - DNA, 20 bp, Homo sapiens
ttctctgtccagtcccggca

SEQ ID NO: 79513 - DNA, 17 bp, Homo sapiens
cgttggggtaactggac

SEQ ID NO: 79514 - DNA, 20 bp, Homo sapiens
ctctttccattgaaactgtg

SEQ ID NO: 79515 - DNA, 17 bp, Homo sapiens
caattgcctccacaaag

SEQ ID NO: 79516 - DNA, 21 bp, Homo sapiens
cattgtttgttctttgtatca

SEQ ID NO: 79517 - DNA, 18 bp, Homo sapiens
gcatactcgatgggctct

SEQ ID NO: 79518 - DNA, 24 bp, Homo sapiens
cctcgtctcccagagttttaaacg

SEQ ID NO: 79519 - DNA, 16 bp, Homo sapiens
ggccacaccgaccaga

SEQ ID NO: 79520 - DNA, 22 bp, Homo sapiens
ctgggtagcgtcaacggatgaa

SEQ ID NO: 79521 - DNA, 19 bp, Homo sapiens
tacctgacggcttgggtca

SEQ ID NO: 79522 - DNA, 19 bp, Homo sapiens
agttcccagacctcccgat

SEQ ID NO: 79523 - DNA, 16 bp, Homo sapiens
actaaacagcgtctgg

SEQ ID NO: 79524 - DNA, 16 bp, Homo sapiens
ctttgtcgtggaccca

SEQ ID NO: 79525 - DNA, 22 bp, Homo sapiens
ctctcaaggcagaagtgtgttt

SEQ ID NO: 79526 - DNA, 24 bp, Homo sapiens
catacgcgacggggtcgttgctga

SEQ ID NO: 79527 - DNA, 20 bp, Homo sapiens
caacagtaggcattctattc

SEQ ID NO: 79528 - DNA, 20 bp, Homo sapiens
aatgatgccatctgcatcca

SEQ ID NO: 79529 - DNA, 21 bp, Homo sapiens
tggtgggaggaggtgaattag

SEQ ID NO: 79530 - DNA, 16 bp, Homo sapiens
actcctggtgcaaacc

SEQ ID NO: 79531 - DNA, 17 bp, Homo sapiens
ctccagagagcacaggg

SEQ ID NO: 79532 - DNA, 22 bp, Homo sapiens
ggaaaccgggaaaatcatgcca

SEQ ID NO: 79533 - DNA, 16 bp, Homo sapiens
ccctggaagcgccctc

SEQ ID NO: 79534 - DNA, 22 bp, Homo sapiens
gttataatgtgttacaatcatt

SEQ ID NO: 79535 - DNA, 23 bp, Homo sapiens
tcgatgggcttatcgcggctgcc

SEQ ID NO: 79536 - DNA, 16 bp, Homo sapiens
ctgctcagtctcctca

SEQ ID NO: 79537 - DNA, 21 bp, Homo sapiens
ccattcttgtaattgtttggc

SEQ ID NO: 79538 - DNA, 16 bp, Homo sapiens
caaagtggatgtggga

SEQ ID NO: 79539 - DNA, 17 bp, Homo sapiens
ccaaaatgtggctgcac

SEQ ID NO: 79540 - DNA, 18 bp, Homo sapiens
tccatgaaacacgtcagt

SEQ ID NO: 79541 - DNA, 17 bp, Homo sapiens
cgacctacacaggagtt

SEQ ID NO: 79542 - DNA, 21 bp, Homo sapiens
gaacctgttgaagctgaacac

SEQ ID NO: 79543 - DNA, 22 bp, Homo sapiens
ctacaacatgtatatagtcacc

SEQ ID NO: 79544 - DNA, 21 bp, Homo sapiens
accctgaagccagtctctgaa

SEQ ID NO: 79545 - DNA, 17 bp, Homo sapiens
ctcgggaaaccagagaa

SEQ ID NO: 79546 - DNA, 24 bp, Homo sapiens
ccaacatgacatacttcacgttac

SEQ ID NO: 79547 - DNA, 16 bp, Homo sapiens
gggtcagcctttatgg

SEQ ID NO: 79548 - DNA, 21 bp, Homo sapiens
attcgggtagtctgctttctg

SEQ ID NO: 79549 - DNA, 16 bp, Homo sapiens
gggtctgaccttgtgc

SEQ ID NO: 79550 - DNA, 21 bp, Homo sapiens
gtgcagcaataaagtcatatt

SEQ ID NO: 79551 - DNA, 20 bp, Homo sapiens
aaacaaggtattaactagac

SEQ ID NO: 79552 - DNA, 16 bp, Homo sapiens
cactcgggtggtgcca

SEQ ID NO: 79553 - DNA, 20 bp, Homo sapiens
atcctttttcctatgggaga

SEQ ID NO: 79554 - DNA, 22 bp, Homo sapiens
gccctatgctctaaaagcattg

SEQ ID NO: 79555 - DNA, 17 bp, Homo sapiens
ttttgctgagaagcact

SEQ ID NO: 79556 - DNA, 22 bp, Homo sapiens
ttttttttttaaggaaaaagaa

SEQ ID NO: 79557 - DNA, 16 bp, Homo sapiens
ttctccgactccagcc

SEQ ID NO: 79558 - DNA, 22 bp, Homo sapiens
ttctgttatttttttgaagaca

SEQ ID NO: 79559 - DNA, 16 bp, Homo sapiens
aggacaccctcagctg

SEQ ID NO: 79560 - DNA, 23 bp, Homo sapiens
ggtttcaagaggaaaggagcata

SEQ ID NO: 79561 - DNA, 24 bp, Homo sapiens
cccacacgcacgtgtactacacca

SEQ ID NO: 79562 - DNA, 24 bp, Homo sapiens
tacaggggggctcgaggcagtgga

SEQ ID NO: 79563 - DNA, 23 bp, Homo sapiens
tgaaacgcagattaccatgcagt

SEQ ID NO: 79564 - DNA, 23 bp, Homo sapiens
ctggtgctctctgggctctggca

SEQ ID NO: 79565 - DNA, 20 bp, Homo sapiens
cacacgacaatacccgctac

SEQ ID NO: 79566 - DNA, 23 bp, Homo sapiens
cagagatctcggagcgcggctca

SEQ ID NO: 79567 - DNA, 18 bp, Homo sapiens
cccctcctttcagcccct

SEQ ID NO: 79568 - DNA, 16 bp, Homo sapiens
cggagctggacagtgg

SEQ ID NO: 79569 - DNA, 17 bp, Homo sapiens
tggcagaatgaaagcac

SEQ ID NO: 79570 - DNA, 19 bp, Homo sapiens
tgtagggaggtggggggct

SEQ ID NO: 79571 - DNA, 18 bp, Homo sapiens
atgtgatgtttctctcct

SEQ ID NO: 79572 - DNA, 24 bp, Homo sapiens
gttcaacctgaatcactctgctga

SEQ ID NO: 79573 - DNA, 20 bp, Homo sapiens
cccctagggaagcagcctct

SEQ ID NO: 79574 - DNA, 19 bp, Homo sapiens
agcatggatttatatcgac

SEQ ID NO: 79575 - DNA, 19 bp, Homo sapiens
cccgttacccacattcctt

SEQ ID NO: 79576 - DNA, 16 bp, Homo sapiens
cggtagtagtggtgtt

SEQ ID NO: 79577 - DNA, 19 bp, Homo sapiens
ctgcacccaatcaaaaggc

SEQ ID NO: 79578 - DNA, 16 bp, Homo sapiens
tcctctgattgggcgg

SEQ ID NO: 79579 - DNA, 16 bp, Homo sapiens
tcctgtcctcgcgtcg

SEQ ID NO: 79580 - DNA, 19 bp, Homo sapiens
tcaaatgcttcaagaggaa

SEQ ID NO: 79581 - DNA, 18 bp, Homo sapiens
ccatggcaaaattgaaca

SEQ ID NO: 79582 - DNA, 23 bp, Homo sapiens
gtcagggttataagcttaaagca

SEQ ID NO: 79583 - DNA, 18 bp, Homo sapiens
ttcatggccgcgttaatc

SEQ ID NO: 79584 - DNA, 22 bp, Homo sapiens
tttcacttcataagtaactgaa

SEQ ID NO: 79585 - DNA, 19 bp, Homo sapiens
ctgaagcgcacaggagcca

SEQ ID NO: 79586 - DNA, 17 bp, Homo sapiens
tcagtgccccgttcagg

SEQ ID NO: 79587 - DNA, 16 bp, Homo sapiens
tccagtgcagctctca

SEQ ID NO: 79588 - DNA, 20 bp, Homo sapiens
ccgcagagcgggaattggga

SEQ ID NO: 79589 - DNA, 21 bp, Homo sapiens
gctgtaataacagttgtgtta

SEQ ID NO: 79590 - DNA, 20 bp, Homo sapiens
atggacgtgagggccacgct

SEQ ID NO: 79591 - DNA, 21 bp, Homo sapiens
taatgctggtgttagggggta

SEQ ID NO: 79592 - DNA, 20 bp, Homo sapiens
ttatttcattgactggcagc

SEQ ID NO: 79593 - DNA, 18 bp, Homo sapiens
gatgtttttcttctggcc

SEQ ID NO: 79594 - DNA, 22 bp, Homo sapiens
ttactgggtcagactgaggaaa

SEQ ID NO: 79595 - DNA, 16 bp, Homo sapiens
gccaccatcctctgtt

SEQ ID NO: 79596 - DNA, 17 bp, Homo sapiens
cccaaagctctcttctt

SEQ ID NO: 79597 - DNA, 16 bp, Homo sapiens
gtggcagagtcctaac

SEQ ID NO: 79598 - DNA, 24 bp, Homo sapiens
ctgtttcactgaaggcgtgggcca

SEQ ID NO: 79599 - DNA, 19 bp, Homo sapiens
ggacgtcaagtgaattctt

SEQ ID NO: 79600 - DNA, 19 bp, Homo sapiens
tgctcattgatcggaattt

SEQ ID NO: 79601 - DNA, 24 bp, Homo sapiens
tggaaaaggctgcaagacccttcc

SEQ ID NO: 79602 - DNA, 20 bp, Homo sapiens
gtggggctggctggcgtcct

SEQ ID NO: 79603 - DNA, 24 bp, Homo sapiens
ctgggccaagcctgggggccgggt

SEQ ID NO: 79604 - DNA, 16 bp, Homo sapiens
cgcctatgcctgtcta

SEQ ID NO: 79605 - DNA, 24 bp, Homo sapiens
cctgagttgttgcagcgttaaagg

SEQ ID NO: 79606 - DNA, 20 bp, Homo sapiens
tagaatcacaacacattcta

SEQ ID NO: 79607 - DNA, 18 bp, Homo sapiens
ctgacagtgcaaccagca

SEQ ID NO: 79608 - DNA, 23 bp, Homo sapiens
gtaaagttttgttgttgttggat

SEQ ID NO: 79609 - DNA, 21 bp, Homo sapiens
tcccagcgcagcatggttaga

SEQ ID NO: 79610 - DNA, 23 bp, Homo sapiens
ttttaaaccactgtgaagccacg

SEQ ID NO: 79611 - DNA, 18 bp, Homo sapiens
ctggacgacatcctgaaa

SEQ ID NO: 79612 - DNA, 19 bp, Homo sapiens
gttaagaagcaggagcagt

SEQ ID NO: 79613 - DNA, 18 bp, Homo sapiens
tggttcatcagagtgtcg

SEQ ID NO: 79614 - DNA, 17 bp, Homo sapiens
caggagcatggcatcga

SEQ ID NO: 79615 - DNA, 16 bp, Homo sapiens
gcttgtggaagtgttc

SEQ ID NO: 79616 - DNA, 24 bp, Homo sapiens
cactgacgtcagagaaggatttca

SEQ ID NO: 79617 - DNA, 22 bp, Homo sapiens
tttttaaaaaatgcatcagaaa

SEQ ID NO: 79618 - DNA, 19 bp, Homo sapiens
cttttgagtggagttctgt

SEQ ID NO: 79619 - DNA, 20 bp, Homo sapiens
atcccaggattttcaatatc

SEQ ID NO: 79620 - DNA, 18 bp, Homo sapiens
gacaaagcggcagccatc

SEQ ID NO: 79621 - DNA, 19 bp, Homo sapiens
atgttttgaaaataaagcg

SEQ ID NO: 79622 - DNA, 18 bp, Homo sapiens
tcccaagcaaatgtacga

SEQ ID NO: 79623 - DNA, 21 bp, Homo sapiens
gaagaattgcataaccagcga

SEQ ID NO: 79624 - DNA, 19 bp, Homo sapiens
ccttcccttggactgtgct

SEQ ID NO: 79625 - DNA, 21 bp, Homo sapiens
gtcctctgccaggcctccagg

SEQ ID NO: 79626 - DNA, 21 bp, Homo sapiens
gggagctggctggggatttga

SEQ ID NO: 79627 - DNA, 22 bp, Homo sapiens
agacatactcgtaccccttgaa

SEQ ID NO: 79628 - DNA, 19 bp, Homo sapiens
tggtcccattttaatggaa

SEQ ID NO: 79629 - DNA, 21 bp, Homo sapiens
agtctgctactatttcttaat

SEQ ID NO: 79630 - DNA, 22 bp, Homo sapiens
atgcactggcaggaggagttga

SEQ ID NO: 79631 - DNA, 19 bp, Homo sapiens
aatacaaatacacttgccg

SEQ ID NO: 79632 - DNA, 17 bp, Homo sapiens
ttgatatggcccttgtt

SEQ ID NO: 79633 - DNA, 20 bp, Homo sapiens
ctacagggcatagattgtcc

SEQ ID NO: 79634 - DNA, 16 bp, Homo sapiens
ggcatgtgacctgcct

SEQ ID NO: 79635 - DNA, 23 bp, Homo sapiens
tgttcttgactgtgccacccaca

SEQ ID NO: 79636 - DNA, 19 bp, Homo sapiens
cccattagccttgctatta

SEQ ID NO: 79637 - DNA, 22 bp, Homo sapiens
agccatgacatccaccattcaa

SEQ ID NO: 79638 - DNA, 24 bp, Homo sapiens
acagcaaaatttagctctataaat

SEQ ID NO: 79639 - DNA, 17 bp, Homo sapiens
ctcaatccggccgatcc

SEQ ID NO: 79640 - DNA, 24 bp, Homo sapiens
tgaaatgttaaaaatgaaaataat

SEQ ID NO: 79641 - DNA, 16 bp, Homo sapiens
gacagctgggaggaaa

SEQ ID NO: 79642 - DNA, 16 bp, Homo sapiens
cttctgagagcgctca

SEQ ID NO: 79643 - DNA, 17 bp, Homo sapiens
ggacaaacttcgaccct

SEQ ID NO: 79644 - DNA, 20 bp, Homo sapiens
gggctgtggcggggcagtct

SEQ ID NO: 79645 - DNA, 20 bp, Homo sapiens
aaggctcttttcatggtctc

SEQ ID NO: 79646 - DNA, 24 bp, Homo sapiens
gaccaacctcagccttattcagca

SEQ ID NO: 79647 - DNA, 16 bp, Homo sapiens
acctcctacaaggtgg

SEQ ID NO: 79648 - DNA, 19 bp, Homo sapiens
ctcttccaggaattccaaa

SEQ ID NO: 79649 - DNA, 18 bp, Homo sapiens
cagatatgctggaaagga

SEQ ID NO: 79650 - DNA, 16 bp, Homo sapiens
ggggcgaaattacagt

SEQ ID NO: 79651 - DNA, 25 bp, Homo sapiens
atttcaatgtttttatttcttgttc

SEQ ID NO: 79652 - DNA, 20 bp, Homo sapiens
aactttgacagataatagaa

SEQ ID NO: 79653 - DNA, 24 bp, Homo sapiens
gcaacattagaaacactgagtcct

SEQ ID NO: 79654 - DNA, 16 bp, Homo sapiens
tcaggaacaccccagt

SEQ ID NO: 79655 - DNA, 16 bp, Homo sapiens
tgctgtcccagactgt

SEQ ID NO: 79656 - DNA, 18 bp, Homo sapiens
agcttatcacagaaacag

SEQ ID NO: 79657 - DNA, 18 bp, Homo sapiens
tcaaacaagggtaaagat

SEQ ID NO: 79658 - DNA, 17 bp, Homo sapiens
ttttgtctctgcttttc

SEQ ID NO: 79659 - DNA, 16 bp, Homo sapiens
aaggcacactactggg

SEQ ID NO: 79660 - DNA, 25 bp, Homo sapiens
ttctttttatatgttctatcatttc

SEQ ID NO: 79661 - DNA, 18 bp, Homo sapiens
acctgatccatgtaacct

SEQ ID NO: 79662 - DNA, 16 bp, Homo sapiens
tggcaaaagctctgct

SEQ ID NO: 79663 - DNA, 19 bp, Homo sapiens
tccaatttccactgcctaa

SEQ ID NO: 79664 - DNA, 20 bp, Homo sapiens
gatgaaaaaaatcctttcat

SEQ ID NO: 79665 - DNA, 16 bp, Homo sapiens
tacaacacctggactc

SEQ ID NO: 79666 - DNA, 22 bp, Homo sapiens
tccagggcaacttcatttacta

SEQ ID NO: 79667 - DNA, 24 bp, Homo sapiens
tttaatcctcaactcatgatacag

SEQ ID NO: 79668 - DNA, 20 bp, Homo sapiens
cctgctgctcattagtaggt

SEQ ID NO: 79669 - DNA, 20 bp, Homo sapiens
cgagtaagtcgtgaattaaa

SEQ ID NO: 79670 - DNA, 19 bp, Homo sapiens
gacacggctggcctggagt

SEQ ID NO: 79671 - DNA, 24 bp, Homo sapiens
ataaaacatgagtttgcagtgatt

SEQ ID NO: 79672 - DNA, 23 bp, Homo sapiens
ttagcaccttcttctttaggggt

SEQ ID NO: 79673 - DNA, 20 bp, Homo sapiens
gtctcatgactagagttcat

SEQ ID NO: 79674 - DNA, 22 bp, Homo sapiens
ttctccaatcttctggcgagta

SEQ ID NO: 79675 - DNA, 19 bp, Homo sapiens
tgaagttaacattgccatt

SEQ ID NO: 79676 - DNA, 22 bp, Homo sapiens
gcgggcctggctcccggccagg

SEQ ID NO: 79677 - DNA, 16 bp, Homo sapiens
ggattaaaagcagcga

SEQ ID NO: 79678 - DNA, 21 bp, Homo sapiens
ggggtttcgccggccgcagcc

SEQ ID NO: 79679 - DNA, 16 bp, Homo sapiens
aaaaaaactgcggcaa

SEQ ID NO: 79680 - DNA, 17 bp, Homo sapiens
gagggaccgggccgggg

SEQ ID NO: 79681 - DNA, 21 bp, Homo sapiens
aaagcgccgctgtggctgaga

SEQ ID NO: 79682 - DNA, 16 bp, Homo sapiens
acgttggtctcgaggt

SEQ ID NO: 79683 - DNA, 18 bp, Homo sapiens
ctccccggcgctcactcc

SEQ ID NO: 79684 - DNA, 24 bp, Homo sapiens
atatgaggaggcccacaaccaaga

SEQ ID NO: 79685 - DNA, 16 bp, Homo sapiens
ctgttgggggctcacc

SEQ ID NO: 79686 - DNA, 24 bp, Homo sapiens
ttaaataagagtctctgaaacttc

SEQ ID NO: 79687 - DNA, 21 bp, Homo sapiens
atccgccggggctgcagtctc

SEQ ID NO: 79688 - DNA, 24 bp, Homo sapiens
ccccatttgtctgctgcttttcct

SEQ ID NO: 79689 - DNA, 23 bp, Homo sapiens
gagagagaggaagagagtgtgtg

SEQ ID NO: 79690 - DNA, 19 bp, Homo sapiens
gacggccggctggaggcgg

SEQ ID NO: 79691 - DNA, 23 bp, Homo sapiens
ggagggaagagaaagtgggagga

SEQ ID NO: 79692 - DNA, 16 bp, Homo sapiens
gccgagccccaggacc

SEQ ID NO: 79693 - DNA, 24 bp, Homo sapiens
gaaggcggcgtcgcagtagctggg

SEQ ID NO: 79694 - DNA, 17 bp, Homo sapiens
aagcctccgtccccgcg

SEQ ID NO: 79695 - DNA, 22 bp, Homo sapiens
gcgcagcccccccgtccgtctg

SEQ ID NO: 79696 - DNA, 24 bp, Homo sapiens
gtcctcgcaagccgagcgcccagg

SEQ ID NO: 79697 - DNA, 20 bp, Homo sapiens
ctgccgccgccgccgcggtc

SEQ ID NO: 79698 - DNA, 22 bp, Homo sapiens
cagcagcggctggtctgtcaac

SEQ ID NO: 79699 - DNA, 19 bp, Homo sapiens
cacggccccggcgcgcggc

SEQ ID NO: 79700 - DNA, 24 bp, Homo sapiens
gaaatccaagcccagcgtccgcgc

SEQ ID NO: 79701 - DNA, 16 bp, Homo sapiens
cgcggggcgtcccgcg

SEQ ID NO: 79702 - DNA, 24 bp, Homo sapiens
gacggaggagcggaggacgaggaa

SEQ ID NO: 79703 - DNA, 21 bp, Homo sapiens
gaggcgaggtggcgtcggcgg

SEQ ID NO: 79704 - DNA, 21 bp, Homo sapiens
agacaaagagacccgcagcga

SEQ ID NO: 79705 - DNA, 17 bp, Homo sapiens
cggagcgcgggtgccga

SEQ ID NO: 79706 - DNA, 20 bp, Homo sapiens
gacggaggaggaggagaaga

SEQ ID NO: 79707 - DNA, 19 bp, Homo sapiens
tttttttccctggcccccc

SEQ ID NO: 79708 - DNA, 19 bp, Homo sapiens
tccgccgaaagcctccggc

SEQ ID NO: 79709 - DNA, 21 bp, Homo sapiens
tctcccccttgccttgtcgct

SEQ ID NO: 79710 - DNA, 21 bp, Homo sapiens
cgagggccatggaactgctta

SEQ ID NO: 79711 - DNA, 23 bp, Homo sapiens
cttctcctccgttttcttcttct

SEQ ID NO: 79712 - DNA, 17 bp, Homo sapiens
tcggatccgtcacgtga

SEQ ID NO: 79713 - DNA, 20 bp, Homo sapiens
aaaccccggcgcgctgggcc

SEQ ID NO: 79714 - DNA, 22 bp, Homo sapiens
tgatagcacgttcctcgagttt

SEQ ID NO: 79715 - DNA, 23 bp, Homo sapiens
ttacaagcctgtttctattaagc

SEQ ID NO: 79716 - DNA, 16 bp, Homo sapiens
ccgttctgcattcagt

SEQ ID NO: 79717 - DNA, 18 bp, Homo sapiens
gtgttggacagctacata

SEQ ID NO: 79718 - DNA, 24 bp, Homo sapiens
acttgcactcagaccctggaaaca

SEQ ID NO: 79719 - DNA, 17 bp, Homo sapiens
gtggaagccaagattcc

SEQ ID NO: 79720 - DNA, 21 bp, Homo sapiens
gtgccaacaatatgcaagtta

SEQ ID NO: 79721 - DNA, 19 bp, Homo sapiens
gaggacggcatgaccagta

SEQ ID NO: 79722 - DNA, 21 bp, Homo sapiens
gagtctcattgtagtccatga

SEQ ID NO: 79723 - DNA, 22 bp, Homo sapiens
caaaaagcttcctgggtatgaa

SEQ ID NO: 79724 - DNA, 24 bp, Homo sapiens
gagggccatctaggttcaggggaa

SEQ ID NO: 79725 - DNA, 16 bp, Homo sapiens
atgggagaagcgtctg

SEQ ID NO: 79726 - DNA, 19 bp, Homo sapiens
gtctttaggctctcagaaa

SEQ ID NO: 79727 - DNA, 23 bp, Homo sapiens
tttctaccccagagaaaccccca

SEQ ID NO: 79728 - DNA, 23 bp, Homo sapiens
tcttattacgaaataactctcga

SEQ ID NO: 79729 - DNA, 16 bp, Homo sapiens
ggcagtagtggaagca

SEQ ID NO: 79730 - DNA, 24 bp, Homo sapiens
ccacagtggtggggatgctggcag

SEQ ID NO: 79731 - DNA, 18 bp, Homo sapiens
cacaatgaagaggcatct

SEQ ID NO: 79732 - DNA, 22 bp, Homo sapiens
ctgaatgggcctgccctctggt

SEQ ID NO: 79733 - DNA, 16 bp, Homo sapiens
cggctttcttacaggc

SEQ ID NO: 79734 - DNA, 22 bp, Homo sapiens
ctgctgctgcctccaccacctc

SEQ ID NO: 79735 - DNA, 20 bp, Homo sapiens
tgtcagtgtaattccacatc

SEQ ID NO: 79736 - DNA, 22 bp, Homo sapiens
ttggtctcaccgttgtggccag

SEQ ID NO: 79737 - DNA, 20 bp, Homo sapiens
atctcttgagtccagtatta

SEQ ID NO: 79738 - DNA, 18 bp, Homo sapiens
tacaacagtcaagcctgt

SEQ ID NO: 79739 - DNA, 16 bp, Homo sapiens
tcagagtgggtctctg

SEQ ID NO: 79740 - DNA, 19 bp, Homo sapiens
gagaaagatggcctcctga

SEQ ID NO: 79741 - DNA, 18 bp, Homo sapiens
tgcttcccacaccacgtg

SEQ ID NO: 79742 - DNA, 19 bp, Homo sapiens
gctcagaaaaggataaccc

SEQ ID NO: 79743 - DNA, 24 bp, Homo sapiens
caaggtcatgaatcagttctttgt

SEQ ID NO: 79744 - DNA, 17 bp, Homo sapiens
ttctggctggtctgtat

SEQ ID NO: 79745 - DNA, 19 bp, Homo sapiens
tcaagttttttcaggaggc

SEQ ID NO: 79746 - DNA, 18 bp, Homo sapiens
caggcaaggtaactttca

SEQ ID NO: 79747 - DNA, 16 bp, Homo sapiens
attcaaacacctgggt

SEQ ID NO: 79748 - DNA, 16 bp, Homo sapiens
ggccaagaaagaccac

SEQ ID NO: 79749 - DNA, 20 bp, Homo sapiens
tgcagctgtcctctgaaaga

SEQ ID NO: 79750 - DNA, 16 bp, Homo sapiens
ccagcagactcagagg

SEQ ID NO: 79751 - DNA, 19 bp, Homo sapiens
acacaaaagcctttcctga

SEQ ID NO: 79752 - DNA, 20 bp, Homo sapiens
caggaagtagaaatgatgaa

SEQ ID NO: 79753 - DNA, 18 bp, Homo sapiens
tgttccaaaagaaggtgg

SEQ ID NO: 79754 - DNA, 21 bp, Homo sapiens
tggatacagcatgtttatttt

SEQ ID NO: 79755 - DNA, 17 bp, Homo sapiens
ttgggaggtatcaagcc

SEQ ID NO: 79756 - DNA, 24 bp, Homo sapiens
tatttctgttatcagtatactaaa

SEQ ID NO: 79757 - DNA, 18 bp, Homo sapiens
ctctttccgataggcggc

SEQ ID NO: 79758 - DNA, 16 bp, Homo sapiens
caactgcagaacaagc

SEQ ID NO: 79759 - DNA, 17 bp, Homo sapiens
ctccgtcttttaggaaa

SEQ ID NO: 79760 - DNA, 18 bp, Homo sapiens
gcagatggagttcttgaa

SEQ ID NO: 79761 - DNA, 19 bp, Homo sapiens
catactgtctgggtctgaa

SEQ ID NO: 79762 - DNA, 22 bp, Homo sapiens
atgtcgtcggatttttcacttt

SEQ ID NO: 79763 - DNA, 17 bp, Homo sapiens
gtggtatctgagtgctt

SEQ ID NO: 79764 - DNA, 16 bp, Homo sapiens
gtgtgctcctagctga

SEQ ID NO: 79765 - DNA, 22 bp, Homo sapiens
tccccaagaaccaacagctgcc

SEQ ID NO: 79766 - DNA, 16 bp, Homo sapiens
tgccattatgtcaggg

SEQ ID NO: 79767 - DNA, 23 bp, Homo sapiens
gtctccagacattgccaaatgtc

SEQ ID NO: 79768 - DNA, 23 bp, Homo sapiens
aagaaggccaacaacaaggtgtg

SEQ ID NO: 79769 - DNA, 24 bp, Homo sapiens
acccatgacacagacactcaagta

SEQ ID NO: 79770 - DNA, 16 bp, Homo sapiens
agacgaagctggagga

SEQ ID NO: 79771 - DNA, 21 bp, Homo sapiens
caaatggtgtttcagcagatt

SEQ ID NO: 79772 - DNA, 16 bp, Homo sapiens
taggcctgtgatctgg

SEQ ID NO: 79773 - DNA, 16 bp, Homo sapiens
agctcagtgtgacaca

SEQ ID NO: 79774 - DNA, 17 bp, Homo sapiens
cccaagaaagtagagcc

SEQ ID NO: 79775 - DNA, 17 bp, Homo sapiens
gcaatcatgttcctgca

SEQ ID NO: 79776 - DNA, 19 bp, Homo sapiens
acctgccatgaagaatttc

SEQ ID NO: 79777 - DNA, 18 bp, Homo sapiens
cagatcagacagctgcag

SEQ ID NO: 79778 - DNA, 20 bp, Homo sapiens
tgaacaagtcaaggacaccc

SEQ ID NO: 79779 - DNA, 24 bp, Homo sapiens
aaagaacaagctagatacaatcag

SEQ ID NO: 79780 - DNA, 21 bp, Homo sapiens
cattctcgcagttggctttgc

SEQ ID NO: 79781 - DNA, 21 bp, Homo sapiens
gctagaaagatcagttgaagt

SEQ ID NO: 79782 - DNA, 18 bp, Homo sapiens
aattcctctcggtcatgc

SEQ ID NO: 79783 - DNA, 19 bp, Homo sapiens
gttaaattgcctgtgttgg

SEQ ID NO: 79784 - DNA, 16 bp, Homo sapiens
cacgctgctcctggag

SEQ ID NO: 79785 - DNA, 21 bp, Homo sapiens
ggtctgtagttagttacattt

SEQ ID NO: 79786 - DNA, 19 bp, Homo sapiens
cacatctggatgtccttct

SEQ ID NO: 79787 - DNA, 19 bp, Homo sapiens
gagggaattccgaggtgtc

SEQ ID NO: 79788 - DNA, 17 bp, Homo sapiens
ggtgatcaaagcagcag

SEQ ID NO: 79789 - DNA, 23 bp, Homo sapiens
caaaggagtgggaaggactggga

SEQ ID NO: 79790 - DNA, 19 bp, Homo sapiens
gttactctatgagcgtttt

SEQ ID NO: 79791 - DNA, 21 bp, Homo sapiens
atgctgacccaaaacaaaaca

SEQ ID NO: 79792 - DNA, 16 bp, Homo sapiens
tctcctccttcagatg

SEQ ID NO: 79793 - DNA, 21 bp, Homo sapiens
tggcagcattatgttcctcca

SEQ ID NO: 79794 - DNA, 20 bp, Homo sapiens
tgattgaaccatctgtaaaa

SEQ ID NO: 79795 - DNA, 17 bp, Homo sapiens
gcatgctgctgcctctt

SEQ ID NO: 79796 - DNA, 19 bp, Homo sapiens
agagtggtgatttgttttt

SEQ ID NO: 79797 - DNA, 21 bp, Homo sapiens
ctggtctcggagggtgcggat

SEQ ID NO: 79798 - DNA, 22 bp, Homo sapiens
ttggcaacacttgagatccttt

SEQ ID NO: 79799 - DNA, 18 bp, Homo sapiens
aaaaactttcttcctagg

SEQ ID NO: 79800 - DNA, 20 bp, Homo sapiens
ggggagatctgtttcccaga

SEQ ID NO: 79801 - DNA, 21 bp, Homo sapiens
ctgcaaataaaagtccagata

SEQ ID NO: 79802 - DNA, 19 bp, Homo sapiens
gaaccatgtgggctggatt

SEQ ID NO: 79803 - DNA, 19 bp, Homo sapiens
ctggagtttgaaacattct

SEQ ID NO: 79804 - DNA, 18 bp, Homo sapiens
gacagacttgctgggtaa

SEQ ID NO: 79805 - DNA, 16 bp, Homo sapiens
gatacagcagggagca

SEQ ID NO: 79806 - DNA, 22 bp, Homo sapiens
gaaccagctgcctcaaggtggg

SEQ ID NO: 79807 - DNA, 16 bp, Homo sapiens
acacagaggaagatgg

SEQ ID NO: 79808 - DNA, 21 bp, Homo sapiens
tacttcacaataaaatggacc

SEQ ID NO: 79809 - DNA, 21 bp, Homo sapiens
attgccaaagacagcccatca

SEQ ID NO: 79810 - DNA, 19 bp, Homo sapiens
tcagctccttgctgtgcgc

SEQ ID NO: 79811 - DNA, 19 bp, Homo sapiens
gagagtgggctttggaagc

SEQ ID NO: 79812 - DNA, 21 bp, Homo sapiens
attggggaggtagagggcaca

SEQ ID NO: 79813 - DNA, 17 bp, Homo sapiens
acttctttggagaccag

SEQ ID NO: 79814 - DNA, 20 bp, Homo sapiens
ctcagtcttcctgatgacaa

SEQ ID NO: 79815 - DNA, 20 bp, Homo sapiens
tactcccatagacctgccct

SEQ ID NO: 79816 - DNA, 23 bp, Homo sapiens
atcatacgggggaggctgcccgc

SEQ ID NO: 79817 - DNA, 18 bp, Homo sapiens
gaaccctgagcctttaca

SEQ ID NO: 79818 - DNA, 16 bp, Homo sapiens
actgggagtgaagata

SEQ ID NO: 79819 - DNA, 21 bp, Homo sapiens
agtctcccaggttctcagcgg

SEQ ID NO: 79820 - DNA, 20 bp, Homo sapiens
ctttcatcagcactgccgca

SEQ ID NO: 79821 - DNA, 16 bp, Homo sapiens
cagagcctgtggttcc

SEQ ID NO: 79822 - DNA, 16 bp, Homo sapiens
cttgtccagggaggag

SEQ ID NO: 79823 - DNA, 24 bp, Homo sapiens
catttcttttgtttcctctcttcc

SEQ ID NO: 79824 - DNA, 17 bp, Homo sapiens
gctgccgagtgggtctt

SEQ ID NO: 79825 - DNA, 17 bp, Homo sapiens
agcatgccacccaaact

SEQ ID NO: 79826 - DNA, 19 bp, Homo sapiens
agagtcaaagcctcctcga

SEQ ID NO: 79827 - DNA, 22 bp, Homo sapiens
caggcgtgagccactgtgtcca

SEQ ID NO: 79828 - DNA, 22 bp, Homo sapiens
agttctctagatattgcagctg

SEQ ID NO: 79829 - DNA, 17 bp, Homo sapiens
aaaaaagtggcatcact

SEQ ID NO: 79830 - DNA, 16 bp, Homo sapiens
ggcctctgaagaagat

SEQ ID NO: 79831 - DNA, 22 bp, Homo sapiens
gttacctcaagagaagaaaaat

SEQ ID NO: 79832 - DNA, 16 bp, Homo sapiens
gagccacctggcagca

SEQ ID NO: 79833 - DNA, 19 bp, Homo sapiens
ttatagcagagcgagggtc

SEQ ID NO: 79834 - DNA, 19 bp, Homo sapiens
ttacagggattacactgta

SEQ ID NO: 79835 - DNA, 26 bp, Homo sapiens
cttcttctttatctttttcaatacta

SEQ ID NO: 79836 - DNA, 18 bp, Homo sapiens
ttctctgttcagcatgaa

SEQ ID NO: 79837 - DNA, 22 bp, Homo sapiens
aagatcacttagagtgacagaa

SEQ ID NO: 79838 - DNA, 16 bp, Homo sapiens
tgacagaggatcaggt

SEQ ID NO: 79839 - DNA, 21 bp, Homo sapiens
agaattcactactcgtttcat

SEQ ID NO: 79840 - DNA, 17 bp, Homo sapiens
caggaagagagaatgga

SEQ ID NO: 79841 - DNA, 24 bp, Homo sapiens
cttgtttccatttaactttctttt

SEQ ID NO: 79842 - DNA, 22 bp, Homo sapiens
ctttacaatatgctcgagaaca

SEQ ID NO: 79843 - DNA, 22 bp, Homo sapiens
caaggcctgtagtaacgcagaa

SEQ ID NO: 79844 - DNA, 18 bp, Homo sapiens
aaagaaaacatcccaaca

SEQ ID NO: 79845 - DNA, 23 bp, Homo sapiens
tgtgtagacatggtcttgcagaa

SEQ ID NO: 79846 - DNA, 24 bp, Homo sapiens
atcacaccttgagagcagcttgtt

SEQ ID NO: 79847 - DNA, 16 bp, Homo sapiens
cggatgactacgtgca

SEQ ID NO: 79848 - DNA, 22 bp, Homo sapiens
attttaggtcagaattctatct

SEQ ID NO: 79849 - DNA, 18 bp, Homo sapiens
aaaggaactcctctggga

SEQ ID NO: 79850 - DNA, 18 bp, Homo sapiens
actgtgcctgggcagagg

SEQ ID NO: 79851 - DNA, 21 bp, Homo sapiens
cagtttttctaatagttgggc

SEQ ID NO: 79852 - DNA, 16 bp, Homo sapiens
tggcctgggggagtga

SEQ ID NO: 79853 - DNA, 20 bp, Homo sapiens
cccagaaagttaactctagc

SEQ ID NO: 79854 - DNA, 19 bp, Homo sapiens
gaggagaggttgctggggt

SEQ ID NO: 79855 - DNA, 20 bp, Homo sapiens
cttttttgtttttaggttca

SEQ ID NO: 79856 - DNA, 16 bp, Homo sapiens
cctgatctgtcacacc

SEQ ID NO: 79857 - DNA, 21 bp, Homo sapiens
gtgtcaaaaacaagtttacaa

SEQ ID NO: 79858 - DNA, 16 bp, Homo sapiens
ggagcccatctatggt

SEQ ID NO: 79859 - DNA, 18 bp, Homo sapiens
aaaggcaggccaaaacca

SEQ ID NO: 79860 - DNA, 17 bp, Homo sapiens
tcgtggatgacttagca

SEQ ID NO: 79861 - DNA, 22 bp, Homo sapiens
gtaccaaagactttactgtaag

SEQ ID NO: 79862 - DNA, 20 bp, Homo sapiens
atgcctttttctagatgaaa

SEQ ID NO: 79863 - DNA, 19 bp, Homo sapiens
gaggagtggtcataccaca

SEQ ID NO: 79864 - DNA, 18 bp, Homo sapiens
actgaaccaccacaagta

SEQ ID NO: 79865 - DNA, 22 bp, Homo sapiens
actttctttgctaatatcatgg

SEQ ID NO: 79866 - DNA, 17 bp, Homo sapiens
ttaaatatgccagggca

SEQ ID NO: 79867 - DNA, 21 bp, Homo sapiens
tcccaaccacatactaaatct

SEQ ID NO: 79868 - DNA, 21 bp, Homo sapiens
ttcttctcttccattttaggg

SEQ ID NO: 79869 - DNA, 19 bp, Homo sapiens
ggcacactagttgacacca

SEQ ID NO: 79870 - DNA, 19 bp, Homo sapiens
cagagtctgaggtagctgc

SEQ ID NO: 79871 - DNA, 19 bp, Homo sapiens
tcagattttttaggtacag

SEQ ID NO: 79872 - DNA, 18 bp, Homo sapiens
gtagaagtagcacaccct

SEQ ID NO: 79873 - DNA, 16 bp, Homo sapiens
cagcccttatgctgac

SEQ ID NO: 79874 - DNA, 21 bp, Homo sapiens
atattttgggaaaaatcccta

SEQ ID NO: 79875 - DNA, 17 bp, Homo sapiens
gctattctgtgtctcac

SEQ ID NO: 79876 - DNA, 24 bp, Homo sapiens
aacaaagacaaataatgttttcca

SEQ ID NO: 79877 - DNA, 18 bp, Homo sapiens
ctcatgatgttgtgatcg

SEQ ID NO: 79878 - DNA, 19 bp, Homo sapiens
accatagctattctgtgtg

SEQ ID NO: 79879 - DNA, 23 bp, Homo sapiens
ttgattacagtttgcatttcttg

SEQ ID NO: 79880 - DNA, 18 bp, Homo sapiens
aaagcgggctgagatttg

SEQ ID NO: 79881 - DNA, 20 bp, Homo sapiens
tctttgctatcagagttccg

SEQ ID NO: 79882 - DNA, 24 bp, Homo sapiens
tgtgggatccagagagattttggc

SEQ ID NO: 79883 - DNA, 19 bp, Homo sapiens
tggctatttctttatgtac

SEQ ID NO: 79884 - DNA, 24 bp, Homo sapiens
tgtgaagagtatgttttaaactca

SEQ ID NO: 79885 - DNA, 20 bp, Homo sapiens
atccggaattagtgactgga

SEQ ID NO: 79886 - DNA, 22 bp, Homo sapiens
attctgtaagtagaacatctat

SEQ ID NO: 79887 - DNA, 21 bp, Homo sapiens
tcagccctttataatttgtca

SEQ ID NO: 79888 - DNA, 21 bp, Homo sapiens
acattttcaatctctcgaaag

SEQ ID NO: 79889 - DNA, 18 bp, Homo sapiens
tcagtacttcattccttt

SEQ ID NO: 79890 - DNA, 19 bp, Homo sapiens
tccagttcatggtccttgg

SEQ ID NO: 79891 - DNA, 19 bp, Homo sapiens
ggcttctttcactcagtat

SEQ ID NO: 79892 - DNA, 17 bp, Homo sapiens
gaagaagtggtcaaggt

SEQ ID NO: 79893 - DNA, 19 bp, Homo sapiens
tagtggctgcctagggatt

SEQ ID NO: 79894 - DNA, 16 bp, Homo sapiens
tcgtctcctttttgcg

SEQ ID NO: 79895 - DNA, 17 bp, Homo sapiens
gtctgccgttaaataca

SEQ ID NO: 79896 - DNA, 19 bp, Homo sapiens
gtccatctccatgccagtg

SEQ ID NO: 79897 - DNA, 23 bp, Homo sapiens
gtagcaaacaaacaagcagtttc

SEQ ID NO: 79898 - DNA, 18 bp, Homo sapiens
caactaagaggctcttct

SEQ ID NO: 79899 - DNA, 16 bp, Homo sapiens
actgtaatgagaacgc

SEQ ID NO: 79900 - DNA, 16 bp, Homo sapiens
aaaagtcctgctggca

SEQ ID NO: 79901 - DNA, 23 bp, Homo sapiens
aaggcgatgaaagagtgcgtaca

SEQ ID NO: 79902 - DNA, 21 bp, Homo sapiens
cggatttgtttgcattttaga

SEQ ID NO: 79903 - DNA, 23 bp, Homo sapiens
ctgtagtggatgcacccaagata

SEQ ID NO: 79904 - DNA, 20 bp, Homo sapiens
tcttcttgatttctttgaca

SEQ ID NO: 79905 - DNA, 19 bp, Homo sapiens
aagtctacatgtccattcc

SEQ ID NO: 79906 - DNA, 16 bp, Homo sapiens
ggcgtcttggtgttga

SEQ ID NO: 79907 - DNA, 20 bp, Homo sapiens
tcacagggcccaacaggtat

SEQ ID NO: 79908 - DNA, 16 bp, Homo sapiens
acgtttcctgtttgac

SEQ ID NO: 79909 - DNA, 22 bp, Homo sapiens
catgatgacagacggccaaaaa

SEQ ID NO: 79910 - DNA, 18 bp, Homo sapiens
tctcagtgtttagagcct

SEQ ID NO: 79911 - DNA, 18 bp, Homo sapiens
ggtagcatggttatcaac

SEQ ID NO: 79912 - DNA, 18 bp, Homo sapiens
ttcagtaatccttaggga

SEQ ID NO: 79913 - DNA, 19 bp, Homo sapiens
accaactctggacaacatt

SEQ ID NO: 79914 - DNA, 17 bp, Homo sapiens
tcttggaagcataagct

SEQ ID NO: 79915 - DNA, 21 bp, Homo sapiens
gttaaaatctagcttccttgc

SEQ ID NO: 79916 - DNA, 16 bp, Homo sapiens
aagccgccactcgttt

SEQ ID NO: 79917 - DNA, 21 bp, Homo sapiens
aaaccatttcattcaaatcct

SEQ ID NO: 79918 - DNA, 16 bp, Homo sapiens
ggactgcccttgttct

SEQ ID NO: 79919 - DNA, 16 bp, Homo sapiens
aggtgcttgagagagc

SEQ ID NO: 79920 - DNA, 17 bp, Homo sapiens
gagagattggagcacat

SEQ ID NO: 79921 - DNA, 18 bp, Homo sapiens
agtaacgagaggatggat

SEQ ID NO: 79922 - DNA, 20 bp, Homo sapiens
ttaaaatcttgaatttgacc

SEQ ID NO: 79923 - DNA, 23 bp, Homo sapiens
cctacaaagtaatttttatatgt

SEQ ID NO: 79924 - DNA, 16 bp, Homo sapiens
agctctcagccggcat

SEQ ID NO: 79925 - DNA, 21 bp, Homo sapiens
tcaaaagaataagctcaggac

SEQ ID NO: 79926 - DNA, 20 bp, Homo sapiens
cttttcttgatttagaccgt

SEQ ID NO: 79927 - DNA, 18 bp, Homo sapiens
aagaacatatgaaatgcc

SEQ ID NO: 79928 - DNA, 17 bp, Homo sapiens
aggaagctgtgtaaggt

SEQ ID NO: 79929 - DNA, 17 bp, Homo sapiens
aggtggtcaggatgtgc

SEQ ID NO: 79930 - DNA, 17 bp, Homo sapiens
taatgctgcacaaaact

SEQ ID NO: 79931 - DNA, 16 bp, Homo sapiens
caagcatagggccacg

SEQ ID NO: 79932 - DNA, 24 bp, Homo sapiens
aattgaaagtttaaaacacatata

SEQ ID NO: 79933 - DNA, 16 bp, Homo sapiens
ccccatgctgggtgtg

SEQ ID NO: 79934 - DNA, 24 bp, Homo sapiens
tttcagaagatgaaaactaaaatg

SEQ ID NO: 79935 - DNA, 18 bp, Homo sapiens
ttcgagcgagagaatggc

SEQ ID NO: 79936 - DNA, 24 bp, Homo sapiens
ttctttctagaagataagctaaaa

SEQ ID NO: 79937 - DNA, 16 bp, Homo sapiens
gtggccccaatgaaga

SEQ ID NO: 79938 - DNA, 16 bp, Homo sapiens
agctgtcacgtcgtcc

SEQ ID NO: 79939 - DNA, 22 bp, Homo sapiens
ttttttatggagaaaaatgggg

SEQ ID NO: 79940 - DNA, 18 bp, Homo sapiens
gacatttgcttgttgggc

SEQ ID NO: 79941 - DNA, 23 bp, Homo sapiens
cgcagcagcgctgagtgccccgg

SEQ ID NO: 79942 - DNA, 24 bp, Homo sapiens
agcggcagcagcagcagcaacagc

SEQ ID NO: 79943 - DNA, 21 bp, Homo sapiens
ccccgggcggggatggggcgg

SEQ ID NO: 79944 - DNA, 16 bp, Homo sapiens
ggcccctgcgggagcc

SEQ ID NO: 79945 - DNA, 24 bp, Homo sapiens
cggccctagccgcagtccctccag

SEQ ID NO: 79946 - DNA, 17 bp, Homo sapiens
cacggcaaacagaaagg

SEQ ID NO: 79947 - DNA, 21 bp, Homo sapiens
gacgtccggtgccgcggggct

SEQ ID NO: 79948 - DNA, 16 bp, Homo sapiens
gcagccactgcgctcc

SEQ ID NO: 79949 - DNA, 20 bp, Homo sapiens
tttctagcccgtgtgtaact

SEQ ID NO: 79950 - DNA, 16 bp, Homo sapiens
tacagcttctcccagt

SEQ ID NO: 79951 - DNA, 23 bp, Homo sapiens
gatgaaaaactcctgctaagatc

SEQ ID NO: 79952 - DNA, 15 bp, Homo sapiens
cctcaggggcgtccc

SEQ ID NO: 79953 - DNA, 24 bp, Homo sapiens
gaagccttattctcaccatccctc

SEQ ID NO: 79954 - DNA, 21 bp, Homo sapiens
tctcatgcagccgtgtgcggt

SEQ ID NO: 79955 - DNA, 19 bp, Homo sapiens
tctacttctcgagggatgc

SEQ ID NO: 79956 - DNA, 17 bp, Homo sapiens
ggctccggttaaggtag

SEQ ID NO: 79957 - DNA, 23 bp, Homo sapiens
gcccttgctgtacgtccatgccc

SEQ ID NO: 79958 - DNA, 24 bp, Homo sapiens
gtggggcacggggtgggtgttggg

SEQ ID NO: 79959 - DNA, 17 bp, Homo sapiens
catctctacggcacgta

SEQ ID NO: 79960 - DNA, 17 bp, Homo sapiens
gccaagcttcagtgtca

SEQ ID NO: 79961 - DNA, 24 bp, Homo sapiens
catccaggaggacaccggcctcct

SEQ ID NO: 79962 - DNA, 20 bp, Homo sapiens
caggccagcctcacttaacc

SEQ ID NO: 79963 - DNA, 23 bp, Homo sapiens
aaggaggtggcaggcagagctgg

SEQ ID NO: 79964 - DNA, 16 bp, Homo sapiens
cgaagggatgtgggtg

SEQ ID NO: 79965 - DNA, 24 bp, Homo sapiens
gaccagggtttacaccagccctgg

SEQ ID NO: 79966 - DNA, 18 bp, Homo sapiens
gaggtgttgaagaaggag

SEQ ID NO: 79967 - DNA, 23 bp, Homo sapiens
cagatgtggccgatgcccccaca

SEQ ID NO: 79968 - DNA, 16 bp, Homo sapiens
ggccttgtctctggga

SEQ ID NO: 79969 - DNA, 24 bp, Homo sapiens
caccgtctacctcaaggtcttcct

SEQ ID NO: 79970 - DNA, 16 bp, Homo sapiens
caggcagcaggcggaa

SEQ ID NO: 79971 - DNA, 22 bp, Homo sapiens
caggctgtgcccgcgtatactt

SEQ ID NO: 79972 - DNA, 17 bp, Homo sapiens
ggcactcaccctccagg

SEQ ID NO: 79973 - DNA, 22 bp, Homo sapiens
ctcaagccccgggagctctgct

SEQ ID NO: 79974 - DNA, 23 bp, Homo sapiens
tggcttgtgtcaagggctcgcag

SEQ ID NO: 79975 - DNA, 16 bp, Homo sapiens
ccccaggcaccttcca

SEQ ID NO: 79976 - DNA, 20 bp, Homo sapiens
caagaggtacttctggaata

SEQ ID NO: 79977 - DNA, 24 bp, Homo sapiens
atcagcgtggcctacaggctcctg

SEQ ID NO: 79978 - DNA, 24 bp, Homo sapiens
tcacctccaggctgtccggggcgc

SEQ ID NO: 79979 - DNA, 23 bp, Homo sapiens
gaggcctggggccgcggcggtgt

SEQ ID NO: 79980 - DNA, 22 bp, Homo sapiens
cacggccaccagctcgtacttc

SEQ ID NO: 79981 - DNA, 24 bp, Homo sapiens
ccgaggaaagcggctggcccggtc

SEQ ID NO: 79982 - DNA, 24 bp, Homo sapiens
tacacggtcaccgggaagggcacc

SEQ ID NO: 79983 - DNA, 24 bp, Homo sapiens
caggtgagggtctgcccttccgct

SEQ ID NO: 79984 - DNA, 24 bp, Homo sapiens
tccaccacggcgctggcggtgtcg

SEQ ID NO: 79985 - DNA, 22 bp, Homo sapiens
ggaccgcgagcagcgggagaag

SEQ ID NO: 79986 - DNA, 24 bp, Homo sapiens
gacagacactgggtagaccacagc

SEQ ID NO: 79987 - DNA, 17 bp, Homo sapiens
gaggaggtggtgatggt

SEQ ID NO: 79988 - DNA, 23 bp, Homo sapiens
cacacggttgggtggctacacgg

SEQ ID NO: 79989 - DNA, 20 bp, Homo sapiens
cccaccttccccgcgggcgt

SEQ ID NO: 79990 - DNA, 24 bp, Homo sapiens
ttcccctccccctaggacagacgg

SEQ ID NO: 79991 - DNA, 22 bp, Homo sapiens
gaacccaggtcagactgtcccc

SEQ ID NO: 79992 - DNA, 17 bp, Homo sapiens
tcaccagctcccctgat

SEQ ID NO: 79993 - DNA, 23 bp, Homo sapiens
gggctgtgtgggacgtgcagcat

SEQ ID NO: 79994 - DNA, 24 bp, Homo sapiens
cagtgttccacccggaaggtctgc

SEQ ID NO: 79995 - DNA, 24 bp, Homo sapiens
catctcgcctgcactgaccaacgc

SEQ ID NO: 79996 - DNA, 24 bp, Homo sapiens
tgtacggtcgcccgcacgaagctg

SEQ ID NO: 79997 - DNA, 23 bp, Homo sapiens
gtgtcttcgatgcagacgtggta

SEQ ID NO: 79998 - DNA, 22 bp, Homo sapiens
cgagcacctcatttcctggggg

SEQ ID NO: 79999 - DNA, 24 bp, Homo sapiens
tgctccccggggacacctgggccc

SEQ ID NO: 80000 - DNA, 24 bp, Homo sapiens
tgggccacagagggccatgccagg

SEQ ID NO: 80001 - DNA, 23 bp, Homo sapiens
agacctcggtccaggccaacggc

SEQ ID NO: 80002 - DNA, 19 bp, Homo sapiens
agggcaggcctggcagaga

SEQ ID NO: 80003 - DNA, 23 bp, Homo sapiens
ttgaacattggtgctaacttagg

SEQ ID NO: 80004 - DNA, 20 bp, Homo sapiens
catggtgcggttctccgaga

SEQ ID NO: 80005 - DNA, 19 bp, Homo sapiens
agtgcgtgtttgcaccagt

SEQ ID NO: 80006 - DNA, 17 bp, Homo sapiens
agcaagaggacgcccgc

SEQ ID NO: 80007 - DNA, 24 bp, Homo sapiens
catgaggaagcagccagagcagct

SEQ ID NO: 80008 - DNA, 20 bp, Homo sapiens
agagggagtaggtactgggc

SEQ ID NO: 80009 - DNA, 22 bp, Homo sapiens
gttctcaaccggaacctctcca

SEQ ID NO: 80010 - DNA, 24 bp, Homo sapiens
atcttccccagacaggcaataggt

SEQ ID NO: 80011 - DNA, 24 bp, Homo sapiens
atgactcagacttccagggcccag

SEQ ID NO: 80012 - DNA, 20 bp, Homo sapiens
gttgggccaagaggcagtgt

SEQ ID NO: 80013 - DNA, 16 bp, Homo sapiens
gtcagcctgcacctgc

SEQ ID NO: 80014 - DNA, 22 bp, Homo sapiens
tgtgcacacagctgtacctcct

SEQ ID NO: 80015 - DNA, 21 bp, Homo sapiens
atgaaggctctgaggggtgga

SEQ ID NO: 80016 - DNA, 21 bp, Homo sapiens
ttgtactggacgttgatgcca

SEQ ID NO: 80017 - DNA, 24 bp, Homo sapiens
agttgggggctgttccaggactta

SEQ ID NO: 80018 - DNA, 16 bp, Homo sapiens
gtgtcctcggctgagg

SEQ ID NO: 80019 - DNA, 19 bp, Homo sapiens
gtccagctgcctggctaag

SEQ ID NO: 80020 - DNA, 24 bp, Homo sapiens
gtagtgaagttcggcacacttggg

SEQ ID NO: 80021 - DNA, 24 bp, Homo sapiens
tgtggaaaactgccaggcattcag

SEQ ID NO: 80022 - DNA, 18 bp, Homo sapiens
gcagctgggcctgggcct

SEQ ID NO: 80023 - DNA, 23 bp, Homo sapiens
gccaactgcagcacgctaggggt

SEQ ID NO: 80024 - DNA, 22 bp, Homo sapiens
gaagcccccaggaccccgaccc

SEQ ID NO: 80025 - DNA, 23 bp, Homo sapiens
gacaccaaggccctgcggcggcc

SEQ ID NO: 80026 - DNA, 17 bp, Homo sapiens
ctaagccttgcagctgt

SEQ ID NO: 80027 - DNA, 19 bp, Homo sapiens
gaccagcagacctctaggc

SEQ ID NO: 80028 - DNA, 24 bp, Homo sapiens
ggagcaaccatttactgctgggtc

SEQ ID NO: 80029 - DNA, 22 bp, Homo sapiens
tgcacaggacagggggcagccc

SEQ ID NO: 80030 - DNA, 24 bp, Homo sapiens
ctccggtccccttgggctccatcc

SEQ ID NO: 80031 - DNA, 23 bp, Homo sapiens
actcacacctgcctgttggggag

SEQ ID NO: 80032 - DNA, 20 bp, Homo sapiens
cactagctggacgctgggcc

SEQ ID NO: 80033 - DNA, 20 bp, Homo sapiens
caggcctcccttgggcgttt

SEQ ID NO: 80034 - DNA, 22 bp, Homo sapiens
gatgtggccgaggaggcgggct

SEQ ID NO: 80035 - DNA, 20 bp, Homo sapiens
gggagagccaccccaggctg

SEQ ID NO: 80036 - DNA, 22 bp, Homo sapiens
gtgtgaggagtgtggcggcctg

SEQ ID NO: 80037 - DNA, 16 bp, Homo sapiens
tatgctggcatcgaga

SEQ ID NO: 80038 - DNA, 22 bp, Homo sapiens
tcttggtgctgggagagcaggt

SEQ ID NO: 80039 - DNA, 24 bp, Homo sapiens
tggtgtttccctactcaggcctcc

SEQ ID NO: 80040 - DNA, 17 bp, Homo sapiens
gagggcaaatgttgatg

SEQ ID NO: 80041 - DNA, 20 bp, Homo sapiens
gtggtgggggcgtgtggcgg

SEQ ID NO: 80042 - DNA, 21 bp, Homo sapiens
ttcccctactatctcctacct

SEQ ID NO: 80043 - DNA, 20 bp, Homo sapiens
cagggatcaccaggaacttc

SEQ ID NO: 80044 - DNA, 19 bp, Homo sapiens
ttgatgcatagaactgaca

SEQ ID NO: 80045 - DNA, 23 bp, Homo sapiens
gccactgcgatgttgtggagacc

SEQ ID NO: 80046 - DNA, 18 bp, Homo sapiens
tgcctgctccctccccat

SEQ ID NO: 80047 - DNA, 18 bp, Homo sapiens
ggctaagccaagctgctg

SEQ ID NO: 80048 - DNA, 22 bp, Homo sapiens
gtgccatagccagctttaatcc

SEQ ID NO: 80049 - DNA, 21 bp, Homo sapiens
cagttggggagggggctcctt

SEQ ID NO: 80050 - DNA, 20 bp, Homo sapiens
accctggatgtcttcgggct

SEQ ID NO: 80051 - DNA, 20 bp, Homo sapiens
caggaggctgagtgggctac

SEQ ID NO: 80052 - DNA, 16 bp, Homo sapiens
gctgttgagacctctg

SEQ ID NO: 80053 - DNA, 21 bp, Homo sapiens
ctggggagccccgggggatta

SEQ ID NO: 80054 - DNA, 18 bp, Homo sapiens
ggagggaagtttcatggg

SEQ ID NO: 80055 - DNA, 23 bp, Homo sapiens
aggaggagaagtgcttctgcgag

SEQ ID NO: 80056 - DNA, 21 bp, Homo sapiens
agtacccatgctcgatggggt

SEQ ID NO: 80057 - DNA, 19 bp, Homo sapiens
aagaggacagcggctgcga

SEQ ID NO: 80058 - DNA, 23 bp, Homo sapiens
ctggcgcggacacggcaggctgg

SEQ ID NO: 80059 - DNA, 24 bp, Homo sapiens
tgggcaaacttgtggtagcagtgg

SEQ ID NO: 80060 - DNA, 23 bp, Homo sapiens
gtggtgccgagcctctggcggtg

SEQ ID NO: 80061 - DNA, 16 bp, Homo sapiens
aaggcctgggcgggcc

SEQ ID NO: 80062 - DNA, 24 bp, Homo sapiens
tgcgacgagctgtgccgcacggtg

SEQ ID NO: 80063 - DNA, 16 bp, Homo sapiens
acctggttctccatgg

SEQ ID NO: 80064 - DNA, 23 bp, Homo sapiens
tgctgctgtctgccttctgcatc

SEQ ID NO: 80065 - DNA, 16 bp, Homo sapiens
ggatcttccctgcccc

SEQ ID NO: 80066 - DNA, 23 bp, Homo sapiens
tcagctgagatgaccttccggag

SEQ ID NO: 80067 - DNA, 20 bp, Homo sapiens
cccctcacaggatggcctct

SEQ ID NO: 80068 - DNA, 22 bp, Homo sapiens
cccgccggccctcgctggactc

SEQ ID NO: 80069 - DNA, 21 bp, Homo sapiens
cccacacagcgccctatggaa

SEQ ID NO: 80070 - DNA, 21 bp, Homo sapiens
cagagacaggcagcgttgccg

SEQ ID NO: 80071 - DNA, 19 bp, Homo sapiens
ttctcctagagtttttcca

SEQ ID NO: 80072 - DNA, 21 bp, Homo sapiens
cttgtccatggggcctccttt

SEQ ID NO: 80073 - DNA, 19 bp, Homo sapiens
gtaccctgctctgcctttc

SEQ ID NO: 80074 - DNA, 16 bp, Homo sapiens
ctcttctcccccttcc

SEQ ID NO: 80075 - DNA, 16 bp, Homo sapiens
aggggcactgtgcctg

SEQ ID NO: 80076 - DNA, 24 bp, Homo sapiens
tcggaagaacttggttcttggaaa

SEQ ID NO: 80077 - DNA, 16 bp, Homo sapiens
ttcagggtcccatgct

SEQ ID NO: 80078 - DNA, 23 bp, Homo sapiens
tcaaggcaacggccttccatctg

SEQ ID NO: 80079 - DNA, 23 bp, Homo sapiens
taggcccaagtggcccatggtag

SEQ ID NO: 80080 - DNA, 24 bp, Homo sapiens
gaggcccctgtccactgatcccaa

SEQ ID NO: 80081 - DNA, 18 bp, Homo sapiens
tcaggacgttgaactctg

SEQ ID NO: 80082 - DNA, 17 bp, Homo sapiens
ctgtctgaacttgggca

SEQ ID NO: 80083 - DNA, 17 bp, Homo sapiens
ttaccatcctggctgca

SEQ ID NO: 80084 - DNA, 23 bp, Homo sapiens
gaaggggcttccaggagcgatcg

SEQ ID NO: 80085 - DNA, 19 bp, Homo sapiens
acagggctgtatggagccc

SEQ ID NO: 80086 - DNA, 24 bp, Homo sapiens
gagtgagctgcgagacctgctgtc

SEQ ID NO: 80087 - DNA, 16 bp, Homo sapiens
agggagaacaggaaac

SEQ ID NO: 80088 - DNA, 23 bp, Homo sapiens
acatgtcatcaaattgtatgggg

SEQ ID NO: 80089 - DNA, 21 bp, Homo sapiens
gagctgcagcagtgctgcctg

SEQ ID NO: 80090 - DNA, 21 bp, Homo sapiens
ggctctcgcggaggaagcccc

SEQ ID NO: 80091 - DNA, 16 bp, Homo sapiens
gggcctggggaccctg

SEQ ID NO: 80092 - DNA, 23 bp, Homo sapiens
ggtccagggagctggagttgcgg

SEQ ID NO: 80093 - DNA, 22 bp, Homo sapiens
cctgacccgcacgcccagggcc

SEQ ID NO: 80094 - DNA, 24 bp, Homo sapiens
tgtgagatctgccaggcaaatgag

SEQ ID NO: 80095 - DNA, 18 bp, Homo sapiens
cgccaaatacggctccct

SEQ ID NO: 80096 - DNA, 16 bp, Homo sapiens
ggtgcagagccatatg

SEQ ID NO: 80097 - DNA, 23 bp, Homo sapiens
ctacctgggcagtggaggcagcc

SEQ ID NO: 80098 - DNA, 24 bp, Homo sapiens
gggggagtggcaggccagggtgtg

SEQ ID NO: 80099 - DNA, 24 bp, Homo sapiens
ctcaccatgggcgacctcatctca

SEQ ID NO: 80100 - DNA, 16 bp, Homo sapiens
tagcatggcatgccat

SEQ ID NO: 80101 - DNA, 21 bp, Homo sapiens
atgtcacaccctgactccacc

SEQ ID NO: 80102 - DNA, 17 bp, Homo sapiens
ccgcccctcagctacca

SEQ ID NO: 80103 - DNA, 19 bp, Homo sapiens
ctacccgggccacacacca

SEQ ID NO: 80104 - DNA, 23 bp, Homo sapiens
ctcttcacgtaggaatcctcttc

SEQ ID NO: 80105 - DNA, 24 bp, Homo sapiens
gaccgctgctgcctggccatggcc

SEQ ID NO: 80106 - DNA, 16 bp, Homo sapiens
acctgggatccctggg

SEQ ID NO: 80107 - DNA, 17 bp, Homo sapiens
gccagaaacatcctggt

SEQ ID NO: 80108 - DNA, 16 bp, Homo sapiens
gagctccactaatctt

SEQ ID NO: 80109 - DNA, 18 bp, Homo sapiens
cttgtcccgagatgttta

SEQ ID NO: 80110 - DNA, 23 bp, Homo sapiens
gagttctaattgggtccttgggg

SEQ ID NO: 80111 - DNA, 18 bp, Homo sapiens
tccagccccttcaaagat

SEQ ID NO: 80112 - DNA, 22 bp, Homo sapiens
ggtgtagatatgatcaaaaagg

SEQ ID NO: 80113 - DNA, 22 bp, Homo sapiens
tcctctggttactgaaagctca

SEQ ID NO: 80114 - DNA, 21 bp, Homo sapiens
gtgtttctgtaacctccaccc

SEQ ID NO: 80115 - DNA, 23 bp, Homo sapiens
ctagagagttagagtaacttcaa

SEQ ID NO: 80116 - DNA, 16 bp, Homo sapiens
aattccctggccaagc

SEQ ID NO: 80117 - DNA, 16 bp, Homo sapiens
gatggcaattgaatcc

SEQ ID NO: 80118 - DNA, 16 bp, Homo sapiens
cctcagtgagggggtc

SEQ ID NO: 80119 - DNA, 23 bp, Homo sapiens
ttcatgctacatccatctgagca

SEQ ID NO: 80120 - DNA, 20 bp, Homo sapiens
aggggtttccccctagggtc

SEQ ID NO: 80121 - DNA, 22 bp, Homo sapiens
tgaagccgacagggtcagcagg

SEQ ID NO: 80122 - DNA, 23 bp, Homo sapiens
tctccatccggtggccggtcttc

SEQ ID NO: 80123 - DNA, 20 bp, Homo sapiens
ctctgtgagggccaggtgga

SEQ ID NO: 80124 - DNA, 18 bp, Homo sapiens
ccaagtgaggctgggcca

SEQ ID NO: 80125 - DNA, 16 bp, Homo sapiens
ctgctgtgggagatcg

SEQ ID NO: 80126 - DNA, 20 bp, Homo sapiens
ctggtttctcctggggctgc

SEQ ID NO: 80127 - DNA, 24 bp, Homo sapiens
tgagcggctcttcaaccttctgaa

SEQ ID NO: 80128 - DNA, 20 bp, Homo sapiens
acacccaaggatggctctct

SEQ ID NO: 80129 - DNA, 16 bp, Homo sapiens
cacgaggctcagagat

SEQ ID NO: 80130 - DNA, 18 bp, Homo sapiens
gcaaacaccggccttttg

SEQ ID NO: 80131 - DNA, 20 bp, Homo sapiens
cacactgggcccagggtaca

SEQ ID NO: 80132 - DNA, 21 bp, Homo sapiens
aattggacccaggcactcact

SEQ ID NO: 80133 - DNA, 19 bp, Homo sapiens
gccctgcttggatcatatt

SEQ ID NO: 80134 - DNA, 18 bp, Homo sapiens
tactgccctggggtgagg

SEQ ID NO: 80135 - DNA, 24 bp, Homo sapiens
gctgcaatgctggaagcaggagcc

SEQ ID NO: 80136 - DNA, 23 bp, Homo sapiens
gcatgactctctctctctgcaca

SEQ ID NO: 80137 - DNA, 21 bp, Homo sapiens
ctggagaagatgatggttaag

SEQ ID NO: 80138 - DNA, 24 bp, Homo sapiens
tatgcagcctggccctggtctctt

SEQ ID NO: 80139 - DNA, 18 bp, Homo sapiens
gagaggccgtcgtcataa

SEQ ID NO: 80140 - DNA, 22 bp, Homo sapiens
cagccagagcctctgccctgag

SEQ ID NO: 80141 - DNA, 16 bp, Homo sapiens
ggaagggagggctcga

SEQ ID NO: 80142 - DNA, 17 bp, Homo sapiens
cttggagtgaccggcca

SEQ ID NO: 80143 - DNA, 19 bp, Homo sapiens
cggtgctagaatctagtaa

SEQ ID NO: 80144 - DNA, 19 bp, Homo sapiens
catctgactccctgattta

SEQ ID NO: 80145 - DNA, 20 bp, Homo sapiens
cagaccagaaacatttttaa

SEQ ID NO: 80146 - DNA, 17 bp, Homo sapiens
aatgcccccctccctcg

SEQ ID NO: 80147 - DNA, 16 bp, Homo sapiens
tggatgcaaagtcaga

SEQ ID NO: 80148 - DNA, 18 bp, Homo sapiens
tggtagaatttcccatgc

SEQ ID NO: 80149 - DNA, 23 bp, Homo sapiens
tataacagtgtttttggaaacct

SEQ ID NO: 80150 - DNA, 16 bp, Homo sapiens
gccatcagctctcgtg

SEQ ID NO: 80151 - DNA, 20 bp, Homo sapiens
agtttggtttgaacatcaaa

SEQ ID NO: 80152 - DNA, 16 bp, Homo sapiens
agcatccagttagcat

SEQ ID NO: 80153 - DNA, 20 bp, Homo sapiens
tggttcttcagtgcagaaca

SEQ ID NO: 80154 - DNA, 20 bp, Homo sapiens
gtccattacctttcacaaag

SEQ ID NO: 80155 - DNA, 22 bp, Homo sapiens
ctggcctggagagagtcctgta

SEQ ID NO: 80156 - DNA, 16 bp, Homo sapiens
caaagaaagggccggt

SEQ ID NO: 80157 - DNA, 23 bp, Homo sapiens
atccaaatgatagtgtatatgct

SEQ ID NO: 80158 - DNA, 17 bp, Homo sapiens
ctaccaaaaacgagtct

SEQ ID NO: 80159 - DNA, 23 bp, Homo sapiens
cagccccacagctgccgcccggg

SEQ ID NO: 80160 - DNA, 24 bp, Homo sapiens
agagcccgcgagagtggggatatc

SEQ ID NO: 80161 - DNA, 24 bp, Homo sapiens
ctggtgcgggcgggagtcggggct

SEQ ID NO: 80162 - DNA, 16 bp, Homo sapiens
cccggcagccgtgtcc

SEQ ID NO: 80163 - DNA, 24 bp, Homo sapiens
gagcccggcgcccagttgccgggg

SEQ ID NO: 80164 - DNA, 24 bp, Homo sapiens
acctacggcgtctgcgggaagcta

SEQ ID NO: 80165 - DNA, 19 bp, Homo sapiens
ccccggacacgaaaagagc

SEQ ID NO: 80166 - DNA, 24 bp, Homo sapiens
cggcgggcccgcgcggaggagcag

SEQ ID NO: 80167 - DNA, 24 bp, Homo sapiens
ggcgcgcgcgcactgggaaggccc

SEQ ID NO: 80168 - DNA, 20 bp, Homo sapiens
ccggcggctggccctcctcc

SEQ ID NO: 80169 - DNA, 23 bp, Homo sapiens
gagggggcggcgcgggtgcgggg

SEQ ID NO: 80170 - DNA, 22 bp, Homo sapiens
ggcgcttccgccgtgcgctcgg

SEQ ID NO: 80171 - DNA, 24 bp, Homo sapiens
caggcggattccaatctctgcagc

SEQ ID NO: 80172 - DNA, 20 bp, Homo sapiens
gtcgggtgcgcgcggcgcgg

SEQ ID NO: 80173 - DNA, 21 bp, Homo sapiens
ccttggccctcctccctcctc

SEQ ID NO: 80174 - DNA, 20 bp, Homo sapiens
cgcggacgcccgcccctccc

SEQ ID NO: 80175 - DNA, 20 bp, Homo sapiens
tgcgatcttcgccgcgcgcg

SEQ ID NO: 80176 - DNA, 24 bp, Homo sapiens
aagagtcggcggcggtggcggcgg

SEQ ID NO: 80177 - DNA, 18 bp, Homo sapiens
atcggccttcgcccttgg

SEQ ID NO: 80178 - DNA, 24 bp, Homo sapiens
tggcgaaggagaagggaggaggca

SEQ ID NO: 80179 - DNA, 24 bp, Homo sapiens
gggaacgcatcctccagccctcgg

SEQ ID NO: 80180 - DNA, 24 bp, Homo sapiens
gcttaggctcggcgcgtccgtccg

SEQ ID NO: 80181 - DNA, 16 bp, Homo sapiens
cagcccctccggtccg

SEQ ID NO: 80182 - DNA, 24 bp, Homo sapiens
gggtcggggccgctgcacgccaag

SEQ ID NO: 80183 - DNA, 23 bp, Homo sapiens
cctggctccggccaccgcgcgcc

SEQ ID NO: 80184 - DNA, 18 bp, Homo sapiens
ccgcgcccacccgctccg

SEQ ID NO: 80185 - DNA, 20 bp, Homo sapiens
gtcccggcccagcgcgcgcc

SEQ ID NO: 80186 - DNA, 24 bp, Homo sapiens
ggtgagttgggagtgcgcgtgcgg

SEQ ID NO: 80187 - DNA, 21 bp, Homo sapiens
caaaagaggggccggcggggg

SEQ ID NO: 80188 - DNA, 24 bp, Homo sapiens
cgggcgaggctgcagaggcagctg

SEQ ID NO: 80189 - DNA, 24 bp, Homo sapiens
ccggagcgactttcgcccactccg

SEQ ID NO: 80190 - DNA, 19 bp, Homo sapiens
ccggcagctccgcaggcct

SEQ ID NO: 80191 - DNA, 24 bp, Homo sapiens
ctcgccgctccggggcggggaggt

SEQ ID NO: 80192 - DNA, 19 bp, Homo sapiens
ccacggcaccccgcgccgc

SEQ ID NO: 80193 - DNA, 20 bp, Homo sapiens
attttgttctcccctgttcc

SEQ ID NO: 80194 - DNA, 24 bp, Homo sapiens
tgcaggccgagtttggggatgcgg

SEQ ID NO: 80195 - DNA, 16 bp, Homo sapiens
cggggactcgggggcg

SEQ ID NO: 80196 - DNA, 24 bp, Homo sapiens
atccttaaatgggaaaggcgctca

SEQ ID NO: 80197 - DNA, 25 bp, Homo sapiens
ccttttaaatatttttgtctttcag

SEQ ID NO: 80198 - DNA, 17 bp, Homo sapiens
ggctcccaataatctga

SEQ ID NO: 80199 - DNA, 20 bp, Homo sapiens
gtcaagtgcttgcgatcttt

SEQ ID NO: 80200 - DNA, 24 bp, Homo sapiens
tatacacacatacattactaaaat

SEQ ID NO: 80201 - DNA, 20 bp, Homo sapiens
gcaagaccaattattaaagg

SEQ ID NO: 80202 - DNA, 19 bp, Homo sapiens
tgggcctaactattcaaac

SEQ ID NO: 80203 - DNA, 21 bp, Homo sapiens
ctcagctatacatttacatca

SEQ ID NO: 80204 - DNA, 16 bp, Homo sapiens
tttggcacgtgtttca

SEQ ID NO: 80205 - DNA, 19 bp, Homo sapiens
tgtctgtttgttgtatgaa

SEQ ID NO: 80206 - DNA, 18 bp, Homo sapiens
tggtcggagtctgatttc

SEQ ID NO: 80207 - DNA, 19 bp, Homo sapiens
ttgtgataagaaagcttaa

SEQ ID NO: 80208 - DNA, 19 bp, Homo sapiens
ctttaaaaaaggcaaggta

SEQ ID NO: 80209 - DNA, 23 bp, Homo sapiens
tgagcttttcagaaatgatttac

SEQ ID NO: 80210 - DNA, 22 bp, Homo sapiens
aaatacttacatgcatgtgtta

SEQ ID NO: 80211 - DNA, 16 bp, Homo sapiens
ttcatggcactgggat

SEQ ID NO: 80212 - DNA, 24 bp, Homo sapiens
ataattcttaaaatagcactaaat

SEQ ID NO: 80213 - DNA, 17 bp, Homo sapiens
accttagcaccagagga

SEQ ID NO: 80214 - DNA, 19 bp, Homo sapiens
gctttttggctttctggaa

SEQ ID NO: 80215 - DNA, 23 bp, Homo sapiens
ccagatgatgctattaataacac

SEQ ID NO: 80216 - DNA, 19 bp, Homo sapiens
ttgtcttaaaacctctggc

SEQ ID NO: 80217 - DNA, 18 bp, Homo sapiens
ccctggtcatcttcttct

SEQ ID NO: 80218 - DNA, 17 bp, Homo sapiens
caaagtattaaaggcca

SEQ ID NO: 80219 - DNA, 16 bp, Homo sapiens
tcttactttgcactga

SEQ ID NO: 80220 - DNA, 21 bp, Homo sapiens
agtactttctatgtgaattta

SEQ ID NO: 80221 - DNA, 18 bp, Homo sapiens
tgggggaaatcgatgctt

SEQ ID NO: 80222 - DNA, 24 bp, Homo sapiens
ggacattgctttgccatcatagaa

SEQ ID NO: 80223 - DNA, 20 bp, Homo sapiens
tcctccaatatatttactga

SEQ ID NO: 80224 - DNA, 24 bp, Homo sapiens
tatgaaatatgaaggatctgattt

SEQ ID NO: 80225 - DNA, 24 bp, Homo sapiens
tttcagcacaaattttaatctttc

SEQ ID NO: 80226 - DNA, 18 bp, Homo sapiens
actggttacataaattgg

SEQ ID NO: 80227 - DNA, 24 bp, Homo sapiens
tttcactcactgaaatagaaattg

SEQ ID NO: 80228 - DNA, 16 bp, Homo sapiens
ccgacttttctcggct

SEQ ID NO: 80229 - DNA, 24 bp, Homo sapiens
accaaaccatttctaattttatca

SEQ ID NO: 80230 - DNA, 19 bp, Homo sapiens
tgacgtgttcaattctagg

SEQ ID NO: 80231 - DNA, 19 bp, Homo sapiens
tacgccggacaatagaatg

SEQ ID NO: 80232 - DNA, 19 bp, Homo sapiens
ggacctgacaataaaagta

SEQ ID NO: 80233 - DNA, 23 bp, Homo sapiens
ctgccccctgttgtcataggtag

SEQ ID NO: 80234 - DNA, 16 bp, Homo sapiens
attatgcagacagcca

SEQ ID NO: 80235 - DNA, 22 bp, Homo sapiens
ttctctggttttacagtaacca

SEQ ID NO: 80236 - DNA, 25 bp, Homo sapiens
aaatattttgcttcaaaataaatat

SEQ ID NO: 80237 - DNA, 22 bp, Homo sapiens
ttacattgtttacttttattgt

SEQ ID NO: 80238 - DNA, 21 bp, Homo sapiens
atacaagttaatggtttctgc

SEQ ID NO: 80239 - DNA, 19 bp, Homo sapiens
ttgctcatttctatggctg

SEQ ID NO: 80240 - DNA, 20 bp, Homo sapiens
tccttttcccttaagagaac

SEQ ID NO: 80241 - DNA, 16 bp, Homo sapiens
tgtaacgacgtctgct

SEQ ID NO: 80242 - DNA, 23 bp, Homo sapiens
ctaatttggataggattctttct

SEQ ID NO: 80243 - DNA, 19 bp, Homo sapiens
ggtcttttagtgattctcc

SEQ ID NO: 80244 - DNA, 20 bp, Homo sapiens
ggtttttcttagggttttat

SEQ ID NO: 80245 - DNA, 20 bp, Homo sapiens
gtttaacttaccaataaagg

SEQ ID NO: 80246 - DNA, 16 bp, Homo sapiens
attgcaagagcatctc

SEQ ID NO: 80247 - DNA, 18 bp, Homo sapiens
ctgtccaccatcatgagg

SEQ ID NO: 80248 - DNA, 20 bp, Homo sapiens
agcatttattccagttggag

SEQ ID NO: 80249 - DNA, 22 bp, Homo sapiens
gcatacctctttctaaataagg

SEQ ID NO: 80250 - DNA, 19 bp, Homo sapiens
tggtagtgggtctggacta

SEQ ID NO: 80251 - DNA, 19 bp, Homo sapiens
tccatcctgggtgacagag

SEQ ID NO: 80252 - DNA, 17 bp, Homo sapiens
ttgccggaccatctgaa

SEQ ID NO: 80253 - DNA, 18 bp, Homo sapiens
ttaactggagttggttgg

SEQ ID NO: 80254 - DNA, 16 bp, Homo sapiens
cactttttcgccacgc

SEQ ID NO: 80255 - DNA, 20 bp, Homo sapiens
gtcttaatgggtttctttca

SEQ ID NO: 80256 - DNA, 18 bp, Homo sapiens
tggtagatttctgtttct

SEQ ID NO: 80257 - DNA, 22 bp, Homo sapiens
ttcagcgaactattgccaaaca

SEQ ID NO: 80258 - DNA, 19 bp, Homo sapiens
tgaaattgactgaatcagt

SEQ ID NO: 80259 - DNA, 22 bp, Homo sapiens
gagaagtatggatgggcaaatg

SEQ ID NO: 80260 - DNA, 19 bp, Homo sapiens
cacacattttcaaagcaca

SEQ ID NO: 80261 - DNA, 19 bp, Homo sapiens
agaagccagctggtttcga

SEQ ID NO: 80262 - DNA, 21 bp, Homo sapiens
ggactatgttttattcaaacc

SEQ ID NO: 80263 - DNA, 16 bp, Homo sapiens
caggaacctgtacctt

SEQ ID NO: 80264 - DNA, 16 bp, Homo sapiens
agtttcactatctgca

SEQ ID NO: 80265 - DNA, 21 bp, Homo sapiens
acatttcaggaagtcatagag

SEQ ID NO: 80266 - DNA, 24 bp, Homo sapiens
agcattacttctccctagcctatc

SEQ ID NO: 80267 - DNA, 16 bp, Homo sapiens
accacaggcagctgaa

SEQ ID NO: 80268 - DNA, 21 bp, Homo sapiens
gacaggtttcatagcggcaga

SEQ ID NO: 80269 - DNA, 16 bp, Homo sapiens
atgagcaattgcgggc

SEQ ID NO: 80270 - DNA, 20 bp, Homo sapiens
accatgaaaatggatctctc

SEQ ID NO: 80271 - DNA, 16 bp, Homo sapiens
gtcagcaatgcagcaa

SEQ ID NO: 80272 - DNA, 17 bp, Homo sapiens
ccctgcttaaattggct

SEQ ID NO: 80273 - DNA, 21 bp, Homo sapiens
taaaataatttcaaaacagtg

SEQ ID NO: 80274 - DNA, 17 bp, Homo sapiens
gcacccaaggaaagccc

SEQ ID NO: 80275 - DNA, 19 bp, Homo sapiens
tgcacatttttagaattcc

SEQ ID NO: 80276 - DNA, 19 bp, Homo sapiens
caagaaaaatgggagttgc

SEQ ID NO: 80277 - DNA, 22 bp, Homo sapiens
ggacacaatttttgtaaaaaga

SEQ ID NO: 80278 - DNA, 19 bp, Homo sapiens
catgtagtatgtagcatgt

SEQ ID NO: 80279 - DNA, 16 bp, Homo sapiens
ggtgcccaccctggta

SEQ ID NO: 80280 - DNA, 23 bp, Homo sapiens
caatgcatctggccccaaggaga

SEQ ID NO: 80281 - DNA, 16 bp, Homo sapiens
gggctggaagtggttt

SEQ ID NO: 80282 - DNA, 18 bp, Homo sapiens
attttatttttggccctc

SEQ ID NO: 80283 - DNA, 16 bp, Homo sapiens
cgacgagccatctccc

SEQ ID NO: 80284 - DNA, 17 bp, Homo sapiens
tgatgtgcccttgaata

SEQ ID NO: 80285 - DNA, 26 bp, Homo sapiens
atttttaaaatgatgagtaaatcaac

SEQ ID NO: 80286 - DNA, 17 bp, Homo sapiens
gctggacgaaagcctga

SEQ ID NO: 80287 - DNA, 20 bp, Homo sapiens
cacctactatgtgcccacaa

SEQ ID NO: 80288 - DNA, 18 bp, Homo sapiens
ggcctaatcatttgggag

SEQ ID NO: 80289 - DNA, 22 bp, Homo sapiens
tctccaagatgtgattattaca

SEQ ID NO: 80290 - DNA, 17 bp, Homo sapiens
ccatgttgtaatatggc

SEQ ID NO: 80291 - DNA, 19 bp, Homo sapiens
tttttcttgtgtaagaatc

SEQ ID NO: 80292 - DNA, 17 bp, Homo sapiens
ccgcaaacgtttgacac

SEQ ID NO: 80293 - DNA, 22 bp, Homo sapiens
attggtatatcttgtccagcaa

SEQ ID NO: 80294 - DNA, 16 bp, Homo sapiens
tcaggggactgagttc

SEQ ID NO: 80295 - DNA, 18 bp, Homo sapiens
tcgtggaagaataccaat

SEQ ID NO: 80296 - DNA, 20 bp, Homo sapiens
gacactgaaaagtaaagaga

SEQ ID NO: 80297 - DNA, 16 bp, Homo sapiens
tatgcgtgaggttgtg

SEQ ID NO: 80298 - DNA, 16 bp, Homo sapiens
ggaggctggattgtgg

SEQ ID NO: 80299 - DNA, 19 bp, Homo sapiens
acagtgatgaagtgagtgg

SEQ ID NO: 80300 - DNA, 18 bp, Homo sapiens
ttacatcttgggattcaa

SEQ ID NO: 80301 - DNA, 22 bp, Homo sapiens
atatattctctgctcactgaac

SEQ ID NO: 80302 - DNA, 20 bp, Homo sapiens
ccatgggtaaaaacagttct

SEQ ID NO: 80303 - DNA, 19 bp, Homo sapiens
tgtcagaatgctgggccca

SEQ ID NO: 80304 - DNA, 18 bp, Homo sapiens
gaagaaagagtctgagaa

SEQ ID NO: 80305 - DNA, 20 bp, Homo sapiens
gaagacgcttgccaagatgg

SEQ ID NO: 80306 - DNA, 18 bp, Homo sapiens
gcaaaggctgttacagtc

SEQ ID NO: 80307 - DNA, 16 bp, Homo sapiens
ctcgagtctgaggtta

SEQ ID NO: 80308 - DNA, 21 bp, Homo sapiens
aggaaagagcgaatgcagtcc

SEQ ID NO: 80309 - DNA, 22 bp, Homo sapiens
gttgtggggcgggggtggagga

SEQ ID NO: 80310 - DNA, 24 bp, Homo sapiens
attccccttgcagggaccgtccct

SEQ ID NO: 80311 - DNA, 16 bp, Homo sapiens
aggataacgagctaag

SEQ ID NO: 80312 - DNA, 21 bp, Homo sapiens
ttcacctgtgcacaggtaacc

SEQ ID NO: 80313 - DNA, 19 bp, Homo sapiens
gttcccagccgccagcctg

SEQ ID NO: 80314 - DNA, 22 bp, Homo sapiens
catctcagctttcatcatcagt

SEQ ID NO: 80315 - DNA, 22 bp, Homo sapiens
gagtccccaagccgcaggctct

SEQ ID NO: 80316 - DNA, 22 bp, Homo sapiens
ctgggtttctgggcagaggccg

SEQ ID NO: 80317 - DNA, 20 bp, Homo sapiens
ggcagggcagggggcggtag

SEQ ID NO: 80318 - DNA, 24 bp, Homo sapiens
caaaagccgcagcaagtgcagctg

SEQ ID NO: 80319 - DNA, 23 bp, Homo sapiens
agaccgaggggaggcgggaggcg

SEQ ID NO: 80320 - DNA, 24 bp, Homo sapiens
caggcagctacactgggcatgctc

SEQ ID NO: 80321 - DNA, 23 bp, Homo sapiens
atcaccgcccgccggcctgcccg

SEQ ID NO: 80322 - DNA, 23 bp, Homo sapiens
agctaccgctctgccccctccta

SEQ ID NO: 80323 - DNA, 24 bp, Homo sapiens
gagcgcagtcgcgtcccagcgccg

SEQ ID NO: 80324 - DNA, 20 bp, Homo sapiens
gtcccgtccgcctctcgctc

SEQ ID NO: 80325 - DNA, 23 bp, Homo sapiens
agcggctcaactctcaaacttcc

SEQ ID NO: 80326 - DNA, 16 bp, Homo sapiens
cggcgcggcggcggag

SEQ ID NO: 80327 - DNA, 16 bp, Homo sapiens
gcggccgccgccgtct

SEQ ID NO: 80328 - DNA, 24 bp, Homo sapiens
tatgcgctgcggcaggatacgcgc

SEQ ID NO: 80329 - DNA, 23 bp, Homo sapiens
gccgcaggccggccggctccccg

SEQ ID NO: 80330 - DNA, 24 bp, Homo sapiens
ctctcggaagctgcagccatgatg

SEQ ID NO: 80331 - DNA, 16 bp, Homo sapiens
cggttagaaaagacga

SEQ ID NO: 80332 - DNA, 23 bp, Homo sapiens
ggctcaggcgagggagatgagag

SEQ ID NO: 80333 - DNA, 16 bp, Homo sapiens
ggctcccgcccgagcc

SEQ ID NO: 80334 - DNA, 24 bp, Homo sapiens
gagcagccgcgggggcagcgccct

SEQ ID NO: 80335 - DNA, 19 bp, Homo sapiens
gccgccgccgcttctcccc

SEQ ID NO: 80336 - DNA, 24 bp, Homo sapiens
cggcgtttctcgcctcctcttcgt

SEQ ID NO: 80337 - DNA, 17 bp, Homo sapiens
ggtgacaggcgactcag

SEQ ID NO: 80338 - DNA, 22 bp, Homo sapiens
cctgaaagggaaggtggaagcc

SEQ ID NO: 80339 - DNA, 17 bp, Homo sapiens
ccgtgttggaggcagta

SEQ ID NO: 80340 - DNA, 23 bp, Homo sapiens
ggcggcacctcccgctcctggag

SEQ ID NO: 80341 - DNA, 17 bp, Homo sapiens
gcggcgcacgggaggtt

SEQ ID NO: 80342 - DNA, 24 bp, Homo sapiens
cggctgcagctccagggagggggt

SEQ ID NO: 80343 - DNA, 21 bp, Homo sapiens
cgaataatcctccgaacggct

SEQ ID NO: 80344 - DNA, 24 bp, Homo sapiens
cggagagttggtctctccccttct

SEQ ID NO: 80345 - DNA, 18 bp, Homo sapiens
cttctcctcagcagccag

SEQ ID NO: 80346 - DNA, 23 bp, Homo sapiens
cagggacccgggccggttttaaa

SEQ ID NO: 80347 - DNA, 22 bp, Homo sapiens
ttggctctggaccgcagccggg

SEQ ID NO: 80348 - DNA, 23 bp, Homo sapiens
ctccggaggccgccggcggaggc

SEQ ID NO: 80349 - DNA, 18 bp, Homo sapiens
ggaaatggctctggactt

SEQ ID NO: 80350 - DNA, 24 bp, Homo sapiens
tccgctgccgccgctgccaggcct

SEQ ID NO: 80351 - DNA, 17 bp, Homo sapiens
gaagaaaaaggaggaga

SEQ ID NO: 80352 - DNA, 19 bp, Homo sapiens
agccgccgcagcagccatt

SEQ ID NO: 80353 - DNA, 23 bp, Homo sapiens
tatctccttttgtttctgctaac

SEQ ID NO: 80354 - DNA, 18 bp, Homo sapiens
ggggcatcagctaccgcc

SEQ ID NO: 80355 - DNA, 16 bp, Homo sapiens
gagcagccgcagaaat

SEQ ID NO: 80356 - DNA, 16 bp, Homo sapiens
cagcttctgccatctc

SEQ ID NO: 80357 - DNA, 16 bp, Homo sapiens
cggacattttcgcatc

SEQ ID NO: 80358 - DNA, 20 bp, Homo sapiens
gccatcatcaaagagatcgt

SEQ ID NO: 80359 - DNA, 19 bp, Homo sapiens
cagaaaggaaacacaaaat

SEQ ID NO: 80360 - DNA, 20 bp, Homo sapiens
agtctttctgcaggaaatcc

SEQ ID NO: 80361 - DNA, 17 bp, Homo sapiens
tccagctatagtgggga

SEQ ID NO: 80362 - DNA, 18 bp, Homo sapiens
tcaaagcattcttacctt

SEQ ID NO: 80363 - DNA, 21 bp, Homo sapiens
tttgattgctgcatatttcag

SEQ ID NO: 80364 - DNA, 20 bp, Homo sapiens
gtggcttagaaatcttttct

SEQ ID NO: 80365 - DNA, 22 bp, Homo sapiens
caaacattattgctatgggatt

SEQ ID NO: 80366 - DNA, 22 bp, Homo sapiens
gccaaaaaatgattatagagca

SEQ ID NO: 80367 - DNA, 19 bp, Homo sapiens
ttgatgatgtagtaaggta

SEQ ID NO: 80368 - DNA, 20 bp, Homo sapiens
tctaaacccatagaaggggt

SEQ ID NO: 80369 - DNA, 25 bp, Homo sapiens
atacttacagattgtatatcttgta

SEQ ID NO: 80370 - DNA, 23 bp, Homo sapiens
gaaaaagaaaatctgtcttttgg

SEQ ID NO: 80371 - DNA, 22 bp, Homo sapiens
ctttcacttaatagttgtttta

SEQ ID NO: 80372 - DNA, 20 bp, Homo sapiens
agctcatttttgttaatggt

SEQ ID NO: 80373 - DNA, 18 bp, Homo sapiens
cggtttaggaatacaatt

SEQ ID NO: 80374 - DNA, 22 bp, Homo sapiens
ggattcaaagcataaaaaccat

SEQ ID NO: 80375 - DNA, 16 bp, Homo sapiens
aatttggcggtgtcat

SEQ ID NO: 80376 - DNA, 19 bp, Homo sapiens
cacagcataatatgtgtca

SEQ ID NO: 80377 - DNA, 18 bp, Homo sapiens
agatacagtctatcgggt

SEQ ID NO: 80378 - DNA, 16 bp, Homo sapiens
ttcttcctaagtgcaa

SEQ ID NO: 80379 - DNA, 26 bp, Homo sapiens
gataattcttaaatatgtatctcact

SEQ ID NO: 80380 - DNA, 20 bp, Homo sapiens
tgctgaaagacattatgaca

SEQ ID NO: 80381 - DNA, 19 bp, Homo sapiens
acaattagaaagttaagca

SEQ ID NO: 80382 - DNA, 19 bp, Homo sapiens
aaagggtttgataagttct

SEQ ID NO: 80383 - DNA, 18 bp, Homo sapiens
acctgttaagtttgtatg

SEQ ID NO: 80384 - DNA, 16 bp, Homo sapiens
tgctgcaacatgattg

SEQ ID NO: 80385 - DNA, 20 bp, Homo sapiens
tcaagagtttttttttctta

SEQ ID NO: 80386 - DNA, 21 bp, Homo sapiens
tgccccgatgtaataaatatg

SEQ ID NO: 80387 - DNA, 24 bp, Homo sapiens
ttttgaagaccataacccaccaca

SEQ ID NO: 80388 - DNA, 20 bp, Homo sapiens
tttttgtctctggtccttac

SEQ ID NO: 80389 - DNA, 18 bp, Homo sapiens
aagtgaagatgacaatca

SEQ ID NO: 80390 - DNA, 22 bp, Homo sapiens
caataaattctcagatccagga

SEQ ID NO: 80391 - DNA, 18 bp, Homo sapiens
tggtgtaatgatatgtgc

SEQ ID NO: 80392 - DNA, 18 bp, Homo sapiens
cttgtcaattacacctca

SEQ ID NO: 80393 - DNA, 17 bp, Homo sapiens
gatttctatggggaagt

SEQ ID NO: 80394 - DNA, 25 bp, Homo sapiens
tttcacaatgtatatacacatacat

SEQ ID NO: 80395 - DNA, 23 bp, Homo sapiens
atttattattgagctggatttaa

SEQ ID NO: 80396 - DNA, 16 bp, Homo sapiens
tctttaacaggtagct

SEQ ID NO: 80397 - DNA, 23 bp, Homo sapiens
tgttcttaaatggctacgaccca

SEQ ID NO: 80398 - DNA, 23 bp, Homo sapiens
aatagtttcaaacatcatcttgt

SEQ ID NO: 80399 - DNA, 24 bp, Homo sapiens
ggaacattttttttcaatttggct

SEQ ID NO: 80400 - DNA, 20 bp, Homo sapiens
caatacatggaaggatgaga

SEQ ID NO: 80401 - DNA, 16 bp, Homo sapiens
aggcgctatgtgtatt

SEQ ID NO: 80402 - DNA, 23 bp, Homo sapiens
aatgtggtaaatttctttctaaa

SEQ ID NO: 80403 - DNA, 19 bp, Homo sapiens
tggcactgttgtttcacaa

SEQ ID NO: 80404 - DNA, 23 bp, Homo sapiens
gttgaacaacaaagctaattaat

SEQ ID NO: 80405 - DNA, 22 bp, Homo sapiens
tttcatttatttcagttgattt

SEQ ID NO: 80406 - DNA, 18 bp, Homo sapiens
gggtcctgaattggagga

SEQ ID NO: 80407 - DNA, 20 bp, Homo sapiens
tttcgtgtatattgctgata

SEQ ID NO: 80408 - DNA, 17 bp, Homo sapiens
cacacaggtaacggctg

SEQ ID NO: 80409 - DNA, 19 bp, Homo sapiens
cctgtgaaataatactggt

SEQ ID NO: 80410 - DNA, 18 bp, Homo sapiens
agtaaagtacaaaccttt

SEQ ID NO: 80411 - DNA, 18 bp, Homo sapiens
ccagctaaaggtgaagat

SEQ ID NO: 80412 - DNA, 24 bp, Homo sapiens
catgtcataaaataaaatatagct

SEQ ID NO: 80413 - DNA, 16 bp, Homo sapiens
ttgagttccctcagcc

SEQ ID NO: 80414 - DNA, 18 bp, Homo sapiens
agagtaagcaaaacacct

SEQ ID NO: 80415 - DNA, 17 bp, Homo sapiens
acagaacaagatgctaa

SEQ ID NO: 80416 - DNA, 18 bp, Homo sapiens
atagtctttgtgtttacc

SEQ ID NO: 80417 - DNA, 16 bp, Homo sapiens
ggtcctggtatgaaga

SEQ ID NO: 80418 - DNA, 20 bp, Homo sapiens
tgcaaatgtttaacataggt

SEQ ID NO: 80419 - DNA, 19 bp, Homo sapiens
actgcaaatgctatcgatt

SEQ ID NO: 80420 - DNA, 26 bp, Homo sapiens
attaattaaatatgtcatttcatttc

SEQ ID NO: 80421 - DNA, 25 bp, Homo sapiens
ttgtcaagatcattttttgttaaag

SEQ ID NO: 80422 - DNA, 19 bp, Homo sapiens
tcacttttgggtaaataca

SEQ ID NO: 80423 - DNA, 20 bp, Homo sapiens
tgaccttaaaatttggagaa

SEQ ID NO: 80424 - DNA, 23 bp, Homo sapiens
gtagaaaatggaagtctatgtga

SEQ ID NO: 80425 - DNA, 21 bp, Homo sapiens
actcctagaattaaacacaca

SEQ ID NO: 80426 - DNA, 20 bp, Homo sapiens
aatgacaaggaatatctagt

SEQ ID NO: 80427 - DNA, 21 bp, Homo sapiens
acactgcttcgaaataataca

SEQ ID NO: 80428 - DNA, 20 bp, Homo sapiens
gacaaagccaaccgatactt

SEQ ID NO: 80429 - DNA, 19 bp, Homo sapiens
aaaaggcctcttaaagatc

SEQ ID NO: 80430 - DNA, 16 bp, Homo sapiens
aagttgaactgctagc

SEQ ID NO: 80431 - DNA, 22 bp, Homo sapiens
aaatggaataaaaaatctgtta

SEQ ID NO: 80432 - DNA, 16 bp, Homo sapiens
agtcagtggtgtcaga

SEQ ID NO: 80433 - DNA, 18 bp, Homo sapiens
tgtgggttttcattttaa

SEQ ID NO: 80434 - DNA, 21 bp, Homo sapiens
tcagacttttgtaatttgtgt

SEQ ID NO: 80435 - DNA, 18 bp, Homo sapiens
gaggagccgtcaaatcca

SEQ ID NO: 80436 - DNA, 22 bp, Homo sapiens
attttcagtttattcaagttta

SEQ ID NO: 80437 - DNA, 23 bp, Homo sapiens
tgaacctgatcattatagatatt

SEQ ID NO: 80438 - DNA, 20 bp, Homo sapiens
ttgttcctataactggtaat

SEQ ID NO: 80439 - DNA, 18 bp, Homo sapiens
tttgatgaagatcagcat

SEQ ID NO: 80440 - DNA, 24 bp, Homo sapiens
gcggcgacagcctgggcggacagt

SEQ ID NO: 80441 - DNA, 16 bp, Homo sapiens
ggcgcggtggggccgg

SEQ ID NO: 80442 - DNA, 24 bp, Homo sapiens
tgcagcccccatcgcctcggggag

SEQ ID NO: 80443 - DNA, 24 bp, Homo sapiens
tagatggcgtgcagtcccggggga

SEQ ID NO: 80444 - DNA, 24 bp, Homo sapiens
gctctccccgtcgtttgccctctc

SEQ ID NO: 80445 - DNA, 23 bp, Homo sapiens
gatagcggtaacctggagcgggt

SEQ ID NO: 80446 - DNA, 22 bp, Homo sapiens
gagctgcggcctagcggcgccc

SEQ ID NO: 80447 - DNA, 23 bp, Homo sapiens
aaccctttccagcccgcgcctgt

SEQ ID NO: 80448 - DNA, 22 bp, Homo sapiens
cggccttcgcttcgctctttcc

SEQ ID NO: 80449 - DNA, 22 bp, Homo sapiens
agtgctttaaccattctctacc

SEQ ID NO: 80450 - DNA, 22 bp, Homo sapiens
cgcctttaccctgaccagccga

SEQ ID NO: 80451 - DNA, 19 bp, Homo sapiens
attcccaacttgagcctta

SEQ ID NO: 80452 - DNA, 22 bp, Homo sapiens
cagccttagctgtccatccctt

SEQ ID NO: 80453 - DNA, 20 bp, Homo sapiens
ctgtacatgctaacatagtc

SEQ ID NO: 80454 - DNA, 21 bp, Homo sapiens
acctttcacccaggttcctcc

SEQ ID NO: 80455 - DNA, 16 bp, Homo sapiens
cgaagctgatgtagtg

SEQ ID NO: 80456 - DNA, 16 bp, Homo sapiens
tctgatttccaggctt

SEQ ID NO: 80457 - DNA, 16 bp, Homo sapiens
aagaacaggtggcata

SEQ ID NO: 80458 - DNA, 23 bp, Homo sapiens
gtggcccagaccccttggactat

SEQ ID NO: 80459 - DNA, 18 bp, Homo sapiens
atgctcacagcactatga

SEQ ID NO: 80460 - DNA, 22 bp, Homo sapiens
ctaacatccccgagcactggca

SEQ ID NO: 80461 - DNA, 20 bp, Homo sapiens
cttggcatgagtagatatag

SEQ ID NO: 80462 - DNA, 17 bp, Homo sapiens
cttctcaggttccctcc

SEQ ID NO: 80463 - DNA, 16 bp, Homo sapiens
aaggtcaactcaaagc

SEQ ID NO: 80464 - DNA, 23 bp, Homo sapiens
gaggatttggatactgaggccac

SEQ ID NO: 80465 - DNA, 19 bp, Homo sapiens
ccctgcattaactctgcgg

SEQ ID NO: 80466 - DNA, 21 bp, Homo sapiens
ttcctaaggtaattgagctta

SEQ ID NO: 80467 - DNA, 17 bp, Homo sapiens
gaccagcacagcagcca

SEQ ID NO: 80468 - DNA, 17 bp, Homo sapiens
cctagtggttttggctt

SEQ ID NO: 80469 - DNA, 18 bp, Homo sapiens
gccactccacaaacatca

SEQ ID NO: 80470 - DNA, 18 bp, Homo sapiens
ctgccccaccaacatggc

SEQ ID NO: 80471 - DNA, 18 bp, Homo sapiens
gaaacaccaggcaaaaca

SEQ ID NO: 80472 - DNA, 24 bp, Homo sapiens
tctttgcttccatccggagtgaat

SEQ ID NO: 80473 - DNA, 19 bp, Homo sapiens
tgactcactgttatccaaa

SEQ ID NO: 80474 - DNA, 22 bp, Homo sapiens
gggaagcctcccagcctgggct

SEQ ID NO: 80475 - DNA, 23 bp, Homo sapiens
cccaaagggtgtctgcacgggct

SEQ ID NO: 80476 - DNA, 21 bp, Homo sapiens
tgaacaatgaggatccttgta

SEQ ID NO: 80477 - DNA, 16 bp, Homo sapiens
caggaaggcttgagcc

SEQ ID NO: 80478 - DNA, 22 bp, Homo sapiens
atgtgtcctggcacagcccttt

SEQ ID NO: 80479 - DNA, 16 bp, Homo sapiens
ctcccactcccttcac

SEQ ID NO: 80480 - DNA, 19 bp, Homo sapiens
cagaggacccacagatgca

SEQ ID NO: 80481 - DNA, 18 bp, Homo sapiens
accatctgaatctacctg

SEQ ID NO: 80482 - DNA, 21 bp, Homo sapiens
tccctcctaagggaatcatcc

SEQ ID NO: 80483 - DNA, 24 bp, Homo sapiens
ctccaggatgccctgcccgttcca

SEQ ID NO: 80484 - DNA, 20 bp, Homo sapiens
tcccaactggaggtgactca

SEQ ID NO: 80485 - DNA, 21 bp, Homo sapiens
gagccgcgctcccaccttgca

SEQ ID NO: 80486 - DNA, 24 bp, Homo sapiens
gggtggccattaacacacaatggg

SEQ ID NO: 80487 - DNA, 23 bp, Homo sapiens
aaataacaacgcaagagggagcc

SEQ ID NO: 80488 - DNA, 22 bp, Homo sapiens
actgaagagctacactcagccc

SEQ ID NO: 80489 - DNA, 20 bp, Homo sapiens
gactgtcagggagtgagtcg

SEQ ID NO: 80490 - DNA, 22 bp, Homo sapiens
ttttcacatcagggcttcctga

SEQ ID NO: 80491 - DNA, 20 bp, Homo sapiens
gatcgatctcaaatatggtc

SEQ ID NO: 80492 - DNA, 17 bp, Homo sapiens
gtcctaggcctggggca

SEQ ID NO: 80493 - DNA, 23 bp, Homo sapiens
ttggaagaggcctaggcacaggg

SEQ ID NO: 80494 - DNA, 19 bp, Homo sapiens
agttaccattgtatcccct

SEQ ID NO: 80495 - DNA, 20 bp, Homo sapiens
tttctactcactcacacata

SEQ ID NO: 80496 - DNA, 22 bp, Homo sapiens
gataactgacatgcggagggga

SEQ ID NO: 80497 - DNA, 16 bp, Homo sapiens
tccctacgtgctctgc

SEQ ID NO: 80498 - DNA, 21 bp, Homo sapiens
tgcattggtaaccagggcaga

SEQ ID NO: 80499 - DNA, 16 bp, Homo sapiens
accactcaggttggag

SEQ ID NO: 80500 - DNA, 23 bp, Homo sapiens
tcagcaccacaagggctcagtaa

SEQ ID NO: 80501 - DNA, 16 bp, Homo sapiens
gtcctcgtcatcctcg

SEQ ID NO: 80502 - DNA, 18 bp, Homo sapiens
cagttctctgaaagaact

SEQ ID NO: 80503 - DNA, 16 bp, Homo sapiens
gatggctcccaccttt

SEQ ID NO: 80504 - DNA, 18 bp, Homo sapiens
caaaggcatcgagacaga

SEQ ID NO: 80505 - DNA, 18 bp, Homo sapiens
atcctagagagactggaa

SEQ ID NO: 80506 - DNA, 17 bp, Homo sapiens
ctgagccggccccccga

SEQ ID NO: 80507 - DNA, 20 bp, Homo sapiens
ttgctgtttaaatcatgcca

SEQ ID NO: 80508 - DNA, 17 bp, Homo sapiens
cgactctctggcaaagg

SEQ ID NO: 80509 - DNA, 24 bp, Homo sapiens
caatctgtactcactcagcgctta

SEQ ID NO: 80510 - DNA, 17 bp, Homo sapiens
gacaggtttgctgttga

SEQ ID NO: 80511 - DNA, 19 bp, Homo sapiens
tagtttttcttagcacctc

SEQ ID NO: 80512 - DNA, 20 bp, Homo sapiens
aacttacggggcccggtcgt

SEQ ID NO: 80513 - DNA, 16 bp, Homo sapiens
ggccactgggcaactt

SEQ ID NO: 80514 - DNA, 18 bp, Homo sapiens
atccacagggacaggccc

SEQ ID NO: 80515 - DNA, 17 bp, Homo sapiens
cctgaggagaggactcg

SEQ ID NO: 80516 - DNA, 17 bp, Homo sapiens
aagcctagagatcctgg

SEQ ID NO: 80517 - DNA, 22 bp, Homo sapiens
ggcagaatggcctcgcccacga

SEQ ID NO: 80518 - DNA, 18 bp, Homo sapiens
atggccgtggagctgtca

SEQ ID NO: 80519 - DNA, 24 bp, Homo sapiens
atcattatcatcagtcaccattat

SEQ ID NO: 80520 - DNA, 20 bp, Homo sapiens
cctggttgaatttcagatgt

SEQ ID NO: 80521 - DNA, 18 bp, Homo sapiens
ctcctccctgagcttttc

SEQ ID NO: 80522 - DNA, 21 bp, Homo sapiens
gggtaaactgtgtggcagggc

SEQ ID NO: 80523 - DNA, 23 bp, Homo sapiens
gagccgcaaagacagcctggaaa

SEQ ID NO: 80524 - DNA, 16 bp, Homo sapiens
gagggggctggggagg

SEQ ID NO: 80525 - DNA, 22 bp, Homo sapiens
gcacgcggcagcttgagagcgt

SEQ ID NO: 80526 - DNA, 17 bp, Homo sapiens
cagggagacgggaagca

SEQ ID NO: 80527 - DNA, 18 bp, Homo sapiens
tcccctgttgatgggcag

SEQ ID NO: 80528 - DNA, 21 bp, Homo sapiens
tgatggccatgtcacctgtga

SEQ ID NO: 80529 - DNA, 24 bp, Homo sapiens
accatagtccccactgtcccagag

SEQ ID NO: 80530 - DNA, 22 bp, Homo sapiens
ccatgagccgcgtaaggatgct

SEQ ID NO: 80531 - DNA, 16 bp, Homo sapiens
cagctcctcactgtct

SEQ ID NO: 80532 - DNA, 17 bp, Homo sapiens
atgaaaggaaggaggga

SEQ ID NO: 80533 - DNA, 24 bp, Homo sapiens
ggcactttacatataaaagtatca

SEQ ID NO: 80534 - DNA, 16 bp, Homo sapiens
aggaaggggtgccatc

SEQ ID NO: 80535 - DNA, 22 bp, Homo sapiens
tggaaggcgcctttgccactga

SEQ ID NO: 80536 - DNA, 16 bp, Homo sapiens
tccatacctacacaca

SEQ ID NO: 80537 - DNA, 18 bp, Homo sapiens
gtcatcattcccaagtgt

SEQ ID NO: 80538 - DNA, 24 bp, Homo sapiens
agtcctgtgggggccaaggttctt

SEQ ID NO: 80539 - DNA, 18 bp, Homo sapiens
aactgcagaatctaccca

SEQ ID NO: 80540 - DNA, 16 bp, Homo sapiens
tgggtccgaagggcat

SEQ ID NO: 80541 - DNA, 18 bp, Homo sapiens
tcctccaacattttctct

SEQ ID NO: 80542 - DNA, 22 bp, Homo sapiens
acagatcacagtgagctcatct

SEQ ID NO: 80543 - DNA, 16 bp, Homo sapiens
gggacctgttgtcagg

SEQ ID NO: 80544 - DNA, 24 bp, Homo sapiens
tggttggcaaaaagatcatacatt

SEQ ID NO: 80545 - DNA, 20 bp, Homo sapiens
acacgcacacatgcatgcac

SEQ ID NO: 80546 - DNA, 21 bp, Homo sapiens
ctgttgaccgaagagtttgta

SEQ ID NO: 80547 - DNA, 16 bp, Homo sapiens
gggaggagcccacaga

SEQ ID NO: 80548 - DNA, 18 bp, Homo sapiens
acctgggtctagcatttg

SEQ ID NO: 80549 - DNA, 24 bp, Homo sapiens
aacaccacgtcaggcaggatggag

SEQ ID NO: 80550 - DNA, 23 bp, Homo sapiens
cctagctccccggggacaggcct

SEQ ID NO: 80551 - DNA, 20 bp, Homo sapiens
tgggctccctgctggccact

SEQ ID NO: 80552 - DNA, 20 bp, Homo sapiens
cactcctggtctgtgcttgc

SEQ ID NO: 80553 - DNA, 19 bp, Homo sapiens
atttgtggagatctcgttg

SEQ ID NO: 80554 - DNA, 22 bp, Homo sapiens
agctggcctgaaaagaagctga

SEQ ID NO: 80555 - DNA, 20 bp, Homo sapiens
cctgtgcatggcaccccact

SEQ ID NO: 80556 - DNA, 24 bp, Homo sapiens
gcacctccttcctgcatccggcac

SEQ ID NO: 80557 - DNA, 24 bp, Homo sapiens
agctgcggaagctgaaccctcctg

SEQ ID NO: 80558 - DNA, 23 bp, Homo sapiens
gaggctgctgaccgcaggccagg

SEQ ID NO: 80559 - DNA, 24 bp, Homo sapiens
cctcctttcccagggagtggagga

SEQ ID NO: 80560 - DNA, 23 bp, Homo sapiens
gtgggcgtggcggccgccctggg

SEQ ID NO: 80561 - DNA, 20 bp, Homo sapiens
gcagggagcccctcacccag

SEQ ID NO: 80562 - DNA, 22 bp, Homo sapiens
gctcatgcagccggggccactc

SEQ ID NO: 80563 - DNA, 23 bp, Homo sapiens
gtgggcctggggaagtggctggt

SEQ ID NO: 80564 - DNA, 24 bp, Homo sapiens
cggatctcacgcaccaacgtgtag

SEQ ID NO: 80565 - DNA, 23 bp, Homo sapiens
atgtgacccagcggcccctcgcg

SEQ ID NO: 80566 - DNA, 24 bp, Homo sapiens
caccgctccggcctggctcagggc

SEQ ID NO: 80567 - DNA, 24 bp, Homo sapiens
acagggcagccgctctggctctag

SEQ ID NO: 80568 - DNA, 22 bp, Homo sapiens
cccaggactgcagggcgtgagc

SEQ ID NO: 80569 - DNA, 16 bp, Homo sapiens
gccccgccccgcccca

SEQ ID NO: 80570 - DNA, 23 bp, Homo sapiens
tcccgggagacttacagcgcgag

SEQ ID NO: 80571 - DNA, 23 bp, Homo sapiens
acatcgagacctcggccaagacc

SEQ ID NO: 80572 - DNA, 24 bp, Homo sapiens
agagggtcccggagctggagctag

SEQ ID NO: 80573 - DNA, 21 bp, Homo sapiens
ctggctgcacgcactgtggaa

SEQ ID NO: 80574 - DNA, 23 bp, Homo sapiens
agtgagtgctgctccctggctgg

SEQ ID NO: 80575 - DNA, 24 bp, Homo sapiens
aaacgggtgaaggactcggatgac

SEQ ID NO: 80576 - DNA, 21 bp, Homo sapiens
ggagagctgcctcacctgccg

SEQ ID NO: 80577 - DNA, 18 bp, Homo sapiens
ctgcgcctgcagcccccg

SEQ ID NO: 80578 - DNA, 23 bp, Homo sapiens
cttcgggcgaggtcctgagcctg

SEQ ID NO: 80579 - DNA, 24 bp, Homo sapiens
tggggccaggccggctgcgtccag

SEQ ID NO: 80580 - DNA, 24 bp, Homo sapiens
ccaccagcaccatgggcacgtcat

SEQ ID NO: 80581 - DNA, 16 bp, Homo sapiens
ccaccagtacaggtga

SEQ ID NO: 80582 - DNA, 18 bp, Homo sapiens
gaaagcgagagctggcta

SEQ ID NO: 80583 - DNA, 24 bp, Homo sapiens
cagtacatgcgcaccggggagggc

SEQ ID NO: 80584 - DNA, 22 bp, Homo sapiens
aggacaggaggcccctgcctgg

SEQ ID NO: 80585 - DNA, 24 bp, Homo sapiens
ctgttggacatcctggataccgcc

SEQ ID NO: 80586 - DNA, 21 bp, Homo sapiens
gctcccgggccagcctcacgg

SEQ ID NO: 80587 - DNA, 16 bp, Homo sapiens
ctgtcctcctgcagga

SEQ ID NO: 80588 - DNA, 24 bp, Homo sapiens
tgttgatggcaaacacacacagga

SEQ ID NO: 80589 - DNA, 23 bp, Homo sapiens
aggtaccagggagaggctggctg

SEQ ID NO: 80590 - DNA, 16 bp, Homo sapiens
gtactcctcctggccg

SEQ ID NO: 80591 - DNA, 22 bp, Homo sapiens
gaggaggggagtccctcgtctc

SEQ ID NO: 80592 - DNA, 23 bp, Homo sapiens
tcaatgaccacctgcttccggta

SEQ ID NO: 80593 - DNA, 22 bp, Homo sapiens
tgccccctcctctcctggggtg

SEQ ID NO: 80594 - DNA, 17 bp, Homo sapiens
ccagctgatccagaacc

SEQ ID NO: 80595 - DNA, 23 bp, Homo sapiens
gagacagggccacagcaccatgc

SEQ ID NO: 80596 - DNA, 22 bp, Homo sapiens
gacggaatataagctggtggtg

SEQ ID NO: 80597 - DNA, 24 bp, Homo sapiens
ctgggctcgcccgcagcagctgct

SEQ ID NO: 80598 - DNA, 23 bp, Homo sapiens
cctccttggcaggtggggcagga

SEQ ID NO: 80599 - DNA, 24 bp, Homo sapiens
tatagtggggtcgtattcgtccac

SEQ ID NO: 80600 - DNA, 22 bp, Homo sapiens
ctgccagcagctgccctgtggg

SEQ ID NO: 80601 - DNA, 19 bp, Homo sapiens
cacaccgccggcgcccacc

SEQ ID NO: 80602 - DNA, 22 bp, Homo sapiens
gctacatgaacggtcccagccg

SEQ ID NO: 80603 - DNA, 22 bp, Homo sapiens
ccctggcgtgggctcggtggag

SEQ ID NO: 80604 - DNA, 24 bp, Homo sapiens
ggttccctcggggctctttgggct

SEQ ID NO: 80605 - DNA, 24 bp, Homo sapiens
aagagatcagcgcctgagaagtcg

SEQ ID NO: 80606 - DNA, 24 bp, Homo sapiens
gacccggcgggtcggccctccgcg

SEQ ID NO: 80607 - DNA, 24 bp, Homo sapiens
ggccggccccgccctgaccggccg

SEQ ID NO: 80608 - DNA, 24 bp, Homo sapiens
ccgcagcctcttgcgcggggtctg

SEQ ID NO: 80609 - DNA, 16 bp, Homo sapiens
caccccggccggcccg

SEQ ID NO: 80610 - DNA, 24 bp, Homo sapiens
cacggcgcggggacatcgcccgac

SEQ ID NO: 80611 - DNA, 16 bp, Homo sapiens
cgacgtaaacaaagct

SEQ ID NO: 80612 - DNA, 23 bp, Homo sapiens
caacggcgcggcgatcaagaagc

SEQ ID NO: 80613 - DNA, 24 bp, Homo sapiens
tgcgggccctttaatgccacggga

SEQ ID NO: 80614 - DNA, 24 bp, Homo sapiens
ctgaccagctgcactcggggattt

SEQ ID NO: 80615 - DNA, 24 bp, Homo sapiens
gggaccggccggccggacaaagcg

SEQ ID NO: 80616 - DNA, 20 bp, Homo sapiens
tcaagagagcgccgagcagg

SEQ ID NO: 80617 - DNA, 24 bp, Homo sapiens
caccggagatcagaggcccggaca

SEQ ID NO: 80618 - DNA, 16 bp, Homo sapiens
ccggccccggccccgg

SEQ ID NO: 80619 - DNA, 24 bp, Homo sapiens
gtgccggccgcgggacgtcccgaa

SEQ ID NO: 80620 - DNA, 22 bp, Homo sapiens
ctggccccggccccggccccgg

SEQ ID NO: 80621 - DNA, 22 bp, Homo sapiens
ccgcgctgcccctggttcgcgc

SEQ ID NO: 80622 - DNA, 17 bp, Homo sapiens
ctccggctccggtcgcg

SEQ ID NO: 80623 - DNA, 23 bp, Homo sapiens
ccggggcgggggccggggccggg

SEQ ID NO: 80624 - DNA, 24 bp, Homo sapiens
ctagtgtcccggtcccggccccgg

SEQ ID NO: 80625 - DNA, 24 bp, Homo sapiens
ggagccggggccggagccggagcc

SEQ ID NO: 80626 - DNA, 21 bp, Homo sapiens
cctcgagccggccgctgagtc

SEQ ID NO: 80627 - DNA, 16 bp, Homo sapiens
ccgcgaccggagccgc

SEQ ID NO: 80628 - DNA, 24 bp, Homo sapiens
gggcgctgccgcctgctgctggcg

SEQ ID NO: 80629 - DNA, 20 bp, Homo sapiens
cgggactgggggcggggtgg

SEQ ID NO: 80630 - DNA, 23 bp, Homo sapiens
cagtggaccgaagtggacagcga

SEQ ID NO: 80631 - DNA, 24 bp, Homo sapiens
gctccggcgcctcctcgaggccgt

SEQ ID NO: 80632 - DNA, 24 bp, Homo sapiens
cagaaccgctgggattacgacttc

SEQ ID NO: 80633 - DNA, 24 bp, Homo sapiens
caccgcgaccgcgacgggccgcgg

SEQ ID NO: 80634 - DNA, 16 bp, Homo sapiens
ctgagccgcgagctgc

SEQ ID NO: 80635 - DNA, 24 bp, Homo sapiens
tctcgcggtagaacgcgggcaccg

SEQ ID NO: 80636 - DNA, 23 bp, Homo sapiens
gggaccttcccagtactagtgcg

SEQ ID NO: 80637 - DNA, 16 bp, Homo sapiens
cagcggcatgtcctgc

SEQ ID NO: 80638 - DNA, 17 bp, Homo sapiens
catgtccgacgcgtccc

SEQ ID NO: 80639 - DNA, 24 bp, Homo sapiens
cgttcagctcggccaggcgggcct

SEQ ID NO: 80640 - DNA, 20 bp, Homo sapiens
ctttccccttcttctcgctg

SEQ ID NO: 80641 - DNA, 24 bp, Homo sapiens
gaagaggctgcggcaggcgctggt

SEQ ID NO: 80642 - DNA, 16 bp, Homo sapiens
gagtcgggcggcgcgg

SEQ ID NO: 80643 - DNA, 24 bp, Homo sapiens
ccatcgtggatgtgctgcggaggg

SEQ ID NO: 80644 - DNA, 18 bp, Homo sapiens
gagaaacatgaccaaact

SEQ ID NO: 80645 - DNA, 19 bp, Homo sapiens
ttggatgaagaagatcaac

SEQ ID NO: 80646 - DNA, 22 bp, Homo sapiens
tcggtggccaagttgtcagaaa

SEQ ID NO: 80647 - DNA, 18 bp, Homo sapiens
cttgaaagcagttcacac

SEQ ID NO: 80648 - DNA, 22 bp, Homo sapiens
ttgttgcaagtgtctctgactg

SEQ ID NO: 80649 - DNA, 21 bp, Homo sapiens
caaagcgccagctggagtttg

SEQ ID NO: 80650 - DNA, 17 bp, Homo sapiens
ggtgccttgtgatgact

SEQ ID NO: 80651 - DNA, 21 bp, Homo sapiens
taattcatctgaccgggcaaa

SEQ ID NO: 80652 - DNA, 17 bp, Homo sapiens
gcctgggaaatgagctc

SEQ ID NO: 80653 - DNA, 24 bp, Homo sapiens
tttattatttaaagatagccacgc

SEQ ID NO: 80654 - DNA, 16 bp, Homo sapiens
aagttctcccggtccg

SEQ ID NO: 80655 - DNA, 21 bp, Homo sapiens
acactagtcttttccaatccc

SEQ ID NO: 80656 - DNA, 16 bp, Homo sapiens
ggccgaggctagacct

SEQ ID NO: 80657 - DNA, 24 bp, Homo sapiens
aaaaataatgaaaaataaatgtga

SEQ ID NO: 80658 - DNA, 16 bp, Homo sapiens
tcctccagctgccgga

SEQ ID NO: 80659 - DNA, 24 bp, Homo sapiens
cctggtgtgggtcttcaggtggtc

SEQ ID NO: 80660 - DNA, 16 bp, Homo sapiens
tggggaaatctaaggg

SEQ ID NO: 80661 - DNA, 20 bp, Homo sapiens
ttctttatttaagaggagga

SEQ ID NO: 80662 - DNA, 20 bp, Homo sapiens
ttttctcgttcagaccagct

SEQ ID NO: 80663 - DNA, 21 bp, Homo sapiens
aaaaactaaacacatggctga

SEQ ID NO: 80664 - DNA, 16 bp, Homo sapiens
tgtgtcttccccaagg

SEQ ID NO: 80665 - DNA, 20 bp, Homo sapiens
tagcccaagggaacacagct

SEQ ID NO: 80666 - DNA, 16 bp, Homo sapiens
taggagaggttgcctt

SEQ ID NO: 80667 - DNA, 22 bp, Homo sapiens
atgtctcctttggtgtcttttg

SEQ ID NO: 80668 - DNA, 17 bp, Homo sapiens
atcctaccctaacaagc

SEQ ID NO: 80669 - DNA, 18 bp, Homo sapiens
tcacactggtatggtttc

SEQ ID NO: 80670 - DNA, 16 bp, Homo sapiens
caaaatggccccacag

SEQ ID NO: 80671 - DNA, 21 bp, Homo sapiens
gcaataagagatattttaagc

SEQ ID NO: 80672 - DNA, 17 bp, Homo sapiens
atcctggaaataacctg

SEQ ID NO: 80673 - DNA, 21 bp, Homo sapiens
ttgtacggtcggcatctgaga

SEQ ID NO: 80674 - DNA, 24 bp, Homo sapiens
gagctcttgaaccatgtttgccca

SEQ ID NO: 80675 - DNA, 19 bp, Homo sapiens
ctcccttcctcttactctc

SEQ ID NO: 80676 - DNA, 23 bp, Homo sapiens
gctgtgcatctgtaagtgggaca

SEQ ID NO: 80677 - DNA, 17 bp, Homo sapiens
tactccagtgctcactc

SEQ ID NO: 80678 - DNA, 24 bp, Homo sapiens
aaggggcgtttctcactggtctca

SEQ ID NO: 80679 - DNA, 19 bp, Homo sapiens
atggggatctggagtgtga

SEQ ID NO: 80680 - DNA, 16 bp, Homo sapiens
cttatcagacccaggg

SEQ ID NO: 80681 - DNA, 17 bp, Homo sapiens
tgcggagcccaatacag

SEQ ID NO: 80682 - DNA, 23 bp, Homo sapiens
agaagaggctgccagggccaaag

SEQ ID NO: 80683 - DNA, 17 bp, Homo sapiens
ttgtgtttgcagccaca

SEQ ID NO: 80684 - DNA, 21 bp, Homo sapiens
gaagaggcagtgcggccccct

SEQ ID NO: 80685 - DNA, 21 bp, Homo sapiens
attccctcctgattgcagata

SEQ ID NO: 80686 - DNA, 18 bp, Homo sapiens
agacaccgtgcgtgtgta

SEQ ID NO: 80687 - DNA, 18 bp, Homo sapiens
catggagggaggcaaaaa

SEQ ID NO: 80688 - DNA, 22 bp, Homo sapiens
tatcgctctcgtaccctgtgct

SEQ ID NO: 80689 - DNA, 17 bp, Homo sapiens
ataagaagaggtggggg

SEQ ID NO: 80690 - DNA, 20 bp, Homo sapiens
cctcttcttcttttctagag

SEQ ID NO: 80691 - DNA, 22 bp, Homo sapiens
cctgattacccacgtcagtcct

SEQ ID NO: 80692 - DNA, 23 bp, Homo sapiens
tggattctgggatctggggggct

SEQ ID NO: 80693 - DNA, 20 bp, Homo sapiens
tttgctttgccatctccgca

SEQ ID NO: 80694 - DNA, 17 bp, Homo sapiens
cagcactcttgatagct

SEQ ID NO: 80695 - DNA, 24 bp, Homo sapiens
ttcactgagctggagctcccagca

SEQ ID NO: 80696 - DNA, 18 bp, Homo sapiens
aatactgaacacaactca

SEQ ID NO: 80697 - DNA, 18 bp, Homo sapiens
acctggaatcagatgaac

SEQ ID NO: 80698 - DNA, 21 bp, Homo sapiens
cacagagagctttgccctttc

SEQ ID NO: 80699 - DNA, 20 bp, Homo sapiens
tttctaactctagatgtttt

SEQ ID NO: 80700 - DNA, 17 bp, Homo sapiens
tggttcaaacaggtata

SEQ ID NO: 80701 - DNA, 18 bp, Homo sapiens
aaaactccattgcttttg

SEQ ID NO: 80702 - DNA, 22 bp, Homo sapiens
ttaaggtggctcctaagttcat

SEQ ID NO: 80703 - DNA, 21 bp, Homo sapiens
taattcagatttgcatattct

SEQ ID NO: 80704 - DNA, 21 bp, Homo sapiens
tttggtataaattgtcactgt

SEQ ID NO: 80705 - DNA, 24 bp, Homo sapiens
gggagatcagctttaatttcctct

SEQ ID NO: 80706 - DNA, 23 bp, Homo sapiens
cagctgcaccggcagccaggctt

SEQ ID NO: 80707 - DNA, 24 bp, Homo sapiens
ctccaagaccctgcatgcccgcag

SEQ ID NO: 80708 - DNA, 23 bp, Homo sapiens
ctgcaggtgagcagcagtactcg

SEQ ID NO: 80709 - DNA, 23 bp, Homo sapiens
atgcgtcccctccggggtcccaa

SEQ ID NO: 80710 - DNA, 16 bp, Homo sapiens
cgcaccccgagccctt

SEQ ID NO: 80711 - DNA, 22 bp, Homo sapiens
tgtagggcgtcctcagcagcaa

SEQ ID NO: 80712 - DNA, 16 bp, Homo sapiens
ccaggccccagtgccc

SEQ ID NO: 80713 - DNA, 24 bp, Homo sapiens
tggcagccatagaccgggggcggc

SEQ ID NO: 80714 - DNA, 18 bp, Homo sapiens
ttcaagcatgaggatccc

SEQ ID NO: 80715 - DNA, 23 bp, Homo sapiens
atttctaaggtccttttagatgt

SEQ ID NO: 80716 - DNA, 21 bp, Homo sapiens
ccttcgacgggacgcccagct

SEQ ID NO: 80717 - DNA, 22 bp, Homo sapiens
gagaggaggatagcacggaaga

SEQ ID NO: 80718 - DNA, 23 bp, Homo sapiens
gagcaccgctgacactgtgcttc

SEQ ID NO: 80719 - DNA, 23 bp, Homo sapiens
cagcgagccctgctggcccatgg

SEQ ID NO: 80720 - DNA, 20 bp, Homo sapiens
gcggggttcagcgcacaccc

SEQ ID NO: 80721 - DNA, 19 bp, Homo sapiens
catggtgcgagggcgtgtg

SEQ ID NO: 80722 - DNA, 22 bp, Homo sapiens
ctgccgaaagtcctggaggctt

SEQ ID NO: 80723 - DNA, 16 bp, Homo sapiens
gtccctgcctactcct

SEQ ID NO: 80724 - DNA, 22 bp, Homo sapiens
agagagagaaagagagacagac

SEQ ID NO: 80725 - DNA, 22 bp, Homo sapiens
gacccacggccctcgccgggca

SEQ ID NO: 80726 - DNA, 23 bp, Homo sapiens
agagagagagagagagagacgaa

SEQ ID NO: 80727 - DNA, 17 bp, Homo sapiens
ggcccgagttctggggt

SEQ ID NO: 80728 - DNA, 24 bp, Homo sapiens
cctcctccccagccgccgcttccg

SEQ ID NO: 80729 - DNA, 21 bp, Homo sapiens
ggatgtttcctaacgcgccct

SEQ ID NO: 80730 - DNA, 18 bp, Homo sapiens
gtcaaaaggggtaggaga

SEQ ID NO: 80731 - DNA, 20 bp, Homo sapiens
gtcgctacgggcccttcggt

SEQ ID NO: 80732 - DNA, 19 bp, Homo sapiens
cgcgcgtagggggcgctcc

SEQ ID NO: 80733 - DNA, 16 bp, Homo sapiens
gtgcctgagcgccttc

SEQ ID NO: 80734 - DNA, 20 bp, Homo sapiens
ctcgaggcagctgggcaggt

SEQ ID NO: 80735 - DNA, 18 bp, Homo sapiens
cgcctcactccttcatca

SEQ ID NO: 80736 - DNA, 24 bp, Homo sapiens
cctggctgggcggaggaggaccga

SEQ ID NO: 80737 - DNA, 21 bp, Homo sapiens
cttcggcttacgggtcgttgg

SEQ ID NO: 80738 - DNA, 23 bp, Homo sapiens
actggccggaaaagtggacagtg

SEQ ID NO: 80739 - DNA, 20 bp, Homo sapiens
ctgtgagcggcgcggcgcag

SEQ ID NO: 80740 - DNA, 24 bp, Homo sapiens
gccccagctcggctcctgtttgat

SEQ ID NO: 80741 - DNA, 23 bp, Homo sapiens
gtgcgggacctgaacgcgctgct

SEQ ID NO: 80742 - DNA, 23 bp, Homo sapiens
gagccggtggcggcgcggggccg

SEQ ID NO: 80743 - DNA, 24 bp, Homo sapiens
cagggccggaggagccgcggggcg

SEQ ID NO: 80744 - DNA, 24 bp, Homo sapiens
aaagtccagcaccggcgcccactg

SEQ ID NO: 80745 - DNA, 21 bp, Homo sapiens
gacccgggcggcatctgggcc

SEQ ID NO: 80746 - DNA, 17 bp, Homo sapiens
gaggggacggcgggcag

SEQ ID NO: 80747 - DNA, 16 bp, Homo sapiens
cagcacacgctccgct

SEQ ID NO: 80748 - DNA, 18 bp, Homo sapiens
gctcagacccggacgccc

SEQ ID NO: 80749 - DNA, 22 bp, Homo sapiens
cgatcctggacttcctcttgct

SEQ ID NO: 80750 - DNA, 24 bp, Homo sapiens
gctggcctcggcggcgcctaactt

SEQ ID NO: 80751 - DNA, 24 bp, Homo sapiens
acccacccacccagagccgggacg

SEQ ID NO: 80752 - DNA, 24 bp, Homo sapiens
tggctgctgtaggcacccaggccc

SEQ ID NO: 80753 - DNA, 16 bp, Homo sapiens
gaccgcctgtccgctc

SEQ ID NO: 80754 - DNA, 24 bp, Homo sapiens
gacacacgtggaagccgggtcctg

SEQ ID NO: 80755 - DNA, 24 bp, Homo sapiens
ctcctcaccagcgacgaagtcgag

SEQ ID NO: 80756 - DNA, 21 bp, Homo sapiens
cttccggcatgcgcagggacg

SEQ ID NO: 80757 - DNA, 21 bp, Homo sapiens
aagacaaagggtaatccccgc

SEQ ID NO: 80758 - DNA, 16 bp, Homo sapiens
cgggcggctaggagtt

SEQ ID NO: 80759 - DNA, 24 bp, Homo sapiens
ctccctgggcctgcccttgccctg

SEQ ID NO: 80760 - DNA, 17 bp, Homo sapiens
cggtgtctacagtgttc

SEQ ID NO: 80761 - DNA, 24 bp, Homo sapiens
tgacctcccaaagtgctgggatta

SEQ ID NO: 80762 - DNA, 23 bp, Homo sapiens
tctgaatgatgtcacactgagca

SEQ ID NO: 80763 - DNA, 21 bp, Homo sapiens
catgactaaatgtgattgaat

SEQ ID NO: 80764 - DNA, 17 bp, Homo sapiens
caatcatgtccttttgg

SEQ ID NO: 80765 - DNA, 21 bp, Homo sapiens
gatgatagtcgtcattattgt

SEQ ID NO: 80766 - DNA, 18 bp, Homo sapiens
cgggctcttttggtttct

SEQ ID NO: 80767 - DNA, 17 bp, Homo sapiens
aggcacagcctattgtc

SEQ ID NO: 80768 - DNA, 20 bp, Homo sapiens
gtcccatacctaagaagaat

SEQ ID NO: 80769 - DNA, 18 bp, Homo sapiens
gcccaacagattcccaaa

SEQ ID NO: 80770 - DNA, 18 bp, Homo sapiens
gagtctctctgaacctac

SEQ ID NO: 80771 - DNA, 20 bp, Homo sapiens
gagagaactgatgaatccat

SEQ ID NO: 80772 - DNA, 18 bp, Homo sapiens
aaaaagaggttgagaagg

SEQ ID NO: 80773 - DNA, 16 bp, Homo sapiens
atgttggaaaactgca

SEQ ID NO: 80774 - DNA, 16 bp, Homo sapiens
catgtgctgcagatgt

SEQ ID NO: 80775 - DNA, 23 bp, Homo sapiens
atcgggcagcttcctgagccaga

SEQ ID NO: 80776 - DNA, 21 bp, Homo sapiens
gtagtaaatatcccagtcatt

SEQ ID NO: 80777 - DNA, 24 bp, Homo sapiens
ttggtgtcacttctcttttattag

SEQ ID NO: 80778 - DNA, 22 bp, Homo sapiens
actgtcctattttcacattatg

SEQ ID NO: 80779 - DNA, 20 bp, Homo sapiens
tttttagtctttttgctaaa

SEQ ID NO: 80780 - DNA, 23 bp, Homo sapiens
caaaaaaaaaaaagaaagaaaaa

SEQ ID NO: 80781 - DNA, 23 bp, Homo sapiens
atgaccgcctgattaacgagcct

SEQ ID NO: 80782 - DNA, 16 bp, Homo sapiens
gagccgagatcatgcc

SEQ ID NO: 80783 - DNA, 23 bp, Homo sapiens
cttcattttcaaatatttctggg

SEQ ID NO: 80784 - DNA, 21 bp, Homo sapiens
agaaggatggagacagtctat

SEQ ID NO: 80785 - DNA, 16 bp, Homo sapiens
acgcagtctctgctct

SEQ ID NO: 80786 - DNA, 19 bp, Homo sapiens
attctcatacctgagcatt

SEQ ID NO: 80787 - DNA, 17 bp, Homo sapiens
atgccaggccgtggagc

SEQ ID NO: 80788 - DNA, 18 bp, Homo sapiens
agaagctaaaccagcccc

SEQ ID NO: 80789 - DNA, 16 bp, Homo sapiens
agaagccggaagcaag

SEQ ID NO: 80790 - DNA, 24 bp, Homo sapiens
gactttgctaaaaacaaaaacaaa

SEQ ID NO: 80791 - DNA, 18 bp, Homo sapiens
gagagggttatgtccatc

SEQ ID NO: 80792 - DNA, 20 bp, Homo sapiens
gtgggtttgatacagactgt

SEQ ID NO: 80793 - DNA, 17 bp, Homo sapiens
agaaagtgtccacccct

SEQ ID NO: 80794 - DNA, 18 bp, Homo sapiens
ctttgggctgggggcaga

SEQ ID NO: 80795 - DNA, 22 bp, Homo sapiens
tcaactcgagcgccatcaagct

SEQ ID NO: 80796 - DNA, 23 bp, Homo sapiens
gagcctgggtccccacaagcggt

SEQ ID NO: 80797 - DNA, 18 bp, Homo sapiens
cactttccagagtgagaa

SEQ ID NO: 80798 - DNA, 24 bp, Homo sapiens
ttgaggaaagacagagtgtagtca

SEQ ID NO: 80799 - DNA, 16 bp, Homo sapiens
gtggcagcacggctca

SEQ ID NO: 80800 - DNA, 24 bp, Homo sapiens
ttgcgactgtgccgtgagttgcag

SEQ ID NO: 80801 - DNA, 20 bp, Homo sapiens
cagtgtcaggacccccccgg

SEQ ID NO: 80802 - DNA, 22 bp, Homo sapiens
ctccttcatgcccttcatcttc

SEQ ID NO: 80803 - DNA, 23 bp, Homo sapiens
cagaggagcccccgccgcccaag

SEQ ID NO: 80804 - DNA, 16 bp, Homo sapiens
gggtgctggcacctga

SEQ ID NO: 80805 - DNA, 21 bp, Homo sapiens
cgtggggcgaggaagcccggg

SEQ ID NO: 80806 - DNA, 24 bp, Homo sapiens
agcgacagtcccaggaggcttccg

SEQ ID NO: 80807 - DNA, 20 bp, Homo sapiens
gtgcggcagaaggtgcgcat

SEQ ID NO: 80808 - DNA, 17 bp, Homo sapiens
gtccagtgctggcttct

SEQ ID NO: 80809 - DNA, 21 bp, Homo sapiens
cagggtcctggagttccagcc

SEQ ID NO: 80810 - DNA, 19 bp, Homo sapiens
gggccccgccgccggcctt

SEQ ID NO: 80811 - DNA, 16 bp, Homo sapiens
cttgggtgccgatggg

SEQ ID NO: 80812 - DNA, 16 bp, Homo sapiens
tctcggctcactatgc

SEQ ID NO: 80813 - DNA, 23 bp, Homo sapiens
cagtccctaggccgttttgaggg

SEQ ID NO: 80814 - DNA, 24 bp, Homo sapiens
tcccatcccacccagggggtctca

SEQ ID NO: 80815 - DNA, 22 bp, Homo sapiens
caaatgggaggagggcagtccc

SEQ ID NO: 80816 - DNA, 20 bp, Homo sapiens
cagaaaagtctgacaagccc

SEQ ID NO: 80817 - DNA, 21 bp, Homo sapiens
ccgccctccaggaccctgagt

SEQ ID NO: 80818 - DNA, 22 bp, Homo sapiens
ctgtgcagctgtccctcacctg

SEQ ID NO: 80819 - DNA, 19 bp, Homo sapiens
gtaagagactgatctgtgc

SEQ ID NO: 80820 - DNA, 16 bp, Homo sapiens
tgcagcacaggcgtgg

SEQ ID NO: 80821 - DNA, 19 bp, Homo sapiens
gagccaggggtctttgcct

SEQ ID NO: 80822 - DNA, 18 bp, Homo sapiens
gcagcaggtgggcgaagc

SEQ ID NO: 80823 - DNA, 20 bp, Homo sapiens
attggctttataaaaggaaa

SEQ ID NO: 80824 - DNA, 24 bp, Homo sapiens
aggagcggccgggggagcaaagcc

SEQ ID NO: 80825 - DNA, 24 bp, Homo sapiens
tagcaaaagggaacatagctgtct

SEQ ID NO: 80826 - DNA, 18 bp, Homo sapiens
ccaatgatgtcatcccca

SEQ ID NO: 80827 - DNA, 18 bp, Homo sapiens
gcagcccccatggcctgt

SEQ ID NO: 80828 - DNA, 22 bp, Homo sapiens
ctgctctcacagctacaactac

SEQ ID NO: 80829 - DNA, 22 bp, Homo sapiens
ctggagctccagcctttcacct

SEQ ID NO: 80830 - DNA, 18 bp, Homo sapiens
gtccctggggctaccccc

SEQ ID NO: 80831 - DNA, 24 bp, Homo sapiens
agctggctgcctccttcagcaggt

SEQ ID NO: 80832 - DNA, 16 bp, Homo sapiens
tcattttgcagtgagg

SEQ ID NO: 80833 - DNA, 21 bp, Homo sapiens
tgtagatctcctcgtcttccc

SEQ ID NO: 80834 - DNA, 18 bp, Homo sapiens
gacacggccactgtcatc

SEQ ID NO: 80835 - DNA, 21 bp, Homo sapiens
gtggccttgctgcctagggac

SEQ ID NO: 80836 - DNA, 17 bp, Homo sapiens
atgtacctggctggcta

SEQ ID NO: 80837 - DNA, 16 bp, Homo sapiens
gacgagggtggttgga

SEQ ID NO: 80838 - DNA, 22 bp, Homo sapiens
ctccatccagggcattgcctca

SEQ ID NO: 80839 - DNA, 24 bp, Homo sapiens
tagtagggggatcctcactcctgg

SEQ ID NO: 80840 - DNA, 16 bp, Homo sapiens
gcatttgtgccagcag

SEQ ID NO: 80841 - DNA, 23 bp, Homo sapiens
cacattgcggttgcgacagtggt

SEQ ID NO: 80842 - DNA, 18 bp, Homo sapiens
gagtggagatggagagga

SEQ ID NO: 80843 - DNA, 22 bp, Homo sapiens
gatagtaggtcttggctgaggc

SEQ ID NO: 80844 - DNA, 24 bp, Homo sapiens
acagccctgactgaactgattctg

SEQ ID NO: 80845 - DNA, 18 bp, Homo sapiens
tagaggagctggagccca

SEQ ID NO: 80846 - DNA, 20 bp, Homo sapiens
acacacaaagttctcttctc

SEQ ID NO: 80847 - DNA, 24 bp, Homo sapiens
ggctgggtggcagcctgaattatg

SEQ ID NO: 80848 - DNA, 23 bp, Homo sapiens
cactgttagggtctcccttctgc

SEQ ID NO: 80849 - DNA, 24 bp, Homo sapiens
ggacatctggaaaggtcagtagag

SEQ ID NO: 80850 - DNA, 22 bp, Homo sapiens
gtctggccggccaggggtgggc

SEQ ID NO: 80851 - DNA, 19 bp, Homo sapiens
gctcataactctctccttc

SEQ ID NO: 80852 - DNA, 18 bp, Homo sapiens
ggtacctaggaaaggatc

SEQ ID NO: 80853 - DNA, 23 bp, Homo sapiens
ctgttggttctgacccccacctc

SEQ ID NO: 80854 - DNA, 17 bp, Homo sapiens
ctggccacttccctcta

SEQ ID NO: 80855 - DNA, 16 bp, Homo sapiens
gactccattaaagggc

SEQ ID NO: 80856 - DNA, 22 bp, Homo sapiens
tactctcccaagagccctggga

SEQ ID NO: 80857 - DNA, 16 bp, Homo sapiens
ccatcaacccttccat

SEQ ID NO: 80858 - DNA, 24 bp, Homo sapiens
aggaggggaagctgaagctcagga

SEQ ID NO: 80859 - DNA, 22 bp, Homo sapiens
ctgtacctgaaaggatcataca

SEQ ID NO: 80860 - DNA, 24 bp, Homo sapiens
gtcaagtctggcctagcccagtcc

SEQ ID NO: 80861 - DNA, 23 bp, Homo sapiens
aagcaggcacagggtgggccatc

SEQ ID NO: 80862 - DNA, 18 bp, Homo sapiens
gagtcggtgtgcaggtca

SEQ ID NO: 80863 - DNA, 16 bp, Homo sapiens
acataggaagggaaga

SEQ ID NO: 80864 - DNA, 16 bp, Homo sapiens
tgcggtcacagcgcat

SEQ ID NO: 80865 - DNA, 20 bp, Homo sapiens
tagtagcccaagccacccaa

SEQ ID NO: 80866 - DNA, 24 bp, Homo sapiens
caatgccggtgtggctgagcgggt

SEQ ID NO: 80867 - DNA, 24 bp, Homo sapiens
ccaggaaaaggggctcttctgtct

SEQ ID NO: 80868 - DNA, 19 bp, Homo sapiens
acagctgaggtcacctggc

SEQ ID NO: 80869 - DNA, 17 bp, Homo sapiens
agaaaatggagtccctt

SEQ ID NO: 80870 - DNA, 17 bp, Homo sapiens
cacctcgccctgtctga

SEQ ID NO: 80871 - DNA, 24 bp, Homo sapiens
acaaggctggggggagggaacaat

SEQ ID NO: 80872 - DNA, 21 bp, Homo sapiens
caaattggacagctccggtgt

SEQ ID NO: 80873 - DNA, 21 bp, Homo sapiens
ctcgttgcccttgccgtgcca

SEQ ID NO: 80874 - DNA, 18 bp, Homo sapiens
atgttaaagcacagagga

SEQ ID NO: 80875 - DNA, 22 bp, Homo sapiens
cactacccaggcatgatcctca

SEQ ID NO: 80876 - DNA, 21 bp, Homo sapiens
gtcacaggcttggaaagggag

SEQ ID NO: 80877 - DNA, 20 bp, Homo sapiens
ggcaggccccaaccacagca

SEQ ID NO: 80878 - DNA, 19 bp, Homo sapiens
ctttgaacacgtgggaggg

SEQ ID NO: 80879 - DNA, 16 bp, Homo sapiens
catgccgtgtgtgact

SEQ ID NO: 80880 - DNA, 16 bp, Homo sapiens
atccagtccctcttca

SEQ ID NO: 80881 - DNA, 21 bp, Homo sapiens
ttcccaactgcaaagaggaaa

SEQ ID NO: 80882 - DNA, 18 bp, Homo sapiens
aaggtctccgatgtcata

SEQ ID NO: 80883 - DNA, 24 bp, Homo sapiens
taaaagggttctgtaaaccatgga

SEQ ID NO: 80884 - DNA, 17 bp, Homo sapiens
gtcgacctgtccctcta

SEQ ID NO: 80885 - DNA, 22 bp, Homo sapiens
ctgggctccaacctgtgatgaa

SEQ ID NO: 80886 - DNA, 20 bp, Homo sapiens
ccgtggccgacctgtctatc

SEQ ID NO: 80887 - DNA, 24 bp, Homo sapiens
aggagcggctgaggctgttccata

SEQ ID NO: 80888 - DNA, 19 bp, Homo sapiens
gagctcaccttccagccca

SEQ ID NO: 80889 - DNA, 16 bp, Homo sapiens
cttctcgaggatagag

SEQ ID NO: 80890 - DNA, 23 bp, Homo sapiens
cttggtgctgggcttcgtggagc

SEQ ID NO: 80891 - DNA, 24 bp, Homo sapiens
tgaagcgggcatagagggcggcga

SEQ ID NO: 80892 - DNA, 23 bp, Homo sapiens
gacgacgtggtgcgcctgtttgc

SEQ ID NO: 80893 - DNA, 21 bp, Homo sapiens
aggcgggtcgggggcggggct

SEQ ID NO: 80894 - DNA, 22 bp, Homo sapiens
cgccgccatggggctgaaggcc

SEQ ID NO: 80895 - DNA, 22 bp, Homo sapiens
gttgacagccagaaaatgctcc

SEQ ID NO: 80896 - DNA, 17 bp, Homo sapiens
ggccgaacctgcccgac

SEQ ID NO: 80897 - DNA, 21 bp, Homo sapiens
gctcctctcggcccagctcgg

SEQ ID NO: 80898 - DNA, 23 bp, Homo sapiens
aagcaggggagctgtgcgtgtgt

SEQ ID NO: 80899 - DNA, 24 bp, Homo sapiens
gcgggaacagcgtcttctgggcgg

SEQ ID NO: 80900 - DNA, 19 bp, Homo sapiens
agagaaccaatcaccatcc

SEQ ID NO: 80901 - DNA, 19 bp, Homo sapiens
tcacacgtttttggatccc

SEQ ID NO: 80902 - DNA, 16 bp, Homo sapiens
gctagctcggaagctg

SEQ ID NO: 80903 - DNA, 16 bp, Homo sapiens
tagacacgaaccttgg

SEQ ID NO: 80904 - DNA, 24 bp, Homo sapiens
taccgagcgagtccggaagttgcc

SEQ ID NO: 80905 - DNA, 21 bp, Homo sapiens
ctctcgcctaaggcctcctcc

SEQ ID NO: 80906 - DNA, 24 bp, Homo sapiens
gatatcatcgcaagactccgggag

SEQ ID NO: 80907 - DNA, 17 bp, Homo sapiens
gttctgcatgtgagcgg

SEQ ID NO: 80908 - DNA, 20 bp, Homo sapiens
tcccggactttcaagatggg

SEQ ID NO: 80909 - DNA, 24 bp, Homo sapiens
tccttgtggctttgttttctcacc

SEQ ID NO: 80910 - DNA, 16 bp, Homo sapiens
gcacggtgccctcgtc

SEQ ID NO: 80911 - DNA, 24 bp, Homo sapiens
gtccccggggaagccccgtccctt

SEQ ID NO: 80912 - DNA, 23 bp, Homo sapiens
acaggcagcttgaacttcttgcc

SEQ ID NO: 80913 - DNA, 22 bp, Homo sapiens
gggggtcagggtgagggtttgt

SEQ ID NO: 80914 - DNA, 24 bp, Homo sapiens
atgtcacagaggaactgggcaatc

SEQ ID NO: 80915 - DNA, 17 bp, Homo sapiens
taccggacgctgcacag

SEQ ID NO: 80916 - DNA, 19 bp, Homo sapiens
gaatagggcttggctggac

SEQ ID NO: 80917 - DNA, 24 bp, Homo sapiens
gtggcaagcccatggagctcatca

SEQ ID NO: 80918 - DNA, 24 bp, Homo sapiens
aagaaagcgggtggcagtctagca

SEQ ID NO: 80919 - DNA, 19 bp, Homo sapiens
tgcaccatgcgagaagggg

SEQ ID NO: 80920 - DNA, 18 bp, Homo sapiens
atcgtaccactgcactcc

SEQ ID NO: 80921 - DNA, 24 bp, Homo sapiens
gaattaaaagcctcctgtgcttaa

SEQ ID NO: 80922 - DNA, 19 bp, Homo sapiens
gtccttgcccaccgcgatg

SEQ ID NO: 80923 - DNA, 22 bp, Homo sapiens
gtgtttgttctcagatggtggt

SEQ ID NO: 80924 - DNA, 23 bp, Homo sapiens
tggcccagggagctgtgttcacg

SEQ ID NO: 80925 - DNA, 24 bp, Homo sapiens
gccagcccacggtgacagagcccc

SEQ ID NO: 80926 - DNA, 16 bp, Homo sapiens
gtggaagatgaggggc

SEQ ID NO: 80927 - DNA, 16 bp, Homo sapiens
caagagtctccgcaac

SEQ ID NO: 80928 - DNA, 23 bp, Homo sapiens
cgccctgaggctgggcagtgggg

SEQ ID NO: 80929 - DNA, 24 bp, Homo sapiens
ggcactgctgcggtgttgcacaga

SEQ ID NO: 80930 - DNA, 17 bp, Homo sapiens
ctcccccagcagtccac

SEQ ID NO: 80931 - DNA, 20 bp, Homo sapiens
gccctgcagcagaaccccca

SEQ ID NO: 80932 - DNA, 17 bp, Homo sapiens
aaaggagacccagggta

SEQ ID NO: 80933 - DNA, 16 bp, Homo sapiens
gcccatgggtcctgct

SEQ ID NO: 80934 - DNA, 22 bp, Homo sapiens
tctgctgctggtgtgtgatgtc

SEQ ID NO: 80935 - DNA, 22 bp, Homo sapiens
tcgcggtacaaccggttgccct

SEQ ID NO: 80936 - DNA, 23 bp, Homo sapiens
ctgctgacggacgcagctgtggt

SEQ ID NO: 80937 - DNA, 22 bp, Homo sapiens
ggttcttgaggcaggcaatggc

SEQ ID NO: 80938 - DNA, 21 bp, Homo sapiens
gtggagagccctggcacgtac

SEQ ID NO: 80939 - DNA, 17 bp, Homo sapiens
cacacccccctccatcc

SEQ ID NO: 80940 - DNA, 22 bp, Homo sapiens
cagtgccacttatccaccagga

SEQ ID NO: 80941 - DNA, 24 bp, Homo sapiens
ggctgttcctgggagtatgggggc

SEQ ID NO: 80942 - DNA, 23 bp, Homo sapiens
ggaggctgctgccaagtactacg

SEQ ID NO: 80943 - DNA, 21 bp, Homo sapiens
cagtagttgagcagcagcggc

SEQ ID NO: 80944 - DNA, 20 bp, Homo sapiens
gaggctgagggggaggatgg

SEQ ID NO: 80945 - DNA, 22 bp, Homo sapiens
gaggatggaagagcagtggtcc

SEQ ID NO: 80946 - DNA, 23 bp, Homo sapiens
gtctacagcttctccccgctccc

SEQ ID NO: 80947 - DNA, 23 bp, Homo sapiens
tctgaccactcgcagcccccggc

SEQ ID NO: 80948 - DNA, 20 bp, Homo sapiens
gatccagctggaccagcaga

SEQ ID NO: 80949 - DNA, 16 bp, Homo sapiens
gaatgggggttgtgaa

SEQ ID NO: 80950 - DNA, 20 bp, Homo sapiens
ggagtactacgaggtgctgg

SEQ ID NO: 80951 - DNA, 17 bp, Homo sapiens
atggggcccacagccct

SEQ ID NO: 80952 - DNA, 24 bp, Homo sapiens
atggtgtattgggggtggggtggc

SEQ ID NO: 80953 - DNA, 20 bp, Homo sapiens
agcctgggcctcctgggcat

SEQ ID NO: 80954 - DNA, 24 bp, Homo sapiens
ccatggtgccaggagacatgaggg

SEQ ID NO: 80955 - DNA, 24 bp, Homo sapiens
agggcctgcagctctcggctcacc

SEQ ID NO: 80956 - DNA, 16 bp, Homo sapiens
ctgcccactggcctcc

SEQ ID NO: 80957 - DNA, 16 bp, Homo sapiens
cccggaaccgggcttt

SEQ ID NO: 80958 - DNA, 16 bp, Homo sapiens
ggccgtgtggaatgcc

SEQ ID NO: 80959 - DNA, 16 bp, Homo sapiens
gctgcagcagtgggct

SEQ ID NO: 80960 - DNA, 24 bp, Homo sapiens
ctggacccagccctggcgcctgtg

SEQ ID NO: 80961 - DNA, 22 bp, Homo sapiens
gagataaataaaggcctttata

SEQ ID NO: 80962 - DNA, 16 bp, Homo sapiens
cagaaggacgaagagg

SEQ ID NO: 80963 - DNA, 21 bp, Homo sapiens
agtaccaggaatgccaggtga

SEQ ID NO: 80964 - DNA, 23 bp, Homo sapiens
ttaaaaaaacaaggtgaatcaat

SEQ ID NO: 80965 - DNA, 22 bp, Homo sapiens
tgatccttttatgaacactagt

SEQ ID NO: 80966 - DNA, 18 bp, Homo sapiens
atggagttatgctcagga

SEQ ID NO: 80967 - DNA, 17 bp, Homo sapiens
ttcagtgaagcagggaa

SEQ ID NO: 80968 - DNA, 20 bp, Homo sapiens
aacattttcatttttcctgt

SEQ ID NO: 80969 - DNA, 20 bp, Homo sapiens
atcccatgtgaaatgactct

SEQ ID NO: 80970 - DNA, 25 bp, Homo sapiens
ctatttcttcttaaagaactagtgt

SEQ ID NO: 80971 - DNA, 24 bp, Homo sapiens
ctcattaagaatttaattgtactt

SEQ ID NO: 80972 - DNA, 18 bp, Homo sapiens
caaacctcagcatcacgc

SEQ ID NO: 80973 - DNA, 19 bp, Homo sapiens
cccagagtcaagtatcgaa

SEQ ID NO: 80974 - DNA, 23 bp, Homo sapiens
aaagatgaagttatttatcaaag

SEQ ID NO: 80975 - DNA, 21 bp, Homo sapiens
tgtgtttgtttttgtttttgt

SEQ ID NO: 80976 - DNA, 22 bp, Homo sapiens
attttataaagttaaaaattaa

SEQ ID NO: 80977 - DNA, 17 bp, Homo sapiens
ggcagctgctggattga

SEQ ID NO: 80978 - DNA, 16 bp, Homo sapiens
atcaacccctttcgat

SEQ ID NO: 80979 - DNA, 18 bp, Homo sapiens
aagttttattgccgctaa

SEQ ID NO: 80980 - DNA, 20 bp, Homo sapiens
tctataaactagcccttggt

SEQ ID NO: 80981 - DNA, 18 bp, Homo sapiens
agatgaatcagatgtgga

SEQ ID NO: 80982 - DNA, 22 bp, Homo sapiens
aagtctgttaaacttacatggc

SEQ ID NO: 80983 - DNA, 17 bp, Homo sapiens
cagagtctattctcaca

SEQ ID NO: 80984 - DNA, 19 bp, Homo sapiens
tttcagatgtttcttttgc

SEQ ID NO: 80985 - DNA, 20 bp, Homo sapiens
ttgtggctcatatataactt

SEQ ID NO: 80986 - DNA, 22 bp, Homo sapiens
tgaagtggtaggaaaaatgtct

SEQ ID NO: 80987 - DNA, 18 bp, Homo sapiens
ggagggaggtcagactga

SEQ ID NO: 80988 - DNA, 19 bp, Homo sapiens
aatcctagaagccctagag

SEQ ID NO: 80989 - DNA, 19 bp, Homo sapiens
tctagcctttaaatctaca

SEQ ID NO: 80990 - DNA, 27 bp, Homo sapiens
taatttttcttcttttatttactttgt

SEQ ID NO: 80991 - DNA, 17 bp, Homo sapiens
tgcaagtttttctaagt

SEQ ID NO: 80992 - DNA, 24 bp, Homo sapiens
attaatacacaaccataaaacttt

SEQ ID NO: 80993 - DNA, 24 bp, Homo sapiens
ttataattaggcatcattcagttt

SEQ ID NO: 80994 - DNA, 16 bp, Homo sapiens
cgggaaggctgctgtc

SEQ ID NO: 80995 - DNA, 17 bp, Homo sapiens
ctaatgcatagcaaaga

SEQ ID NO: 80996 - DNA, 19 bp, Homo sapiens
gcaggaactcaaagactgc

SEQ ID NO: 80997 - DNA, 21 bp, Homo sapiens
ttgcccttataacttcccaat

SEQ ID NO: 80998 - DNA, 22 bp, Homo sapiens
ttgtacattgactgttcatttt

SEQ ID NO: 80999 - DNA, 19 bp, Homo sapiens
tctttctaatgttggaatt

SEQ ID NO: 81000 - DNA, 25 bp, Homo sapiens
ataagtttatttagctttcattttt

SEQ ID NO: 81001 - DNA, 18 bp, Homo sapiens
tttctagatgctgacaca

SEQ ID NO: 81002 - DNA, 22 bp, Homo sapiens
actctagatgtttgttcttata

SEQ ID NO: 81003 - DNA, 16 bp, Homo sapiens
tcagcatcgagaggag

SEQ ID NO: 81004 - DNA, 18 bp, Homo sapiens
ttttaaagaaccgtgttt

SEQ ID NO: 81005 - DNA, 16 bp, Homo sapiens
atctcagcagcaacca

SEQ ID NO: 81006 - DNA, 19 bp, Homo sapiens
gtattttccactcaactgc

SEQ ID NO: 81007 - DNA, 20 bp, Homo sapiens
gctgatgaccttatgagtat

SEQ ID NO: 81008 - DNA, 23 bp, Homo sapiens
ctcacctcttcctctttgagacc

SEQ ID NO: 81009 - DNA, 18 bp, Homo sapiens
tgaccagggccagagcac

SEQ ID NO: 81010 - DNA, 20 bp, Homo sapiens
acctcttcctcggcctcttc

SEQ ID NO: 81011 - DNA, 19 bp, Homo sapiens
tttttaggatggtacgtta

SEQ ID NO: 81012 - DNA, 19 bp, Homo sapiens
gccatctgttctgctaaat

SEQ ID NO: 81013 - DNA, 17 bp, Homo sapiens
gtcagcctcctttatgt

SEQ ID NO: 81014 - DNA, 23 bp, Homo sapiens
agactcctctgactgagatctga

SEQ ID NO: 81015 - DNA, 18 bp, Homo sapiens
atttgtaggctgaactga

SEQ ID NO: 81016 - DNA, 19 bp, Homo sapiens
cagagaaaccagacaaaaa

SEQ ID NO: 81017 - DNA, 18 bp, Homo sapiens
cccctagacctatggact

SEQ ID NO: 81018 - DNA, 16 bp, Homo sapiens
aactggaataggcaac

SEQ ID NO: 81019 - DNA, 25 bp, Homo sapiens
taagaaagtgatatataaacacaag

SEQ ID NO: 81020 - DNA, 19 bp, Homo sapiens
ttgttaaatttgcaagttt

SEQ ID NO: 81021 - DNA, 26 bp, Homo sapiens
atcttcttcattagtatttttttgtc

SEQ ID NO: 81022 - DNA, 19 bp, Homo sapiens
cattgtgcaattttaacgt

SEQ ID NO: 81023 - DNA, 22 bp, Homo sapiens
acattttctaatttaaccttca

SEQ ID NO: 81024 - DNA, 18 bp, Homo sapiens
gcgatttcttaaagaacg

SEQ ID NO: 81025 - DNA, 22 bp, Homo sapiens
agagaggttaaatagtgattta

SEQ ID NO: 81026 - DNA, 18 bp, Homo sapiens
tgtggacaaggaggagaa

SEQ ID NO: 81027 - DNA, 22 bp, Homo sapiens
gacagactatttaaatagacct

SEQ ID NO: 81028 - DNA, 16 bp, Homo sapiens
tgtgcagctctcactg

SEQ ID NO: 81029 - DNA, 18 bp, Homo sapiens
tcgagggcatcaatatga

SEQ ID NO: 81030 - DNA, 25 bp, Homo sapiens
tccttgctcatctataattattttg

SEQ ID NO: 81031 - DNA, 17 bp, Homo sapiens
attcctcaatggcatct

SEQ ID NO: 81032 - DNA, 17 bp, Homo sapiens
actacagctgttcacta

SEQ ID NO: 81033 - DNA, 20 bp, Homo sapiens
cccatccctctttctgttag

SEQ ID NO: 81034 - DNA, 23 bp, Homo sapiens
ttccctgctgtgcagcaactgca

SEQ ID NO: 81035 - DNA, 21 bp, Homo sapiens
aggaacaactttaagggtaga

SEQ ID NO: 81036 - DNA, 20 bp, Homo sapiens
ggattcattttgtttaaact

SEQ ID NO: 81037 - DNA, 19 bp, Homo sapiens
tttttttctaggagaagag

SEQ ID NO: 81038 - DNA, 18 bp, Homo sapiens
aggtagccattattcaaa

SEQ ID NO: 81039 - DNA, 17 bp, Homo sapiens
tgacaacttgcaatgag

SEQ ID NO: 81040 - DNA, 24 bp, Homo sapiens
ggtttgaaagtactgttttacaag

SEQ ID NO: 81041 - DNA, 22 bp, Homo sapiens
gcctcaaaatttaccatgttga

SEQ ID NO: 81042 - DNA, 18 bp, Homo sapiens
ttcccaaagttgatctct

SEQ ID NO: 81043 - DNA, 17 bp, Homo sapiens
tccattttttcaggcat

SEQ ID NO: 81044 - DNA, 21 bp, Homo sapiens
ttgtttaagacattacaatca

SEQ ID NO: 81045 - DNA, 17 bp, Homo sapiens
gtgttcttcgctttagc

SEQ ID NO: 81046 - DNA, 21 bp, Homo sapiens
aaagattccttcacaaatcct

SEQ ID NO: 81047 - DNA, 18 bp, Homo sapiens
tcctagcgttcatagatt

SEQ ID NO: 81048 - DNA, 19 bp, Homo sapiens
gttttttccttttgttctc

SEQ ID NO: 81049 - DNA, 17 bp, Homo sapiens
actgtgaatactgaagg

SEQ ID NO: 81050 - DNA, 16 bp, Homo sapiens
cccgatccacaaattt

SEQ ID NO: 81051 - DNA, 19 bp, Homo sapiens
tagctccatcatgatctac

SEQ ID NO: 81052 - DNA, 24 bp, Homo sapiens
taactcaaatccttatatctttgt

SEQ ID NO: 81053 - DNA, 16 bp, Homo sapiens
ctgaacgggaacgtct

SEQ ID NO: 81054 - DNA, 17 bp, Homo sapiens
actctcctcactacttt

SEQ ID NO: 81055 - DNA, 18 bp, Homo sapiens
actcagtttactacgttg

SEQ ID NO: 81056 - DNA, 20 bp, Homo sapiens
aaattaataatattcaatct

SEQ ID NO: 81057 - DNA, 22 bp, Homo sapiens
aaagatgattatgtagttcagg

SEQ ID NO: 81058 - DNA, 18 bp, Homo sapiens
ggctggtgagaattaccc

SEQ ID NO: 81059 - DNA, 18 bp, Homo sapiens
ggagcattacaagaaggt

SEQ ID NO: 81060 - DNA, 22 bp, Homo sapiens
acaattaaacacattcactgaa

SEQ ID NO: 81061 - DNA, 20 bp, Homo sapiens
cagacatttttaacccagat

SEQ ID NO: 81062 - DNA, 17 bp, Homo sapiens
aggcttccctctactct

SEQ ID NO: 81063 - DNA, 16 bp, Homo sapiens
cttcacacagtgcggc

SEQ ID NO: 81064 - DNA, 24 bp, Homo sapiens
aaagtagatctcattgactttatc

SEQ ID NO: 81065 - DNA, 18 bp, Homo sapiens
tccacttcagacatgttg

SEQ ID NO: 81066 - DNA, 24 bp, Homo sapiens
ctttgtatggcttgggttacttta

SEQ ID NO: 81067 - DNA, 16 bp, Homo sapiens
tcgtttgcacatcacc

SEQ ID NO: 81068 - DNA, 19 bp, Homo sapiens
atcctccatgaaaaactgc

SEQ ID NO: 81069 - DNA, 25 bp, Homo sapiens
acatttatttttaagagtatgattt

SEQ ID NO: 81070 - DNA, 16 bp, Homo sapiens
aatacgcagcaaacca

SEQ ID NO: 81071 - DNA, 20 bp, Homo sapiens
tctggaaaaacaataagact

SEQ ID NO: 81072 - DNA, 17 bp, Homo sapiens
aagctcagtggttactt

SEQ ID NO: 81073 - DNA, 17 bp, Homo sapiens
atgacaatactgccagt

SEQ ID NO: 81074 - DNA, 18 bp, Homo sapiens
gagtgtaaaatagctcca

SEQ ID NO: 81075 - DNA, 26 bp, Homo sapiens
agatgattagttattatagcaaagat

SEQ ID NO: 81076 - DNA, 18 bp, Homo sapiens
acttcattccagaacaat

SEQ ID NO: 81077 - DNA, 19 bp, Homo sapiens
ttacagcttctcctgggga

SEQ ID NO: 81078 - DNA, 21 bp, Homo sapiens
tttctaatcaccgaatttata

SEQ ID NO: 81079 - DNA, 19 bp, Homo sapiens
tgttgttcatttttggttg

SEQ ID NO: 81080 - DNA, 22 bp, Homo sapiens
gcaataaaatctttagtgaatg

SEQ ID NO: 81081 - DNA, 19 bp, Homo sapiens
tcaatgaagtcatccaaaa

SEQ ID NO: 81082 - DNA, 18 bp, Homo sapiens
tgatctttacattcccaa

SEQ ID NO: 81083 - DNA, 18 bp, Homo sapiens
tcaaaatgaaatcacaca

SEQ ID NO: 81084 - DNA, 19 bp, Homo sapiens
tgttgagaccaaaggaaga

SEQ ID NO: 81085 - DNA, 18 bp, Homo sapiens
cttgaaagattaagggca

SEQ ID NO: 81086 - DNA, 21 bp, Homo sapiens
ttcaggatccattccagatga

SEQ ID NO: 81087 - DNA, 17 bp, Homo sapiens
cagcacttggctcaaac

SEQ ID NO: 81088 - DNA, 22 bp, Homo sapiens
agattcattttttaagccgaag

SEQ ID NO: 81089 - DNA, 17 bp, Homo sapiens
aaaccaagagttctcat

SEQ ID NO: 81090 - DNA, 21 bp, Homo sapiens
tcaaatatatctcccaacagt

SEQ ID NO: 81091 - DNA, 18 bp, Homo sapiens
ttcgatagagcctttcat

SEQ ID NO: 81092 - DNA, 18 bp, Homo sapiens
aagacattttttcaccaa

SEQ ID NO: 81093 - DNA, 20 bp, Homo sapiens
tgcttcaaaaaggaagcaca

SEQ ID NO: 81094 - DNA, 18 bp, Homo sapiens
aagaataaggtttgcccc

SEQ ID NO: 81095 - DNA, 19 bp, Homo sapiens
tgctggatttgtaaatcac

SEQ ID NO: 81096 - DNA, 21 bp, Homo sapiens
caattgtttaaagaatcacac

SEQ ID NO: 81097 - DNA, 23 bp, Homo sapiens
acattctttgaaattattttgca

SEQ ID NO: 81098 - DNA, 17 bp, Homo sapiens
tagcgcaatctttgtgc

SEQ ID NO: 81099 - DNA, 20 bp, Homo sapiens
cttttaacaggtgatacgat

SEQ ID NO: 81100 - DNA, 18 bp, Homo sapiens
cagacattgaacgtccaa

SEQ ID NO: 81101 - DNA, 22 bp, Homo sapiens
aattttgttttgagaagacact

SEQ ID NO: 81102 - DNA, 18 bp, Homo sapiens
ggcacaaagtgcatctgc

SEQ ID NO: 81103 - DNA, 23 bp, Homo sapiens
tcagatttttaaaaaatctaaaa

SEQ ID NO: 81104 - DNA, 21 bp, Homo sapiens
agtgtttagtattcatggcaa

SEQ ID NO: 81105 - DNA, 22 bp, Homo sapiens
tcaacttgacttttgactcaat

SEQ ID NO: 81106 - DNA, 22 bp, Homo sapiens
agtaactttttttttttaaggt

SEQ ID NO: 81107 - DNA, 20 bp, Homo sapiens
aactaaactgatcatttcca

SEQ ID NO: 81108 - DNA, 18 bp, Homo sapiens
tttggaggagaatcttag

SEQ ID NO: 81109 - DNA, 18 bp, Homo sapiens
gatcgtcatgattgccat

SEQ ID NO: 81110 - DNA, 18 bp, Homo sapiens
aaagctctaaactagtgg

SEQ ID NO: 81111 - DNA, 19 bp, Homo sapiens
gatagttcacccatggaaa

SEQ ID NO: 81112 - DNA, 24 bp, Homo sapiens
atataaattaatacaatgatgtac

SEQ ID NO: 81113 - DNA, 17 bp, Homo sapiens
tgatcggcctgtccagt

SEQ ID NO: 81114 - DNA, 16 bp, Homo sapiens
atggaaggcaaaacag

SEQ ID NO: 81115 - DNA, 17 bp, Homo sapiens
gccctcaaggaaaacat

SEQ ID NO: 81116 - DNA, 19 bp, Homo sapiens
acacaagtaatcactcact

SEQ ID NO: 81117 - DNA, 19 bp, Homo sapiens
taacacctttttctgttga

SEQ ID NO: 81118 - DNA, 18 bp, Homo sapiens
gactgatcactgagaatt

SEQ ID NO: 81119 - DNA, 20 bp, Homo sapiens
tttttatctctttcatctgt

SEQ ID NO: 81120 - DNA, 16 bp, Homo sapiens
ctcgaggcaggtatgt

SEQ ID NO: 81121 - DNA, 27 bp, Homo sapiens
ctttgaataaataaaatgtaaattttt

SEQ ID NO: 81122 - DNA, 19 bp, Homo sapiens
acaaaataaaatccacctg

SEQ ID NO: 81123 - DNA, 20 bp, Homo sapiens
tttaagacacaaagcataca

SEQ ID NO: 81124 - DNA, 17 bp, Homo sapiens
cgtttgtaacactcgat

SEQ ID NO: 81125 - DNA, 22 bp, Homo sapiens
caggcaaggtaagcacctgagc

SEQ ID NO: 81126 - DNA, 23 bp, Homo sapiens
tattagttgcaacagatattcat

SEQ ID NO: 81127 - DNA, 16 bp, Homo sapiens
accaagggaatatggt

SEQ ID NO: 81128 - DNA, 23 bp, Homo sapiens
attaatatattgaaatgtttctt

SEQ ID NO: 81129 - DNA, 20 bp, Homo sapiens
gggcaagtcttaaaatttca

SEQ ID NO: 81130 - DNA, 23 bp, Homo sapiens
ttactctataactgttattattt

SEQ ID NO: 81131 - DNA, 22 bp, Homo sapiens
ttctccataaatccaagatgaa

SEQ ID NO: 81132 - DNA, 19 bp, Homo sapiens
gataacgttgaatacttca

SEQ ID NO: 81133 - DNA, 27 bp, Homo sapiens
caaacagataaatatttaaaacattcc

SEQ ID NO: 81134 - DNA, 16 bp, Homo sapiens
ggtcccagaggagctt

SEQ ID NO: 81135 - DNA, 21 bp, Homo sapiens
aacaggttccttatttactgc

SEQ ID NO: 81136 - DNA, 18 bp, Homo sapiens
ggaatcgagtgcattttc

SEQ ID NO: 81137 - DNA, 16 bp, Homo sapiens
gctttagaaaccccaa

SEQ ID NO: 81138 - DNA, 21 bp, Homo sapiens
caggcttttaaaaaatgtgtt

SEQ ID NO: 81139 - DNA, 20 bp, Homo sapiens
cacaatttcagaacacacat

SEQ ID NO: 81140 - DNA, 22 bp, Homo sapiens
cctctaattgtacagttaaatc

SEQ ID NO: 81141 - DNA, 16 bp, Homo sapiens
tctagttgacggcagc

SEQ ID NO: 81142 - DNA, 18 bp, Homo sapiens
tttttcacacctctttct

SEQ ID NO: 81143 - DNA, 23 bp, Homo sapiens
cttatttcaaggaaaaattgaat

SEQ ID NO: 81144 - DNA, 20 bp, Homo sapiens
atgtattttttttacagaca

SEQ ID NO: 81145 - DNA, 20 bp, Homo sapiens
ggcgcttaaatttctcaact

SEQ ID NO: 81146 - DNA, 16 bp, Homo sapiens
tctgcttatctgctgc

SEQ ID NO: 81147 - DNA, 17 bp, Homo sapiens
tggaatctgaatgccga

SEQ ID NO: 81148 - DNA, 23 bp, Homo sapiens
aggtagtaaattacttaaattca

SEQ ID NO: 81149 - DNA, 29 bp, Homo sapiens
gaaaaataaagacagtaaaataaatttga

SEQ ID NO: 81150 - DNA, 24 bp, Homo sapiens
tcctttttattttcagaaagaagt

SEQ ID NO: 81151 - DNA, 21 bp, Homo sapiens
aatgttaagacttacacacaa

SEQ ID NO: 81152 - DNA, 16 bp, Homo sapiens
aacatctagatcggca

SEQ ID NO: 81153 - DNA, 23 bp, Homo sapiens
atattaaatgccaaattcatatg

SEQ ID NO: 81154 - DNA, 22 bp, Homo sapiens
tttaattgttttatttgttttt

SEQ ID NO: 81155 - DNA, 19 bp, Homo sapiens
tgatacatttggttttgct

SEQ ID NO: 81156 - DNA, 24 bp, Homo sapiens
tggtttaaaagttgctctttgtga

SEQ ID NO: 81157 - DNA, 17 bp, Homo sapiens
tttgaccaaactactga

SEQ ID NO: 81158 - DNA, 20 bp, Homo sapiens
caacgagtttctgaaattgc

SEQ ID NO: 81159 - DNA, 25 bp, Homo sapiens
aatctgttaagccatttatttataa

SEQ ID NO: 81160 - DNA, 21 bp, Homo sapiens
gaaagaaacagaatgtctgag

SEQ ID NO: 81161 - DNA, 19 bp, Homo sapiens
ttatgcaacagttaagtcc

SEQ ID NO: 81162 - DNA, 16 bp, Homo sapiens
agatgcaggaaatcag

SEQ ID NO: 81163 - DNA, 22 bp, Homo sapiens
aaataaaaatcattatatgtac

SEQ ID NO: 81164 - DNA, 22 bp, Homo sapiens
tgatataatttaagagttcttg

SEQ ID NO: 81165 - DNA, 26 bp, Homo sapiens
ttctctacaaaagaagtttagttaat

SEQ ID NO: 81166 - DNA, 17 bp, Homo sapiens
tgctacaatcagctccg

SEQ ID NO: 81167 - DNA, 20 bp, Homo sapiens
tccaagtgtcttatttttgt

SEQ ID NO: 81168 - DNA, 16 bp, Homo sapiens
ccactgttgctgagat

SEQ ID NO: 81169 - DNA, 18 bp, Homo sapiens
agcacctaggctaaaatg

SEQ ID NO: 81170 - DNA, 18 bp, Homo sapiens
tggtgaagtttcatttca

SEQ ID NO: 81171 - DNA, 16 bp, Homo sapiens
gtgctatttacggagc

SEQ ID NO: 81172 - DNA, 17 bp, Homo sapiens
ctgttaaactgtcaggt

SEQ ID NO: 81173 - DNA, 20 bp, Homo sapiens
agaaaatactggtgtgaaat

SEQ ID NO: 81174 - DNA, 24 bp, Homo sapiens
aaaagctacataataaataaaaat

SEQ ID NO: 81175 - DNA, 25 bp, Homo sapiens
tataagataaaattaaatactgatg

SEQ ID NO: 81176 - DNA, 19 bp, Homo sapiens
gaaggtttcagatagagcc

SEQ ID NO: 81177 - DNA, 22 bp, Homo sapiens
agtgcagttttaaaatcctttt

SEQ ID NO: 81178 - DNA, 16 bp, Homo sapiens
agcatcctttggtaac

SEQ ID NO: 81179 - DNA, 22 bp, Homo sapiens
cattttgatttttaaaaaatca

SEQ ID NO: 81180 - DNA, 16 bp, Homo sapiens
actgaatagccttgga

SEQ ID NO: 81181 - DNA, 18 bp, Homo sapiens
tctctgtgtacttcaggc

SEQ ID NO: 81182 - DNA, 16 bp, Homo sapiens
tggtcttgcaagatca

SEQ ID NO: 81183 - DNA, 19 bp, Homo sapiens
aattcatgctgttaccaaa

SEQ ID NO: 81184 - DNA, 21 bp, Homo sapiens
ctgttatgatggatcaatgtt

SEQ ID NO: 81185 - DNA, 19 bp, Homo sapiens
tttggactttttttccaag

SEQ ID NO: 81186 - DNA, 22 bp, Homo sapiens
aagagctgctaagatatgattt

SEQ ID NO: 81187 - DNA, 19 bp, Homo sapiens
tgtttgaaaattagggttt

SEQ ID NO: 81188 - DNA, 19 bp, Homo sapiens
tcctaattcacacactcga

SEQ ID NO: 81189 - DNA, 19 bp, Homo sapiens
tgtacagtttgttccccct

SEQ ID NO: 81190 - DNA, 19 bp, Homo sapiens
aagaatcattaagcctatg

SEQ ID NO: 81191 - DNA, 16 bp, Homo sapiens
agagctcttcaggtct

SEQ ID NO: 81192 - DNA, 19 bp, Homo sapiens
gctcctttcggatgatgga

SEQ ID NO: 81193 - DNA, 17 bp, Homo sapiens
tggctgtcaactttcga

SEQ ID NO: 81194 - DNA, 19 bp, Homo sapiens
tgtttgaatgaagaagcaa

SEQ ID NO: 81195 - DNA, 16 bp, Homo sapiens
ttggactcaacatagg

SEQ ID NO: 81196 - DNA, 19 bp, Homo sapiens
ccagaggaaagtcatatcc

SEQ ID NO: 81197 - DNA, 23 bp, Homo sapiens
caactgcaaatttatatccatca

SEQ ID NO: 81198 - DNA, 26 bp, Homo sapiens
tcaaattctaaaaactctatgaaaaa

SEQ ID NO: 81199 - DNA, 22 bp, Homo sapiens
aatagagtttgtcaaggatctt

SEQ ID NO: 81200 - DNA, 24 bp, Homo sapiens
tagcagatcatataagttgtataa

SEQ ID NO: 81201 - DNA, 16 bp, Homo sapiens
tctaacgctgatgcag

SEQ ID NO: 81202 - DNA, 18 bp, Homo sapiens
ttacgaaatcctgaagaa

SEQ ID NO: 81203 - DNA, 20 bp, Homo sapiens
tgtaaacagagtacatacat

SEQ ID NO: 81204 - DNA, 18 bp, Homo sapiens
ttactgtacctggtgaca

SEQ ID NO: 81205 - DNA, 18 bp, Homo sapiens
tcaacaaaatggagaagt

SEQ ID NO: 81206 - DNA, 21 bp, Homo sapiens
agcccaaaatgcccagtttaa

SEQ ID NO: 81207 - DNA, 19 bp, Homo sapiens
ataggaagtagaggaaagt

SEQ ID NO: 81208 - DNA, 18 bp, Homo sapiens
gttgcatgtacagagtca

SEQ ID NO: 81209 - DNA, 21 bp, Homo sapiens
ttgaattgatggcagatatct

SEQ ID NO: 81210 - DNA, 23 bp, Homo sapiens
gtgtagtagtgtaagattgagaa

SEQ ID NO: 81211 - DNA, 20 bp, Homo sapiens
gtggtgatacgagatcgtgc

SEQ ID NO: 81212 - DNA, 19 bp, Homo sapiens
cctagttctattttcttcc

SEQ ID NO: 81213 - DNA, 22 bp, Homo sapiens
gctcaaaaaaaaaaaaaagaaa

SEQ ID NO: 81214 - DNA, 18 bp, Homo sapiens
cactttaccaaggcacaa

SEQ ID NO: 81215 - DNA, 17 bp, Homo sapiens
tccttggagatttctca

SEQ ID NO: 81216 - DNA, 21 bp, Homo sapiens
ctgaaagttttctgaaaaata

SEQ ID NO: 81217 - DNA, 21 bp, Homo sapiens
acagtgtcccttgcaaaagga

SEQ ID NO: 81218 - DNA, 21 bp, Homo sapiens
ctagtaataggtttgggggta

SEQ ID NO: 81219 - DNA, 19 bp, Homo sapiens
cagaagtcacagaatgatt

SEQ ID NO: 81220 - DNA, 22 bp, Homo sapiens
tttaggaagtaggacatagtaa

SEQ ID NO: 81221 - DNA, 18 bp, Homo sapiens
ggtaaacttgcaggatac

SEQ ID NO: 81222 - DNA, 19 bp, Homo sapiens
tggtgattctctaattagg

SEQ ID NO: 81223 - DNA, 16 bp, Homo sapiens
tgtcgctgttggggta

SEQ ID NO: 81224 - DNA, 22 bp, Homo sapiens
aatgtgatggaatagttttcaa

SEQ ID NO: 81225 - DNA, 18 bp, Homo sapiens
acctcttgtcttgacaca

SEQ ID NO: 81226 - DNA, 20 bp, Homo sapiens
ttaatatcaaagtatcctgc

SEQ ID NO: 81227 - DNA, 20 bp, Homo sapiens
acaccaaattttattccaga

SEQ ID NO: 81228 - DNA, 20 bp, Homo sapiens
tgatgatactatctcagctt

SEQ ID NO: 81229 - DNA, 18 bp, Homo sapiens
caagtaagccaaagtttt

SEQ ID NO: 81230 - DNA, 18 bp, Homo sapiens
ccttacggaagttgcatt

SEQ ID NO: 81231 - DNA, 20 bp, Homo sapiens
cccagtaaataacttccaga

SEQ ID NO: 81232 - DNA, 25 bp, Homo sapiens
aaaagtcagatttattaaaactctg

SEQ ID NO: 81233 - DNA, 20 bp, Homo sapiens
tgtgtgtttatctgtaagtc

SEQ ID NO: 81234 - DNA, 20 bp, Homo sapiens
agttctgagcaaatacaagc

SEQ ID NO: 81235 - DNA, 19 bp, Homo sapiens
ctgaagtaacaaactatga

SEQ ID NO: 81236 - DNA, 16 bp, Homo sapiens
tgaggttgacagagaa

SEQ ID NO: 81237 - DNA, 16 bp, Homo sapiens
ttaagtcttctcggcc

SEQ ID NO: 81238 - DNA, 18 bp, Homo sapiens
gtggtcagtgccaaagtc

SEQ ID NO: 81239 - DNA, 20 bp, Homo sapiens
aacagtttttatgttcattt

SEQ ID NO: 81240 - DNA, 21 bp, Homo sapiens
agcttctatttacttcacaca

SEQ ID NO: 81241 - DNA, 18 bp, Homo sapiens
aaagtctttgcccctcca

SEQ ID NO: 81242 - DNA, 17 bp, Homo sapiens
agtcaccctctaactga

SEQ ID NO: 81243 - DNA, 24 bp, Homo sapiens
ttatagtcctgcagtatgctgttt

SEQ ID NO: 81244 - DNA, 19 bp, Homo sapiens
cagcatgctaatgaactta

SEQ ID NO: 81245 - DNA, 18 bp, Homo sapiens
atgggaatagagcaaaat

SEQ ID NO: 81246 - DNA, 17 bp, Homo sapiens
aataaagccatctggca

SEQ ID NO: 81247 - DNA, 20 bp, Homo sapiens
tgaaatggctcttattctat

SEQ ID NO: 81248 - DNA, 23 bp, Homo sapiens
aaaaacaaacataatatttaata

SEQ ID NO: 81249 - DNA, 20 bp, Homo sapiens
tccaattcttcacaggtaat

SEQ ID NO: 81250 - DNA, 21 bp, Homo sapiens
agactcacaagaattttctcc

SEQ ID NO: 81251 - DNA, 24 bp, Homo sapiens
ttttaatctaggatccaaatttta

SEQ ID NO: 81252 - DNA, 16 bp, Homo sapiens
ttctggcacgctttgg

SEQ ID NO: 81253 - DNA, 18 bp, Homo sapiens
agtattctttacatggct

SEQ ID NO: 81254 - DNA, 23 bp, Homo sapiens
atcatctttgtaattaaagctat

SEQ ID NO: 81255 - DNA, 22 bp, Homo sapiens
ttgtagtaattttcctcatctt

SEQ ID NO: 81256 - DNA, 18 bp, Homo sapiens
tgcaatttttttggacca

SEQ ID NO: 81257 - DNA, 24 bp, Homo sapiens
aactgtaaagctgcaatgaatttt

SEQ ID NO: 81258 - DNA, 18 bp, Homo sapiens
agtccgaagaagagaagc

SEQ ID NO: 81259 - DNA, 23 bp, Homo sapiens
aatagttcttctacttctgagaa

SEQ ID NO: 81260 - DNA, 24 bp, Homo sapiens
gaatgatgtagatactaggttaat

SEQ ID NO: 81261 - DNA, 18 bp, Homo sapiens
acattctctcacaatggt

SEQ ID NO: 81262 - DNA, 23 bp, Homo sapiens
ggcaaagcattaggtacttggtt

SEQ ID NO: 81263 - DNA, 21 bp, Homo sapiens
gcgatccagtgattccttgag

SEQ ID NO: 81264 - DNA, 23 bp, Homo sapiens
gataaagaagaactttcattctc

SEQ ID NO: 81265 - DNA, 16 bp, Homo sapiens
tctcacctcagatgag

SEQ ID NO: 81266 - DNA, 17 bp, Homo sapiens
gatggactttttaacca

SEQ ID NO: 81267 - DNA, 18 bp, Homo sapiens
ctccttcctaacagttta

SEQ ID NO: 81268 - DNA, 23 bp, Homo sapiens
ccagtattggcttctctgtccac

SEQ ID NO: 81269 - DNA, 21 bp, Homo sapiens
gccactttgcttttaaaatga

SEQ ID NO: 81270 - DNA, 18 bp, Homo sapiens
tcagaacagcttctgaat

SEQ ID NO: 81271 - DNA, 22 bp, Homo sapiens
atctcctagttgtttttagagc

SEQ ID NO: 81272 - DNA, 16 bp, Homo sapiens
ggacacccaccaaaag

SEQ ID NO: 81273 - DNA, 25 bp, Homo sapiens
ttttgttttttaatatgtatgtaga

SEQ ID NO: 81274 - DNA, 21 bp, Homo sapiens
ttggctttctggaataattct

SEQ ID NO: 81275 - DNA, 24 bp, Homo sapiens
ttatgaaatatatatatttttatt

SEQ ID NO: 81276 - DNA, 23 bp, Homo sapiens
atacatttcattcaaatttatcc

SEQ ID NO: 81277 - DNA, 16 bp, Homo sapiens
gtccggtgttcacgtc

SEQ ID NO: 81278 - DNA, 18 bp, Homo sapiens
gggttaacctgcataaaa

SEQ ID NO: 81279 - DNA, 17 bp, Homo sapiens
agctgaagaggaagcat

SEQ ID NO: 81280 - DNA, 28 bp, Homo sapiens
aattaaacaattaaaacaatttaaaaaa

SEQ ID NO: 81281 - DNA, 19 bp, Homo sapiens
tgtatgactacgtggaact

SEQ ID NO: 81282 - DNA, 18 bp, Homo sapiens
tgaattcctcatttgtct

SEQ ID NO: 81283 - DNA, 23 bp, Homo sapiens
tttattttatagtatgtccaaga

SEQ ID NO: 81284 - DNA, 16 bp, Homo sapiens
ttgctcaagcaacgtg

SEQ ID NO: 81285 - DNA, 22 bp, Homo sapiens
tttaactggaatttgcattttt

SEQ ID NO: 81286 - DNA, 17 bp, Homo sapiens
tgggtgacagagaaaga

SEQ ID NO: 81287 - DNA, 23 bp, Homo sapiens
aggagaaagtatcactctgttta

SEQ ID NO: 81288 - DNA, 16 bp, Homo sapiens
ctggaaaccaggaggt

SEQ ID NO: 81289 - DNA, 16 bp, Homo sapiens
ctaggtggtacatgcc

SEQ ID NO: 81290 - DNA, 23 bp, Homo sapiens
agttattataactctaagaaaag

SEQ ID NO: 81291 - DNA, 19 bp, Homo sapiens
ttagctttgatgttaacaa

SEQ ID NO: 81292 - DNA, 25 bp, Homo sapiens
taaactatttatctacattccattc

SEQ ID NO: 81293 - DNA, 18 bp, Homo sapiens
gcaaaacaggaagcatac

SEQ ID NO: 81294 - DNA, 17 bp, Homo sapiens
ttctttgttgcttggtt

SEQ ID NO: 81295 - DNA, 18 bp, Homo sapiens
tgcatccttatttacaaa

SEQ ID NO: 81296 - DNA, 17 bp, Homo sapiens
tggctttttcctgcgat

SEQ ID NO: 81297 - DNA, 19 bp, Homo sapiens
ccgcacctggccttaattt

SEQ ID NO: 81298 - DNA, 23 bp, Homo sapiens
ttcgaactcccgacctcaggtga

SEQ ID NO: 81299 - DNA, 23 bp, Homo sapiens
atttccattagtatcatcttcca

SEQ ID NO: 81300 - DNA, 23 bp, Homo sapiens
atgtgagccactgtgcccagcct

SEQ ID NO: 81301 - DNA, 19 bp, Homo sapiens
tactatcagggtaatcgtt

SEQ ID NO: 81302 - DNA, 23 bp, Homo sapiens
aagaagccatcttgaacatcttt

SEQ ID NO: 81303 - DNA, 19 bp, Homo sapiens
atgtatttacctatggtac

SEQ ID NO: 81304 - DNA, 20 bp, Homo sapiens
tgaccgtggagaagtagaat

SEQ ID NO: 81305 - DNA, 17 bp, Homo sapiens
tcaatgaggcctcttat

SEQ ID NO: 81306 - DNA, 19 bp, Homo sapiens
gtcatccatgaatctattt

SEQ ID NO: 81307 - DNA, 17 bp, Homo sapiens
agaaaggaacaatccta

SEQ ID NO: 81308 - DNA, 18 bp, Homo sapiens
agagagccaaagtaccat

SEQ ID NO: 81309 - DNA, 18 bp, Homo sapiens
gacttttgaagctttcag

SEQ ID NO: 81310 - DNA, 19 bp, Homo sapiens
acttgagcatgtctaagaa

SEQ ID NO: 81311 - DNA, 18 bp, Homo sapiens
tttttgtgaagaggagga

SEQ ID NO: 81312 - DNA, 17 bp, Homo sapiens
gctgccctaaaggacac

SEQ ID NO: 81313 - DNA, 22 bp, Homo sapiens
tagtgttaatgagtgcttttta

SEQ ID NO: 81314 - DNA, 18 bp, Homo sapiens
agggatttggtaggttct

SEQ ID NO: 81315 - DNA, 18 bp, Homo sapiens
tctgtcaaagcaagatct

SEQ ID NO: 81316 - DNA, 20 bp, Homo sapiens
gcaacatcagataaaatcca

SEQ ID NO: 81317 - DNA, 19 bp, Homo sapiens
gctcagaccaatactgtgt

SEQ ID NO: 81318 - DNA, 20 bp, Homo sapiens
tttcaattcttcaaagacac

SEQ ID NO: 81319 - DNA, 18 bp, Homo sapiens
aattgattctagcacgct

SEQ ID NO: 81320 - DNA, 16 bp, Homo sapiens
agcacgttaaaagtgt

SEQ ID NO: 81321 - DNA, 19 bp, Homo sapiens
gctgttctcaaactcctga

SEQ ID NO: 81322 - DNA, 19 bp, Homo sapiens
tcaagaacatcttccattg

SEQ ID NO: 81323 - DNA, 16 bp, Homo sapiens
tgagccactgcacccg

SEQ ID NO: 81324 - DNA, 22 bp, Homo sapiens
tataactttaaagtgaacataa

SEQ ID NO: 81325 - DNA, 21 bp, Homo sapiens
tggataaacctgatttttttc

SEQ ID NO: 81326 - DNA, 19 bp, Homo sapiens
ctgtggtaaaaaaaaaaaa

SEQ ID NO: 81327 - DNA, 18 bp, Homo sapiens
cctggagaagagtacccc

SEQ ID NO: 81328 - DNA, 24 bp, Homo sapiens
ggacatggtttaaaatagttttac

SEQ ID NO: 81329 - DNA, 20 bp, Homo sapiens
cgtaagaaattaaaacctta

SEQ ID NO: 81330 - DNA, 16 bp, Homo sapiens
tgtgttctcagagtcc

SEQ ID NO: 81331 - DNA, 21 bp, Homo sapiens
ttaagcttataaagttgaact

SEQ ID NO: 81332 - DNA, 21 bp, Homo sapiens
ggaccacaaaatagactgtac

SEQ ID NO: 81333 - DNA, 17 bp, Homo sapiens
cgtcgtgaccaagatgt

SEQ ID NO: 81334 - DNA, 21 bp, Homo sapiens
aatcactgatgtggatacaaa

SEQ ID NO: 81335 - DNA, 18 bp, Homo sapiens
aggtcaaagcaatatgga

SEQ ID NO: 81336 - DNA, 20 bp, Homo sapiens
acacaaattacattctgcta

SEQ ID NO: 81337 - DNA, 19 bp, Homo sapiens
gtaattggagcattttggt

SEQ ID NO: 81338 - DNA, 17 bp, Homo sapiens
tggcaaggtgagtatgt

SEQ ID NO: 81339 - DNA, 18 bp, Homo sapiens
ggcaatttactagggcca

SEQ ID NO: 81340 - DNA, 21 bp, Homo sapiens
agaaagacatattggaagtaa

SEQ ID NO: 81341 - DNA, 23 bp, Homo sapiens
aaaattttcaatggagatcttac

SEQ ID NO: 81342 - DNA, 24 bp, Homo sapiens
gaatgattatttaactttggaaaa

SEQ ID NO: 81343 - DNA, 21 bp, Homo sapiens
gggaaaagaactgtggttaaa

SEQ ID NO: 81344 - DNA, 23 bp, Homo sapiens
aatatatattctctgtaagaatg

SEQ ID NO: 81345 - DNA, 18 bp, Homo sapiens
ggaaagtcttttcccatt

SEQ ID NO: 81346 - DNA, 24 bp, Homo sapiens
ttttgcatttttttagtaagatct

SEQ ID NO: 81347 - DNA, 18 bp, Homo sapiens
gccaacatgcgaacttgg

SEQ ID NO: 81348 - DNA, 24 bp, Homo sapiens
taatgagtaatttttctctatttc

SEQ ID NO: 81349 - DNA, 20 bp, Homo sapiens
cagcattccaaatacttcat

SEQ ID NO: 81350 - DNA, 17 bp, Homo sapiens
tgggccattcttaatgt

SEQ ID NO: 81351 - DNA, 24 bp, Homo sapiens
ttagctatttttaatattgcaact

SEQ ID NO: 81352 - DNA, 21 bp, Homo sapiens
tacacaatttcttgctgacaa

SEQ ID NO: 81353 - DNA, 24 bp, Homo sapiens
tgacagaagtataagaattaagaa

SEQ ID NO: 81354 - DNA, 18 bp, Homo sapiens
acctggaagaatctccct

SEQ ID NO: 81355 - DNA, 21 bp, Homo sapiens
agctagtatgttattatgtct

SEQ ID NO: 81356 - DNA, 20 bp, Homo sapiens
cctgagctttcaagtatgca

SEQ ID NO: 81357 - DNA, 20 bp, Homo sapiens
agtagggtttgaaattagaa

SEQ ID NO: 81358 - DNA, 21 bp, Homo sapiens
agcaagcatatgataacagca

SEQ ID NO: 81359 - DNA, 20 bp, Homo sapiens
aagattgttccaggacacga

SEQ ID NO: 81360 - DNA, 20 bp, Homo sapiens
actggattataaactctctt

SEQ ID NO: 81361 - DNA, 20 bp, Homo sapiens
tcagcaaacagcttttgaaa

SEQ ID NO: 81362 - DNA, 20 bp, Homo sapiens
ccagaaagaatgcagtttca

SEQ ID NO: 81363 - DNA, 20 bp, Homo sapiens
ttcttgtaccaaaagacaga

SEQ ID NO: 81364 - DNA, 18 bp, Homo sapiens
caacgtcagtaaaacaga

SEQ ID NO: 81365 - DNA, 20 bp, Homo sapiens
gcttgtcaaaaaatctggag

SEQ ID NO: 81366 - DNA, 16 bp, Homo sapiens
ggcaaacaaagcctgt

SEQ ID NO: 81367 - DNA, 20 bp, Homo sapiens
tttacattacattttttttt

SEQ ID NO: 81368 - DNA, 21 bp, Homo sapiens
tactcatccatatataccttt

SEQ ID NO: 81369 - DNA, 25 bp, Homo sapiens
tttggatgaaatttataatagaaaa

SEQ ID NO: 81370 - DNA, 20 bp, Homo sapiens
aaatctagctttaacttttt

SEQ ID NO: 81371 - DNA, 18 bp, Homo sapiens
tgtagccctatctgcgaa

SEQ ID NO: 81372 - DNA, 19 bp, Homo sapiens
ccaatattcccaacctaaa

SEQ ID NO: 81373 - DNA, 19 bp, Homo sapiens
agaacctcaccttgtgaaa

SEQ ID NO: 81374 - DNA, 19 bp, Homo sapiens
actgtgccagttgagtaca

SEQ ID NO: 81375 - DNA, 19 bp, Homo sapiens
aaagtcttctaaacgtcta

SEQ ID NO: 81376 - DNA, 22 bp, Homo sapiens
aaaagttgaatgaatgttgttt

SEQ ID NO: 81377 - DNA, 22 bp, Homo sapiens
tcagtatcttgaagatttagcc

SEQ ID NO: 81378 - DNA, 24 bp, Homo sapiens
taaatgatttatttttttcatttt

SEQ ID NO: 81379 - DNA, 24 bp, Homo sapiens
acttacctatagaaatcctcaata

SEQ ID NO: 81380 - DNA, 18 bp, Homo sapiens
gtttctgaaacttttgga

SEQ ID NO: 81381 - DNA, 21 bp, Homo sapiens
gctaagtattgttaactaatt

SEQ ID NO: 81382 - DNA, 24 bp, Homo sapiens
tttagattatctggttttggaatg

SEQ ID NO: 81383 - DNA, 17 bp, Homo sapiens
ggctcccacacacacat

SEQ ID NO: 81384 - DNA, 28 bp, Homo sapiens
tccttttattttattaaactacacaaat

SEQ ID NO: 81385 - DNA, 26 bp, Homo sapiens
ctatttagaatttacttaatttttcc

SEQ ID NO: 81386 - DNA, 17 bp, Homo sapiens
tctaatcaccagatgtg

SEQ ID NO: 81387 - DNA, 23 bp, Homo sapiens
tctggataaagtatgatacttta

SEQ ID NO: 81388 - DNA, 17 bp, Homo sapiens
aagacttttccagtcct

SEQ ID NO: 81389 - DNA, 22 bp, Homo sapiens
aattttacttggaaaagttata

SEQ ID NO: 81390 - DNA, 16 bp, Homo sapiens
accctcataggcaaaa

SEQ ID NO: 81391 - DNA, 21 bp, Homo sapiens
tgttataaggttttgattcca

SEQ ID NO: 81392 - DNA, 24 bp, Homo sapiens
tttcacttttaagcatatcataga

SEQ ID NO: 81393 - DNA, 22 bp, Homo sapiens
ttgctaatcagattcaagagga

SEQ ID NO: 81394 - DNA, 19 bp, Homo sapiens
tcagggaatgaaaagtaca

SEQ ID NO: 81395 - DNA, 25 bp, Homo sapiens
gtaaatattcttccttattttgcct

SEQ ID NO: 81396 - DNA, 22 bp, Homo sapiens
tatataaatacgaataaatcga

SEQ ID NO: 81397 - DNA, 17 bp, Homo sapiens
agagactgctaccaagg

SEQ ID NO: 81398 - DNA, 19 bp, Homo sapiens
aaaaaattcatgggttggc

SEQ ID NO: 81399 - DNA, 25 bp, Homo sapiens
gtagagttatttataatcttgtaaa

SEQ ID NO: 81400 - DNA, 18 bp, Homo sapiens
cgtcatcaataactccac

SEQ ID NO: 81401 - DNA, 20 bp, Homo sapiens
aatacttttggaaataaggt

SEQ ID NO: 81402 - DNA, 18 bp, Homo sapiens
ccctgaaaagtcacagag

SEQ ID NO: 81403 - DNA, 26 bp, Homo sapiens
atataaaatattaaatatattttaat

SEQ ID NO: 81404 - DNA, 21 bp, Homo sapiens
ccaataaacttctttaaaaac

SEQ ID NO: 81405 - DNA, 17 bp, Homo sapiens
ccagagattgtggtgga

SEQ ID NO: 81406 - DNA, 27 bp, Homo sapiens
tttttaaagaaaattttttaaaaagag

SEQ ID NO: 81407 - DNA, 24 bp, Homo sapiens
ttctagtgccagtcagagcactga

SEQ ID NO: 81408 - DNA, 24 bp, Homo sapiens
tgtgattttattgaaagtatagtt

SEQ ID NO: 81409 - DNA, 16 bp, Homo sapiens
aggcaaatgttgcttt

SEQ ID NO: 81410 - DNA, 24 bp, Homo sapiens
attaaaatctaaattttcattttg

SEQ ID NO: 81411 - DNA, 18 bp, Homo sapiens
acagggcttttggaaaga

SEQ ID NO: 81412 - DNA, 17 bp, Homo sapiens
tgactgtattttttccc

SEQ ID NO: 81413 - DNA, 21 bp, Homo sapiens
caaagtttttttagctaaaaa

SEQ ID NO: 81414 - DNA, 16 bp, Homo sapiens
tttccatcgcatgtga

SEQ ID NO: 81415 - DNA, 25 bp, Homo sapiens
ttttcctttttaattatgagataaa

SEQ ID NO: 81416 - DNA, 19 bp, Homo sapiens
ccaagttaaaaagcatttt

SEQ ID NO: 81417 - DNA, 22 bp, Homo sapiens
cttaatgtaacattttgtactt

SEQ ID NO: 81418 - DNA, 18 bp, Homo sapiens
gctgcttgctcacatatg

SEQ ID NO: 81419 - DNA, 26 bp, Homo sapiens
gttattttaaatataaaatgtgtagg

SEQ ID NO: 81420 - DNA, 22 bp, Homo sapiens
ctaacaaacaggtgatatattt

SEQ ID NO: 81421 - DNA, 18 bp, Homo sapiens
tattgtagccgagtatct

SEQ ID NO: 81422 - DNA, 17 bp, Homo sapiens
gaacaaaggcccaagct

SEQ ID NO: 81423 - DNA, 19 bp, Homo sapiens
atcagaaaattcttcttgc

SEQ ID NO: 81424 - DNA, 22 bp, Homo sapiens
ttggtctaaatatgttatttac

SEQ ID NO: 81425 - DNA, 18 bp, Homo sapiens
aagaagcacagaattctt

SEQ ID NO: 81426 - DNA, 19 bp, Homo sapiens
acaaaacaaaacaaagcaa

SEQ ID NO: 81427 - DNA, 24 bp, Homo sapiens
agatataaaaagtggcttaggagg

SEQ ID NO: 81428 - DNA, 18 bp, Homo sapiens
gatgcagtgagccgtgac

SEQ ID NO: 81429 - DNA, 21 bp, Homo sapiens
ttctgcattttgctgatgtga

SEQ ID NO: 81430 - DNA, 18 bp, Homo sapiens
acaaagggagaagctacg

SEQ ID NO: 81431 - DNA, 21 bp, Homo sapiens
aggcatataagaattagagat

SEQ ID NO: 81432 - DNA, 16 bp, Homo sapiens
tagagcatccttacag

SEQ ID NO: 81433 - DNA, 21 bp, Homo sapiens
aattttccagaacttactggt

SEQ ID NO: 81434 - DNA, 16 bp, Homo sapiens
tgaacctccacctgct

SEQ ID NO: 81435 - DNA, 17 bp, Homo sapiens
tggatgtgtcattacgt

SEQ ID NO: 81436 - DNA, 24 bp, Homo sapiens
cttctaacaatactttatatattt

SEQ ID NO: 81437 - DNA, 18 bp, Homo sapiens
cagacagccgtgacttac

SEQ ID NO: 81438 - DNA, 22 bp, Homo sapiens
atattctcaataaaatcaccaa

SEQ ID NO: 81439 - DNA, 18 bp, Homo sapiens
cacttataccccttgtgt

SEQ ID NO: 81440 - DNA, 21 bp, Homo sapiens
gctctgtaattgattacaaag

SEQ ID NO: 81441 - DNA, 18 bp, Homo sapiens
ttcaacaagtccaatacc

SEQ ID NO: 81442 - DNA, 16 bp, Homo sapiens
gctgggtatcttagac

SEQ ID NO: 81443 - DNA, 22 bp, Homo sapiens
tctaaaagcttaatcgtgatat

SEQ ID NO: 81444 - DNA, 23 bp, Homo sapiens
attttatcatttattacagtaag

SEQ ID NO: 81445 - DNA, 22 bp, Homo sapiens
tatttgattttttgctgagtaa

SEQ ID NO: 81446 - DNA, 24 bp, Homo sapiens
aattttttctttttaaattatatt

SEQ ID NO: 81447 - DNA, 25 bp, Homo sapiens
ataaaaaatagtagatgatgaaatt

SEQ ID NO: 81448 - DNA, 24 bp, Homo sapiens
acaaggataatgaaaacctctata

SEQ ID NO: 81449 - DNA, 23 bp, Homo sapiens
agattccattttttactgctaga

SEQ ID NO: 81450 - DNA, 22 bp, Homo sapiens
ttaaggatttgcgtattactca

SEQ ID NO: 81451 - DNA, 16 bp, Homo sapiens
gagccaatgtgcctgg

SEQ ID NO: 81452 - DNA, 17 bp, Homo sapiens
acattgtagggtttgca

SEQ ID NO: 81453 - DNA, 21 bp, Homo sapiens
tgcatcataaacacttactga

SEQ ID NO: 81454 - DNA, 18 bp, Homo sapiens
agacatgagtcagtgtct

SEQ ID NO: 81455 - DNA, 18 bp, Homo sapiens
ttatgtagttccagttgt

SEQ ID NO: 81456 - DNA, 19 bp, Homo sapiens
tatttcacaggcttaacca

SEQ ID NO: 81457 - DNA, 22 bp, Homo sapiens
atagcccatgtcatttaaaatt

SEQ ID NO: 81458 - DNA, 18 bp, Homo sapiens
accattttctctcagtaa

SEQ ID NO: 81459 - DNA, 21 bp, Homo sapiens
gtctgtgacaatgaaaccaag

SEQ ID NO: 81460 - DNA, 18 bp, Homo sapiens
ggatcttcgaagacaact

SEQ ID NO: 81461 - DNA, 22 bp, Homo sapiens
accagttttacagttagatgag

SEQ ID NO: 81462 - DNA, 19 bp, Homo sapiens
tcattccctacatattttt

SEQ ID NO: 81463 - DNA, 17 bp, Homo sapiens
tggataactgcaacaaa

SEQ ID NO: 81464 - DNA, 18 bp, Homo sapiens
agaagttttctagtcaga

SEQ ID NO: 81465 - DNA, 17 bp, Homo sapiens
tcacgcagcgcatgact

SEQ ID NO: 81466 - DNA, 23 bp, Homo sapiens
gtcttcatgctagtttaaactaa

SEQ ID NO: 81467 - DNA, 20 bp, Homo sapiens
aacatacagtaaaaatacag

SEQ ID NO: 81468 - DNA, 21 bp, Homo sapiens
ttatggtgaaactagttgtca

SEQ ID NO: 81469 - DNA, 18 bp, Homo sapiens
cctaggctacaaacctgt

SEQ ID NO: 81470 - DNA, 19 bp, Homo sapiens
cctctgtctcccaaagtgc

SEQ ID NO: 81471 - DNA, 22 bp, Homo sapiens
tatggtagagaaatctatagga

SEQ ID NO: 81472 - DNA, 19 bp, Homo sapiens
tgaagtacagaaaaacagc

SEQ ID NO: 81473 - DNA, 21 bp, Homo sapiens
cttcaaataacttaagggcct

SEQ ID NO: 81474 - DNA, 21 bp, Homo sapiens
tgatctcttacctatgactct

SEQ ID NO: 81475 - DNA, 18 bp, Homo sapiens
ccaatcttctaccagtgt

SEQ ID NO: 81476 - DNA, 16 bp, Homo sapiens
tgggagaagtgggtcc

SEQ ID NO: 81477 - DNA, 22 bp, Homo sapiens
aagtatcattctccatgaatgt

SEQ ID NO: 81478 - DNA, 19 bp, Homo sapiens
gcatcttataccaaggccc

SEQ ID NO: 81479 - DNA, 23 bp, Homo sapiens
cataaagacactgagatttaaaa

SEQ ID NO: 81480 - DNA, 16 bp, Homo sapiens
tgctgacctacctgaa

SEQ ID NO: 81481 - DNA, 21 bp, Homo sapiens
acttttatttgatattggaga

SEQ ID NO: 81482 - DNA, 18 bp, Homo sapiens
tgtccagtctttgtggct

SEQ ID NO: 81483 - DNA, 24 bp, Homo sapiens
attttagttttgaaattttttcag

SEQ ID NO: 81484 - DNA, 16 bp, Homo sapiens
ggctgtagataggcca

SEQ ID NO: 81485 - DNA, 19 bp, Homo sapiens
gtgtacttgataggcattt

SEQ ID NO: 81486 - DNA, 20 bp, Homo sapiens
tgttttagatatgctgggta

SEQ ID NO: 81487 - DNA, 19 bp, Homo sapiens
acctgtttgaaaaacattt

SEQ ID NO: 81488 - DNA, 25 bp, Homo sapiens
gttagtacaatactatttcaagcaa

SEQ ID NO: 81489 - DNA, 16 bp, Homo sapiens
gatccaatgctggcct

SEQ ID NO: 81490 - DNA, 18 bp, Homo sapiens
taacacattccctggatt

SEQ ID NO: 81491 - DNA, 20 bp, Homo sapiens
aaacataaatgttttcatct

SEQ ID NO: 81492 - DNA, 17 bp, Homo sapiens
tcatccaggccttcaaa

SEQ ID NO: 81493 - DNA, 24 bp, Homo sapiens
atttagctttattcagaaagattt

SEQ ID NO: 81494 - DNA, 17 bp, Homo sapiens
gcacaagtcagtgtctt

SEQ ID NO: 81495 - DNA, 21 bp, Homo sapiens
tttccacttctcttatttaca

SEQ ID NO: 81496 - DNA, 16 bp, Homo sapiens
ttcacacattggcttt

SEQ ID NO: 81497 - DNA, 20 bp, Homo sapiens
acaaagaaaacccttttgaa

SEQ ID NO: 81498 - DNA, 23 bp, Homo sapiens
actctttagataaacaggtcata

SEQ ID NO: 81499 - DNA, 22 bp, Homo sapiens
tcatgacatttggataaagaca

SEQ ID NO: 81500 - DNA, 20 bp, Homo sapiens
aaatttacaacagtttgagt

SEQ ID NO: 81501 - DNA, 24 bp, Homo sapiens
acaaaatgtgaaattcttcaatta

SEQ ID NO: 81502 - DNA, 20 bp, Homo sapiens
tgttttttgtttgttttttt

SEQ ID NO: 81503 - DNA, 23 bp, Homo sapiens
atatcatgaatcaagtatggaag

SEQ ID NO: 81504 - DNA, 22 bp, Homo sapiens
ttagaaatttaatatgtcaacg

SEQ ID NO: 81505 - DNA, 17 bp, Homo sapiens
ccctgaacatgtgtaga

SEQ ID NO: 81506 - DNA, 22 bp, Homo sapiens
ctcatttttactcaaactattg

SEQ ID NO: 81507 - DNA, 16 bp, Homo sapiens
ttgcaggggttgtgga

SEQ ID NO: 81508 - DNA, 19 bp, Homo sapiens
tgtcagactgtacttccat

SEQ ID NO: 81509 - DNA, 17 bp, Homo sapiens
tctctagaactgagttt

SEQ ID NO: 81510 - DNA, 19 bp, Homo sapiens
atcatggagaaatctgctt

SEQ ID NO: 81511 - DNA, 27 bp, Homo sapiens
aacaaatttagaggttatagatttaat

SEQ ID NO: 81512 - DNA, 18 bp, Homo sapiens
ttctcgcaaacgagccga

SEQ ID NO: 81513 - DNA, 16 bp, Homo sapiens
aacttgttgcaactgt

SEQ ID NO: 81514 - DNA, 20 bp, Homo sapiens
tttcttttaaaagcaaaaga

SEQ ID NO: 81515 - DNA, 22 bp, Homo sapiens
gcattgttctttgtgatttttt

SEQ ID NO: 81516 - DNA, 20 bp, Homo sapiens
actgcccaccagaaccttat

SEQ ID NO: 81517 - DNA, 17 bp, Homo sapiens
gcaacactcattacatt

SEQ ID NO: 81518 - DNA, 19 bp, Homo sapiens
tgtgtaagcaagaatgcct

SEQ ID NO: 81519 - DNA, 22 bp, Homo sapiens
taatcatgttaaaattcagccg

SEQ ID NO: 81520 - DNA, 18 bp, Homo sapiens
tttttccgatgctgtttg

SEQ ID NO: 81521 - DNA, 24 bp, Homo sapiens
ttactgcaaggagatataaatatc

SEQ ID NO: 81522 - DNA, 20 bp, Homo sapiens
catgagaagacaaaagaggt

SEQ ID NO: 81523 - DNA, 25 bp, Homo sapiens
tgtttataggtatatattggggaaa

SEQ ID NO: 81524 - DNA, 19 bp, Homo sapiens
ggcaacttctagataattt

SEQ ID NO: 81525 - DNA, 24 bp, Homo sapiens
tgttaagcagtcactaccattgta

SEQ ID NO: 81526 - DNA, 17 bp, Homo sapiens
ctgcatagatttctgca

SEQ ID NO: 81527 - DNA, 20 bp, Homo sapiens
agtgaatgacattatatctc

SEQ ID NO: 81528 - DNA, 24 bp, Homo sapiens
ttaaaaaccaaaaattctaaattc

SEQ ID NO: 81529 - DNA, 21 bp, Homo sapiens
gatgctttctggctggattta

SEQ ID NO: 81530 - DNA, 19 bp, Homo sapiens
caggaggcaaaataaatct

SEQ ID NO: 81531 - DNA, 17 bp, Homo sapiens
acagctttactctatgc

SEQ ID NO: 81532 - DNA, 26 bp, Homo sapiens
taaaaatttattataatttcacttta

SEQ ID NO: 81533 - DNA, 18 bp, Homo sapiens
tccttttccatcctaggt

SEQ ID NO: 81534 - DNA, 19 bp, Homo sapiens
caagctagaaatagttgta

SEQ ID NO: 81535 - DNA, 19 bp, Homo sapiens
ctgttttgtttgccacctt

SEQ ID NO: 81536 - DNA, 19 bp, Homo sapiens
gagcctctaatatttacct

SEQ ID NO: 81537 - DNA, 22 bp, Homo sapiens
gagcttccaaatagtatgttct

SEQ ID NO: 81538 - DNA, 20 bp, Homo sapiens
gcatctgtacagtgtctata

SEQ ID NO: 81539 - DNA, 16 bp, Homo sapiens
gaagaaggaagccaga

SEQ ID NO: 81540 - DNA, 23 bp, Homo sapiens
attttatatatatgatgcttagt

SEQ ID NO: 81541 - DNA, 20 bp, Homo sapiens
actggaataagtttacaggt

SEQ ID NO: 81542 - DNA, 22 bp, Homo sapiens
tgtttgaactgtatttcagaac

SEQ ID NO: 81543 - DNA, 16 bp, Homo sapiens
tctggctcccctatac

SEQ ID NO: 81544 - DNA, 19 bp, Homo sapiens
aacatttagagttgggagt

SEQ ID NO: 81545 - DNA, 21 bp, Homo sapiens
aaaatgcaatttacctagtaa

SEQ ID NO: 81546 - DNA, 18 bp, Homo sapiens
agaccgattttttttcct

SEQ ID NO: 81547 - DNA, 19 bp, Homo sapiens
tagctttgggttttacaca

SEQ ID NO: 81548 - DNA, 24 bp, Homo sapiens
tctcttagaaatctacagaagtat

SEQ ID NO: 81549 - DNA, 18 bp, Homo sapiens
tgccccacattgcttcgt

SEQ ID NO: 81550 - DNA, 22 bp, Homo sapiens
agatgttacaacccattactag

SEQ ID NO: 81551 - DNA, 23 bp, Homo sapiens
tacctgaatgattcctgcctggc

SEQ ID NO: 81552 - DNA, 19 bp, Homo sapiens
atgaaggagttatgtgtgt

SEQ ID NO: 81553 - DNA, 17 bp, Homo sapiens
aacctcagcactacact

SEQ ID NO: 81554 - DNA, 20 bp, Homo sapiens
agactacgaacatatgaaca

SEQ ID NO: 81555 - DNA, 20 bp, Homo sapiens
taagttctagtcttatctct

SEQ ID NO: 81556 - DNA, 20 bp, Homo sapiens
agcaatcccctcatcaacac

SEQ ID NO: 81557 - DNA, 16 bp, Homo sapiens
atccctctgcttcagg

SEQ ID NO: 81558 - DNA, 21 bp, Homo sapiens
aaagtgctgagattacaggca

SEQ ID NO: 81559 - DNA, 20 bp, Homo sapiens
ttttaaatagacggaaagaa

SEQ ID NO: 81560 - DNA, 19 bp, Homo sapiens
tgtgaactaaaatttgtct

SEQ ID NO: 81561 - DNA, 19 bp, Homo sapiens
tgcttggtaatgaagttct

SEQ ID NO: 81562 - DNA, 23 bp, Homo sapiens
tctgttgatatctttgattactt

SEQ ID NO: 81563 - DNA, 24 bp, Homo sapiens
aaaaaatcaagtcaaatttcttac

SEQ ID NO: 81564 - DNA, 16 bp, Homo sapiens
tttgggactctgccat

SEQ ID NO: 81565 - DNA, 24 bp, Homo sapiens
tattcatagaagagaaaaacagtt

SEQ ID NO: 81566 - DNA, 21 bp, Homo sapiens
gtgtgtgtgtgtgtatatata

SEQ ID NO: 81567 - DNA, 16 bp, Homo sapiens
ccattgcacttccgtc

SEQ ID NO: 81568 - DNA, 23 bp, Homo sapiens
gaatttaaatgactcataaaatt

SEQ ID NO: 81569 - DNA, 19 bp, Homo sapiens
ttgtagagcattgtacaat

SEQ ID NO: 81570 - DNA, 20 bp, Homo sapiens
agaatggagaaatgttaatt

SEQ ID NO: 81571 - DNA, 20 bp, Homo sapiens
tacctggcatatttgagact

SEQ ID NO: 81572 - DNA, 17 bp, Homo sapiens
tcttagggttctgtttt

SEQ ID NO: 81573 - DNA, 19 bp, Homo sapiens
agttttcagaaaagaagcc

SEQ ID NO: 81574 - DNA, 18 bp, Homo sapiens
ggaaccagttaccatgaa

SEQ ID NO: 81575 - DNA, 18 bp, Homo sapiens
cacagccaccaagtcttt

SEQ ID NO: 81576 - DNA, 21 bp, Homo sapiens
tctctacattttatgaaagtc

SEQ ID NO: 81577 - DNA, 20 bp, Homo sapiens
gggtcagttgtattttgttt

SEQ ID NO: 81578 - DNA, 16 bp, Homo sapiens
tcaaggctgcgcttac

SEQ ID NO: 81579 - DNA, 20 bp, Homo sapiens
tattagatcagtagcaaagc

SEQ ID NO: 81580 - DNA, 16 bp, Homo sapiens
atgctttccagctctc

SEQ ID NO: 81581 - DNA, 21 bp, Homo sapiens
tatttccctgaaaacctcttc

SEQ ID NO: 81582 - DNA, 17 bp, Homo sapiens
aagctgcactttaggat

SEQ ID NO: 81583 - DNA, 18 bp, Homo sapiens
gaagtggaagagatgtgt

SEQ ID NO: 81584 - DNA, 16 bp, Homo sapiens
atgagccaccgtgccc

SEQ ID NO: 81585 - DNA, 22 bp, Homo sapiens
acacttagcaggttgcaggcca

SEQ ID NO: 81586 - DNA, 23 bp, Homo sapiens
atatatacttcagagagttgtct

SEQ ID NO: 81587 - DNA, 22 bp, Homo sapiens
actacaaaagttcctttgtatt

SEQ ID NO: 81588 - DNA, 20 bp, Homo sapiens
gccatgataggctcctgaaa

SEQ ID NO: 81589 - DNA, 24 bp, Homo sapiens
atagtttttttttttttttttttc

SEQ ID NO: 81590 - DNA, 18 bp, Homo sapiens
tctttgtgagttgtccat

SEQ ID NO: 81591 - DNA, 20 bp, Homo sapiens
gatcagtcacacatagacaa

SEQ ID NO: 81592 - DNA, 23 bp, Homo sapiens
ttgaaagttctggccagtataga

SEQ ID NO: 81593 - DNA, 19 bp, Homo sapiens
gcttctcaaggacagtgat

SEQ ID NO: 81594 - DNA, 18 bp, Homo sapiens
gtcaagaggtaagatgac

SEQ ID NO: 81595 - DNA, 20 bp, Homo sapiens
ggagatcctgatggaaaagg

SEQ ID NO: 81596 - DNA, 23 bp, Homo sapiens
ctatctcttaatgacatttcttt

SEQ ID NO: 81597 - DNA, 16 bp, Homo sapiens
acaccttgtagaactc

SEQ ID NO: 81598 - DNA, 22 bp, Homo sapiens
cagatctaattccaaaatggga

SEQ ID NO: 81599 - DNA, 17 bp, Homo sapiens
tgcagacagagaggtcc

SEQ ID NO: 81600 - DNA, 16 bp, Homo sapiens
actcagagactccaca

SEQ ID NO: 81601 - DNA, 23 bp, Homo sapiens
aatgaatggtagttgctgctttc

SEQ ID NO: 81602 - DNA, 19 bp, Homo sapiens
cttgagaatactcagggca

SEQ ID NO: 81603 - DNA, 22 bp, Homo sapiens
ttattcccatatgtcattttca

SEQ ID NO: 81604 - DNA, 19 bp, Homo sapiens
tccagccaataaaaaaaac

SEQ ID NO: 81605 - DNA, 16 bp, Homo sapiens
ttcagttagctgtgga

SEQ ID NO: 81606 - DNA, 24 bp, Homo sapiens
aaattgttattaaaaatattttaa

SEQ ID NO: 81607 - DNA, 19 bp, Homo sapiens
tgggcaaaaaaggagcaga

SEQ ID NO: 81608 - DNA, 23 bp, Homo sapiens
aagactagttttacaatatcttg

SEQ ID NO: 81609 - DNA, 17 bp, Homo sapiens
gatgccagctgtgcagc

SEQ ID NO: 81610 - DNA, 20 bp, Homo sapiens
cctcagacattctgtgtatg

SEQ ID NO: 81611 - DNA, 21 bp, Homo sapiens
tttttttttcccacccaccaa

SEQ ID NO: 81612 - DNA, 18 bp, Homo sapiens
gcatgatgaccgcaggat

SEQ ID NO: 81613 - DNA, 17 bp, Homo sapiens
ggcagttgggtacagtc

SEQ ID NO: 81614 - DNA, 21 bp, Homo sapiens
gcatattcatgctaagtaact

SEQ ID NO: 81615 - DNA, 17 bp, Homo sapiens
cccagcctaaaacttac

SEQ ID NO: 81616 - DNA, 22 bp, Homo sapiens
gaaaaataaaaccatactttta

SEQ ID NO: 81617 - DNA, 21 bp, Homo sapiens
cagaaacgtgcttagaaaatc

SEQ ID NO: 81618 - DNA, 16 bp, Homo sapiens
ttcactccaccctaga

SEQ ID NO: 81619 - DNA, 20 bp, Homo sapiens
tgggccgtgggttggacaag

SEQ ID NO: 81620 - DNA, 18 bp, Homo sapiens
ttttccatttcttagctc

SEQ ID NO: 81621 - DNA, 26 bp, Homo sapiens
tataagttaaattttagtgtattacc

SEQ ID NO: 81622 - DNA, 18 bp, Homo sapiens
agttttcaattctttggt

SEQ ID NO: 81623 - DNA, 24 bp, Homo sapiens
aatataatttaaattggttgtgtt

SEQ ID NO: 81624 - DNA, 18 bp, Homo sapiens
cttcctctttggctcttt

SEQ ID NO: 81625 - DNA, 17 bp, Homo sapiens
gaaagtagtgatgagct

SEQ ID NO: 81626 - DNA, 18 bp, Homo sapiens
ttgtcacttgtagaaacc

SEQ ID NO: 81627 - DNA, 22 bp, Homo sapiens
agcccggttttcagatactcaa

SEQ ID NO: 81628 - DNA, 17 bp, Homo sapiens
aaagaccaagtcactct

SEQ ID NO: 81629 - DNA, 18 bp, Homo sapiens
aacaagcaagctctcctg

SEQ ID NO: 81630 - DNA, 21 bp, Homo sapiens
ccaaaagaccaagataatcta

SEQ ID NO: 81631 - DNA, 18 bp, Homo sapiens
attcagacaaacaggtaa

SEQ ID NO: 81632 - DNA, 23 bp, Homo sapiens
aagacaaaagtaagtttattccc

SEQ ID NO: 81633 - DNA, 18 bp, Homo sapiens
tgcacgcagggctaattc

SEQ ID NO: 81634 - DNA, 17 bp, Homo sapiens
aacccaacttttttcat

SEQ ID NO: 81635 - DNA, 20 bp, Homo sapiens
cacttaataagcagttgata

SEQ ID NO: 81636 - DNA, 20 bp, Homo sapiens
catggcttttgtgttttacc

SEQ ID NO: 81637 - DNA, 20 bp, Homo sapiens
cagaattttcaagccagagg

SEQ ID NO: 81638 - DNA, 20 bp, Homo sapiens
cagcgagagctggagttgga

SEQ ID NO: 81639 - DNA, 17 bp, Homo sapiens
agaatattgggctgagt

SEQ ID NO: 81640 - DNA, 19 bp, Homo sapiens
atgtaaagcagttgaaaat

SEQ ID NO: 81641 - DNA, 16 bp, Homo sapiens
caaagaggtatacacg

SEQ ID NO: 81642 - DNA, 23 bp, Homo sapiens
gatatgtgggtattccgactttg

SEQ ID NO: 81643 - DNA, 22 bp, Homo sapiens
tttagaaaactacaaaatgcta

SEQ ID NO: 81644 - DNA, 18 bp, Homo sapiens
aagaaatgaaggaaaaca

SEQ ID NO: 81645 - DNA, 17 bp, Homo sapiens
tctagcagccaattggt

SEQ ID NO: 81646 - DNA, 23 bp, Homo sapiens
ctaatagaggagcactgtcttaa

SEQ ID NO: 81647 - DNA, 20 bp, Homo sapiens
ggtttacttacattattgag

SEQ ID NO: 81648 - DNA, 23 bp, Homo sapiens
tgtttcttaattttgtgtctttt

SEQ ID NO: 81649 - DNA, 25 bp, Homo sapiens
ggtatatatactttatataatatat

SEQ ID NO: 81650 - DNA, 22 bp, Homo sapiens
aaatttttgcctcttatgtacc

SEQ ID NO: 81651 - DNA, 20 bp, Homo sapiens
tgtgatgtgagaagacaaaa

SEQ ID NO: 81652 - DNA, 19 bp, Homo sapiens
aggatttcatgaagtcctc

SEQ ID NO: 81653 - DNA, 16 bp, Homo sapiens
ttcctcataggcctct

SEQ ID NO: 81654 - DNA, 21 bp, Homo sapiens
gccagtataataaacaaagtg

SEQ ID NO: 81655 - DNA, 21 bp, Homo sapiens
tacccactgcagtatctagac

SEQ ID NO: 81656 - DNA, 16 bp, Homo sapiens
ctggctacctctggtt

SEQ ID NO: 81657 - DNA, 24 bp, Homo sapiens
tatttttttgtttatttgcataaa

SEQ ID NO: 81658 - DNA, 22 bp, Homo sapiens
gtttaatccaaatacctcatca

SEQ ID NO: 81659 - DNA, 16 bp, Homo sapiens
tcaatggatcaccccc

SEQ ID NO: 81660 - DNA, 28 bp, Homo sapiens
acaagattttaaaaagaaatattctagg

SEQ ID NO: 81661 - DNA, 21 bp, Homo sapiens
agatgaatttctgactaaacc

SEQ ID NO: 81662 - DNA, 16 bp, Homo sapiens
cgtgagccaccgtgcc

SEQ ID NO: 81663 - DNA, 21 bp, Homo sapiens
atgtatctttgatgtatttca

SEQ ID NO: 81664 - DNA, 24 bp, Homo sapiens
tcctacttctgatagtacatatta

SEQ ID NO: 81665 - DNA, 22 bp, Homo sapiens
attccattgtctagatttgtgc

SEQ ID NO: 81666 - DNA, 22 bp, Homo sapiens
gctaatataatataagcatcac

SEQ ID NO: 81667 - DNA, 24 bp, Homo sapiens
actctgagaagtttaaatgttggg

SEQ ID NO: 81668 - DNA, 25 bp, Homo sapiens
cgtttcttctttaaaaaaaacatac

SEQ ID NO: 81669 - DNA, 21 bp, Homo sapiens
atcgaacagaggctgcaaata

SEQ ID NO: 81670 - DNA, 19 bp, Homo sapiens
gatttacttattaggctct

SEQ ID NO: 81671 - DNA, 18 bp, Homo sapiens
agtgttgaggcactttgt

SEQ ID NO: 81672 - DNA, 20 bp, Homo sapiens
gggaatgctgaagccatcag

SEQ ID NO: 81673 - DNA, 17 bp, Homo sapiens
gaagactcagagaagta

SEQ ID NO: 81674 - DNA, 23 bp, Homo sapiens
ctgcatagtggccaaagcccaga

SEQ ID NO: 81675 - DNA, 22 bp, Homo sapiens
tagggacaacaacatcttctaa

SEQ ID NO: 81676 - DNA, 18 bp, Homo sapiens
gggccagtggtatctgct

SEQ ID NO: 81677 - DNA, 22 bp, Homo sapiens
aaaaaaaatttagtttaaaaaa

SEQ ID NO: 81678 - DNA, 20 bp, Homo sapiens
agtttgtcactaaaatctct

SEQ ID NO: 81679 - DNA, 20 bp, Homo sapiens
tgccaatatttaaccaattt

SEQ ID NO: 81680 - DNA, 24 bp, Homo sapiens
attactaaacttaagaatttagaa

SEQ ID NO: 81681 - DNA, 20 bp, Homo sapiens
gcttgggcaaaggaaatata

SEQ ID NO: 81682 - DNA, 20 bp, Homo sapiens
gagcgtgagccaccacaccc

SEQ ID NO: 81683 - DNA, 22 bp, Homo sapiens
cgaaattctgctttaaatgact

SEQ ID NO: 81684 - DNA, 26 bp, Homo sapiens
catttgtttctctgtttaatattaaa

SEQ ID NO: 81685 - DNA, 19 bp, Homo sapiens
tccttgccatcggaaccta

SEQ ID NO: 81686 - DNA, 20 bp, Homo sapiens
gtgtatctgacctattatca

SEQ ID NO: 81687 - DNA, 17 bp, Homo sapiens
actctaagggctaagcc

SEQ ID NO: 81688 - DNA, 20 bp, Homo sapiens
atctggtgactatacagtca

SEQ ID NO: 81689 - DNA, 19 bp, Homo sapiens
aaataaagacaaaatccca

SEQ ID NO: 81690 - DNA, 25 bp, Homo sapiens
tttaccaaaaataatagattgtgta

SEQ ID NO: 81691 - DNA, 21 bp, Homo sapiens
tggttctagaaaataatgcat

SEQ ID NO: 81692 - DNA, 20 bp, Homo sapiens
tctaaatgaaagaatggcag

SEQ ID NO: 81693 - DNA, 17 bp, Homo sapiens
ctggaagacctgttgca

SEQ ID NO: 81694 - DNA, 21 bp, Homo sapiens
gtgcacagatgctcagattgg

SEQ ID NO: 81695 - DNA, 23 bp, Homo sapiens
agtacagatagttaatttcctct

SEQ ID NO: 81696 - DNA, 20 bp, Homo sapiens
aaaataaactgtacttgttt

SEQ ID NO: 81697 - DNA, 20 bp, Homo sapiens
ccaaccaaatggcatctttt

SEQ ID NO: 81698 - DNA, 24 bp, Homo sapiens
atgacctgagacaagatgctgtca

SEQ ID NO: 81699 - DNA, 16 bp, Homo sapiens
tcccaccttggcctcc

SEQ ID NO: 81700 - DNA, 16 bp, Homo sapiens
tcaagatggggtctca

SEQ ID NO: 81701 - DNA, 23 bp, Homo sapiens
attggtttcctccaaggagcttt

SEQ ID NO: 81702 - DNA, 16 bp, Homo sapiens
tggggacagttcctgt

SEQ ID NO: 81703 - DNA, 20 bp, Homo sapiens
aaaaatgctttgcactgact

SEQ ID NO: 81704 - DNA, 18 bp, Homo sapiens
tgaaatcatttggcctgt

SEQ ID NO: 81705 - DNA, 22 bp, Homo sapiens
aaattaaaaggtatttaatctg

SEQ ID NO: 81706 - DNA, 23 bp, Homo sapiens
tcttacaataacctttaattttg

SEQ ID NO: 81707 - DNA, 20 bp, Homo sapiens
gtggtgttcttgaatggtgc

SEQ ID NO: 81708 - DNA, 19 bp, Homo sapiens
ttaaagtttttttgtattc

SEQ ID NO: 81709 - DNA, 18 bp, Homo sapiens
gatggtgctcataaaaga

SEQ ID NO: 81710 - DNA, 20 bp, Homo sapiens
cactttcattctgatgagtt

SEQ ID NO: 81711 - DNA, 16 bp, Homo sapiens
tgcttccctgtccaga

SEQ ID NO: 81712 - DNA, 16 bp, Homo sapiens
ttttggcaaacatcca

SEQ ID NO: 81713 - DNA, 22 bp, Homo sapiens
attgcccctatatctgtcatat

SEQ ID NO: 81714 - DNA, 17 bp, Homo sapiens
tctcaaaccaaatagct

SEQ ID NO: 81715 - DNA, 24 bp, Homo sapiens
tgaaaaataattatatatattctc

SEQ ID NO: 81716 - DNA, 20 bp, Homo sapiens
actatatgtacaagaagatt

SEQ ID NO: 81717 - DNA, 21 bp, Homo sapiens
agaaatatgaagtcttcatgg

SEQ ID NO: 81718 - DNA, 17 bp, Homo sapiens
aagtgctgaatcaaaca

SEQ ID NO: 81719 - DNA, 24 bp, Homo sapiens
cttctgcatggaaaaattcttgga

SEQ ID NO: 81720 - DNA, 18 bp, Homo sapiens
agatgggttggttactaa

SEQ ID NO: 81721 - DNA, 19 bp, Homo sapiens
agctacttcttctattggt

SEQ ID NO: 81722 - DNA, 21 bp, Homo sapiens
tgagttaaactcaacatggcc

SEQ ID NO: 81723 - DNA, 22 bp, Homo sapiens
actgctcatttatcaagatatt

SEQ ID NO: 81724 - DNA, 18 bp, Homo sapiens
gattataccaagtcagtg

SEQ ID NO: 81725 - DNA, 23 bp, Homo sapiens
gaatagatacatagattttatta

SEQ ID NO: 81726 - DNA, 21 bp, Homo sapiens
gaatcagtgatttcagattgt

SEQ ID NO: 81727 - DNA, 23 bp, Homo sapiens
tatatttgtaatatcttggtagg

SEQ ID NO: 81728 - DNA, 21 bp, Homo sapiens
ggtgatagacatgtacagaat

SEQ ID NO: 81729 - DNA, 21 bp, Homo sapiens
ggacaactgtttatgctgaaa

SEQ ID NO: 81730 - DNA, 22 bp, Homo sapiens
agtgacaaagatgaggaaggca

SEQ ID NO: 81731 - DNA, 16 bp, Homo sapiens
aactgtctcaggagta

SEQ ID NO: 81732 - DNA, 18 bp, Homo sapiens
taggtaacatgtggtttc

SEQ ID NO: 81733 - DNA, 16 bp, Homo sapiens
agacaccttcaacacc

SEQ ID NO: 81734 - DNA, 17 bp, Homo sapiens
agctgtcaaacctccta

SEQ ID NO: 81735 - DNA, 20 bp, Homo sapiens
tgcccagcccatgtaatttt

SEQ ID NO: 81736 - DNA, 22 bp, Homo sapiens
gaacagggcaaaatccttccta

SEQ ID NO: 81737 - DNA, 16 bp, Homo sapiens
cctcccacttcagcct

SEQ ID NO: 81738 - DNA, 23 bp, Homo sapiens
attgtggatggcatgggcattac

SEQ ID NO: 81739 - DNA, 22 bp, Homo sapiens
caaacgtctaatgaaagcccac

SEQ ID NO: 81740 - DNA, 17 bp, Homo sapiens
cagagtttcctgagagt

SEQ ID NO: 81741 - DNA, 16 bp, Homo sapiens
aagcataggctcagca

SEQ ID NO: 81742 - DNA, 18 bp, Homo sapiens
gtctacctggtaagaaaa

SEQ ID NO: 81743 - DNA, 21 bp, Homo sapiens
cattggtgtgtaacaaaatcc

SEQ ID NO: 81744 - DNA, 18 bp, Homo sapiens
catccccctatgttaaaa

SEQ ID NO: 81745 - DNA, 24 bp, Homo sapiens
agaaaaccatggaagtgatgagaa

SEQ ID NO: 81746 - DNA, 16 bp, Homo sapiens
ggatgtgtgaaaaggc

SEQ ID NO: 81747 - DNA, 17 bp, Homo sapiens
catggtccagtcaaaga

SEQ ID NO: 81748 - DNA, 20 bp, Homo sapiens
tgttcccctcccccatcaac

SEQ ID NO: 81749 - DNA, 16 bp, Homo sapiens
tagggtgaagctcagt

SEQ ID NO: 81750 - DNA, 26 bp, Homo sapiens
actgtttctaagtatgtgattaaaat

SEQ ID NO: 81751 - DNA, 19 bp, Homo sapiens
aggaccttcttaaaatact

SEQ ID NO: 81752 - DNA, 22 bp, Homo sapiens
tctatatgatccactctttgac

SEQ ID NO: 81753 - DNA, 18 bp, Homo sapiens
agtgaggtgaacagttta

SEQ ID NO: 81754 - DNA, 17 bp, Homo sapiens
gcagaggccggaagatg

SEQ ID NO: 81755 - DNA, 18 bp, Homo sapiens
tcagctactttgttgaaa

SEQ ID NO: 81756 - DNA, 17 bp, Homo sapiens
gaaatctcaggtgagca

SEQ ID NO: 81757 - DNA, 16 bp, Homo sapiens
gagcacagtgccttct

SEQ ID NO: 81758 - DNA, 19 bp, Homo sapiens
ttttcttattcccaaggcc

SEQ ID NO: 81759 - DNA, 17 bp, Homo sapiens
ggctgagatttttgggg

SEQ ID NO: 81760 - DNA, 21 bp, Homo sapiens
ccttagtgatattgaccagag

SEQ ID NO: 81761 - DNA, 18 bp, Homo sapiens
ggctgaatgaaagggtaa

SEQ ID NO: 81762 - DNA, 17 bp, Homo sapiens
aaaggagtggaagaagg

SEQ ID NO: 81763 - DNA, 20 bp, Homo sapiens
atccctacttaaagtatgtt

SEQ ID NO: 81764 - DNA, 19 bp, Homo sapiens
tcatacagcaggccataga

SEQ ID NO: 81765 - DNA, 21 bp, Homo sapiens
gtggtgattaaatcaagtatt

SEQ ID NO: 81766 - DNA, 24 bp, Homo sapiens
gccaccttccgacagctgtgtttg

SEQ ID NO: 81767 - DNA, 22 bp, Homo sapiens
aagacccctcacctcggcctcc

SEQ ID NO: 81768 - DNA, 18 bp, Homo sapiens
catttcctcttccctgtt

SEQ ID NO: 81769 - DNA, 16 bp, Homo sapiens
ttccatccccttccct

SEQ ID NO: 81770 - DNA, 17 bp, Homo sapiens
gggttggtggatgacct

SEQ ID NO: 81771 - DNA, 17 bp, Homo sapiens
cattgctgtgatttcgg

SEQ ID NO: 81772 - DNA, 23 bp, Homo sapiens
tgagtgccgtttgcggtgcccta

SEQ ID NO: 81773 - DNA, 21 bp, Homo sapiens
cctggtcttaacttcacagta

SEQ ID NO: 81774 - DNA, 16 bp, Homo sapiens
tgctgagatatgagca

SEQ ID NO: 81775 - DNA, 20 bp, Homo sapiens
tcccctatttattgttaagt

SEQ ID NO: 81776 - DNA, 17 bp, Homo sapiens
ggctcggtgacaagtgt

SEQ ID NO: 81777 - DNA, 24 bp, Homo sapiens
ctgttaaaggagaggttcttatga

SEQ ID NO: 81778 - DNA, 18 bp, Homo sapiens
gtgaaggtaaagatggct

SEQ ID NO: 81779 - DNA, 21 bp, Homo sapiens
gaactccagtggtcagacctg

SEQ ID NO: 81780 - DNA, 19 bp, Homo sapiens
acaaagttggacacaagag

SEQ ID NO: 81781 - DNA, 20 bp, Homo sapiens
gaatggtgtggagtgcagca

SEQ ID NO: 81782 - DNA, 24 bp, Homo sapiens
caaaaaacagagatagcttctctc

SEQ ID NO: 81783 - DNA, 16 bp, Homo sapiens
cactgacaaccctctc

SEQ ID NO: 81784 - DNA, 24 bp, Homo sapiens
ttatatcctatatgtacactgcct

SEQ ID NO: 81785 - DNA, 16 bp, Homo sapiens
gtccatcgcagagcaa

SEQ ID NO: 81786 - DNA, 23 bp, Homo sapiens
atgaaagatgtgtgtttctcaca

SEQ ID NO: 81787 - DNA, 22 bp, Homo sapiens
gacaactatatttggaattgct

SEQ ID NO: 81788 - DNA, 20 bp, Homo sapiens
gctgcatctctccactggac

SEQ ID NO: 81789 - DNA, 18 bp, Homo sapiens
atcaacttctccctcata

SEQ ID NO: 81790 - DNA, 19 bp, Homo sapiens
tccggctgcttatttgaat

SEQ ID NO: 81791 - DNA, 24 bp, Homo sapiens
tataaatctaggcatatacatatt

SEQ ID NO: 81792 - DNA, 21 bp, Homo sapiens
actcttcatggtcactggcaa

SEQ ID NO: 81793 - DNA, 22 bp, Homo sapiens
tattcagccatacaaaggaatg

SEQ ID NO: 81794 - DNA, 16 bp, Homo sapiens
agctgagatcgtgctg

SEQ ID NO: 81795 - DNA, 20 bp, Homo sapiens
gagaaaccccatctctacaa

SEQ ID NO: 81796 - DNA, 18 bp, Homo sapiens
gcacgatctcggctcagc

SEQ ID NO: 81797 - DNA, 22 bp, Homo sapiens
ttgggtgggtgaagtgggcgga

SEQ ID NO: 81798 - DNA, 24 bp, Homo sapiens
acgcaaaaggctatacagaatccc

SEQ ID NO: 81799 - DNA, 18 bp, Homo sapiens
ctgcaaggcatccccatg

SEQ ID NO: 81800 - DNA, 24 bp, Homo sapiens
gagacattgcatttgaacttgaca

SEQ ID NO: 81801 - DNA, 16 bp, Homo sapiens
agcaaagcccagcaaa

SEQ ID NO: 81802 - DNA, 20 bp, Homo sapiens
atttcactgtggttttttat

SEQ ID NO: 81803 - DNA, 18 bp, Homo sapiens
aaaaaggtcagagcttcc

SEQ ID NO: 81804 - DNA, 16 bp, Homo sapiens
tgactatgttcatggg

SEQ ID NO: 81805 - DNA, 19 bp, Homo sapiens
aatggcatgacaaagcaga

SEQ ID NO: 81806 - DNA, 18 bp, Homo sapiens
tttcagctttaacctttg

SEQ ID NO: 81807 - DNA, 16 bp, Homo sapiens
agaagaaggctgtcca

SEQ ID NO: 81808 - DNA, 16 bp, Homo sapiens
tgttgccatgctgtgg

SEQ ID NO: 81809 - DNA, 21 bp, Homo sapiens
ctagagctcgggccgtggctc

SEQ ID NO: 81810 - DNA, 19 bp, Homo sapiens
ctggcgtccatccgctcca

SEQ ID NO: 81811 - DNA, 16 bp, Homo sapiens
cttccgagaggggttc

SEQ ID NO: 81812 - DNA, 22 bp, Homo sapiens
cttcgtggtccaccgggccgaa

SEQ ID NO: 81813 - DNA, 24 bp, Homo sapiens
ttttttgagagtgcgagagaggcg

SEQ ID NO: 81814 - DNA, 21 bp, Homo sapiens
ttccacttgcgctggctcgcc

SEQ ID NO: 81815 - DNA, 21 bp, Homo sapiens
gtgtctaacgggagccctagc

SEQ ID NO: 81816 - DNA, 23 bp, Homo sapiens
cttctccacctcttgccactcgt

SEQ ID NO: 81817 - DNA, 17 bp, Homo sapiens
ggcctgcaggaacctct

SEQ ID NO: 81818 - DNA, 22 bp, Homo sapiens
ttgcaggcacctttggggggcc

SEQ ID NO: 81819 - DNA, 22 bp, Homo sapiens
gagaagcactgcagagacatgg

SEQ ID NO: 81820 - DNA, 17 bp, Homo sapiens
caattaaaggcgccgcc

SEQ ID NO: 81821 - DNA, 21 bp, Homo sapiens
aatcacaaacccctagagggc

SEQ ID NO: 81822 - DNA, 21 bp, Homo sapiens
gctgtccgacggatcagtctt

SEQ ID NO: 81823 - DNA, 24 bp, Homo sapiens
cccgagttctactacagacccccg

SEQ ID NO: 81824 - DNA, 17 bp, Homo sapiens
gtcggttgcaggtcgct

SEQ ID NO: 81825 - DNA, 16 bp, Homo sapiens
cagcgggagccgcccg

SEQ ID NO: 81826 - DNA, 18 bp, Homo sapiens
caccctccagcaggcaaa

SEQ ID NO: 81827 - DNA, 21 bp, Homo sapiens
gaggacacgcatttggtggac

SEQ ID NO: 81828 - DNA, 18 bp, Homo sapiens
ataaagttagctctccca

SEQ ID NO: 81829 - DNA, 16 bp, Homo sapiens
aggaataaggaagcga

SEQ ID NO: 81830 - DNA, 18 bp, Homo sapiens
ctgttggctcttttgttt

SEQ ID NO: 81831 - DNA, 20 bp, Homo sapiens
cggatccaggattgtgggtg

SEQ ID NO: 81832 - DNA, 16 bp, Homo sapiens
gcgtctgctccacaga

SEQ ID NO: 81833 - DNA, 17 bp, Homo sapiens
cagccattgttttttct

SEQ ID NO: 81834 - DNA, 17 bp, Homo sapiens
ctttagtgatcaaccca

SEQ ID NO: 81835 - DNA, 21 bp, Homo sapiens
ttagattcttctactcaaaac

SEQ ID NO: 81836 - DNA, 16 bp, Homo sapiens
ttgccagcaaccagta

SEQ ID NO: 81837 - DNA, 17 bp, Homo sapiens
ccccaaatgccggttct

SEQ ID NO: 81838 - DNA, 18 bp, Homo sapiens
tgctacttttttgacctc

SEQ ID NO: 81839 - DNA, 20 bp, Homo sapiens
gcagcactcttatctacata

SEQ ID NO: 81840 - DNA, 20 bp, Homo sapiens
aatctctgtagaaagatgga

SEQ ID NO: 81841 - DNA, 18 bp, Homo sapiens
tcaggaaatgctgacttt

SEQ ID NO: 81842 - DNA, 21 bp, Homo sapiens
ctctcagtgtccagaagggaa

SEQ ID NO: 81843 - DNA, 17 bp, Homo sapiens
gttgtgggtgggcagaa

SEQ ID NO: 81844 - DNA, 18 bp, Homo sapiens
ttgctcactccggattac

SEQ ID NO: 81845 - DNA, 22 bp, Homo sapiens
gcagagattcgcttgtgtgggt

SEQ ID NO: 81846 - DNA, 23 bp, Homo sapiens
ttctctgtgggtggctatttgca

SEQ ID NO: 81847 - DNA, 18 bp, Homo sapiens
cagagggccccgcccagt

SEQ ID NO: 81848 - DNA, 24 bp, Homo sapiens
caagtttcattaaccacagtggcc

SEQ ID NO: 81849 - DNA, 16 bp, Homo sapiens
cctccagaggatgact

SEQ ID NO: 81850 - DNA, 23 bp, Homo sapiens
tctatttctttccctgtgcccac

SEQ ID NO: 81851 - DNA, 16 bp, Homo sapiens
atgggaactggaggac

SEQ ID NO: 81852 - DNA, 16 bp, Homo sapiens
gtaccaccgactgcac

SEQ ID NO: 81853 - DNA, 24 bp, Homo sapiens
agaaaaagattttctattctgagt

SEQ ID NO: 81854 - DNA, 16 bp, Homo sapiens
tacatctcgaggccag

SEQ ID NO: 81855 - DNA, 24 bp, Homo sapiens
ggaaactctgaagccgaccagttg

SEQ ID NO: 81856 - DNA, 22 bp, Homo sapiens
gacaggagaactctggtcagga

SEQ ID NO: 81857 - DNA, 20 bp, Homo sapiens
atctttgaaaatgactgcta

SEQ ID NO: 81858 - DNA, 20 bp, Homo sapiens
ccatcctgggttcagcagaa

SEQ ID NO: 81859 - DNA, 18 bp, Homo sapiens
gttggcctttattcccta

SEQ ID NO: 81860 - DNA, 24 bp, Homo sapiens
ggtcacttactcaaagattttgcc

SEQ ID NO: 81861 - DNA, 17 bp, Homo sapiens
cagtgagctgtgatcat

SEQ ID NO: 81862 - DNA, 18 bp, Homo sapiens
tatgcaacacctgtggac

SEQ ID NO: 81863 - DNA, 24 bp, Homo sapiens
cctggtctcaaaaaaaaagaatgg

SEQ ID NO: 81864 - DNA, 18 bp, Homo sapiens
tcctattccctttaggtt

SEQ ID NO: 81865 - DNA, 24 bp, Homo sapiens
ggggaattcaaggtagtccagggt

SEQ ID NO: 81866 - DNA, 17 bp, Homo sapiens
gtgttcagtcaagcaag

SEQ ID NO: 81867 - DNA, 21 bp, Homo sapiens
gatacagccaacactccacat

SEQ ID NO: 81868 - DNA, 21 bp, Homo sapiens
caaaatgggttctggttggga

SEQ ID NO: 81869 - DNA, 20 bp, Homo sapiens
gagctcggtaccagagtgta

SEQ ID NO: 81870 - DNA, 19 bp, Homo sapiens
ccagaatctacagctacca

SEQ ID NO: 81871 - DNA, 22 bp, Homo sapiens
atgggttaccatgaaacacaac

SEQ ID NO: 81872 - DNA, 18 bp, Homo sapiens
ccagagaacattctggtg

SEQ ID NO: 81873 - DNA, 22 bp, Homo sapiens
tgctacgggcaatcactctcct

SEQ ID NO: 81874 - DNA, 17 bp, Homo sapiens
gtttctaagaggcctag

SEQ ID NO: 81875 - DNA, 22 bp, Homo sapiens
ccacgggtgtaagtgccatctg

SEQ ID NO: 81876 - DNA, 16 bp, Homo sapiens
tatggtgcctagtttc

SEQ ID NO: 81877 - DNA, 19 bp, Homo sapiens
ttgactgttccaccacttg

SEQ ID NO: 81878 - DNA, 18 bp, Homo sapiens
gttggtaggcattgagag

SEQ ID NO: 81879 - DNA, 24 bp, Homo sapiens
gatgcaattggcatgaaggaaatc

SEQ ID NO: 81880 - DNA, 17 bp, Homo sapiens
catatctggacaaggca

SEQ ID NO: 81881 - DNA, 21 bp, Homo sapiens
aaaggggaggtacagatgcac

SEQ ID NO: 81882 - DNA, 23 bp, Homo sapiens
gtgccacatcccgaactgaccgg

SEQ ID NO: 81883 - DNA, 19 bp, Homo sapiens
ggtcccaatccacctctca

SEQ ID NO: 81884 - DNA, 19 bp, Homo sapiens
ggttaaaggggattgaaaa

SEQ ID NO: 81885 - DNA, 16 bp, Homo sapiens
gcaagcctggtggggg

SEQ ID NO: 81886 - DNA, 18 bp, Homo sapiens
gggtgtgatgatctgtag

SEQ ID NO: 81887 - DNA, 17 bp, Homo sapiens
aacaccagggttacctt

SEQ ID NO: 81888 - DNA, 17 bp, Homo sapiens
gtgagaaggtggtggag

SEQ ID NO: 81889 - DNA, 23 bp, Homo sapiens
cagcctgaccagagtaaatgctc

SEQ ID NO: 81890 - DNA, 21 bp, Homo sapiens
gcacagttcgtgaggtggctt

SEQ ID NO: 81891 - DNA, 21 bp, Homo sapiens
ctcagggtccccacttctcta

SEQ ID NO: 81892 - DNA, 17 bp, Homo sapiens
ctcaagagtgtgagagt

SEQ ID NO: 81893 - DNA, 23 bp, Homo sapiens
ttccctttactccccacgcccaa

SEQ ID NO: 81894 - DNA, 23 bp, Homo sapiens
aattggtgtcggtgcctatggga

SEQ ID NO: 81895 - DNA, 19 bp, Homo sapiens
gcctccagtcgcctcagta

SEQ ID NO: 81896 - DNA, 19 bp, Homo sapiens
attgtagggtctcccttga

SEQ ID NO: 81897 - DNA, 17 bp, Homo sapiens
acctcctcctccattgg

SEQ ID NO: 81898 - DNA, 16 bp, Homo sapiens
aggctcataccatcct

SEQ ID NO: 81899 - DNA, 21 bp, Homo sapiens
ggggatcacgggccttgtaca

SEQ ID NO: 81900 - DNA, 16 bp, Homo sapiens
ggggatgggatgctgg

SEQ ID NO: 81901 - DNA, 16 bp, Homo sapiens
tctgagctccctgaaa

SEQ ID NO: 81902 - DNA, 16 bp, Homo sapiens
tggctgctgcagaaga

SEQ ID NO: 81903 - DNA, 22 bp, Homo sapiens
ggggtcacaggtttggacagtc

SEQ ID NO: 81904 - DNA, 20 bp, Homo sapiens
acagatcggaatattccgga

SEQ ID NO: 81905 - DNA, 17 bp, Homo sapiens
cttggcatcaggaggcc

SEQ ID NO: 81906 - DNA, 16 bp, Homo sapiens
tctgagtggactgggg

SEQ ID NO: 81907 - DNA, 24 bp, Homo sapiens
aatggcccagctgtgggttcttct

SEQ ID NO: 81908 - DNA, 19 bp, Homo sapiens
tcaccatccacacccaggt

SEQ ID NO: 81909 - DNA, 16 bp, Homo sapiens
gtagtgctgggcaatg

SEQ ID NO: 81910 - DNA, 16 bp, Homo sapiens
ggtgaaggagaccagc

SEQ ID NO: 81911 - DNA, 22 bp, Homo sapiens
gaataaacaggcacagtgagac

SEQ ID NO: 81912 - DNA, 24 bp, Homo sapiens
gtctggccagcgcgggagggctgg

SEQ ID NO: 81913 - DNA, 22 bp, Homo sapiens
tgagccgaggcagatgagggag

SEQ ID NO: 81914 - DNA, 23 bp, Homo sapiens
gaggcttactgatgggcccacga

SEQ ID NO: 81915 - DNA, 24 bp, Homo sapiens
cccgcgcagctgcagtacacaggc

SEQ ID NO: 81916 - DNA, 17 bp, Homo sapiens
gaggtcgtgcattttac

SEQ ID NO: 81917 - DNA, 24 bp, Homo sapiens
agtgtggacagaacagtccatcag

SEQ ID NO: 81918 - DNA, 20 bp, Homo sapiens
ggtggaagttctacagaaga

SEQ ID NO: 81919 - DNA, 22 bp, Homo sapiens
ggaagacaccagggcgtgcctc

SEQ ID NO: 81920 - DNA, 23 bp, Homo sapiens
tcagtggctctgctccaactgtc

SEQ ID NO: 81921 - DNA, 24 bp, Homo sapiens
cagaaacccccctgtggactccag

SEQ ID NO: 81922 - DNA, 24 bp, Homo sapiens
gtggtctggaggctgggctggtga

SEQ ID NO: 81923 - DNA, 20 bp, Homo sapiens
ctgcagggtgaaggccatca

SEQ ID NO: 81924 - DNA, 17 bp, Homo sapiens
caggcgcttctcacagc

SEQ ID NO: 81925 - DNA, 23 bp, Homo sapiens
gaggagtcgtagggcgcctgaca

SEQ ID NO: 81926 - DNA, 24 bp, Homo sapiens
aggaagggctcaagtgcaggtggg

SEQ ID NO: 81927 - DNA, 19 bp, Homo sapiens
acatggtgtggggaggcct

SEQ ID NO: 81928 - DNA, 18 bp, Homo sapiens
agctgtaacttctgccgc

SEQ ID NO: 81929 - DNA, 23 bp, Homo sapiens
caggtgtgacccacagagctgga

SEQ ID NO: 81930 - DNA, 24 bp, Homo sapiens
ctccgaggaggcccagttccgaga

SEQ ID NO: 81931 - DNA, 24 bp, Homo sapiens
cggatgttctgctccacagtgaag

SEQ ID NO: 81932 - DNA, 21 bp, Homo sapiens
catcacaaaccaggtgaataa

SEQ ID NO: 81933 - DNA, 22 bp, Homo sapiens
agagtctttacacaggtccagg

SEQ ID NO: 81934 - DNA, 19 bp, Homo sapiens
ctccttcccgatgtgggct

SEQ ID NO: 81935 - DNA, 23 bp, Homo sapiens
cgtaggagcggcaggggtctcgg

SEQ ID NO: 81936 - DNA, 23 bp, Homo sapiens
ggaaactgtagcctaaggtccag

SEQ ID NO: 81937 - DNA, 19 bp, Homo sapiens
gaagcaggtctcggttcag

SEQ ID NO: 81938 - DNA, 17 bp, Homo sapiens
tagagaagtcagctgag

SEQ ID NO: 81939 - DNA, 20 bp, Homo sapiens
acatccttaccatgcacagg

SEQ ID NO: 81940 - DNA, 17 bp, Homo sapiens
ttcccacttgctgctca

SEQ ID NO: 81941 - DNA, 20 bp, Homo sapiens
ttcatggtgcacgcattaca

SEQ ID NO: 81942 - DNA, 16 bp, Homo sapiens
aaagtcacaggctctc

SEQ ID NO: 81943 - DNA, 20 bp, Homo sapiens
acgttagtgtcctctcctca

SEQ ID NO: 81944 - DNA, 19 bp, Homo sapiens
ctcaggattatgtcgcaaa

SEQ ID NO: 81945 - DNA, 18 bp, Homo sapiens
ctccagggcagggttatt

SEQ ID NO: 81946 - DNA, 23 bp, Homo sapiens
gtgccagacaggtcccagacccc

SEQ ID NO: 81947 - DNA, 23 bp, Homo sapiens
gagagctcagtggagttccgaga

SEQ ID NO: 81948 - DNA, 16 bp, Homo sapiens
actcctctgtgtgcca

SEQ ID NO: 81949 - DNA, 17 bp, Homo sapiens
ctctgagtgagctcatt

SEQ ID NO: 81950 - DNA, 17 bp, Homo sapiens
ttcccggtgagcagtct

SEQ ID NO: 81951 - DNA, 24 bp, Homo sapiens
tggaagtataaggatgctgaggga

SEQ ID NO: 81952 - DNA, 24 bp, Homo sapiens
cagggagcacccccgtgaggagga

SEQ ID NO: 81953 - DNA, 24 bp, Homo sapiens
ggggactggcaccggggaccaccc

SEQ ID NO: 81954 - DNA, 18 bp, Homo sapiens
cgtacatcgtggccgtgt

SEQ ID NO: 81955 - DNA, 23 bp, Homo sapiens
tggcagtggcctcaaaagacaaa

SEQ ID NO: 81956 - DNA, 24 bp, Homo sapiens
ctcagattctagggtgtttgcagc

SEQ ID NO: 81957 - DNA, 22 bp, Homo sapiens
ctcctgggagagctggctggcc

SEQ ID NO: 81958 - DNA, 26 bp, Homo sapiens
aaattattaacaatgacattttagcc

SEQ ID NO: 81959 - DNA, 16 bp, Homo sapiens
gcccgtccttcatgca

SEQ ID NO: 81960 - DNA, 17 bp, Homo sapiens
cctggagcctggagagg

SEQ ID NO: 81961 - DNA, 21 bp, Homo sapiens
cacaggcagcctcctgccaga

SEQ ID NO: 81962 - DNA, 17 bp, Homo sapiens
gcccgatctgattttcc

SEQ ID NO: 81963 - DNA, 20 bp, Homo sapiens
gaatccaacgtggaggattt

SEQ ID NO: 81964 - DNA, 19 bp, Homo sapiens
atctactaaccatgagtcc

SEQ ID NO: 81965 - DNA, 22 bp, Homo sapiens
cagaggatgagcaggaaaatga

SEQ ID NO: 81966 - DNA, 20 bp, Homo sapiens
tgaaacaatcatgaggaagt

SEQ ID NO: 81967 - DNA, 21 bp, Homo sapiens
aaacacagccgcgttgtctca

SEQ ID NO: 81968 - DNA, 24 bp, Homo sapiens
aatgttccagttgttttccagtaa

SEQ ID NO: 81969 - DNA, 22 bp, Homo sapiens
ccaggttggaggagccttcgct

SEQ ID NO: 81970 - DNA, 24 bp, Homo sapiens
cctccccatctctttcctcctcat

SEQ ID NO: 81971 - DNA, 16 bp, Homo sapiens
tccaggggatgccttg

SEQ ID NO: 81972 - DNA, 21 bp, Homo sapiens
cggaatcaaaggaaaagtttc

SEQ ID NO: 81973 - DNA, 16 bp, Homo sapiens
gcagtgtctgctgctc

SEQ ID NO: 81974 - DNA, 20 bp, Homo sapiens
tgacaatttctttctctcga

SEQ ID NO: 81975 - DNA, 21 bp, Homo sapiens
ctgcaggaatgaacgcgaccc

SEQ ID NO: 81976 - DNA, 23 bp, Homo sapiens
actgaagcagcgtcttcaatgct

SEQ ID NO: 81977 - DNA, 22 bp, Homo sapiens
gtgaatacgagatgaaactttt

SEQ ID NO: 81978 - DNA, 18 bp, Homo sapiens
tggagggtacagatagat

SEQ ID NO: 81979 - DNA, 19 bp, Homo sapiens
aagaaattcccagcatcga

SEQ ID NO: 81980 - DNA, 18 bp, Homo sapiens
aggaagcctgagggatga

SEQ ID NO: 81981 - DNA, 17 bp, Homo sapiens
ttttcacgctgctcaga

SEQ ID NO: 81982 - DNA, 17 bp, Homo sapiens
atcctctgtacaaagaa

SEQ ID NO: 81983 - DNA, 19 bp, Homo sapiens
cagcccacccaggaggaga

SEQ ID NO: 81984 - DNA, 16 bp, Homo sapiens
catcgctgagttcaag

SEQ ID NO: 81985 - DNA, 23 bp, Homo sapiens
aaagccacagtgctgcgtcacca

SEQ ID NO: 81986 - DNA, 18 bp, Homo sapiens
gtgccctctggctctcca

SEQ ID NO: 81987 - DNA, 18 bp, Homo sapiens
cgatggcatcttccacac

SEQ ID NO: 81988 - DNA, 16 bp, Homo sapiens
gaggcttttctgcttc

SEQ ID NO: 81989 - DNA, 16 bp, Homo sapiens
atgactgatgacccca

SEQ ID NO: 81990 - DNA, 17 bp, Homo sapiens
cacactccacaacatga

SEQ ID NO: 81991 - DNA, 22 bp, Homo sapiens
aaactcagaaatacactactta

SEQ ID NO: 81992 - DNA, 22 bp, Homo sapiens
aaccaggtgatgcacttctacc

SEQ ID NO: 81993 - DNA, 20 bp, Homo sapiens
agtaagggaccagcccagct

SEQ ID NO: 81994 - DNA, 24 bp, Homo sapiens
gcatggtcgtgggctgggtgaagg

SEQ ID NO: 81995 - DNA, 19 bp, Homo sapiens
tgcaggaagagcttcttca

SEQ ID NO: 81996 - DNA, 24 bp, Homo sapiens
gcagcagcgtgggaggctgagggt

SEQ ID NO: 81997 - DNA, 21 bp, Homo sapiens
aggatggcgaccgaagccagc

SEQ ID NO: 81998 - DNA, 16 bp, Homo sapiens
agccgtgtagggaaaa

SEQ ID NO: 81999 - DNA, 20 bp, Homo sapiens
ggtactgggtgatctccttc

SEQ ID NO: 82000 - DNA, 17 bp, Homo sapiens
atttggaccgtgactta

SEQ ID NO: 82001 - DNA, 18 bp, Homo sapiens
cagctacgatgagacagc

SEQ ID NO: 82002 - DNA, 23 bp, Homo sapiens
ctctgccattaagactaagggaa

SEQ ID NO: 82003 - DNA, 17 bp, Homo sapiens
gatccagcaggcctccc

SEQ ID NO: 82004 - DNA, 21 bp, Homo sapiens
aattaagggcaaaggataaga

SEQ ID NO: 82005 - DNA, 16 bp, Homo sapiens
cagtctcaccatgtca

SEQ ID NO: 82006 - DNA, 24 bp, Homo sapiens
cacctgaaggtgttagagcacagg

SEQ ID NO: 82007 - DNA, 16 bp, Homo sapiens
ttcctgtgcagtgtgt

SEQ ID NO: 82008 - DNA, 24 bp, Homo sapiens
cacccgtgatcatgtcctccaggg

SEQ ID NO: 82009 - DNA, 19 bp, Homo sapiens
gtggctggagtcaggccca

SEQ ID NO: 82010 - DNA, 24 bp, Homo sapiens
gtcggccccctccatgtcgttgac

SEQ ID NO: 82011 - DNA, 19 bp, Homo sapiens
aatagcctggcaggtgtga

SEQ ID NO: 82012 - DNA, 23 bp, Homo sapiens
tctgaaggtccagctccacacac

SEQ ID NO: 82013 - DNA, 22 bp, Homo sapiens
gaggccccacctggaccttgac

SEQ ID NO: 82014 - DNA, 22 bp, Homo sapiens
ggagttcgatgaccaagccact

SEQ ID NO: 82015 - DNA, 17 bp, Homo sapiens
gtcgaactctgagccca

SEQ ID NO: 82016 - DNA, 17 bp, Homo sapiens
acagcccgccctgacct

SEQ ID NO: 82017 - DNA, 24 bp, Homo sapiens
atggcagaaacaccagccaggtct

SEQ ID NO: 82018 - DNA, 23 bp, Homo sapiens
cacattcggctccgacctcttct

SEQ ID NO: 82019 - DNA, 19 bp, Homo sapiens
agcctgaactgttgatctc

SEQ ID NO: 82020 - DNA, 17 bp, Homo sapiens
gtgcaggtactttcaca

SEQ ID NO: 82021 - DNA, 24 bp, Homo sapiens
gttgtcatcagcctcctttccacc

SEQ ID NO: 82022 - DNA, 24 bp, Homo sapiens
gtccccaggcagagccggcctcgg

SEQ ID NO: 82023 - DNA, 17 bp, Homo sapiens
ctggaggtggcgggcaa

SEQ ID NO: 82024 - DNA, 23 bp, Homo sapiens
ctgcctgtcgcaggccttcgaga

SEQ ID NO: 82025 - DNA, 18 bp, Homo sapiens
tcccaatgggaatgtgaa

SEQ ID NO: 82026 - DNA, 23 bp, Homo sapiens
gactggcagcgccatggagcccg

SEQ ID NO: 82027 - DNA, 23 bp, Homo sapiens
gggcacatcgccgggtcacagag

SEQ ID NO: 82028 - DNA, 24 bp, Homo sapiens
tgtcttggaggaattcccactggt

SEQ ID NO: 82029 - DNA, 21 bp, Homo sapiens
aacgacagtactgtgctcacc

SEQ ID NO: 82030 - DNA, 22 bp, Homo sapiens
cacactcatcgctgttcagtcc

SEQ ID NO: 82031 - DNA, 24 bp, Homo sapiens
ggtagtgacggatcatgcgccggg

SEQ ID NO: 82032 - DNA, 16 bp, Homo sapiens
ccaggtcttttcttcc

SEQ ID NO: 82033 - DNA, 23 bp, Homo sapiens
gttgatcttgtcagccacacaga

SEQ ID NO: 82034 - DNA, 16 bp, Homo sapiens
gcctacaaggtgagag

SEQ ID NO: 82035 - DNA, 19 bp, Homo sapiens
ctcttcagctcccagctgg

SEQ ID NO: 82036 - DNA, 24 bp, Homo sapiens
ttcgaagttcgggcagaaactgac

SEQ ID NO: 82037 - DNA, 24 bp, Homo sapiens
cctgggtcaaggcaaaatggaaga

SEQ ID NO: 82038 - DNA, 22 bp, Homo sapiens
cagagcacggcctcctcctgga

SEQ ID NO: 82039 - DNA, 24 bp, Homo sapiens
gatggggctcacacagcaagaccc

SEQ ID NO: 82040 - DNA, 16 bp, Homo sapiens
ttggtctaggtgcgca

SEQ ID NO: 82041 - DNA, 16 bp, Homo sapiens
cagatggtcttcaggt

SEQ ID NO: 82042 - DNA, 16 bp, Homo sapiens
gtctgccccagggctg

SEQ ID NO: 82043 - DNA, 20 bp, Homo sapiens
caggagctcagggcccacct

SEQ ID NO: 82044 - DNA, 23 bp, Homo sapiens
tgtcctcaagggcctttgcccat

SEQ ID NO: 82045 - DNA, 16 bp, Homo sapiens
gctgggcatctggttg

SEQ ID NO: 82046 - DNA, 16 bp, Homo sapiens
cgtctttgtgctggac

SEQ ID NO: 82047 - DNA, 19 bp, Homo sapiens
tcaatcacgacaagcactc

SEQ ID NO: 82048 - DNA, 17 bp, Homo sapiens
caccacgcacaggccca

SEQ ID NO: 82049 - DNA, 16 bp, Homo sapiens
gggagatgtcctcctt

SEQ ID NO: 82050 - DNA, 16 bp, Homo sapiens
atctggggtgacggtc

SEQ ID NO: 82051 - DNA, 23 bp, Homo sapiens
gagggcccaggactcacagtgtc

SEQ ID NO: 82052 - DNA, 24 bp, Homo sapiens
tctggcccagttcagctacctgga

SEQ ID NO: 82053 - DNA, 24 bp, Homo sapiens
gatgaagatcccgaagagcgcttt

SEQ ID NO: 82054 - DNA, 16 bp, Homo sapiens
tcaggctgggaagcag

SEQ ID NO: 82055 - DNA, 17 bp, Homo sapiens
ggagaaggaaacaagac

SEQ ID NO: 82056 - DNA, 24 bp, Homo sapiens
tactgttccgggccctggtgcacc

SEQ ID NO: 82057 - DNA, 17 bp, Homo sapiens
ctggtgcaggccatacc

SEQ ID NO: 82058 - DNA, 23 bp, Homo sapiens
cagagcccccaccatccagccct

SEQ ID NO: 82059 - DNA, 20 bp, Homo sapiens
tgctcaagagcaaaggtctc

SEQ ID NO: 82060 - DNA, 23 bp, Homo sapiens
tgggcagtgggccgggcagctgc

SEQ ID NO: 82061 - DNA, 24 bp, Homo sapiens
ttattgaccacacacacacagccc

SEQ ID NO: 82062 - DNA, 21 bp, Homo sapiens
ctcgttcccacaggtgaggtg

SEQ ID NO: 82063 - DNA, 24 bp, Homo sapiens
agggcgtatatgagactcaggtga

SEQ ID NO: 82064 - DNA, 23 bp, Homo sapiens
ttggcagacacactgctgacatt

SEQ ID NO: 82065 - DNA, 16 bp, Homo sapiens
ggaacacatcaacgag

SEQ ID NO: 82066 - DNA, 20 bp, Homo sapiens
ccagcccacaccctgggcgg

SEQ ID NO: 82067 - DNA, 17 bp, Homo sapiens
tcctcgctccaacatgg

SEQ ID NO: 82068 - DNA, 21 bp, Homo sapiens
tcagtcgagggtggctgggga

SEQ ID NO: 82069 - DNA, 22 bp, Homo sapiens
cagacattaccacttacgccca

SEQ ID NO: 82070 - DNA, 19 bp, Homo sapiens
gctgacagctcagcgttga

SEQ ID NO: 82071 - DNA, 16 bp, Homo sapiens
aggggcaccagaagtc

SEQ ID NO: 82072 - DNA, 22 bp, Homo sapiens
gaatactcatagagattgtaga

SEQ ID NO: 82073 - DNA, 19 bp, Homo sapiens
ccagagtttttagttgtaa

SEQ ID NO: 82074 - DNA, 24 bp, Homo sapiens
tgaaccagcgagtcgctaaagcgg

SEQ ID NO: 82075 - DNA, 23 bp, Homo sapiens
ggaattcctagaacatccccata

SEQ ID NO: 82076 - DNA, 23 bp, Homo sapiens
tcgttggcagtgacttgcactgc

SEQ ID NO: 82077 - DNA, 24 bp, Homo sapiens
tagatcatgggaaagccacctcag

SEQ ID NO: 82078 - DNA, 24 bp, Homo sapiens
atgtccgtgtggcctttcagatca

SEQ ID NO: 82079 - DNA, 20 bp, Homo sapiens
taccttgcgatacgaagcac

SEQ ID NO: 82080 - DNA, 17 bp, Homo sapiens
tacctggaaggtggccc

SEQ ID NO: 82081 - DNA, 17 bp, Homo sapiens
atgctcagcctgatgca

SEQ ID NO: 82082 - DNA, 16 bp, Homo sapiens
tggagtttcctgccca

SEQ ID NO: 82083 - DNA, 24 bp, Homo sapiens
aacaggccggcctggctggtctcg

SEQ ID NO: 82084 - DNA, 22 bp, Homo sapiens
cctggaccttccgtggcagatt

SEQ ID NO: 82085 - DNA, 23 bp, Homo sapiens
cttaggcctccctacgatgggca

SEQ ID NO: 82086 - DNA, 23 bp, Homo sapiens
tccgggatggtcctgccacgggg

SEQ ID NO: 82087 - DNA, 23 bp, Homo sapiens
gacctcagggcccagctggacac

SEQ ID NO: 82088 - DNA, 21 bp, Homo sapiens
tcgcccgcaggaagaggcagc

SEQ ID NO: 82089 - DNA, 24 bp, Homo sapiens
ttggatcaaggtctatacctgcac

SEQ ID NO: 82090 - DNA, 23 bp, Homo sapiens
atggcttgtctggctccggttcc

SEQ ID NO: 82091 - DNA, 22 bp, Homo sapiens
ttcttcgcaagaagctccccag

SEQ ID NO: 82092 - DNA, 23 bp, Homo sapiens
gggcattcccatctcaccacttg

SEQ ID NO: 82093 - DNA, 20 bp, Homo sapiens
acaccctctgccgactccag

SEQ ID NO: 82094 - DNA, 16 bp, Homo sapiens
cagggagcccgagatg

SEQ ID NO: 82095 - DNA, 16 bp, Homo sapiens
ccacttcttcttgtgg

SEQ ID NO: 82096 - DNA, 20 bp, Homo sapiens
accagccaggtaaggcacac

SEQ ID NO: 82097 - DNA, 24 bp, Homo sapiens
ggatggtgagcacagccagtgtgc

SEQ ID NO: 82098 - DNA, 19 bp, Homo sapiens
agtcccaggacctcacgcc

SEQ ID NO: 82099 - DNA, 16 bp, Homo sapiens
ctccctaggggtcagg

SEQ ID NO: 82100 - DNA, 21 bp, Homo sapiens
ctcacccagcagcccctgtca

SEQ ID NO: 82101 - DNA, 24 bp, Homo sapiens
acagacagtatcacagctgtgtgc

SEQ ID NO: 82102 - DNA, 20 bp, Homo sapiens
cagaagacagtccgaggcca

SEQ ID NO: 82103 - DNA, 23 bp, Homo sapiens
ccaagatttcctgccagggcaca

SEQ ID NO: 82104 - DNA, 17 bp, Homo sapiens
cgagatcctgagattta

SEQ ID NO: 82105 - DNA, 24 bp, Homo sapiens
ccaaagaactcgcttcctcttcac

SEQ ID NO: 82106 - DNA, 23 bp, Homo sapiens
ttctcctgtcttggcctcccaaa

SEQ ID NO: 82107 - DNA, 22 bp, Homo sapiens
atattttgtagagacagggtct

SEQ ID NO: 82108 - DNA, 22 bp, Homo sapiens
cagagttagagagtaaagtgcc

SEQ ID NO: 82109 - DNA, 16 bp, Homo sapiens
gtctacaagcagaaga

SEQ ID NO: 82110 - DNA, 22 bp, Homo sapiens
cttgaacagaagcttcactaca

SEQ ID NO: 82111 - DNA, 23 bp, Homo sapiens
aaagaacccagtgccacgtgtca

SEQ ID NO: 82112 - DNA, 24 bp, Homo sapiens
tcacaaggatcccgcccagcccag

SEQ ID NO: 82113 - DNA, 21 bp, Homo sapiens
taaaaactgtgcagttagaca

SEQ ID NO: 82114 - DNA, 22 bp, Homo sapiens
aagagctcactgatcttcttct

SEQ ID NO: 82115 - DNA, 18 bp, Homo sapiens
caccatccctgcggccct

SEQ ID NO: 82116 - DNA, 17 bp, Homo sapiens
agtcggggtgtttgaca

SEQ ID NO: 82117 - DNA, 17 bp, Homo sapiens
gattctggattgggact

SEQ ID NO: 82118 - DNA, 22 bp, Homo sapiens
atcagagagagacccttgtcta

SEQ ID NO: 82119 - DNA, 20 bp, Homo sapiens
tgaagtgagccccactcttg

SEQ ID NO: 82120 - DNA, 16 bp, Homo sapiens
gcccttacctgctgca

SEQ ID NO: 82121 - DNA, 21 bp, Homo sapiens
catcatagagtttctgagagg

SEQ ID NO: 82122 - DNA, 18 bp, Homo sapiens
cagccgctcaatgtagta

SEQ ID NO: 82123 - DNA, 17 bp, Homo sapiens
gttttcagttttgccct

SEQ ID NO: 82124 - DNA, 19 bp, Homo sapiens
aaatggctcaagagctctt

SEQ ID NO: 82125 - DNA, 24 bp, Homo sapiens
aaggaggaagtcaagagtgaagac

SEQ ID NO: 82126 - DNA, 17 bp, Homo sapiens
ggccatcccacttgcca

SEQ ID NO: 82127 - DNA, 23 bp, Homo sapiens
gctctgtctagctttccttgtaa

SEQ ID NO: 82128 - DNA, 18 bp, Homo sapiens
aggatcagattttgggtg

SEQ ID NO: 82129 - DNA, 17 bp, Homo sapiens
gtcttgaagggaagagc

SEQ ID NO: 82130 - DNA, 19 bp, Homo sapiens
acattgatgtttgtgaaca

SEQ ID NO: 82131 - DNA, 20 bp, Homo sapiens
cgtgggctctgcttggaaaa

SEQ ID NO: 82132 - DNA, 22 bp, Homo sapiens
acttggtgttaaacacagccca

SEQ ID NO: 82133 - DNA, 16 bp, Homo sapiens
tacatcatctcccgca

SEQ ID NO: 82134 - DNA, 17 bp, Homo sapiens
cacctctctgtgatgag

SEQ ID NO: 82135 - DNA, 18 bp, Homo sapiens
cagcaaagcgcctggccg

SEQ ID NO: 82136 - DNA, 17 bp, Homo sapiens
gatgggaggagccctca

SEQ ID NO: 82137 - DNA, 24 bp, Homo sapiens
ctctgagaaccgttccatgtctcg

SEQ ID NO: 82138 - DNA, 21 bp, Homo sapiens
caggggagccctcgggcttgc

SEQ ID NO: 82139 - DNA, 23 bp, Homo sapiens
cattgtctttctctaggcagcca

SEQ ID NO: 82140 - DNA, 21 bp, Homo sapiens
tgaccatctggtctcccagga

SEQ ID NO: 82141 - DNA, 22 bp, Homo sapiens
agaggagcacagtccagggtga

SEQ ID NO: 82142 - DNA, 23 bp, Homo sapiens
cttctgctccccgtaatcttcca

SEQ ID NO: 82143 - DNA, 18 bp, Homo sapiens
gagagctcttgaaattgc

SEQ ID NO: 82144 - DNA, 16 bp, Homo sapiens
tcaggcatgttggctg

SEQ ID NO: 82145 - DNA, 16 bp, Homo sapiens
caagggggtaattgtg

SEQ ID NO: 82146 - DNA, 16 bp, Homo sapiens
tatggctctgtagcca

SEQ ID NO: 82147 - DNA, 23 bp, Homo sapiens
gttcttcggtcaccttggtctcc

SEQ ID NO: 82148 - DNA, 21 bp, Homo sapiens
gcagctgattaagatcttcca

SEQ ID NO: 82149 - DNA, 24 bp, Homo sapiens
tcatccctcagagcaggtgagggt

SEQ ID NO: 82150 - DNA, 18 bp, Homo sapiens
agacggttctctggctga

SEQ ID NO: 82151 - DNA, 16 bp, Homo sapiens
agtcagccaccttggc

SEQ ID NO: 82152 - DNA, 16 bp, Homo sapiens
ttgccactgctgtgct

SEQ ID NO: 82153 - DNA, 23 bp, Homo sapiens
ttgaggaaggcctcaaacaccga

SEQ ID NO: 82154 - DNA, 16 bp, Homo sapiens
gagggttggaaaggga

SEQ ID NO: 82155 - DNA, 20 bp, Homo sapiens
gacctcaaagcccttgagct

SEQ ID NO: 82156 - DNA, 16 bp, Homo sapiens
agagaagcagtggcct

SEQ ID NO: 82157 - DNA, 23 bp, Homo sapiens
ttcttccagcctccaaggaagaa

SEQ ID NO: 82158 - DNA, 16 bp, Homo sapiens
acaagaacccaggtct

SEQ ID NO: 82159 - DNA, 22 bp, Homo sapiens
gtcacccgctcagagaacagca

SEQ ID NO: 82160 - DNA, 23 bp, Homo sapiens
ctaaatttaatctatctcaatcc

SEQ ID NO: 82161 - DNA, 16 bp, Homo sapiens
aggaaggcttcaccaa

SEQ ID NO: 82162 - DNA, 20 bp, Homo sapiens
ctcttcttcaatttcttgcc

SEQ ID NO: 82163 - DNA, 16 bp, Homo sapiens
tttccaggtttgggcc

SEQ ID NO: 82164 - DNA, 20 bp, Homo sapiens
cccatcaacctcaaaaaaga

SEQ ID NO: 82165 - DNA, 21 bp, Homo sapiens
gtgttagttatgtggaaaagc

SEQ ID NO: 82166 - DNA, 17 bp, Homo sapiens
agccagctcctggtact

SEQ ID NO: 82167 - DNA, 19 bp, Homo sapiens
gatacctctgaccatggtc

SEQ ID NO: 82168 - DNA, 17 bp, Homo sapiens
tgtgaagaagcccaaag

SEQ ID NO: 82169 - DNA, 18 bp, Homo sapiens
gaaggcatgcacactgtg

SEQ ID NO: 82170 - DNA, 18 bp, Homo sapiens
cagatggtatatggtgcg

SEQ ID NO: 82171 - DNA, 18 bp, Homo sapiens
cagccagagcttcaggac

SEQ ID NO: 82172 - DNA, 16 bp, Homo sapiens
gggaactcacgacctt

SEQ ID NO: 82173 - DNA, 24 bp, Homo sapiens
tggcgcctgggtaggagatggtca

SEQ ID NO: 82174 - DNA, 16 bp, Homo sapiens
cactgggcaggaagga

SEQ ID NO: 82175 - DNA, 22 bp, Homo sapiens
ttttctgggaagctgttgggca

SEQ ID NO: 82176 - DNA, 17 bp, Homo sapiens
gagggaaggctggaggc

SEQ ID NO: 82177 - DNA, 24 bp, Homo sapiens
gcctccagccttccctccttcctt

SEQ ID NO: 82178 - DNA, 23 bp, Homo sapiens
catcgtctgcttcacaggggcca

SEQ ID NO: 82179 - DNA, 22 bp, Homo sapiens
ttccttcctgcccagtgtgtgg

SEQ ID NO: 82180 - DNA, 20 bp, Homo sapiens
caccagtttgtggtgtcctc

SEQ ID NO: 82181 - DNA, 24 bp, Homo sapiens
caggacctgctcccagccccacgg

SEQ ID NO: 82182 - DNA, 19 bp, Homo sapiens
ctcctccctactcctcact

SEQ ID NO: 82183 - DNA, 17 bp, Homo sapiens
tgcctgggtgatgatgt

SEQ ID NO: 82184 - DNA, 22 bp, Homo sapiens
cttagttctgtcctggtgcacg

SEQ ID NO: 82185 - DNA, 20 bp, Homo sapiens
caagtgcatcctgaactcct

SEQ ID NO: 82186 - DNA, 21 bp, Homo sapiens
aacattccttgaatcagatga

SEQ ID NO: 82187 - DNA, 17 bp, Homo sapiens
ggtgaagcgctgcaaga

SEQ ID NO: 82188 - DNA, 24 bp, Homo sapiens
gctgccctaaacgtggactcatcc

SEQ ID NO: 82189 - DNA, 17 bp, Homo sapiens
ttctcaggtgtggaaaa

SEQ ID NO: 82190 - DNA, 19 bp, Homo sapiens
ccttgcgcatgacatagcc

SEQ ID NO: 82191 - DNA, 18 bp, Homo sapiens
ggctattgactttgtaga

SEQ ID NO: 82192 - DNA, 17 bp, Homo sapiens
gtcatacagcacctcca

SEQ ID NO: 82193 - DNA, 20 bp, Homo sapiens
tcttcattgtactggttttt

SEQ ID NO: 82194 - DNA, 16 bp, Homo sapiens
gagagcttctttttcc

SEQ ID NO: 82195 - DNA, 18 bp, Homo sapiens
aactcttccaagtcaaaa

SEQ ID NO: 82196 - DNA, 19 bp, Homo sapiens
aactccttctacgtggaca

SEQ ID NO: 82197 - DNA, 23 bp, Homo sapiens
agaggatcccaggcaaggagcca

SEQ ID NO: 82198 - DNA, 19 bp, Homo sapiens
ctacaagaagatccacatc

SEQ ID NO: 82199 - DNA, 22 bp, Homo sapiens
cacagaggccaaagcttgcagc

SEQ ID NO: 82200 - DNA, 22 bp, Homo sapiens
ctgggagatctcacccacctgc

SEQ ID NO: 82201 - DNA, 24 bp, Homo sapiens
gcctgtcccggaaggcacgcacgg

SEQ ID NO: 82202 - DNA, 18 bp, Homo sapiens
gtggtgacgtagaagcca

SEQ ID NO: 82203 - DNA, 18 bp, Homo sapiens
agacgctcttccaccttg

SEQ ID NO: 82204 - DNA, 16 bp, Homo sapiens
gcccacctttttcggt

SEQ ID NO: 82205 - DNA, 16 bp, Homo sapiens
aacaggcgaaatacga

SEQ ID NO: 82206 - DNA, 24 bp, Homo sapiens
cagcttctggtctgctgtgacaac

SEQ ID NO: 82207 - DNA, 22 bp, Homo sapiens
gtcagagaagttcccccccttg

SEQ ID NO: 82208 - DNA, 20 bp, Homo sapiens
taagaacagaaagtgggagc

SEQ ID NO: 82209 - DNA, 16 bp, Homo sapiens
ttcccagtgccagcca

SEQ ID NO: 82210 - DNA, 18 bp, Homo sapiens
cagccttctcttctcgta

SEQ ID NO: 82211 - DNA, 19 bp, Homo sapiens
tttctccacttggtgggaa

SEQ ID NO: 82212 - DNA, 24 bp, Homo sapiens
aaggcccgagctggcccctctggg

SEQ ID NO: 82213 - DNA, 21 bp, Homo sapiens
cagtgagtgtcggccgcctgg

SEQ ID NO: 82214 - DNA, 16 bp, Homo sapiens
atggtattcgctgcga

SEQ ID NO: 82215 - DNA, 16 bp, Homo sapiens
tcaataagcctggagc

SEQ ID NO: 82216 - DNA, 24 bp, Homo sapiens
tcaaaaggaggcacagacacaccg

SEQ ID NO: 82217 - DNA, 23 bp, Homo sapiens
taagtgctttctcacccctccca

SEQ ID NO: 82218 - DNA, 24 bp, Homo sapiens
ccacccgtttcccaccgagtgccc

SEQ ID NO: 82219 - DNA, 21 bp, Homo sapiens
caggtgagactttacttcccg

SEQ ID NO: 82220 - DNA, 20 bp, Homo sapiens
caggccatcttccgctggca

SEQ ID NO: 82221 - DNA, 17 bp, Homo sapiens
ctcatctaccacctgga

SEQ ID NO: 82222 - DNA, 23 bp, Homo sapiens
cttcgtccaccatggcagagggc

SEQ ID NO: 82223 - DNA, 18 bp, Homo sapiens
atgagattaagagcaagc

SEQ ID NO: 82224 - DNA, 22 bp, Homo sapiens
agagagagctccgactctgaca

SEQ ID NO: 82225 - DNA, 17 bp, Homo sapiens
cacacgaggcaagcttg

SEQ ID NO: 82226 - DNA, 20 bp, Homo sapiens
gttggggtacatggccccca

SEQ ID NO: 82227 - DNA, 27 bp, Homo sapiens
gtttttgctctatttatatatttttca

SEQ ID NO: 82228 - DNA, 18 bp, Homo sapiens
aacgtccttcagggaggc

SEQ ID NO: 82229 - DNA, 19 bp, Homo sapiens
gacagcatcacacgtcaca

SEQ ID NO: 82230 - DNA, 19 bp, Homo sapiens
ttgaggaagaggagaaagt

SEQ ID NO: 82231 - DNA, 23 bp, Homo sapiens
gtccacagcaccacacgcagcag

SEQ ID NO: 82232 - DNA, 17 bp, Homo sapiens
atcctgccgcctttgac

SEQ ID NO: 82233 - DNA, 23 bp, Homo sapiens
gtgaagaaggcgccaaacacaga

SEQ ID NO: 82234 - DNA, 16 bp, Homo sapiens
tgaggcaggctagtgt

SEQ ID NO: 82235 - DNA, 23 bp, Homo sapiens
gttggtgacttgctccacaggca

SEQ ID NO: 82236 - DNA, 16 bp, Homo sapiens
gagtccttccggagct

SEQ ID NO: 82237 - DNA, 21 bp, Homo sapiens
ctcaacccgctgcagcaggaa

SEQ ID NO: 82238 - DNA, 23 bp, Homo sapiens
cctaaagaagcccccggggggtg

SEQ ID NO: 82239 - DNA, 16 bp, Homo sapiens
cacgtggaggccctcg

SEQ ID NO: 82240 - DNA, 22 bp, Homo sapiens
aggatggggagaaggggcttta

SEQ ID NO: 82241 - DNA, 18 bp, Homo sapiens
ggagttcaataagctgac

SEQ ID NO: 82242 - DNA, 22 bp, Homo sapiens
agcacaagagtgggaagaatct

SEQ ID NO: 82243 - DNA, 17 bp, Homo sapiens
cttgctgatggtgcagg

SEQ ID NO: 82244 - DNA, 24 bp, Homo sapiens
agggatatcgctgcggaaaacccc

SEQ ID NO: 82245 - DNA, 24 bp, Homo sapiens
ttgcttttggctggaagccttggt

SEQ ID NO: 82246 - DNA, 23 bp, Homo sapiens
cagagtccagcacgtgtccgtcg

SEQ ID NO: 82247 - DNA, 17 bp, Homo sapiens
agttcagcttaggttcc

SEQ ID NO: 82248 - DNA, 21 bp, Homo sapiens
ggaagatgatgttggcgtgga

SEQ ID NO: 82249 - DNA, 17 bp, Homo sapiens
aaaccacaggaggcaga

SEQ ID NO: 82250 - DNA, 18 bp, Homo sapiens
tcccaaaggacatccctg

SEQ ID NO: 82251 - DNA, 20 bp, Homo sapiens
tgaagtacgtccacccattc

SEQ ID NO: 82252 - DNA, 21 bp, Homo sapiens
cagcactcctgggacatccac

SEQ ID NO: 82253 - DNA, 22 bp, Homo sapiens
ttctctcctcagactctggcca

SEQ ID NO: 82254 - DNA, 22 bp, Homo sapiens
ctgaggaggccagggtgccgac

SEQ ID NO: 82255 - DNA, 16 bp, Homo sapiens
cttcacacttgaccct

SEQ ID NO: 82256 - DNA, 24 bp, Homo sapiens
gaataatggtgcacagagcaaaga

SEQ ID NO: 82257 - DNA, 16 bp, Homo sapiens
ttgtcctgtgccggtc

SEQ ID NO: 82258 - DNA, 24 bp, Homo sapiens
tggcgacagcatctgacacagaat

SEQ ID NO: 82259 - DNA, 21 bp, Homo sapiens
cacggagcagccccaggcacg

SEQ ID NO: 82260 - DNA, 17 bp, Homo sapiens
ctgctgggtggagcggg

SEQ ID NO: 82261 - DNA, 16 bp, Homo sapiens
gctaggctatgatccc

SEQ ID NO: 82262 - DNA, 20 bp, Homo sapiens
ggatgtggctcacatgcctg

SEQ ID NO: 82263 - DNA, 22 bp, Homo sapiens
aggtgggtgaagagggacagtt

SEQ ID NO: 82264 - DNA, 16 bp, Homo sapiens
gggcagccgggatgtg

SEQ ID NO: 82265 - DNA, 23 bp, Homo sapiens
ctcaggggttcccgggctgcatg

SEQ ID NO: 82266 - DNA, 21 bp, Homo sapiens
gtcctccgggtctagctccac

SEQ ID NO: 82267 - DNA, 24 bp, Homo sapiens
ggctcctgggtgcctgttaggaac

SEQ ID NO: 82268 - DNA, 24 bp, Homo sapiens
attatgactgcccacaggaaggta

SEQ ID NO: 82269 - DNA, 22 bp, Homo sapiens
catcccgggccctggcagggtt

SEQ ID NO: 82270 - DNA, 16 bp, Homo sapiens
agccagggggagtaca

SEQ ID NO: 82271 - DNA, 22 bp, Homo sapiens
cggaggccaccctcctcccatg

SEQ ID NO: 82272 - DNA, 22 bp, Homo sapiens
ttgtggaggcccgggcagcagt

SEQ ID NO: 82273 - DNA, 16 bp, Homo sapiens
cacggacagcagtgag

SEQ ID NO: 82274 - DNA, 23 bp, Homo sapiens
agaaaggggcattagagcctgac

SEQ ID NO: 82275 - DNA, 22 bp, Homo sapiens
tggatgcactggggcgccttgt

SEQ ID NO: 82276 - DNA, 21 bp, Homo sapiens
ggttcactctgcacctcccgt

SEQ ID NO: 82277 - DNA, 20 bp, Homo sapiens
ctgctgcatgctcagaccgt

SEQ ID NO: 82278 - DNA, 23 bp, Homo sapiens
gagggagggcgttgcgtggtgca

SEQ ID NO: 82279 - DNA, 18 bp, Homo sapiens
gacttttttgactggtga

SEQ ID NO: 82280 - DNA, 17 bp, Homo sapiens
cagggaggaacccagac

SEQ ID NO: 82281 - DNA, 19 bp, Homo sapiens
caaaggtggtttgaacacg

SEQ ID NO: 82282 - DNA, 23 bp, Homo sapiens
ctaagtcgacatgggaagcgccc

SEQ ID NO: 82283 - DNA, 19 bp, Homo sapiens
ttgaagaagagaaagagca

SEQ ID NO: 82284 - DNA, 17 bp, Homo sapiens
tagagaagacacagact

SEQ ID NO: 82285 - DNA, 17 bp, Homo sapiens
aataagggccaacatga

SEQ ID NO: 82286 - DNA, 20 bp, Homo sapiens
gtttggtctcctggacgtgt

SEQ ID NO: 82287 - DNA, 16 bp, Homo sapiens
gctttgttctcagggt

SEQ ID NO: 82288 - DNA, 22 bp, Homo sapiens
tcaatgaacccgatgaggtaag

SEQ ID NO: 82289 - DNA, 22 bp, Homo sapiens
tctctggcagaaaagacggtca

SEQ ID NO: 82290 - DNA, 24 bp, Homo sapiens
agatattgaagattttgagttcac

SEQ ID NO: 82291 - DNA, 23 bp, Homo sapiens
gacggaatgcctgaggccttgga

SEQ ID NO: 82292 - DNA, 20 bp, Homo sapiens
ttgtgctgattgctaatgaa

SEQ ID NO: 82293 - DNA, 22 bp, Homo sapiens
gtagtttcccaagtgatacctc

SEQ ID NO: 82294 - DNA, 19 bp, Homo sapiens
ctaggcagagtgtgtgggc

SEQ ID NO: 82295 - DNA, 20 bp, Homo sapiens
catattctggcttgggggtg

SEQ ID NO: 82296 - DNA, 22 bp, Homo sapiens
gcgtctcttctcaggaagctta

SEQ ID NO: 82297 - DNA, 17 bp, Homo sapiens
ctcgaaaggggagggta

SEQ ID NO: 82298 - DNA, 22 bp, Homo sapiens
gagacagaccagattatgatga

SEQ ID NO: 82299 - DNA, 22 bp, Homo sapiens
cctggactaactcattattcac

SEQ ID NO: 82300 - DNA, 17 bp, Homo sapiens
gtggttttggcatttga

SEQ ID NO: 82301 - DNA, 19 bp, Homo sapiens
gggaccagacaaggtcccc

SEQ ID NO: 82302 - DNA, 16 bp, Homo sapiens
ggcctaatggggagtt

SEQ ID NO: 82303 - DNA, 24 bp, Homo sapiens
catcgatcatgtaggaaatcatca

SEQ ID NO: 82304 - DNA, 19 bp, Homo sapiens
gagccttttgactctttta

SEQ ID NO: 82305 - DNA, 20 bp, Homo sapiens
ggcagtttggtcgtctcaat

SEQ ID NO: 82306 - DNA, 24 bp, Homo sapiens
tcagaaactgatgaaaaattctaa

SEQ ID NO: 82307 - DNA, 17 bp, Homo sapiens
cagataccgaggaaatg

SEQ ID NO: 82308 - DNA, 22 bp, Homo sapiens
agcaaacatatctttgagtcag

SEQ ID NO: 82309 - DNA, 17 bp, Homo sapiens
ggatgtagaactctagt

SEQ ID NO: 82310 - DNA, 18 bp, Homo sapiens
ttaggatgaaggtaacac

SEQ ID NO: 82311 - DNA, 16 bp, Homo sapiens
ttcctaacagccagga

SEQ ID NO: 82312 - DNA, 17 bp, Homo sapiens
gtgatttctaccggaaa

SEQ ID NO: 82313 - DNA, 18 bp, Homo sapiens
tctccattgacctgaaga

SEQ ID NO: 82314 - DNA, 24 bp, Homo sapiens
cctgcaaaacacacagtgtgctaa

SEQ ID NO: 82315 - DNA, 18 bp, Homo sapiens
gctgaccagttggacaac

SEQ ID NO: 82316 - DNA, 20 bp, Homo sapiens
tcacccataatgatcatctc

SEQ ID NO: 82317 - DNA, 16 bp, Homo sapiens
gtgttctgcagagggg

SEQ ID NO: 82318 - DNA, 20 bp, Homo sapiens
cccactcaccacgtggatct

SEQ ID NO: 82319 - DNA, 16 bp, Homo sapiens
aactctggtctcacct

SEQ ID NO: 82320 - DNA, 21 bp, Homo sapiens
ctcgcgcatgtccacaatgtt

SEQ ID NO: 82321 - DNA, 23 bp, Homo sapiens
catcaatttaccttttgtgtttc

SEQ ID NO: 82322 - DNA, 20 bp, Homo sapiens
tcagtaatgacaccgcccct

SEQ ID NO: 82323 - DNA, 24 bp, Homo sapiens
tgggaagccactgtttatttaaca

SEQ ID NO: 82324 - DNA, 16 bp, Homo sapiens
ggagcaggatcacgcc

SEQ ID NO: 82325 - DNA, 22 bp, Homo sapiens
tatcaaacagagccagccatta

SEQ ID NO: 82326 - DNA, 17 bp, Homo sapiens
actgtggaggatcttgt

SEQ ID NO: 82327 - DNA, 16 bp, Homo sapiens
tgtcgttctgaaccgc

SEQ ID NO: 82328 - DNA, 21 bp, Homo sapiens
cttcgcattatagccaaatca

SEQ ID NO: 82329 - DNA, 16 bp, Homo sapiens
ctgtgtacgcgtcgct

SEQ ID NO: 82330 - DNA, 19 bp, Homo sapiens
ttgagtgtttaccctctca

SEQ ID NO: 82331 - DNA, 21 bp, Homo sapiens
gagatctccttcctcactttg

SEQ ID NO: 82332 - DNA, 16 bp, Homo sapiens
cagagttggacaaggt

SEQ ID NO: 82333 - DNA, 21 bp, Homo sapiens
ttcgcttcaaacccaccaagt

SEQ ID NO: 82334 - DNA, 20 bp, Homo sapiens
agagctctttggaaggaatt

SEQ ID NO: 82335 - DNA, 23 bp, Homo sapiens
atcttttctctccaagaagtttc

SEQ ID NO: 82336 - DNA, 21 bp, Homo sapiens
gacctgaatttctacctcttc

SEQ ID NO: 82337 - DNA, 18 bp, Homo sapiens
ccaatggaaagccttttc

SEQ ID NO: 82338 - DNA, 22 bp, Homo sapiens
atttacccctggaaagtctggg

SEQ ID NO: 82339 - DNA, 17 bp, Homo sapiens
gtgtcattctgtggtgg

SEQ ID NO: 82340 - DNA, 20 bp, Homo sapiens
cacttttgcaattttgccct

SEQ ID NO: 82341 - DNA, 16 bp, Homo sapiens
tttctacattgcgacc

SEQ ID NO: 82342 - DNA, 20 bp, Homo sapiens
accctaatcaggatcagaat

SEQ ID NO: 82343 - DNA, 16 bp, Homo sapiens
tctcatcacccctgga

SEQ ID NO: 82344 - DNA, 16 bp, Homo sapiens
agttgcaaagcccacc

SEQ ID NO: 82345 - DNA, 17 bp, Homo sapiens
taggctgttcatgggat

SEQ ID NO: 82346 - DNA, 22 bp, Homo sapiens
tatgaaacacactcacctttct

SEQ ID NO: 82347 - DNA, 17 bp, Homo sapiens
ctgtgaaaagtgcgcat

SEQ ID NO: 82348 - DNA, 19 bp, Homo sapiens
cggaagcagatttaaggta

SEQ ID NO: 82349 - DNA, 23 bp, Homo sapiens
tgatggggcctccaggggcccga

SEQ ID NO: 82350 - DNA, 23 bp, Homo sapiens
gaccgagattttagatgaagata

SEQ ID NO: 82351 - DNA, 21 bp, Homo sapiens
cctcccatgccctccctgaca

SEQ ID NO: 82352 - DNA, 20 bp, Homo sapiens
gaaagtttctctaactgtgt

SEQ ID NO: 82353 - DNA, 23 bp, Homo sapiens
ttagcttgtcgcagtcaggggct

SEQ ID NO: 82354 - DNA, 17 bp, Homo sapiens
gacctagatgagagggt

SEQ ID NO: 82355 - DNA, 21 bp, Homo sapiens
cactgcactgcctaagcgctt

SEQ ID NO: 82356 - DNA, 17 bp, Homo sapiens
ggctggctcattaacat

SEQ ID NO: 82357 - DNA, 18 bp, Homo sapiens
ggaaccttcacatctccc

SEQ ID NO: 82358 - DNA, 19 bp, Homo sapiens
tggacggataagatggatt

SEQ ID NO: 82359 - DNA, 24 bp, Homo sapiens
tagataaggaccacgctatgacca

SEQ ID NO: 82360 - DNA, 23 bp, Homo sapiens
ttcactcagggatgatggcgcca

SEQ ID NO: 82361 - DNA, 18 bp, Homo sapiens
ctagtgcttacaggatgc

SEQ ID NO: 82362 - DNA, 16 bp, Homo sapiens
aaaagaagcagcagca

SEQ ID NO: 82363 - DNA, 17 bp, Homo sapiens
tcaaaaccaaaccgcaa

SEQ ID NO: 82364 - DNA, 17 bp, Homo sapiens
ctgcactccagcctagg

SEQ ID NO: 82365 - DNA, 20 bp, Homo sapiens
gtcggcggtcggggcgcgcc

SEQ ID NO: 82366 - DNA, 23 bp, Homo sapiens
catgtctctgaggagcggcgggc

SEQ ID NO: 82367 - DNA, 16 bp, Homo sapiens
cctccctcccgcctcg

SEQ ID NO: 82368 - DNA, 24 bp, Homo sapiens
ctctcgcgagtctgggtgggagcg

SEQ ID NO: 82369 - DNA, 21 bp, Homo sapiens
gagggccggcccgagagcctc

SEQ ID NO: 82370 - DNA, 24 bp, Homo sapiens
cctcggggggcgggggaggggcgg

SEQ ID NO: 82371 - DNA, 24 bp, Homo sapiens
ctgggtccgcgcgccgccgcccgc

SEQ ID NO: 82372 - DNA, 22 bp, Homo sapiens
gctgttaccgttccaggagatg

SEQ ID NO: 82373 - DNA, 20 bp, Homo sapiens
gcagcgtgtcttaaaaattt

SEQ ID NO: 82374 - DNA, 20 bp, Homo sapiens
gagttttacctcagtcacat

SEQ ID NO: 82375 - DNA, 20 bp, Homo sapiens
acactttctcggtgtaattt

SEQ ID NO: 82376 - DNA, 20 bp, Homo sapiens
tttgcagacttatttaccaa

SEQ ID NO: 82377 - DNA, 17 bp, Homo sapiens
tggttctaagcaacact

SEQ ID NO: 82378 - DNA, 16 bp, Homo sapiens
aaagagaggccaacat

SEQ ID NO: 82379 - DNA, 16 bp, Homo sapiens
aacctgcaaacgatga

SEQ ID NO: 82380 - DNA, 16 bp, Homo sapiens
cgcaagagaatggatt

SEQ ID NO: 82381 - DNA, 20 bp, Homo sapiens
gagcttctgaagaaagttct

SEQ ID NO: 82382 - DNA, 20 bp, Homo sapiens
agtcaagatcttaagcattt

SEQ ID NO: 82383 - DNA, 17 bp, Homo sapiens
gtttggttcgtaattgt

SEQ ID NO: 82384 - DNA, 20 bp, Homo sapiens
aatttgtctgtcactggtta

SEQ ID NO: 82385 - DNA, 16 bp, Homo sapiens
tggagttgaagccagc

SEQ ID NO: 82386 - DNA, 23 bp, Homo sapiens
accaataagtcttaattggtttg

SEQ ID NO: 82387 - DNA, 24 bp, Homo sapiens
tatctaattcttttacaggagatt

SEQ ID NO: 82388 - DNA, 20 bp, Homo sapiens
gcagaagaatctgaacataa

SEQ ID NO: 82389 - DNA, 18 bp, Homo sapiens
ctagtttgtagttctccc

SEQ ID NO: 82390 - DNA, 20 bp, Homo sapiens
aaggaaaccatcttataatc

SEQ ID NO: 82391 - DNA, 16 bp, Homo sapiens
tgcccagcatgacaca

SEQ ID NO: 82392 - DNA, 23 bp, Homo sapiens
gactctgccgctgtaccaatctc

SEQ ID NO: 82393 - DNA, 22 bp, Homo sapiens
tgagacattattttcatcgtct

SEQ ID NO: 82394 - DNA, 20 bp, Homo sapiens
ctgtgctcggggcatccttt

SEQ ID NO: 82395 - DNA, 21 bp, Homo sapiens
ctgtgcgaagacttttatgtc

SEQ ID NO: 82396 - DNA, 17 bp, Homo sapiens
acattctcattcccagt

SEQ ID NO: 82397 - DNA, 22 bp, Homo sapiens
aagacaagaatttagaagtgga

SEQ ID NO: 82398 - DNA, 25 bp, Homo sapiens
gaatgcaaatttataatccagagta

SEQ ID NO: 82399 - DNA, 23 bp, Homo sapiens
atatgtaggaaaatgtttcattt

SEQ ID NO: 82400 - DNA, 19 bp, Homo sapiens
tgttcccaatagtagacat

SEQ ID NO: 82401 - DNA, 16 bp, Homo sapiens
aggctcttagccaaaa

SEQ ID NO: 82402 - DNA, 19 bp, Homo sapiens
cagatgatgtttcctgtcc

SEQ ID NO: 82403 - DNA, 24 bp, Homo sapiens
ttctaatgtaaaaactattctatt

SEQ ID NO: 82404 - DNA, 18 bp, Homo sapiens
ttaatgcttcatgagaga

SEQ ID NO: 82405 - DNA, 22 bp, Homo sapiens
catacctgacttatctctttgt

SEQ ID NO: 82406 - DNA, 21 bp, Homo sapiens
agtagtattccaacaatttat

SEQ ID NO: 82407 - DNA, 24 bp, Homo sapiens
ttaagttttatttttattaacatt

SEQ ID NO: 82408 - DNA, 21 bp, Homo sapiens
tgccagttttttaaaataacc

SEQ ID NO: 82409 - DNA, 17 bp, Homo sapiens
ctttggtgtatgaaaca

SEQ ID NO: 82410 - DNA, 19 bp, Homo sapiens
acaatgtacacatgtaaca

SEQ ID NO: 82411 - DNA, 20 bp, Homo sapiens
tgtcaaattctcaattacta

SEQ ID NO: 82412 - DNA, 25 bp, Homo sapiens
ttattcttagaatactagaaatgtt

SEQ ID NO: 82413 - DNA, 20 bp, Homo sapiens
cctgtatgaggcagaatgct

SEQ ID NO: 82414 - DNA, 16 bp, Homo sapiens
cccccagtggtatgtg

SEQ ID NO: 82415 - DNA, 27 bp, Homo sapiens
tgatcattaaggatattattttttcat

SEQ ID NO: 82416 - DNA, 16 bp, Homo sapiens
tgacgaccctgggagg

SEQ ID NO: 82417 - DNA, 21 bp, Homo sapiens
gagatttacaaatctgtacct

SEQ ID NO: 82418 - DNA, 20 bp, Homo sapiens
acttgaccaagacatatcag

SEQ ID NO: 82419 - DNA, 24 bp, Homo sapiens
aacgttaagtgaaataaagagtga

SEQ ID NO: 82420 - DNA, 20 bp, Homo sapiens
cacatttgctattattacct

SEQ ID NO: 82421 - DNA, 19 bp, Homo sapiens
aactattttctttcctccc

SEQ ID NO: 82422 - DNA, 23 bp, Homo sapiens
ttttaacagaagtattagagatg

SEQ ID NO: 82423 - DNA, 16 bp, Homo sapiens
gctgaggtggatcctg

SEQ ID NO: 82424 - DNA, 18 bp, Homo sapiens
tgtcagttactaacacac

SEQ ID NO: 82425 - DNA, 18 bp, Homo sapiens
tctactgtgctcataggt

SEQ ID NO: 82426 - DNA, 19 bp, Homo sapiens
actgtgttgattgaccttt

SEQ ID NO: 82427 - DNA, 18 bp, Homo sapiens
agcagtagtatcatgagg

SEQ ID NO: 82428 - DNA, 18 bp, Homo sapiens
aatgtgtcatgtaatcaa

SEQ ID NO: 82429 - DNA, 19 bp, Homo sapiens
gcattccaaaattgttagc

SEQ ID NO: 82430 - DNA, 19 bp, Homo sapiens
tttgcattctagtgataat

SEQ ID NO: 82431 - DNA, 18 bp, Homo sapiens
actttctcaaaggcttag

SEQ ID NO: 82432 - DNA, 22 bp, Homo sapiens
tgaagaagcatctgaaactgta

SEQ ID NO: 82433 - DNA, 17 bp, Homo sapiens
cagagagacagcagagt

SEQ ID NO: 82434 - DNA, 17 bp, Homo sapiens
acttctggaattttcca

SEQ ID NO: 82435 - DNA, 22 bp, Homo sapiens
cagaagcgataaatctatcatt

SEQ ID NO: 82436 - DNA, 18 bp, Homo sapiens
tgaaatcaccaaaagtga

SEQ ID NO: 82437 - DNA, 18 bp, Homo sapiens
acttaccatgacttgcag

SEQ ID NO: 82438 - DNA, 24 bp, Homo sapiens
tttatactagtgattttaaactat

SEQ ID NO: 82439 - DNA, 20 bp, Homo sapiens
tccacctcaaaaaaaaaaaa

SEQ ID NO: 82440 - DNA, 22 bp, Homo sapiens
tccaatcatgatgaaagtctga

SEQ ID NO: 82441 - DNA, 17 bp, Homo sapiens
ttgagcacgggaggcag

SEQ ID NO: 82442 - DNA, 18 bp, Homo sapiens
acaaatcaaagagaagct

SEQ ID NO: 82443 - DNA, 16 bp, Homo sapiens
gcatggtggtgcatgc

SEQ ID NO: 82444 - DNA, 23 bp, Homo sapiens
ttccaaatcctgttaaagtataa

SEQ ID NO: 82445 - DNA, 21 bp, Homo sapiens
ccgaaaaataaaatgccaagt

SEQ ID NO: 82446 - DNA, 18 bp, Homo sapiens
tccaatgtggtctttgca

SEQ ID NO: 82447 - DNA, 23 bp, Homo sapiens
ttctacataaactgtttctatga

SEQ ID NO: 82448 - DNA, 17 bp, Homo sapiens
tcagaggtatctacaac

SEQ ID NO: 82449 - DNA, 23 bp, Homo sapiens
aatattaatgtgcttctgtttta

SEQ ID NO: 82450 - DNA, 20 bp, Homo sapiens
tgctagttcttactttttgt

SEQ ID NO: 82451 - DNA, 22 bp, Homo sapiens
ttaaagtaaatagctgcaaaga

SEQ ID NO: 82452 - DNA, 20 bp, Homo sapiens
atttttcacattcatcagcg

SEQ ID NO: 82453 - DNA, 19 bp, Homo sapiens
aagtatatgaaacagttgt

SEQ ID NO: 82454 - DNA, 18 bp, Homo sapiens
tcagtatcatttggttcc

SEQ ID NO: 82455 - DNA, 22 bp, Homo sapiens
ctaaatgtagaacaaaaaatct

SEQ ID NO: 82456 - DNA, 20 bp, Homo sapiens
cttccttggagattttgtca

SEQ ID NO: 82457 - DNA, 24 bp, Homo sapiens
aaaattttccatgaagcaaacgct

SEQ ID NO: 82458 - DNA, 18 bp, Homo sapiens
gctccatttagacctgaa

SEQ ID NO: 82459 - DNA, 19 bp, Homo sapiens
actcatttgtatctgaagt

SEQ ID NO: 82460 - DNA, 22 bp, Homo sapiens
ctgaaatattttggtcacatga

SEQ ID NO: 82461 - DNA, 20 bp, Homo sapiens
agaagccctttgagagtgga

SEQ ID NO: 82462 - DNA, 21 bp, Homo sapiens
gcaaagaattctctgaagtaa

SEQ ID NO: 82463 - DNA, 20 bp, Homo sapiens
cctgtgaatggtctcaacta

SEQ ID NO: 82464 - DNA, 18 bp, Homo sapiens
accactgtttcctcattt

SEQ ID NO: 82465 - DNA, 21 bp, Homo sapiens
acccctattgcatatttcttc

SEQ ID NO: 82466 - DNA, 16 bp, Homo sapiens
tgcaagaatgcagtct

SEQ ID NO: 82467 - DNA, 22 bp, Homo sapiens
agaacaaaagaaagaaagattt

SEQ ID NO: 82468 - DNA, 20 bp, Homo sapiens
tagactttttgataccctga

SEQ ID NO: 82469 - DNA, 19 bp, Homo sapiens
accaaaatcagagaagcca

SEQ ID NO: 82470 - DNA, 18 bp, Homo sapiens
cagtcatatgacctgaaa

SEQ ID NO: 82471 - DNA, 20 bp, Homo sapiens
cttgaatctcatacagactg

SEQ ID NO: 82472 - DNA, 19 bp, Homo sapiens
cagtatgtatttccagtcc

SEQ ID NO: 82473 - DNA, 21 bp, Homo sapiens
ttctccagtggcttcttcatt

SEQ ID NO: 82474 - DNA, 16 bp, Homo sapiens
ggctggccagcttcca

SEQ ID NO: 82475 - DNA, 17 bp, Homo sapiens
agactttcaatgcaagt

SEQ ID NO: 82476 - DNA, 22 bp, Homo sapiens
ttttcaaagtggatattaaacc

SEQ ID NO: 82477 - DNA, 16 bp, Homo sapiens
aagcctctgaaagtgg

SEQ ID NO: 82478 - DNA, 22 bp, Homo sapiens
tcggtattttttttcctttata

SEQ ID NO: 82479 - DNA, 25 bp, Homo sapiens
cttatgtccaaatttaattgataat

SEQ ID NO: 82480 - DNA, 22 bp, Homo sapiens
aaaagcatttgcttcaaactgg

SEQ ID NO: 82481 - DNA, 19 bp, Homo sapiens
tagctttgaagaatgcagg

SEQ ID NO: 82482 - DNA, 23 bp, Homo sapiens
acaaaaaaaaaaagacagaggta

SEQ ID NO: 82483 - DNA, 23 bp, Homo sapiens
tatacatgatgaaacatcttata

SEQ ID NO: 82484 - DNA, 24 bp, Homo sapiens
gattttaaaaagcagaaaaaaaca

SEQ ID NO: 82485 - DNA, 17 bp, Homo sapiens
taactgttcagcccagt

SEQ ID NO: 82486 - DNA, 20 bp, Homo sapiens
aaagacctaaacaatcatgt

SEQ ID NO: 82487 - DNA, 19 bp, Homo sapiens
atgctgattcaggtacctc

SEQ ID NO: 82488 - DNA, 19 bp, Homo sapiens
tcctgggctcaagcagtct

SEQ ID NO: 82489 - DNA, 20 bp, Homo sapiens
agttggttcttcagaatcat

SEQ ID NO: 82490 - DNA, 22 bp, Homo sapiens
atgagccactgtgcccaaacac

SEQ ID NO: 82491 - DNA, 24 bp, Homo sapiens
aacatgtttcatttctagaacatt

SEQ ID NO: 82492 - DNA, 20 bp, Homo sapiens
tggtactttaattttgtcac

SEQ ID NO: 82493 - DNA, 24 bp, Homo sapiens
tttccttattacattttgcttctt

SEQ ID NO: 82494 - DNA, 21 bp, Homo sapiens
aagaagctgttcacagaatga

SEQ ID NO: 82495 - DNA, 16 bp, Homo sapiens
cttcctgcaggcatga

SEQ ID NO: 82496 - DNA, 19 bp, Homo sapiens
tgggacaattctgaggaaa

SEQ ID NO: 82497 - DNA, 16 bp, Homo sapiens
tgcagccaagacctct

SEQ ID NO: 82498 - DNA, 21 bp, Homo sapiens
ggatcttgattataaagaagc

SEQ ID NO: 82499 - DNA, 19 bp, Homo sapiens
ctgggattgaaagtcagta

SEQ ID NO: 82500 - DNA, 22 bp, Homo sapiens
agaagctgattctctgtcatgc

SEQ ID NO: 82501 - DNA, 18 bp, Homo sapiens
tccttggaagtaggagtt

SEQ ID NO: 82502 - DNA, 21 bp, Homo sapiens
gcaaaaaagtttcagatataa

SEQ ID NO: 82503 - DNA, 22 bp, Homo sapiens
tgtctgacattttgtatgattc

SEQ ID NO: 82504 - DNA, 18 bp, Homo sapiens
tcaaaagtggaatacagt

SEQ ID NO: 82505 - DNA, 19 bp, Homo sapiens
ccatgggaatatttttggt

SEQ ID NO: 82506 - DNA, 19 bp, Homo sapiens
tgaaaatgccagcactctt

SEQ ID NO: 82507 - DNA, 16 bp, Homo sapiens
gcaacagctcaacgtt

SEQ ID NO: 82508 - DNA, 20 bp, Homo sapiens
catgatttctagaggcaaag

SEQ ID NO: 82509 - DNA, 20 bp, Homo sapiens
agatttgtgttttggttgaa

SEQ ID NO: 82510 - DNA, 19 bp, Homo sapiens
tgaatctgatgttgaatta

SEQ ID NO: 82511 - DNA, 23 bp, Homo sapiens
tggattgacagttatttttgaaa

SEQ ID NO: 82512 - DNA, 25 bp, Homo sapiens
taaatgaaaattataaaaacgttga

SEQ ID NO: 82513 - DNA, 19 bp, Homo sapiens
tagctacttggaagacaaa

SEQ ID NO: 82514 - DNA, 17 bp, Homo sapiens
ccttcaagaaaggtaca

SEQ ID NO: 82515 - DNA, 17 bp, Homo sapiens
acacaagtcaagtctgt

SEQ ID NO: 82516 - DNA, 18 bp, Homo sapiens
caagaagaaactacttca

SEQ ID NO: 82517 - DNA, 18 bp, Homo sapiens
ttatcacctgtgtctcca

SEQ ID NO: 82518 - DNA, 19 bp, Homo sapiens
ctcagacaatgagaataat

SEQ ID NO: 82519 - DNA, 17 bp, Homo sapiens
gttctcctctgcaagaa

SEQ ID NO: 82520 - DNA, 17 bp, Homo sapiens
actaaggaacttcatga

SEQ ID NO: 82521 - DNA, 19 bp, Homo sapiens
aggagatgtccgattttaa

SEQ ID NO: 82522 - DNA, 18 bp, Homo sapiens
accatggttttatatgga

SEQ ID NO: 82523 - DNA, 16 bp, Homo sapiens
agtcctgcccatttgt

SEQ ID NO: 82524 - DNA, 21 bp, Homo sapiens
gatttggtttatgttcttgca

SEQ ID NO: 82525 - DNA, 22 bp, Homo sapiens
gatttccttatttgaagctgtt

SEQ ID NO: 82526 - DNA, 17 bp, Homo sapiens
atgactctaggtcaaga

SEQ ID NO: 82527 - DNA, 24 bp, Homo sapiens
gttcttcaatatctttgaagaaca

SEQ ID NO: 82528 - DNA, 21 bp, Homo sapiens
ccagaaaaaaataatgattac

SEQ ID NO: 82529 - DNA, 19 bp, Homo sapiens
gattatctaatgccaaggt

SEQ ID NO: 82530 - DNA, 24 bp, Homo sapiens
atcacagttttggaggtagcttca

SEQ ID NO: 82531 - DNA, 20 bp, Homo sapiens
acaactacactactctgtaa

SEQ ID NO: 82532 - DNA, 17 bp, Homo sapiens
agagcaaaatgttcttc

SEQ ID NO: 82533 - DNA, 17 bp, Homo sapiens
cctgcttggaaaataac

SEQ ID NO: 82534 - DNA, 22 bp, Homo sapiens
ttgaaattgtaaataccttggc

SEQ ID NO: 82535 - DNA, 21 bp, Homo sapiens
taatatagtagaaagttctgt

SEQ ID NO: 82536 - DNA, 17 bp, Homo sapiens
atactgtatctgcacat

SEQ ID NO: 82537 - DNA, 17 bp, Homo sapiens
gtagcttggttttctaa

SEQ ID NO: 82538 - DNA, 19 bp, Homo sapiens
catataacccctcagatgt

SEQ ID NO: 82539 - DNA, 17 bp, Homo sapiens
tcagaagtggtctttaa

SEQ ID NO: 82540 - DNA, 21 bp, Homo sapiens
ttaacacctagccaaaaggca

SEQ ID NO: 82541 - DNA, 16 bp, Homo sapiens
gaccaatcgatggggc

SEQ ID NO: 82542 - DNA, 24 bp, Homo sapiens
gtcagtttgaatttactcagttta

SEQ ID NO: 82543 - DNA, 19 bp, Homo sapiens
acaggccagcaaacttccg

SEQ ID NO: 82544 - DNA, 20 bp, Homo sapiens
agtgcctgaaaaccagatga

SEQ ID NO: 82545 - DNA, 19 bp, Homo sapiens
accccacttcattttcatc

SEQ ID NO: 82546 - DNA, 22 bp, Homo sapiens
cttcatgtcataatgaatgccc

SEQ ID NO: 82547 - DNA, 18 bp, Homo sapiens
ttgcagagcttcagtaga

SEQ ID NO: 82548 - DNA, 21 bp, Homo sapiens
cagttgaaattaaacggaagt

SEQ ID NO: 82549 - DNA, 16 bp, Homo sapiens
tacctctgcagaagtt

SEQ ID NO: 82550 - DNA, 19 bp, Homo sapiens
cttctggttatttaacaga

SEQ ID NO: 82551 - DNA, 22 bp, Homo sapiens
ttttctatcttaaacattgaaa

SEQ ID NO: 82552 - DNA, 19 bp, Homo sapiens
tggcacaaaactgaatgtt

SEQ ID NO: 82553 - DNA, 19 bp, Homo sapiens
tttgtaatatcagttggca

SEQ ID NO: 82554 - DNA, 20 bp, Homo sapiens
agaatattagtgaggaaact

SEQ ID NO: 82555 - DNA, 19 bp, Homo sapiens
ttctcttgtaattttcagt

SEQ ID NO: 82556 - DNA, 21 bp, Homo sapiens
tgtcatgattctgttgtttca

SEQ ID NO: 82557 - DNA, 25 bp, Homo sapiens
ccatcaaattctaagttatgagaat

SEQ ID NO: 82558 - DNA, 25 bp, Homo sapiens
aagtgaaaaaaataataaatgccaa

SEQ ID NO: 82559 - DNA, 17 bp, Homo sapiens
gcaagtccgtttcatct

SEQ ID NO: 82560 - DNA, 21 bp, Homo sapiens
ggcacttttgttgaagaaatt

SEQ ID NO: 82561 - DNA, 19 bp, Homo sapiens
ccctccttcataaactggc

SEQ ID NO: 82562 - DNA, 19 bp, Homo sapiens
tgctgccagtagaaattct

SEQ ID NO: 82563 - DNA, 18 bp, Homo sapiens
agctttcgcaacttccaa

SEQ ID NO: 82564 - DNA, 24 bp, Homo sapiens
aaatgatactgtttgtattcataa

SEQ ID NO: 82565 - DNA, 18 bp, Homo sapiens
ctccgttttagtagcagt

SEQ ID NO: 82566 - DNA, 21 bp, Homo sapiens
gtcttaaattatctggccagt

SEQ ID NO: 82567 - DNA, 16 bp, Homo sapiens
ttttcccacttgcagt

SEQ ID NO: 82568 - DNA, 23 bp, Homo sapiens
ttgtcagatttaacttttttgga

SEQ ID NO: 82569 - DNA, 19 bp, Homo sapiens
cttctggtttctgatcaaa

SEQ ID NO: 82570 - DNA, 16 bp, Homo sapiens
agaacagttaactgct

SEQ ID NO: 82571 - DNA, 19 bp, Homo sapiens
tgtccattttgttctttct

SEQ ID NO: 82572 - DNA, 18 bp, Homo sapiens
acattttttcagactgca

SEQ ID NO: 82573 - DNA, 20 bp, Homo sapiens
ccaactgggacactttcttt

SEQ ID NO: 82574 - DNA, 26 bp, Homo sapiens
ataaaattgtaaatttctttgatcag

SEQ ID NO: 82575 - DNA, 16 bp, Homo sapiens
tttcatcacgttcggg

SEQ ID NO: 82576 - DNA, 23 bp, Homo sapiens
aattacattctgacataagaaag

SEQ ID NO: 82577 - DNA, 23 bp, Homo sapiens
gattcctttgcaattttaacttt

SEQ ID NO: 82578 - DNA, 23 bp, Homo sapiens
acagacatagttaaacacaaaat

SEQ ID NO: 82579 - DNA, 16 bp, Homo sapiens
cactagtaccttgctc

SEQ ID NO: 82580 - DNA, 24 bp, Homo sapiens
aactagtgaccttccagggacaac

SEQ ID NO: 82581 - DNA, 17 bp, Homo sapiens
aaggtctttacaggcct

SEQ ID NO: 82582 - DNA, 22 bp, Homo sapiens
ggttttcatacagctagcggga

SEQ ID NO: 82583 - DNA, 20 bp, Homo sapiens
gaattctgcatttctttaca

SEQ ID NO: 82584 - DNA, 18 bp, Homo sapiens
tttgatgaaaaagagcaa

SEQ ID NO: 82585 - DNA, 16 bp, Homo sapiens
agcttaggtggcacca

SEQ ID NO: 82586 - DNA, 18 bp, Homo sapiens
agaccctaaagtacagag

SEQ ID NO: 82587 - DNA, 20 bp, Homo sapiens
aactttcaaaaagatacttt

SEQ ID NO: 82588 - DNA, 16 bp, Homo sapiens
gatcacagctgcccca

SEQ ID NO: 82589 - DNA, 18 bp, Homo sapiens
gtaacaagttgcaggact

SEQ ID NO: 82590 - DNA, 19 bp, Homo sapiens
ttctattgagactgtggtg

SEQ ID NO: 82591 - DNA, 22 bp, Homo sapiens
tacaacttgtgtaaaaagctaa

SEQ ID NO: 82592 - DNA, 23 bp, Homo sapiens
aactgaaaatctcaaaacatcaa

SEQ ID NO: 82593 - DNA, 16 bp, Homo sapiens
ttccttctctaagcca

SEQ ID NO: 82594 - DNA, 16 bp, Homo sapiens
aaacagcaaaaagtcc

SEQ ID NO: 82595 - DNA, 25 bp, Homo sapiens
tcatacaaataatttcctacataat

SEQ ID NO: 82596 - DNA, 17 bp, Homo sapiens
aattcagccttagcttt

SEQ ID NO: 82597 - DNA, 17 bp, Homo sapiens
tcttgtttttcggagag

SEQ ID NO: 82598 - DNA, 23 bp, Homo sapiens
ttcattacttgaagcaaaaaaat

SEQ ID NO: 82599 - DNA, 17 bp, Homo sapiens
tacctcatcagaatggt

SEQ ID NO: 82600 - DNA, 19 bp, Homo sapiens
aagaataaatactgcagat

SEQ ID NO: 82601 - DNA, 16 bp, Homo sapiens
ctggctcaataccaga

SEQ ID NO: 82602 - DNA, 20 bp, Homo sapiens
tagctgaaaatgacaaaaat

SEQ ID NO: 82603 - DNA, 18 bp, Homo sapiens
tgcatcttttacattgga

SEQ ID NO: 82604 - DNA, 19 bp, Homo sapiens
gcatgtctaacagctattc

SEQ ID NO: 82605 - DNA, 16 bp, Homo sapiens
gctagtcacaagttcc

SEQ ID NO: 82606 - DNA, 25 bp, Homo sapiens
ctctcaaaaaataaacttgattctg

SEQ ID NO: 82607 - DNA, 25 bp, Homo sapiens
aattattactattagatatggacaa

SEQ ID NO: 82608 - DNA, 24 bp, Homo sapiens
caaaaaaacactagtttttccaaa

SEQ ID NO: 82609 - DNA, 21 bp, Homo sapiens
gtttcatgtgaaacacaaacg

SEQ ID NO: 82610 - DNA, 20 bp, Homo sapiens
aagatatttgcgttgaggaa

SEQ ID NO: 82611 - DNA, 22 bp, Homo sapiens
tgttttccttaattactttact

SEQ ID NO: 82612 - DNA, 19 bp, Homo sapiens
gcagccattaaattgtcca

SEQ ID NO: 82613 - DNA, 18 bp, Homo sapiens
tgcctcgtaacaacctgc

SEQ ID NO: 82614 - DNA, 16 bp, Homo sapiens
taggatagccagtggt

SEQ ID NO: 82615 - DNA, 17 bp, Homo sapiens
gcgtgctacattcatca

SEQ ID NO: 82616 - DNA, 19 bp, Homo sapiens
atttacagacagtttcagt

SEQ ID NO: 82617 - DNA, 22 bp, Homo sapiens
cagacatattttggttatgttg

SEQ ID NO: 82618 - DNA, 17 bp, Homo sapiens
tttgccaaacgaaaatt

SEQ ID NO: 82619 - DNA, 20 bp, Homo sapiens
tctgaagtttccaaactaac

SEQ ID NO: 82620 - DNA, 23 bp, Homo sapiens
ataactctctagataatgatgaa

SEQ ID NO: 82621 - DNA, 20 bp, Homo sapiens
ccacaagtatttgcagatga

SEQ ID NO: 82622 - DNA, 19 bp, Homo sapiens
cattcagagtgaagaaatt

SEQ ID NO: 82623 - DNA, 18 bp, Homo sapiens
gcgttttgtaatgaagca

SEQ ID NO: 82624 - DNA, 18 bp, Homo sapiens
tcaccttgtgatgttagt

SEQ ID NO: 82625 - DNA, 22 bp, Homo sapiens
acaatactttggaaaagacttg

SEQ ID NO: 82626 - DNA, 22 bp, Homo sapiens
agggaagcttcataagtcagtc

SEQ ID NO: 82627 - DNA, 19 bp, Homo sapiens
tggagtacgtatagcagta

SEQ ID NO: 82628 - DNA, 20 bp, Homo sapiens
aaatctgtccaggtatcaga

SEQ ID NO: 82629 - DNA, 18 bp, Homo sapiens
ccagagaaagcagatgaa

SEQ ID NO: 82630 - DNA, 20 bp, Homo sapiens
tagaagatagtaccaagcaa

SEQ ID NO: 82631 - DNA, 17 bp, Homo sapiens
aactttgtgtaaggaac

SEQ ID NO: 82632 - DNA, 18 bp, Homo sapiens
gctcacaagagaagaaaa

SEQ ID NO: 82633 - DNA, 20 bp, Homo sapiens
cgtaggtgaatagtgaagac

SEQ ID NO: 82634 - DNA, 24 bp, Homo sapiens
ttttcatataatgtggtaaattca

SEQ ID NO: 82635 - DNA, 18 bp, Homo sapiens
tgctctgggtttctctta

SEQ ID NO: 82636 - DNA, 20 bp, Homo sapiens
agcaagtttccattttagaa
